United States Patent Application Publication US 2004/0034888 A1 - sequence listing, part 3

SEQ ID NO: 4810 - DNA, 963 bp, Zea mays
  Clone ID: 700427724_FLI
cagaaagtgatgcagatgggtcattgttgcatgagcattggaactctgatcttaggcttttcagttacgatgagaatggggcttataatcttcttcagctacttttggtccgagcagagtcagagatactgcgccttccaggtgagacgcaacaagcactccagacgctggattctatcaagtcacagatgaaaacagccttccaagggcacattgaaagaattaacgggaatacgtcgttggaggaatcacataatcaacagcatcaggtgcgtggggaggtattcacacctaagcatcccagcttgaggaagggttcttgggctgatgttaaatacaaaggtgagtggatgaaaaggccaatctcagaggctgaagtagcctggcttgcaaggattctgatccggctctctgactggttgaatgacgccctggggcttgagtgtgctgatgctgaaggtagtcctgctggcgccacctacattcagtttgatgggaacacgacggtgggcgggccaagggatgctgcgagaatggctctcggtgctgtatgttcattcatggtgctagtggggcaagcggtactgaagttgatgaggtcgcaaaggtgaagatcagtctgagagtgtttgcttcgaagaaactgctctcagccgctgttgtgctgtatgcagtggtggccgtgacacggaatgtatcgcgttgagagttttgatttgataatggggttatgctgtataagctaagcttgtagaggaagtcgatcgataggaggaaaagaaaagaaaagtgtgtcgttctgctgttgtccagtaagcttgatgtaaatgcctgcactggaatggttttggacttaaaaacgcaatggagtaattaggacagttctaacagtattaaaacagctgctagctcctcatggaagcgttaaatgtatcggtggcctttgaagttcacttaaaggtc

SEQ ID NO: 4811 - DNA, 720 bp, Zea mays
  Clone ID: 700427749_FLI
ggacgctgttcacaagaagtaccttgaagaagtttcttcatgcaatgtttttgttgtcaaggacaatgttatttctaccccagcaataaaaggaacaatattacctggtatcacaaggaaaagtataattgacgttgctttgagtaaaggcttccaggttgaggagcggcttgtttcagtggatgaactgcttgatgctgatgaggtattctgcacaggaactgctgttgtggtgtctcctgttgggagcattacatatcaagggaaaagagtggaatacggccaccaaggtgttggcgttgtgtcccagcagctgtacacttcactgacgagtcttcagatgggtcaaaccgaggattggatgggctggactgtgcaactgaattagttggccgtggttcgtggatcattcccaacagatgatgggttcgcaagatccaaatctggaggatcacaaccatgtgtacctcttcggttacagttttgtagtgtcttatgcgatggcgtcctgctgtatatttcttagacggtatttaaaccataaaacagtattcgtctgtacgactgtacccttcagttctgtagcatctgccggagacgagtactagttttgttattttctttcttttacaaaccaagaacagttctatagttttattgtagacactggaccatcatatgatctcaatgggtagctttttcctttttatatttaaaaat

SEQ ID NO: 4812 - DNA, 1055 bp, Zea mays
  Clone ID: 700427851_FLI
ccagaccaaagcagagctgcttgcttctccacgccttgtgcttccacagagcaaccagttctcatagcaatgtccgcacccctggtggacgccgagtacatggccgagatcgagagggcacggcgggacctccgcgctctcgtcgccagcaagaactgcgcgccgatcatgctccgcctcgcgtggcacgacgccggcacttacgacgccaagaccaacacaggaggccccaacggctccataaggttcccacaggagtacagccactcttcaaacgcagggatcaagatcgccattgacctcttagagcctgtgaagcagaagcaccccaagatcacatacgcagacctgtatcagctcgccggagttgtcgccgtcgaagtcactggtggaccgaccgttgacttcgtccctgggaggaaggattcttcgatttgtccagaggaaggacgcttgccggatgctagaagaggtgcttcgcatctcagacaagtattctaccggatgggtttatcagacagggacattgtggcgctctccggcggccatactctggggagagcgcatcgagagaggacagggtttgatggcccatggactagggatcctctgaaatttgacaactcttatttccttgagcttctgaaaggcgactctgaagggctcttgaaactccctactgacaaggttcttgtggaagatcctgaattccgtcagcatgtccaactatatgccaaggatgaagatgcatttttcagggactacgcggagtcacacaagaagctgtcagagctaggcttcaccccccctcgctcttgtctctcatccagatctgcgaataaacacaagtcgttgctggtgcaagctgcagctgggctcgcagttgctaccgcagttgtcgcatgggcgtacctgtgcgaatccaacaacaagttcatctaacttacgcttaccgttagtacaaatacaaattggagtcgccaaaatatttcagttctgtgcacatgtatttgcatctacatattgatataataccaagcatgttatgtgttgtg

SEQ ID NO: 4813 - DNA, 354 bp, Zea mays
  Clone ID: 700427919_FLI
gcgtcatcgtcgacctggtgcaggagatcgcggaggccgtgtcggcgttcacggtcgttacggccgtgcaggcgtcgggctcccaggacggcggcggcatcgtggtcggcgagaggatggagacggctgccgtggcggtggcagggacgccgagcttctcgccgcgggaggtgtccttcctcctgaggctcattcccgagctagtgcaatagcgcgttcttgctgctttgctggtggaatctcgcgacgagatcctctgtatccgtagagttaggtcactaacgtgtgaatccggcctttttgtttgtcaactgaaatcgaaaaaggttatgggttacattcgtagagactacc

SEQ ID NO: 4814 - DNA, 312 bp, Zea mays
  Clone ID: 700427920_FLI
ctctctccctcagcgctcccaacgcctctctgctggccgcgcccccttctcggcctcttctccccatggtgctcggcgcccaagttccctgctccctctatcttctccttgcctgcgcgcaaagttcctctgtggccgcgctcccatctgctcggggttccatggcgctcacccatggtgccgtcgtcctcaagctcgtcccctgcgtcgcggccactggatggcgcggtcacctctctctggtgccttgcccagtgaaagggaaattatctcaacatttcctataatcatttttggtgtttgacgactatc

SEQ ID NO: 4815 - DNA, 958 bp, Zea mays
  Clone ID: 700427931_FLI
ctattttgggacatgggaaagctgtcagttatgtgaggttcttggatccatacacacttgtctctgcatcaaccgacaacacattgaagatatgggatcttaaccagactaattgcagtggattatctaccgattcttgcagcctgactctgaatggtcataccaatgagaagaattttgtagggctatctgttcatgatggatacataacttgtggctctgaaaccaatgaagtgttttcttactacaaaactttccccatgccaataacttctcataggtttggttctattgacccgataactggacaagtgacaaatgaagacaaccagcaatttgtgtccagtgtttgctggagagggaagtcaaacatggtagtggctgccaactccagtggtagcatcaaagtgcttgagcttgtgtgaatgaacgagagtcatattggagaagaaggttctagtgttgccatgcgggcctgcgatgctttcgtgcccttgggcactaaaagactcgactgctctatgcaagcatcctacaacaccgatcattggttattggaagctttgcttgaaactcacaagcaaactaaagtttttttttttccaagagtatgatggcctcacctccatttttgtgtttggcattttgagacggtacctattcatcgtgatgcaaacttcttttgggctagaggtgcgcgggacttgctatgactgttaagagcaaacgatggaaagaaagggaaaaaaatgatcatgtagctcgaagaagttaatcgtgctgtgtgaatgtttcaaggagaatgtctcaaatagttttatacccccttcattattgtacatatatctagggctgcctaatgaaaggccttgtaagttgtaactagagtagaatgctgatcatgagttaagtataatgaatggtcttcacaaaagattaatcaatggaagattcatac

SEQ ID NO: 4816 - DNA, 1003 bp, Zea mays
  Clone ID: 700428023_FLI
cggaacagaagggatatggttcccgggctccggcgacgacgagaggtaggcagaaatcgtttgccaaatcaacaccagcaacagcaaagcgactacagagagtaggagatgcttactctccacaccattcagtcatgcccctcgctgcgcagatcctctctgttccggcgtgctctgctaggcaggaagagatctttcatttctgccagcagttctgaggatgccgaatccggcactcccccgccgcttggtggcgacaaacaccagcaggaggttcttgcacagatcgccatgcttcagacgcagaaggtgcgcatcacagacttcttggacgagcgctctgcttacctgaccaagttcgccaaggacgccgactcggagttcgacctgattgggcagaacgccatgaaagaacttgatgccgttggtgaccagatactggagaggctcgacagcaagatgcaagccttcgaggagacggctgaggtacaacggcaagagatagaaatgaacgataaggtgttagaggacttcgaagactggattgagaaggagaaaaacgaaggaatgttcttcaaaagccttggcaaggtcaaacctcggaacaagatggaaataaaggtgaaagccaaggtggaagcacagaaggtcaaagagattgcagaggagagtgcaggatcaaaaactcgtatgaacatttacctggggctgatggggatactcgggattacaattgcgaatgccatctttgcaacaccagaggtggagtggaggaaggttgctgctctgggtctgattttcattggtctggttgctcaggtcatctacgagcaggatatctcaccgccggaagctgagaagacagagaaaatagaagaataaaaaaggagttgcagacatatcggtagggtgtgatctcccacgggcaatgtaaactgtatatggtagcatgaatagatacaaggtttaatactttaattaatcgttcataacccaagaaatt

SEQ ID NO: 4817 - DNA, 1314 bp, Zea mays
  Clone ID: 700428112_FLI
accgctgcttcaagaaaccaccgagagcccaaccgcacaggcaggagagagagcagggagccagggacagtagcgtggggccggggagcaaagatggaggggaaggaggaggacgtgcgcctgggcgccaacaagttctcggagcggcagcccatcggcacggcggcgcagggcgccggggccggggacgacgacaaggactacaaggagcccccgccggcgccgctgttcgagcccggggagctcaagtcctggtccttctaccgcgcgggcatcgccgagttcgtcgccaccttcctcttcctctacatcaccgtcctcaccgtcatgggcgtctccaagtccacctccaagtgcgccaccgtcggcatccagggcatcgcctggtccttcggagggatgatcttcgcgctcgtctactgcaccgccggcatctccggaggacacatcaacccagctgtgaccttcgggctgttcttggccaggaagctgtccctgactagggccatcttctacattatcatgcaatgcctgggtgccatctgtggagctggagtggtgaagggcttccagcaggggctttacatgggcaacggcggtggcgccaatgttgtcgcccccgggtacaccaagggggatggccttggcgctgagattgttggcaccttcatcctggtgtacaccgtcttctcggccaccgatgccaagaggaacgccagggactcccatgtccccatccttgccccactgccaattgggttcgcggtgttcctggtccaccttgccaccatccccatcaccggcaccggcatcaacccggctaggagccttggcgccgccatcatctacaacagggatcatgcctggagcgaccattggatcttctgggtcggccccttcatcggcgccgccctggctgccatctaccaccaggtgatcatcagggccatcccgttcaagagcaggtcttaagctgccgcggcagtgccgagacatgcctgccagtccggaaggacgagcgtcttcctgtgggggggaatgccttgtctgcccacgcctagtttctctgctgaatcttccatctctcttcccttcaagactgctcactgctgcactgctctgttatctgaacccagaactttgtgtactcctgtaccgagctgtgtgtatgttttttttttcttccatcgtgtttgttgcaagggttcccgtctccttttatgcgttgggatcgtggcaagaaagggcagatatcatgtgaaaacgtgggtttataactatcagctggatttcatccaagtggaatcgattcag

SEQ ID NO: 4818 - DNA, 1116 bp, Zea mays
  Clone ID: 700428128_FLI
cttttcccgatcttgtgttgttggtgaaaaaatttgattcctttgagaggatttggtttggggattgtttggtagtgagttgcactctttggaccactgcatacacctatttgttgcagattttggtcacgatttgagaaaaactcaggttgaactcgtttctagaaaaccccaacaaaaccccaatttctgctgtatttttaaatctgcgggtgattcacaagtcggattgagctcaaaatttagggagatcttgcaaaggtacttgctcaggtgtgtgtaaaatttcataacaatcggagtttgtttagttcagctttgaaatcaagaacagattttcgtactgctgaaaacagcacttgttgacgatactgtattaaccgttttggactttttggtgtccgatttgcgatccgtttcttttgctggtctcatgtgagtattaggaacattttgtaatcatgagatcagtcgtttgctgatgtgtttattgtttgtgcacttacttcatctcaattgaagtaaagtgttaattttcagtgtttggagacaaaaatctgattggctcctattcaccccccctctggtcgccttaccggtcctacacggatccagctgtggcgactacgaagaagggttgggcggcggggcaagggcctgcactaggcctagcaagggggttgacaccagcgatgagagaagtttgaaggatagagaggcgctccaaggacgcctcaggcgaggggcgagatagtgcacgaccatggtaggggagaggccggccttggggcagcatcttgctggctagagcaggaaacatggccagagcaaaaggtggcgcgaggtgggctgctagtgggttaggcacacggcattgtgacgcaggggtgccagctgccaacaccgggcgtcgttgtagcaggggcgatccaggagaggtcgctggaaggtgaaagcacctagagggggggtgaataggtgatcctatagaaacttaaaacttaaagccacaaaacttgattaagtgttagcacaatgaaatcaagtggctaaggaccaagctcttgtaaaacacaatagtcacaatgagaacaagcacaagagacacgatggttt

SEQ ID NO: 4819 - DNA, 1090 bp, Zea mays
  Clone ID: 700428144_FLI
gacacaggcccgcgatcccctccccctcttccttctccggattcgcggcgatctagccggcggcgggcggcgcagcgatggcggggcaaaaccagcggctcaacgtcgtgccgacggtgacgatgctcggcgtcatgaaggcgcggctcgtcggcgccacccgcggtcacgcgctgttgaagaagaagtccgacgcgctcacggtccagttccgcgccatcctcaagaagatcgtcgccgccaaggagtccatgggcgagacgatgcgcgcctcctccttctccctcgccgaggccaagtacgtcgccggcgacggcgtccgtcacgtcgtcctccagaccatccgcgccgcctccgtccgcgttcgatctcaccaggagaatgtcgccggggtcaagctcccgaagttcactcacttcgtcgaccccgccgcggcatccggggggccctccaacgcgtctccgagccttacgggcctcgcccgcggcgggcagcaggtcgccgcctgccgcgccgcgcacgtcaaggccatcgaggtgctcgtcgagctcgcctcgctccagacctccttcctcacgctcgacgaggccatcaagaccaccaaccgccgcgtcaacgcgctcgagaatgtcgtgaagcccaggatcgagaacaccatcagctacatcaagggggagctcgacgaactcgagcgcgaggactttttcaggctcaagaagatccagggctacaagaagagggagatcgagcgccagatggccaacgccaggcttttcgcagaggaacagctcgccgaggatctcgcgctcaagaggggcatctccgtgggggctgcggcaaatctgctggctgctggaggggagaaggacgacgacatcatcttttgatcgcctctttccatgctcatccaatcattcaatcggtgcgtagaatcatcaaagccttattctggatctggttttagaacatccacaatgtgtttcctctcatgttttttttttcttctgtgaagactgctgatgtagttgctttgattgtacaatatcaatcgtgtatttcaattaattagtagatgcatccaaattacctt

SEQ ID NO: 4820 - DNA, 496 bp, Zea mays
  Clone ID: 700428146_FLI
cctcgacgtgtctccgcgaggtttaatccggggaaagcaaagctctgcacatcagccacattcacgcacagaggtactagagctcgggcagcagcaaaagacatgacgccaccagcagcgccaaccatggccgccggcgacgccgtccacgtcgggcgacgccggcacgtgctcttgttcccgctcccgtaccagggccacatcaaccccatgttccggctcgccggcctcctccacgcccgcggattcgccgtcaccgtgttccacacccagttaaacgccccggacccggcgcgccacccggagtaccgcttcgtccccgtccccaacggcagccccgtgccggtcgccatcgaggacgtcgtcgctcatatcctggagctgggccgcgcgtgcgaggccgccttccgcgaccgcctggcctctgtcctggaggagtactccagggacaccgtcgcgtgcctcgtcgccgacgcccacctgctgccgattttcg

SEQ ID NO: 4821 - DNA, 564 bp, Zea mays
  Clone ID: 700428173_FLI
gtaaagactacttactgctagtgctagtacggtagtacctatgtatgtccgtgcgccattgctggatctgatgaacactactagttcgagatctgcgctcccgtgtaccatggatctgggcttctgcttggtacccgtacgccctgccatcgattcgtccaaggaagggtaaggtgaggtggtgacccgacgccagccagatgagatccattgaagccgacagccgagggttgggtgtaaaatatggactcgatgagtgtggtgtttctgtcccgaggtgaaggacacagactgttgttcgttgctcttgtcctacagccatgcttttggtattgcgatccgagtgcgtgtgatctggatggagcttggagatgacggaattgcgacggatcctcatgtgccagcggctccgcctgcgctgaaccgctgtcatgcctaccatcgttgaacaaaggcagtttgtgttctgccgagcgtccatctcgagaacataatgtaatctccacttggctatcaatcatttctctgtatattattgcaatccaagctggcgatttgtccgct

SEQ ID NO: 4822 - DNA, 1125 bp, Zea mays
  Clone ID: 700428236_FLI
gcaagtgaggtggtcaggagggagatggggcttgaatggatgctcaagccagcaagcagcagccaaactgagggcaccggtgttcgtaaggttgataatgtcgagaaggatgaatctgcacatgaagagattatgagaccgaacccaaaggaacttaacccataccttaaagataatggaaccggatacccagaagaatcaaccccatcaaatgctggcagtcagttgcttgcatcctctgttgtgggtgatggaggtgccagctggagacttaaagctttgaagcgtgcaaaggagcaagctgctcgcgaaggaagaaaacttgaggaggttgttgaagagagatggagctcattaggcgacttagctgtttcagtatcagcatcaagagctgcccattcacatgctcatttgcatgccattagaggcagaaaatctggtaatgctgacaactcagaagaacgtgttaaaagaaatccagagggtcagctggatggtagcagtggcagacgtgaatatctacgggatgtttcttctcagcaccatgccatgagaaaaccaaaacctgattctgtcccatggaaaaagagaagacagaatatatcttctgaagatcaggcacttatctcatcagcggtagcaagcttaaataagttttctgatgatggaagctttatggaaaagattagcaatgttgagagcaagaacacaaatgtttccactgctagtgctagtgctgatgagcagagggacaatgggcagaaaacccctaaggagagttcaaacaaagtacaattagtgagcactcagaaactaaatgcaaaccagatggctgcaaagattctgcagctccgaatgaaaggcaagcatcaagaagctgaacaactttcgagagaaatggaagctttgctggagaatcaggatactgcccatgagaagcctggtcatggaaaagaaagaagctcaatcaggcctacattgaagcctactgcagctgatcacaggagaagagaagatgatgcggaccttcatttggctaataaaattatgcacaacaagcagtataacatgtccaaaagtatagaagatgaatatgattttggtgatgctcccactaaaaaggac

SEQ ID NO: 4823 - DNA, 259 bp, Zea mays
  Clone ID: 700428275_FLI
ccgcgccgtgctagcttgctagttgcaagcaccagccgaccaccaaacggtagcgcacgcggacaatttaacagcatcaggtttaggccctgctgccgtcgtcgagcgcccgggccaccgcacacctgaaagcaatggagatcgtcgccacgcgctccccggcttgctgcgccgccgtgtccttctcccagtcgtacaggcccaaggcgtccaggccgccgaccacgttctacggcgagtcggtgcgggtgaacacagc

SEQ ID NO: 4824 - DNA, 577 bp, Zea mays
  Clone ID: 700428285_FLI
ggggcacaaggaattggattatgccggacagagcacatgttctttgcttcagacgagaggattaaggctgtcaggcagatgattatggctcccacgcttgagctgaggcagcaggcgctcgaccgtctcttgccgtatcagaggtcctggaccagaggggagtgggcgagctggtgaagcttgctacagagaggggccgcaaagctaggcctaacttgaaggtgggcatttgtggagaacacggtggagagccttcctctgtggccttcttcgcgaaggctgggctggattacgtttcttgctcccctttcagggttccgattgctaggctagctgcagctcaggtgcttgtctgaggctgcctcctcattggcaaccggattgcctgctgctggtggatgtggtgatcaacagtattattacagagccatgctatgtgaacattactagtagcagtgctcataaaagctacaatcccatgtcctttttttccccagtcatgtaaaacttccaaactgctccatggttcaaaactctgttcttcaatacatcatcaattatcgattatatacgtggc

SEQ ID NO: 4825 - DNA, 785 bp, Zea mays
  Clone ID: 700428310_FLI
atcaggtaggcgaaatcggagcagaggccagggacgcgccagcgcgagcgataaggcacactgacatggccgccacggcgtactccaccgcgctccccggcggggcgcgcctccccgctgccggagccgccgcaccgccctctgccctcctcctcccgcggcgtaataaactgtctccgctccctctccggctccaagatgcgccgaggctgtcgttgctccgggtgaaggcctcctccgacgactcctcggccgcgagcggggacgagctcatcgccgacttgaaagccaagtgggacgccgtcgagaacaagagcactgtcctcacctacgccggcggcgctgtcgtcgctctctggctgacgtccgtcatcgtcggcgccatcaactccgtgcctctgctccccaagatcatggagcttgtcggcctcggctacaccggatggttcgtctaccgctaccttctcttcaaggaaagcaggaaagagctcgccgacgacatcgagtcgctcaagaaaaaaattgctgggacagagtaaaacatgttgttctcgtgaaactttttttggacgattctttcgggaacacgttgcctcttgtctagactccagatcagtgctacatgtctttgcacttttttttttgttgcataccttatgtcctcgtctctctggagagctttgtacgacgatggagaacaacagtgtacgatcgaactggacgccatcctcggggattgttttcttaaaatgaaatagggtatgtatccgggttttcttttcatc

SEQ ID NO: 4826 - DNA, 815 bp, Zea mays
  Clone ID: 700428317_FLI
atcgagtcccagagatctcccacgagctcagcgaggttcctgaagtgtgggctgtgcgagagattcctgcaccagaaatcaccctggacctcgaacaggattgttcgaaacgccgacatgccagtggcagcagttctgccttgccgacatgtcttccacgcggattgcttggaggaaagcactgccaagacagaagtccatgaaccaccttgccccctgtgcgcgcgagccactgacgatgaagggcacgtgtcgttctcagaacctctgcatgttgccctccgatctgctcgcaggaaccttttgttgggcactggtgctggtgggaacagcggcatttctgaccctcctcgcactgatcgtggcttgaagaggaacaactctgcagtcatgcctaggcgcagcggcggcgcattgttccgcaatcgcttcaagaaacagttccccttcaaagcgaggatcgggaaggagctctttggcggtagggttctcaacaaggttggattgtctttgtcttcaggtcagcatgatgatcatcgacagcaagcgccaaagcatgaccggcccatgaagtagctagatcttagtggcacagagtataatatgttgtgtgccctcctgatattttatctatggcatctgttatcgaaacttggcatccatgcgcagcagtcgtccaagatgggggccctgtatggattatggaaggctgcttgcattgcgtgtaacagtagcaccttgccattgcatgtattttgcatgtagcacagtaagaatctatgccctgtgattgatatgttctgaatgttccgctt

SEQ ID NO: 4827 - DNA, 564 bp, Zea mays
  Clone ID: 700428321_FLI
taaggaaagggttcgtactcatggcgccgccgcagccaaagtcgggccttttcgttggcatcaacaagggtcatgtcgtcaccaagcgcgagctgcctccccgcccgtgccaccgcaaggggaaatcaacgaagagggtgtctatggtcaggggcctgatcagagaggttgctgggtttgctccttatgagaagcgtatcactgagcttctgaaggttggcaaggacaagcgtgccctgaagcttgctaagagaaagcttggaactcacaagagggcaaagaagaagagagaggagatggcgggcgtcctcaggaagatgaggtcggctggtacgcacactgacaaaaagaaatagagagcatttcaagttcatggagctggctgccagagattatgttccagtgtctgattttccatacatgtagaacctaatagacatgtcaaagtattatgtatcgaaccagctcatgggattttgctccttccaatgcatccagggtttatgtatcgaaccaatttatgggatcttgctcttattctaatgcatccatggtttgtgaatc

SEQ ID NO: 4828 - DNA, 772 bp, Zea mays
  Clone ID: 700428364_FLI
cacatatgctaatttaaaattatggaagaagcaaagctaccaaatgttgctaaggtgcctaagataaaactttgaagtgtgtataccatttgtaataccacttgtaatattgattcattatttggtttcgacccttaacacttgagatagctagacctcaaagagactagaaacatttgtgagaccaaaattactagaaagatttctagataccaattaaaaaagcaaataatattaagtctagctatcgcttaacatatgcatgctagttcatcaaattatcaatcaaaaaatattaaaatacatatcataaacaagaatgttgggggccttcgtcttccgaaggtcctcaaaaacacgactaacatatttcccaagtataatatatgtacaggaaccttcggacatgaaatgaagttatacaataatatggagagcgcggttcgggagaaggatgaatcaatgctgaagctacccgtgaagaagcttcggcttaacgatggaaaatgaaaccgacttaaaggggaaaaggttgtctagtcctcgatagatttctctaagtcaatagtaagtgtcgagggcatgaatgtaattctacacaggttgcgccctgtgcctataaatagataaatagtgacactgcactgttcacgctgactgatattcactcacacgtcacacttggacttttaccttccgttaagccgaaggtataaatgtaattcaatactgtccatgtttattcatgataatataataaaaatgttctgat

SEQ ID NO: 4829 - DNA, 595 bp, Zea mays
  Clone ID: 700428411_FLI
ctccaccagagaacccgcagcgcccgccatggccgtctccgattccctcgcgcatccagggctggcgatcgtggtcatgggagtcagcggctgcggcaaatcaaccgtcgcggcaatgctcgccgaagccctgggctgcagcttcatcgaagcagacgactaccattccgaggcaaacaaaggtcgaggaagctaaatgctaaaaaaatggaatcaagtgtacattacggtatagattttggcaaggagtaatatgtatgatgctgatgcaacagacaaatgcatatgccatgtatcatcaggggagcttagtcagaagcattgcaaaagtgaaacaaaccagctatttatgttcaggctccagacatctcttttttctcgtattcacaattttagtgagaaggattgccaagctgacaagtgggataaaccattcgagaatttagtatataacatgttatctgcttccgtgtgtcttagaatagtaatatctctgttccaagttgttctgtttccatgtacttttgacagtgtgcttgacttgactgcgttgtaaaaacagagaagaaaagaacaatttatgtcatcttgaact

SEQ ID NO: 4830 - DNA, 657 bp, Zea mays
  Clone ID: 700428444_FLI
gcaggagctcgccaggaacccgcgcctggacctcttcttcgtcaaggacctcaacaaggagcagcggctggagctggagagcggcaccttcgatgccgtgctctgcaccgtcagcgtgcagtacctgcagtcccctgaaaaggttttcgcggagatcttccgggtgctgaagccagggggcgtgtgcatcgtcagcttcagcaaccggatgttctacgagaaggccatcagcgcgtggcgggacgggaccgcgtacagccgcgtgcagctcgtcacgcagtacttccagtgcgtggaggggttcacgcagcccgaggtgatcaggaagctgccgtcggccggcggatcgccgtcctcgccgctggacgccgtgatgaggctgttcggcgtggcaggctccgacccgttctacgcagttatctcgtacaggaacttcaagccaatgtgacaccctgattgacagaacccgtgcagcattgcgatatgcagtgcatacgatctatagaatcactactggtgcaaagctagtttgtacttgtacatgcacacttcagcattagctgtctagctcagcggcgggcagatgcaagttcgttcagaagctcaaaacatcatccaccgaccatctgattcagaaacatgctagcgatccttctt

SEQ ID NO: 4831 - DNA, 579 bp, Zea mays
  Clone ID: 700428651_FLI
ctcttcatccgctccttcaagcgctacgccgacctgccgtacccgagctccaggcccatgacgctgcacgccacgctgtgggacggcagctactgggccaccgagaagggcagggtcggcatcgactggtccgacgcgcccttcgtcgtctcctaccgcagctactacgccagcgcctgcgtcagcggcggcgcgtgccgggccgccggcagcggcgggtggatgaacaggcagcttgacagcgccgagtggggcaccgtcaggtgggcggagcgcaacttcatgcgctacaactactgccaggatgggtggaggttcccgcaaggactccccgccgagtgcgcccgccactgatatgcgtccgccggttaattctttgttttgttgggtattctttttttttctacgggtatatgattcttgctcttctttgtggatttgtgattaaaaagcagccctgcagctagcaacgtgtgggcggttgttgtacacctagcttttcctaaatcaagcatgtattttttttatcgtgcctttggatacaggcatgcagcatatatagtattgttgtgagtcgtg

SEQ ID NO: 4832 - DNA, 819 bp, Zea mays
  Clone ID: 700428719_FLI
gtcgatgcgatgccccatgggcgttttacgattgatgttgagtttctagacctgaggatagccacgaacaatgctacggaatcgtcatcggtgtggccaaacgaaggcatggtgcagaagatcgcgagcaagagcgccctgggctgcctgtcgcacatgctggcggactccatccacgcggacgtgaccatcaacacgacggacggggtgctgaaggcgcacaaggcggtgctggcggcgtgctcccccgtgttcaagagcatgttcgtgcacgacctgagggagaaggagtcgtcgacggtggacatcggcgacatgtgcgtggagtcgtgctcggcgctgctgggtttcgtgtacgggacgatcgagcaggggcagttctggaagcaccggctgccgctgctggcggcggcggacaagtacgggatcggcgacatcaaggactgctgcgaggagagcctgctggaggacataggctcgggcaacgtgctggagcggctccacgtggcgtggctgtaccggctggagcggctgaagaaagggtgcctcacctacctgttcgtgttcgggaagatctatgacgtgagggacgagatgcacggcttcttccaccacgcggaccgcgagctcatgcacgacatgttccaggaggtgctcagcgtgtggaagcccatgtgaatggaagtgtccctttccacgcgagctgtgtgtgtgtgtgtgtgtcgtgcttgttcagtcagcagtgtgtggagagcatgctggttatgcatatttgaaacgaaaaggatgctcagaatttgaatggaagctaaattatac

SEQ ID NO: 4833 - DNA, 603 bp, Zea mays
  Clone ID: 700428755_FLI
gcagagtaccatcgtcaatcgactggtttaattcgtgctaagcagcacacgtctccctcttctgaaagaagctgcaggttttcgccggaccatggctggaagaggaggaaatggcgttccggccgaacaggagttcccaggctggagcgtcgccaaagcccaggaagatccacacccacctgtgcggcatgtgcacgctgctagaggtctccctgcgcaggctcggcataaaaacgaggaagggccggcgcatttcatccctggcatctccaactccatgcctagccatcatcatcaatttccgggggcgcagtggagcaagaatcctacgccgcatgtcccctctccagtgggattcatcatagaggcgtttcagccccaaaaggatgagctgaaggaaaaggcgcgccaaaagttcattcgcttatccagcggggggaactagacaaagaagagaaaggatgcatggggatgaacaatctacagcagcgctatagttgtctggacataagcatagagaggtggttgatgcagatgacacatacatacaacatcgactatatattaatttatgctgcacgcgcgactcgtgagtctttagtt

SEQ ID NO: 4834 - DNA, 745 bp, Zea mays
  Clone ID: 700428763_FLI
ccgccatcggcgccgggctgctcaaaacggaggagatcttggaaggcgtggcgcgcctccgcatctccaacgacatcgagttcgaggaggagacgttcatcgacatgatgagggcggcaaaggagaaaagggcgaagctgaaggctcctgctccgcagataccgatggagacgcgggcggagaaggccctcgaagccatctacgtgtgctgcttcggtcaggacatggtggaggacgaggacgagaagcttctccgggcgatactgaacgccgtgttcccctccgtcgggcgggccgcggtcgagaggatggtggcgtccatggccaagcaggtggcctccggcgagaggaagcgggacgggaggaccgtgtccaaggaagtgcagcagcggcagctcaaggacctggagtttctgaagcagaacaagctggagtcgtcgtgaagcagcagcggcggcgagcagaaacttggcagcaaatcacgcggcgtggttcgccggcggctgcagcagccttgctttcggttcgttttggaacaacggattcatggtggaattttgtaggattattagaacagaactctatgtgaatttgtaaccctttggaagttggaacaaggaagtggccatactgaaatcctacatgccctttttggaaccgtggtatgctgaacactgggcttcataaaaatattatctccaacattgtaattagatttgtagtattataatcataattcataacc

SEQ ID NO: 4835 - DNA, 709 bp, Zea mays
  Clone ID: 700428783_FLI
gacagattgattctcaatcgtcagaaatagagaaactgtttgaggagaactcagccttatctgcttcttatcaagaagccattgatgttactgtacaatgggaaaaccaggttagagactgtctgaagcaaaatgaagagctccgttctcacttggagaaactaagacttgaacaagttagcctgttgaaagtaagcaatatcgctacccaatcagatgggcaaactgaaaacagtatctcaaacccaccacaaatggtcatcgagaatatttctctaaaggatcagcttataaaagaacagagcagatctgaggggttgtcggcagagataatgaaactttcagctgagcttaggaaagcagtccatgcacagaataaccttgcacgcttatacagacctgtattaagagacattgagagcaatctgatgaaaatgaaacaagaaacttatgcgacgatccagtgatacatgttgacatgttgtgaaactcagtcctctggcatggccgcatgggctccacgttactgattttcgtcgtggatgtatttatctcatgccatcttcaagatgctggtgcaaagcagttcttttcgtggccaccatttataagtagagttcagtcgagatcgttgtacttgtatcatactcatgtatacccgattcccagactggttcatctcgtaaattggaagcgatgtttggatgcc

SEQ ID NO: 4836 - DNA, 932 bp, Zea mays
  Clone ID: 700428785_FLI
gtggttgctagcatacatatccaatccaattatattgctacaatacaggcctacaccctcagctcaacgtcgacgtcggcgatgtgtctgccgttctcctgttgccaccgcggtgaccatgacacaaaggagtctgaagtggaaagccaaccttattatcatccgtctcctgtgaaagaagcacatgatggtcaccgtgcgaccaacgacatgcctcccgtcgtcgaggacaacagcaagaacggaggagggcacacgacgggtttcagcagccactcagacgacggcgttgtccgaggtggagagacgacgataactaccgagaagatcgtggcgccgcccaccactactccagcaccgcaagctgcttctagggatctggctgtgcagcaagctcctcagggtacgtatgtctctgctagtcgtcctcgccacaaccatggccgtgggtcgtcggcagcatcgcctcccagcgaggccgtcgtcaccaaagtcgtactaccgatggctcgtcgtggtggtgaagactactagctaccctactgcatgctagctgcggccaccacacagaggccgcctatatatatatccccaacaatttcgttccgttctactacgccattcgtgacccgtaataatgatcccctgtgcacatatatggcaaaacaaagatatatagcagcaacagcagtgaagtttcgaacatctccgcgggcaactttctccatcatcatttcttgaaatcaactgaggacgcggcatgaagagactcctgcgctcccgttgcgtggtgtgcagaacgtaggtctccctacgatagcagccaattaattccctcccaccccactatatatattgtcaattggacgagagtgaaaatatgtacctttcagttttaaattaataaatttggtgatgatgtattttcgttc

SEQ ID NO: 4837 - DNA, 232 bp, Zea mays
  Clone ID: 700428793_FLI
tgttgatagagaatagagaggaggctgcggacccaatggaggtggattttgatgacaaaggcagctggtggtatttgttcaaggactattggttaaatttgaagacaaacttgtcgttgacagttgaggaaatatcagcagccaaatctcgaaagagtggagagttacctgatactaatgatgaagttaattcagagagttcatcagggcgcaatctagaaagcaatacatc

SEQ ID NO: 4838 - DNA, 958 bp, Zea mays
  Clone ID: 700428822_FLI
cagggagagacgagagaagtggacacctcgcctgcctggactcgtctactctagtatacagaaaaaagcagaagagatacggggatgtctaagacggcgggcgtcggcagactcggaggagccggggcggcggacgcggcgcagcagcagcagctggcggcgggtgatgctgcggtggcgcgggcggcgcggcccatcgagacgctgctgcgcgcggcgccgctggtgctgtgcgtggccgccatgaccctcatgctccgtgaccagcagagcaatgagtacggcaccgtcgcctactccgacctggggggcttcaaatacctcgtctacgccaacggcctgtgcgccgcctactcgctggcgtccgcgttctacacggccgtgccgaggcccgccaccgtgtcgcgctcctgggtcgtcttcctcctcgaccaggtgttcacgtacctgatcctggcggcaggtgctgcggcggcggagctgctgtacctcgcctacaacggcgacaaggaggtgacgtggagcgaggcgtgtggtgttttcggcagcttctgccgccaggcgcgcacatccgtggccatcaccttcggcgccgtgctctgtttcatcctcctctccctcctctcctcctaccgcctcttcagcgcctacgaggcgcccccgccgtcggcgctcggcagcaagggcgtcgagatcgccgcgtacccacgctgaagccgccggccattcatcggaggctctggagggcgatcaagtaacgaagggagtaacgaaggctgaattgtgcttgactgcatcgttcttgcgtgtactgggtggattgaccttgaacttcttactacagccgtaaattctgtgtatgtttcgttatggcaacatctttctgtggaaagaatgtttgtaacaagcagacgagaagttgtgtgggtaggaaattgtagcaaaattgtttgccagc

SEQ ID NO: 4839 - DNA, 300 bp, Zea mays
  Clone ID: 700428912_FLI
tagtgtcgtgccgccgcgcgaggacccggagattcgattccggtccggtgtatctctaggctgcttggtttgggttaggatttagtgggcagggttgtgcagctggtgtctcgtggaggaagaatttcgtgggaggattttgaccgggtttgggcaaagagcgcgccgttcgggaggaggtgattctcgcgtggttgcgtgctttgctgggagtctgctgcggccaccgccggtatggcgacgcacttcacgccgtcgcaggcgcacgcggcgtcgcaccacgcggcgcaccaccactcg

SEQ ID NO: 4840 - DNA, 1012 bp, Zea mays
  Clone ID: 700428943_FLI
gcttggttctacatcctcttctcttcccctccgtctctctctctctctctctatttggtttgcttgcttgcctctactagactctagtcgtcgggtccggccatggccaccatcctggagaacatccagaaggcgaggttcctgccgaccaggccgctcaaggacgagctgcccaccttccagggcggcggcaagagcaaggaggagagccacctcatgggcctgaggaagcggctgtccagcttctccggcaagatccagcccatctcctccgcgtcggccgccgagtgggcgttccgccgctccaagtcggcgccctccctcggcgccgccttcgccgcggggggcggctccctgaggcagtggtggcagtggggcgtcggctggctcctgtccaagaagcccgggttcgcgggcgacctcgagatgaacgaggaggaggtcgccgcgctgggccgccagagcaggggcacctgggcccacatcctgttcaagatgcggtccggcgtccgccgcctcgtcgcgtccgcgcactcgctccccaccacgcacaagcagcagtccctgccgtcgtcgtcggccgcggcggcgcacagcgtccagtgcaagccggcggcgtcgttcgcctacgcgcagcggcagagcttccaccacaccggccacgccatggcgcactaggcagcgtctcgcggttgccggtgccgtctgcggccggtctcctccagatccagggatggagagcgctgagaggcgcgggaagaagaagattcaggttacaggtgcgtgagatcgacggtgaagatgtcgttgaattgatgatgaatgaaatggaatgtaggattaccgttctgtgatctgtgtagatctagtgcccctgtagaggtgaacaagtgttatactacatgcccgttctttctttatattattcttttgggttcgttctttggacgatgtaaatgtaaaatgttttgttgatcttgtactgttaaataaaactgatgcaaattgtgcc

SEQ ID NO: 4841 - DNA, 1459 bp, Zea mays
  Clone ID: 700428946_FLI
cttcgcctccgtctccgtggcgcgcgcgctcgcacgaacacgagtcccatgtcgtccaccgcagcgcgcgtcgtccacccggctgccgcggcgccgccgcctccccgcccacgccgcctggcgcccgcgaggtgcgcggctggatccgcgacggacacggccaccgcgggtccgacaagggtgacgaccgtcagcaaccgcggggactccttggcgatatgccgggtgctcaacggcatgtggcagaccagcggagggtggggccgcatagaccgcgacgccgcggttgacgccatgctcgcgcacgccgacgccggactctccaccttcgatatggctgaccactatgggccagcagaggatttgtatggcatgttcatcaacagaattaggagggagcgcccacctgagtttcttgaagaagtcaaggggcttacaaagtgggtaccacccccggttaagatgacaagaagttatgttgaggataatatcaacagatccaggaagaggatggatgttactgcattggacatgttgcagttccactggtgggagtactcaaatccaggctacttggatgcgctaaagcacatcacagacctgaaggaggaaggcaagataaagactgtggccctaacaaacttcgatacagacagactgcaaataattctcgaaaatggaatcccagttgtgagcaaccaggttcaacattctatcgttgatatgcgccctcagcagagaatggcagagctttgccagctaactggagttagacttataacgtatggcacagtgatgggtggtcttttgtctgaaaagtttctcgacaccaatgtatcaataccttttgctggtcctcctctaaataccccatccttgcagaaatataagaggatggttgatgcttggggtggctggagcctgttccagactttgcttcaaaccttaaagaaggtgtcactgaaacacggtgttactatttcaacggttgctgtgaaatacatactgaaccagacgtctgttgcaggttccatggtcggtgtgagattgggactctctgaacacatcaaagacaccaacgccatattctcacttgaattggatgaagaggacatgaacatcatcactgaagtgtcgaagaggggcagaaatttgatcgatattattggggattgtggtgacgagtaccgagcttagttggccatgctgctgctgggctactacagacctatatactcgtgcccaattttgcacagctctaaatttttgcctatttgggtctagcggctcagcgcactgttgaggcaaccatatacctgaatgcctattattcaggcgctagcatgtaccctccagtcctcaacagccagttataaaactgtaaatacacagcgatgcagatcgctaatgtggtaacttgttcagtcctttttagcgattactgtcccaaacaaaatgc

SEQ ID NO: 4842 - DNA, 990 bp, Zea mays
  Clone ID: 700428977_FLI
tgctgatgtgtgcagaatctgagaagtgcatctgatggaagttcctgttggatgtttaatctaattaactttgttttttatgaagtagcatgaagctgaatatagtccaacagtgcaaaagcataggtctttcatttgagcttgctggtcaacttgtacagagagtgatcatattccttctttttttacgttgattacacccaattagtatatatagttgcatacccacttggatgatttagttagtgaggaacacaagtgaagatgagctttgcactgttcaatgcttgtgcttggaagaaggatgctcttgcgcccgcagttcattgttatctggaaagtggcttgctactgagcattctcttactacatgatgtaaattgtgaatctccatcaaggctggcttatggctgaagagtcagtatcatagtttcctttgatgggagaggacagcaaagccagctaatctcgctaaccaagaaatcggctagtagttttttcccttttgaaccttgtcatgatgccttgtcttctggataaagttcacgcaggtttcaaataagaaatcacatggacgactatcagacttgtatggaatatggatgctgtacaaaggtttctaatgtacattagtctaacttttttttttcatgatccccgaaatgccgactatcaccagcgcatgtacatgtatatatacatacactaaaggttggggcatttttaccacgtgctggtctctatgtatgacgcctttggttccgtccaacttttagtctttcacatttttgaaattttgtgacattatagtttttttgttaggatagcgtctagtactgggaatttgttgcagaatgcaaaataaattccgtgctgtacaacttgtagccgagtttcaggtcgtcgagtgaagtgatggtaactgctcgccgaatttgcactatgcggtctgtggatatagctacttgaatgaaaagtttgtttccacat

SEQ ID NO: 4843 - DNA, 654 bp, Zea mays
  Clone ID: 700429017_FLI
ggacaggggcctcctcgtccgcgggtgggcgccgcaggtgaccatcctctcgcaccccgcggtgggcggcttcttgtcgcactgcgggtggaacgcctcgctggaggccatcacccacggcgtgccggtgctgacgtggcccaacttcgccgaccagttctgcagcgagcggctgctcgtcgacgtcctcggcgtcggcgtcaggtccggcgtcaagctgccgcccatgagccttcccgacgaggccgagggggtgcaggtgacgagcgccgacgtggagaaggcggtggccgagctgatgggcgtgggcgccgacgggacggcgaggagggcgagggccaaggagctcgccgcaaaggccaaggcagccatggaggaaggcgggtcgtcgtatgccgacttggacgacatgttgcgccatgttgcggagctaaacatgaagaagagccacgaagagggcacgggcttcagcactctgccggagcttggaactggaagcaagaacaatgacaacataggtgccggggctgccttgtcagtacagtcctaagttgcattgcaccatgcgcttgccttcttggacgatgtttaacacaagtagaccagtgtactttctctatgtttttgtacacataatacatgtagttagtattc

SEQ ID NO: 4844 - DNA, 233 bp, Zea mays
  Clone ID: 700429041_FLI
gtacggcgggaattttctcctacgatatggtttccgatttcacgacggaaacacagcaggtcgagcacgcgtacgtacgccgtgtagatttgtacgtagcgtgcattatttatttacataaggtttctctgtacgtatgtgcgcggtccttgttctctataggctggctgcaccgatccatccatcatatctttgtacttgatatgaaaaacaaaatatatatgttagcagtt

SEQ ID NO: 4845 - DNA, 461 bp, Zea mays
  Clone ID: 700429049_FLI
cattttgaggcatggcagacaactgaggtcgaaatagcgtggtagcttggatctgcacatctatatgattgagggcctggtgtttaggattataatctgcccagattatataacctatcttattttgaactaagtgttagttcaaaataagttagattatataatatggacaaattatattcccaatcaaacaggctatgattggacttactgatacccatttgagtagaactgatcttgacaggtatccgagaaaacgatgaccttaattgaaaattttgctgatacgctgatgcagcacttagggtctactattgttattggtgtagccaagggattgcaactgggaaaaatggtgtaaaaacgctgcatatttttttttgcctaagctacagctgtgctacagcaaattttgattacggttgtttttttaaaatgcccaatcatcaacacttagcctt

SEQ ID NO: 4846 - DNA, 1465 bp, Zea mays
  Clone ID: 700429206_FLI
agcacgcaaaaaccccacgagagagacgaatcttccgaatctctcggtggcgatggcgctctccgaccgctcccgcgagtcgctcctcccgagcttcctctacgcctcctcggcgcgctctttcgctgccacaggagccgccgcgcgcctccctgtctcctccccagcgcctgccacggctggagcaggaggcggcgtgccgttctcgatccaggcgcccaaggagaagatcgagatgtactcgccggccttctatgccgcctgcactgccggaggaatcgccagctgcgggctcacccacatggccgtcacgcctctcgacctcgtcaagtgcaatatgcagattgacccagcgaaatacaagagtatctcatctggatttggtatcctgttaaaggagcaaggggccaggggtttcttcaggggatgggtgcctactttgcttggttacagtgctcagggggcttgcaagtttggcttctatgagttctttaagaagtattactcggacattgcagggcctgagtatgcccaaaagtacaagactctaatctacctcgcaggatctgcatctgctgaggtaattgctgatgtggctctctgcccttttgaagctgtgaaggtacgtgtgcagacacaacctggatttgctcgtggattgagtgatgggctccccaaatttgtccgatctgagggtgttcttgggctctacaagggaattgttcctctctggggtcgtcagattccttataccatgatgaagtttgcttcctttgagaccatcgttgagcttatctacaagcatgctgtgcctgttccgaagtctgagtgcagcaagactacccagttgggtattagctttgctggtggttacattgccggtgtcttctgtgctattgtttctcacccggctgacaaccttgtgtctttcctgaacaatgccaagggagctacagtgggagatgctgttaagaagcttggtctctggggtctcttcactagaggacttcctcttcgtatcgtcatgattggtacccttactggtgctcagtggggaatttacgatgcattcaaagtgatggttggactcccaacaacgggaggtgttacacctgccccagcagcagaggctgaattgaaagccagtgcttgattttttttttctgtgttccctgagatcatatttggtggagtggaattgtatcagccggtcgagagcttagttcccgaatcttttttaatcttaacggaaaatttgtccgtcatccttctgatgagaggaactcattaaacaggcgaaataggtcttttttgcgctgggaaaagtttacgcttgatgcataataatttgtaggacggcaacgctctagagcgcaggttttgttcacctcctgtaccgaggaatgcttaaagttacatttcacattatggtctttatgaaagagtgcacctcggttgatgttcc

SEQ ID NO: 4847 - DNA, 783 bp, Zea mays
  Clone ID: 700429252_FLI
ggcgcgctcgacaggctggaggcccacctcgccggctgccgttacctgtgcggggacaggctcacgctggcggacgtctgcctcttcacgacgctcatccgattcgatctcgtctacaacacgctgttcaggtgcaccaggcggaagctggccgagtaccctagcctccatgcctacacgcgcgacatctaccagatgcccaaggtcgccgagacgtgcgacatggaggccatcatggcaggatacttcaagacactcttccccctcaaccccggcgggatccagccacacccgccggccacctgcgatagggagtcgctcttgaggccgcatggtagggaggccttgtcctctgctgctggcacgccgcttgaagcagctgcggtttcataattcattcaggctttgaacaaaacttctgaaactgcagaaagagtttatagttctaccagatactgatgcttcagcttcacaggatcaaatcacatcgcagtaactgccatgtgcaaattcttattttgtccatataagtcactggttaattatattggcaagatctgtgctgccaatggtgattatgatagtctctttggatgaagatatatttggttctgctcagtgtacctaaactagaatacttagtgtaaaaaatcgctcatgtttgaacatgtaaataaattttgtaaagcagttgatcagttgtataatggcatgtgttctgttcaatagaatccgttacagagacatcttttgtctgtgcttatatacatcagaactgtctgc

SEQ ID NO: 4848 - DNA, 533 bp, Zea mays
  Clone ID: 700429312_FLI
gacggctcctaacaacggggcggctgcttctgctatagtgggagctgctggctttgaggtgcacactacagtaggagctgctggctttggaccctgaccaagacgtgcaagtgcaactattcaactgatataggtagaagggagagagacaaatggaggcagggataatggcaccgtcatgaacgcaatagcttactgcaggcggtggacgagtttactgaaccgtaatgctggacaatatataagaggactggagtacgtggttgagtggcggcttgacgtacagatgctgaagtgtagggattggtacaactatacattgttcattaattgttacacatatacgtaacttgtcgctatcaattttttgtttaatgatatgttagttcttaattaactaaagggcttgtacatgcatgtatacaatgcacctttctttttgaagaatgcatctggtgtataagtttgttgattgttgctcaacccttcttcgagcaaagtaaaataagcaatgtataactttgattacattc

SEQ ID NO: 4849 - DNA, 1539 bp, Zea mays
  Clone ID: 700429329_FLI
gtggggcacctccccggcgtgctcccgctctcctccgccgccatcgccacctccctcgccaacgtctccgggttcagcctcctgatcggaatggcaagtgcactggagacgctatgcggccaggcctacggtgcgaagcagtaccataagctaggcctagacacctacagagcggtcgtcaccctcctggtggtctgcgtccccctctcgctcctctgggtgttcatggacaagatcctggtcctcataggccaggaccctctcatctcgcaaggcgccgggaggtacatggtctggctgatcccggggctcttcgccaacgcggtgatccagccgctcaccaagttcctgcagacgcagagcctcatctacccgctgctgctgtcgtccgcggcgacggcggcggtccacgtccccctgtgctacgtgatggtgttcaagaccgggctcgggtacacgggcgccgccctgaccataagcatatcgtactggctgaacgtggccatgctcgtcggatacatcgccttctccagctcttgcaaggagacgcgcgcgcgcccgacggtcgaggtcttcaggggagtcgacgcgttcctgcgtctcgccctgccttctgcgctcatgatgtgtcttgaatggtggtcgtttgagctccttactctcatgtcagggcttctacccaacccagagctgcagacctcagtgctttcgatctgtctcacgagtgtaacattactcttcactataccttttggccttggagctgctggaagcacgcgagtggcaaatgagctgggcgctgggaaccctgacggagctcgatcagcagtccgcgtggtgctgtccatggcggggatcgacgcggtcgtcgtgagcggaagccttctggcggcccggcgcctcgtgggcatcgcgtacagcagcgaggaggaggtcatatctgcggtcgccgccatggttcctctggtctgcatcaccgccataactgactgcctacaaggaatcctctcaggcgtcgcccgcgggtgcgggtggcagcacctgggcgcgtacgtgaacctcggctcgttctacctgctggggatcccgatggcgatcctcctcggctttgtgctgcgcatggggtcgagggggctctggatgggcatcgtctgcggctccctgtcgcagaccacgctcatgtccgccatcacgttcttcaccgactggaacaagatggctgagaaggctagagagagggtgttcagcgacaagcagccacaagagccggggccatgatttgtacgccgactagcggcagctgcacatttttccagaccggttttgcaggggatcggaaggcgtttgcttgtcattccgtcgcattcacgaggagggagggggtcatgcctccctcctgcaaagtttctcacaaggcaaatgggttcttgctttgaacttcgccttcctacgtttgatttttgtatcatgtaaagtggagaggaacatggaacgaacaaattggacctcatatatgactaacaaggcgaaaatcatctc

SEQ ID NO: 4850 - DNA, 618 bp, Zea mays
  Clone ID: 700429335_FLI
cctctcctctttccccatccgtccaatcaaccggtctgctctgctgcctctccggcgccattgacgagcaagagaaccctccgacacctggtccgtcgcgtgccgtgaccacccgctaaggccagggcgctccgactcgagctcaccgcgtcgaactcgaaccgctgctgttcctcggcagggggcagggtcgtcgaggatgccggagcactcagagaacgcggcggcggacctgatgggcaacatcatggagaccattgcggagaacctcccgaggcagaagtccgtgcggttcgacgacggcgacggctcctccatctccgagcaggccaagaagctgttcggcggcggcgagagcaggaagaagtcggtccaccacgtgctgggcggcggcaaatccgccgacgtgctgctgtggcggaacaagaagatctcgtccagcgtgctgggcgtggcgacgctggtgtgggtgttcttcgagtggctggactaccacttcctcaccatcctctgcttcatgctcgcgctcggcatggccgtccagttcgcctggtccatcttctcgtccagcgtgcctcgcgtgcagctgccggaggagctgttcgcgagcgccggcgc

SEQ ID NO: 4851 - DNA, 511 bp, Zea mays
  Clone ID: 700429366_FLI
ggatgggagaggcgtggcagggcgggcctcacgcttctggtgtgtgtgactgctgctcggtcggtgctgcatgctgctagctctgcttccatgcatgtgcctcctgtgcgtgcacctcctagctaaaccatgcataattaataacatatatatacttattagtatattagtaattaccatgatagatatatatgatgcacgcacacgcgtgtgctagctagctacaagcagctcgatggctcaatccccttgctagttttgcatgcatcgactatgcggtcatgtgctgctgttgttgaacaccgatcgaagcttgttaccatgcatgcagatcagctaggttttgagccaattaacgtaatgcttaccttgtactggtctagctatgctagctactcgatctgatcaagagtgatccatgtgcaagactaaggcttgcatgtgttgtaagcattatactttaaaaaatatatgtacaactaagtctaatatataatttatgagtttatct

SEQ ID NO: 4852 - DNA, 633 bp, Zea mays
  Clone ID: 700429526_FLI
tccacgcgcagcgcacaaaaggagtccgcggctgacaacgccgggatgttggcaggcggcatcaaggacgtgccggcgaacgagaacgacctccagctccaggagctcgcgcgcttcgccgtcaatgagcacaaccaaaaggccaatgctcttctggggttcgagaagcttgtgaaggccaagacacaagtggttgctggcacgatgtactatctcactattgaagtgaaggatggcgaagtcaataagctctatgaagctaaggtctgggagaagccatgggagaacttcaagcagctgcaggaattcaagcctgttgaagagggtgctagcgcctaaggatctgtcgtctccctgtgcaatttgctgcctgaagcgcaaaactaagttgcagaataaggagctgcttcggaacatgccagagcatgcaccctcgcgtattttcataaaatcagtgctcttaatgtaatatcttgaattgccgtgccatgtgtaataagtaatatcatgaataacagttgctattatgggttctaaatgtgtattaacagccatccatggcagagttctcatattactttgctgaagtctttgttggaatatacatgacagaattctcacattgccttgctg

SEQ ID NO: 4853 - DNA, 571 bp, Zea mays
  Clone ID: 700429550_FLI
ggaaacgttggcctcagaacgagctaataaaaaagccgaagcggctgccagtaaatctgaagccgacacgaagacgacaccttcagaggaggcagctgctactcctagcgcggtgaacggggctcaggcctctctagagaacctcttgagtagagccaaagtgatcagtgcggatttctcgtgggagaagttcagcacacagtttgccgacgtgacgacccctctaacctcatcactagagaaggaacccaacaaggcacagatagccactgtgcgaggccaggaaaaagcgaagaagctggcaccgcggattgctgttgtgaagccagcagcgcagaaggcgaagcagccggatcccaaaccagaagtgagagcactgtttggtggcctcttcaaacaagaaacggtgtatgtggatgatgactaaaacgaggagcgccaatttatcctctacgtgattttctttcttttgtttttttttgtttgtccagtgccttggtgtactcttgaaataggaacgcttaaagttgtacaaaaattggctatatataagaaccaatgatcatgtgtt

SEQ ID NO: 4854 - DNA, 555 bp, Zea mays
  Clone ID: 700429626_FLI
aggtgaagtatgtgtaggggcagaggtggagggtggaggtagatgtgttgtatctacaaccaggtatgttcctgcttattcaactcgggtgaagtttgaggacaatgcatggcacgttcttccagcgaactcgtctgatccaatgggtgctgcagatcccgtgtggactgaaagcttctggaacactattggcctcagggtctacgccgtgcaagatccagcttacgattggcttattcttcttgccgggctcggaatcactgctgcatcttattgcgctgtacactttggcagagcatacatttcaaaggtggcgaagcttgactgaagcgtcagtgagctgccccactgataatgggtatctagagctggaaatagaactaattgggctggcaattcgtagaacattagcagcgcatgagacagggtgattgagctgcgagaaagccgcaataaattatgagaaccaagcacacccgaagcaagtcctccatcattatgcggacgtccaggtcgatgtaatattaatgaaattgtgaccctgttacgttttgt

SEQ ID NO: 4855 - DNA, 1133 bp, Zea mays
  Clone ID: 700429636_FLI
cacgctataaaatcccagctccatggccgcaaaccagcagctgcagcatcagcatcgttccatccatccatcctactatccagcttcagcccgggccagccgctccacagcagcaagcaagcaaggctgagaacgaacgaagcagcccgcatccgcatccatggccgccgtgctggtggcgaggcaggggcgcgagctgcagcggtacagccagagcacgggcgggcgcatcgtggtgggctgcatcccgtaccgcgtgcggcgcgacggcgagctggaggtgctggtgatcacgtcccagaaggggcacggcatgatgttccccaagggcgggtgggaggtggacgagtccatggacgaggccgcccggcgcgaggccctcgaggaggccggcgtgctcggcgacaccggaccggtcctcggcctctggcactacaagagccgccgctacgtggaccagacctacgagggcttcatgttcccgctccgcgtcgccgacgagctccaccagtggcccgagatggcgtcccgcaagcgcacctgggcaacggtgcagcaggcgatggacgggtgcccgcactggtggatgcgcgaggcgctggagcggctcgtcgcgcggcaagccgtgctgcagtctgccctctgatcgtcgtcatcgactggggtaacaaaagaggcgggaggcgcgagccaccatgtgcgcacgccgccacggctctctctctctctcggtgcagcggcaggccggccggcccggcgttccgggtctggaatttggtcgccctcaccggagagtcgaacggcgcgccgcgcggctcgtgtgctctggcgatgctttcttgtgaccccccctgaccccgaggcgcggagtcgtcgttggcaaataaaatcatcagctcgtttttagagggcggatggtttagacgaaatggaaaacaaaatctgaactggacgcctagtggaaggaaaagtaatagaacagcagcgcgaaacaattcggcgattctttcgagtaactgcacagattgtaaaattttagtggtgactcgtttcttgcccttgggtggcaccgtggcagaattgttacgagctgttcaattcaaaaaagaagaagaagaaaaagtttcaggcat

SEQ ID NO: 4856 - DNA, 424 bp, Zea mays
  Clone ID: 700429657_FLI
aatgcttcctttattttgtggattgatcattacactacaccattcaggaaagcgcaaaccttcgcccgagttttatcttcaagctgcagatcaactcaacgttgatccagcaagctgcgtttttattgatgataggatgataaacattgaagcagctcttagtgtaggaatggttgggttgcagtttaaaagtgctgaggcactacagaaggacttgtgtgctctgggagttgaattatctcctcttgtttgtgaaggtgaagcacaagtacaataaggtcgtgtgtgccctatcttatcttatgctcaaccaaactacaatacgaatgtacataatgtatggtgcccttgctttgtgagctatgtcaataaattattgtgctaatctgaatcgtctatcaaatataactgatatgttaactgc

SEQ ID NO: 4857 - DNA, 706 bp, Zea mays
  Clone ID: 700429688_FLI
cacaggccatcaccacaacacacaaatacagctcagagcaactcacacacaggctcctctcccccgttgcgcaacgcgctttcccccacttcacccgcctcggcgccatggctaagctcgcgctggcgctcctcctcctgctggccgtggcggcgtccgcgtcggccagcagcgggagccacctggatctcgacctgggcttcctctcctctggggaacgccggagggagtgccgcggcacggtggccgagtgcctcgccgaggagtcggatgaggagggccttgacctggctggatcccaccgccgcgcgctctacggcggcgggtacatcagctacggcgcgctgcggcgggacaacgtgccctgctcccgccgcggcgccagctactacaactgccgcccgggcggccaggccaacccctaccaccgcggctgctcccgcatcacccgctgccgcggctgaggcggcgccggatccgccagactgccgaggaaaggtctggtccaggtcccggccctttcgccgacaataatttctttcgccttgttcgttcaggcgctaccgccaccgccaccgctgtttactatagcaccagacctacggattgaattgttgtatggatttgtttggccaaatctttgttctgttgtaaagtaaggggagggattcctgcccctgcgcctgcttaaaatacttatatgaac

SEQ ID NO: 4858 - DNA, 956 bp, Zea mays
  Clone ID: 700429776_FLI
ctgcatccatcatcctcagctcctaccatgagtacacggatacacccttcgtcttcggacgctgccggccgtgcccatcgtcgtcgtcgggctgctgctgctgaacgggaacgccggccgccggcggtgtacacggtgtggaagaggtccagcatgggcttccagggcaccgacggcttctgcgtctacgacgacgccggcaggctcgcgttccgcgtcgacaactactcccgccgccgcaagctctgcgccggcgacctgctgctcatggacggccatggcacgcctctcctctccctcaggccacagcttctcagtctgcacgaccgttggaactgctacacagcaacggaagacgccgtggtcgacaagaaggcgcctcccgcgtcttcggcgcagcagcaggtgttcacgatgagcaggtgctcagctctgcgtagcagcagcgacagcgcggaggtgcacatgtcagcctcaagaccgggctccactgctgccgcgtcgtcctcgtcctcctctctcagtctcagctgcaacaagcacaacccgcaggccgcagctcccggctaccgggtcgagggctccttctcgaggcggagctgcaagatccggcgtggcagcgatggcagggaggcggcgcggataacgaggaagagcgccggcgtggcgtccaggccggtggccacgctcggggacgacgacgtgttcagcctcgtggtccggccgggcgtcgacgtggccaccgtcatggccatcgtcgtcgtcatggacaggatctgtcgcaggccgtacacgcccatggtgtgcgtgtgcccttcgcagtgcgagtagtaatgagaaacgtgtataagtgttctgattttgacattgcatttgctaattgctagcacctctcctagctagtggtgtgggggaatgaggatacgggatacctgaagacaactactacttttgtc

SEQ ID NO: 4859 - DNA, 830 bp, Zea mays
  Clone ID: 700429786_FLI
ctcagctgtactctgccaatgaactgtataatcggggatggttttaccataaagaagtgcacttatggctcaccagaatttcaaatgtggaacctctagtaaaaactcacctctatgaacgtggatcttactattgctttgacccagaatcctgggacacaatacgcaaggacaactttgttctccactatgagatggtagagaaaaggccagttctgccttcaacatcaccaaaccttagatgaaaagaaaatctaggacggggagaggaacaaagaaacatataacgatctgcaggaaggactaaggaggcaggaagtcgcagaacagaattggggatgtccaattaacaccccttgtaattactaaaactgtgagcgaatgttgcgtttttcttgcactccccccttcgccctcctaattaaactgcctaatgttcaggattagtttttctccagcttcaaaataacaacgcatagatggttttgatgttcaaaaaaaaaaaaaaaagaagaaggtgaggagtgaggggagagcaaggtggggaggatgaggggggtgcagcggaagtatgagaacggcgagccaggggaattgcgtgccgggacgaagccgttatgttgtaggggagaaggctaatcgatggtgaagatggaagagatgagagggttagggatagcaaatgggctagcgtaggtgcgaaggcggaaagggtgttaagagggcgaaagagtataggaagaaagggcaggagggcaagcgtaggaagggagaaccgttgtatggcgagtagaggagggagagaggacggaattattgcggtgtgcact

SEQ ID NO: 4860 - DNA, 501 bp, Zea mays
  Clone ID: 700429803_FLI
gaccaaatatgtattgtagtatataattggtcgagtacaaacaacacacaagtcaagtttttatgagtgtgattggggatagtcaagtaacacactccctcgattttccaaaacaaacatatatatagtagagtaggcttacataacgcatccaattattcactttcattaggcttacaaataagagtcaaccttatatatactagtgatgatgtaatgtaactctagcaatgtccataccgtaccacacactccatgtatcgctttttaatttcatggcatgcacgcactcaacgtgcgcgcgccgagctcccgccacctctagagtccaccaccgatgccaccacccgaacctccgccacctccgaagccaccacctgcacctccgccaaaaccaccacccttgcctcctccaaagccaccacccgcacctccgccgaaaccacctcccttgaatccagccccgaggccaccgccatggccaagacccgcaccgaagcc

SEQ ID NO: 4861 - DNA, 833 bp, Zea mays
  Clone ID: 700429881_FLI
gctgcaaattgctcacgatgtttctcatgggattgagtacctgcatgaaggggtacgttaacatttgataactattaaggttgcagactttggtctatcaaaggaggaagtgtatgatggaaggaagtctggccttaagggcacctatggctatatggatcctgattacatgtccacaaataagctaacaaagaagagcgacgtgtatagctttggcataatactttttgaactgataactgccataaatccacaacaaggtctgatggagtacattaatctggcagcgattggaggggaggggagggttgattgggacgagatactggacaaggacctcctagtagggaacatccctgaagaggttcggatgcttgctgatgttgcctaccgatgcgttaacaagaatccgaggaagcgcccctggatatcagaggtcacacaggccatctcaagactcagacagcaccagctgataaagcatgatgcgataactctgccgaggagtgagaccaggaccgtccttaggaggatagactaccagcacgtggagcttagtgacctcactagcatcaaagaacttacgccgataagggcatcatgaactcgtgagcttgttctagtatgtaggttgctttatagagttagatttggacttggttcggcgatgttgtagctgtttgatgaaagcatcaggtagctagatcgttgaaagatgtcttggctgcaatgagagctctccttaattggagttctgtactgacctgaggtttgaaatcgttgtaaaaaaatcaacagtagtagctgtagcatttgataaaaaaagactttat

SEQ ID NO: 4862 - DNA, 293 bp, Zea mays
  Clone ID: 700429912_FLI
aagagcagtctccaatagtatagcaacaccaagaaaataagcgccatgcagacgccggccatgtcgacgtccacggccacgacaacaagggccatggcgccagcgaagccccccgcgcggcggcattgctgcagctacctcctcctcctcctaccctccaccggccaccgccgcagcgtcgcggcgtggtccgcgaagaaaaagaacccgtggctggacccgttcgacgacgggcccgacgaggagttcgactaccagggcatgttctccggcgggaagcaggaggaggaccc

SEQ ID NO: 4863 - DNA, 916 bp, Zea mays
  Clone ID: 700429923_FLI
gtgctgggcctcggcactcggcagccatggttcgccttgcgaagttctatctcgtctgctacaactccctccaatcgctcggatggttcgtctccctcctccgcctcctgccctgcctcgtccctcccttccctgtccactccgcgtacgtggtcgccggcgacctcatctgtttcctacagacatgtgcgatccttgaaacggtccacgctgccatcggattggtgccgaccgcgccacttcttgctttcttgcaatggggagggaggatccacttcatcctggctgttgtccggcaaattcccgaggttcagagcagtccatctgtgttcataacatttatagcttggagcatatctgaggtcatccgttactctcactatgctctgactaccttaaaagtttgtccagcatggctgacttatctcaggtacactgcttttatcccgctgtatccaatcggggttggcccaggagaaatgtggacaatgtaccaagccctcccgtttgtgaagaagagggacctttactcaggtttcttcgagaagttctccatgagctaccgttcctttctagtgggtgtgctggtgctctacccgttcctgtggctgaagctgtaccagcacgtgttcaagcagcgcaagtccaagctggggaaggggagcaggaagaaacgggcctgagaaaatctggctctgctcagctcagctgccacttgttgctgtcatgtgaaacgctaacgggtcattgtggatttttgttttggaagaaaatctttgtgagttgttgtctgatgcgacgggggcagttattggattacgctttgggttctctgtttgtttcaattgctctgcgttttatgtctgtattaacatacatcaagcatatataatagtcatgttgctgctgcgagtct

SEQ ID NO: 4864 - DNA, 1159 bp, Zea mays
  Clone ID: 700429932_FLI
aagtttccggcccaacaacctttccgactggcccaaaccaactcccaagtcccatcccaaccgaggcgacgcagccgccgccggctgaacctaaacccctcgacgcagccgccgccggcgtaggggagaggggcacgggcacggcacggggacggaaatggcggaggggaacggcggcagtcgcgccgaggctggcgtccgcgagtcctccgagccctcgccgaagcgctcctcgatccccgccatgccgcacgaagaatgcgtcgagggcatccgctccgcgctcaaacgtacgcgcgccccgcagccggcaccaccaccaccaccacggcggcggattcttcctctctacctttcctctttggtctcgactctcgaggccaccgcgtgtcaccctccgtgcgctgaccccgcctgtcgatccgccgcgcagatcccacggtgcggttcctgagggagcggatggagagtgccgggtgcctggtgtggccgcgcctcatccgggcggcgacctgctcctccgccggcggctacgctagccagcaagggatacaagtttgctgcaatcacatgacttgtcaagatgagataactcaggtcatgattcatgaactgatacatgcctatgatgactgtgttgccaaaaatctgaactggaagaattgtgctcaccatgcttgctctgagattcgagccaatcaccttagtggtgattgccattacaaacgtgaattgttgcgtggtttcatgaagataaagggtcatgagcctgaatgtgtcaaaaggcgggctctgatgtctgtgaaaaacaacccatactgctcagagggtgctgcaaaagatgcaattgatgctgtatgggatatatgctacaatgacacacgcccatttgatagagccccatgaaatcttttcagaacctgggatacattagctattttgtgcacacctgcattgatgttctgatcccttcagaaacttgtacttcagcaacctttgtcagcaaagtacagaaattttctgctgtagccaaggcgtgctgcatggcgcgatgagtctgcacacactgtaacgatttaatttgtgcaattcaattcttttgcacgatatcccgacagattttaataaatcataaacgtaaagtttgttggtggcgtgc

SEQ ID NO: 4865 - DNA, 1995 bp, Zea mays
  Clone ID: 700429964_FLI
tccagaaagagcttcagaaagttgttgaatggcccatcaagcatgctgctgcattttctagacttggaataccaccagtccggggggtgctgttgcatggcccaccagggtgctccaagactactcttgccaaggctgcagcgcatgctgcccaagcttctttcttttctttgaggttcatcaggaaacaacattttattttacgaaaataacagttcactttccgttgtgtgaagaacatagaacttttagcccacagtatttaaaacagattaacataatttacttatttctgccagttgagttaatatcctgtacccagaagtcagcgaatgcttgaaaataatcaactaaaacatgttcagataaagatactctcatcaacactcactagcttttcacataaattcttataacagtggtgcagatttatattccaagtatgttggagaaggggaagctctgttgcgtagaacatttcagaaagctcgtcttgcttctcccagcattatattttttgatgaggctgatgccattgcccccaagaggtatgcactgatatgtgatgcataatataataaaaatgattctgatataactgtcatagctagcaagaatgggtaggtattgcttatcccttttactgtttaaaatggaaaaatgtacttgttacacataatggaaagactgttgtgcaatcaaactttccatacaatcgttgtgcaatcaaactatcaaaagttataaaaattctcaaatcttttatagatatacttcattactgactctactgatatatcaaaattcaaattttaattcttcctatgttaagagatattaaaaagaggaattttatccaataagaatacttaaaaatgatgatttttctttttatatctattaacatagaatgaattagagcttgaaatttcatatattggtagagtaaataatatagtacaattataattttttgagattttttcatggtttttggtagtttgattgcacgggaaggttgattttacaacaatttttccccacataatgtaaaggattgaacagtgtgcaaacaacttgttgacaatggcaacttggatgttctttttatggcagtagaatcagattatatagaattcagttttgtgcttgtaaaaatctttatttttagcttcagagtaccatgtgcgaattatactaaaaatagtttatgttggcacctgtgtatgctcttgcagaactggccctggtgggaattctagtggcaatgccacagtcggagaaagacttttgtcgactttattgaccgaaatggatggtttagaactggctacggtactgttagcctgctgataactttctgtgtgattctactgattatatctacatgtatattcactagaaggcaatcctttttttagggaattatcgtattgggtgctacgaatcgcccaaatgcaattgatgctgctcttttgcgtccagggcgtttcgataaggtccttcagtgcttctgttaatgacacatggacatatagacactggccataatttcccattgatctgcaggtgctgtatgtcccgccaccagatgtggaagggcgacacgagatactacgcatccatacacggaaaatgaagttgggagaggatgtagatctttggaaggttgcagagtgtaccgagctattcaccggtgctgatcttgaaggcctttgcagggaagctggaatggcagcattgagggaagatatctcagcaagtttgatacatgacgctcacttccaagccgcacgaagttcattaagcccctctcttacaaaagcagtagttgatgagtactcaaaggtagatataaatgatccatcgagtaggaaacattgatatgttccttttctatttctttgttgcacactaggcgcaatacacatttgcaaccttgccaccaagacacacagatggagatagagagatctttttaagaatattcttttt

SEQ ID NO: 4866 - DNA, 749 bp, Zea mays
  Clone ID: 700430064_FLI
gatccctggcgtggttcgcagaagaacgctgcggagggtcccggacgggcggtgctggctcgtggggcactgctgcgacgccgtcggtgccgccacaaggttcagcgagcggtggacgaccggcctggtggtcggggagcacgactgccgggactacaccaacggtaatctgtcagcactctcatagtcgtcgccattgcaaaatcgttgtgtagtgcgatccgtctcatatatcctctctttgtttggtggatcgctaagggctggtcgaggtcctgacaggtgaaaaacgtgtcctggagtcgctcagattgcgcggcaacggcagcagcaccagtggggcggcgccgccgtgatggatgatctaaactgtacggactacggtcatatatcggattctataaactggagacccaacacgcaatgcagaaatttcatggaaacgaggagacgttttgaaagggaaaaaaaatgaggagagaaaacaaagaagctactactcaagacaaggcgatggtgtaacgaagaaatgaggccacttgactagttgactgtgaaagatactagaggtgctacgtgaagcaagaaattagacacgctatgtggagaagcaccgttgactaagtaaacttaggaggtgtttggtttgaagaaatcaatctattctaaatgaggtggtatatcatgagtctattatacaaattttgtggaataaacttattctttatattattactaattattagccc

SEQ ID NO: 4867 - DNA, 918 bp, Zea mays
  Clone ID: 700430083_FLI
gaatggatccctctatgactttctgcacttgtccgacgactacagcaagccgctgacctgggacacccgcgtaaggattgctgttggtacagcttgtgctctggagtacctacatgacgcgtgttcacctccagtgatccacaagaacatcaaggcatccaacgtcttgctcgatgctgacctcaaccctcacctcactgactgcggccttgcatacttctatgaggatccaagtcagagcctgggaccagggtacgatcctccagagtgcacaaggccatcaggttacgttatgaagagcgatgtctactgctttggtgtcgtcatgcttcagctgttgaccggccggaagccctacgacagctcgaagcctagagcggagcagtccttggtcaagtttgtcggtccacagcttcatgacaccaacgccttggaagctctggcggatccaggccttcgtggcctatatccaccgaaagcattgtcccgtttcgccgatgtcctctcccgctgcgtccagtcggatccagaactccggccatccatgtcagaggtggtgcagttgcttctccagtgcgtccagcgcacaaccagcaacaggaggctgggtggccaccgcaccgtctcgcagcgaagcgacgattctgattggtgatgctctgtttctgcctccatcttgctgctgcggccgagttgctgaaactgtctcagaacagaaccgtaggtgtgcggcccttggcatgccgctgtacaaaagaaaatgctttattagacaatctggttgctcgaacagtgtggcaacaaataagtcggttgatttaggtaagataaaagcagattgggtgttctagtgagtagtgacattgtatttgtaatcataaacttaaaaacatatggccagctaatttttaaaaatat

SEQ ID NO: 4868 - DNA, 773 bp, Zea mays
  Clone ID: 700430121_FLI
agcatcatacgccgcgcggcggggcatctcgtccacccagcctctctcccgccgctcctcctcgcggcgctcctcctcctcctcttccgctccgctctcctggctggcacgctccgtctcgcctcctttgctgaccgcgacccggccctccgctcccttctcgcccgcctctcctctcccaatccgccatcgccgccgcctcccccacaccacctcccgcgacgccgctcgccgttcacctccccctcgtcctctctctccgacgatgatatcctggtcagccccctcgatcccaccgcctcaactccctccagccgccgcaacgcctcctaccaccatgtccaattcacctcctactccaccgtgcccaaaccctatacgttgccgctcccggcctccgcttcccccttcttcatcgccgtctataatgagacggcgcctccgaagcccgcctcgcggcggggcagcgagcttggcctgcttgacttgaccaggcgggacgcagcggccatcgtcaacctcctcgcgctgctgtcgtccgcacatatcttcgcgatcctcgggtacatcgccgtgcactccattgcgctgggcgcagtgtttgcgtccgtggcggggcaccacagacctgggcagcgtctagtgttcctcctcaccggtgctgccaagggcgctaagagactcacagggttcgcgttcctccggtgggccacgagggacgccgttgtgcagatgctctgcctctggttctttgccgatgtgcacgaccaggc

SEQ ID NO: 4869 - DNA, 535 bp, Zea mays
  Clone ID: 700430159_FLI
ggggaagccatccatgcaacaccaaggaagacagggattatagttcttggtggaggccttccaaagcatcatatatgcaatgccaatatgttccgcaatggtgcagattatgctgtgtatattaacacggctcaagagtttgatggtagcgattctggagcacaccccgatgaagcagtctcatggggcaagattaagggttcagcaaaacctgtaaaggtgcattgcgatgcaagtatcgctttcccgcttcttgttgcagcaacatttgcacgtaaggttcataactccaaatgaacagactgaatgggattcggtggagtgaatgggcaacagaattttgttgaactctccaaatgaccttttggagcacgaggtctacttcacttgcacagggatcatgtgcaaattttttcggtgactcgcggcaaccacatgccatcattcttcgatgttcacttgatgctgtactagctggttgatagcatttttgttacaacagataatttattgaaatacagacatacgattgtcc

SEQ ID NO: 4870 - DNA, 679 bp, Zea mays
  Clone ID: 700430169_FLI
cgccaccacatgctgggccgcctgtcgtccattattgccaaggaactgctcaatgggcagaaggtggtcgtcgtccgctgcgaggagatctgtatgtcgggtgggctcgtacgccagaagatgaagtacctccgctttctccgcaagcggatgaacaccaagccatcccatgggcccatccacttccgcgccccgtccaagatcctgtggcgcaccatccgcgggatgattccgcacaagaccaagaggggggaggcggctctggcgaggctcaagacgtacgagggcgtcccgccgccgtacgacaagaccaagcgcctggtcatccctgacgctcttaaggttctgaggctgcaaccaggacacaagtactgcctccttggggagctttctaaggaggtcggatggaactaccatgacaccatcagggagcttgaggagaagaggaaggagaaggctaaggtggcctatgagaggaggaagcagctggccaagctgcgcctaaaggctgaggctacagcccaggagaagttagggtcccagctggacattcttactccgatcaagtactgaatttgtggaacatctgatccatcgttttaaaagttgtgacagtataatcttgagtgctattccgaacacattttttagccggtgaatgtattgtttgttttatcag

SEQ ID NO: 4871 - DNA, 880 bp, Zea mays
  Clone ID: 700430176_FLI
gttcggccggcttgtctagcgaccagcgcgcgctggccgccaggccatggagaagaagctgctgctgccgctggcggtggcgcacaagcacgcgcacggaggcggcggggagcggccgtgggcgcggccgtggcggtgggccaagaccgccttcttcgtcgcggcgatgctggcgtcgctcctgctcgtctgcgcgccgccgctgctcgtcgtgctcctcgacctcgcgctcccgccggcgctcctcctccgcggcggggatggcggcggcggcggctcgctcgcgctggcggtcgtggcccaggcgcgggcgttcgacttccgctcctcgctcgtcgacctgcccgccgtctccgcggcgcgcgcgctgctcatcctctgcgcgtacgtggcgtgcggcggaggcggcgcgtacctaggggtggtggtggcgtgcgcggcggcgtccgtgtgctacgtgctcgccaaggccgcggccgtgctgccgcgccgcgccgcgggtggcgctcgcgccgtggccgctgccggcggccccgaggccatgctccttctctccctggcgctcgccgccgcgcacctcgccgtagcgtaccggaccagctgccgcgagcgccgccgaatgctcgtgtacaggatcgacgttgaaggcgccgtgaggttaaaaggaggccatcaaacacccaaagggctgaagcagtagtgtagcgtctgacactccgttcccatcatcacacacgtgcgtaggcgcacgaaagattgatttccttttaggagcaaattttggttgagttgtacgctaagatacattgttactcgtgtaaactactgtcactgccacaagtgaacatactgtaagtacgaaacggtcgtatgctagctc

SEQ ID NO: 4872 - DNA, 935 bp, Zea mays
  Clone ID: 700430183_FLI
ctcactactactactagctactcatcgaccaatctccacgtgcatcgttccacagcttgcagcgcggcttgttgacagttgacacacacacacacacagagagagagagagagagagagagagagaaaagtcaattgagagggacgacagagtgagttagcttgcattggacagagagagccaaaccagaaccaaaagcaagcaaggagagattgttacttaatggagcgcgtgatgaagatcgcgtcggagcgcgcggtggtggtgttcactctgagcagctgctgcatgtgccacacggtgacgaggctgatggcggacctgggcgtgaacgcgctggtgcacgagctggacagcgaccccaggggcaaggacatggagcgcgcgctgctcaagatgctgggagggaggggccccgccgtccccgccgtcttcatcggcggcaagcttgtcggcggaactaacagggtcatgtcgctccacctcgccggcgagctcgtgcccatgctcaagagcgccggtgcgctctggttgtagagagagacctgctagctgctgatcatgcatggcgcgggcggcagcctatgcgtgcactgcacctttgtgtgcgtgcatgcatggctactgtgcgtatgcatgcatgcgcgcgagcgcgggaaaaaataaataaagacactaaaccaagggcaggcacaggcaggttagtacttagtagtgtgtgtaccggtcaaagacaggttttttcccgtcctgttcttctgaattctgacagcaacaataagcaaactgtggcttgctagcttcatgcatgcggcttagcttgtataggagttagtgagcgatctagagagatggcggcctaggtatatcaatatatgtatgtactgctctttttccatgggcttatgaatatcaatatatatgtatttttaatt

SEQ ID NO: 4873 - DNA, 226 bp, Zea mays
  Clone ID: 700430190_FLI
gagtcctgcaagcggggggcagaacttccacagttccaaatcacttcctgtttaatcgagttgttgtacgagaaataagaatggaaattactggactccatccatgcttctcatttgcttgttctgataatcatgtgctcttcatctagtgcatattgaagtcatgtttcctgtcataaaatggaactgtactatctttgtcgtgcagtttaaactgaccgccggc

SEQ ID NO: 4874 - DNA, 893 bp, Zea mays
  Clone ID: 700430202_FLI
cccttttctgttctttgggggttgagctctgaggttttcatacggggtttcatctctagcctaccccaacgtgcttgggacaaaaaggctttgttgttgttgttgttgtattccttttgtaggtctgcactgaagcatctcaaaattgagagagtcaagaagtttgactactgcatgccttattatatgccactgcaacctcttgaagatgaagaaaacacaactatcaatttcttatatcctctggaacccccgatagtagatgagttcgactgggaaatggatgattacgaggattttgcagatcagaaagtccaagaaggtagcctgcccgagggcgagaaagaaaaattcaaggagttcctgaaggagaaggttagagaaaggaagagagagctgagacaggctaaagaagccaggaagaaagctattgatgatatggatcctgcgatgaaagaggcattcgagaatatcaaattttacaaattttatcctgtgaaaaccccagacacgcctgatgtaaacaatgtaaaggctaggtacatcaacagatactacaggaatgcccattatctgaagtaaaggctctcctgatctcacgtgcttgaggacgagcttgtcatttgagttggtgtaaaaaaattttgaaacccgggggagaaaagtttggtgacatctttggatggtcttactgttgtactgtactgtactagaattgccctcagactttcgctgtccggtgcatacagtcagaaaggttcaaggtagttttgagactaaccaaatcatgatggaacaatttgttcctttgtcatcatggttactgcacaccctgatggttatgctgtgactttttttaacatctgctatgagcaagctatgaattatgctgt

SEQ ID NO: 4875 - DNA, 717 bp, Zea mays
  Clone ID: 700430248_FLI
gtcatttaccagaacataacctttgaaaacgtacgtgtcggtatagtgataaagacagactacaacgagcacccagacgaaggcttcgacccaaaggccgtccccaccatcgggaatatctcttacacctcaatccatgggcatcgtgtgcgagtaccggtcaggatacagggaagcgcgcagatccctgtgaagaatgttaccttccatgacatgtcaatcggtatagtagacaagaagcaccatgttttccagtgctccttcgtccaggggcaggtcattggctacgttttccctgtgccttgcaagaacctggacctgtacgacgagcggcgtgggctggttaaacaatcaacgttacagaatatctctgatatcgactacagtttctgacaatggcatttgataccactgtactattgctgtaggtgtattcagtattcacagccgtcacagtcctttccacacatttagaagcaaaattttgggtagcttttacactcttcacctcacagtcaggcatgtatctaaggaagatcgacttgaccatactgtctcgtagagggacgccaggaatgttgccttttcacttttttgatcactgtatgattacacttacttggttacacagtcgacagtacacttttgatagtgcttactgttcatggcagactacatttaccttgccctttttaaaacagatgtggatgtatatgt

SEQ ID NO: 4876 - DNA, 216 bp, Zea mays
  Clone ID: 700430274_FLI
ccttcactagctagcttagctagccagccacctccgttcactccatcgatcgacccgtagccaaccaccaacagctagctagctagcaacaatggctgccgtcgtcaacgcgcgagccgcaactgctcgttgctcggccgccggcgggccaccacgcggtgctgcgtctttgtttccgccgtcgataaggatgaggaagaggacgacggcggcggc

SEQ ID NO: 4877 - DNA, 422 bp, Zea mays
  Clone ID: 700430292_FLI
ccaaaacagcactcagaaggttcaagaatggatgatggagtacaattctgtgattcctctgacagtgaggatgactgtccagtatgcctggaagaatatgattatgagaatccgaagattgcactgcaatgcaaacataatttccaccttagctgcatttacgagtggatggaaaggagccaggcttgcccggtctgtgcaaagactatgttgttcaatgaggatgaatgaccccgccgatggaagtcttcccagacggcaagtggaagacccaagctaaatcctgcgtgttgtgtacatagcgctgatcgtttgctgaaacttacagcattgcgaaaatttatttttatagattttttcttgatgttaatgtccgcaggggtgcttacaataggttttcatgctgaaatctcaggttctgt

SEQ ID NO: 4878 - DNA, 825 bp, Zea mays
  Clone ID: 700430319_FLI
caccgctgctcgggcttcccgccgcacagcccggcttgcctccgccactccgtttcccgccgcaccgccatccgaatccgccgcagcctgctccctgctatcaagccacgttgcctcgctcatcttccgccgccgcagggatacagaggagagagagagagagggagagaaaagatgtcatcgaagaagaactactataaggagaagttgatgcggcggaaagaggagaaaaaagaagagccagagacacccaggtaccgcgatcgtgctaaggagcggcgtgaagatcaaaacccagattatgaacctacagaacttggttcgtttcatgcagtggcacctcctgggaatgatttgaggctggcagatgctcacaagatctcaattgagaaaagcaaatatctcggaggtgatttggagcatacacatctggtcaagggcttggactatgctctacttcataaagtacggagtgaaattgaaaagaaacctgaggcagaggatgggaaggatacaaagtcaagggcagcaaaagaagatcaggcagtctccttccgcaccgcaactgcaaagtctgtgtaccaatggatcataaagcctcaaagcataattaaagagaatgaattgtttcttcctggccggatgtcatttatttacaacatggaggagggagtaaccaatgatattccaacaactcttcataggagcaaagctgattgtccagttccagaggagatggtaactgtcagtgtggatggttcagtacttgaaagaattgctaaaattatgacataccttcggcttggatcatcagggaaggtcttg

SEQ ID NO: 4879 - DNA, 1024 bp, Zea mays
  Clone ID: 700430320_FLI
gtggagaacaaattcagtttgctcgaactgctcaaatatcttctccagctcatgtgggcaaatcacaaaatcctgtaatggacttgagcacaacttttaccagtgttcttcaaaataagtcaagcctcttctcaaaaaacaatgcattgactgattctagtggtctgatccgaagcagccactcagagagaaaggtcccatctgctctgcagaccagggcaccaccccatgggtcacctatatccaatatgagatcaactgtagggggtaagttccccacagtgggccagaatgttgacagtccatttttgaggggggctaaaggtatcagttctagaaaaggagagacgggattcaaagaagggattaaatatgctgatcacgatccactgcctatgtatttgaacttgagttctggtgatacacccaccaaagactaccgaacaagtttgttgaaggccgaggctaacaaaaccacttattttcaaggacaagattctgttggaaaaggagagttccactttggttcacgtgctgtgaagcctttcaacttaaatggaactggcgcaggtcaaaatggcctcgctaagatctcgggatatgctggttttcgtgaggattataaagtaccaactaaggagaacatcttgagctttagcaagaaatcttcagttggtggagcagaagccagcaaaggtgtgtcaaggtggagatccgatgagtctagtgaagaagagagaacaaaccgggagagcggagctcctcttgttactagaaggcgacctagattttcgagaagatgatatatccacatcctcagggatttttttaattgtttgcagctatgccctaatgtgacaacaattgttttaagggaatgtgtatgcgggatgcggctatcatgcataatctacattgccatggccgagatgtagttcaagtgtcactaaggatgctagaaaacaaaatcgagaaggcgtatgcatgtagcattcagagttcagtggctaaattatattttccc

SEQ ID NO: 4880 - DNA, 1049 bp, Zea mays
  Clone ID: 700430353_FLI
gcgcagcgtccgtccatccatggctctccctacacgcagcgtcgtgccgctttccacaatccgtgcctcaatccccttccttcgcgcagcacccttccatccatggctcgcttccagaaatccccctacctacggcgcagcgtcgcagtccggaatccacccccaaaatcactacccgctctgcggcgatggaagggaatcaaaacgcgtgcttcccccttccatcctcgacgttgcgcggattgcatggccatcgtttcgcgcccccaatccgtcgatgcaaggaacgcgtgcttcccccttccatcctcgacgctgcgcgaattgcagattgcggattgcatggtcatcgtttcgtcccagttcattgcccgcatcagatggaagggcgccccgatctgcctcacctccatcaatgaggtgtctgcctttcttgcatggagacgccaaagagaaggaaccagtcactaagtcggcctctgtacggtccatgaacatacatcaacggagcgtgatgtccgctccggttcagacttcacctccttgaatgtttccgacatgagcgccgagtcgataaggaggacacagtaccccagcttcattgaccgcccgtctaacctgagggtgttctcctttgctgaattgaagagtgccacccgcaacttccgccggtctctcatggttggctagggtggctttggctgtgtgtacaggggtgtcatcaagacctccgacgatctgaacgaacgaatcgagatcgctgttaagcagttgaatcgtaaaggacttcaggaagtagctcttccactacatgagcaattgctggtggagtggagccttgctatttgctgttcctgctatcagttttgcctattggcggcacaggaaaccacaagagcattttttcaatgtatatggcttcaaagttagtctttgattattatctttcttgcaacataagggcaaacaacgtttatatgtagcaaacaaatacaatttgcaaacgttttaggaacatgtttttacaataaagatatacttatagtttc

SEQ ID NO: 4881 - DNA, 561 bp, Zea mays
  Clone ID: 700430366_FLI
gttttgtggagaaggaaaaacttgaatcattctatttaccaatgtattcaccatcggttggtgaagtggaggccatactaaagcaagttgggttgttcaacatgaatcatgtaaaagtattccagacaaattgggatccctacgatgacttggaaagtgatgttgtgcataacagtattaggagcggtgaaaatgttgctaagtgcctacgagcagttatgcagccgctagtcgcaagccaatttggagaacccattctcgataagttattcaaagactacgctcgccgtgttgccaaacaccttgagaatgagaaaaccaagcatgctattattgtcctatccatcgagaaagcaattcacctgtgaagtgtattgtttctcactatctcgcttattattatcacatgctactatttgtgtagaaaactttgtatgtatgttttttgtgtgtttgtgtcactagtgtattgaatgacatagggtgtttttgttgttttatttatcacttctcctgtattcctatatttcatatgtctaagtttttaatgtgatttcatgc

SEQ ID NO: 4882 - DNA, 731 bp, Zea mays
  Clone ID: 700430394_FLI
tggagcgcggcgcggggcatgcgtgcaagtgcaaccaatcgcctcgtcgtgtgcgctcgcctttgcttccctcgttaacgtgagtaacctcgttggctgatcaaggctttgacggcggcaccaacgttcttccctcgccgcctcgttgcgtccgcccgcccagcgccaactcctcgtcctcgtacataaccccccaccccaccgcgtacagcgttccctctcgcgccccgcggtgagctacccccgctcgccttagctagctacccaccatggccctcccgccgtcctcctcgccgtcgtcgctctccgccgcgtcagcgcagcccacgcccctgcacctgcacctcccgaccaaggcgcccggccgcctcccgctgctccccttctcgcgcgccgccctcccgccgccgctgcgcctccgcattgcgcgcaccagcctctccccgggcacgcccctcccgcgcgcgctcctgccaccaccctccgcctccgccgacgccgcagcctccgacgtcggcggcggcggcgccggcttcggcggccatgacgacgacggccacaaccaccacggcggcgagggtggcggcgacgacggcggccatggcgacgacgccggccacggcgatgacgcgcccggcggcggcgacgcccgcggggaggcgctgttcgtgctggcgcagctgggccgcaagctcgacagcctgccgtccgatctcgccgccgccgtcgac

SEQ ID NO: 4883 - DNA, 928 bp, Zea mays
  Clone ID: 700430481_FLI
cacaaatttggtgagcagattcatccaagtctatacacatcgatctacaacaagttgcagaatggaaagaacactgatcacttctaacctctccatgagtgcacatgcttcaagatcgtcccggagggttcactacatctctcctgcggcctctgctgctgcacacaactccagctacaggaagaagaagaagaacgccccgtctccgccgccgtcggccgccgcaactgacaccgttgtcatctcccctcctgccactgacaatgttcagtccactgctccgaagcaggccggccgacaggagcttgaagagctcgtggccgccaagactaacacttcaagaattgctactgcaagaacaagtgcgtcgagccagtctcgggctaagcttcgccgccggcctgccccggcaatcacgtccctgccgatggcgttctgcagcgcgttggaggaggcgatcaacacgttcgtcgacccgccggtgctgcgaccgtccgtggacccgcggaacgtgctgtcgaccaacttcgcgccagtggacgagctgccgccgacgccctgccccgtcgtgcgcggcgcaatcccgcgctgcctcgccggaggggcctacatccggaacgggcccaacccccagcacctcccgcgtgggccgcaccacctcttcgacggcgacggcatgctgcactcgctcctcctcccgacggcggagtcgccgtcgtcggaccccgtcctgtgctcgcgctacgtgcagacgtacaagtacctcgtggagcgcgacgcaggagcgccggtcatgccgaacgtcttctccggattccacggcgtggctgggctggcgcgcggcgccgtcgtggcggccagagtactcactgggcagatgaacccagccgagggcgtggggctcgctaacaccagcctcgtcttcttc

SEQ ID NO: 4884 - DNA, 447 bp, Zea mays
  Clone ID: 700430501_FLI
gacggagcgcactgatgttgctatatgtagagttgagcagctctgcccattcccctatgacctcatccagcgtgagttgaagagatatccaaggacactgaaaggcggatgtgcggattggcttatagagaaatgtattgaacttggagcttctagtgttacccctgtcctgacagaacaatgtcacacaatagcggaaaatcgggtggacaggctgcaacgccttgtgctggatgcagttaaacaatgtatggagtttgggtatcacctccgttcttggcctgttaaacaatgtacggagtttggggttaaatgattttgtaaagtgtttgcaaatatgtgcaaaacataataatgtgtaggttttgtgaatgattttgttgtggtgtttgttgatggtttatgtgatgtggatctatcattatgcaatactaattaaatttgtat

SEQ ID NO: 4885 - DNA, 299 bp, Zea mays
  Clone ID: 700430504_FLI
ggagggcgtcgtcaagcagtacgtctgcgtgtggaagggcaagcgcgtcacggccaacttccccttcaaggtcgagttcgagctcgccgtcgagggccagcccaagcccgtccggttcttcgcccacctccgtgaggacgagttcgagttcgtcgacggagagtgacagcgtcgagtgcgttcgggtaagcggcgacggcgagcgccgttcttatagaataatcaaggccgcggcggtcgctggtttatactgttccggtgcaggagctcgcgaggcaaggcatgtcaagtgtttgctt

SEQ ID NO: 4886 - DNA, 699 bp, Zea mays
  Clone ID: 700430518_FLI
gtcatgctttacattctcttggctacgtttgggacatgcggatctctcccgccatcttgcattgtcctctgtgcccttactctgcccatgggcaaaacggtcgtggactacgtgctgaaacatcacgaggacaacgcgaagatattcatggcgaagtactactgcgtgcggctgcacgcgctgtttgggatggcactggcctctggtttggtcttggcccgaaatggtatattagcctgacagacaggctcataggcggcgctgaaatccaggagagggtccagagcaccctggagtttcagaatcagcgagcaccctgttcaatttacgttctgaatctgaactacttgggggcgcagcactgagcagcagcagttttgccaagaaacggtggagggaatggccctaggagaagtagaactactacagcgtcagaactcagatgcacaccggcccgtatcggacggcaagttcggcgctcgagttcatttggttcagcgtccttgtacgctttggtccgctctcggggggcttgcttgctcgtgcacggtcagactgccgttgcgccggggtccgggggatgccagtgtatgtatgcatatggattgaatcccaagcaaggacgagtcatgcactcatgtacaagcattacttctgtgcacagacgaccatacagattttatgacgtttttttttttt

SEQ ID NO: 4887 - DNA, 753 bp, Zea mays
  Clone ID: 700430673_FLI
ctcctccagagccagccgccgtgcgctctcgctctccctctgtctgcgacgagacttggtgggctaccgccgctgcgcttcgccaggtgctgacgccttcgccgatcacttcgccggcgatagcactcaccaggaatgggcctgtggacattgctggagggttttttgcttcttgcaaatgcgttagcgatattgaacgaagaccgcttccttggtccaaggggatggagcatgtctgaagtatcaggaaacgggcaaaccaagtcgttcaagggccagatcgtggggcttatctacgctacacagtttctgcggatgcccttaattgctctcaacgttctcatcatcgttgtcaaattggtgtctggctgagcctgatgaattggtatctgttccacctttatgtaagagctaagagatcccaaagttaattgtactcaaggttgctgtaaatatgctgtttctgtttactctaatgtggatttctgttattgttgtcgtaaattaatttggtcagaaaatgactgtcgatattcatactatccaagcgggcactttattgggggtgtctttcttttgtacattaatgaattcaagacatatttgcaacgtccttgtatgttttgtgatcgcttcctctccattttatgcttatagtgcgtttcatggttgggtactgctgttggttcgaggcatttttctcatgcctgaggttaagtgctaatgcaaaccattgccgatccttctgtttgg

SEQ ID NO: 4888 - DNA, 195 bp, Zea mays
  Clone ID: 700430686_FLI
aaggtcgggataataaaccagacggggcctatgtgtcaacaatgtgtctttgtgtcatcagtcacccgaggagaatatttgtgtttatgcacacgccaacaatggctccttgctactaaacctttatggcacattgtaataaggctattgtatctcttctacatgactctaaaataaactaagtgttatggtgct

SEQ ID NO: 4889 - DNA, 392 bp, Zea mays
  Clone ID: 700430772_FLI
gacgtgccgtggaatgtgtttgtgtcaactgctaaaaggctgagggttttgaggagctcggagcttgccaaaggtttggtaggcacaaggccacctcagattgcggtagctccgagaagaggaccaccagattgctgaaagcctgaaacagcgacaaaattctgatcatttggaatgtgagcaagcaaactgaacccggaccttttgtgatgtgacggtaccttttttttgcctgtagagactaatctagtgagatgaactgccatttcagtctttcagatgtatgcggaggtcctggatattttgtaaattaggctaccatgtgactcgttgctgtagggtaataatgtcctaatgtaattcaacatgggcattaattggacttataagag

SEQ ID NO: 4890 - DNA, 797 bp, Zea mays
  Clone ID: 700430776_FLI
accggccgcaagatcatcatcgacacgtacggcggctggggagcccacggcggtggcgccttctccggcaaggaccccaccaaggtggaccgcagcggcgcctacgtggccaggcaggccgccaagagcatcgtggccagcggcctcgcccgccgctgcctcgtgcaggtgtcgtacgccatcggcgtgccggagcccctgtccgtgttcgtcaactcgtacggcaccggcacgatccccgacaaggagatcctcaagatcgtgaaggagaacttcgacttcaggcccgggatgatcagcatcaacctcgacctgaagaagggcggcaacaggttcatcaagaccgccgcctacggccacttcggccgtgacgacgccgacttcacctgggaggtggtgaagcccctcaagttcgacaaggcatcggcttaaggttgggagtgtcactgtggacatgaggactaccttcctctggctctgctgttacctgcaagcattgctgctgctggatgtgtgtgtttgatcagtgactggctgctgctccatagaagatgaacggagagaaggatgatgaagggctttggcaatcgccgctgcaactgcaacccatgccatgccggcttagtgattgggtataatttggcttggcagcagccagcattattatgtgctgatctgttatcttttactagtttggtcgtccgatatctttctttctttttccccccttttcgactctgtactgaaactgctgagagattcgcagtattgttgtatcgtattcatatgctactgtt

SEQ ID NO: 4891 - DNA, 461 bp, Zea mays
  Clone ID: 700430855_FLI
ctcatatactggatccccatctggtacgagctcaagctgctgttcatcgcgtggctcgtgctccccaacttcaggggcgccgccttcatctacgacaagttcgtgcgcgagcagctccggaagcacggcctcaccgccgccggctccgtcaagtcgtcgtcgccgtcgtccaaggacaaggacaagcccaagaacaagttcctcgccttcgtcacgcccaagaaggatcatgaagcttactgaagtgggttgcagtgatcccattcctggaccatgtcccggcaacctgtagctgtagtgcactccactagatttctgttgtgtttgttctcgacatgaaatagagcctctacgatgtgtgtatggccattctgtatgtgtgagcatcaactctaacatggaatggagacaagtgccaactttcggtgctgatgatgatgtgaatgtgtgaaatttatgtc

SEQ ID NO: 4892 - DNA, 1397 bp, Zea mays
  Clone ID: 700430905_FLI
gcgaagtggaactgcaaccgccaccacgggccccaccgcggcaaatcgccaccgacccagagaatggagactggagccgtctcctcctgtcctcccgagacccgactcaactttctctcggcacgccactgccaattccccgccagcagcagaaatcacactccgcttcatcttccgctggatccctagtctacgccggcctaacgccttgggacctccgctgctgttctctcgccggtcatttttggttcaggggctgatcgcttgatcggatcggtgtcgcagccctatacatcatacatgacgacgcccggctcctgtcctgcgacaaccgccgccacccaccctcccatgtgcgccgctagcgccgcaggtggatcgcaaaaaatggtgcgtccgcgactagtgctcttcggggactccatcaccgagcagtccttccgccccggtggctggggtgccgcactggctgatacctactcgcgcaaggctgatgtagttgtcagaggctatggtggatacaacacaagatgggctcttttcttagtacatcacatctttccgctggatggtttagcaccccctcttgcaaccactattttctttggagcaaatgacgcagccctgttaggaagaactggcgagcgacaacatgttccagtttcagaatataaaaataatctcaaaatgattgttaatcatttgaaggattgttctaattccatggttattgtgcttattacgccacctccaattgatgaagaaggaagagaaagatttgcacggtcactttatggacagaatgcgaggaagctacctgaaaggacaaatgaaatggctggggtctatgctggttattgcgtcgaactagctagagaaatgtgtataccctgtgttaatatctggtcaaagatgcaggaggcagaaggatggcagaaactttacctaagtgacggtctgcatctgacacaggaaggaaacgcagttgtccacaaggaggttgtcgaagcattgagaaatgctggtttcaaagctgaacagatgccgtacgactttcctcatcactccaaaatagatggcagttgtccagaaaaggccttccaatgaaatgatttcgagttgtgtgatgttttggagttttggatcctgcattgaagattacgataacgtccaatgacatgatcttgagctgttacattttgggagtttgaaatcttgcgtatattttggagtttgagatcctgcattgaagattgtaatttcctccgtgcaaattaaggacctaggcttctccaagatgccggtgttgcttcttctacacttacattgttacattttctggattaagacatgttagcttccatttctcgttattgtggtggatggtttggatattg

SEQ ID NO: 4893 - DNA, 598 bp, Zea mays
  Clone ID: 700430942_FLI
cctcattccaatttccaagagagacagagagagcgtgtggatttgggggagcttcttcactggagagtggagagctccggtagcgaggcgaaggaaggaagagggaggaggggaatcagagaggtctccccgatggcggactggggccccgtgatcgtagcgacggtgctgttcgtggtcctcacgccggggctgctctgcacgctgccgggccggggccgcgtcgcagagttcggcagcatgcacaccagcggcctggccatcctcgtccacgccgtcctctacttcgcgctcatcaccatcttcctcatcgccatcggcatccacgtttacgcgggctagtagccgcccggagcaggatgcgatatacggagtagtaggttgcgccgccgccgtgatccagatcaagatgtgttttttttctttgttccttttcgctctctctctctctgccctcctcctcggatttgctgccagtatggacgaaatcattgattatggtctggacgtctgcttgtaatcaatcatgacttgtgtaatcttgcttgcagccatcagtatcgatcaaatatcaatcgcgctcattccatattttttt

SEQ ID NO: 4894 - DNA, 1241 bp, Zea mays
  Clone ID: 700430988_FLI
gagcgtcagagcccgatcccgatccagcgaggcggcgaccctccctcctccccttgcttcgctcgtccagccctgaccacccgcatccccgtcagtcatggcagcggcagcaggcggaggcgcggtgcgtgcgctgtcccagaaggagcaggacatacagatgatgctcgccgccgacgtccaccttggcaccaagaactgcgatttccagatggagcgctatgcctttaagcgccgcaccgacggcatctacatcatcaaccttggcaagacatgggagaaactgcagcttgcagcgagggttatcgttgccatcgagaacccgcaggacatcatcgtccagtccgcccgcccctatggccagcgtgctgtcctcaagttcgctcagtacactggcgctcatgccatcgctgggaggcacacccctggtaccttcactaaccagctccagacctccttcagcgagcctcggctgctcatccttaccgacccaaggactgaccatcagccaattaaggagtctgctctggggaacatccccaccattgccttctgtgatactgactctcccatgcggtatgtcgatatcggcatcccagcgaacaacaaggggaggaacagcattggatgcctgttctggcttttggccaggatggttctgcagatgaggggcactatcctccctgggcacaagtgggaggtcatggtggatttgttcttctacagggacccagaggaagcaaaggagcaggaggaggaagctgctgttgcccctgagtttgccgcaatcactgattaccaaggagctgatcagtggggtggtgaccagtggacctctgatgtgactgcgccgcctgttgctcctactggtgctgattggggtgctgctccagctccggttcctaccggtgatggctgggatcaagctggggcccctgcacctgtggtggacggcactgtacctcctctggttgctcctactggttgggaccaagcagccccgccaccgactgcccaaggctgggagtaggcgttgtccactctgagacctgtcttctgcggctgaagttcagtatttttctgtggtctgaatgtccaaattccggtggcatcttctatagctatgctttgctttgctttgaacacttgtgttttagggctttctagctgaacccgttgtccaatattgctgacgttgaaatttttggttaatcttaaaactggaaatgatgcttgcggtt

SEQ ID NO: 4895 - DNA, 493 bp, Zea mays
  Clone ID: 700430993_FLI
gcactgctcagtacgcagccgctcccactactagattcaggtgagctcatcattagtgccccggcccttggtgcggtgcggccaacggccatggcgaagcttgccgcgcagctcaagagcaagttctttggcctcgtcggccgcatcaccagctgtggccgcgccggcgccacccacaaggatgccgctggtgcgacagaggccaagtcatcagtgggatcccagcctgttgagatcaggtcaaggggaggtgctcctcccgttgatggaggggccaagggtcacatcaacagtgacaccatctagaggagagggagaggagaagagaagagatcgaagagaagagaagaagctcaccgatagttaccatgtttgaaagaactgaagctgtaaatcacagtcgtcgttgcttgtgtgtgtgtgtttatagttcctccatggtttaccatcactttcagcttttctagtatatctagtgcttgctatgtttcat

SEQ ID NO: 4896 - DNA, 623 bp, Zea mays
  Clone ID: 700431089_FLI
gcttcgcttctccacctcgcgaccccgaccctgactcgctccactcgcctcgccgtccgcctccccagcgcccagctgtcgcgctggccatcgggggcacgcatcgccgccgcgcagccgccgcgggcgtacaaggtgacgatcgagcacggcggcgagtcgcgggtggtggaggtggaggaggacgagacgatcctgtcccgcgcgctggacgagggcctggacgtgccgcacgactgcaagctcggcgtgtgcatgacgtgcccggcgcggctggtctccgggacggtggaccagagcgacggcatgctcagcgacgacgtcgtcgcgcgggggtacgcgctgctctgcgccgcgtacccgcgctccgactgcaccatccgcgtcatccccgaggacgagctgctcaaggtccagctcgccaccgccgacgactgactgacgctccgccgatgaccagcggaccggccagcaggcatcaacctccggcggtgtaatgatgtccctgagacttgtacaccattgttgactagtagcactagtgacagagcttttctcgagaatagatgctgtgtgatatgcctctctgccaaatttctggtatccaaatcgagcatttcgcg

SEQ ID NO: 4897 - DNA, 1162 bp, Zea mays
  Clone ID: 700431113_FLI
gcctcgcctcgcctcgcccctgtttgtttgcttctggccggaccccttccccttctccggtgcacgccactctgcaaccctcctcctctcgagcagagcagtcgagcagagcggcagcctcggcgcgcgccggcgccagccgacatgactgccggtcagtgcggcaacatccaggaccaggaggcagctcctggcgccgacctctacgccgtgctcgggctcaacagggagtgcaccgacgccgagctcagggtcgcgtaccggaggctcgccatgatatggcatccggacaggtgctcggcgtccggcagctcggcgcgcgtggaggaggccaaggagcggttccaggagatccagggcgcctactccgtgctctccgactccaacaagcggctcctctacgacgtcggcatctacgacagcgaggacgacgacgctgacctgtcggggatgggcgacttcctcggagagatggccgacatgatgagccaggccacgccaacggagagcttcgaggagctgcagcagctgttcgtggacatgttccaggacgacctggacggcgccgggttcttcggcgggcttccgacgagccgcagtgcccagggtcctagcagcacctcgttgccaccgtcgacgtcgccattgcggccgacgcctcctgcaagaagtaagggtgcgcaaacaccgtcgtcgtttaacggcgctgggaggcggggttcgacggcgaagcggccgaggaccggttgggctggcctggaaccggatctgggcctctctggattctgcttcatggtgagcaagtcgaaggagaggccggcggcatgggcgtgcgacggcggtgacgagaggagcggcagcaagcagaggctgtcaacgagccgtctccggctccggtggtgggatgtcgcgctcgcggcagagccaaaccagtagaaacttgtgggcagtgaacggcctctagtcttgaatcttgattagagcactctttattcacttactggctctcgtcagtcgtagtagctcgaggcacgttgaaaaggagagagaaaagatctgttgcattcttcaatctattccaagctagccataaatagccaattctcttgctgcattgtttcgatgaatttttatctgggagaaattgagagtggttggtagt

SEQ ID NO: 4898 - DNA, 123 bp, Zea mays
  Clone ID: 700431137_FLI
gcgccaggccagacagactaactgagcacccgctgcaaggagtccgcgcccatggcgagcaccaacatggcgtcggccacctcgcggttcatgctggccgcgggcgtgcccaccggcagcagc

SEQ ID NO: 4899 - DNA, 596 bp, Zea mays
  Clone ID: 700431146_FLI
gtgtgggagaaagtcagtccagcgctacagcgtgcagtgcaaagccagatgagtctaatgagcacaccgttcatcgacaacaatgacctttttgaaactggcagtacaggaggcatgtcaagggctctgattgataggatcccaaagatgaggttcagtgctgcaagcaattgtgacaaggaaactgatagcagctgctgctcagtctgcctgcaggattttggagcacagcaatttgtgagggccctgcctcagtgccaacacatattccatgtgcggtgcatcgacaattggctccttcggcacgcatcctgcccactatgccgggccggcgttcatattgaccatatacatatgtaaataaactcgcagggtggcacctggtgtattttcatagtgaatacccgtgctcctgttggatatcacaagtatagctggatgtatacataggttttctcctttttttttgttacttctccggtcttatgtggggctatgctttcagctgcacgtttttgtcgaagtaatacctggattggctggatatgtacatcttgagaacggattgactaacaagctccctgaattatggtccc

SEQ ID NO: 4900 - DNA, 472 bp, Zea mays
  Clone ID: 700431150_FLI
ggcgtgcaaccgcgttaccagcgccgttatctccatgaccttcctgtccctgtccaagggtatcaccatcggcggcagcttcttcctctactcgggcatcgccgcggtcgggtgggttttcttcttcacgtgccttccggagacccgcggtcgtacgctggaggagatgggcaagctgttcggcatgccagacacggacatggctgaagcacacaacgccgctgccaaggagaaggcggtggaaatgccggcagtgctcggcaatgattgatgcagcgtcttaccagagcagcgtggcaagattggcctctgtcccttgactctgaggggtcgcggtactgcaggacagtgaacgcgtggtccaaccagagactcttctgccggacagctgtgccttattgctgtcggcgtggcgtgtgcttcgcaagttgtgaagctgtttggcttgttctacataccagatagtgaaccc

SEQ ID NO: 4901 - DNA, 604 bp, Zea mays
  Clone ID: 700431187_FLI
gcacaaagaccatgcgcgaagacggcgggtttgaagagatcaagagagcaatcctgaacctttctctgcgccatgatctgcatattagtgcatacggagaaggaaatgaaagaagactgactgggaaacatgagactgcgagcatcggaacgttctcatggggtgtggcaaaccgcggctgctctatccgtgtggggcgggataccgaggcaaaagggaaaggttacctggaagaccgtcggccggcatcaaacatggacccgtacattgtgacggggctactggccgagaccacgatcctctggcagccatccctcgaggcggaggctcttgccgccaagaagctggcgctgaaggtgtgaagcagctgaaggatggttcaggcaccaatataaaccggtccgcgacaagattgatctttgtgtccatggcgtgggtcttgcgactctctgctcggcggtgccactctgtacaaaatcacggctgtctttgattcatcggatattcggatacgtttgtttgttactttttgcttggacacccaccatgtttggaacttttttgggctccgtttgggggctgaacgatggtcagtggaaatttt

SEQ ID NO: 4902 - DNA, 694 bp, Zea mays
  Clone ID: 700431227_FLI
cttgaggatctggaaaaacatattcgtgatgtgaatgctctggttacagtggtgcggtccgtccgttgccaggttgacttgaatgaagtatttaaccggcaagcatatggtgccaagaattcatctcatctgcaagaactgctggactatagtaaatcagtgccacctagtcgccgtcatgataacagtatttccaccttgtgcatctatgaacaggattctgttaacttggctaaggtggagtcttggcttgaagatcttctttgggaaaagaaatctagtatggacatatatcgctgtaaagggattttatatatccatgattcagaccaagttcatacattacaggcagtgagggaggtctatgaagttgtgccggctcgaaaatggtctgagacagagtctcgcatgaacaagatagttgtcataggccgcaatctggatatcaatgtacttcaagattcttttagtggttgcaagagctgataatgagtatctgttttgccttgcacaatgttagttggctatttttctgtgaggtacctctgtgcaagtgaatactgaactggaggagaatcttaggtagggaatatagataacaggcgctccatatataaacttcgttattaggtgctgtatggttcacatatttgtaacgtgaacggtaaccgataatgttaaaacatgtttgttt

SEQ ID NO: 4903 - DNA, 1507 bp, Zea mays
  Clone ID: 700431229_FLI
ccacaacacgtcctcgtgatcctagtaccttcttcttggaaaaagttgccgccgcgatgaacgcgctcgccgccaccacccgcaacttccggcgggcatcgaagctgctcggcctcgactccaagctcgagcagagcctgctcatcccgttccgggagatcaaggtggaatgcaccatccccaaagacgacggcagcttggcgacgttcgtggggttccgcgtgcagcatgataacgcccgcgggccgatgaaaggcggcatccgctatcacaatgaggttgatccagatgaagtaaatgcccttgctcaactcatgacatggaagacagctgttgcagcagtgccatatggtggagcaaagggagggatcgggtgctctcctggtgaactaagtagaagtgagttggagcggttgacacgagtatttacccagaaaattcatgatcttatcggaacgcatacagatgtccctgctcctgacatggggaccaatgcacaaaccatggcatggatgctggatgagtactcgaaatttcatggtcactccccagcagtcgtcactgggaagccaatagatcttggtggatcactgggcagggatgcagcaacagggcgaggcgtaatgtatgctaccgaggccctactcgctgaatatggaaaatgcatttctggatcaacttttgtgatccaaggttttggcaatgttggttcatgggctgctcgacttattcacgagaaaggtggtaagattattgcaattggggatgtgacaggttcaattagaaacacggctggtatagacatacctgctttggtgaagcataggaatgaaggtcatgcgatgaaagacttcgatggtgcggaagttttgggttcgaccgagttgctagtgcatgactgtgatgttcttgtcccctgcgccttaggtggagttcttaacaaggataatgcaccagacgtgaaggccaaatttataatcgaagctgctaaccatccaactgatccagaggcagatgagattctcgccaagaaaggagtagtagtattacctgatatctatgccaattcaggtggcgtggtcgttagctactttgaatgggttcagaacattcaaggtttcatgtgggccgaggaaaaagtaaacgatgaactagaaaagtacatgagcagtgcttttcaacacatgaaggccatgtgcaagtctctggattgcgaccttaggatgggggccttcaccttaggagttaacagggttgctcgtgccaccctcttgagaggctgggaggcatgagaccattgaccgcgcattacagattcgacaggtgcattcaataattcgtgtccaacaacgttggagcattagtgtctgatacgggaaaattcatcagaaacgaccggcttggaatgagcccgttgaaataacagtctgggtgttgtgcttgttgatcctgagttaccaatggttggttcaccagttcttggtgatgattagtgaaaattttattt

SEQ ID NO: 4904 - DNA, 836 bp, Zea mays
  Clone ID: 700431246_FLI
cttctctctcatttcgtggcaaaacggatttcttttccccaaagcatagatggcctgaagatatagcttggcatccagatggtgagacaatttttgctgtatacactgctgataatggtgattctcaggtttcaatgacaaaccttatatcaggacaaggctccaggtagacagctgcgcttgtttgatgtcaggcttaggcaatctgaggttcatgcatttggttggaaacaagagagcagtgagtctcagtcggctctaattaaccagtcatggtctccagatggatggtacatgtcgtctggttcagcagatcctgtgatccacatcttcgacatcaggcatcatggccagaatccttgccagtctgttcaggcacaccagaagcgggtgttcaaagctgtttggcaccgaacgttgccatatctgacctccatatcatcggacctcaacattgggatccacaaatattcatgaaacgttttgggctgattttggcgcttggcaaattttttgttgtggattaggaaccatgaagacctgtgaaattttcaggactttgcatcaatcgaagatacagcaaattcagcatgctttcgctggacctgcttcaccattgactttctctgtgggagaaccatgcagctcagcagctgaagagccccacggttggatgtttgcgcgagctgacccaaacttttccaccttttgagctgctgctggagtggtatggtaggccattcatccgaacactgtttggctcgatgtgttgccctggttatttctgggaaggaaacagtcaactatacacattatatccaacatattcagcaatg

SEQ ID NO: 4905 - DNA, 510 bp, Zea mays
  Clone ID: 700431258_FLI
aggtgagaatacttatttgctcttatttagaacacaacctattacatgttaagcaaaagataatttatgcactatggctttacaactttgctccaaactcttaaatatattgcccaattcagagatgatcttttggaagacttgctcaaagaacctgatgagataaccataaagaggaagcagatacgtgaaaatctcaaggtccttcaacaagcttacaaagtacgttttcacagttctttaattcttccgttcagaagtcttggcaccacttggttccaacactagcttttcacctcacgtttcttctgcaccatgcagactttggacgagataccacttgacgcagaggcagtagagaggggtggatactccctggattctgatgcgattggtctgccaagggcccatgggctttcttcatccctccacggattcaacgatggaagctcaccatattcaaccccgaagcagtcaaggtcaaggaggtcaaaccattctggcgagcag

SEQ ID NO: 4906 - DNA, 909 bp, Zea mays
  Clone ID: 700431308_FLI
cacagctgcaaagcatattcgctttccgccaccgcccgatccccacaccgccacccgccgcctctaaccccgctgtcccgtcttgtgctctgacctcaccgctggtcagtgtcagaccgcatggaccccaccgaccagtcgccggaggaggtgtactccgtgtgggcccttccgccggagcccgtccgtgatcgtttccgccgcatcatggagggcctccgcgctgcatacggcggccccgcctttgagccgcacgttaccgtcgtcggtgacttccgcggacgccgctcggaagctgtcaaggtgctccgcgccgccgccgccagcgtccaaccctacactgctcgtgtcacgggggttgcccgtggcagcttcttctaccagtgcgtctacatccttctcgaccccaccgccgaggtggtgggagctagcgatcactgctgcgccaacttcggttacaatagaaaaactccatacatgccgcatgtcagcctcttatatggagaccttacagatgaggagaaggaggaggcaaggaagaaggcagaggagctggacaaggatatctatgtattagagtttgagatatctgagcttgcgctctatagaacagataccacagataaaaccttggagtcatgggaattggtggaggtgtgccatcttggctcttgagaagaagttattagtttcctctccatggtgattctgctgtaagttaactcttggaatttataatgctttgtagtgtcttgttgactactttctaagaaactggtacgtaccactggcataatactttcaatgggaataaggaatgatgtgttgtgctcttctgattgtagtaaggaataatatacaatctgtgattctctgttagttttccatgaaatatactttgtattattc

SEQ ID NO: 4907 - DNA, 346 bp, Zea mays
  Clone ID: 700431339_FLI
gtgccttgtgcgacagtcgccagcctgccccgcctgccggcccggccgcccgcctgcccgcggcactgagaagacgaagctccgggctccgggacgccgagcagaggggaaaggatggaggacaaggcgtccaacctagacgccgtgctcaaggaggccgtcgatctcgagaacataccgatcgaggaggtgttcgagaacctccgatgcagcccgcagggtctcaccacggagcaggcggagcagcgcctcgccatcttcgggcccaacaagctggaggagaagcaggagagcaagttcctcaagttcttgggcttcatgtggaacccgctgtcctgggtcatgg

SEQ ID NO: 4908 - DNA, 194 bp, Zea mays
  Clone ID: 700431372_FLI
cagagatggccgccctcgccgccgcctccacggccgccttcgccgcgaagccgcgcgcgcgcctctccgtggcctgctccgccgccaccggcgacagcagcagcgtgtcgctcgcgtcctccgtgaagacgttctccgccgcgctggcgctgtcgtcggtgctgctgtcctcggccgccacctcccctccgccc

SEQ ID NO: 4909 - DNA, 660 bp, Zea mays
  Clone ID: 700431616_FLI
aggaaacctcaccggccgtcctatacttttctctgacatgacgacaggacaaccactccaccaccgtgaactgatacaataacaataaagtcctttagtcccagtaaattagaataggctagaaactaaaatccaacagagagacgaaatcatggctttggtttgataataactgatacttttgcaggcacgaggtggtcggcgaggtggtggaggtcgggcccgaggtggccaagtacggcgtcggcgacgtggtaggcgtcggggtgatcgttgggtgctgccgcgagtgcagcccctgcaaggccaacgttgagcagtactgcaacaagaagatctggtcatacaacgacgtctacactgatggacggcccacgcagggtggattcgcctccaccatggtcgtcgaccagaagtttgtggtgaagatcccggcgggtctggctccggagcaagcggcgccgctgctgtgcgctggcgtgacggtgtacagcccgctgaagcactttgggctgacgaccccgggcctccgtggcggcatcctgggcctcggcggcgtgggccacatgggcgtgaaggtagccaaggccatgggccaccacgtgacggtgatcagctcgtcgtccaagaagcgcgcggaggcaatggaccacctcggcg

SEQ ID NO: 4910 - DNA, 143 bp, Zea mays
  Clone ID: 700431634_FLI
gcaatttccatttccaccacgaccactctcttcctcgcagcgcgtaccaacccgccgccgtctactgccactccgcctgctcatggcctcccctacgcaaggtgatgcccccctcgcggctccggctccggcggctgacgcta

SEQ ID NO: 4911 - DNA, 574 bp, Zea mays
  Clone ID: 700431674_FLI
tggacgggcaggtagccaggagctgagggcaccagcgagggggacttgcgccagatcaggttaggctatctccagcagcagcatctgaggagctggcaccagaggtggggacacttcgactgtgaggagcaggcaggggtcagcaccatgtaagagaaaggggctggcaatggagaccaacatgcaaagcacagatgatgccaatgagaggctgcaatggcgaaagaaaggaagcatcagaaaggatatgccgaggattaatttggaagagatggcttgactcacaacatgttggaaatgatacattgtcattggaggcgccaggaaatctgcaaagttagatgccgaggcgttccaactgttgatatgaagaatctctgttatcatcttgaggagaagtcaggtggaaaagtcattcaccgagtaggcggcgttgtttttctatatagaggaagacattatgatcctaagacccgtcctcgctatccactaatgctctggaaacctgcaactcctgtatatccaaaactcatcaaagaagctccagatgggtttacaaaagaagaagcggatg

SEQ ID NO: 4912 - DNA, 528 bp, Zea mays
  Clone ID: 700431705_FLI
cagggccgccgcggtcagcccggccgcagccttctccttgatggacgtggacgagggcgacgccgacgcccgcacggccgtcgtcgtcatcctcgccgccctcggatgcagctcggctgcgacggcgtcttcgtcggctccggcatcttcaagagcggcgaccccgcgcgccgcgcccgcgccatcgtccaggcggtcacccactacagcgaccccaccatcctcaccgacgtcagcgcggggctcggggaggccatggtcggcatcaacctcaacgacccaaaggtggagcgatacgccgccagatccgagtgaacactcccctttcctactccacttatatttatcagtatcatctccgctccgccggctctgccaacaaatttttttgcactgcatgcagtagcttaagtaataatggaatgagtgaatgaaatggtgagaaacgaagctatggcactatgcagaagctctgtaattttgtgccgttcttataaagtttgcataggctcccctggattatgaatc

SEQ ID NO: 4913 - DNA, 596 bp, Zea mays
  Clone ID: 700431719_FLI
gccctgcctctgctgcgagatggaggcccgggctcaccagaagatggaggaggtggccatggagcagctgccgtcctaggcacaagatggattgccccggccggcagcccatgcaatcgcattgcatctatctcatcgatctacttacgtgtctacaccacatgcgtgataataatctgcagattgacctggctactagctggtatattgtcaccgtgattgtattaagtttttgtttaacaaaagggtagaagtcgaagtccgagccggcgaaagaaaaaatactggagaaaaaaaaagagtgcacgaaggagacggaggcgagcgaacaggctggcctaatttcatttgtatgctaatgttacgtgtgtcaatgatgatggagtggttaaattattagtaattctcgatgcctaatttgtcagcctggatactgttattagcatgtagcttagctccaagggtcattgggtcagtacgacagtaccgtcaccttagagatgccaaatgagcggtttggcttggcacgacacctaagagaaaaaaaataccataaagaagctcgtggtcgtagccactacccaggtttattttct

SEQ ID NO: 4914 - DNA, 412 bp, Zea mays
  Clone ID: 700431757_FLI
ggcgctcttcgcgcgcttcgaccgcgacggggacggcgccgtggaccgcgacgagttccgtgccgggatgagggaggtcatgctcgccgtcgccagcggcctcggcgtgctccccgtgcagatggtggtcgaggaaggcagcctcctcaagtgggccgtcgacagggagctggccactaccatgccagcttgaccagctcggctccatgagctagctgcctgacagtgtgcactagcgctagtgtcacctctagctgaatgggagttttatcacctatgtatgtatgtaaccgtacgccgagggtgtcggtctaatttgggctcgtttaacgttttcgtgtttgtagacctgacatgagtatgtaacgtacgcactgaaccttttttatcagtccgaaaagtagcgttttac

SEQ ID NO: 4915 - DNA, 754 bp, Zea mays
  Clone ID: 700431774_FLI
tccgccccgagctctgcctccgccgccgccgcgccatgaggcctctcgacgagaaggagacgactcaggtattcgagaagctgttcaagttcacggggcccaacctgaagcacctcctggagcgccccgcagtggagggccccgacgcggagcccggccgctactgcctccggcttcaccgcaatcgcgtctactacgcctccgaggcgctcgtgcgccgcgccaccgccgtgtcccgaccgcgcctcgccggcgtggggacgcccatcggcaagttcacccaccacggcgcgttccaccttacggtccacgcgctcgacctcctcgctgcacacgcgcgccgccgcgtctggctcaaacccgacaccgagcgttcctttctctttggcaattccgtgcccaagtcttctctcgctcgcatcaccgagaacaccaaggccggggacggggtggtcgtcatgtccatggctgacgtccctctcgggttcggcattgcggcgaggtcggcgcaggattgcaggaaggccgacaccaacgccgtcgtcgtgctgcaccagtcggacgccggggagtacctccgcaaggaggaggagctcatgtgaggtgagcgcataggcttggctggttaggtcatattcatgagtgaattatggaagattgtgccttactgttgtgtgttccaaggcttggggcatatatatatgtactgaatgattaatcactggttatgagatgcgattatcgctgttgccag

SEQ ID NO: 4916 - DNA, 769 bp, Zea mays
  Clone ID: 700431780_FLI
gtgagatggcacaagccatggcgtccatgaccggcctctcgcagggcgttctgcccagcaggcgcgccgccaacagggccaggacggccgccgtcgtcagggcgtccgccgaggcgcaggcgcaggcgcaggcgggccgccgcgccgtgctcgggctggtggccactggcatcgtcggcggcgccttgtcgcaggcggtgcacgccgagaccgtcaagaccatcaagatcggagccccgccgccgccctccggtggactccccgggactctgaactctgaccaggcgagggacttcgacctccccttgaaggagcggttctacctgcagccgctgccgccggcggaggcggtggcgagggtgaagacgtcggcgcaggacatcatcaacctcaagccactcatcgacaagaaggcgtggccgtacgtccagaacgacctccgcctccgggcctcctacctgcgctacgacctcaagaccgtcatcgcttccaagcccaaggaggagaagcagagcctcaaggagctcaccggcaagctcttcagcaccatcgacgatcttgaccatgccgcaaagatcaagagcaccccggaggccgagaaatacttcgcagcaaccaaagatgcgctcggcgacgtcctcgccaagctagcctagatggaagctaatagatgggttaacgatggccacgtaatttcggacttgtgtttgttcatatggagccggcaaatgtaccgtttcctgttcatattatatcccaagttcttgac

SEQ ID NO: 4917 - DNA, 1015 bp, Zea mays
  Clone ID: 700431783_FLI
caggaacaagccccccggacccgcgcgccgtccgcccagggtccctctggaccaagatgaatacgacggcggctatgatgaccgggaggaggggaggttcgctgggggcacccgggccgccgccatgcccaagccaccggccggcttcgtgctggatgaccagggcaggtgcatcgccgcagcatccaagcgcatcgtcaccatcatcgacgacaccaacaaccgccccttggagtgcataatcaggagagtattccggagctcgcaggaccacgactgcatgcttctctgcccagttgacatgcctgtgcaggtcctcaagagcacaaatttcagtggctgggtagctgtcgatgacgaccaactcaagcaaatcattccatctgttgcctatgcccttgccagagtacatatgcactttgtagaaagcggattctgttatacagcaaggggtggcttctgctttcctgaagaggccattcaagagtttcatgattccggtgaaggtgtgccttttgaaggtgtagagatttgctgcttcaatttggatggtgcacactatatgatttatacaccagttgatcctcttctttttgtcgcaatcaaggataaggatggtgtgctacgcatcgctgaggatgatctgatggaagaccctgcagttctggatgcggtagatgaagagacagaatttacagctctagtggaggaggaggaggcccttcttgaaacggtacttggtgaaaggtgatggatgccagggagtacttgtacaggaagaggaagagagactcgtctgattgtagtagaatagaatggaatggaatggaatggagtgcatttgcaactgtaagcagctgcaacctgcaatacttggagtggagtgatggacaacgcagttgataagcaactgctgctgctaatctttgtctagtgtaggatagatagctcaatgggacgatcaaagctatttatgatgtgctcatgtgtttgaattaattaataaaattacccc

SEQ ID NO: 4918 - DNA, 189 bp, Zea mays
  Clone ID: 700431789_FLI
ggaggcgttgctgggattcctgatctattttcagttttggaatcccggctgcggcgagtggggtacatagggcgcgtttctctcttttttgattgactgatgagtggtaagcgttttgttgtgtcatcggcacacagacaaacatcattaatgtgtcaaaaaactaagcgaaaagacaaacccttctgt

SEQ ID NO: 4919 - DNA, 1015 bp, Zea mays
  Clone ID: 700431831_FLI
atagaatgcaacttccattacttataaaaattctgttgctgtgccaccaacttccattacctgtaataaactgggatcaagggcgcgtgaatgaacacacctctgtttgtcgcatcaatcgcaggttccaccagctgcctgaattcgaccagctaaagaagagctgccgcaaacgcctcgcaggccacaacgagcgccggaggaggccgccgcctggaccccttgcgtcacgatacggccgtcacgctgcgtcgctcggcggtaaccaaaagctggtttttaccctgtgatgtcgtctcggcgaccaaagttcccgtcttttttttgtaaccgctaatgttcatgtgcttggtccagaagagcccggcaggctcagaagcttcatgctggatttctcgtacccgagggtctcaagcgccatgaggggtgggtttccggcggtgaggcccggtggtgaaagggtgcctggcggtatccagtggcaagcgggcttggatcctcgtcaccaccaaggcgcggtcgcgggatacggcgcccactatgggagcgagggtggtagctcgtcgtcggcgaggccgccggtgttccctggcccggagctgcccccaggtggatgccttgcaggagtccccgcggactccagctgtgctctctctcttctgtcaactcagccatgggatgctgcccacagccacagccacagccacgctgcgccaacagcgggtttcgacggcggcagccctgtggcgccctccctcatggcggcgagtagctacatcgcgccgagcccctggaccgagaccgactcctggggccacgaaggcgggcggagcgtgcctcagctgccacctgacgacgtccccctcggcgaggtgcactccggctcgagcagccaccacggccagttctcaggtgagctcgagctcgccctgcagggaaacaggccagcgccagggtcggcggcaccgccagcgccgcgcaataatcagggctccgcgggcacgttcgaccaggc

SEQ ID NO: 4920 - DNA, 426 bp, Zea mays
  Clone ID: 700431848_FLI
gtaatccggggagagaacgttgttttaatcggagaattggatcgcgaaaaggatgaactccctgctcacatgacctgtgtttcagaagcagaaataagaaaggctgaaaaggcagaacgggaagccagagatctgaaagggacgatgaggaaacggatggagttcctggacttcgattaacaccgtcaccgcggccgttgccgctccccattgtggcggaatctttagtggcggcctgtgtgccatacatgcctggtgaccgcgccggcgcaccttggattgctggagggtttagcaaacagtttctttttaactagcagtgctgttttatactctcgtggccacagaccctttgggcgcctcctgatacagctttgtcaccactctgatcattgcctcgatgaatttatatacctgacgttttgg

SEQ ID NO: 4921 - DNA, 373 bp, Zea mays
  Clone ID: 700431958_FLI
ggaaaccgaaggcttaattctcagggtcaacaaagtcaagaaccaaaaataagttgtaatgctacatacgaaagcctgctcggaagctcgaagccgttcccacaaccgacccctcttggtgaaatggtggattttctcgtggtcagctgggagcaggaaggcttgtacggttagagctggttattggaaggtgccgttggttagagctggttattggaaggtgccgtttgtaatcacgttattattcgctgaaatgtacgcagcttgagtaggctgcagaagtctgtgtcgtgttgaatgtggattgcctcggagacaggaacaggatgacaccccttttaagcaaatgtataaaatattcgttgtttttatt

SEQ ID NO: 4922 - DNA, 182 bp, Zea mays
  Clone ID: 700432127_FLI
gacgacatggtcaaggtcatctcctggtacgacaacgagtggggctactcgcagagggtcgtcgacctcgctgacatctgcgccaaccagtggaagtgaagcgttgcattgtaatagcactttgtaactcctcaccctccacagggctttgggattcaccccgaaatgactcactttcggtg

SEQ ID NO: 4923 - DNA, 1809 bp, Zea mays
  Clone ID: 700432159_FLI
gccgtggcttactggcttccacccacagccttcgcacttccctccttcctcgcaaatggccgtcgccgtccccaacgctcccggccgcctcttccttctccaatccaccccgttcccgaaccctagcagctcggcatccgccgctcgagcccaatccttccgcgtaccacccctccgcctctcgctattccgacgcatggctgggcgctcgctgacggtgatcgcaggcgcctccggcggctccgaacgagatctcagcgcctccgcagtctccgtggaggccctggactccgtcgcctccgattctgacttagagacgaaggagcccagtgtgtcgacgatgctgacgagcttcgagaactcgttcgacaagtatggggctctgagcacaccgctgtaccagaccgccacctttaagcagccttcagctacagattatggaacttatgattacactagaagtggtaaccctactcgtgatgttctccagagcctcatggctaagcttgagaaagcagatcaagcattctgcttcaccagcgggatggcggcgttagctgcagtaacacacctccttcaggctggacaagaaatagttgctggtgaggacatatatggtggttctgatcgtctactctcgcaagttgtgccaagaaatggaatagttgtaaaacgagtagatacaacgaaaattagtgatgtggtgtctgcaattggaccctccactagactggtttggctcgaaagtcccacgaaccctcgtcagcaaattactgacattaagacaatctcagagatagcgcattctcatggtgctcttgttttggttgacaacagcatcatgtctccagtgctctcccgtcctatagaactgggagctgatatcgtgatgcactcggctaccaaatttatagcgggacatagtgatcttatggctggaattcttgcagtgaagggtgagagtttggctaaagaggtagggtttctgcaaaatgctgaagggtcgggtctggcaccttttgactgctggctttgcttgaggggaatcaaaaccatggctctgcgggtggagaaacaacaggctaatgcccagaagattgctgaattcctggcgtctcacccgagggtcaagcaagtaaactacgctgggcttcctgaccatcctgggcgagctttacactattcccaggcaaagggagcgggctctgttctcagttttctcaccggctcactggccctctcaaagcacgtcgtggagaccaccaagtacttcagcgtaacagtcagcttcgggagcgtgaagtccctcatcagcctgccgtgcttcatgtcccacgcatcaatccctgcctcggtccgcgaggagcgtggcctaaccgacgacctcgtccggatatcggtcggcatcgaggatgtcgaggacctcatcgccgatctggaccgcgcgctcagaactggcccggtgtagacatcgccgatccttaggtcatgtcaagctatcttttgatgattcattggttgactgcttgcgtgatgataataatgggaatgttgcttggatacgccgctgctacgccttctcgtactagtccgctaggatttgttcaccttgggtgaaaggctgcccgctgtcgagctgtcggcttgtgggatgtggccaccggcggcagcagtgccgcggtgagcaaacatgcctgtggtttcttccgtgcatgccctgaattctctatcgttagcacttgtacatcccaatttgtgtgtaggaaaacgcgaacgccacgcattttaacatatctatcactttttact

SEQ ID NO: 4924 - DNA, 449 bp, Zea mays
  Clone ID: 700432266_FLI
acgggcgccgtgctcgtgcagatcgtgccgtggggcaagatggactggatggccaccaacttctacggccagccggcgcgcgacatgcgctccggtacgtcgagtactacgtctcggaggaggagacgacgctcaaggacaagtacccaagggaccactacgtgttcaaggacccaatgcacatccacgcgcaggggtggccagcgatcgccgagatcatcatgaagcaggatgtcatggtcaacatgacaaggttcaaacccttcttgctccaggcgctcaacgagttgcaggactagctgcagctggagaagggtgattccctttgtatggctcgatacggacagttcggatagggcgataggccagcacagatgcggtacaggagggcctttcgtttgtttcccttttttatttgtcattttaaatcaactaaaattgatattttt

SEQ ID NO: 4925 - DNA, 666 bp, Zea mays
  Clone ID: 700432294_FLI
tcgacagaagcacggtatttcgccgcggttgtcccgttcctgaactccatgaggcttctgatatatggactccgtctctacactgatgaagctctggtaaaatcagtgacacgtgaaggaaaaccagagtaaatccgatgaactgaagatccgtatgatcgtttagcttgctgctctgacgataacgactttgcttctttacagggaattgctgagaggtccactctattatgtcctggtgctgctgttcagcgttttagtcttctggcgtgagtcccccatcgggatcgtctccttgtcgatgatgagcggtggcgatggttttgctgacattgttgggaggaggtatggctcagcgaagctgccattcaatcggaagaagagctgggccgggagcatctcgatgttcatttctggtttcctgctgtccgcgatgatgatgctctacttctcaagcctgggttacattgatgttatctgggaagaggcacttggtaagctggcgcttgttgcactagcagcgacagtagtggagtgcgttcctgtgaccgaagttgtagatgacaacatatctgttcctttggccaccatgctggtagcttttctcttgtttagctccaaccgcacaatagttaattaaaatactactagtgcattatttaagac

SEQ ID NO: 4926 - DNA, 1044 bp, Zea mays
  Clone ID: 700432333_FLI
ggctaagcagacacgaacgcaggtccggcggcaatgcaacgcgccgcgctcgtcgggtcccctctcgtacctgtgggtccccttgctcagcttgccgtgcggcgccgctgccgcttccatggtggtgttcgcgtgaggtcctcaaccgggaaggacgggaccgggactgggaccgggggcggaagcgagggcggcgacggcgccggtgccgcagcgtcttggctgagctcggcggtcggggagaaagtggacgagcttctgcgccgcgaagagaaccgggccctgctcgagggcgtcgaggacgccgagcgccgcgttgagcgcgcgcgcgccgcgctcgccgacatcgagcgccaggaggccgccgcacgcctcgcccgcgaggaggtccgccgcctcgagaagcggcgcgatgagattgcagagtcccagcgggaattgcttcaagcaagagaaatgattgatgaagctcagcgatccttgtcttctagtcttgacgaaggaagctttggagatatgtcaagtggtgatgttgatgaagataacgagagaatagaatccgtaaaagctgctgcagtttcctctgtcgtcggtgttctggctagtttgcccatatctttctatgaagttgaagatcttccacaactattccttcggtcatcaattgttttcataagttgtgctttgtttggagtcacattccggtacgctgttagaagagatctggataatatccaactaaaaactggggctcctgcagcatttgcttttgttagaggccttgctctgctggaatctggtagaaccttcgagctgagtactgataccttaatatcagttactcttgatgctgcagtcagtgtggttgagaacattttcatatttctgcctgctgctgttgcactggactactgttttaagatgagatttttgagtccctttcctagaagaaaacaatagcttctgtgaagaatatgtatgatcaataacaatcttgatagctcaaatggtcatatgtaacacaaatgatatcttagattcatt

SEQ ID NO: 4927 - DNA, 501 bp, Zea mays
  Clone ID: 700432359_FLI
gaagagttcatcgaaaacgcagggtcagttttcttgggccaatggaccccagagagcgtgggcgattatgcgagcgggacgaaccatgtccttccgacctatggttacgcaaggatgtacagcggtgtatcgctgaactctttcctcaaatacatcactgtccagtccctaacagaggaagggctgagaaagctggggccgtacgtcgcgaagatggccgaagtggaggggctagaggcgcacaagagagccgttacccttaggctgcaagaggttgaggccaatgttactgtctagctgctgtccatggtctattgtaatgttcagactcgatgtgggatgctggagttcttccctaggaacctaggggaactggactattgatgccttccaaacatgctctggaatgttagaaagaggcgtttcaactggtgcagctaataatgttcattggaccctgatttgtttcacgaataaacttgagcagaacttactgtgtat

SEQ ID NO: 4928 - DNA, 1173 bp, Zea mays
  Clone ID: 700432406_FLI
gattacttcaattcgcaaaagcttgttgaaacaaaagagactgagctgttagaggctaggcatgaagtcgaagatatgaaattgaaggtggattccatacaatttgctgttcgagagaaggatttggagcttctggaggcacaaagaaaacttgatgaagttaacagcgaagttgttgaacttcagcagctgataaatagcaaggaggatcaactggtccaagttagaactgaattacaggataaagagcaatgcatacaattaatgcaggatgaattggataagatgagattaggacgctcgcaagctgaatctgtggtgcaaaagatagtcgagcttactagcaatctcataggttctgtcaaaggcgaagaattcgacatttataacttgctggatgatgaaattttaagcacgagcacagcccttgagtacagtttgcataagcataaccaactggaggctgacatagacatgttaaaagaatccctgcgacagaaggacatggatctgactgctgcttataaagcgcttgacgccaaagatcgagagttgaaggcagtagttggaaggttagatgttagggataaggaactagaaaacttggaagagctatccatagacccctatggcaccaggaaactgtctagagttgctgatgaggcaaccgaagacaacattgctggtgaagcggagctccaaaagcatgagatggaatctgtggagatggaggcactagctgctagcactatgttgaagaagcttgcggatgtgactaagaaattcttgagaagtggtagaactgattctggtaccaatttagattcaaacgttagtgaaggtgcttctgaattagaaccacaaaggaaacttaatgtgattctcgaggctaaaaaggagattgtcgggctattttctttgacagaagagctcgtcactggtgctcaagtgaaggatgacgaggaaccatagcatcataagttcataactgaacatataactgcatcatgaatgttatgcatgtcaactggaatgacgcagctgaaattgttaccatcgtttcctttccttttggggctcaggatttctttatgttcttttggttcatggatggcatcgcaaaatgaaaaaaaaagattgtttagattttggttaaaaggatgatgattgtgc

SEQ ID NO: 4929 - DNA, 745 bp, Zea mays
  Clone ID: 700432432_FLI
gcctggaggtgccactcaccatgggaatgatcaaggccgtcattctcgaccttttcggtgccggcagcgagacgtctgcaagtacactccaatgggccatgtcggagctcgtaagcaacccaagagtgatggaaagggcacaggccgaggtacgtgagaagctccaagggaagccaacggtgaccgaagatgacttggtcgacatgaggtacatgaagctcatcatcaaagagaccctaaggatgcatccggtggtgccattgcttctcccaagggagtgccgagagccatgcagggtgatggggtacgacgtgcccaagggaactaccgtgttcgtgaatgtctgggcgatcagcagggatcccaagcactgggaggacgctgcgacgtttagaccggaacgattcgaggccgcgggtacggttgattttaagggcacggactttgaatacacgccgtttggggcgggccggaggatgtgccccggcatggcgtttgcgcaggcaagcatggagctcgtgcttgcagcgctcctgtaccatttcgactggaagctgcctggtgggatgctgccgagtgaattggacatggcggaggagatgggcatcactgcccgaaggaagcgcgacctttacctgcatccagtcgttgtcagtgtgccaccacatgtctcataaaccatagctgttctacttgctattttaccgtagctatatgctttattgatgcagcaaagttcactagt

SEQ ID NO: 4930 - DNA, 536 bp, Zea mays
  Clone ID: 700432435_FLI
gagagttcatttaggtttctttgaaaaccgggcttgttctgccgagagcgcggcggaggcgatggcgagcggagggaagggactcaacgcgactggggagttcttccggcggagggacgagtggaggaggcaccctatggcggggaaccagctgcgccacgccacacccgggctcggcatcgccatcgtcgccttcgggatctacctcgtcggcgaggccgcctacaaccgcctctaccgcccctccggcgacaaccaccactagatcgccggcaggatccgtgactcggtcaagaagctggagccaactttaccaagcactggtgctgttgatgtttttacagttttgagctcataaggtcagccatgaccatattgtaatctgtgaccaggtagacttgcccactggtccgtccaactattgtcttgggaccctgtgttaatccttgctatatggatctgacagtgctcatgtaattcaagaatcctggactatcttttatgtgcttatttgagtttgcaagtgcgtttccgtt

SEQ ID NO: 4931 - DNA, 1524 bp, Zea mays
  Clone ID: 700432516_FLI
ccaagcctcagcccctctccccgctcgtgtctccaagccgcaacggcgcagctcctcttcttggacgccgaaaccgggcaccgtcgtagcccctgtctccgctcgtctccgggaccctgcttggccctctccggcgaacctctgtgcccctgctccgccgccagttcgacgccgcctgctccagatcgacgttgtcgtcctccgtcctttgtccgcctgctccagatcgacgacgcctgctccagatcaaatccggcctccgtcctctgtgcccctgccctgccgctcccagatcgacgccctaccgctccaggtcgagctgctgctccagatcgacgcccaactgctccagatcgagctgcttgtcccagatcgacgctaaggtaattagttcagtgctttcttttgtggtaatctgaacattgtgactggtaatttttttgtcaaagaagtagttgcaatttagaaggttggaagtctccaatttttctgtcactgaacagccaagaataattagttcaacctatcatgcatagatggataacatgccaaagaacaggaaaccaaatgctcaatgggatctcagtgctgctagaatttttaatgagatatgtgtggaataagtattgacaaataatagaccacaaggttgtttgaacaacaaagggtacgccaatcttgtagccaagtttaatgaatggtcaggcagaaattacacccgtgttcaaatgaaaacccgttgggatgcactgaaatctgactttacaacatggaaaacactactccttagtgtgtctgggttaggaagagatccaaggattggttctattacagctagtgacgaatggtgggaagaaaagatagaggtatgcaaccttggctttgtttctattgtatgaaatggttatgttgcttgttataactattagagttgttgtgtttcaggccatgccagcatgcaaaaagtttaggcttgcagcattggagaatgaagatcttgaaataatgtttaatggggtgtcctgcactaatgcatatgctatggctccaggggcaaaagaaggattgcctgccaatgatagtgatgatgtggaggaggtgtctccaagtgttgaggacaagcaagctagaaaaagaggtgttgatcacaaatccccaattaaaaaatcaaagaagaattttagagatatgcagttcaagcgttttgtggattcatttgtggaaaaagctagttcaagcaagtcttccgcaacatcttcgcctaatgatcatgttaggcaagagataacagaaatgatggaatcagttatctcagctgggatagttgaaggaagtgatgacatttctatgccactcaacttctcatcaagaaggagtatcgagatgtgtttctcacactaaagattccagaagggaagcttgcatggctcaagagaacttgggaggagaggaaaaaacataagctagttatatgtattcatgctgtatcttgaacttgattagtaatgctatttgttcatgttg

SEQ ID NO: 4932 - DNA, 783 bp, Zea mays
  Clone ID: 700432527_FLI
gtgcgccgtcagcaacaaagtcttgatccaaacaaaaagaagaagggtagacaagttctgctggaacctgagattgaaattccactcagggttgaacctcccacggtatcaaatgatatccaaaatcatttaagaacaacaaatcagtttcttgcaccaagccatatgatgcaggcaccttatgttgcacagcagtttggtcttggttctttacaaggattcccaggcatgtcaccatttgggcagattcaagaaccaacacctcttcagcagccccatttacaaccaccatcgtttcatagtggtcctcaaattacacaggctccacctccagacattcaatcactacagtttcttagcagcaatcctcagcttggccaccagaccacggatcaaggccagtacaccattccagtctgggatttcctgtgacatacagtatcctcctgtttggttgctagcagcttggtgcctgactcgcccagcatcagttgaaactaacgattcttacttcctcacgcatctccacgcatgcaagtcaacgagggtaaaaaagcctagcttgcacctgcgcgcacatgcgtccactatatttttacttccccaagcacgtgcctgggcgcggtcaacgcatgcacggggccaggcgcgggagcagagccaaccaatcatgcagtatgtgatgtatggcgaagtagcaatgtagttgtaaattatgtaatgacactgcccctccccgaagggttaatgtcaatgaaatcctttagcatggtgcattggatt

SEQ ID NO: 4933 - DNA, 378 bp, Zea mays
  Clone ID: 700432573_FLI
tgcagatcgctgccattgtcctgaagatattgagatgatctacaaaataatccagcacatggctgctaacgacagagcacttatagcagaaggcagctgcggctctcctcgcagtgttaaggtgtacctcggtgaatgcagcgtggacgaagatatgcaggccgcatagattctgggtctggatccgtgtaacattgttggaataaatcagaagcaacacaatagcgatgctatgcatgggtgtcgctgatcctgatgtcccattagtttcttgtttggtggtgcttgcacacgattgccggaacgatgtaattttagaatttgattttttttgggccccttaaaatataaaatacaaagatagaaggtggtgtccgc

SEQ ID NO: 4934 - DNA, 1168 bp, Zea mays
  Clone ID: 700432587_FLI
ctagactgcagtctgcagtggccactggatgagaaaactaagatgagttccttgcagacccaacatgcagcgagtgaagacgcatccgtttgatcaaagcagagttcaattctctgctgtctttatattaagtcttgctgccatgatgctgagacttgttacttccgagagcagtctttgtgtttgatatccttcctgttgggtctgcaaaagtccagcctttgggtgatgctagtttcagagagtacagcaattccttcatcgttgtcatgctcacttgagttggatccactactgagggatcttgttgagaagaaactaagcctgaagaggaatgtgactgcaatggctaccgagctcagggatgccaggaacaggcttgcttcacaggaactgttgctggctcaggagatagaagccagaaaggttgctgagctaaagacgagaaatttggaggatgaggtgagcaagctgcagaaatgcttaggggacaaagatgagcagttgcgtgcatcgctatgtagcgcagatcagttccgcaatgagttggatggtttcagatcacaacttccagtgatgacaacgctgctgcactgctcatatttgttaggaaagctgaatgataggaacaattcgatgagtgagggtgaatttccggtgaacaatttagcagaacagctcaatcatcttgaaaagtgcctcgagagcagggatcccacactaagacaattcaaagattgttactctttgagaaccgagtctgacatcacggatgcctttgccagagttgcatttgataacgatgatggtgtggccaagccgggagaggatataagggcgctatctgctcactgggtaaacagaagcaaggaactggaatcacagttggatcagcatcggaggacagcccaggagctgaagaggagggtaatgagacttgaactctgcatcctagaaccatatggaaactccataggctaagaaatcagatggccgtgcagcagcccacttgtagtggctcaggcgagaagcgcaatctctgggagagctcagccttcaagctcatagcatccgtgtcaatgttggtcctatttacacttgcaaaccgatgagctctcacggtctcgcttttgcgtacagaaaatataaacgttcatgtttgaatgtt

SEQ ID NO: 4935 - DNA, 661 bp, Zea mays
  Clone ID: 700432654_FLI
ccatgcacgccacgcaaaacgaccgcctgcctctccggttggtggttcaggtcctcttcttccagcagctgagggccggctcgggcaaagaactcgccctggttgacaacggagaacacgcttgcacacggcctacgcaggatcagtgcgaaccctgcgaaaggcggataccgaagcatccagagtcactagataagcaggtgacgagcctgagcgcgagggagagccgccagcaccaccggaccagcgacagcgagcacaggggcggcggcaggaacagcttcaaagaccagctcgggggcctcctgccgcagtcgcggtccaggaggatcttcgacaagctgtggagcagcaaggggcaaggcgagcatggcggcaaaggctcggagacgtctggcagctcccagagcccaccgttgtcagcaaagcctgcagaagtgaagccctcccctcttcccgctgttaggaacaggaggtactctgtttcatagttttttttggctctcctagtttagagctctgggttaggttgctgtacagaaggaagctaatcactgctgcccatcctttttgtaagcagatcaacctgctgttctcaatgtgatcatccatgctgtagcttttactctagtgtaattccaactgggagcagagattcgcc

SEQ ID NO: 4936 - DNA, 1622 bp, Zea mays
  Clone ID: 700432687_FLI
tgctgatattgaggcaagcttttctccaggagtgaaaggatcaggagtcaatggcatagtttatgcttctgaacctttgaatgcctgcagcccgttaacaatcaaggcagtcaagggcccgccatctccctttgcattaattgtaagaggcggatgcacgtttgatgagaaagtgaaaaatgcacaggatgctggattcaaagctgcaattgtgtatgacaatgaaaatagtggggtcctggtttcaaaattgttgcagtggctggaagctcaagtggcatacacatatacgctgttttcgtttcgaaggcctcaggagaggtgttgaagaaatcttcaggacatactgatgtagaggtgtggatactacctacattcgacaactcagcctggtcgatcatggcaatctcattcatatcgctgcttgccatgtctgctgtattagctacgtgtttctttgtgagaaggcatcgaataaggagagaccaccctagaatcccagaagctagagagttccatggaatgagcagtcagttagttaaggctatgccaagtcttattttcacgaaagtgcaagaagataactgcacatcatcgatgtgtgccatttgtttggaagactacagtgtcggagaaaagctcagagtgctgccttgtcgtcacaagttccatgcagcttgtgtggacttgtggctaacttcttggagaacattctgccctgtatgcaagcgagacgcgacgagtggagtatcagaacttcccgccacagaggctacccccttgctttcttctgctgtccggttaccttctcagccatcttcattcaggtcgagcgtggcagcctccccacccaggccgataagccggcatccttcatcgcactcggtttctcgtgcttactctgtctctagtaccccccactcccccaaccccttcagatctcacacaaacttacctggggtcatccatgcaagcagaagcaccacagaccttgcaaacatgtcgtctccccaccctcgcatctcacacttgtcgtcgtcgacacactccctcgtcggcagccacctatctccaccaatcagcataaggtatccattgccccattctcggcatgaatcgcccagtccacacgtcagttcgccctacatctcaaattctggctacggttcttcaagctactactaccttggcggctcgagccagcacgggtcgtacctgcggcggtgtggagagtcagggccaagcctgtctaccatggtccctcggtcatcgcagcagcagttccagtcagaggcaaacgtggccgcaggcgcgtcgtctgcccagtcctcacggcagtcctacctgcgacgctgtggcgattcagacgccagcttgtctgacatggcgtcagcccagtcgttgccggggtgctgaggcagatgtgcactacaagatgcggcttgacctgtgcatacaatgaggcttgcagcgtcacataggtggggaacatgtatagcatagactttatgatcctgttcttgtctgtgagtggtatatggttctttttttgtgccttttattgtgtgcatctgacgtgacaggagcctgttgaagttgattctgttaacattttagtccgc

SEQ ID NO: 4937 - DNA, 450 bp, Zea mays
  Clone ID: 700432739_FLI
gtggttcctgagctgaagacagactcgttcgactgggcctgcagtgacgagggtccggcaaggcacagcctcattgtgaggggtgtcatcccaatgctgagtgccgccactgccaaggcctttgacaacgaagccactgacgaagctattggttttgccattgaaaatgcgaagacgatggggctatgcaacaccggtcaatccgttgtggccctgcaccgcatcgggatttcatccgtcatcaagcttcttactgtgaagtaggggtccaagggtgagggacaccattttgcttggtgaatttttgtgaggctgcttacgcacatcagcgtatccacagcttttctgttgccaaagatacagactttgcgttctggtacaccttggtgttacaaggttgtgggaatttgtcgtttagatattagcgatttaaacagtttatcaactgct

SEQ ID NO: 4938 - DNA, 459 bp, Zea mays
  Clone ID: 700432746_FLI
cgtctccttcctcggcccactggctgagcttggtagggagcgtctggctccagaccatcaacggccccaacgccgacttcgccgtctactcgtcgcagctcaaggagaccaagggcatctcgcaggtgcagctcaacttcctcgccttcgcctccgacgccggcaagctcttcggctggctcgcgggtgtggccgcgctgcgcctcccgctctgggtggtggcgctgaccggggccacgttcggcctcgtcgggtacggcgtccagttcctgttcctcgacagggccggcctcgcgtactggcacatgttcgcgctcacctccctcgccggcaacggcatctgctgggtcaacaccgtgtgctacctcctctgcatcaacaacttccctgcccacagccgcgtcgcggtcagcctggccacgagctacccagggccgttccttaggggttgccgagggt

SEQ ID NO: 4939 - DNA, 450 bp, Zea mays
  Clone ID: 700432771_FLI
ccaacacaccgccgccaccctcccccgggcatgggggtctcccctccgcccgcgttcgcgccgccacgtccctccacctcatccgccgccaacccgctccctttcatgtcgttcgatgtctcagctgccgcggcctcctcctcctctgcgccgcccctcttcgcggggcctatcggtgtcggcggttccggcgcatcctttgaggacgagccgccgctcctcgaggagctcggtatcaacacgcgccagatctggcggaagacgatctccatcctccacccattccgctccaccgacccctccctccacgccgacgccgacctatcgggcccgttcctcttcctcctctcctttggactcttccagctcctcgcggggaagttccacttcgggatcgtgctcggttgggtcaccgtggcgtccctcttcctctacttcgtcttttccatg

SEQ ID NO: 4940 - DNA, 1112 bp, Zea mays
  Clone ID: 700432792_FLI
gttagcggctcggggtcgggggttgggccaatcccttccccggcagacggcagtcgcatcgcatcccctccgcctcgttccttgctcggctcgccccaacttcgctgccggccgccgccgccgcattcccctcggctactcgctcctcgtcgctccccggtgatgtctggcggtaacgcatggtcgccactgccttcgcacggatttggatccgagtctagcggcatggcgaatcgcgccggcgagcctgtggcgaggaccaacagcgatggcggcggcggcggcagcaaggactcgggcagcttcgagtgcaacatctgcctggacctggcgcaggaccccgtggtcaccctatgcggccacctcttctgctggccctgcctctacgagtggctccacgttcacgcgcactctcaggagtgccccgtctgcaaggccgtcgtcgaggagggaaaactcgtccccctctacggccgtggtggcagctccgccgtaccccgtgcaaggtcggtggccggtgtggaaatcccgagcaggccgaccgggcagcggccctccactgccccgcagccggaccacaataaccattacccgcaccagaacccctggttcaatggtgctggcgccccccctgtggctaatggtaggtgggggagttacactttctcggccgccatcggagggctgttcccgttgctgagcttccaggtgcacggattcccgcaggcgactgcctatgggcctgctgcagggtttccttatgggtacggccattctttccatgggtggcatggccatggcttcccgcgccaggcaccacaaggccagcaggtcgatgcgtacttgaaggtgctgctgctggcagttggtgtgcttgtaattgccagcctaatcgcattttagattatgtatggctggcgatgtcgctgatccttgttggtgtgtaccgtagttctagcatcattgcatcttagatggctcccaaagtttgatgtcaatgtgtagagtattgtggatgcttcggctagtaatagtacttgtgataattggtggcagctgttattcattgtgtaaagttgctatcgaaaattataggtgcatctgttgtgttc

SEQ ID NO: 4941 - DNA, 595 bp, Zea mays
  Clone ID: 700432807_FLI
ggacgccgtcgacctgttcgtcgagcggtaccgcgggatgggcatcgacgccgtcgccgggattgaggccaggggcttcgtgttcggcccggcgatcgcgctggctattggcgctaagttcatacctctgcgcaagccaaggaagctcccaggtgaggtgatctccgagaagtacgttctcgagtacgggactgattgcctggagatgcgtgtcggggccatcgagcgatccggcgagcgggtgctggtcatcgacgacctggttgcgaccggagggacactctgtgctgcgatcaggcttctagaacgtgctggagccgatgtggtcgagtgcgcgtgtgtcattgggctcccgaaattcaaggtaccgcgttgctggattcacaactaatctgaactactgatatgcaaaaccagctgtttattattaaaatctagctgacatactgccatatactactgtactagcctgtattacgtattatgataacgttaggttccatatgctgtactagcctgtactagacatgctcggatgagattgtaaaatctgggtttcagatataaaaaacaatctatatatgttgtttcgtgg

SEQ ID NO: 4942 - DNA, 312 bp, Zea mays
  Clone ID: 700432894_FLI
gataaagcctcactctcttcccacctctctctcccctcccctcctcagtcgtcacacacactcagactcagccagtccgctgcctccgcgctcccccaaaacccaccaccgccacgccggaatcctagccttcgccaaccagtcgccatgagagagatcctccacatccagggcgggcagtgcggtaaccagatcggggccaagttctgggaggtgatatgcgacgagcacggcatcgatcacaccggaaagtacgccggcgactccgacctccagctggagcgcatcaacgtctactacaacgaggccagc

SEQ ID NO: 4943 - DNA, 655 bp, Zea mays
  Clone ID: 700432919_FLI
gcccgccgacgacaaccgggggctcctgctgctcatcgtcgtcacgcccgccatcggctgggtgctcttcaacatcctccagccggcgctcaaccagatcaaccgcatgaagtccgactgagctgctagctggcaacaacaccggggacggcggagtgtgcgtatcagcggctggacggttgtaatttatagcgtgaagcatggttggtctacgtgccttgttttttccatcttcgaatcttgagcaaatgcagtacatgtacagctccctccctctcgtctcaatctgttacatacatatacacacataccgtatcctctgtggtggttggtcaacgcaaacgctcctcgacgctggacaactcgccggcgagcgctccctgaacgccggcgccggcgtgaaccgtgatagacaagatgcgcgtcgtcagcgccgcgcgcccctcaccgtcgtcatcggactcgcccctctccggcgttgcgcgcgcccagctcgcagcagaggcactcacgagttgcgtgtagcctctgtgcttctcctccccgtcgcgtcatgcgcatgcgcttcatgttcgtctaaacagagtgcattgctatatggaacatattaaacagttatttttttccgtatgcttaattattctagcttttatct

SEQ ID NO: 4944 - DNA, 588 bp, Zea mays
  Clone ID: 700432977_FLI
ctgcatttttcaagaacaagcttgcactctggggatgcaagggcaagcaaggtttcttcaagggatgctgctgccaaggaaggggatggcaagagaccttgcagtgatgagctggctaatcaaaagactacaaagagaaatgagccagccaagaagaggggtgtgggtcggcctccaaagagtgggcagaggattgctggggcacaggaaaatagccccatcaaaggcaggaaaagtagcgctggggcacaggtagatagccccagcaaaggcaggaagaggagtgtggaagcacatgatgatagctccagcaaagggggcaagaggagccggcggtgaagctaccatcagctcaatgccggtgaaactgtgtacagcttaaccatatatcataggctgttcccttccggtttgtttacctgacaaaaaaaagttattgtcccagtattcaaactgatgtaacaggaagggttagttgtttctgatgttgttttgtaaggagtaaggacaattagaagggaaccctcatttttatattgagattatccgagttaggctatacatatctgaccatgtaatgcttatagt

SEQ ID NO: 4945 - DNA, 550 bp, Zea mays
  Clone ID: 700432990_FLI
gcggatgtattcagctttgccattgttctttgggagctggcaacttcaatggtcccatatgacaacatgacacccttgcaagctgcattaggagtaagacagggattgcgcttggacattccgggcagcgtgcacccaagattgaccaagctgattcgacagtgctggaacgaagatcctgatgcgcgtctgacttttgcagagattactaaagaactccaagatagtctacaccatatcgaggcacccaagggagccagccgtcgatctagagcaaagatgcagaagaaataagagggcaaggtttcctacttttttttgggtgtgttacactagttgcagtatgagtgtttaaggtgtatgtcgcggttataaatattttaaggccaaggaagtgttaaaaaccgaccttagctcagttggtagagcggaggactgtagtggattgcagatgaaatccttaggtcgctggttcgaatccggcaggtcggagttgtttttaaaataacatttttttgctcaacaatgttaggctactcgcctactcacc

SEQ ID NO: 4946 - DNA, 354 bp, Zea mays
  Clone ID: 700433005_FLI
ccggccaagaagagccgccgcggcccgcgctcccgcagctcgcagtaccgcggcgtcaccttctaccgccgcaccggccgctgggagtcccacatctgggattgcgggaagcaggtgtacttaggtggattcgacactgctcatgccgctgcaagggcgtacgaccgagcggcgatcaagttccgcggcgtcgacgccgacataaacttcaacctcagcgactacgacgacgatatgaagcagatgaagagcctgtccaaggaggagttcgttcacgccctgcggcggcagagcaccggcttctcccgcggcagctccaagtacaggggcgtcaccctgcacaagtgcggccgc

SEQ ID NO: 4947 - DNA, 1077 bp, Zea mays
  Clone ID: 700433017_FLI
gccgtcgccgcctcctctccccagcacccggagctcgcccgaccgccgctcaccatgatcatccccaagaagaaccgcaatgagatctgcaagtacctcttcaagggtatgtggttcttggtccactagactcgcagtagggtaacctgggctgattggttgtttcaccttctaggaggtgacaggtcttcaaattattttcgtattactaggagggagtgctcgtgtattattttgagttcacttttttggtccaatttcagcatctcacaaacttacgatctgatatataggcttgacacagcgagcattgtcaaatatttttgtgctccaaatttatttgccccctaaactatggattccttgttatacattcatctgcgttatgttcatgcgatttctgttagtttgatgtatttgctgctgcagagggcgtgctgtatgccaagaaggactacaacctggcgaagcacccgcagatcgatgtgcccaacctccaggtgatcaagctcatgcagagctttaagtccaaggagtatgttagggagaccttctcctggcagtactactactggtatctcaccaacgatggcattgagcacctacgcaactacctgaacctcccgtctgagatcgtgcctgccacgctcaagaagtctgccaagccacctggccgcccatttggctctggccctcctggtgaccgcccaaggggcccaggtcgttttgacggcgacaggccaaggtttggtgacagggatgggtaccgtggtggtcctcgtggtgctcctggtgactttggtggcgataagagtggagctcctgctgagttccagccatcattcaggaggcctggctttgggcgtggtggcggcagcggcttcggcgcaggcccaacctcttcttccatggagtgaagttgcccttggtttggacatggtgtttcccttcgcatgtggcctttagttttgaaggacagttattatgtactagtaatattactcggatcggccagtgctgacatatgcaaaaaaatgttctgtcgttatacattggttccagtattattgtcttcgc

SEQ ID NO: 4948 - DNA, 412 bp, Zea mays
  Clone ID: 700433023_FLI
acctaccgtacaagcaagagctcgtcgggctgttcgccaacgtcagtgggctgcgccggagctaccacccgttctaaaacgcgatctgtccatgccttccgacctccgtcagtgggccaaaaagtaaaaaaagatgatatcttgctcgtttttctgtggataatactgcctatagtactgtgcactgtttttttacagtacggcggaagcagtagatctgcgtattttctctctaagttatcggcttggataaaatagggttttagttttaattaaaaaaatagcagaacctcagcaaggggaaaagaggtaacgtagcgtgtgtactgctgctagtctgctactcatttgttcacaacttcacatacttgacttcacttgagaaaaataacctgaggtttccttaatatac

SEQ ID NO: 4949 - DNA, 785 bp, Zea mays
  Clone ID: 700433052_FLI
gccttctgaagaacaaaaagaggggataagagatttgaaaataaggcatgcagaacaagataaaaaggaatgcttggggaattcatcaatagatggaaataaaacaagcatggagcatgctcatatatcatcagtttcctgcgaggatggtggaggtgcactatgggatatttttaggagggaggatgttggaaagctgaaagagtacctcacaaaacattccaaagaatttcgccatatgtactgttgtccagttgaaaagatatttaaccctgtacatgatgaaacattttatctgaccaacaaacacaagagaaagctcaaggaggagtatggaatcgagccatggacctttgtgcaaagacttggagatgcggttttcatacctgctgggtgtcctcatcaagtacggaatctaaagtcttgcaccaagatagctctggattttgtatcaccagagaacattcagcaatgtctcagcttaaccgaggatttccggagacttccagtgggccacagggcaaaagaagataaactagaggtgaagaagatgatcgtctatgccgttgagcatgctttggcgattctgaaagagccttgcacaccccgcgagtccgcctgaacaagctggcatcatatctgggtttctgctagtcaacgagggaaactagagaacatgatgcgatgttgtgcgacagtagacgtggggtagcgctagttgctttgcttgtcggcacaaataataatcttggaaatattactaataagggctcggttaggaaggg

SEQ ID NO: 4950 - DNA, 931 bp, Zea mays
  Clone ID: 700433068_FLI
gaaaagcaaggcaaagcaaactgcagacccattggtgggtgcaatgggaggtagcggaacgctgatctcggtttaccccgaggagctcaccttcttgtttgagctggagaagccgtgctattgcaatctcaaggtggtgaacaacagcgagcatcatgtcgcattcaaggtcaaaacaacatcgccgaggaagtatttcgtccggccgaacgcgagcatcgtccagccatgggattcttgcacaataacgattacgctgcaggcacagaaagattacccaccagacatgcaatgcaaggataaattcttgattcagagcacgaaggtggccgccagtaccgacatggatgagatcccccctgatacgttcaacaaggaagctgataaggtaatcgaggaaatgaagctcaaggttgtctacacattacctagctgcggaggttcagatgactctagcgtatcatctttaggaagccggagcttcaaagcagcgtctgacgatctgatgatgctgaagaatgcaagccttgaagagatccagacaattcagcggttgaaagaagaaagagacaacatgcttcagcaaaatcagcaaatgcaacgtgaattggatgtgcttcggaggcgcaggagccgcaaaggcgatgcaggtttctccctgacgttcgccgcgtttgctgggctaataggtctcatggtggggctcctgatgagcctcatcttctcgtccgcgccggctgatgcgtagtaagatgcaagaaaaggttgcagccaacggaagcgttgttgagttgagaccgacgtgggggaaaaggctcgctcgggggaagaagatgaaatttctgctctagtctccatttttctttcttttgctgtttgcatcctagttattattatacgaaatggcaacggggtgcagatctttccttcc

SEQ ID NO: 4951 - DNA, 544 bp, Zea mays
  Clone ID: 700433102_FLI
aacgaaggcggctacaatggactgacgacacagaccgaaggcctctcgctgaacccgcggagcagcgagaacgagaggagcgcggcacggccggcagcgtcccgccctgccaaacctgaggactcgctcttcaaggacctggtcgacttcgcaaagaccaagccttcgtccccgtcgaaaccggccaacagccgcaggacccgctagaacgactcgtgcgatgcatggatggacattgggtcgttcggatattcatttcacaggttagcggcttttagatggtaccatgaaataaggccgtctggagactggttttcattgcatatttgcattgcatgggaaattgttttggttgcgtttagagtggcagatgtcagaaacgttgcttgctcataatcctgggtgtgtgatgtctagttagctgctcctaaatttctgtgtcgttggcttccgattctcattttctttttctttcacttagctgtgtatatatatgttacccgattcgacagcaaatattcatagttgagtttgtgacttgagg

SEQ ID NO: 4952 - DNA, 1253 bp, Zea mays
  Clone ID: 700433118_FLI
ctacttggaagcggtcccttgggtcggggaagaagaggagaatgtggtctcgtctgtccggaacctgcagagcgagagctatggcgtcagtcctgtgctgaagagggtagcaccatctgatcgaacaaccccaccaaacgatacgttttcacatatcatcgaactggtcttgagaagcagcgaggacagggggcggcgcgagatgaaatctctggtgcagaagcttctgaaggagagtagcactggctgcatgagtgggtcttccgacctgtgttctgcggtcctctacagatcatgccggaactgcctggattccttactaatcctgtttcagcaagcaaccgacagtgatttcgctgagcaggctcttaataccaaagaaccagttttccgacaagttgctctagaagcagataacctgctctggttagctgagatcttggctgacaggaatgccgctgacgagttcgcggtcatatgggctagccaacgtgagctggctgggctgcactctaggttgccagtcaagtcgcgccaccttgtcagctgtgtcacggcgaggctgttcgtgggcatcgggaaaggggagatgcttccttcgaaggacacgaggcggcttctcttggacgtctggttgcagcctctcatggatgactacaactggttgcagcacggctgcaggtcgttcgaccggaaagtggtggaggaaggtgttgggcggaccatcctgacgctccctttggaggatcagcagacgatcctgctctcgtggcttgggagcttcctgaaggttggggacagctgccccaatctccagaaggcctttgaggtttggtggaggagaactttcgtaaggccctatgctgagcagcaaggtaatcgatcgcaatcaggtcggagttgagatgtcaattggttgcagaagaagatagtcttgtttcctagtgtagtatatttgatgagaagttagggtggcggtttcttcttgcgtggtagcccgcgtgggagatccccagtatgtggaggaaatgcggttagtactcttgacctgcgtgaggcttgaggaagttcgcgttgtgcttgtgatgcttcgtatgtatgtcaagatctctgaattctgggtgcagaatttgtatcgtcaggcatctgttttgatgctctgttctgcttctcacaacgttgcacgatgttaattaaggatctgttatgtaaaagaactcgacgccttcaatgcaactgtaaagattttgcag

SEQ ID NO: 4953 - DNA, 386 bp, Zea mays
  Clone ID: 700433155_FLI
cggcgccgtctccttctggcccctcaccgtctacttccccgtcgagatgtacatcaagcagcgccgcgtgccccgcggcagcaccaagtgggtctgcctccagacgctcagcgtcgcgtgcctggtcgtctccatcgccgccgccgccggctccatcgccgacgtcatcgaggcgctcaaggtttaccacccgttcagcagttaattcttgctgctgtggatgtgcagtgggggggcctggactggcctgggtttggacgtatgtgcatgcagcattcattgcgttgcgttcaactgtggtcaacaagggagggagacggatgcagatgcagtgtgagatgtttgcatggaggcccctatagaaacaagtgaaatgtttaggcgcc

SEQ ID NO: 4954 - DNA, 1036 bp, Zea mays
  Clone ID: 700433170_FLI
gtaggtggaggctgccgtcgcaacaagcgttcgtccaagtcctcatcctcctctgctgggtcttcctcctcaaagatgtctccctcaggaaggctactgggtggtccatcagctacaccgtccaccaccccaggcactaccggtgcgatcattactccgggtctcagctctttctctcaccacttgccgttcttgggctccatgcacccgtcagggcccaacctaggtctagctttctccgccggactgccgctagtcggcatgcagcacctggacacggtggatcagtttccggtggcaagcggcggcggcaccaccataggtgcatctctagagcagtggagagtgcgacagcagcagcagcagttcccattcatgactgggggaatactggatctgtcgcagccgccgacgtaccaattcggtttggaagctaaccgaggaggcagcggctcagctgcggtggcgttcaattcaggacagaccacgacgaccagtgctaccacgggaaggcaggaagggtcatcaaagaagatgggggatagtaaaggagaagatatgagcttacagaagcagtacatggtacctctacgccacggatcaggatcacacggtgtctgggatgggagtgctggtggaactggcagcaacggtggtggtactggcaatggcggttcaagttggccaatgaacatgattcctggattccattcttcgtccactagcggttgcaatgacagtggcttgtcgtagtactctctagctaggggctggggcaatgtcctatcaagaaaaatattttggagatgcatggttgagtctgagcaaatgctagctatagctaggacgatggaggaacaggcgatgaccaatccacaggcatgttcatcatctgctattcttcatcggaattgtagaagcacactgctacctcatgatggtcacaggtaggagtttaaagtaaagctgctctttgtttaaacctttttctgtcatttggttttgaacttaaaggtgttctctgcattgtgtccat

SEQ ID NO: 4955 - DNA, 620 bp, Zea mays
  Clone ID: 700433211_FLI
ggcggcccttggcgcagcagctcccgcggctgctggcaacggcggcggcggcggcggcggtggcagctgcgccgctcccggcgctggcggagcagatggagaaggccgcactgtttgacttcaacctgacgctcccggcgatcgcgaccgagttcctgctgctcatggtggcgctggacaagctctacttcacgccgctaggcaagttcatggatgagcgggacgccaagatccgcggtgagctcggcgatgtcaagggcgcctccgaggaggtgaagcagctggaggaccaggcggcggccatcatgaaggcggcgcgcgccgagatcgcggcggcgcttaacaagatgaagaaggagaccaccgcggagctggaggccaagctggacgaggggcgcagccgtgtggaggccgagctcgtagaggcgctcgccaacctcgaggcgcagaaggaggaggctgttaaggcgctcgacgcccagatcgcctcgctcagtgatgagatcgtcaagaaggtgctcccatccgcgtgatgaaaccaaaccggccctgccttatcctacgactatagttacatgaacatcataaattaatgataattttgaagaaattggccgatg

SEQ ID NO: 4956 - DNA, 586 bp, Zea mays
  Clone ID: 700433234_FLI
ctgagaatcccaataagtttgcttaacaagacatatgggtcacgctcatttaagcttgtctataacaaagtagtcagagagaatgacatcttcaggccttcaagtgtgtcctttgctgaagttgtttcatctggcaactaggttatgcaaattctaaagcatctaattatgacattagtacccaaaagaaaattgtcatggatctccaattcaaatgtactgaaatgaagttattatttggaaggcagcattattctcataccatattccagatatgaaatcccaccactcgaaactattcaaaaaggataaatatttttttcatttcaaatacggtaccgacaatcctgtgtagagtccagaaaagatgcaaggaattttgtgagatccagaactaataggagatggaagtattacgaataataatactagactgtctagacaggctgaattttcttcaattttgatagattaagagaaaggaatcctcttcaatttttggagctcacttttgggcttttgaagccgagcctttagattttgttcttttcttacgctgcggcacctaataaatgacttgccttct

SEQ ID NO: 4957 - DNA, 793 bp, Zea mays
  Clone ID: 700433287_FLI
cgcggctttctttcccaactccgacgaaggctagctacaccacctggtgcgggctcgtctccatcgcccgccacccgctccgtcgtcgtcgtccccgccgcgccgatcccgaatcgaatggggagcctggcgtccgagaggaaggtggtcgggtgggccgccagggacgccaccggacacctctccccctactcctacaccctcaggaacacaggccctgaagatgtggtggtgaaggtgctctactgcgggatctgccacacggacatccaccaggccaagaaccacctcggggcttcaaagtatcctatggtccctgggcacgaggtggtcggcgaggtggtggaggtcgggcccgaggtggccaagtacggcgtcggcgacgtggtaggcgtcggggtgatcgttgggtgctgccgcgagtgcagcccctgcaaggccaacgttgagcagtactgcaacaagaagatctggtcatacaacgacgtctacactgatggacggcccacgcagggtggattcgcctccaccatggtcgtcgaccagaagtttgtggtgaagatcccggcgggtctggctccggagcaagcggcgccgctgctgtgcgctggcgtgacggtgtacagcccgctgaagcactttgggctgacgaccccgggcctccgtggcggcatcctgggcctcggcggcgtgggccacatgggcgtgaaggtagccaaggccatgggccaccacgtgacggtgatcagctcgtcgtccaagaagcgcgcggaggcaatggaccacctcggcg

SEQ ID NO: 4958 - DNA, 563 bp, Zea mays
  Clone ID: 700433352_FLI
gataaggttgctgtttctggtaaaaagcggtcacaaaagctttataggaggcactccggaaggcctggagggatgaaagaagaaacttttgaccaacttcagaaaagaattccagagagaatcattgaacatgcggttcgtggcatgctccccaagggaaggctgggaagaagattatttacccacctcaaggtatacaaagggacagaacatccgcacgaggctcaaaaacctgtcccactcccgatcagggataaaagaatacaaaaaactggatagagaattcatcgactgaaaaggatgcagtggcgaattcctccccagaaggttttgccctttgtttggaatgctatcctcataaccatgcctctgatcggggaggggggggggggagtataaatcctctttgtaattttgatgtttaccaatgcatgaaattcagtcaaatttctgtcaatgagtagtcatgtaatatggtacggtttaaatcaacctaaaatctttattttccagttgaagtttgtaattttgacctcgtatggtatgaagtggcagattgtttc

SEQ ID NO: 4959 - DNA, 468 bp, Zea mays
  Clone ID: 700433423_FLI
gcctgggcctggctgctgtgtctgtatcgatgtgtccgtattttctccatctcgtctgcatacgctgcaattggtaaggagctagctggcctttcatgtcttccatgctgccatagccatacggccggccggcaggcaggaggataccccatcgctcgctgcacatgcatgtatgcatggggatacatgttcatcatcagcagcacagtggctctgtatcccccatcccaatctgatcctatataggaggagaaggaggagcagcagcagcagccaggcgcggccggcggccggagtagtatccgaatccgctcaacacccaccggctggtctctaactttcctatcgatcaatggctttcaaaggactcccgcgtgattcccgagggtccctcgaagtcttcaatccagacgcccctgtttcagatcgagcaaccacctccccgtttctcctccctcctgcggccgc

SEQ ID NO: 4960 - DNA, 871 bp, Zea mays
  Clone ID: 700433481_FLI
aacgggggcagttggtgagttgggacttgggagccgacgctgtcggggtgatccagtcgccgccgacgccgccgaacgcgcccgcgcccgagcctccctctacgcggacgcgggaggacccttccactcccagagccgggcgtgtccgatcgtgagcccatggcggaatccatcgtctccggcgccgccgccccgccgccgggcgcgccctcgttctcctacctggccgtgttctccaactgcccgctcgtcgccgcggtgctcgccttcgccatcgcgcagtccatcaaggtcctcaccacctggtataaggagaaccggtgggacgcgaagcagctggtgggctccggcgggatgccgtcctcgcactcggccaccgtcaccgcgctcgccgtcgccgtcgggctgcaggaggggttcgccagctcgctgttcgccaccaccgccgtcttcgcctccgtggtgatgtatgatgcctttggtgttaggctacatgcagggaagcaagcagaggtcttgaaccagattgtgtacgagcttccatcagaacatccactagctgaaacaagaccgctgcgagagctgctagggcacacacctccacaggtatttgctggcggagtgcttggatttgcagtagccacatttacagcgatgattgctgggcttggtagttgactccgcatttgaagaaatggtcaacattcgcattgaagttctggaattcaaattggacacatgtttcctagccagcttatgatagataatgcgttgtgtataggtgtatttaatatgcaaattgatgtcaatttgttgaagagaaacttgcgccattcttttgtagttaatcgacgagtgaactatatgctgt

SEQ ID NO: 4961 - DNA, 335 bp, Zea mays
  Clone ID: 700433529_FLI
ctattcgccgtggctgagcccaggctgccggtgcacctgtacagcgcgaccgactgatccaatttacgacatttttatccttagtcgtgttttgtgctcagttttaaactttcagtgctatagaacagaaagacaaaactgagaaaaaacacaactaaagttaaaaatgaacacaccagcaaaaccaaggacaccaccttaaaaaacccattgtatattaatgaaagccagagcctctatatacaaaactacttgtattatatatttgaaagtctatgttttgtatctcataatgttggatttctatatatcagatgagtaaactctattttaat

SEQ ID NO: 4962 - DNA, 615 bp, Zea mays
  Clone ID: 700433549_FLI
caatgaactgccatctaaaaagtcatttgctgagccaactgagatgggagcaatgaaagagttgtcatcaaaagaatgttttggagaacttcgtgtcctagatacaaatggacacactttcccacaaccagcttccacttgtcatgtaaaaacttctgctgtgacggggacaggattgcaagagttgttagcattgatagagaggaaactgactgaacaacaaactgtcgtgcaaagaagctatggacctttcgacagaaaatggagacctacctctatggattgtgaaaaggctgcagagccgtaggtatgggattcctccttcccctcttctatatgggattcatccttcccctcttctatatgctgctgagatcagtagcagtaaccagtttctgagtttgcatccctagagatggaaaccacacaatgtgtttgaatatgcgcttgtgcatgatgtatgatgtatcattcaaagagtatcttgatattctttctgcagaacatgaagaaactgtaggaagggaccgtatgagttttgatcaatgtcagtcactttaacagacattttgtactcatgcttcatgttgctagatagcatcttatctttatctt

SEQ ID NO: 4963 - DNA, 701 bp, Zea mays
  Clone ID: 700433595_FLI
agaacttccagtacctgcgggagctgccctacggcatcggcctcctcgtctcgctccgggagctggacgtcagctacaactccatcgccgcgctcccggactccatgggctgcctcaccaagctcgccaggttcagcgccgcgggcaacccgctggtgtgcccgcccatggacgtcgtcgagcagagcctcgacgccatgcgcgcctacctcagcgcgcggatgaacggcaccgccaaggccaagaagaagagctgggtgcccaagctggtcaagtacagcaccttctcggcggggatgatgacgcccggccgcaccaaggtgcacgggaacaacaccgacggcctccacatgtcggattaccggtcgctcgacggcggcggcgttgcgtcgtcggcgtttctcagcatgctgtcgccccggcgtctcttctcgccgcggagaaattcggccaagcactagtagcttagcagtggccactggttcggcgggctatacatgtgtgctccctccttattgctggctatttgcttgctgcttcgatgttcatatgacatgcacgtactgtagcgcaagctgaagctaatgatcttgctactgcagttgtatatgctttgaagagaggtatatatgaagtgtgtatagtagcacgtagtgcaatagggcattaatgtacataagaattaagggtgtctttctttc

SEQ ID NO: 4964 - DNA, 630 bp, Zea mays
  Clone ID: 700433649_FLI
ctctcccatccagccttctcttcttccttgcgcaagccgcctggtggtcgaccgctcatgctcccatcccccaccagcgccgagctccaccaattgcacctccttcccatggcgtgagccctgcgttggcgcgcacctctgctcggtctccatctccccagtcgtcggaccggcctcctcccagccatggcgcagggccctgctcctcttcggcttccccttcgcgtaggcttgccttcggccgtcgtgaggacaccagcaggctccagatccgaacgatcgtgctccgactctggctggccaccatctctaggcgccgctgccccaagcccgtcctcgcgcgctgccaacgttgtcttctccgaccacctctccattccgcgagaggttactagtcatctgaagaatcaccctggtaactggaatctcaagtgccaggagaagaacaggtggttcaggaggagccacaaggcgaggagtttgatctgatctaggtggcgtttctcagtcgacattggcgccaacgatccttagttcgtgttatatttatcttttatttttgtaagtcttccgctatgtaataaatactctgattattgtgacgtttatctctatacactctgttattat

SEQ ID NO: 4965 - DNA, 687 bp, Zea mays
  Clone ID: 700433651_FLI
ctcccgtcccccctccgtgatctgttgtgtgtcagtccatgtaccctcctcgatcgtagtgtctatatctcctgccttgcagctttctgcagggagctgcgccaacgatgggcgtcttccaggacaccggcgtcggtggcggcgccggcagccgcacgtccaggagggttttccagtaccagaggctggagtgctgctgggacgacggagccacttccaggtggcggtgtccgccagccgcgaatggtaagaaggctgaagccccctgtttgttcagtgtcaggcggctcaagtggagcaaggtcacctcggttctgataccgaggaaggtcgccgagttgtctgcaaagatctgccacgcccgcgccaggacggaggccgtcgtctgcccggccgtcgtcttcatgtcgccgtggggcctccctgtgctctcccgcccgctattggtcggccacaacacttgcaggtatcaccgtggaagagacaccttctggtgagcaggtagctgcacctcgatctgtattcctggcggtggtagtatcggtatatgcgtgtgtgatatatgtggccagcttagttgatcttgtaggatgtgtattattactcctccattttgatttctgcaatacttgtgttgtgttttgccggctgcatctgaacttagatgctgtttggttcatgatggtt

SEQ ID NO: 4966 - DNA, 420 bp, Zea mays
  Clone ID: 700433658_FLI
gtgcgccgcgccgaggaggagatcgaacggcgcaacgctgacactggccgccgcaaccggtgcggcgctggcgtgctgccgtacgagctcatggcgcccacatcggggccgggcatcacctgccgcggcgtccccaacagcgttaccatttagcctctcagtaccgacagacagccatgggcgcatgacagagatgatctgaaaggagattttttttccactcattatagtcgggtggggagaaatctaagcagaagcaaatgaattctgcattatttctccccccatttccaaattgccattgatttggtggtccgaacaggtgaaatttgatttttgactagggccaagactgtgaggaactgaatgggtgtaaataatttgtcatatacaaaaatcaatggaatataatcattatag

SEQ ID NO: 4967 - DNA, 610 bp, Zea mays
  Clone ID: 700433713_FLI
aagaactacaaggacctgtcgactgcgcttgagaagatgttcagtggcttcagtactggcaaggatggcttatctgagtaccgcaaggatggtgaatatgttctgacttacgaggacaaggatggagattggatgcttgttggcgatgtaccatgggagatgttcgctgactcttgccgcaggctcaggatcatgaaaggatcagatgcaattggacttgaaaggagacataattcatggtccctgcatctgtggtggtagctctcttggctccaagggcagctgataagtccaagaatcgcaactagaatggttgcttcttacagtccagagcaagagggagatatccagtgactgtagggatctttgtggaagccggaaaacgtctaacagtttcaagaagaattctgccttatggtctgtaccacatgtttttgctgctacgcaagtaaagaactccacgtctgtcaatgttagttttacaacatcgtctacggacaaaaaaaaaaccccccgctatttgattgttgctaagccttcgtacgacgtgtaaatggtttggtacaatgagtgctgcgactacgattgagcacccctctacctagtttgc

SEQ ID NO: 4968 - DNA, 1030 bp, Zea mays
  Clone ID: 700433722_FLI
accaacccaatgctatgcaactatatgtcattacattctactaatgctaaagcagttctttcaaggacacgaaaacaaaattgttggaccatagctttatttcatagtataagaagcagttcaccatataggcatataccaagtataatgatgcacgactcatgagtaagagaccaggttatttcgagcagtacatactcgaaaaagcgagtgaaagagctagctgttcaccgactacgtgcggcgtagacaaaggacgcagctgctaacacggttgtggtagctgggcacagccatgtccagaccacattcttcccactgcgctctgcatcggctactgcaagctgcacctgctcaagctcactgttcaagtcattgatttgtttgtccctgccaccaacttctgccttcagcaccccaatctcatgaacattgtctctgttacaggattcaagctcctggattttggacttcagcttttctgcttcagctttctcctgctcaagttctttgagaaccgaaactttctcatcgtggaggaaagaagactttccatcaagatcatcatagagagcacggagcgcagccatggaactgttgagcttcttcagttcatccctcaactttccaacctcagcatttttagcatctaccaagactaaggcactatctttctcagcctgaaccatgtccacgttcaccttcagcatctccaattcaccctccatcatcttcttctcagcctcatgtgccccagcagcagcttcattcgccatcgccacttggtcaagctcactttggagcctagccacttcagcagccacaacaatctgcttctggtccatctccgcaagcaaggcgtggagcttctccacctccgccttggtagcggccatctctacatccaatttgtgcccttccaactccaatccatggttcctagcgacggcctctgagagctctgcctccaaagaacccaccttcgcctctaattccaccttcctggattgcagagcctccgactccttca

SEQ ID NO: 4969 - DNA, 574 bp, Zea mays
  Clone ID: 700433803_FLI
gcatcatataaaaggcgagctggcaaggaaggagaagacaacctctctgtaagaatcaatacctaccccatggagaagctctcttctcgtcgctattcccggccggcgatgtccctgctgatcatcgtggccatcactatctcctgctccgtcgtccacagttcggaggctccagcccaagaagcagcagtacctcgtctggacggagaccatcagggccaagcgccgccgccaccggatgccggcaaacctcgacagccacagccgccgtgctgtcttcggcacggcgcttaacgtcctaaaatggacagggaggacggaggatacttaagatcaaccaggccgcgacgacaataagtttttaaattttattaggactagtttaggaaccctatttttttaatggatttttattttatcaaaaaaaattgggttcccaaactagttcttaacaatacaaacataagagaatccgtacaccattcgtgtcaaattataagtaatataggtcggggtgcataactgagataatttggttcatttatcatttgtggtcctacgagttcaaccgtgt

SEQ ID NO: 4970 - DNA, 1457 bp, Zea mays
  Clone ID: 700433813_FLI
ggacttgagtgccagcaagccagaatggaggcacatcaacgtgagcgcagctcctcctggtcgctggggccataccctgtcatgcctgaatggatcacggctgattctgtttggtggctgtggggggcagggtctgcttaatgacgtcttcattttggatcttgatgcacagcatccaacttggcgtgagattcctggccttgcaccccctgtaccacggtcatggcatagctcctgcactgttgatggaaccaagctggtggtttctggtggatgtgcggactctggtgttcttctcagcgatacctacctcctagatgtgacaatggaaagacctgtttggagggagatacctgcatcttggtctccaccttcaaggctggggcactcgctatctgtctatgatggcaggaaaatcctgatgtttggtggccttgctaaaagtggtcctctacgacttagatctagtgatgtgttcactctagatttaagtgaagacaagccttgctggcggtgcataactggcagcaggatgccaggagctggtaatcctgctggggtcggcccaccacctcgcctcgaccatgttgtcgtgagccttcctggtgggagagttctgatatttggtggttctgtggcgggtcttcactctgcttcaaaactttacctcctggatccaacggaagataagccaacctggaggcttctgaatgttccagggcatcctccacggttcgcctggggccacagtacttgtgttgtcggagggacaaaggcaatagttcttggaggacaaactggagaagagtggacgctaactgaaatacacgagctttctctagcaagctcattagtctgaagatgggaaggtcccagcaagctttccagcttccttgaagcaatgtctctggagacagctacctgttcatatgacttgaggcagattttttttccaacagtggtgtgcaagcacaagcacaaaagggttggtgaagtggacaaccagacctgattacttgtgccatgcctgggagtcagctggtctaaaagtaggaataagttacctctgctgctgctgttcgtatgatctgaaatgatggaatagctggcatccataagctaatctcagttcttatcatgtttcaaatgggacactggcattatgtcgctggagcccctgatgcaacaggtaccctgccttctggttgcgcctgccttcggtgacaactgatgctgtggtcttctgttttttgacccatcaactgctgtgaagcttctttgttatgcttttgcgccacttcgtgcttactcaattgctgctttctggagaagctgtaacacagacacacctgctgtatttaattttgcctttcgtatcactttgtgcttacctcagctgttagtgatacctataacattttctttttaatctgattatcaaaggatgaattatgaat

SEQ ID NO: 4971 - DNA, 150 bp, Zea mays
  Clone ID: 700433844_FLI
gcaccgcacctcgttgtgctgcctgtccttgtacgtttactaattactgctgcctgtatgtaaatcaaaatctgaggctcccatttcgaaacggacggtgaactactcttcccgtttcgtttcatacgagaatcgaactcgttttcaatt

SEQ ID NO: 4972 - DNA, 1221 bp, Zea mays
  Clone ID: 700433856_FLI
cgcacgcaccatcgtcctgccgatcgatcgcagtcagccagtcttgctgagagacgaactgaagccggaagtgaaccgatcgatcgatcgagcgagcgagcgagctcccatgaagacgttggttctggtggcggtgctgctgctgctgctgcagcagcagcacgggggagccgcgagcgccggcggcaacttctaccaggacgtggacatcacctggggcgacggccgcggcaagatcctcgacaacggccagctcctgacgctgtccatggacaggtcctccggctcgggcttccagtccaaggcccagtacctctacggccgcttcgacatgcagctcaagctcgtcccgggggactccgccggcaccgtcgccaccttctatctttcgtcgcagggttcgcagcacgacgagatcgacttcgagttcctggggaacgcgagcggggagccgtacacggtgcacacgaacgtgtacagccaggggaagggcgggcgggagcagcagttccggatgtggttcgaccccacggcggccttccacgcctactccgtgctgtggaaccccgcccacgtcgtcttctacgtggacggcgtccccatccgggagttccggcgccgcggcgacgggaccgtgccgttcccgacgtcgcagccgatgcgggtgtacgccagcgtgtgggacgcggaggagtgggccacgcaggggggccgcgtccggaccgactggtccaaggcgcccttcgtcgcgtcgtaccgcgggtacgccgccgccgggtgcaccgcgccggacgccgccgcctgcgcgcgctccaacggcgcatggatgtcgcaggagctcgacagcgccgcccaggagcagctccgccgggcgcaggccagctacatgatctacaactactgcaccgataagtaccggttcccgcagggcccgccgcccgagtgctcgtcgccggccaagtagtagatgagtagaattgatcggatacagagagcaatcaattaattaaatcgacccgtcgcttggtttttggtttacacattgtactacggcataagttcggcggatatatgtatacgtagacggctagacgccatgcatgtgtcttggcatgtatcgtattcgtatatatcgtaattcgtatgtacctcagtatacctgcatcgtacatttacatgcatatatatctccctatatataaatatatatggttttattac

SEQ ID NO: 4973 - DNA, 492 bp, Zea mays
  Clone ID: 700433934_FLI
gcgcaccagaggcctgacatgggccatgctgtcaatgtgctctctaccctttcggaagtttggaaaccagccgatccggactcggatgacagctacggtatcgaccttaacatgtccctgcctcaggctctgaagagatggcaggcgttcgaggacagcagccactttgacggtgcgacctcgtcgtttgttgcgagcctggataacactcagaccagcatccctacgaggcctcctgggttcgcggactcgttcacctctgccgacggaagataaagacatttagcgctgctagtaagggtgtgcaaaaaccttatgtttccgttgaaatggaagctcgggcgatccttgttcattcttttagtctcttcacccccgccaccaatctttccatgtctctttattcgtctctgtactgccgtgtagctgctctttggtcgtgtatgctgtgatcttgtcccgaaaattgcctggaagttcgaagactttgct

SEQ ID NO: 4974 - DNA, 292 bp, Zea mays
  Clone ID: 700433990_FLI
cttgacggccgccgcggcatctccctcccccttggacgccacctccgcctcctccgggatcctcacatagtcgccgcgtctgccattggcggacccgggcgaacccatcgaccgtggggacccgatcaggctagcatccgcggggtaccccggattgtgctggtgaggagccgtcggatcggctggggcccgagcgggattgggctcgggttgggcttgttccggcgagctcggcgtggttgaatgctagggtttgtgtccgggactccgggaggccggaagcgtttatgag

SEQ ID NO: 4975 - DNA, 697 bp, Zea mays
  Clone ID: 700434019_FLI
caaacagggaattcaaataaccatactccatctgcttctttctcaactggtgctgctgttcctcctccctttgccttctcgggctcaggaaatgaaggaacgcaggcacgccaagcttctaatggacttgaaggggaacatggtgaaccaggcatacacagggatgatgacgtccatataaatttggctggacccgagcaggctgcggaggctttgagagctgtgatgcagatgcttgggccacagatgggtcaacatgagggtgcacctagaggaccaggttaagcgtgggaggtaggaaaatgtgttacgtggcgtattgtggtctgcaggagtcttatacgggacattattttgtcttctccatcctgacgaagaatggagattctcgtgcgccttattattatagcagcttatctgtgtgctacaacaattccaccgtaatggttaccggcgttcaacttatctgccctgttcatattggcgtaggtgtgtcattagctgtgctggggcctgggtcttgttttgttgagacttgtctcgtaatggctgtcggtccatcatgtgatcttaaattaaagcctttttgcccccctcccctgcttttccgctgcttgtcggttcccagttgatacttggaaaatatttgcaaggttggtgaaaaaaaactgtcactggaatgaagttcatcatcgtt

SEQ ID NO: 4976 - DNA, 720 bp, Zea mays
  Clone ID: 700434265_FLI
ctccaagtgcaaactcacaaggacgattcagtgaggagatgcaagtggtgtgatttgattcgatgatgcgtggtttgtcgattgaccttgctgagttcagagttccaaggaaatggaatttgccaaattgacgaatggtaataatgagcatgtatagaaacctgcagatttagccctgtcatcttatccgaagagatcagggtggttgagcagatggcgagactggtggttaccataacaattccaggggagaaaagaagcaagcaatgcagcatgattactggcaagcaggcgggtgtacatgcaaattgatgtggatttgatcagctcaataaacacctgaggctgggtggtaagtacagccagttttgccattaggagtagctagcattaagcaaaaccagcaaattttagatttttggcaatgtgggtgtcccagggctgtagatgttgctccctcccttgtaattacacagtactgttgcttctacactggaatatacattgccattgcttcaagatttttttttttgaattgtcatctggatcgactactgccctagtcaaactgggaaagtgtgctctttccctgtagcccacgctaaaaagctcgatgctgcgttactcctgctaaagttgaggctctgtactgcttgagcagtgttctcatttctcaatgttgtttagctcctggagtttcagtatctgatttattagtgt

SEQ ID NO: 4977 - DNA, 406 bp, Zea mays
  Clone ID: 700434272_FLI
taattgtctggacccttggaggaaagaatgtatatgttgaaggatcatgggataactggaaatcaagaaaagccatgcaaaaatctgggaaagatcattctcttttgctggtactcccagcaggagtttaccgatacagatttgttgtagatggagaaaggagatgtcttcctgatctcccctgtgaaatcgatgcaatgggcaatgcggttaaccttcttgatgttaatgattatgtccctgaaagtgttgagagcgtggcagagtttgagccacctccttctccagactctagctacagtttccaggcacctgaggacaaggacttcgccaaggagcctcctgttcttccatctcaactccatctcggtgttcttaactcacagaactcggaagaaagctgtgc

SEQ ID NO: 4978 - DNA, 701 bp, Zea mays
  Clone ID: 700434310_FLI
caaccgcaacgttatccgcatcacccccttccgtaggagaaacggactgaggtgctcagctgacgccggtcgcctcgcagtggcaagtgcccgagcgatgcagcagataatcagcgcctgcaagctgcctcacacgcaacgggccgccgcgttcctgccgccgaggccatcgctcaggcgccttccagtcccagcaggaggtgcgccgccgccgcggcgattggtggtcaggaggagatgccaggaagagaataagcagcagcaagaggccgaggagggaagcggcgctgacgagcaggagcagcagaagagaacgttcctgagcctggaggaggccgggctggtggagatgtccggactcagcacgcacgagcgcttcctctgccgcctcaccatatcgtctctgaacctcctgagagtgatctcggagcaggagggcgtcccgatagaggagctcaacgccgggcgcgtctgcgactggttcctcaaggacaagctcaagagagagcagaacgtcggcaccgccgtcttgcagtgggacgaccctggcttctagctagttccagcttcgttctgagccaatgatcatgctattctacactgcagcgcacgcaggggctatatatttcagggcttcaggcccttcacgggatgagcaaccaatgccacatgttcagtaatctcagaatttcagtttcaag

SEQ ID NO: 4979 - DNA, 1294 bp, Zea mays
  Clone ID: 700434468_FLI
ggtccgccgccggcgggccgcaggtgctgacggcgcggttcgtgcggcaggtggtgcagggccggtggttcatggtgttcgcgtgcctgctcatcttgtcggcgtcgggcgccacctacatcttcagcatctactccaaggtgctcaagtcgacgctggggtacgaccagcgcacgctcaacacgctctccttcttcaaggacctgggcgccaacgtgggcgtcatttcgggcctcatcaacgaggtcacgccgccgtgggtggtgctcgccatgggcgccgccatgaacctggcgggctacctcatgatctacctcgccatcgacgggcgcaccgccaggccccccgtctggctcatgtgcatctacatctgcgtgggcgccaactcccagtccttcgccaacaccggcgcgctcgtcacctgcgtcaagaacttcccggagagccgcggcgtcgtgctcggcctcctcaagggcttcgtcggcctcagcggcgccatcttcacgcagctctacctcgccatctacggcgacgacgccaagtcgctcgtgctgctcatcgcctggctccccgccgccgtcaccatcctcttcgtccacaccgtccgcatcatgccgtacccgcgcgccagccgacgccggggcccgtcagcggcagccaccagcaacgacgccttcttctgcttcctctacatctccatcgcgctcgcgacctacctcctcgtcatgatcgtggtgcagaagcaggtcaacttctcgcacgccgccttcgcggtctcggccgcggcgctgctcctcatcctcttcctgccgctcgccgtcgtcgtcaagcaggagtacaagatccagaaggagctggaggagtccctccgcgaggaccccacggtgaccgtggagaaaccggccaccgcagcttcgctgcagctggtggcagcagcagcagcagcacctgaaccagcggtggctcagagcatgactacgggaacagaggccaagcggtccagctgcctggggtcttgccttcggcacatgttcagcccgccggcgcagggggaggactacaccatcctgcaggcgctggtgagcgtggacatgctggtgctgttcctggccaccatctgcggcgtgggcggcacgctgacggcgatcgacaacatggggcagatcgggcagtccctgggatacccggccaagagcatcaacacgttcgtctccctcatcagcatctggaactacgccgggcgcgtcaccgccgggttcgcgtcggaggtgttcctggcgcggtacaagttccc

SEQ ID NO: 4980 - DNA, 645 bp, Zea mays
  Clone ID: 700434582_FLI
attataaaccgtttagctttggttttttctatcggactgtgatttagccaatgttcagctactagtacaagctgttacggcaatccatctcactgccccgttcttagaacgaatatgtgctggagctcctctcgtgacgctcttctctcccggcgctggagctcccctatcaagtcttgtccgacggcgctccggggcgctcctctccctggtcccggcggtgctcctcttcctgatgttgatgattactcggcccagccagcagtgcttccccgccagcagtgcttccccgccagtgcttcctcgctcctggctgtgcttccccgcgaccggttatcgttccctgagacgctcggtctcgctcccgacctcaacaatggagaccccgccaggagcgatgacgtcggcaccggctgttgtcatccccgatgacaaccatgatgcgtataggtccgtcactattgaagatgttgaccactcattgattaaggcaccaacaacgcttgaggagatcggtgctctgcctcctatggatgttgtaaagcttcgttaatggtcaatggccaatgagagtgttatgtacccaatgagagtgttatgtaccttaaacttgtatttctaagtactataagtgaactttcagtg

SEQ ID NO: 4981 - DNA, 1087 bp, Zea mays
  Clone ID: 700434614_FLI
ctctctctctctctctctccttcccagttccctccgtcctctccagttccacagaaggctccgtgcctagatcgtcccgtggagaatgtgttggggatcaaggagtggttgattggatccatcccctcgcgtgcttccctcatcaagtttcaaatccccatctgcgcgaggaactcctctctcaaggggaaatcgctcgtaactgtgcaaacacttgttcctcgatcccccctcaatcaatcgagccgtggtgtttgttgtctctctctctctttaagatggttgcacggaggaatccatccattattgaagaaggtagtagatctgaagaaatccaggtggagctggagcgtcctcgccgctcccagaccggtcatggtagaggccaagctcggggagatgttggtgggagtagttctcaacaacctcaaatcgtccatgccgctcgagaagaacctgtccctcagccacctctccatccatcttcatcacgggctgctgcagctgccgcctctcgccccatgagccgtggtaagagaagcaagaagagaggtgttcgtgcgctcatcaggggtttaaatggaatctatgctatctgtcgtgagagttatgttcaaatcgccgagctaaaaaggaaaaatgacgagtacaatgagaactttaggagatttatgttagagtcggacaactttaggcgttatgttggtcgtgtacctctgcgtcctgctccaccatacaatcctccgccgcctatgcccgacactctggatcagtgggttcagcagacatatggtgttcctttcgacgaagatatctctgatgatgaggaagaaatctctgatgatgaagatgagtccttctggtgaacatggtcattatggtggcttcttcttcttcttggttcttgttgctaaaagggagagaagttcgtgacatttgatctagtcttttgttgctggcagttgtgagagtgagaacctaaactatgtgggatgtaataactttatgattatgttgtctcaaaacacctggcctgtaatagataattaggtgaacttgttcttattatgctactactcgtttcatt

SEQ ID NO: 4982 - DNA, 2342 bp, Zea mays
  Clone ID: 700434640_FLI
cgttgatgggagtgccttctcttcatctcctcatgatcaacttgggaaaagcaactggaacctcaagaatttttcatggctccccaattctgttctaagacttcttcagacgccaattccaggagtgacagatccaatgctttatattgggatgctcttcagcatgtttgcgtggcacgtggaagaccattacttgtacagcatcaattaccatcactgtggggcatttaaaacatggtatgggataccaggcgatgcggctcctgggtttgaaagggttgctagccagtacgtatataacaaggacattttgattggtgatggagaggatgcagcatttgatgtcctactagggaaaacaacaatgttccctccaaatgtcttgctagatcacaatgttcctgtctataaagctgtacaaagacctggagaatttgttattacttttcctcgttcttaccatgcaggcttcagtcatggcttcaattgtggagaggctgttaattttgctattggcgattggtttcctcttggttctctggctagcaagcgctatgcacttctgaacagaactccattgcttgcacatgaggagctactttgtcgttctgctgtgcttctatcccaaaagctgttgaactgtgatccaagatccttggacaagttggaacatccatattcccagaattgtgtgaaatcctgctttgtgcggttgatacgattccagcgacgtgctcgtggccttcttgctaaaatgggttctgaaatatgctataagccaaagacatttccaaatctgtcctgtagcatttgtcggcgtgattgctatatcacacacgtgttgtgtagatgtaactttgatcctgtctgcctacatcatgaacaagaactgcggagctgcccttgtaagtccaatcgcgttgtctatgttagagaggacatactggagctagaggctctatcaagaaaatttgagcaggatgtcagctcgtataaggaaggaagttgcattagcccatgtaaggaggttgagatctctgatactactgatgaacaacttccaaatcttgggattactctggatttcgttaatagtaaagctggtagctcaggctttatgactgttgatggaggaaacagttcttctgcagtatcaattttgacatcttctgtgcatcatgaggcatataagcatacagaagcaaggcaggcaataaatacatcaatgaccaaaggaacttacactatggatgagagttcatccggcatagatggtgcttgtaatgaacacggttcatgtaatgcttcagccatggaatgcagtgataattcggattcggagtgtgaaatcttccgagtcaagcgcaggtccacctcatttgacaaacctacttctgaagctaagacatcaaccttgtctgaacagcaggttctgaggcggctgaagaaggtacatcctgaagtacagcaagtcatcagtaagcgtcaagaagaatctggtaatggttcagttcgcgctgcccacatgagccagaaaagctcaaatcctgcccctgctgatgacgaaacagaggacatggctcccataatgtggagaataaagcggcgacagtcagaaacccaagatgctacatgtcctggtacgagaccgcagtcatatccgccttccagtggtggttctggagaagagtttgtggaaagaactagagatgctgcagtagaactccgtccaaaacgagtgaaaatccggctaccttctaatgccagtaggcagattgagcagcagcgcagttcagggcagagatttgctagggaggacaggttgccgcttggttttccacgtacattttagggaatcacaggtgctactaacctctacttgagcagacgaattctttgtttaggtacactgttaactacaaaacgtggtgacagaagggaggagtgggagggatcagttgcagactgactttagaattggcaggaaaggaagcggctatctaatcgattcttttgtgcagcagggcctccaatttgaggccactgggggcacgcttagaagatacacgtgataatattcttgttgctggaggttccgtgtcactgccgatagctctttgatgcctggctatcagtgacacagattaaagagaacctcgctaccttgatatgtccgctagtgtttagagcatgtagctagcttagctgttatctctctcactgtaccaacggcctttcccttgtaatttcctgtaaacaggcttagctgctacactatggctaactctattcttttgttggtttagccttaacgttaaattcaatgcatttcttttttggtt

SEQ ID NO: 4983 - DNA, 570 bp, Zea mays
  Clone ID: 700434680_FLI
gcaagtcaaagcagatgccgtaagcttggcaagtagactcgaagccctagaaaagaccaaacgaatgtttctgggtgaaaatttagaagaatgctccattgaagaactgcataatctggaggttaaactggcgaagagccttcacgtcatcagagggaagaagacacaactgctggagcagcagatatccaagctgaaggagaaggagaggaccctgctccaagacaacaaagagttgcgggataagcagcgcaacctccagtctccaccggaggcgccaccggacctgaaccgctgtgtccctccttggccgcgtagcctgccggcaccgagcaatgacatggacgtggagacggagctgtacataggattacccggcagggagcgctcctccaaccgggactctgattgaaccacggattttcagttcgatcggctaaaaggaataagctccctgaaattaaagcatcgaagggcacacgtcaatggttttatttgcaacttttgtatgcaaacttgtacttgaaaagtaaaaaaaataaaaataaatctgtagtatgtggatgcaag

SEQ ID NO: 4984 - DNA, 1175 bp, Zea mays
  Clone ID: 700438105_FLI
ctgggagagacttcgattgcatcatcgatttcgtatcttgataatggtgttgtttacgttggttcacggtttggcgattcacagctggtgaagctgaacctccaagctgatgcaagtggttcatttgttgaaattcttgaacggtatgttaatcttggaccgattgtggacttctgcgtggttgaccttgataggcagggtcaaggtcaggtggtcacttgttctggggcgtttaaagatggttcccttcgggtggttcgtaatggtatagggattaatgagcaggcttcagtagaactccaaggcataaagggattatggtcattgaaatcttcgatcaatgatccatttgacatgtaccttgtcgtgagctttataagtgagacacgattcttggcaatgaacatggaagatgaactagaagagactgagatagaggggtttgatgcacaaactcaaactctgttttgtcagaatgcgatcaatgatcttcttatacaggttactgctaattctgttcggttagtcagttgcacctcccgggagttagtgaatcaatggaatgcaccagcaggattctcagtcaatgttgcttcagctaatgccagccagagctaggaactgagactgacacaggagcaggaggggtaaacctagactgacacagggacgacgtggtgggtagtagagccgaatcgacgagcaggggcagggaagcggtggatctagagggaggcggcatcggagggaagcacagggaagcattcttttaacattccaggtgctaagtatgaactgcccaagtatgttttgagtgaaccaaccaacctgatccgagacagctgaacggcagccggccgtaggaagacccaccgatgtaaaaactgtaaatgactgcagatgccgccaaattgatcccttgcttgtggtaactggagtgcctcgagtaaccttcacatttgctttggcaactttcggcaatagggttttccagttctagtgttcagataaaaagcttttgcgtaccctcgtctattgttcttggttctactgtaaacatgagtctgcttagaattctttggagcgagaatgctgctgagattgttctcgtccactatcatgatacaagctggagcatacgttttagaaacttgtcacatctcgtgcaactaatt

SEQ ID NO: 4985 - DNA, 2014 bp, Zea mays
  Clone ID: 700438170_FLI
cgatgttgttgttggaacacctggccgcataatcgatttgataaatggcggaagcctccagttgggagaagttcagtatttggtcctggatgaggctgaccaaatgctcgcagtggggtttgaggaagatgtggaaacaatattacaacagcttcctgcaggcaggcaaagcatgttgttctctgcgacgatgcctagctgggtgaagaaactgtccagacggtacttgaacaaccctttgacgattgacttggttggcgatcaagatgaaaagcttgctgaaggaatcaaactctatgctatcccactcacagcaacatcaaagcgtaccgttcttagtgatctaatcacggtttatgcaaagggtgggaaaaccatagttttcactcgtacaaagaaagatgcagatgaggtatcattggcactgacaaacagtattgcttctgaggcacttcatggtgatatttcacagcatcagcgtgagaggacactaaatggattccgtcaagggaaatttactgttctagtagcaacagatgttgctgcccgtggtcttgatataccaaatgttgatctgattatccattacgaattgccaaatgatccagaaacttttgtccatcgttctggacgcactggacgtgctgggaaagcaggaactgcaatcttgatgtttaccagcagccagaaaaggacagttaagtcacttgagcgtgatgttggttgcaactttgagtttataagccctccgtccatagaagaagtgctggagtcatctgctgagcatgtcattgctacattgagaggtgtgcacccagagtcaactaaatactttcttggagctgctgagaaattaacagaagaattgggacctcatgctcttgcttctgcactggcacatctgagtggattttctcagccaccttcgtcacgttctctcatcagtcatgagcagggatgggtgacgttgcaactaactagagaacagggatttggcagaggcttcttttctcctagatctgttactggttttctatctgatgtttgttcagctgctgcagatgaagttggcaaaatatacctaacagcagatgagaacgtccaaggagcagtcttcgatttacctgaggaaattgcaaaggacctgcttactatggagctccccccaggaaacacattaaccaaaatttccaagctgcctgcgttgcaagacgatggccctgctactgatagctacggtcgcttttcaaacgaccgaggttccaggaacaacaggcgttctaggggtggcggcgcttcaagaggccggggtggttgggacactgacggcgaggaccgattccgccgtggtggtaggagcttgaggtctgacaatgacagttggtcagatgatgactggtcaggcggtgggagaaaatcaaaccgttcctcatcattcggtagccgctcatcatcctacagcagccgtggctcaccatccttcggtggccgctcatcatccttcggcggtagggagagcaacagaagcttcagcggtgcttgtttcaactgcggcgaatccggccaccgcgcaacggactgcccaaacaagtagtaagatggaagagatggcgcggtctcccctgccgcacggggtcgatgatcctgattggccggagcatgcagagcgaaatcccaaagcccactccacctgctgatcggtgtactacgcccgacacccagccgacgttattactggctacagttttgcgtggtcgtctggcgtcggaaaacagaggaaggttttggcatcctgactacagttactacatcaagcggagttccttcagcttattcatgtcacacggacactactctacactacagggatatgttagtatttcttttatataagtatgtattttttttgtggtgctcttgattgaggatctcggtataactgtaaccacacgcactggttacggttgcttctgcgtcacaatcgctggcgacggttggattctttgaatgttat

SEQ ID NO: 4986 - DNA, 1516 bp, Zea mays
  Clone ID: 700438230_FLI
gcgaggcgacgaaaccctcgccagtccccaactcgaacctcagtcaggcggcgtgagggagggagagttcgaggaccgaggcggcgtcgggcgagatgaagcttaacgtcaagaccctcaagggcaccaacttcgagatcgaggcgagccccgatgcgtcggttgctgacgtgaagaggatcattgagaccactcagggtcagagtacctaccgggcggaccagcaaatgcttatataccaagggaaaattctcaaggatgagaccactttggaaagcaacggagttgctgagaacagcttccttgttataatgttgtccaaggctaaggcatcgtcgagtggagcttctaccactactgctgcaaaagctcctgcaactctggcccaacctgctgcccctgtgccccctgctgcatcagttgcaagaacaccaacacaggctcctgttgccacagctgaaacggcacctccaagtgcccaacctcaggctgctccagctgctacggttgctgctactgatgatgctgatgtgtacagtcaggcagcttcaaaccttgtatctggcaacagtctagaacagactatccaacaaattcttgacatgggtggtggtacatgggaacgtgatacagttgttcgtgctctacgtgctgcatacaataaccctgagagagctatagactacctgtattctggaattcctgagaatgtggaggctcagcctgttgcccgagcacctgctgctggccaacaaacaaatcagcaggccgcatcacccgctcagccagcagttgcattgccagtgcagccatcacctgcctctgcagggcctaatgcaaatcctttgaacctttttcctcagggtgttccaagtggtgggtccaacccaggcgttattccaggtgctggatctggtgcccttgatgccttgcgacagcttccacagtttcaagcactccttcagttagtccaggctaatcctcaaatcttgcagccaatgcttcaagagctaggtaaacaaaacccacaaattctgcggttgattcaggaaaatcaagctgagtttctccgcttggtgaatgaatctcctgagggtggtcctggagggaacatactaggtcaactggcagctgctgtgccacaaacgctgacagttaccccagaggaacgggaggctatccagcggctcgagggaatggggttcaaccgtgagcttgtgctagaagttttctttgcatgcaacaaggacgaagagcttacagccaactaccttctggatcatggccatgagtttgacgagcagcagcaatagacgtggggtggatggaggaaaccgaggcagttgcagaacagcgagtgtcgttcttatgctatgctgctgactatcttttatttccatatatatttgttcggaatgctttctaagtacatattaattcaatatcaagcgttacaccgtgtatgaaagcctgtcaaatcgtggcctttggtttggagggaaggattcgattgctc

SEQ ID NO: 4987 - DNA, 824 bp, Zea mays
  Clone ID: 700438252_FLI
gcggcggcggcggagcaaacgcaggcgaaggcgagggtgtgagggaaggagcaccagccatggtgcacgtcaacttctaccgcaactatggtaagacgttcaagaaaccaaggcgtccttatgagaaggagcgtcttgatgctgaactgaagctggttggtgagtatgggctgaggtgcaagcgtgagctttggagggtccagtatgcactgagcaggatccgtaatgctgcaaggcacttgctcacccttgacgagaagaacccccgtcgtatctttgagggtgaggcacttcttcgccgcatgaaccgctatgggctgcttgctgagggtcagaacaagcttgattatgttcttgccctcaccgctgagaacttcctcgcaaggcggcttcaaacacttgtcttcaaggctggcatggccaagtccattcaccatgctcgtgtcttgatcaagcagcgtcacatcagggttggcaggcaaattgtcaacgtcccatcattcatggtgagggtggagtctgagaagcacattgacttttcactgtcaagcccattcggtggaggccccgcaggaagggtgaagagaaagaatcagaagaaggcaagcggtggcggggatgctggtgatgaggatgaggagtgaggatggacaagtagtgttacaccaatataataatattatctagttttcttgaacttgttcgaatgatgagtgcttagctgtgtcatggatggtccattttatcttgtggtattatcagcctttacataactgctatgtttggatatgttcaattctgttgcaattttatgtggttgtttt

SEQ ID NO: 4988 - DNA, 1938 bp, Zea mays
  Clone ID: 700438417_FLI
cctggcgttatcaagaccagacccgaagaagaacatcactaccctcgtcaaagcgtttggagagtgtcgtccactcagggaacttgcaaaccttactctgatcatgggtaacagagatgacatcgacgacatgtctgctggcaatgccagtgtcctcaccacagttctgaagctgattgacaagtatgatctgtacggaagcgtggcgttccctaagcatcacaatcaggctgacgtcccggagatctatcgcctcgcggccaaaatgaagggcgtcttcatcaaccctgctctcgttgagccgtttggtctcaccctgatcgaggctgcggcacacggactcccgatagtcgctaccaagaatggtggtccggtcgacattacaaatgcattaaacaacggactgctcgttgacccacacgaccagaacgccatcgctgatgcactgctgaagcttgtggcagacaagaacctgtggcaggaatgccggagaaacgggctgcgcaacatccacctctactcatggccggagcactgccgcacttacctcaccagggtggccgggtgccggttaaggaacccgaggtggctgaaggacacaccagcagatgccggagccgatgaggaggagttcctggaggattccatggacgctcaggacctgtcactccgtctgtccatcgacggtgagaagagctcgctgaacactaacgatccactgtggttcgacccccaggatcaagtgcagaagatcatgaacaacatcaagcagtcgtcagcgcttcctccgtccatgtcctcagtcgcagccgagggcacaggcagcaccatgaacaaatacccactcctgcgccggcgccggcgcttgttcgtcatagctgtggactgctaccaggacgatggccgtgctagcaagaagatgctgcaggtgatccaggagttttcagagcagtccgatcggacttcccagatgttcaagatctcagggttcacgctgtcgactgccatgccgttgtccgagacactccagcttctgcagctcggcaagatcccagcgaccgacttcgacgccctcatctgtggcagcggcagcgaggtgtactatcctggcacggcgaactgcatggacgctgaaggaaagctgcgcccagatcaggactatctgatgcacatcagccaccgctggtcccatgacggcgcgaggcagaccatagcgaagctcatgggcgctcaggacggttcaggcgacgctgtcgagcaggacgtggcgtccagtaatgcacactgtgtcgcgttcctcatcaaagacccccaaaaggtgaaaacggtcgatgagatgagggagcggctgaggatgcgtggtctccgctgccacatcatgtactgcaggaactcgacaaggcttcaggttgtccctctgctagcatcaaggtcacaggcactcaggtatctttccgtgcgctggggcgtatctgtggggaacatgtatctgatcaccggggaacatggcgacaccgatctagaggagatgctatccgggctacacaagaccgtgatcgtccgtggcgtcaccgagaagggttcggaagcactggtgaggagcccaggaagctacaagagggacgatgtcgtcccgtctgagacccccttggctgcgtacacgactggtgagctgaaggccgacgagatcatgcgggctctgaagcaagtctccaagacttccagcggcatgtgaatttgatgcttcttttacattttgtccttttcttcactgctatataaaataagttgtgaacagtaccgcgggtgtgtatatatatattgcagtgacaaataaaacaggacactgctaactatactggtgaatatacgactgtcaagattgtatgctaagtactccatttctcaatgtatcaatgtatatagaagttaacgtgc

SEQ ID NO: 4989 - DNA, 1491 bp, Zea mays
  Clone ID: 700438448_FLI
gcagaggaaggtgtacgccgccagaacgctcctgttcctggacggcgaggactcgtcgatgctcagaccgctggcgatcgagctcagctcgccgcacccggagaaggagcagctcggcgcggtcagcacggtgtacactccaccggacagcggggacgacggcatcacggccgggaggttctcaacctgggaactggcaaaggtttacgcctctgccaacgacgcagccgagaacaacttcgtcactcactggctcaacacgcacgcatccatggagccgatcgtgatcgcggcgaaccggcagctgagcgtgctgcacccaatccacaggctcctcaagccgcacttccggaagacgctccacatcaacgccgtcgcacgccagatcatcgtcggctcgggtgaccagaggaaggacggcagcgtcttccgtggcatagacgaggtcacctacttccccagcaagtacaacatggagatgtcctccaaggcgtacaaagcctggaacttcacggaccttgctcttcccaacgatctcatcaagagaggtctggcgaaaggagatccaaagaagccagagacgctggagctggcgataaaggactacccgtacgcggtggacgggctcgacatgtgggcggcgatcaagaagtgggtggctgactactgcgccatctactacgccgacgacggcgcggtggcgagggacagcgagctgcaggggtggtggagcgaggtcaggaacgtggggcacggcgacctggcggacgcgccgtggtggccggcgatggactgcgtcgccgacctcgtggagacctgcgccaccgtcgtctggctgagctcggcgagcggagggcggccgaggcgctggcggagttccgggcgaggttggaggaggtcgcgggcaacatcgacaggcggaacgcggaccctgcgctgaagaaccggacggggcaggtggaggtgccctatacgctgctcaagccgacggcacagcccggactggtgctccgtggcatacccaacagcatcaccgtttgagcagcagagcgccgtcggcagctgtcagctgtgtacagtacagaataataaggtggtcgtgtttggcgctatctccaccacataaacgtgaaaatgtttttttttgaattatatggacatgcagggccgcagcccgtaagcctggccccagtttcggttttctgtttttttttttttgcctcgatctggtgatcagcaagccacgtcggtccgggtgatctcgctaccggagatagaatgtgtacacgaaacctaataggtttttactccattaggatacgaggttgagtcaattttcatacctatagatttgttaatgagcataaatctatacccgacgagttcatgagtataagtttattatgtgaaccgtgggtttttaaacccgaccaaacttagtgtatattgtcattttattttataaacggacaataaacttgttatctcctt

SEQ ID NO: 4990 - DNA, 1504 bp, Zea mays
  Clone ID: 700438461_FLI
cgcgccgtagccgtgtagccacttccgccgcgagaaggccaagggctctccagcgagctcggtgctcggctacagccgcttccggtgaagccggtgagctgtcgcacgcgacactgctatggagggcggcgaagctacccatctactccgtagcgctaataccactcacagtagggagcgcttctgcttattatcatgcaggcttattctttaccaagcgctattttgttctcctgacagcagcagtcctcgtgatcacttggctcaatctcagcaatgatgtttatgactcggatacaggggctgatagggacaagaaagaatctgttgtcagcattactggcagccgagcaatgacacaaaatgcggcgaacttttcccttttcctcggctttgcagggctactttgggcctttgcagaagccaaggatatcagattcattttattggtgatctctgcaatcttctgtggttatgtttaccagtgtcctccattccgattaagctaccaaggactaggcgagccgttgtgtttcgctgcatttggtcctttggcaaccacagccttttacttctcaaacagcagcttaaatacttcgagcggaggagcggctcttctccctctcactaaaacagttatagcttcatctgttctcgtcgggctgacaactactctgatactcttctgcagccatttccatcagatcgatggagatctcgccgttggaaagatgtctcctctggtaagaatcggcactaaagcaggatcgcggatagtgtcgattgggattgtcatgctttacattctcttggctacgtttgggacatgcggatctctcccgccatcttgcattgtcctctgtgcccttactctgcccatgggcaaaacggtcgtggactacgtgctgaaacatcacgaggacaacgcgaagatattcatggcgaagtactactgcgtgcgcctgcacgcgctgtttgggatggcactggcctctggtttggtcttggcccgaaatggtatattagcctgacagacaggctcataggcggcgctgaaatccaggagagggtccagagcaccctggagtttcagaatcagcgagcaccctgttcctcaatttatgttctgaatctgaactacttctgattcgactatcgaacaggccgatgagaatggggcgcagtactgagcagctgcagttttgccaagaaacggtggagggaatgggccctaggagaagtagaactactacagcgtcagaactcagatgcacaccggcccgtatcggacggcaagttcggtgctcgagttcatttggttcagcgtccttgtacgctttggtccgctctcgggggcttgcttgctcgtgcacggtcagactgccgttgcgccggggtccgggggatgccagtgtatgtatgcatatggattgaatcccaagcaaggacgagtcatgcactcatgtacaagcattacttctgtgcacagacgaccatacagatt

SEQ ID NO: 4991 - DNA, 1630 bp, Zea mays
  Clone ID: 700438504_FLI
gtcccacccgttttgcagtgcggaagccggcgaaacttccaagcccaagggaaaaaaaaagctgtcacctttaactcgatcccctcttccccgcccgagtcagagcggcggcgccagagccggtgccggagctgacagcttccggcaagcgggggctacttggtgcggcgggctatttccgcggttttgtgccacagcggactgaactgcccgcccaggcttccctgtcagggtcaccaagattgaacaagactgaactgccgcgcttcaggatactgaactgccatctcagttaaatgatacactgcacaacagtgggcagcgatagtttgagacacattaacaatgagttgtttttctcactttttcaagagaaaaagggggccacaacaacaagacgatccatctgacaattatttcactggttctgagaatataacaagattcagctacagggaactggttagagccacatcaaattttgaccaaggcaataagattggtgagggcggctatggacctgtctacaagggaacactcaaggatgggacagttattgccgtaaaggttctgtctttacattctagacaaggggcaaaggagtttcttaatgagcttcttgcaatctctgatgtaacacatgagaatcttgtcaaactctatggctgctgtgtagaaggaaaccacaggatccttgtctacaattatcttgaaaataatagtcttgcacatacccttctagattcgcgacacagcaacatccagttcaactggagaactcgggtaaatatctgcatcggtgttgcccaaggattagctttcctccatggcagtgtcagccctcacattgttcaccgtgacatcaaggcgagcaatatacttcttgataaggacatgacgccaaaaatatctgattttggtctggcaaagcttctacctccggatgtatcacatgttagcacaagagtcgcagggaccctaggttacttggctcctgaatatgcaattcgaggacatgttacacggaaggcagatgtctacagctatggcgttctgcttatcgaaattgtgagcggaagatgcaacactgatacgaaattgccctatgatgaccagattctccttgagaagacatggagatactatggtcgcgggaatctggagaagatcatagacagctcccttggcgacgacctggacgttgacgaagcctgcaggtttctgaagatcgggctcctctgcacccaagacggcacgaaacgccggccgggcatgtctgcggtggtggccatgctgagaggcgaggcggacgtggacacggagacgatcagcaagcccgacgtgatcagggatttcggagacctgaagctgcggagcagggccacgtcgtccacgctgctgacctcgatcatggcgcggtcgtccccgctgtcgtctgaggagacgacgcgcacctccatcaccttcaccgagatatcggagcgcgactgactgacgatcgccgttaattcgccgacaagaagtgggctgtgagcctgtgaccgtgtagctggaggagcggaaagtgtacgtagcataggccggggagaattctttttgctggttttatgtgatctgtgtgcgtatttct

SEQ ID NO: 4992 - DNA, 787 bp, Zea mays
  Clone ID: 700438513_FLI
caggagcttgacgcaaaggggagccgtagcctgtagagtgcggggagcaggagccggcggagccatggcgaccactctttcgttatcctctcccctcttcctcggagctccggccagaggcaagggttacacgagtagagttcgttgtcgggagcagcagcgacgaacgacaatagtatctatgcttggaaggaaatcaacggctagagcaactgttgtcccagaccccgactataggttaccaatcgctatacttgggattgctagtgcttttgcatatgccgacaatcttctcgctgctgcacctgtaggactgctggggcttcttcttttgttccagactacaagagtgaggttcgtctttgataacgaggccctggaggtgaaggttggagagcagctgcaggagtcaggtgaaaatgtattcgtcggcggcaagaaccgttggaagtactcaacgttcgtaaactgggagctgtggtggccacagtttcctgtcttggtttacttcaaggagacccaaacgaagcccgaaggacagatccacttcttccctgtgatattcgatggtcgacaattgtacgatgtgatggtggagcgtgctgggccctcgaagacgagtggccctaaatagttgcagctgatcttcctaccgtcgttttgctccctcgggctccctcacatttaaattgtaaaaatggtaaaattatatacaaacggggttcgattccaaccacggttcttagctttaaacccatcttcatacgtacctaaccaacaaaaacac

SEQ ID NO: 4993 - DNA, 759 bp, Zea mays
  Clone ID: 700438604_FLI
ggagcaatggacgggctcaactacagcaagttgcgctcctcgctccggcctcggctccaagcgttctccggcgtcctcttctccagtttgcgctccctagacgggctcctgcacatggcgtctgtcgccgtcttgcagtttgtccacgatccgcacgatgatccaccagtgctaggctgcgtacacttgactctagctcgcgtatatgccttggatcgagctcgctctctttctctcgtcaaggaccacttcacaaccttgggaaaagacctcaccgtcattgggtactgctgcgatgatgctgaaccccgtcgtcgacaactccagttctacgtcgccgagtccatgtttcgggtagcagcatcatattatctcgcgccattcctctgaaggttcatacatgcgcattttgcatttcattaggtgcgctagttgagcacttgatgcgaagggccagagctgagtcaaccacaagatgatgttaagcatgggcttcttcgcaaggtgatgctgatggatgaacataaggatggatgacttgaacgagtaccaagacaaagtatgatcgtcaagtggtcatctgctaacaacactaacgtagtttttatcccaagcaagccccggtgtatttgccacctccttctgttttaaaaagttttatcaccttgaatgatgcatgcattaggtgataggagttgtgtgatcaaacagttgatgcatttccatccttgattaaaaaaccctaatacctgttttatg

SEQ ID NO: 4994 - DNA, 1338 bp, Zea mays
  Clone ID: 700438624_FLI
ctggtccgtggccaggcgtcgtccatgctctccgctaccaccgtgccactccagcaggggggcggcctgtccgagttctccgggctcaggagctccgcgtcgctgcccatgcgccggaatgccacctccgacgacttcatgtccgccgtctccttcaggacccacgcggtcggcacgagcggcgggtcgcggcgggcgccgacggaggcgaagctgaaggtggccatcaacgggttcggccgcatcgggcgcaacttcctgcggtgctggcacgggcgcggcgacgcctcgcccctcgacgtcatcgccatcaacgacaccggcggtgtcaagcaggcgtcccacctgctcaagtacgactccacgctcggcatcttcgacgccgacgtcaagcccgtcggcgacaacgccatctccgtcgacggcaaggtcatcaaggtcgtgtccgaccgcaaccccagcaacctgccgtggggcgagctcggcatcgacctcgtcatcgagggcaccggcgtcttcgtcgaccgcgagggcgcggggaagcacatccaggcgggggccaagaaggtgctcatcacggcgcccggcaagggcgacatccccacctacgtcgtcggcgtcaatgccgaccagtacaaccccgacgagcccatcatcagcaacgcctcctgcaccaccaactgcctcgcgccattcgtcaaggtgctcgaccaaaagttcggcatcatcaagggcaccatgaccaccacccactcctacaccggcgaccagaggctgctggacgcgagccaccgcgacctgcgccgcgcccgcgccgccgcgctcaacatcgtgcccacgtccaccggcgccgccaaggccgtctcgctggtgctccccaacctcaagggcaagctcaacgggatcgcgctccgggtgcccaccccgaacgtctccgtcgtcgacctcgtcgtgcaggtctccaagaagaccctcgccgaggaggtgaaccaggcgttccgcgacgccgcggccaacgagctcacgggcatcctcgaggtcgcgacgtgccgctcgtgtccgtcgacttcaggtgctccgacgtctcctccaccatcgacgcctccctcaccatggtcatgggcgacgacatggtcaaggtcatctcctggtacgacaacgagtggggctactcgcagagggtcgtcgacctcgctgacatctgcgccaaccagtggaagtgaagcgttgcattgtaatagcactttgtaactcctcaccctccacagggctttgggattcaccccgaaatgactcactttcggtgaaattcacccgtttcggcgaggtcgtccgaat

SEQ ID NO: 4995 - DNA, 788 bp, Zea mays
  Clone ID: 700438651_FLI
cgtggtcttgctccagaaggacggaagaggcgcatcaagctttcatcagatctcgccgcccacccacaccggcaggcaggctccgtcggcttctccgcacccgtgagaactcttcggccagtgaaggtcgcgtccgatgaactcgagaagggacttccgtagccatagagctgctttatttgatggcattgaagaaggtggggtgagagctccagcttattcttctcgtgaaattcatgagcacgagaatgatcaagctctggacagtttgcatgatagggtcagcgttctcaaaagactgactggcgatatacatgaagaagtggagaaccataaccggatgctggacagaatgggtaatgacatggatgcttcgagaggatttctttcagggacggtggacaagttcaagatggttttcgagacgaaatcgagcaggaggatggcgaccatggtggcatccttcattgctgtcttcttgctcatatactaccttacaaagtagcagcacggctgtctggctataaggttcgcagtcgcagcccctgttgtgtcgctgggtgtgatgatgtatattgtgtggtcctaccttcgcacttgatgaccggaacgttggttctctcataagaaacggagcattggtggatttgggagttgtcagatactcagatgatgttttttcagatacaatcatacaatacgtgggtgtacatcgctggagccgcctggggggctggtaaatgatatgtaactgtgaaccgcaaaagatatgcgatgactttattacc

SEQ ID NO: 4996 - DNA, 1695 bp, Zea mays
  Clone ID: 700438684_FLI
gtcggctgccgcagactggtagtagccggcgcgccgtcaccgtatcctcagatcagaggcgagcagaaaccacaccactctactgacgcccgacgagcagtgtaacattttccttcagccatgggtaaggagaagactcacatcaacattgtggtcattggccatgtcgactctggcaagtcgaccaccactggccacctgatctacaagcttggaggtattgacaagcgagtgattgagaggttcgagaaagaggctgccgagatgaacaagcggtcattcaagtatgcgtgggtgcttgacaagctcaaggctgagcgtgagagaggtattacaattgatattgccctgtggaagttcgagaccaccaagtactactgcactgttattgatgccccgggacaccgtgacttcatcaagaatatgatcactggcacttcccaagctgactgtgctgttcttatcattgactcaaccactggtggttttgaggctggtatctccaaggatggccagacccgtgagcatgctctccttgctttcacacttggtgtgaagcagatgatttgctgctgcaacaagatggatgctactacacccaagtattcaaaggcccgttatgatgagattgtgaaggaagtctcttcctacctgaagaaggttggatacaaccctgataagatccacttcgttccaatctctggttttgaaggtgacaacatgattgagaggtccaccaaccttgactggtacaagggcccaaccctacttgaggctctggacttgatcaatgagccaaagaggccttcagacaagcccctgcgtctcccccttcaggatgtgtacaagattggtggtattggaactgtccctgttggacgtgttgagactggtgtcattaagcctggtatggttgttacttttgggcctactggtcttactactgaggttaagtccgttgagatgcaccatgaggctctccaggaggcccttcccggtgacaatgttggcttcaacgtgaagaatgttgctgtgaaggatctgaagcgtgggtatgtggcctccaactccaaggatgaccctgccaaggaggctgctagctttacctcccaggtcatcatcatgaaccaccctggccagattggcaatggctatgccccagttctggactgccacacctcacacattgctgtcaagtttgctgagctcgttaccaagattgataggcgatccggcaaggagctggagaaggagcccaaatttctcaagaacggtgatgctggtatggtgaagatggttcccactaagcccatggtggtggagaccttttctcagtatcctcctcttggtcgatttgctgtccgtgacatgaggcaaacggtggctgtcggagtcatcaagagtgtggagaagaaggacccaactggagccaaggtgacgaaggctgctgccaagaagaaatgatctatctgtctggtgctgtgcttgcttgttggttacctcgtggaagcttaaaatatctcgtcttgttgacatccttgcagttgtcgcgtgaacaagtaatctatgatggcaatgtttgcctggtcatgaagtattattactttcgttgaaaccgtgatgctattaagacttaatttttttatggaacatcgaatgtaaggcatacatggttatgagttttgtactaccctt

SEQ ID NO: 4997 - DNA, 743 bp, Zea mays
  Clone ID: 700438691_FLI
tgcaaatcaaacaacaatgcttaaaggagaaactgaagaaattgggaagcttattgaaaagacgatgatgcaaaaatatggagttgaaaatgtaaacgatcacttcatggccttcaatactatttgtgatgccactcaggaaagacaagatgctatgtatcagctggtgaaagagaaagttgaccttattcttgttgttggaggatggaattcaagtaacacctctcatctgcaagaaattggagaactcagtggaattccatcatactggattgacagtgaacaaaggattggaccaggaaacaggatcagctacaagctaaatcatggtgaactggttgagaaaaataactggttacccgaggggcctattaccattggtgttacttcaggtgcctcaactccagataaggttgttgaggatgctcttcagaaggtatttgagatcaagcgtcaggaaattttgcaggttgcataaattttaagcagagatttggtgaagagctgaatagttttggcttggcaaaggttactagaaacgttgcacaggcaaatgtttgtacagtagctaaggatgtaacgagttgggcacgaatactaccacgagtcactatccttgtgctggaatttacagtacggtggaaactaaaatggtgtaagtttctagtacacgagtcactatccttgtacacgagtcagcctttctaaggcctaacattttgccacttaaattgatggggaag

SEQ ID NO: 4998 - DNA, 1749 bp, Zea mays
  Clone ID: 700438729_FLI
ggccgtcgtttgccccctccctccccacctgcaccaccaccaacaccaaccaacaggtggcgagagcgagagcgagagcaaagagctgagcgggacggagcagctagcgctagggataacgcacacccaccaccatggcgacgcccggagagcagccggcggaggtcgtgtccgtcgagatgcccgcacccgacgggtggaccaagaagtttactcccttgagaggggggagatctgagattgtttttgtttcaccaactggcgaggaaattaagaacaagaggcaattaagtcagtacctaaaggcacaccctggaggccctgctgtttcagagtttgattggggaactggtgataccccaaggcgttctgctcgtattagcgagaaagtcaaggtatttgatagcccagagggcgagaagatcccgaagcgcagcaggaactccagtggtaggaagggtaagcaggggaagaaggaaacccctgagaccgaagaagccaaagatgctgaaactggcaaggaggcagaggaggccccaagcgaagatgccgcaaaggagactgatgtggagatgaagcctgctgaagaggtgaagggggcctctgctgaaacagaagatgctgacatggctgatgctcctgcaccagcaccaatggaagaagataagaaacaaactgaagaactggcagaagctattgcagctcctcctgtgccatcggaggagaagaaagatgtcaagccagctgagcctgaagctgcagcaagcaacccaactgaggattcggcccctgctcctgctgaacctgctgatgttgctgctccagctgctgagcccaaatcagacgccaaacctgctgctgttgctgctccagtgcctgagaccaaatcagacgccgagcctgctgctgttgctgctccagcgcctgagaccaaatcagacgctgagcctgctgctgttgctgctccagctcctgagaccaaatcagtagccgagcctgctgctgttgctgctccagcgcctgagaccaaatcagatgccgagcctgctgctgttgctgctccagtgcctgagaccaaatcagatgccgagcctgctgctgttgctgctccagtgcctgaaacgaaatcagatgctgagcctgctgctgatgctgctccagttcctgagatgaaatcagagtccgagcctgctgctgttgctgctccagcgtctgaaaccaaatcagacgccgagcctgctgccgttgctgctccagcgcctgagaccaaatcagatgccgagcctgctgctgctgctgctccagtgcctggaaccaactcagatgctgctgctactgatccagcacctggaaccaaggccactgccgccgatccagcacctggagctccagcagagaactccaccgacaaagacggaagccaggagagccagcccgtgaacaatggacagctgccgcactcgacggtgaagtgcacctgaagccgcaacgccggaaaaacctgaaccccttccggcgccgtgtatctcatttaggaacaaacattcgcattcgcattcacattgttatcagttaaaaagtctatggaacggtaagcatgttaattagtcagtctgacgctgctgggtgacaggttggtaattaggctctgcatttagctgttttgtatggctgctgtcgccgccatacatgtatcatcttcttgtggttgtatggtacctaaccgcgtaaacatgttaaccttaggcc

SEQ ID NO: 4999 - DNA, 616 bp, Zea mays
  Clone ID: 700438766_FLI
atccaacgaaccgttccgttccttccgtccatccatccgccatggcgaccgctacgctactgagctcctccttcgccatgcccgccgccgcccgtagggcctcctccccttcctccgcctcattgagcttcgccacgtcgcagctcgccggcctctccctctccgccggcgttgcaactccaaccgccgtcgccctcctccccaagaggcagcagctccagcccactgtcgcgcggcgtgtgtgcccgttcacggacaagaagacgaaccgggcgaacaaggtgtcgttttccaaccacaagacgaagaagcagcagttcgtgaacctgcagtacaagaagctgtggtgggaggccggcaagcgcttcgtcaagctgcgcctttccaccaaggccctcaagaccatcgagaagcacggcctcgacgccgtcgcgcgcaaggccggcatcgacctcaacaagaagtgagcaagaagtgagcccatccgatgagcagccaaactagtgtggggtggcactagcttagcattcacgttcgcagggtcgtctcgtctgtctgtctgcctgcctgcctcctgctgttctttcgcaatcaaatcatatcattatatttcctc

SEQ ID NO: 5000 - DNA, 1180 bp, Zea mays
  Clone ID: 700438813_FLI
tattggctcaattcttagtaacctttgcatttacaattatgcaaactagttcaattatgcacttctatacttgctttggtttgtgttggcatcaatcaccaaaaagggggagattgaaagggaattaggcttacacctatttcctaattgattttggtagttgaattgcccaacacaaataattggactaactagtttgctctagtctataagttctacaggtgccaaaggttcataataagccaataaaaagaccaagaaaagggttcaaacaaagagagcaagggacaaccgaagtgcaccctggtctggcgcaccggactgtccggtgtgccaccggacagtgtccggtgcaccaggggactccaagctgaactccttaccttcggaaattctcagaggcgctttgctataattcaccggactatccggtgcaccaccggacagtgtccggtgccccaagggagagcgactctgaactcgccagcttcgggaatccgctccgctaaaattcaccggactgtccggtgagtcaccggacagtgtccggtgcacaccggagtgtccggtgagccagcagagcaacggctacttcgcgaagcaacggtcgactgcaacgcattaattgcgcacctgcgtgcgcagaggtcagaggacgtgtagttggcgcaccggacagtctacaggacctgtctggtgcaccaccggacagcccagagggcccacatgttagatctccaacggtcgaaccccaacggctggctgacgtggctggcgcaccggactgtccggtgcgccatgcgacagcacacttccaacggccatttttggtggttggggctataaataccccaaccatcccacattcaatggcatccaagttttccaccttcaacacattacaagagctatagtattcaattctagacactccaaagagatcaaagcctctcccatgtccaaagacaactccaatcaatagtgactagtgagagagtgatatttgtgttcatttgagctcttgcgcttggatcgcttcttttctttctcattcttcttgtgatcaaactcaattgtaaccaaggcaagagacaccaattgtgtggtggtccttgcgggaacttcgtgttccatttgattgagaagagaagctcactcggtctaagtgaccgtttgagag

SEQ ID NO: 5001 - DNA, 1601 bp, Zea mays
  Clone ID: 700438828_FLI
gtggatttcgcggacgaggaggactaccgcaagggcggcggcggcgagctgctctacgtgcaaatgcagtcaaccaagcccatggaaagccagtccaagatcgcttccaagctatcgcccatatctgatgaaaatacagtgcttgatttggttatcattggttgtggtccagctggtctttctctagcttcagagtcggctaagaaaggtctcactgtaggtctcattgggcctgaccttccattcacaaataactatggtgtgtgggaggatgaatttaaagatctcggtctagagagctgtatcgagcatgtctggaaggatactattgtctacctagacaataacaagccgatactgattggccgttcttatggcagggtgcaccgtgacttgctccatgaggagctgctgagaagatgctatgaatctggcgtgacatacctgaactccaaagtggacaagatcatagaatctccagatggacacagagtagtctgttgtgacaagggtcgcgagataatttgcaggcttgccattgttgcttcgggggcagcatctggtaggcttctagagtatgaggttgggggtccccgtgtttgcgtgcagactgcatacggagtagaagttgaggtggaaaataacccatatgatcctagcttaatggttttcatggactacagagattgtttcaaagaggaattctcacacattgaacaagaaaatcccactttcctgtatgctatgcccatgtcatccacacgagttttctttgaggaaacatgcttagcttctaaagatgctatgtcttttgatctacttaagaagaggctgatgtatcggttgaacgcgatgggaattcgtatcctgaaagtttatgaggaggaatggtcctacattcctgttggagggtccttaccaaacacagatcagaaaaaccttgcatttggtgctgcagcaagtatggtgcatcctgcaacagggtactcagtggtcagatctttgtctgaggctccaagatatgcttctgtgatatcggacatcttaggaaatcgagttcctgcagaatatatgctcggaaattcgcaaaattacagtccatcaatgcttgcatggagaacactgtggcctcaagagaggaaacgccaacgatccttcttccttttcggattagcgttgataatccaactgaataatgaaggcatacaaacattcttcgaagcctttttcagggtgccgagatggatgtggcgaggatttcttggctcgaccctttcatccgtcgatctcatactattctcattctacatgtttgcgatagccccaaatcaattgcgaatgaaccttgtcaggcatctcctctctgacccaactggctcatccatgatcaagacctacctgaccttataaaaccatttgcaccaggctgcaagcctgcaagaactcttagaaactgtacagttttgtagttgtacataagttagagaggatctggggggttacttggcggcggatctaggggttagcagcaatgctataatacactgtaaatcttttatggttgctatggtgattggatagagaagcacaccgtgttgtgc

SEQ ID NO: 5002 - DNA, 1095 bp, Zea mays; identical to SEQ ID NO: 949
  Clone ID: 700438914_FLI

SEQ ID NO: 5003 - DNA, 1514 bp, Zea mays
  Clone ID: 700438940_FLI
gcgagatgaacggcggcggggaggacgggaagcagcagccgcacctggtactggcgcacaagctgttcctcctgtcgcactccgacgtcgacgacctcgccaaggtcgacctacgcgctgacgtgttcgcggcagtcaaatccgatgacatggcagctctgtacgagtcgttggcggcggacggcgtactggagacggacgcggcgctgctggccgagatgcgcgccaggatcgacgaggagatccggaagctcgacgagaagattgctgatgcagaggagaacttgggtgagagtgaagtgcgtgaggcccatctcgccaaatccttatatttcataagggttggggagaaggagaaagcactggagcagcttaaagttactgaaggaaaaactgtagctgttgggcaaaagatggaccttgttttctacacactacaaattggattgttctatatggactttgatctcatctcgaagtccattgacaaagcgaaaaacttgtttgaggaaggtggtgattgggaaaggaagaacagattgaaagtatatgaagggttgtactgcatggcaactagaaacttcaagaaagctgctagtttattcttggattcaatttcaactttcacgacatatgagctattcacatatgatacattcatcttctacacagtcctcacgagtgttatatctctggaccgtgtatctctgaaacaaaaggttgtagatgcgcctgagatcttagccgtaattggcaaagtacctcacctctcagagtttctcaattccctctacaattgccagtacaagtcattttttattgcattctctggcttgactgaaccaatcaagttagagcgttacttgcagcctcattttcgctactacatgcgtgaagtgcgcactgttgtctactcacagtttctggaatcgtacaagagtgtgacaatggaagccatggctgctgcatttggcgtcacagtcgactttatagaccaggaactgtcacgcttcattgccgctgggaagctccactgcaagatagacaaagttgctggcgtcttggaaacgaaccgacctgatgctaggaacgccttctaccaggcaaccatcaagcaaggagacttcctgctgaaccgcatccagaagctgtcacgagttatcgacctgtaggggagagcccttcatgcaggacaggagcttgccttggttcctggagtgtacgagcggtgcttgactttcaatgggtctcagttgaagaagcttttagggatatttgtgttctgagaaattgtgttttgcactttttagcctaactacatgaagcccccaaaaaaatttcatggcgttgcttgtagacgtttcttcattgatgaattcatcccttgttttttcttgctggatattgttttgctactaagagcctagcagatggtagacaagcagaatcacttgtgttctgttacgtcaatgctgttctgtttcagccaaaggaacaaaagaacagatcgcaag

SEQ ID NO: 5004 - DNA, 2299 bp, Zea mays
  Clone ID: 700438944_FLI
attgaataccagtcaaagcgtgggtacattgaattggattactttggccgcactgtcgggatcaaaatcatgccagtgggagttcatatgggtcaattggagttgggtctgcgcttgcctgatagggaatggaggctttctgagcttcaacggcagtttcaggggaaaactgtcttgcttggtgtggatgatatggatatctttaaggggatcaatttgaagcttctcgcctttgagaacatgttgaggacacatcccaagtggcaggggagagcagtgttagtgcagattgctaacccagcccgtggaaggggtaaagatctggaagccatccaggctgagattgaggagagctgccagcggatcaatggagactttggccagtcagggtatagccctgttgttttcatcggccgtgatgtgtcaagtgttgagaagatcgcctattatacgatagcggaatgtgtggtggtcactgctgtgagggatgggatgaacttgacaccgtatgaatacgttgtctgtaggcagggtgcaccaggatctcagtcggtatcagaggtgagtgggccaaagaagagcatgctggttgtgtcagagtttattggctgctcaccgtcactgagcggtgctattagggttaacccatggaatatagaggcaaccgcagaggcgatgaatgaggccatttcaatgccagaacaggaaaaacagttgaggcatgagaaacattaccgttatgtcaggagccatgacgtcgcttattggtcaaagagcttcatcatagacttggaaagggtttgtaaggatcacttcaagaggacttgttggggcatagggttgggttttggtttcagggtggtggccttggaccctcatttcacaaagcttaacatggattcaatcattaatgcttatgagctttcagagagcagggctatattgctcgattatgatggaactctggttccccaaacttccctcaacaaggaacctagtccacaggttttgagcatcatcaataccctttgctcagatagtagaaacatcgtttttcttgtcagtggtcgagacaaagataccttgggaaagtggttctcctcatgtccaagattggggattgcagctgaacatggttacttcttgaggtggtctagagaagaagagtggcaaacatgcactcaggcattggacttcggatggatgcaaatggcgaagccagtgatgaatttatatacagaagcaactgatggatcctacattgaggccaaggaaagtgccttggtgtggcaccatcaggatgctgacctaggctttggatcctcacaggcaaaggagatgcttgatcacctggaaagtgtactagcaaatgaaccagtctctgtcaagagtggccagttcattgttgaagtcaaaccacagggaataagcaagggaatagttgccgagaggatacttgcatcagtgaaggagagaggaaagcaggctgatttcttattgtgcatcggcgatgataggtctgatgaggacatgtttgaaaatattgctgatatcattgggaggaatttggttgctccaagaacagcactgtttgcgtgcactgtgggacaaaaaccaagcaaagccaaattctacctggatgatacattcgaagtggtcactatgctgagcgcactggcagatgccacaggtcctgaactggagactgattcggctgatgaatctgtcgcatatatctcatcacttgatattggtgacgaacaatcagaatccagtgataaaccagttgaagggtcttagccagttttctcttgcgttttcagaacatgatgattgtttcaatagtcaattctattctacacaattttctgatgggaactcaacgactaacaactggttctacgaatgctccagagtgaagcttctcaatctgctgtgctccaagttctccagttgggcaagatagtacagtctgttgctccaaggcgtagatccatatgttcatagctgacttacttggcacgttctttcactttctcattcctggttgaattaaaatgaaaacctcacagaagacaaagggagcgctgtttggctcattggctgaagtaatctggggggaggtataggagtggcgtatgtgaaaggagcctgtgcgcaggttgtgatatgattccttattaacacgacgttacaaagtggtgtcacttcttgaactaccagtagtaacaatcccaagagtgaggttcgaattgattaattaattgcttcaaagccggatctcggatggttttgctcc

SEQ ID NO: 5005 - DNA, 894 bp, Zea mays
  Clone ID: 700439009_FLI
atcggaatgaccaaaaaagagtaagaattacagaaaagcccctccggtagtctctctcttttccgtttctcttctccggccttcgtcttcctgcttctccccgtccgccaattcccttccccacccaaaccctagagcaaagctcaatggccctcgtcacgagttcgcgagagactctgcaccgccgccgttgactgctgatccaaccgctcccgcggcgcccggggccctgtcacggaggcggcggcgacatggcgtcgaggcagcacaatgcgcagttccacaaatccaagacgcttgacaacaaatacgtgaggatttatcgcgcctcccacctcagatccaggggaattcgtgtttttttgctgcgaattttggggttatcctactctcactcagtgcgcctgcacgggcccgtgtgcagatgcttggagatgaaatagggaagggggcgtacggccgcgtatacaaggggcttgacctggagaatggcgatttcgtggccatcaaacaggtctcgctggagaacattccgcaggaggatctcaacataataatggtgacgttttttcttacttatcatatcatgcacaggaaatgaaggggtgtgtaattgcgtgaaatgtgtttgttgggaggagctgtgtagctagcacacagcggctccagttcagctataatatgtagttttagctatgcacctcgcccttttgtagcacactttttgctgtgagattacattccagggctaggttctgctagcttacttatgggagtagtgagcaagatccctgtttggtaggttcaaacttggaattatagcagaagtcaaggacatgcgttacctgtgtgtttggcatgttaatcgatctgtagtgagtcggttactcggtt

SEQ ID NO: 5006 - DNA, 1107 bp, Zea mays
  Clone ID: 700439012_FLI
tttagcaaccaaacttactgaggtgtctgtgagtgacaaacttgaaggcttccgtgcaacaaaagagaactttaaaggtttgagttttcctacaatttcatctgtgggaccaaatgcagcagttattcactataaacctgaagcaagcacatgttcggaaatggatgctgataaaatatatctttgtgactctggggcacagtacctggatggtacaacagacattacaagaactgtacattttggtaaaccctcagcacatgagaagtcatgctacacagcagttttgaaaggccacattgcactagacattgctgtgtttcctaatgggacgacaggacatgctcttgatattctttcacgagcaccactctggagagagggtcttgactatcggcatggtacaggccatggaattggatcttatttgaatgtccatgaaggtcctcatctaattagcttcagaccttctgctcgaaatgtaccgctgcaagcatcaatgactgtgacagatgagcctggttattatgaagatggggcctttggtataagattggagaatgtacttatttgcaaagacgccaatgctaagtttaattttggagataaaggttatttggcatttgaacatataacatgggctccataccagaccaagctgatagacaccgagcttctgacccctgttgagatcgactgggtgaacacgtaccactcagactgccggaagatcttggagcctcatctgaacgagcaggagaagcaatggctgatgaaagctactgagcccgtagctgcaagaggctgagccttttcgtcaacgttgcatgccaccgagcgccaggctcatcttctgcgtggcatacatataagattggctgcccccgctggttaaataataatagcggcgaaggaacaggatagcttgttctcaacgctgatcttcgccgctaaagtggagtgtttggcaggatgctattttctttcccattagggtacgttcgggttttacggaacggtaggtttttatacggaacggtgggtacaacaattcctagagccggattgtttctctaattatttatataaggtttgatcaattgaaat

SEQ ID NO: 5007 - DNA, 1507 bp, Zea mays
  Clone ID: 700439054_FLI
gtcaaggctaagatccaggacaaggagggcatccctcctgaccagcagcgccttatcttcgccggcaagcagcttgaggacggccgcacacttgctgactacaacatccagaaggagtcaacccttcatttggtgctgcgccttaggggaggcatgcagatctttgtcaagaccttgactggcaagacaatcacccttgaggtggagtcctcagacaccattgacaatgtcaaggctaagatccaggacaaggagggcatccctcctgaccagcagcggcttatcttcgccggcaagcagcttgaggacggacgcacacttgctgactacaacatccagaaggagtcaaccctccacttggtgctgcgccttaggggaggcatgcagatctttgtcaagaccttgactggcaagacaatcacccttgaggtggagtcctcagacaccattgacaatgtcaaggcaaagatccaggacaaggaaggcatcccaccggaccagcaacgtctcatctttgccggcaagcagttggaggatgggaggacccttgctgactacaacatccagaaggagagcaccctccacttggtgctgcgtcttaggggtggcatgcagatctttgtgaaaacccttactggcaagaccatcactcttgaggtggagtcttcagataccattgacaatgtcaaggccaagatccaggacaaggagggcatcccgccggaccagcagcgtcttatctttgccggcaagcagctggaggatggacgcacccttgcggattacaacattcagaaggagagcaccctccacctggtgctgcgcctcaggggaggaatgcagatcttcgtgaagacattgacaggcaagaccatcaccttggaggttgagagctccgacaccattgataatgtgaaggccaaaatccaggacaaggagggtatccccccggaccagcagcggctgatcttcgccggcaagcagctggaggatggtcgcaccttggctgactacaacatccagaaggagagcaccctccatctggtgctccgcctgaggggtggtatgcagatctttgtgaagaccttgactggcaagaccataaccctggaggttgagagctctgacaccatcgacaacgtgaaggctaagatccaggacaaggaggggattcccccagaccagcagcgtctgatcttcgccggcaagcagctggaggatggtcgcacccttgcagactacaatatccagaaggagagcaccctccacctggtgctccgtcttcgcggtggttattaagccatcagtcgttgaagctgctgctgtatctgggttatccagtgtctctgccattgcccatggatggtactgtctttcaaagtatttgtatggtttgtgtcgtgagtcgtgactgagctggtttcatggaccagttgtgttctcgttacccaaaactatcgtgcggcagcatatggcttaatcatgaataaatgtggtgtttgaattt

SEQ ID NO: 5008 - DNA, 462 bp, Zea mays
  Clone ID: 700439055_FLI
gggtacggtggtggccgtggaggcggcggctacggcggtggcgggcgccgtgatggcggcggcggctacggcggtggcggcggctacggtggtggcggcggcggctacggtggtggtggcggcggctacggcggtggcaaccgtggcggcggctacggcaactccgacgggaactggaggaactgagcggtggggcccgcgcggccaagttatcctgttcgctaccgtgttgtttaccctagtccagagtgtttatcttcgttcgtctcgtgtttgttgttgcccatctgtgtttttgattgaaggtcgctctgtgtcagttgttagtgctgtgttcatcctcggctccagcagacccatgcatcaaccagcatggactgcggatcgatgggtgctgttacccccgtcaggctttattctaagttaaatcctaaggaaaaaaatggtgcttcttggtgctgc

SEQ ID NO: 5009 - DNA, 574 bp, Zea mays
  Clone ID: 700439061_FLI
cgctcaccgtacctcctccgaatccgccgaccgccggcgagcccctcctcctccacgacacgcgcttccccggctatcatggattcagatccatcatcacagaacccaacagatatgactgcatttgtccagaacctccttggacagatgcaaacaaggttcgagtccatgtcgcagaacattgtgtcaaagatagatgaaatgggaaccaagattgatgagctcgagcagagcatcaacgatctcaaagctgagatgggcactgagacgccggtcaagaagcctgatgagccaaagcctgctgactctgcctaacttgggtgtaacccagagattgttgtgtgaagatttgatgatggtgtgacaaatttcagcagtacgtgatcgtatctgttttcatgagtcctggcagttatgtagacacgaacccatcgtatgaaagatgaatccatgtttgggctctccagacatcaacgcatgttcttagcttttctgtcatctttcggcaactatttgtttgactgttataagatgttatgcaacatctactccatttgaagtaattgtcttgtgt

SEQ ID NO: 5010 - DNA, 1188 bp, Zea mays
  Clone ID: 700439179_FLI
cgacgatagactggatgatgaggaagacggatttgattgcgaaattgggacattggagaacgttaagaaggctaagggcactgtaaatgtctcagcaacttacaacaccaggcaccatgactttgagagttcagtagtcgcacgaggagacctttggaggttggagtcatcgcgtggcaatttaacttcagggaatgatagctcaccacttttccttgttcaacttgggcctttactgtttgttcgagactccacgcttcttttgccggttcatctgtcaaagcaacaccttctttggtatggttatgatcgcaagaacggaatgcactcgctatgcccagctatctggtcaaagcatagaaaatggatgctgatgtcaatgatgtgcctcaaccctgtagcttgttccttcatggatgtgcaatttccaaatggacaaatgacatatgttgctggtgaggggataacagcaagtggttttatccctttatttggtggattactccaagcacatgcaaagtgtcccggtgatacaagagtgagcttctccttcaagaacaaacaaggtactaggttcagtccaacgtttcagtggcctgacaattctgtttcatttggagtcgcacaagctgtagcatggaagagatctggccttatggtcaggcccagcattcaaatcagtgtttgccccactttcggaggaactgatcctggaatatgcaccgagtttgtccactctttgaaggaggaagtcagcgtaatgtgtggtttctcttgctcaagacatccctcagcattcacagctctctctcttgggcgatccaaatggaatggccaggtcggcagttcgggactagtaatcaccttggagacaccccttgacaacatggcaaggccttctttatccgttcaattgaacgggggtttcgagttctgacatttcccccgtgggctctagaatacaactgtatatactgtatctcatagcgagaagatgatatgccactgtatatattgcacacacgtagctgtgattaagtagatatcttcccaaccggtgaagtgtatagtcctaaaaaacagacagatggcttactgttttggttcactgaataaatttgaaggcttgtgtgtcgtacctgtacgttcgaactatttgtcttcttcaataaaaattgtagtactcct

SEQ ID NO: 5011 - DNA, 561 bp, Zea mays
  Clone ID: 700439202_FLI
gatctttcccccgtcctccctcgccttcgcctcgccggcaggagatttccaccaccaccgccggaccaccccgaccctccttccctctcgcgctatggcccagactgttgtgctcaaggttggcatgtcctgtgagggctgtgttggagctgtcaagcgggtcctgggcaagatggaaggcgtcgagtcctacgacgtagacatcatggaacagaaggtcaccgtgaagggcaatgtgacacctgacgccgtcctgcaaactgtttccaagactggcaagaagacttcgttctgggaggctgaggccgtgacaagtgaatccgccacacctgccggcgccaccgcctgacaggttcgatgatctggaagtgcccagcaaaaaaatgtgaatgtatttagcttggatctgttacaaataattgcaaactgctagctcggtctgtacattttacagttgctatttgtatactgtgatgttctcgtatgtttgtggaggcgataaaccaatatttgtatgatatatgtgtcgtgttccataaggtaaggttttgacggtatgct

SEQ ID NO: 5012 - DNA, 1278 bp, Zea mays
  Clone ID: 700439213_FLI
gccctctgaagaggactatggaacaagaccattctgagaaaagatcaggtatagaagcagtcatcgttgctccttcgagagaattaggaatgcagattgtgcgagaagtggagaagattttgggtcctaatgacaaaagactggtccagcaacttgttggcggagctaatcgttccaggcaggaagaagcattgaagaagaacaaaccaatcattgttgtcggaacacctggccgtatttctgaaatttctgcagcaggtaagctacacactcatggctgccgttttcttgtactggatgaagtcgaccagcttctgtcttttaattaccgtgaagatatgcatagaattttggagcatgttggaaggagacctggaggcacatctagggatattcttggcccacttgcgagacgatctgagcgtcagactatcctggtttctgcaacaataccattttcagttatacgagcagcaaggagttggggtcatgatccagttctcattagagctaaaagtgtagttccacttgattcaatcactgtgccaagacctgcgttatcccaaagtgacgctaaccccagttcgtcatcgcagtcagtgaaccaagctgctgttggcagcttgccgccatctttggaacactactattgtacggccaaggcgcagcacaaggttgacacattacggaggtgcatccatgctctggaagcacagacagtgattgcatttatgaacaacaccaagccactgaaggatgttgtgtttaagttggaggcccgtggtatcaaagccactgagctacatggagaccttggaaagcttgcaaggtcgacagttttgaaaaagttcaaggatggtgaattcagagttctcgttacgaatgagctgtctgccagaggactggacgtgccagaatgtgaccttgtggttaatctggaccttccaactgactccacacattatgctcacagagctggaagaactggacgtcttgggcggaaagggatcgtggtcacaatatgcgaagaaagcgagggatttgttgtaagaaaaatgcgcaagcagttagatgtggccatcaagccatgcgagttcactgaaggcgagcttgttgtccacaaggaggaagatgtggaataaaatcttcataatgcacatgactacttctttttacctgtagcgtttttgcaatagtttcgtatttcaaaatgctggcctctggccctttgcttgtactaccgaattttcatactgtcggggttaaagtttttgaatc

SEQ ID NO: 5013 - DNA, 1762 bp, Zea mays
  Clone ID: 700439374_FLI
ccttgttctttcttgctccgctccccacgcgtacgcgctctcgtggcgacgactgggtgatcgccgccgccgccgccgccaccacgcaccaccaggccttcaccggcgacaaacaccaccaacagacacaagtgcttcagtcattatagtgccagtaccattctgccagcgagttcctttgccacaaaaagataacactcggatatctcatggcaaaacctgggattttaggccgcagtgcacagagatcaaatgagggcatgcgaatcatattctcagcagttattggtgttatgctagggtacttgtttggcatttccttccctaccgttaatataacaaagcttcacttcccttccagcattatctcctatatcgaggacagaaactctggcatcacaacccaaacattattgaatcatgcatggacgtctgcagctactcataagaagaacaattcagcttctaactctgatgaaattcctaagatttatgttccaacaaaccctaaaggtgctgaaaggcttccaccgggcattgtagtgtctgaaacagacctttatctccggagattgtggggtgaacctagtgaggatcttactaccaaaccaagataccttgttacatttacagtgggatactctcaaaaggcaaacattgatgcagcggtgaaaaagttttcagataacttcacaattatgttgttccattatgatggtcggacaactgagtgggatgaatttgagtggtcaaaaagggccgtccatgtgagtgtcacaaagcaaaccaaatggtggtatgccaaacgatttctacatcctgacattgttgcccgctacgactacatatttatctgggatgaagatcttggtgtcgaacattttaatgcagaggcgtacattaagcttgttaggaagcatgggcttgagatctctcagcctggtttggagcccgataaaggtttgacatggcaaatgactaaacgaagaggtgatcaggaagtccacaaagtaactgaggagagacctggctggtgtagcgaccctcacctgccaccatgtgcagcgtttgttgaaattatggcaactgtattctcaagggatgcatggcgctgtgtatggcatatgattcagaacgacttggtccatggatggggccttgattttgctcttaggaaatgtgtggagccagcccatgagaaaattggagtggttgactcccagtggattgttcatcaagtcatcccttcgcttggtaaccagggcaaggcagagaatggaaaagcaccatgggaaggggttagagcacgctgtcgtaaagaatgggggatgttccaaacaaggttgactgatgctgagaaagcatattacttggagcacgggatcacaccaccaaaatcgacggtagcttagctgcacgcaccgacagtagcttagctgcactgcatgcctgcatacaggcacctcgcgagtcacgccaaggtttctgttttgtgaacctagcgccttcctgtccgataagcaactgactctgtagagatgcagcaccacagccagatttgtacagaatcgatgtacgtttttactcttcttaatcttctttacttgttttcaaccgtagcgacgagagtagctcttgtgtaagtaaccgatttagcatgaatccggtggctcttttttttttgatatattgcccaaatgcaatatcgatatggtcatttcgtttcattgttttaataacaagcaaatggttgctttgggac

SEQ ID NO: 5014 - DNA, 787 bp, Zea mays
  Clone ID: 700439379_FLI
cgacctgaccgaggacaacgtccgggtggccctagacgaagccaaatccgagctagggcagctgttcgacacgtcggtgggcatcacagggcaagttgacctcgcggagttggacgggccgttcgtgaagctccggctcaagggcaagttctggcacacccgcgccaccgtggtcgcaaggatcggaaactacctcaagaaccgcattccggaaattttggaggtggagatcgaggacgagaaacagctggatgatagtcccgctgctttctgaggggtaccgcacgatcaccaatttagttcaatgctgtgtgtgattcatcagtatgtgccaattgtgaggttcaggagaagggacacgttttcagttttcagaattagtactggttcagggagaattcttatcggaggctacctttcgtacacagttaagtatggtactccttactctgctaatgtcaaaactacagacttatgaacacatgaattccaatcaacattttctggctgacatgacaagagcattcatcatcctcgatgtgtaaagctgaatctatggatctgagtctgaaggagcgaatatacagacctgaattttctgtatttcccataatcacagctccagcttcggggaatttgcagttgcctttgtggtttgcattatagcatatgcacattgattgcagatatccaatatttggaggtgcttgttctattattacgaagaagctgcatggtattacaaagaaacaaaatgacaagactatggctgacactagtcatactc

SEQ ID NO: 5015 - DNA, 831 bp, Zea mays
  Clone ID: 700439546_FLI
ctcggcagtcggcacgcaggctagcagcacagcagcagccagagccatcccctctcctcgctacgcttcgcttcctcggcgccgattcctcctcctcctcctccaccctcgtccgtcccgttccggcgcgcgagctcgcccgagatggcgaacgcgagatcgggtgtcgctgtgaacgatgagtgcatgctgaagtttggcgagctgcagtcgaagaggctgcaccgcttcataactttcaagatggacgacaagttcaaggagatagttgtggaccaggtcggggatcgcgctaccagctacgatgacttcacaaacagcctccctgagaatgactgccgatacgcgatctatgatttcgactttgttactgcagaggatgtccagaagagcaggatcttctatatcctatggtccccatcctccgccaaggtgaagagcaagatgctttatgcaagctcaaaccagaaattcaagagtggcctcaatggcattcaggttgaactccaggccacagatgcgagtgaaatcagcctcgatgagatcaaggatcgggcacgctaggcgcaccgccatcgtgagtttcatgatcacgcatcatggactcgcctactactgtggatttgtacgccattatagacttggtgctgcgaaagactgctttggtgatttgtgggtttgttgctgtgtaaaaagatcctcatggcttccagaagaccatgaaggtttggatctatcatgtaattccttgttatctgccaattatgtatgaactatggacatgtgttgcgctgttcaactcactacaaataagtaatcgatatattccct

SEQ ID NO: 5016 - DNA, 979 bp, Zea mays
  Clone ID: 700439603_FLI
atcggtgtggtcgccaaagagttcccgtttgcaggagttcccatctcggggtgtcttggagatcagcatgctgctatgcttgggcagctgtgccagaagggtgaagcgaaaagcacctatggaactggtgccttcatccttcttaacacaggggaagagcctacccaatcctcccatggccttcttagtaccattgcttacaagcttggtccagctgcacccactaactatgctcttgaagggtccattgcaattgcaggcgcagcagttcagtggctgagggacagccttggaatcattcagtcagcagctgagatcgaaaagttggctgaaacagtgccagattcaggtggagtgtactttgtgccagcatttaatgggttgtttgcaccatggtggagagatgatgcgaggggaatttgcatcggaatcacaaggttcacaaataaggggcacattgctcgagcagtgctcgagagtatgtgttttcaggtgaatgatgtcctcagctccatgcacaaggatgctggagaggcaggagaagtaaagagcgcagaaggagagttcttattgcgtgttgatggtggtgctactgttaataatcttctaatgcagatccaggctgatttattaggcagccctgttgtcagaccagctgacatagagaccacagccctcggagctgcatatgctgctgggttggctgcaggagtttggaccaaggagaaggtttttgcaggtttgcacaaggagaacacgacagtcttccgcccgaaactggatgaggcgcacaggaaaaagagggcggattcatggtacaaggcggtttcaagatcattcgatctggctgatctttctctgtaaatttatcctgccagcgctcctctatctggttttggaagctgcaaatgaataaattggtcttcgctgggactaatcttaactgcttgttatttatatataacatcacgatgtttat

SEQ ID NO: 5017 - DNA, 1351 bp, Zea mays
  Clone ID: 700439643_FLI
cccatatccgctcccctacctctccagcatctcccgtctccgtcgtctcgtctctgctcctcacctcgccgccagccatgggcaagatcaagatcggaatcaacggtttcggaaggatcggcaggctcgtggccagggtcgccctgcagagcgaggatgtcgagctcgtcgccgtcaacgaccccttcatcaccacggattacatgacctacatgttcaagtacgacaccgtgcacggccaatggaagcacagcgacatcaccctcaaggactccaagacgcttctcttcggcgagaagccggtcaccgtctttggcatcaggaaccccgaggagatcccgtggggtgaggctggtgctgagtatgtcgtggagtccaccggtgtcttcactgacaaggacaaggctgctgcacatctgaagggtggtgccaagaaggttgttatctctgccccaagcaaagatgcacccatgtttgttgttggtgtcaatgaggacaagtacacctccgatgttaacattgtttccaatgctagctgcaccacaaactgccttgctccccttgctaaggtcattcatgacaactttggcattattgagggcttgatgacaactgttcatgccatcactgccacccagaagactgttgatggaccctcagccaaggactggagaggtggcagggctgccagctttaacatcattcccagcagcaccggtgctgccaaggctgtcggtaaggttcttcctgaattgaatggcaagctcactggcatgtccttccgggttcccaccgtggatgtgtcagttgttgacctcactgtcagaatcgagaagggggcctcttacgaggaaatcaagaaagctattaaggctgcttctgagggcccactcaagggtattatgggctacgtggaggaggatctggtttccaccgacttcaccggtgacagcaggtcgagcatcttcgacgccaaggccgggattgccctgaacgaccacttcatcaagctcgtctcttggtacgacaacgagtggggctacagcaaccgcgtcgtcgacctgatccgccacatgttcaagacccagtagagagagatatttctgcctccctatcgagggtcgtccccgatggcctttggtcgcagaccatctttgctgcttgtctatgctgagaataaatgtgaacggtgcccctggacgctggatccatgctggttttggacacggttgtctttttgtgtttaacttatctgctgccgtcctgtaacgaattcgctaagttttagttcttttgtgctttgttaagaatataaacaatgaggtttcaattttgttggcgccatccggtc

SEQ ID NO: 5018 - DNA, 702 bp, Zea mays
  Clone ID: 700439688_FLI
gtttcagaaggtcacaagtgctttgaaagcatgggaagagaccacggcattgaacctagcatggatcactatgcctgcgtagttgatctgcttggaaggtctgggaggtttgcagaggctgagcaattcatcagggacatgcctgtccgtcctgattcaaccatctggggacctcttttagctgcttgccagcttcatgggaatgttgatcttgcagaaaaagctgccaaagaattgtcggccttggaaccggagagtgacatatggagagtatccttgtcaaatacctatgcctcggttgggagatggagagacgctgcaaagattaggtctgaaatgaggagagttggattgagaaaagagactgggtggagttttgtagacgttggaggggttgagggttttaagtttgtgtcagcagatacaaggcatcatgatgctgaaaaaatatattcagtatggcacagtatgaacaggcacatggcagatctagctgctgatgtgcataaacttaatccaattagtgcaatttagtcgatgcacgagatgtttatagatctagctgttgatgtgtctaggtccaactagtgatgaaatggaccttttgtagttatgagcttataacttaaaattacagttgatccgttgttttgaatgctgaatatagttaacaagaagagtgaataaacagaacacacatgg

SEQ ID NO: 5019 - DNA, 996 bp, Zea mays
  Clone ID: 700439712_FLI
ggacgaactcgtcactggtgtgggccgtggctgtacgccgcagagtgaagcgagacgagacgacgatgcgcaagtgggcgctctcctccgcgctcctccttctcttcctcctcaccaccctccccgacccagctaagaagctacaggtgaatgcggaagagagcagcgatgacttagctaacccacccaaggtagaggagaagcttggtgctgtccctcatggcctgtccaccgactctgaggttgcccagagggaagctgagtctatctctaggaagactcttaggagctccgccgagaagtttgagttccaggctgaggtgtccagactcatggacatcatcatcaactcactctacagcaacaaggatatcttcctgagggagctcatatccaatgcctctgatgcattggataagatcaggttcctttcccttactgataaggaagttctgggtgaaggtgacactgcaaagcttgagattcagattaagttggacaaagagaagaaaatcctctccattcgggataggggtattggtatgaccaaggaggatcttattaataaccttggaaccattgctaagtctggcacttcagcttttgtcgaaaagatgcagtctggaggtgacctcaatcttattggacagtttggtgttggcttctactcggtgtacttggttgctgactatgtcgaagtggtcagcaagcacaatgatgataaacaatatgtttgggaatcaaaagctgatggatcgtttgctatctccgaggatacatggaatgaaccccttggccgtggaaccgagataagattacatctgcgagatgaggccaaggagtacttggaagaggataagcttaaggatttggttaagaagtactctgagttcatcaacttccctatctatttgtggtcaaccaaggaggttgatgttgaagtgccagctgatgaggatgagacaagtgaagaagaggatcgtccccagaaactac

SEQ ID NO: 5020 - DNA, 565 bp, Zea mays
  Clone ID: 700439719_FLI
gtttcattgattcttgaagagatcgagcttcttttgcaccacaaggtcgaggatgtcttgcaactgcggatcaagctgcggctgcggctcaagctgcaagtgcggcaagaagtaccctgacctggaggagacgagcaccgccgcgcaggccaccgtcgtcctcggcgtggccccggagaagaaggccgcgcccgagttcgtcgaggccgcggcggagtccggcgaggccgcccacggctgcagctgcggtggcaactgcaagtgcgacccctgcaactgctgatcacatcgatcgacgaccatggatatgattattatctatctagcttgtggtggtggttgaacaataataagcgaggccgagctggctgccatacataggtattgtgtggtgtgtgtgagagagagagaaacagagttcttcagtttgctatctctctctgcatgtttggcgtcagtctttgtgctcatgtacgtacgtgtgtctacctgcatgttggttgatccgattgcatctgctgtaaccatatattaattggtccacgatgatatgatttgatactat

SEQ ID NO: 5021 - DNA, 1153 bp, Zea mays
  Clone ID: 700439722_FLI
caagaacaaccagagacgcaagcaggggagaatcgcggaggtctgggaaacaccatcctgcagagatgacagtgctgctctccccgagctcctccctgttcctcgccaaaccttctgccgtcgccaagggcagggcggcggctgcggctgtgacgtgcttcagcgggccctccctgtcagtggggcgtgaagaggagggtgtagcagtggtggtggggaggcgtgcgttggcttccgcagcagctgtcgcctcagtgcttgggtttgcaggccgtggtctggcggccaaccagggcctgctcgccgggagggtccccggcttgtctgaacctgacgaaaatggttggagaacgtaccgcaggccagacgacaagtccggtggccacggagttggctggagccccatcatcccgtacagcttcaaagttccagacggctgggatgaggtcccggtgtccattgctgatctgggcggcacggagatcgacctgcgcttcgcaaaccccaaggaaggccggctgttcgtcatcgtggccccagttcgccggttcgcagatgacctggacgacgcgaccatcgagaagatcggcagcccggagaaggtgatcaccgccttcggtccggaggtcatcggagagaacgtggaagggaaggtcctgtcctcggcgacggcggcgcattcgggaagaacttactaccagttcgagctggagccgccccatgtgttcatcaccgccacggcagctgggaacaggctctacctcttcagtgtaactgcaaacggtctgcagtggaagaggcattacaaggacctcaaacagatagcacaatcatttcgagtcgtgtagggttccaattcctactactacttttttttacagcgcctggctcttgttgatatgattagaggacatgggagacggtaatacggagagaggacaagtgagcatcacttctgatgaccactctaactctcttaaggttacaaagctgcagcagcagttcaacagcatgtgtaaacctgctcgctaaggctaaatgcttgttactatattttttttccctgatgttgcctcgaagggtacagatgcttgccctcgaaactttcggttactaaaggcaaacatgccaaatctatcgagtttgtggggac

SEQ ID NO: 5022 - DNA, 759 bp, Zea mays
  Clone ID: 700439751_FLI
agaagctgtgcctggagccgacgtccttcaccgtcaaggcggagggcatcgccaagaacgccccgcccgagttccagaagaccaagctcatgacccgcctcacgtacacgctggacgagatcgagggcccgctcgaggtcggctccgacggcacgctcaagttcgaggagaaggacggcatcgactacgccgccgtcaccgtgcagctcccggggggcgagcgcgtgccgttcctcttcaccgtcaagcagctcgtcgccaccggcaagcccgagagcttcggcgggcccttcctcgtgcccagctaccgcggctcctccttcctcgaccccaagggccgcggcggctccaccggctacgacaacgccgtcgcgctccccgccgggggcagaggtgacgaggaggagctccagaaggagaacatcaagaacgccgcctcctccaccggcaacatcacgttgagcgtcaccaagagcaacccggagaccggcgaggtcatcggcgtcttcgagagcgtgcagccgtccgacaccgacctcggggccaaggcgcccaaggatgtcaagatccagggggtctggtacgctcagctcgagtgattcgagtgtctaactgctaggtgtccgaccgccgtcatggatcttgggaaggtgtatgtataccatggaaaactttggagagcagaggaggaatcgtgtatgtaatgtacttgttaatgcaaattcgggctgtcgcttttttactccgctaaattcccat

SEQ ID NO: 5023 - DNA, 1125 bp, Zea mays
  Clone ID: 700439775_FLI
ctgatgcccatgttagcgtcgtcgtatgcgtttcacttcgccacggtgcagttagtggataagtactcggaaatgaagaaaaccaacgatgaggaccttattgctgacgtgcatgttctttcgtctgggttgaaagcctacataacttcatatacagccaagtctataagcgtatgtagagaagcctgtggtggccatggctatgctgctgtaaatcgttttggagctctgcgcaatgaccatgatatattccaaacgtttgagggggacaatactgttcttctgcagcaggtcgctggagatctcctgaagcagtaccaggagaagtttaagggagggacactttcagtcacctggaattacttaagggactccatgggtacctacctgtcccagcctaatcctgtcactgcccgatgggagggcgaagatcatcttcgggatcctaatttccagctggatgcattcagataccgaacgtctcggttgctacacagtgtcgctgctcggctacagaaacacagcaagacgcttggaggtttcggtgcgtggaatagatgtctgaaccatctgcttacgcttgcggaatcacacatcgagtccgtcatccttgcaaagttcattgaatcggtgaaaagctgccctgacgaaaaatcacgggaagtattgaagctggtatgcgacctttatgcgctcgacaggatttggcaagatatcggaacgtatcggaatgtagactacgttgccccaaacaaagctaaggctattcataagctgacagactacctcagttaccaagtgaggcttgtggcgcgagaactcgtcgacgcatttgaccttccagatcttatcatccgtgccccaattggcatgcaatcggaggcctatgcacagtacacccagtatgttggcttctagtagagtatatacatataataagtccgagaaatatattacgaagttgcaatatagagatagatcataggtgagcaaataagtttcagtagtacatgtaaactgtaaatgtaaagcagtggatccgtaaagcactggctccgtgtgaataaattgtcagattatttttttgtctgaattgttttcaattaagatttttatcagtaagct

SEQ ID NO: 5024 - DNA, 1662 bp, Zea mays
  Clone ID: 700439811_FLI
ccagcggccagcaaaagcagcggcggcgcggccagggaccgacgtacccgccgcgagaagctccggttggcaccccaacggcatggatgctagcagcgtcagcccgtgcgatctagacagggagtttgcgctccaaatcgctcagctcctcgccacgcctcctctccaatcagcccaggaatactatggtgaactcatacggtccaagaagcttgatggcattagagtgagctacagtggcaagcatgggaaaggtgtttatgcaaatagggactttggtgaagacgaccttgttctgaaggaccaaatgttggtcggtgctcaggacagccttaacaagattgactgtgttgtgtgtagttactgcttccacttcattggttctatagagtaccaaattgggcgtagattgtatttgcaaagccttggtggtagtggtgatggcactaccgagagacactgccatgggagtgatgttgggtcaagtactggctgttccggtgcatcaaatggaaatagcaatgctgtgccacaagaggtcctgttgtcacttatggatggtaatacgctgttgcctttaaccgatcagttctgtttgccaccagttgttgcttgccctggtggatgtgagggagaactctactgcagccaatcatgtgcggattccgattgggattcttatcactctttgctgtgtgctggatccaagactgaaccattgcggaaatctgcccttcagaaatttgtggggcatgctaatgaaaccaatgatatttttttggttgctgccaaggctatcactttcaccttgttgagatataggaaactcaaaagacagcatgtgtctcatgaatcaagctcttcgctcctcttggaagcatggaaaccactttcaatgggcttcaaaaagagatggtgggagtgtgttgctttgcctgaagatgttgattccagtgaagaagaattgtttagacagcagataagggatctggcgtttacgtcactgcagcttctcaaggatgcaatctttgatcctgagtgtgcgcctttgttttcgcttgacatctatggccatataattggcatgtttgagctgaacaatcttgatttagttgtcgcatcaccagttgaagactatttcatatacattgacggtcttccagagagcgacaaggaggaagcagagaaggtgacagggccattcctagatgctttaggagaagactacttagttccgtgcgagggaacggcattctttcctctgcagagctgcatgaaccattcatgccgtccaaatgctaaagcatttaagagagacgaggacaaggatggccatgcagtgataattgcccttaggcccatcagcaaggacgaagagattaccatcgcctacatcgatgaagaccttccttacgaggagaggcaggcgcagcttgcagattacgggttcacgtgtacatgcttgaaatgccaagaagagcgaccggtctgaaaggacaaatatgtttgaattttgcggcattcagcctatgtcactgggtagttttgaaagctcgcgagaagtgagtgcacaaaatgatgtttgttttcggctgtaacttgcaaaagttttgttgttgtccaatgaatatgaatagtgacgaacagacgatcagtcgtcgt

SEQ ID NO: 5025 - DNA, 539 bp, Zea mays
  Clone ID: 700439907_FLI
gcgatgcggaacgccatcgagggcatgaacggcaaggagctggacggccgcaacatcaccgtcaacgaggcccagtcccgcggcggccgtggaggcggcggcggcggctacggtggtggccgtggaggcggcggctacggcggtggcgggcgccgtgatggcggcggcggctacggcggtggcggcggcggctacggtggcggcggtggctacggtggtggtggtggcggctacggcggtggcaaccgtggcggcggctacggcaactccgacgggaactggaggaactgagcggtggggcccgcgcggccaagttatcctgttcgctaccgtgatgtttaccctagtccagagggtttatcttcgttcgtctcgtttgttgttgcccatctgtgtttttgattgcaaggtcgctctgtgtcagttgttagtgctgtgttcatcctcggctccagcagacccatgcatcaaccagcatggactgtggatcgatggatgctgttactcctgtcaggatttgttctaagttaatcctaagg

SEQ ID NO: 5026 - DNA, 1176 bp, Zea mays
  Clone ID: 700439921_FLI
cataaacgggtctgcaattttcattttaaaaacagacaagtatgtacaatacatagaataatttgtagtctaaatatcgaaattagacgcactaacataagttagaactgaatttacgtataaaacaaagtcttatacttaaaatccagaattaaaatgataaaatatgccattatgggccctcagaagcagcccaggcggcctgccaggcgggccaggcagcggcctggtgaccagcacgccggcccagcctggctggccggcctaagcggcccaactgagaccacaaagcccattagaaatatgagcagttaggttttccaaaccctaactgccccagccgtcgtctcccagggagcgccccagccaccgccagggccctcggtggcgtgtgggtgtcctctcccggcggtcagggcgaacccaaaactccggctcaccggcgggcggcccgtccaggcgggcgcggcctcctgccccgacctcggtccggcgcgcgcgggcacgggtcctccggcagcggccaggcggtcagcctcgaccccagcggtacgcggtgcaggccccggcgcgcggccccccggcggcagcgcgggcagacggtgcaggcgtgcggacgcgcggtctcccggcggcggccgggtagacccggcgctcgagggcgcgggcgcgcggccccccgcggcggcgcgggcagccccggctcgcggcctttcctggcggcggcgtcgcggccccctggagtcgagcgggcgcgacggctcgacggcgcacgggcacgcagcccgtctcggtcgcggtcgaccgaccctgcgtagacaccggcacgcggcctcagccccaacgatgcgcggggcggaaggctcggcgggcgagcgaccgttccggcggcgcgggttcggccaaggcacccctggcggcgattcttccaagccctcggccagggcgcgccggccccgaccccggcggcatgggcgtagccacagcggccctggcggcgccggccccatgggcggctcgggcgcagcccggagggcacaagcctcggcgcttggccgcgcggtcagaagcgcgagcacgcgggagtgcatcccggcggcgcgtggctacggcagcacgggcgcggctcatgcccaggcgcacagacccggcaacggcaacgacaatggatttgcc

SEQ ID NO: 5027 - DNA, 1371 bp, Zea mays
  Clone ID: 700439966_FLI
ataaggtctggccaggctgctcgtcccgtcctcctctcgtggtcttccagaagccatggccgccgccgccgtccactgttccagggcatacgttcctttgagctctggcgcttactcaaggaaaaaaccaacttgccacaagtattgtgcatcggtggagcttacttggaaaccatgccgactagttggatatcgggattttcgactgaaagagctagcttgccaacaattggcccatggagtggatgaacaatatcctgtgaaaagtagcactgtggagcaaactcaggaccgccagccctgtctgccacaaggtgatgcttacttcgctggcctgtcgaagaaagaaatcgagagaaggcggaagattggcgctgccaacaaggggaaggttccctggacaaaaggcaggaaatggagtgaagagcacaagaaggtcatcaggcaacggactgctgaagctctgagagatcccaaggtgatgtcatatcaggaagaaaatgttagggcaccgtcagctacatagacaaacaagcaaagacaagataagtgcggcgctgaggacggtctgggagaggcggatcgtttctgtccgatccagacagaaggttctgcagatctggtccaacagtatagctgaagcagcaaagaacggtggtcacggccaagatatgcttggctgggacagctacgagaggatgaagtcagagatggtatctacgttcctgtggatcaaggagaggggacgtatggtgaagaagcttgaaagggccgtggcaaaaatagctgccaagaggcttcaagtggtacggagaagggaagaacaggccacaaggatgaagaagctgaaacctgacaagacgttgctgcaaaacgcggaccgtcaaccagcaagagtggtagtatctgcaaggccaaagcttaaggagaggctagctaagtggcacggtcgaaagaaagagctcgagacagtgataagttcacgggcaaggaaaagaggattgcgaaatccaccacgaaggcaaatggcagcagaaagcctcgaggctctgtcaacttcggctgcaggagcaccataggaaggatgggcatgtaccctagctactgagcagctgggagctcgtagtcgccttatagagaagcagaagcccatgcctaatgaccaattcattaggcaggcacggggttttttgtttgcgttgctgagactacgtgtagtaattcttgttttatagccttattaaggtttctgtcaaaggaacatgtttatgctccctccaatgaaactacgtgtaacatgatttatgtgtacaaaaaataaatgtactagaaaaatacagttaaaaaacatttgaatcccactactcgtac

SEQ ID NO: 5028 - DNA, 1187 bp, Zea mays
  Clone ID: 700440029_FLI
gctagcgcttatagcttgtcagccatggccaccgccgccgcgtctagcctcctcaagtcctccttcgcgggctcccggctcccggccgccacgcggaccacaccggcgtccctcgtggtggccaccggcccgcgcggcgccggcgcggggcccatctgcgcgtccatgtccatgtcctcctccaacccgccctacgacctgacgtccttccggttcagccccatcaaggagtccatcgtgtcccgcgagatgacccgtcgctacatgacggacatgatcacctacgccgacaccgacgtcgtcatcgtgggcgccggctccgcggggctgtcctgcgcgtacgagctctccaaggaccccgccgtgagcatcgccatcgtggagcagtcggtgtcgccgggcggcggcgcgtggctgggcgggcagctgttctcggccatggtggtgcgcaagccggcgcacctgttcctggacgagctgggcgtggcgtacgacgaggccgaggactacgtggtcatcaagcacgccgcgctcttcacgtccacggtcatgagcctgctcctggcgcgccccaacgtgaagctgttcaacgccgtggccgtggaggacctcatcgtcaggggagggcgcgtcggcggcgtcgtcaccaactgggcgctcgtgtccatgaaccacgacacgcagtcctgcatggaccccaacgtcatggaggccaaggtcgtggtcagctcctgcggccacgacgggcccttcggcgccaccggcgtcaagaggctccaggacatcggcatgatcagcgccgtgccggggatgaaggcgctcgacatgaacaccgccgaggacgagatcgtgcgcctcacgcgcgaggtcgttcccggcatgatcgtcaccggaatggaggtcgccgagattgacggcgcccccaggatgggcccgacgtttggcgccatgatgatctccggccagaaggcggcgcacctggcgctcaaggccctgggcaggcccaacgccgtggacgggaccatgtcgccgccgttgcgcgaggagttgatgattgcgtacaaggacgacgaggtcgtggacgcctgagtgcggcaagcagagaggaggatcgacgccagcagcgtcttatcttaattgccttgttgttcaatgatgaatcgatcgaattcccttgggttagcttt

SEQ ID NO: 5029 - DNA, 1320 bp, Zea mays
  Clone ID: 700440030_FLI
ctgtaatctggtccactagcgctccattcgaccccacccacagccatggctgccgtgaccgcggcggccgtctctctgccctcctcctcctcctcccctgccgccgccaaggccaaggcgtccgcgtccgcgtccccgtcgtctccatgcggccacctccagttcccgcggcggcacggcggcccgcgcgcggtgcggctgcgggtgcaggtgtccaccaccgagaccgcggaggcggagccggtcaagaagctggagaaggtgtccaagaagcaggaggaggggctcgtcaccaacaagtacaagcccaaggagccgtacgtcgggaggtgcctgctcaacaccaggatcaccggcgaccaagcgcccggggagacgtggcacatggtcttcagcacagaaggcgaggtcccctacagagagggccagtccatcggcgtcatcgcggatggcgaggacaagaacggcaagccgcacaagctcaggctctactccatcgccagcagcgccctcggagatttcggcgactccaagacggtgtcgctgtgcgtgaagaggctggtctacaccaacgatcagggggaggtcgtcaaaggagtctgctcgaacttcctctgtgacttgaagccaggcgctgaggtgaagatcacagggccagtgggcaaggagatgctcatgcccaaagaccccaacgcaacaatcatcatgctcgcaacgggtaccggcatcgctccgttccgctccttcttgtggaagatgttcttcgaggagcacgaggactacaagtacaccgggctcgcgtggctgttcctgggcgtcccgaccagcgacaccctgctgtacaaggaggagctggagaagatgaaggagatggcgccggacaacttccggctggacttcgcggtgagccgagagcagacgaacgcggccggggagaagatgtacatccagacgcgcatggcggagtacaaggaggagctgtgggagctgctcaagaaggacaacacctacgtctacatgtgcgggctcaagggcatggagaagggcatcgacgacatcatgctcgacctcgcagccaaggacgggatcaactggttggactacaagaagcagctcaagaagagcgagcaatggaacgtcgaagtctactgatgatgatccttcattgtattgttcagctcaagcaatctggtggtgatgagtttgcattgcattgtacgtagtattgcggagatcaatcgaatcgtttggctcgtcgtcattctatcgatgtacatacattatatatgatgaaagacatatataatcgtttctttcagg

SEQ ID NO: 5030 - DNA, 758 bp, Zea mays
  Clone ID: 700440071_FLI
cgtcttcttcctcgcggtgttcagcctcaactcagattctcggcgtcctctccatggctccctgcgccctcgtcttccccctggtgccgcgcgggcgcgcccctggaacctcctcgctgcacgcagctgcttccccctcactccccagccgatttctctgcgcgcccagcccagctgtttcttcctccttgcgctcggatttcctctgctccctggcgaactcgccccagcccccagctcgaatccctgcctctgctcgcgtccagctgcgcttgccgaagctcgcctggccgtggtgctcgcccctctgctatctccacgcccgagctcgtcctccagcttgccccatggcgctcggcctcacccccttgccccagcgccatcggctccccgtccagcttcaacctcgccgtcggtctcgtctctgttcaagctgccatcgcgccgtgccggttgtccatctttgatcctcgcctcgacgtcatcatgccgtgcaatgcttgcttggtgctcgacaaaacgcctgaattaggaccatcgtcgttccgcgcgtcagcaagaaaacccaagaatcgggtgaagacgaagctagcagcgcgatattccctaagcgctcgataaattgcctggatcggaaaatcgctaccgatctcgcggattcgtgtctgatgtggaaacgctaagctgataaattgtttagaatggttcaatcattaaataaattaatgtactagtgtgatactcattagttgctcgat

SEQ ID NO: 5031 - DNA, 609 bp, Zea mays
  Clone ID: 700440344_FLI
gtgtttgcggcggcgaagaacttcgccaggagactggagagggagaagaagcgggaggagctggaacgggatcagccctccgggggcctcgacggtaaagtgaaccagaatatctgtccttagctttccttggttcgcgcgaacgagcttcagaaacttggttgcaggggatgcggaccgcgaggcggagacggaggcgcaggccgaggcgaggcgcagcgcgtgggaggagctcaggtggaagcccctgcttgatgcttggaatgggctgataggtggtcgttgacgctgtgcaggaggttgaagagaagctcagcgctggaagctgaacccgtaacatctgcagctgcagaaatagtggatgtgccaaggacaaaatagcacctttgcggccgtgggttatcaaacagtaggtgtcgtcgtaactcgtaaatgatcatgtgtaattacagattacataactcgtaaatgatcatgtgtaattacagattacaaaaatgtgtaggaatagtagccaaatatatgtgtagaggttggcatattgcacaggattatgtcccctttatatatatggtggttaatggaaatggcagggtggaacatcactgt

SEQ ID NO: 5032 - DNA, 1029 bp, Zea mays
  Clone ID: 700440372_FLI
gtgaagcctgctgacgagagttcagcgaaaaggacagaagattgttccagtggtgaaaattctccagtgttttatacagctagggctggtaatgaacatgataattgtcatgataatgattccgagaagagcagtattacttcaaattcatgcgccggtgatgattatagagacgaagtcttgccagacgagtcgtccagctgtaactgtgaggataaaaccgtctcagaagcaatagagtctggagcaaatgtaggtcaagctagacccttggagaaaaccatggtacctaatgaaagaaagccatttattaacaagctgcagtggctgttgaggtttggcagaccatcagctgaaggcaatgtggtggagaagggcagtgctcaggcatcatcggatgataaacatgacgtggttcctccctgcccttcacctgctgatgcgagttcagataactcctgcagcggcataaatttggcttatggcgataataagaaggtgatgggcactctgaagaatatcgggcagaacatgctcgaaaacatccaggtgatcgaaacggcgttccagcaggaccgcgcgcagcccagcgccatggagaacttgtcgaacaacatcctgggaggcaaagggcaggtcaccgcgatggctgccctgacagagctccgcaagatcagcaacctgctgcgcgagatgtgacccatccaaggcgtgtgcaggctcttcctcctcccccattctttccccccgatttattagctcctcagaatcagataagcaaggcctccgtagttgaagcccaggcacctagccaccccccaaacccccctgtatatatagacccccattcgattattccattgagcctctgctcggcaggtatgctaaggctctcgttctttttctttctttctttctttcttgtaactaaggattggtcagctgctgtcaactgagttgcgggaggtgagggagtaaaaaactctcttgtctcctgcgttaggagcaactttttgatggaacaatttt

SEQ ID NO: 5033 - DNA, 718 bp, Zea mays
  Clone ID: 700440385_FLI
gcgaaagccaacgaggctatcttgctcctgagtacattatgttcggcaaaccaactgcaggttgtgatgtatacagctttggaataatactattggagcttgctagtggcaaaaggccgatagaaaagtcgtgttctgttaagacatatggaattcgaaactgggtgctcccgctggcaaggcagggtagatatgatgaaattgcagactcaaaactgagcgacaagttctctgaatctgaactgagaagaatggtcttagttgggctagcatgtactcattcagaatctgaaaaaagaccaacaatgcttgaagttgtgccgttgctgaaaggcgaatcaaaagaaacccttattaagcttgaaagagatgagttgttcagctcagactcgatggtgagttcacaaggaacaccaaccccagatgggggcacagactctgtgccaaaggaagatcaagaactggttggagcgtgaaatgtgatatgttgctactgtaggcgatggtagaatgcggatttgtgttattggttgatgattggtttgtgcggtttgacatgaatgtaaattgtataggcattgttttctgtaaggaggtatttacccatcccttttgagagattaaggaagagcatgggggctggagatagctgtttatgcgaagtggtttttgtatgcaccgcatagaaaatgcacatgttttttcaggatgtttgtat

SEQ ID NO: 5034 - DNA, 785 bp, Zea mays
  Clone ID: 700440461_FLI
cgcttgccgtttccccacgcgcgcagcctccctcctagctcggccgcctgcttctctccgctgctcgtcgtcgcgtcgtttgccgtcgagtcgtcaaacacgttatcccctgctcgactcccacctcaccagctcgctccaaacacgatctcgtcgtcgacccacgttgtgcccacgacgtgctcgtcgactttgatgatttgatttccaatttcgtgctgcttatgtcgaccctcggaactcctcgtcgtactcgaccccgcaagtctccatctcgtcgtcaatccgtgcgtcagcaagaaatcccaagaatcgggtgaagacgaagctagcagcgcgatattccccaagcgctcgacaaattgcctggatcggaaaatcgctaccgatctcgcggattcgtgtcagctgctgaagcggtgcgataattaatcacgtgatgcggaagatgactcaagtcgaccccaagcgcgggctactccgcatggtgatgctgatgaacgaacctgcctgatcaagtgctaggacaaggatggtcgtcaagtggacatcgtctaacaaacactaacctagtgttacccaggttctaaccttatgctgctgtgatggtgttaagtgccggtgggctcggccttcttataagtctaagtacttcttctatacttcttattgaggatggtcccatgagctagcatatatttcaaacttatacttttgtaatcactccgataaaataatataaaatttttgtaacttgtaaaatttggtaatagtatttccactgc

SEQ ID NO: 5035 - DNA, 1428 bp, Zea mays
  Clone ID: 700440496_FLI
tgctcccacagctcacttggcggcggcaggaacggacagaggcggttggcccgtggaaggccaaggtgtatgaaatgaatcatgtggtggtcagtgtcaagtcaaggagggtcccgggggcgatgacggatgaagaattcttttcatcttgcaatgacaatgatatagagagtgaggggtttgatgatgttctgacagaggaggagaagaagcagttggaggctgcgctaaaaatggattctccggatgccggtggggaagaccaatctgactcatttgctggccctcgacatagttgctttgagccaagggagagggaggtacccattgaggacatgagtgtttctggaaatggggagggtaagcatgacaagaaaggttggttcagtaattggggaaagagaagtcaggttagcaagtcagagggggtgaagaagatggcatctccaaggaactcgctctgtgtagatgacaaggtgagtgacctcgtcattgaatcgccctcaaatgtacaaacaagaccgggaaggcattcggtagatgtagtcagaccagatgacaacagaaggatcagggaaagggatagtaggagacatgttgcttctgcagagaatgggcataggcgcaaagaaggttccaaagaaagtgagtacaaaaaaggcctaaggcctgttctctggctctctccaaatttccctcttcggactgaggagctgctgccattgcttgatattcttgcaaacaaagtgaaggcaattcgtcgtttgagggatctacttacaacaaaactccctccaggcacatttcctgtcaaggtcgctattccagtcgtgcctacaatcagagtgcttgtgacattcacaaaatttgaagagctacagccgctagatgagttcaccacaccaccctcaagtcctgacaacagcaagagcccagcagtgcagccttcttcaagttcctggattcagtggatcaaggcgccctacctccagaacttgtcgacggcacctggcccaagcagccgcgtggaggacatccaggacccattcgccattccttccaattacgtgtggacaacacctgaagagaagaaaaagaagacacaagaaaacaagaacaagtcgaagaaaggcaggagcggcgcatagatagtacgtaggtgatagcattggtgggggggggggggagttaaagttatgctgtgagtgggtgaaaagggctatactcttcaggatctaacaggagggatgattggaagatttggagatttcggctgctctgacgtcgaatattgagaagcgaccgcttgtcttctttcattgtgataacagatctgctgtcaacattctttcgtttaacccatcgtttgggtcctgattatcattgcaatctactgtattggtagattttgaggtgtggcgccttctg

SEQ ID NO: 5036 - DNA, 830 bp, Zea mays
  Clone ID: 700440618_FLI
gcagccagcgtaagagtgagcaacgagctcggcgccggcaacccaagggcggcggcgttctccgtggtggtagtgacgctgctctccttcgtcctgtcggtcctcgtctccgccgtcatcctgctgtgccgggactacatcagctacatcttcaccgagggtgaggacgtgtcgcaggcggtctcccggctcaccccgctgctggcgttcacgctcatcctcaacggcatccagctccagcccgtcctctctggggtcgctgtggggtgtggatggcaggcgttcgtcgcgtacgtcaacgtcggctgctactacatcgtcggcatcccgctcgggtgcctcctaggcttctactttgacctaggagcagcgggtatttggagcggtatgatcggcggcaccttgatgcagaccttgatcttgatatgggttacattcaggaccaactggaacaaagaggttgaagaagcacagaagaggttaaacaaatgggacgacggcaaggctcctctgctgtcagcgcaagaatgaaacaactcgtctctctggtgcccaaccaaagaacaacgagacgtggatatgacctgtacggaactagggacgcccctcggcaggctcagcggagacgtcgacgtagtttgatatcaagtagcaattccaccatgtcctgaaatggacagaaccaggccaaatgcctggaatggacagaaccagatggctgatgaaattctacgtacattccatccggtccaatatataattcgtttcacttttttatattaagtttgaccgactcatctcattaaaaaatataattgttattaactttt

SEQ ID NO: 5037 - DNA, 826 bp, Zea mays
  Clone ID: 700440689_FLI
ctggaatgaacttaaagcaaaactagaaacagaaacagtatgtgtgaaaccagctcgtgacgggtgctcgactggtgtagcaagattgtgctgtccaaaggacctagaagtctatacaaatgcattgaggaggaagtttcagcatctgcctgctaattgcctgtccagggcacatggtgtaattgagatgccagtcccttctccagagtcactaatatttgagccttttattgaaaccgatgaaattatcattgcaaataaattagaggatggtagtgcccgccatcttgtatggaaaggtgaaaatgactggcttgaaataaccgttggtgtagttggcaaacgtggagaaatgcactcattaaatccaagtatcacagtgaaagaaagtggtgatattttatctcttgaggagaaatttcaaggtggcactggaatcaacttgacaccacctcctgcaacaattatgggcgaggatgctctgcagaggtgcaagaagagtatcgagaccatggcaaacgctctaggtttggaaggcttctcacgcattgatgcatttgtcaacgtgcgaagcggggaggtgctgctgattgaagtcaacactgtacctgggatgactccatccaccgtgctgatccaccaagcactcgcagaggaaccgcccgtgtacccccacaggtttttccgcactcttctggatttggtgtttgcaagggcaaaatagctatctcacatttatttttctttttacggtgcgtcggtttgattctgtatcagtcgagtagtatttttatttatatttgtgggaaaaaaatcgtcttctccg

SEQ ID NO: 5038 - DNA, 1650 bp, Zea mays
  Clone ID: 700440792_FLI
gccacctccacctcctcgaagccgccgcgaccgatcgagcgaagcgtcccttcccgcgccgacgccgaaaccctagctcctcttacgccatggccaccgtgtcgctcactccgcaggcggtcttctccaccgagtccggcggcgccctggcttctgccaccatcctccgcttcccgccaaacttcgtacgccagctcagcaccaaggcacgacgcaactgcagcaacatcggcgtcgcgcagatcgtcgccgccgcgtggtccgactgcctcgctgctcgccgcctccgcggcggcggatgtcagcgcaattcctaacgctaaggttgcgcagccgtccgccgtcgtattggccgagcgtaacctgctcggctccgacgccagcctcgccgtccacgcgggggagaggctgggaagaaggatagccacggatgctatcaccacgccggtagtgaacacgtcggcctactggttcaacaactcgcaagagctaatcgactttaaggaggggaggcatgctagcttcgagtatgggaggtatgggaacccgaccacggaggcattagagaagaagatgagcgcactggagaaagcagagtccaccgtgtttgtggcgtcagggatgtatgcagctgtggctatgctcagcgcacttgtccctgctggtgggcacattgtgaccaccacggattgctaccgcaagacaaggatttacatggaaaatgagctccctaagaggggaatttcgatgactgtcattaggcctgctgacatggatgctctccaaaatgcgttggacaacaataatgtatctcttttcttcacggagactcctacaaatccatttctcagatgcattgatattgaacatgtatcaaatatgtgccatagcaagggagcgttgctttgtattgacagtactttcgcgtcacctattaatcagaaggcattaactttaggtgctgacctagttattcattctgcaacgaagtacattgctggacacaatgatgttattggaggatgcgtcagtggcagagatgagttagtttccaaagttcgtatttaccaccatgtagttggtggtgttctaaacccgaatgctgcgtaccttatccttcgaggtatgaagacactgcatctccgtgtgcaatgtcagaacgacactgctcttcggatggcccagtttttagaggagcatccaaagattgctcgtgtctactatcctggcttgccaagtcaccctgaacatcacattgccaagagtcaaatgactggctttggcggtgttgttagttttgaggttgctggagactttgatgctacgaggaaattcattgattctgttaaaataccctatcatgcgccttcttttggaggctgtgagagcataattgatcagcctgccatcatgtcctactgggattcaaaggagcagcgggacatctacgggatcaaggacaacctgatcaggttcagcattggtgtggaggatttcgaggatcttaagaacgatctcgtgcaggccctcgagaagatctaagcactctaatcagtttgtattgacaaaatcatgaggtgatggctgtcttggatcttgtcaagatctgtgacaatgatatatgagctgatgactgcgaataagttctct

SEQ ID NO: 5039 - DNA, 878 bp, Zea mays
  Clone ID: 700440886_FLI
gctacaccgcctcccggccacgccgccatctgttgggagggcatccggctcccgcggtggtcgccgtccgcacctccgctgcagctccggcggcgggggtggggagcccgggcagccgccgcaagaagctgtgctcgaggccatatccaagatagcaaggtctaaaggaagggttgcactcacaacaaatgtggtcatgggtggtactgtgatggacgatgcaagtgatgaatggcttgctctggatcagaaggtaaattcctaccccacagatagaggttttacagcaattggcattggaggtgatgattttgtccagtcgatggtagttgctgttgaatctgttcttcaagaatccattcccaagggccgagtatctcagaaactatcttcaggaggaaaatatgtttctgtaaaaattgggccaattcgtgttgtttcaagtgagcaggtccaagctgtatatcgtgccatgagaagagataacagaatgaaatacttcttatgaagtgcaattgcatgtcctgcacgttccctggtccattccatcatgtaaacaaaaggagtccaacagtacattttcgccacattttgctggactggactggactggacccccgatgaattgcaaaaggaaaatgggaagacttttatgtgccattcatgccctgatggaagcttctcaaataacctgctacaggcaatttggtgggatcggttatgttatgtagtgcttgtgtagtacagtgggcgtatatagctactatatatgctaaagttgtattttagtgtctcatattagatgcattttaatattttataaaccatatgaaactagcggtataagtgttcctaatttatcatgtttgtttgcttgc

SEQ ID NO: 5040 - DNA, 812 bp, Zea mays
  Clone ID: 700440887_FLI
gcggcggcaagggtggggtcggggacggcgacggtggcagcaaccgcgccgccacggacgcccactaccggcagatgatcgaggcggacccgggcaactcgctgctcctggtcaactacgccaggttcctcaaggaggtggcgggggacgcagcaagggcgcaggagtactgcgagcgcgccatcctcgccagtcccggcgacgccgaggcgctgtcgctctacgcgggcctcgtttgggagaccagccgcgacgctggccgcgccgaggactactacagccgcgccgtccaggccgcacccgacgactgctacgtcctgggctcttacgccgggttcctgtgggacgccgaggaggacgaggaagagaactccgagcccttgccacctccttcgctgttccagggggcagctcagcgtccttccatcacagcggcctcttagatgatcgtgaactcgatctagatctcaccaccgcctgtgaacgaagctgaatctggaaccctggagagtggagagtgactgggagtgggagataaccgtgcagaaacccccgacgagtgactcgcatcgccggccggctcctcgccgcttgtgaactgaatcacggtacatgtaaaactgaatctggcagagcacacacgcgcctaagcctattagcgtctatagacttcgcagggctatgtatagtagatatgtagattgagaccctgctgagcatgtacgtgcagtatgttcctagtcacttgtgtatcattactagtaatgcagtatccctcgtgaaataaacgtcaaaaccccttcctgctgctt

SEQ ID NO: 5041 - DNA, 1171 bp, Zea mays
  Clone ID: 700440963_FLI
gagcgcaggtgtcgacaccgcgcgccgggagccggaagaagggtggaccatgagcgcgaccgggcgagccccgtgcggcctgccgcgcatcggcctgggcacggcggtgcagggcccgcggccggaccccgtccgcgccgcggtgctgcgcgccatccagctcggctaccgccacttcgacacggccgcgcactacgccaccgaggcgcccatcggggaggccgccgccgaggccgtgcgcacggggctcgtcgcctcccgcgaggacctcttcgtcacgtccaaggtctggtgcgccgacgcgcaccgggacagggtgctcccggccctccgccggacgctcagcaatctccagatggaatacgtggacctgtacatggtgcactggcccgtgaccatgaaggccgggaggttcacggcccccttcacgcccgaggactacgagccgttcgacatgcgggccgtgtgggaggccatggaggagtgccaccgcctgggcctggccaaggccatcggcgtgtgcaacttctcctgcaagaagctcgagaccctgctctccttcgccaccatccctccggtggtcaatcaggttgagatcaacccggtgtggcagcagcggaagctgagggagttctgcagggcgaagggcatccagctatgcgcctactcgcccctgggcgccaagggcacgcactggggcagcgactcggtgatggactccggcgtcctgcacgagatcgccatgtccaagggcaagaccgtggcacaggtgtgcctgaggtgggtgtacgagcagggcgactgcctgatcgtgaagagcttcgacgaggggcggatgaaggagaacctggacatcgtggactgggagctgagcgaggaggagaggcagcgcatcagcaagatcccccagcggaagatcaaccagggccgtcgctacgtctccgagcacgggccctacaagtccttcgaggagctatgggacggcgagatatgatatgagtaaacgttacgtcggcgccccgctaggcggctgccttgcgtgacggagcaacgagctccccgttgtgacagtgagcggctgcttttgtggttttatgccgtgccatctgtgcaacaaaaagtgatgctttagtgtcacagtatgtgtgaaataaattaaaaaggattttct

SEQ ID NO: 5042 - DNA, 1157 bp, Zea mays
  Clone ID: 700440982_FLI
ctccgtcctccgacctccgagatttgaaaccgtgctgcgaatcccccactcataaaattgaccactcgtcctcccccctgcccgtcatcatgctcaatctctctccagtttcccccagttcccgtttccatctccatccttccccccgggagcaggagctgcagccaggagtcgagtcggcgtcgtcacgggagatatcagcttcgctatcaccggatcccccctctgctccctccgcacctcccatctgcgctctctgttttcttccgcgcaccccggctgttggtgtcccgtccggcggcgttgctggtggctgaatccgagcctttgaggggtctgctgctgccaccgctgccaccgttcttgagatatctttcttgatctggagggattaaagagggattcttgccttcctactggagcaagagaaaggggagaacgtgtttcttcaggcgtggttgaacagtgaggaccggagaacaatgcgaggttcgggatttaagatgttctggctttaggggcagttcttctgaagcaggggacgggcgattcgaccaccggagctcagatctgattacaaaacgttcagaaaacacaaggcgttctcacaccgcctttcacttcttgcttactttggcaaccactcactgcgactggtctccacctccacctacaccaaagaacacatggcaagccgatctagcgcgatggaaggaggggcggcaatacaaaggaggaatgccgtgaagcggcatctgcagcagcgtcagcaggaggcggatttcctcgacaagaaggtcatcgcgtccacctacttcagcatcggggcgttcctcgtgctcgcctgcctcaccgtctcgctgctgatactgccgctggtgctgcctcccctgccgccgccgccgtcgctgctgttgtggctgccggtctgcctgctcgtcttgctggttgtactggccttcatgccgacagatgtgcgcagcatggcctcctcttacctgtaaatagataaataggtcttggccagattttctgtgttttgcagctgcaggattcgtcctaagacgagtcatgagtgtaatgtgaagcaacttctccagggatagatctcaaccaagtttggtagccatacgaagttattgactggaatttagaac

SEQ ID NO: 5043 - DNA, 964 bp, Zea mays
  Clone ID: 700440996_FLI
ggcgcaccgtcgtcagcatccctaacggcccctccgagctcgccgtcaaggaggccgcgtgggggctcgcacgctacgccgccatctcacaggacaacgggcttgtgccgatcgtggagccggagatcctgctggacggcgagcacggcatcgagcgcacgttcgaggtggcgcagaaggtgtgggccgaaaccttctacgccatggcggagaacaacgtcatgttcgagggcatcctgctgaagccgtccatggtgacgcccggcgcggaggccaaggacagggccaccccggagcaggtggccgcgtacaccctcaagctcctccaccgccggatccccccctccgtgcccgggatcatgttcctctccggcgggcagtcggaggtggaggcgacgcagaacctcaacgccatgaaccaggggcccaacccgtggcacgtgtccttctcctacgcgcgggcgctgcagaacacctgcctcaagacctggggcggcagccggacaaggtcaaggcggcgcagacgcgctgctgctgcgcgccaaggccaactccctggcgcagctcggcaagtacacctccgacggcgaggccgccgaggccaaggagggaatgttcgtcaagaactacagctactaattaatcgcccggccatcacccgggataccgccgcccctccgagagatacgtgtgtactgatcatggttaagcacgtactccgatccattcccatcccatgaagccatgataatgatgatatgatccatggaccatgcatggtgctctggtcgatgccgtacgtgtgtccctgatacaatactattttagtactgatgctagtcatcatatatatcgatcgagctcgccactgcgaagtctgagataatgcatgtatgcttgacggcgagatctgaggaaaaataatttctatatatgcatgtttcgagatggctctcccttaatt

SEQ ID NO: 5044 - DNA, 1021 bp, Zea mays
  Clone ID: 700441010_FLI
gcctgcccctttttttattcccaaaaaaactcccatctcgcggcggaaagagagagaggagaggtgcgagctggtaagatggatcggttggaggagcggaacattaagaagggggagagggagatggaggaggcgcgcaaggaagaggagcggaaggaggaggcgggggacaggaatacccaggagccgcagcaaggtcaaggcctcagcctctcactcgccaacggcagcgacagcggcaggtctggaatgttgccgatgtcgaacccttcagctaatcccacacagcttacaattttctatggtggatcagtatgtgtgtatgactcggtgccaccagaaaaggctcaggcaatcatgcttatagctgcggctgcagcagctgcggcagccaccaaaggcagtgctgccactgcttttaatcctccaatggtacatacagacactgtcgccccagcagcagtcttctctcctgtgcttacacggtctccatcactgcagagcacttctgtagcagctggacaagctcaggttgttgctgaccctagctcaataagcaagcttcaggctgatctccccattgccaggaggcactctctccagcgcttccttgagaaacgtcgtgacagggtcgtgagcaaagctccgtacagccccgccaagtcgttcgatggcatggagtcagcgggaatggagatgactgcggacggcaagcagggcgcaaggcccagtatcttgaaaggttggggagccgcgaagtctgaagtctgaacggtgaaaggctggctgacgctgtggggaggaagggacagggacgtgctgttggttttattatattggtatttatgttattatatactgtatgtggtagcagcagcgtggaaccgcactaataatggggaccttaacacctctattttactgtcgttgctttgttgtcgcgtgctaggttgtattctgaagtggattcctcaataccgcataccgtactgctacgcctgttgactttgttacattgatt

SEQ ID NO: 5045 - DNA, 982 bp, Zea mays
  Clone ID: 700441039_FLI
gttctacggctccaatttctctgacttctccctgagcctttgcggccggctggagctggacggtccccgggcagcgcaggcagccggactgcgggagtcacctccatggcctcggctgctactgcaaccctccccaaggttcagttgaggccaagatgcaacagctacttccaggtgaccggtcaagtccatgcccacaccaaaacatgcggtgcctgcaagtgtccgacccatatccacgggttgcttgtttcagctggaggaaggaggacattcctgccggtgtctgcagttggatcaggtcagggctcatcggtcactgaggccgacaggaagagcgatttgtcgctggagaacgtcaagacgtccgttgtatcccgcgacggtgaaaagattaatgtacgagtgcagttgcctggaaaggcgacgcaaaaggtgtttgatgaggctctgacgttcttggcccgtgatgcgccaccggttcctggttttagaaagtccaaaggagggaaaacatcaaatatacccagcagcatcctgctgcagatgcttggcaagagccgggtcaccaaattcgttcttcaggaaatactgagcatcaccattgaagaatttgtcaagaaggaaaacctgaaggtgaaacctgagatccagacaacccagtccgaaggcgagatggagtccgcgttcgcgccgggatcagcatttgggttcaatgttgtccttcagctcgagacacctgactctgatgatccagaggagaaacctggctctgatgacgatttacaggaggaatctggttcctcggagtagaaagaaatgcatatcgcctgcatgcatttatcaaccttcttcatgtgccattccttatgaatgaatgtactgaatggaaagccgttgcaaccgttttgagttgagagttgcaactgaaacatttctgaagatatgagtggccgactcgcctctcttaacatgttgacac

SEQ ID NO: 5046 - DNA, 720 bp, Zea mays
  Clone ID: 700441113_FLI
cagcaaacccgtgaagccgagagtgaagaaggggacaagtcagatttgtcatttgtcgcaccccccgtgactccaggccaatctgatctgcctcaacgagatatctacgctgctatctagagacagccgtgacgagttccggtcgagcgaggagcaaccaacaacatggcactctcgtttaggctggtcgccggcgttcttctggtcctggcattagctctgctctcttcgagcgcggaggagaggagcgccgggcgcgctgccactgtcagcgcgatgggctcagatcacgatcagacgtcggaagctccggtgccgccgttgaggcctcttggctcgaggaaaccggtggcggctccgccaccgccgaggccggcacatccacgggcgagtataaggccatttcctccacctcgtccgtcacagccgcagccgcagccgcagccgccgccgccaccaccacgctcgtaggtgtaggctgtgtacgtctaggcagccggcaagctctagccctctaggtctacagacgtgagaaaatggtttgctggcgttggcattcctccagtattcctgtgaacctgttgtagtgttcttcagttgtgagttttcaacgaacttttggaagttctatgtctgtcggttatggttcaggtgtttgggcgctttcagccccaaaaccatcggttgcgtattttaatatttccttcttggctgctcaac

SEQ ID NO: 5047 - DNA, 1452 bp, Zea mays
  Clone ID: 700441126_FLI
caaaacttatgactatgttggacgaggtggataggaagtacaaacactattatcatcagatgcaacttgtaatgtcatcgtttaatatggttgctggtgctggagctgccaagccttatactgcagttgccctccagacaatctcacggcatttccgatgtctaaaggatgctatcaatgatcaaattagtgttatccggaagaaacttggagaggatgacaatacatccggcaaagagggcaaactaacccgccttcgttatattgatcagcaaataaggcaacagcgagctttccaacagtatggtatgctacagcaaaacgcttggaggccacagagaggactacctgaaaattcagtctcgattctccgggcttggctttttgaacacttccttcacccgtatccaaaagattctgaaaagctaatgttatcgagacaaactgggttgacaagaagtcagatttcaaactggttcatcaatgcccgtgtccggctgtggaagccaatgatcgaagacatgtacaaagaagagattggtgaggcggagctagactccaactcttcctccgacaacgggcagcgaaacaaggacaaagcaccatctcccgaagaaaatgaggacctgcagaccccaacaagccaggcttgccaaaccagccagctcggccagtctaaagccatcgttggtggagtgatgggctttagtggagtgctagccggcggcttccacaccgaggccaaccccgacgacagcttcatgagcctgatgctaaaggcccagagacctggtgaaaccgaaggcaccggtctcctccacgatgccgtcgctcaccactcggacgacggcgcccggttcatggcctaccacctggcagagttcgggaggtacgggaacagcagcaacgtctcactgacgctgggcttgcagcacgccgagaacagcctcgcagtcccaccaaacactcagccaggcttccccggcgtcagagaccaagacatgtacaacgccacagctcctcctctcaacgtcgcctccacgtcttcagagtatgattcggcgagccaaattgatcaacaacagcaacggcagcggttcgagccgtcacctctgatgcatgatttcgtggcctgaatttcagctcgcccactggaaaacgtgggggaaaattactgccaatttgtagtgtgtgccaggacgaataacttgcctggactgaattttcaggcgtgggacagtagctgtagttaacgattggggattggggggtacagtacaggaggtatatagcgtaaatgtgatgtaaatttagtgggggtgatagcggtaaagaaatcctgtaaagatggaatgcatttatacgtgtatttaagggccatgctgtaaaaatagatttacctgtaatgagtacttatgatccaggtaatatatatactgtgcacgctgttga

SEQ ID NO: 5048 - DNA, 1372 bp, Zea mays
  Clone ID: 700441158_FLI
cagacaagcaaggaatcccccgatggctcatcgcgttctcctcctcctctctctcgcgtcggccgccgcggttgccgccgccgtcgacgcggaggacccgctgatccggcaggtggttcccggtggagatgacaacgatctggagctgaacgcggagtcccacttcctgagcttcgtgcagcggttcggcaagtcctacaaggacgccgacgagcacgcgtaccggctgtccgttttcaaggccaacctgcgccgcgcgcgccggcaccagctgctggacccgtcggcggagcacggcgtcactaagttctccgacctcacgccggcagagttccgccggacctacctcggcctccgcaagtcccggcgcgctctcctcagagaactcggggagtcggcgcacgaggcgcccgtgctccccaccgatggtctccccgacgatttcgactggagggaccacggcgccgtcggccccgtcaagaaccagggttcgtgcgggtcgtgctggtcgttcagcgcgtctggagcgctggagggtgcgcactacctcgcaactggcaagctggaggtgctttcggagcagcagttcgtcgactgtgaccacgagtgtgattcatcggagcctgattcatgtgattcgggttgcaatggtgggctaatgacgacggcattcagttatctccagaaggccggtggccttgagagtgagaaggattacccttacactgggagtgatggcaaatgcaagtttgacaagtccaagattgttgcttcagttcagaacttcagtgttgtgtctgtggacgaggctcaaatttctgctaacctcatcaaacatgggccattggcaatcggcatcaatgctgcctacatgcagacatacatcggaggcgtgtcatgcccatacatctgtggcaggcaccttgaccatggtgttctccttgttggatatggtgcttctggtttcgcccccattcgcctgaaggacaagccttactggatcatcaagaactcgtggggcgagaactggggggagaacggatactacaagatatgcaggggttccaacgttcgcaacaagtgcggcgtcgattccatggtctctaccgtgtccgcagtccacgcctcgaaggagtagactctggtcagcggtgataatcgtgattccatatattgtagaactataatccctgctagtaatccatttgtgctgtttatgtatcgaaggcagcaaagatgtgtgaagcggcaatgggatgcttgctgtaaggtaatatgtttggcttgctaggcatgctacacgctatttggatgtagcaacgttatcaccagctgtatacgctttttaatcgacaacatttgaataatatgt

SEQ ID NO: 5049 - DNA, 925 bp, Zea mays
  Clone ID: 700441260_FLI
gcgtccctctccccttccctccacctcccttgcaattcaagaactggcttccttggaaagacacgtgggattcgtccttgtgttttccctgctggaagagttggatttgtcagaacagtagtggaatgcaaggaatctagaattggaaagcagcccatcgaagttccatcaaatgttactctcacattagaagagcagtttgtcaaagctaagggtccgctgggggagttatctctgagctttccaggtgacttgaagatcgtgaaagaagaatccggtaacctgagagtttataagactgcagagaccaagagggcgaaccagatgcacggacttttcagaacgttgacagacaacatcatcgtcggtgtgtcaaaaggattcgacaagaagcttcagttagtaggtgtcgggtaccgtgcggcggtggagggcaacgatctcgtgatgaacctgggattctcccaccctgttcggatggccattcccgaaggcctggcggtcaaggtggaagagaacacaaggatcatcgtgagcggctacgacaagagcgcgatcggtcagttcgctgctaccataaagaagtggaggccacctgagccatacaaggggaagggtatcagatacatggatgaagttgtcagaaggaaggaaggaaaagctgggaagaagaaatagaagtgtttgttttttgtttgtcctttccatgcttcatttcattttcccgctgtaacggtcctcgtctgctatgaccgaacccgagaaaaaaaagtattgttctgtggctgtgctgatcatgccatatttatgtgcaccttgagcatcccagtatcccactgtaatggtttccatgtacaccaagcggagccgtttgacccccgtttggttggtgaagacgcaaaactgctcgatgagcgctaccgct

SEQ ID NO: 5050 - DNA, 776 bp, Zea mays
  Clone ID: 700441262_FLI
accagatgacaacagaaggatcagggaaagggatagtaggagacatgttgcttctgcagagaatgggcataggcgcaaagaaggttccaaagaaagtgagtacaaaaaaggcctaaggcctgttctctggctctctccaaatttccctcttcggactgaggagctgctgccattgcttgatattcttgcaaacaaagtgaaggcaattcgtcgtttgagggatctacttacaacaaaactccctccaggcacatttcctgtcaaggtcgctattccagtcgtgcctacaatcagagtgcttgtgacattcacaaaatttgaagagctacagccgctagatgagttcaccacaccaccctcaagtcctgacaacagcaagagcccagcagtgcagccttcttcaagttcctggattcagtggatcaaggcgccctacctccagaacttgtcgacggcacctggcccaagcagccgcgtggaggacatccaggacccattcgccattccttccaattacgtgtggacaacacctgaagagaagaaaaagaagacacaagaaaacaagaacaagtcgaagaaaggcaggagcggcgcatagatagtacgtaggtgatagcattggtgggggggggggggagttaaagttatgctgtgagtgggtgaaaagggctatactcttcaggatctaacaggagggatgattggaagatttggagatttcggctgctctgacgtcgaatattgagaagcgaccgcttgtcttctttcattgtgat

SEQ ID NO: 5051 - DNA, 568 bp, Zea mays
  Clone ID: 700441302_FLI
ctgcttcacgccaggaaagcaccctagagaccgcgacgaggaaggaggcgccaaaggaaatggcaaggtgtgggtgcccaagacgatccggatcgacgacgtggacgaggtggccaggagctctatcctgtcgctaatcgggatcggcggcgacaaggcaggcaaagatggcggcagaggctgcaagctcgcaagggtttttgagcagaacgaagaggcggcaaggacggcaactcctcactcggcagccatcagcggcttgccgttcttgcaggggaacccagctgcgctctcgcggtcactgaccttccaggaggggtcttgagcctctcgctcgattcacagctgagaattttgtacattagagggttgtatgtaatctaatctaggtggggggtggggctcatagctgccagcggacattgaaactatacaatagatagatatttgtagatagccaatatatatgggtcgggggaggaaaaaaaggataatgagagcaagtccccttatttgtatatattataatggattggaatatttggttgccaagtggtcttccagcaat

SEQ ID NO: 5052 - DNA, 774 bp, Zea mays
  Clone ID: 700441330_FLI
caggatgttcagatgcacagtactttgaggaactctatcaatactttatgacagaaaaggcctggaagctttgtgaccccgatgccgaaagtgtatttaaagctttgaggaaagctggcgttaaaactgcagtcgtctccaatttcgatacccgtctacggccactcctgcaggccttgaaatgtgaccactggtttgatgcagttgcagtctctgcagaggttgcagcagagaagccgaacccaataatattcttgaaggcctgtgagttactgggcgtgaagcctgaagaagctgtgcacgttggcgacgatcgtagaaatgatatatggggagcgagagatgcaggctgcgatgcttggctctggggcagcgacgttcgctctttcaaggaggttgccgagcggatcggtgttgaggtgacgaagtgactaagtgagctaggatggtgaatatacggaggcagaggtagtacccaggatcgcggtcgtcaaggaagccagtgaccccatccttgtggtgaaattcctgtgctggtttgtaggcttgtagctgtatgtatgacaacttattagggttccgttgaacctgctatgcatgcatgcttgctgccctgacagtgacaggcgaatgcgtcccatgcacttgaatatgagggtctgggttctggacttctgggactcttgagttattgaattattgtcgcctagttagacacaaagttatctgccatgcacttaaaaattgaaggtctggaattctggattgttgtct

SEQ ID NO: 5053 - DNA, 1045 bp, Zea mays
  Clone ID: 700441361_FLI
gtcgttccttccagttagcagctatgattccttggagagagcatttgcagaagctggcacctcaggaatggaaagattttattgtccctttccaaactgttcagtgctgttagaccttagtcagcacttctctagggcaagttcatcaagccagtcagatctcagttgtgtcgagtgcccagaatgccatagagatatatgtatcaactgtggagtgccgtggcacatcatgatgggctgtgatgagtaccagagcttgcccgctgaggaaagagatgctggagacctatctttgcatcggcttgcacagaacaataggtggaggcgttgccagagatgtcgacgtatgattgaactgacacagggctgcttccatatgacttgctggtgtgggcacgagttctgctactcctgcggtgctgactacgctagcggcgttcaaacatgccaatgcgtgttctgggacgacgaagccatggagccctcctccgccgcacggtccacccaagcagcgtccgagatctgggcgtgggacacatttgactgcatgccgaccgccgtggagggatactcggagcaggagagagcgcagctggcactcatccagaggttcctcgccggggggttcagcctgggtgagaacccctgccagtcgccgccccgctgcgccgactcctacatcgtcgacaccatgaaggacctccaccagctcccatggctcgagcggttcgtgtcggtgatcagcgacacgtacaacgatgactacatgcagtgaagagagggagggagggagagacagttatagatagcagtaaaagaaacggcacatactgagtcctccattcagaataatttgtttccatgcccccctgtaggcaattggcgcagggaaaaatgatatgctttcatcatgaatacactggtgttgtttcctccattgtatggtaaccttcggcttcggtgttagttgtgcatgggcacaagagttctccattttatatgattatgtccttatttctttaaagtgagtgtaatctctctctat

SEQ ID NO: 5054 - DNA, 518 bp, Zea mays
  Clone ID: 700441402_FLI
ggagcataagcacaaggagcgcctcggcgaggtgggcgccctcgcgggcggcgcctttgctctgtacgaggggcaccgtgcgaagaaggacccggcgaacgcgcagaggcacaagatcgaggccggcgtggcaacggcggcggcgctgggcgccggcggctacgcgtaccacgagcaccgcgagcagaaggaggcccactacgagagcaggcagcaggagcacagggtgccgcacgggcacgggcacggctactcctactactgcgactgaaacgactgatcatcccatcgatcgagatatgcatgcagaactcgatatatatacggcccctagcgccgtacacgtgcgtgcgtgtaagtaaataagagcaaacgtcgtcacgtgtgtgttgctcgatcactactccatcgatctacttattatcgtctgcaaataacgactaagtgcatgcttctgcagcgtgtaacgatccatcactgttactatatctaatgatatgcatgcatgcaattaagct

SEQ ID NO: 5055 - DNA, 1196 bp, Zea mays
  Clone ID: 700441420_FLI
ccgaaaccgagatctagtgcttgattcggtcgtttttgggcaccaaacacgttcttgggaccgccgccgccgccctacttccagtcccagctgctcaggtctccatcggcctcgagccctttgccggcgacgagcactcacaacaccagatgcagccccataaaggtccctacccttgtcccccggcgctattggttcccctcgcggacgcggaagaagcacaaaagaagtagagcgcccccgcccttgcccccgtgctcgccgcctgcctcccgcgccctgcttggctcttgtacggcgttgatcctgcggtgaggaagccttcccacttcggtattgatgccaacttcattggtccatgctgcacaccgcccctcatgagtgcacaccaccagctaccttgaatgtactccgacaaccctcgttgactatgttgttttcggtcagccttgccctcctccccatgtccttgttcatccttctcttctttatgttccttaggatttggagaacttttttcacgaaatatttagggagtgtttggtttaaagaatcaatccattctagatgaggtggtgtattatgagtacattccacaaatttggtggaatgaactcattcctcacttattactaattattagcctatgaggaatgaaatagtgatggatcaactcattccattccacaaaccaaacaagaaagtgaggagtgagaaaatgatggactacctcattcctcaaaccaaacacgctattagatttagcttacttctctattcaattcttttctttgttttcctctagggcttggagaaattttcacgagatatttagatcttgtgtacttctctattcaattgttgtcttttattgaatgttgtatgtgccatgccaaaaatatttttcgataaatatttgttgtaaagaatgattagctgggttacgtactggacattttgatccatgtcaccggtgtccctccccctttcatacgtctgatcccaacctttcccaaaccctaacgatttgtgttcagttttgtaagaggggatctgtaccagtcaggctgagcagcagcagcagtggtgtgttctggcttgtgtgggacctagaggaagcttacacaacagggaagagtattgtgttaggtgagttagaaagtaatggaatgcatgcagtgactcacattgatttc

SEQ ID NO: 5056 - DNA, 783 bp, Zea mays
  Clone ID: 700441426_FLI
ccctactacgcctcggaatcagaggaacccgaacggtggaagagtacgcctcggaatcagaggagcagcgaggaagctgaaggaggggcgaatctaagcccaattgaagcatgagggcgtcgattaatcgtcccccgacgccgagcgcggaggaggatcgggacaagcagccttctctcggagagatcattaacatcaagttggtagagactggggagaaggagaagctaatggagctactccgcgagcgactcgctgagtgcggctggagggatgagatgaaggcactctgcagggcatatgcaaggaagaaaggaagaaataatgtgacagtagatgacctcattcatgttattactccgaaaggaagagcatccgtgcctgattcagtgaaggcagaactcctgcaacgcatccggtccttccttatgtctaccacacttcggtagtcatttgtcgcgacggttggagcctatatgtaccattgtaggatcattgggaagtcgatcttgttggggaccaaagggtgcaggaaagcagtgcgtaggggaatattgtgagcatgaaaagaaacagtgtgatcttcatgacactgtcgacatgttcctcgtcaggcgcaggcggttggcgtaatttcaggtgtaccaatagagttgtaagttgtaacccctgaatactgtattgttaaagcaaccttccaccttgtaatgctacattgtactataactgctcagcgctgatgcttaatttcacaattagaaaacagaaacgcaatcttgatat

SEQ ID NO: 5057 - DNA, 1458 bp, Zea mays
  Clone ID: 700441447_FLI
tggaggacttgtctcaacaaggtttgtgcataaaatgtggtgaaggtggtcagttgttggaatgcaatggctgttttttagccgcccatagcagctgttttggttcatcggcgacatttgaaggaaccaattttttctactgcccggtatgcttgtataagaaagccactgaagcatataaaaaggcaaagaaaacatattgtgaaactaggaagaaccttgttgctttccttggcacagcacaagccaccaatcaacctgacaaacaactaaatggagctcagccaggagctgccaacagagatgaagagcctcatgatgagcaacattctaaagggtgtggcgcatcaaaaggggcccatgaaaatgaagtatacaatcttgctcatcaggatgaagagcatcatcagcagaggaagaagcagaaaataaatgctataggtaagagttatcctaaggaggtactcactgagaaggttattttccagaactctgatcctgcatccattaataaacattcagtgctccagaataacaataaaacaccagttaaggatccagagaaaaagcagcaagcggtcaacgaagaagctcgcaaagaaggtggtaatgacaactcatctcatgaaacaggagcttcatctccgagaagatgtgatcctccttcgaatcaggacgttgaggctgaccaggacgatagccttacaacttctaatcaatctggtggttctgatgaaatagaagctacatcttctaatgactctgccaagcaatcatcacccccttggcgtggtatgggacacaacaaaaaaggattgcacgaaaaggagccagctgtatcaagtaaatctggaaaaggtattgggaaacaggatcaacatatgcatacttcacgaaggaaaaaaaaaatgcacacctgcaaaagcgctattccaatcctgttgcgccacctggaagacgcaaacaactctgttggacagaaaaagaagtagctattttgagggatgggatggcaaaattctctccacataataatggtaaaataccatggacccagatactgcaatatggccgtcgtgtgtttcacaagacgcgcctgccatgtgatttgagggtcaagtggaggaacatggagaggaagaagtgggcaggctactgatgctggcaatcttacacacagacacacacacacacacaactgttgtgtgtcatactgaattactaaccacaccttcatttgtttgtgtccatctgcagatctgatgccgtcgacatggaacactgatgtggtactagaacatagcggaacactgatatggtactaatagcgaatggaggagggtttcttctaaaatagtattttgatgcacagggtgggcatccttttgtgactggttgtgtcaacctagacctactatgcccgtgagagagattgctaaagagtcaactttcttttgg

SEQ ID NO: 5058 - DNA, 920 bp, Zea mays
  Clone ID: 700441468_FLI
gccgccgcctcctctctgctgccgtcgccatggggagaaggcctgcgagatgctatcgccaaatcaagaacaagccataccccaagtccaggtactgccgtggtgtccctgaccccaagattaggatctacgatgttggcatgaagagaaagggtgttgatgagttcccctactgtgtgcaccttgtctcttgggagaaggagaatgtctccagtgaggctcttgaggctgcccgtattgcctgcaacaagtacatgaccaagtctgcaggaaaggatgccttccaccttcgggtccgggttcaccccttccatgtccttcgtatcaacaagatgctttcgtgtgctggggctgataggctccagactggaatgaggggtgcctttggcaagcctcagggcacctgtgctagggtggacattggtcaggtactcctttctgttcgatgcaaggacaacaatgctgcacatgccagtgaagctctgcgacgcgccaagttcaagttccctggccgccaaaagattattgagagcagaaagtggggcttcaccaagttcagccgtgccgactacctgaagtacaagagtgagggtagaattgttcctgatggtgtcaacgcaaagctgctcggtaaccatggaagacttgagaagcgtgctcctgggaaggctttcctcgaggccgttgcttaagtccaatctacagttggaatgcgaatccagacgttttgctttagcctatcttattttgctttgtgcaacatgaattttaagtgtatggggtattacagtgccttgtcttgtgtgaacctgcttatctcgtgctgaacatcgttatgcatggaagtacttatcttttgttctgctaaaaattaagtgttctgcgtctaaatatatcttctcaatctggcttgtctcttt

SEQ ID NO: 5059 - DNA, 1445 bp, Zea mays
  Clone ID: 700441491_FLI
gtgccgctacggcggcgaggcggcggctggtgatcggggtggggttctgggtgcagggcttccggctcttcccgtggctgggcgtcaatttcttcctcaaggacggcatgggcgttgctgcctcctcgctgcagatcctccaggcctccgccaatctgcccatggtcgccaagccgctcattggcctcctctcggatgccgtccccatacgcggccatcgccgcctgccctacgtcgccatcggcgctctcttgcaggcaatttcatggctagcaattgcactttggcaagatatctctcttcaagttcttaccatttttctcctcttgagcaactttggtgcttccatatgtgaggttgccaatgatgccattgtagcggagtctgggaagaaagcggcctcttcctcaggatcaggtcagcttcaatcgtttgcttggatgttcggctcttctgctggtgctttaggaaacctcctaggtggcattgctctcagctatttttctcccaaagtcatgtttctgtttttcgcaatccttctcctgctccagttcttcacaactgtggctatacctgagggctctctcaaactccctaaggtagctacttctaccaatctatcagcactcaccagcatccgtaagcaagtcaaagagctgtcatgcgccctatctatgcctgaaatgttttggtcaattatatggtttacagcgtcatacgctgccataccttttctacttgggaccatgttcttctaccagactgaagtgctaagactagactcctcggttatcggcttatcgaaggtgtttgggcaagtggctctattggcttggagcatgtcatacaacaagtacttcaagacaatgtccgcccggaagctcctgtcagttctgcagttcgtcacagcgctcgtaatgttgtcagatgtgttgttcgttcagggagtatacaggaaggtgggaattccagactccatatacacgattgtcttctccgggctgctcgagggccttatgtttttcaaggtcctgcccttcagtgttcatgttgcaaaactttgccctgctggctgtgagggatcagtgatggcctttgtcatgtctgcgcttgcccttgcgactatcgtcagtggctaccttggagttgctcttgctgccttcatgggagtgtctggagatgatttctcagcactgccagcttgcctgttgattgaggctgcgtgcacaatgttgccactatgttgctcgtccttgatcaaagagagaagagaaaaggagaaaaaacaagagtagattacatatatattatctgaagatgatgtaaagctcattgttgttaccctcgtcctcatggtgtcatttcagtttgttatgtgatcatagcttgcagaaacaaaataggagatgattacacatttacacttgtccggtgttaacacctct

SEQ ID NO: 5060 - DNA, 886 bp, Zea mays
  Clone ID: 700441514_FLI
caagcatagtacgatttagggtttccttaccttacaagctttttcttccgccgccgcctcagccctcgccccgcgctgctgtactctctcacctccttcgccgttgtctaccagatcatcccatggcgtcggagaagaagcagtcgaacccgatgcgggagatgaaggtccagaagctcgtgctcaacatctccgtcggcgagagcggtgatcgcctcacccgcgccgccaaggtactggagcagctaagcggccagtcaccggtattctccaaggcaaggtacactgtgaggtcgtttgggatccggcgcaatgagaagatcgcatgctatgtgacggtgcggggtgagaaggcaatgcagctgctggagagtggcttgaaggtgaaggagtacgagctgctgaggaggaacttcagtgacactggctgctttggatttggtatccaagagcacatagatcttggcatcaagtatgatccatctactggtatctacggcatggacttctacgtcgtccttgagcgtgctgggtaccgtgtcgcccgtcgccgcaggtgcaagtcccgtgttgggatccagcacagggtcactaaggaggacgccatgaagtggttccaggtcaagtacgagggtgtgatcctcaacaaggcccaagccaacacctcctaagcctaagcgttaccataagatattagaccctcttggtctcttctagcgcttcgagttaatggagtattccgagtatatctggcagtcggatttgtattagaagaaaaccagatgcattatcatttttgcctctactggtcctactggagttagttggatccatgtttttgtgtgtgtcgaatacattgatgttactactgttctacctcgacagc

SEQ ID NO: 5061 - DNA, 907 bp, Zea mays
  Clone ID: 700441537_FLI
atcccacatgctttgtgcgttcgtcctccagcccacctttgtggtgcccctctcactgctccagctcctttcaccaccgagctgccgcaccggtggaacaacaacgcgctcggcttccccttgcctccaacccttctgtcgtctttctcctctctctaatctctagcgcatgctcagctcctctccatgccgcgcggctacagatcgaggagcagtccgcaccaggtgaagccaaggaggccgtctcccgcgacatgctccaggccaacggcgcgggtctggccatggtggtcagcacggtgtctgtcgggccatgtcgagacgagtggtggtgagtgttgagtaattagacaaattccagattaaattctgaatataaatcatgaccaaatcagaagaactgaagtaaaaagtcaaatcagatgatgcgtactgattagatataccgatagatggcacgcgccggaatcagcaggatcgacgacgtcgaagcagcgaaatcagcagagtcgacgaggttagaagatcacgagcagtcgcgtgaggacgcttcccaaaaaccttattcgccctctcccggtgcaggatctagaagacgaagggttctggagacctgctcttctgatcgcagatgcacgtctgcggtcgggacgaagggaactaaaaggcgactcagctatgaagagaggcgaaagcgaaactgggatgatttggaggctggctgccgggctccttttatagggccgagtccgcgacccccgatcttatctgcccacaaaaatctcacgatcagttgagattttatagcgatcggttaggataaatgtaacagccaagaaaccaaaaaaatcaaacggcaaaaggtagccgcgcccccgcaaggcgaggggccggattttggtggacc

SEQ ID NO: 5062 - DNA, 1244 bp, Zea mays
  Clone ID: 700441589_FLI
cagcctcatccccttgcccacttctacagcccctctgctgcagcaagaaggaaagaagctagcgcttatagcttgtcagccatggccaccgccgccgcgtctagcctcctcaagtcctccttcgcgggctcccggctcccggccgccacgcggaccacaccggcgtccctcgtggtggccaccggcccgcgcggcgccggcgcggggcccatctgcgcgtccatgtccatgtcctcctccaacccgccctacgacctgacgtccttccggttcagccccatcaaggagtccatcgtgtcccgcgagatgacccgtcgctacatgacggacatgatcacctacgccgacaccgacgtcgtcatcgtgggcgccggctccgcggggctgtcctgcgcgtacgagctctccaaggaccccgccgtgagcatcgccatcgtggagcagtcggtgtcgccgggcggcggcgcgtggctgggcgggcagctgttctcggccatggtggtgcgcaagccggcgcacctgttcctggacgagctgggcgtggcgtacgacgaggccgaggactacgtggtcatcaagcacgccgcgctcttcacgtccacggtcatgagcctgctcctggcgcgccccaacgtcaagctgttcaacgccgtggccgtggaggacctcatcgtcaggggagggcgcgtcggcggcgtcgtcaccaactgggcgctcgtgtccatgaaccacgacacgcagtcctgcatggaccccaacgtcatggaggccaaggtcgtggtcagctcctgcggccacgacgggcccttcggcgccaccggcgtcaagaggctccaggacatcggcatgatcagcgccgtgccggggatgaaggcgctcgacatgaacaccgccgaggacgagatcgtgcgcctcacgcgcgaggtcgttcccggcatgatcgtcaccggaatggaggtcgccgagattgacggcgcccccaggatgggcccgacgtttggcgccatgatgatctccggccagaaggcggcgcacctggcgctcaaggccctgggcaggcccaacgccgtggacgggaccatgtcgccgccgttgcgcgaggagttgatgattgcgtacaaggacgacgaggtcgtggacgcctgagtgcggcaagcagagaggaggatcgacgccagcagcgtcttatcttaattgccttgttgttcaatgatgaatcgatcgaattcccttgggttagcttt

SEQ ID NO: 5063 - DNA, 1707 bp, Zea mays
  Clone ID: 700441960_FLI
cggaagcagagcaagggatggatagcaagtcggtgggaatcgtcggcgcaggcgtgagcggcctagcagcctgcaagcacgccctcgacaaggggttcaggccggtggtgttcgaggccgacgggagcgttggcggagtgtgggcgcacaccctggagtccacgaggctccaggcgccgacgacggcgttccggttctcggacctggcgtggccgccggagagcgcgagggaggcgtacccaggccaccgcagggtcatggagtacataaggtcgtacgcgcgtgcgttcgacctcctcaagcacatcaggttccacagccaggtgctgggcgtcgagtacctcggtgcgaccgaggaagaggtcatgggctgggatcagtggtccggcgatgggacggcgttcggagccgtgaagggtggcggatggcgcctcaccgtccaggacttgaaagtcggtagcactgaggtttttgtggtggattttctcatcctgtgcattggaaggcacagtggaaccccaaacatcccagagttcccagcgaatgggcctgagctgttcaaggggaagatactgcactcgctggactactcctacatggacgacggcgacgctgctgagttcgtgagggggaagcgcgtgacggtgatcggctccggtaaatcggcgttcgacatcgccgcggaggtcgccaaggtgaacggtgccgcgcagccatgcaccatcgtgtacagaacaaggcactggctggtccacaagtccagcgtgtggggagtcgacctcagctacttctacctgaaccgcatctcgcagctcctggttcacaaacctggtgaaggattcttgcgctgcatgctggccgccgcactctctcccttgagatgggcgatctctaaagcgatcgaaacgtactacaagtggagcgttcctctgcggaagcacgggatggtcccggactacagcttctccttcgccatgtcctcgtgcctgatcgcgatgctgccggaaggtttctacgacagggtcgacgaaggcagcatcgttctcaggaaatccaaggcggtcggcttctctagcgacggagtcgtcctgcgagacagaaacgaaagcgtgagaagcgatatcgtgatcctggcgacggggttcagaggagaccagaagcttagggacatcttcactgcgaactggtgcagggagatagtggcagggtcaccggatacagcagctcctctgtacagagaatgcatccatccccggattcctcagctggctatagtgggttactccgagagcctcaccaacatatacgcctcggagaggatgagcaactgggtagctcaatttctggccggcggcttccagttgccaagcgtgagatgcatggaggagagcgtggcggagtgggcagagtacaagaaccgatacaacgggaggtatttccgcaggtcctgcgtaagcaccgctaacatctggcttaatgatctgctgtgccgagatatggggtgcaaccctagaaggaagaaagggttcctggccgaatggttccagccatatggacctgcggactatgcaggtctttgctgaagatggttgcattgcatgcctgtcagtgcatactcctaggaagagatgacagagttgctacctccatgggtgtaatactgcaatgtgaaacgtacaagcaaaatatgtctgatgtttgaactgt

SEQ ID NO: 5064 - DNA, 662 bp, Zea mays
  Clone ID: 700441996_FLI
cgacgacgatcacacacgcagaagatcgagttcgttcgatcgtgaccgtgacgcaggaagctataagctagccaagacaggaataataatggcggcgtcgacggtggcgagcctctctgtcccggtgacgacgacgaccttcgcggcggcggcggcagcgggcggcgccgacgtgctgatcgtcgtcccgaggagggcgggcgctgggcgcgtctggttccccgcggcggcgcgccgcggcggcggcagcgggcggttggtcgccgtgcggtccagcgggccggccacgccgccggagatctccgacaaggtgtcggagagcatcaagcaggcggaggagacgtgcgcggacgaccagaagggcgacgccgagtgcgcggcggcgtgggacgaggtggaggagctcagcgccacggccagccacgcccgcgacagcctcaaggagaccaacgccaacgacccgctcgagaagtactgcaaggacaacccggactccgaggagtgccgcatctacgacaactagctagtcgtatagctatataggccatcgacatgaaggacgaaggttgtagcacactacgaaagaatgatactctcgatcggcgcgtcatacgtggaatgaacttgtttgtatcaagctatctatacctcaatgcttctct

SEQ ID NO: 5065 - DNA, 140 bp, Zea mays
  Clone ID: 700442060_FLI
gggatataagactccttagatgcaccgaataaatgtctatgtagtttctattctgtttcatgggaccttgttgtaactcgtgaactttgattgagcacctattcggatttagtagcacgttcagaaaatcattcgctgct

SEQ ID NO: 5066 - DNA, 792 bp, Zea mays
  Clone ID: 700442111_FLI
caattttctctacaggaaacacggcatcctcgctgacgccggagaagccgaagctacaagttcgcccgtcggagccgcagcacaggcgcttgcaaacgcgatggggagcgcggacctggtgctcaagatggcttgcgagggctgcggcaacacgtcggatctctacggcacggggtgcaagcacaccactctctgcagtgactgcgggaagtccatggcacgctcccgtgcccgctgcctcgtctgctccgcgcccatcaccaggctcatccgggaatataatgtacgagctaattctgttatggataagacatactctattggacgatttgtcactggtttacctcctttctcgaaaaagaagaatgccgagaacaagtggtctctccataaggagggtctgcaaggccgtcagatagccgagaatatgcgggaaaaatacaacaagaaaccatggattttggaagacgaaacaggccaatatcagtatcaaggtcaaatggaaggatcacagtcagctacagctacatattatttgttaatgaggcacggcaaggaatttaatgcatatcctgctggctcttggtttaatttcagtaaaattgcacagtacaaacaattgacactggaggaggctgaagaaaagatgaataagaggaagaccagtgcaactggttatgaacgctggatgatgaaagcagcggcaaatggaccagctgcctttggttcagacatgaagaagcttgaggccacaaatggtggggaaaaagaaagtgctcgtcctaagaaagg

SEQ ID NO: 5067 - DNA, 749 bp, Zea mays
  Clone ID: 700442142_FLI
tttcggtggacgagctgagcatcgagcgcgacgaggtgctcgtcgtgaacggcctgttcagtctcggtaggatgcaggagcaggagcaggacgacgtggatagggatagccggccgagccctagggacactgtcctcggtaacgtccggaagatgcggcccgacgtgttcgtcctgtgcgtggagaacagctcgtacggcgcgcccttgttcgtgacgcggttccgggaggcgctcttctactactcggcgctgttcgacatgatggacgcggtggcggcgcgggacgacgacgaccgcgtgctggtggagcagcacctgtttgggcagcgcgccttgaacgccatcgcgtgcgagggctcggacagggtggagcggccggagacgtaccggcagtggcaggtgcggaacgaacgggcagggctgaggcagctcccgttggatcctgatgcggttcgggccatcagaaggaaggtgaaggacaagtaccacagggacttgttcatcgatgaggatcagcagtggctcctgcaagggtggaagggacgagtactctacgccatgtctgcgtgggctgcaaaatgatacgtacactagtttaacaaagttcaaagaaaacaccattaatatctatggctcatgttcaaaaaacgtttgattccgagaattgtaatctttcttcttcttttttatgaagggacgtagaaagagtatataattaattttatggattacttgtttgactgtcct

SEQ ID NO: 5068 - DNA, 593 bp, Zea mays
  Clone ID: 700442156_FLI
cgaggagtgacccttcttcagctgagcttccatctgccgttcgctcgcttcttcccagagagaacggcaactctgttggcagctccaggtcagctgccacgacgacaacggaggaggacggatgtggggtcccgacgtcgagtgacgtcaactcgttgaggtcaacaaggctcgccaacaacagcggcggaagcgagaggagcagtggcagcagcgacatcaacaggagcgccgcggggaggggggcaagggggattctgatgccgaagaagatgctgagcaagctctggtctgggaaaacgaacgccggtgagaacagcagctcagacacgtcgcagagccctgggtccgtcaacaacccggaggaggtgaagtccacgcagtcaaggatcacaaggcgctcggtatcctagtcgcggaggggtaaccgcggtcacagcctagttttgttcttgctcttgatttttgccttcactggagagtagtggcaatctaaaaaatgtggagttactggagtaggtttggtcattgatgatgttttcagccatgttccatgggaactttttacatacaaagaaagtataggttgttat

SEQ ID NO: 5069 - DNA, 906 bp, Zea mays
  Clone ID: 700442361_FLI
gcgctcgtggcgtgcgccgctgccacggcggcgctgctgctcggcgtggcggcagcggacgtggcgtcgatcatcacgcaggacgtgtacaaccagatgctgcccaaccgcgacaacacgcagtgccccgccaacggcttctacacctacgacgccttcatccaggccgtcaacttcttcccggggttcggcaccggctccagcaccgacgaactcaacaagcgcgagctcgccgccttcttcggccagacctcccacgagactaccggtggcacgacaggtgccgccgaccagttccagtggggttactgcttcaaggaggagatcaacaaggccacaagtcctccctactatggacgcggaccaattcaattgacagggcaggccaactaccagcaagccggggacgcgataggcgaggacctggtgaacaacccggacctggtgtcctcggacgcggtggtctccttcaagacggccatctggttctggatgacggcgcagtcgcccaagccgtcgtgccacgacgtgatcctcggcaactggacgccgtcgagcgccgacgcggcggcggggcgggttcccggctacggcgccatcaccaacatcatcaacggcgccaaagactgcggcgtggggcaaaacgccgccaacgtcgaccgcatcggctactacaagcgctactgcgacatgctcggcgtcggctacggcgacaacctcgactgctactcccagcagcacttctgatgaactgctgttcgacttgactgctagcactgttgctacagtataagatctgtgtccggacgtgttccatacatattttattattttaatacaataaaggctgatgatccggttatatatatatgaaatctttatcttattatgaacatgggattttcg

SEQ ID NO: 5070 - DNA, 693 bp, Zea mays
  Clone ID: 700446918_FLI
gttccttagggttttgtggaggggcgatggcggcggctgatgtggagtaccgttgcttcgtcggcggacttgcctgggccaccagcaacgagtcgctggagaatgccttcgcctcctacggcgagatcctcgactccaaggtcatcaccgaccgggagacggggaggtcccgcggcttcggcttcgttaccttctcctccgagaactccatgctcgacgctatcgagaacatgaacggcaaggagctcgacggccgtaacatcaccgttaaccaggcccagtcccgtggcggcggcggcggcggcggcggcggtggctacggcggcggtcgcggcggcggcggctatggtggcgggcgccgtgacggcggttatggcggcggtggcggctacggcggtcggcgcgagggtggtggcggcggctacggaggcggtggcggctacggcggtcggcgcgagggtggtggtggcggctacggcggcggcggcggcggctggagggactgatgtgtggccccatcctggcttcggccgagttatcttatctatctatagtatcgtgttaccgttcgcttctgtcaccgtgttagtgtccgttctacctttggattaggtgttggtaccccttttgttcgctttggttgctcccgctatgaaacgagacgagagaagaatgagcaaggtttttgttcgc

SEQ ID NO: 5071 - DNA, 1242 bp, Zea mays
  Clone ID: 700447227_FLI
gctagcggtgtccggtccggcgcccccctatttcctctcgcagcctcttctccccaaaccctaatcttgctcctgcctatctctgctccaatccgtcggtggagcggcggcgatggaggggaaggaggaaggtcggatcttcgtgggcggcctgtcgtggcaaacggacgagcgcaagcttcaggacgcctttggtcgcttcggcaaggtcgtcgatgttcagatcatgctggagaggcacacaaaccgccacaggggctttggcttcgtgacattcgaagatcgaagggcagttgacagcgctatcaaagagatgcgtggccaagagttagatggtcgtaccatctcagtgaacaaggctgagcctaagatgaatacagatgacacaaggttcgacaatggcggtggacgagactatcgaggtggtagaggtgatggtccaccccctggcaattgctatgagtgtggccgtcctggtcattgggtccgtgactgccctagtgctgctggtggtcgttctggcagattcccgtccaagttcagtggtggtggcaggggagaccgcttttctggatcagataggtttagtgatcgttacatggatgatcgttatgatggtggtcgttatgggtaccgtgatcaagttgatgcaagggacaagtatgctgggggccgagatcgttatgccaatgatcgctactccgctggtggcgatcactttgacggagacaggtatggaggtggcccggatcggtacgcgccaaatggttatgggagggaacgagaaagaagctacgagagagatggagttcgtggcggcggtggctatgataggaatgactcaagaggtggtggaagctatgacagggatggccctagaggcggcaagggtggtggctatgtcagggatggcccacgcggtggtgttgctgatcgttatggtggtggaggacctgcacgctatgatgggggaagttacagggacaggcctgggccatatgatcgccctagcaggggaggaggtcgttttgatgatcgccactgatgaactgcttctagacccgagcccctggtcttgtagtttagctttttgcagttttgcatagcttaatgcttaatgggctatggaagatgcctaatttacccccctctttggcacttcaatgtctgctctgtatttcaaccagtacttgggcaccggtgttgccttctcgataagtttatcaagctgactgtttttgc

SEQ ID NO: 5072 - DNA, 1413 bp, Zea mays
  Clone ID: 700447237_FLI
acaaatcaaagctcctgcactgcagcaccatgctctgatccccatttagagctgatcgtcgcgtcgagcacccggcggcgtctgttcgtccacagctagccaatctctctctccgggggacgagacgatggacatcatcaacggggccgtgctccctcgctgccacgccgcccccgtcacgggcgccgcggcggcctccgtcgccgacgcgagagtgagcggacacctccagcttctccggcgcgtgcgctgcagaggaagcggaagcgccagtgccgggctgctgcatgcgacgacgccccgagccggcgtggcagcgcgcaggttcttctccccaccgctggggaacgggaacgggaatgggaggaccatcggctggcggccggctcgctgcacccacggcggctcctcctccgacggcgacggcgccgccgccgcggacttcgacgcccgtgaggaggagttcgttgactccagcgtcatggaggccgttgagctcaggagcgtgtcagacggcggtttcgtcatcaagatgcgcgacggcaggaacctgagatgcgtccagaacaacccccgggtgctgaggctccgggactccgcgccgcaccacgcgatcgtgctcaagatggaagacggcagcgaccttctgctccccatcatcgtcatggagacgccaagcatcatgcttctggctgcgcttcggaacatccgaattccaaggccaaccatctacaatgtggtgctggagatgactacaaggatgggatatgaggtgcgtttggtgcggatcacagaaatggtccatgacgcatactattctcgactatatctcgcaaaggttgggaatgaccaagacactatcagtttcgacctcaagccatcggatgctatcaacattgctttccgctgcaaggtccctatacaagtgaacaggcgtatcgcgtataacaacggattgaaagtcctacagccaaaggcggccgggagttatttaggctccgacgacattcaaatcacaaggcttgacaggcctgacgaccagcattgcagcgaggcccaagagttcgatctggtccggaacatgctcattgctgccgtagaagaacgctacaaggatgctgctcaatacagagaccaactttccatgttgcggtcaaagaaaaagaacgcgatatagccagatgggtgcaaagcttcaacttgttagagcttgatgggggtgtacagaggaggccttttttgctgaagcacgtgaagcttcggcaaacatctaaggaacaccatgtaaatacgtacgtattacagaatttatgtatagacacacacatacacggagagcctaattctggattctttagctcatagttgcactgttgcagtgattgtactctaaaatgcaaatgactgttgtgt

SEQ ID NO: 5073 - DNA, 1286 bp, Zea mays
  Clone ID: 700447274_FLI
accctcttgaccaccgccgccgccgccgcgaagccaagccaaactgagtaagcagctatggagggatccgccgccgctccgctccgcacgcgcatctgcatcatcgggagcggtcccgctgcgcacacggcagccatctacgcggcccgcgcggagctcaagcctgtgctcttcgagggctggatggccaacgacatcgccgcgggcgggcagctcaccaccaccaccgacgtcgagaacttcccgggcttccccaacggcatcatgggcgccgacctcatggacaactgccgcgcgcagtccctgcgctttggcaccaacatcctctccgagaccgtcaccgccgtcgacttttcggcctgcccattccgagttagtgcagactccacaaccgtcctcgccgatgcggttatcgttgccacgggagccgtcgcgcggcgcctccacttccccgggtccgatgcatactggaaccgcggcatctccgcctgtgccgtctgtgacggtgccgcccccatcttccgtaacaagcccatcgccgtcataggcggcggcgactccgctatggaggagtccaatttcctcaccaagtacggctcccacgtctacatcatccaccgccgcaataccttccgtgcttccaagatcatgcaggccagggcgcttgagaaccccaaaattaaggtcctctgggactcggaagttgtcgaggcctatggcggcgcaaacggcggcccattggctggcgtaaaggttaagaacctactgaatggtgaggtctcggatcttcaggtgtctggcctcttcttcgccatcgggcatgagccggcgaccaaattcctgggcggacagcttgaactcgattcagatggttatgtggaaaccaagccaggttccactcacaccagtgtaaagggtgtatttgctgctggcgacgtgcaggacaagaagtaccgtcaggccattactgccgctggatcagggtgcatggctgcattggacgctgagcactacctgcaggagatcggtgcacaggagggaaagtctgattgactatatttaggtgtagcaaccagcaatccatcgaatagtcagttgtcggtgctgaaagccgctctctgatgcgcgtttatgccatgggttgtcatgagctcacgattgagatacctgatgatttatgctgcttagtagcatgctattcttatcgttaggatccagaagtatgtctgaactctgaactatttactggatacctattcgtgattactgccttgaagtttttcctt

SEQ ID NO: 5074 - DNA, 1212 bp, Zea mays
  Clone ID: 700448668_FLI
cgccgcctccgtgatcgcaattcgcacctgcccgcgcggccccgacccctagtcctccccacccatggcgcggcgatccgctcctctcctgcgccgcctcgtctccgcctcctccccgcccgcgcttcagtccctcacggaccacgtcggcgtcctcgcgcggcgcacggtgacctacatgccccggcccggggacggcgcaccacgcgccgtcacgctcatcccaggcgacggcatcggtcccctcgtcacgggcgccgtgcggcaggtcatggaggcgatgcacgcgcccgtctacttcgagacctacgacgtccacggagacatgcccacggtcccgccagccgtcatcgaatccatccgccgcaacaaggtctgcatcaagggcgggctcgccacgcccgtcggcggcggggtctcctccctcaacatgcagctgcgcaaggagctcgatctctacgcctcgctcgtccactgctccaacctccccggcctgcccaccaggcacgagggtgtcgacatcgtcgtaatcagggagaacaccgagggcgagtactcggggctcgagcacgaggtcgtacccggggtcgttgagagcctcaaggtgatcacaaagttttgctctgagaggattgccaaatatgcattcgagtatgcttaccttaacaaccgaaagaaagtcactgcagtgcataaagcaaacattatgaagcttgccgatggtttgttcttggagtcttgccgtgaagttgcttcaaaatatcctggtattcagtacaatgaaatgattgttgacaactgctctatgcaacttgtttcaaagcctgaacaatttgatgtcatggttacgcctaatctttatggcaatttggtggctaacacggctgcaggtattgtaggagggacgggcatcatgcctggaggcaatgtgggtcaggactacgccatctttgagcaaggcgcttctgcaggaaatgttgggaatgagaaccttgtggagcagaagaaagcaaaccctgtcgcgctgcttctgtcatctgctatgatgttgaggcatttgcagttcccgtcatttgcggaccggctcgagacggcagtgaagcgcgtcgttgctgaaggcacgtacagaacaaaggatctgggcggtagcagcaccacccaggaagttaccgatgctgtggttgccaatctggattagattccaggtgtaca

SEQ ID NO: 5075 - DNA, 798 bp, Zea mays
  Clone ID: 700449336_FLI
cggcggcttttctggcgacggcggcggcggcgacgacgagcagccacctggggaagagcaggtagcaggaaatggcggcgttcctgaggtcaaaatgttcaccagttggacgtactttgatgggaagccttggaaatagtttgtttggggctgccaactcttctgttggggcaataacaaggccttctcattgcgatgctatcagtcagcaaatcagaacattcatccagatgaggactaacctgaaggtggtcgataactccggggccaagcgggtgatgtgcatccagtccctgagggggaagaaaggagcaaggctcggggacatgatcatcggatccgtaaaggaggcccagcctcgtggcaaggtcaagaaaggagacgtagtctacggcgtggtcgtccgtgccgccatgaagaaaggacgcagcgatggcagcgaggtccagttcgacgacaacgcggtggtcctcgtgaacaagaagggcgagctgatcggcacccgcgtctttggccccgtcccccacgagctgaggaagaagaagcacctcaagatcctggccctggctgaacacattgtttgaggtgtgtcgcatagccaagtgtttgtgggaatgtttttttttgtgtgttctctgtttgaataatgcattgtgaaacgatagcatggaccgtttgaactattttgatgacattgctcgtccatttggatggccaatacgtgtcgtgatcgattctggagttccattttttttgttacaagctgctttcacatgtatgcagatatccttgtctggg

SEQ ID NO: 5076 - DNA, 1241 bp, Zea mays
  Clone ID: 700449356_FLI
ccaatctattgctcaaggtttctgtcaaaggaaacaatggcaatgagtcttctgttactgttcggttgtatggaccaaatacagacttggtgattgatcggaaaagggaattgcaggcgataccgtatctctcagctgcagggttcggggctcggctgcttggaatgtttgaaaatggagtagttcagtcattcatctatgctcgaacactgtcacctgcagacatgaaagaacctaaaatagcagctgaaattgccaaggagctacgcaaatttcatcaagtagatataccagggtctaaagaaccacaattgtggaatgatatattcaagtttttgaagaaagctgcagcattgaagtttgaggataatgagcagcaaaagagatatgtaaagatctcatttagagaaatacaagatgaagttaaagaacttaaggatctcttggacattctgcatgcacctgtggtttatgcacacaatgacttgctttcaggaaatctgatgctcaatgatttggaagggaagctatattttattgattttgagtatgggtcatacagctaccgtgggtatgacattgcaaatcatttcaatgagtatgcaggatttgactgtgactataatttgtacccagataaagatgcccagtatcacttctttaggaattatctgcaccctgatagacctagtgaggtgcaggcacaagatatggaagtactttatgtggaaacaaacactttcagactagcatcgcacatttactgggcattatgggctcttattcaggcaaaggtatccccaattgactttgactatcttggatacttcttcttacggtatggtgagtacaagaaacaaagggactcctgcttcgccttggcacaaagtttcctctccgggctaagaaatggctagagcctgagaatctggtcaagggtttgcactgttgtacgcatactcggggcgggtacgcgttgtgatcatcgtctgctactcagaaactctactatagtggtggtagcagcctcattttgttgtatctgatggtagtttcgtcatcgcctgataggaaagtctcatgatcgccctcgggaacgcagggtggcgagatctgtacttatatttgtaataaacacaatccggatgggttctgtcctgtgcaatttgttgtgcgcataagcattccgtgtttttatacattattgtgaggaattgcataagtttttttgtttttcgatt

SEQ ID NO: 5077 - DNA, 715 bp, Zea mays
  Clone ID: 700449763_FLI
gaagcacccggagcagcgcacagcaacagagcacacgccgcacaccgccgcctccgcagcagcagcaatggcgcgcgccggcgctctctgcctggtgctgctctgcctcgtggccgcgcactcagccgcggcgcagaagtccacgacagccccggccgccgcgccggccgccgccaccaccccgccggcgaccccgaccaagaagacgcccgcgcccgccgccgcgccgcccaccaccccggccaccctggccccggccgccgcgccgcccaccacgccggccacccccgcgcccgtcgctgcggcgcccactaccccggccaccctggcacccgccgcggcgccgcccaagtccgcccccaaggcgtcccctcccgccccgtcgcccaaggccaaggccaccccgccggtggccgagctgccgcccgccgcctcgcctcccgcccccgcccccgcctccccgcccaccaagcccgccgaggtccccgcgcccgcgccgtccaagaagaagaagaagccctcctcgtcgtccaagaacaagaagaagaagtccaaggccccggctccagcccccgtcgccgaggcacccaccagcaccaagcgctccaaggctaaggcaccttcggccagcgaagccgacgcacccggcccggtcggcgatggcgtggccgccgacaccgcgggtgctggaaggaccgtggcaggcggaatcatg

SEQ ID NO: 5078 - DNA, 1143 bp, Zea mays
  Clone ID: 700449815_FLI
aacccctgcaaaaacccgccactctcagatccgcacagcgacgccgccagccagacccgatcccctccctcgctagggttttcgtccccgcgccgccgcgctcccggatcccaccgaaacaaccatggccggcggtcccgcggcggtgtcgttcctgaccaacatcgcgaaggtggctgcggggctcggagccgcggcctcgctcgcctccgcgtcgctctacaccgtcgacggcggcgagcgcgccgtcatcttcgaccgtttccgcggggtgctcccggagaccgtcggcgagggcacccatttcctcgtgccctggctgcagaagcccttcatcttcgacatccgcacgcgcccgcacaacttctcctccaactcggggaccaaggacctgcagatggtcaacctcacgctccgtctcctctcccgccccgacgtccagcacctccccaccatcttcacctccctcggactcgagtacgacgacaaagtgctcccctccatcggcaacgaggtgctcaaggccgtcgtcgcccagttcaatgccgaccagctcctcaccgaccgcccccacgtctccgccctcgtccgcgacgctctcatccgcgcccgcgagttcaacatcatcctcgacgacgtcgccatcacccacctctcctatggtatcgagttctcgctggccgttgagaagaagcaggtcgcgcagcaggaggccgagcgctccaagttcctcgtcgccaaggcggagcaggagaggcgggcggccatcgtgcgcgctgagggagagagcgagtccgcgcgcctcatctctgaggccacggcgatggctgggacagggctgatcgagctcaggaggatcgaggcggccaaggagattgccgcagagctggctcgctcaccgaatgtggcatacattccttctggggaaaacggaaagatgctgcttggtctcaatgctactggatttggccggtgattcactgtttttttagtctgcttgtgctatgtgctgatgcatgactaaaacggaggttcgaactttgaaggacagtgatatctgctatccttgcttatgttaagttttccttgtcttggaactaaatgtgtctgttgtgctccaaataagttttggtttttgactgc

SEQ ID NO: 5079 - DNA, 1842 bp, Zea mays
  Clone ID: 700441654_FLI
cgatctccgatcccctcgtcgatccaagatgcagatcttcgtcaagaccctcactggaaagactatcaccctcgaggtggagtcttctgacaccattgacaacgtcaaggccaagatccaggacaaggagggcattcccccggaccagcagcggctcatcttcgctggcaagcagctcgaggacgggcgcacacttgccgactacaacatccagaaggagagcaccctccaccttgttctccgcctcaggggaggcatgcagatcttcgtcaagaccctcactggaaagactatcaccctcgaggtggagtcttctgacaccatcgacaacgtcaaggccaagatccaggacaaggagggcatccctccggaccagcagcggctcatttttgctggcaagcagctcgaggacgggcgcacgctggccgactacaacattcagaaggagagcaccctccacttggtgttgcgtctcaggggcggcatgcagatatttgtgaagactctgactggcaagactatcacccttgaggtcgagtcttctgataccatcgacaatgtcaaggccaagatccaggacaaggagggcatccctccggaccagcagcggctcatttttgccggcaagcagctcgaggacgggcgcacgctggccgactacaacattcagaaggagagcaccctccacttggtgctgcgtctcaggggtggcatgcagatcttcgtgaagacacttactggcaagacgatcacccttgaggtggagtcctcggacaccatcgacaatgtcaaggctaagatccaggacaaggaaggcattccaccagaccagcagcggctcatctttgctggcaagcagctggaggatggccgtacccttgcggattacaacatccagaaggagagcaccctccacttggtgctgcgtctcaggggcggcatgcagatcttcgtgaagacacttactggcaagacaatcacccttgaggtggagtcctcggacaccattgacaacgtcaaggccaagatccaggacaaggagggcatcccaccggaccaacagcgcctgatcttcgccggcaagcagctggaggatggtcgcactcttgcggattacaacatccagaaggagagcaccctccacctggtgctccgcctcaggggtggcatgcagatctttgtgaagacattgactggcaagaccatcaccttggaggtggagtcgtctgacacaatcgataatgtcaaagccaagatccaggacaaggagggcattccaccggaccagcagcgcctgatctttgctggcaagcagctggaggatggccgtaccctcgccgactacaacatccagaaggagagcaccctccacctggtgctccgcttgcgaggtggtatgcagatctttgtgaagaccttgactggcaagaccataaccctggaggttgagagctccgacaccatcgacaacgtgaaggcgaagatccaggacaaagagggcatccccccagaccagcagcgtctgatcttcgctggcaagcagctggaggatggccgcaccctagcagactacaacatccagaaggagagcactctccacctggtgctccgcctccgcggtggtcagtaagccatgggtcatttaagctgctgctgtacctgggtatctgcgtcgtctggtgccctctggtgtacctctatatggatgtcgtcgtctaataaacatctgtggtttgtgtgtcatgaatcgtggttgtggcttcgttggtttaatggacctgttgtgtcctctgtgtgttgtacccaaaactcttctgcagcagtatggctcgaatccttatg

SEQ ID NO: 5080 - DNA, 1949 bp, Zea mays
  Clone ID: 700441662_FLI
gcgcactaaagatgcctccagccttcgccgccgcaccttcctcctcgatgtaagcgtctgagcgccgaaccactggccctcaaagcccttgtacttctgtactgctggtgcttgtaaaatatgtgtatatatatttcagatgtggcgttcgcatcccaactgtgcgccgtttcgaagcgcaaagcacggtttccacgcccagatttatgcgtaatcgggtggcaggtaaggcaccgctccccgcgttgcagtgcaccacattatcagaattgccaacggttaatagttgatagtgcagccttcaagtttcagttagtttattttctggatagtgggtatacaaccacaattttaagctaacagttgggccaaatacatgagtgccctttttcggttctcgcattttctgttgatatctggaagcctgcattggatctgtcagcgccattgccactataccaccacacctttaccttttaaataaaatcgcgccatttgtgaattattttgtacacttcaacaagtgcagaaaacaaaatcatgatagtaataggtcaaagcctgtagattctcaagctcaatggaaagttaaacatgcaaactgctgattgctcataggcctatttatattcattattatgttttctattacttttgtggactgttcataaagcgtagctgtttatttgataattagtagcccaacaccaacatccacactattgttgcagcaaaaacacggtctacatcagcttggtccttgaaggctggcttgtgggattctctcagatctggccttttgaagaataatagcagtacagagacagtagagccaccaccagcaccacttgaagtggaagagcctttgcctgtggaaatagtactcctagaaagaacactacctgatggaagcacagaacaaattttattttcttcagccggagatgttgatgtatatgatctccaagccttatgcaataaggtgacctttcatcaatcccgatatttctcagtattatgtagtcaatgaacttaatgcttcttctcttaacaaatataatttgttttgaatattgatccacataacaaacatgtttgttttaaatatttgatctcacaggtaggatggccacgcaggcctctttcaaagatagcagcctcattaagaaatagctacttggttgctacactatattcaataattagatcttcagaaacaggtacttgcctcattgtttgatcatcacaggctcttctgtggtcatatgcattagttgaggcacaggtcctaatctgaaggttatttgcagaaattcatttttctagatgatgaacatcttagtgtacttgtagaagttatttgacagagggagaagagaagaaacagctcattgggatggcacgagcaacctcagaccatgccttcaatgcaacgatttgggatgtccttgttgatccttcataccagggtcagggtcttggtaaagcactcatggagaaagtaattcgtactttgctccagcgagacatcaacaacattacactgtttgcggataacaaagttatagatttctacaagaacctggggttcgaagttgatcctcaaggcatcaagggcatgttctggtaccccagattttagcaccagcagccagatatatcgttcgaggggttgttgtacttgaagcatctccccgttctgaaagggtaattgcaggtcagggctccacgccctgatggatctcgcacttaatatttcacccttggtgagaagctgtaattttcttcaatgctaaaacgaccatgtgatcggctcaactcgccgcacccctgttgtaaccataaccccaacaaaacacgctatttgtgatacccgtgtttcatacatgcgctctggactcttgccatctgtatgtaacgtacgttttcaaatttctacactcgaaatg

SEQ ID NO: 5081 - DNA, 870 bp, Zea mays
  Clone ID: 700441748_FLI
tggaaatggtgtccatttccaacatcacaaccagggatacaaggcctctaagcattgctcgtggtatcttattgtaggaaggtgcctgagcaaatcttttccgcgtagtcacttgtctaaatttgactgcttttaataaatttgcctgtttgatgctcagtatgcttggtgacctgctactttatttcagaaagtagcaggacgctttatttggtttgaacaagttgctgcctttatattccgacatgcttattccttcagaggatttgtgtattaacatggttgacttttcagccctcccgcgattgaaaggctttctggaggcgtctttgaggaagttattgtgacaaactccatcctgctgccggaagacaaatgcttccctcagctgactgtgctttcgatggcgaatcttgtgggggagacaatttggcatgttcaccgcgatggctccgtcagcagcatcttccaatagcagaaacgagcgcgtagcatcgtcacctcgccttgcgttcgtgtgcttggtatagagaaggcacccagtgcctgtgctgcttgcgtattttcgtagggagtcaattttggcggcaaggtataataaggttgtattgcccgatgtacggggtgataaataaggtggttattgccagtgtacgtgggataataaggttgtatgctggtgtaggtgttctgcaggctgcagcgtgttactaattaagtgcatctcttgtcctattatgtattgctgaggtagttgttgtcgagttgaagtttcagtgtctcagatacatggggatagtgatgtacccagcactcggtcactagtgaagtcctggtcattggaaatatgggagcaccaatttctgtttt

SEQ ID NO: 5082 - DNA, 1620 bp, Zea mays
  Clone ID: 700441834_FLI
acaaagcacacaagcaaaagcaaccccgcgggccgcgctagcagtagtagccgaacgaggaggagcctcgaatccagccaggccaggctcctcccattcctcctctcccacgagctctcaccgctcctcgcggcggcaaaaccccccttgaattccctacgcgcccgcctccaatcccgccagtccggcggcgacccagggatccatggagaggtacgaactgctcaaggacatcggttccggcaacttcggggtggcgcggctgatgcggaacaaggacaccaaggagctcgtcgctatgaagtacatcccgagggggctcaagattgacgagaatgtggcgagggagatcataaaccaccgctcgttgcggcaccccaacatcatccgcttcaaggaggtcgtgctcacgcccacgcacctcgctatcgtcatggagtacgccgccggcggcgagcttttcgacaggatctgcagcgccgggaggttcagcgaggacgaggcgaggtatttcttccagcagcttatctgcggtgtcagctactgccacttcatgcaaatttgtcaccgggacttgaagctggagaacacgctgttggatggcagcccggcgccgcgcctaaagatctgcgactttggctactctaagtcatcgctgctgcactcaaagcctaaatccacggttggaactccggcgtacattgctccggaggtactctctcgccgggaatacgacggcaagatggcagacgtttggtcttgtggagtgactctttacgtgatgctggttggtgcatacccttttgaggaccccgatgatcccaagaatttcagaaaaacgattgggagaatagtgtcaattcaataccagataccagagtatgtccacatatcccaggattgcagacagctccttgctaggatcttcgtcgcaaatcctgcaaagagaataacaattagggagattaggaatcacccctggttcctgaagaatttgcccagagagcttacagaagctgcgcaagcgaagtactacaagaaggacaacggtgcccccaccttctctgatcaaacagtcgaagagatcatgaagatcgtagaggaggcccgcacgccgccccagtcgcctgctccagtggctggttttggttgggcagaggaagaagagcaggaagatgggaagaaacctgaggatgacgagcaggatggggaggatgagcaatacgacggcgaggacgagtatgacaaacaggtgaagcaagtacatgccagcggggactttcgacacctaataaaatgaagctcctagcaagaccgagttctcaactgatgagatactgtctggttttgctgtagtttgtggtgctaagatgatgcaccctcggtgcttacgtagtatacttctgtctggattcacctttttttcgcatattgtgttaatactctgtaaattatcaaactggcttcctcaatgctcgtgtaattaaatgaaccgttgagtgattaagctagaaggcaagatatactttctatggagtaaattctgaaagtatcaatatgtgttgaactagactaatttaaattttattttcgcaaccattacatactattgaatagtct

SEQ ID NO: 5083 - DNA, 626 bp, Zea mays
  Clone ID: 700441870_FLI
tggggtactacatggaggactagtcagaatctcagcgtgtatagcaatgaaatagcagggccctcgagtaaaagctattgggaagaatcaaggaagcaggaagccaccaattcgggcgtttctatttcaggggaagccattagaaacaagcgcttgaaccctcctgataatgctattcggggcagccatcatcaccgtggcaggtactcccaaatcagtgaatcttggctactcagttcaaatcactctaggagtagttctgctagatttggcagcggtggttcatcaagatcaacttcaaagggtcaaactaggggctaatgtaaattctcaggtgcaggagaaaggatgcatcttgtagctacctgcatccttgatctctgcagcaggaataggttttaaaattctctgttatatctttgcagtttgtataggctaattaaaattaagtcaacagagagcgtaaatgaccatctctgctccactcaactcaactgtagcaaggagcatatgtttagcatagaggtttgactgaatggccctgcccaagaagtagattcagctcttgggcatggtctgtatcatcctgacattctgttggatggaactgcaattgtgcaaccggc

SEQ ID NO: 5084 - DNA, 1140 bp, Zea mays
  Clone ID: 700441926_FLI
gtcatgccggggcagtgggagttccaggtcggaccgtccgtcggcatctcttcgggcgatcaggtgtgggttgctcgctacattcttgagaggatcaccgagatcgccaccgccgagaggttgattagagaagcacacaagaaaggtgcaaagattgtactcgttcaggaattgtttgaggggcactatttctgccaagctcaaagactggatttctttcggcgcgctaagccttacaaaggcaatccaactattataaggatgcaacagcttgcaaaggagctggaagttgtcatacctgtcagttttttcgaagaagcaaacaatgcacattataattcggtggctattatcgatgctgatggcgctgatcttggactctatcgcaaatcacacattccagatggaccaggatatcaagagaagttttatttcaaccccggtgacactggctttaaggctttcaaaaccaagtatgccaccattggtgttggaatctgctgggatcagtggtttccagagtgtgcaagagcaatggcacttctgggggctgaaatactgttttatcccactgcaattggatccgaaccccaggattgtaacctggattcacgtgaacattggaagcgggttatgcaaggccatgctggtgccaacttggtccctcttgttgcttccaaccggattggcagagaaactgttgacactgagcatggcaagagctcgataaccttctatgggaattccttcattgcaggaccaaccggagaaatagtgaagcttgctaacgacaaagacgaggaagtgctggtggcagagtttgacttggatgagatcaagtcgattaggcatggttgggggatattcagggaccggcgccctgaactatacaaagtgctactgacgttggatggcgagaaacaatcataaaccccggtctcacgcttaatagtggtaaggcacaggcaggctccagctccacatcaattttagattttttttttctccttttttaccttgtccaacgatgccatgcctgcatttgtacaagccatctgcgcgtgttcgccatttcacattcagcaaaataaataattttcgtgcaatgtcattctatgtcgggggagaatttagagctcc

SEQ ID NO: 5085 - DNA, 909 bp, Zea mays
  Clone ID: 700442373_FLI
acgcgagcacgagcacgagcacacatcccctcccttcctcgttgcgtgccctcgccgcagacctctgccatggcggaccagctcaccgacgagcagatcgcggagttcaaggaggccttcagcctcttcgataaggatggcgacggctgcatcactaccaaggagcttggaacggtgatgcgctcccttggccagaaccctaccgaggcagagctgcaggacatgatcaacgaggtcgatgcggatggcaatgggaccatcgacttcccggagttcctgaacctgatggcgaggaagatgaaggacacggactcagaggaggagctcaaggaggccttccgcgtcttcgacaaggaccagaacggtttcatctcggctgccgagctccgccatgtcatgaccaaccttggcgagaagctgactgacgaggaggtcgacgagatgatccgtgaggccgacgtcgacggggacggccagatcaactacgaggagtttgtcaaggttatgatggccaagtgaggagcggtccccgtgaaataagtatctatggattgaagcggattatcaggcacacaagctgtactttgtcatgtccctttgagtacgcatcagtgtcatgcaggtggttatgtcttgtagtggtccgtttaggcggtgtagtcatgggaacgcgacatcagatacctggtttcttttgattgtgatgttatcttgcattattgcacctgtaggatttgttgaagctcatattatccagggttttggatcttttgtgctagtcttatgtctttgtgtatgcagaggctgagctaggattatggtatataagggagccaactaattcatcaatactatatgatgttatcaagcttaagtacttaacatggaataaaaattctagttctttat

SEQ ID NO: 5086 - DNA, 595 bp, Zea mays
  Clone ID: 700442376_FLI
ctggcatccgcagagagcttgttccgtccaggcaaccaaaaagcaagttgccccgccgcgcagaggaagaagagagcagaggaggatggctcgtacgaagcagaccgcccgcaagtccacgggaggcaaggccccccgcaagcagctcgccaccaaggcggcgaggaagtcggcgccgacgaccggcggcgtgaagaagccccacaggtacaggcccggaaccgtggcgctgcgcgagatccgcaagtaccagaagagcacggagctgctgatccgcaagctgcccttccagcgcctggtgcgcgagatcgcgcaggacttcaagacagacctccggttccagagccacgccgtgctggcgctccaggaggccgccgaggcctacctcgtcggtctcttcgaggacaccaacctctgtgccatccacgctaagcgcgtcaccatcatgcccaaggacatccagctcgcccgccgcatccgtggcgagcgcgcgtagccatcatctccggggatctgatgaatgtctagttaccaaacaaataggctgtattagcgtcgttgttctgtattcgttattttggattcggttgcagtg

SEQ ID NO: 5087 - DNA, 623 bp, Zea mays
  Clone ID: 700442486_FLI
ctatcgggtacaaagttggaacaatgattgagatccccagggcagctctggtggctgatgagatagcggagcaggctgaattcttctccttcggaacgaacgacctgacgcagatgacctttgggtacagcagggatgatgtgggaaagttcattcccgtctatcttgctcagggcattctccaacatgaccccttcgaggtcctggaccagaggggagtgggcgagctggtgaagcttgctacagagaggggccgcaaagctaggcctaacttgaaggtgggcatttgtggagaacacggtggagagccttcctctgtggccttcttcgcgaaggctgggctggattacgtttcttgctcccctttcagggttccgattgctaggctagctgcagctcaggtgcttgtctgaggctgcctcctcattggcaaccggattgcctgctgctggtggatgtggtgatcaacagtattattacagagccatgctatgtgaacattactagtagcagtgctcataaaagctacaatcccatgtcctttttttccccagtcatgtaaaacttccaaactgctccatggttcaaaactctgttcttcaatacatcatcaattatcgatt

SEQ ID NO: 5088 - DNA, 1114 bp, Zea mays
  Clone ID: 700442544_FLI
ctccgctgccggcaacctcatgctgcagcggtacaaggaggacatggaaggccttccggagcaccgtggaatggacgagttcaatgagatacccgtggagggatttggcgcggctctccttgctggatacggctggacagaaggtaagggcattggtaggaacaataagacgggggataccaaagttcttgaatacgaccgccgtgctggcacacaggggttagggtacaacccctccgaagcagaccctaggaagactcgttctggcgactggattgttggcaagaaggtgtcagaggacgggagtacgaagagagatcgaggcagtagagataggatggaagagagcgattctagtgcccagaagaagagatataatgaggaaaggtctgagaaggagggccgtgaaaaggtgaggaatggccgtggtagccgagaaggcacaagtaatgcaagtgatactcatagcaatgtatggtggttgcagagccatatcagggttcggattgttagtcagaaactaagcaagaggctgtacttgatgaagggtaaggttgtcgatgtggtggggcctacaaaatgtgacatcatgatggatgatggatcagagttggtgcagggcgtggagcaggatatgcttgaaactgtacttccacggacgaacgggcgggtgcttgtgctttatgggaagcacaagggtttatatgggcacctggtagagaagaattccaaagaagagattggattggtggaggatgcagatacaaaagatattgtacgtgttagatatgatcagatggcagaatacactggagatccagagttgcttggctactgattaagttttttggggaggatatgcttaccgggagccttctgctatgcttggtattatatttttcttctttacaaactgtcaagaattgctgcaatgtaaaaccttgaacaaactggtgggttgctatgcatttcttacttgtctttgtaagtttgctacttatttgtcagccctcaagttagtaatcatctaggagtgaccactaatgttggggtggggctcttttgataaatagtggaatgtttctgagtgtaactgtttgtttctttgtccgtg

SEQ ID NO: 5089 - DNA, 1745 bp, Zea mays
  Clone ID: 700442545_FLI
ggtcgctcccctacacgctctccggcggcgagacgtacgacgacgttgcctcggaattcgccaacctcaccaccgcctcgtggctgggggtcaccaacgcggacccggcgggcaagttgcccgccgctgggaagatcaatgtcaccgtgaactgctcctgcggcgacaagagggtatcgccgcggtacgggctgttcctcacctatccgctctgggaaggggagacgctctcctcggtggcggagcaatacggattctcgtctcctgcgcagttggagctgctcaggaggtacaaccccgggatcgggatggacagggcctccgggaaggggatcgtgtttgtcccagtgaaagatgcagacggcagttaccgccctctggaatcagatgctggaaatatcctttctggaggagcggtagcaggaattgtgatagcctgtatcattattttgattgctggcatctggctgtttgcaatgtattataggaagcagaaaatgagaaaagccataccactcacatgtctagaagattctgtccaacttagcaaggtttcacaagatgagggcataaaggttgacagatccatagagttctcatatgaagaactttctgatgctacaaacaactttagtatggaccataagattgggcaagggggttttggttctgtttattatgctgagcttagaggcgagaaagctgccataaagaaaatggatacaaaggcatctcaagaattcctcaatgaattgaagattttgacacgcgtccatcacacaaatctggtgcgcttaattggttattgtgttgagagttgcttatttcttgtttatgaatttattgagaacggaaacctaagccagcatctgcatgggacgggttatgaacctctctcatggaccagtagagtgcaaattgcccttgattcagcaaggggtctagagtatatacatgagcacactgttccagtgtatgtgcatcgagatatcaagtctgcaaatatcctgatagacagagacttacgagcaaaggttgcagattttggactgacaaaactttcagaaattggaactacatcacagtcactcccatcactacgagttgttggtacatttggttacatgcctccagagtatgctcgatatggtgaggtttctcctaaggtggatgtctacgcttttggtatagtcctgtatgaacttctttctgccaaagaagctattgtgagatcaacagaattcactgatgcacaaggcctggtttatctgtttgaggagactctcagcatgccaaaccccatggaagctcttcaggaaatgattgatccaaggctaggaggtgactaccccattgactcggctgtgaagattgcgtaccttgcaaagtcatgcacgcatgaagagcccaggatgaggcctaccatgagatctgtagtggttgctctcatggcgctttcatccaaggaccatgagttaactcggggacacgattagcatagcacattgtccctggggctgctttccatgtcagatgaaaacaatacaaaagctatcgtgtacagatgcaatgtattttcgttctgattttgtagcgcttaagttggctagtaacattgtgtgtagttttctttgcctgcttctctataacaacaaaaaggggatgaccgagcggtctaataagagcccccacccaattaagatgataatggatatggctcggccacttccgagccggcaatattt

SEQ ID NO: 5090 - DNA, 1850 bp, Zea mays
  Clone ID: 700442608_FLI
gctttttgagtagttcgtctgcaattcagatcttttataatggcttcaaaggaattgtctgaaaaaatcgcaaatcccttccctccaccatcgatcgggcttccatggccgccaagcgccgcgcccggcagccaagtaccgaagattccaaggagttgggcctcaatgggggcaacgaaggttccgacgaggaggaggaggagagcagcaagtccgacgcgctgaagcgagccgagcaaccctcgccgccgtcgccggaggatgctgaggccgagagatccggcgaggcctctccgcagaggagcaagccgcgcggttgggttgctatgaagaccaagacgacgacctccaagcgggtcaagaaaccctctccggcgtcggagaaggaagatgaggcgggggactctggtgatttgtcaccggcgagcgacccgctacccgacaacatcgttgacgccggcgacaacaagaggcccgcgacgctgaagccgggcaagaagcgctccccgacgccgcagcaggaggaagagcgcccggagaagcgtgctgcgggatctgatggcgagaccgtggccacgtcgtccccgcagcgcaagaagaaaagtaagaggtccgtcgataaggacaggcgcaaaaagaagaacaggaatcagattagaaaggcgttgacccaagaagacgaggaccatgacacggtgatggcagagcaagagcagagcaacacctcactgccacaggacgagcacgccgcccgtgaagaggagcaagaggagaagatggcacagcaagagcatgccggtgacacttcacacccgcatgacaaggacatgcgcagcgcccatggagaggagcagcaggatgcaaatcaagagcatgcggatgacacctcacccgcagaagacaatcacagtgtggatgaagaggagcagcaagtggagccgatcccacagcaagagcaacctaatgacacctcacccccacaagagaagaaccgagcccaggaggatgaggagacaagagctcaagtgaatggcaaagccttggaggggaggaatgctccatcaaccaagttgcgcagttttgagtcagagaaaaagccagcggtcgagcgatcatggtcctacgatgacgagctcaagatcctcaatgccttggttgagcacgcccagtcccataacggttctttgccagactcgtcgcatgttttggccaatctcacctttgacaaaattgatgccaatgaggacaagctcactgacaagatccgcaagcttaggacacggtaccgcaggtggcttttacaaggctgcacaccttctgtttctggcagtcagttgtttaagctgtctgaaattctctggggccaagctgatgaagatgaacaggtggagccaacatctagggacttcagtgtagtatcaaaactgtatcctcacctggccaaagaagtcaaagcatatgccgaaacgcacagctcgggtgacttaatcatgggaatggtcatgaccatatgtgataagaaggcccgcgatcttgacgctaagtgcaagaagcaacagattgaaacattcaagctggagttgggccaggcaaacctaaccaacgaattgctctctgcactttcaagtcagacccatgtgaaattctagtaaaggtctctgctatcttttgttttagtgtaataatgagtagacgtgctgtcattaggttaatgtgggaccaagaaccttcttttggggtactggaaaactcttatctgttaactagttagttgcttaggtttgatgtctgtttctgcatatggaagtagctgttacagctcgatggtggaaaccagtactttaacattt

SEQ ID NO: 5091 - DNA, 1554 bp, Zea mays
  Clone ID: 700442646_FLI
gggcatgctagccgtcgtggctccccttgtgcgctgtccttgctgctcgctctgcgcgcacggtcctctgtcccctgcgcgtagccggtttctcggttcgccgtggagcctgcgcgctcagttctgtccagttcgtgtcctgctcggccgtccgcgcgacacgtcatccatggccgctgtccgtcgtcgagtccctacgtgcgcaccagctccctgtgtcgcgttccattcacctaaaccggagttcgccagtcgtccctgcttgtcggtgtgctgctgctctagtttggatcttgcccaagtcgctgccatggttgtacggtgtttggcccgcgccgattcgcgttcgctcatatcgccatcatagtgttgtcgttggtgatagcttcgcgtgcgtgtcaaactcctgcgtcgagtctttttcctgctcgccggtgcgccctctcggctcgcttggccttaattctcatcgcgtcatcgattccgctggtcagcgtcgttcgtcatcgtgtcgcgtgtgtagctctatatacgtcaccctcctgtgtcgtcgtcgttccgtgcgtcatcaagaaattccaagaatcgagtgaagacgaagccagcagcgtgatattcaccaagtgcgcgaccaaaaagctcggacatcctgcgcgactcaagttcaattcgtcgaaattattcaatcgaagaaaagatcttcagcaattaattaccgaagaaaagaaggctcctgtatgacatcaaccggaacccgtagtcgtgcttgcgactatcgcgtcgaattagtcagggtaagttggttcgtattcccattaactaggtctataaatagattaaatagaattgttggtcacaataaatattattaatttagcatgcgtatattgtgatgattgatttagataactcgctaaatcaactaattaagttacacagtttagagagttaataaaaagcttagaataaaaatagattttctagtgtaatatgtcaatttgattaatggatatagtcgatgtcctgctgtgatatccatggtgcttaatgcttggttttaagtgtttcatgctttttagcgtagattatctatattatactcgttatacatgtgctcatacatgtgcatcatgcatctcatgaggtacgataaataatcgtgtgacgcggaagaagaaccaagccgaccccaagcgtgggctaatctgcaagctgaagctgatgaatcaacctgaagacggttaaatcaagcaagtgctcggtcgaaggatactcgtcaagcggacgtcacctaataacactaacctagtgttactcaggtgaggaagcgacaaacttttgttgcttttgctccaaggtggtaccaaatgaggaaaaacaagactgaagtgcgggaggactcggtcctccacttaggttcttttgcttatagcttatcgggaggagtttgtgcctcccatggtttgtataatattactactctgcactcacttttagctctggtctgtaataaaataactcaagcttgcttttgaaataaatgtaagtttatat

SEQ ID NO: 5092 - DNA, 1402 bp, Zea mays
  Clone ID: 700442675_FLI
gagaaagcgtgtaaaccatggcgtcctccgcgttcctcaacgctctcgtcctccgatcgccatcaccgtcgctctcgtcctcgtctaaccgccgcagcaccggcgccttcgcgttcccgaacccaccgcgcttcccatgcctgcgttctgcgcgtcgactcgtccttgcgagggcggcggcagcgccggcgccgggcgatggccccgaggacgagtgggggccggagcccgagggcggttccgctgtcacgggggccgcggtggcggaggcgccggaggcgagagaggtcgcggagctcaaggcgcagctaaaggacgcgctgtacggcacggagcggggcctgcgggcgtccagcgagtcacgagccaaagtgctggagctcatcacgcagctcgagacgcgcaaccccacgccggctcctacggaggcgcttacgctccttaacgggaagtggatcctcgcgtacacatcattttcccaactattcccactattggggtttggtaatctgcctcagctggtgaaggtggaggaaatatcacaaaccattgattctgagaacttcacagtgcaaaactgtatcaagttttcaggacctttggctacaacctcagttgccactaatgcaaaatttgaaattagaagccccaagcgtgtgcagatcaaatttgatgaagggattgttggtacaccacagttgaccgactccattgtgctaccagagaagtttgagttatttggacagaacatcgacctgagtccactgaaaggcatattttcttccatcgaaaatgcagcatcctcggttgcaaagaccatatctgagcagcctccgctcaaaataccgatcaggacaaacaatgctgaatcgtggttgcttacgacataccttgacgaagagctcaggatctccagaggcgatggcagcagcatctttgtgctgttcaaggagggaagtactcttctatactgagatccaaatcccgagtccatgatcgttgaagctgaaccgtgaagtagttatactgcttatgcttttctttcttatagtaatatgctccgtctcaaaataagtcaatttctagaatcacttaaagtcaaattatcttaagtttgaccaattttataggaaaggcaccatcgtctatgtctctatgacaccaaatgagtacattatgaaaaatattttatggtgcattagtgacactaattcagtgccatgctctttttatgaatttggtcaaacttaaaaatagtttgatttaagataactctgagaaattgatttattttgggacagagagaatgtttctgggttgtcttgtaaatacagttcttgtcattagagtatatgatgactaggaccggtttaatccgaattatataaactctctatatatc

SEQ ID NO: 5093 - DNA, 1576 bp, Zea mays
  Clone ID: 700442687_FLI
gagaaacccaggttgcaataccgcaggtgctatcctccagaaagcttcgctgtgtcaaatggacgtgttggtggtacaccaaacaagaacacaggtccaaagcaagtatgggagccaatggatgcaagaaagaagatagggaatgggagaggatcagaaataacaccagaaactactggtgctgctgatggttcagatcaagtggaatgctcaaaggacattagtgaatgtgagaagcttgaggtagtgtgtgaaacacttgctgaaacttgttgtgagatatctgcagaagcctgtaagtcagatcaaccatgtagacaaggtgagaaaaatcagtctgcttgcagcgatggatctaaatgcgtagataagccaaattgctgcttgacaaaggacactgttaggacaacaaatttaaccagttcagacagcttttcgtgtctaagtgagggagatagagacagcagcatgagtagcatgacctcactgagtgctcagaatgtagaatcttcatctacatctgattcagatgagtattcagacaggaacgatagcagcccaggcgatccaccagtgaagaatgtttctcgttcattacttgagatgtgtgcaggaaatggtttcagggagtaccaaccgaaaggcttgaaccctcctaatggcaaccaatttggatttatggtggcacctttacaggaccagatgttgcaccaacagaagatccatgcaccgccgtactcgtcaccatttgtggggttccacaatcaccccttggcagttccaacaaatgggtacttgccatatcctcagccaggtcacttctaccctggccttatgacccctgttggatgtggagtcgctggcagccaatgcgttgactttccaatgcagtacagcaataacattcatccttactcgggccccgaatttggttttctgcctgcaaaaccagttcacaagaccccagtgagcttccatgctgtgccagtgccaccactggccccgctgtgtagaagcgaggtgccagtggtgataaatcaagagaggcagcagggctctgcaccccctaaattcaaacaggcagtgctggtccctgagaacggctgttcagcagaagacaacaccttcaaacagaaaggtgatgacacagacagcacacccttctccttgttccagttcaacctgcctattgcccctcccaccctggcaacatccaaagaagagcaaagtggagcgatgccgtcaatggcactgccaccagctcagataactcgagcccagctgtgctccagggaggagaccaatgtcaaggagtacaaccttttctctgggtgtaacggagtgatgtttcagctcaactagaggcgaagaaaagtgagcagctattcaatatacatacatggtgaacgatttgtattctagtaaaacagaataaagtaggtcgaggtttttactgtgttgccctcgaatatttatttcttttttaattttgatttgttgtgcttcccctccctgtttttttgtgtgtatggaaaactgaaaagacagtgagtggtatagattctgcagttttgac

SEQ ID NO: 5094 - DNA, 1710 bp, Zea mays
  Clone ID: 700442740_FLI
cagtgataatgaagatatagatcgtgccattgcattatcgctagctgaggaagatcagaataaggggaagtcggtggctattgatactgactataatctggaggaagatgaacaacttgcacgggctctgcaggagagcctgaatgcagagtctcctcctcgacagaatgttcctattgaggatgtgccagtgcctcaatggaatattcctgttgagcgggtgcctcctcgacagtatgttccagcaaatgaaccaaccccacatgtttacccacggggtggatccaggatttgtgctggatgccaaaacccaattggccatggacgtttccttagttgtatggattcagtttggcatcctcaatgcttcagatgttttgcttgcaacaaacccatatcagagtatgagtttgctatgcatgatgatcagccataccacaaatcctgctacaaagagttttttcatccgaaatgcgatgtttgcaacaactttattccaaccaatagagatggcctcattgaataccgagcacatcctttctggatgcagaagtactgtccttcccatgaagatgatggcactcctcggtgctgcagttgtgaacgaatggagccaagggagatcaagtacataacattagatgatgggaggaaactctgcttggaatgtctcaattctgcagtaatggattctccagaatgtcaacatctttacatggatattcaggaattttttgaaggtttgaacatgaaagtagaacagcaaattccattacttttggttgagaggcaggctctgaatgaagccttggaagccgagaaaaatgggcaccacctaccggaaaccagaggtctatgcctttctgaggagcaagttgttagaacgatcttaaaaagaccacagattggaccaggaaacagaatcttagatatgattataggaccatacaagctgtctcggcggtgtgaagtgactgcaatccttatattatatggtctgccaagattacaaactggttccattcttgcccatgagatgatgcatgcatatcttcgtctcaaaggattccgaaaccttagtattgaggttgaagaaggcatctgccaagttttatcccacctgtggttagagtcggaaatcatcgctggttctagtagcaacgttgcatccagttcagaagcatcatcatcttcatcatcctcagctcctacctcttcaaagaagggtgcgaagaccgaattcgagaagaagcttggggcattcatcaagcaccagatcgaaacggattcttccgaggcatacggaggtggttttagagctggctatccggctgttgagcgctatggcttgaaaagaacccttgatcatatgaagttgacagggtctttcccatattaaagcaacagaagtaaaggagggggctttcttccagttgtgaggatacactccacattggaggttttggtttgggttatacatatactgatatgcataccaaacgaggggaattgtctgtaaatcaggagaaccctctgctgcgcggaaacttattgcaaactgtctttttataggaaaacgatacatgcaagttttcagacagggaacttgagaggatcatatgtaatttttgggcacttgtttttgactcctttggttatcaaaaacaaggcaacataataagattgaaatttatcttcatctttaaattc

SEQ ID NO: 5095 - DNA, 1226 bp, Zea mays
  Clone ID: 700442752_FLI
caagcacccgagcggccagctccagccccaccagagaaatacggcgtaaacgccgccggggacaaacccaggcgaccggggtgcctagctcgccgtttcttttcgccttctcctcgcaatttcttaggatcaacgccctactacacgacgggggttttccccttcggctgccactccgtcctttcgcagcctgccgccggcgccatgctgtacatcgtgggcctcggcctgggcgacgagcgcgacatcactgtgcgggggctcgatgccgtacgcagctgctccaaggtatacatggaggcatacacatccctcctctccctcggcctcgacccggccgcgctcgccaacctggagaagctgtacgggaaggagataacggtcgccgatcgggagatggtggaggagcgtgtcgaccaggtgctaagcgaggctgctgacactgacgtcgccttccttgttgttggcgacccgttcggggcaactacacatactgatctggttgttcgtgccaagaaaatgggagtagaagtgaaggtgatccacaatgcatctgtcatgaatgcaattggagtttgtgggctacaactttaccgctatggagaaactatctcaataccattcttcacagacgaatggagaccagatagtttctatgagaagattcagaacaatcgccagcttgggctgcacacactttgcctgcttgatatccgtgtcaaggagccaacatgggaatctttagccagaggaaagaaagtctatgaaccaccaagattcatgactgtaaacactgcaataagtcagctttttgaggtggaggaagcacgtgggggatatgcatatcgcagggaaacattgtgcataggagtggcacgacttggaagtgatgatcagaagattgttgctgggcctatggagaagctactagatgttgattttggtccaccccttcactgcctgatcatagtgggagagactcatcctttggaagaagagatgctagagttttacatgatcaagtagtgatatacacaccctacacatgtgagttttcacttgtattgactaagggaatgcttagacttctgtccttgtcaatattggattgttgaatacttagccatttggatgtagaaccccaggaaatggtgcagtatgcgatttggagtgctggcagcttgtaaaacaaatctgtgctagcagtctaccattagtttacgtct

SEQ ID NO: 5096 - DNA, 1126 bp, Zea mays
  Clone ID: 700442783_FLI
aagcggcgctccatgctcatcccgaacgccttcttccgggccggctgcgcggcggtgctgctgtccaaccggcgccgcgacttccaccgcgccaagtaccagctggagcacgtggtgcgcacgcacaagggcgcggacgaccgcgccttccgctccgtgtaccaggaggaggacgagcagcggatcaagggcctgtccatcagccgcgacctgctggaggtgggcggccacgcgctcaagaccaacatcaccacgctggggcccctggtgctgcccttctccgagcagctgctcttcttcgcgggcgtgctgttccgccacctgttcccgtccaaggcctccacgccggcgccgccgaccaccccaggggacgcctcggccgccgcgccctacatcccggacttcaagcgcgcgttcgagcacttctgcatgcacgcggccagccgcgacgtgctggagcacctgcagagcaacctgggcctgcgcaacgccgacctggaggcctcccgcgccgcgctgcaccgcttcggcaacacctcaagcagcagcatctggtacgagctggcgtacctggaggccaagggccgcgtccgccgcggcgaccgcgtctggcagctcgccttcgggtcgggcttcaagtgcaacagcgcggtgtggcgcgccgtccgccgcgtgcgccgccccgcgcgcagcccctggctggactgcgtcgaccagtacccggcgcgcatggacgcctagcacgtacctgcaatgcagtggctgctatctatctatcgctcgcttcgctaccactaccagtgcagtgctgcacttcaccgatggatgatggatcggatatgatatggtataggacgcggtcggtcgatttgcatgcatgcacaagtgttagtataccgttctgaaggtacgtttgaactttgttcgtttgtattgcactattgcttgttgtttaagtagcggttaagggaggcatacgtacgctgtactaccataatggaagtactccggtccggtcctgtcctgtgtgagccttatgtacgtgcaattttaatgtgttttgatattacaagacttgacggttggcaatagatgttgctgacttgctgttgtgtttcgattgatc

SEQ ID NO: 5097 - DNA, 1590 bp, Zea mays
  Clone ID: 700442788_FLI
ctcgcctcttcccgacttgccccctcgattcgatccgagcttacttctagggttcttggccccgctccaccgtcgcccatggcagacgatgccaaccgagcggccttcatggagctgcagtcccggatgatagataccaccgcgaagatcaagcaggtcgttcccttgttcccgttctctgacccgtttcataggttccggtcgtgcctcatcttagggctttttagttgtcgggtcttgatttgtccggcgggttgaaactcgacggttgctcttcatattgtctgttcagtgcggctgctgctcgtagtacaactgtagattcttctggatctcgtccggtcagctattgtgctatcacactttgctgtgctggaaaacccttttttcagccagtaatatgctttggttgtatgggtggctcattacatgcattacttctacaacagtcactgccaatttatgtaaaaatggccagctcgatgtccaagaattttggcttcttaatgcagtgatattgttttcctttaatttctttttctgcaagagctcccatatgaagtgtaatgttgaaccttttaaattcagattaacatatgtgctttacaaaattttctatcttgtttatttcctagtaggaactccaaagcatgagtagaaaaggaattgatttggtttttgatagttattattgaaagagaaatcaacggtttgctagtaatgttgtgactcaatcatttctgtcggtgtacaatcatattgcacaaaattatttacagcctttgtaaatgcaagcatattagttctgtttgactaccttgatgggttcttcacttgtactctgttgtgattttacctttgatggaagtttctttgtaaggaaatttctatagtaacttctagcctatatgtcatagaacctctgttgcaataatacctttctttcatcagttacaaacccaaatgcgttctaaagaaggggaaaagaagcgtgcctaccttactttggaggaacttcgccagttgccagatgataccaacacctacaagactgtcggaaaagtgtaagtaaacgaggaagaccatcttcaacatgggggagttcaattccattttcttgtatggtgctgtgatgcaaaatacggtatcgtgtatttcatttttttcccccacgtccatctgttgccaggtttattctggagccaaagtcagttctgttcaatgagcaggagcaaaagcttaatgacagtgagagtgcgatagcttcaatgcagacatccaaagactaccttgagaaacagcagggcgaagtggagaacaatattagggagctgcttcaacaggacccaggacttgcgcgtcagatcctctcaatgaccgttcaatgagagttgtttttctctccatttaattttttagataatttgtaatgtcgcagtttgatcagtcatgctgtggtcttgccttatctgtgagacatgtgcggtctgtaatttctgaggtgtttggctggtggaatgatgtggtccatcattatctcactctagtgctttgtttggtttgtggaatagattgagttaattcatcatc

SEQ ID NO: 5098 - DNA, 1915 bp, Zea mays
  Clone ID: 700442802_FLI
gcagaccattggagagaggatcgttggagctcggccgagctgagcacgcacagtgtgattgtgtgtgtgtgtctgacatggcgtcgctctggctagcgagagcgtcgtcccagctggcgcgccgtgccgccgccaggaggcctcctccgcgtcctgcgcgccacggctccgaccaacccaccagttcgtggttcctgggctcagtgccgccgccggcccttgggtcagcagcggcggacacctgccgccgcggcttctgctccgtccggcgcttcgcaggggagagcagcgctgctgctgctgcggcggctgtcgtcgacgaggagccggagagcgggttcgcagccggcgatcagcaggcagttgactttcctggagggaaagtatcctttgtggcagaaatgaacttccttccagaatcgacgagggaaaggatcaactgctaccgcgtgcttgacgacgacggcagaacgatatcaggaagtagattccaagaggtcagtcgggagctggctctgaagatgtacagcgagatggtgacgctccagatcatggataccatcttctacgaggctcagaggcagggcaggatctcgttctacctcacttccaacggcgaggaagcgatcaacatagcctctgctgctgcgctcagcatggatgacattgtgctgcctcagtacagggaacctggtgttcttctatggcgtggcttcactctgcaggaatttgcaaaccagtgctttgggaacaagctggactatggtaaagggaggcagatgcccattcactatgggtcgaaccgtctgaactatttcacagtctcgtcacctatcgcaacacagctcccgcatgctgttggagctgcctactctctgaagatggacaagaaggacgcgtgtgccatcacatactttggggacggtgggacaagtgagggagacttccatgcagcgctcaacttcgcggctgttatggaggcaccggtgatcttcttctgccgcaacaatggctgggccatcagcactccgactactgaacaattcagaagtgatggagttgtcatccgtggccaggcttatgggatccgtggcatccgagtagatggcaatgatgctcttgctgtgtacagcgcaatccatgctgcccgagaaatggctgtaactgaaggaagaccaattttagttgaggcactgacttaccgagtcggccatcactcgacatccgatgattcgaccaagtacaggccagttgatgagattgagcattggcgaacagcgagggatccgatttccagatacagaaaatgggttcagggtaatgactggtggtctgatgctgaagaatctgagctcaggagcagagtgagaaaagagcttctccaagccatccaggttgcagaaagaatgccaaaaccaccagttactgagcttttcactgatgtttacgacaagatcccttccaacctgcatgaacaagagcaattgctgcgggatacaatcatgaggcaccctgcagactacccaactgatgtacctgttggggtcgtgcttcggtatgccgaaggtctcacacgaagaagcagcttcggccaaagtcgtttctaagagatggccgaaggtcccttttcatggagcttcggcgttttaaaccgacatagaggcagaatgacctttttatacatgtatgtccgagtcaatgttgtaaacttccgcaaggggcataattgtaatttgtcacaggctgcgacctgtgtctataaatagatgaacagtacctctgtactgttcacgcgaacttgcttttggccttcgcatcacattcgtactttttgccttccgcaagatcgaaggtacatttgtacttcaaagtcatttatattcattaatacaagtagagataactccatgataat

SEQ ID NO: 5099 - DNA, 1098 bp, Zea mays
  Clone ID: 700442854_FLI
gaggaatcgagcctggtgttctttatccagctgtctctgttgagcagtttcacgaaccccatgcttataagttgaatttcctatcaatcaaccggtttgagaggaaaaagaatcttgatcttgccatttcagcatttgctttgctccgttctgctgcttggactatacctggtgatgctctacaagaagcaacattaacagtggcaggtggctatgataagcgtctcaaggaaaatgttgaataccttgaggaactcaaaagactcgcattgacggaaggggtttctggacaggttaaatttgttacatcttgctcaacatctgaaagaaacgagcttctctccaactgcctctgcgttttatacactccaaaggatgaacatttcggtattgtacctcttgaagccatggccgcccataagccggtaattgcctgcaatagtggtggcccagtggaaacagttgtgaatgaagtaacagggtttctgtgtgatccctctcccgcagaattctccaaagccatgctgaaacttgtgaatgatcatgatcttgctgttagattgggtgaacaagcacgtgaccatgtggtgcaaaaattctcgaccaagacatttggtgatctcctcaacagctacgtcttgaacatctaccatgagaggatggaatgatctataatactgggtcagccatgccatatgaaaacaatttgttcaatacaaggttttttttgcacctttacgtctaatctgattttgatagacacacataatgacaatgacactccattgaagccctttggcatactatagtcactctatgatctgtatattgttttcaattataacatcaaatttggcttggtccatcctggagtctggaatggagctggagtagagatgacaatggggacctgattctctgtgtggaattcctttattaggagatgaggaagtttcttctccgatggaaatgtaaatggaaaaaaattatccccggggatagggatgggaatggggaagcattctccatcccagttctccacgtgatgatgttttcatgtaatagtttatgataaaaataaataattagtttgttaag

SEQ ID NO: 5100 - DNA, 346 bp, Zea mays
  Clone ID: 700442982_FLI
tgatcctcaaggacaagccggacgccgacatcgtggcctgaggtggtcgggctgagcgtggaggacgccaagaaggtgatcctcaaggacaagccggacgccgacatcgtggtgctgcccgtcggctccgtggtgaccgcggattatcgccctaaccgtgtccgcatcttcgtcgacatcgtcgcccagacgccccacatcggctgataatatataagctagccgctatttcctttccttgccccagaacttgaaataaatatatatacgatgaaataacgcgggcatgccgaataatggatgtgtgaattctcactaattaagtaatgcataaataaacgtattc

SEQ ID NO: 5101 - DNA, 1008 bp, Zea mays
  Clone ID: 700443224_FLI
cctgagttgatgcccctcagccatgtccttgccaccaagctaggtgctcgtctcaccgaggtccgcaagaacggaacctgcccctggctcaggcctgatgggaagacccaggtgacagtcgagtaccgcaatgagggtggtgccatggtccccatccgtgtccacaccgtcctcatctccacccagcacgacgagacagtgaccaatgatgagatcgctgctgacctgaaggagcatgtcatcaagcctgtcatccctgagcagtaccttgacgagaagaccatcttccaccttaacccatctggccgctttgtcattggtggacctcacggcgatgctggcctcactggccgcaagatcatcattgacacctacggtggctggggagcccatggtggtggcgctttctccggcaaggacccaaccaaggttgaccgcagcggagcctatgtcgcaaggcaggctgccaagagcatcgtcgccagcggccttgctcgccgcgccatcgtccaggtgtcttacgccatcggcgtgcccgagcctctctccgtgttcgtcgacacgtacggcaccggcgcgatccccgacaaggagatcctcaagattgtcaaggagaacttcgatttcaggcctggcatgatcatcatcaaccttgacctcaagaaaggcggcaacgggcgctacctcaagacggcggcctacggccactttggaagggacgaccctgacttcacctgggaggtggtgaagccactcaagtcggagaaaccttctgcctaaggcggccttttttttcagtaagaagcttttggtggtctgctgtgcttaatcatgcttttatatggcttctacatgttgtggttctttcttgatctgcaccgcgcttatcgtttgtgttgtactgccctaataagtggtgcttatgaggactgtttctggttttgctgcttatgttgtaatgctttgaaacaatgaaagaagctacaggccacagctattttgagaagt

SEQ ID NO: 5102 - DNA, 610 bp, Zea mays
  Clone ID: 700443250_FLI
gaaaaagataacagatgctcagtctcttgaggctagtttggaggaaaaatccttggagatcgagggaaaacttcatgctgcagatgccaaacttgcagaggcaaaccgcaagaagtctcaagctgaccgtgatttagaagaggcggaagctcgtcaacgtagactggagaaggagaaactgtattttgagacagagcggaaggcccgagaaaagcaacttaaggagcaggggattcaacgagctggagctggaggaacgcgcggcataggagcaggcgtgcgcacggagcttgcagggagcacgcagcgaatgtgcgtcgggagcatggctggcgatgtggagcgctgatggagattttttttcgttacaggatagaagggaggtcgcacggcttggacaagaaaaaaatgtgacggtgggatatttccaggaattaaacgccaagcattggaataagaatgaagagagatatttaggatgagcggtgagaagattaggatgagagagatattttcttttttaattattctttaaagaatttcgcagatatttttgaatcctgatttttagcgctgtacacatgccgacaaatacatattttattctccg

SEQ ID NO: 5103 - DNA, 515 bp, Zea mays
  Clone ID: 700443278_FLI
gcgaggaccacctccacggccacggcaagacggccaaggtgatgcacctgctgctctggggacccaagtgaagcggcgagaggccaccgtaccgccggcgttgctcgttttgctctgcctgcaatccgccccgcacggactgtactgtactgtacctatacacctatatactacgacgtgcacatgtacgagtctacgacgtgctgctgtaccatactaatactagtgcgctgctgctcccttgccttcttgcttgcaagttgcaccagccactccgcttttttttgctcgaacgatcgactgctcgtcgcgtcgggccacggccggtcgtcagtttgggtgtgtccactccactgtaaagctcctcctcttgtttttttgggtactccctgcatgccaaagttagcggacgtgtactaggtgtggttcggagcagcaggttgtattacttaccaccccctctgtgatgtaagaacgcgtgctgaaattatcatgttatggcatatggattggat

SEQ ID NO: 5104 - DNA, 1232 bp, Zea mays
  Clone ID: 700443291_FLI
gcgaaagcagcgtaacgttcataatcggcaagttcgacggcatcctcggtctcggataccccgagatctccgtcggcaaggctcctccgatctggcagagcatgcaggagcaggagctgctggcggaggacgtcttctccttctggctgaaccggagcccggacgcggacgcagcgtccggcggcgagctcgtcttcggcggcgtcgaccctgcgcacttcagcgggaaccacacctacgtccccgtctcccgcaagggatactggcagttcgacatgggggaccttctcatcgacggccactccaccggtttctgcgccaaggggtgcgctgccatcgtcgactccgggacttccttgctcgctggcccaacggccataattgcccaggtgaacgaagcgatcggggcagacgggatcatcagcacggagtgcaaggaagttgtgagccagtacggagagatgatcctcgacatgctcatcgcacagacggatccacagagggtgtgcagccaggttggtctgtgcgtgttcgatggcgctcgatctgtcagcgaggggattgaatctgttgtcgggaaagaaaacctgggctcagatgtcatgtgctcggcctgtcagatggctgtcgtgtggatagagaaccagctccgcgaaaacaagaccaaggagctcatactgcagtacgctaaccagctgtgtgagcgtctgccgagccccaacggagagtcaacagtcagctgccaggagatctccaagatgcccagccttgcgttcaccatcgcaaacaagaccttcaccctaacacccgagcagtacattgtgaagctggagcaaggaggccaaaccgtctgcatcagtgggttcatggcgtatgacgtgccaccgccgcgtggtcctctctggattcttggggacgtcttcatgggagcttaccacacggtgttcgacttcggcaacgacaggattggcttcgcggaatctgcatgagtgtggagagcactctcatctttataaagacgataccctatgtattagggatgtgtagtttattgtctatccactacatgccaacagtacgctgcaaataaatcggtggccaaaattgctgaaaccagaaacgtgaacagtactgctttctttgtttctggagaagagcaaatggatgcttcaagacatgcatgtccgatgtgtattgagaaatagagcgatgagtgctgctcgatcgtcttg

SEQ ID NO: 5105 - DNA, 614 bp, Zea mays
  Clone ID: 700443296_FLI
gcatgggtcttgcagttcctccagccataccgagaaacattcttcgcaagatgggccttaacaatgtccctgggcttcgttcatcataatctcgatgtcacgatatcaagcagaagacgtgtgctacagcacagtacatgcatttgaccagccataatgctgttaacttcgtaaacaacacttgttgctggacttaagtaccgcagttaacataagcagattggtttgctgatgacctgaagtttctacaagcatcctcatttccaacccgtacacaagtcctcgggtgtagccagaatatgcattcattttgaagccaaattttgttcggtcgagacatcaacacttcacagagaatgctcaaacagacaaggtgattctacgtatacaaggatttgtcaaaagcatagtgatgtgtatgaagtattaaaagttcgggaagaaaaatgcgctttcctgatttatcgtcatataggggaatgcatgtgttcagtttcaaattctgacgttgtttgtacgcgaatgaaaagaaaggtatagggttgtgtaggggcaacaactactatacaaacaaccgttagatataaacatgcaagcaggtcactcggtctgtt

SEQ ID NO: 5106 - DNA, 795 bp, Zea mays
  Clone ID: 700443369_FLI
gtccgacgcggccgggtcgggggaggaagcgagcaagaaggtgcggaagccgtacacaatcaccaagtcccgggagagctggacggagcaggagcacgacaagttcctcgaggccctgcagctctttgatcgtgactggaagaagatagaggcttttgttggctccaagactgtcatccagattaggagccatgcacagaagtaccttttgaaggttcagaaaaatggaaccagcgaacatgtcccacctccacgaccaaagcgaaaagctgcccatccatatcctcagaaggcttccaagaatgattcatcttccatccataggaactctggcatgaacgtgcctgtttcttcatgggctcatagttccatcccacaagctgttgcttcatcaatggtgaaagaagatttaggtgctggaacaccaggttcaaacaatttttgctcaagtagtactgaaggccttccaagaacttggcaacctggtgaaacaaatgatccaataaatcaaattccgtcactccgccgtctgtacctcatgatatttctgataatcatcttgtagtgcaaaatacttactccgattctgtccatctctactatttctaagaattatgtcttaaccatcctcctgtgcatcttttcttgtgaatttgtaagcttcaatctcaaatccgctggccccttcttttagaatgaaccgaacctccaatattctcttgatgatgcttaacatacagagaaacggtgtaacacaaaacagcacaatccatttctttgtactgtttctttttc

SEQ ID NO: 5107 - DNA, 593 bp, Zea mays
  Clone ID: 700443418_FLI
caccgtccaagaatcggcgctgatgctgaacacgcggtggaaggtgttccggggcgacagcacccgccggcgggacctcatgttcagcgtcgtgaagccgtccgtgatccagctgcggggccccaccaaggtcagcgtcttcctcgccagcaacgacgccgagcaggcctgcgacttcaggatcaccggcagctaccacgacggcgcctgcgccgtctccctcggcgactccgacaccgtcatcgccaagatcgaccggcggttcagcgtggtcagcgcgctgctggggaagaactcgtacagcgtcaccgtcaacccggggatcgactacgccttcgtcgtcgcgctcgtcgtcatcctcgacgagatgcattaccagcgatgacacgcacgcttcagttttggttccaagccgcgcgccttcccttctgctgttggctgttgcgtggaataaggctcgccccgttctcgaatgtttgtcgcgagagactacttaatttccatacgaggatcttaaccttcctaggcacttggcagttccatctggctgtgtactcgacacggacgttctctatttgttaaatacctatgct

SEQ ID NO: 5108 - DNA, 1991 bp, Zea mays
  Clone ID: 700443450_FLI
acaggactcctcctcccccttccctccccctaaaagctaaaaacatttggagagagagagagagggagatcgaggggaaaccgagcaaccaagacgcacacgacgatggagcgagaggacgcgtgccgggtggcgctgctggacgcggccggcggcgagggcggcaagaagcagcagcagctcgcggcgcgggtgtgggaggagtcgaggaagctgtgggacatcgtggcgccggccatcttcagccgcgtcgtcacctacagcatgaacgtcatcacgcaggccttcgccggccacctcggcgacctcgagctcgccgccatctccatcgccaacaccgtcgtcgtcggcttcaacttcggcctcatgttgggcatggcgagcgcgctggagacgctgtgcgggcaggcgttcggcgcgaagaagttccacatgatgggcgtgtacatgcagcggtcgtggatcgtgctgttcatgtgcgcggtgctgctgctgcccatgtacttcttcgcggaggacgtgctgctgctgacggggcagccgccggagctggcggcgatggcggggaaggtgtgcgtgtggttcatcccgctgcacttctccttcgccttcctcttcccgctgcagcgcttcctgcagtgccagatgaggaactccgccaacgccgccgccgccgcagccgcgctctgcgtccacctcctcgccagctggctcctcgtctccaggctccgcttcggcctcgcgggcatcgccctcacgctcaacttctcctggtgggccaccggcgccatgctcttcgcctacgtcgcatgcggcggctgccccgacacctggcacggcttctcgctcgaggccttcgccggcatgtgggagttcgtcaagctatcctccgcgtccggtgtcatgctatgcttggagaactggtactaccggatcctcgtcttgttgacgggaaacctaaaagatgcagccattgccgtcgacgctctgtccatatgcatgtcaattaacgggtggcagatgatgattccgttggcgttcttcgccggcaccggtacacagacgggaaacagttgtgggatgcacttactactaagtatggtgcatcagatgctggcagtgacctgtatatcatggagagctttcatgattataagatggttgataatcgctctattgtagagcaagctcatgaaatacagtgtatagccaaggagctcgaccaccttaagatagtccttcctgaccgatttgtggccggatgcattattgcaaagttgccttctacatggaggaacttcgccacagctctgaaacataagagacaggagatatcagttgaaaatctgatagcgtctctggatgttgaggagaaagctcgggctaaggacacgggatctaaaggaggcgagggccactccagcgccaacatggttcagaagaaccacaacaagggcaaaggaaagccaaaatctaacaagcccaacaaaactaccaacttcaagaagaagaagaacaaggctgaattgacatgtttcgcatgtggcgaggcgggtcattttgccaaggattgtcccgatcgagcggatcgccgtggcaaaaagggcaatgtcaacacagtggtcgctagcaatgaggaagacaaaggggcgcccgggattcttccgtgctaatggggaatgggtcacatgcttctgttcatggcactggcacggtggatctgaagtttacttcgggaaagatcgtgcagctgaagaacgtgcatcatgtcccttctatacacaagaatctcgttagcggaacccttctatgtagagatgggttcaaggtagttttagagtccaataaattagttgtgtccaagtctggacaatttattggtaaaggctatgattgcggaggcttgttccgcttttctttgttagatttcaataataagtctgtgaaccatatttgtgctaatgttgatgatcttgcaagtatttggcatt

SEQ ID NO: 5109 - DNA, 1667 bp, Zea mays
  Clone ID: 700443454_FLI
ctaccgcctcagcacctgggggaacaagctcgcctctctcttcagcccttacctggagatcaccatctccgagtacggcgccgagcgcttccgccgcagcgacttcttcctcgccgctgaggcctacctctccgacgcctgctcccgccgcgcgcgcaagctccgggccgacctcggcaaggacagcaagaacctccaggtctccgtcgacgacaacgacgaggtcaccgacgacttctccggggccaccatctggtggtacgcgtccaagcagctggccaggtcacaggtcatcagcttctacccgggcgaggacgagcgccgcttctaccgggtcgtcttccacaggcgccaccgcgacctcgtcgtcgacgagtacctgccccacgtcctcgaggaaggccgcgccgtgaccgtccgcaaccgccagcgccgcctcttcaccaacaaccccagcggcagctggaactcctaccgcggcaagagcgtctggagccacgtccccttcgagcacccggccacgttcgacacgctcgccatggacccggacgacaaggaggacatcctcgacgagctccgcgcgttccgggacgctaaggcctactacaccaaggtcggcaagccgtggaagcgagggtacctgctctacgggccccccggcaccggcaagtccaccatgatcgccgccatggccaacttcctcgactacgacgtctacgacctcgagctcacggcggtcaagaacaacaccgagctgcggaagctcttcatcgagaccaccggcaagtccatcatcgtcatcgaggacatcgactgctccgtcgacctcaccggcaagcgcaaggacgacaagaagcgggcgtcggccgaggcagacgacaagcccaaaactccaacggatcccgacaaggacgagggaagcaaggtgacgctctcagggcttctcaacttcatcgacgggctgtggtcggcgtgcggcggcgagcgcatcatcatcttcacaaccaaccacaaggacaagctggacccggcgctgatccggcggggcaggatggacaggcacatcgagatgtcctactgccgcttccggaccttcaaggtgctcgccaagaactacctggacgtcgaggagccgcacgagctgttcggccagatagaaaagctgctcgaggagacggacatgtcgccggcagacgtggccgagaacctgatgcccatgtccaagaagaagaagaggagggatgccaacgcgtgtctggagagccttgtggaggctctgaagcaggccaaggaggatgctgctgctgctgctgctgctaaggcactagctgacgctagggcggccaaggaggaagcggaggaggcgaaggagaaagaggccaaagagaaagacgaggcaacaaatagcaaaggagcagcagacccagcagggaaggacactaagatgagcaatggagatgttactgtcaataaggaaggtggtgacgagtgacaagtatagaatggatgagctcgcttgctactgaagtaatggagaaacatggctataaataatgacagtggcctatgtaaaatagtgtagtctctagtgaagattacagtcacacgtcgtcatcttccatgtttaaaagataaaaagatagacttgatttgcactagttaaaaat

SEQ ID NO: 5110 - DNA, 1537 bp, Zea mays
  Clone ID: 700443503_FLI
cactacgcaaaacggctgcgaggcggcttgtctcggcgactgcaactgcacggcctactccttcagcaccgatggcaaatgctctgtctggaatggggacctgctcaacgtggaccaggccgacagcaccataagctcccaaggtgttctttaccttcgtctcgccaagagtgatttccagggtttgagcagaggcaacaagaggacaccgacggcggcgatcgctgcaggcgctgttggttctggaatactagtgctcgccgtgctagcgctcgtaatctggaggtgcaacaatgtgccgccgccgctacacgccggcgtcggagacggtggcggaatcatggcgttcaaacacaccgatctatgccgcgctactaagaacttcagcgacaggctcgggggaggtggtttcggctccgtgttcaagggactgttgggtgactcgaccgctgtggcggtgaaaaggctcgacgatgcccggcaaggcgagaagcagttccgggctgaggtgagctcggtcgggatgatccagcacatcaacctggtcagactgatcggcttctgctgcgaaggcgacaagaggctgcttgtgtacgagcacgtggtgaacgggtccctcgacgcgcatctgttccagcagagcagtgccgccgtcgtcgccactgcgctggattggagcaagaggtacaggatcgccgtcggggtcgcaagaggattgtgctacctgcaccagagctgccgcgagtgcatcatccactgcgacatcaaaccggagaacatcctcctcgacgcgtccttcgcgcccaagatcgcggacttcgggatggcggcgttcgtcggccgagacttcagccgggtcctgaccacgttccgagggacagcagggtacctcgccccggagtggctgagcggggtccccatcacgcccaaggtggacgtctacagcttcggcatggtggtcctggagatcgtgtccgggcagaggaacacgccgccgcaggctctcagcaggagcggttactaccacgccgcggcgtatttcccggtgcaggccatcacgaagcttcacgagggagacctgcagggcttggtggacccgcgcctacagggagacctcagcctggaggaggcggagaggctgtttaaagtcgcgttctggtgcatccaagacgacgagtgcgaccggccgaccatggctgacgttgtccgcgttctcgagggcctccaggagctcgatatgcccccagtgccaagactacttgcagctattacagcacgcgccaatgcggatttcatgtgatagatagttcatagctagactgctagactagataattccatctccgtcgtgacgacgcaaggcctcatgatgattgagctcgagcatggctggcatggcagcacttcctgcttgactgcgtctgcgtggtcagattaagcctttgataattgtaagacgatctgaaaatctgagtggttctatggcgttgacaatcattagtgcaattgacaataagtcaatttgcattgcttacac

SEQ ID NO: 5111 - DNA, 526 bp, Zea mays
  Clone ID: 700443507_FLI
caagaagccggaagacgctgctgccgccgccgccgcgccggccgtccacgcgccaccgccggcgccgcacgccgaggtcgacgtcagcagcccggatggcaagaagggcttgctgggcaagatcatggacaagatacccggctaccacaagagctcgggtgaagaagaccgcaaggacgccgccggcgagcacaagaccagctcctaaggtcgcagcgtgtgcgtgtccgtcgtacgttctggccggccgggccttgggcgcgcgatcagaagcgttgcgttggcgtgtgtgtgcttctggtttgctttaattttaccaagtttgtttcaaggtggatcgcgtggtcaaggcccgtgtgctttaaagacccaccggcactggcagtgagtgttgctgcttgtgtaggctttggtacgtatgggctttatttgcttctggatgttgtgtactacttgggtttgttgaattattatgagcagttgcgtattgtaattcagctgggctacctggacattgttatgtatt

SEQ ID NO: 5112 - DNA, 555 bp, Zea mays
  Clone ID: 700443651_FLI
cggcctgcctcagagagagaaaaagcggagattagcggcggcgatggcactcccggcgtcgagctccggcctcttccgcttcatctccccgcgcagccgcctccagtccaccgacatcgtggctgccgcctcctggggagtcttcgccggcaccgccggcctctacctcgtccagccatttgactggattaagaaaactttcttcgagaaaccccaaccagaggcataaaaggcttgcaagtctgcaactttggtacatcacttttgtccgggatggttcctgactgaagagaacttggataactcagcaaataatacgagaccccctcgtgtttccttgtttgttttttattattcagatgtatgtaggcaatccccacgagggagacagggaacagagaaaccgcttggttcacctgtgtttatataatactcctgtattatccaacatgcatgttttaaaacctgtggcaaatatatcttgctgattaatattggactatgatgtcatgttcgaatgttcccatcactaaaaggaggaaaaacaatgatggc

SEQ ID NO: 5113 - DNA, 1044 bp, Zea mays
  Clone ID: 700443674_FLI
cgtctgcagaactttctaggaatatggtccttcgtttcagatattcctaatgtagcacctgagccaaactgtgagcaaggaataagcatgatgagcatcagcgacagtggtgtcagtaatcaagataatgctgcaggggacagtattttgttagatatagctagtgcaacacttgtaagtgatattggtacttgtgacaagcttttggtaggttcctcttcaggagctggagtgaacctacttccactggctactggtcaaacagaaacagctggatctgtggattccacaccagataaggttccctatacgccagataaagatatgttcagtaaggacagcatatatgaagatttttgtgtggatgacgctgaccttgctttcgaaaattatgaagaactctttggtacctctcatattcaaacagaacaactctttgatgatgctggaatagacatttactttgaaatgaaggaagcacctgctgggaattccactgagcagtccaagctgaagcaacctgcaaatagcaatgcggtatctgccgactctgggatgtcgaaccctggagtgaaaggtgattccagtgtttgtacccctttgaggcaggctaggtctagtctgtctctttcctttgctggtttgactggtgagagtagtgcgggagaccaccaagattgtgtggtatcatcattgcttcttatgggtgagcctccttggcagcctcctggccccgagggctcaattgctggaggtagtagagacagtgcactcacacgatacaaggagaagaaaatgagaagaaagttcgacaagaaaatcaggtacgcttctcgtaaggctagagcagatgtgcgaaagagggtaaagggtcggtttgttaaggctggtgaagcatatgactatgatcctctctgccaaacgaggagttactgaagcatatgatctttatccagttttaaattagcaaactgcaaccaaggctcgttgcagctagaacaaaagcactggcaatccaagctattgggccaaactgtgccttcg

SEQ ID NO: 5114 - DNA, 977 bp, Zea mays
  Clone ID: 700443709_FLI
ggtttacatcaaaatgtccccccaaagaaattgtccgcaagatcgaggaagctgcaaaacctctaggatttgatgttcagaagaaaaattacaaggtacctacatgtagcgctagtaacttaatatttgaatattttcttgaggcatgacttctcgaaacgaatacaaactttggatacatctttctgcatgctaaaagttctctttttcatttgtgtaatcagttgaggctcgaaaaggtaaaggcagggaggaagggaaacctcaacgttgctactgaggtcatgcttaacgttttccctaactgcaatatttttttgtaacttcttctgcctaacatttattattcatattgattcagatactgcaagttgcgccctctctccacatggtagaagtccgaaaagcaaagggtgacactctggaatttcataaggtaactatggggcatgcaaagatcatgcccataaagaaacatatgtattcatgtactgtccataagctgatcaaccagcagtttgaattcactaattcatagtttattttgctctttcagcatcttttgtttgaacagtatttacttaaatgtgtgagctataattatctgcagttctacaagaacctttccaagaccttgaaggacgtcgtctggaaatccgacgatcttcaaacgcaacatgcttcttagcagaacctcagagaggaggaatggcaaactattttgtgcaccatcctttcaagcaaactattctgcatgtaacggtgggtgcccaggaaattgcgctggtgctccaccatcgttgtatatgctgcgtcttgagttgcttgctgtagctgaagggaagttcattcagtaggttttgagtatgagttttgtatatccgtatatgcctatgactatgagccgtgctggaacactatgatcagaaactgcgaaatggagcccagaatgttcttgccatcttgctccagttctc

SEQ ID NO: 5115 - DNA, 752 bp, Zea mays
  Clone ID: 700443832_FLI
atcggctcacgcactgacgcacatccattaccttctataatacgtctgcggtgtcaaaatttccctctcagccgtgttgctcgccgccgccccgccgtgttgctcgccgacaccgccccgccggcagccaaaatgccgttcaagaggttcgtggagatcgggcgagtggcccttgtaaactacggcaaggagtatggccgcctcgtcgtcatcgtcgacgtcgtcgaccagaacagggctcttgttgatgcccccgacatggttcgttgccaaatgaacttcaagcggctttccctgactgacatcaagattgacattaaacgtgtcccaaagaagactacactgatcaaggcaatggaggaagctgatgtgaaaagcaagtgggagaatagctcatggggcaagaagctgattgttcagaagaggagagcatcactcaatgactttgacaggttcaaggtcatgttggcgaagatcaagaggggcggtgccattaggcaagagcttgctaagcttaaaaaggtggctgctgctgcttagattgctttggtggttcctctattcgatctcttgaaatgtaatgcacgaattactttgacagttagcttgtcaagatgtcaattttaaactggcttatttagatattttgtccaaaatgctattctgaatctgagatagtgttgtattctgatatctatcaagtgttgcattgttgttacattcaacgttgttgccggctggctttcagtttc

SEQ ID NO: 5116 - DNA, 1392 bp, Zea mays
  Clone ID: 700443856_FLI
ctcgccttactccctcacagaacccagtaaaatattgccagtcccgccgtcgagatggccccacgccgcctgctcgtcctcgccgtcgtcgccctcgcggccaccgccgccgcggccaactccggcttcgcggactcgaacccgatccgccccgtcaccgaccgcgcggcctccgcgctcgagtccacggtcttcgccgcgctcggccgcacccgcgacgcgctccgcttcgcacgcttcgctgtgaggtacggcaagagctacgagagcgcggcggaggtccacaagcggttcaggatcttctccgagagtctccagctcgtccgctccaccaatcggaaaggcctctcctaccgcctcggcatcaaccgcttcgcggacatgagctgggaggagttccgtgcgacccggctcggcgcagcccagaactgctccgccacgcttaccggcaaccaccggatgcgcgccgccgccgttgcgctgccggagacgaaagactggagggaggatgggattgtgagcccagtgaaaaaccagggccactgtggatcatgctggaccttcagcactactggtgcacttgaggctgcatatacccaggcaactggcaagcccatctctctctctgagcaacagcttattgactgtggttttgcattcaacaatttcggatgcaacggaggccttccatcccaggcctttgaatacatcaaatacaatggtggccttgacactgaggaatcttacccttaccaaggtgtcaatggaatctgcaagtttaagaatgagaatgttggagtcaaggttttggactcggttaacatcaccctgggtgctgaggatgaactgaaggatgctgttggtctggttcgcccagttagtgttgccttcgaggtgatcactggtttcaggctgtacaagagcggagtttacactagcgaccattgtggaactacaccgatggatgtgaaccacgctgttctggctgttggctacggtgtcgaagatggtgtaccctactggctcatcaagaactcatggggcgctgactggggtgatgagggttacttcaagatggaaatgggcaagaacatgtgcggtgttgctacgtgtgcatcctaccctattgtcgcatgaggcccttacgaagtgttacatggtctgtttggcatcaataatgcatgtttaacctgagcttggcgatgggttatacagaacggaaactctgtttgtgaatagaaaatcatgaagggaaggagttgaccggacccctgcttgtacgtctccccgactgtgtaggtagattgtcagttggggttccgaagtactctactcatacgtgtgtatgacagtttatttatgaaacaaaatacgcattgatcgttatggtgc

SEQ ID NO: 5117 - DNA, 1408 bp, Zea mays
  Clone ID: 700443858_FLI
cccgtctcctccacctttcactttccagttcaagtcaaaccacgttcctcgcggtcgcggaggctcacgccaagctcgctaaccgctcccctcctccctcactccctcgtctctccctctccccccgaatcctcgacacccaaagcccaaaccctagcacgggcagcggagctgcgtcgggcgaatggacctgcagctgcatgtcttctacagggcgctcgggctctcgttcgtcggcggcctcagcaccgccatcggtgcactgtttgtcgttttgaatcctgcccctaaccttaaagtgctcgggcttctacagggttttgctgctggacttatgctcagcatctcctttctagacctggcacacaatgccctgaattctattggcttcttgaaggggaacctctggttttttgcaggggttcttttcttcggtttcattattaagtttatcccagagccagatttttcgccaccagctgatccaagcgagaaagaggctgatgatggtgtatcaggtaaagatatgatgagaaaacatcgccggcaagtgctattcagtggtattatcactgctgttggaattagcttgcataatcttccagagggaatggctgtatttcttggatctgtcaagggtcttcatgtgggcctgaacttggctgttgctattgccttacataacataccagagggggttgctgtagctcttccaatctattttgctaccaaaagcaaaaaaaaggcattttatacggcagcattctctggtttggctgaaccactaggagtggttgctgtagctttgttgtttccaagcagtttgaatcctgacattcttgaaggcctacttggatctgtgggtggtgtcatggctttcctcactttgcatgaaatgctgcctcttgcatttgactattgtggccagaagcaagctgtcaaagctgtctttgtgggcatggcctgcatgtctgcaagcttgtacttcttggaagtcagcttaccaaaggagataagcttgtagcatcgcgctgcaggtactgggaggccatagcctgtcagtagatcctgaattctaggaggaggaacagcacaataaaaccatgaacagtgactactggtgtgccgccattgatattgtccatcttaccgtgaaaggagggagaaactgcatttccccagaatgtattccccagattcctcgtgggaccatatgaaagaattgaaaaatgtactgtagtactctgtcgtccggcaatggaagcttcgaagtcgtcaactaaactatttctagcactctcgtcggttgacaatggaagattctatgtaaaaacccatcagatagatgttaacctttaatctttaatttcttaaaagtacattgaaataagatactttgctttcaaac

SEQ ID NO: 5118 - DNA, 575 bp, Zea mays
  Clone ID: 700443867_FLI
tcttgcccgaggcactgggcggaaccatcgatcgagccactggtcaggttgatctcaagtttagatcgaggttctgcttctcggttgggagcgtctacaaagcgccgccactgttcgtcgagacaacactgacctccgaggagtcgaggggagccataagatccggcaccggagaaagaatggacgaagaaggcagatgcaggctggttggggtggccgtcgtcgacccaattgatgacctcttcatgaacacatttctcagcctgcccaccgagtgcattgcttacttgagcgccaccatttccatagccgctgcgagatgaacgtctttattgctggcttacattgaaaatataatgcgcgcgccgatttctttttcttgtaaagattagccaaggctcggccatatcgcttcagttcatattggaaacctgaagtacactactatcgatcatcgcttggccattgatgttgttggggtgtaccatgtctcataagctaaggagccctcgtgtgtaaaagaggccaaaataatatgttcagggacatatgtataaacatctagtggtttaatt

SEQ ID NO: 5119 - DNA, 815 bp, Zea mays
  Clone ID: 700443890_FLI
cccgggtgtcggaggagcttcgcgccgcgctctcagcgttccagcagaccttcgtcgtgtccgatgccacccgccctgaccaccccatcctctacgccagcgctggattcttcaacatgacgggctactcctccaatgaggtcgtcggaaggaactgccgcttccttcaaggttctgggaccgaccccgtagagatttccaagatcagacaggctctcgcagctgggtcaaattactgtggccgtatcctcaactacaagaaggatggtacaccattctggaacctcctaaccgttgcccccataaaggatgaggatggcagggtcctcaagttcattgggatgcaagtggaagtaagtaagtacacggaaggtaacaaagatactgctcttcgtccaaatggattgccagagtcactcatcaaatatgatgcaaggcagaaggatcatgctcgtagctcagtctcggagctcctacttgccctgaaggatccacggtcactgtcagaatcaagaaacaataccttaaaaaggaaatcacaggaatcagcaggttcagctctagttcccggcaagagaagctccgaaactggatcccgtcgtaactcacatagtggaatcagaaactctctacaaaaaatcagtgaagtacctgaaggagggaataagaccaggaaatctggtttgcgttcttttatgggccttattggtatgggacatgggaatgtagagaagaacattctaaaaccaagggaagatcccctacttgatagcgatgatgagagaccagatagcttcgatgacgatttcaggaag

SEQ ID NO: 5120 - DNA, 527 bp, Zea mays
  Clone ID: 700443939_FLI
cagacgcggagggtgcactttggattcgctcgatcggtcatcatcggactgtgcaagcacgagaggggtatacaggcatacagcggattcataaaccgtcagagtgttaggacaagatggtggccaatggtgatgcacctgctagagggagcgcggcggcagccgcaagcctgcgtaggcgtaggaccacaagcggtgctgctgctggtggaggcggtgccagctcaatgctccaattctacactgatgaggctgccggccgcaaaatgtcaccaaacactgttctgatcatgagtattgggttcgtagccgtcgttgctgtgctccatgtattcgggaagctgtaccgcacctccaactaggttggcattgccatatccaagaaagctgagtccaccaagagaggattcctgtagaacaatttaaatggatagcaagtgactatcagactctgttgtagaagtttatttatacaacttgcaatgctgcgaggctattcataaatgcctgcgagttttgtttaagtc

SEQ ID NO: 5121 - DNA, 624 bp, Zea mays
  Clone ID: 700443948_FLI
gctacggcggccacggccgcccgctcacggcgttccagctcaccgtgctcggcgacggcgccgtgttcgtcggcttcgtcgccaaccacgccgtcgtggacggcacctccttctggcacttcttcaacacgtgggcggggctgtgccgcggcgcgccggtccgggagcccgacttccgccgcaacttcttcggcgactccaccgccgtcctacgcttccccggaggcgcgagccccgccgtgacgttcgacgccgacgcgccgctccgcgagcggatcctccacttcagtgctgccgcaatcagcgagctgaaggcgacggccaaccgctcgaaaagagcaggtcaggaagccgaggctaacggcaagctcgcgcacgacgactccagacttgaagggcgttccggtgaaatctcgtcgtttcagtcgctgtgcgcgcacatctggagggcggtgacgcgcgcgcgccggctgctggctgccgacaagacgacgacgttccgcatggccgtgaactgccggcaccgtctgcgcccggcgatctccccgctctacttcggcaacgcgatccagagcgtggcgacgacggccaccgtagccgagctggcgtccaacgacctgggct

SEQ ID NO: 5122 - DNA, 644 bp, Zea mays
  Clone ID: 700443993_FLI
cccgcacgacacgacaccaagtcgaggagctcgagagggcaccaataatggccggcgtgaactccagcgtcgtcgggctcaagcccgccgcggcagtgccgcaggccgccgccgcctcatcgccggcgaagcgggtgcagctggccgcgcccgagggccgccgcgccgctctgctcggcctggcggccgtcttcgccgtcacggccaccaccgggtcggccaaggccacgatcttcgatgagtacctcgagaagagcaaggccaacaaggagctgaacgacaagaagaggctggccaccagtggagccaactttgcgcgcgcctacaccgtggagttcggcagctgccagttcccctacaacttcactgggtgccaggacctcgccaagcagaagaaagtccccttcatcagcgacgacctcgagattgagtgcgaggggaaggagaagttcaagtgcggctccaacgttttctggaagtggtgaagcagctagcagcagcgtctgatgggaatggaggagatcatcacctgtcttgtcgaccctagatatgtccaaactgcagggaaattaaatcttcatgtgtaattgtgctcattctgtttcaatcatctcaacatccgatcatgaacctcttgcattatt

SEQ ID NO: 5123 - DNA, 1567 bp, Zea mays
  Clone ID: 700444094_FLI
caccatttggctcccgcaagcaccgatttgtttactgctctctccgacgcgcggcggcggagctccctacgacaactgaaccatgtgcggcggcgcgatccttgccaaccttcgcgagccggcgccgcgccggctcacagagcgggacatctggcagcagaagaagaagctcaagaggggcggcggcggcgggaggcgctcgttcgcggcggaggacgatgaggacttcgaggccgactttgaggtcttcgaggcagactccagtgattcagatttggagctcagggaggggactgacgacgacgtcgtcgagatcaagcccttcactgccaagaggactttctccagcgatggcttaagcaccatgactagtgctgtagcaaggtcagccaagaggaagagaaagaatctatacaggggtatccgccagaggccttggggcaagtgggctgctgagatcagagatcctcagaagggtgtccgtgtttggcttggtactttcaatagtcctgaggaagctgcaagagcttatgatgctgaagcgcgcaggattcgtggcaagaaggccaaggttaactttcctgatgcaccagaagttggtcagaagcgccgttctggctcagcttccgctaaagcatccaagtcaagttttggacagaagcctattgtcaaagtaactatgaacagccttgccaacacaaatgcatccttcttccaatctgttagctacccctccaattcatttgttcagcatggcaatataccatttgttccagcaatgaactctactggttctgttgaggatcctatcatgaatctgcactctgaccagggaagtaactcctttggctgctcagacttgggctgggagaatgataccaagacaccagacatcacttccattgctcccatttccactatcgcggaaggagacgagtctgcatttgttgacagcaattcaaacaactcatttgtgcttcctgccctggagaacagtgctgttgatctcactgatgggctgacagatttagaatcctatatgaggtttgttctggatggtggtccaagtgattcagttgatagccttctgaaccttgatggatcgcaggatgttggtagcaacatggacctctggagcttcgacgacatgcccatcgccggtgatttcttttgaggattttgaagcttggccataggagtatgtacatagggactaggggaataaagaccgggggagattgggaagcacctgcttggcaccttgggggtagcatttgctcgtgtctagctcagagatgcagaagttgcattctgaaactacttggttatcgacctgttccctattttagctatctctttatgagagccatttatgagactgaaccattttgttttgctttcttttcgttgttacaatatatggtttaacattatgatttatggatatgtgccaaatatggtgctcaacagtggtcaaacatgccttttagatgctcttgtttctcgtattgttgtgtaccttgtgatatttcattcgttgaaattgagttaaactagttatctgctg

SEQ ID NO: 5124 - DNA, 2095 bp, Zea mays
  Clone ID: 700444114_FLI
gtcaggcctcgctcagatctctccgccctcgtcccccctcacaccccaaaccctcggcccgcctctctcgtcaacgccgcccgacgagagcgatgtcggcctcgccggccgccgccgcggtactcctcatcctcttcgccctcggggcggccggcggagtggcggccgacggctccgaccaccggtacaagatgtacgagcccgtcccgctctacgccaacaaggtcggcccctttcacaatcccagtgagacatatcgttacttcgacctgcccttctgctctcctgagaaagtgaaggagaagagcgaggcccttggcgaggtccttaatggggatcggctagttgatgcgccttacaagcttgatttccgttcggaagttgagtccaaggcggtttgctcaaagaagcttaccaaagaggatgtagtgaagttccggaatgcagtagcgaaggactactacttccagatgtactatgatgatctcccactgtggggcttcattggtaaagttgagaagggaggcaaggccgatccgagcgagtggaagtactacctgtacaggcacatcatcttcgatatcctgtacaacaacgaccgggtgattgaaatcaatgtgcacactgatcagagtgcattggttgacctgacggaggataaggagacaaatgtggatttcctgtactcagtcaagtggaaggagacaccaacaccatttgagaagaggatggagaagtactccagctcctccaacatgccgcaccacctggaggttcattggttctcaatcataaactcttgtgttactgtcctcctcctcacagggttccttgcaacaatcctcatgcgagtattgaagaatgattttgtcaagtatgcccatgatgaggaagctgctgatgaccaggaagagtctggatggaagtatattcatggtgacgtcttccggttcccaaagaataagtcgctattttccgctgctcttggcacaggaactcaattatttgcactcacaacctttatattccttcttgcacttgttggagtattctacccttacaaccgtggtgcactatttactgcattggttgtcatctatgcactcacttcaggaattgctggatacgttgctacctctttttattctcagctggaggggacaaactgggtgaggaacttgctattgacaggatgcctgttctgtggacctctcttactgacattttgcttcttgaacactgttgctattgcttatagtgcaacagcagcactgccctttggcactatctgtgtcattgtgctcatctggaccttggtcacatttcctttgcttgttttgggtggtattgctggtaaaaacagcaaaagtgagttccaagctccttgccgtaccacaaaataccccagggagattcctccacttccctggtacaggagaaccattccacagatggctatggctgggttcttgcctttcagcgccatatacatcgagctatactacatctttgctagtgtctggggccacaggatctacacaatttacagcattctgtttattgtcttcatcatcctccttattgtcactgcgttcatcactgttgcactgacatacttccagcttgctgctgaagaccatgagtggtggtggaggtcattcctttgcggaggatcaactggttttttcgtgtacggctactgcctgtactactactatgcgcgatccgacatgtctggcttcatgcagacatctttcttctttggctacatggcctgcatctgctatgcattcttcttgatgctcgggatggtgggcttccgcgccgccctgttctttgtccgccacatatacaaatcaatcaagtgtgaatgagctgttgctgggagacgaagagcagcagagttgtacccgtttttggtgccccaccgagaggtcccagatatagaaaaggttagctctcgcatgcgacaggagcagctagagattgccatgtttcagagtaggccaattatttataggaacaggtaatgaacctataaatttgttctgtttttgtgactgctgtgataaaaagaccgtctgttccttcgtcc

SEQ ID NO: 5125 - DNA, 1461 bp, Zea mays
  Clone ID: 700444117_FLI
caacctcctctgctctcccccacctcccggtccggcagcagagagcgggggtgcagagagatcgagatccggaggccgcgagtgggagcgccaccaccagcgactgcggcaatggcgggcacggtgacggtcccggggtcgtcgaccccctccacgccgctgctcaaggacgagctcgacatcgtgatcccgacgatccgcaacctcgacttcctggagatgtggcggcccttcttccagccctaccacctcatcatcgtgcaggacggcgacccgaccaagaccatcaaggtgcccgagggcttcgactacgagctctacaaccgcaacgacatcaaccgcatcctcgggcccaaggcctcctgcatctccttcaaggactccgcctgccgctgcttcggctacatggtctccaagaagaagtacatctacaccatcgacgacgactgcttcgttgccaaggacccatctggcaaggatatcaatgctcttgagcagcacatcaagaacctcctcagcccatccaccccgttcttcttcaacaccctgtacgacccctaccgtgagggtgctgactttgtgcgtggataccccttcagcctcagggagggtgctcacaccgccgtctcccacggcctgtggctgaacatccctgactatgatgctcccacacagctggtcaagcccaaggagaggaatgagaggtatgttgatgctgtcatgacaatccccaagggaaccttgttccccatgtgtggcatgaaccttgccttcgacagggatctcattggccctgctatgtactttggtctcatgggtgatggccagcccatcggtcgctacgacgacatgtgggcaggatggtgtgtgaaggtcatctgcgaccacctgagcctgggagtcaagactggcctgccatacatctggcacagcaaggctagcaaccccttcgttaacttgaagaaggaatacaagggcatcttctggcaggaggacatcatccccttcttccagaacgtgaccatccccaaggactgcgacaccgtccaaaagtgctacatctacctctctggacaagtgaaggagaagctgggcacgattgacccctactttgtcaagctcggtgacgccatggtcacctggatcgaggcctgggatgagctgaacccgtcgacccctgccgccgcaaatggcaaggccaagtagatgtgccatcacttcggcactggagtgaaaaagaaagtatgattgggtcctgcctaggccccatagatatagctcttttttgagaaggaagagagattaattcagcagcagcttttataaattctttgttgtcatgaagcaggtggttcttttgtagttgatgaaagggatttgtcgtcgctatcgtttacataattcagacaataattttatattgtgtaattctgagaatcaaagcactgtttgtgttatagc

SEQ ID NO: 5126 - DNA, 1368 bp, Zea mays
  Clone ID: 700444141_FLI
gcgagagcttgtcggagggctctctgtctctgtgataaaccgatacgcagaggaagctgcggagaggtgtccctgctctgctggtgagctgcggccagcgggtgaagtgaagtggaccggacgtggacgaaggagagagagagagagagagaagaaagggcgccgcgggggccatggctggacacgcgccggcgagggacaagaccaccaccggcttcgccgctacgtgcagcctgctgagccagtttctcaaggagaagaagggcggcctgcagggcctcggcggcctcgccatggcgccggcgccggcagctggagcaggggctttccggccgccgaccaccatgaacttgctgtccgcgctcgacgcggccaaggccaccgtcggggagccagaaggccatggccaacgcaccggcgggaatccaagggaggcagctggggaggaggcgcagcagctgaccatcttctacggcgggaaagtggtcgtcttcgacaggttcccctccgccaaggtcaaggacctgctgcagatcgtgagcccgccgggggccgacgccgtggtggacggtgccggtgccggtgccgctgtccctacgcagaacctgcctaggccttcacacgacagtctctctgccgatctgccgatcgcgaggcggaactcgctgcacaggttcctcgagaagagaaaggacaggataaccgcaaaggcgccgtaccaagtcaacagttccgtcggcgctgaggcgtccaaggcggagaaaccctggctgggtctgggccaggaacaggaaggaagcgacggtcgtcaagcaggagaggagatgtgatcgatcagtagagactagattcgttcgtgcgcgcgtcgtcgtagcttcaggttaagggaaagaataatccaaccgtcggttaattgctcggcttaattacactgctctactacgtagtactggcactgctaccaccaccaccaccaccagagtgaccaagttaagctagggattgttacataggccggccggtcggccgttcgttcgcgagattgtttcgctgctggagatgcgcatgcacgctcgcagcagcttcgctggtccgcgtggccgcgtcttgtgttcgcgcaacgaacggtgcacgttccggtacgttttcatttgtctccgacctgtcctgtgtgtgtgcgtgtgtttttgcactggatattccccctcccctctcgtggtcgtagggagggtttgtatgttcagtggaaagatgtttggtatggtctactccattctatttcatgattcatgaatatgtatgtatgtatgtatgcgtgtgatgtactactgtggtatgctgtataaatttataaacacgcgctttatt

SEQ ID NO: 5127 - DNA, 749 bp, Zea mays
  Clone ID: 700444216_FLI
cggggctactgaatactgcgtggtgcatggaggagggaagcgctgttccgtgcccggctgcaccaaaagtgcccgtggccgcactgactgctgtgtgaagcacggtggcggcaagcggtgcaaggttgacagctgtggcaagagcgcccaggggagcacgcacttctgcaaagcccatggcggagggaagcggtgcacatggagcacaggctgcgaaaagttctcccgtggcaagagtggcttctgtgcagcacatggtaccttgatggccaggcagcgagaagaagaggtggtgaagaatgtagggagcatgattggaccaggtctcttcagcggcattgtggcgtcatctgccaccgcagcaagcagcatgacgaacgagcactcggcctctggtgtcagcaccgcttccgactgtgacggcacggtgaggagccaatcaatgattcctccgctggtgctggttcctcgctctatgatgccttcatggtcgactgagcctgtagatggaggcagagagggaggtcatgttgttcctgaggggagggtccatggtggtggcctactgtcacttctcggtggcagcttcagggacgccgacgtggaaaagctttgaagattttgtcagtttgtttgtacataaacaggccgcgttcccgcctatagaattgttattgtgccttttcttgtctagataaacatttcaaccttcatgtaccggttaaatcaatactggtttagtcccttgt

SEQ ID NO: 5128 - DNA, 668 bp, Zea mays
  Clone ID: 700444247_FLI
gccgtcaagttcggcaaggccttcgggatgaaggtcaccgtcatcagcacgtccgccagcaagcgccaggaggccatcgagaacctcggcgcggacgagttcctcatcagccgggacgaggaccagatgaaggcggcgacggggaccatggacggcatcatcgacacggtgtcggcgtggcacccgatcacgccgctgctggcgctgctgaagccgctggggcagatggtgatcgtgggcgcgccgagcaagccgctcgagctgccggcctacgccatcgtgccgggcgggaagggcgtggctgggaacaatgtcggcagcgtcagggactgccaggccatgctcgagttcgcggggaagcacggcatcggggccgaggtcgaggtcatcaagatggactacgtcaacacggccatggagcggctcgagaagaacgacgtccgctaccgcttcgtcatcgacgtcgccggcagcctcggctctgccgcctaggcatggctgcaaaggtttcaatcagagcccagccgcaataatttgttagctaccgaatgaatgatggtctacgcttgttgatgagttggtgctttgtcgtggttttgtggatgtaataattcgatgtacaaataaaaaaaggggagacaaggtgcttgttcccttggtttggtgac

SEQ ID NO: 5129 - DNA, 1375 bp, Zea mays
  Clone ID: 700444283_FLI
agacaagcaaggaatcccccgatggctcatcgcgttctcctcctcctctctctcgcgtcggccgccgcggttgccgccgccgtcgacgcggaggacccgctgatccggcaggtggttcccggtggagatgacaacgatctggagctgaacgcggagtcccacttcctgagcttcgtgcagcggttcggcaagtcctacaaggacgccgacgagcacgcgtaccggctgtccgttttcaaggccaacctgcgccgcgcgcgccggcaccagctgctggacccgtcggcggagcacggcgtcactaagttctccgacctcacgccggcagagttccgccggacctacctcggcctccgcaagtcccggcgcgctctcctcagagaactcggggagtcggcgcacgaggcgcccgtgctccccaccgatggtctccccgacgatttcgactggagggaccacggcgccgtcggccccgtcaagaaccagggttcgtgcgggtcgtgctggtcgttcagcgcgtctggagcgctggagggtgcgcactacctcgcaactggcaagctggaggtgctttcggagcagcagttcgtcgactgtgaccacgagtgtgattcatcggagcctgattcatgtgattcgggttgcaatggtgggctaatgacgacggcattcagttatctccagaaggccggtggccttgagagtgagaaggattacccttacactgggagtgatggcaaatgcaagtttgacaagtccaagattgttgcttcagttcagaacttcagtgttgtgtctgtggacgaggctcaaatttctgctaacctcatcaaacatgggccattggcaatcggcatcaatgctgcctacatgcagacatacatcggaggcgtgtcatgcccatacatctgtggcaggcaccttgaccatggtgttctccttgttggatatggtgcttctggtttcgcccccattcgcctgaaggacaagccttactggatcatcaagaactcgtggggcgagaactggggggagaacggatactacaagatatgcaggggttccaacgttcgcaacaagtgcggcgtcgattccatggtctctaccgtgtccgcagtccacgcctcgaaggagtagactctggtcagcggtgataatcgtgattccatatattgtagaactataatccctgctagtaatccatttgtgctgtttatgtatcgaaggcagcaaagatgtgtgaagcggcaatgggatgcttgctgtaaggtaatatgtttggcttgctaggcatgctacacgctatttggatgtagcaacgttatcaccagctgtatacgctttttaatcgacaacatttgaataatatgtacat

SEQ ID NO: 5130 - DNA, 1061 bp, Zea mays
  Clone ID: 700444319_FLI
cccacacaagcgccgcttaccgcccgggacaggactgttggaagtccccagacggcagcgatggcggaattatcgacatcttcggatggattggtggacgaagaagcgaggcagcaggaaccaggacaaggaagtgctgaaggtagccatggtctgcaagacacaaaggagcaggacataataaagggaaaggcggctcttgtttccactgaactgctgagggaggatctggttcagagtgctgttagttttctgaaacacccgaaagtagtagcctcttcagatggacagaggcgatctttccttgtaaataaaggactcaccatggatgaaatagatgaagcatttcaacgtctacaaagcccgtcatcgaattctgcgagctcaaatatgtgcacatctcaaggggtgtttgatcattcatgcaggattactgagcaggaaattaaagtcgatagaaagtgtatggatggtttagagagggtggaacctgaagctggacctgtggcccctgtggtacctcgtcatccaaaatcatatatggagatcatggaaatgatacaaaggggtgagcggccagacgatatacaggatattaacgatgaccctccaaatcctgatcaaccaatctcagaacctcgtatggcaccgaaaccaaagccatgggaaaagcaaggtcaagggagtttggcctgtgatttgaaatcgccgccaagggaatccgacgtgctgaggtcagaagttcagcacgatggcaccaacaaggctacggagtccgccgatggcgccaaccaaacgcactcattgctgcaggtaggcgtagctgctggatctgaatctcctgcggttccagatgacgccgcttcttcgcttgagtaaccaccgcgaaaataaatgaatgacgccgtaatcagacgcgaaaacaaacgacctcattaccacaacactgttctgatatttttgggtcctcagagagccacttgagttcacaataaatgtagtacccatcactggatgatcttttttagttgctggaaccatatgatatgagcattcttcac

SEQ ID NO: 5131 - DNA, 829 bp, Zea mays
  Clone ID: 700444330_FLI
ggactgggacatcgactacgagctccaggtcgggctcaccgtcgacctccccatcgtcggcaacttcaccatcccgctctccacctctggcgagttcaagctccccaccctcaaggacttgttctgatctagtagtagctcgcttgccttgtgttctgtgcgggcgcgcaccagcgatctgtacgacgagcttttgcaaataaacgacgcagctcctctgttctatatatctcagtgaatgcctaagctaaggggatggatggtttaataaataaagagctggatttcattcaggttcctgtctctaagctggatttcattcgggcatccaccgtgatctggatgtgcctgccgcgtccgtccacaagcccacctttaatttgcccctaaagataaggtgaggtagatgacaaagaaaactaagggtgtgtttggcatggctctgctccaccccagagcagctctactctaaaactctgggtggagcagctctgctccagagtttagattgtttctcataaccagtggcaatggcgggtaaataactcaaaactccatgactaggttgcttttttggagttttcagagcagcaaaagaggtactccaaaaaattgtactgcagctccaaaaactccatagagtttacaactctggagttagggtgtttggcatgctttggccagctcctccttggagttttgctctggagccatgccaaacaggccctaatactccttccgtttctttttagttgtcgctggatagtttaactttacactatacggagggtgtaataaccttacattatagccatcatatatgcccatt

SEQ ID NO: 5132 - DNA, 1677 bp, Zea mays
  Clone ID: 700444335_FLI
gtcgtcttgtgtcactcatggactctcctctaatggagcccctactagtgcccaacaaccacagtcccggtccggttgtcgccgccacgccgggagaacacggcggtgctgcggtcgacgagagcagcaccctcgtggatgctgccagtggcacggatgagagccacagggcactcgccgacgccgacgtgaagatgaacgacgatggcgacgtacaaggggacgagctgtccgcgtccgtgcagcgccggctggacgagagcagcgccgtggagggggaggatgaagaggaggagattggtgacgacgcggaggccgacgacatggcggcgcgcatgggacggcgcctggcggcgctgcccgggaatgcgcatgagagcgagccgttcaccatcttccgcgtggcggggcccatgcgcgaccgcaaccggcacctctacgagccgcagatgatctccatcgggcccttccaccgtggcgccggccggcacctcgccgccatggaggagcacaagtggcggtacctccgcgacattctggcccgccccggcggcgcgacgctggcctcgtacgcccgcgccgcgcgctcgatggaggcctccgcgcgccgccggtacgcggagcccgtgctgctgcccgcggccgagttcgccgagatgctcctcctggacggctgcttcctggtggagttcttcctcaaggggcaggagagcgcggaggacgcgctcatcgacgcctcgtgggcgatgcagaacgtgtacaacgacatgctgctgctcgagaaccagctccccttcttcgtgctcgagcgcttctacgacctggccacgggcgggctcggccgggactacttcgtcaccaacgtcctcgtcaactacctcaccgtggacatgtgcgtcggcccgcgggaccccgagagcacgcggccccccgacggtgagatccaccacctgctgcacctctactactactggttcctgccaccggaggaccgggacgggagcggcacgggcagcaaggacaaggaagacggcgaggcgctcgaggaactgatgtccacgtctgcggatgagcgcatgccgtggcagctgccgccggcgtcggagctgaaggactccggggtgacgttccgcgccaagaagtcgccgcggagcatggtggacgtgaccttcgaccgccgcagcggcgcgctggagatcccggccgtggagagctacacgaaccacgccatcttcgcgaacctgctggcgtacgagcagagccggggccggtgggagctgcagcgcctggtgagctacgtgctgctgatggcgtccgtggtggacgcgcggcgcgacgtggaggtcctgcagcgggccggcgtgttcgtgcgcggggacgaggagacggcggcgttctacgcgcacctgggcgagctgtgcccgccgcccgagttcgtcaacaactgctacgccgacctgttccgcgacgtcctggagtactgtgggcgcagctggaacaggcaccgcgccgtgctggtgcacgactacttcagcaacccgtggaccagcatgtccgccgccgccgccgtcttcctgcttgtcctcaccgtcgtgcagacggtctacaccgtgctgccatactacagccagaattaaccgggcaaaaaacaaaaaaggcgttttgccgccgtcacac

SEQ ID NO: 5133 - DNA, 1819 bp, Zea mays
  Clone ID: 700444341_FLI
ctctcccccacccgtcgtctccttgtcatccttgcctgcggattggggcggcacggcagtcggcacagcctctcgcttctcccgcgcgcgagccctttctccacggccgcggcatgacgttgccggaggtgaatgccggtgcgacggcgcagaggaagaagaactcaccagagatggagttcttcagcgagtacggcgatgccaacaggtacaagatccaggagatcattggcaaagggagctacggggtcgtctgttcggctattgaccaacatacgggcgagaaggtagccatcaagaagatacagaacatcttcgagcacctgtcggacgctgccaggatcctccgtgagatcaagcttctccggctgctgaggcaccccgatatcgtcgagatcaaacacgttatgctgcctccgtcgaggagggactacagagatatttacgttgtgtttgagctgatggataccgaccttcaccaagttattaaggctaacgatgacttgacgaaggaacaccaccagttctttctctatcagatgctgcgtgcattgaaatatattcatactgctaatgtttatcatcgtgatttaaagccaaaaaatatattagcaaatgctaactgcaaactcaagatatgtgattttgggctagcaagggtcgcatttaatgactctcataccacagttttctggacggactatgttgctactagatggtacagggctcctgagctgtgtggatctttctttagtaagtattcaccggctatcgatatgtggagcatcggttgcatttttgcggagattttgactgggaagcctttattccctggtaaaaatgtggttcaccagctggatttgatgactgatctcctgggtacaccatcagcagatactatttcacagattcggaatgagaaagcaaggaggtatctaagcagcatgaggaggaaacagccaatacccttctcagagaagttccccaatgcagatcattcggcgctcaagctcttacaaaggcttcttgcatttgatcctaaggatcgaccaacggccgaagaggcattggctgatccctacttcaaaggcattgcaaaagtagagagggaaccatcctgtcagccaatttcgaaaatggaatttgagtttgaacagaagtttaccaaagaggatgtcaaagaacttatattccaggagatactgcagtaccatcctcaacttctgaaggattacaagaacggctctgaaaagacgagttttctatatcccagcgccgttgacaggttccgtaggcaatttgctagcttagaagaaaatggagagaggaatgccgcgcttgacaggaaacatgtttctctcccaaggacaacaaccgttcactccactccaattcctgcaaaggaaggtccagcagcaacctcccaggttgctcaaagggttccagcagctagaccaggaagagtggtaggcccagtattgccattcgagagcgcaagcgtcaccgaccaacacatcgcgcgacgggtggcaaggaacccagctgttcctccagcaacgaacacctcgtcagtctactgctaccacctcaagtcggacagctccgacaggcaggagcatcatctagagcgtgagaaagatcgaaggcagtataggccagggcagcatttcatggatgccaaggtagcccctgagatgggccgggatatacgcccgtcacagtactatgtctcaaggggcttgcccaaagctgatctgacagacagggccaccctccataggagcgctcttcatggcgttgctcccttcaatggcatcgc

SEQ ID NO: 5134 - DNA, 1515 bp, Zea mays
  Clone ID: 700444344_FLI
gtccaaagccccaactcaaatttacatccaggccattcgccggagatggcgtcggagctgacgtaccgcggcggcagcgtggcgccaggctccgcctccaacggtggggaatactccccgaagtcctccaagccgctctcctggctcgcccgcgccgcgcgctacgccgccgccgagcaccgccccgtcttcgccctcgccggcatgctcttcgctgccgctatcttcaccttctcttccccctccactttatctccgtccgaacccgccgcgtcggtcggcttcaaccaccttgccgtcagcgggcacccgtccttccgcgagtccgtcggcgggaaggttcccctggggctgcgtcggcgcgcgctgcgggtgctcgtgacgggcggcgccgggttcgtggggagccacctggtggaccggctgttggagcgcggcgacagcgtgattgtggtggataacttcttcacggggcgcaagggcaacgtggcgcaccatctccagaaccccaggttcgaggtgatccgccacgacgtcgtcgagcccatactgctcgaggtcgaccagatctaccaccttgcctgtccagccagccccgtgcactacaagtacaaccccatcaagaccatcaagacaaatgttgttgggacactgaacatgcttggattggccaagaggattggggcaaggttcctacttacaagcaccagtgaggtttatggtgatcccctccagcaccctcaggtggaaacctattggggcaatgtcaaccctataggtgtcaggagctgctatgatgagggaaagcgtacagctgaaacattaaccatggactaccatcgtggtgccaaccttgaggtaaggattgcccggatctttaacacatatggtcctcgcatgtgcattgatgacggccgtgttgtcagtaatttcgttgctcaggcgctgaggaaggagcctttgacagtctatggtgatggcaagcagactaggagctttcaatatgtctcagatttggtggaagggctgatgaagctcatggaaggggagcacattgggccgttcaacctcggcaaccctggagaattcagcatgctggagctggctaaggtggtccaggacaccatcgacccagaggcgcacatcgagttccgtccgaacaccgcagatgatccgcacaagcgcaagcctgacatcagccgcgcgaaagagctcctcggctgggagcccaaggttcccctccgtgagggccttccccgcatggtcactgacttccgcaaacgtatcttcggggaccaggaagggtccaccgagtcagctggtggcctttcttaagtgctcaaaacttgttgaagtgacacgtttgtatggtatatgacttgatacagttttggcgctgtgctctatacgtagttgttatatagggatataaatgtttgttaaagtacggaaaatagcctggcacgctatactatgtaacgacgtaccattttgtaatgtcattgttaacgggtt

SEQ ID NO: 5135 - DNA, 667 bp, Zea mays
  Clone ID: 700444401_FLI
cgcggctcaacttccccgacaacgcggagtccagggcgccgctcgaccccgccgtggacgccaagctgcaggccatctgcgccaccatcgccgccgcgtcgtcgtcatccaagaattccaaggccaagagcaaggcgatgccaatcaacgcgtccgttctggaagcggcagcggcgtctccgagcaacagctcctccgacgaaggttccggctccgggttcgggtcggacgacgagatgtcctcgtcctccccgacgccggtggtggcgccgccggtggcggacatgggacagctggatttcagcgaggttccgtgggacgaggacgagagcttcgtgctccgcaagtacccgtcctacgagatcgactgggacgcgctgctctccaactagtcgcccttcgccgacagatgtgctgttgtagttcagtagtggcagtatctctggccgccgcagatgaggttttaggcaatctgcaggccgccggcccatgtgtattaagtaggttttgctcagttgttggccccggacttcgccggcgtttttgtgaccggcgtccccgagtgcactgcattggtgtactggtctgtctgtaaaaaaaaatggatctgtgtacttctatagtgtgtattcaaccattgttcttagttgtgatgttactcgtgctg

SEQ ID NO: 5136 - DNA, 564 bp, Zea mays
  Clone ID: 700444480_FLI
ctttattgatgccacaaggtctggaaatgtttcccgttatattagtcacagttgttccccgaatctcagtacccggttggttttggtagagagcaaagattgccagcttgctcacattggattgtttgctaatcaagatattgccgtaggagaagaactcgcctatgattaccgacaaaagcttgtagcaggcgatggctgcccatgccattgtggaactaccaattgccgaggccgtgtctattgattttgcaggaatacactaactgttcaatgctcggttgcagaactccagagatttcaacagttgtgtaggcttgctgagcgatttagcattgcaattttcctacagcttgagtgcagggctaggatctcattgttaatgctacaaatagtgattgtgatataggactcaggcaagcattaggcaataacatagtgtcgattttagtcatggtaccatcatgtttaactgattatttgttagaagcagcctgaaatgaaactgattcaggctgctctgttcgtaggcgagaattctctctgtaaaattccttcattcat

SEQ ID NO: 5137 - DNA, 1415 bp, Zea mays
  Clone ID: 700444481_FLI
gtgagcgtgaaaagcccggctccgaaacggagcaatattagcacgaaatgctgccagttcccagggtgtgagaagggagcgagaggagcctctggttactgtatcgcccatggcggcggcaggcggtgccagaaacctggctgccagaagggagccgaggggaggaccatctactgcaaagcccacggtggcggcaggcggtgccagtacctgggatgcacgaagagcgccgaaggccgcaccgaccactgcatagcccacggcggcgggcggcgctgcagccaggacggctgctcgcgcgccgcgcgcgggaggtccggcctgtgcatcaagcacggcggcggcaagcggtgccagagggagagctgcaggaggagcgcggaggggcactcgggcctctgcatctcgcacggcggcgggaggcggtgccagttcccggagtgcgccaagggcgcccaggggagcacggggctgtgcaaggcgcacggcggcgggaagcgctgcacgttcccgggctgcaccaggggagccgaaggcagcacctggctctgcaaggcgcacggcggagggaagcgctgcgcccaccagggcggcggcggcgcgtgccccaagagcgtccacggcgggacgcggtactgcgtcgcgcacggcggcgggaagcggtgcctggtcgcgggctgtaccaggagcgcgcgagggcggacggagcactgcgtccgccacggcggcggcaggcggtgcagggccgagggctgcgccaagagcgcgcaggggagcaccgacttctgcaaggctcatggcggagggaaacgctgcgtgtggggccaggagggctcgagcctcggggccggcgggccgccgtgcgacaggttcgcgcggagcagggtcggtctgtgtgcgggtcacggcgctctggtcgaggaccgctgcgtccacggtggcggctcgttgggccctgcccctgctatcgggcagctgacaacctattgtgagcctgctgctgctgctgctgcaacgaggggcgatgctgatatggcggacggagacgaggaagcgttcctgacgctgggatggaacggcgacggtgagtctgctggcggcacggccccggccccggccccggccccgttcatggagggcagggtccatggcagcgggttgcttgctctgctcagctgctctggtaatggcggcgcctcggcggcttcgtcgtctggcatgcgcacctggatgtgatgttgtaggtttgagtagtgacagtgtcttgtcgcaatgcctgaatccggcggcataaacggctgcccccgtgtagcagaaataataaggggtagccagcagggtcatagtgtgttattgctatcgttggtctgactgactgtgtgtattgcccgtgattgattgaaagtctgtcttat

SEQ ID NO: 5138 - DNA, 859 bp, Zea mays
  Clone ID: 700444534_FLI
gcgcgcgcatgcattcactcgttcgtcagtacgttgatagacccggggtggcattctgcaccagcctgaccggtggcagcagttccatcacgaacgccgtcgacatccaccaggcacccagcggcgccacgcgagtgatggcggcgaacaacgactgcgtcgtcaggacgttcgacgccgagagatacagccttctcacgcagctcaccttcccgtggtccgtcaacagcacgtcggtgagccccgacggcaagctgctggcggtcctgggcgacagcacggagtgcgtggtcgccgacccgcagtcgggcaaggcgctggcgacgctgcgcgggcacctggactactccttcgcgtcggcgtggcaccccgacagccgcgtcctggcgacggggaaccaggacgcgacgtgccggctgtgggacgcgcgcagcctgtcggagccgttcgccgtgctcggggcccggatcggcgccgtccggggcctccgcttctcccccgacggcaggttcctggccgcggccgaggccgccgacttcgtgcacgtgtacgacgccgcggccgggtacgccggcgccgcgcaggaggtggacgtgttcggggaggtcgccggcgccgcgttcagccccgacggcgaggcgctgttcgtgagcgtcgccgaccgtacctacggcggcctgctcgagttccggcgccggcgggcggaccgctacctcgacgcgtgtttcttctgagggagaggcgcgcgcgcgcgccgtcagttgtgtactgtgcatgtgcctgccggcggccggcacgtatacatacttgtgtggtgtgttgtgtagtgtaaaacgcagagttttggtgcgtatcggac

SEQ ID NO: 5139 - DNA, 1045 bp, Zea mays
  Clone ID: 700444542_FLI
gtggttacaatcaaaatcttcatctggccttatttcagcaaaggaggacaaatataagaaggaagttgtattgcttgctatcaatcacaagcatccagactacatggcctttagaccggaaaagagggtacaggagcttgttgaacacgaaaaggatgttgctgaaagtagtgtcactaagcaattggaggttgcagagatttataagccaagttctcatgttaaacccatatttgtggctgtcgaagctgacatggagaagtattacagtgcaccagaggcttcagatatagtcttcaggtacgttgaaaaggaaaaattggttaaacctacagacagggccaaggtgattcttgatgttacattatgtgatgcattgtacaaaggggctatcaaaaagggctcggcatacccaactgaaatccacaagaaagacttaggttcagcattcttaaaccgcatgcaagttcaccacaaggtatcgagaggaactcaggaggtcatacgcaagggtgccataagaactatccagatcatgacagaaagaagacagggcaacaagaagatgactcggctttctgggctcgagtgtttcctgatggatcctgattcattggcttctgagctccagaaaaaatttgcttgcagcaccaccacagcagagcttccaggtaagaaagggcagtacgaggtcttggtacaaggtggagtgattgatgaccttgctaaacaccttgtcgaccattacgatgttcctaaaagatacatcgaggtttatgacaaaacaaagaggtaggaagtgggggctgatcatgtccgtttaggtgttggagcgcttggatggtctacgaaatgatcccaggattgtttcatgatactttttgtcatcacatgtctgagcaatattacgacattgttgatctacgagtaccttacgatatttgttttcgttcctgcctttggttgatggaaaatgctattgtgcttactgaagaaatatggttacaggatggataatgaggtttcctcatgcttttggtgctgc

SEQ ID NO: 5140 - DNA, 1002 bp, Zea mays
  Clone ID: 700444672_FLI
aacggcgccggcggcgagacgctcgacgacgacggcaagaagaagcgcacgggaacggtatggacggcaagcgcgcacatcatcacagccgtcatcggctccggcgtgctctccctcgcctggtcgactgcacagctgggctgggtcgtggggccgctcaccctgatgatctttgccttgatcacgtactacacctctagccttcttgctgactgctaccgcagcggcgatcagctcaccggcaagaggaactacacctacatggacgctgtcgccgcgtacctgggtcgatggcaagtcctgtcctgtggtgttttccagtatgttaacttggttggaactgccgttgggtatacaattacagcgtccatcagtgcagcggccgtgcacaaggcaaactgcttccacaacaagggccacgcggccgactgcagcacctacgacaccatgtacatggtcgtatttgggatcgttcagatcttcttctctcagctccctaacttcagcgacctttcgtggctgtccatcgtcgccgccatcatgtcgttctcttactctagcatcgccgtcggcctctcgttggcgcggaccatttcaggccgtagtggtacgaccactctgaccggcactgagatcggagtcgacgttgattcagcccagaaggtctggctcgcgcttcaagctcttggcaacatcgcgttcgcttactcctactccatgattctcatcgaaatccaagacacggtgaagtctcctccagccgagaacaagacgatgaagaaggcgaccctgatgggcgtgacgaccaccacggcgttctacatgcttgctggctgcctcgggtactcggcgttcgggaacgcggcgccagggaacatcctgaccgggttcggcttctacgagccctactggctgatcgacttcgccaacgtctgcatcgtggtgcacctggtgggcgcgtaccaggtcttctcccagcccatcttcgcggccttggagacg

SEQ ID NO: 5141 - DNA, 631 bp, Zea mays
  Clone ID: 700444748_FLI
cgcttccgctccgtcgctcgcctcacgcctccggcgccacctccaccatggccccgaagaaggagaaggccccgccgccatcgtccaagccggccaagtccggaggcgggaagcagaagaagaagaagtggagcaagggtaagcagaaggagaaggtcaacaacgctgtgctcttcgaccaggccacctacgataagctgctctccgaggtgcccaagtacaagcagatcaccccatccatcctatctgagcgcctcagggttaatggatccttggcacggagggccatcaaggatctgatggcaaaggggctcataaggatggtctctgttcattctagccagcagatatacaccagggcaaccaacacatgatgggtgttttgcgtcttgtggacgttatctagtctagacgacttgatgttgctattatatcaagtttaatttaatcgtggctcgatcaatcttactgtcgtgttgaatgtcgaatatttttgagattattgtactattttaatatcatgttttttataacatttaagaccatgttgccatccaaattttaatcttggtgaggaatatcaaccaatctctgctctgcaattacaattgctgaagttgttgcgtgtgtt

SEQ ID NO: 5142 - DNA, 464 bp, Zea mays
  Clone ID: 700444750_FLI
ctctggtgttcgctgggcgaagacccggagacgcagagatcgtctacgccgcaactgccaaggcagagaaggagctcaaatggaaggccaagtacgggatcgaggagatgtgcagagatctgtggaactgggcgagcaagaacccgtacgggtacgctgggtcacgcgacaacagcaaatgaaccacccatccatgcatcccatcctgcagtaggagcaagcagcagccttatagcctatatgctaccataattagtaactcatcaatcatgcatacataatcagtcagtcatctgattaggaggtactgcgatgggcctcgcttcttcagtgtatagagggaggaggagggggtcatcttgatattctttttttatcattcccgaatgattattattagtagccagttcgatattactccatggttggttgctagagaaggaataagctccattcatatacct

SEQ ID NO: 5143 - DNA, 443 bp, Zea mays
  Clone ID: 700444764_FLI
atgagaagctgaaggtcctgttcgcggggcgggagcgagtgggattccttgagatcgccaagcttctcaaccctcacttcgtgaagtgatgaggaggagccaggccacttccaggaatcgagttagcttatatggttggttggttacttgtggctggcctagagggtgcgcgtgcgttgggttttggtagcctgagttggctcgctcgactttgtagaatgctgttgttagcttttattagtagccttcagctcgtagcctggtatgcagttagcgtgtgtgttctgctatggtttaagtttaaccactgtccatagtcagtcaatgttagcttccttgtccttgcaatggatgttgctgtgtgaattatggtccaacatggattggttgctctgctatggtttagtcactgcccagtcagtctatatatattttttgatggt

SEQ ID NO: 5144 - DNA, 835 bp, Zea mays
  Clone ID: 700444772_FLI
gcgccgttgacaggttccgtaggcaatttgctagcttagaagaaaatggagagaggaatgccgcgcttgacaggaaacatgtttctctcccaaggtaacatataccttcttttccttccaagtcattttttcggttgttgagattgataaatcagggtaatccattagctactcaataggatttatcaactagatataggatgatgatctgatgacgtgttggcctagggtgtcacagaaaatttgctcaaacttgactgctgaccttgatttgctgcttgcaggacaacaaccgttcactccactccaattcctgcaaaggaaggtccagcagcaacctcccaggttgctcaaaggattccagcaggtaactggtcacatttcctaatctgtggctacccatcagtctattttttcagtcactcctgagttttcctgacatgcttcatctctccaatcttgcagctagaccaggaagagtggtaggcccagtattgccattcgagagcgcaagcgtcaccgatcaacacatcgctcgacgggtggcaaggaacccagctgttcctccagcaacgaacacctcgtcagtctactgctaccacctcaagtcggacagctccgacaggcaggagcatcatctagagcgtgagaaagatcgaaggcagtataggccagggcagcatttcatggatgccaaggtagcccctgagatgggccgggatatacgcccgtcacagtactatgtctcaaggggcttgcccaaagctgatctaacagacagggccaccctccataggagcgctcttcatggcgttgctcccttcaatggcatcgc

SEQ ID NO: 5145 - DNA, 1367 bp, Zea mays
  Clone ID: 700444833_FLI
gccaactccggcttcgcggactccaacccgatccgccctgtcaccgaccgcgcggcctccgcgctcgagtccacggtcttcgccgcgctcggccgcacccgcgacgcgcttcgcttcgcacgcttcgccgtcaggtacggcaagagctacgagagcgcggcggaggtccataagcggttcaggatcttctccgagagcctccagctggtccgctccaccaaccgcaaaggcctctcctaccgcctcggcatcaaccgcttcgcggacatgagctgggaggagttccgtgcgacccggctcggcgcagcccagaactgctccgccacgcttaccggcaaccaccggatgcgcgccgccgccgttgcgctgccggagacgaaagactggagggaggatgggattgtgagcccagtgaaaaaccagggccactgtggatcatgctggaccttcagcactactggtgcacttgaggctgcatatacccaggcaactggcaagcccatctctctctctgagcaacagcttgttgactgtggttttgcattcaacaatttcggatgcaacggaggccttccatcccaggcctttgaatacatcaaatacaatggtggccttgacactgaggaatcttacccttaccaaggtgtcaatggaatctgcaagtttaagaatgagaatgttggagtcaaggttttggactcggttaacatcaccctgggtgctgaggatgaactgaaggatgctgttggtctggttcgcccagttagcgttgccttcgaggtgatcactggtttcaggctgtacaagagcggagtttacactagcgaccattgtggaactacaccgatggatgtgaaccacgctgttctggctgttggctacggtgtcgaagatggtgtcccctactggctcatcaagaactcatggggcgctgactggggcgatgagggttacttcaagatggaaatgggcaagaacatgtgcggtgttgctacgtgtgcatcctaccctattgtcgcatgaggcccttacgaagtgttacatggtctgtttggcatcaataatgcatgtttaacctgagcttggcgatgggttatacagaacggaaactctgtttgtgaatagaaaatcatgaagggaaggagttgaccggacccctgcttgtacgtctccccgactgtgtaggtagattgtcagttggggttccgaagtactctactcatacgtgtgtatgacagtttatttatgaaacaaaatacgcattgatcgttatggtgcagcctgggatttcttattatagcataatgtatcgtatgtataaacggaccgtcctcagcacggacctaatataagcacgacctgttggc

SEQ ID NO: 5146 - DNA, 1387 bp, Zea mays
  Clone ID: 700444904_FLI
gtcgcttccgccgacacctgagtcttgtcgctgccgccgggatggccggagtcaccgccaccgggatggccggagttcccgccaccttctcctcagccaccgctcagatcgggggcttcctctcgaagaagccttacgcgccgccgttgtgggccacgcacctctcccccatgccttgccataccttctcgctcggccatttcccaacaccgattcacaagtggaatctgcccaatttgccggaaggaacggaagtgtggatcaagcgagacgatttatcaggcatgcagttgagtggaaacaaggtccggaagctggagttcttgatggcagatgccgtagcacaaggcgcagactgcgttattactgttgggggtatacagagtaaccactgccgtgccacagccgtggctgctaagtatctcaatcttgattgctacctgatactacgtacctccaagcttcttgtggataaggaccctggtttggttggcaatcttcttgtcgagagactagttggggcacacgttgatcttgtgtcaaaagaagaatatggaaaaattggtagtgtggctttagctgacctgctgaaaaaaaggcttctggaagaagggaggaagccgtatgtgattcctgttggtggatcaaactcattgggaacttggggatatattgaggcaataagggagattgagcagcaaattcagcaatcttctgatgttcagtttgatgatattgttgttgcatgtggcagtggtggaaccattgctggccttgctttaggatccagattgagcagcttaaatacaaaagttcatgcattctctgtttgtgatgaccctgaatacttctatgactatgtccaaggcctgattgatggacttaattctggtttcgattcacatgatatagttagcatggaaaatgctaaggggttaggctatgccatgaacacagctgaggagcttaagtttgtcaaagacatagctgcatcaacaggcattgtccttgatccagtctacagtgggaaggcggtttatggtttgctaaaagacatggctggcaatccagccaaatggaaaggtcgaaaagttctgtttatccacacaggtggtcttcttgggttgtatgataaggctgaccagttgtcatctttggctgggagctggcgcagaatggatcttgaagattctgttccacgcaaagatggcactggtaagatgttctgatcagtacggtccatgtgattccatgatggctcattcttgcaaacattgtatccattacagagttattactcttaaatttgtgcaagaaaatgcagaatagatggttcacattgtatagaacactgatgcaatttaagaataaagcacatctttctgcc

SEQ ID NO: 5147 - DNA, 583 bp, Zea mays
  Clone ID: 700444921_FLI
gtcttagcgggtgtatttggcacagcagcaacaggatacatcttgcagcatggttcttgggacaacgtattcgagttatcagtagtgctttatctggtagggactttggtatggaatgtattctcaactggcgagaagattcttgattgaagggtgtatgtacacagtgtgcttacagttcgtagtgacaaactcatttcggatcgacaacttgacccctggacataatacacttcaagataacaaatgtgtcatcgcgcagcacgagaagtatcaacctctacatcccggatattaaattgcctggttgtgatgttgctctggtagagacgatttgaagcatatggaattatggatgagttgagcgatgcacccgttccgagcatgccactgtatattgtgttgagcataggtatcatgtacagcatggtagaaagattcgtcatacagagtagttttttttttacttgtacaatttttccctcttgaatagtttgttcctgtaacagcccgacgtagataaaaacaaggaaacctggggatgggggtactactaatgcaaacatttggtgaatatttatcc

SEQ ID NO: 5148 - DNA, 853 bp, Zea mays
  Clone ID: 700444935_FLI
aacggagtgagtagcgatagtgacgcagtcgtcttgccgccgccgtcccaaacgtccgcgcggtcgtcctcgatcttcccgtaccatcccgacgcgatggccgccggcgcgaagcccgataccgccgcgcccccgcaagcgccttcggcggcgaagggggtcttcatgcgccgcatcttccccttcctcctcgcgacgaacgtcttcatcggagtttatgtatttgccaagacctacaaaagagaccaggaaaagaaaaatgctcagactactgccgctgcagcattgtcatccccagcaagtacatctgccaaggctccagatcctgctcctgcacctgcgcccgaatcggttctcccacctctatccgaagatgagcagtggaatctgtacaaatggattctggaagaggagcggaagatcaaaccacgcaacgccactgagaagaagaagatcgacgaggagaaagctcttctcaaggagataattcgggacaaatctctccctcgtttgtgatggttacatcggctgtccttctgatcttgattttttttcttctctctccacctgcagtccattgaggacaacatctgaaactatgtgccctgttagttagcaaaaccgttagcatttctttgcactatcacatctcttcatttgacaataagaaggtcgagttgttttgctctgatgagaacttattgtgttcggggatgcttgggagatgttttggaagaagcttattgccttgtgaaacgttctaattgacctgctgataatgggcccagctagctatgctctgctattcttatgtaagatgtgaattgagctattcaactgctagtgtttttac

SEQ ID NO: 5149 - DNA, 529 bp, Zea mays
  Clone ID: 700445036_FLI
aaaaagaccaacaggggtctcatgaaaatggaccggttgtagctagtatataaatggtggagtcaaccatagtcgaaatgaaaagactcagaacttatcctcagaaaaggaagcagctgacgatcactcacctgatgtccacaaattaacggaccgagagaatggcaatgacgcggtatagagtggatgttagcgatctactgctctctgaagatcagtgagtgtcgtatctgcttcatcgacgtatagctgggagatagtgaccaacagtttcacgaacagctactacaggagagttgagaatcaacacgaagaagatgcaaacaggaggcaaaattgtgcaaaccacggtctaggtctaggctcatttatttatttttgtggctgtactttagagagagagagagagtagtggtagatgaaagatttgagatctcaaaggatttatgttgttcagctgggatgggatgtacaaggtggctgtaataaatgtacacctgattttgaccgtgcaattcgatattttacc

SEQ ID NO: 5150 - DNA, 1465 bp, Zea mays
  Clone ID: 700445047_FLI
ctgtgatcaacgattgattaaattaaaagagctttatgatggtgaacaacctctgagtgcagagttgggtgaagagcttggaaagactcagccactcagatggcaaagacagaatagaagatgggaacaggtcgatggtacaaaggtttagatctcaactgacccatcagatggatgccttgcataaaaccgtatcaagttctgttgcagttctatcatgcaacagaaggaccaccttaatgaaatgaaacatgaaagtggttagagccgaaggtcttgttgaaagacagaatagaagatgggaacaggtcgatggtacaaaggtttagatctcaactgacccatctcaaacggagaggaatttcgaattgtggcaggtgctgcctccacctggtaacggtgggctgaaatactatggttgtgagcagtaaattcgaccaaatcatctgctccacagaagccatcagcgcctcgaccggacagtgacataggtgatccacagatacttcatgtacacagcaaaagatttggaagagtggtcagaaaatcatgattcctttcgccacgagcagaatttggttcagtggactgagaaaaaacggccatatgttgaagcccttttcatcgtggttgtaaccaatggtgtcggtaaggattttgtcatcaacaatgagtcgtactggaagacgggatctcgctgacggaggtaggagggctgctgcaggagtgggatggcagggaagagccagctggacagcatgccctggaggacagcctcgcatccgaggatctggggagcatgctggagtccatcaaagtggagagggccaaatattcactgatgtgctttcagttccctgttggacgtatccaccgtcagctgaagcaaaggactcaggcaaatggtcgtgttggtgccaccgcagccgtctactcagctgccatcctagagtacttgactaccgaggttctggagctggctgggaatgctagcaaggatctgaaggtgaagcgtatcacccctcgccatttgcagctagctattcatggagacgaggagctggacactctcaccaagggcaccatcgcaggcggaggtgtcataccgcacattcacaagtccctgatcaacaagtcatccaaggagtgaagattaggggatgtgcatctttagtttaaactggacttctgtgcgctcctgagcgagtccttgttgtaccgtaggttttagttgagctgttaggttggagctcctttgtgtaacgcttgcctggtagtgcttcattagttatttggttattgtgtttgtgttgagttgttaacttcaggggtgcaaacctggttgcttatttagttatgtgactactgctattcagtttatttttaaattttttgtagctgcaattatacttataatatgttgttgatagccctgtggggtgctgggggctcagatttatcatct

SEQ ID NO: 5151 - DNA, 1313 bp, Zea mays
  Clone ID: 700445103_FLI
ctcgattatgatggaactctggttccccaaacttccctcaacaaggaacctagtccacaggttttgagcatcatcaataccctttgctcagatagtagaaacatcgtttttcttgtcagtggtcgagacaaagataccttgggaaagtggttctcctcatgtccaagattggggattgcagctgaacatggttacttcttgaggtggtctagagaagaagagtggcaaacatgcactcaggcattggacttcggatggatgcaaatggcgaagccagtgatgaatttatatacagaagcaactgatggatcctacattgaggccaaggaaagtgccttggtgtggcaccatcaggatgctgacctaggctttggatcctcacaggcaaaggagatgcttgatcacctggaaagtgtactagcaaatgaaccagtctctgtcaagagtggccagttcattgttgaagtcaaaccacagggaataagcaagggaatagttgccgagaggatacttgcatcagtgaaggagagaggaaagcaggctgatttcttattgtgcatcggcgatgataggtctgatgaggacatgtttgaaaatattgctgatatcattgggaggaatttggttgctccaagaacagcactgtttgcgtgcactgtgggacaaaaaccaagcaaagccaaattctacctggatgatacattcgaagtggtcactatgctgagcgcactggcagatgccacaggtcctgaactggagactgattcggctgatgaatctgtcgcatatatctcatcacttgatattggtgacgaacaatcagaatccagtgataaaccagttgaagggtcttagccagttttctcttgcgttttcagaacatgatgattgtttcaatagtcaattctattctacacaattttctgatgggaactcaacgactaacaactggttctacgaatgctccagagtgaagcttctcaatctgctgtgctccaagttctccagttgggcaagatagtacagtctgttgctccaaggcgtagatccatatgttcatagctgacttacttggcacgttctttcactttctcattcctggttgaattaaaatgaaaacctcacagaagacaaagggagcgctgtttggctcattggctgaagtaatctggggggaggtataggagtggcgtatgtgaaaggagcctgtgcgcaggttgtgatatgattccttattaacacgacgttacaaagtggtgtcacttcttgaactaccagtagtaacaatcccaagagtgaggttcgaattgatt

SEQ ID NO: 5152 - DNA, 1497 bp, Zea mays
  Clone ID: 700445105_FLI
cggcaatctcgatctcgttcgttcccctgagcggcagtcagtgcgagcgagcgcgcacacagacaactcatcctctcccctctctctctcacacacacacatccatcatcccatccctgtgacgggcgatccgagggcctaccgacgatggtgtccgccgtgctccggaccatcctcgtgacgggcggcgccgggtacatcggcagccacacggtgctgcagctgctgcagcagggcttccgcgtcgtcgtcgtcgacaacctcgacaacgcctccgaggccgccctcgcccgcgtcgccgagctcgccgggcacgacggcgccaacctcgtcttccacaaggttgaccttcgcgacaggcacgcgttggtggacatcttctcgtcgcacaggttcgaggctgtcattcactttgctgggctcaaggctgttggggagagcgtgcacaagcccctactttactacgacaacaacctggtcggcaccatcaccctcctggaggtgatggctgcgaacggctgcaagaagctggtgttctcgtcatctgcaactgtctatgggtggcccaaggaagtaccctgcaccgaagaattcccgctctgcgccaccaatccctatgggcggacaaagcttgtgattgaagacatctgccgcgacgtccaccgctccgaccccgactggaagatcatactgctcaggtacttcaaccccgttggcgctcatccaagcgggtacatcggcgaagacccctgcggtgtcccgaacaacctgatgccctacgtgcagcaagtcgctgttgggaggttacctcacctcacggtctacgggacggactacagcaccaaggatgggactggggtgcgtgattacatccacgttgccgacctggctgacggccacatagcagccctgaggaagctctacgaagactccgacaaaataggctgtgaagtgtacaacttggggactggaaaggggacgtccgtgttggaaatggtggctgcattcgagaaggcttctgggaagaaaatccctctggtgttcgctgggcgaagacccggagacgcagagatcgtctacgccgcaactgccaaggcagagaaggagctcaaatggaaggccaagtacgggatcgaggagatgtgcagagatctgtggaactgggcgagcaagaacccgtacgggtacgctgggtcacgcgacaacagcaaatgaaccacccatccatgcatcccatcctgcagtaggagcaagcagcagccttatagcctatatgctaccataattagtaactcatcaatcatgcatacataatcagtcagtcatctgattaggaggtactgcgatgggcctcgcttcttcagtgtatagagggaggaggagggggtcatcttgatattctttttttatcattcccgaatgattattattagtagccagttcgatattactccatggttggttgctagagaaggaataagctccattcatatacct

SEQ ID NO: 5153 - DNA, 306 bp, Zea mays
  Clone ID: 700445114_FLI
cagaatgccaatggagaggatggcacaagagcaactttggtagttcagaagagccggacaggcggcctgatagaaaaatggggttccttcttcaagaacaacgactaaggcgaggaaagatagacgatgacacctttgacaatacgtgttccgttgtgttcatagtcatagaatcgccgttggctgatgtccagcttgattggttttacgtgtaaaatggaaaggaaacaggtgatttcaggacgttcgtgtgtatatagaaggaattgtagcgcccccattgatttataccatctctcaacttcc

SEQ ID NO: 5154 - DNA, 467 bp, Zea mays
  Clone ID: 700445118_FLI
gccggtgatgatgaacccggtctacgaggtcgcggagcgcctgctctgcggcaagcgctacgcctggtggctgcgctggatcctggtcgtgctcgtcgggctcctggcgatgctcgtgccaaacttcgcagacttcctctcgctcgtcggcagcagcgtctgcgtcgtgctcggcttcgtgctgcccgccgtgttccacctcaaggtcttcggcaccgagatcgggtgggccggcctcgtcgccgacgtggccgtcatcgtcatcgggattgcgctggcggtgtccgggacatggacgtcactcgtacagatcttcagttcttccgacctgtaagcatcgacagtctgatatgtgcaatgggagcgttcaaattggttccaatagattgagacccaattcagcgaccgggataacactgcatgcatttgtggacgtccgatcccgcaggcgatggttcaacagcaat

SEQ ID NO: 5155 - DNA, 1894 bp, Zea mays
  Clone ID: 700445122_FLI
acacaagtcgtcgtaggcagcgagcgtctctcctctcccacgcatcgcgccaaggaagagagagagatcgccgctccccttctcggcgtcggtggtgcgggtgccctccctcctcgagcgagatctgtctggtcacagatctatctgacaaaatggtgaagatctgctgcatcggtgctggctatgtcggtggcccaaccatggccgtcattgccctcaagtgcccagacattgaggtcgtcgtcgttgacatctccaagccccgcattgaggcctggaacagtgacaccctgccaatctacgagcctggtctcgatgatgttgtgaagcagtgcaggggcaggaacctcttcttcagcactgatgttgagaagcacgtcgctgaggctgacattatctttgtctcggtgaacacccccaccaagacccgtgggcttggagctggcaaggctgccgacctcacctactgggagagcgctgcccgcatgattgcggatgtctccaagtctgacaagattgttgttgagaagtccactgtccctgtcaagaccgctgaggctattgagaagatcttgacccacaacagcaagggcatcaactaccagatcctttccaacccagagttccttgcggagggcactgccattgaggacctgttcaagcctgacagagtgcttatcggtggccgggagacccctgagggcaggaaggccgtccaggctctcaaggatgtgtacgctcactgggttcccgaggacaggatcctcaccaccaacctgtggtctgctgagctctccaagctcgctgccaacgcgttcctggcacagaggatctcctctgtgaacgccatctccgccctctgcgaggccaccggcgcgaatgtgactgaggtggcttacgccgtgggcaaggacacgaggattggccccaagttcctgaacgccagtgttgggttcggtgggtcttgcttccagaaggacatcctgaacctggtgtacatctgcgagtgcaatggcctgcccgaggtggccaactactggaagcaggtgatcaagatcaacgactaccagaagagccggttcgtgaaccgcgtcgtgtcgtccatgttcaacaccgttgccggcaagaagatcgccgtcctcggcttcgccttcaagaaggacaccggcgacaccagggagaccccggccatcgatgtctgcaagggcctgctgggtgacaaggcccagatcagcatctacgacccccaggtgacggaggaccagatccagcgggacctagccatgaacaagttcgactgggaccacccgatgcacctgcagccgacgagcccgacggccgtgaagcaggtgagctgcgtgtgggacgcgtacgaggccaccaagggcgcccacgggctgtgcatcctgaccgagtgggacgagttcaagaccctggactaccagaagatcttcgacaacatgcagaagcccgccttcgtcttcgacggccgcaacatcgtcgactccgagaagctgagggagatcggcttcatcgtctactccatcggcaagccgctcgacgcctggctcaaggacatgcccgcggtcgcctaatcccacccccctcacccatggattggattccgggaaggaagaggagagaagctggttgaccgttctttattacagtttgtttttgcaggctacgctaccgattttctcttgtgtcaggcataaaaaaaggttggacgggctgctagtattccctgctgtttggtgttttcgtatcggaggacgtctgtagatgtacaattcctcaggccccttgtgttcggcttgaggaagtttccgttgtaccctggacctgctatagccggttgattcttcaattgtattcctaaaagttactacac

SEQ ID NO: 5156 - DNA, 1240 bp, Zea mays
  Clone ID: 700445127_FLI
tcctggaattgctttgaagatcttccttatagtgcttccaactatactgatgtttatgtctaaatttgaaggactgatatcgcagtcatctctggagaggcgatctgcatctaagtattacatattcttgttcttcaatgtatttttggggagcgtaattgcaggatctgctctggagcagcttaaaacttatctccatacatcagcaaacgacataccaaggatcattggtgactccatcccaatgaaggcgacttttttcataacatatgtgatggttgatggttggactggaatagctggtgaaatattgagactgaagccgcttatattcttccatctgaagaactttttcttggtcaaaaccgaaaaggacagagaagaagctatggaccctggcagtatctgctttgactcaactgaacctagaatacagttgtacttcttgcttggccttgtttatgctgcagtgacgccgttcttgcttcctttcatattggtgttctttgggttcgcatatgttgtcttccgccaccagataataaatgtctataatcagcaatatgagagcgccgcacagttctggcctagcgttcatgggcgtataatcacagcgttgattgtatcgcaactgctgctcctgggactgatgagcacgaacgactttgagcagacgacacctgtgctccttgttcttcctgtgctgacctttgggttttacaagtactgcaagaaccgctttgagccggcattcgtgaggaacccgctgcaggaggcgatgaagaaggacaccctagaacgcgcccgggagcccaacttggatctgaaggcgtacctggccaactcgtacctgcacccggtgttcaagggggacgaaggcgacgacaggtactcggtgatggacgacgatgggtggatggaggaggaggtgatcgtgccgacgaagcggcattcgaggaggacgacgcccgcgcagagcaagcatgaagggtcggactcgctctctgtgctcgagagttctctacagcggtagtcacagtaggagcttagcctgtacagaatggatgaaaatgatcacggccctgctccattgcttttgctttggttgttggttgttcatgtcacaggggacacacacacacagatagaattcaagagagctgtggggaggactgaggggagagatagtttactgtagcttggacaaagaatctgaatacagcagttacattatctgatg

SEQ ID NO: 5157 - DNA, 359 bp, Zea mays
  Clone ID: 700445150_FLI
acgggcgctacctcaagacggcggcctacggccactttggaagggacgaccctgacttcacctgggaggtggtgaagccactcaagtcggagaaaccttctgcctaaggcggcctttttttcagtaagaagcttttggtggtctgctgtgcttaatcatgcttttatatggcttctacatgttgtggttctttcttgatctgcaccgcgcttatcgtttgtgttgtactgccctaataagtggtgcttatgaggactgtttctggttttgctgcttatgttgtaatgctttgaaacaatgaaagaagctacaggccacagctattttgagaagtaatggaacctcgtgccgttttgatt

SEQ ID NO: 5158 - DNA, 689 bp, Zea mays
  Clone ID: 700445158_FLI
gggaaacaaagctggtgaagattatgatggcgatagggacttggttgactttgtcaagttcattaacgagaagagtggtaccagccgtgacacaaagggtcaactaacctcagaggctggccgtatagcaagtctggatgtcctggctaaggagttccttggtgcttccggtgacaagcgaaaggaagtcctctccagtatggaggaggaggcagataagctcagtggttctgctgcaaggcatggaaaggtctatgtaaccatcgcaaagaagattctagagaaaggcaacgagtatactgagaaggaaaccaagaggcttgatcgcatcttggagaagtccatcagcccctccaaggccgacgagtttatcatcaagaagaacgttctttcgactttctcatcctaaggcatctgctagctccattttcacgtttcagatataggcgacaaaaactgcaggattataagtgtgataatgagagttaaatggtgctagaactaattttggggctttccctcgaggatatgtaatactcgtacgtcttgcgaattagttcttttccttgtgcttctggatttattccgtagcaccatagtttattttttggtttgacatggaggacattgtgactacagaactgagttttactatccaataacactgctcacttgatggggcttatgcg

SEQ ID NO: 5159 - DNA, 1737 bp, Zea mays
  Clone ID: 700445167_FLI
cgcaagcactccacactgctgtgcagaacgagagccacaccatcagtagttagagcgaccaatagatgagttcctccccgtcctttggtctcctggctgtagcagcattactcctagcactgagcttagcacaacatggctccctcgccgcaaccgtcggccccagggtcatcgtcgtcggcgccggcatgtctgggatctcggcggcgaagaggctgtcggaggccgggataaccgacctgctgattctggaagcgacggatcacatcggcgggcggatgcacaagacgaacttcgccggcatcaacgtcgagttaggcgccaactgggtggagggcgtgaacggcggcaagatgaaccccatctggcccatcgtcaactccaccctcaagctccgcaacttccgctccgacttcgactacctcgctcagaacgtctacaaggaggacggtggcgtgtacgatgaagattacgtccagaagagaattgaactggcggacagcgtggaagagatgggggagaagctctctgccactttgcacgccagtggcagagacgacatgtctatccttgccatgcagcgcctcaacgaacaccagccgaacgggccggcgacgccggtggacatggtggtggactactacaagttcgactacgagttcgcggagccgccgcgcgtgaccagcctgcagaacaccgtgcctctcgcgaccttcagcgacttcggcgacgacgtctacttcgtcgccgaccagcggggctacgaggccgtcgtctactacctcgccggccagtacctcaagaccgacgacaggtctggaaagatcgtcgacccgcgcctgcagctcaacaaggtggtgcgagagatcaagtattccccgggtggcgtcaccgtcaagacagaggacaactcggtgtacagcgcagactacgtcatggtttctgcaagcctgggtgtcctgcaatccgatctcattcagttcaagcccaagctacctacatggaaggttagggcgatctaccaattcgacatggccgtgtacaccaagatcttcctcaagttccccaggaagttctggcctgaagggaaaggaagggagttcttcctctacgccagcagcaggagaggttactacggagtgtggcaggagttcgagaagcagtaccctgacgccaatgtcctcctggtcaccgtgaccgacgaggagtcgaggcgcatcgagcagcagtcggacgagcagaccaaggcggagatcatgcaggtgctgcggaagatgttccccggcaaggacgtcccggacgccaccgacatccttgtcccgaggtggtggtccgacaggttctacaagggcaccttctctaactggccagttggcgtcaaccgctacgaatacgaccagcttagggcaccggttgggagggtatacttcaccggtgagcacaccagcgagcactacaatggctatgtccatggagcctatctttcaggtatcgactccgctgaaattctcatcaactgcgcccagaaaaagatgtgcaaataccatgtccagggaaagtatgactaggaagctacaggaaaattgatttaaagctccagcaaattgagcagtgtggatgttgcatttctcagttcattttttcccagttttcaacaaagtatagatgacagccatatcccctcgcggcatatgccttttcattattccaataaagctagcggctggttcgatgagc

SEQ ID NO: 5160 - DNA, 781 bp, Zea mays
  Clone ID: 700445173_FLI
gcaacagcttattgactgtggttttgcattcaacaatttcggatgcaacggaggccttccatcccaggcctttgaatacatcaaatacaatggtggccttgacactgaggaatcttacccttaccaaggtgtcaatggaatctgcaagtttaagaatgagaatgttggagtcaaggttttggactcggttaacatcaccctgggtgctgaggatgaactgaaggatgctgttggtctggttcgcccagttagtgttgccttcgaggtgatcactggtttcaggctgtacaagagcggagtttacactagcgaccattgtggaactacaccgatggatgtgaaccacgctgttctggctgttggctacggtgtcgaagatggtgtaccctactggctcatcaagaactcatggggcgctgactggggtgatgagggttacttcaagatggaaatgggcaagaacatgtgcggtgttgctacgtgtgcatcctaccctattgtcgcatgaggcccttacgaagtgttacatggtctgtttggcatcaataatgcatgtttaacctgagcttggcgatgggttatacagaacggaaactctgtttgtgaatagaaaatcatgaagggaaggagttgaccggacccctgcttgtacgtctccccgactgtgtaggtagattgtcagttggggttccgaagtactctactcatacgtgtgtatgacagtttatttatgaaacaaaatacgcattgatcgttatggtgcagcctgggatttcttatt

SEQ ID NO: 5161 - DNA, 813 bp, Zea mays
  Clone ID: 700445176_FLI
gcagcagctaacatccctcactctcggtacctgacctgaccacgagagcaacatgggcggaggacacgacatgcacgggcagcactacggccacaacggcggcgtgaagggcttcgtgtccaacctcgtccacggcggcggcggccatggccatggaagcggctacggccatggccatggaaacggctacggccatgggaatggcggctacggcggcggccacgggtaccctcctcccgccgccgccggcgcgtaccctcatccgcacggcgcgtaccctcacccgcacggcggccacgggtaccctcctcccgccacctaccccgcgcactcggcgcactacgggcacacggggtcgtaccacaccagccacaacagctacggcggcggcggcggccaccacggcatctacggcggcggcaagcacggcgcgttcggcggcggcaaccgcaagagcggcggcggcaagttcaacaagtggaagtgaagcgaccgaaacgaatcaaaacaacaccctcagtctcgcttcgcacacgtgcacccgcacacgaatcctagtgctacataataaagtgcaagcaggcaggaggcgtacgtgtgcgagtgagtgctgctgctgcggcgaccgtgtgaccgtagtcgttatttgtgtgtacggaataaagtggtgagcgctgagacgtgcgtgtcagcctagtaataactaaaataatggccgtgttcacgtaacgtgctcgccgtatgtaccatcgtgtgtaccggccgtacgtatgtacaagccgagtgcaataatacagtactatgtgtattatt

SEQ ID NO: 5162 - DNA, 1421 bp, Zea mays
  Clone ID: 700445177_FLI
ggcagcggagccagcgacgccgttcctttcgttgtgcttccttgggttcttgctgccggccgccggcgatttggcgaggtccgtttgggcggcaggtagaggtaggtagaggcgatcgtttcttggcggctggtggaatggatagccacgccgctgtgtcgagttccgtcggatccggggatggcgccgcgcagcccaggaggaactccaggaagcccaagtattccaagtttacgcagcaggagcttccagcttgcaagccgattcttactccaaaatgggttatttcagtatttgttcttgttggtgtgatttttgtccctatcggtattgtttcgctgcgagcttcacatcaagttgtcgagatcgttgatcggtacgatgacgcatgtgtccctgctaatgtaactgagaagcttgcttacatccagaatgatagtataccaaaaacctgcacaagaaatctgacgattacaaaggatatgaaacaaccgatttttgtgtattatcagctggataacttttaccagaatcataggaggtatgtcaagagccgtaacgacgcacaactaagagataaaagtaaggcgagtgaaactaccaattgtgatcccgaggccaaaacagtagatggaaagccaattgtgccttgcggtcttattgcatggagcctgttcaatgatacatataccctcatccacaacaataaaaccttgagagtggacaagaaagacatctcttggaagagtgacagagaccacaagtttgggagtgatgtcttccccacgaacttccagaaaggacctcttcaaggtggaaaaatacttaatccaaaaatcccgttgagtgaacaagaggaccttattgtttggatgcggactgcagcgcttccaacattcagaaagctgtatggtaggatatatgttgatctcaaggaaaacgatacaattacagttcagttggagaacaactacaacacctatagcttcagtggcaagaagaagctggtgctttctactgcaacctggattggtggaaagaacgattttctgggccttgcatatctcactgttggtggaatctgcttcgttttggcatttgcattcaccttgctatacttgataaaaccaaggaaaatgggagataacaactacttgtcatggaacagacccactttaggtcgctgatatggttttgaagttaaatgttacacggacaacaaattcatttatggttcagatgtatcttgtaccacatcgaatttttattcatgagcattggtgtagaatacatacagagtaggcatgtgtatacgtgcgacaactttggatccatccttgcacagattgtacattaaactgaaacaaatagttttatgttctccaaaattgtataatcagaagttaatgtcagtttcgatg

SEQ ID NO: 5163 - DNA, 538 bp, Zea mays
  Clone ID: 700445211_FLI
ggatcgtcagcatcgtctgcgccgttttctcatggatagcggcggtgatcgcgttcgcgctgttcatacaaggtgcggcgtggaacgccaacgtggtgcgggtggaacaagcgccctactgcccctacctcaaggacggcgtcttcgccggcgcggccgtgctcgccctcgccgccacagcgctaagcatcacctccttcatcatgcagcggacccagccagctgcggcggcgacggtgacgggggcatcggctgtgggcacaccgaacatgccaggcgcaggcgcaggaggccagcagtcgccgtcccccgaggtagtaatgggccagccgctgtttccgtcgggcaaggcgcatcagaacgattatcccgtaaaaccccagggatacgagcacgagcagcagcctcatcaggtgcagcaggtccctcctcctaccgagtctcaccacccaccacaaggctacgcacagtccgctgctcaaggcaacgtgtcccacgcgccaaaccaccagctccctccgcgcccagcggccccagc

SEQ ID NO: 5164 - DNA, 582 bp, Zea mays
  Clone ID: 700445240_FLI
gacgacttgtttcattgattcttgaagagatcgagcttcttttgcaccacaaggtcgaggatgtcttgcaactgcggatcaagctgcggctgcggctcaagctgcaagtgcggcaagaagtaccctgacctggaggagacgagcaccgccgcgcaggccaccgtcgtcctcggcgtggccccggagaagaaggccgcgcccgagttcgtcgaggccgcggcggagtccggcgaggccgcccacggctgcagctgcggtggcaactgcaagtgcgacccctgcaactgctgatcacatcgatcgacgaccatggatatgattattatctatctagcttgtggtggtggttgaacaataataagcgaggccgagctggctgccatacataggtattgtgtggtgtgtgtgagagagagagaaacagagttcttcagtttgctatctctctctgcatgtttggcgtcagtctttgtgctcatgtacgtacgtgtgtctacctgcatgttggttgatccgattgcatctgctgtaaccatatattaattggtccacgatgatatgatttgatactatatatatact

SEQ ID NO: 5165 - DNA, 1283 bp, Zea mays
  Clone ID: 700445261_FLI
ctggggcaaagccaatctcaaatcccaggggccaaaggaggagtgggagatcgaccttgcaaagctggagatccgctatgtcatcgctcaggggacgtatggcacggtctaccggggcacctacgatggacaggacgtcgcagtgaagcttttggattggggagaagatggttttgccacagaggctgaaactgctgctttacgaacatcatttaagacggaggttgctgtttggcataagctcagccaccctaatgttacaaagtttgttggtgcatctatggggaccacagaccttaagattccatcaaacaattccaatggtgctgcacgtacaaatttgccagcaagagcatgttgtgttgtggtagagtatcttgctggaggaactttgaagcaatatttgataaagaatagccgacggaagcttgcttataaagttgtggtccagcttgcattggatttggccagaggattgagctatctgcactccagaaagattgtacatcgggatgtgaaaagcgaaaacatgctgcttactccacagagaaaccttaagattgccgatttcggtgttgctcgtgttgaggctcagaatccaaaggacatgactggtgcaacaggcacacttggttatatggctccagaggttcttgatggtaagccatacaacaggaagtgtgatgtttatagttttggcatttgtttatgggaaatctattgctgtgacatgccttacccagacctaagttttgccgatgtctcatctgccgttgttcaccagaatttgcgcccagacattcctcgctgctgcccaagcgcatttgcgaatgttatgcggaaatgctgggatgcaaaccctgataaacgccctgatatggatgaagtggtgcagcttttagaggctctggacacgagcaaaggcggtggcatgatacctgatggccaatcatcaggatgcttatgcttcacaaaggctcgtggtccatagatacttttcatggtactcccttcccttggcaacactttccccgtgtaaatgactgggccacagcatgcttctctttgcacgacctgtgcagtcgtcgcttacagttctccatagctgccttgcgatcattgcgtgtcaacctgtagctctcatacgatttttgctgtcctctgtcgacaatcttttcatatactagtgtgctgctgtaattgtggttctaaaagagatttggcatacgcgttacactcttgaaactgctgtatgatcagtataaatctttactctgattatt

SEQ ID NO: 5166 - DNA, 1087 bp, Zea mays
  Clone ID: 700445278_FLI
caaccgccccgcccccaagcgcggagcggagtccagtcctccaagtccaggaaaggcgcgcgagatccaacgagcggtgaagtgaccctgatcttccaagatgctccgccgagcaagggttccctgcgccgcggcgcccgcgcccgcgcccgcggtcgtcgtggcggtggcgctcctggccctcagcgccgtggccgccgccgacttcttctcccctctcgcccccatcttctcccccgtcatcaactccatatgcagcacggtggcctgcgggcagggcaactgcacggtggcgccggacacgctgggctaccgctgcgactgccgcccgggctggacgcagctccacgtcggcgacagcctcaggttcctgccctgcgtcatcccaaactgctccatcgacagctcatgtttcaatggttcgccggcgccggcaccggcgctagcgctgacgcctttgccgccacctaaaaacttctcgctcgacccatgcgagctagcgtactgcggcgccggcggcacgtgcaggaagaacggctccggcatgagctaccactgcgagtgcaaggaggggtacagcaacctcctcaacatgaccgcgatgccttgcttccagaactgttccatcggcgcagactgcgcgagcataggtattcatccctcctcgaccagcaacagcccgcccgcgccacctggctccgagagcatttctaaccaaggcagtacagcggcaccaggatccatttcacagcggattctactgccactgctgctgatggtggtggtctcattggccgtcggttacgtgatgtaggtcgaggatggagcgtcccacggcaacactagactgttttttttttatccgcaggacagggtagagctgatagtttgttagggtggtgatacacttttggatgtgtattgtactgctgcgtggttacgttttggcgattggtttgtgtagatgttacccggccgggtcattttatgtcgatatggaataaagcgcctctgtgaatactactgggatgattaaactgactctgcattgggtaactgcgcttagctttgcttttttctgaacttc

SEQ ID NO: 5167 - DNA, 1511 bp, Zea mays
  Clone ID: 700445305_FLI
aaagactaatattcagattctacagcagagtgttcttcttaaatacaagtacacgataaatttccttaaggaacatgctaaggagatatatgcagaagttcgtacggcgtatattgacaccatgaataaggtgctaagtgcacatttccgggcttacatacaagcattggagaaactacagatggacatagcaacttccactgatttgcttggtgttgaaaccagaagcacaggcttcattttctccattggaaaagaacctctgaaaacccgtccttcagtgtttgctctgggtgaacgaataaacattttgaaggaaatcgaccagccagcattgatacctcatatagctgaagcgaagtcacagaaatactcgtatgaagttcttttcagaagcttgcagaaacttcttattgatactgccacttcagaatacctgtttactgatgatttctttggcgaagaatccatattccatgatatatttgcaggaccgattcaagttgttgatgaacatttcaatactgtactcctgaactgttatgatgcaattggcataatgcttatgatcagaataattcatcagcaccagctcatcatgtttaagcggcgaatcccatgtttggactcttacctagacaaagttaatatgtcactctggcctcgcttcaagatggtgttcgacttgcatttgaacagcttgcgaaatgcaaatattaaaacactttgggaggatgatgtccatccacactatgttacaaggagatatgctgaatttacagcttctctagttcatctcaatgttgagcatggggacggtcagcttgatctaaatttggagcgattgcggatggccattgaggatttgcttgttaagttggccaagatgttttccaaaccgaagctacaaactgtctttctgataaacaactatgatttaacaatttccattttgaaggaagctggaactgagggtgggaaagcacaacaacacttcgaggaggttcttaagagcaacatcgcaatatatgtggaagagttgctcctggagcagttcagtagtttgatcagattcgtcaaatctcgtccagcggatgagacggctgcaaattccgagaaagccagcattgccgaagttgagccactggtaaaggatttcgcgagccggtataaggccgcgatcgagctgatgcactatgatgtgatcacatctttcagcaactttctttgcgggatggagatcttgagagcgacgctcgcacagctcctgctatactacaccaggctctccgagtgtgtcaagagaatcaacggcggctctgctctcaacaaggaccttgtctccatatcctccatcctgttcgaaatcaagaagtattctaggacgttttagttgtttcacccccttccatgtacactaggacggctagctgaggggtagctgtgtatccttactttgtaactggtatgtgcgactgcaggggaaacaagggcattttgtcgtggtttgt

SEQ ID NO: 5168 - DNA, 763 bp, Zea mays
  Clone ID: 700445404_FLI
caccccccaagtctgcaacttcaagttttctcgggactgccacaattctcgtggccagcaagggatgtgcgtcgtcggggctatcaacaactacacggaccagctctacagctacggccagaagacttcgtataacctgacggagagcctgatgttcctggcacacttcgtcggcgacgtccaccagccgctgcacgtaggcttcgaagatgacgagggcggtaacaccatcaccgtccactggtaccggaggaaagcaaacctccatcacgtgtgggatgtcagcattattgatacggcaatcaaggacttctacaacaagagcatggataccatggtagaggctctcaagatgaatcttaccgatggatggtctgacgacatcgtccactgggaaaattgcaagaacaaacacgcgacctgcgcgaacgactacgcaattgagagcatccattattcctgcaactacgcctacaaagatgtggagcaagacatcactctaggagatgattattttttcagtaggtacccgattgtggagaagaggttagcgcaggctggaatcagattggcgttggtacttaatcggatatttggtggaggtgaagcggatgatataccactaaaagtacagtaacagctgtaataaaaggaagcatagctattacaaggatttgtccattacgtcgtttatacatcaataaattggcatgaatttgtaactccattgctacacatcaataaattggcataaatttgtaac

SEQ ID NO: 5169 - DNA, 725 bp, Zea mays
  Clone ID: 700445436_FLI
ctcaccaccaggagggagagcacaagccgcacttcccggcgccggcgcctcccccgcacgtggagacgcaccaccccgtcgtcgtccacaagatcgaggacgacgacacgaagactcagaccccaccacaggcaccggaggaggagaagaaaggcctgctggacaagatcaaggagaagctacccggtggccacaagaagccggaagacgctgctgccgccgccgccgcgccggccgtccacgcgccaccgccgccggcgccccacgccgaggtcgacgtcagcagcccggatggcaagaagggcttgctgggcaagatcatggacaagatacccggctaccacaagagctcgggtgaagaagaccgcaaggacgccgccggcgagcacaagaccagctcctaaggtcgcagcgtgtgcgtgtccgtcgtacgttctggccggccgggccttgggcgcgcgatcagaagcgttgcgttggcgtgtgtgtgcttctggtttgctttaattttaccaagtttgtttcaaggtggatcgcgtggtcaaggtccgtgtgctttaaagacccaccggcactggcagtgagtgttgctgcttgtgtaggctttggtacgtatgggctttatttgcttctggatgttgtgtactacttgggtttgttgaattattatgagcagttgcgtattgtaattcagctgggctacctggacattgttatgtattaat

SEQ ID NO: 5170 - DNA, 893 bp, Zea mays
  Clone ID: 700445470_FLI
cacgaggtcgtacccggggtcgttgagagcctcaaggtgatcacaaagttttgctctgagaggattgccaaatatgcattcgagtatgcttaccttaacaaccgaaagaaagtcactgcagtgcataaagcaaacattatgaagcttgccgatggtttgttcttggagtcttgccgtgaagttgcttcaaaatatcctggtattcagtacaatgaaatgattgttgacaactgctctatgcaacttgtttcaaagcctgaacaatttgatgtcatggttacgcctaatctttatggcaatttggtggctaacacggctgcaggtattgttggagggacgggcatcatgcctggaggcaatgtgggtcaggactacgccatctttgagcaaggcgcttctgcaggaaatgttgggaatgagaaccttgtggagcagaagaaagcaaaccctgtcgcgctgcttctgtcatctgctatgatgttgaggcatttgcagttcccgtcatttgcggaccggctcgagacggcagtgaagcgtgtcgttgctgaaggcacgtacagaacaaaggatctgggcggtagcagcaccacccaggaagttaccgatgctgtggttgccaatctggattagattccaggtgtacacggctaaaaaaggctaattctttggggtgactagttgtctagtcttgactcctgagtgttatttatcttcttacatagattttagattgcttcacatcttcaagagggattacaaggtatcccttgtttcagattttctttagaaataatattgaggaacccacgacgattcttgttcacgtgatactttgtacttatcaaggtagaggaccttgagttgcaaagccgaagggaatggatggcagtctg

SEQ ID NO: 5171 - DNA, 527 bp, Zea mays
  Clone ID: 700445619_FLI
tcggagaagtacaggaaggaggagaaggagcacaagcacaaggagcacctcggcgagatgggcgccctcgccgccggcgccttcgccctgtacgagaggcacgaggcgaagaaggacccggagcacgcgcagcggcacaagatcgaggagggcgtggcggcggtggctgccctgggcagcggcggcttcgcgttccacgagcaccacgacaagaaggaggccaaagacgcggcggaggacgccggggaggaggaggagtccggccgccgcggcgaggggaagaagaagcaccacttcttcggctgatcgggctgctgctcgatcgatctacttgcgtacgtaggctgctccccaggaccagaaggagcatgcatggagggcgaacgaagtcacgggggtttgattgcccgtctatgtatatcatgtgtagttactgatgatgtgtgtgcatggtacttcgtacgcgtgtttggtgatcgatgtgtggtgtgtgtgtctctgcatggacattttcctactctgcgttt

SEQ ID NO: 5172 - DNA, 914 bp, Zea mays
  Clone ID: 700445636_FLI
gaaaaggcgacggtgcaatgactgcatgtgaggtgctcttattccaccatgaagatatggggatcccatgggagattgcgaagctcggtgtccggcaggggatgtggggctgcgtcaagaggatagagcctggccttcgggcataccaggttgcgaggactgctggagagcctatctcaaaacatgccgccatggcgcatgttaccaccaggttcgatgccgacgagctcgtcacggaagacagcgcggaggccagttcatccagtgacaacaacaagaccgccgaggttgagaagccaaagcactggacaaacaacatacccaaggttctcatgatcggcggcgccgtcgccctggcttgcaccttcgacggtggattgatgaccaaggccgccatattcggcacggcgaggaggtttgcagggccaggaaggcggtaggtggatggagctggtcaccctagagcaatgccatgctaatcatgtgtagcaaagcgttggttggatggatgcctggaagtgccctaagcagtcctttttgtagcaatgcactgcagaggacagaatgccttgtctagttgctcagtctagacatcatcctcatgttgcagataaggtggtgtgctcttattacagatcagtatcagttgagaaaaatagatccctgcacatcccgagaaaggaaatggacgacaaagatccagcgacacagagaagtgtacgtaagcagaccgggcatgcttgtgctgctgctgcagccgcgccgccgggttagagccagctggataggttagaaatgtagcattattatgaggacaaagtgtacgatgaacaaggttcattctggcagctgtacgacgaacaaggttcattgtcgttagatgaaacgacaagaattcactgctgtttagtaac

SEQ ID NO: 5173 - DNA, 1693 bp, Zea mays
  Clone ID: 700445687_FLI
gtgatctctgtgtgaattttactttatgtttcatttatactgtttatggatcatgcagactataaaaaatgacgatttggaggaaattagagagctgggttcaggtacttatggggcagtttatcatggtaaatggagaggatgtgatgtcgctgttaaaagaataaaagcgagttgctttgtaggaagaccatctgagagagagcgtttgattgcggatttctggaaagaagctctgatcctaagctcactccatcatccaaatgtggtttcattttatggtgtagttcgtgatggtccagatggaagcttagcaactgttactgagtttatgatcaatggatctctaaaacagtttctgaggaaaaaagacaggacaattgatcgccggaagagagtaatattagccatggatgctgcatttggcatggagtatttgcatgggaagaatatagtccattttgacctgaaatgtgagaatctactggtgaacatgagggatccgcagcgaccaatttgcaagatcggtgatcttggactgtcaaaggttaaacagcatactttggtatctggtggtgttagaggaaccttaccatggatggcaccagagcttctgagtgggaaaagtaatatggtgtcagacaagattgatgtctattcgtttggaattgtcatgtgggagttgcttactggggaagagccatactctggcatgcgtgctgctgaaattattgggggcattgtaaacgattccctacgtcctcaaattccttcatggtgtgatcctgagtggaagggattgatggaaagctgttggtccagtgatccagctgagagaccgtccttcacggatatatctcaaaggttgaggaaaatggccgccgcaatgaatgtgaagtaaaggtccggaagccatatttgtcttgtatgtgtgttccccgcatccaatatatatagcgatatacaagaggaaggcagagttgaaacaggattattttgagtaaatatgttccatatgtcttggcagcatcgcagttgatgaccctactccaagtgataatttaacaagtgctgacttcatgggagaaaatctatgtcatggagattccaaagcatgtttgatgttttcttttaatcctggagtaaaccggctaccatttgccttccgccgaaaacaagtatgctatatggcgcattgtcttgatgggagctgttgcactgtcatgtaaataagttttgacttgctggcccgtagtagatgtgcaaagtaataggcacgatcacacagttacttttttttttcccatataaattgtgttctaggataggtagaacgaacatgactggagcgatccttgttcagattgtaaagaaaaggacagacccagtgctgacggttcttatatgagtggggtctggttaaagaataaccaaaacaagtcttatacttttatcttgcagagaggttgcatcgaatctaggactttggctcggtagaaaggtttttcaccactgcgttaggcctatacttttttcagtttaaccactgtgctagacctgcccccttttttcagtttgtacttggtctaaaaataagagtatactgttttccatgtgtatatatcatcacttcctatttgaatgccccaaaaaacaagagtacactgtttgtcatgtatacaccatcacttcc

SEQ ID NO: 5174 - DNA, 1156 bp, Zea mays
  Clone ID: 700445714_FLI
aatcctcatcctccgtcgagatcaaggaagaaagaaagcaaccatggcggcaaccggaatgtccccctccccctcggccgcaataactcgccacatccatgctcgtcgttcctgtgctgctgcttccttgtccctccgccgctcgggcttcctggggcgcgtcgtgctggccgcggtgccagtggccgtggacgccacccggcgccgccgcgtctccgtgtcggtgcggatggcctgggacggtccgctctcgtcggtgcgcctcatcatgcagagcaggaacgcgaagctgagcgagaagctcaaggagcacatcgaggacaaggtgggtcgggcggtgtccaagcactgccacctggtccgggaggtagacgtgcgcctctccgcgcgcggcggcgagctcggccggggccccaagacgtcgcgctgcgagatcaccctcttcaccaagcgccatggcgtcctgcgcgccgaggaggacgccgagtccacctacgccagcatcgacctcgccgccgccatcgtcaagcgcaagctccgcaagatcaaggagaaggagacggaggtgcgccgcggcggagacgctgacggcgtctgggacgagatcccgccggccgacctgctgccccccgcggtggccgaggccgacgacctggaggcggccgtgggcgctgaggacgagcagacggtgctcgccaaggtggtgcgcaccaaggtgttcgagatgccgccgctcacggtggaggaggcgctggagcagctggagaacgtggaccacgacttctactgcttcagggacgaggccacggggcaggtgaacatcctctaccgcaggaaggaaggcggatacggcctcatcatccccaagaacgacggcaaagtggataccgttggcgttgtgccaccacccgccgtcgctgcggagccggagccgtcctacgcagtgcacgccgctgacaacaacaactcctgaactgagcactcgtcgacgtctcatccaaccaaaaccaaaacgagagagaatgcttgcttggtactgtaaaaataaaacaaacgcactcgtcgtcgacgtctcatctgcatcagttgcatgcattgctgtgatgaatgtgtctgtgtttgtgtcacccacacaaactgctcatattagctctcc

SEQ ID NO: 5175 - DNA, 640 bp, Zea mays
  Clone ID: 700445756_FLI
gtcctcctgcacgcggggttcggtggcagggagcgcatcgacggagagacgccggagactgtggcgctgatggagaagctgtggggggtcgtgtgcctcgaggcgacggacggcctgaacgacccgcggataaatccgttggctgccgccgcggcgccgagcctgcggaacctgccgtgtgagagggtgctcgtctgcgcggcagagttggacttcctgcggccgaggaacagggcgtactacgaggccctcgcagcaagctggcggggcggcacggtggagtggttcgagtcgaagggcaaggagcacgtcttcttcctctacaaccccggctgcggcgaggccgtggagctcatggatcgtctggtcgcgttctttgctgggaactgaaattcgtcatgtgtggatgtgaccgcgaccacatccacatgcagtgagacggatggatcaaacgaagatgcagctcatcgccgaatcgaatggttgagctgtgtccaggaaaagaaaactaaaagtgactagaataattgagctcggagccttggattgatcagtttgtgctatcaatttactgcacggggcagcttctcttgttttctttttcatcgagaataatatactatctagtaggaccgaaact

SEQ ID NO: 5176 - DNA, 664 bp, Zea mays
  Clone ID: 700445770_FLI
gtccttcaggagaaacctcgcaaatggcagctcgtctaagcaatccctcgagcagcaacaacaaaacgatgatgaagcctcctgtgacaaggcgaagcagacctgcaagagaagcccgctcatcaaaataaacatggacggcatccccattgggaggaaaataaacctctcagcgtacgacagctaccagaagctttcgtctgccgtccaagatttgttctgtggcttccttgatgcagcccagaaggatgaatctagagggcgaggagcagaagagaaaatgttctcagggttgttggatggaactggtgagtacactttagtttgtgaagacagtgaaggaggcaggacactagttgggcacctaccatggaatgtatttgtttctaccgctaagaggctgagggtcatggaaagctctgaacttcctcatggcctgattaaaactgcctccaagagggctgatggctgatatgaggccaagtcgcgcccagccttcgaatcatgcaattgcaagctatgccaatcattggcttcttcggatggccctttttggcttgtagagagaaatctaataagataatgttagcatatcgcagatgccctgaatgcactgtgcaccttttgtaattttcgtcgctctgtttcagatgtggtgctgatc

SEQ ID NO: 5177 - DNA, 643 bp, Zea mays
  Clone ID: 700445879_FLI
tgctttaaagctatcatttggtggatcaaatcaattcatctacgtccagacatggttcttcatagtagtagtcactatttgctgcttggtgcaattaaactacttaaacaaggctctggactcgttcaacacggctgtggtttctcctgtatactacgtgatgttcaccattcttaccattgttgcaaacatgatcatgtacaaggactgggcctcgcagactgcaacgcagatcgcaacacagctatgtgggtttgtgaccattgtcgcggggacttttctgcttcacaagactagggatatgggaaatccaccaccaccaccacctgaccaaatgtgcctgcaagaagccggggaatgtgctccacggtcaatgaccagttctagctgaacacactaagatgtcaaaatctcacagcctctatggactgaattggaattttgagctatatggtgacctttgtagatatattaggaaggagtaaagattggagtgcccagcagttggacataccgatgaagttttacgtttctgcaaaagaaagaatgaactgtatgaaggcatcggaatcttgtgaagacatgagattcaaactagctacctaactttggtaaatagcttgttatgccattttaaaacgat

SEQ ID NO: 5178 - DNA, 980 bp, Zea mays
  Clone ID: 700445890_FLI
cgctcagggtgcgttcaagtacggcctctacgagttcttcaagaagacgtacgccgacatggccggccccgagcacgccgccaggtacaagaccctcatctacctggcgggctcggccaccgcggaggttttcgccgacgtcgcgctctgccccatggaggccgtcaaggtccgggtgcagacgcagcccggcttcgccaggggactcagcgacggcttccccaagatcgtcagggccgagggctacgcagggctattcagaggactggttcctctttgggggcgacagattccttacaccatgatgaagttcgcgacgtacgagaacatcgtggagatgacctacaagcacctcatccccacgccgaaggatcagtgcagcaagcctctccagctcggggtaagcttcgggagcggctacgtcgccggagttttctgcgccgccgtctcgcaccctgcagacaacttggtgtcgttcctgaacaacgccaagggagccacagttggagatgctgtcaagaaccttggcctgttgggcctcttcactcgtggcctccctcttcgcatcctgatggtcggcaccctgactggcgctcagtgggtgatctatgattccttcaaagttatgattggactgccaacgactggcggagcgcctgctcctgctactgtcccaatggaaggactcggagagctaaaagcctctgcctgaagttctaaagtttgacagagagtatgcatgcttccgtccatagcgtatactggtgactgtaacagaccctcacccccaccagaaaatattgtctcaagctggtgattttgttttgaataagataagttattactgtatgctacgagtatataatacgacatgtagaagactataagttactagtcacaaagttgataaatcatttttgggtgaaatttatttgggttcgtactggattgtgttcctccaatataaattgtgttcctcc

SEQ ID NO: 5179 - DNA, 1219 bp, Zea mays
  Clone ID: 700445930_FLI
ccgttccgtccgcccgcccgcctgcccgcttctctctccccctctccctccacccaacccgcgagaccgccggcagctccaggacaggaggaggagcggcttcaattcgtccccgcgccgcgcgcccaggacccgcccccgctgcctctcccgagggttccagctggttctcaggcagaggcagaggtcaccttctgctgctcaacgcaacactgcacatacatacatacagatgggttccgaggggccttctcccgtcaccaccaccgtccacgtcactgggttcaagaagttccacggagtcgccgacaaccccaccgagaagatcgtgcgcaacctcgcgtcgttcatggacaccagagggctgcccaagggcctggtgctcgggagctgcaccgtcctcgaggccgccgggcagggcgcgcttggcccactgtaccaactgctggagtccaccgtcgtctccggccggggacgtgggatgccggctcaggagcgagtgattctgctccattttggcgccaacagtggttcacataggtttgcgcttgagaatcgagctgtcaatgaagctactttccgttgccctgatgagctaggatggaaaccacagaggacgcctatcatatcatccgatggaaacatcttacacgcaagacagaccacactgccactgaaggaaataagcaagtctctccagcaaatgggatatgatgtgatgccttcagatgacgctggtcgatttgtgtgcaactatgtctattaccactcgcttaagtttgcagagaagcatggcatgacgtctctcttcgttcatttccccctcttcctggcaattgatgaggaagttcagatgcaatttgttgcctcccttcttgaagtcctcgcttccttgaacttctagtagtaacctgatggtagatctatctcttccagtggtgtattgttcccaatttatttggaagggttcccaatttacatgtggagtgaataagaatgaggaatcattcatggagttatgtgtgcttcaaaatgtgtaaaaaaacagctcttctcaaagaacatgtccaggcagtacagatgtacaaatatccaaagtggtttatatgacaggtgctattgttctcagagatgtgtttcactctgttctttgacatttacagaaacatttttctgatcatcagatcatatgtaataaagtaacttacaaacatggtgc

SEQ ID NO: 5180 - DNA, 858 bp, Zea mays
  Clone ID: 700446019_FLI
atcaaaacacgagggcgtctcccgcaggactggtcactcggcacgcaggcagaggcagcatagcagcagccagctccatccatcctctttcccctcctcgcttcgcttcctcggcggattcctcctccctcgaccgtccccgtccccgtccccttccggcgcgcaagctcgcccgagatggcaaacgcgagatcgggtgtcgctgtgaatgacgagtgcatgctcaagttcggcgagctgcagtcgaagaggctgcaccgcttcctaactttcaagatggacgacaagttcaaggagatcgttgtggaccaggtcggggatcgcgctaccagctacgaggacttcacaaacagcctccccgagaatgactgccgatacgcgatctatgatttcgactttgtcactgcagaagatgtccagaagagcaggatcttctatatcctatggtccccatcctccgccaaggtgaagagcaagatgctttatgcaagctcaaaccaaaaattcaagagtgggctcaatggcattcaggtggaactgcaggctactgatgcaagtgaaatcagccttgatgagatcaaggatcgggctcgctaggcatcatcatgatcatgcatcatggacttggcctactactgtggatttgtatgccattatagacttggtgctgtgaaagactgcttgatgatttgcgggtttgttgctgtgtaaaaaaaggtcccatggctcccagaagaccatgaaggttcggatctatcatgtaattccttgttatctgccaattatgtatggactatggacatgtgttgcgctgttcaacttactactacaaataagtaatcgataatgttcccttcc

SEQ ID NO: 5181 - DNA, 940 bp, Zea mays
  Clone ID: 700446047_FLI
ctcactgctcgttgccggctgcccccgcggccccggccagtccatcccctcgctcgctccccaactccagcaggcagatcagatacatccatccattcgcggaccggaaggaaaggaaagggttgaactatgagcgccgtggcggtttcgtcgtcgctgaacccggacgcgccgctcttcatcccggcggcgctgctgcaggtggaggacttctcgccgcagtggtgggacctcatcaccaccactgcctggttccgcgaccactggtcccgcgagcgcgcccacctggacgagatggccgagcagatcgacgcggccggcctcctccccgacgacgaggacctcttctacgacgaccagctcgagcagggccccgtcgccgccgcccttaagacagattcggtgctcaaggcgctgaacatgacctccccgaagggcggcggcgacgccccgcgggggttccgggagaaacccaggaacgccgagaagccgaccaagtacgccggcagccccaagagcaacgctccccgcgtgatccaccagcctcgctaggttcgctgggggaactcatcaggaaggctgctgcccctcttgcagccttgctcctggctgccgccgctgtcgtggtctgctctttcaagtcgaagtaacggtggttcgagctagtggatagtgtggctcaactgtagaagttccttttgtatagcaagcaagtaaaaaaaaatgaccaaaaaatataacaaaatgcagctgtaagtttactgctgctctctaagtcgtgttcagtcatccagtgtgtctagtctagggaaaccccataaaaatggtgaaggtggaatcccatcccagtgtcataattaaggatgcacttcttctgtaagcaaatgtatgatgtacaatggccggccggcagtctaaatgttacaactagctcttggtg

SEQ ID NO: 5182 - DNA, 1345 bp, Zea mays
  Clone ID: 700446170_FLI
agcagaaggatccgggcggccaccgagagtcactggaagtctggaagaagctcgtccggcgccccgcgacgagacgacggcctcctcctccgctccgctgaagaacgacctccccgctgacagaggcggagcgctccgcagaggcgcagagagaggtggcgtctgccttgctgcgctgcgggtctgcggtctcctgcagattcccgcacccacaaggccagaggcgacccaccagcgccacccaaaaaaggcgcacccctttccgccgcccaaatctccctttaccccgatccccaagccccgccgctgctccctcgtacgcaccgttggcgggccttgtagcgaggagggggtgcggaggcgcggcgactgttcgcgggatgagcttcggcggcagcagctccctcgcatcaggtgcgaagaggccgttcgagtacgggagaacgcatgtggtgaggcccaagggcacgcacaaggccaccattgtctggctccatggacttggggacaatggagccagctggtctcaactactggaaactcttccccttcctaatataaaatggatatgccccactgcaccttcaagacccgtgtcagtgtttggcgggttcccctccacagcatggtttgatgttgctgatctttctgaggatgctcctgatgacattgagggaatcgatgcctcagcagcacatgttgcgaatttgttgtcaactgaacctgctgacatcaaacttggtgttggcggctttagtatgggtgctgctactgctctgtactctgcaacttgctttgcccatggaaaatatgggaatggcaaaccattccctgtgaacctaagtcttgccgttggtcttagtggctggcttccatgtgccaggaccttgaagaacagaattgaagcctcaccagagtgttcacaaaaggcttcatcaatacctcttttgctctgtcatggaaaagctgatgatgtggttgcctacaagcacggggagagatctgctggtgccttgaaggcaaatggcttttccaatgtgctcttcaagtcatacaatagtcttgggcactacactgttccagaggagatggatgaagtttgcaaatggatcacagcaaatttggggctcggcactaagtcatcttgattggaaaatgatgcgagaaatactcgcggggacggtgtccaaataataccggtatcttttccaggaggtatatggtttaatagcaaatttgggcttgggtatacggccatgttctagcttttctgaacgcagacgtgtctgcgaatgatgtatgcttataatatctatattttggtctacgtcgatttggttgtggc

SEQ ID NO: 5183 - DNA, 560 bp, Zea mays
  Clone ID: 700446195_FLI
gttgctgggtcagatcctcatccatttgcaggattaggaggcagcagtgtcgagcttatggagtcctcgaggcaatccttgggtgcctatcacagctattctgttgggagcttaggtcagatgcagttttctagcggggtgaggaaccctagccgaggtcagactacacttcaaagtcggaggtcgcaatcaagagaggatctcagttcttcacttgctgatattcattttccaaaagtgtagcactgcatcaagtaatgactagaatgagatccctacatgccataacaaactctgtaaataatagctccagagttcgaactgcttgatttcttctctaatcagaagtcaattttgtctgtccgcttacacttcaatgaggtttaggattcatataaatgaacttatgacttgtgcctatcctggacatgatacatccattcatcccattgtatgtgctcaagaacataccatagcagtgaagttctggtagtgtactggaagatatatttatgccgttcaccagactggttgaccatggctacagcctacaactttat

SEQ ID NO: 5184 - DNA, 1521 bp, Zea mays
  Clone ID: 700446314_FLI
attgtctcccccctcgtccgacctcctcgccgccgcagacgaccgccgccgccgctgccgctgccgctgcgaaccctttgtgaatcttcgttgtccgggctgtgtggggcaggcatggcgctccggaggctgctgcaggggagcgtcctgccgcggataatcggcagggatttggcaccggccgtggcgccgttttcaacggagtccggggagaccattcgtgccacgctctttcccggcgatggcatcgggccagagatcgctgagtctgtcaagcaggtattcaatgttgcaggggtaccaattgaatgggaagaacactatgtcggtacagaagttgatcccagaacagagagttttttgacttgggaaagcctggagtcagtgcgtagaaacaaagttggcttgaaaggacctatggctacacctattggaaagggccatcgatctttgaatcttacattaaggaaagaacttgggctctatgccaatgtcagaccttgcaacagcctcccaggttacaagaccagatacgatgatgttaaccttgtaacaattcgtgaaaatactgaaggagaatatagtggtcttgagcatcaggttgtgagaggtgttgtggaaagtttgaaaattattacacgccaagcaagtttgagagtggcagagtatgctttccattatgccaaggccaatggccgggaaagagtctctgcgatccacaaagccaatattatgaggaagacagatggtcttttcctcaagtgttgccgtgaagtgtctgaaaagtaccctgaaattcaatacgaggaggtcatcattgacaattgctgtatgacgcttgtgaagaatcctggtctttttgacgtattagtgatgccaaatctctatggtgacattattagtgatctatgtgctggtttgatcgggggcttgggcctaacacccagttgcaatattggtgaaggtggcatttgtctggcagaagctgttcatggttctgctcctgatattgctggcaagaacctcgcgaacccgactgctcttatgctgagtgctgtcatgttgttgcgccacatgcaattcaacgacaaagcagaccggatccacaacgccatcctccagaccatcgccgaggggaagtacaggactgctgatcttggtggaaaggcatcgacatcagagtttacaaacgcagtctgtgatcacatctgagaaacggatgtgattcttccttctgattgttttgtcatcctaatatttttttgtcacatatgagaggagctttagctttaagaggttaactggcagcacctcgaacttctttggggtgtttaacacggtttgagaccgtcaaataattttgtcacatttcttgcggttcagaaattctttcaacattggaatggagccaagaattgtctgtaataatcaacatcagcattataacagtatgtagggtttatctcattcacgttcttgaaatattgggccaactggtcagaatgccagctgtgccatgtt

SEQ ID NO: 5185 - DNA, 1403 bp, Zea mays
  Clone ID: 700446322_FLI
acgctatgcaagggtttccgcaaggttcatgctgacagatgggagtttgctcacgaagatttcctgcgagatagcaagcatctattgaagaggattgtcaggcgcaggtcctccccaacaaaacaatgcagcgttcagcctggctcttcttctggagagtccagcttggaccctgagctccacacgctgaggagagagaagaacgcgctgcttgaagaagtagcaaggttgaaacaggaacaccgccagacaattgagcaaatgagcacgctgaatcacaggctggaatctgcagaggaccggcagaggcagatggtctctttcctggccaagctccttcagaacccgagtttcgtgaggaagctgaagctgcacagggagaagaaggagatcgactccaccagggtgaaaagaaagtttctcaaacatgttcctcatggcagcgtagagtcaggtgaatccagctcacagcacgccggagagagtggttcgtatttcgctgtgagttcccccatggctacaactacaagcgtgcatgacgacatcacggagcttcagaactttcttttggaagatgatgacctcaacttcggcatggattcagaaaacaccgggcttgaaggcaccgaggcaccagatgatattggagaactgattcaggggttcgacacacaagaggaacttgacctcggcagtggagctgagctacaggagatgcctccagcttctggttctcttgctcaagatcccacaatcggcaggttcaagggaaagaatgtgctgtgtccaggactggacgctacctcctccgaaggcgactgcctcagtccattgcctgacagcatggggctgctttcaggcaccatgctagggacagcaggaagtatgatggccgctgacgatgagcaaatatggggcgttgatgcttcggcagccctgcaaagctcttgcagtggcactagccaacaagctttcggtagccatgttagtgatccctatctgatggacatcgccaacaggcctgagagattttgggagcttgatttccaggcactggacgatgctgatctgcagctggacaagtgtgctatcgatgaccctgctcttcagcagcagccaagcatgaagaagccgtagacgaatttccgttgtgagacagacagacaatgtatatggtggtgctttatccactgaagtgctacgattaacttatggagattgctatagttacttcggtatttgggagcgaggctgatgaactcgcctactatggcacttagtagtagcagcagcacagcagtagtatgtttttgtttcccatttattcacccccggtgtttttgaatggaaacttgtatcctagtgatttcttcagagcagctgttaactgctctggccgattc

SEQ ID NO: 5186 - DNA, 715 bp, Zea mays
  Clone ID: 700446401_FLI
cgcactgctagtaagcgagcttagctactgatcgtcgtcaagcactctcgagctcgatctctcgaagcggctagctgctagcagccaattaatggcgaagccttcgcaggtgctggtgtcggcgctcgccgcctgggcggtggtcctgctgctgctgtgcgccgccgcgccgcggggcgccgacgcggccacggcgtgcgacgccgcgcagctgaccccgtgcgcgggcgccatcatcgggagctcgccgcccaccgcggcgtgctgcagcaggctcagggagcagcagccgtgcctgtgcacgtacgcgcgcgaccccaagctgcagcgctacgtcagctcgcccaacggcaagaacgccatggccgcgtgcaaggtgcccgtgccgtcgtgctaatttaaacttctgttagcgccgccgccgccgcgcgcgtacgtacgtgtcgtgactcgtgaggcgtacctgtgtcggtagcagcatggcccactggacagggacagagtgtggcgtcgctttttttctgtttcagtacgtacgtacttggatcgcggaagcccgtgtatgcgtgttccgttgtggtgttgctgtactcgatctgctgcatgtgtgtatctaccgagctcttcggacagatacgcgtgcgtatgaataaatgatgtaataacgacgtgtgcatccgctatatatatgcatatctatacatatgcttttact

SEQ ID NO: 5187 - DNA, 1090 bp, Zea mays
  Clone ID: 700446403_FLI
gggcaacctgtgctgctgtgttcaagttgaccagtcgactgtggccatcagggagcagtttggcaagtttgacagcgtgcttgagccaggatgccactgcatgccttggttcgccggcaagcgtgtagctgggcatctcacactcaggctgcagcaactggatgtgcgctgtgagacaaaaacaaaggacaatgtttttgtgaatgtggtggcatctattcagtaccgcgctctggctgacaaagcaagtgacgctttctacaaactgagcaacacaaggtcccagatccaagcctacgtctttgacgtgatcagagcaagcgttcccaagctccatttggacgatgctttcgagcagaaggacgagatcgcaagggcggtggaggaagagcttgagaaggccatgtcggcttatggctttgagatcgtgcagactctcatcgtggacatcgagccagacgagcatgtgaagcgcgcaatgaacgagatcaacgcagctgcgaggctcagggcggctgcaaacgagaaggcggaggcggagaagatcgtgcagatcaagcgcgcggagggggaggcagaagccaagtacctgtccgggctgggcattgcgcgccagcggcaggccatcgtggacgggctcagggacagcgtgctggggttctccgtcaacgtgccgggcaccaccgccaaggacgtcatggacatggtgctcatcacccagtacttcgacaccatgaaggagatcggcgcgtcgtccaaggcgtcctcggtgttcatcccgcatggccccggagcggtgcgcgacatcgccacgcagatccgcgacggcctcctgcagggatcctctgtcgccaaacactaagctgcctgcctgctgttgccgctgctgctgctgaagaacaccaccaccactattatatatataatataatgatgatcttggtaccagagtgatgcttgtctatattgttcatcactcatcgtcaccatctgctaggatggctatctttatgcttggggattggagaaaaccttatctaaccttttagggaaccggtaatatatatataatgcagcatgagtttgcagt

SEQ ID NO: 5188 - DNA, 714 bp, Zea mays
  Clone ID: 700446484_FLI
gaaggatgcgcgcagctatgacgcgcatggccctgctcccgccctccccctcgtccgcctgaaccacgtctcgttccagtgcgagtccgtggaagcatcggtcggcttctaccagcgcgtgcttggcttcgagctcgtcaaacgcccggcgtccctcgacttcggaggagcatggatgcacaggtacggcatggggatatatctactgcagcgcggctcggattcgtcgcccaacgctccggcagctgcaagaccgccggcgatcaaccccaagggcaaccacatttcctttcagtgcacggacatggggctcatgaagacgaggctgggtgacatggagctggagttcgtggcggcgcgggtgtgagacggcgagacggtggtggagcagctcttcttccgcgacccagacggcaatgtggtcgaggtctgcgactgcgagaagctccccgtgatacccctcgcagatgcaggcagcaccggccttcttccaaatacgctgctgctgccggtggaaacgaacttgcatggctagttcgtggtgcttgctcattggttgcttagcacgattatttgattcgtgtgattagatttgtgagctgtaacaatactgtaataacaggcagttctgcacgctattgtacatatgttgcaagtgtccgtacgtagtgtaatgtgtatgtacaggttcggagattgccgggttaggcgtct

SEQ ID NO: 5189 - DNA, 1310 bp, Zea mays
  Clone ID: 700446528_FLI
ggttgctctttttggtccctcagttgatgagatgaatgaaaaggcgagtcataccccagattttagaagttcagtgggctctgataggaagaaacttaaaatttcctgcaacagatatgtttcaagaggatctaggaacgaagatgtgcatacacgacactctcctcaagattattcacattctaagcaagaacgaagtagccacaacatgaattatgagtacagacgacataaaagagattcttcagcagcagataagcaccgaagacaagatgttggagatacaaatgacagacaattttcaacaatgggaaatgacagcaagtcccataggcataagcatgaagaacggcatagaagtgatcatggtaatggagaaaaagaagatgacagcaaaactaggcctaggaagcactgttctgttaggcgtggaagtttggaggttggatattctgactggtctccagacttcactggtacagacatcagcaagggcccttcaggtgagaagtccactagcaggtatgatgatgccaaagggagcaggaggggatcatcagagtattacaatcttgaaagacaccactctacagctcaaaaacaatcaagaaatgagcacagcactacaagacgcaggagacatgacattgaagattatcatgatgaaaaaaatgacggaagaggggaatcccgaaagcataaccgccatgaatcaaacgaccggtgggtagccacaaatagtgatgttgattcggatgtagatagatatcagagttcaagctgtaaaggcactaggctgggaaggaaggatgatgatccaggcattgaagttcggcatcagaggtcaggtagaagtacgaaggatgacaagagaaggaagcatcacagtggaaacaggtggcacagcggcactgaagagggtacctcagattcaagcggtggagatttgagctctgattcgtggagtggtagatcgagaaacagtgagaacttttcagcacacaggtcaaggaggaagcgaagtcggagcaaggagtctggttagttgtaaatagttagcctctttttggagcacatgaattcgtaggaatcgtgcagaaattttacaggaatcggtttaacttcgcacgaaaaatttcccgcactccgaacatgcggtagtggcttcttgatattctactgtatgctttcaccgtttcgcttacaagttctgttactgtacactgcggtagtgcggttcatagcattgctcaattccggacccgttctcaagcgtctggctatgttaatacaggtattatttccgtgct

SEQ ID NO: 5190 - DNA, 368 bp, Zea mays
  Clone ID: 700446564_FLI
cgctgcttcgcgaccccagtcctctcccatggcggcgcgcccatcctctgctccctcttccctgatctcgcgcgcccctgattcctacttctgctccagcgcgcgcgttcttccctgtcgcgtctggccgtcgtcaagctccatggtgtctggccccgcttggatctcgtctgtgccgtgcagctccctctgccgatttcgctgtgcgccgaggtcgcgtgcagctcgtccagctcataagggtgaatcacagtttgagattgaaaaaggagcttagaaggtgtagataatgaagccctagattgacgtttgccgttgtcgtttgtgcgaacatcgaatcaaattgtgatgcggtaagctaattcatt

SEQ ID NO: 5191 - DNA, 1459 bp, Zea mays
  Clone ID: 700446664_FLI
ggctaatccaccgctcgccttctcccatcgccatgcctgccgcttcctggtccgcgcccaccacctccttcgcgccggcgccggcgccgccatgggggccgtggaggaccaaggcggcgcctttacccatcaggacgcttccccgccgagtgcttctcaacgcagttggcgaatccgccatggttgctgctggtgacacattgcttggtttgtatgagaaagagcggttaggcctgttgcagtatgccgacgacgagtctaaagaagagaggtactgggaaaccttggatgctgatttgcgttactggaccagatccctgcgcccagtgcagtggtatcctggtcatattgcaaaaacagagaaagaattgaaggaacaattgaggctcatggatgtcgtcatagagatccgtgatgctaggattcccttgtccaccagccatcctaagatggactcatggctaggcaaccggaaaaggatcatagtcttgaatcgcaaggacatgatctcaactgaggatatgaatgcatgggctacttactttggtaatcagggcatcaaagttgttttctccaatggccagctgggtatgggtacaatgaaattaggtaggatggcgaaatcagtagcatctgttgcgaacacaaagagaaaggagaagggattgcttcctcgtccggttcgagctggaatagttggatatccaaatgttggcaaatcttccttgattaatcgcttgctaaaacgaagaatgtgcccagcagcacctaggccaggtgtcacaagagagctgaagtgggttcgttttggaacagacctagagttgttagattcacctggaattttacctatgcgaattagtgaccagacatctgcaatcaagcttgctatatgtgatgatattggagaaaggtcatacgattttgctgatgtggcggcgattcttgtgcagatgttgataagacatcctgcagtaggttctgaagcatttcgaagacgatataagattgatgtagatagtgagtgcggtaaaacgtttgtcacaaagctctctgttcacttgttcaatggagacacaagccaggcagctttccgcatattgtctgactacaggaaaggcaaatttggatgggtagcgctggagagacctccaacatgaacaagcgggatatcatagatccttagataaaagacatgtgcttgttcatgtagtatcacacaatttagtgtcgttcattggaccactctcgacagttttcactggacctgcacctatacgaggaattaattcagaatagctgtccatctgatgatctaaagacaaaacttaagaaatgctcctgctgttatcagacagtccagagcaaacgagctgatttgtatgatctattgaatgagctcaactatgtttctatgtaacggaattaggtttgagaaatgaaagattgtatgtctcct

SEQ ID NO: 5192 - DNA, 458 bp, Zea mays
  Clone ID: 700446685_FLI
gccggccgtccacgcgccaccgccgccggcgccccacgccgaggtcgacgtcagcagcccggatggcaagaagggcttgctgggcaagatcatggacaagatacccggctaccacaagagctcgggtgaagaagaccgcaaggacgccgccggcgagcacaagaccagctcctaaggtcgcagcgtgtgcgtgtccgtcgtacgttctggccggccgggccttgggcgcgcgatcagaagcgttgcgttggcgtgtgtgtgcttctggtttgctttaattttaccaagtttgtttcaaggtggatcgcgtggtcaaggtccgtgtgctttaaagacccaccggcactggcagtgagtgttgctgcttgtgtaggctttggtacgtatgggctttatttgcttctggatgttgtgtactacttgggtttgttgaattattatgagcagttgcgtattgt

SEQ ID NO: 5193 - DNA, 904 bp, Zea mays
  Clone ID: 700446705_FLI
ggttcatccacttgtgttgctatttgaccggtaccgtaggagagcacagcactacatcgcaaagatttgggctacggtgacaatctccatgttctacaatcttgaggtcgaaggaatggagaatctgcctccaaatagctgtcctggtgtctatgttgctaaccatcagagcttcttggatatttatacccttctaactctagggaggtgcttcaaatttataagcaagaccagcatctttatgttccctattatagggtgggcaatgtatctcttgggtgtgattcctctgcggcgtatggacagcaggagccagttggattgtctcaaacggtgtgtggacttggtaggaaaaggagcttctgtatttttctttccggagggtactcgaagtagagatggcaagttaggtgtatttaagcgtggcgcattcagtgtcgccgcaaagacaggagctcctgtgatagctattactcttatcggaactgggaaattgatgccttctggaatggaaggaattctcaattcaggttcggtaaaggtgattattcaccgacctattcaaggcaatgatgcagaaacattatgttccgaagcaaggaatgtgatagcagacactcttcttctgcatggttatggagcccattaaagcaagtggggtgctttggtctgttttttcttctgaacgagtgctttggtctattctttagtggacttttcagagcacaagacttgagagttgagacaaagctcgttgcagatgtaatcctgtaaaggcaagagggaggaaaatggcgtgaattggcggttgtaacatgtggtcttcaatttgttgtaaaccctacttatttttgttggtttgatagtacaaagaaatgtaaaaggcagaggccatcttcattgg

SEQ ID NO: 5194 - DNA, 316 bp, Zea mays
  Clone ID: 700446744_FLI
cacctaaagaggtgtttaggcagagagagataagcgtgtagagaatgtagcgattgacagggagggaatgtgtttaaggatagggaaaatggagatcaaatttgtgattgatcaaatggatcaaattggttgtagttgttcatgtattctgtctgtgtagggcaactgtacacttcatcgattcttgttcatatatagacactttcagacaccagtggaaaacataagttatgggcaacggaagcatacaatacaatacagagtctgctgttgcagtatgaatttggaaatgtataatgaggcttgtgatattgtc

SEQ ID NO: 5195 - DNA, 1074 bp, Zea mays
  Clone ID: 700446811_FLI
gatggccattacgaaatcatagcagcacatgggaagggtgtgttctcaaaagtcgtgcgggcaaaagatcttaaagcgagtaaagatgatcctgaagaagttgctatcaaaattattcgcaacaaggagacaatgtacaaggctggtaagcaagaggtttcaatactggaaaaacttgcaagtgtggaccgtgaggacaaacgccactgcgtgcggtttatttctagtttcatgtaccggaaccatctttgcttagtttttgaatctctcaatatgaatcttcgtgaggttttaaagaaatttggtcgtaatattgggcttaaactgactgcggtgagggcatattcaaagcagcttttcatcgccctgaagcacctgaagaactgcaaagttttgcactgtgatattaaacctgacaatatgctggtgaatgaggctaagaatgtgctcaagctatgtgattttgggaatgctatgcttgctggtatgaatgaagttacgccttatcttgttagccgtttctatcgggcacctgagatcattcttgggttagcctatgatcatcctttagacatgtggtcagttggctgctgtctatatgagctttataccggtaaagtcttatttcctggtccatcaaacaatgccatgcttcggcttcatatggaattgaagggtccattccctaagaagatgcttcgaaagggtgcctttactatgcaacactttgatcaagatctcaattttcatgctaccgaggaggatcctgtgacaaaaacggctgtgagaaggttaattttgaacattaaaccaaaggatgtcggttttttgattttgaactctcctggcgaggatccaaaaatgctatccagttttaaagatcttcttgataaaatgtttatattagatccagaaaagaggataaccgtatcacaagcacttagccatccatttatcactggcaagtgacataagatgctgattcctcttgatattgaacttagcatctacactgtaaaatacaatttgggtttctcttgtctaatcatcgacgtttctgtcttgtgtccaaag

SEQ ID NO: 5196 - DNA, 847 bp, Zea mays
  Clone ID: 700446943_FLI
ctaagagcggccctctgcggctcaggtctagtgatgtgtacacaatggacttaagtgaagaagaaccttgctggcgatgcctcactggtagtggaatgcctggggctggaaatccagctggcgcaggtccacctcctcgcctcgatcatgttggtgtgagcctgccaggtggaagaattttgatatttggtggctcagtggcaggtcttcactcagcatcacagctttatctgttggatccaactgaagaaaagccgacctggagaattttgagtgttcctgggcaccctccccgattcgcctggggccacagcacctgtgttgttggaggaacaaaagcgatagtgcttggtggacaaactggggaagagtggatgcttacagaaatacatgagctctctttggcaaacaactcagtctgagttcatggtggacaaaccggggaagagtggatgcttacagaaatacatgagctctctttggcaagcaactcagtctgagttcagggtggccaaaccggggaagagtggatgcttacagaaatacatgagctctctttggcaagcaactcagtctgagttcaggaatggttcttagtcatgctccttgcaaactaattgcggcttcttatgcgacctgaagcttgattgccttcaccttcagagtatcatctggcagctacatggctttacttgggagatgaaatggttttcactggtttgctcgctttatgtaggcagagggtagcgatatgttcatttttattgccgtttgcttggccttctttttaccagataattacagttcataagctactattgtggaatgagtaccagattttatatgt

SEQ ID NO: 5197 - DNA, 607 bp, Zea mays
  Clone ID: 700446955_FLI
ctcggcatataatttcagttcgacagacctcaggaggatagtgcctgccctggcgtagtagcaccgatgagtgatgaaggaggcgtttgcaccttttgtgcttctcgctagctccatgccttcggctgacgattgtgaagcgtgcacccttcctggcctttcctatccccaaaagctcggccatctaggctcgtgaaatgctgcttcagatcaaggctgtccttggaaatgggaagatgaaaggagaatctgggtaatgccggttgctccctttcccattctttgttgagttcagctttctgattggtttctggtggccctcttgatacggaacttgtgcgctccgtctgagaaagcatgtgtgcaaagtttcatttgaggagttgaggcgatcatggcgctgtaaaatgcggcttatcttcccccttcagggctggtttggtggaccaaccctcaaacatttgcaattcctatgtacgtctgtagtgcatcaggtgttgttgcccacgtgtaaaaggaaaataaattcacaatgtaaaggagacttgtgcgttagcactaccatttgaatttatgaaatgtcaaagcagcccagcgagtttgtact

SEQ ID NO: 5198 - DNA, 2214 bp, Zea mays
  Clone ID: 700446984_FLI
ggatgtatcacttatgccggacgtatccgtcgagcttgtgtcaaacatgatggaagagggaaaaaaaccttctgttgcagccattcaaggtcttgcattgggtggtggcctagagttgactatgggttgtcatgctcggatatctactcctgaagctcaacttggattgccagagctaacccttggcatcatccctggatttggaggtacccagcgtttgccgaggcttgtaggtctacccaaagcaattgaaatgatgctgcaaagtaagttcattacggcaaaggaagggaatgaacgtggtttgattgatgccctttgctctcctgatgaattgataaagacatcacgtctttgggctctggaaattgctaattgccgtaaaccttggatgaggtctcttggcagaacagataggcttggaccactctctgaagctcgtgctgtgttaaatgcagcaagacagcaagcaatgaagatcgcaccaaacatgccacaaaaccaggcctgcctggatgtgatggaggaaggcatattatgtggaggccaagctggtgttttgaaggaggccgtggttttcaaggagctggtgatagcaccaacatcaaaggctcttgtccatgttttctttgcacaacgttccacgacaaaggtgccaggtgtaactgatgttcaactgaaaccaaggccaattagaaaagttgctgttattggtggtggtctgatgggatctggaattgccacatcacttcttgttagcaacatttctgttgtgctcaaggaagtaaaccctcagtttctgcaaaggggagagaaaacaatagcaggtaatcttgagggcctggtcaaaagaggttcactaacaaaggataggatgcacaaggccatggcccttctcaagggtgctttggattattcagatttcaaggatgttgatatggttattgaggctgttattgagaagattcctttgaagcaatcaatatttgctgacattgagaaaatctgtccaaaacattgcatacttgcaacaaacacatccaccattgatttgaatgttgttggcaagaagacaaattctcaagatagaattataggggctcactttttcagccctgctcatattatgcccttgcttgaaattgttcggacggagaagacatcaccacaagctatccttgatctcatcaccattgggaagataataaagaaagtccctattgtggtcggcaactgcacaggatttgcagtcaaccgtacattttttccttacacacagggttctcatcttctagttagtcttggtattgatgttttcagaattgatcgagtaataagcacctttggcatgccaatgggaccttttcaactccaagatgtggctgggtatggagttgccttggcagtaaaggatatctacgctgatgcctttggagaaagaaatttggactctgaccttgtggatttgatggtaaaggatggacgacaaggaaaggtgaacggcaaaggttactacatttatgagaagggtgggaagccaaagccagatcctagtgttaagcatgttatcgaggagtaccgaaagcacgcaaacacaatgcctggtggaaagcctgttactttaacggatcaagatattttggagatgattttcttcccagttgtgaatgaggcatgcagggttatggatgaaaatgttgtaattcgagcttctgatcttgatattgcttctgttcttggaatgggctttcctaaatacaggggtggtcttgtcttctgggctgacactgttggagcaccttacatacattctaagctaagcaagtgggctgaaatttatggccccttcttcaaaccatcatcatatttggaacagcgagctaagagtggtgtaccattgagcgcaccaggagcttcgcagcaaggttcggcgaggtcacgcatgtgaggtgctgtccagcattgagcagaataatgcagaatacttgcgggatgagccattgacggctgcttcgctgatcaaaacacctccgtgaacacaaacatgaggcacagaagaaatgatgaaaaataaagggattgtaacagttttggtgcctttgactgtaactggcagagtttctggggacagagtggcatggattaattgcacctgatcactctgtatgtcgctgtcatgtgtgcaatgttcaatacgtacgtaataaagaatgg

SEQ ID NO: 5199 - DNA, 1178 bp, Zea mays
  Clone ID: 700446985_FLI
gccggcgccgcccagggtaaagaagtcaggctcggaggtgaggaagtcgcaggtgtcgcgggcggcgcccaggatcgtccaggcggtcaccgaggacgacgactccgtcgaggaagccggcggcggcggtttcaggcggaggccgtcgccaccccagcaagagtaccactaccggcaagaatacgtcactccgccgccgccggcacccgccccgctgcagcgcacgtcgtccgtgctggacaggctccgctcgctgggcctctacggcttcctcgctcccgacgaacccgccgccgccgcgtcagttccagcgagcgacggcttcgccaccccggcggacgagaagaggcacgcgcacacgcactacgacatcggccggtccgagccggcacgggagcagcaggacaagaaggagaagacgcaggggggcaactcaacaagggccaagtcgagctcgggggctaggaagacgcccgctcagaggcaggcggaggccggcgccgagtgcgtggacgcgagggcggaggcattcatcgacagcttcaggcagcagcagcaggtgcaccactaccaggaggaggaatacgtcccgcctccggcgcccgcgccgccgctgtcgcgcacgtcgtccgtcctggaccgcctccgctccttcggcctgtaccgcttccgctccggcgacctcggccccgaccttccctccgccaccgccgccacggagacggacaaggagaagcagcaggcggcgcactacgggcggagccggtcggagccggcgcgggagcagggcaagaagcaggacacgaggatgaacaagtcgagctcgagcggcgtcgtggcggaggcggacgcgcatcagtgcgtgaacgcgcgcgcggacgacttcatcaacaagttcagacagcagctacagctgcagcgactgaactcgctgctcaactacaaggagatgctcaaccgcggcggtgacaagcagtagccggagcgtgcaaggcggagggagaagggtagctagctgtaggatccaatccaaaaccatactgaaaaaaaaaatcgatctttggtccatcaaccactagacctcgagtgtggattatgcagtgttgttcttattagcatcgttatgtaagaatcgctattttttcagcttgttaatttcaattggtttgtgttgctgg

SEQ ID NO: 5200 - DNA, 848 bp, Zea mays
  Clone ID: 700446989_FLI
cgctagggaggaaaacagagggatggttgggcgtcgaacagaaaggaatacctagggaaatcgccatgggaaacaggggcatcgacgacaggacgccaggaatcgcgagctacaggaggagaaactcggcacagcggctatggccgagcagagggccattccgtcgagctggaagccgcggcgccgagcagagcgagaggagcagatggccgtgctaaagcaccacggcaagacagggagagaagcaagggggcagctgggctcggcaagcaggctgagacgctgcgcaggggaggaagacgccagaagtttgggcgtggtggccatggcgagcagggatggcgcgcacagctgaggaggaaaattggagcacgcgacactggaggatagcgccacgggagcagccaaagggcgagcaggggcgcgcgcgtgccgtggttctagtcgcggcggaaaaaaatggagcgcgcaggcagccggacttgcgcaggggcgcgagatccatgagctgggaagaaaaaggaccagctggggagagctcagcgcagtggagcagggaggaaggagaggggtgcacgcccgggctgagagctgggcgacctgcgcagggaagaacgccatggaggggcgcggctgggggcgggtccaagcttgacgacggcagccatggggagcagggccgagatccgagcaggacgcggcagagagctggggctggaaatccgagccacggcagaggactagcgcattggagagctgagggagagggagaaggggagctcgcggcagccatcatcggcagagcaagctccgacgagggagaaagacaggcgcggcagggaataagc

SEQ ID NO: 5201 - DNA, 952 bp, Zea mays
  Clone ID: 700447049_FLI
tcctcgcagtcgcagcccctcaccatggctgccacactctcctccgtggctgccccttccctccccaagcacgtctccgttaccagagctcagcagcaggcgcctccttccatcatctcggcatcaactaagactgccttccatggggtgtcgctggtggtggacaggaggtgggcggccggccaccggagaggcagcggccggcggaggctgctgcaggtgaacgcgaggaccgccgccaagaacatcgaggtggaggtcgagaagccgcttggcttagccttgggccagaagcccggtggtggcgtcgtcatcacttctgtggagtctggagggaatgcagccagagccggtctgaaaaccggggaccaggtcctgtacacaagcagcttcttcggagacgagctgtggcctgcggataagcttgggttcaccaagacagccatccaagcgaagtcagactccgtctacttcgtcgtgagcaggggtgccgaagttgacgtgaagcgcctacctaagaggccggcgccaccccggtttggacggaagctgactgattcacaaaaggagagagcaacgcacgtctgccttgattgtgggtacatatacttcctacccaagccttttgacgaacagcccgacgactacggttgcccacagtgcaacgcgccgaagaagcggtttgcgaggtacgacgctgccaccgggaaggccatcggcggcgctctgccgcctatcgccgtgatcgtaagtttggtgatcggcatcgctggggtaggagctctgctcgtgtacggcctgcagtagcctgctcgttcttgttcagaaccttttttttttttttgctgtgctcaagaagctcagctgactgctgctgtactctgtctcacaagacattccgagtgatatacatacataaaagggaagaaggaaatacccagtatttgaggct

SEQ ID NO: 5202 - DNA, 1160 bp, Zea mays
  Clone ID: 700447078_FLI
gcaaagcagcaagctctactcttcttctgtactgaacgtgtgactagataacaataagcgtgaaccatggcggacgagtacggccgcagcggctacggcaggtccggcgccggcgacgactacgacagcggctacaacagcaagtccggcactgatgactacggccgtggcgaaggtggctacaacaagtcgggcggcgatgacgactacggccgcagcggcggcgatgggtacggcaggtccggcggcgacgactacggccgtggcaccggcggtggtggctacaacaagtccggcggcggcgacgactacggccgcagcggcggcgatgggtatggaaggtccggcggcgacgactacggccgtggcaccggcggcggcgggtacaacaagtccggcaacgacggctacgacagcgggtacaacagatcgggcaccaccaacgacgacgaatacggccgtggcaccggcggcgggtacggcagcaagccctctggcgacgacgcgtacgccggcggcggcggtggcgggtacggcaagcagtccggtggcggcgcggacgagggcggagagtacggctcctcccgggacgactcggagaagtacaggaaggaggagaaggagcacaagcacaaggagcacctcggcgagatgggcgccctcgccgccggcgccttcgccctgtacgagaggcacgaggcgaagaaggacccggagcacgcgcagcggcacaagatcgaggagggcgtggcggcggtggcggccctgggcagcggcggcttcgcgttccacgagcaccacgacaagaaggaggccaaagacgcggcggaggacgccggggaggaggaggagtccggccgccgcggcgaggggaagaagaagcaccacttcttcggctgatcgggctgctgctcgatcgatctacttgcgtacgtaggctgctccccaggaccagaaggagcatgcatggagggcgaacgaagtcacgggggtttgattgcccgtctatgtatatcatgtgtagttactgatgatgtgtgtgcatggtacttcgtacgcgtgtttggtgatcgatgtgtggtgtgtgtgtctctgcatggacattttcctactctgcgttttttctctctctactgatatagtatatatgtggtgtgtct

SEQ ID NO: 5203 - DNA, 1070 bp, Zea mays
  Clone ID: 700447087_FLI
ccacctcgccggcgtcgccctcggggatagctggatctcgccgctcgacttcgtgttgtcgtgggggccgttgctgtaccaggtgtcccgggtggacgagaagggcctgcagcagtgcaacagcgtggcggccaagatcaaggagcagctggagaaggggcagttcgcggacgccgaggcctcgtggtcggagctggagggcgtcgtcctcgccagctccaactccgtcaacttctacaactttctcaaggacgaggcgtcgggggacgccaccgccactgccacagcggcggtgtcgacactggcgtccttcaggcgccggggcggctactcgggctacctcagctccatggcggcgtcttcgtcgtcgtcagcaggcggcttcgacgggctcatgaacacggtcatcaagaagaagctcggcatcatcccaaaggatctcaagtggggagagcagtcagacgacgtgttcgatgctctggctggagacttcatgaagcccaggatacaggaggtggaccagctcctcaagcttggcgtcaatgtcaccatctacagcggacagctcgacctcatctgcgcgaccaaaggcaccatggactgggttcagaagctcaagtgggacgacctcaacagtttcctgagctctcctagaacgcccatctactgcgacaaggaggggcagtccggcacccaggccttcgtcaagtcctacaagaacctcaatttctactggatactcgaagccggacacatggtacccctggacaacccttgccctgcgctcaagatgctggctgacattacgcgatctcctgccgagtagcaggaggaagaaaacaaggcgacggaatggaacggcctgacaccagttcttcaagattcttctcttttcatacagtcagagaaaaataagtcattggtggtagcattcatacatgcaacaataaacacaaaggaaaaggtagtgataggatcagacagatatttaattcggcagatattattgtgtagcaccgctatagagcttgcagctgaatttccaacatgatgatctgattgacagtgct

SEQ ID NO: 5204 - DNA, 194 bp, Zea mays
  Clone ID: 700447089_FLI
tgatcgagtagaggggctctagcgtagagagctgctagcatgcatagtaattaaggttaattttgcaggacatgcaatgcaattcgttgcttcttttttatacaaggaagtaaccggtcatggggtgtgtggtgtgtgtgtgtgttggcaatgtaataacaattttataattcgttcttgaatttgtgcttagc

SEQ ID NO: 5205 - DNA, 949 bp, Zea mays
  Clone ID: 700447102_FLI
ccgaatccatggccgtcctccgcgcgtcgccgccgccctttctcccccatccgctctcgcgcccctctcagtgcaagcggcgccccacctgccgcgtggtcgcagccacagccagacccagtcctgctccttccaggcccaggagcggcggcgtccatggaggccgccccaagagggggcttcttgcggcaaggagaaggccggcggaggggcgggtgccctgcttgcgggccacggaggcgggggtcggtgcggcaggcgtcgcgaaggaggaagacgagtacctggcgcgggaggccgggtggggcgtgcggcggatggcacgggttggggaggagatgcggcgggtggcgcaggtccaggccgaggccttccacgtccccgtcgcgctcttcaacgacttcttcttcgacttcttcaaagccgaggtgctgtcggcgctcatctacagagtgaggaactcgccgcctgacagatacgcttgtttggtggctgaagaagctgaggcagccgaccagccgtcaaaggcaccatatgagaagatcgtcggggttgtggattgcacggtgcaggacgaagacggcatcctaaagcaccttcgaggcgcggatgaatacctctacgtgtcaggaattgcagtcttgccaccattcaggaggaggaaggtagggaccgcactgctgaaggcctgcgaggcactggggctccaatggaggcacgtgttcatggttctgagggcgtacgaggatgacgacggcgctcgaggcctctactccaaggcagggtacagggtcgtgtcaagggatccagactgggtctcctgggtggggaggaggaggcgagttgtcatggtaaaggagctgccggttcacgatgatcaatgacgccggcacggttttgttgaatatgtgtgtgtgtgtcaccagctaatttgtactgtttcttgtcc

SEQ ID NO: 5206 - DNA, 492 bp, Zea mays
  Clone ID: 700447166_FLI
cacggcatcccggcggcggtcgtggagggcatgctgcgcgtggcgcgggagttcttccacctgccggagtcggagcggctcaagtgctactccgacgaccccaacaaggcgatccggctgtccaccagcttcaacgtgcgcacggagaaggtcagcaactggcgcgacttcctgcgcctgcattgctaccccctccagagcttcgtcgaccagtggccgtcaaacccgccgtccttcaggcaagtggtgggcacctacgcgacggaggccagggcgctggcgctgaggctgctggaggccatatcggagagcctgggcctggagcggagccacatggtggcggccatggggaggcacgcgcagcacatggcggtgaactactacccgccgtgcccgcagccggagctcacctacgggctgccgggccacaaggaccccaatgccatcacgctgctgctgcaggacggcgtctccggcctccaggtgcagcgt

SEQ ID NO: 5207 - DNA, 1384 bp, Zea mays
  Clone ID: 700447174_FLI
acctcgcctgcgatcttcgtagcctccgtcgcgtcgagcatcgatcatgtcggcctactgcggaaagtacaaggatgagctcatcaagaatgctgcctacattggcacccccggcaagggtatccttgctgctgatgagtccactggcaccattggcaagcgcctttccagcatcaatgtcgagaacgttgaggagaaccgccgtgccctccgtgagctcctattctgctgccctggtgctctccagtacatcagcggtgtgatcctcttcgaggagaccctgtaccagaagaccaaggatggcaagccttttgttgatgtcctcaaggagggaggcgtcctccctggcatcaaggttgacaagggcaccattgaggttgttggcactgataaggagaccaccacccaaggccatgacgaccttggcaagcgttgcgccaagtactacgaggcaggtgcccgctttgccaagtggcgcgctgttctcaagattggccctaatgagccatcacagcttgccatcgacctgaacgctcagggtctggctcgctatgccatcatctgccaggagaatggtctggtgccaattgttgagcctgagatccttgttgatggccctcatgacattgatcgctgcgcttacgtcactgagaccgtccttgctgcctgctacaaggcgctcaacgagcaccatgtcctcctggagggtaccctcctgaagcccaacatggtgactccaggctccgactccaagaaggtgacccctgaggtgattgctgagtacaccgtccgtaccctccagaggaccgtccctgctgctgtgcctgctgttgtcttcctctctggtggacagagcgaggaggaggccacccgcaacctcaatgccatgaacaagctcagcaccaagaagccgtggtccctgtctttctccttcggccgtgccctccaggcgagcaccctcaaggcctgggctggcaaggtggagaacctggagaaggctagagctgccttcctcgccaggtgcaaggccaactctgaggctaccctcggcacctacaagggtgatgctgccgccgacaccgagagcctccacgtcaaggactacaagtactgagttgcttctctttgcgtgcccgttttggaactcctgcctacgagctaggttgcggagtgtggtttgctcgttagagcttattttcggacatccaaaaaacatgcttcctatgtgggatgatggttatctttatatttgtatgttaattagtctctttgctgttaaatttcgtgtaagttggtcctgccgatggagaatcgagcagctccctttttttgttctatcaactatgctgtaattctggctatgtatcggcaaaaacaattctat

SEQ ID NO: 5208 - DNA, 371 bp, Zea mays
  Clone ID: 700447212_FLI
ttaggcaaagactgcccgtttttgtagagttgtatgattggtggaagagattaaggaatcgttgctgcaaggagtcaaagaagattttcgatggactcctcatctctttctggtggaatatatggttagaaagaaataacagaatctttcatagacttcaaagatctgctatccaggttatgcaattggtgaaagatcaaattgtgagttttagtgtatgcaattggtgaaagatcaaattgtgagttttagtgtatgttagattgagttagtgtatgtttttctctttttttgttttttcttttgctcagtcttcagtatctatttctcttctaatatattgatgaggcaagtcttttgccgcttccttt

SEQ ID NO: 5209 - DNA, 1303 bp, Zea mays
  Clone ID: 700447219_FLI
ggccttcttgatacaatggtgaagctgacaatgatagctcgtgtcactgacggccttccactggcagaagggttggatgatgggcgagatctgaaggatgctgatttctataagcagcaagctaaacttcttttcaagaacttgtcaaaagggcatcatgaagcttcacggatgtcaattgagacagggccctactatttccactacattattgagggcagagtatgttatctgactatgtgtgaccgctcttatccgaagaaacttgcattccagtacctagaagatctgaaaaatgaatttgagagggtcaatggcaaccaaattgaaactgctgcaaggccatatgcttttatcaagtttgatacattcatccagaagactaggaaactgtatttggatacaagaactcaaaggaacctcgcaaaactgaatgatgaactctatgaggtgcatcaaattatgactcgcaatgttcaagaggttcttggtgttggtgaaaagctagaccaggtcagtgaaatgtcaagcaggttgacttctgatacaagaatatacgcagataaggctaaggacctcaaccggcaggcgttgattcggaagtatgctcctgtcgccattgtcattggggtagtattgatgttgttttggctcaagaacaagatatggtgattgtacagtacgaaggatactgggccctgttacaacaccggagaagaacagatggagataaaaaccaggtctattctggaacaagatgctttggtgacttgtatcccgtatctgcccattcaagcgattacttaaactgcccttttgctcctccctataagctagtatcaaagtgaattcgttggagtgcagacctgataagagcatctccggaagtctttcaaaattcactctaaattgtcattttgagagtcatttgcttaataactgtcattctgtttttttcactccaacagctttttatatcctgtttgcactaaggagtcattctctttctatattggactaccgatgaatttggagaagatggatatattcggatagctgtttttttttaaaaaaaagctgttggggggaatcttagcaattaggaaggttatagtctctagagaaactcatattttgtgcatccgttgaactcaatgtaatacaatataagggctctagagttctacatcggggttgtggaactcaatgtaatacaagagctgtggagttgactttacatcggggttgtaaattttagggtggaactcaatataaggattcaggctggtctgatgagttgact

SEQ ID NO: 5210 - DNA, 783 bp, Zea mays
  Clone ID: 700447337_FLI
caggcaacagcccagccgctgtcgccctcgttccgtagtacggcgccgccagatcgtcagtcaccatgatcatctccaagaagaaccgccgcgagatctgcaaatacctcttccatgagggggtcttgtacgccaagaaggactacaacctggccaagcaccccaagcttgatgtgcccaacttggaggtgattaagctcatgcagagcttcaagtcgaaggagtatgtgagggaaaccttctcatggcagtactactactggtacctcaccaacgatggcattgagcacctccgcagcttcctcaacctgccatcagaggttgtgcctaataccctcaagaagtcttccaagcccccgtctcgccccttcggctctggcccacctggtgaccgccccaggggccctcctcgttatgaaggtgacaggcctaggtttggtgatagggatggttacagaggaggtccacgtggcgctccaggtgactttggtggtgataagggtggtgctcctgcagatttccaaccatcttttaggggtagcagacctggctttggccgcggtggcggcggtgctttcggtgctggtggatcttccatggagtgatgtgtcaacatgagctagcataacattcgtctttgaactatgagaacaatgagattttgttttgttttaccgagctgttgccgtgggttgacatggttttgtgatcgtttttgtttagatgaaattattgaaatcaagcagcgagttatcagtctatcgcgtgctgaattccttgtgc

SEQ ID NO: 5211 - DNA, 598 bp, Zea mays
  Clone ID: 700447445_FLI
ctgtcattgaagaaattcaaaggtccgcggaggatagtggtgacaaacgaaatttgaagatgtgcttggggatgctaaagtccatgagaaatcgctgtgatcagaactttgttgcttatagaaagggtcttggtgttgtttgcaacaaaaaaggtggattcggtgtagatgactttgttgttgaattctttggggaggtttacccttcttggagatggtacgaaaagcaagatggtattaaacatatacaaaacaacattgaagatcaagctcctgagttttacaacattatgttagaaaggccaaagggagaccgagatggatatgacttggtttttgttgatgctatgcggccaactacgcgagtagaatctgtcactcctgcaaccctaactgcgaagcaaagtaagatccttttaaggttcaggttccaaccttgtgaatgttaactgtttcattgcttctgtggttatgtaatatcattctttgattattggtcagaatttatgtgtatgatgtgcatgacgtatttttttggagggagtaaccccctctgtgtactatgtattaatgaaatgacacacaactcttccgcgtt

SEQ ID NO: 5212 - DNA, 2580 bp, Zea mays
  Clone ID: 700447446_FLI
tcgtgtaggtcggcaagccgaccaagagtgctgacaacacacaacagtcgaacaatttcaccggcgggcggcggcggccaccagcgcgtcgccgcgacgttagcgcttgatccggcggcggcgactcagcccctttctctcccccaacgctcaaatgccaccgcgcgccttgcccactacctccacacccgcatctaggcgcgtcgtctacgtcatcctcgcggcgctcgccacagcgccgttcctgctcctcctcctctacagcggcgcctcccggtctgcgctctgtcccacctcctaccgcgcgccccgccgcctcccgtacccgtccgtgctctggtccaaggtgcccccgctccccgcgctctccacctcgccgcacccggacctccgcggctctcgctggatcgtcttcaccgcgtcgccgcacgccccgcggcaccgcccgctgcgcgcggtccccgggtggcaggtcctcgccgtcgccgacgaggctacccccgcggactggtcccacccaggtgccgtgctgctcacgctcaccgaccagggccgccttggattcagctccgtcgctttccttccggcccggggcccggcgcgcaaggcagcggcgtacctcttcgccgtgcagcgcggggcgcgggtcatctacgacgccgacgcgcgcaacgccgtcctgggcgggaacctcaccaggcacttcgatgtggatctggaccagcgccacggaggcgccgtgctgctgcagtacagccacgccaatcctaaccggacgatcgtgaacccgttcgtgcactttgggcagccatcgatctggccgcgtgggctgccgctggagaaggccggggagctggatgctgaggagttctacactgagatattcagtggtggccaattcatgcagcaagggatgtgtaatggccttccagatgttgattcggtgttctacttcactcggaagtcattggagatggaggcatttgatttccagtttgacgcggatgcacccaaggtcgcgctgccgcagggcatgatgacaccagtcaactctgttaacacattgttccactcgccggcgttctgggggcttgcgttgccagtgtcagtgagcccaatggcatcagatgtcatacgcggatactgggctcagaggatactatgggagattggtggctacctagttgtctacccaccaactgtacaccgcatagataacgtgcgtggtcacccatttgatgaagagaaggatctccatgtcaatgtagggaagctgataaagttcctaatggagtggcgatccagtaagctgacactattcgagcggattcttgatctaagctatgcgatgacagaggagggattctggagtgagaaggatttgcatttcatgactgcttggctgcaagatctggttgctatcgggtatcgacagccacggttgatgtcattggagattgaccggcccagagcaaccattggacatggtgacaagaaggggtttggtcccaagaagctgccttcagtgcatcttggggttgaagagattggggaagtaagcactgatattggcaatctaataaaatggaggaagcattttggtgatattgtgctcatagtgcattgcaccgaacttgtggaccgaactgcattagagtggaggctgctttatggtcggatatttcgagcagttgttgttctttcagagcaaagcaattctgatcttgctgtggaattcagcaacttgacacaagcctacaagtacttgccgaaggtgtttgatcggtttggaggtgcccaaggatttctgttccttcaagatcgtatggtcttcaattactggaacctcttgaatgctgataaggctaagctctggataaccaaccaggtgaaggaatcttggtcggatgtgcctctacatggtaacaacattgagtggtttgtgaaccaaggggatatgattaaaaaggcggtcagcaattttccatctcaatatcaagataattacaggagaagtgtaggtgaaaataatctgattcgttgcagcagtgagatattttacgtacctcaacggtacacccgtgatttctcagatcttgtaaaagttattgggagcttagacattcatcacagttttgcagtccccatgttattccttgcgatcgattcaccgagcaactttgagtccaaagctttgacaaaacttgtctacagggcagatcttccatcagatacaactctttcaacaatttatactactgaagcacatgcagtgtaccctgtgaaggttcagaacgagatggattttgtaaaactgataagggctatggctttaggagatccatttcttatggaattggtctgatctaggattgcctctcttttttaattcgtcaggttggcgatagaaaacaaaacaacgagataatgtttggttcgtctttgtcctcccttcttccatatgaggatgaggataatctagtgttactcgatctcagtttacatgtacaatcagataatacaggcttactttgttgagctaaaaaacgaaattccgaaattcatggtgttattttgttg

SEQ ID NO: 5213 - DNA, 598 bp, Zea mays
  Clone ID: 700447447_FLI
gaatgccacacccacccatggcgctcctcctctccccgaccgtttccttcctggtctccccgtgtgctccacgccctcgagctctctccgctgccgccaatgtatcctaccccgcctcaaggctgcaatgcaagaacctgtcctcccaacagagccctctgaatgtgactgctacctgtgcttctttcgctgagaagaggctggttcttgtccatgccacggcagagggttctgaggctggtgcggagcagccagaagagccgaaaccagcgaccaagatcgaggaaatgccgctcgagtcgaagcagaagatgatcatggagcaaagagcgcggatgaagcttgccaagaaactgaggcagcggcgcaagcggcttctccgcaagaggaagcttaggaagaagggcaggtggccaccgtccaagatgaagaagctcaagaatgtatgaacagcgtcaacgttgactgccattctgccttggttttatgtgttgtgattgtgattgcacagcttacgaattttgctgttcagaatctgagacacggtacctacaaaatgtaactctgttttcacgtaatttgaatcttcttacagtct

SEQ ID NO: 5214 - DNA, 761 bp, Zea mays
  Clone ID: 700447531_FLI
gccgagggatgtcactgctcgcactccgccaccacacgactaggacaacatacccttttaattaatcgcaggaaagctgcatctctctctgaaaaatcactccgatgtcgatcaggaaaacacagaaaacaacagccgctgacagaagctgctgccaccaaactgcattttctgtcaccccatcaagcgagcctatcgcatatagcgtgtagcattagacatgtcatgtcaatatgtcatcttccaaatgaccaaacacgagagctagcccaagctgggtgccacgaaacgcaatttcaatttgtaatgaccagcgcgcacggcgtgttagggacagccggacgtccctctcggatgaacaggccggtgtgacgcgcgacgaagctcaggggggtgcaccgcacatgcgcagacctgcctgccaacgaatggcatccgtttccttctctctcgccgattcgtgcagccgtatatgtaacgctaacaatatatatctgcaagactgcaagttgccattgcacagcacgggctttgattgacacactagctaggctccaaaagggcatcccatgtagtagcttcgcaaagtgttattggatcacggggaagtttagttatgtttttccaactacagctggataaagttagcttggcgtcatctatatttagttgagttttgactaagctatataaaggcagcagaagtcgtctgtaatttttactctgcatatagaagtaagcaggaatatatgcgcctcctt

SEQ ID NO: 5215 - DNA, 889 bp, Zea mays
  Clone ID: 700447549_FLI
ctcaaatcgctccctgcctctggtcacctcgcttccgctcccggctcccctccggccacccagacatcgtccgttcgctcgccaagagacaggaccggagaccatggcggaccagctcaccgacgaccagatcgccgagttcaaggaggccttcagcctcttcgacaaggacggcgacggttgcatcacaaccaaggagctcggaactgtcatgcgatcactgggtcagaacccaaccgaggctgagctccaggacatgatcaacgaggtcgatgcggacggcaacggcaccatcgacttcccggagttcctcaacctcatggcccgcaagatgaaggacaccgactccgaggaggagctcaaggaggcgttcagggtgttcgacaaggaccagaacggcttcatctctgcggcggagctccgccacgtgatgaccaacctcggcgagaagctgaccgacgaggaggtcgatgagatgatccgcgaggccgacgtcgatggcgatggtcagatcaactacgaggagttcgtcaaggtcatgatggccaagtgagtaaagcctgcggtaacggtatactaccccgcgggaattgaaggaggaaaccaaaccgtgcatcgcatattagaaaggcaatgcaggtcttgtttccttcgtcttccccatgaagaaaccgtactagctgtagctgctgaacgtttgagtcctcctgctgccacccttatctccatttgtgtcatcgaaactccttgcttcccctgctgtgtgaatctgtacggctttgcgtgttctggacactgattgcagttggatccagtttgtagttatatttgttcatcgaatctgcccagactcctttggtaccattcaacaggctgctgctttctgttt

SEQ ID NO: 5216 - DNA, 1608 bp, Zea mays
  Clone ID: 700447550_FLI
gggtattcgggtgagccggcagcggcgtcggctcggctccggctggggggtgcggcggcagcggcgtcggccttcgcgggagacgcggcggcggccgggcgagcttcgggcttcgggcgtggcctcacgcccgcgccttggcggcctcgccacggcagcaacgcgtcagggcgtcggcctttgcgggagacgcgggcacgcggcgggcgggcttcggccgtgggcctcgcgcccgcgcttaggtggcctcgctgcggtagcaacgcgggcatcagctttcgcggaagaggcggcagcggccggccgggcttcggcggagggcatcgcgcccgcgccaggcgtcggcattcgcgagcttcggtacaggctgtctcttctagaatgctaggagtggagaattgatgccggagaaatgcaagtttgaggacagaagacctcttcaggactagcagttcttgacatctacacggttcaacacctgtttcttctggggaagaaagcacagcaattcattatgaagagcagcgacggaaaccaaatcaagttacaaccaatgtggagaaaagttgcctatgggggaaggcagtcaggatatgatgataactacactgacgagtccttccttgaggagatggttatgaatgccaatgtcgtcaagagggaccttctgaaagtgatgatcgactctgtatccatatcacagtatctttgcatcgtcgctcttgtggtttctacatggaccctaacgctgaacttggacattgatgaatctactctcctcaaactagatgttggtcttctccttgttgggttctgggtcctcttgctcacaacttgtccgttctcgctgaagcttctgacaaagtatgtcctcaatatatcattcttcataagcggtctttatgttctcgcaccaatttatcataccctcaccaggtccatcagttcagattcaatatgggcccttgctgtatctcttctgctggttcatctatttttacacgattactctggttcaaccataaggcctccaggcgcattgaacaacccaaaattaactagcaacatctccttgaatgcatcgatagtagcctctgtccttgtggcttcgcggctgccatcaaggctgcacgtcttcgcaatcatgttgttctccttgcaagtcttcctctttgcacccctcattactttctgtgtgaagaaataccattttaggcttcatctgctattctccttcacgctaatggctgtggccctgagtgtcacataccagttgcatcgaatgttcttcactgttctattggcgctacttgtttttgtctcaatcgtttgcccttactggcttataaggattcaggaatacaagtttgagatcaatggcccctgggatgaagcaaaactctgctttgatataactgaatagcagtgctaagttttctttaggaatgatttgcattgaagattggtttggttgtatatactggcatataggctcgctgcgagccttcatggcataggtgttttcatgtgaatgtatatgctatttaatggatttattgtgttaccgagactaattcttggcatgctttgacatgcctaatgatcact

SEQ ID NO: 5217 - DNA, 542 bp, Zea mays
  Clone ID: 700447580_FLI
gatcgatacaatgtatctgatctggtgttcgcccatttttatccgatgacttcttgcagtggagctgggccgtcggtacttcccgaactgctcgcaggtgctggacaagttcctggaggacgatctgccggaaggtctggaccagttctacctccagaggggcacagccgatgagcagaaggtgaagaggatgcgcttctgcgagctgaaagaggacgtgctgaaggcgtttagcaaggacaaggcggagggcagcgtgttctcgggcctgtcctcgtcgtcgtcgtgctcgccgccccagaagtatgcccagaggtgatcaaggcaccagtttttgccgtatagtttgttatcatggtcttcgagacttggacccggacagcatatagggacatgtacacctgtgtatgtatagtgcttacaattggcgtaagtagaactatatgtatggaacataaggaaacatggcaggaacaccgtgcaaaaagatgaaaagatggccgaagtgctctatgcgagtgcccacctgattcgatggccct

SEQ ID NO: 5218 - DNA, 500 bp, Zea mays
  Clone ID: 700447718_FLI
catcgtcttcaacgacaactcatacagaagcagcagcagcaacatatgcagaagctactaccacaacgacttcaataccaagagcagctacatttacagcaacagatgacgcaacaaatacaacagcaacaacaatctctataccagcaacatcaacaaatgcagcatcaacagcaactgtggcaacaaatacaacaacagaagcatcagttgcaacacatggatccccaacaacaacagctgttgtctcagatggtgggtacagaattaggcagtgatgatgacacaagggaagattgggtcacaggggctgggccgcatgcctagggaatcagggagggttaatgagggcttacactcactcacttgagggttaagatgtttcctagtgtttgtcgttaaatcattaactgataacttcaaaaaaataaaccagtcatttgtatagttatacggatggggtaagagtttaaataacaccgttatgttatcgaatagct

SEQ ID NO: 5219 - DNA, 1444 bp, Zea mays
  Clone ID: 700447781_FLI
ctccccaacccgttgtccactgccaccaggcaaaccagccgcgccgccgccggcgatgaccaccgcgcggctcgtctcaacatcccccgcccgcctatcctccacgtcggcttccccgattcacagaacctcgctgtgtgttgtcggtcgtgcccctgctttctccgccaggccgctcggattctcgcttcgtctcaagccgtcgcctgccatggccgccgccggcgtcggcggcaacggcccccctaccgcgcatggagactcaataggtggttcatgtgtttgatactggaattttttgctctctgtgcagcttcgcgtttgatttgttcctcagctgtgcccatcacttcatagttcatatttgttcttctttacggtagctatttcgactgactgtatttattccaagcacattttttttttatgatcgcgttcaaaatcttcaggatcttttaggattggagaggttaagagggtgaccaaagagacaaatgtgcacgtgaagatcaaccttgatggcactggtgtcgccgagtgtagcacagggataccgttcttggatcacatgctcgatcagttggcatcacatggactctttgatgtctacgttaaagcaacaggcgacacccatattgatgatcatcactcaaatgaggacattgctttggcaattggaacggcactacttgaagcacttggtgatcgaaagggaattaaccgatttggtcattttacagcaccgcttgatgaggcagcggttgaggttatactggatctgtctggtcgccctcatttaagctgtggcttagatattcctactcaaagagttggcacatatgatacacagctggttgagcacttcttccaatctgtggtgaacacatctgggatgactcttcacatccgtcagcttgctgggaaaaactcacaccatatcattgaggcatctttcaaagcgtttgctcgggcccttcgacaagcaacagagtatgacctgcgccgtcaaggcactgtccccagctccaaaggtgtcttgtcgagatcatagcatcgcagtttggacgaacgcatatcttccactgcagcgcacatcaatgagaggaaaacctgcagagtagacagcttggtttttgctgctcacgttgggagcctgcgttagcctctgaacattgctaatgggataatcaagaaccatctagcaactagcaagcaccacttattatctgccttgtgacagtggcatagcgcgtctgctcgctactgcaactctattatctgctcgctggagttacaggatatctgaagattgaaggtctagacatgctgtgactttgtaagctacaccggtcaggaataatgctgcgtctggatcatccgcagaaacataggggtatgtaaattgtttggacattgaagggaatgcattgatctttgcgcgttc

SEQ ID NO: 5220 - DNA, 1236 bp, Zea mays
  Clone ID: 700447956_FLI
catcagtctacccatcagtatgcaaaatgataagatcatattgcatgagtccatcttcacacactggttggacaagggttattgttgaaaagccctttggaaaggatttgaacactgcagaggaactgagtactgaacttgggcagttgtttcaagaagaacaactctatagaattgaccactatttaggaaaagagcttgtccaaaacttgcttgtgcttcgttttgcaaaccgcttatttttgcctctctgtacgttagctatgttatcacggttccagagaggcaaaaataaggaagactttggaactgaaggacgtggaggatattttgatcaatatggtatcattcgtgatatcattcagaaccacttgttgcaggtcttctgtttggtggctatggaaaagcctgtctctcttaaacccgagcacattagagatgaaaaagtcaaggttctgcaatcggtggagcctataaagcatgaagaggtagtcatcggacaatatgatggctacaaggatgaccctactgtgccagatgactccaacacccctacttttgcatctgttgtactgagggtacacaacgaaagatgggagggggttccattcatcctcaaggctggcaaagcacttaattcgaggaaagcagagatacgtgtacagttcaaggatgctcctggtgacatttttagatgcaagaaacaaggcaggaatgagtttgtcatacgcctgcagccatcagaagccatgtacatgaaactaacggtcaaaaaacccggactggaaatggcaaccgaacagagcgagctggatctatcctatgggatgcggtacaatgacgtaaaaatcccagaagcatacgagcgtctcatcttggacacgataagaggagaccagcagcacttcgttcgccgagatgagctgagggccgcatgggaaatcttcactcctttgcttcacgacatcgatggtggcaagctcaggtccgttccgtacaagccgggaacccgaggaccgcaggaagccgacgagttgagcaggaggatggggtatgtgcagacccatgggtatgtatgggttccgccgaccctttctaaggtttagctgtttgattatcaactgccgtgtaaccacagaatgacagaacgcggggaagatccctttgtaatacgtgggtcgtgtaataagagaaacttctgcttgttgtgagagtgaccctttacggtattggaat

SEQ ID NO: 5221 - DNA, 719 bp, Zea mays
  Clone ID: 700448008_FLI
ctgagatggtgtcaccagagagccaaactgatgctcggaaagaaaacatccattcagatgtcgctgagacagatgaatgcactaagactcagaaggccgctctagcaggcacagagggagaaaattctgctgaagattctggtgtgccggtgtctgagatggacaaatgcaacgagatgccgaaggatgctccgacacttacagcagcaggtgcaaatcctgctgaagacgaagcttccctgaaagacctctctgtgcagacagagaacaaggcttcttctgcctccccagctcctgatgatccgaaggccagtgacgagaagacgctggcagaagagaaccagaagctgaaagagcttctgcaaaagcttctcgcgtccggcaacgatcagatgggggtcatcacggacctaagtgagaaggtcaaggtgctggagcggaagctggcacgcaagaagagaccaaaggtgagggtgcacaggtcatccaggcatgcgacggctaaagtccagtgaaagtaagtctgtaaggttttgaggtttatgttgtatggatcccatgttgcttcctgtgtccagctattgtgcactgtataggtatagccatgctgtggcactgtgctttgtctcggacaacgcaaggtgtggcatgttctgtattttatgtctgtataatgcatccaaccacatctagtgttccgtgagcaaattgattggggc

SEQ ID NO: 5222 - DNA, 653 bp, Zea mays
  Clone ID: 700448014_FLI
acctggccttcaagctgcactacctgcgcggggtgtactactaccggtccggggacggcctcgccaccaaggtgctcaaggaccccatgttcccgtggctggacgaccacttccccgtggccggccgcgtccgccgcgccgaggcggagggggacgccgcgccgcgccggccctacatcaagtgcaacgactgcggcgtgcgcatcgtggaggccaggtgcgaccgcgacatggccgagtggctccgcgacggcgcgcccggcaggatcaggcagctctgctacgacaaggtgctcggccccgagctcttcttctcgccgctgctctacgtccagatcacaaacttcaaatgcggtgggctggcgctggggttcagctgggcgcacctcatcggcgacatcccgtcggccgccacctgtttcaacaagtgggcgcagatcctgagcggcaagaagccggaagccaccgtcctcaccccgccgaaccagccgctgcagggccagtcccccgcggcgccgcgctccgtcaagcaggtcgggcccatcgaggacctctggctggtccccgcgggccgcgacatggcgtgctactccttccacgtcagcgacgcggtgctcaagaagctccaccagcagcagaatgggcgccaggac

SEQ ID NO: 5223 - DNA, 364 bp, Zea mays
  Clone ID: 700448072_FLI
gtggaggctttggaggtgggcatggtggtggtcgctatcctggtggtggagggcaccatggtggtggagggcaccatggtggatggaattaagaagcattgctacataaagtttctctatgtccgataacaataaatggcgacgataaatttgaatgctacatgtagttccgtgatggaaatcttatgtattttgtataaaacatggtacatggactgttacgtatgttgcatgaaatactgtactagaataagatctttgtatgccatgtatggtattagtgtgcatgtgtctggcttttgaaaggtgtacctcctcatttatggacttatatgtatgtatagataaaaataatatttttatc

SEQ ID NO: 5224 - DNA, 820 bp, Zea mays
  Clone ID: 700448092_FLI
gcaggagggaacaccatacctgaaacttcactgcctttttgtcaggcacgctggtcaggaaatcagtagcctgttttggctgctgttgctaatcagttgggagagggggagatggccaggaggaacatcggagtcgcagtggacttctcgtcgtgcagcaaagcggctttgcggtgggcgtcgacgaaccttgcgaggaacggcgacaggctcatactcatccacgtgaacagctcctgccagaacgagcggggcgccgttcatctctgggagcagagcggttccccattgatccctctggccgagttttcagacgtcgccaggacatacggtgtgtcaccggacaaggagacgatcgagatcctcactcaagcggcaaatcatagagggatcgaagtctttgcaaaggtgttctacggcgacccggcaaagaagctgtacgaagcagccgacatggtcccgcttagctgcatggtggtcgggagcagaggactaagcacgctcaagagggctctgatggggagcgtgagcacgtatgttgtgaaccacgcggcctgccccgtgacggttgtgaaggagatggtgtagcgtgttgaacaccgctggttacaagcttcaccctagccagattgaataagcgtgcttgataagcactgatcaggggggatcttgctacttatacgacattttgtgcttgaaatttgggtaactaggaccgggcagaacatatctatgtcttgggctcatggcactgacatctgaacatatgccctaagtctgttgtaatcgcaaaatatttttgcttataaaatcagttaag

SEQ ID NO: 5225 - DNA, 980 bp, Zea mays
  Clone ID: 700448252_FLI
ccccggccgcctccgatctcagctctccgttaacacgcaaacgcaagctcccaagcagctaccaaccagccgggagagggagcgcacgcactgcgacaatggccacggccggcggaggggccgggcatctgaagctgctgggcgcgtggccgagccccttcgtgaaccgcgtacgcatggcgctgcacctcaaggggctggagtacgagaacgtggaggaggacctcaccaacaagagcgacctgctcctcgcctccaaccccgtccacaagctcgttcccgtcctcctccacggcgacaagcccatctccgagtcactcgtcatcgtggagtacctcgacgacgccttccccggcgctggccaggccgtcctccccgccgacccctatgaacgcgccgtcgctcgcttctgggccaaatacgtcgacggcaagttgcacggcatgatggtgaaggcgctcatgggggcaacggaggaggagagggcgacggcgacggcggacgcgctggccgctatggacacgctggagggcgcgttcgccgagtgctccggcgggaaagagttcttcgccggcgacgcgcccgggtacctggacgtcgcgctgggaggcttcatcggctggctgcgcgcctgggacaaggtggggggcgtcaagctgctggacgccggccgggccccgcgcctggccacgtgggcggagcgcttcgccgcgctcgacgtagccaaggaggtcatcccggaccccgaccacatcgccgagtttgccaaggtgctgcaggcacgctccgcggcagctgccaccagcaactgagctcgcaagtgaatgctgctgctctgccttcctgataaatcatatcatggtacccggttttgttcgtttaatctggcgcggataaaacatggtttgttgccgtaccaaactaagagtatgcatgcttgcttgttcttataataaatgtctgatgaacattcgttcaag

SEQ ID NO: 5226 - DNA, 1149 bp, Zea mays
  Clone ID: 700448273_FLI
gacaagatgaaggaggtgatcaggtacatgaacagaaacaaacttgggaaggaaataagggagcagatcaagggacacctgaggttgcagtatgagagcagctacaccgaagcatccgtccttcaggatatcccgatttctatccgtgcaaagatttctcaaacgctgtataagccatatatcgaaagcattccactgttcaagggatgttccgcagagttcattcaacagattgtgatcaggttgcaagaggagttcttcctaccaggagaagttatattggagcagggaagtgcagtcgatcagctgtacttcgtctgccacggtgcactggaaggtgtaggcatcggtgaagacgggcaagaggagactctgctaatgctggagccagagagctccttcggcgagatctcaatcctctgcaacatcccgcagccctacacggtccgcgtctgcgagctctgccggctcctgcgtctcgacaagcagtccttcaccaatatcctggagatctacttcgtcgacgggaggaggatcctgagcaatctctccgagagcgagtatggcggacgggtgaagcagctggaatcggacatcacgttccacatcgggaagcaggaggcggagctcacactgcgggtcaacagcgccgccttctatggcgacctgcaccagctgaaaagcctgatccgggcaggggctgatcccaagaacaccgactacgacggccgctcccctctgcatctcgcggcttccagagggtacgaggacgtcgtgcagttcctcatcaacgaaggcgtcgacatcgaccttaccgaccagttcgggaacacgccgttgctggaggcggtgaagcaggggcacgaacgggtggcagcgctgctgttcgccaagggtgcgaagctgagcctcaagaacgccggcagccacctgtgcacggcagttgccaagggggactcggacttcatccggcgcgccctggcctacggcgccgacccaaactgcagggactacgaccaccgcacgccgctccacatcgccgccgccgagggcctctacctcatcgccaagatgctcgtcgaggccggcgccagcgtgttcaccacggacagatggggcaccactccgctcgacgaagcgcgcaagtgc

SEQ ID NO: 5227 - DNA, 1257 bp, Zea mays
  Clone ID: 700448276_FLI
gatcgccctcgtcggcctcctccgctacgccaagtgcgtcctcttcagtgccgccacgccgcggcccgtggactccaaggtggatctcgacgacgcggagccaccgtcgccgccgccggacttccggtgccccatctccctcgagctgatgggcgaccccgtcgtggcttctagcggtcagacgtacgaccgtgactccatcacgcggtggttcggctctggcaaatccacgtgccccaagaccgggcaagtgctgctgaatctggaactcgtgcccaacaaggcgctcaagaacttgatatcgcggtggtgccgggagaacggcatccccatggagagcagcgagtccgggaaagccgagccggcggcggtggtaggcgcgaacaaggccgcgctgaaggcggcgcgcatgaccgcgtcgttcctcgtgaagaagctgtcggcctctttctcccccgaggcgacgaagcgcgtggtccaagagatccggcagctggccaagtccgggtccgacaatcgcgcgttcatcggggaggccggcgccgcggggctcctcgtgccgctgctcctgtccgaggactcggctctccagctcaacgccgtcacggcgctgctcaacctctccatcctggaggccaacaagaagcgcatcatgcacgcggagggcgccgtggacgcgctctgccacgtcatgggctcgggcgccacgtggcgcgccaaggagaacgccgcggccaccgtgctcagcctggcggccgtccacgcgtaccgccgccggctcgggcggaacccacgcgtcgtcgagagcgtcgtgcggctcgcgcgcacgggcccctccagcaccaagaaggacgcgctcgcggcgctcctgtgcctgtccgccgagcgggagaacgtgccgaggatcgtcgaggccggcgccgcggaggcggcgctggccgcggtcggcgaggccgaggccgaggccgccgcggcggtgctggcgtcgctggcgaagcgcggcggcgcggaggcgatcgtcgcgctggacggcgccgtggcgcggctggtgaacgagatgcggcgcggcacggagtggtcgcgggagtgcgcggcggccgcgctggtgctgctgtgcaggcgcgccggcgccgccgcggcgtcgcaggtggtggcggtccagggcgtggagtgggccatctgggagctgctgggcaccggcacggagcgcgcgcgccgcaaggccgcgtcgctcggcagggcgtgccggcggtgggc

SEQ ID NO: 5228 - DNA, 600 bp, Zea mays
  Clone ID: 700448307_FLI
ggaactggaaggcagaagcgcccgcacaggcacagcactactcgaagcaagaactatagcagctgctgctcctcctgtacaccaagcgtacgtgcaaatacaatggccaccaaaagcatcgcctcgctgctcgccgtggccctgctgctgctgctgctctcctccccggccgccgtcgtcgtcgtccgcgcgcagcagcagcagcggggcaacccgtgccccgaacgcggtggcggacctcaaggtgtgcgccgacgtgctggtcctgctcaagctcaagatcaacgtgccgccgagccagcggtgctgcccgctgctgggcagcctcgtcaacctcgacctggccgcctgcctgtgcgccaccatcaggctcaacgtgctcggcatccccgtcaacctgccgctcgacgtgcccctcgtgctcaactactgcggccggaacgcgtccgccgtgccgggctccaactgttccttctgaggcatgttcgatcgatcgatcggcaaccccgctccaattgtaggttggttggttggttatatgcgggccgggtactgtaacagcagctgcttggaaataaaaagcgtgtaatgaccttactc

SEQ ID NO: 5229 - DNA, 1511 bp, Zea mays
  Clone ID: 700448312_FLI
cgacaagccctacgggattgggggtcttgatcttcttcttggagcagacgacggcgaaggaggaggcgcggaaatgctgcgtctcgggatgctcaggcattcgcgtaaacgatgcggagaagctcgtgacgatcggaggccatgtgctgcgcgaaggtgagtggctgtcgctgaatgggtcgactggtgaggtgatccttgggaagcagccgctttccccaccagcccttagtggtgatctgggaactttcatggcctgggtggatgatgttagaaagctcaaggtcctggctaacgccgatacccctgatgatgcattgactgcgcgaaacaatggggcacaaggaattggattatgccggacagagcacatgttctttgcttcagacgagaggattaaggctgtcaggcagatgattatggctcccacgcttgagctgaggcagcaggcgctcgaccgtctcttgccgtatcagaggtctgacttcgaaggcattttccgtgctatggatggactcccggtgaccatccgactcctggaccctcccctccacgagttccttccagaagggaacatcgaggacattgtaagtgaattatgtgctgagacgggagccaaccaggaggatgccctcgcgcgaattgaaaagctttcagaagtaaacccgatgcttggcttccgtgggtgcaggcttggtatatcgtaccctgaattgacagagatgcaagcccgggccatttttgaagctgctatagcaatgaccaaccagggtgttcaagtgttcccagagataatggttcctcttgttggaacaccacaggaactggggcatcaagtgactcttatccgccaagttgctgagaaagtgttcgccaatgtgggcaagactatcgggtacaaagttggaacaatgattgagatccccagggcagctctggtggctgatgagatagcggagcaggctgaattcttctccttcggaacgaacgacctgacgcagatgacctttgggtacagcagggatgatgtgggaaagttcattcccgtctatcttgctcagggcattctccaacatgaccccttcgaggtcctggaccagaggggagtgggcgagctggtgaagcttgctacagagaggggccgcaaagctaggcctaacttgaaggtgggcatttgtggagaacacggtggagagccttcctctgtggccttcttcgcgaaggctgggctggattacgtttcttgctcccctttcagggttccgattgctaggctagctgcagctcaggtgcttgtctgaggctgcctcctcattggcaaccggattgcctgctgctggtggatgtggtgatcaacagtattattacagagccatgctatgtgaacattactagtagcagtgctcataaaagctacaatcccatgtcctttttttccccagtcatgtaaaacttccaaactgctccatggttcaaaactctgttcttcaatacatcatcaattatcgatt

SEQ ID NO: 5230 - DNA, 651 bp, Zea mays
  Clone ID: 700448317_FLI
gcatccgcagagagcttgttccgtccaggcaaccaaaaagcaagttgccccgccgcgcagaggaagaagagagcagaggaggatggctcgtacgaagcagaccgcccgcaagtccacgggaggcaaggccccccgcaagcagctcgccaccaaggcggcgaggaagtcggcgccgacgaccggcggcgtgaagaagccccacaggtacaggcccggaaccgtggcgctgcgcgagatccgcaagtaccagaagagcacggagctgctgatccgcaagctgcccttccagcgcctggtgcgcgagatcgcgcaggacttcaagacagacctccggttccagagccacgccgtgctggcgctccaggaggccgccgaggcctacctcgtcggtctcttcgaggacaccaacctctgcgccatccacgctaagcgcgtcaccatcatgcccaaggacatccagctcgcccgccgcatccgtggcgagcgcgcgtagccatcatctccggggatctgatgaatgtctagttaccaaacaaataggctgtattagcgtcgttgttctgtattcgttattttggattcggttgcagtgaaaaacagctttactaatcttatttgtgatctctggtggttgctcgcttctaagcgatc

SEQ ID NO: 5231 - DNA, 1261 bp, Zea mays
  Clone ID: 700448386_FLI
gtcgggtatctgagcaaggacaccgtgtcgttcggctccaccagcgtgcccaacttctactacggctgcggacaagacaacgagggcctcttcgggcagtcggcggggctcatcggcctggcgcgtaacaagctgtcgctgctgtaccagctggcgccgagcatgggctactccttctcctactgcctcccgacgtcgtcgtcgtcgtcctcggggtacctgtccatcggctcctacaacccggggcagtactcgtacacgcccatggcgtcgagctcgctggacgactcgctctacttcatcaagatgaccgggatcaaggtcgcgggcaagccgctgtccgtgtcgtcgtcggcctactccagcctgccgacgatcatcgactccggcacggtgatcacgcgcctgcctacgggcgtgtactcggcgctcagcaaggcggtggcgggcgccatgaaggggacgccccgcgcgtcggcgttctccatcctggacacgtgcttccagggccaggcggcgcggctgcgcgtgcccgaggtcaccatggccttcgccggcggcgcggcgctcaagctggccgccaggaacctgctggtggacgtggacagcgccaccacgtgcctggccttcgcgcccgcccggagcgccgccatcatcgggaacacgcagcagcagacgttcagcgtcgtctacgacgtcaagaacagcaagatcgggttcgccgccggcggctgcagctgagaagcgacacctacatacacgcgcatgcacagaccgactcggtaactaaaactaaaacgagcagcgcatgcatgcatctaccgtccggtttcgtctgaaaccatcattaatttcgatcgtccactccacgcacagcaagttctttacggaccttgccgcatatgatatgtacatggtgacaagataaggtacaggagaattgatgaaagaagcgttgccggccagtcgtcgttgcacaagaacaaacacataaattaaaacattattacaggagtagggtatttattgtattgttcaggccagaaaaatatgtggaaagtgggtctttaacttaattcggaagaagcatatagcactccaaaaaaaaagattcatattcatcacatagccaacagatagcatgtagtagctgttcatgcatgtaattctttggcaagtcctggtcaggaagtaccatttactgtgtgtaggacgaataaactgaagtgatgtgtatgtttctgatttctttcgtacttgc

SEQ ID NO: 5232 - DNA, 2239 bp, Zea mays
  Clone ID: 700448428_FLI
tgtccaaggatccggccggcaaggatctccggggcgcgcgagcagccatggccgcgaacggagaggatttccggggccctctcctgcttggagcgcgagacgacggagcggcctggtggggccgtgacggcgccgaccctccgcgaggccgccggagcagcagccgcccgtggacggcgctggccatcgccgcggcgctcctcgccctggcgggcgtcgtcttcctcctcagctccagtagctacgggggccgtcccggcgcctcccgcgccgccgccgccgcgcggcggagcccgcaggaggtggagtccgcggtgggcgcggcggcggcggacgacgcgcggtgctcggaggtggccgccgcggcgctgcgcgcgggcgggcacgcggtggacgccgccgtggccgccgcgctctgcctcggcgtcgtgcaccccatgtccagcggcatgggcggcggcgccttcgtcgtcgtccgggacgccgcctccggccaggccgtcgccttcgacgcccgggaggccgcgccggccgccgccacgccggacatgtacgcggcggacccggcggccaagtacaggggcgcgctggccgcgggcgtcccgggcgagctggcggggctccacgccgcgtggtcgcggtacgggcggctgccgtggcgggacctggtggcgccggcgatccgcctcgcgcgcgacggctacgaggtggtcccgtacctggcccgcgcgctgcaggagtgcgagggcgacgtgctcgcggaccccggcctgcgcgccgtgttcgcgccgggagggcggcgggtgctggcggcggggaagacgtgccgcaacccggcgctggcggccgcgctggagcgcgtggcggaggagggcgccgcggcgctctacggcggcgccgtcggggaggccctggtccgcgacgtcagggcggcgggcggggtcatgacgatggacgacctcagagggtacagggtggacgtgggcgccgccttgcgagccgacgccatggggttcaccttcctcggcatgccgccgccgtccagcggcaccctcgggatggcgctgatcctgaacatcctgcaagggtacagctcgctcgagttcttgaaggagctccttggcatccaccgggtcatcgagtccatcaagcacatgctagccatccgtatggacctcggcgaccccgacttcgtggacgtgaccggcgacgtcgccgagatgctgtccacgacattcgccgacaaagtccggcagaggatcgtggacaacacgacgttccctcccggctactacttccccaagtggagccagctggacgaccacggcaccagccacctgtgcgtggtggacggcgaccggaacgcggtggcgatgacgacgaccgtcaacgcatacttcggcgccaaggtgctgtcgccgtcgacgggcatcgtgctgaacgacgagatggacgacttctccgtccccgcgaagcgcacgccggaccgcctcccgcccgcgccggccaacttcatagcgcccgggaagcggcccctgtcctccatgacgccgctgatcatactcaaggacggtgagctcgccggcgtcctcggaggcagcgggggcacgaacatcatcgccacggtggtccaggtgttcgtgaaccacttcatcgtcggcatggaccctctggcggccgtccagcatcccagggtgtaccacaagctgatcccgaacgtcgtgacgtacgagaaccagacggtgggcgacggcgaggtgatcgcgctgggcggcgcggcgagggcgttcctggaggagaggggccaccggctgcgcagcacggactcgggcgccgtgtgccagttcatcgtgcacgagctggcggagccgccggccgcgcccggacacggcgtcttccgcgggaggctcaccgccgtgagcgaccccaggaagggcggcagccctgcagggctgtgattgtgaattgtgatggaggctggtgcgcgtggatagttgcgccttccgatccaactttcgtgcgtggatctcatctcctccctgtagatagatagaaagattcatagacatcatgcattgtttatatatatattgcctagatgggaatccatcaaactgctttcgcgaactagtggacaggcacgaccagtgaaagtttcgagaaacaatagtgaacatttgagagaatttatatgtaacaggtgacaagatttaatataatgtgtatttgcaacaagatg

SEQ ID NO: 5233 - DNA, 1350 bp, Zea mays
  Clone ID: 700448429_FLI
ctccggtccgttccgctccttcctccccctatctagctagccttcccgttcctgcatcgcggcggagatgggcgcctccaccacgccgacgcgggcgtccactccttccgcctcgggctcaaccgcttcgccgacctcaccaacgacgagtaccgcgccacctacctcggcgtcaggagcaggccgcagagggagaggaggctcggtgacaggtacctggccggcgacaacgaggacctgccggagtccgtcgactggcgggccaagggcgccgtcgcggagatcaaggaccagggcagctgcgggagttgctgggctttctcaacaatagcggctgtggaaggcatcaaccagattgttactggcgacatgatctccttgtctgagcaggagcttgttgactgtgacacttcatacaaccaggggtgcaatggaggtctgatggactatgcgtttgagttcatcatcaacaatggcggaatcgacaccgaggaggattacccttacaagggcacggacggacggtgtgatgtcaacaggaaaaacgccaaggttgttgctatcgacagctatgaagatgtaccagcgaacagtgagaaaagtctgcagaaggcagttgcgaaccagcccgtcagtgttgcaattgaggctggtggcagagcatttcagctctacaactcgggtatcttcacaggaacctgtggaacagcgttggaccatggtgtcacggccgtcggctacggcacagagaacggcaaggactactggatcgtgaagaactcttggggcagcagctggggcgagtccggctacgtcaggatggagcgcaacatcaaggcgtccagcggcaagtgtggtatcgccgttgagccgtcgtaccctctgaagaagggcgccaaccccccgaaccctgggccgaccccgccttcccccaccccgccgcccaccgtctgcgacaactactactcgtgccccgacagcaccacctgctgctgcatctacgagtacggcaagtactgcttcgcctggggctgctgcccgctcgagggcgccacctgctgcgacgaccactacagctgctgcccccatgactaccccgtctgcaacgtcaagcagggaacctgcctcatgggcaaggacagcccactgtcactgtcagtgaaggctacgaagcgcaccctggccaagccgcactgggctttccctggcaacacagctgctgacggcatgaagagcagcgcatgagaaaaacgcagcatggcattaggccgccaacagccagcatgattagagcccccctgcatgcagaatgatcacccggtcccgtagttcacgacgaaagcatggctg

SEQ ID NO: 5234 - DNA, 926 bp, Zea mays
  Clone ID: 700448482_FLI
gcatcctgttcgtgaccttcgtgtcctggccgcgccacaccgccgtcaccgcgttcccggacacgcccgccggcgacgacagcttccactacttcaagaaggtgttcgacgtgcaccggattcggtccacggccggcgcgctcgacttcagcggcatcggccagggctacttctgggaggcgctcttcaccttcctctacgtcgacatcctcgacacaaccggcagcctatacaccatggcgcggttcgccggattcgtggacgatgcgacgggagagttcgagggccagtacttcgccttcatgtccgacgcgacggccattgtgtttggctcgctcctgggcacgtccccagttacggcgttcatcgagtcgtcgacggggatccgagagggcggccggacggggctgacggcgctcacggcggcgatctacttcgcggcggcgctgttcatcacgccggtgctcgcttcgatcccgtcttgggcggtcgggccgccgctggtgctggttggcgtgatgatgatgcgtgcggtggcggaggtggactgggacgacatgcggcaggccgtgccggcgttcctaacactagcgctcatgccgctcacctactccatcgcctacggactcatcggcggtatcgcctcctacatgctcctccactcgtgggactgggcgtgccaagcgaccaggaggctcggctgcctcaagaagggcggaggcggcgccgacagcactaatggcggcgtggcagagcagagcgtggaagagcagagaaaggatatggaatcggcataacatttctttcgcctttttgtcctctctgcctttcaaatttcttattttttagggaatttaggtacttcggtcaacctcaatggccattgtttcattttacagtttttaacagtgctacgtcaggtccat

SEQ ID NO: 5235 - DNA, 651 bp, Zea mays
  Clone ID: 700448580_FLI
gcagtgcagaatttgcatagggagcaacttgcaataattctccgagagaatgctgttctgaagcggggcgttgcgatacaacacgaacgccaaaaagagtttgatgtgaggactcaggaagtcgacagccttaaacagttggtactgcaatatcaggagcagataaaaactcttgagataaataattacgcacttagagtgcatttgaagcaggctcagcagggcaattctatgcatggacgtttcccgcctgacgtcttctaatgtctgccatggctcaacagaataattatgcatggacgttcgttaatatttgatgctgtacagttggattttgaactaagcagtgtcaaataaaaaaaatcgaggtagtacctattaagataagtagactcaggacctcaagttcgactcaaatgctgcatatacgatcgtaccccatcattggagtcgacaacactaaggtccaactacctggaagctgagatgaaatagcatgttagggttggcagtgcactggtccttgcatacttgttgtaataatggatcttgcaggggaagctcggatgaagtaatattggctgtatgcgtttgaagtgtgagaactgatatatatcgtaagcttaacacactaaaaacaaaacaatgttt

SEQ ID NO: 5236 - DNA, 1194 bp, Zea mays
  Clone ID: 700448582_FLI
ctcaacatggacctgttcaggaagtgcatggagcctgttgagaagtgcctgagggatgccaagatggacaagagcagcgtccatgatgttgtccttgttggtggctccactaggatccccagggtgcagcagctgctccaggacttcttcaacggcaaggagctgtgcaagaacatcaatcctgatgaggccgttgcctatggtgctgccgtccaggccgctatcctcagtggtgagggcaacgagaaggtgcaggacctgcttctgcttgacgtcactcctctctctctgggtctggagactgccggaggagtgatgaccgtccttatcccgaggaacaccaccatccccaccaagaaggagcaggtgttctccacctactcggacaaccagcctggtgtgttgatccaggtgtacgagggtgagaggacccggacccgcgacaacaacctgcttgggaagttcgagctctccggcatcccaccggctcctcgtggtgtcccccagatcacggtctgcttcgacatcgacgccaacggcatcctgaacgtgtctgccgaggacaagacgacggggcagaagaacaagatcacaatcaccaacgacaagggccgtctgtccaaggaggagatcgagaagatggtgcaggacgcggagaagtacaagtcggaggacgaggagcacaagaagaaggtggagtccaagaactcgctggagaactacgcctacaacatgcgcaacacgatcaaggacgagaagatcgcgtcgaagctggctgccgacgacaagaagaagatcgaggacgccatcgacgcggccatcagctggctggacgccaaccagctcgccgaggcggacgagttcgatgacaagatgaaggagctggagagcctttgcaaccccatcatcgccaagatgtaccagggcgcgggtgccgacatgggaggctccggcggcatggacgaggacgctccggctggaagcggtggccctggccccaagatcgaggaggtggactaagcggtttgtgtcaggtctcgtgtgtctgctgcagtggctggctggcccagtcgctgctcgatttatcgtcgtcgtcgcggtgtatccgcgttagaaccttttgttggtgaacaatattatcgtggcacgcgttttaagtaatacggtattctggttcggtttcgtattgctgtt

SEQ ID NO: 5237 - DNA, 794 bp, Zea mays
  Clone ID: 700448587_FLI
aaccgcgccacccattgttgtcgcttctcacttctcactcaccaaccaacccaaccgagcaacttggctcgtaccgtacgtagtacctgctgcgacacgccgaggagctagacctgttggagctaggacagtcagacacgagacgacagagaccatgtcgacgacgacgatgaaggcgagcgacccggggtccgcgtggttcggcagcggcgcacgcacccggtcggcggcggggataagccacaacgcgcggctcgtcaccaccgcggtcgccgcgttcgtgtccgtgctcggcctcgccctcttcctccacctctacgtctgccacgtgcgccgccgcaaccgccgccgcgcggcggcagtgctgccgacgaccaccgccgccgccgccggcactgagctcatcggctcggttcgtgcaggcggagaaggcggcgcaggacgccgtcaaggaggaggccggcagctccacgccggagagggggatcggtgcctgcgcgtcgctgatgaagatgctcagcagggagaggccggcgccgcggaggccacacgccgacgccggggacttggacgacttggaacggcagcagcattctgttgccgtcaataattagcctattgttttttattagaaaaaaaggaaagaaaggcggcctttttagtctggtcgttctccacatcatttgtatatcccgcatttgcgtgagtggtgcagtagtaagacaggtctgtgactgtgagctcttaacttttttttgatgaatgtaagagcccatttcaaaagaattggtatg

SEQ ID NO: 5238 - DNA, 968 bp, Zea mays
  Clone ID: 700448614_FLI
aggagagggagggtttcctcaaagagacccaaacccaagcagagaacactagcgttccctcaccagggcgtccatcccagcagccatggcgatggcgtacaagatggcgacggaggggatgaacgtgaaggaggagtgccagcgctggttcatggagatgaagtggaagaaggtgcaccgcttcgtggtgtacaagatcgacgagcggtcgcgcgccgtgctggtggacaaggtgggcggccccggggaagggtacgaggagctcgtggccgcgctgcccggcgacgactgccgctacgccgtcttcgacttcgacttcgtcaccgtcgacaactgccagaagagcaagatcttcttcatcgcctggtcaccggcggcgtcgaggatcagggccaagatcctgtacgcgacatcgaagcaaggcctgcggcggctgctggacggggtccactacgaggtgcaggccaccgacccctccgagatgggcttcgacgtcatcagaggccgcgcgcaatgaggcccccgctgcgctctgctcctatttacgtacttacctgtgcgtgggcgtgttctcctactactcactgctcagtagtcagtagtcatctgcgttcgtgtgtgtgtgtgtgtgatcggccggatgctaattggcgttggtgtgctcccgtagcgatcgatgctgccaatctgacgaggcttcgcgtgtgtttgctttgctattttcggttctcgggagagatggtgcaggcgtggtgtgttgatgttgatgggtggagtagaagctcaggggagtggcagcggactaatgaaacgtccacctctgcgacgtagaattccactgaaaaaaaatgctccagtgtaccataagctgcttcagatttgatcgtgttttctctcccatggtggcgtttctacctacatttttcttagaaaacacatttctagttactcgttcagttctgaattat

SEQ ID NO: 5239 - DNA, 605 bp, Zea mays
  Clone ID: 700448622_FLI
cagcaatgctgcagctcttcgaccggtccggtatgctctacggcgagcttgcacggtttgtgctgcgtttgctaggagtgagaacaaagccaaagaaggggggcagcattcaggggccagaagcgctggcgttcgagggacctagccggcagtctatcgaggcaccgaaaacgaacaactgggacaacgtctggggaaactgagatcatgcctatgggtgcaacgagttgaatcatatagaagaagtgcaagggctatgacctatgggagtttgcttgccttttgattcatcaaaaagaagattgcggccagataccgcctttggtggcaacttaggggaagctgtgaagaagaaactgctgggcctctcttgcttttcgcagctttgctttgatgtacctgcgagggccatggcccatgacagtggtaggtttttctttaatcgcaactgtaaggtttggtgaagaacggtttcacagtgcactgatatatatgtagctgcttgctgctgttgtgatatcagtgtgggtatcgaatgtttgtatatctctatctgggtaaatagtgtccgccttcgaaaataatacagcaaatgtttgtgtacc

SEQ ID NO: 5240 - DNA, 644 bp, Zea mays
  Clone ID: 700448644_FLI
ctcagaaggttcactctaggtcccgtgcaagaagggcacatgaggccaagcagaagggaaggcactctggatatggcaagcgcaggggtaccagggaggctaggctccccaccaagattctgtggatgaggaggatgcgtgttctgaggcgcctgctccgcaagtaccgtgggccaagaagatcgacaagcacatgtatcatgacatgtacatgaaggtcaagggtaatatgtttaagaacaagagggtgcttatggagagtatccacaagtccaaggctgagaaggccagagagaagacactttctgatcagtttgaggccaagcgtgcaaagagcaaggcaagccgtgagaggaagattgctaggagggaggagaggctggcccagggcccaagagaaccaacagcacctgtcgcagccccagctccatctactggggtgccaaagaaagcaaagaagtgaagtatggaaacaaagctgtagctttttggtactatataagcatgactttggagcacctgaagtattttgctgttatatagtttcgtgtctcaaatattctgagtcttgtatctctaccgttctgttggataatgcatgccgtaagagttgtttatggagcttttgttgttacaggacccct

SEQ ID NO: 5241 - DNA, 802 bp, Zea mays
  Clone ID: 700448756_FLI
cgcaagatcatcatcgacacctacggcggctggggagcccacggcgggggcgccttctccggcaaggaccccaccaaggtggaccgcagcggggcctacgtcgccaggcaggccgccaagagcatcgtggccagcggcctcgcccgccgctgcctcgtgcaggtgtcctacgccatcggcgtgccggagcccctgtccgtgttcgtcgactcctacggcaccgggaccatccccgacaaggagatcctaaagatcgtcaaggagaacttcgacttcaggccagggatggtcaccatcaacctcgacctcaagaagggcggcaacaggttcatcaagaccgccgcatacggccactttggccgtgacgacgccgacttcacctgggaggtggtcaagcccctaaagaaggcatccgcttaagaatgtattgggaagttcactggacatgaggttcatcttcgtctggctctgctgatacctgcaaggattgctgctgctgctgccgcccctggatgtgtgtttgatcagtgactggctgctctgctccatagaagatgaatgaagagagagatggtgaagaaggctttggcaaatggcaattgccgcagcaagccatgtcggcgccactgaccggcttagtgattggtataatttggtgtggcagcagccaggattaatgcgctggtcttttatctttactactagtttggtctcgtccggtatcttatttttctttccccttttcgagtctgtactgaaactgctgagagatttgcagttttgatctatcatatcctttggt

SEQ ID NO: 5242 - DNA, 1559 bp, Zea mays
  Clone ID: 700448959_FLI
gtcggatctgagacgagacgatccccccctcccctcaaccggaacttgttttaccccatctcatcccactgactccacccacccacccgcccgctgcctccgccggatctcgtcggactcggatccgcccgaccacgaccaccccgcgccgccgccgcgcagcagcagcagatcagagaagatggccggactcgacaccttcctcttcacctcggagtccgtgaacgagggacaccctgacaagctctgcgaccaggtctcagatgctgttctggacgcttgccttgctgaggaccctgacagcaaggttgcttgcgagacctgcaccaagaccaacatggtcatggtctttggtgagatcaccaccaaggccaatgtcgactacgagaagattgtcagggagacatgccgcaacattggtttcgtgtcgaacgatgtcgggcttgacgctgaccactgcaaggtgcttgtgaacattgagcagcagtcccctgatattgctcagggtgtgcacggccacttcaccaagcgccccgaggagattggagctggtgaccaggggcacatgtttgggtatgcgactgacgagacccctgagctgatgcccctcagccatgtccttgccaccaagcttggtgctcgtctcacggaggttcgcaagaatggaacctgcccctggctcaggcccgatgggaagacccaggtgacagtggagtaccgcaacgagggtggcgccatggttcccatccgtgtgcacacagtcctcatctctacccagcacgacgagacagtcaccaacgacgagattgctgctgacctgaaggagcacgtcatcaagccagtcatccccgagcagtacctcgacgagaagacaatcttccacctcaacccgtctggccgcttcgtcatcggcggacctcacggcgacgctggcctcactggccggaagatcatcatcgacacctacggtggctggggagcccacggcgggggcgccttctccggcaaggacccgaccaaggtggaccgcagcggggcctacgtcgcgaggcaggctgccaagagcatcgtcgccgccggcctcgcccgccgtgccatcgtccaggtctcctacgccatcggcgtgcccgagcccctgtcggtgttcgtggacacgtacggcaccggcgcgatccccgacaaggagatcctgaagatcgtgaaggagaacttcgacttcaggcccggcatgatcatcatcaacctcgacctcaagaaaggcggcaacgggcgctacctcaagacggcggcctacgggcactttgggagggacgaccccgacttcacctgggaggtggtgaagcccctcaaggcggagaagccgtcttctgcatgaggcgcctcctctgttttggaagaagcttttggtctggtctggtctggtctggtgtgcctgcgctctatcatgcttttttatggctcctacttgtgattcttgatctgccccttgcttatcatttgtactgtactgtcactgtcctaataagtggtacgtgtgcggggtcgtattgtgtctgctt

SEQ ID NO: 5243 - DNA, 2447 bp, Zea mays
  Clone ID: 700449031_FLI
ggcggccatggccatggccatggagaccgccgatcctgcccgtgcattcgtgaaggacgtcaagcgaatcattatcaaggtgggcacggctgttgtcactggcatgaatggccgattggccatggggaggctcggttctctctgtgaacaggtgaagcaactgaattttcaagggtatgaggtgattctggtaacctcaggagctgttggtgttgggaggcagaggctccaataccgtaaacttatccatagcagcttcgcagatctgcaaaatcctcagatgaactttgatggaaaggcatgtgctgctgttggtcaaagtgtcctgatggcgatctatgacacattatttagccaacttgatgtaacgtcatctcaacttcttgtgacggatcgtgatttcaaggatccaagttttggggaccagctccgtgagactgttttttcactgttagatcttaaagtagtacccttatttaatgagaatgatgccatcagtacccggagacagccatatgaggattcatctggtatattctgggataatgacagtctagcagctctgttggcagcagaacttaatgctgatcttcttatcatgcttagtgatgtggagggactctatagtggtccaccaagcgatcctcagtcaaagattatccacacatatgtcaatgaaaagcatgggaagctaattagttttggagagaaatctagtgttggaagaggtggcatgcaagctaaagtgactgctgctgctaatgctgcatcaaaaggtgtacctgttgttattgcaagtggatttgcaacggatagcatcattacagttctcaaaggcgaaaagatcggtacacttttccacaatgaagcaaatttgtgggcatgttccaaggaagctacagcccgagagatggcagttgcggcaagagactgttcgaggcgtctacagaagttgtcatcagaggaacgcaaacagattttgctagatattgctgatgctctggaagcaaatgaggatgcaattatgtctgaaaatgatgccgatgttgaggcagcacaagttgctggttatgaaaagtcgttggttgctaggatgaccctaaagccaggaaagataacaaaccttgcaagatccattcgtaaaactgctgacatggaggaccctatttcccatacattgaaaagaacagaggttgctaaagatctggtttttgagaaagcatattgcccattgggtgttctgctcattatttttgagtctcgtcctgatgcattggtccagattgcatctctagcgatccgaagtggtaatggtctccttttgaaaggagggaaagaagttatgagatcaaatgcaatattacacaaggtcataactggggtcattccagatactgttggcaaaaagctcataggccttgtgactagcaaagaggaaattgctgatctgctagcgcttgatgatgtaattgatcttgtcattccgagaggtagtaagtctctagtctcccaaatcaaagcaacaactaagattccagttttaggtcatgctgatggtatctgccatgtttacattgacaaatcagccgacatggatatggcaaaacggatagtattggatgctaagattgattatccagcagcatgtaatgcaatggaaacactacttgttcataaagatcttaacaagagtgagggacttgatgatctattagtggaacttgaaaaggaaggagtagttatttatggtggacctgttgcacatgacaaactgaaagtaccaaaggtagactcatttcgtcatgagtatagctcaatggcatgcacagtcgaatttgttgatgatgtgcagtcagctatcgatcacataaatcgttatggaagtgcacacacagactgcatcatcacaactgatagaagtgctgcagaggcctttctgcagcaagttgatagtgccgctgtgtttcataatgcaagcacaaggttttgtgatgggacgcgttttgggctaggtgctgaggttggcataagtacagagcgcatacatgcccgcggacctgttggagttgatggacttctaactactcgctgcattttgcgcggtagtggacaagtggtgaatggtgacaagggagtggtttacacccacaaggatcttcctttgcaatgaggcaaataacctccgttgtggtcgtaacgaatggctggacttcccttttaagtaccattttctttattccatgctacaaagtttggtgtcgtaacaagcagaatgcctatttagtaggcaatgatgtaatcagaccattttgtcgtggtgttccttgtcgtataaaaacatccgagacatgtgtattagaggcgtggtagctagttgatacgcgattgttttggatgaaatttggatctgttccaatgcaatgataatgcatgtgtgatgaggtcct

SEQ ID NO: 5244 - DNA, 2136 bp, Zea mays
  Clone ID: 700449070_FLI
gaaggattccgacccctcatcatcctcggcagcggcggattcctccatggcatccctaatcgagcgcgccacctccaccacggcgcacgccgtcgacccggtgctcctccgcgccatcaaatcttcggcccgtgcctccgatgccgccatccgggacgcgttccgcctcatcctctccctcatgtccaagccccactcccacgtgcggctcctcgccttcagcatcgccgacgagctcttcatgcgctccaagctcttccgctccctccttgctgactcgctcgacggcttcctcccgctcgccgtcgggttccgccgagcaaaccccctcccgccgccgaccacgtccgctgccttactccggaaggccgccgtccaggcgctcgagcgctggcaccatctctttggtgcgcactaccgccagctccgcctggccgtcgagtacctcaaggagtccgcgcgcgtccagttctctggtctgcgggccaccgttgatgctcgtgcagctcgtgaggctcgcatgcaggagatctatgctggcaaggttgagcagttgcgtgaaaaccttgcgtcaatcaaggcggagattcggtccacgattgatgagattcgcaatggattggagatcatccgtgctgaacataagaaatttgagggttattatgtggatgacgaggaggagattgcatccttgtcaatgcggagcattagaacagcatcattgatggctggggagtgggtgcctgagactcaggagaatgaggcagtttttgatgcactgagggaagcacaccggttgcttgtgtcaaagcatttggtcacagtacaggagtggataactgtgcttgtgagggtcaaccttccagacaaccgtttccgagattctgcattgaaggatttcattgatgttaagaatgagataagggctgtgagagatcattgcagtgagcttggtcttgaccttgataattttcataggcggaagggtgaccaggaggaagaggacaatgagttctgggtggagggaaacatagaggcaccaaatcgtgctagagtccagagcagtttagatgttgcgagcactagcaaggacactgagaagggaaagtgggtggttggtggagtgtctcacattggcaaggcaccagttgcggctaatggaacgagaaatcttgatccagaaaaatcaaaactcctcgctgaagcccctgtgctgccatggagctctgtcttggatcgctggggctcaagtggggatgtacacgtaaaccagaggggacttgaggtcgagagtcattggggaagagtggataatgatgccactatacctgcagcaaagattgcagagttgaatgttcattgctcaatttatagagaagacccagttgagatcctaccatgccacgcccctctaaaaaaaggaggactttgccagagaagggatcttagggtatgtcctttccatggaccgattgtcccacgtgatgcagaaggaaatccaattgagcagaacagtggtagttctgatgcagaagtaaatcctgttgagcacttagacattggaggacattcaaatgagcttaatggaatcagtgatgatgattgtatggagggaacctcttcaagaatggcaggtgtcaataatgattatggtgacatagctggaacttgtgatctaggtaagattactgcagagcagttagcaagacaatcagttaaaaatgtccggaaaagagaaatggatcgcaaggcacaggaaagggcccaacgtgcaagaatccgtcagcacaatgaagatgtcctgcgaaatgcggctcttgcttcaacttcctattctgcagcagcctatgagcagcctacagaagcacatggtcggcgaggacgccgaggtaaggcaaaggcaccaacgctggcatcgatgctgaaaaagaaagttaccaccaaagacagaattgcagagaggcttctgaacgctcgagccacagatgccacagtaagggatgtttctcataatgaagatatgagctacagggaagcatttccaaatcagtggtagcagaagcagttgagttgttcttgtgtaggctccggctggataaacatgttaggaatgaaatcgatgttgtttattggttc

SEQ ID NO: 5245 - DNA, 1568 bp, Zea mays
  Clone ID: 700449094_FLI
cgctccttcctccccctatctagctagccttcccgttcctgcatcgcggcggagatgggcgcctccaccacgccgctcgcgtcggcggcggcgctgcttctgctgctgctcgcgccgctcgccgcggcggcggacagcatgtcgatcgtctcctacggcgagcggagcgaggaggaggcgcggcggatgtacgccgagtggatggcggcgcacggccggacctacaacgccgtcggcgaggaggagcgcaggttcgaggtgttcagggacaacctccgctacgtcgacgcccacaacgccgccgccgacgcgggcgtccactccttccgcctcgggctcaaccgcttcgccgacctcaccaacgacgagtaccgcgccacctacctcggcgtcaggagcaggccgcagagggagaggaggctcggtgacaggtacctggccggcgacaacgaggacctgccggagtccgtcgactggcgggccaagggcgccgtcgcggagatcaaggaccagggcagctgcgggagttgctgggctttctcaacaatagcggctgtggaaggcatcaaccagattgttactggcgacatgatctccttgtctgagcaggagcttgttgactgtgacacttcatacaaccaggggtgcaatggaggtctgatggactatgcgtttgagttcatcatcaacaatggcggaatcgacaccgaggaggattacccttacaagggcacggacggacggtgtgatgtcaacaggaaaaacgccaaggttgttgctatcgacagctatgaagatgtaccagcgaacagtgagaaaagtctgcagaaggcagttgcgaaccagcccgtcagtgttgcaattgaggctggtggcagagcatttcagctctacaactcgggtatcttcacaggaacctgtggaacagcgttggaccatggtgtcacggccgtcggctacggcacagagaacggcaaggactactggatcgtgaagaactcttggggcagcagctggggcgagtccggctacgtcaggatggagcgcaacatcaaggcgtccagcggcaagtgtggtatcgccgttgagccgtcgtaccctctgaagaagggcgccaaccccccgaaccctgggccgaccccgccttcccccaccccgccgcccaccgtctgcgacaactactactcgtgccccgacagcaccacctgctgctgcatctacgagtacggcaagtactgcttcgcctggggctgctgcccgctcgagggcgccacctgctgcgacgaccactacagctgctgcccccatgactaccccgtctgcaacgtcaagcagggaacctgcctcatgggcaaggacagcccactgtcactgtcagtgaaggctacgaagcgcaccctggccaagccgcactgggctttccctggcaacacagctgctgacggcatgaagagcagcgcatgagaaaaacgcagcatggcattaggccgccaacagccagcatgattagagcccccctgcatgcagaatgatcacccggtcccgtagttcacgacgaaagcatggct

SEQ ID NO: 5246 - DNA, 590 bp, Zea mays
  Clone ID: 700449305_FLI
aagggactcgttcagcgttgtggactacggcgacaacgctggcctggacccaatctcctcgatatttgggccaagctatgctccggagcatcatcccggtccacctggcagtttcgccgcgtgcacgaggctctcgccttccaacccacagacgaggtacttctcggagagcacagggttcgtctcggactactcttccagcggcattgtacatagaggaagggatccaggtagggcatacacctgttcagcggaaccgctcgcttcggctgcggcggcgcaccagcaccagcggtacgcccttagcggccgagacggtttggtccagacatctgggttctgccaaatgtaaccggctttacgatttcgtagctatagctgtagctggtgctcgggcagctgcggtttagcactgccactgatgctgctgcctctatgttctttttatttcaggtgaggcgtattaaattttggctgcatgtcattcctaggctagctcgattcaatgtagcgagagagagagaggaacaaatttagattgtgtctatatgcaggtgaaattttagagcgcggtggagctgctccggttg

SEQ ID NO: 5247 - DNA, 434 bp, Zea mays
  Clone ID: 700449368_FLI
gattgacaagcacatgtatcatgacatgtacatgaaggtcaaaggtaacgccttcaagaacaagagggtgcttatggagagtatccacaagtccaaggctgagaaggccagagagaagacactttctgaccagtttgaggccaagcgcgccaagagcaaggcgagccgtgagaggaagatcgctaggagggaggagaggttggcccagggtccacgagaaataacaccacctgtctcatccacagctccagctactggggcaccgaagaaagcaaagaagtgaagtattgaaataaagctgtagctttctagtccagtactgcactttcttttataagctctagtcaaattttggagcgcctgaactgttttgctgttatataacttagtgtattgataaattcgactatcacatctggattattctgctggat

SEQ ID NO: 5248 - DNA, 1105 bp, Zea mays
  Clone ID: 700449458_FLI
gtaaaccctaatgctttgatcgcggcggcgtcgtttgagacactcccgaatcgatccgcctacatgcctatgaatcctcctcccccgccgcctcctgggtcggcgtcttcgacgccggcgggggccagctacttccctctccctttccacctgcagcagcaccagccgcagccgcagatgccgccgcctatggcggcgagcagctaccagcagtaccagcaacagctgcatcaggcgcatcagctcttccagcgggacgcgcagaccatcacccccgaggcgctgcagagcgtcaaggctgctctcgccaccagcgacgtcctcgaccccgccgccgccgcgaacgccaggccctccgatccctctaccagcaagaagcccatcccccgccgcgctgccggacaatcctgggaggatcctaccctcactgactggcctgaaaacgactaccggctgttctgtggagatctaggcaacgaagttaatgatgatgttctatccaaagcattctcacggtttccatccttcaacatggcaagggttgttagagataagaggactggcaagactaaaggttatggatttgtgagcttttcaaaccctactgacttggctgcagcaataaaagagatgaatggaaagtatgttgggaatcgccctattaaattgcgtaagagtaatggaaggagaggacagatgttgaggctctgcaaagacaaaagaatcatgtccaaaggaagcctaaaattcccaagaagagtgttcttcacaagtagagatatataggccctaccgagggtgaagggcagctcatggatgcgctgctgccttgggatgatgctacttctggaatgtcttcactctctgcactactggggggcggaaatcacgcaagggctgttgtttcatgcaaattgcaacgagctactgctgccatctgatgcaatttgtgctccgttttactgtttcccatagtttgcgttcatccatttgcggtgttggagtactgtcatggctactgactaaccaggccgagctgaacaagaaccaaatggaattttcagtttgggtttcagcaagtaatagcatgacgtgttgtactatc

SEQ ID NO: 5249 - DNA, 578 bp, Zea mays
  Clone ID: 700449470_FLI
gagcatatatatccaccgatcatgatgaagggtggcagcaagaaggaagtggccggtgcggcggcggtggtggccatactgctggttctgcagctgatggcagctccaccgacggccatggccgcccgctcgccgcgcggagccgtgccggatggctccctcgccacgacgcccaaggtgacgatgctgtcagccacgctgtgctacacgggggagacatgcaaatacattacctgcctcactcctgcttgctcctgtaactatgatgatcgtcgctgctacatcatatttactcctgctgctgcttgaggccattctgtgtacgtgaatgaagccactactactctcacacagcatgcgccggccgacgacgtgcgtacgtatatatatacgctctacctcgtgagcttttgttcgagtgatacgtgtttcaaggcatccatccatccatggatgcttatgtacgtatatgtgttagtcgtgtgtcaggcaaccgggcagcagaagggggtgttgtattatatatatttacgtcttctggtgattaaataataaaggggggcatgttggatgtgtgc

SEQ ID NO: 5250 - DNA, 1728 bp, Zea mays
  Clone ID: 700449511_FLI
ccgtccttcacctccgccgccgaatccgagactctgatctcgggttcaccgcagcgcacagagcacccccgactcccgtcccgatccgcgctctcctctacgacgcttcagtcatggcaggaatggcacccgagggttctcagtttgatgctaagcactatgattctaaaatgcaggagctgctgagcactggtgagactgaggagttcttcacttcatatgatgaagtttttgaaagttttgatgacatgggccttcaagagaatcttttgagaggcatttatgcatatggttttgagaaaccatctgcaattcagcagagaggaattgttcccttctgcaaggggcttgatgtcattcagcaagcacaatctggtacaggaaagacagcaaccttctgttctgggatcttgcagcagcttgactatggtctggttgaatgccaggccctggttcttgctcccacccgtgagcttgcacagcaaattgagaaagttatgcgcgcacttggtgactaccttggtgttaaagtccatgcatgcgttggaggaacatctgttcgtgaggaccaaaggattctcgccagtggtgtgcatgttgttgttggtacacctggtcgtgtgtttgacatgctgcgtagacagtccctccgccctgataacatcaagatgtttgttcttgatgaagctgatgaaatgctttctcgtggtttcaaggatcagatttatgacatcttccagcttctgccatccaagattcaggttggagtcttctctgctaccatgccacctgaagcccttgagattacccgcaagttcatgaacaaaccagtgagaattcttgtgaagagagacgagctgacccttgagggtatcaagcagttctatgtgaatgtggacaaggaagactggaagctggacacactgtgtgacctgtatgagaccctggccattacccagagtgtcatctttgtcaacacccgccgcaaggtggactggctcactgacaagatgaggagcagggaccacaccgtttctgccactcatggtgacatggaccagaacactagagacatcatcatgagggagttccggtctggctcctcccgtgtgctcatcaccactgacctgcttgctcgtggtattgatgttcagcaggtgtccctggtcatcaactatgatcttcccacccagccagagaactacctgcatcgtattggtcgtagtggtcgttttggtaggaagggtgttgccatcaactttgtgacccgcgacgacgaacgtatgctgtttgacattcagaagttctacaacgtgttgattgaggagctgcctgccaatgttgctgaccttctgtgatcaatttgaagaaaaaacaaaacaaaaaagggtggtgagggaacctggtaaggattggttttgtcgaaataccgtgggagagggggtgataaggacggtggggggtttctatgttgaagtcgtggtcatggacaatttgtgattttttctcctttatgccatgttttggaatttttgtagctgcctaggccttgtggtaatgtgctgctgtgggggttcattagtatgaagaggaagacgctgctggcgcggagtctttttctctttattagtattttgtttaaaactatgtatgaccgaatggtggtatttatttgtgtcatccttgactcttattctgctgcaaccagatgtatcgtgccatgtctgc

SEQ ID NO: 5251 - DNA, 848 bp, Zea mays
  Clone ID: 700449542_FLI
gcagcatgcagtgaaacacactaccatcacctagctagctactacaaacctacctacaacgaggactcgaccgatcatcgttctcgagagtgagctactgagctacgatgaggtgcacactggtggtatggctgtctctggtcgtcatggccgcggtcaccgccgccggcgatgataatacgccggagccgaggccggtgatcactccaaagccgaagccaccacggccgtaccagccgaaaccgacgcctcaaccgtaccagccgaaaccgacgccacagccctaccagccgaagccgcagccagagccaggacacccgaagcccacacctcagcccaacccaacaccggaacccaccaaaccgaagcccacgccgcagcccgagccgaaaccaaagccacagccgcagccgatgccggagccccagcctggccacggcaaacccaagcctaagcccccggcgtactccccgggcacgcccggtccttgatcgtgttcgtatataaacacgcaggccgcatgagcttcgtataaataaataagcgggcgccatgcatgcatgcacacgacacgacgatgctttgtttcttcgtgcaaggtccgatcatgcgtgctcgtgcgtgacactactacctgcgcacgcacgtgtaaggaatgcaatgtttcatcacactactgactactgtacgtgtgtaaaagagtatgttgtatgcgttgtttttttgtgcctatctaccgtacctaatggccacctgttgtacgtgttgttgtggagtcgagtcacctgtactcactgtattgtaccgatgaataaaaagagaacgtgcatccattgcgcgtgttcact

SEQ ID NO: 5252 - DNA, 1163 bp, Zea mays
  Clone ID: 700449616_FLI
ataacgctagtaaaaactataatatcaagcaagtaacactctcaccgactactgatacattcaccaattgataaaaaatatgaagtaaataaggaaaaacaagtttgttgttcgtttataaaataaaatgacaatatgcactaggtttggtcgggtttaaaaaacccacgggttcacgggtttgggtactataggaacaaacccgtacccataaacccgctgggtacagatttatgcccgttaacaaacccatgggtatgaaaattgacccaaacccgtaccctaatggggtaaaaacccatcgggtttcgggtttcgggtacccattgccatctctacacctacctggacctcagtcgaaataaccattaatagccgaatactcaactacctgaacctgtcccggaaccaccttggtggagaaatatcggcaaccattgctgcaatgcagagccttacgaccatagacttctcctacaataacctgtctgggctcgtgctagcgactgggccatgatgcacacacctacgatggcatgtccaataccttcaagttgctaattgtccttggcttgcttgtctgctccattgcgtttgttgcatggcaatcttgaaggcccgattactaaagaaggccagcgaggcacacagttggagactcactgcgttccagcgcctaaacagtctgaaggaggagaggagctaggattgtgtacaagatgacgacaatgctggatggtgagcatgttgcagacttgcagtgaagcggctttcgtcgatgagtcgtggctcgtcgcatgaccatgggttctctgcagagaaacaaactcttgggaggatccggtggtagcgcatcttcacgcccgaccagtgctcacggctgtgctgccgctctacgttgccatgatgctggaccgtgagccagccgtgggccgcgcggcggaggctcggctccgcgccgcggaggcagagctggagcgcgcccgccgccgcggcgcggatctggaggagcggctccggcagctggccggggagggccaggcgtggctgggagtcgccaggagccacgaggccgtcgccgctggcctccgcgccacgctcgacaaggtgctctagcagcccgccgtcgccgccgtcggcggaggagaatgcggcgtggcgga

SEQ ID NO: 5253 - DNA, 708 bp, Zea mays
  Clone ID: 700449630_FLI
attgggaagggagctgatcagtcaggtgggtactactcgcagctgatgaaagaatacgacggagtcataatttcaagcgacctggccaagatgtcggccttacctttgtcgcgtgaagccggcacaaaccaacctctctgtatcatcatagcacagggtgaaagctcccggctacacatcccatctctcagccaagagcatgcatccagggccatagtccttgccgatagtccggtcactgtggagccagcaggagtggaagttgcagtttttcgtcagatagacctggagtctattctccagcttcttgcgcagcgagggctctgcagcgtgctggtggacttcagagaggccggcgaaagcttcgcgtcgcttctgaacgacttccaggaggacaagctggtgcagaaggtcgtcgttgaggtcctgcccttttggctcgcgagcgacgggctcagcaacctggcatttggtggcagccaatcgttcccgttgaagaacttggagcccagggatgtgaatgggagtgtgctgctggaaggctatgtgtaatagcctctcttctgtcggagattggcattgtttgttttccctcgtgtaaacagatagccctgtaatatacttgcagagccgcccacgagccatgtggggttttgcttttttatatatatagttgaaaatcaatgccatgcgtccttcattttgctg

SEQ ID NO: 5254 - DNA, 711 bp, Zea mays
  Clone ID: 700449681_FLI
cctgcatccaatccacagtagccgcggctactagctagctagtctgctccacgctgcagggcttttagcttaatggccgggctaagcgttctcctggagaaccacagcaagagctacaccgggaaggcggcggcggcgcagatcatcagcaaggccaccctcgtgacgacgacccacggccccaaccaccaccagcagcagcggaagatccctgtctctgcggcggctgcgggctccttcctgcagcgctgctgcctgtgccacaaagagcttgccgagggcatggacatctacatgtacaaaggcgaccgggcgttctgcagcgaggagtgccggtgccggcagatcttcatggacgaggacgccaccaccgtgcgcggcaggcggccagtcaagacaagacaaggatgggaacgtgaatgggagacgtagcttaggtggtgcaccagatgaccagatcttcttcatggaaacatggatggggagacggagacaagacaaggatgaagatgatgaacacagtgtggaagtgtctgccagctcatcccccgtggggtccgtcgcatgcgcagcacactagtagtacgtgcgtggcatcttgctggacccactggataagatggccgcacgacttggagccgctctttgggccccacctcatgaattggatcaggatccgaccgagtaattagcgggccgcatcttcgcttc

SEQ ID NO: 5255 - DNA, 2391 bp, Zea mays
  Clone ID: 700449694_FLI
cccaaaacttgtttgcagatcggcgcagttttggtcgcaaaggcgtggtcgttctcctcgagcatcgatttagggttcttcggctttctatgatcaggaggagttgctggattattttatcagggaacagaatggtgtgattcgttgattggattacagtctggatctctcttgcatcaaatggttgagcaaggcaaaccacgaagcatcccgacgaaggcgaagaaatcgccgttcgtggaggtagaggttgacgagattggccaggctagtggggtggtgtttgcaagggaatcaccgctggcgcctaagagcgaccaaggatgcagcgttagccatagtcatggcgacgacgaaacacatgaatcggatgggtgcgtgcaaagccaggggctagacgagcatgggtgggtggacttcggtcactcactgcagctggtgctgttctcgcgacagtggagcctcgctgaaagtcttgttgacctagcagatcagcagccgatgctggattatggcctgtcgattgcccttgatgccatatggtttttgcggacgaaacaggatcttgaggggctcaacagtctgatatcgaagattgtggcctcaggggcaaaggattttgcaagagcaatcctcaggacatcgctgctcgcgtcatgtgttgcagcgtgccaaagcaaggctatcactgtgggtaacagcaaggagatcgtcgcagagagattgcatgatcgtctgcgagattgtccaggtgctgagcatctaaaaatagaggcaggtgccaaggtgcagaagttcatggaatgggctttacagtgtattcatatgcatcattgttctgaagatacacatatgtacagatggaactacaatactctccaagaggtacagcttcatgtatcagcatttaggaccttcttggacatagctggtgacaacttaagtggcaagatttttactgaggcatttgatgcggtctgcttcccccttacactcttctcaagtttatttgaacctggatggtcttctgggagttcagcagtctccattaagggccttttatcattgctggtggaaggaggcgctgacaatgtaaatcagtgttttcttgaagcagcgcgctttggaagtactgaacttgtacgcattctgctgaaggtcgcatatcagaatagcttggctgtggacaccgatctggctctggtgtatgcctcacattactgcaagttcaaaacaatggaatgcctagttgatgaagggaacgtgagttctttccttggccctctgataaaagctgcagagcgtgggtgcttgcaggttgtccactggttcgtcagtcgaggcgtctctgacattgagatgtgccttgccctgacgactgctgcctccagcggccatttcgtagtggcgtcgtacatgcttgcacatatccctcagcaaatccttgaagctctcagcacacagatcctcaaagccgcgaggggccagggcagcaggccgcttgatggtgtcaccttccttctgagatccaacttcctaagagacgcagctgcaacatatgaggccgcagacatcattgcaaccgggggcaccaacggtgagctcccggacctggttgccttcctgaaagaacactggtcccaggacgcgtttgctgaaggggtgagcgccggtgaaatgcacttcgtgaatgtcatgagggtcctcaggagaggggcgtccccgatctgcctggaggacctcccgcctgagatggtgctcggcatcacgtacctgccactgtaccgtgagtgcctgagcgcgggtgggcagctgttgccccaaaggctgaggggggagctgctggaggcggtgcaccggctcggtgagcccgttggcccggagagccaggggaaggacctcgtgctggcactagagcgccacatgccgtcgttcttggttggatcctgagatgtttccaggttgtaaaagaagcttgtgcaggctataccttgctttaaaaaattgtatggagcagtgttgattaccaacttctggctgcggtggaatcagcaatagatttggcgcgtcacatgtctcgtgatcgtgtagaaagattttgtttttgttttgtattttgcatgagaaagaagtttctttcttgattgcctattgaaggggcctgttcttgttgccagctgagctcttccaattattttccgggctgcgcacgagacgtacatgtgtgctagtggtgctgttagtctagtttgtgttgtgttgtgttgagtgtatgcgttgtgtgcgcgcgggcgcgtgtggtggtgctaagagtagtttctgcgtatactgggccttcagtggtatgcctggtaatctcaataagtatcgctttcaagacatggattcttc

SEQ ID NO: 5256 - DNA, 1460 bp, Zea mays
  Clone ID: 700449720_FLI
cgactcctccgcgctgctggcgctggccgtcgcgctcgcctgctgctccgttgcagtggtggcctacgaccccctggacccgaacggcaacatcaccatcaagtgggacgtgatctcgtggacgcccgacgggtacgtggcgatggtgacgatgagcaactaccagatgtaccggcacatcatggcgcccgggtggacgttggggtggtcgtgggccaagaaggaggtgatctggtccatcgtgggcgcgcaggccacggagcagggggactgctccaagttcaagggcggcatcccgcactgctgcaagcgcaccccggccgtggtggacctcctcccgggggtgccctacaaccagcagatcgccaactgctgcaaggccggcgtggtgtcggcgtacgggcaggacccggcggggtccgtctccgcgttccaggtctccgtcggcctggccggtaccaccaacaagacggtgaagctgcccaggaacttcacgctcatggggcccgggctgggctacacctgcgggcccgccgccgtggtgccgtccaccgtgtactggacgcccgaccaccggcgccggacgcaggcgctcatgacgtggacggtgacctgcacctactcgcagcagctggcgtcccggtacccgtcctgctgcgtctccttctcctccttctacaacagcaccatcgtgccgtgcgcccggtgcgcgtgcggctgcggcggccacggcggccacgcgggtccgggcggctgcatcgagggggactccaagcgcgcgctgtcggccggggtgaacacgccgcgcaaggacggccaggcgctgctgcagtgcacgccgcacatgtgccccatccgggtgcactggcacgtcaagctcaactacaaggactactggcgcgccaagatcgccatcaccaactacaactacaggatgaactacacgcagtggacgctggtggcgcagcaccccaacctggacaacgtcaccgaggtcttcagcttccagtacaagccgctgcaaccatacgggagcatcaatgacactggcatgttctacgggctcaagttctacaacgactttctcatggaggccggcccgttcggcaacgtgcagtcggaggtgctcatgcgcaaggacgcaaggaccttcaccttcagcatgggctgggcgttcccgcgcaagatctacttcaacggcgacgagtgcaagatgccgccgccggactcctacccctacctgcccaacgccgcgcccgtcgtcgcctcgcagctggtcctgtccgccgccgcctcggcgttcctactgttgctgctcctggtggcatgaccgtgaccgaaccaagggcaaggcctccgttttgttttcccgtctcgtcccgtgggcagggagcagacttcagtaggcagggcattttatttggtttttttgccaaggattcaacacttgggttttcgtc

SEQ ID NO: 5257 - DNA, 616 bp, Zea mays
  Clone ID: 700449823_FLI
ggcttctcctccccctcttatcaagtcctcctcgggttagggttccttagggttttgtggaggggcgatggcggcggctgatgtggagtaccgttgcttcgtcggcggacttgcctgggccaccagcaacgagtcgctggagaatgccttcgcctcctacggcgagatcctcgactccaaggtcatcaccgaccgggagacggggaggtcccgcggcttcggcttcgttaccttctcctccgagaactccatgctcgacgctatcgagaacatgaacggcaaggagctcgacggccgtaacatcaccgttaaccaggcccagtcccgtggcggcggcggcggcggcggcggcggtggctacggcggcggtcgcggcggcggcggctatggtggcgggcgccgtgacggcggttatggcggcggtggcggctacggcggtcggcgcgagggtggtggcggcggctacggaggcggtggcggctacggcggtcggcgcgagggtggtggtggcggctacggcggcggcggcggcggctggagggactgatgtgtggccccatcctggcttcggccgagttatcttatctatctatagtatcgtgttaccgttcgcttc

SEQ ID NO: 5258 - DNA, 1192 bp, Zea mays
  Clone ID: 700449843_FLI
gcggcgtcccggtctcaccgcgaccgggcggtgagaggtagaacggccaccagacatcaaccgtgaaggggtggcgtcaaggcagcgctgaagcggcggcgacgtcgaggctcgagctcccgtgccgcgctccgagctaacctagatgaacatactcgaaaggatacgtggaggtggcgacagggcggctgccacggagcgccccccgcggccggagtgctgggtggagatttcggagtccgtctcacggctctgcagcttcgacgccgccggcagcggtagccgcagcatctctgtaaaagttattcaggattctagacctatacatgacaaacttgttgattctttcttgaacaaaatttttccatcaggttatccatacagtgtgaatgaaggttacttaacttataccaaattccgtgtgctacagcatttctcgagtgctatgctacatgtgctatcaacacaggtttgcgacctaccccggcgcaagcaactgctgtaagttgggtaagcatatgatgtcagagatgctaaagtccaagcagcacgcaggaaagctcatttgtagcagcatgggtgcaagaatggattctgaaccaaagagttggaggatacttgctgatgttctctacgatctcggtactgcattggaagttgtttcgccgctgtgcccacaacttttccttgaagtagcaggcttgggaaattttgcgaagggaatggccgttgttgcagcaagagcaacgaggcttccaatttactcttctttcgccaaagaaggcaatcttagtgatttatttgctaaaggggaagccatatcaacacttttcaatgtcatgggaattggagctggaattggattggcatctactgtttgttcaacaactcaagggaagttaattgcaggcccgttactttccgcagtgcatatatggggtcatccaagagatgagagcaactcctgtaaacacactcaacccacaaagaacagcaatgatcgtggctgattttatcaagctgaaaggagcttctcaaagcttaagttattgaagaattatttaagatctacaatgtctcaagaaaggttaaacgagctagcaactttatgtattgagaagaaattattagatgatgtcaatattgaagccatctgatgattttgcatctagaaatgttagacgacattttt

SEQ ID NO: 5259 - DNA, 473 bp, Zea mays
  Clone ID: 700449885_FLI
cagaaacttgaataaacagaaaggataggtgcagtttctgatcatgagacgtttcagttcttctgtgtcctgcagcctgtggatataatctgtgcagactgaaatgatttgatgaaaccattgttgaaccgcccaatcgcttcaaagttttgccgttcagagtgagcttgtttgggcttgtcagggagaagaatattctctccctttcttgttttttctaagtttaacttctctatatctctgaatattgacaattctaatattcagtcagcataagaaaatctagtgaatctcaccaggcatgtactctcaggcaaggttcacagtttcgttttgggtcaaccgattttttgttttgttgaccaaaatttaacttttgtattttatattttgaattgaaatctatttgaaactggaccgaaattcgtttttcgcttagtagcgaaaacgaaaacacacaccagttttcggtg

SEQ ID NO: 5260 - DNA, 1847 bp, Zea mays
  Clone ID: 700449890_FLI
gggtgatctgctgcctcaagcagcttgaggtgcattggaaagtgaccatctttcccagacatcggcacaacgtaactggacatggaggctcttgtggttttcccggagcagcacagccaccaccatcaccgccaccctggtacccgcagcaagtcatcgggtccatacttttcatcaccgcctaactctcgtggcttccgtggaatgaactgccggtctttccactctggtcgttgcgtcggtgctattccattcccagcacctcctgctcgcacctactcatccccagagcccaagacacccaagcagcaaccacgccatggtggcaagcgaagccggccaatttccataagcctctccacatcccctccctcccattctgagctctgggcaggtccagcattctccaactctccaccacctagttcgcttcccatccccaaattctcgctccgccagaagcgcagcatctctctcgagctgccaccggttgaacgccctgatgatgtggtggtcaggctgcattctaaatcagcaccttcatccccagttgagggatatgggtatgacttcttcaatgacgatgcaatcgctagtgcgatagcaacggagaatctgaggaggattctccagctggatatcgcagatcattgaataatgggaggatggaagggtggttcctgtgtacataggttatctttcactgacagctttctacttgcattggtagtgtatagggtaatgatgatagatacttggtggttgtaagatatggtcaggatcatgggagaggtgtaggttgtaggtgaagcatcttcagaagcttagacggttgaaggtgatagtgccctgttaggtgttattaaggtggggtctgggtcgaggatggggttgcacggcagttggtagtattcacctatatgcttccttcatctcttaggtgtaggatttaaacctttttaaaaacagcatcatttgcatccacagtacctgttctgagctggcggtgggcactctgccatagcagtaacatacgtcctaaccccaaaccagatgtcaaatatttgtagggtaccatgcatcttacatacccttgcatacttatttccttctgtcctctagccaactggctctaactatcctcgcttcctggtgctctgcaaagaacaccattatctcctcagcagctcttctgttttttttggtaaggaagaagctgcgtggaagatggaagaaattctgctctatccgtcttgttcgaaactaactttcctatcccgcccctttgttgcatatctggcatataccatagtccatatccgtcgcatatctccaggcttttatgttcatctagcgctcctgcattgcatctagtgcccttagtcagttagcatgctcattcgttcccacttcaagttcatgaaccagtttgagggttctgattttcttaaaacgtcgaaagagagtctggattctggatcccttcgtgcaggcaaaccctgatgaggttgctctgtagtgacataacgcccaagctagctcgtgccggtgttacacgcttctgtagccctgcgcagttttagcactagcagtgaagcagcagtactgctggatctagattagtagtcatcggaaatgccgaggtttggtcagttatcttgtgctctggtgttaaatcagcagttgcattgtgtcgttgtttgtccgctcctatgttgatgttagagctactatgttgatgttgcacctgctgagcctgtcatggctgtcactccttgaggattattttggttattagttcgtcggcggagttgcggagtttcgtctctgcgtttgatgaaagtggt

SEQ ID NO: 5261 - DNA, 1607 bp, Zea mays
  Clone ID: 700449933_FLI
ggctcctgtatcctctcacttccctcagtcctcgtccgtctgctccctcctctctctacctagctctagctagccttcctgtagcgcggcagagatggctgcccctgcctccaccacggcggcggcggcggcagcgctgctgctgctgctcctcctgtcgctcgccgcggcggcggacatgtcgatcgtgtcctacggggagcgcagcgacgaggaggcgcggcggatgtacgcggagtggatggcggcgcacggccggacctacaacgccgtcggcgaggaggagcggcggtaccaggtgttccgggacaacctccgctacatcgacgcgcacaacgccgccgccgacgcgggcgtccactccttccgcctcggcctcaaccgcttcgccgacctcaccaacgacgagtaccgcgccacctacctcggcgccaggaccaggccgcagagggagaggaagctcggcgccaggtaccacgccgccgacaacgaggacctgccggagtccgtcgactggagggccaagggcgccgtcgccgaggtcaaggaccagggcagctgcgggagctgttgggctttctcaacaatagcagctgtggaaggcatcaaccagattgttacaggcgacttgatctccttgtctgaacaagagcttgtcgactgtgacacttcgtacaatcaggggtgcaatggaggtctgatggactatgcatttgagttcatcatcaacaatggcggaatcgacaccgagaaggattacccttacaagggcacggacggacggtgtgatgtcaacaggaaaaacgcgaaggttgtcactattgacagctacgaagatgtaccagcgaacgatgagaagagtctgcagaaggcagttgcaaaccagcctgtcagtgtcgcaattgaggctgctggcacagcatttcagctctacagctcgggtatcttcactggaagctgtggaacagcgctggaccatggtgtcacggccgtcggctacgggacagagaacggcaaggactactggatcgtgaagaactcatggggcagcagctggggcgagtccgggtacgtgaggatggagcgcaacatcaaggcgtccagcggcaagtgcggtatcgcggttgagccgtcatacccgttgaaggagggcgccaacccgccgaaccctggccccagcccgccgtccccgaccccggcgcccgccgtgtgcgacaactactactcgtgccctgacagcaccacctgctgctgcatctacgagtacggcaagtactgcttcgcctggggctgctgcccgctcgagggcgccacctgctgcgacgatcactacagctgctgcccccatgactaccccatctgcaacgtcaggcagggaacctgcctcatgggcaaggacagcccactgtcactgtcagtgaaggctacgaagcgaaccctggccaagccgcactgggctttctccggcaacacagctgacggaatgaagagcagcgcatgagaaaacgcagcgtggcattaggtcgtcagcaacctgggtggtcgattagagcccctgcgtgggaaatggtcacctggccccctgattgacgacggaagcatggctc

SEQ ID NO: 5262 - DNA, 719 bp, Zea mays
  Clone ID: 700449968_FLI
ctgagatggtgtcaccagagagccaaactgatgctcggaaagaaaacatccattcagatgtcgctgagacagatgaatgcactaagactcagaaggccgctctagcaggcacagagggagaaaattctgctgaagattctggtgtgccggtgtctgagatggacaaatgcaacgagatgccgaaggatgctccgacacttacagcagcaggtgcaaatcctgctgaagacgaagcttccctgaaagacctctctgtgcagacagagaacaaggcttcttctgcctccccagctcctgatgatccgaaggccagtgacgagaagacgctggcagaagagaaccagaagctgaaagagcttctgcaaaagcttctcgcgtccggcaacgatcagatgggggtcatcacggacctaagtgagaaggtcaaggtgctggagcggaagctggcacgcaagaagagaccaaaggtgagggtgcacaggtcatccaggcatgcgacggctaaagtccagtgaaagtaagtctgtaaggttttgaggtttatgttgtatggatcccatgttgcttcctgtgtccagctattgtgcactgtataggtatagccatgctgtggcactgtgctttgtctcggacaacgcaaggtgtggcatgttctgtattttatgtctgtataatgcatccaaccacatctagtgttccgtgagcaaattgattgggac

SEQ ID NO: 5263 - DNA, 1089 bp, Zea mays
  Clone ID: 700450023_FLI
cgcacgcacgcactcgcctccgacagcgaccgcgcaacgtccttctcccgcgccgcccggccggccggtccctgttccctctcctcccctcggagcagcaggagcaggagcagccgcgttcgtcctctgcgctgcgcggcccgccggcctgaccaagcaaagcttatcggccggagccggacgaacgaacgatgcagcaggacctcagaaactcagagagaagaaacccggaacaggcgcatccagtgatgtcggcgagctcgaccaactccgcggcttccccggccgtgtccggcctcgactacgacgacacggcgctcaccctcgcgctcccgggctcctccgccgagcccgccgccgatcgcaagcgcgcccacgccgaccacgacaagccgccatccccaaaggcgcgggccgtgggctggccgccggtccgcgcgtaccggcgcaacgcgctgcgcgacgaggccaggctcgtgaaggtggccgtggacggcgcgccgtacctgcggaaggtggacctcgcggcgcacgacgggtacgcggccctgctccgcgcgctccacggcatgttcgcctcctgcctcgttgccggagccggagccgacggggcggggcggatcgacaccgccgccgagtacatgcccacctacgaggacaaggacggcgactggatgctcgtcggagacgtccccttcaagatgttcgtggactcgtgcaagaggatccgcctcatgaagagctccgaggccgtcaacctatctccgaggacatcatcccggcagtgattgttgttggtgtggacgccatatgccctacgcggcttatctctccgaattagttcacagagtgtgtgctggaagaggcttggctgctcaggtcctccatgcacacgtcatacaccgtacgtagggtgagggttcagtctgttgctgtgtgttctgtacaggccacaccacacacgcccccatggaaaactttttcagtttcgagtgcccctccctctcggccggacggtttggtttttggacgacgccggcgaggaggcggcgctagcacactagtagctccgtttccgtgtgttctttc

SEQ ID NO: 5264 - DNA, 511 bp, Zea mays
  Clone ID: 700450039_FLI
ttctggaagcggcagcggcgtctccgagcaacagctcctccgacgaaggttccggctccgggttcgggtcggacgacgagatgtcctcgtcctccccgacgccggtggtggcgccgccggtggcggacatgggacagctggatttcagcgaggttccgtgggacgaggacgagagcttcgtgctccgcaagtacccgtcctacgagatcgactgggacgcgctgctctccaactagtcgcccttcgccgacagatgtgctgttgtagttcagtagtggcagtatctctggccgccgcagatgaggttttaggcaatctgcaggccgccggcccatgtgtattaagtaggttttgctcagttgttggccccggacttcgccggcgtttttgtgaccggcgtccccgagtgcactgcattggtgtactggtctgtctgtaaaaaaaaatggatctgtgtacttctatagtgtgtattcaaccattgttcttagttgtgatgttactcgtgctg

SEQ ID NO: 5265 - DNA, 809 bp, Zea mays
  Clone ID: 700450066_FLI
aaacacactgccatcacctagctagctacaaacctacctacaacgaggactcgaccgatcatcgttctcgagagtgagctactgagctacgatgaggtgcacactggtggtatggctgtctctggtcgtcatggccgcggccaccgccgccggcgatggtaatacgccggagccgaggccggtgatcactccgaaaccgacgcctcaaccgtaccagccgaaaccgacgccacagccctaccagccgaagccgcagccagagccaggacacccgaagcccacacctcagcccaacccaacaccggaacccaccaaaccgaagcccacgccgcagcccgacccgaaaccaaagccacagccgcagccgatgccggagccccagcctggccccggcaaacccaagccgaagcccccggcgtactccccgggcacgcccggtccttgatcgtgtcgtactgtcgtgttcgtataaacacgcaggccgcatgagcttcgtataaataaataagcggccggcatgcatgcatgcacagttgcacacgatgctttgtttcttcatgcatgcacagttgcacttgcacacgatgcatgcacagttgcacacgatgcatgtatacgtgtaaggaatgcaatgtttcatcacactactgactactgtactgtacgtgtgtaaaagagtatgtttgtttttgtgcctaatggccactggcctgttgtacgtgttgttaatgtggagtcgagtcacctgtactcactgtattgtaccgatgaataaaaagagaacgtgcatgccattgcgcgtgttcact

SEQ ID NO: 5266 - DNA, 2177 bp, Zea mays
  Clone ID: 700450071_FLI
gcgaagcaagcaatccgaattctctgcgatttctctagatctcgaccacccctactagttttggttcctcctttcgttcgagagagcgtttctagtggcaatggcgaagagcgagggtccggcgatcgggatcgacctcggcaccacctactcgtgcgtcggcgtgtggcagcacgaccgggtggagatcatcgccaacgaccaggggaaccgcaccacgccgtcctatgtcggcttcaccgacaccgagcggctcatcggcgacgctgccaagaaccaggtcgccatgaaccccaccaacaccgtcttcgatgccaagcggttgatcggcaggaggttctctgacccgtcagtgcagagtgacatgaagctatggccgttcaaggtcatcccagggcctggtgacaaacccatgattgtagtcaactacaagggcgaggagaagcagtttgctgctgaggagatctcctccatggtcctcatcaagatgaaggagattgctgaagcctaccttggttccaccatcaagaacgcagtggtgacagtgccggcctatttcaacgactcgcagaggcaggccaccaaggacgccggtgtcattgcgggcctcaatgtgatgcgtatcatcaacgagcccactgctgctgctattgcctacggtcttgacaagaaggccaccagctccggcgagaagaacgtgctcatcttcgaccttggtggtggcacgtttgatgtgtcgctcctcaccatcgaggagggcatcttcgaggtgaaggccactgcgggcgacactcaccttggcggcgaggacttcgacaatcgcatggtgaaccacttcgtccaagagttcaagcgcaagaataagaaggacataagcggcaacccccgtgcactgcgccggctgcgcacggcgtgcgagcgcgccaagcgcacgctgtcatcgactgcccagacgaccattgagatcgactccctgttcgagggcatcgatttctactccacgatcaccagggctcgcttcgaggagctcaatatggacttgttccggaagtgcatggaacctgtggagaagtgcttgcgcgacgccaagatggacaagagcagcgtgcacgacgtcgtgctcgtcggtggctccacccgcatccccaaggtgcagcagctgctgcaggacttcttcaacggaaaggaattgtgcaagagcatcaaccccgacgaggctgtggcgtacggcgccgctgtccaggctgccatcctcagcggcgagggcaacgaaaaggtacaagatctgctcctgctcgacgtcacgccactgtctctcggcctggagactgcaggtggcgtcatgacggtgctgatcccgaggaacaccaccatcccgaccaagaaggagcaggtcttctccacgtactccgacaaccagccgggcgtcctgatccaggtgtacgagggtgagcgcgcgaggaccaaggacaacaacctcctcggcaagttcgaactctccggcatccctcctgctccccgcggcgtgccccagatcacggttaccttcgacatcgatgccaacggcatcctcaacgtctctgccgaggacaagaccaccggccagaagaacaagatcacgatcaccaacgacaagggccggcttagcaaggaggagatcgagaagatggtgcaggaggctgagaagtacaaggcagaggacgaggaggtcaagaagaaggtggacgccaagaacgcgctcgagaattatgcctacaacatgaggaacaccatcaaggacgacaagatcgcctccaagctccccgctgaggacaagaagaagatcgaagatgccgttgacggcgccatcagctggctggacagcaaccagctggctgaggtggaggagttcgaagacaagatgaaggagcttgaggggatctgcaaccccatcatcgcgaagatgtaccagggcgagggcgcgggcatgggcgctgctgctggcatggatgaggatgccccgtctggtgggagcggtgctggtcccaagatcgaggaggtggattaagttggttagtgttcgaggtttggtttggtgaggtgtgaagtgcctgaactctgatggttgtttgtgaggtgtggtcgcaatagctgcggcctgtggtgaacttctcagaaataaataagttttcgttcct

SEQ ID NO: 5267 - DNA, 612 bp, Zea mays
  Clone ID: 700450189_FLI
gcaacctagtcgaggaggagcaatacctgacacttgttcgtaagtcaccgtatcatcatggtgacagagcaaccgtgcttctaaactggaaattacttgctgtggagttcttacctgaagaggatgcagtttttgttcttctcctatgcatggtgattgcacggaccatgacagagatcaggagagaagatgtggctgggcttttagtgcggcggaggataagtgaagcaagggccgggcagagagactggggttcggtgatgcttcctggctcgctttcaccggatcctcatctgcagccttggtaccggaacgcaacgcaggttttgagctctgcggagacaggaccagtgctcacaaagtactcacctgctgacgggaaggacatgttgtacaggcaagctcttataccctgatgaagccctaatagagattattaccataccatcaggacttgcctgatagataaaaaaaacgaacccaatcttcctgggtatcgcagggaaattatttcatttcctcaatgctatgacatacgacatttgtacatgacaattttttgtggttcgagctgttgtttcactaatgatgattgtcctttgatacgaatcc

SEQ ID NO: 5268 - DNA, 1665 bp, Zea mays
  Clone ID: 700450225_FLI
gacgggtcggatctgagacgagacgagacgatcccccctcccctcaaccggaacttgttttaccccatctcatcccactgactccacccacccacccgcccgctgcctccgccggatctcgtcggactcggatccgcccgaccacgaccaccccgcgtcgccgccgcgcagcagcagcagatcagagaagatggccggactcgacaccttcctcttcacctcggagtccgtgaacgagggacaccctgacaagctctgcgaccaggtctcagatgctgttctggacgcttgccttgctgaggaccctgacagcaaggttgcttgcgagacctgcaccaagaccaacatggtcatggtctttggtgagatcaccaccaaggccaatgtcgactacgagaagattgtcagggagacatgccgcaacattggtttcgtgtcgaacgatgtcgggcttgacgctgaccactgcaaggtgcttgtgaacattgagcagcagtcccctgatattgctcagggtgtgcacggccacttcaccaagcgccccgaggagattggagctggtgaccaggggcacatgtttgggtatgcgactgacgagacccctgagctgatgcccctcagccatgtccttgccaccaagcttggtgctcgtctcacggaggttcgcaagaatggaacctgcccctggctcaggcccgatgggaagacccaggtgacagtggagtaccgcaacgagggtggcgccatggttcccatccgtgtgcacacagtcctcatctctacccagcacgacgagacagtcaccaacgacgagattgctgctgacctgaaggagcacgtcatcaagccagtcatccccgagcagtacctcgacgagaagacaatcttccacctcaacccgtctggccgcttcgtcatcggcggacctcacggcgacgctggcctcactggccggaagatcatcatcgacacctacggtggctggggagcccacggcgggggcgccttctccggcaaggacccgaccaaggtggaccgcagcggggcctacgtcgcgaggcaggctgccaagagcatcgtcgccgccggcctcgcccgccgcgccattgtccaggtctcctacgccatcggcgtgcccgagcccctttcggtgttcgtggacacgtacggcaccggcgcgatccccgacaaggagatcctgaagatcgtgaaggagaacttcgacttcaggcccggcatgatcatcatcaacctcgacctcaagaaaggcggcaacgggcgctacctcaagacggcggcctacgggcactttgggagggacgaccccgacttcacctgggaggtggtgaagcccctcaaggcggagaagccgtcttctgcatgaggcgcctcctctgttttggaagaagcttttggtctggtctggtctggtctggtgtgcctgcgctctatcatgcttttttatggctcctacttgtgattcttgatctgccccttgcttatcatttgtactgtactgtcactgtcctaataagtggtacgtgtgcggggtcgtattgtgtctgcttattcacctactagaggattatttctggttttgctgcttatgtaatgcttttaaaaccatgaaagaagctacaggctcctacagctgctttgagaagt

SEQ ID NO: 5269 - DNA, 936 bp, Zea mays
  Clone ID: 700450245_FLI
ccatgaccatgaagagtgttggaagcgctgccctgaagatggtggaggaggtccgcaggcagttcaacaccattcctgggttgatggagggaacagccaagcccgactacgcaacctgtgtgaagatctccactgatgcttccatcaaggagatgattcctccgggcgctctggtcatgctgactcccctcatcgttggaaccctctttggcgtcgagactctctccggcgttcttgctggtgccctggtttctggagtgcagatcgccatctctgcttccaacaccggcggtgcatgggacaatgccaagaagtacatcgaggctggtgccagcgagcacgcgaggaccctcggtcccaagggatccgactgccacaaggccgctgtgatcggtgacaccattggtgaccccctgaaggacacctccggcccgtccctcaacatcctcatcaagctcatggccgtggagtccctcgtgtttgcccccttctttgccacccagggtggcctgctcttcaagtacctgtaaaagggacaacaccaagcacacagcagaagtatacgatctcccgaccgaccgtggacaatatcgaataactcctgccaaatcgccagttccttttgtgtactgtgcgctagccgccgcctagctgcactgctgtatttttgtttcaggattgctgctgctgttcgcattcaatctttgggcctcccggagccgccggaggcgcgttttactgttagccttactactcttactccctgtagctccacgtagaagaaaccgatgtcctgcgtctggcaatttttcttagtcccttgatgatggcgatgatgctgaaacctttttttgaacaatgatacatgatgattgttgcgttgtactggtggtaaatcacggtccgtattggcctgttctgttggtgcccatttcc

SEQ ID NO: 5270 - DNA, 766 bp, Zea mays
  Clone ID: 700450309_FLI
ctggcttctcctccccctcttaccaagtcctcctcgggttagggttccttagggttttgtggaggggcgatggcggcggctgatgtggagtaccgttgcttcgtcggcgggcttgcctgggccaccagcaacgagtcgctggagaatgccttcgcctcctacggcgagatcctcgactccaaggtcatcaccgaccgggagacggggaggtctcgcggcttcggcttcgttaccttctcctccgagaactccatgctcgacgctatcgagaacatgaacggcaaggagctcgacggccgtaacatcaccgttaaccaggcccagtcccgtggcggtggcggtggcggcggtggctacggcggcggtcgcggcggcggcggctatggtggcgggcgccgtgacggcggttatggcggcggtggcggctacggcggtcggcgcgagggtggtggcggcggctacggaggcggtggcggctacggcggtcggcgcgagggtggtggtggcggctacggcggcggcggcggcggctggagggactgatgtgtgggcccatcctggcttcggccgagttatcttatctatctatagtatcgtgttaccgttcgcttctgtcaccgtgttagtgtccgttctacctttggattaggtgttggtacccctgttgttccctttgtttgctcccgctatgaaacgagacgagagaagaatgagcaaggtttttgttcgcagctatttttgtccaatgatattgatatgttgttcc

SEQ ID NO: 5271 - DNA, 653 bp, Zea mays
  Clone ID: 700451479_FLI
gatctccgacttcggcatggccaagatcttcgaggacgactccgacgcgattaacacgggccgcgtcgtcgggacctacgggtacatggcgcccgagttcgcgttggacggcgtcttctcggtgaagtcggacgtgttcagtttcggggtcctcctgctggagatcttgagcgggcaacggaacggcgccttgtacctcgaggaacaccagcagtccctcatccaagacgcatggaagctgtggagtgaagaccgcgcggccgagttcatggaccagtcgctggggcggtcctactccaaggacgaggcgtggcggtgctaccacgtcggcctgctctgcgtgcaggaggaccccgacgtccgcccgaccatgtccaacgtcctgctcatgctcatcagcgaccacaccaagttacccgagccagccatgccgcccttgttcgcgcggctcaggaacatctccttgctggcgccgccactcaccaccaaaaccgagtccaccacgtctccgctgtcgatcaacgacgtctccatcaccatgatcgaaccgcgatgagctcatgcgttttgtacttctgacaactgagggagaggcttcgagtgtaaatttataagactgcaatcgttcagaatgactactcatatgtactagt

SEQ ID NO: 5272 - DNA, 1459 bp, Zea mays; identical to SEQ ID NO: 4841
  Clone ID: 700451509_FLI

SEQ ID NO: 5273 - DNA, 2147 bp, Zea mays
  Clone ID: 700451542_FLI
acctgctcctcgcccccttctctcagaggcgacgcctcgggcgctcctaccctgccccgtctccggtccccccgcgccgtcggcgaggcagccggccgtcacagaagcccgatccggaccccgcgagaaatccttgttatacctgatggctatgattgatgagcctctttatccaattgctgtactgattgacgagctcaagaatgaagacatccagttgcgtctaaactccattagaagactttcaacaattgcacgggctcttggagaagaaagaaccaggaaggagctgattccttttcttagtgaaaacaacgatgatgaagacgaggtgcttcttgcaatggctgaggaattgggtgtgttcattccgtatgttggtggtgtagaacatgctcatgttttgctcccacctttggagacattgtgtacagtggaggaaacttgtgtccgtgataaagcagttgaatctctgtgccgtattggtgcacaaatgaaggaaactgacattgtcgactggttcattccagtagtaaagaggctagcagctggagagtggtttacagctcgcgtatcgtcctgtggtcttttccacatagcctatccaagtgcgtcggaccaattgaaaacagaattgaggactatctatggtcagctatgtcaggatgacatgcctatggtcagaagagcagcagcatcaaatcttggaaagtttgcagctacagttgaacagaatcatttgaagacagaaataatgtcaatatttgatgatttaacccaagatgatcaagattcagtgcgtctgttggctgttgaaggctgtgctgcccttggtaaattgttggaaccacaagattgcgtagcacacattcttccagtcattgtcaatttctcccaggataaatcatggcgtgttcgttatatggtcgccaatcaattatatgagctctgtgaggctgttggccctgagcctacaagagctgatttggtgcctgcctatgttcgcctccttcgtgataatgaggctgaagtgcggatagcagctgctggaaaagtaactaagttttgccgcatattaaatcctcagctctcagtccaacatattcttccatgcgttaaggaattgtcatcagattcatcccagcatgttcgttcagctttagcctcagtgattatgggaatggctcctgtactgggaaaggatgctaccattgaacagcttgttccaattttcctctctttgttgaaagacgaatttcctgatgttcgacttaacataatcagcaaacttgatcaagttaatcaggttattggaattgacttgctatctcaatcactgctaccagcaattgtagaacttgcagaggataggcactggagagtccggcttgcaataattgagtacatcccattgttggcgagtcaattaggtgttgggtttttcgatgacaagctgggggcgctctgcatgcaatggttggaagacaaggtcttttcaatcagagatgctgccgctaacaacttgaagcgccttgcagaagagtttggtccagagtgggcaatgcagcatataatccctcaggtgctggagaagatcaacaacccacactatttataccgcatgacgattctgcaggcaatctccttgctagctcctgtcatgggtgcagagatcacctgtcaaaagctgcttccagtcgtcattaattcttcgaaggacagggttcccaacatcaagttcaatgttgcgaaagtactacagtcacttgtaccgatcctcgaccaatctgtggtggagaagaccgtgaaaccgtgcctcgttgagctcagcgaggaccctgacgtcgacgtaaggtactacgcaaaccaggcactgcaggcgtgcgaccagatgatggtgtcaagctaactagcctttgtgtcaagtatttagagagttcgatcgatgctccatagtccaattttggattacctgtaatttggcctttagatttgaagagttgtttgtgtccagcctcggtaacagataaaaacggacggtcctgatccccttgttcgtttgtgttaattaatgttgtaattgagcaggacacaacgcgttgctgtgtgtgtttgcgtttacatggcagattgaactttacggtttt

SEQ ID NO: 5274 - DNA, 1366 bp, Zea mays
  Clone ID: 700452211_FLI
ggagttcaagagaaagaacaagaaggatatcactggcaacccgagggctctccggaggctgaggacctcttgtgagagggccaagagaactctgtcttccactgcccagaccaccattgagattgactcgctgtacgagggcattgacttctactccaccatcacccgtgccaggtttgaggagctcaacatggacctgttcaggaagtgcatggagcctgttgagaagtgcctgagggatgccaagatggacaagagcagcgtccatgatgttgtccttgttggtggctccactaggatccccagggtgcagcagctgctccaggacttcttcaacggcaaggagctgtgcaagaacatcaatcctgatgaggccgttgcctatggtgctgccgtccaggccgctatcctcagtggtgagggcaacgagaaggtgcaggacctgcttctgcttgacgtcactcctctctctctgggtctggagactgccggaggagtgatgaccgtccttatcccgaggaacaccaccatccccaccaagaaggagcaggtgttctccacctactcggacaaccagcctggtgtgttgatccaggtgtacgagggtgagaggacccggacccgcgacaacaacctgcttgggaagttcgagctctccggcatcccaccggctcctcgtggtgtcccccagatcacggtctgcttcgacatcgacgccaacggcatcctgaacgtgtctgccgaggacaagacgacggggcagaagaacaagatcacaatcaccaacgacaagggccgtctgtccaaggaggagatcgagaagatggtgcaggacgcggagaagtacaagtcggaggacgaggagcacaagaagaaggtggagtccaagaactcgctggagaactacgcctacaacatgcgcaacacgatcaaggacgagaagatcgcgtccaagctggctgccgacgacaagaagaagatcgaggacgccatcgacgcggccatcagctggctggacgccaaccagctcgccgaggcggacgagttcgatgacaagatgaaggagctggagagcctttgcaaccccatcatcgccaagatgtaccagggcgcgggtgccgacatgggaggctccggcggcatggacgaggacgctccggctggaagcggtggccctggccccaagatcgaggaggtggactaagcggtttgtgtcaggtctcgtgtgtctgctgcagtggctggctggcccagtcgctgctcgatttatcgtcgtcgtcgcggtgtatccgcgttagaaccttttgttggtgaacaatattatcgtggcacgcgttttaagtaatacggtattctggttcggttt

SEQ ID NO: 5275 - DNA, 1733 bp, Zea mays
  Clone ID: 700452269_FLI
gtgcctttgttgaaagacacaggtttggaaaccatggggttggtccagcttgcttagcgatgccattcctaataaaactgcaaaaaggaagttggaagtcacatcaattgaggaaggagaagttgtggatgacactgttgatgctaaaaggcctaccaagactccccctcatagtgttgatagaagctttgaagggattagatcgataaataaatatttaaccgagaaagcccttgctgaattagtattgccttgcatcgacagaagttctgctgatatccgtggtatactttctgttgatttgaccaaacagatgggggctattagtgaacatatcaaagcaatagcattgaatggtgctaaacaagctggttcagtttcttcaggaaatgaagtgccatcgaccaaatcaagtggccgtagaggaattcgaggtggaagcccaaacattggtagaagagctccggttggtaatgacccaagtcctccttcgacttctgctctgcgggcagcgttgtggttacgcctccagttcatcattagactgcttccagtaatcatggcagataggagcatgagacatacgcttgcttctgcaattctaggcctgcttgcaacgcgcatgatttatgaagatgcagatttgccccttcctcctaccaacgcaactgctttaaggcgggatgtggattccttgctggaacctcccctggatgtcctgcttgaccggcctggcgaaagcctttttgagaagcttttatgcgttctccatgcactgcttggtagctacaaaccaagttggctgaagtcaaggtcagcctctaggtcgtcaattaaaagccaacgagatttctcagcatttgataacgaagcagccgagggcttacagtccgcgttggaccacatggaattgcctgaaacaatcaggcggaggatccaagcagccatgcctcttcttccaccatccaggcgcccttgtatgcaatgccaacctccgcagttgtcgttggctgcattatcaccactccagagcagtacctctggtgtaggtcctcaacagaaaagttcttgtgtgagttgggtgcccactaacgtatcagtcagaagcaaggcagcattgccttctcatgaccctgaaacggaggtagatccatggagcttgctggaagatggcacaaactgccccccctccacagcatctggaagcaatggctcgagtggagtgacgggagaccatgctaatctgaaagcttccagctggcttaagggtgccgtgagggtgaggaggacagaactgacctacattgggtctgtagatgacgacagctgatacgtgtatgattatcttggtgaattggaggcaaagaatttggtgtcacttgttggcatttgtgtcgtgtgcaagttaaaagcaccaactgcatcgaattctttgagagctctgtaccacaaggtggaatggaaaccatatggcttttggttggttgttgtagtgttagaatacatcgctgcccccgatttgttttagggcctgtgggggcggctgtatatagttggaatccatttctggattcaatgggggagcttatttgagaatcaggcaggaagccatgtagtagatttctagccaagagccctgtacttgttttttttttgggtctgagatgtaattgtcatgtcacatatattcttttgatctaaggctgacggaagttgcattgcctatttgtttt

SEQ ID NO: 5276 - DNA, 755 bp, Zea mays
  Clone ID: 700452272_FLI
cacggacagatgttctttggaagcctcttaaccatgaggtgctgatgcagactaggagtgatgaagttcgccccaaaatgctgggcctgaaggttatcaggtacatggtccaacatctgaaggaggagtatgtcgttctcgtaccagagaccataccgttcctaggcgaattgctcgaggatgtggagcttcctgtcaagaccctgtcgcaggagatcttgaaagagatggaaaccctcagtggcgaaagcctccagcagtacctatgaggcatcatctcctcgcggtagtaccgtttggctgatgaactgtagaacatctactcatttcctgtggattaccagttcaacagatcggcatacttgtcggatgtctggaaactgaaattacatgctgtccaattcatggaaggcaagtgcaattaacttaaccttcaaggaggcaaatgcagtttaaggaaaacttacacgttgaaagcacccatattatgttttcggatgagttcctatgtagctacgttgaaagagtacttttctacacaattgattgaggtgttctcgatttgatctctttttgagcttttggtgtcgttgggattttgcgctaaatattggaaattagaccaaggggctgtttgttcgttgtgaaggaattataatttacttaatatagtaggttatttggtttggaatttaatattccatcacatgttaaagtttagatataatcctatcctaaatttatagggtgagaat

SEQ ID NO: 5277 - DNA, 1033 bp, Zea mays
  Clone ID: 700452315_FLI
ctggaattattttagcttgggaatggatgcacaagtatcctatgaattccactctgaaaggaagagaaatccagagaagttcagacaccagctaagaaatcagggtacatatgctaagcttggatttaagcattccctaaaccatctttcatcgaggaacatttctcaacttgcaaaggtgaagatcatgaaaagacctggttcccagtgggaagagctaaagattcctcgcagcattcaatcagttatctgcctgaacctgccaagcttctctggaggattgaatccatggggaacacctggcacaaggaaagcacaagacagagacctgactgcaccttacgttgacgatgggcttatcgaggttgtcggcttccgtgatgcctggcatgggctcatcttgctggctcctaatggccatggaactcgtctagcgcaggcccaccgaatccgtttcgagttccacaagggagcagccgagcacacgttcatgaggatcgacggggagccatggaagcagcctctccccaaggaggacgacaccgtggtggtggagatctccaacctccgtcaggtggccatgctggccaacgacccgtgcaggtccaagagcgtgaacgagccgtcctccccgtcgtgccacggccatgaggacgacgacagcaacagcctggaggacgaggacgaggacgagtgggaggacgggaggaagaagttcggtgcggcggccaccttcaagatccccgacgaggtggacatcgctcatctcagttagaacctagaaaccccgccggctgcttctgcgtcggttggtggtgctgactgctgagtctgtgcatttcagagtgtttgctgcttgctacagcctacagtgctactgctccctttttttttgttgtttttttttttggttgcctccacgagctcagatttcagaagctaaccactgctgttggtgaaactgctcgttatgatcccccattgttctgtaaattttcaagttttagcagccatgtgtatttcactggctgat

SEQ ID NO: 5278 - DNA, 548 bp, Zea mays
  Clone ID: 700452322_FLI
caagctcaaaaccctacagtgtggccaaagatagtatgatggatgggaattacagccttcctgacaacgttgcgattgtcactttgcagaatcttgatgatggtaccacactactccgcttggcccatcttttccaagctggcgaggacccgagatattcagaggtagcagaggttgatctgaaaaaggtctttggaaagagaactatcaaggaactgaccgagactaacctctccgcaaatcaaaagaagtcagagatgaagcagctcaactggagagttattgaggacgctgaaagtggtcctgccccggtaaaaggtggcccagttgattgtcgtgctctggtcgttgcgctgggacccatggagatacgcaccttcttgctgaaattttaatcgcatttaccgtgcttgtaattgtaaagaaaaaacaatgataaatggagaacttgctatcgttatttccttttgtaaaaaaaagatgaaatacccaaatagaacgttaaatttgcgcaaggtatgtacaatctacatcatgtgttttctatt

SEQ ID NO: 5279 - DNA, 276 bp, Zea mays
  Clone ID: 700452325_FLI
gcgagggtggtggtggcggctacggcggcggcggcggcggctggagggactgatgtgtggccccatcctggcttcggccgagttatcttatctatctatagtatcgtgttaccgttcgcttctgtcaccgtgttagtgtccgttctacctttggattaggtgttggtaccccttttgttcgctttggttgctcccgctatgaaacgagacgagagaagaatgagcaaggtttttgttcgcatctattgttgtccaatgatattgatatattgttcc

SEQ ID NO: 5280 - DNA, 855 bp, Zea mays
  Clone ID: 700452394_FLI
gatccagcagcatgcagtgaaacacactaccatcacctagctagctactacaaacctacctacaacgaggactcgaccgatcatcgttctcgagagtgagctactgagctacgatgaggtgcacactggtggtatggctgtctctggtcgtcatggccgcggtcaccgccgccggcgatgataatacgccggagccgaggccggtgatcactccaaagccgaagccaccacggccgtaccagccgaaaccgacgcctcaaccgtaccagccgaaaccgacgccacagccctaccagccgaagccgcagccagagccaggacacccgaagcccacacctcagcccaacccaacaccggaacccaccaaaccgaagcccacgccgcagcccgagccgaaaccaaagccacagccgcagccgatgccggagccccagcctggccacggcaaacccaagcctaagcccccggcgtactccccgggcacgcccggtccttgatcgtgttcgtatataaacacgcaggccgcatgagcttcgtataaataaataagcgggcgccatgcatgcatgcacacgacacgacgatgctttgtttcttcgtgcaaggtccgatcatgcgtgctcgtgcgtgacactactacctgcgcacgcacgtgtaaggaatgcaatgtttcatcacactactgactactgtacgtgtgtaaaagagtatgttgtatgcgttgtttttttgtgcctatctaccgtacctaatggccacctgttgtacgtgttgttgtggagtcgagtcacctgtactcactgtattgtaccgatgaataaaaagagaacgtgcatgccattgcgcgtgttcact

SEQ ID NO: 5281 - DNA, 640 bp, Zea mays
  Clone ID: 700454308_FLI
gtaccggccagtaaaatccgaacccacagcgagaaatggcggcggcagcgctccgtccggcgatcctccgccgcatccgcctctccccctccccttcgctcacccgcgacgaagtcatcgaccggatcctcgacgtcatcaagagccaccccaagatcgacccctccaaggtgaccccggaggcgcacttcgagaaggatctggggctcgacagcctggacaccgtcgaggtggtcatggccatcgaggaggagttcaagctcgagatcccagacatggaggctgacaagatcgactcactccctctggccatcgagtacgtcgccaaccaccccatggctggctgagcctctgctcgcccgagaggaggcgagttgaggtgaggcttcgcttggttttgtttccgagggcaaataatctgctggagtggcacagaaaaacttgttcctggtgctctgcattgcttcacggtgacggatgatgatgtcgaaatggaacattaacattttcagcgttagattgttgtttttgtgtgcgtgttatatctatatatactggttgacaaactagtttggttgattgagtctgatcgttgttgggttatttgaattgggttcatgatagtttcccatgatatttt

SEQ ID NO: 5282 - DNA, 708 bp, Zea mays
  Clone ID: 700454401_FLI
tgcgccgcctcccgctccacctctacccctcgctcgctcgctctttctgcgcagtttccccggccgccgcctcggccgccccggcgtccgccaaggtcgccgatcgcatcgtgcgcgttctcgccatcgatctcgagggggggcgccgcgaggtcgtcggcctctccgggcagacactcctccgcgcgctcgccaacgcggagctcatcgagccggcctcccaccgcctcgaggatatcgacgcgtgctccgccgagtgcgaggtccacatcgcgcaggagtggctcgacaagctgccgccaccgtcctacgaggagcggtacgtgctcacgcgcgcgtccaggaaccgcgagctcaacaagcacgcgcgcctgggctgccaggtcgtcctcacgccggagctgcatggcatggtcgtcgctgtccccgagcctaagccgtgggacatcccgtaatggcctgccgcgacgaatggcaaggtgcggctttcgacgctgtgagccttccttcattcccctggctcggtcaagcttgtgcgcctctgccatacccttttatgttacggatttgatgaagaataatagtttgatgggaaaaacctgccattggttaacttttgttcttttgaatgtggagtgtaatggatgctgtaatgtggaatcccgttgcaattaccgcagttcaatgtttcatggtttgaagttttgt

SEQ ID NO: 5283 - DNA, 238 bp, Zea mays
  Clone ID: 700454405_FLI
tccaggcattagatgagaattttatgttacattaccgtacaaaagaatatgttcgtttatcttctggatgacttgcaattttggactggattgcattcaattgcagatttgctttgcttttacactaacgtttgaagcgactgagactattgatttttttttttttttgccaagatgtgattgatgggttgctccagtaacattctattttttatgagttaatagttcttttgattcc

SEQ ID NO: 5284 - DNA, 616 bp, Zea mays
  Clone ID: 700454408_FLI
cccagcaatccctagcagaagccttccatcctcactcgctcgatggcccgcacgaagcagacggcgaggaagtccaccggcggcaaggcgccgaggaagcagctggcgactaaggcggcccgcaagtctgcccctgcgaccggcggagttaagaagccccaccgcttccgccccggcaccgtcgcgctccgggagatccgcaagtaccagaagagcacggagctgctgatccgcaagctgccgttccagcgcctggtgcgggagatcgcgcaggacttcaagaccgacctacgcttccagagctccgctgtctccgcgctgcaggaggcggctgaggcctaccttgtcgggctcttcgaggacaccaacctctgcgccatccacgccaagcgcgtcaccatcatgcccaaggacatccagcttgcccgccgcatccgcggggagagggcctaagcgtcatattctctgtcatcagtgcccgatcagaagatgtagagatgtgctgggttctgtagtttgggttactgtcgaatcatcgagtagttggttgttcactgctgtaacttaattatcatgatgcatatgaaatggcaatgagctctgttatcacttcaac

SEQ ID NO: 5285 - DNA, 1340 bp, Zea mays
  Clone ID: 700454567_FLI
ctcctgtcagttcacggctgatataattgctatgaacaatgctgattttatcatcaccagcacataccaagaaatcgctggaagcaaaaatactgttggacagtatgagagtcatactgcctttactctgcctggtctgtaccgagttgtccatgggatcgatgtcttcgatccaaagttcaatatagtctctcctggagctgacatgtccatatactttccacataccgagaaggccaagcgactcacctctcttcatggttcaatcgaaaatttgatttatgacccggagcaaaacgatgaacacattgggcatctggatgaccggtcaaagcccatcctcttctccatggcaagactcgacagggtgaagaacataacggggctggtcgaagcttttgctaagtgcgctaagctgagggagctggtaaaccttgtcgtcgttgccgggtacaatgatgtcaacaagtccaaggacagggaagagatcgcggagatagagaagatgcatgaactcatcaagacccacaacttgttcgggcagttccgctggatctctgcccagacaaacagggcccgtaacggcgagctctatcgctacatcgctgatacccatggtgctttcgtacagccggccttctatgaagcgttcggtctcaccgtcgttgaggccatgacctgtggacttcctactttcgcgacgctccatggagggccagctgagatcatagagcatggcgtctcgggcttccacattgacccgtaccaccccgagcaggctgctaatctgatggccgacttcttcgagcggtgcaagcaagacccagatcactgggtgaaaatatctggagcagggctgcagcgcatatacgagaagtacacatggaagatatactcagagaggttgatgacactggccggggtctacggtttctggaagtacgtgtcgaagctcgagaggctggagacgaggcgctaccttgagatgttctacatactgaagttccgcgagctggcgaagaccgtgccgcttgcaattgaccaaccgcagtagcttgcgcaactgcgactgcgtagcacttggtacaagactgaaacctgaaggaccttcagtaatttaggcgcggcagacggtagccaataaaatgtgccggagctgaactggtttttattatgtacataatggcagtataacaaaattactgaaggcaggtgggttgcagttgtgtgttcgttactgtttactgtaatatgtcaagctgtcggctgcaatttctttgctggcaagccgcaggcactggtgaagtgctgataaatacatcatattctgttgacctgtg

SEQ ID NO: 5286 - DNA, 1078 bp, Zea mays
  Clone ID: 700454585_FLI
gccgtctcgggcaagttctccatggaggaaggccgcaacaggctgttccgggagctcaccgacatcaacgcgggactcctcggagggttccacatccaggactacttccctagcctgggccggatcgagctcgtcaggaaggtggcgtgcgccaagaccaggcgcgtcaggaagcgctgggacgacctcctcgacaagctcatcgacgaccatgcggccaggatggcaacccatcaggacgaggacgacgataaggacttcatatacgtcttgctgtctcttcagaaggagtatggcctcaccagagaccatatcaaggctatcttgatagacatgttcgaggccggaaccgacacctcgtacatgacgttggagttcgccatgacggagctcatacggaagccacacctgatgaagaagctgcaggaagaagtgcggcggaacgtgccggcggggcaggagatggtcaccgaggacaacctccccggcatgacctacctcaaggccgtcatcaaggagacgctccgcctgcacccgccggtcccgctcctcctcccgcactactccctggacgcctgcgaggtcgccggctacaccatcccggccaacacccgcgtcgtcgtcaacgcctgggcgctcggccgccacagcggctactgggagcgcgagaacgagttcgtcccggagaggttcctcagcggggacgtggccggcggcgtcgacctcaagcccaacgagttccagttcctggcgttcgggtccggccggaggatgtgccccggggtccactcggcgtccgcgaccatcgaggcgatgctgtccaacctcatgtaccggttcgactggcagctgccggcggggatgaaggcggaggacgtggacatgaccgaggtgtttgggatcacggtctcgaggaaggagaagctgctcctagtcccacaggctgcgtgaggatgatgatgatactagtgcaatgcgatacagggttttaaattagtaacaccaaaggctgtgttactggaccttaattaataattaataaatgtgctactactatatagccaggcttcacagtgac

SEQ ID NO: 5287 - DNA, 845 bp, Zea mays
  Clone ID: 700454676_FLI
gcgagcgagggacccggggcggaagaagagagagaagacgtctctctcctctcggcgtccccgttccccaacctctcgtctgctgcctgcctgcctgcctgcctgcaaaaaggagtttgtcatggcgtctaagcgcatcctcaaggagctgaaggacctgcagaaggacccccccacatcatgcagtgcaggtcctgctggtgaggacatgtttcattggcaagcaacaattatgggaccacctgacagtccctatgctggtggtgtttttttagtgaacattcatttcccgccagattaccccttcaaacctccaaaggtttctttcaagacaaaggtcttccatcctaatatcaacagcaatggaagtatatgccttgacattctcaaagagcagtggagccctgctttgacaatttctaaggtcctgctctccatctgctccctgctgaccgaccccaacccggacgaccctcttgtcccggagattgcccacatgtacaagacggaccggccgaagtacgagtcgacggcccgcagctggacgcagaagtacgcgatgggctgacgaacgctttcctgctcgtccacccgactggcgtctcaagaaagtcgttcctgggcgccattgttcccttggatttgttgttggtcgtcgtgtgtatccctgatccatctaggatcatcgtattgtattgtagtgtatgtatatcgtcggcctaccatcgttgccattcaccatagtgaggtggttggacatgcttcgcctatatgcacctgtgcttgccgtccttcgggtcggtgctctttggttaatgttcatcgaagacgttgatttcgttgcc

SEQ ID NO: 5288 - DNA, 1731 bp, Zea mays
  Clone ID: 700455962_FLI
gcttctccctcctcctcgctcgctcgatcgctcccacgtcctcgcctccctccacaaaccaccaccaccatccaggatcgcagcgcggcgcgcgagagaggggtgagcaggtcgggcaagatgagggagatcctgcacatccagggcggccagtgcggcaaccagatcggcgccaagttctgggaggtgatctgcggcgagcactgcgtcgactccacgggccgctactcggggacctcctcgcagcagctcgagctcgagcggatcaacgtctactacaacgaggctgggggtggccgctacgtgccccgcgccgtgctcatggacctggagcccggcaccatggaatccatccgcgccggccccttcggcggcatcttccgccccgacaacttcgtctacggccagtccggcgccgggaacaactgggccaagggccactacaccgagggcgccgagctcatcgactccgtcctcgacgtcgtgtgcaaggaggccgagaactgcgactgcctccaagggttccaagtatgccactccctgggtggcggcactggttctggcatgggcacgctgctcatttccaagatccgggaggagtacccggaccgcatgatgctcaccttctccgtgttcccgtcgcccaaggtgtccgacaccgtcgtggagccctacaacgccacgctgtccgtgcaccagctcgtggagaacgccgacgagtgcatggtccttgacaacgaggcgctctatgatatttgcttccgcaccctcaagctcaccaacccttcatttggtgacctgaaccatctgatctcggcgacgatgagcggcgtgacatgctgcctgcggttcccgggccagctgaactcggacctccgcaagctggcggtgaacctgatcccgttcccgcggctgcacttcttcatggtggggttcgccccgctgacgtcccgcggctcgcagcagtaccgcgcgctgacggtgccggagctgacgcagcagatgtgggatgccaagaacatgatgtgcgcggcggacccgcgccacgggcggtacctgacagcgtccgccatgttccggggcaagatgagcaccaaggaggtggacgagcagatgatcaacgtgcagaacaagaactcctcctacttcgtggagtggatccccaacaacgtcaagtccagcgtgtgcgacatcccgcccgtcgggctgcccatggcctccaccttcgtgggcaactccacctccatccaggagatgttccgccgcgtgagcgagcagttcacggccatgttccggcgcaaggctttcttgcactggtacaccagcgagggcatggacgagatggagttcacagaggccgagagcaacatgaacgacctcgttgccgagtaccagcagtaccaggacgccaccgccgaggagtacgaagaggaagagcacgacggcgaggaggagcacgcctgatctggacgccaactcatcggtgcaaagcgtttcagtttcatcgctcctatggtacacaaatcgcgactacgtattcctacaatcctactaccttaagtatgtatattcatgtactgccgtatttgccttactgcttttattagcttgtgtgtgtatctacagtcgtgtgtgttagtgttttctgaaattgtgatatattgccaccgctgtccagattctgtgggtatgtttattcatataattggaatgctctctgttcttgtacgt

SEQ ID NO: 5289 - DNA, 1381 bp, Zea mays
  Clone ID: 700456526_FLI
ctcaacacagcacaggcagctcgagagagagagagagagaaagatgtcgtggttcgggcaccaccaccacaaccagccggctcccccggcgtcgggccccaaccaggtgttcaagatcttctgccgcgccaacgagaactactgcctggccgtccgcgacggcgccgtcgtgctggccccggtcaaccccaaggacgaccaccagcactggtacaaggacatgcgcttcagcacccgggtcaaggacgaggaaggcatgccggcgttcgcgctcgtcaacaaggccacggggctcgccatcaagcactccctcggccagtcccacccggtcaagctcgcgcctttcaacccggaccaggaggacgcgtcggtgctgtggacggagagcaaggacgtgggcaagggcttccgctgcatccgcatggtcaacaacacccgcctcaacttcgacgccttccacggcgacaaggaccacggcggcgtgcacgacggcaccgccgtcgtgctctgggagtggtgcaagggcgacaaccagagctggaagatcctgccgtggggtcccgaggccaactcctccgcggcccacgcgggaggcccgcacgccgtgcgcgtcttctgcaaggccggcggcgaggactacagcctcacggtgcgcaacggcacggcgtgcctggcgcccaccaacccgcgggacgagtaccagcactggttcaaggacatgcgccacagcacccgggtgcgggacgaggagggctacccggccttcgcgctcgtcaacaaggtcaccggcgaggcgctcaagcactccacggggcagggccaccccgtcaagctcgtgccctacaacccggactaccaggacgagtccgtgctctggaccgagagccgcgacgtcggcaacggcttccgctgcgtccgcatggtcaacaacatctacctcaacttcgacgccttccacggcgacaaggcccacggcggcgtccatgacggtaccgagatcgtgctctggaagtggtgcgagggcgacaaccagcgctggaagatcctcccttggtgaacgaacgaaagaaactactagctggtaccctaataataattctgctggctgcggcgatcccaaaataaaagaggccgggtgcgatgcatctcggacttctcgagtggtgtttgcgtcagacagccagccactgtggggctagtgttccaacatttgtcagcctgcttgcgcgaggaaggggggtcactgactcaagagaagggcctggtcataggctgctgcattatgaatttctgatgatgtcttatgtctgtactctgaatcaactatgtatgagatctcatctcctttctcctactgaatgaatgaatcattattggcttt

SEQ ID NO: 5290 - DNA, 980 bp, Zea mays
  Clone ID: 700450343_FLI
tgaacttttgccccgtaacagtgcaaaggtttcagtgtttgattcagttgtacaaggaggagatgctgtttgggaaggtttacgtatatatgatggaaaagtattcaaattagatgaacatttggacagattgtttgattctgcaaaagctatggccttcagcaatgtgcctactcgtgattggattaaggatgccatctttaagactctgattgcaaatggaatgttcaacaatgctcatataaggctcacgctcacccgtgggaaaaaggtgacatctggaatgagtccagctttcaatctttatgggtgtgccttgattgtgcttgcagagtggaaaccaccagtttatgataactctcatgggataaaattggttactgccaccacacgtcgaaattctccaaatagtatagattccaagattcatcacaacaatcttatcaacaatattctggcaaagatagaaggtaatcttgcccaggctgaggatgccattatgctagataaggatggctttgtatcagaaacaaacgcaacaaatatttttatggtcaaaaagggaattgtattgacacctcatgctgactattgccttccaggcattacgcgagcaactgtcatggatcttgtggtgaaagaaaactttgtgttacatgaacgacgcattagtctgtcagaattccatgctgcagatgaggtatggacaaccggaacaatgggtgaaatcacaccggttgtaatgattgatggacgtgaaatcggcgacgggaaaattggtccagtcactagacaaatccagaaggcatacaagatcctgacagcagggcaaggagtaccgataccgggggttgctgaggtgtaattgtctaagatgcatccctttatctagttaggatcagtcccccaaggagctcaatgatatcaggctagcgcaacaataaattaataatctgcattgatcactgatgttcaaagac

SEQ ID NO: 5291 - DNA, 2320 bp, Zea mays
  Clone ID: 700450353_FLI
tcgtcaccggcggcgccggcttcgtcggcagccacctggtggaccgcctcctcgagcgcggcgacagcgttatcgtcgtcgataacttcttcaccggccgcaaggacaacgttctgcaccacctcaacgacccaaacttcgagatgatccgccacgatgtcgtcgagcccatcctgctcgaggtcgaccagatctaccacctcgcctgcccggcgtcccccgtccactacaaatacaaccccatcaagacaatcatatcctttctctacgaattccttcagttcagttccgttgcgttcatttcctttcctccatgaatgattcgtgatttatgcctggatcgcgaccgcttctatttttcttcttcttttggtgccaaaacaaaatcattttatattgtatggacttggtttctattgcttttttggtggggaatttccgaatttgttccttcctgcgggtttatcggttaacgcgcgatgcatctgaggaggaccgattcactactctttgagattccgtatccgtctatgaatgggaatatgacaaaattttgaaatccggtactaacaggtataatccccccagaactacgatttccttccacggaagtagaattttgtccggagctcggatttgtgccacgtttcactccgttttttggagttttctgctcaactgagggaaagcagagccaccagagcttggccgtttcagatctctgtctgctaggctgccctttgctcaagggcaatcctcctttttcattcaacgcagaaaaatgatctttttttgcgtctttctatgaaatctggtgacaaatgttcagttgacctcagattcttcagatgcaattgaagatctcaaatcataacatcatttttctgtcgaaataatttatgtgtgtgtgtgtgtgtttcttaaaaaactgttttttatgcttctgaatgcttgctgcattttcccgtgcatttgaaacaggaaaaacgtactagcgaaagctatagctgtgatctgaactcaattgctccgtaccattttactttgcttcatgatccgttaatgaaagcaaaaagtaagcgcacggtgcgcatggatctgggttagttatgtactttgcttacttctgacataaagggcgcatttcaattttcaacaacacaaaagttgacgtccaagtggcctttgccttttccactttctaagcaacttcgcttactgttcacttcacgaaatttccttatgctttacttgttttgcaactgaatgtggagtagcaatgtgacaaagtgaaaaagggtgtctggctgattcatttagtttctgctcgttttgctttcttgagatggttcgtgttagccttaacctttgtgatagcacaagaccaatgtggttgggactctgaacatgctcggattagcaaagaggatcaacgccaggttcctcctcaccagtaccagtgaggtctatggtgatcctctccagcacccgcaggtggagacttactggggcaatgtcaatcccatcggtgtcaggagctgttacgatgagggcaagcgtacagctgaaacgttgaccatggattaccaccgtggtgccaaccttgaggttaggatcgcacgtatcttcaatacatatggccctcgcatgtgcattgacgatggccgtgttgtcagtaactttgttgctcaggcactgaggaaggagcccttgacggtttatggtgatggaaagcaaaccaggagtttccaatatgtttctgatctggttgagggtctgatgaagctgatggaaggcgagcatgtggggccattcaacctgggtaaccctggcgagttcaccatgcttgagcttgccaaggttgtccaggacaccatcgaccccaacgcacggatcgagttccgcaagaacacccaggacgacccgcacaagcgcaagcccgacatcagccgcgccaaggagttccttgggtgggagccgaagatccccctgcgtgagggccttcccctcatggtctccgacttccgcaagcgcatcttcggcgaccaagacgctgctgccaccaccaccggaaaccagcaaggttaggatgaaggagcgcacatgacatggaaatttttggtggccctgcttctagctgcttggttgctctctccttactgacaaaagctatgggccacgtagttcgttgggaatgtgttactggaatacctcggctgatgctgtaatgccattctttttttcccctgtattttttctttctcagttctctcagtccttagctatacaaaaaaaaaagttcagttgaacagttggagat

SEQ ID NO: 5292 - DNA, 1621 bp, Zea mays
  Clone ID: 700450362_FLI
ccatctcgccggccacgttcacgaagaagtcgtggagctcggggctgttgatggtcggcgggaagaaaggacggtccttgctgaggaagtccacggcagcgctgcagcgctgcacgctagcttgacggctcgagctcgagccgctcggatgccaggggatggggattcctgttggtaaactttccctttacactgccctgggaggagttcgtccatctgcttgcttgccgatcacattggatgttggtacaaataacgaggagctgcttaatgacgaattttacattggcttgagacaaagaagagccactggccaggagtacactgattttctgcaagaatttatgagtgctgtgaaacaaaactatggggagaaagtgcttattcagtttgaggattttgccaaccataatgcttttgatcttcttgcaagatatggcaccactcaccttgtattcaatgatgatattcagggaacagcttctgtggttcttgctgggcttattgcagcacaaacattacttggtggttcattggcagatcacacttaccttttccttggtgctggagaggctgggacaggtatcgctgaacttatagctcttgagatctcacgtcagacgaaagctcctatagaggagtgccgcaagaaaatctggcttgttgattcaaagggcttgattgtcagtacacgaaaggagtcccttcaacacttcaagaaaccatgggctcatgagcataaaccactcagcaacctcttagatgctgttaatgctatcaaaccaacagtgttgattggcacatccgggaaggggcaaactttcacaaaagacgttgttgaagcaatctcctcatttaacgagagaccaatcattcttgccctatcgaacccaacatcacaatctgaatgcacagctgagcaagcttacacatggagcaagggacaagcagtgtttgcgactgggagtccatttgatcctgtggagtacaatggcaagatacatgttcccggacaggcaaacaatgcctatatcttcccagggtttggcctcggcgtggtgatgtctggagctatccgcgttcatgatgacatgcttctggcagcatcggaggctctggcccagcaggtcacagaagaaaattttgagaaggggctgatttatcctcccttctcaaacataaggaagatctctgcccacattgcagccagcgttgcagcaaaggcatatgaacttggtttggcaagtaggcgccctcggccaaaggacctggtgaaatatgcagagagctgcatgtacagccccatctaccgcaactaccgttgaattcggatcaactccagttatgtgcaaatcagcagcagccttgcgtcaactgcaagatttcctaagaatataactcgtttcagtctttcatactgtaataccctaagccctctagcaatagctgtttcacgtccttttctgccccttacatattccgcagcgtttatctcttgcgatgtcatgtaaatcagctccggttaggcttttggatgctagtcagtcatggtgctgctgccgtccttccggttccggacaaggataaatttggaataaagtttgagtcgacgattcctcct

SEQ ID NO: 5293 - DNA, 1028 bp, Zea mays
  Clone ID: 700450378_FLI
tgacggagtacgtggtcacgcgctggtaccgcgcgcccgagctgctgctcaactccaccgactactcggcggccatcgacgtctggtccgtcggctgcatcttcatggagctcatcaaccgccagccgctcttccccggacgcgaccacatgcaccagatgcgcctcataaccgaggtgatcgggacgcccacggacgatgagctcgggttcatccggaacgaggacgcgcggaagtacatgcgccacctcccgcagttcccgcgccggccgttcgtcagcctgttcccgcggatgcagcccgtcgcgctggacctcatcgagcggatgctcaccttcaacccgctgcagaggatcacaggtcagtcggcgcgggcctactacagcttagcctgttctttttcctccctagcttcttctctccatgtgcaacttgcaactgggtggctgctgaatcctgaactccgccgcacgtgttctttagttggcgtcggtagtcactgtggtactagcatgtgggggcatgcactcgcgatgcagtgtatagtgcgtagtatgtaggcaaggcaacgcagctgacaacatgtcgcatttccagagagagaggggggggcatgcgtttggtttgtccgcgcaattttgggtgttggactggcctggtaaggactcaggagcatatgcaatcttctttgtctgaactagaaactttcacgcgccaacaaaacggaacgatttggtagtcctctcctcttcgttgaattcattcagagttagagaccataacagaaaacagggcgtcagttctgtgattctagttagctgctgtttaaaattagttggagatataggctattagctgtttttaggtagagacatctaatatctctagctaataggctattaactgcttgtttctttctcctcctgcgtttcccaattctaatattgtgcatccagctcatcaaagttgtgcacgctgtggtctgcgggagctttctccatttgcatccaaattaatgccttgatgtt

SEQ ID NO: 5294 - DNA, 820 bp, Zea mays
  Clone ID: 700450425_FLI
caaaatttcccccaaaacttctcctcttgaggaaggcagcccgagcgagcgcgctgcaatggcggactcgtcggcgccgacgagagtgatgatggcggtgaacgagtcgtcgctcaaggggtacccgcacccctccatcagctgtcgcaccgccttcgactggacgctctccaagctcgtccgctccaaccctgggggcttccacttcctcttcgtccacgttcatgtccccgacgaggacggatttgatgacatggatagcatctatgcttcgccggaggactttcaccaaatgaagcagagagacaagataagagggcttcatttgctcgagtactttgtaaaccaatgccatcagttagggataaaatgcgaggcatggatcagacatggagatccaaaggaggttatctgcagcgaagtgaagagagtccagcctgaccttctagttgtgggaagtaggggtcttgggccatttcagagggttttcgtgggcacggtgagcgagttctgcgttaagcatgccgaatgccccgtcatcaccataaaacggaacgctaccgaagctcctcaggaccctgtcgacgattgatgcttccaagccaagccatgccatgtcactggagaatgagatgttcttcttcactgcttttataatgggttgatgtacaaaatacgatatggaagtggtgcctggaactagttcgcggagggttccaactcttgcacactgcgcccccaaaaactagagttgaagatgtaaaacgccgtcgtccgccgagggacgacgagagattgtacgtgatacatcgatcgagtc

SEQ ID NO: 5295 - DNA, 1607 bp, Zea mays
  Clone ID: 700450428_FLI
agttgaggagaatggctgttggtgggactcaaccagtccttaggaagtacctaggcgccctcaaggacacgacgactgtgagcttggcaaaagtgaacagtgattataaggaattggacattgcaatcgtcaaggccacaaaccatgttgagcgcccatcgaaggagaagtacataagagaaattttccattccatttctgctgctaggccacgggcagatgtagcctattgcattcatgcccttgctagacgtctttcgaagacgcgcaactgggcggttgcgctcaagacattgattgtcattcatcgcgcccttcgggaagttgatcccacttttcgtgaagagcttattagttatggcagatctaggtcccatatgttgaacatggcctactttaaggatgactctagtgcagaagcttgggattattctgcatgggtgcgcatttatgctttatatttagaggagaggctcgaatgtttccgagtgttgaagtatgatgtagaaacagatcctccgagaactaaggatcttgatactgttgctttgcttgatcatctaccatcattgcagcaactccttttccgtcttcttgcttgccagccacaaggagcgtcgtcttacaatgttataatccagcatgcactctcaatggttgctttagagagtattaagatctacactgcgattagtgatggaacaatcaatctagttgacaagttcttcgagatgcaaagaaatgatgctgttagggcacttgatgtatacaaaagagcaactaaccaggctgaacgactttcagagttttatgaagtgtgcaaaactatacacattgggcgtggtgagaaattcctgaaaatcgagcagcctccagcatcattcctgaataccatggaggagtatgttagagatgctccaacaggtcaaaaagagaaggctatactagcgatagaatacaaaaaagagccagaggaggaagaaaaaccgtcctcacctcctgcggctccagaaccagaaccggaacaagtgcctgagccagaacccgagccagtgaaagaggaagcaccagaagctgaaccagatttgctgggtctgaacgaacccaaccctgctgcaactgcgatagaagagcagaatgctttggcgctagccattgttccgatagatgatgctccgaaagctgctcccacttttggaaatggagtcactggctgggaactggcccttgtgacagcaccaagttcaaatgagaccgccgttgccccaagcaagaaactggccggtggtctggacttgctgacccttgacagcctgtacgacgaggcgaaccggagagcgagccagccagcaagctacaacccctgggaggcgacccccgccgcgcctgccccgatgatgaccatggcgccggtgatgcacgacccgttctacgcctcgaacgggtacgctgcgccgcacggcgtgcagatggcggcgatggcgcagcagcagcaggccttcatgctgcagcagcagcagatgatgacgatggccccggcgcagccggtggtccaccacccgatgcagatgcagcagaaccccgcgaacccgttcggcaaccccttc

SEQ ID NO: 5296 - DNA, 747 bp, Zea mays
  Clone ID: 700450486_FLI
gcagaccgcgccgcagggcagtcgcgccggcggcctccctccacctcggcccgggggagatcgccgagctcgcgcgcaacaaggttttgattgcggcgacagtggcgagcgcgatcgggcagctgtccaagcccttcacctcggtcaagaatgggggcgtcggcgccggccttgacctcagaaccgtcttccgctccggagggatgccctccacccactccgcgagcgttgttgcagttgctacttcgcttgggctagaaagatttagtgtgcagggggtttgcagactccatatttggaatgtcagtggtgtttgcagcaattgtaatgtatgatgctcagggagtaagaagagaagtgggcaaccacgccaaggtcttgaacaggttttggatcctcaaagagaaggcacctctggagtattctgaagtggacatggcagctcctgagtttgtttcggtctccgaggaagcgagctccaatgcgagcccctccttgaagcgcggttgtagcaccgaatcaccaagggtgaatgggctccgtgggtctgagctgactgagctgaagcaggcttacgtagaggaggattaccggttgagtgaatctgttggccacacggagcttcaggtcacagtcggcgccctgttgggttttgctgtaagcttagcagtgtatgcaacactgtaagagcaactccaatagttatgtaaattttagctctctaaatcacagatttaagaagttgtt

SEQ ID NO: 5297 - DNA, 921 bp, Zea mays
  Clone ID: 700450526_FLI
cggcgttcgagtaccacggcacggactcgcgcttcaaccgcgtgttcaacgagggcatgaagaaccactcggtgatcatcaccaagaagctgctggacttctacacgggcttcgagggcgtgtcgacgctggtggacgtgggcggcggcgtgggcgccacgctgcacgccatcacgtcccgccacccgcacatctccggggtcaacttcgacctgccgcacgtcatctccgaggcgccgccgttccccggcgtgcgccacgtgggcggggacatgttcgcgtccgtgcccgccggcgacgccatcctcatgaagtggatcctccacgactggagcgacgcgcactgcgccacgctgctcaagaactgctacgacgcgctgccggaaaatggcaaggtcatcgtcgtcgagtgcgtgctgccggtcaacacggaggccacccccaaggcgcagggcgtcttccacgtcgacatgatcatgctcgcgcacaaccccggcggcaaggagcggtacgagcgcgagttccgcgagctcgcaaagggcgccggcttctccgggttcaaggccacctacatctacgccaacgcctgggccatcgagttcatcaagtgaaccaccgtcgccgcgatgagatggcatggctgccacatgctttgcttgcttggtcctcgtatcgtacgtcgccgtcgtcgtcttcttctggttattgcgctgctacctcgctgctctcgcgtatgcatgtacttttgcttaattttctttcttcatatcatgcactctggctggcctagactgcccccgatccatggtggccggtacgtcttgtcgagctcttgcatgtcgtggattctaaattcttcttctgcgtcgaattgtctctgccatgtgcgagtaataacaatcaaggttatacttacgatac

SEQ ID NO: 5298 - DNA, 656 bp, Zea mays
  Clone ID: 700450563_FLI
gtgatcagttaatactaagggcaggcacacctctgcttcgcgctagtgatcaagcaagtgctttctgtactctgcagcaatggcaggcaaggcctcggtcgcgctgttcctcgccgtgaacctggtggtgttcgccatggccagcgcctgcggtggcaactgccccacgccgaccccgtccaccccgtcgacgccgaccccgacgccggcctcgttcggcaagtgcccccgcgacgcgctcaagctgggcgtgtgcgccaacgtgctgggactgatcaaggccaaggtgggcgtgccgcccacggagccatgctgcccgctgctgaagggactcgtcgacctcgaggccgccgtgtgcctctgcaccgccatcaagggcgaggtcctcggaatcaagctcaacctgcccgtcgacctcagcctcatcctcaaccactgcggcaagaccgtgcccaccggattcaaatgcctctaagctagccgcgagcatgcggatatatatgtgttcttttggttgccattcgcctgcagacttcttgtcgtttgctacttattaagcgagtgctagctctgcatgcatgactacgtcctttgcatgttgatgagcaactttcgatacttttgggtgtttgttttatgtaagtgcttcgtccttt

SEQ ID NO: 5299 - DNA, 1075 bp, Zea mays
  Clone ID: 700450602_FLI
cgctgtcctatttcaatttcgaatctccccttcccctcagtctctcacacgcacgctcctcccctacgcagcaaaaccctaaccctagctgcggacgccgtcgccgcctccgcgcccaaccgatgtctgattctgaggcgtccccaccgcccactccggccgccgcaacgcccgcagcgctggtggagacctccccgtcctcggcgaggaaggaagaactgctgcctgtggaggaaaagatctcggaattaagtgaatcacaatcagagcttctagggaggctccgtgggcttaaggaggatttgctgagttggaggagtaatttagactcccaagtgacgaaatacaaagtggaactctctgacatcaagagtgcactcaataatgaaatagagcagcttcgctcagatttccaagagctgaggaccacccttaagaagcagcaggaagatgtgtcacttagcttgaagaatttggggcttcaagatgctaccgaaaatgatgggaacaaaggaaatggagacggcacaaatgaggtcttgtcagctaacttggggaacttgaaactggatggttcttctgaaaactatgatgaaagcagagagtcaaaggaggacaaggtggaaaacaccgacactgctggtgatggcatcgtcgacaaagctactaaggagacgagctcaactgatgaacaattctaacacaggaaactgaactacactgttcgtgtctcagctgtagaaattctaggaacatcgatacatgagttcctgtaagagagcgagtccatgctttgctatggctcagtcgggttggttatggaactctattgggacctgtgagtcgtgaggatccaaatctcctctagaattgtgtaccaattgaaagttacgatatggtatcatggacatttgctcacctgaatgcatttcagctggtttgtcgtttgcaatatccaagcctccaaggccatgattttattagacctacttgaaatggcggtaggtgatgtactgatgtggattttgtacgaggaatagtggaataaggtattctggtgggtttgttgttggtc

SEQ ID NO: 5300 - DNA, 1488 bp, Zea mays
  Clone ID: 700450713_FLI
ctctcaggcataagcgagtttgacctatcagcagaggcgttgccttggttgatgccgccggaggaggcagacaagaggacgacgcacacgcggcaagaggcgcaggagttggaggagcgcatgacctgtctgcggttgctattcgaggacgcagcagatgacagaattctcgccagaagggagcttggagcagcagccgacgagttcctgctccgcttgacgacgcgtcaacaggccttgacgcgcgagtactcgcgcctcgccaacctgaagaggcctctggatctctccggcatgactgaggccgaccgggcggcggaggcagagaggctgagggaggagaagctgcagaaggcgcgtcaactccaggaccagggggacatgagcggcgcccgcgagtgtgaaggtctggcacgcatcatcgacttcgatgtcaagcagggcggcgaatacctcaacagtatctgctgtgtcggcaacatctacaccttcgaccacacagaggagtcgcccgttggtccgatgagatttaccaacagaccctggcaagacaagatgtgtgtgaattgtgcgtcgataaacatcctatctgtcaagattgcatgctcggatatcgacttccccatccaagtctatggcaccgttgttgccagggactgcatcgactacaagtgtgtttacctcttccgccgagataatgaccattgccaactcatcagctctaatgaagaatcattgatcttgactggcccaaaacggggacttgcattgtggtacggtgctgattatgttcagactgatctctgggtcaaggatcgtcaagggcattgcaaacaattcagtaaggggatcgtgaggatcccaggcacagcaaatcaagtgtttgacaaatgtgagcctgaaacagtatctcttgctaccaggctcagtactgtggatgtgacatatgacgttgtggaatgtgcggtggaggcaactgttgcagctgaagttacacagggggaattctttggagcaatgactgcccacaccactagaagcaagaggaggattgtgctgtttgatagccaagtaggaggtgataaatgtcatggtatgattcaattgatgcgacctgttgtatcggtctctgtgatggacaagctgaaaattttcgtaacgaccgctgctggtgtctctacaggcattgaagttactcctagatggaatggtggacacgaatttgtactcactttaggtgacgctacgatttgtgtgaaggttacttggtcgatggtagatccacggctttaaatgggttcgcctgttcgttgttaagcatcatcggtggaagtgtagtagtgctcttgctctggtttgttgtctgaggctgttggagtctagataagtataacagtgttcacactatcatgcccgtcctgttatttagtgaaccttaatttgtctaatgttgctactcttgttatttattgaaccttagtttattct

SEQ ID NO: 5301 - DNA, 1366 bp, Zea mays
  Clone ID: 700450772_FLI
caaacctagactagaggcccctcaccgaggcgacgacgcacgcagccgagcgccactccgccgccgccgcctcctcctcgtccccgtcccgcgccgcaacggcctcccccaccctgcgcccgccggccgcccctcgacgggtcgagcggagcggggaacccatccgtccggccgttggtcgctctcgctcgtctggtgttggttgtaatgagaagctggacctgttaggccgaagagttctcgttgcaagtctgtgcctcagcgatgggttcaggcaacttgatcgtgaagaaggtggtaaagcacagctcctttgatctggacatacagcttgataagagttggatggaggatgttacctgcccgatctgccttgattaccctcacaatgcagtgctactgaggtgcacgtcttatgagaagggatgcaggccgtttgtttgcgatacagaccagacccgctcaaactgtcttgagaggtttaaatctgcatatgaactgccttccaatgtgaaagtttcatctttagccgtgcctcctcttgatagcattattcatattgtgccgtctaacgcaaacaaccgccccagctgccctttgtgtagaggtgatgttattgggtgggttgttattggtgaggctcggctgcatcttaatcagaagaaaaggtgctgtgaagaggattgctgctcgtttgttggcaacttcaatgagcttcagaagcacacgcaacaaaagcatcctgattcacgcccttcagagatcgatcctgctaggcaagttgattgggagaatttccagcaatcttctgatatcgtagatgtcttgagcacaatacatgcacaagttccaaacgggattgttctgggagactatgtgattgagtatggggatgatgacactggtgaggactatgaagttttccgcagggtcaggacgaactggtggtcatgtattttctgcagggcgttttcaagatcttcaagaagtcgtagaagatccagagcaagggaaagaataggcagtggaaggaggaatggcaaccaggttaatctagaaaattttaacctcgtggttccgacacaacctgttgaattaagggaaattaggtttgatgaaattgatgatgaatacatagtcacaggggccattcctagtatcgcagcaccgggaagaatggctagtttccattacagggatacaagatatggacgttgatgcatagggtctgcagtaaaaaaaggaatagatgttatgcaatttaccgatcaacgtaacgttgtaactccgctcatttggattccttttccacctgccctcggtaggtgctgccgcagttcaaacttatctgtgcataaaaagtagc

SEQ ID NO: 5302 - DNA, 1288 bp, Zea mays
  Clone ID: 700450793_FLI
ggagcttggagcacggcgggttcacgttcacgccgccgcccttcatcacctcgttcacggagctgctctctggggcagcagcggacatggtaggagccgcgggcgccgatcatcaggagcggtcgccgagggggctgttccaccgcggcgccaccaggggcggcggcgtaggcgtgcccaagttcaagtccgcgcagccgcccagcctgcccatctcgccgccgccgatgtcgccctcctcctacttctccatcccgcccgggctcagccccgccgagttgctggactcgcccgtcctgctccactcttcctcgaacttcttcgcgtcgcccaccaccggcgccatcccggcgcagaggttcgactggaagcaggccgccgacctgatcgcgtctcaatctcagcaagacgacagccgggctgcggtcggcagcgccttcaacgacttctccttccacgcgcccaccatgcccgcgcagaccacgtccttcccttccttcaaggagcagcagcaacagcaagtcgaagcggcgactaagagcgccgtcccgtcgagcaacaaggtcagcggcggaagcggcggcagcaccaagcttgaggacgggtacaactggcgcaagtacgggcagaagcaggtgaaggggagcgagaacccgcgcagctactacaagtgcacgtaccacagctgctccatgaagaagaaggtggagcggtccctggccgacgggcgcgtcacgcagatcgtgtacaagggcgcgcacaaccaccccaagccgctgtccacgcgccgcaactcctccggcggcgtggcggcggcggaggagcaggccgccaacaacagcagcctctctggctgcggcggcccggagcactccggcggcgccaccgccgagaactcgtccgtcacgttcggcgacgacgaggcggagaacgggtcgcagcggagcggcggtgacgagcccgacgccaagcgctggaaggcggaggacggtgagaacgaaggcagctcaggcgccggcggcggcaagccggtgcgcgagccgcggctggtggtacagacgctgagcgacatcgacatcctggacgacgggttccggtggcgcaagtacgggcagaaggtggtgaaggggaacccgaacccgcggagctactacaagtgcaccacggcggggtgccccgtgcggaagcacgtggagcgcgcgtgccacgacgcgcgcgccgtgatcaccacgtacgagggcaagcacaaccacgacgtgcccgtgggccgcggcgccgccagccgcgc

SEQ ID NO: 5303 - DNA, 1476 bp, Zea mays
  Clone ID: 700450831_FLI
ccgctccggttcagacttcacctccttgaatgtttccgacatgagcgccgagtcgataaggaggacgcagtaccccagcttcactgaccgcccgtctaacctgagggtgttctcctttgctgaattgaagagtgccaccctcaacttcagccggtctctcatggttggcgagggtggctttggctgtgtgtacaggggtgtcatcaagacctccgacgaaccgaacgaacgaatcgagatcgctgttaagcagttgaatcgtaaaggacttcaggggcagaaggagtggttaacagagatgaatgtgcttggaattgtggaccatccaaacctagttaaacttataggctactgtgctgatgatgatgagaggggagtacaacggcttttagtgtacgaatatatgcctaatggaagtgtggatgatcacttgtcgagtaggtcaacttctactctgtcatggccaatgagactaaaagtagctcttgattctgctcggggactgaagtatctgcatgaagaaatggaattccaggttattttccgggacctgaaaacatctaacattttgttggatgagaactggaatgctaaactgtcagactttggtttggctaggcatggaccagcagaaggtctgacccatgtctccacagcggtggtcgggactctaggctacgcagctccagagtacatgcagactgggcgcctgaccgcgaagagcgacatatggagctacggcgtcctcctgtacgagctgatcaccggccgccgccccatcgaccggaaccgcccaaagagcgagcagaagctcctggactgggtgaagccgtacatctcggacgtgaaacggttccccatcatcgtcgacccgcggctggaggggcactacaacctcaagtccatgacgaagctgtccagtgtggcgaaccggtgcctggtccggatgcccaagtcccgccccaagatgagcgaggtgtacgacatggtgcagaagatcgtggactgcgtggggaccggcccgccgcagcccccgctgctgcactaccacggctcggcctctgagcctggccctggcgacaagcgcgccaggaaagggtcggtgaagaggaggaggctctgggagctcaggttcggctgccggcacatcgtgtggcgcggctggaagcctgcgatcgtgaaggacctctgaggagggcggggtggctccggtgctgtaagtacagtagctagctagctgttcatagagacggtggtaacagtttgttccaccgtgtagtgcttggttggtatatagggtgagttcatgcttgcataataccagtcgagaagaagaagaagaaaggtgcacagttgagtggggtggcgttggagtggagtacatagagtagtgctgtgtgtaatttccagtgcaacttctgctgctggctttcttcgtctttgggacaagtttggtgtggtcttcggggatgattc

SEQ ID NO: 5304 - DNA, 1165 bp, Zea mays
  Clone ID: 700450844_FLI
ttctctgactgttgtgaaatgtcgttttttatttaggttgaaactgttgatgactatgacgagtattgtcactatgtagccgggctagttggttatggactttccaggctcttttatgctgctgggacagaagatctggctccagattcactatcaaattcaatgggtctctttttacagaaaactaatataattagggattatttggaggacataaatgagataccaaagtcccgcatgttctggcctcgagagatatggagtaaatatgcagataaactcgaggatttcaaatatgaggaaaataccgaaaaggcagtacaatgcttgaacgatatagtgacgaatgcactgattcatgccgaagagtgccttcagtacatgtcagccttgaagaaccatgccatcttccgtttttgcgcaattccccagataatggcaattggaacatgtgctctttgctacaataacgtgcatgtctttagaggagttgtaaagatgagacgtggtctcacggcacgaataattgacgagacaaattcaatgtcagacgtctataccgctttctatgagttttcttcattgatagagtcaaagattgatgacaatgatccaaatgctgctctaacacggagacacgtgaattcaataaagcaaacttgcaagtcatctggtttggtaaagaggagggggtaccatttggacacatcaccttacaggcctatgctgatcatgattgtcctcctgctggtggctatccttttcggggcactgtataccaagtgatgcacttgtagctggcctttttcccctatggagacgagacaaactctgccaatctgatccttttcgtactctgtagtccccaatggctgcaggaagttcgaaattactggctgtagaagtgtagatcatacggcagcatgctactgcttccatgactccgttactgctctcgattcgtttcttcattatgttttctcgcgcgttgtatcgtttgaagctgttttaagcaacggaaaaaaataccatgtgacacgtgtatcctacgaacatgggtttctgtttagttagcagtgggcgcactgtattatgttgtcttgttgacatgtcatgttttcaaagctgacgtgtttgtgtttaccagaattgtgtagtggagaac

SEQ ID NO: 5305 - DNA, 809 bp, Zea mays
  Clone ID: 700450908_FLI
ctcaactccatggtgctcgccaacaactcggagaacgtgctgctcccgctcaacgagccggtgcacggcaccaagcgccgcagccagatacaaacgttcctggaccaccacggcggccccggcgtgcagcacatggcgctggccagcgacgacgtgctcaggacgctgagggagatgcaggcgcgctcggccatgggcggcttcgagttcatggcgcctcccacatccgactactatgacggcgtgaggcggcgcgccggggacgtgctcacggaagcacagattaaggagtgccaggagctaggggtgctggtggacagggatgaccagggcgtgctgctccaaatcttcaccaagccagtgggggacaggccaacgctgttcttggaaatcatccaaaggatcgggtgcatggagaaggatgagaaggggcaagaataccaaaagggtggctgcggcgggttcggcaagggaaacttctcgcagctgttcaagtccatcgaggattatgagaagtcccttgaagccaagcaagctgctgcagcagctgcagctcagggatcctaggacagtgcttggagacgagcaactgctgtggcactttgtatcatggaacagaaataatgaagcgtgttctttgtgacacttgacatgcaaatgtttgtgttctgtaaccgttgaatatatgggacgatgctatgatggtgtaatagatggtagagagggtacaaccctgatactaatgatgcactattgcatctctgttgtacaagtttgcatgaaaataacgacgagggtcagtatgaggc

SEQ ID NO: 5306 - DNA, 1278 bp, Zea mays
  Clone ID: 700450916_FLI
aatctactgcatgccaccacgaccttgtttcaagggttctgcaccaatcaatctttccgatcgtcttaatcaggttctccgttgggctcttgggtcagtggaaattctgcttagtagacattgtcctatctggtatggttacaatggacgattgaagcttttggagaggctggcttacatcaacactattgtatatccaatcacatccattccgcttattgcctattgtgtgcttcccgctatctgcctccttaccaataaatttatcattcctgagattagcaattatgctgggatgttcttcattcttcttttcgcctccatttttgccactggtatattggagcttagatggagtggtgttggcattgaagattggtggagaaatgagcagttttgggttattggtggcacctctgcccatctcttcgcagtgttccagggtctgctgaaagtgttggctgggattgataccaacttcacagttacctcaaaggcatctgatgaggatggtgactttgctgagctatatgtgttcaagtggaccagtttgctcattcctccgaccactgttcttgtcattaacctggtcggaatggtggcaggaatttcttatgccattaacagtggctaccaatcctggggtccgctctttggaaagctgttcttctcgatctgggtgatcctccatctctaccccttcctcaagggtctcatgggaaggcagaaccgcacaccaacaatcgtcattgtctggtccatccttcttgcatctatcttctccttgctgtgggtgaagatcgatcctttcatctccccgacacagaaagctgctgccttggggcaatgtggcgtcaactgctgatcgagaccgtgactcttatttgaagaggctcaatcaagatctgccccctcgtgtaaatacctgaggaggctagatggaaattctttttgttgtaggtgaggatggatttgcatctaagttatgtctctgttcattagcttcttccgtgccggtgctgctgcggactaagaatcacggagcctttctaccttccatgtagcgccagccagcagcgtaagatgtgaattttgaagttttgttatgcgtgcagtttattgttttagagtaaattatcatttgtttgtgggaactgttcacacgagcttatattggcaatgctgttatttatacacagactacattctttggaatgtgagcaaacaatcagaacactgtaatctattagcacaactatataaggcagctgttgtatc

SEQ ID NO: 5307 - DNA, 1104 bp, Zea mays
  Clone ID: 700450925_FLI
agatgcttcgcatgcaaatattggtgaagcgttttcaggggttgcaggtggcactcctttttcagttgagtccggagttagactattgccacttagaacagtggttgccatgcctgctggcatcagtcgtgctccatcagggtcgtctagtggtgggcttggtattatctatccatttctcactagggttcgacaaagggcaaacactaatggtaatgatgaaaggaatggtcaatctccaaatgaatcggctcgtagtagcacccatcttaatcagcaatcaattccgcagtcatctcaaactcatgaagcaggtaatctgagatctccagttgatgtcaatgttggagatggctctgagacctcacctgggcagcagaatggtctggtcactctctctcagataatggacttttttggatcaatgctcccaggcgaaaatgttcgaggaaatacttcaagccagcaaccaccaatggcttccaccgagcagggagagggtagaaatcttgcaacaccagaagtgtcaggagccagtgaggaggccctacgctttgctggcatggtcagacaaattatgccatttatctcccaagttgaaacacagaatcaaagtgccccaccagacagcagcagcacacctgcacaggctgcatctgggagtgcagacagagctagggatgtcccaaatgattctacgagttcccgtcaacataaccgcgaccaaattgatgagcctaattctaaaaggcaaagaactagtgactgattggaatctacttgtgagctgagaatcttgccagttcttgatttaccccagcggatgatcaaaataaggacttgagacaaatggtggcagtattgagacaaaaatggattagctgtggtatatacttggcactgagggcactagacgaggcacctatgccttttttttttgagggggcgcatcttataagctgttatttttttagtgcaacgagcatacatgctgctggcatccaatccccaatatgtacaagttttaattcaggttgtgatcatttacgcaacgaatcaaagcctccgctctggtcattgccgtagcatacggaggactgatgc

SEQ ID NO: 5308 - DNA, 1543 bp, Zea mays
  Clone ID: 700450953_FLI
gttcgcctcttctcctccctcctgccgggtccttaataaagagcagcagcgcaagaggttggtagagcgagcgagaagaaggcaatggcggcggagagcttcctgttcacctcggagtccgtgaacgaggggcacccagacaagctgtgcgaccaggtgtcggacgcggtgctggacgcctgcctggcgcaggaccccgacagcaaggtggcctgcgagacctgcaccaagacgaacatggtgatggtgttcggcgagatcaccaccaaggcgagcgtggactacgagaagatcgtgcgcgacacctgccgcgagatcgggttcacctccgacgacgtggggctcgacgccgaccgctgcaaggtgctggtgaacatcgagcagcagtcccccgacatcgcgcagggcgtgcacgggcacttcacgaagcggcccgaggagatcggcgccggcgaccagggccacatgttcgggtacgccaccgacgagacccccgagctgatgccgctgagccacgtgctggccaccaagctcggcgcgcgcctgacggaggtccgcaaggacggcacctgcgcctggctcaggcccgacggcaagacccaggtgacggtggagtacgtgaacgagggcggcgccatggtgcccgtccgcgtgcacaccgtgctcatctccacccagcacgacgagaccgtcaccaacgacgagatcgccgccgacctcaaggagcacgtcatcaagcccgtcatcccggagaggtacctggacgagaagaccatcttccacctcaacccgtcggggcgcttcgtcatcggcgggccccacggggacgccggcctcaccggccgcaagatcatcatcgacacctacggcggctggggagcccacggcgggggcgccttctccggcaaggaccccaccaaggtggaccgcagcggggcctacgtcgccaggcaggccgccaagagcatcgtggccagcggcctcgcccgccgctgcctcgtgcaggtgtcctacgccatcggcgtgccggagcccctgtccgtgttcgtcgactcctacggcaccgggaccatccccgacaaggagatcctaaagatcgtcaaggagaacttcgacttcaggccagggatggtcaccatcaacctcgacctcaagaagggcggcaacaggttcatcaagaccgccgcatacggccactttggccgtgacgacgccgacttcacctgggaggtggtcaagcccctaaagaaggcatccgcttaagaatgtattgggaagttcactggacatgaggttcatcttcgtctggctctgctgatacctgcaaggattgctgctgctgctgccgcccctggatgtgtgtttgatcagtgactggctgctctgctccatagaagatgaatgaagagagagatggtgaagaaggctttggcaaatggcaattgccgcagcaagccatgtcggcgccactgaccggcttagtgattggtataatttggtgtggcagcagccaggattaatgcgctggtcttttatctttact

SEQ ID NO: 5309 - DNA, 994 bp, Zea mays
  Clone ID: 700450973_FLI
cacaacccagtcgctcaaaaccctagagctctcgcctgctcgcctccgccgccggagcgagctccccatcttcatccgtcaaccatggcgacccagatcagcaagaagaagaagttcgtcagcgacggtgttttctacgccgagctcaatgagatgctgacgcgggagctggcggaggatggctactctggcgtggaggtgcgcgtcacgccgatgcgcacggagatcatcatccgcgccacgcgcacgcagaacgtgctcggcgagaagggccgcaggatcagggagcttacctccgtcgtccagaagaggttcaacttccctgagaatggcgtcgagctttacgccgagaaggtcgtcaaccgtgggctctgtgccatcgcgcaggccgagtccctccgttacaagctcctcggaggccttgccgtccgcagggcttgctatggtgttcttcgttatgttatggagagtggtgccaagggttgtgaggtgattgtgagtggaaagctcagggcccaaagagccaagtccatgaagttcaaggatggctacatgatctcatctggtcagccagtgaacgagtacattgactcggctgtgagacacgttcttctcagacagggtgttctcggtatcaaggtgaagatcatgcttgactgggacccgaagggcaaggttggcccgatcactcctcttccggacctggtgaccatccacaccccgaaggacgaggacgagccgcgccctccggtcttggcacctcctgaggtgtaaggtcccaactgtgtccttgaaatggcagtttgatcgggtcctagataggtttctatcttacgataaggacaatgctaagacagttggttaccttaatctttatggacagatgctatgtgttgcttctgtggcacttttgtttaagctaagttttgcggagacaagatacttatatatgttccggatgaaattatggttccttgtatgctctggaaatttt

SEQ ID NO: 5310 - DNA, 2992 bp, Zea mays
  Clone ID: 700451030_FLI
attccacctccgttcaccccgtccatttgatttgcgttcactgcgttgcgtttccttggaggggattgttctctcctctcctttggattggaggtccctccttcttctcctctctctctcagaggaaggcctgaggatccaggaagaggacagcaatgggggaaggtgcaggtgaccgtgtcctgagccgcctccacagcgtcagggagcgcattggcgactcactctctgcccaccccaatgagcttgtcgccgtcttcaccaggctgaaaaaccttggaaagggtatgctgcagccccaccagatcattgccgagtacaacaatgcgatccctgaggctgagcgcgagaagctcaaggatggtgcttttgaggatgtcctgagggcagctcaggaggcgattgtcatccccccatgggttgcacttgccatccgccctaggcctggtgtctgggagtatgtgagggtcaacgtcagtgagctcgctgttgaggagctgagagttcctgagtacctgcagttcaaggaacagcttgtggaagaaggccccaacaacaactttgttcttgagctggactttgagccattcaatgcctccttcccccgtccttctctgtcaaagtccattggcaatggcgtgcagttcctcaacaggcacctgtcatcaaagctcttccatgacaaggagagcatgtaccccttgctcaacttccttcgcgcccacaactacaaggggatgaccatgatgttgaacgacagaatccgcagtctcagtgctctgcaaggtgcgctgaggaaggctgaggagcacctgtccaccctacaagctgataccccatactctgaatttcaccacaggttccaggaacttggtctggagaagggttggggtgattgcgctaagcgtgcacaggagactatccacctcctcttggacctcctggaggccccagatccgtccaccctggagaagttccttggaacgatccccatggtgttcaatgtcgttatcctctcccctcatggttacttcgctcaagctaatgtcttgggttaccctgacaccggaggccaggttgtctacatcttggatcaagtgcgcgctatggagaacgaaatgctgctgaggatcaagcagtgtggtcttgacatcacgccgaagatccttattgtcaccaggttgctccctgatgcaactggcaccacctgtggccagcgccttgagaaggtccttggcaccgagcactgccatatccttcgcgtgccattcagaacagaaaacggaatcgttcgcaagtggatctcgcgatttgaagtctggccgtacctggagacttacactgatgacgtggcgcatgagattgctggagagcttcaggccaatcctgacctgatcatcggaaactacagtgacggaaaccttgttgcgtgtttgctcgcccacaagatgggtgttactcactgtaccattgcccatgcgcttgagaaaactaagtaccctaactccgacctctactggaagaagtttgaggatcactaccacttctcgtgccagttcaccactgacttgattgcaatgaaccatgccgacttcatcatcaccagtaccttccaagagatcgccggaaacaaggacaccgtcggccagtacgagtcacacatggcgttcacaatgcctggcctgtaccgcgttgtccacggcattgatgtgttcgaccccaagttcaacatcgtgtctcctggcgcggacctgtccatctacttcccgtacaccgagtcgcacaagaggctgacctcccttcacccggagattgaggagctcctgtacagccaaaccgagaacacggagcacaagttcgttctgaacgacaggaacaagccaatcatcttctccatggctcgtctcgaccgtgtgaagaacttgactgggctggtggagctgtacggccggaacaagcggctgcaggagctggtgaacctcgtggtcgtctgcggcgaccatggcaacccttccaaggacaaggaggagcaggccgagttcaagaagatgtttgacctcatcgagcagtacaacctgaacgggcacatccgctggatctccgcccagatgaaccgcgtccgcaacggcgagctgtaccgctacatctgcgacaccaagggcgccttcgtgcagcctgctttctacgaggctttcgggctgacggtggttgaggccatgacctgcggcctgcccacgtttgccacagcctacggcggtccggccgagatcatcgtgcacggcgtgtctggctaccacatcgacccttaccagggcgacaaggcgtcggccctgctcgtggacttcttcgacaagtgccaggcggacccgagccactggagcaagatctcccagggcgggctccagcgtatcgaggagaagtacacctggaagctctactcggagaggctgatgaccctcaccggcgtgtacgggttctggaagtacgtgtccaacctggagaggcgcgagacccggcggtacctggagatgctgtacgcgctcaagtaccgcaccatggcgagcaccgtgccgctggccgtggagggagagccctccagcaagtgatgcgcgacggcggccacagacctgatcgatcgatgagcgagagggagcactcggagtgtcgtgtcttttcccttgccatttctttctttttttcccttcccggaggcgaaaaaaagagtctgcttttgctaggcggcgggcgttcgttgctgctctttgcttcaagagttaaatttacctaccttgtcaaggtcttgttccatcattgatccgggtgtcgcttttttagtagtctgatggactgttagtagtttgcgttgcgtcggttgagagggaacgttggtggtggtggtgtgtgtgcagtcaggcgtggtgctccctttgtttcctggatgggatgttgctccttgaataataatcgtagtggccttggagcccttttcctg

SEQ ID NO: 5311 - DNA, 724 bp, Zea mays
  Clone ID: 700451040_FLI
tgcagcgatatcttcttcagccgacgccgctcctcaagtccgcctcccccagccgcggctagcactcccccgcccacgtacacaataccggagccggccctcgtccgcgtgttccgccacttcgacgcggacggcgacggccgcatctcggcggacgagatgcgcgagttgtgcgggtgcacagccgtggaggcagacgagatggtagctgtcgcggaccgcgatggagatgggttcatcagcctcgaggagctcgaggcgctgtttgaggacggcgaccggtcagacacgttgcgcgctgcgttcgccgagtacgacgagaacggcgacggcgtgatcaccgcggaggagctgcgccgcgctctgtggaggctggggatcgtcggggaggagatgacggccgagcggtgcgcagagatgatcgcggtggtggacatagacggcgacggggtggtctgcttcgacgagttcaaggccatgatggacacggcggcggcgtcatgaaccatacgcgcccggcgctctgcaccacacgtgtacgtgtacgtctgatattgttcgtcgacatgataacaccctaattagcagtaaacccattagttttagggtttcacgttctagtctagttcgagattggtttgtgatgggattaaagttttgcgttgtggcgccgtgtgcaattgatttcgatcatttcctttaatttcgcacctgttggatcgtt

SEQ ID NO: 5312 - DNA, 739 bp, Zea mays
  Clone ID: 700451045_FLI
gtagcaaggtggtttaaccacattgatgcgctcgtgaggctgagcggaattactgcagagggccaaggtgtgaaggttgaatcctcagcagttccttcagccccaactccagatgttgctgaagcacaggccccagttgctgaggaggacgacgacgatgatgttgacctttttggtgaggagaccgaagatgagaagaaggctgctgaagagcgtgctgcagctgccaaggcttctggcaagaagaaagaatctgggaagtcatcagttttacttgatgtgaagccatgggacgatgagactgacatggccaagctcgaggaagctgttaggagtgtccagatggaagggctgctctggggcgcatccaagcttgtcccagttggatatggtatcaagaagctgcaaatcatgatgaccatcgtcgacgaccttgtctctgtcgacactctcattgaggactatctgtgcgctgagccagtgaacgagtacgtgcagagctgcgacatagttgccttcaacaagatctaggcgtgacttccgatcagtccttctcctggggtgctggcgatggtggtggctgggcaatgcaccagcctaatttatccatagctatatgtctgctttgtgtggccagtgatattgccgtgagtatttttggatcctattcgagtcgaatgtaccagtaccagagttaatttgctttaattcgaaacaccgttccagttggaattctgtt

SEQ ID NO: 5313 - DNA, 1374 bp, Zea mays
  Clone ID: 700451063_FLI
gtagttcttgcatgtgcattgtctgctcaaagtttgactcagcatctaatacttgtagttgggttggttgtgatgtatgtcttcattggtgccacacagattgtggtctacgccactctctgattcgaaaggggcaaagtgcttcaagggcatatggaactactgagatgcagtttcactgttctgcctgtggatatccatcggagatgtttggttttgtgaaggaagtatttcgaacatgtgcacaacaatggaggatagacatgctggttagagagttacagtatgtagaaagaattttttctgcaagtgaagatgtaaggggcaagagggtccgggacttcgtgaagcagatgctaattaagtcagaaaacaaggcctatcatgctgaagttgtcagatgtgtcattgcattcttttctgatgatggtgctaaccttggcagtgatccatcagtaccactgaaaggcattccatgcagcatttctgaagctgttgatgggattcctagttcaagtcggaaggcatggataccatttaccttagagggacttccagttttagacaaaacaactcttcctaccacaagcacagggagcccatctgtgcctagaaaatctggtgaagctgagtttcagacaattgataataagcctgccactgatgaactggatagcttgatcaggttaaagcaggctgaagcatatatgtaccaggaacgtgcaaatgatgcacggaatgaggttgacaatctgagacacattgttatggtaaaaaatgcacgaattgaggaagattatggcacccatatcgctgatcttgacataaatgagttacaagagcggcgcaagcgaaggattgaagaactccaagtaattgaaaggacacaccatgaatttctcagcatgaaaactaggatggtagctagcattggggagttattgtcaaaaatggaggcactgaaacaaaaccgaagcacatgaactgaggttactattgcagaaatcgaagttgctcaacttgtttaaggaagcctgcacatattgttcttacaggaatgcgcaaagcatcgacatgtgaggggtaaccgaatgtctcactggggatgagccaccccagggccccccacgagtagccgaaggaggagaggtgcagacggacgacgaccatgatggtcagaatgtaacataggtagatatagaggatgtttggtttccatgaccaaagtttagttcatgtaatattaaatatttgaatatcaattataactaataaatgtagacttaattatatttaataaatttgtctcgtctttatctgtataattagttttataactaaattatatttaatatatgcaattattattcaagc

SEQ ID NO: 5314 - DNA, 1174 bp, Zea mays
  Clone ID: 700451080_FLI
aagtgatccctttagcgatatgtcccttgagatagaagacttgattatcccatggagtgagcttgttctgaaagagaaaattggtgcaggttcttttggtactgtgcaccgtgcggattggaatggttcggatgtcgcagtaaaaattctaatggagcaggacttccatccagagcgtctcaaagaatttttgagagaggttgcaattatgagaagtttgcgacatccgaacattgttcttcttatgggtgctgtcactcagccacctaacctttcaattgtgactgaatacctatcaagaggtagcttatacagacttttacacaggcatgctgcaagggaaaatctggaggagcgccgccgcttgagtatggctttcgacgtggcaaaagggatgaactatcttcataagcgtaatcctccaatagtccaccgggatcttaagtcaccaaacctgttggttgacaaaaagtacactgtgaaagtctgtgactttggtctctccagattgaaggcaaacacatttctgtcttccaagactgcagcagggactcctgagtggatggcaccagaagttctacgagacgagccctcaaatgagaagtctgatgtttacagcttcggtgtaatcttatgggagcttatgacattgcagcagccatggagtaatttaaatccagctcaggtcgttgcagcggttggtttcaagggacaaaggcttgagatcccaagcagcgttgatccgaaagtggcggcagtaatcgagtcctgctgggtcagggagccctggagacgaccctcttttgccagtatcatggaatccctgaaacttctcatcaagacattaccacccaatcagctcctcgaagaaaattagttaccacccaagcaacttgcaaattatgtcacctctagagttttctcgatttgtttagatccgatatgcgccaggcctctcaaaccattcgtcttcggcgccacgtattccctgatgagaaatattcaaaactacacctgtcacaaaaggggaaaaactatggttggacaataagattcatgaaaaaaatatgtgatccaaattaagtgtacatctcttttatcaaggaaccaaatgtaagttggtcaaatatatacatataagtactaatatttatggaatatatacttttacaat

SEQ ID NO: 5315 - DNA, 506 bp, Zea mays
  Clone ID: 700451245_FLI
cgttcatcctggtggttttgtgaggtcgaaagcggcgagcgaattagaagatgctggacaagctgtgggacgacgtggtggccgggcctcgcccggagacgggcctcgagaagctccgcaaggccaccaccgcccgtccgctcgtcatcaacaaagacgcggacggcggcagctacaagcgggcgcagtcgatgccgtcgaccccgacgacgccggtgacgccgtcgtcgtcgtcgtcgtcgacgacgccgcgcggcgccggcaacgtgtggcgcagcgtcttccacccggggagcaacctggccaccaagggcatgggcgccaacctcttcgaccggccgcagcccaactcccccaccgtctacgactggctctacagcgacgagaccaggagcaaccaccgctagatcgggcgagatggatggacagtgaagaggccatgtttgctggtccttgtggttatctaaaacgcacgcatgctctattatagctagtcatcactatat

SEQ ID NO: 5316 - DNA, 914 bp, Zea mays
  Clone ID: 700451259_FLI
ctcccctgagcttggtgggcgatcgagagttcgagacagtgtacacttacatactctgctcgtcagctgaggatcgatcgcttggtctcgttgttgcgtagataggtactagaggactatagctactagtaggactaggagaggatccgagggagagagagtaagcaggccaagatgatgcgcgcgaaccgggagcagagagtggccttctcgtcgacgaaggaggccgccgcggtgcccaaggaggaggtgtgggaggtccggcccggcgggatgctggtgcagaagcggagccccgacgcggacccgccccccggcggcgcgcccgtgcccaccatccgcgtcaaggtcaagttcaacggcgtctaccacgagatctacatcaactcccaggcatccttcggcgagctcaagaagctgctgtcggagaagacgggcctgcacccggacgaccagaaggtggtgtacaaggacaaggagagggactccaaggcgttcctggacatggccggcgtcaaggaccgctccaagatggtcatgctcgaggaccccgccgccaaggccaagcgcctcctcgaggagcgccggaccggcaaggccgagcgcgccgccaaggccatcgcccgcgccgccctcgacgtcgacaagctcgcaaccaaggtgtcggcgctggagacgatcgtgagcaagggcggcaaggtcgtggacgcggacgtggtgacgctgaccgaggcgctgatgaacgagctggtgaagctggactccgtcgccgccgaaggggaggtgaaggcggcgcggcgggcgcaggagaagcgggtgcagaagtacgtggagacgctggacgccatccgcgccaagaacaaggcggcggcggcggcggcgccggccaaggcccgcagcggcagcaacaaggc

SEQ ID NO: 5317 - DNA, 1054 bp, Zea mays
  Clone ID: 700451260_FLI
ggcacacccaccaactgacctgacccacgagggatccgcagatgaagatcattccggtcccttgcctggatgacaactatgcctacttaatcgtggacgagagcaccaagaaggcagcggccgttgaccctgtggaaccggagaaggttctcaaggcggccggcgaggtcggcgcctacgtcgactgcgttctcaccacccatcaccactgggatcatgctggtggcaatgagaagatgaggctgcaggtgccagggataaaggtatttggaggatccctggacaatgtgaaaggctgcactgatcaggtggagaatggaatgaagttgtcacttgggaaggacattgagatactatgcctacacacgccttgccacactaaaggtcatatcagctactatgttactagtaaggagggtgaagatccagcggtcttcaccggagataccttgttcattgctgggtgtgggaagttttttgagggttctgcagagcaaatgtatcagtcccttattgttacactgggttcgctgccaaagtcaacccgagtttactgtgggcatgagtacactgtgaagaacctaaaattcatgctgacactggagccagagaatgagaagacgaaacagaaactggaatgggctgaaaagcagcgcgaagcgaatcagccaacagtgccctcgactataggagatgagtttgagataaatactttcatgcgtgttgatctaccagaaatacaggcgaaattcagtgtcaactctccagttgaagcaatgagagaggtcaggaagaccaaggataattggagaggttgaggacacccatggccgccactagtctgttgaaccagcattccaaagtgaactaatgcagaaaccttgccctgtaggtgggaatgaggtttactgccgtgcaatgctttgagaaatgtgttgttgtgaaggagaagactcctacaataagctccgcgttaatgagtagtaacaatacgctccttgtaacttgtggtctgtttgccaataataatgtacgaactgtagtgcctatcttg

SEQ ID NO: 5318 - DNA, 653 bp, Zea mays
  Clone ID: 700451357_FLI
cttctcttcggttcagctctcgagtttccaggatgaaggtaatagctgcctacctgcttgctgttctgggtggaaacacttccccgactgctgatgatgttaagagcattctggaatcagttggtgctgaagctgatgaagaaaaactagagttcctgctcacagaactcaaagacaaggacataacagaagtgattgcagctggaagggaaaggttatcctctgtgccttcaggtggtggtgcaattgacatgggagctccagcagctgtagctggcggtggcgcagcacctgctgaagaggcaaagaaggaagaaaaggttgaagagaaggaagagtctgatgaagatatgggtttcagcttgttcgattaaaacaccactgccagtttacagtttctctcgcgaatggtctcacaatattcgctggtttccacaaaataagattgtcaatagctactacgtacttatgctattctgcatgtgatgtacgagtgtgcatcttcaagaatctttaagttgaatggtcccataataatattgataacaatgtaaattgtatgtcctgtacgtactttggtatcgcgacatctcagtgtgcatcttcaaggatcataagttgaatgttatcattaaggtcagtttggttcagat

SEQ ID NO: 5319 - DNA, 1983 bp, Zea mays
  Clone ID: 700451402_FLI
caacccgcccattgcattgcatcttcctcctctcccttgctcttccacttcgttgcgcccatccgtctctcgtctcgtgctcccatcgtcgacccatcacacatccacacacaagctaccctacgacgtatacagagaggaaaaagactagtggtacggccgtcgctagctcgactagtgatccgatccatcgatggaggcagcagacgcatcgtcagcgccgccgcctgcggaaggccgggtggtgtgggtgaacgggcccatcgtggtgggcgcggggccggggggcctgtcggtggcggcgtgcctgcgggcgcgcggtgttccgtgcgtggtgctcgaccgcgccgactgcatcgcgtcgctctggcagcgccgcacctacgaccgcctccgcctgcacctgccgcgccagttctgcgagctccccgggatgcccttccccgaccactacccggagtaccccaccaagcgccagttcgtcgactacctccaggcctacgccgagcgcgcgggcgtccagccgcgcttcaaccaggccgtcacgtccgcgcgctacgaccgggccgcggggctctggcgcgtgcgcgccgccgacgctctcgccgacgacgacgtcgccagcgccgcctccaccgagtacatcggccgctggctcgtcgtcgccacgggcgagaacgccgagcgcatcgtgcccgagttcgacggcgcccaggacttcgccggccccgtctcccacgtctccgagtacaagtgcggcgaggcgtaccgcggcaagcgcgtgctcgtcgtcggctgcggaaactccggcatggaggtctgcctcgacctctgcgaccacaatgccctcccgtccatggtcgtcagggacgcggtgcacgtcctgccccgggagatgttcggcgtcgccaccttctccgtcgccgtcttcctgctccgcttcctgccgctctggctggtggacgccgtcctcgtcctgctcgcgcgcctcttcctcggcgacctggagaagctcggcatccggcgccccgccgggggccctctcgagctcaagaacgccaggggcaggacccccgtgctggacatcggcgccctcgccaggatccgctccggccacatacaggtcgtgccgggcatcaagaggttcttccgtggcggcgccgagctcgtcgacggccgccgcgtcgctgcggacgcggtcatactcgccaccggctaccacagcaacgtccctcagtggctcaagggaagtgatttcttcacgcaggaagggtacccaagggtgccgttcccacacggctggaagggggagtccgggctctactctgttggcttcaccaggagaggcctctccggcgtttcctccgacgctgtgaaggttgcgcaggacatcgccgtggaatgggagaagcaaacctccacaagatgatgacgattgacgacgatgatgacgacgacgatggatgcccatcaacttaccagctcactcatgaccatcgttgacctctcatgcatggacctgctacgacgaccaacagatcgataccttgccatcatgcatagcatgttcagcaaaaagtgcaaaaacttgagatgatgtggccaagagttgccccaagctcaaatccagaaaccaaaagaaacagaggagaagcgcgcgtcgggatccagatcaaggctccgaaaactggagagcgaagcgagcctcctcgacgcttgggcgacaggaagaaggccggactgtgcgcgcgtcatgcagagcccagattttgctgtaccccatgggcccttatatacatgcgtagctatgtacagagtgtttttatgtagcaaagttgtgtacagtagtagcagtgcctctctagtgggttggtagagtgttagcgttgacatgcttgtgtgtttgtgtgccatcgtcgtgatgtctatgtatggagttgacaacgagaaatgacctattctatttaatttttgttcgttatt

SEQ ID NO: 5320 - DNA, 447 bp, Zea mays
  Clone ID: 700451410_FLI
ctactacatccatgatgaaaagtctacgtacaaccacgcgttgaagcgcccgtggggtaccatctagggctggacgaaatactcgtggctcgctggctcgctcggttcgtggtcagctcggctcggatcggatcggctcgtttaaattttttcacgagctgagctaacatcctagctcggttcgttaatgagccagctcggttcgttaacgagccagctcgcgagctaaacgagctaccatattccagcaaaatgaaactatatgcatatcatttacaaaataattgatgaacatgttatatatatgtgaggtgtttatggcttatgaattaaactaatgattaatgaactatgtctatgtgttaatttggtttatacaaatataattatgggttaaaccgatgagcatgtatgtgaattgtgaattaatgagtgatgaattgtgct

SEQ ID NO: 5321 - DNA, 451 bp, Zea mays
  Clone ID: 700451411_FLI
ggaggagacgagcaccgccgcgcaggccaccgtcgtcctcggcgtggccccggagaagaaggccgcgcccgagttcgtcgaggccgcggcggagtccggcgaggccgcccacggctgcagctgcggtggcaactgcaagtgcgacccctgcaactgctgatcacatcgatcgacgaccatggatatgattattatctatctagcttgtggtggtggttgaacaataataagcgaggccgagctggctgccatacataggtattgtgtggtgtgtgtgagagagagagaaacagagttcttcagtttgctatctctctctgcatgtttggcgtcagtctttgtgctcatgtacgtacgtgtgtctacctgcatgttggttgatccgattgcatctgctgtaaccatatattaattggtccacgatgatatgatttgatactatatatatact

SEQ ID NO: 5322 - DNA, 352 bp, Zea mays
  Clone ID: 700451413_FLI
atcaactccatgccccgtgttggcagcgccgccaactgggccgcctgggacgaagccatctagtagatctagccttgccatgtacactgcgctgcctgcaacccgttcgccggtgcccctgcccctgcccgtggtcttttatcatccttccaaccacgagactttgcttctaaaccagaggctccatctgtgtgccgccttgttttactagaaatctttttttttatcctttttcacttttcctgcctagtttttccccttatcctggcattgtacaaataatttctccagtgcttgtagcttgtggacttgggttgtccaacatgtcatgaatacaaactgagtttgcttc

SEQ ID NO: 5323 - DNA, 1175 bp, Zea mays
  Clone ID: 700451428_FLI
cagctctcgccttctctctcccatcggcacacccgagctcgctccctccttccacgtcgaggtccgagtcctgctttgatggcgaccgacgtggctgagactcccgcgccgttggtggatgcggccccagaggcgcccgccgacgccccggcggcgcctgctgccgacgcgaagccggccaaggccaagaaggccaccgcgccgaagaagcgcgccagcccgacccacccgccgtacgccgagatggtctcggaggcgatcacgtcgctcaaggagaggacggggtccagcagctatgcgattgccaagttcgtggaggacaagcacaaggacaagctcccgcccaacttccgcaagcttctgaacgttcagctcaagaagctcgtcgccggcggcaagctgaccaaggtgaagaactcgtacaagctgtcgtccgccgccaccaagccgaatcccaagcccaaggccgccccgaagaagcccaagaccggcgctaagaagcccaaggccgctgccaagaccaaagctaagacccccgccaaggcgaagcccgccacaaagcccaagcccgccgcgaagccgaaagccgtagtgaagccgaagacacccgccaagcccaaggccaagccagctgccaaggcgaagcccaagaccgccggcgctaagccgaagccacttgctaagaaagccggccgccccgccaaggcggcgaagacgtcggccaaggacacgccagggaagaaggcgccggtggccaagaagtccgctgctgccgcgaagaaggcccctgccaagaaggccgctccctcgaagaaggcggcgaccccggtgcggaaagcgccgtcccgtaaggccaagaagtaaagcggccaagaaggggggcgcgatgctgtaaatttgatatcggagaggctcgggtacactggtcattcagtatccgagaccgatagctgaggctagtggcgatggaggactgtgttattactactataaactggtggttgtgtttctgtaactggtgaatgatcaagttggaagcttttagtctatcttagatatatcagtggatagtgttttttgtattttcgttttcttttccaatgtgtgttgggtcttgtggattatcctttttttctaatctaatacaatgaagaggcatgtcttttgaagcttcc

SEQ ID NO: 5324 - DNA, 697 bp, Zea mays
  Clone ID: 700451438_FLI
gctgatccttcgccgtctctctctctctctctctctctctctctcttagatagtcttttgaatccatctctagggctcttgtttctccccatcctccccccaccccaccccccaccaaacagattcaatccgacaagacaagcatccatgtcgtcgtcacgccggagctcgagccccgacagcaacgacacgacggacgagcgcaagcggaagcggatgctgtccaacagggagtcggcgcggcggtcgcgcgcgcggaagcagcagcggctggaggagctggtggcggaggtggcccgcctgcaggcggagaacgcggcgacgcaggcccgcaccgcggcgctggagcgcgacctgggcagggtggacggcgacaacgcggtgctgcgcgcccgccacgccgagctggccggccgcctgcagtcgctgggcggcgtcctcgaggtgctccagatggccggcgccgccgtcgacatcccggagatggtcaccgacgaccccatgctccgcccctggcagccgtccttccccccgatgcagcccatcgggttctgagaatctgagcctcagccggcgggagagagccaatttctgtcgtcgtgccgctgtctatctcgtattggtatctattcataaatcatcgttgtcatggtttgctcttcttgtcagtgttataaatttgcttcttgttagtgtt

SEQ ID NO: 5325 - DNA, 1021 bp, Zea mays
  Clone ID: 700451467_FLI
gactattccctcaagcttggtatagcatttggattgacgggaaaatggagctcatagttgatccgctgcttattctcgagaggtacctctggcgtggaaaatacgcattcgcggtggctgtccacaagcatcataggagcatctacgaggagggcgacgcgatcaagcgacggaagcgctacgcccgccctttggttgatcttcagatgaagatgtactattacgaggggatggagccttggagcccgaagaaaaagatgcctagcggacgacggcgtcctcctcgctgctctcggccgcggtcgcctccacaccgctgcacgcacgcaccagggtgctcgtcgtcccgcggatcgcgacgcagctctcatccacggaggaggatgtcagcgagccttcgacgacaccaccagctccgacgaggacaccgaactggcggaggaggtgtccaacggcttcttcatcgtcgccaggctgccgccgtcgtcgacgtccgaggacccgagggcggggacgacttgggcactgcggaggagtcgctggacaggactagactctaccgcgcgcgccatggcgctgctggtaggcacgcggctgtcctcgctctcctcggcgtcctcctcgccgctctcgcctgcccatcgacggcggattgaggaacatgcaaacatcggccagtgaagggacagcagcaaacaccggacgacgctggggagactccctctctacggactcctctggctggcacgcaccttcgatgttggccgcgaactcgtcgattgcgaggaccagcgccgggactggcggcggctccattgccgacgagctcagctgcagccgagcgtgggaagaagccgaacgaagaagaatgaggagtcccgagtttgatctgttatgagtaacgaagagcagttcttcaacgaaacaaaacggccaccctgtactttagttttcggttgatgacactcggcagcgagtaaacctctgcacgatatcaaatttgcaaacaaacggcagttat

SEQ ID NO: 5326 - DNA, 652 bp, Zea mays
  Clone ID: 700451595_FLI
cgcagaaggcagtcgcggacaggaggaagaggaagaagaagcggcagcgagcgaggatgccgtgcctgaacgtgtcgaccaacgtgaacctggagggggtggacacctccgccatcctcgccgaagcctccaagtccgtcgccaacatcatcggcaagcccgaggcctacgtgatggttgttctcaagggttcggtgcctatggcatttggaggtacccaggagccagcagcttacggtgagctggtttccatcggaggcctgaaccctgatgtgaacaagaagcttagtgctggcatcgcttctatcctggagtcaaagctgtctgttcccaagtcgcgcttctacctcaagttctatgactcgaagcgctcggacttcggttggaacggctccaccttctagacttgaggtctgcagctgaaataaaagaaattcgtggaatcatggtacctaatgcccatggctattgcctattaaggacaatgtcataagatgtgtcttaatcggtgctgaactgagaaacagtaactgttgtcgtggaactggaagtggggtgctggcgtgtcagagtgcttgcttcctacctagcatagcatgcctgtgctatcttgttattggtattggcttgatatcagtctatattatcattt

SEQ ID NO: 5327 - DNA, 616 bp, Zea mays
  Clone ID: 700451631_FLI
gccgggcctcaagcgcagcacgtccacgccgttcatgaacaccaccgacgtcggcaagcagttcaccatgtccgaggtgcgcaagcacgcgtcgcaggagtcggcgtggatcgccgtgcacggccacgtctacgactgcaccaagttcctcaaggaccacccgggcggcgccgacagcatcctcatcaacgccggcaccgactgcaccgaggagttcgacgccatccactccgacaaggccaaggcgctcctcgacacctaccgcatcggcgagctcatcaccacgggcaccggctacagctccgacaactccgtccacggcggctccgtcctgtcgcacctcgcgcccatccgcgaggccgtcagggcccccgcgctctccaacccgcgcgataagatccactgccgcctcgtcggcaagaaggagctgtcccgcgacgtccgcctcttccgcttctcgctgccgtcgcccgaccaggtgctcggcctccccatcggcaagcacatcttcgtctgcgccagcattgaagggaagctgtgcatgcgggcgtacacgcccacgagcatggtggacgagatcggccacttcgacctcctcgtcaaggtctacttcaag

SEQ ID NO: 5328 - DNA, 584 bp, Zea mays
  Clone ID: 700451685_FLI
cttcctgccggccgccagagagatcgccattttgactgagtccctttcgtttctgtacgccgtcagggagctttctccggccgccgttctactcggttgccagggagaaccagccgttggctgaaccagctggccactaatttcctagccgagcccaggcaactgaccggacgaccgtcgatgaatcggccggcagccatactcggctgttcagtctgcgcggcgaagcggggccctgcgggctctcccgccggcgtgcgcgtcccctagtgcgggcgcgccgccgtcggtagagcggtcagcggtggtccctgcaaacccggctaaatctgttgttactgtgactttctgttttctcgcccggatctagcctctatctcgaatccctctgagtgaatgaatgtatgaaatgaaactatatgtaattttgggattgagtatggaggtctaaagtgtggatctggttccctttgcgttttcccctgtgattcacgcttggatccagtctctggattaaacgaacattgctctgtgcaatttgaccgatccggattttagggttaaatcgattaaggttgaaccct

SEQ ID NO: 5329 - DNA, 746 bp, Zea mays
  Clone ID: 700451702_FLI
caaggaccgagcaaatgaaatcttcaagaaaattgaagatctcaagtctattaggggaagaaatcaagatgccatattagccgcatgtctatatattgcttgtagacaagaagatcgccctagaactgtgaaagaaatatgttcggttgctaatggggccacgaagaaagaaattggcagagccaaagaatttatagtgaaacaactggaagttgagatggggcaatctatggagatgggaaccattcatgctggagattttctgaggcgtttctgttcaactcttggaatgaccaatcaagctgttaacgcagccaaggaggcagttcagcgctcagaggagcttgatataaggaggagcccaatctcaattgcagccgccgtcatttacatgataacccaactctcagaggacaagaagccacttaaagatatatccttggctactggtgtggcagaaggcaccatcagaaattcgtacaaggatctgtatccctacgcctcaaggctcatcccgaatacttacgccaaggaagaagacctgaagaatctgtgcacaccttaggaagctttacttttttttccccttctgttatataaatcggaattagatttgtcaaagagtgagtgaagttgttcctggttgtgaccgactgtactgagcaatgtgtcgtcgccggcgcgcttaactttgtggatggaccaatgagaacagaagttatcatcatcagatcgaatttcttttc

SEQ ID NO: 5330 - DNA, 360 bp, Zea mays
  Clone ID: 700451801_FLI
gtggtttatcgtttcggcaaacaatgtgggctgctgagtaagaggacatatctggtgcacataaaaaattggtgcacatggtgcatatattaaattatcaccactcattttagatctaacgtctttagttgatcattcaatttacaaataacaccttccaggcttccaccactacacaccaccacgttggagggtgcttttagcaaaatataccaaacaactagaaacgttagatctaaaatgagtggtgatgatttaatatgtgcagcatgtgcaccaatcttccatgtgcattagatatgttctcgctgagtaatccacctgtggcgaataaataaagcagtcagttctcagtctgtc

SEQ ID NO: 5331 - DNA, 978 bp, Zea mays
  Clone ID: 700451803_FLI
gccacgcgcgccccggatcgagggagggcacgcagacgcggaggagggaggatgagtctcttcgggcttggacggaaccagaagacattccgccccaagaagagcgctccatcaggcagcaagggagcacagctccgtaagcacatagatgccactctcggcagtggaaaccttagggaagctgtgaggttgcctcctggagaggatatcaatgaatggcttgctgtcaataccgtggatttctttaaccaagttaatatgctgtatggcacgctcacagaattctgcacacctgagagctgcccgacaatgacagctggcccaaagtatgagtacagatgggctgatggtgtgcagataaagaaacccatagaggtatcagcaccaaaatatatggagtatctgatggattggattgaaggccagcttgacgatgaatccatatttcctcaaaaacttggcacaccattcccaccaaacttcaaggaagtagtgaagacaatattcaagcgcttgtttcgtgtttatgcccacatctaccactctcatttccagaagattgttagccttaaagaggaggcccatctcaatacctgtttcaagcacttcattctgtttacaaatgagtttggcctgattgacaagaaggagctggctccactccaggagctcattgaatccatcatcgttccttactgagactacggtgtagtaaacgtggatatagagctctcagtgcagatggctgtgaagtgtccatccgtgacagaacttcactgcatagagctatatgtgcatgtacctgtgtgtttctaaatgatcatgtattggccatgtaagtgtgcctgttatcagttatagaagggtgatgatgatcatgtactgcaaaaagagaaagcacaagaatgtgttggattgatgtatgcagtgtttattttcctcctggttgtggaaccgtcagtttgtctgcttattgct

SEQ ID NO: 5332 - DNA, 541 bp, Zea mays
  Clone ID: 700451805_FLI
gaactagggagttccactccctcattttcacaagaaaacgggatcgatcattccatgacgccactatctgtatctagatcgtctgctgaaacagcaaaggagaagccctctgaggcaacttctgtgatctccaagctaactgaggagaaaatgtctgctgttcagcagaaccagaaattacgccaagagctggagcttctacggaaagagagcagcaaaaccggcagcggtttctccatcaccttcttgtttgtcgtgggcctcctgggcatcgtcgtcggctacatcctcaagagaacatagtggaacggtgtctccagcagatctctactactcccatgaaaggatacccccaccccacaggtggtgggtggtatgcctctctccccatgtgttttcgctcctaatcggagcgccctgttctaacgtgtaacaacagcagcactcctagaggctagaggccttcggtttgtgtacatcattatggtggtccatacttattttttttcagaattcatttcggagttggtagacttgtttt

SEQ ID NO: 5333 - DNA, 492 bp, Zea mays
  Clone ID: 700451824_FLI
gagaaccaaaatggggtgtatctaccagagtgggtctatgagagagtagtcactgggcaggacctcacacttagtaagaaaatagctgatcaggagaaagaaacagtgaggcagctggccattgttgcactctggtgcattcagtggaaccccaaaaacaggccatcaatgacaaaagtggttaacatgttgacaggaaggttacagaatttaccaataccacctaagccatatgcctagcctgaaagacatcctatgccataaaacatggaggatatacaccatgttttaggaagcatgaaaagcagttattcttactttcatgtgtgagcttagtaatgcttagcaatagattacacagtatttggatcattccactgtatcagacacatgaactgtgactattttaattttcgatatgtggtaacttaattagagacgtatcacattggatttgatttccagtgttgttcaattattgtgattttccgg

SEQ ID NO: 5334 - DNA, 1038 bp, Zea mays
  Clone ID: 700451863_FLI
ggcttcaactatgcctcgactgacttggctgccctttggtatcggctcaatgttgagcaggcagagtggatcatatacgtgacagatgttggtcagcagcagcactttgacatgtttttcagtgctgcaaagatggctggttggctgccaggtccaaacgaaaagaagtttccgaaaacaagccatgttggatttggtctagttcttggttcagatggcaagcggttccgaacgcgcagtactgaggttgttcgattggtagagctacttgatgaggctaaatctcggagcaaatcagaactactacaacggctcactgaaaatggcaaaattgttgactggacggatgaggaattagagcaaacttcagaggcagttggatatggtgctgtgaagtatgctgatctcaagaataatcgtctgactaattacacatttagttttgaacaaatgctgagcgataagggaaatactgctgtgtaccttcagtatgcacatgctcgtatttgttccattattcggaaatccaacaaggatgtggaagatctgaagatgactggagccatttctcttgaccatccagatgagcgtgtgttggggctgtatcttatccgatttgctgaggtggttgaagaggcatgcacgaatctgcttccaaatgttgtgtgtgaatacttgtacaatctatctgaaatgttcacaaaattctataccaactgtcaggtggtcgggtcaccggaggagacgagccgactgttgctttgccaagcgactgctgttgtcatgcgacagtgcttcaatctgctagggatcaccccagtctacaagctgtgatcggctgcatgtttgaagtttgatttatacattcaacatcgctttacgtagaaacccattcatcatggttgcagttttggccttgtaacctagttgaggcagttaacagactataatccatctccctgtttgaaaatagaagcaactcaaaagtttgtaacaaaatatgctctgcagagtttctattgatccattacattacgt

SEQ ID NO: 5335 - DNA, 339 bp, Zea mays
  Clone ID: 700451864_FLI
cggtgaccttcgatgatctggggtcacgctaccacacgcactgcgacccaaggctcaatgcctcacagtctctggagatggcatttatcatcgccgagcgccttaggaaaaggaggatggcctcgtcgcctttgtacacgaaccagctgggttccattccatcaatgggtctgtgaacaacactaggttcactgtcaaggactagtccttgggttttgtttcagctgctgtgtcaaactttgctggcatgcactggtaaactagatagcctgctgtactgctcattcccggcactgggtctgccctcaaagtataatagatactcatcactttttgacc

SEQ ID NO: 5336 - DNA, 469 bp, Zea mays
  Clone ID: 700451901_FLI
gaaactcatttcaagtggcacgagaatatggctgtacagtggtgatatggatgcagtgtgctcattcatttcaacacaatatgtgctggacaatcttgggcttcctatagaagcagcttggcgtccatggcacgtcgacaatgaggttgctggctacgtcattgggtataaagggctggtcttcgcgacggtcagaggagctgggcacatggtgccatactaccagcctcgcagggcattggcattattctcgtcattcctcgaaggggagctccctccacgctgatcgattaagctagcagggtttgtgaatgccatttactcattttccacagcctatggaatcataggcggtacatgaggcctagtgtttttactatacttgtagctggcctttattttttatataaatatataaaacaaaccaagcagggagctgacgattatattaataaaaaatgagattgag

SEQ ID NO: 5337 - DNA, 1551 bp, Zea mays
  Clone ID: 700451923_FLI
tggaagactgcatgcttgttgctagctgcatcaagagcatccagacatatcgatcgagctcctactcctggcggtggcgggaaatataatattgtatactatacgtccacagccacagtttcttggtagaaagatcggcagatcatggtagtcaaggagttcggaagagaagtagtaatgagcatggacaaggtgaagaggggtggagaagcgctcatggccgccggagccggagccggagatgaagagaaagatgacgcggtgctccctgggttccggttccacccgaccgacgaggagctcgtcacgttctacctccgccggaaggtggccaggaagccgctcagcatggagatcatcaaggagatggacatctacaagcatgatccatgggacctccctaaggcgagcacggctgctggtggcgaaaaggagtggtacttcttctgcctgagaggaaggaagtaccggaacagcatcaggcccaacagggtcaccggctccggcttctggaaggccaccggcatcgaccggcatatctaccctgccaccgcgaaccccgtcgagtccgtgtccgtcgggctcaagaagtccctcgtgtactaccgcggcagcgccggcaagggcaccaagaccgactggatgatgcacgagttccgcctcccgccggccgccgcctcgccctcgccaacgccgacgagcatgcaagaagctgaggtgtggaccatctgcaggatcttcaagaggaacatcgcctacaagaggcagccgcagctgccggcgtggaggcagcagcagcagtccagctccaacacggggagcttcgagtccgacggcggcggcggcggggacgagtacatgaaccgctgcctgccggtgccggccacggccacggccaccgctcatcagatcggcggcatgctgaacggaggaggcgtcgtcagtgccactggcagcagcagcagcagtttcttcagggacagggagagcgtgcacggcggccagcaattccacttccacgagcagtggctgagccgcttccccgccgcgccagcagtcgagcagaagccgcagctcctggacccgtcggcgatggccatcgcgttccatcagaacgacgaccagagcgtcgccaccgctgccgctgccgctgcgagcgagtgctgcaaggacgggtactactgggacgagatcgcgaggttcatggaggtcaacgatccaacggtgcttcacgactgtagatacgcttgatcggtagcaagttcaggcagatcgtagacagacacccagacccaggttaggtgaccaagggatgatgcaagcatgagagactggcaattttgcgcacccttttgtgtctattttcctgatcgaatgtattgtatacaggacgttgttgtgcccaaaataaacacatagttcagccatgaagaatcgtgactttagcacctgctctggtctctgttccgaaaattataggcaagatttgagttggcctaaagtcaaacgatgttgatatttggtgtctgaatatcagttctctttttctat

SEQ ID NO: 5338 - DNA, 725 bp, Zea mays
  Clone ID: 700451924_FLI
gattgccccccacccattcgacgagatctcggaggcagcctcgaggtgaccctgttctgattctcgtggtttcaggggaggatctaggtccagggagattaatctcgaggttggacctcacatttttatggcctttgactgcaacaaggaaagaggagtttcttcgcctgacagttgctcccgcatttgcaccgagggcactctcgtccaggcaaatcccttatctcactactggaagcctaaacgtttggagaacttcaacaagttggagaaccagaagtccagttatgaatctgctccgagtggctctgatccaaaacaggatgctgaagcgagtgatgaggcaactgcctcactgtgtggcttcaggtgcttcactgatctgccagcttcgttggtctgcgaggtccttgcacgtctcgatgcgaaggaccttggaattgtatcctgtgtctccaccctcctgcacgccttagccacagatcatcagggatggaagaagttatactgcgaaaggtgggggcttccagacctccccaccaccctgaatgggcccttgctgccgggtgtccccctagatgggaagttttggaaaacatttttcgtggagcgggagtttaggagcaaatccttcatgggaagattcaatctggatattctccgtggccacaatgaggatgtgcgtgctgtgtcccttttggtatcagcaaatctgatattcacag

SEQ ID NO: 5339 - DNA, 892 bp, Zea mays
  Clone ID: 700451947_FLI
tcgggtcaaaccctaagcagggagttgatttatccgctgcagccatgagtaagttgcagtctgagtctgtcaaggatgccatctcccagattgttggggatgccaaggagaagaataggaagttcactgagactgtggaacttcagattggtctgaagaattatgatccacagaaggacaagcgtttcagtggctctgttaagttgccccatatccctcgtcccaagatgaaggtgtgcatgcttggtgatgcccagcatgttgaggaggccgagaagatgggacttgactacatggatgttgaggctctcaagaaaatgaacaagaacaagaagcttgttaagaggcttgccaagaagtaccatgctttcttggcatcagaggccatcatcaagcagattccccgtctccttggtcctggtctcaacaaggcaggcaagttcccgaccctggttactcaccaggaatccctcgagtccaaggtgaacgagactaaggcaaccgtcaagttccagctcaagaaggtcctttgcatgggtgtcgccgtcggcaacttggcgatggaggagaagcagatccagcagaacatccagatgagcgtcaacttccttgtttcccttctgaagaagaactggcagaatgtgagatgcctgtacgtcaagagcaccatggggaagccatacagggtgttctaagtatgctcttttgtgaagtctgctaggttctggcagcgaggttttattgaattaaactcttgttaaggatatgtttttggacgatcctatatttcgtcctggcgctactatgtttcagaatggtggtactactataagtatcctagcgctataagtattgcttgaaaggatcaatataatttgcgtgtcatacccgc

SEQ ID NO: 5340 - DNA, 663 bp, Zea mays
  Clone ID: 700451974_FLI
gggccattggaggttcccctatggtatggaactgcaaggatacgcctacatcctgacacaccctggcactcccgcagtcttctatgaccacatattttcacacttacaaccagagatcgctaaatttatttccattcgacaccgtcaaaagattcattgccgcagcaagatcaagatactaaaggcagagaggagtttatatgcggctgaaattgatgagaaggtaacaatgaaaatcggatcagaacattttgagccaagcggtccccagaactggattgttgctgctgagggtcaagattacaaaatctgggaagcgtcttcatagacttggcgggctgcgagtgccatataactgctcaaagactaaaaagctacaagaaagcataatgctaggagatggcgcctcagaatggtcagctggcgggagctgctgccgctgccgccatggagcagcaaaattcaacaacataagctatggaagcacttgccacggcgataggattatctaataggactactgttgaacattcgatatatccagaaccacccatcatttgcaggcacattggccattaaaatttagcttcgtcctctattttggagctatgtaaaagcatgcacaactctatttatgtgtgaaataaaatttgaatcttcatc

SEQ ID NO: 5341 - DNA, 2550 bp, Zea mays
  Clone ID: 700452004_FLI
catctcgtgacggaaaaacaaagtcaacacgaaggactcggccggtagcactggcgctagcagcagcagagatcgaccggccatcgccgttttataaaaagagagtccagcggtagccgtcgctgacggacgcccccctcccagacctccgcccggatctcgccgcctctcccgcccctgctcgcgagccgccgtcgacagccaccgccatgggcacggccaacggccagcagccggcagagggcgctccctctgacaagctccgccacgtcgagtccatgtcggagctgccctccggcgccggcaagatctcggggatcaacgccgtcgtgctcggggagtcgctcgccgccgaggagaacgacctcatcgtccccagccccgagttctctgccagcgccctcgtctcttctccgaaacagtatcgcgagatgtatgagaggtccattaaggacccggccgggttctggtcggagattgccgagaccttttactggaaggagaagtggaaccccgccgaggtctgctcggagaacctcgatgtcaccaagggacccgtccagatcaactggttcaagggagggaaaaccaacatatgttacaacgctgttgaccgcaacatcgagtctggcaatggcgacaaggttgcaatgtactgggagggtaatgagcccggtcaggatgggaagcttacctattccgagctcctggagaaggtttgccagcttgcaaattacttgaagagccttggtgtcggcaagggtgatgctgttattatatacctaccaatgttgctggagcttcccattgccatgcttgcctgtgcccgcattggtgccgttcactcggttgtgtttgctggcttctcagcagattcgctagctcaaaggattgtcgattgcaagcctaagcttgtcatcacgtgcaatgctgtgaagcggggagtcaagcccatctttctcaaagatatagtggatgcagctttggttgaaagtgagaagaatggagtctctgtaggtctctgtttgacgtatgaaaaccagtcagccatgaagagggaaaacacaaaatggcaagcagaaagggatgtttggtggcaggacgttgtcacaaaatttccaaccaaatgtgatgtggagtgggtggatgcagaggatccattgttccttttgtacacaagtggcagcacagggaagccaaagggtgtactgcatacttctgggggctacatggtgtacactgcaacaacatttaagtacgcatttgactacaagccaactgacatatactggtgcactgcagactgtggctggattactggacatagttatgtaacatatggtcctctcctgaatggtgctacggttctcgtttttgaagggacgccgaactaccctgattcgggccgatgctgggatattgtggacaagtacaatgtgacaatattttatactgccccaactcttgttcgttcactcatgcgtgatggcactgagtatgttacacgttactctcgaaagtctctccgagtcctgggaagtgttggtgagccaatcaatcctagtgcatggagatggttctacaatactgttggggattcccggtgccctatatcagacacctggtggcaaactgaaactggcggtttcatgatcacccctttgcctggcgcctggcctcaaaaaccaggttctgcaacctttcctttctttggtgttcagccggtcattgttgacgagaaagggcaagagattgaaggggaatgtagtggatatctttgcataaagaaatcatggcctggggctttccggactctgtatggagatcatgagagatacgagaccacgtacttcaaaccatttgctgggtactatttcactggtgatggttgcagcagagacaaagatggttaccactggctgactggaagagtagatgatgtcatcaatgtcagtggacaccgaatcggcacagcagaggttgagtcagctttagtgtcacatccacagtgtgcagaggctgctgttgttggtgttgagcatgaggtcaaaggtcaaggaatttatgcttttgtaactttggtggatggtgttccgtatagtgaggaactacgaaaaagcctcataatgacagtgcgcaaccagattggggcatttgcagctcctgacaagatccactgggcaccgggacttcctaaaacccggagtggcaagatcatgcgaaggattttgcgcaagattgctgcacggcaactggatgaacttggggacataagcaccctcgctgaacctgctgtagttgaccagcttatttcgctcagcaattgttaggttgcaacgtaattggatggtggatacatccttgagcgcatgttgcgtttgtctgtaatatgagtagaaggtgcatttcaatatcgagaactcaagtgggacgtggtgacatgttgtcgatgtttccttttaaacttttgtatcagatatcaagataggtccatcagaatgtattattgattgacacagacaaatatatcaataaaattgttaatttttc

SEQ ID NO: 5342 - DNA, 596 bp, Zea mays
  Clone ID: 700452047_FLI
catctacctcaccgtctacggcacctccaacagcgccgactacgacgcgctcggctgcctcaagaagttcaacgacctctccaccaaccacaacgcccagctgcaggcccagatctccgccctccaggccaagtacaagtcggcgcgcatcatgtacgccgacttctactccgccgtctacgacatggtcaagaaccccggcagctacgggttcagctcggtgttccaggcgtgctgcggctcggggggcggcaagtacaactaccagaacagcgcgcggtgcggcatgtcgggcgcgtccgcgtgctccagcccggcgtcgcacctcagctgggacggcatccacctcaccgaggccgcctacaagcagatcaccgacggctggctcaacgggccctactgccgccccgccatcctccacagctaagctaagcgaggggagggcgattaattttttattgttgccatgttatttatacctgtgtttacgttgccgggaaaaaagtgtcccggcagctgcatgcatgtgttgcctcttgtaacttgttatactggtggtcttcatttacaaatcaaatggtatagatttttcatgg

SEQ ID NO: 5343 - DNA, 904 bp, Zea mays
  Clone ID: 700452061_FLI
ctcgatcgctcatcaatcgccagaggagttgttgatcgaggtgagtgaggttgaaaagcacaccatcgtcatggacggcggatactacggcggtcgcgatcagcgctacagcggcgggtactacggcggcggtggcatcgcaacgccggggtacgctccggcggtcccgtacgggatgtcgcaggtgaacatcgagggcaacgggtgcgggcgggcgctgccgccgcagccgaccgtgaaggtgtactgccgcgccaaccccaactacgccatgagcgtccgcgacgggaaggtggtgctggcgccggcgaaccccaaggacgagtaccagcactggatcaaggacatgcggtggagcacgagcatcaaggacgaggaaggttacccggcgttcgcgctggtgaacaaggcgaccggggaggccatcaagcactcgctggggcagtcccacccggtgcgcctggtgccctacaacccggactttttggacgagtcggtgctgtggacggagagccgcgacgtcggcaacggtttccgctgcgtccgcatggtcaacaacatctacctcaacttcgacgccctccacggcgacaagtggcacggcggcgtccgtgacggcaccaacgtcgtgctctggaagtggtgcgagggcgacaaccagcgctggaagatccagccctactactgaaccaacggatgatatgaccatcgcgcccatcgatcgtgcacatgcatgcatacgtactagcagaataacaggggtcttatctcccgaggcgtcttttgcatgcatgccagcagttgcatagataaagcaggagcgagacaaagggtgttcatgtatattgcagctgtatcactgtatgtatgtgccattgtgccttgtaataatacatataataat

SEQ ID NO: 5344 - DNA, 1474 bp, Zea mays
  Clone ID: 700452092_FLI
ccgaggagactccgtgcgaccgaagccagagccagcggaaccgaacggaagcgagacccccggcggctagcgagatggacggcggcgccggcgaggaggggaagcaggagcggcacctggtgctggcccacaagctcttccttctatcccacccctccgttgatgacctctccaaggtcgccctccgcgccgaagtcctcgacaccgtgaaatccgatgatatggcgacgctgtttgagtcgctggtcgccgggggtgtgctggagggggacgccgcgctgctggccgagatgcgtgggaggattgacgaggagatccgcaagcttgatgagaaaattgctgatgcggaggagaacttgggtgagagcgaagtccgtgaagcacatcttgccaaatctttgtactttataagggtcggtgagaaggaaaaggccctggaacagcttaaagtcactgaaggaaaaactgtagctgttggccaaaagatggatcttgtgttccacactttgcagattggttttttctacatggattttgatctgatatcaaaatccatcgataaggcaaagaacttgtttgaggaaggaggcgattgggagaggaagaacagattgaaagtatatgaaggcttgtactgcatggcaaccagaaacttcaagaaagctgccagcttatttttagactcgatttcgactttcacaacttatgagatattcccatatgatacgttcatcttctatacagtcctcacaagtgtcatcacattggatcgtgtatctctgaaacaaaaggtggtagatgcaccagaaatcctggctgtaattggcaaagtacctcacctctccgagtttctcaactccctgtacaactgccagtataagtcgttcttcgttgcattttctggtctgacagagcaaatcaagttagaccgttatcttcagcctcatttccgctactacatgagggaagtgcgcaccgtggtatactcacagttcttagagtcatacaagagtgtgacaatggaagcaatggccactgcgttcggtgtaactgttgatttcattgaccaggaactgtcacggttcattgcagctgggaagctgcactgcaagattgataaggttgctggcgttctggagactaaccgacctgatgagaggaatgctttctaccaggcgaccatcaagcaaggggacttcttgctgaaccgcatccagaagctttcacgggtcattgacctgtaaggactgtttgtgttggagctattcctgcaatcggcgcctgcaaatgtttaccaccctacgtcttccacaagacatctctgcttgagtggggattggggaacaagccctaagaacatctgtgttttaagtgcagaatatttgtgttttaatcagtaaacgctgtcctgtcatttcaagtttcctatctgtggctctgtctgtgattttcttccttaagttgttagcttgac

SEQ ID NO: 5345 - DNA, 561 bp, Zea mays
  Clone ID: 700452115_FLI
ttccaacatgctactactgctgctagtagagtagtcatctctttttagttgatttttttgatagcctttacatgccatcaaatcaataacgatattaacttgattcgatgcatgccatgccatgcgccatatccgtacgtccagggcgcggccatgttcatccagacgaacccgagcctggcctcgcacggcacggcggtggcgtcgcagacgacgcggtggcccttcttcgtgttcctggcgggggccatgttctgcctgctgagcagcagcgcgtgccacctgctgtcgtgccactcgcaccggctgaacctgctgctgatccgcctcgactacacgggcatcgcggtcatgatcgtggtctccttcttcccgcccatctactacatcttccagtgcgagccgcgctggcgggcggcgtacctgtcggcgatcacggcggccggggcgggcacggtgtacgcgctcatgtcgccccgcctgagcgcgccgcgctaccgcgcccgccgcgcgctgctgttcgtcggcatgggcctgtccggggtggtccccgcggcgcac

SEQ ID NO: 5346 - DNA, 1054 bp, Zea mays
  Clone ID: 700452123_FLI
gtccgacggcgagaccgtccagtggctgctgcagcaggccgagccggccatcgtcgccgccaccggcacgggcaccataccggcgtccgcgctcgcctccgtcgcgccctcgctcccgtcgcccacctccgggctcgccaggccgcaccaccacatgtgggcgccgtccgccggcttctcctcgccctccttcctgaactctgccgccgcgggcacgggcgatgccgccggtatcatgcagcggatggggatccccgcgggcttcgagctgccgggagcctccgccgccggagccaccctcggcgccggcggccacatcggctttgcgcccatgttcgctggacacgccgccgccatgccggggctcgagctcgggctatcgcaggacggccacatcggcgtgctcgccgcgcagtcgatcagccagttctaccaccaggtgggtgctgccgccggcggcggcggccagatgcatcacgcgcacgggcaccatcatcaccatcaccagcagcaggaggacggggaggacgaccgcgaggacggcgagtccgatgacgagtctgggcagtagtagtgtaaccgttcaaccttttgcgttgctgaatcttccctcaagttggaaggagagaaaagtgtatgcgtgcagccacgggatgcttctgctactcttggactgttgttggtcgagttctgatggatttttgtgttcatttttttctcgtgtggtatccaaactcaacggaggcctctcttgctgtgaggacttgcggattcgagatcatcctcagttcttcctacaatctcatggagtggatgatcgccacagccttctctccgacttccaggtgtatactagctgagaaaatgatggattggatcgatcacccttgagtgagtgccttatttgttattgcagtgtgtagatattcaggtaattttgcagttagagaggtgttctttttattgtagtagtgatccacgttttaaaacaatcaaggtattctcctccacaggctgtctatgcaatgcaagtatagtacaattctagttcatg

SEQ ID NO: 5347 - DNA, 1392 bp, Zea mays
  Clone ID: 700452427_FLI
gttgagacaagaattggtaatatggataacattgatggaccttcagtttcagaatctgatgcactgaggcagggtgccatagatgtgcctggtcttcaatatgacctgccatcagtttcaagtcatgcatattcaaacacaacacagccaagtacaatggaagaaccacaaggaaacacacaagcacaacccctttcccatttttctggcttactgcaagcaaatactctacccaataacttgttggggtcaaatcttacccctcttcgggagtttgacttctcccagttccttcagacacagtcagctacaaaatataacccatctgttgcacctaataatctgccaccaatctccatgcaagagacttcaaaacagggaggcttccccaatactcagtctacgcaacatgttcccagtacaagcatttcgtcgggtcttcctctcccacaacaattgcctgtatactctcagccaactctgccccttgggccttttaccagcctggttggctatccatatttgcctcagaactattacctaccttcagcgccattccagcaagcgtactcaagtaatgggcctttccatcaatctgctgctcctgccgtgcctggagctggtatgaagtatccgatgccacaatacaagagcagccctcctgcttcgaccctaccacaaccatcatcactctctggttacggagggttcggaagtgcaaataatatccctggaaatttcagccaaaatcagggtgctcccgctgcacctacaactttgggatttgatgaagctttaggcacacaattcaaacaccccaatcattatgcagcactacagcagagtgataattcaacgatgtggcttcatggaggcgctggttcaagaacaatttctgcagttccgcctggtaacttctatggtttccagggccagagtcagcatggtggcttccgccaggcacatcagccatctcagtacggtggtcttgggtatccaagcttctaccagtcgcagaccagtctgccacaggagcacccccagaaccccactgagggaagcttgaacaatccccagggggtaccatcccagccttcacaccagctctggcagcacatctactaaaccttctgtgctctccttggagatgcctctctacgctgccagcttacctgcaagcgagcagactagctgagcccaacagcaatgaagtgtgttgtttttctttctttcttttttttctccagctgtgtgttctggaactaaattaggctgtcgtggtttttacttgatagtgagtggtgttgcagaggtgctatcttgtaacggtaaagtcctaactcatctaacagatctgcttttcataccctgtaatgtgccgttttgttcttg

SEQ ID NO: 5348 - DNA, 964 bp, Zea mays
  Clone ID: 700452437_FLI
ccccaccaaaccctaacccgagcacccagcccctcctcgcgtctgctcgcgccggcctttggggctctcactctgagcggcagggacccgcagggctccggttgtgtccaggaaacatcccagttgttggcgagagaccaagaaatggcggagaaggagggagcgaaggttggagcggaagagatggaagagcgggagcaggaaggggaggcagaggaggtggaggtgaagtttcgtctcttcgatggctctgacatcggtcccgtgcgctgcaacgccgccgccactaccgtagccgccctcaaggatcgcgtcgtcgccgattggcccaaagataaatcaattatcccaaagactgctagtgatgtgaaactaataagtggaggcaaaattctagaaaatgacaagaatgttgcacagtgcagagctccttttggtgatcttcccagtagtgctatcacgatgcatgttgttgttcaaccatcgtcagcaaaatcaaaaccagataagaaggcgaacaagttgcccaaaaccactcgttgctcatgtaccatactatgaactacgaaggtccaagtccctccgagaccaacaataatttgtacgtccaccgaagattctgcagaggatttgagaacgaaagatccaagatgtccacgtcattcttctctgccaacgggtggcaatggcgaaagacaacaacgtccatatgttgtaagctatgtaattgtaacttaggtacaaagagtgggtccctctgccgtacggacgggggaaaaatagtctactggctgccctgttttaccctacacaagattgttctatatgatgtaccacaagatacatacacgctactattttgggtgtagtgaccttgttcccacttcaccttttgaaagtttgttccagagttgagtacccttatgggcactgagtcaatgtgaaatctaagttggttgatttc

SEQ ID NO: 5349 - DNA, 479 bp, Zea mays
  Clone ID: 700452438_FLI
gacgcctgtgcccatccgttcttcgatgagctgcgggaccccaaggcttgcctgccgaacggacggccaatgccaccgttgttcgacttcacagcagccgaactcgaagggctccccgccgagcttgtccaccggatcgttcctgaacacatgaggaaggaagtgaattaggtggacggacgtactggggcaaaaaaaaaaaaaaaactccctgtttctctgttggttctgagagatgtgtgagggcacggatatggaggagcggtggtgtattgtaattgtaaagagggctgaaagaaaggtccctctggttgggcgtgtcaccaaagagtggccctagaggcaaaccttacgtttgctcgttgcccttggtgtgtacccagatgtgtatcgatgacataggctggctgctgtatcatcatcagggttgacgctgaacaagagaaattcaagcagggtgctgctagctcgcttcctcc

SEQ ID NO: 5350 - DNA, 567 bp, Zea mays
  Clone ID: 700452443_FLI
ctcttcttgacattccgaaacagaacagtcgctgtatggaacttccgaggagatcttgtgacttcatttgaggaccatttactttggcatcatgattgtagcaccaacaatatttacatcactagcgaccaggatcttattatctcatactgcaaatcggaggcagtggctgaggatggtacagttgttccagttggatccatcaacatgagcgagatcatgactggcaagtgtatcgccaagattactgccaacgatcctgccctaagtgcgccccctcgcagaaatggtcgcagcaagcggcggtcctcggtctggagcaccgttccagaagctctggaggacgtcacggcactgttctatgacgaggacaggaatgagatctacaccggcaacagtcatggactggtgcatgtatggtctaactagatggtaacatgtccatacatctcgcccttttgatttgacttggctagcctgactgcattctgtataatccccggcttggggctcacctagattttgtatttggcaatagaatgtgtttccttgagaaattgtgaatgc

SEQ ID NO: 5351 - DNA, 417 bp, Zea mays
  Clone ID: 700452480_FLI
ggccgacgagcggtggggcgagtcgccgtgcgcgttcgtgacgctcaaggacggagcagcagccgacgggtcggacgaggcggcgctggccaacgacatcatgcgcttctgccgggagaggatgccggggtactgggtgcccaagtcggtcatcttcgggccgctgcccaagacggccacggggaagatcaagaagcacgagctgagggccagagccaaagagctcggccctgtgaagaagagcaggatgtgagagatctgggggccgacggcgatagcgtgtgatgccatggcaacaactcagaatcttgctccaagtcgcgcatataaaattcatgagttctgaagatgcctaataacttgagtgctttgcttgtatcgttctgaaaccagaagttcagaccagatccgatatat

SEQ ID NO: 5352 - DNA, 1818 bp, Zea mays
  Clone ID: 700452520_FLI
ggggaacccagcccagcccagcacctgaaccccacaccacacacacagggttgcccacccacgccacgcacgcgcagccgcggcggaagccaccggggggtgggctccgatgggctgctgcggctcctcgcagcgggcggggacgcacccggagaagaagccgccgggggcgctccccccgcaccgtccctcctactcgctcaaccagcaccaggcgccggcgccgccgcctccctccgcggctcgcgccggcgcccgccaggtgccgccgctcaaggagttctcgctcgcggagctgcgcgccgccacggccggcttcgcggcggggaacatcgtgtcggagagcggcgagaaggcgcccaatttcgtgtacaggggccgcctcgacgccggccgccgcgcgatcgccgtcaagaagttcaccaagatggcgtggcccgatcccaagcagttcgcggaggaggccaagggcgtcgggaagctgcgccactgccgcctggccaacctcatcggctactgctgcgacggggacgagcggctgctcgtcgccgagttcatgcccaacgacacgctcgccaagcacctcttccactgggaaaaccagacaattgaatgggctatgcgtctgagagttgcatactacatcgctgaagcactggagtattgcagcactgagggaaggcctttgtaccacgacctaaatgcatatagggtcctctttgatgagaatggtgatcctcgcctttcatgctttggcctgatgaaaaacagtagggatgggaaaagctatagcacaaatcttgcatatacacctccagaatatttaagaaatggaagagtaacatcagaaagtgtcatattcagctttggcactatactgctggacctcctaagtggaaagcgtatacctccttcccgtgctcttgatatgataaaaggcaacaatatccaagtactgatggattcacatttggagggaaactactcaacagatgaggcaaccacattggttgacctggcctcccagtgcctacagtatgagcctagggatcgggccaacactaaaaagctggtttccgtactcgagcccttgcaaataaaatcagaggtaccatcctacgagatgcttggcattccaaaacatgaggaagaagcgcctccccctccacaaccgcagcgccctctctctcccatgggtgaagcctgttctaggacggatctgacagctatccatcaaattctagtgaacacgcattacagggacgatgaagggagcaacgagctatcgttccaggaatggacgcagcagatgagggacatgctggaagctaggaagcgtggggacttcgcctttcgcgataaagatttcaaggcagccatagattgctacacgcagttcgttgacgtggggacgatggtatcgccaacggtgtacgcgaggcggagcctgtgccacctcatgtgtgaccagcctgacgccgccctccgcgacgcaatgcaggcgcagtgcgtgtacccggactggccaaccgcgttctacatgcaagctgtcgcgctcgcgaagctgaacatgcagagcgatgccacggacatgttgaacgaggcatcgcagctcgaagagaagcggcagaagaacacaaaaccctgatgatggcttgttcctggtccaggggttgggaatgtagctgggggagtgtgctgcagagtcctgcgattgtaactacctggtttcgcatttctgtcatgcattttttttgggcccgtgtacatgttacatcgacgaaagtcgaaacaggcagaatgcaaggggattttttt

SEQ ID NO: 5353 - DNA, 2349 bp, Zea mays
  Clone ID: 700452526_FLI
cgtgcactcgtcccgtccccctccaccctccaagacctcgcattgccaccgccgccgccgagccaggggagaggagagaggccagccgcgtcgcggcgggcggaggaggaggacgagcgggagagcggagcgagccggccgggcaggatgttcgggcgggatccctggggcgggccgctggagatctccaacgccgactcggcgacggacgacgaccgcagccgcgacctggaccgggcggcgctgatgcggcagctggacgagacgcagcagagctggctcctggccgggcccggcgaccaggccggcaagaagaagaagcggtacgtcgacctcggctgcctcgtcgtcgaccgcaaggtcttcatgtggaccgtcggcaccgtcctcggcctcggcgtcttcatcggcttcgtcatcatgatcgtcaagctcgtcccgcacaagcgccccccgccgccgccgcccgaccagtacacgcaggcgctgcacaaggcgctcatgttcttcaacgcgcagcgatccggcccgctgccgaagcacaatggcgtgagctggaggggcaactcctgcatgaaggacggcctctccgacagcaccgtccgccggagcctggtcggaggcttctacgacgcgggggacgccatcaagttcaactaccccatggcatggtccatgaccatgctcagctggagcgtcatcgagtacagggccaagtacgaggccatcggcgagctcgaccatatcagggagctcatcaagtggggaacggactacatcctcaagaccttcaattcgtctgccgacacgatagacaggatcgtcgctcaggtgggtgtaggtgacacctctaaaggcagcagtcagcctaacgaccattactgctggatgaggccagaggacatcgactacaagaggccggtcaccgagtgccactcctgctcagatctagcgtcggaaatggctgccgccctggccgcagcttccatagtgttcaaggacagcaagacctactccgacaagctcgtcaagggcgccaaggccctgtacaagttcggcaggctgcagcgtgggcgatacagccccaacggatctgaccaggccatcttctacaactccaccagctactgggacgagttcgtgtggggcggtgcgtggatgtacttcgccacggggaacaactcgtacctcaccgtcgccacagccccgggaatggcgaagcacgctggagcatactggtttggaagtccaaactacggagtgtttacctgggatgacaaacttccaggagctcaggttcttctcagcaggctgcgactcttcctaagtccagggtacccttacgaagaaatactgaggacattccacaaccaaaccgacaacgtcatgtgctcgtatttacctgtattcaattcattcaacttcaccaaaggaggattaatacagctcaaccatggaaggcctcaaccgcttcagtacgctgtcaacgcagctttccttgcttctttatacagcgactatcttgaagcggctgacacgcctgggtggtactgtggaccgaacttctacaccatagaagtcctccgcaagtttgccaggtcacagcttgactacatccttggaaagaacccattgaagatgagctacgttgtgggtttcggaaacaagtacccgaagcgccctcaccacagaggtgcgtcgatacctcataacggcgtcaagtatggatgcaaaggaggttacaaatggagggacacgaagaaggcaaaccctaacatccttgttggagcaatggtggctggccctgacaggcgtgacggctacaaagatgtccgcacgaactacaactacacagagcctacccttgcggcaaacgctggtctggttgcagcactgatttctatatctgatatcaaaaccggacggttcggcatcgacaagaacaccatcttctctgcgatccctccgatgtttccgacaccaccgccgccgccatcagcatggaaaccatagagagacagacctctgaatattttttcccccccaaagcatcaacacagggaagtggagcaaacatatgatcagttggtacagcaaaggccaggaacaggaaagcggacagcataagcttatagagcttctatttctgtaccagtatgacagatcagtataaaatcctctgtcatacatagaccagaagttgtgtgcatggcctgaaagctaatttttggggtcttgttgctgttggcattcctgctcatgtgtgaagttattttttgtagaaattgtacctttacaaattgttataggagtgacttttcatagtagtaaagcatttgtgtgacctgt

SEQ ID NO: 5354 - DNA, 1006 bp, Zea mays
  Clone ID: 700452607_FLI
gcgacgatcgccggctcgccgccatgaagcacctccacctctcatcttctcttcctctcctcctccaccgcccctccaagccccatctcctccaccatagccgccgccgcgcctccatccgcaacgccgcatccggcggcggctccggcgaacccacccccgccgcggaaacggcctcaggtacctctccgccagccgctgccaagcccgccggcgtcaaggaccgcctcaaggcgaggaaccaggcccgccgggtccggctggactccccgccgccggaggtggtggtggtgccgaagaagaagcccgcccccgccgcgtcgtcgtctcctgcgccgaagaagaaggtcgggcggaaggggtgggaggagatgagcctgggcgagaaggccgtggacctctacgtcggcgagaagggcctgctcttctggctcaacaagttcgcctacgcctccatcttcatcatggtcggcgcctgggtcctgttccgcttcgtcggcccctcgctcggcctctaccagctcgacgccccgccgctgccgcccaccgccgtgttcagcggcggctcgccgtgatggcgtcgagtcgttcccgagtgggcgtacactaggtcgaggcgtagagctagcgtagccgcggattaataatggtgacatgatatggaaagattgaggaagatgatgctgattctggagccaaagtttggaccttttgctgccaatatgtgaattgtagacgcgcggttcttggagcttgaattcctggtttgtctgtgcaaaacctgtttggttttgtacaggcaagcaattcatttcggtatggtctggttttgagaagaagctgatatcaagaagacatccattctgctgtcgttcttctaatggagaagaaattctcagaacagaccttatattcagaagcccattatgaggagcagatggaactagatgtaattccaagtcatttccattatgttctaatgccaatctcttaatttttcgatgct

SEQ ID NO: 5355 - DNA, 851 bp, Zea mays
  Clone ID: 700452670_FLI
catgtcgatcaggtgctgtcgcttgctactcttgcatttgatggtgcagaaatagttgtgaaggttccatctatctactggtggtacaggactgcgagccacgccgcagagctcacagcggggttctacaacactacgaacagagacggatactctccagttttcagaatgctcaagaagcactctgtgatccttaagctcgtctgctacggacccgagtacacagttcacgagaaggacgacgacgaagcgtttgcggatccggaaggtctaacctggcaggtcatcaacgcggcgtgggatcagggactaccgctctgtatcgagagcgctcttccgtgccgtaatggtgaggcgtattcccgcatcctcgacacggcgaagcctagggacgatcctgatcgtcaccatgccgcgtcctttgcgtaccgtcagcagcagcagcccccgctccgagaagcttgcctttcggagctctgcaccttcgtaaagtgcatgcacggggaggctccccagaatggggaaggttgaatctggttagcaactgatgcgctggctcgacaatacggaagaaaccaagtaggtgggtttcggatttgagccgcttttgaaggcgtccggcgagcgaacattctgatactgctaggtcctattcagttggttccatctcgtcgtcagccgtctgccctgttactcgtcggctggactgagcaggtgcgtttgcagttgcagccttaccatatagcttataactttgtggtaagttagcatacctgcatgctgtaacagacatggaggatatagtggagctctgcaggataatagagtggcaatgcccactcaggtgacct

SEQ ID NO: 5356 - DNA, 1196 bp, Zea mays
  Clone ID: 700452685_FLI
gatgtctcaagttgaccttgcaagggaagctgctcatctgagccggtttatctacaacttccgaaggtggaaggatgtatctttcccaagacctctctatccacttgttcatcctgctgttttagttgagacttacgagcatggggagagtgtttcacactatgttgatgaccttgaaggacatgatcgaattaaaagtgctctggcccatattggtactcacgcgctcttgaaaatgctactggttgataatttcgtccatgcagatatgcacccaggaaatattttagttcgtgttgcacaaccaaagaactcaaataacacccttaaaaagtcaaggccacatgtagtcttcctggatgtaggaatgactgctgaactttcaagtaatgaccgtgtgaatttacttgagttcttcaaggctgttgctcgccgagatggtcgtacagctgcagaaagtactctaaagttgtcaaaacaacagaattgtccaaatccaaaagcttttattgaggaagttgaacgatcattctctttttggggcactgctgaaggtgatgctatccacccagctgagtgtatgcaccaactgcttgagcaagttcgatgtcataaagtgaatatcgatggcaatgtttgtactgtcatggtgactacattagttcttgagggctggcaacgtaagttggatccagattataatgttatgaagactctgcaaactttactttttaaggaagattgggcgaagtctcttcaatacactatccaagggctcatggcgccttagggtcgtccgcaatcctttctaaagttttgatctggtttgtgttcgactggaggatcctcttctctcaccatcacgtctggcttcttttctacgttatttcacgtttcgtttctctgtacctgtcctggcgttgtgctgctaaagcagccttgatgataaagtaataactgcagtaaaaattttcagaagctaccagagtactatgctgctcagctctgggctgtcttcttatatgttcttgatgggccaaagaattaggccctttttcccccctcccaccaacacttttgacaatagcttttagatgatgtagcaaaaggcgttctgttctgatgatcttttttgtaactggagaggttgtatccgtggactggagagttgcttatgtacagacagagatactgtt

SEQ ID NO: 5357 - DNA, 1408 bp, Zea mays
  Clone ID: 700452736_FLI
gccgtttcggactactaccaatttgatgatttgctgactgatgaagagaaggcactcaggaagaaggtccgaggtatcatggaaaaggaaatcgcgcccattatgactgagtactgggagaaggctgaattcccattccatgccattcccagccttgccagtcttggtttagctggtggtacaataaaggggtatgggtgccctggactctcgcttacagctagtgctatttcgatagcagaggttgcacgggtcgatgcgagctgctccacatttattctagtgcactcctcgttggctatgtccactattgccctttgtggatctgaggctcaaaagcagaaatacttaccatctcttacccagttcaaaactattggttgctgggcattgacagagccagattatggaagtgatgcaagctccctaaggactgcagcaaccaaggtacctggtggttggcatttagatggacaaaaacgctggataggtaacagcacttttgcagatgtcctcatcattttggctaggaatgcagatacaaaccaactaaatggatttattgtaaagaaaggagctcctggtctaaaagccacaaaaattgaaaataaaattggactcagaatggttcaaaatggagacataattctaaataaagtatttgtccctgaggaagacagattaacaggcatcaattcatttcaggatataaacaaggtcctcgctatgtctcgaattatggtggcatggcaaccaataggcatatcaatgggagtttatgacatctgccatcggtatttgaaagaaagaaagcaatttggagctccactggcagcttttcagctcaatcaagaaaagcttgtccgcatgcttggcaacattcaggctatgcttctcgttggatggcgactgtgcaagctgtatgagtcaggcaaaatgacaccaggccggtctagtttaggcaaggcatggacgtccaagaaggccagggaggtggtttctcttgggcgagagctactgggtggcaatggcattttggttgattttcttgtcgccaaggcattttgtgacgtggaacccattttctcgtacgagggcacctatgacattaatagcctggtggctggcagagagatcaccgggatcgcgagcttcaagcctgctgtgtcagcaaaatcacgcctgtgaaagttgtttttttctttgttcccgaagacagtagaaatcaaccttgtacattcagatgattgggaataagaacggtaggaaagctgtaaaactcgacgtgcttcctcgtatgtactgttctgtttcaaattattcgacgttttgtcggaacggaacggaggacctgtatggctgtatatgatactcatcctatatatcacgcagcttttgaagattttgt

SEQ ID NO: 5358 - DNA, 452 bp, Zea mays
  Clone ID: 700452744_FLI
gctccgccatgtcatgaccaacctcggcgagaagctgactgacgaggaggtcgacgagatgatccgtgaggccgatgttgacggcgacggccagatcaactacgaggagttcgtcaaggtcatgatggccaagtgaggagccgtccccgttatctatgaattgaagttaaatatcaggcacacaagctgtactttgccatgtcccttttgagtacacatcagtatcatgcaggaggtaatgtctagtagtggtcggtttaggtggtgtagtcatgggaactcgacatcagatacctggtctcttttgattgtgatgttatcttgcattattgctcctgctggagcttttaggatttgttgtaagctcatattttcaggggggtttggatcttttgtgcgagtcatatctcgtgtacgttgcattgcattgttgtgttatgcttctgctggct

SEQ ID NO: 5359 - DNA, 779 bp, Zea mays
  Clone ID: 700452811_FLI
gctgcagtttctagagccctctctgccactcgtgatcccactagtcacgatgcctgccctcgccaagcccgcctcccgcaccgccaagcccgccgcggctccgaagccgaagcctgccgccgccaagccgaaggcggccaccgctggtgcctcccacccgccttactttgagatgatcaaggaggctatcacggcgctaaaggagaggaccggctccagctcgcaagcgatcgccaagtatgtgggggacaagcacggcgcgtctctgccggccaacttcaagaagatgctttccatccagctccgtgggtccgcagccaagggcaagctcgtgaaggtcaaggcctcgtacaagctatcggacgccgccaagaaggcatcgcccaagaccaaggccaagccggcaaaggccgccgcagccaagaccaccgcctccaagccggccaagcccgccgccgccaagtcaaagaaggcagcggctgccaagcctaagaaaaccgctgctgctgggaccaagcgcaaggcgcccgagaagaagatcgtggcgaagccgaagaagtcccccgccgccaaggccaaggccaagccgaagaccgtgaagtcccctgcttctaagaaggcacggaaggcctccgcatgagatgggtttctttaggtctaagctctgattgtggttggtgtcagttaggtactgtacaaactaagtgtgtgcccaaagtgtctcaggcggtgtgttatgtgcttagcaagttctatctatcagagtgttttagtttaac

SEQ ID NO: 5360 - DNA, 2532 bp, Zea mays
  Clone ID: 700452843_FLI
gaaagatggcgtcccatattgttggataccctcgcatgggccccaagagggagctcaagtttgccttggagtctttctgggatgggaagagcagcgccgaggatttggagaaagttgccactgacctgaggtctagcatctggaagcaaatgtcagaagctgggatcaagtacattcccagcaataccttctcgtactacgaccaggttcttgataccacggccatgcttggcgctgtcccagagcgctactcttggactggaggcgagattggcttgagcacctacttctctatggccaggggaaatgccactgtccctgccatggagatgaccaagtggtttgatacaaactaccactttattgtccctgaacttggcccaagcaccaagttcacatacgcttctcacaaggctgtttctgagtacaaggaggcaaaggcgctcggcattgatacagtcccagtgcttgttggaccagtgtcatacttgctcctctctgagcctgccaagggtgtggagaaatctttctctcttctttcacttcttggtagcattcttcccatctacaaggaggttgttgctgagctgaaggcagctggtgcttcatggattcaacttgatgagcctacccttgttaaagaccttgatgctcacgaattggccgcattctcttcagcatatgctgaactggagtcatcgttctctggattgaatgtgcttatcgagacatacttcgctgacattcctgctgagtcctacaagaccctcacatcattgagtggtgtgactgcttacggtttcgatcttatccgtggagccaagacccttgatcttatcaggagcagcttcccctctgggaagtacctcttcgctggtgttgtagatggacgcaacatttgggctgatgatcttgctgcatctcttagcactcttcattctcttgaggctgttgctggcaaggacaaacttgtggtgtcaacctcctgctcactgatgcacaccgctgttgaccttgtaaatgagactaagctggatgatgagattaagtcatggcttgcatttgctgcccaaaaggttgttgaggttaatgcccttgccaaggctttggcaggccaaaaggatgaggtctactttgcagccaatgctgctgctcaggcctcaaggagatcatcgcccagggtgacaaacgaggaggtccagaaggctgcagctgctttgaggggatctgaccaccgccgttctaccactgtttctgctagattggatgctcagcagaaaaagctcaaccttcctgtccttcccacaaccacaattggttcattccctcagactgtggaactcaggagggttcgccgtgaatacaaggcaaagaagatcaccgaggacgaatacatcagtgccatcaaggaagaaatcagcaaggttgtcaagatccaagaggagcttgacattgatgtgcttgtgcatggagagccagagagaaatgacatggttgagtacttcggtgagcaattatctggttttgcgttcactgccaacggatgggtgcaatcctatggatcacgctgtgtgaagccacccattatctatggtgatgtcagccggccgaaccccatgactgttttctggtccaagatggcacagagcatgacccctcgtcccatgaagggaatgttgactggtccggtcacaatcctgaactggtcattcgtcaggaacgaccagcctaggtttgagacatgctaccaaatagctcttgcaatcaaaaaggaggttgaggatcttgaggctgctggtattcaggtgatccagatcgatgaggcagctctaagggagggtctgccactacgcaagtcagagcatgcattctacctggactgggctgtccactctttcaggatcaccaactgcggagtccaggacaccacccagatccacacccacatgtgctactccaacttcaacgacatcatccactccatcatcgacatggatgccgatgtgatcacgatcgagaactcccggtctgacgagaagctactgtccgtcttccgtgagggtgtgaagtacggagctggcattggccctggtgtctacgacatccactctcctaggattccctccaccgaggagatcgcagaccgcgtcgagaagatgctcgccgtgctcgacaccaacatcctctgggtgaaccctgactgtggtctcaagacacgcaagtacacggaggtcaagcccgccctgaccaacatggtctcggccaccaagctcatccgcacccagcttgccagcgcgaaatgaggtcgtttgatagctccatggtctgatagcgcggaatgagccagttgttttgaataatttgggtgttaccccctgttccatggtgttagtgttaggttagcctctcattggtgggatacgccgttacaagatgtgttctaagtttggagtgtgtgtttttctttgggctatgtttctgggggtatgtgtgtgctttggttataaacagaaatgaaatacgcagtcttcc

SEQ ID NO: 5361 - DNA, 736 bp, Zea mays
  Clone ID: 700452876_FLI
ctgtgccgcctccgacatcctactttcgtcctcacgagtgaccgataatccgccggcgctaagatgttggtttatcaagatctcctatctggcgacgagctcctgtcggattcattcacctacaaggagctcgagaacggcgtcctgtgggaggtcgagggaaagtgggtcacccaaggtcctgttgatgtagacattggtgccaatccatccgccgagggtggtgaggacgaaagcgttgatgacacagccgtgaaggtggttgatattgttgacacattccgtctacaggagcaacctccttttgacaagaaatcatttgtctcttacattaaaaaatacatcaagaatctcactgctgtgttggagccagagaaagcggatgagttcaaaaagggtgtcgagggtgcaaccaagtttctccttagcaagctgaaggaccttcaattttttgttggtgagagcatgaaggatgatgcgtccgtggtattcgcctattacaaggatggtgccactaatccgacattcctctatttctctcatggtcttaaggagatcaagtgctaggcttgcggcgagattagttacccatgttgggtactatctatgtactattgttatatccacaactatagttgtcctggttgaattgaactcaaaagggtttgtttgagaaaaaactgtccaagattggattgcttgttaaagctctattgttattgaagtgttattgctt

SEQ ID NO: 5362 - DNA, 1063 bp, Zea mays
  Clone ID: 700452911_FLI
gtaggacactttggatatgaagaagagattgatcagctgaagagggataaacagctcttgatggctgaggtagtgaagctgaggcaggagcaccaaaatactagatcagatctacaggccatggaagagaaattacaagacaccgagcagaagcagcagcagatgatggcattcatggcacgagtcatgcagaaccctgatttcatgcgtcagctgatctcccagcgggagatgaggaaggagctcgaggatgctatctcgaagaagagaaggcgccgcattgaccagggacatgaagctggtagcatgggcactggttctagcctggagcaagggccacagggagtgtttgaaccgcaggagccggtggaatcagtcgccaacggtctgccatctgatctggagagttcgtctgttgaggcgaagggattcgaggttcgacagggtgtttcttcaggtggttctgagcatctgaatggcaggccaagcggagagttaaatgatgatttctgggaggaccttctgcatgaggggggactcggtgcagatgcaggcaatgctgttggtcaggatgatatgaacatggacatggacccagatgttagcctgcctcaactgaaacaacatggtcccagacattagccgctcttgtgctatgacaatggctgtgactctgtgagtatctttacagttatgctcgttatatccctgtggtgtacctgtttcgatcgatcgtcttcgaccaaatgtcacgtcgactgcagtctccagttgttaatacagtctgttcagcacgctgatttaagtatttgggtcaagatgttcatataatcctgtggtatccagagatattatagtttgttttcgtaactgtttgcgcagagaccatgctatgttgcctgcaggctatcagtgtatttgttctaacagatcgcaacgctggtacaacgcagtgacctgccagactgggccactatgagattgtagggaaagaccagatagcttgtgtatgtaaaagtggtcattctatcattctatgtatggtgatccataatagcctatc

SEQ ID NO: 5363 - DNA, 526 bp, Zea mays
  Clone ID: 700452922_FLI
cagacttctgctgcagcgcctccgccgccgccgccgcatctaacgcagttccctccgccgcagcccgaggcaagatggttctccagaacgacattgatctgctcaacccgccggcagaactcgagaagctcaagcacaagaaaaagagactcgtccagtcgcccaactccttcttcatggatgttaagtgccaggggtgcttcagcataaccactgttttcagccactcccagactgttgttgtgtgccctggctgccaaactgtcctctgccaacccacaggaggaaaggcaaggctcactgagggctgctctttccgcaggaagggagactagagcggatgtggtcttcaagttttgctctatgccagatactagcgtcatgaactgcctttagctaagattttccataagttgttctcgagcagctatgtgttgcatgttggctacttccaaacttatatctggtttggtttggattgtgatgaactaatggctctttgaatttatattatgatgttgacgat

SEQ ID NO: 5364 - DNA, 1441 bp, Zea mays
  Clone ID: 700452949_FLI
cggcctgctcgttctatctgtccagcagacttgaggttccgagcggccggaaaccagcggcaaccgtcggcatggcgctcgtattgcattctggggctggaaacaaaaatgccttcaaggcacttattgctgcagaatacagtggggtcaaggttgagttgaccaaggattttgagatgggtgtctcgaacaagacccctgagtttctaaagatgaacccccttgggaaggttcctgttctggagactcctgatggccctgtttttgagagtaatgctattgcgcgctatgttgctcgcttgaaggatgacaaccctcttttcgggtcttcccgtattgaacaagcccacgttgagcagtggatggactttgctgcaacagaagttgatcctggtgttggatggtacttgtatccaaggcttgggtacatcccttatgctcacacgactgaggaaacagctattgcttcattgaagagatcccttggtgctctgaacacacatcttgccttgaacacataccttgttggacattctgttactctagctgacattgtattgacatgcaacctctaccatggaattgcacggatcttgaccaaaagcttcacttctgatttccctcatgttgagaggtatttctggaccatggttaaccaacctaatttcaagaaggtcattggtgaggtcaagcaggcagagtctgtacctcctgttcttaaaaagggtgttcctcctaaggagtcaaaggcaaaggatgtgaagaaagaaactccaaaggaggcccccaagccaaaggtggttgaggtaccagcagaagaggaagcaccaaagccaaagccaaagaatcctcttgacttgctgccaccaagcaagatggtccttgatgactggaagaggctatactcaaacacaaagaccaacttccgggaggttgccatcaaaggtttctgggacatgtatgacccagagggctactctctgtggttctgtgactacaagtacaatgacgagaacaccgtctcctttgtgaccctgaacaaggttggtggattcctgcagcggatggacctgtgccgcaagtacgcctttggcaagatgctcgtggtaggttctgagccacccttcaagctgaagggcctttggctcttccgtggccaggaggttcccaagtttgtaatggatgaggtctatgacatggagctctacgagtggaccaaggtcgacatctctgatgaggcccagaaggagcgtgtcaatgccatgatcgaggaccaggaaccctttgagggcgaggccttgcttgacgcgaaatgcttcaagtgagtgtgctttatccagagctgtttagccctcgaattggatgtctatgttgatctggtatatcttgctatgaactggttaaggtttgtgctggtttgagaatttttgtttaccttctc

SEQ ID NO: 5365 - DNA, 612 bp, Zea mays
  Clone ID: 700452959_FLI
tccggagcagccgcagtcccaccgaccccgccgccggtcgccctccatctcctcgccgctgcctctcgtttctcttttcaataatcaagatgagccgtggtggtagtgccggtggtggtcaaagttctctgggttatctctttggaagcggtgagccccccaaaccagcagtggcaccagctgcaagtgctccacctgttgagaaaccatctgctgcaaagactgatgcggccaagcaggttgctgctggggttaccagccaaaccaataactaccacagggctgatggtcagaacactggcaacttccttacggaccgtccttcaaccaaggtccacgctgctcctggcggtggctcttccctgggctacctgttcggtggcaactgatgcccgtgctggtgcgctcaccaaagttatcctcccctgcctgctgcgtgctatgtctgaatcgtgaacaaccgttgtcatttcatgtgtgtaccccgtgcaatgctttgtgcgcatggttgatttctctgtggcaaacttcccgtcctgcatggggttgtaagctgtctctaaatttcacggcaagtcgtgtgcctgaaccttcatcttaagttgttgtcgt

SEQ ID NO: 5366 - DNA, 423 bp, Zea mays
  Clone ID: 700453001_FLI
gggaaacagcctctgaaccgcgcgaagccgaaaggattgagtggtagtagcatttttgcagacgggaaggcctcgacaactggtgatcatgcaggccgtcggacccggcagccacctggcggcgacagcagcatcttgctgggctagcgtgcatatggatattgtcctatgccgccacacgggtggttggtccgtccgtgtgcggccatgttttcctgatcaggcgatgagtcccatctcagatgatctggttcacttctggcgtgtgtatgggtttgtgtctgtgttggttgtgacatgtccaatggaacaaccctatcgctactgcgtgtggtgccgttttgttgtgtagtagtacaacggatgacatgtggtaccgtttcgttgtgtgtacgtggatatacatatgtgtgtttggttatt

SEQ ID NO: 5367 - DNA, 1695 bp, Zea mays
  Clone ID: 700453049_FLI
gccgtcgctagcgcctgccgcggcgaagcttctgccctccccggcgccaggctcgggtcgtcgtcggccaggcagctgctacgcgtgaacacggtcacaccagtacggcagtaccacgcgacgtgaacggtgaactcgtgaagaacagagccgccactgaggaaaccctagcgacggcggcgtgctaccggtgacattgtccccctcggcccctccatccctgacgcagcggcgccagcctgcaggaagccagcccctattcgagacaaggtcgatctttgctgccttggcgagcttcagccgaatcaaggtcgagcatggcggcaggccagtaaatagagcaacacaaaacccttcaaattaatggagacctctgcagcaaccccgacccggccgccacaccaggcggccacttccccatcgccatcgccctcgtcgtcgctgaggctgtggaggccagcggcgcagcgcaacatgcgcaatcagtggtcccatctgagcgccgccaaggagcagtggctggccgccgttgctgacggccgtgcccacgcctccgcgctcgtcaacgtccacctctcctgcaggaacatgccgacgatggatttgggggtgctcaaggatatgccggggatccgcgataaggcgaactccaagttggcgcttagagaggagcaatacagcggcatgcttctgtcggcctacaaggagatggtccgtcagctgtcctacttggttgaagcttcccattctatgcgccgtttttctaaagcggctccaaattgccccatcacacagttttctgaccgccaagataatttgaatgattcaggggatggtggaggagccccagtattcaaatggttctctgtattagaatttgagagtcttgcccaggagcttgttcagatgtttgtttcagagcaaaagttgaagaggctgctactcttggaatttctctcgattgctttaaaggaaggtgtagaactccagacatcattaaattggggtgatgaactatatgatggtgaatcaaataaacttcagagtattggccttcagtcaggagatgcctactcaccgcctgaaaattggtgtgcagaacgtttagggagtcagagacctggcaatctccctctgcacgaagttttacaggtttatttaaccacttggcatgctaatatgaacatcaaccggagtagaattgatgaaatatttgagcttgttgaggaggagatgaagattaaactgtcttgaagattccgattcattttgttgggctatccatcaaggaagaagaaatggaaaagacagaccaatcagttcactattcaccaggattctatatccacttatccagtgtctttatctgccttagtagaagccttcagaggttacctatgatcttagaatatagtactggtctccttgtgacccataatatttttttaaaatttaatgttgggttacactggaatcatattgggaggagagcgttggaccaacatatgttattgaaatgagatttctaagttatcaggatcattcgcctagcttcaggtttgtcctgtgcggttgtagatgtgtattatttacttcattggcctgctgtacagatcttggtgacatgctcgtggaaaacgcatattgcttttagtggtttttttattacgcttatggattgtaggtcttatggtt

SEQ ID NO: 5368 - DNA, 1162 bp, Zea mays
  Clone ID: 700453085_FLI
gcacgaccacactacccacccacctccactactgaccgattcccagaaagctcgatctagcgcgcgcggctgcagagtgcagacgacgacgtacaccatggcgcggcggtccctggccctgctgctcgcgtcgtcgctcgccctcatgtcggccgccgtcgcatcggcggactcgtggctctacgacaagttcaacacggacggcaccgtccgcacccagtacgacgcgtcggggcaggaggtggcgatgctcagcctggaccgcagctccggcgccggcttcaactccaaggagcagtacctgtacggcgagttcagcgtccagatgaagctcatccccggcaactccgccggcaccgtctcgtgcttctacctctcgtcgggcgacggcgacgggcacgacgagatcgacatggagttcatgggcaacgcgagcgggcagccggtggtgctgaacacgaacgtgtgggccagcggcgacggcaagaaggagcaccagttcgacctctggttcgacccctccgccgactaccacacctacaccatcatctggaacccgaccaacatcctgttcaaggtggacggcgacgtgatccggtgcttcaagcgctacgccgacctgccgtacccgaacgcgaggcccatggcgctgcacgccacgctgtgggacggcagctactgggccaccgagaagggcaaggtgccggtggactggtccgccgcgcccttcgtcgtctcctaccggggctactccgccaacgcctgcgtcagcggcggggcctgcggcggcggcggcgacgacgggtggatgagcaagcagcccgacgacgccgagtggggcaccatccggtgggccgagagcaactacatgcgctacaactactgcgacgacggctggcggttcccccagggcctcccgcccgagtgcagccgcagctaagctagctgattccgccggttttcgtacgctcggcggcgtccgctgacgacacacgccttgttggtttgttcttgctggacatcatacatctctatatgcatgattcttgttctgttattgttaaatcgtgattacaatacttgtaattgtaaagaagtgtgtgggcacgggagtatatcactgtagttttaatttgcttgtaaagaaaagaagggttttttt

SEQ ID NO: 5369 - DNA, 1246 bp, Zea mays
  Clone ID: 700453111_FLI
ctggagctaggaggtgcagctatagcagacgcagagcaatggaggccgccgaggctcttaactatgacagtattgtcaacagggatgagatcaccgacgctgcagctgcagcgttcgccaacccggagcaggtcccggagaagtacgtccggacggaggaggtccttgacggcgtcgtcgtcggcgcggacgagagctacgagctgccggtcgtcgacatggccaggctcctcgacccggagctggcgccgtcggaggtcgccaagctcggcgacgcctgccgaaactggggtttctttcagctgacaaaccatggagtggacaaagcggtggtgcagcggatgaaagacgccacggtgcagttcttcagctccccgctggacagcaaggccaaggtggcggtccgagggaacggcttcgaaggattcggacaccactacagcagagcgtccagcggcaagctggactgggcagagagcatgattctcatcacgcagccagtcaaggacaggaacatggagatgtggcctacaaatccacccacgttcagggacgcgctcgacgtctactcggtagagatgatcggcctcgcaatgcggctcctggggttcatggcggccgacctcggggtggagccggaggcgctgcaggacgccttcacggggaagcggcagagcatggcggtccaccactacccgccctgccgccagcgggagaaggtgatgggcatcacgccgcacacggacgggctgggcctcacgctgctgctgcacgtggacgacacgcccggcctgcagatccgcaggggcggcaggtggttccccgtgcgcccgctgccgggcgccttcgtcgtcaacgtcgccgacatcctggacgtgctcaccaacggcgcctacaccagcgtcgagcaccgggtgctcccggacgccgagagggcccggaccaccgtcgtcgtgttccaggaggcgtccgtcgggggcctggtggcgccgctgccggggctcctcgaccagcagggcgcgcgcgcgcgctacaggtccattgagatcgaggagtacatcaagggcaacttcaacgcgctggagcaagggacacggttcatccagagcctcaggatatagccatctagttgctccttccatccaaaaataattgcccaccatatcgataaatcaatcaatctcaatcttcaccaatcatatccatatcttccgtatctaatattaaagagagtgttaatttcttc

SEQ ID NO: 5370 - DNA, 668 bp, Zea mays
  Clone ID: 700453147_FLI
cggcctccgggcacctcccacggaccacggtcccaccgcatcggaactcggaaggcgaagccgaggcgccgcgcggatcgagcgatggcggcggcgttggagcaactgagcagcagcaaaatgttcgacggcttcaacctccgtttccgccaccagagcgccaccctcggctgcgcaatgaccttctccatctacctgcccccgtccccggcgtccaacatatccgtgctgtactggctctcgggcctcacctgtaccgacgagaatttcatcatgaagggcgcgccgccgccgccaacggcatcgcccttgtcacgcctgacacctccccacgtcttctaggaagaagcggctttcagctgaagctgcttgtgtgagatggccgaaggttcctcttcatgaagcttcggtattacaaaccgacttaaagatagaatgaccttttagtccataaaggtctgagtcaatgttgtaaacttttatgaagggcataattgtaattcctcacgggccgtgtcctgtgcctataaatagtgaacagtattcctttactgtacacgcattctgataattgtaatcgcatctttcggaaacctatctttgccaaggaagaggtataattgtattcagtaattcaatatattaagtaaatataatttaattcgttt

SEQ ID NO: 5371 - DNA, 1837 bp, Zea mays
  Clone ID: 700453152_FLI
atccccagatctcaacccgaacctcccagccgcgccgccctgatggcctacaccacctcgccgtcgacatcgacgtcgacggcagcggcggtggcctgggccttcgctgccgccacctgcgtgaaactcctcctcgtccccacctaccgttccaccgacttcgacgttcaccggtactggctcgccctcacgcacgcgctccccgtgcggcagtggtacaccgacacctcctctcagtggacgctcgattacccgcccttcttcgcttacttctcccgcctcctctccctccctgcgccgctcgtcgacgccaccctcgtttcaatccccgtgcgtgacgcgacgcccttcgcgcatctcatctacctccgcctcactgttgctttctccgacctcctcctcctcggatccgtcctcttactggcgagggacgcgcagcggaaacagcggccgttcctcgctctcgctcttgtcgtatggtcgccggcgctgttagctgtcgaccacgtccactttcagtacaatggattcctcattgggttgctgctgctttcgctgcacttcctcgagcaggggtgggatcttattgggggagtcgtgttcgcatgcttgctgtgctcgaagcacctgttcctcgtggcagcgccggtgtactttatgtatttgttccggcattattgctgtggccggggtgtcgtgaaggggctgggaaggctcgtgctcatgggttctggagtggctgctgtttttgccgcagcatttgtgcccttcgtgtactatggtcagatgcaacaactaattagccgattgtttccctttgggcgaggcctatgccatgcttactgggcgccaaacttttgggtattctatattatacttgacaagattcttgcatttcttcttagaagactaggctttaatattgccatacctgaagcttcgtttactgggggacttgttggtgattcgtctccttttgctgttcttccaaaggtcaccccaattgctacattcttattggtcattcttgccatggctccttgccttatcaaagcattctctaatcctcaaccaaagcatattattagatgggtctcgtatgcatgcacatgtgggtttatgtttggatggcatgtacatgagaaggcatcacttcatttcactatcccacttgccctaatcgccatggatagcttgaacgatgccaggcattactttttgttgtccatagtttcatgctactctctattcccgttgctgtttgagaaccaagagtacctgataaaggtgctgctgctgctgacctacgctgccctcatgtgggtaggctttacggtccattttgctgcaaagtctgacctggaaggaaagaaaataagtcggtcaggcagcacagtgaagaagaatggcatcattggatggattggtttaagctatcttttgggaattgcaggcatagaattatggtctcaagtatttcaccatcatgtattcggcgataggctccccttcctacctcttataatggtgtcattctattgtggccttggaatgatgtactcctgggtgtggcagcttgtacatatagtccgacacacatgatttgattaccggtcatcagtggaagcattctcttgcctttcttgggttgaggctaatcgcgatgacaatgctgcctggaccgatgcagcggccaacacagtcatgtctgggcacagcattttctttttagctgtcgaagtcattgtctgtgtgcaagaaatttttagagatgtgtgaccgtgttatgatgtaattaatgtcagtttatataagtaacagaaaatctgcttgtatc

SEQ ID NO: 5372 - DNA, 1019 bp, Zea mays
  Clone ID: 700453156_FLI
ccgttcgccaggtcggcgaccaggcgaaacgtgctgctgctgccgctgcaagaagaagaataggtacacagacagcatgtccggagttcaggcgatgccgacggccgtgggcgtcgcggggctgagagggtcagggttggttagcagcagcagtaccagcttgttcgccggcgactgcaagaggaaggctcgccgcccgtcgtactcggcctgggccctcaggcagagccggatcggcagcaggagcaggatcaggagcaagaggggcctcggcatcgtctgcaacctcgcgggacagtacgaggattccttcgacgacgtccagcggcaactgatgaactacttcacgtacaaggccgtgaggaccgtgctgacccagctctacgagctgaacccgccgagctaccgctggttctacaacttcgtcgctgtcaacaagcctaccgacggcaagcatttcctccgtgctctcggcaaggagaggcaggagctcgcagagcgagtgatggtcaccaggcttcacctgtacgggaaatggataaagaaatgcgaccatgccaagacgtacgagaagatctccgacgagaacctggcgctgatgcgggagcggctgatggagacggtcatctggccgaccgacgacagcagcacggagaagatcggctgatacctgatgcctgccaaggcgccgagccctttggggttgctgatcaagcttagctccttctattagcatgtatagcagcactctgggtttctctatcagtcagccagccagtcagtcagtgggttgtatataatcggagttgtagtagacagtatacatttctctggggcagtgtttattacaggctatcactgtttgaggtgctaatagtgccgttttgccctcccaattaagcctctacagtcggtctaagtgaagcaaaaaatgcttaccttgtagtagctaaatttacatgtgctgggatatacgttgtaatagaatatttctgcgccccgtacgtggctgtttgatg

SEQ ID NO: 5373 - DNA, 264 bp, Zea mays
  Clone ID: 700453207_FLI
cagaagtaccatggcaaggtcaaggccgtgatagattctctaagaggtgttggtgtgaaattgctgtagggaaaactgactgttttatgagaggttatgttggggcctcatgtttacctccgaagctgcttggcggtccattagtttcgtgactgaattttcttatgggtgctgctgaacaatatcttgaaccatgtaagtccttgttcggttgttcctatacatcatggattggaaaagaaaatatgaaagattttgacttgg

SEQ ID NO: 5374 - DNA, 964 bp, Zea mays
  Clone ID: 700453235_FLI
cgtttgtttgtttggttgttgcgtgcaggacgagtgggccgtgtgcaaggtgttcaacaagcagctggcggcgaggaccgaaccaataatggcggcggccggcgcgggcgagctcgagcgcgtcggctcgctgggcttcctcagcgagctcctcgactccgccgagctgccgcccctcatcggcgccgacgtcgacgaggtgatcgacttcaacggccccgcgtccacctccggcgcgccgggcacgagccacagccacctcccggtcaagatggaggagcacgcgctgctgcacatgcagtaccagcagccgccgccgccgccgccgcccccgacgtcctactactcgagccagtacttctctctgccggcgatgaactccggcgacgtccttcccccggcgatccggaggtactgcaaggcggagcagcaggtggtgtcggggcagacggcggcgtcggcggtcagcccgtcccgcgagaccgggctgagcgccgaccccaacgcggagatctcgtcggcggtgaccccgtcgtcgcaccagttcctgcccgagttcgacgacccggtcctgaacctcgccgacctctggaagtactgaagctgaagccccctgaacgacgatcgatcggtggactggctggggacgcccgcccgcccgcctcgatcccatggtttggttggttaattgcttgatgattcgattgattatcttggcctgttgtgggatttggggttagtgacggaccgtgacgcgtcctccgcctctactgacctcggggtctgactagattattgcccgtgcagaccggcaggggattagggcccccctccttgttaatgaatccgcccccatcctaggttccttgtcttggtcactgtacatagcgccctactctgattgtgtctgtagcagtagcatgattattgataggattaatgaaatggggggtagattagggtc

SEQ ID NO: 5375 - DNA, 978 bp, Zea mays
  Clone ID: 700453242_FLI
cccggcgcgggtgccgctggactacgtgctcttccgtgttccgtcccaacgccggtgtcgccgacgcccgcacggggctccgctacgacaacatgctgtacgcgcaggtgtggacgccgtgtacgcggccatccaggggctcgggtacacggacgtggaggtcaaggtgtcggagaccgggtggccgtcgcgaggcgacgccgacgaacccggcgccacgcccgagtacgcggggacctacatccggaacctgctgcagcggatcgagatgaagcagggcacgccgctgcgcccggcgacgcccgtcgacgtctacgtgttcgcgctcttcaacgagaacctcaagccagggccggcgtcggagaggaactacggcctcttctaccccgacggcacaccggtgtacaacgtcggcctgcacggatacctcccgccgatgctggtgtcgtcgactgcagcacgacagctgattcgttattttgcactagtcgccatcgcgtccgtcgcatattcgtctgtcttatcctgacagtgtagcctaccgacggagcactaaacagctaagcatctcatgctactcacgactcaaggaacttctgagtaatctgctggccatctcaacttgggtacctttactgcatttcggatagcgatcacaagctcttactgtacacatactgacaataaggtagaactgactgaagcatatgcagcatccattcatcacagcttacattttgacccaaaaaggaaaggtacaaacagtagggagagctgcatggacagcacctattttgttgttcactccttttcaaatgctatgaatcaagaacaagtcaacacaattattaaagattaagggtcttcgtcttccgaagtattatctccacaagaagataatattcatcagacgaagaccatttgagacgaacattcattatttaatatgtcaatgggaatgcaaaagggtagagatgg

SEQ ID NO: 5376 - DNA, 1796 bp, Zea mays
  Clone ID: 700453283_FLI
aatcctctctttccctactcgcggaagccaactccaccggcaggggaagcggaagggaagcacctcggccccggcaagatggtgctcgcacagctgggcgggagcatctcccgcgccctggcgcagatgagcaacgccacggtgatcgatgagaaggtgctcaacgagtgcctcaacgagatctcgcgcgcgctcctacaggccgatgtccagttcaagatggtccgcgacatgcaggctaacatcaagcgcatcgtcaacctcgaggcgcttgccgcaggcaccaacaagcgccgcatcatgcagcaggctgtcttcacggaactctgcaccatgttagatcccgggaagccttctttcactcccaaaaagggcaagccaagcgtagtcatgttcgttggtctgcaaggttctggtaaaactactacttgtacaaaatatgcttattatcatcagaagaaaggattcaaaccagcactggtttgtgctgatacatttagggctggtgcttttgatcagttaaagcaaaatgcaacgaaggccaagattcccttttatggaagctacatggaatctgatccagtgaaaattgctgttgagggtgtggagaggttcaagaaagaaaactgtgatctcatcattgtggacacaagtggaaggcacaaacaagaagcagcactctttgaagaaatgcggcaagtttcggaagcaacaaaaccagacctggtgatttttgtgatggacagtagtattggtcaggctgcatttgatcaagcacaggcatttaaacaaagtgtttctgttggtgctgtgattattacaaaaatggatggtcacgcaaaaggcggtggtgcccttagcgcggtcgcagcaacaaaaagtcctgttatattcattggaactggcgagcacattgacgagtttgaagtttttgatgtgaagccatttgttagtcgcctgttaggaatgggagattgggcaggctttatggacaagattcatgaagtcgtacctacggatcaacaacctgagcttctgcagaaactgtctgaaggaagctttactctcaggcttatgtatgagcagttccaaaacattctgaaaatgggtcctattggacaggtcttctctatgttgcctgggtttagcgccgaactaatgccaaaaggacatgagaaggaaagccaggctaagattaagcgctacatgacaatgatggattccatgactgatgcagagcttgacagcacaaatcctaagctgatgactgaatcacggatcattcggattgcacgggggtctggtcgtcctgtcagggatgtcatcgacatgctggaagagtataagcggcttgctaaaatctggggcaagatgaagggtctcaagatcccaaagaaaggggagatgagtgcactgtcccgcaacatgaatgttcagcacatgagcaaggtccttcctccgcagatgcttaaacagattggtggcatgggcggtctgcagtctctgatgaaacagatgggatcgaaggagatgagcggaatgtttggaggcatgggtggcgagcggtaattttacgtcctgtttttggtggatcgtcgctgtgaacttgtgatgctaaattgagagggtttagtgctgcggtctgatcatcgtcagaggtttccatgaagatcagcctgcgccatgttatggaacaggcttgctgtagctccccatgcctgaaatttaatttatatgattatgaacagtacatttgtcctcgaaaaaatgtataagatataatatttgacaaatgg

SEQ ID NO: 5377 - DNA, 536 bp, Zea mays
  Clone ID: 700453302_FLI
aacacggctgcttcctcaggtaaaataataacttcctgctgtctcccaagcagttcgtgatctgctactgctggagagcgcacacactaatcgctgatgctgtcgacggttgtgtaggctgagaagagatgcagagtgggagacatgcgttccggtgatagactgcagctggaagcagatcgcagagcctgtgatgaagacctataccgagactacggacgggtcgactattgaggagaaggagactgccatcgtgtggtgctacgaggacgccgatccagatttcggatcctgccaggccaaggagctccacgaccatctggagagcgtgcttgcaaacgagccggtctcagtgaaagctggacccaacctcgtcgaggtgaagccacagggcgtaagcaagggcctggtggcgaagcggatcctgtcgacgacgcaggagcagcggggcgacgacgacgacgacctgccggacttcgttctgtgcgtgggcgacgaccggtccgacgaggacatgttcgaggtgatcgctgcgc

SEQ ID NO: 5378 - DNA, 691 bp, Zea mays
  Clone ID: 700453322_FLI
gtcctggcatccgcagagagtttgttccgtccaggcaaccaaaaagcgttgccccgccgcgcagaggaagaagagagcagaggaggatggctcgtacgaagcagaccgcccgcaagtccacgggaggcaaggccccccgcaagcagctcgccaccaaggcggcgaggaagtcggcgccgacgaccggcggcgtgaagaagccccacaggtacaggcccggaaccgtggcgctgcgcgagatccgcaagtaccagaagagcacggagctgctgatccgcaagctgcccttccagcgcctggtgcgcgagatcgcgcaggacttcaagacagacctccggttccagagccacgccgtgctggcgctccaggaggccgccgaggcctacctcgtcggcctcttcgaggacaccaacctctgcgccatccacgccaagcgcgtcaccatcatgcccaaggacatccagctcgcccgccgcatccgtggcgagcgcgcgtagccatcatctccgaggatctgatgaatgtctagttaccaaacaaataggccgtattagcgtcgttgttctgtattcgttattttggattcggttgcagggaaaaacagctttactgatcttatttgtgatctctggtggtcgcttcgcttctaagcgatcatctgtggtgctaaattcgtgctggttattctgtt

SEQ ID NO: 5379 - DNA, 522 bp, Zea mays
  Clone ID: 700453333_FLI
gtccactcatcatcgccatctcttctcttgttttgctcgctctatacataccagagaggtaggtagctagctagctagtggtgaacgtacaataatacaatcagcacagcaagacagtaatggcgcagcggcagggaagaggcagtggtgctgtggcccttgcggcggcggcggcggtgctcctctgcgtgctccttcatgcccacgtcgcggagtcggccgtgttcaccgtcggcgaccgtggcggctggagcttcagcaccggtacctggactaacggcaagcgcttcaaagctggggacgtcctagtgttcaagtacgactcgacggcgcacaacgtggtggtggtgaacgcggccggctacaaaggctgctcggcgccgcggggcgccaaggtgtacacgtccggcaacgaccgcgtcacgctggcccgcggcaccaactacttcatctgcagcatccccggccactgccagtccggcatgaagatcgccgtcaccgccgcctgagtcctgaccgatc

SEQ ID NO: 5380 - DNA, 1479 bp, Zea mays
  Clone ID: 700453362_FLI
ccgacagcaaggtggcctgcgagacctgcaccaagaccaacatggtgatggtgttcggcgagatcacgaccaaggcgaccgtggactacgagaagatcgtgcgcgacacctgccgcgagatcgggttcacctccgacgacgtgggcctcgacgccgaccgctgcaaggtgctggtgaacatcgagcagcagtcccccgacatcgcgcagggcgtgcacgggcacttcacgaagcggcccgaggagatcggcgcgggcgaccagggccacatgttcgggtacgccaccgacgagacccccgagctgatgccgctgagccacgtgctggccaccaagctgggcgcgcgcctcaccgaggtgcgcaagaacggcacctgcgcctggctgaggcccgacggcaagacccaggtgacggtggagtacgtgaacgagggcggcgccatggtgcccgtccgcgtgcacaccgtgctcatctccacccagcacgacgagaccgtcaccaacgacgagatcgccgccgacctcaaggagcacgtcatcaagcccgtgatccctgagaagtacctcgacgagaagaccatcttccacctcaacccgtccgggcgcttcgtcatcggcgggccccacggtgacgccggcctcaccggccgcaagatcatcatcgacacgtacggcggctggggagcccacggcggtggcgccttctccggcaaggaccccaccaaggtggaccgcagcggcgcctacgtggccaggcaggccgccaagagcatcgtggccagcggcctcgcccgccgctgcctcgtgcaggtgtcgtacgccatcggcgtgccggagcccctgtccgtgttcgtcaactcgtacggcaccggcacgatccccgacaaggagatcctcaagatcgtgaaggagaacttcgacttcaggcccgggatgatcagcatcaacctcgacctgaagaagggcggcaacaggttcatcaagaccgccgcctacggccacttcggccgtgacgacgccgacttcacctgggaggtggtgaagcccctcaagttcgacaaggcatcggcttaaggttgggagtgtcactgtggacatgaggactaccttcctctggctctgctgttacctgcaagcattgctgctgctggatgtgtgtgtttgatcagtgactggctgctgctccatagaagatgaacggagagaaggatgatgaagggctttggcaatcgccgctgcaactgcaacccatgccatgccggcttagtgattgggtataatttggcttggcagcagccagcattattatgtgctgatctgttatcttttactagtttggtcgtccgatatctttctttctttttccccccttttcgactctgtactgaaactgctgagagattcgcagtattgttgtatcgtattcatatgctactgttactctggtgcccctctctctctctctgctgagagttttctc

SEQ ID NO: 5381 - DNA, 808 bp, Zea mays
  Clone ID: 700453377_FLI
cagcaccagattgtctaccaacaagctcaacagttccaccaacagctccagcagcagcaacagcagcagcttcagcagttctgggtcgaacgcatgactgaaatcgaggcaacagctgatttcaggaaccacaacttgccacttgcgaggataaagaagatcatgaaggccgacgaagatgtccgcatgatctcagccgaagctcccgtggtcttcgcaaaagcttgcgagatattcatactggagctgacgctgaggtcgtggatgcacaccgaggagaacaagcgccgcaccttgcagaagaacgacattgccgcagccatcaccaggaccgacatttacgacttcttggtcgacattgttcccagggatgagatgaaggacgacggaatcgggcttcctaggcccgggctgccacccatgggagccccagctgacgcatatccatactactacatgccacagcagcaggtgcctggtcctgggatggtttatggcgcccagcaaggccacccggtgacgtatctgtggcaggatcctcaggaacagcaggagcaagctcctgaagagcagcagtctctgcatgaaagggactgaggatgtcgctcaagctatcacctgatttttcagagctctcattttaggttctctaaactgcaggttttcgttggctaatatcgttgggtatcaaactgaaacaggtagggtgtagcatcatggtagtttgatttctgctgtggtgttagttggagggataatgattagcggctagtggattaaagttacccataccgtttcctttcgttcc

SEQ ID NO: 5382 - DNA, 590 bp, Zea mays
  Clone ID: 700453413_FLI
agaccctatccaaaaccagaggcaagccaagacgcaagctgcaagcacgcgctcgtgcccgcgccatgaagtgctggtgcgtgcactcgccaaggggagcaatggcgacgccgctctccagccccttggctcccaccgccctccgctcccctctccggcaccgcgccctgctgctgctgctgccgttccctccccgtgcggcctcctccggcgaggacaccgccgcagcagccgaccaggagccggccccggcggccaccaagacggccaccgcggacgacgacttcgaggagcgcgtgctacggatcaagtcccgcgtcgggcccaagaagcgcggcgcgcgcaagaagaaggccgcggcgtccgcgtcagccagcgccgtgacgctcccgcccgtgccgctgcgggagccccggtcggcgctcggcgcgcccgtcgagctcggcttcaccgcgtacagcgagcggctcaacggcgcgctggccgcgctggggctcgccgcggtgctgctcgtggagctgggctccgggcaggccctggtgaagtaccaccagccggccacgctgttcctgcaggcgtacaccgtcgct

SEQ ID NO: 5383 - DNA, 1180 bp, Zea mays
  Clone ID: 700453451_FLI
ttcagaatcaaaacaaaatctgttgggtgcaaatggagttttggaagacaagaagcatatgatggaagggccttcctcattttcagccgtcaaggctaaattaaagcctgcaactatgaggccaattcctcactctcaaaagcaacaaatgcatccttttatgtgtttacctgaaacttcctttcatgaaactagtattgtgaagccaagcttgacagttgcgccaactgtgaagcacaattcagtttcttatgccccaaccacgcacagaaaatcaacatcagggccatctcatactccttcagtcattcagttgaatcctctgcctatgaagaaacatggatgtgataggttgtctatacaagtatgctctgaggaggacttcttgaaggatgtcatgcagtttttaatccagaggggccacaatcgacttgtacctcacggaggactagctgaatttcctgatgcagtccttaacgccaagcgccttgacctttataacctgtacaaagaggtggtgtctagaggtggattttatgtgggtaacggcataaactggaagggtcaagtcttctcaaagatgcgtaaccatactgcaacaaacagaatgactggtgtaggtaacacattaaaaaggcattacgagacatacttgttggaatatgagttagcacatgatgatgtggatggcgaatgctgcttgctttgtcacagtagcgcacctggagattgggtgaactgcggtttatgtggcgaatgggctcactttggttgcgacagacgacaagggctaggcactttcaaggattacgctaagacagacggtttggaatacatctgcccccactgtagcttagcaaactacaagaagccaccactaccaccaaaagtagctaatggtttctcaaatacagcatatgtaccacgaagtgtttaatttcttgtttttttcttttcctttggtcccgtgtttgtgggaagaagtcattagagtagggaatagcctgatggaaagatgggcaaggccttcagggtaggtatcgaaggtatcatctcgctaatttagtggctatgagttttttatagatgtacaattgataacacattcaagttcctaagtagttttttagtggttatgaggtttatatagcatgcatttgaatgcgggtgttacttgttt

SEQ ID NO: 5384 - DNA, 368 bp, Zea mays
  Clone ID: 700453504_FLI
tgcagatctttgtgaagaccctgactggaaaaaccataaccctggaggttgagagctcggacaccatcgacaatgtgaaggcgaagatccaggacaaggagggcatccccccggaccagcagcgtctgatcttcgccggcaaacagctggaggatggccgcaccctagcagactacaacatccaaaaggagagcaccctccaccttgtgctccgtctccgtggtggtcagtaagtcatgggtcgtttaagctgccgatgtgcctgcgtcgtctggtgccctctccatatggaggttgtcgaagtatctgctgttcgtgtcagtgttggtttaataatggaccggttgtgttgtgtgtgcgtactaccc

SEQ ID NO: 5385 - DNA, 948 bp, Zea mays
  Clone ID: 700453529_FLI
ggggatcgtcggagaggaatcgcaaagagggccgtctcatccgagttaaggaagccatggagcacaaggaggctgggtgccaggcccccgagggacccatcctctgcatcaataactgtggcttcttcggcagcgcggcgaccatgaacatgtgctccaagtgccacaaggagatgataacgaagcaggatcaggccaagctggctgcctcctctatcgacagcatcgtgaacggcagcgacgccgtcatggagccggttgttgctggcagcaacacggtagtagctgttgcccaagttgagttgcaaacaatgaacgtgcagcagcccgctgatgttgccggacccagcgagggggtggcggcgatctccaaaggggggaaggtagggccgaaccggtgcagcgcctgcaggaagagggttggacttacgggattcaactgccggtgtgggaacttgtactgcgcactccaccgctactccgacaagcacgactgcaagttcgactaccggactgctgccagggacgccattgccaaggctaatccggtggtgaaggcagacaagctcgacaagatctagggggggttccctacggttgggtatcaggaagattgtaaaccgcggtaactcgtcatgcggaactgctgccttgccccccgcgcctttctcttccatgtttgctgctacaatcttgttgttgggcattgcagtgcacggtgcacacttgtgtagcccgcctcgagaattcctgcctctgcatctggtcagttctaaaatgatttgcatgttggctatgttgtgtaagctctatttatggtggtctcgctgagacgggtatttggcttcgcagttatctagctatgtgatgtactgttgtcttgtccctgggtattatatggtacactgcagccagtaatagtaatctgcaactgtgcgttaaatggtc

SEQ ID NO: 5386 - DNA, 875 bp, Zea mays
  Clone ID: 700453648_FLI
gtgaatatgaaatacttcctcgtcatggtgagatatgggcggtttacaaaaactgggaggctgtatggactgcacaggattttgaaaaatgtgagtatgaactggtggagatacttggccatactgattcctccatacaagttcagcttctaaggaaggtcgatggttataagatggtatttatgtcatacagagcagagggttctgtgatgacaataaggaacgatgagtaccccaagttctctcaccagattccttgctttcgtctcacacatgaaaaaggtggcaagcttcgaggctatttggagcttgaccccttatcagtaccagaggaatttctcgactgattccatctgagataaactttatcaaccacaaatctggaaccttcttgtgatgaagtttctgtaactgaggctcagttaatgttaaggtcgacaggtcaacattgttcaaatgacactgacataagatgtctggatttcagcattcatagcactaacgttcttaaggctctgttcgtttagtccggattggaggccagaaccattccaactcatcaagctaatacaaatttgtgaactattctaatccggaaccaatccagtaaagtattccggaagaaccgaacgggcactaaaggtggactaccaatctgcacaatgaaggcattgactgttggactctttgctgggtggctgtcctgcagctgtaattcacaatccgagtaaattgtttgtagttagcttcagctgtatctggggtttatggtgtaaaaactgccacttctcttgtagtgtactctggtagtgctgtatttgagctgtggggtgccatcctgattaattatcagaagagttctatttgccaccctt

SEQ ID NO: 5387 - DNA, 2349 bp, Zea mays; identical to SEQ ID NO: 5353
  Clone ID: 700453682_FLI

SEQ ID NO: 5388 - DNA, 408 bp, Zea mays
  Clone ID: 700453717_FLI
cgccgcgccgcacgccgtggacaccagcaccccgtacagcgccggccggaaggccctcaggaaccgctccgccaggcccaggccggggcccgacgccgcgagacggtcgtcgtccgcgcccgcgcccgcgcccccgggcagctgcgcggcctgcaggtccaggaacaccagcgccgcccgcaccagccccgccagcgccgcgatcgacaccaccgcgttgtacaccaggtaccccagcaggctgtcccgcggctccggcatgctcgagatccccatcgccgggcgagctcgggagggttcgtcggtttgggggatccgacccgtggaccgggttgcaatttccgattatttcggggtggccggcgcgaggactggcagcgggatggatggatggatggacagacagac

SEQ ID NO: 5389 - DNA, 806 bp, Zea mays
  Clone ID: 700453730_FLI
attcaaagatgatgacttacttgatcacaggccatacagaaatgacaggagggtacctgaaagacatcgagcactaaaacgatctagtccagctcctgtggttggatatgcatcatctgccaagcgtcgcagaggaggagaggttgagctctccaacatattggaaaaagtagttgatcacttgcggggtttgagtggatcactgctgtttttaaaaccagtgacaaagaaagaagcttctgattaccttgatatcatacggtacccaatggatcttggtaccatcagggacaaggtgagaaagatggtgtacagaaacagggatgaattcaggcacgacgtagcacagatacaactcaacgcacacatatacaacgacactcgctatcctcacatccctccgcttgctgacgagctcatggaggtctgcgaccatctgctttacgaaaacgcagatctgctcaccgaggcggaagatgctatcgagtagcaatataaaaagctagatttagcatttggatcttgctatatcctaacatagatgatgtatctatctgctgatctgtaggaggggaaaaggttgtacattttttgggcctagcagcaatctacatgtgatcccgaatccagccagcttctgttggtattgtgttgagaggtagtggaagtacaaaatgtctaggttagccactcaatggcctcatgttgtaaaaatgtagaatgtaatcatgtccatatacatggcatatatcggtccaataaaccgattgtgttgcagtatttgatatgatatggaatggcgtttc

SEQ ID NO: 5390 - DNA, 1181 bp, Zea mays
  Clone ID: 700453736_FLI
gcagctacctctgttcaggccaaaataaaaagtattcatgatgtgttggacgatccccgttttcttaaaggggaaccggaggatgtacagttgtccaaggagcaagaggagatgaaaaaggttactgttcaaactgtcagggatgctttgatctcaaagaaagttgaatcaagggagcaagataatgctccattatctgatgattttcctgaagacgagaatgaagaggattttgataacaggatgcgcgcacaaatccttaaaaaacgtagagagcttggtgatgtttgccctcatgaaacctctaaagcagataaacctcatcataaggataaggaattatcagaccgcaggtccaatattgaacataggagggacactgaggacgatgatcaggagcatgagctacaaaaagctaaaaaactatccttgaagaaaaaaggtgctggctcagaagcgagtgctgagaggatgtccaaagcagatgctaatttgcagctactaaatccagctgaacaagagagacatttgcaaaaacagaaaaaacgtcggctccaaggccgtgaagatgagactctagcgaagttacagaagttcaagtcttctttcctcagtaagaatcttgctaccaatcatgtcgaagagaagaatccttctactgataaggcggaaaaggaagatgaagaggaggatgactacaaagggtggcacacaaacctactgtctttcttacccagttcttccaaggatggaatgactaggaaagatgatccagatgactatgtagtggtagacccacttctggagaaaggaaaagaaaaattcaacaagatgcaagcaaagcttaagcggagagagcgcgaatgggcaggcagatctctcacctgattggaaagcttaactcaaattatgtcaatgctccttacgtccttacctaccctggacggttggaaacactggaaatgatgcagttttggcatggtcttgggactgcgcgcagatgattggtagtgaccgtttgtggactagtgttttcctttttggcatgtgtcatgattgcttacactgtaaatgcaattgtacaatagattggttataagctcactgtgaaagcagctctctgtatcactagctatttaatatccgtttcttcaaggagccgattggctgaagttgacact

SEQ ID NO: 5391 - DNA, 476 bp, Zea mays
  Clone ID: 700453739_FLI
gctgcccctcccgccgtcgcagaggtcttctgggatccggacccctacctgatggtgcagcagctcagggagttcgagaccctgaacgacgggctggtggcgctcagggtgcagctgcaggagtacgcggaggaaatcagcaagagcaaggacaccaacgccgggatggactggctcctcgctctcccggccagcgtcagggacgtcgtcatcatggccagggacgtcatcgagtctttctttgtcatctccactggcgccgcaccgccgtaagcagctccgcagctgtagtcatatatggatattattatatcattatacagtgtgaaagagtcagttcgcctattttctcatgtcatgtaatgtgtgagaagttgatattactgttcagttttcgtgtttgttttctggtattagatttgcgggttattatgtaagtctggtatataaaattataatcaatacattatgaggat

SEQ ID NO: 5392 - DNA, 995 bp, Zea mays
  Clone ID: 700453767_FLI
gcgaaatccaatctagaagcacccctctccctctctctctcttcgccgtccgaagctccgcaccccaatctaatcgacacctcaccgagatgggccgcaagttcttcgtcggtggcaactggaaatgcaatggaaccacagatcaggtcgagaagattgtcaaaaccctgaatgaaggacaggttcccccttcagatgttgtggaggtcgttgtcagccctccttatgtcttccttcctgtggtcaagagccagctgcgccaagagttccatgttgctgctcagaactgctgggtgaagaagggaggtgctttcactggtgaagtcagtgctgagatgctcgtcaaccttggtgttccctgggtcattcttggacactctgaaaggagagctctgctgggagaatcaaatgaatttgttggagacaaggttgcgtatgccctgtctcagggactaaaggtcattgcatgtgttggtgagacccttgagcagagggaggctgggtctaccatggatgttgttgctgcacaaacaaaagcaattgctgagaagatcaaggactggagcaacgtagttgttgcctatgaaccagtttgggctattggaactggtaaagttgccaccccagctcaggctcaggaagtgcacgcctccctgagggattggctaaagaccaatgccagccctgaggttgctgaatctactaggatcatctacggaggctctgtaactgctgcgaactgcaaagagctagcagcacagcctgatgtcgatggttttcttgtcggtggagcttctttgaagcctgagttcatcgacatcatcaacgcggccaccgtgaagtccgcttaagatgctacgctgaagacgaacatactttttttttgctcaactgtgctatgtaagctagtagcttttgcgcaggagcagagactgttttgcctgcccccaacttctagcttgagcttgctaataatgtttacctctggacgtatc

SEQ ID NO: 5393 - DNA, 979 bp, Zea mays
  Clone ID: 700453822_FLI
cgcgggagtactacgactaccgcaagtctatctacggcgacgtcacgcaccgcgccctcctcgtcgacgccgtcggcaccctcgtcgtccccgcccagcccaccgcgcaggtgtataagagcattggtgagaagtatggagtgaagtactcggaagacgagatcctgatgagataccggcgggcatacgagcaaccatggggtggatcacgtctcaggtatgtggatgatgggagaaccttttggcagcacatagtcacttcttctacaggatgttcagatgcacagtactttgaggaactctatcaatactttatgacagaaaaggcctggaagctttgtgaccccgatgccgaaagtgtatttaaagctttgaggaaagctggcgttaaaactgcagtcgtctccaatttcgatacccgtctacggccactcctgcaggccttgaaatgtgaccactggtttgatgcagttgcagtctctgcagaggttgcagcagagaagccgaatccaataatattcttgaaggcctgtgagttactgggcgtgaagcctgaagaagctgtgcacgttggcgacgatcgtagaaatgatatatggggagcgagagatgcaggctgcgatgcttggctctggggcagcgacgttcgctctttcaaggaggttgccgagcggatcggtgttgaggtgacgaagtgactaagtgagctaggatggtgaatatacggaggcagaggtagtacccaggatcgcggtcgtcaaggaagccagtgaccccatccttgtggtgaaattcctgtgctggtttgtaggcttgtagctgtatgtatgacaacttattagggttccgttgaacctgctatgcatgcatgcttgctgccctgacagtgacaggcgaatgcgtcccatgcacttgaatatgagggtctgggttctggacttctgggactcttgagttattgaattattgtcgcctagtt

SEQ ID NO: 5394 - DNA, 762 bp, Zea mays
  Clone ID: 700453892_FLI
caccaagaccgtgaagaagacctccaggcaggtgatcgagaagtactactcccgcatgaccctcgacttccacaccaacaagaaggtgctggaagaggtctcgatcctcccctcgaagcgcctccgcaacaaggttgccggcttcaccacccacctgatgcgccgcatccagcggggccccgtccgtggcatctcgctcaagctgcaggaggaggagcgggagcgccgcatggacttcgtcccggagaagtcagcgctcgaggtcgaagagatccgcgtcgacaaggagaccatggagatgctcgcggcacttggcatggccgatctcccgggcgtagagcgccaggctgaggtctccagcgtccccgcctacggccgcccgcagtatggaggtccccgccgtgaccgcgtctaggttcaccgccgatcgcagtggttgcgtcgtggtcgcaccgttactcacagttgttatgctactatgttaaacttgttttagatctgtggtttcttctggcgattaagttttgaacttgtctgttatgctttaaactctatagttggatctgcgtgtgatggacattagagttatgttcttgcgccaatgaagtctcaagagattataagttactatgaggttttttgtttgatgctactgcttgttaccttaatgttagcatgcttttagatgtatagttagtttggtgttggttgttaggttcattgtgtactatgcagattaaattttgatttttattccttgct

SEQ ID NO: 5395 - DNA, 786 bp, Zea mays
  Clone ID: 700454037_FLI
gcggttgctcatcgtctttctaaagaagtgaaaccagttgccatatactcttctgatctgaagcgagcagcagagactgcgcaaacaattgcaagaatttgcaatgtgccaaatgtcgtgttcgatccagcactgagagaaagacacattggagatctgcaaggcatgacgcttcaagatgctgctacagagaggccagaggcatacaaagcttttatgtcccacaagagaaatcaacaagttcctggtggtggagagagtcttgatcaactgtcggagcgatgtgtgtcttttctgtacgacattgttggtaaacacaaaggggagcgagttatcctggtttcacatggcggcaccatcagagagctctacagacacgtgagtcccacgaagccgctccacggcaaaatacacaacacgtcggtgagcgtcatcctcgtgtccgacgccaccggccggtgcatcgtcaagatgtgcggggacgtcagccacctccaggagacgggcgtcctggagaacgccttcggtggcgacaagacctccgcctgagattccaacattcatcacgcgccgagagctctcggcaattatcacgcgccgagtgagcgctcgtttcggccgtctttttttccactgtaccaatcatcctgttgctaccagtagtggtctagcggagaatgatgcacacttccccccgctgggaacgcggcgatttttgctggaacagttgaaggccgagccggggcgaatccttttggcctggccgtgcactgcttgctgaactgc

SEQ ID NO: 5396 - DNA, 1161 bp, Zea mays
  Clone ID: 700454040_FLI
gtccggactgacgaatcggggacggagattcacatcaacgcagatgtggaccccacgaccgagtcgtcgcgtcgtctcctccgcttccgacactctcctgctctgcctcctcctgcttgccggcgccgccgacgccgcgccgctgctcgtaggcgtttttcccaaagatgaggcgtacttcgcgacgcaggtgatcgcctgcagagacggctcgggctctttcccgaggagccggctcaacgacgggtactgcgactgcggcgatggaaccgatgagccaggcacttcagcttgtccagaaggcaagttttactgcagaaatatcggagatacccctcgattgttgttctcttcgtttgtgaatgacaaaatttgcgattgttgtgatggaagtgatgagtacgaaagtggtatccattgccagaacacctgtagaaatataaaggatactgctgaggctgatggtggtggtggcgacctcgcagtaacacatttagattctactgatgattttatgagtaaacatgcaattgctatggaagaccatatccagaacaacagcaacagagaccttgtccagaagataagaggattgagaacagccctagttattgagctgggccttgttgtatgtatttttgctttttgcattgctcggcgtcgcactagaacacgcaggagacagcatattttgaaacgttagctgaacagtagtaatatacaaagacgatagatcggtgctcatttgcaaacattaaagcttccggagatggtggagaatcagagatgggatgaaggagcctgcacgtcatcctctttaaatcacgaggtccatctgctgttctgaactttgtagggtaggaaaattaagtatgtactccctctagtcgcagaaacttgtcatttaggacagatatggtcaaacctttaaaagtgcaagtatttacattatttactttggaaccatgtaggtctaatgtcgatctgcattcgagattcatgcaaaatctcttatatcggaagggttttaagaatatattctagaatagtggtaaaaacatgcactgaagatcgtgcaaaatcaaatgtgtcaagttgtgaccagatggagtgtacatgtttaacataaataacttaattgttgtaactgatttgtggccc

SEQ ID NO: 5397 - DNA, 2032 bp, Zea mays
  Clone ID: 700454105_FLI
tcctcctctgtctcatcggggacccctgtccctcgtggcgacggccggtcgaccgccgctgccgaggacttcgccggcgacgaccacccccacgcccactacattatatgttgaagaatggcttggagctaacagtactgacaccaacttttggttatgatcagaagcgactggagtgcagtaatgaatctctaattgtttgcaatataagaaccagatacctcattcaaatggtttttccatgttacagattggtagccaagaacaaagaggttagctagtggtgatatgcgataaagttttcatatatacaacaataaagctgagaattgtggtctgcaaataatacagttttccttctccatatgtattgtacttagagcaaccaatcttagtgattaacatggccagtttaacccgattctcaaacacccaaattgtgctatttcacaaattacttgatcatcaaactatccttttgtctgtttaaacatatccatttaccctccattcgggtctatgtttgggtttgggagccttatttggatcctggcattctccataaccggtcatatatctactgctgctgatattatatctctgtttcattatttcatagttttatatttgaacttctgcagaaaaacacacaacagtaatgggtcacgaccatatgtctcgtataaagatgcatatggcagaaggttcttttggtgacaggatccggtgccagcaacctgggtgcaatgaggttgtcgatagaagggtagtgtactgcaaaattcacagtggagagttgtcatgccaacagttcagttacctccagagcggactggagagctcaggtttatctgtgcgccctgttaacgacagccaatttaagggatctgtttccattgcagcagtgccatgcactgagcaagagttacatgtcaagcatgaaggtggtgatcgaggtaaactaaaggatagttctgggtacactttgggtcaggctgcacaatttatcttctctggggcaagcatgctttgcaagaacgataactgcagcaagcaagcacacgagaactcaatccactgtaagttgcatagcggcggcgttaacaagggctgcatggcacggggctgtacaagaggtgcgcatggaggcacgcctttgtgcattgggcacggaggtgggaggcggtgtgtggtccctggatgcccaaatgcagcatgtggccaaggccgtagcgaccgctgcgtgaggcacggtggcggcaagagatgtaaattcgaagggtgcgcgaagggcgcgcaagggaacaccgatcactgcataaggcacggtgggggaaggcggtgcaggttccaaggatgtacaaagagtgcgcagggacgcacagatttctgcatcaagcatggtgggggcagccggtgcaggttccaagggtgtggcgcgagcgcaaaatggggaacggatttgtgctctgtgcacaggaagagcctgttgggcggtgacaatgccatccctgaagctttggccgccccttcagaaaaacgacgccgggccaagacgccccaaagggaagcgaagccgtccgaggtcttccaagagaatgtcacaacagcagctactgctggtaacagcacacagcacacgggcttccttctcgtagctgcccctgttgctaaccgtgacatactgaccaatggtatggcagtgacggggcaagctgcaatagccccccaacggatagtggcaccgatgttcatgagatcaccaacgccatctggatcagtggctgcctcggcacagaggtgggaggcgggagcaagcaggggtatgctgggtctgtagaaaggtggtataatttgggaaggcttggagacaccttgcccaagatagttctctgattattggctttcagactgagaaacctctgaaacttgacagccttgtgccgtcaacggactctagtgatgtcctgtgcagctgtgctctctcatttgtattgtaaattgtaatgcaaatctctagttgttcttgtgt

SEQ ID NO: 5398 - DNA, 582 bp, Zea mays
  Clone ID: 700454131_FLI
agcatccgaagaagtactcagctcgctacgtgtgctcactggtggctgatttccaccggacgctcatatatggcggggtcgctatgaacccaagggaccatctgcggctggtttatgaggcgaaccctctcagtttccttgctgaacaggctgggggtagagggtcagatggcaagaacagaatcctcaccattcagcctgtgaagttgcaccagaggctgcctttgttcttaggaagcatggatgacatgcttgagttggaaagctacggagatgtgcagcagaaggtcaatcctggatatgaagtttaacgatatgtaaaaaaaggttcagattttttcaagcgcccaagcagaaaataaggtaacactcgtgtggcaaccctgtatctgccgatactataccttgtcttttcctctcggtttttagcccaccgcaacttgattgggactaaatccagttgttgttattgttgttcactcttttctgccaaaaattgctgtacttctcagtgaatgtaagttttatgattggcagcttcctcaaccctgcacgcttatatgtgaataatagaaagcttct

SEQ ID NO: 5399 - DNA, 987 bp, Zea mays
  Clone ID: 700454178_FLI
ctttttctcgcgtgtggtccagactcccgtcttcttcctcgaccgctaaccttaccggtccccaaatgtcgcctctcgtgctgctgctcctcgcgcacctactcgccacggccactgcagcgggagcagcgcggaccagggacgacgggcctcctgctccgtcgtcgtcgtccccgcgggtgccggcgacgacgccgccgtggccggaccagttccacgcggtggtggtgacgaacctgagcgcgcgcggcggcgggctgcagctgatcgacctgtactacgactggccgcgagggcgcgacctgaacatcgtccgcgaccagctgtccggcgagcggcgctggagctggaacgtggagtggagcaacggcaccgccttcctgttcgactccgcgtcctgccgcaccttccagttcgccgtgggcctcctgccgcccgactggaaggcccgcggcgccgcctacctggggcgcgaccgcgtcgacggcttcgactgccacgtctggtccaacttcgtcttcgcccgctactacgaggacgtcgccaccggacgccccgtcagctggaacttcaatgggctgcagcggcatgtgctgagcttcgaggcgggggcagtgctgcaggactcctccaagtggcaggcgccggcttactgcttcaccaacaccaatggcagcagtgccgacgccgccgcttcgtcttcctgagatcacgtcgctgggcctccggagtccgggctccacctgcagctggacgctgcatgtcatttggcagtcggctctcatcttgatggttgactcaggagagccttttactattagtcagtaccgattctcgcgtcgcgtgggctagaatccgtgcgatgccacggaacataaattgacgagccttcaatagcgcgacggacgacgtgagtataatggtgggattgtttagtggtgctattaagaatcaactcaataatcataatacatattgaatcctgtc

SEQ ID NO: 5400 - DNA, 932 bp, Zea mays
  Clone ID: 700454188_FLI
gcccacccaagcttccctttcgttcctcctcgccccagcgacgcggcctcccgtagaccgagcaaggcaacccaccactgagaggcacgcagaggagcaggaagccggagaccaagatgtcgtcggtgttcagcggcgatgagacggcccccttcttcggtttcctcggcgccgccgccgccctcgtcttctcatgcatgggcgcagcgtacgggaccgcgaagagcggcgtcggcgtggcgtcgatgggtgtgatgcggccggagctcgtcatgaagtccatcgtgcccgtggtcatggctggtgtgctcggtatctacgggctcatcatcgccgtcatcatcagcactgggatcaaccccaaggccaagccctactacctttttgatggctacgctcacctttcgtccgggcttgcctgtggccttgctgggcttgcagctggcatggccatcggcattgttggtgatgctggagtcagggcgaatgcacaacagccgaagctttttgtgggcatgatcctcatcctcattttcgcagaagcgcttgctctgtacggtctcattgttggaattatcctttcatcccgtgctggtcaatcccgagcagattaagtgcactaccattctgcgattaccgtactgtttattatgctattctaagagaattgaaactctatgcccttgtctagtttattcttgttaccatgtattaatgaaacaatttgtagctgaaggaaggtgacacttccagccatgttggttttggcggtgttaagcagaggttatttattgggttaaggttggagggatgtgggttaagattggatggatgctcctgggctaagtggatttaatttttatccttggtgaataatgaacacggaggtgtagccaaataataacgtgatatatatatttctttgccccttt

SEQ ID NO: 5401 - DNA, 731 bp, Zea mays
  Clone ID: 700454413_FLI
gcccagtgtatacagatatttgattcatggggtggacagcttccacctcatgtgtgggagcagtggtcaaaaccatatatcaaacaggagttgatgttattgggcttgactggacagtggacatgactgatggaaggaggcgccttggtaatggcattagtgtacaagggaatgtggatccagcatttttgttctcaccattaccagtactgactgatgaaattcatagggttgtgaaagcagctggtccaaaaggtcatatacttaatctgggccatggtgtacttcagaaaacacccgaagaagctgtagcacatttctttgatgtcacaaggcgcttgagatatgacacccttttccaaggttctgttgctgaagaattgcatcacgttgcttgacaacggcaatgacattcccatttttcatcaagtggtgtatttgatctgtcatatcatcttagagtcgtagtagattcctagtgttgcctgcattctacctttcaagagagactcattttcttaagcctgtatatgtattgcagagataccggcggcaaatctagtgcaattttattcattgtttgttcgttccattattcatctggctgaagaagggatgcatgatgaccctggtttggtttcaatgattaatgacaatataaattattatagttaatgtatgttttacagaaacaatgttacaataatgcaagatgattggattcatatggt

SEQ ID NO: 5402 - DNA, 1492 bp, Zea mays
  Clone ID: 700454464_FLI
tgccaaaccgagcaacgaaaaaaaggtatcaccaaccggtggcggctgtcaaaaaacctactccaccttccgccgctataaaccctacgaagagcggaagagggtaaaagggtggccagctagccgaagaaacacccagacgaagcggccgtttttggcatctcgtatgtgcaacttcgctggaaccctcctcgactgattttaccgcacagcagaaaaggagataaaacacgacaaaaattgaaggaaaacgcattcacatcttctcttcgtccgccgccgccgcctctcttcattggtagcaccttaatccgaccccagtccagcccgccgccatggaggcgctgacggccacggacaaatgcttctccccggccagggcgatgttcccgatgccgattgtgaggccacctgcatcaccagaccatgccagtcagtatctggaggacttgttgcaggagcaacagaagctcgggccattcgtgcaggtgctcccaatctgcggcaggctgttgaatcaagagataatgagaacatcaaacctgctttctaactttggagttagaggaaatgagaggttgccaccaattgcaagtccgaaccacatgcatccattgccccggggacctgatttctgtggaaacggtttcggtccatggaatgagatgcatcctgagagaagtggttttcctaggggagccatgggttggcaaggtgctgtacagaaccattcctcctacattgtcaagaagatcgtgcgattggaagttccaacagatgcttaccccaattttaacttcattggccgtttgcttggtccgaggggacactcactaaagagaatcgaagctactacaggttgccgtgttttcatcagagggaaaggctccataaaagatcctgtgaaagaggaacagctcaagggaagacctggctatgaacacttggatgatccaacacatatcttgattgaggccgaattacctgctgatgttattgatgctagactggcacaagcacaggagatactagaggagtcgctgaaaccagtggatgagtcacaagacaacatcaagagacaacaacttcgagaacttgccatgttgaactctgtatatcgagagggtagcctgcatcagaacggcagcgcctctccgttcagcaatggtgcacaaaacagtgacagggaggagattcagctctgatccttcccggaaactctcgcgttagtcctgctctcatgacagacgtagcttctctgatgctcaagctcccgtgatggtattggaattcatgccattgctaactggtgaattttgatatcccttgtgacattgacctgcggatgagaagactagcgagaaaaaactcccccatggctgtgtacttaggatatttcgtttattgcttgcgcccactattagtgcagagatgtctaagttctagtattttgagctctttgattatctatagagttatgactccgcaaaat

SEQ ID NO: 5403 - DNA, 1947 bp, Zea mays
  Clone ID: 700454468_FLI
gaggccaaggtgtccgagctgatggagatgtactctggaaaggggagagtggtcatgctaggcgtcgacgacatggacatcttcaaggggatcagcctcaagctccttgccatggaggagcttctgcggcagcaccccgagtggcgggggaagctggtgctggtgcaggtggccaacccggcgcgagggagggggaaggacgtcgccgaggtgcagaccgagacgtacgccatggtgcggcgcatcaacgaggtgtacggtgagccggggtacgagccggtggtcctgatcgatgagcctctgcagttctacgagcgcgtggcctactacgtcatagccgaggtgtgcctggtgaccgcggtcagggacggcatgaacctgattccctatgagtacatcgtctcccggcaggggaacgagaagctggacaggatgctgcggcaggggaagccagaggagaagaagagcatgctggtggtgtccgagttcatcgggtgctcgccgtctctgagcggcgccatcagggtgaacccgtggaacatcgaggccgtggctgacgccatggagaccgcccttgtgctgcctgagaacgagaagaggctgcgccacgataagcacttccgctacgtgagcacccacgacgtcgggtactgggctaacagcttcctcctggaccttgagaggacctgcaagtatcattctcagaagaggtgctggggcattggcttcggcctgcggttcagagtggtctcgctcgacctgaccttcaggaagctttccttggagaacatccttatggcataccggagagccaagacacgggcaattctgctggactacgatggcacgctgatgccacaggcgattaacaagagcccgtcaactgaatctgtgcggatcctcaacagcctgtgccgagacaaggacaatgtggtgtacctatgcagcgggtatgaccggcgcacccttcatgagtggttcccttgtgagaaccttggcatagccgcggagcatggctacttcctgaggtgtaagagggacgcggaatggaagacctgtgtcgctgccacagactgcagctggaagcagatcgcggagccggtgatgtgcctgtacagggagacgacggacggctcaaccatcgaggacagggagacggtgctcgtgtggaactacgaggacgcggaccccgacttcgggtcgtgccaggccaaggagctcgtcgaccaccttgagagcgtgctcgcgaacgagcctgtgtcggtgaagaccacgcctcactcagttgaagtgaaaccgcagggcgtgagcaagggcttggtggcccggcgcatgcttgtgtcgatgaaggagcggggccagtgcccggacttcgtcctgtgcatcggcgacgacaagtccgacgaggacatgttccagctgatcgccaccgctgcctgcggggactcgctggcgtccaaggcggaggtgttcgcgtgcaccgtcggccgcaagcccagcaaggccaagtactacctcgacgacgcggcggaggtggtgaggctgatgcaggggctctcctacgtctccgaggagctggcgctggcgaaccagcgggatgaagacgaggactcctctctggacgacgtgtgggagtaggaaggagcgttcccttcccgtgctgctcctgcggtaatgtctgtttgtgttggctcggctggagctttcgccgagtagtttaggtgtgtaaatgaggtatgctttccagcgtaatgtattgccagtggtctagtctcgagagctggcttgaatctagtaatgctctagtactttggtttgtggtgctatttacctgatccgtggaaggcagtactatgagctatacaagatgcagacctgaaatctcattcatctgaagaccatgacctttctcctaggcgtgtgtatacgtctttggattttggaact

SEQ ID NO: 5404 - DNA, 971 bp, Zea mays
  Clone ID: 700454470_FLI
acagcacgcacggacgccatcgaggaaccctaacaagagcacgtcacacggggcgacggtttggcgccgcgccaccggcgactggcggctggtgcagcagatggtaaattatttctcagactcagagtgcaagaaagttggttcgtccagggaagaggaatagaggttatggttttgtgtgagattgattagcatctgccttcaaatcattcccttggtatttattgagcactgcaagcggttgaggacttgaggtaaacatgctgaagtgcatcttgagccagtcatggaagagaggagcacatatgctacatgcaggaaattcagcaccagctgtactaacttgctggagtcaatttcacagtgggcaggtctggagttcttccaggagcttcttcggcgtggaggacttcgtggacgaggacaacagtaggccatacacgtacaagaaggagaagaggtccaagaacccccacaagcacatctcgttcaagcagcgcaccatcgcccacatggagccgttcacgctggacgtgttcatctccaagcgcttcgtctcggcgtccctcacgcaccggtcgacctgcaggcaggtcgcggtcgccgggaccaactccaaggacatcaaggcggcgctcaggtcgaggtccgacgtgccggcctgcctggccgtcgggcggttcctggccgagagggcgaaggaggccgacgtgtacacctgcacgtacacgccgagggaacgggacaagttcgaggggaagatcagggcggttgttcagtcgctgatcgataacgggatcaatgtgaaactttaccttgactgagtttggtgctgtatgagtagtagttctgttggaacttgcgcgtgggtttatctgttgccagggttgcaggttcgaattattttgtgtccttatgttgataaaaaaattaatttgctcaaatgaaggaaaacacatcattggataccc

SEQ ID NO: 5405 - DNA, 579 bp, Zea mays
  Clone ID: 700454532_FLI
aagacgacttgtttcattgattcttcaagagatcgagcttcttttgcaccacaaggtcgaggatgtcttgcagctgcggatcaagctgcggctgcggctcaagctgcaagtgcggcaagaagtaccctgacctggaggagacgagcaccgccgcgcagcccaccgtcgtcctcggggtggccccggagaagaaggccgcgcccgagttcgtcgaggccgcggcggagtccggcgaggccgcccacggctgcagctgcggtagcggctgcaagtgcgacccctgcaactgctgatcacatcgatcgacgaccatggatatgattattatctatctagcttgtggtggtggttgaacaataataagcgaggccgagctggctgccatacataggtattgtgtggtgtgtgtgtgagagagagagaaacagagttcttcagtttgctatctctctctgcatgtttggcgtcagtctttgtgctcatgtacgtgtgtctacatgcatgttggttgatccgattgcgtctgctgtaaccatatattaattggtccacgatgatatgatttgatactatatatat

SEQ ID NO: 5406 - DNA, 455 bp, Zea mays
  Clone ID: 700454550_FLI
cgaagaagtgggaggaggtgcttctgggccttggagtcgaggggagtcgagctggtatcgacgacgcagaggagatcgccccacttgccaaggaaaacgtagccactccgtgagggcttggtggtgcctcggactcggaaacacgcgttggtgataggaagcgtcttctaggatcctcctgggcggccttgtggctggtggagtgaggtgtccagtcagacacggtttcgcctctactaccacagtaccactactacttcattgtaatataatccttggcattctaaaaaatgccatgcctggtctaattcttctgttcttgcggaacatacacttctcgcttccgttcggtcgacaacggttatgtaaatatagcgaatgctagcgggcagctcgaatcatcccaagtggtagggtcacgatggaattgtttgaaatggctcgttcttgtgcat

SEQ ID NO: 5407 - DNA, 1291 bp, Zea mays
  Clone ID: 700454611_FLI
cggcaatccaagaagacggcgccgagagcaaggccgggatgactgatctgctgatgctgaccgacaagtcgcagctgcaggcgctggcgatgctgctgcggaacaacgaggagctcatgatgagccaggcgatcaagtcggagacggagcgcattgagtacctcaagacggtgagcgactgctacacgcggacgatgaagctcctcgacgattccatggcggccaggaccacgtacgagcgttcgggcggaacgaggagcctcgtcgcccgggacatggacgactacgtcgtctacggcctcaacgcgtgcttgcagaacgtccgcaactgctgcgtgcgcctggacgccatcgacaagctgcgggcgcactacgacgccctcgccgacgccgtcgccgacccggccgccaacgtcgagggcctcgccgcggaggcgtccgagtacaaggccgccatgtggcagtactgctacaaccagcggagcgcctccgcgcgggcgcactcccgcgcctactcccaggcgctcaagctggagggcatcgacttcgccgagctggtgcggaggcaccagctccggctcgggtacggcagcaagggcgaggagttcgaggacctggacgacacccagaagctggaggtgtacaacagcatcatcgtcgagtcggggcgggcggggctaccggtgcggatgttctcgtcgggccgctctgccggtggccctaagattgcagccacgacgtgggcggaggcggtgagcgtcttcatcatggcggcgggcaacctggcgtgggacgtgttcaccacggagcacgaggtggaggccatcctcaagggcagcctcaacctcctggcggggctagggggcttcgccgtggaggccgtcgtcggcgcggctgtcaccaaggcggtcgcaaacgtcggcgccggcgtctttgcttgctctctcgccggcttcgtcgtgggcgccatcgccgggctgatcttcgtcggcgtcagcggcctcctcattaacctcatcatcggctccccaaggaaggtgcctgacatgagcaagctcatgttccacaccgccgtcatgcccgatggaatggcccttgcgtatgcggtatctcattaattacttaatatcatcgcagtgactaccaatgcaactgcttcagctcctactgttgcaacgcgcgtgtggaaataagaagggaataataataattattattattgtaataaaaaataattatcatatattgataatgattatatatcaaatatcttttctcgattcgtcgtgac

SEQ ID NO: 5408 - DNA, 1193 bp, Zea mays
  Clone ID: 700454616_FLI
gtcatcgccgacatcgtcatcaaccaccgcacggcggagcaccaggacggccgcggcatctactgcatcttcgagggcggcacgccggactcccgcctcgactggggcccccacatgatctgcagcgacgacagggcgtactccgacggcacggggaaccccgacaccggcgccgacttcggcggcgcgccggacatcgaccacctgaacccgcgcgtccagcaggagctcaccggctggctcaactggctcaagacggacgtcggcttcgacgcgtggcgcctcgacttcgccaagggctactccgccgacgtcgccaaggtctacatcgacggcacccagccctgcttcgccgtcgccgagatatggacctcgctggcctacggcggcgacggcaagcccttctacgaccagaacgcgcaccggcaggagctggtgagctggctggaccgcgtcggcggcaaggccagcccggccaccacgttcgacttcaccaccaagggcatcctcaacgtggccgtcgacggcgagctgtggcggctgcgcggcgctgacggcaaggcgcccggcttgatcgggtggtggccggccaaggccgtcaccttcgtcgacaaccacgacactggctccacgcagcacatgtggccgttccccgccgacaaggtcatgcagggctacgcctacatcctcacgcaccccgggaacccatccatcttctacgatcacttcttcgactggggcctcaagaacgagatcgcgcaccttgtgtccatcagggaccgccacgggatccaggcggacagtgagctgcgcatcatcgaggccgacgccgacctctacctcgctgagatcgacggcaaggtcatcgtgaagattggatcaagatacgactgcgggcacctcatcccagaaggcttccaggtcgtggcgcacggagatggctatgccgtctgggagaaaaactgagccaaatctgtgcctgatccgtccgtccggtccggcacgacgagttttagcggatttgacctgcattttccttagcttattattactccaaatacgggatatatatagcgacaacctgtattcgagattcatccgtaaacaggtgaggtgaggatgaggggtatagtatcaagtatacaactatctgtttttcaggaataataagaatcactggatatggtgggtgt

SEQ ID NO: 5409 - DNA, 1350 bp, Zea mays
  Clone ID: 700454623_FLI
ctcgtttccgctcttctgctcctcgcgccgccgcagcgacccgacgacaggtaatggcttccgccgcggtgctccggaacgccggatctcgccgcctcttctcctaccccaccctccgtgctgctgcaatctcgggacccgccgtgctaccagatgcgcccgtggcggtgtcggtggcggcccagccgcccccgctggcctggacactctgggcgatgtccatggccaccttcacacgcacgaagccccatgtgaacgtcggcacccttgggcacgtcgatcacggcaaaaccagtctcactgccgctattaccaagggaatatcaactacaaggaatttgcttgcagatgatgctatggtgcctatctcctctcctttgactcctccactaggtgacagtgaagaaactgacaaaaagggggctgtggtaaaacgcctaaaggtccaagccataaaaaaagatatcaaacagagtcccaagaaggtgaatctagtagcaaagctggttcgaggtatgcgtgtagaagatgccctactgcagctgcaagtgactgttaaaagggctgccaaaaccgtttaccaggtgatccattctgctcgggccaatgcatctcacaaccatggattggatcctgataagctcattgttgaggaggcctttgtgggaaagggacttttcctgaagagagtgtcttaccatgccagagggaggtccggcattatggtgcgaccaaggtgcagactgacagtggtggttagagaagctacagctgaggaggaggcaaagatcgccaaactcagggtgagcaactacaagaagctgaccaggaaggagcagcagcttatgcctcacaggctcatcgaggttagcccgaggtggattcgcaagaggaaagcggaggctggtgctacggcgtagtactttatgtatgcagaacctgcattcactgctttgcacatccgaggagcgaacatgccttccctggcacaaatacttgatcctctctcggtgtcgattcacgcaaacgggttacaaagctaggcttggtttgttttgctctaaatccatgtggattggatgtgtttaaatcgcaaacaagtcaaaatcctttataagtttttctaatctcatcaaatccacatgggatagagaataatcgaacaagaccgtaggtggattcgactatttggtaatcttggtcgtttggagtctaggaagagaggaaaatgctatgtattttagcgatgtgcattgtagccaactaaaacctcgccaaagcattggatgtgcatgagacacgtaccattgcttctacaatttcatgcaactattggtttcagctggtttc

SEQ ID NO: 5410 - DNA, 1522 bp, Zea mays
  Clone ID: 700454665_FLI
catattgtagggggcatcatggcttgtgatgagaccaggtttgatgcaattatagagaataagatccctcttgttcttagtgttggagccttggatatggtaaactttggagctcgagatacaattcctcttgctttcgcagaccgaaatattcatgttcataatgagcaggtttcattgatgcgtacgactgtggaagagaacaagaaatttgctaggttcattgctgataaaataaacaaatcttcatccaaagttactgtttgccttccccagaagggcatatctgcaatagatgctccaggaatgccattctatgatccagaagctacatctacactgttgggtgaattaaacacccttatacagagaaccgatattcgagaggtgaagctgtttccttaccacatcaatgaccctgaattcgcaaatgcattggtagatgcattcttgagtatggatgtacaggcctctagttcagcccaacctaagcaagatcttaatattggaaaatcctgttcaggacagaaaatttcagatagttctattatatggagaactcctgtggattttccagatgcaaaaccagaaatattgcggaggacgcggtcaatattacataaactgaaggaacagatcagtgacggtactccagttattggagctggtgctggcacaggcatatctgcaaagttcgaagaagctggtggggttgatcttatagtgctgtacaactctggacggtttcgaatggctggaaggggctcactagctgggctcttgccctttggtgatgcaaatgacattgtacttcagatggccaacgaagtgttgcctgtggttaaaggagttcctgttcttgctggggtatgtgctacagatccatttcgtcgaatggaatactttctcagacaactagaaaccattggattttgcggtgtgcaaaacttcccaaccgtaggtctgtttgatgggaattttagacagaatttggaggaaactggaatggggtacagcatggaagtggagatgatttcaatggctcatcgcatgggtttccttactactccatatgctttcaatccggatgaagctgctgccatggccaaggcaggagctcatatcgtagttgcacatatgggtctgacaactgcagggtctatcggggcaatgacagctgccactttagatgatagtgttttacgtgttcaggccattgcggatgcggcatttggggttaatcctgatatcattgttctctgtcacggaggccccatatctggacccctagaagccgagttcgtattgaagaatactaaaagggttcatggattttacggtgcatcaagcatggaaagattaccagtagagcaagctatcacgaacaccatgagagagtacaaaagaatttccttaaaatgagaaccatcgtttacatgcgtgatttaagcctgctgttctttcgttacacttcgcagattctgtcatctctgcctctttatttgtcatatacattttctta

SEQ ID NO: 5411 - DNA, 531 bp, Zea mays
  Clone ID: 700454682_FLI
ggcaccacacctcttcctcctcttcctcctcctagcacagctagcgcctgctccccttcgtctgtgatcatgtcttgcagcagcggcaagtgcaactgcggctccagctgctcctgcggcagctcatgcaactgcatgtcccctgacgtggagaccgccgccgccagcagcatcaagaccatggtcctcgctgcgccgaccaccaaggccagcgccggcggcttcgaggcggccaccgagggcggcggctgcgactgcaacacctgcaactgcggcaccagctgcggctgctcctgctgcagctgcaactgagccggcccgcccggcccggcgatggcgcacgagagtcgagaggacgacgacgacgaggcgtataaatataatagcagcgtctaaataagatcctgtcaactgcacccgccattatcgatccatggtcgctcctggggttcatgttcatctgtgtaacgtgctcgcggtcatgtccgtctcgtgccggaattaatatttatatgcatgtatttgtgtttt

SEQ ID NO: 5412 - DNA, 1705 bp, Zea mays
  Clone ID: 700454781_FLI
cggcaatagcgccacactggacgctttcctggtgcagcacgacatggagaacatctacatgtgggtgtttaaggagcgtccggagaatgccctggggaagatgcagctgaggagcttcatgaatgggcactcacgccttggggagccacagttccctttcagcgcagacaaagggtttgtgcgctcacaccggatgcagcgcaagcactaccgtggcctctctaacccgcagtgtcttcatgggatcgaaatcgtgagggcgccaaatttggcgggtgtacctgaggctgatttaaagaggtggatggagctcactgggagggacgccaatttctcggtcccaactgaggcaagtgattttgagtcctggaggaatctgccgagcacagactttgagctcgagaggccagcaaccgcggctcctgcaaagagcagttcacatggacaccacaagaagttgctgaacggttctggccttaacctctcgacacaaccatccaatcacagttctggggatggcatggagatcacagccacctgtaacaagcgcaggaaggattcctcaccgaccgcaatggaagaggactgcagcaattcgaattcggacaaggcccaagacatggatgtgagccacaccttcgagccatcatggatgaatgacttctcaggtgtgatgcgccatgcttctggaccagtaaccgctgcaaaaacgatatacgaggacagcaagggctacttgatcatcgttagcctgcctttcgctgattttcagaaggtgaaggtttcatggaagaacactctcacaaatgggattgttaaggtatcatgcactagcgttggtcggatgccactcctgaaaaggcatgatcggactttcaggttggtggatcctgctcctgagcattgcccgccgggagagtttgtccgggagatcccactccctacccgaatccctgaagacgccactctggaagcatactgcgatgaaacagggacagggctggagatcattgtcccgaagttccgcgttggccctgaagaacacgaagtgcatgtgtccatgaggccaccctcgtcgtggtgccaatgaaacctgtttccaagtttgcgggggggggagacacacatacggtgtggaggtttgccgtaaggctaaggctactgcacaacaaatgcagctcagttttgctaattttgatgggaaaccagtccttgattgattgaagcattctggtagttggccgccgcagcgtttggaacactttaggaatatgctacgggtcgcaaggaacatgcttgcttgcattacttagttcttgtatggggatacacctagcgtgttacatttcgtttccattgtgtcgaaagactggttgtctgctcgatgtgctgcaatccgtgcatcgcaccgacacgagcaacaatctgtttgtgttgtacacagaatggcaactggatgtataggggcatttatagtcattttccatagattgaggtttgctttgtgggcatcgtgtaaaattcgtctcagattgatggaaactaggaagaaaaagaagatggcagtgtctttaggatttggcaaagctgtaatggggattagtcggtgctgtagcattctgtctagtttccaggaatttgtagaagacaaaatgtaaatctgttgttccgtcatcaatatagaaagtggtctgtgtctaccagc

SEQ ID NO: 5413 - DNA, 566 bp, Zea mays
  Clone ID: 700454793_FLI
cctctctcccaccccgcagccgccctagcacccgcgacgagcaggatctgcccagttgctcttgcggtagttcccccaactgtcaccatgcagaacgaggagggtaagactgtggacctctatgtccccaggaagtgctcggccacaaacaggatcatcactgccaaggaccatgcctctgtccagatcaacattggccacttggatgcgaatggcctgtatgatggtcacttcacaacgtttgctctctctgggtttgtccgtgctcagggtgacgcagacagctccttggacaggctgtggcaaaagaagaaggctgatatcaagcagtagattttacatctagtttaccaagaattggacaccgccttagctatgttttgaattcatgtcactatatgcaatgttgtgatttcagctggtaccttaaatctgaagatttagtatctttgttgggttccttctgagtttgatgtgtggtgttcgtttaattcccttgtacaaccccatttagtatcattgtgatgattttggattcaattttgctcgagtcagggtacgattcc

SEQ ID NO: 5414 - DNA, 639 bp, Zea mays
  Clone ID: 700454848_FLI
gctaaacaagaagcagctgccagaagggtccatccaacactgcatctgcctacccccgcgcagcccacggcacagatcgctgcaccagctacaagccaaccgcagcaaccttcctttccgtccgctgcgacttcctcaagcgccttctcaacctttagcactccggcttccgctccatcctcgtctagtctgtttgcaactccaacaactccagctccatcgggcaacctttttggtgcgccaggatcggctcagttgaccacaccatttgggacaccttccactcctacgttagcatcgacaccagctcctggatttgggactagcgctacatctttgggtgggacgtctctattttctacaccgtttggaggtggagctacagcttcaggttctagctttggtggtgcatcgaaaggaaggtcgaagccccggggacgacgctagatgtaaatggaccaacgtgaaacgaggatgctcctggttcacttgactgctcccctttccctctatcctatgcaaaatttgtgactacttgtcgccagcaattctagtggagttttaagtgacctattgcatgactactacctttaagcctttgtatcagatataccatcgcattagttgtcataaactttt

SEQ ID NO: 5415 - DNA, 1300 bp, Zea mays
  Clone ID: 700454849_FLI
ctatgctgctccagaggtaatatctggtaaactatatgctggacctgaggtcgatgtatggagttgtggggtgattctttatgctcttctttgtggaactcttccatttgatgatgagaatattcccaatctgttcaaaaaaattaagggaggtatctacacacttccaagtcatttgtctgctttggccagggatttgatcccacgaatgcttgttgttgagcctatgaagagaatcacaattagggaaattcgggagcatcaatggttccagattcgccttccacgttacttggcagtgcctccaccagatacgacacaacaagccaaaatgattgatgaagatacacttcgagatgttgttaatatgggatttaacaagaaccatgtgtgtgaatcactgtgcagcagacttcaaaatgaggcaactgttgcatattatttactattggacaatcggtttagagcaactagtggctatcttggggcagattatcaagaatcaatggacaggaatttaaatcagctggcgtcatctgaatcatctagttctggtacgaggaattatgttccaggaagcagtgatcctcatagcagtggtttgcggccatattatcctgttgaaagaaaatgggcgcttggacttcagtctcgggcccaccctcgtgaaataatggttgaggtcttaaaagcacttcaagaattaaacgtcagatggaagaagaatgggcactacaacgtgaaatgcagatggtgcccagggtttcctgaagttaatgacacgttagatgccagcaacagctttcttggtgactctaccatcatggataatgatgatgctaatgggaggctacctactgtgatcaagtttgaattccagctttacaagacgaaggacgacaagtacctcttagatatgcagagagttactggacctcagctgctcttccttgacttctgtgcggccttccttaccaagcttagggttctatagtggtctaccatgtgcaaattttcactgtggtgatgaataaccgaaagcatgtaaataggaaccttgttctcgtcttttggacaacgaacatgtttgagtgactggtcttgtgttgagcgcgtaaaggtcatgtatacttaggttagtactattttcgttcttaaatatttgtcgtctgctagtgatagttcatttttgaactaaaacgttacgaataaaaaaagagtatattactgtctgcatggacatggctgtttcagtaggccgtggcaccgcagatggcgatgctcactgcaacctattatg

SEQ ID NO: 5416 - DNA, 634 bp, Zea mays
  Clone ID: 700454936_FLI
cagcagcccggagaacgccctggtccaacaagatgcagatcttcgtgaagacgctgacagggaagaccatcaccctcgaggtcgagagcagcgacaccatcgacaatgtcaaggccaagatccaggacaaggaagggatcccgccggaccagcagcggctgatctttgccgggaagcagctggaggatggccgcacccttgcggactataacatccaaaaggagtctacgctccacctcgtgcttaggctccgcggtggaatcattgagccctctctgcaggcgctcgctcgcaagtacaaccaggacaagatgatctgccgcaaatgctatgcacgactgcaccctagggctgtcaactgccgcaagaagaagtgtggtcacagcaaccagctgagggccaagaagaagatcaagaactgaggtgctgctcctagtcagtttcatggacaatgttgggctgtattgctgtgtggttgttgaacggtgtttgtttacccaacatttgggccttctgttatgttttaccttgttgtcgatgacactactatatgacaatagcaactctgttattgtagttttggtcactgttcacctgatatgtgccatatttcggtaaagtatcgttagtgggc

SEQ ID NO: 5417 - DNA, 2034 bp, Zea mays
  Clone ID: 700454944_FLI
gggagatcgaggtcacgtgcgccgccgcgatgatcctcgtggcgctttacgttgcctacgagctcctcaacccgcgctcctcgcaggcggcagcggcgggcgacgccgacgagctcctcgtgcgggggctggacggcgccgacaagttcaaggggggtgtgagcggcccctctgcctatgtagtgaagctcgaattgttggctgcaaaaaatttgatggcggcgaacttaaatgggacatctgacccatatgcattgatcacttgtggtgcagagaagcgtttcagctccatggtccctggctcaagaaacccaatgtggggagaggaattcaatttttttgttgatagtcttcctgtaaagataaatgtcacgatatatgactgggacattgtatggaaaagcacaatccttggctcttttactgttactgttgaatctgaggtaccgagtggaccaatttggcatacacttgacagcacatcaggccaggtgtgtcttcatattaaagtaatcaaggttcatgaaagttcctccagggcaataaatagctcagctgaggctggtgctcgtagaaggatttccttggataagcaaggtcctactgtagttcatcaaaagccaggtcctttgcagacaatttttgaactgcctccagatgaggttgttgaccacagttattcatgtgcacttgaaaggtcatttctgtaccatggacgcatgtatgtctcttcatggcatatttgctttcattcaaatgtcttttcaaagcaaatcaaggttgtgattcctttgagagatattgatgagataaggagaagtcagcatgcagttattaatccagctattacaatttttcttcgaatgggagctggaggatttggtgttcctccgttaggatgtccagatggaagagtcaggtacaaatttgcatcgttttggaacagaaaccatacatttagagcattgcatcgagctatgaagaacttcgtaatgatgatagacgctgagaaacaggaacgtgctcagtctgcattacgtgcacacagtagttcaagaaaaaatagcaagaaggagataaatgtaccagaagattgtgctgcattaacagggaagttacaaccttttgtcaaagaagaagttttggtccctgtattcaatggaacttttccctgtactgcagaacagttcttcagtattcttttaagtgatgattcaaattacataacagagtatcgaacggatcggaaggataaagatataaatctgggccaatggcacgttgcagatgagtatgatggccaggtgagggaacttaattgtaaatcaatatgccatagtccaatgtgtcctccttattcagcaatgacagagtggcagcatatagttctttcagctgacaaaatggatctggtatttgagacagtacagcaagtacatgatgttccatttggttccttctttgaggtgcactgtaggtggtgtgtgaaaactatcagttctaactcgtgcagtctcaacataagtgctggtgcgcatttcaagaaatggtgcatcatgcaatctaagataaagagtggtgctgtggatgagctgaagaaagaagtgaaggtgatgttagactttgcgcaggggtatatgctcaaagttagctctcctgaccaagagaacagtaatctcgcgcagcaagacaacacggcgccggatgcgccttctgatacagggtgacagccgccatcacatgacaacgaatcatgccattacgatgttatacacagaagggcaggtggaccagtaactagtagtccacatgaaccacatctaacatgttaagctgacttccaaaagaatgggtggaccgtgtgtagcgtgttaagttcgtttcctgccattgctctatccgtttttggcagtttggctgatgtatatatatagctgtaaacacacgcaaatataaagtggtggctgtggcaggccagtgtgttgtttgagtataaaaacaaagaaagaaacggaagagagaaatatttgccac

SEQ ID NO: 5418 - DNA, 1109 bp, Zea mays
  Clone ID: 700454956_FLI
gtgggtgggagactgggaaagacgagacagcgagacaccactgagacgagagtcagccggcaggtgagacatcgcaggggaaccagctctcaagacggccgacggccggcttgcctacctgctcccatccttcccgagggaccgagaaagataagaaaggcggtggtcaacttgtgtcctgaggtgcccgtagaagcccaaggacaagaaacaaggagaagagtagatctacatctactccaccgatgagcgcgtctcggttcatcaagtgcgtcaccgtgggggacggtgccgtcggaaagacctgcatgctcatctcctacacatccaacactttccccactgactatgttccaactgtgttcgacaacttcagtgccaatgttgtggttgacgggagcactgtcaacttgggtctgtgggatacagcaggacaagaagattacaatagactgcgtccgttgagctatcgtggtgctgatgtttttctgctcgccttttctcttatcagcaaagcaagctatgagaatgtctctaagaagtgggttcctgaattaaggcactatgctcctggcgtgcccataatccttgttgggacaaaacttgatctgcgtgatgataagcagttttttgttgatcaccctggtgctgttccaatttccactgcccagggcgaagagctgaggaagctaattggtgctgccgcctacatcgaatgcagttcaaaaatccagcagaacataaaagcagtgtttgacgcagcaattaaggtggttctccagccaccaaagcaaaagaagaggaagaagaaggtgcagaagggatgcaccattttgtaactacaaacggtagagggcaacagtctggctgcggcgctgctgccaatgataaccatcgcctccttgctgtataatatatcgcctgatcatgccaccagcatgcacaagggagatggtggttttaggatccttgtcctactgtgttgtgtagaccaccgggtgtagttgactgtatctggttgtttgtatgtatggacaagacaaaactagcactgcagatggtatggtaaggcgtaagcaaatacaatatgacattggtccagttccagg

SEQ ID NO: 5419 - DNA, 1488 bp, Zea mays
  Clone ID: 700454968_FLI
cggcagagaccaaagtgcccatcgcaccatgtcggccgccgaaaccgctgtttctccgacgacgacgccgcagccgcagctgcaatcggatccgaacgccgccgccgacgcggccagttccaattctctctgggtggccgacgagacgcaaaccctaaccgaggtcctgctccaaccccaaccaaaccacctgtcgcctcctccttctggtgaaggggacgacgggatcactgcctccggtgctcctgttggtggggacgccgcggcatctgcttctgctgcggcggcggctaacgcgacgatagaagagcgggtgagggggccgtggtccccagaggaggacgcggtgctgagcaacctcgtggagaagttcggggcgcggaactggacgctgatcgcgcgtggcatcccgggccgctccggcaagtcctgccgcctgcgctggtgcaatcagctcgacccccaagtcaagcgcaagcctttcactgaagaggaggaccgcattataatggcagctcatgctgtccatgggaacaagtgggcatctatcgcaaagcttttggatgggagaacagacaatgccatcaagaatcactggaattccaccctgaggcgtcgctactgcaatgatggccaatgcaagcatggtggttctgtggagcgaagtatcccaaaggtgtccagggaagtttcagaagaaccttggcctttaaacgatcttaattccttcaccgctatggatgtaaaggatgatcctgtgcaaacagctccagatacttctcctcgggcaaggcacatcacagatcattgttctattactcaagtcgttgatccaccatacctgtcccgaccagcggcaaagattggtgctttcagaccatattatctaggacacacggaacctacccaacaagaaatgccaggtgctgtcgtcatgtttgactcaactcataaagtctcgactcctgaaagcgaggtattcaagtttgttgatcctatatgctttgctgctgaggtgccagacaaatgtgggtatggttgctacggcgctcatgagcagcatcgtaagaactcattgctgggtcctgagttcagtgagtttgaaggtcatccacctgttttaaatattagctttgcttcattggtatcagaaattagcagcattgcctggatgagaagtggtatgcaaagcagtgattccagcaacttgatgcaatcaattccaccaacctaacaaagtaggaatcttatgtcagtggcggatccagaaacagatcaaatgaggggctaaattatggattggggaggctggagatggctgcaatgcgaacgaatggaaccaccatgtaaataatgtgcgaattacaaacgcgtgtgggttgctgtgtgccgtgcacatgggtgatgaactgatggacctgcattgtgctgttatgcgcctgcatcttgtaatcgtgggccttcttcgtattactatgctgaaatcac

SEQ ID NO: 5420 - DNA, 333 bp, Zea mays
  Clone ID: 700454975_FLI
gccgccgcggcccgcgctcccgcagctcgcagtaccgcggcgtcaccttctaccgccgcaccggccgctgggagtcccacatctgggattgcgggaagcaggtgtacttaggtggattcgacactgctcatgccgctgcaagggcgtacgaccgagcggcgatcaagttccgcggcgtcgacgccgacataaacttcaacctcagcgactacgacgacgatatgaagcagatgaagagcctgtccaaggaggagttcgttcacgccctgcggcggcagagcaccggcttctcccgcggcagctccaagtacaggggcgtcaccctgcacaagt

SEQ ID NO: 5421 - DNA, 328 bp, Zea mays
  Clone ID: 700455013_FLI
cggaaaggtattaaattaaatggggtttgcccgcaccgtataagggcatgttcggttcccgctcaattcatatggattggaggggtttgagtgggattaattccatatcaagtcaaaatccttcataatttttttcaatgctttccaatcccatgaggtataggaataactgaacaaggcctaattgttgcagttttggtcacattcacacagtgtgttatagtagcagtttgtgtgctcgggacactggggaagtttaatgtatccttaccttatgaatagcggactatgatgaagggagatttaaattgatatgtattctgtgttt

SEQ ID NO: 5422 - DNA, 1133 bp, Zea mays
  Clone ID: 700455027_FLI
ggaaaagctgtatcaaaattttgtgcgaggcatttgcataaacaagtgcttataaatgatgcaaattcatctggtgatttgccaacctctctccataaagctttcttaagaatggatgagatgatgaaagggcagaggggttggagagaactaactgagctgggagataagggaaacaaaatctcaggtatgatagacgacataatatggcctcccaagggtggtgattcagataagataagggaagattgggataccgaggagggtccaaattcgaactttcctggaccaacatctggaagcacagcttgtgtggctgtcataagaaatgacaaattaattgttgcaaatgctggggattctcggtgtgttatctcacggaagggtcaggcttacaatttgtcaacagatcacaaaccagatcttgaggaagagagggagaggattttgggtgctggtggatttgttgttgccggacgggtcaatgcaagtctgaacttatctagggcaataggtgacatggaactgaagcaaaatgacctcctgccagtggagaggcagatcgtgacagctgaacctgaattgaaaacagtccagctctcggaggatgatgaattcattgttttagcttgtgatggaatttgggattgcatgtcaagtcaagaagtagttgattttgtacataaacagctaaagaccgaggataagatatctagtgtgtgtgagaagttgctcaaccgctgtgtggcacctacatctggtggcgaaggatgtgataacatgacggttattgtggttcaattcaagaaaccagctttagctgttgctacttctagcgctgagcagtctgctaccactgcagaagggatgcggcccaaaatttgagttgcctttgtgaacagcgaggtcgatggcccagattaccccccgaagtaggcgttgagtggcacaccgtgctgtggagctctaaccggtggataatagacaaaaaaggatagtgaggtggtgtatataagaaaagggattctattcgacaatctcttatagggtttgttgcttccttctttctagtgttcagagtcgtcgcaacctgtaatacatggcatgttggtgcttaaattggtttttttgtg

SEQ ID NO: 5423 - DNA, 966 bp, Zea mays
  Clone ID: 700455051_FLI
ctcccccaccaggatcttcctcgaggagacgtccctggtcgcgcgcccggggctcgccatggacgacatccaggagcgcatggccgcgcgcctcaggcacctgggtatacgcgtccgaagcgtcgaggaggacgagcgctgcgtcatccccatgggagggccgctgcccgtcctgccgcagagggttgtcggcatcggcggcacggcagggatggtgcacccgtccacgggctacatggtggcgcgcacgcttgccaccgcgcctatcgtggcggacgccatcgtaaggttcctcgacaccggcaccggcaacggcatgggtggcctggcaggggacgcgctctccgccgaggtgtggaagcagctgtggccagccaacaggcggcggcagagggagttcttctgcttcggcatggacgtcctgctcaagctggacctcgagggaacgcggcggttcttcgacgccttcttcgacctggagccacactactggcacggtttcctgtcatccagactgttcctgccggagctcttgatgttcggcctcgcactgttcgggaacgcctccaactcgtcgaggctggagatcatggccaagggcaccgtgcctcttggcaagatgattggcaacttgatacaggacagagatgggtgaggagggtatgtatacctacatttttcacgtgaagatctgatctccattggatctctgattttggtatcgatgattttcactgtatttacgatttgcaaagatggattcacaaaacacagttagcaacagcagttcaggacctcctgtcagatataggaattgctgctgcaacgctacttcagtatggtgattacagaggtgtatagttgcacttgcacactgagggatgtcgtgagaatctacgtatcagatatcatggtcttcatataaaagatcaaatttccaacaaaatatgaaattgacagttgtgt

SEQ ID NO: 5424 - DNA, 1146 bp, Zea mays
  Clone ID: 700455129_FLI
gcggcacgcccgacagccgcctcgactggggccccgacatgatctgcagcgacgacacgcagtactccaacgggcgcgggcaccgcgacacgggggccgacttcgccgccgcgcccgacatcgaccacctcaacccgcgcgtgcagcaggagctctcggactggctcaactggctcaagtccgacctcggcttcgacggctggcgcctcgacttcgccaagggctactccgccgccgtcgccaaggtgtacgtcgacagcaccgcccccaccttcgtcgtcgccgagatatggagctccctccactacgacggcaacggcgagccgtccagcaaccaggacgccgacaggcaggagctggtcaactgggcgcaggcggtgggcggccccgccgcggcgttcgacttcaccaccaagggcgtgctgcaggcggccgtccagggcgagctgtggcgcatgaaggacggcaacggcaaggcgcccgggatgatcggctggctgccggagaaggccgtcacgttcgtcgacaaccacgacaccggctccacgcagaactcgtggccattcccctccgacaaggtcatgcagggctacgcctatatcctcacgcacccaggaactccatgcatcttctacgaccacgttttcgactggaacctgaagcaggagatcagcgcgctgtctgcggtgaggtcaagaaacgggatccacccggggagcgagctgaacatcctcgccgccgacggggatctctacgtcgccaagattgacgacaaggtcatcgtgaagatcgggtcacggtacgacgtcgggaacctgatcccctcagacttccacgccgttgcccatggcaacaactactgcgtttgggagaagcacggtctgagagttccagcggggcggcaccactagactagacccattccgcccagcaacccctacagataattctcttttcaggtccattttgaacctggaaaagaaatttaagagaggctaaataaccggaatacgattgtgtactgagcttctttcagctaattattgaaagaagattataatgtttggatgcactattaattatgttggcatggggatttttgtaacctcttaaaacgaggaaataaagactgttcttattaagctg

SEQ ID NO: 5425 - DNA, 868 bp, Zea mays
  Clone ID: 700455147_FLI
cttcccggtctcctccgcccgttgccttcgtcccctccatctccggctgcgtcgccggcgagcccgacaccgcgaatcggatccgccgacaaggcgagagggaaaagatggggcttacgttcaccaagctgttcagccggctgttcgccaagaaggagatgcggatcctgatggtgggactcgacgccgccggaaagaccaccatcctctacaagctgaagctaggcgagatcgtcaccaccatccccaccatcggattcaatgttgaaactgtggagtacaagaacatcagcttcactgtctgggatgtcgggggccaggacaagatcaggccactgtggaggcattacttccagaacacccagggtctcatctttgttgtggacagcaatgatagggaccgtgttgttgaagcaagggatgagcttcaccgaatgctgaatgaggatgagttacgtgatgctgtgttgcttgtgtttgctaacaagcaagatcttccaaatgctatgaatgccgctgagatcactgataagcttggactgcattcacttcgccagcgtcattggtacattcaaagcacttgtgctacaacgggtgagggattgtatgaaggcctggactggctgtccagcaacattgcaaccaagtcctaaattgtcaagcgaggtttggatcatctaggagcttttggatgatgatgatggtgctggatatttagggttgggttggtatttccgtatgtaagatgtatgcccctgagctcggcagtttttgagctctgcttaagattctcacagttaaattgttttatgtaatttgggccttgagatgtttctgaaccaaacagctaaaagagttcagttgagtt

SEQ ID NO: 5426 - DNA, 855 bp, Zea mays
  Clone ID: 700455156_FLI
ttcctgacccagatggcggcggcaccctgctctaccccttctccggcgacgtgtgggcggagctgcgcctggcctccgccagcgatgtgccgcacatccaccgcctgatacaccagatggccgagttcgagctcctcaccgacctcttcgccgccaccgaagagctgctcacctccacgctcttcccctcgccgacgccgcctcccttcacctccttcacagccctcatcctcgacctatccccctcccccgtcgcccccgacccctcgtccaccatcgcctcccgccgcctcgacctctccgcgtccccgctcgcggaccccgaggccgccgccttcgcctccccgcgcggaggcgggcgcgtcacggccgggttcgtgatctgcttccccaactactccaccttcctctccaagcccgggctgtacgtggaggacatcttcgtgcgcgcgccctggcgccgccgcgggctcggccggatgatgctgtccgccgtcgccggcagggcggccgagctcgggatgggccgggtggagtggtgcgtgctcgactggaacaagaacgccatcgacttctacgagggcatgggcgctgacgtgctcccgcagtggcgcatctgccggctcgccggcaaagcgctggacaagtacaaggggtccgccggcgggaaggctgcggctgcggaataggagggcctggaaaattgcttcctgagttgagtatctgccaataataataatgtggcgtagatttgctcccgtctggcatggtttagatacgatcggtgatttagcgcatttgatcagctcgttgtggcaactgttggcgcattatgctcaattatcttctgattag

SEQ ID NO: 5427 - DNA, 1757 bp, Zea mays
  Clone ID: 700455187_FLI
accgggcagcggcaatggagggacagccgctccatctcctcatcgcccagttccaccacccttgcctacgcggtctcatccccaactaccctacccactacctgcccacctcccgcctccgactccgcgtacagcgtcgcaagccgaagcagctcgccgcagtgccttcgaggcgtccatcgggcagccaagccgacgcgcctggcctggtgccggtgcctaacacggtggcggcgctggtgctccagctgaccgtgtgctcgctcctttttctcttccccaaccgtgcccgagccctcgcgctcccgccccctccgggggccgctgcggtggttgaggcgacgcaggaggaggaggaggaggaccaggagtgggaggctgcgctgcagaagtggaagaccaagacctacgcgctctcggtgcccctccgagtcgtggcgctccgcggctccttccctccatcttggattaaggatttcgtcgaagctcaggggaagagactcaaattcagtcctgagctccgtgctaatcttgatgggatcttctctgagatgtcacaatgtatggacaagggtcaagttcagccgaagtctgcaatggcagctgatgttgtttcccttggggactcttggctcggctatgccatccgcaagggattgctagagcctatcaagaacgctgaagaacaggattggtttcatagcctgagtgacagatggaaggtccatttgtgcaggaaccagaacggagaagcagatcctaatggtacaatatggggagttccatacagatggggcaccatggtcattgcttacaagaaagacaagttcaaaagacataatttgaagccaatacaggattgggaggatttgtggaggcccgagcttgccgggaggatttcaatggtcgattctcctagagaggtgattggtgctgttctgaagcatctggggtcatcatataacacagttgatatggaaatggacgtcaatggtggtagagcagcagtcctaaacagctttacgcaactacagaagcaggtccaactattcgacagcatgaactatctgaagtcgtttagtgttggagatgtatgggtcgcagtgggttggagcagcgacgttatccctgctgcaaagcggatgtctaatgtcgcggtggttgttcccaagtcaggcagcagcctatgggctgatctatgggcaataccatgcgcgacgagatttcagactgaccaaatcgggagccgagccagaggcccgtctccactggttcaccagtggttcgacttctgcctgcagagcgcaaggagcctacccttccgccaagacgtcatccccggagcatctccgctccacctcgagagccctgtgccagaggtccctcaagacgagaacaagaggaagccgaagctggacacgaaccttgtcaggggagtgcctccgcccgagatcctggagaggtgcgagtttctggaacccctgtcagataaggcgctggaggactaccagtggctgatgtctcgggtgcagagacctcgtcttggtttgtttgggaacatgttgcagaagatgtcagctgtacttgacttcaaaagaagatcttagagccactgtactgtgattgaccaagtttttttttctttttacttcgtggtgcaactcttcgttccgtatgtttcattgtagcaatacactcagaggatgggcagatctagaccgcccaggaaggaaaggcagcagccttctttaattttt

SEQ ID NO: 5428 - DNA, 473 bp, Zea mays
  Clone ID: 700455261_FLI
gaaccttggcgagatgatgacgctcggtagaaatgatgccgcggtaacagcaagtttcattgaagggctgaccttggaaggacctctcggacatgctgctcggaagctcgtgtactgcctcagaatgcccacggatgagcaccgggtgaaggttgggatcagctggttcacaaaggctgcgatcgattcgcttgcctccgtgcaaaacgcggtaagtaacacgctcacaggctcatcatgactgtacgggttcttaggtgtatattgcctgcctgaacggaatgaaatggaggacaaatcgatgtccatcttatgtacgtaatcgaggttcttctcgactagtgtgtaccatactttttaatcatgctgctatgttcctacggtacaagagcagtgatgatttatgtaaaaacacgtgtggctatgctgatgactggcgtgaagggcttctagttgggttggttacgtgtttt

SEQ ID NO: 5429 - DNA, 1420 bp, Zea mays
  Clone ID: 700455269_FLI
cggctgagcgctcccccggttccccttctctgctcgccatcttttgctctccgcttggctcgtcaatcacctcctacgctccacacgccgccggcgactacaactgcttctgccgtggttacagagaagaagggtttggggagaagacaacctaaatcaattggatctgggagtatcagatctaaaaagtcaggttttcatcaaggtagaaaaagaaacttttctgtacggtatggctttcccaactgcagcagctgttttgcttaatgagaacatgcagattcataaaggaaacagggttgatgcaccaagtgccaaaccactgaaatcatcagccaaacctgagagaaaggctcttcaggatgtgtctaacattcctaaaggcactgctttaaagaacagatccacagtcaaagaggggtccgccttgaaagaaaggcctgcactccacaatgtgtctaacacccgcaatgagaggtccatcctgaaagagaaatctgccctgtgtagccatgaagctattaagaacccagtgaatatttttgctgatgacgaagagaccaaagggtgccatgaatgggctaaggatgggatggagggcactcacttcactggaaatgattctcagaagttggataaagatgtgcaacacaaacgtatcaagaagaaagtggcgaaagttacgtcagcattgtatggctggtcacatgaggtatatggtcatgtgatgtttatggctatggttcccaagttttctgaagaatcgaaagagctggagctggaaccagagattcttccagacatcactaggtgtatgtctacctcaggcaagagggatgatgcaccaagcgccaaacggctgaagcctaagcttcaagaaccgaaggctcttcaggttcaggatttgtctaacactgtcaaagggagcccttctctgtgcagccatgaagctgtgaagaacccagtgaaaatattcactgttgaagagaccaaaaagtgtcatgaatcggctaatgatgtgtcggagggcactcacttcacaggaaatgatcgtcagaagctggataaggatgtgcaaggtgacaaaacacagctggttgaagattctcctactgatgatgagcttgacgactacccatttttggacaacagtcctgttaagtttgagctgaaagatgagtcagtgattccagatattggagcaatctgaagtgatagtgtttgtgcgattgttctgtagcaatctatgtagtacgatgtttagtacatgttgtttgttctgtagcaaactatgtagtttgagctgaaagatgagtcagtgcctcatcgggtacttttgagtaccgtagcggttgtcaagtttcatgctctcctgaaacatccttcgcaactcgcaagtgaaactctggtttatgccctg

SEQ ID NO: 5430 - DNA, 552 bp, Zea mays
  Clone ID: 700455294_FLI
cgaagatgcgaggagggggagaatataccttcctttggacgagcttgcgcaggcaggtctcacggaagaggacatcttcagagggaaagtgaccggcaagtggagaaggttcatgaagggccagatccagcgtgccaggctcttctttgatgaggcggagaagggcgtcacccatctcgactctgctagcagatggccggtgctcgcgtctctgtggctgtacaggcagatccttgatgccattgaggcaaacgactacaacaacttcaccaagcgtgcgtacgtcggcaaggccaagaagctgctgtcgttaccgcttgcatatgcaagggctgcggttgcaccatgaaccatccgtagatcacatcttttttttcttttcttttccaaacccaccttgttttgccccacccttcctttttttttttttgtatataatcagcttcagctgcctgcatggcataagccttgcctgttcagggtgattccatgtccctaaatactcaatcagctcttgttacaaggaatggagaattagaattcgagaagcgt

SEQ ID NO: 5431 - DNA, 500 bp, Zea mays
  Clone ID: 700455412_FLI
ctttgattggaaaggacaacgatgctgagctgcttcagtgcatgaaggttgcatgctcttgtgtgctttcttctccaaaggaaaggcctacaatgtttgaagtttaccagcttctgagagctgttggagagaaatatcatttcagtgcagctgacgatgaattgacgatgctacctcaaaatgccaatcctgaagatgagcttattgtagcgaactagtttagcctatgtgatgagtgggtgcttgtcggataccaaatgttgcaggagttgcttcaacttggaataatcagaattatttctctatcttctctatttttctggcgctgcatgtcaggcaagcactaggatttgtcgttcgattcgaaggtctatcaatgtgtgctgtactgctgtttacgtttgtacatccttgccttgtgtatcctcaggattgttttcttctggtgttgtaagatggatcaactgtatcattatcgagattttagctgtagtggtagc

SEQ ID NO: 5432 - DNA, 976 bp, Zea mays
  Clone ID: 700455473_FLI
cttcgccaccgacccgcggctgcccaagaacgccaaggccttcttcagcatcctcgacttctccgtgttcagctgggacaacaagctcccgggcgcccagctgctgctgtcgcgcctgcgcatgttcctcaaccccggctacccgtacgaggagtcgctagccggctaccacaacgccaccagcctcaacatgtgcatgtacttcccgcgcttcgccgccttcaacttcaccaagggcgggatggcgctcttcaaccacggcagggggcagccgctgcagtacgtcgtcgccaactccttcatcgccgcgctctacgccgactacatggaggccgtcaacgtccccggctggtactgcggcccaaacttcatgaccaccaacgacctccgggagttcgccaggtctcaggtcaactacattctcggtgacaaccccaagaagatgagctacgtggttgggttcggcagcaagtacccgcggcacgtgcaccaccgtggcgcgtccacgccgcacaacggcgtcaagtactcgtgcaccggcggctacaagtggcgcgacagcaagaaggcggaccccaacctgctggcgggcgccatggtcggcgggcctgacaagaacgacggcttcaaggactcgcgcaacaccttcgggcagaacgagccgacgctggtgggcaacgccggcctcgtcgcggccctggtggctctcaccaacagcggtaggggagccggcgtcaccaccgtcgacaagaacaccatgttctccgccgtgccgccaatgttcccggccacgccgccgccgccgtcatcatggaagccgtgaccacatacgatttttggtacaatacaacgtcagcagtgaattcttgatgccacgttaacggtggcatccatcatgcgtcacctgtagatgtatgttttcatggatacaagtggattacagttaatgaacagatggatacataccttcgctatc

SEQ ID NO: 5433 - DNA, 520 bp, Zea mays
  Clone ID: 700455537_FLI
cccaacctcaagggcaagctcaacgggatcgcgctccgggtgcccaccccgaacgtctccgtcgtcgacctcgtcgtgcaggtctccaagaagaccctcgccgaggaggtgaaccaggcgttccgcgacgccgcggccaacgagctcacgggcatcctcgaggtctgcgacgtgccgctcgtgtccgtcgacttcaggtgctccgacgtctcctccaccatcgacgcctccctcaccatggtcatgggcgacgacatggtcaaggtcatctcctggtacgacaacgagtggggctactcgcagagggtcgtcgacctcgctgacatctgcgccaaccagtggaagtgaagcgttgcattgtaatagcactttgtaactcctcaccctccacagggctttgggattcaccccgaaatgactcactttcggtgaaattcacccgtttcggcgaggtcgtccgaatataccggccaaatgtttccattggatttcaattattagtcaactctagagttgaaac

SEQ ID NO: 5434 - DNA, 818 bp, Zea mays
  Clone ID: 700455559_FLI
ggagattttgggctggcgaagatggtagacatagggaggaatacagtaacaacaggggttcgtggaactatgggccacgtagctcctgagtacataaagacaggaaggccatcagtgaagacagatatctttggttatggtgtcatgctgttagagattgtgacaggagagcgtgcaattgcattccatcctgaccgtagaagaagcaggcgagatcctgctcactgatcaggtcaagctatggatggaagaagggcgactactcgacctagtggatcgcaatctaggtggcgtctacaaccttgaagagctggagaaggttacccagatagcacttctctgcactcacatggatcctgaacaacgccctacaatgtctgaggtggtgcagatgctggaaggagagattgtcccagcagagcggtgggaggagtggcagctggctgagctccaacgacgacaacagcatgagatgaggcaacagggcaaactattcaacttcagtgaagagtctcaaaacatccaggaagccattgagttgtcagctggcagatgagctgtcataagaaagtgacatgattttcacttgttccttaaatagaaaggctataagagaaatattgactattaggaatagtctataaggtcctggactcctggtgtaatatcttgcacaagtaactccgtccatatgctgttaatacaacgataggaccacacctagctcagaccatgtgtatatcaagaatagactgttctacattttaattgcattctgtattactggataactctgaaattctctgttgtgtgtgtgt

SEQ ID NO: 5435 - DNA, 953 bp, Zea mays
  Clone ID: 700455578_FLI
caaccaaagaagactgaacatgcttgatatacccgtacccaaactgccatacatgagagtagatagacagagaacatgaagcaacacagagacacaagctgcagcggcacacatggggcaccgcgccccactaccaccaccagaccagacgacgcacactttatttagcccatgtcactcgcagtccgcaccgggcactgctatagctacgacacacacactgtcacacacggagagatggagagaaaccgtcgcgttcgcgttgtactgaacagtaggcgccagcgcgcgcgacgcgactggcacgccacgcgcgcacgctgagacatcgatctcccgacccgctgtccgccgccgcagtgcgcgtacggcgcacggcctcactcgctggccttctcggccacctcagcggccggctcggccttctcgggctcctcagcggccggctcagccgccgcgggctcctcagcagcagcagcagcctcgggctcagcggctgccggttctgcttctgtctcggcagcgggcgctgccgcttcctccttcacctcttcagccgccgccggctccggctccggctccgcctcctttgccgtctcttcctcctttggcgtctcttcctccgccgccacgggggccgcctcgggctcagcggcggcagctggctcggtctccgccggggcagctggctcctccaccttggcctcggcggcgggggcagcctcctcgggcacgacggcgggcggagccggggtctccaccaccggcgcttcctcggtcgccacgacggtcggggtctggacctcggcagtggccatgggtgacgatcagaaggctgatgactacacgaccgagtggctagctactagctagggctagaggctagagctagagcagctaaagaatgatcgagctgcaagagtgagcgatcagctgctgatcgggagtgggat

SEQ ID NO: 5436 - DNA, 1379 bp, Zea mays
  Clone ID: 700455594_FLI
gctacctactactcaagtatccatccttattgagtacagtgttgatccatggactcggaaggagttgtagcagcaaaggtggcagatgagactactaaaccggcaatccaagaagacggcgccgagagcaaggccgggatgactgatctgctgatgctgaccgacaagtcgcagctgcaggcgctggcgatgctgctgcggaacaacgaggagctcatgatgagccaggcgatcaagtcggagacggagcgcattgagtacctcaagacggtgagcgactgctacacgcggacgatgaagctcctcgacgattccatggcggccaggaccacgtacgagcgttcgggcggaacgaggagcctcgtcgcccgggacatggacgactacgtcgtctacggcctcaacgcgtgcttgcagaacgtccgcaactgctgcgtgcgcctggacgccatcgacaagctgcgggcgcactacgacgccctcgccgacgccgtcgccgacccggccgccaacgtcgagggcctcgccgcggaggcgtccgagtacaaggccgccatgtggcagtactgctacaaccagcggagcgcctccgcgcgggcgcactcccgcgcctactcccaggcgctcaagctggagggcatcgacttcgccgagctggtgcggaggcaccagctccggctcgggtacggcagcaagggcgaggagttcgaggacctggacgacacccagaagctggaggtgtacaacagcatcatcgtcgagtcggggcgggcggggctaccggtgcggatgttctcgtcgggccgctctgccggtggccctaagattgcagccacgacgtgggcggaggcggtgagcgtcttcatcatggcggcgggcaacctggcgtgggacgtgttcaccacggagcacgaggtggaggccatcctcaagggcagcctcaacctcctggcggggctagggggcttcgccgtggaggccgtcgtcggcgcggctgtcaccaaggcggtcgcaaacgtcggcgccggcgtctttgcttgctctctcgccggcttcgtcgtgggcgccatcgccgggctgatcttcgtcggcgtcagcggcctcctcattaacctcatcatcggctccccaaggaaggtgcctgacatgagcaagctcatgttccacaccgccgtcatgcccgatggaatggcccttgcgtatgcggtatctcattaattacttaatatcatcgcagtgactaccaatgcaactgcttcagctcctactgttgcaacgcgcgtgtggaaataagaagggaataataataattattattattgtaataaaaaataattatcatatattgataatgattatatatcaaatatcttttctcg

SEQ ID NO: 5437 - DNA, 1056 bp, Zea mays
  Clone ID: 700455612_FLI
taggcactcatcaaggaacattatttcttggaattgtataattcttgcacacttgctgcatggttctccaagtgaagcactggatcgcttttgtgagatgaaacaagaaggcgtgctgccagatcatacaactttgactgccgtaatcaaggcctatggcctccagggaaaggtatctgaggcgaaacggatatttcacaatatgacccacgatcacaacattactccagatttagatcattacacagctatagttgatctccttggccgctcagggagtctacaagaagcgtacgagtttattgataatatgccactcatacccaatttagcagtctgggaggcattgcttactgctgcaactattcatggaaatgcaaggctcgcaaacctggcagcaagagagttgtcatcgcttgatccgagtgaccctagaatccaaagactggtttttaattactggggtctaactggaaagtctgttgatgtgccactcatgacggtatacaacggaggaagagagttggaagatgttgatagttgttcggttgaaatcaagaacaatgtctatttgttctcaaccggtgataatttagcattagagagtacagttgctgaattgaagctgattatgattcagatcagaatgtcattgctgaaaatctgtaatgagactaacgctgaagaagagaaagaagaattatcaggaatacattgtgagaagctagcaattgcttttgcaatttcaaattcccctcctttcagaagcatacggataataaagaccttaaggatgtgtagccattgtcacatctttgccaagctagtttcagaaaaatacgagcggcagatactaatcaaggattcaaattgtttgcataagtttaaggatggaaagtgctcttgtgaaggttattggtgaatacaactaatataagtgcaccaatggtttctgttcatttatgcgtcgtccatactggctttttcatgtatgagtgtagtgttatcagttcatagttgtattggaacggaaaattactgtagccagttttgctc

SEQ ID NO: 5438 - DNA, 888 bp, Zea mays
  Clone ID: 700455624_FLI
gtcatccgttacttccccacacaggcattgaactttgcgttcaaggatcacttcaagcgcatgttcaactttaagaaggacaaggatgggtactggaagtggtttgctggaaatctggcttctggtggagctgctggtgcttgctctctattctttgtctattctctggactacgcccgtacgcgtttggccaatgatgccaaggctgcaaagaagggtggtgagaggcagttcaatggactcgttgatgtttaccgcaagacccttgccagtgatggtattcgtggcctctaccgtggattcaatatctcttgtgtggggatcattgtgtaccgaggtctttactttggtatgtatgattccctgaagccagtgcttcttgttggtaccctgcaggataacttcttggccagcttcttgctcgggtggggtataaccattggtgctggccttgcctcctaccccattgacactgttcgccgtcgcatgatgatgacatctggtgaggccgtcaagtacaacagctccttggacgctttcaagcagattgtcgcaaaggagggtaccaagtccctcttcaagggtgctggcgcaaacatcctccgcgctgtagctggtgctggtgtccttgctgggtacgacaagctccaggtggttgtcttcggcaagaagtactaaggatgtataatgatgatgacgacgaacaacaaacatgatgttttaggtgcctcctttaagtaaacatacgtacggaccctcgacaccattttaagttcgctctcgcagaggctggtgagtttgtagcgtggctgtgaccgcacctctttttatgtcagagattggaaataagtgacgttagaaattgctgtcttgctgcatcagtttttt

SEQ ID NO: 5439 - DNA, 959 bp, Zea mays
  Clone ID: 700455636_FLI
cgcaactaccctctactctctactgcacgcttctactatctaagaaacaacgcacacgggccgaaactaaatttctccaagcgcgcaatcctgtcgccaaccccggccacggatcggggatgtcgtctgctgcgggccgcgcgccggcgccgacgccgatgggctccgccgatcgctgtaagatcgacgggatcgtggcggcggagaaagccaccaggagctgcgtcgaatgccgcgccaccaccacgcccatgtggcgcagcggcccgaccgggcccaggtcactttgcaacgcctgtgggatccggtaccgaaaaaagaggaggcaagagcttggcctagaccgcaagctgcagcaacaacaaaataatggcgaggcgaagacggatgaagcaaaagacagctctagcaacagcagcagcgggagcagcaacttgcaggtggtgcagaaacggaggctgctaatgggagtggaggaggctgctctgctgctgatgaccctatcttcttcgcccacatccacgttgcttcatggataaggaccctcctccaacgccagatcagcagtgtacatacaacgtaccccctgcacagtgactgccgaacgattgcaggcctatctcagggttgtgtgatcttgtgattggggcggattattagtgccaagctaatcactccgttgatcgtcttgtcttcctctgttttcgccgcacccgtagatcttgatgccagccagccatatatcttctacgtgatttgtggtaggctccataatcagaggtctgttgatcccattccccccgcacatcttttttctcttgtcttttctctttttggttttttgtatgtactttgatgttgccccatttgtgagggatgggtgatcaaagaggagacgccatcccttctcgttctggaataatggtccaaataataaaggatttgagctgttttgtttt

SEQ ID NO: 5440 - DNA, 656 bp, Zea mays
  Clone ID: 700455686_FLI
gaagccgccgcaccagcaatcacagcagcccggagaacgccctggtccaacaagatgcagatcttcgtgaagacgctgacagggaagaccatcaccctcgaggtcgagagcagcgacaccatcgacaatgtcaaggccaagatccaggacaaggaagggatcccgccggaccagcagcggctgatctttgccgggaagcagctggaggatggccgcacccttgcggactataacatccaaaaggagtctacgctccacctcgtgcttaggctccgcggtggaatcattgagccctctctgcaggcgctcgctcgcaagtacaaccaggacaagatgatctgccgcaaatgctatgcacgactgcaccctagggctgtcaactgccgcaagaagaagtgtggtcacagcaaccagctgagggccaagaagaagatcaagaactgaggtgctgctcctagtcagtttcatggacaatgttgggctgtattgctgtgtggttgttgaacggtgtttgtttacccaacatttgggccttctgttatgttttaccttgttgtcgatgacactactatatgacaatagcaactctgttattgtagttttggtcactgttcacctgatatgtgccatatttcggtaaagtatcgttagtgggc

SEQ ID NO: 5441 - DNA, 567 bp, Zea mays
  Clone ID: 700455692_FLI
gcagcacaagcaagaaccacacctcctcccttcgcctgtgatcatgtcgtcttgctgcggcggcaagtgcgggtgcggctccagctgctcctgcggcagcggatgcaacggctgcggtatgtaccctgacgtggagaccgccgccaccagcagcgtcaagaccacggtcctcgccgcgccgaccaccaaggccagcgccggcggcttcgaggcggccaccgagggcggcggctgcgactgcaacacctgcaagtgcggcaccagctgcggctgctcctgctgcagctgcaactgagctggcccggcccggcgatggcgcacgagagtcgagaggaggaggacgacgacgaggcgtataaatataatagcggcgtccagtaaataagatcctgtcaactgcacccgccattatccatggtcgctcgctcctcgcctgcgtctcctggtcctggggttcgtctgaacgtcctcgcggcttcacgacggcgatgccgcctccgtcgatcctgtccgtctcgtgccggatttaatattagatctatatgcgtgtttttctgcgttattact

SEQ ID NO: 5442 - DNA, 1525 bp, Zea mays
  Clone ID: 700455716_FLI
gttgaggttgatgctcttgctaaggcattggctggtcaaaaggatgaggcttacttcgcagcaaatgctgcagctcaggcctcgaggaaatcctcaccccgtgtgaccaatgaagaagtccagaaggctgctgctgctctcaagggctctgaccaccgccgtgcgaccaacgttagtgctagattggatgcccagcagaagaagcttaacctccccatccttcccaccactacaatcggttcgttcccacaaaccgttgagctcaggagggtccgccgtgagtacaaggcaaaaaagatctctgaggaggaatacgtcactgccatcaaggaggaaatcaacaaggtcgttaagctccaagaagagcttgacattgatgtgcttgtgcatggcgagcctgagagaaacgatatggttgagtacttcggtgagcagctctccggttttgcgttcactgccaatggctgggtgcagtcttatgggtcaaggtgcgtcaagcctccgatcatctacggtgacgtgagccgccccaaccccatgaccgttttctggtcgaagacggcgcagagcatgacgtctcgcccaatgaaggggatgctgactggcccagtcacaatcctcaactggtccttcgtccggaatgaccagccgaggtttgagacttgctaccagatcgctcttgcgatcaagaaggaagtcgaggatctcgaggctggtggtattcaggttatccaaatcgacgaggctgcactgagagaagggctgccgctccgcaaggctgagcatgcattctacttggactgggctgtccactccttcagaatcaccaactgcgagatccaggacaccacccagatccacacccacatgtgctactccaacttcaacgacatcatccactcgatcatcgacatggacgcggacgtgatcaccatcgagaactcgcggtccgacgagaagctgctctccgtgttccgtgagggtgtcaagtacggcgcgggcatcggccccggtgtctacgacatccactcccccaggatcccgtcggccgaggagatcgccgaccgcatcgacaagatgctggccgtgctggacaccaacatcctctgggtgaaccccgactgcggcctcaagacccgcaagtacacggaggtcaagcccgccctgaccaacatggtctccgctgctaagctcattcgcacccagctcgccagcgccaagtgagcaccttttttttgcctttttcgtttccgaggagggcgtcgtcgatgccaatttgtttccaataaacagggctccccccctgtgcccgccgttctgttgtgctccgtctgtggttaggttactagttttcttgatctcgcccccacgcggtacctgttttactatctgtttggtggtttctgaggcaagttgcccgtgtacttgtatcgtaaaaaccgagtgggacatctgcatcgtttcatctgccaccactcccccgaggtgtgttgtttcacggctcaaagaaagatgtcgtatcggc

SEQ ID NO: 5443 - DNA, 713 bp, Zea mays
  Clone ID: 700455731_FLI
cgccgcctccgacatcgtctcttcgtccccacgagcaaccgataatccgccggcgctgagatgttggtttatcaagacctcctatctggcgacgagctcctgtcggattcattcacctacaaggagctcgagaacggcgtcctgtgggaggtcgagggaaagtgggtcacccaaggtcctgttgatgtagacattggtgccaatccatccgccgagggtggtgaggatgaaagcgttgatgacacagccgtgaaggtggttgatattgttgacacattccgtctacaggagcaacctccttttgacaagaaatcatttgtctcttacataaaaaaatacatcaagaatctcactgctgtgttggagccagagaaagcggatgagttcaaaaagggtgtcgagggtgcaaccaagtttctccttagcaagctgaaggaccttcaattttttgttggtgagagcatgaaggacgaagcgtccgtggtattcgcctattacaaggatggtgccactaatccgacattcctctatttctctcatggtcttaaggagatcaagtgctagattagttacccatgttgggtactatatatgttctattgttatagccacaactatagctgccctgcctgaactgaactcaggttttttttaagaaaaaactgtccaagattggattgcttgttaaagctaaatattgttattgacgtgtt

SEQ ID NO: 5444 - DNA, 529 bp, Zea mays
  Clone ID: 700455785_FLI
ggcaccacacctcttcttcttcttcctcctcctcctagcacagctagcgcctgctccccttcgcctgtgatcatgtcttgcagcagcggcaagtgcgactgtggctccagctgctcctgcggcagctcatgcaactgcatgtcccctaacgtggagaccgccgccgccagcagcatcaagaccacggtcctcgccgcgccgaccaccaaggccagcgccggcggcttcgaggcggccaccgagggcggcggctgcgactgcaacacctgcaactgcggcaccagctgcggctgctcctgctgcagctgcaactgagccggtcaggcgatggcgcacgagagtcgagaggacgacgacgagtcgtataaatataatagcggcgtctaaataagatcctgtcaactgcacccgccattatcgatccatggtcgctcctggggttcatgttcatctgtaacgtgctcgcggtcatgtccgtctcgtgccggatttaatatttatatgcatgtatttgtgttttttctgcgtt

SEQ ID NO: 5445 - DNA, 1820 bp, Zea mays
  Clone ID: 700455830_FLI
acgaccaattgaaattaaaccatttttatttctcttgattacaatcattctaaaatgcattattaacactgctccaggtcaaggagctggagaatacaaaggatgcagaactcccgtcaaagaggcaacatgtcaaatgttgacaccataaaagaatttgaatcacttgcttttgatggacataattttcccacatggtcaatagatctcaaagtcagtctctctttacaaatttttttgggaggtcattgttcaacggtaatagggtactcagtacccaacaataaaaccaagtacatcatacgcctcatatatataccacagacctagccttcacgtgtttttttttggatcgctctccaacaacggtatgaacaacaacagctacacatgaatggaaccatcttcgcctacaagacttcaagtctgtagggggatacaatcatgcactttataaactttgtgcaaaactcaaaagttatggaaaagaaccaactgatgcatatagaatagataagacttcttctacattgacgacaactgtgtacagaatccttcctcgttaataccatgagaaaaattttaaagtatattctgagtttaattaatagtctattttaagccgaagggcacaataagatctttgtttggaacacaaataaactttccttgaacgttgccctgttactttaagtatatgccaacacttagaacataaacaacaaggattgtacaaataagcaacccgactctaccgcataaacaagatttaatggacaaacaagatgcttgtggagttttcctccaacatatttggagatctcagttagactctcatagtccttggtcacagatacttgagtccagtcaaaataatatttagggttaataatgtgtgttataaattatatagcagtcttgtaaatatttgtggctagcttgctatatcacagttattcgttctctagacattgagaaagatccattcagtcaaggggatgatgaagaagagacactaggacctttagttttatatcttagtgttgttggagcacttatatttgtaaatatctgtggctttgtaatttttttatatggaggcacgaccatctattatctattggaaattttctaataaacagactattgtaacaaccgctatgtattattccaaaaatgatgcactatatgaaacataacgtgaatgtgtattgcttcgcaaaaaatgattaatcacatacaccaatttagtggaattggttcccaccaaatcatccacgattaactgcgaagataatgctgcttgtattacatagatggagacaggctatataaaaaaagaacagtataactaaaacatatttctctaagttgctgtgtcctcatgaatcacaaccgactagagaaatcagcttacaaacaaacgaagtctttgtgataattttaaaaacaaaagtatgaaaacaatagaattgaaagttcaaccattctctttttctttctcccgattacagccgaaaaacacacgtctcaagccgtcgctccacacccacaccgatgattgatctaatctacccatccatccatggatcgatctgtcatgcatcaattaataggtcgggacaaggcaacaagggagggccactgacaggcaggcaggcaggcctgtagcccccgcagcgagaggcggtgacaggtaggccggccggccggccggtgcatacatgatgcatgcgggagtgggacccaccaatcagacccatgaggctcgtccccggcctctccagtcccctcccccctctctgcagatctgggcatct

SEQ ID NO: 5446 - DNA, 967 bp, Zea mays
  Clone ID: 700455831_FLI
gccggaccggtgggagttcgcgaacgagaatttccggcgaggcgagcaaggcctcctgtccggcatccgtcgccgcaagtcaacgacgccgcagccatccaagtacggcggcggcacgtcgtgaacaccgcgttccctccgccgttgccctttccgcctcccgcgtcggtcaccacgtctggcggtggcggtggtgctggcgctggcaacgagcgcagctcctcgtcggcatcgtcgccgccacggaccgacgacctgaccagcgagaacgagcagctcaagaaggacaaccgcacgctgtccaccgagctggcgcaggcgcgtcggcactgcgaggagctcctgggcttcctctcgcgcttcctcgacgtccggcagctcgaccttgggctgctcatgcaggaagacgtgcgagcgggtgccggtgacgacgccgcgccgcgccgcgcaatggtcagccagctggagcgcggcggcgaggaggggaagagcgtgaagctgttcggcgtactcctcaaggacgccgcaaggaagagggccaggtgcgaggaggcggcggccagcgagcggcccattaagatgatcagaatcggcgagccgtggatcggcgtcccgtcgtcgggcccggggcggtgcggcggcgggaattaagtaaggtatggttggaactgatgctccacggccggccgtgtgacagctttattacagcgagcgcatgttcgagtcgtggatgctttttgtgcgtgtttgtatttgtcatccaaggtgaggttgatggcaaggataattccagtgctgtggtaaaactgtgaatgcagaacacagggcacaggagataaccgtaacgcatgttaaaagttaattatgggatgctttggaggtagcaagattgaaagtagggaactagggatgaccggatgagtagacggtctagaaagacaagcccatatgtttggaacataggctt

SEQ ID NO: 5447 - DNA, 1456 bp, Zea mays
  Clone ID: 700455835_FLI
gtttgtggccaatgacccaaccactaagggtggcacatactatcctcttactgtcaagaagcatctgcgagcacaggaaatagcttcggagtgcaaactgccttgcatatatctcgttgacagcggaggtgctaatctccccaggcaggctgacgttttccctgaccgtgataattttggccggatattctacaatcaagctaagatgtcttcagatggtatccctcagattgcagtagtcttgggttcttgcactgctggtggggcatatattcctgcaatggcggatgagagtgtaatagttaagggaaatgggactatatttctagcgggtccaccacttgtaaaggctgctacaggagaggagatatctgctgaggaccttggtggagcatcagtacattgcaaggtatcaggagtctcagatcattttgcacaagatgaaattcatggacttgagttggggcgaaacattgtgaagaacctgcacttagctgctaaaggaacaaatattcagagttctgcttgtggttaccaagagccattgtacgatgtagaggaacttcgctccattgcaccagctgatgtgaaacagtccttcgacattcgttcaataatagcccgtattgttgatggaagtgaatttgatgagttcaaaaaattgtatggaacaacactagtgactggttttgcaaggatatgtgggcaaccagttggaattattggaaacaatggcattttgtttacagagtcagcgttgaagggctcccacttcattgaattgtgcgctcagcggcatattcctttgattttccttcaaaacattactgggttcatggtcggatcaaagtctgaagctagtggaattgccaaagctggagcaaagatggtcatggcagtttcctgtgctaaggttcctaaaattacaataattgttggtggaagttttggggctgggaattatggaatgtgcggacgtgcatatagcccaaactttttatttctttggccaactgctaggatatctgttatgggtggcatccaggcagctggagttctcgctcaaatagaaaagaacaacaaaaggagacaaggagtggagtggagcaaggacgaggaagaagccttcaaagccaaagtcgtggaggcttacgacagagaaggaagcccgtactactccactgctaggctatgggacgacggggtcatcgaccctgctgacaccaggcgggttctgagcctctgcctctccgcttcggccaagccggttccggaagacacaagatacggtgtattccggatgtgaataaatgtgtgtgagtaataacgcagacgtgtttaataaaaagctgcctgcacgcacccaatgtgtgtgcacaaataaaaatttcgccctggtttctgtcgtcgaaatatgttgaagagtgttgttcatttcatatattactatctgatg

SEQ ID NO: 5448 - DNA, 1649 bp, Zea mays
  Clone ID: 700455859_FLI
agctccctacttcccaccgcctcccgctgccacccggggtcgctccactccctccgcttctgctctgctgtccccgagtttgtcgatgtcgccgccgaccctgccgaggcggctgtatcctccgggcacccgtggccggagtggggcaacttccttgataagctgcgggccaaggggtacttcgagcaaggtttgccctccagcgtgagttctggcgaggtagccgccggagatggggatccagcagctgcatctgagaacgcagcaacggctgcttccggtaatacggtggtggatgcggaggatagcgcggtgacctcggaagacatctatcattttctcaaggacgagaacagggtgaagaatgcgtgcctcaaatttgggcgagaccgcttcgatctcctcagcttgcttcccaagcaggatattcaagctattgttatgtctggctgtcctaataacaatcggaagcccgtctattctgcaaaaaggttgagagagtacgtgcaggtcaaagaagaagatgcatgcagcatttgcaaatttaaggcatcttgtgatagagcttatgtcactccaaagggtgaggttgaagttaggactgttgatgttgttcgtatactgttaagttatgcaatggataaaaaccattcaggagataactctgttatcgaagaaagtgtgcaagaatctgcaaaaaagcttctctcaaagcttactgaatttagtgacacaacaatcgatccatctcttccgaaacctgcatttcaagttgctaggaaggctcagggctcagtggggaaggggagagaaacgactgcagttgaaatgaagaagggtgactggttgtgcactaactgtaacttcttaaattttgctcgcaatcgtcactgtctcgaatgcaaagcagatggaccaaagaagatagaagcggccgtggatgcaatgaaaatgggcgattggatctgcacacagtgtcagtttatgaacttctctcgcaacaagatatgttttaaatgtgaagaacctcacccgaagaggcaactcaatcctggagagtgggagtgcccctcatgcgactttgttaacttccgacgcaacgctatctgcaagaagtgcaatcaggaccgccccgaggatgatacccgagatagtcagcggggactgagaaaaaccagaggggctggcaagtttagaagattcgactatattgatcagaagagcgatgacgatgatgacaatgcctggttccagaagcgtggggcaagcatgaggtcgaaaccggaccagagaaccaccactgccaagagcagaggctctgacggtctggatgatattcttgttaccaccaagcgtagaagcaccaagcaagacgaggacgacgaggtcttgccgtacgagggtgcgcgcaagcatgttgtgagcagaagggcaacgccttcccagaggaggttcacggctgcccgtaaccagtaataatacccgagcttggagctttgatgactccgttctgtgaacaaatttcacagcgtcgctcgctctgctgctgtgatgcagacgaatagatgatggacataacacataagcgtgtccgatctgtagtgttattatacaaattattagggaacacgcattgataaagctggtcc

SEQ ID NO: 5449 - DNA, 2238 bp, Zea mays
  Clone ID: 700455880_FLI
acggccgatacagaagcacataaacacattcgacgaggtcacgactcacgaggggactcccgagtcccgagcgcacgcgcgaatcgccgcggacctcgccggaggcggcgacgagctcggatcccggcgatctagtcgccggaggcggtcccgatggctcggcggtcgtcttcctcgtcgtcggggacctggcggtacctgaacccggcgtactacctcaagcggcccaagcgcctggcgctcctcttcttcctcttcgtcgcagccaccttcgccttctgggaccgccagtcgctcgtcagcgagtacgagtctgagatttcccgattagaagatgatataaatcggttgcatgaccagctaagaaaggctggagttaatctggatgaaaatccagtagtaagcaacaagaattccagaaaagatcttgtagtagaaattgatcctgtcaataatgaaagacgggaaaaagttaaagaggcaatgctccatgcttggaattcttatgttaagtatgcctggggaatggacgagcttcagccacaatcgaagaatggtatcaacagctttggtggtcttggagcaacccttgttgactcacttgataccctatacataatgggcctgaaagatgaatttcagaaagctagagactgggtggcggagtcattagactttgacaaggattatgatgcgagtgtttttgaaacgaccataagggttgttggaggtctgcttagttcatacgatctatctggtgataaagtatttcttgataaggctaaagatattacagatcgactcttacctgcttgggatacaacatctggcatcccttataatagaataaacctagctcatggacgagcccataatcctggatggactaacggtgatagtatccttgcagattctggtacggagcaacttgaattcatagctctttcacagaggactggagatcccaaataccagcagaaggcggagaacgtcattaaacagcttcaaaagatatatccaagtgatggtttactgcctatttacataaatcctcattctgggacagcatcatactcaactatcacatttggtgctatgggagacagcttctacgaatatttgctcaaggtctggatccaggggaataaaactgagcatgtaaaacactacagacaaatgtgggagacatcaatggaaggtctattaagtttaaccaagaaaactacaccatctaattactactacatttgtgaaaagaatggtggctcgttgtctgacaagatggatgaacttgcttgctttgctcctggtatgctggccttaggtgcctctggttacgggccagaaaaatcagagcaaattatgaatcttgcaaaagagcttgctaggacctgctataatttctaccaaaccactcccacgaagttggctggagaaaattattttttccatactggacaggacatgggtgtgggcacgtcgtggaacatcttgagaccggagactgttgaatcactgatgtacctgtggcgtttgacggggaataaaacataccaagattggggatgggacatattccaggcatttgagaagaactcccgcatagaatctggatatgtgggactgagagatgtgaacactggtgaaaaagacaacatgatgcagagtttcttcctggcagagacgctgaagtacctgtacctacttttctcccctccatcagtcatatccttcgacgagtgggttttcaacactgaagctcacccattgagaattgttccagtaaatgataacaaaggcattggaacaccggtccgacaattcgggagaaaacagggaaagcctgagtaaccttggatatagagcagtggatttttgaatccgccgtctgattctgacctccctgttgatgtgttctgacacgagggaactttctgcctgaagcagtaagggttagaaattacggcgatagattgtttagagcaaaaatcataggtagaggatgatgttatatgcggggcagtgacctccgtgaggtcaagagccccatagaagcttttatctttggatttgcttacgcaccctgaggtgcattgttgatgtgtagcatacatctaactcactgtccatatgttgttgctttcctgggggctctgcgagctgtattgtcattatgtaccccctagttattacttcttttcagatatgattcatataaatataaaacgtaaagtatct

SEQ ID NO: 5450 - DNA, 1716 bp, Zea mays
  Clone ID: 700455883_FLI
caacgtcaaaaggttactttgtctattgctgtcatggttcagcctgtatctggcccagtgtgtctttttggaagtgaattccaaaaggtttgctgggaaatcttagtggcaggatcagaacagggtatggaagctggacaagttggtcttcgattagtgactaagggtgaaaggatgactactgttgctaaagagtggaatattggtgcgtctagtattgcagatggcaggtggcatcttgtaactgtaactttagatgccgacctaggtgaagcaacttccttcattgatggagtttatgatggatatcagaatgggttgccgttgccaacagataacggtatttgggaacctggaactgatatttgggttggtgctaggccacccatggacttagatgcctttggtaggtcagatagcgaaggttctgactcaaagatgcagatcatggatgcttttctatggggaagatgtctcagtgaagatgaggttactgttttacatactgccatgtctcctgctgagtatggattttttgaccttgcacccggcgatgcttggcatggaagttattctgcaagggtggatgactgggaaagcgaagaagcttatgagctttatgatcaaggggatgtcgaatgggacgtttcctaccctccctcagccgcgtcgcgtcgcatcctacgatccaaagctctctctgctcgcagccatggcgaagaactacccgaccgtgagcgccgagtacagcgaggctgtggagaaggccaggcgcaagctccgagccctcatcgccgagaagagctgcgccccgctcatgctccgcctcgcgtggcactccgcggggacgttcgacgtgtcgtcgaggaccggcggtccattcggcacgatgaagcatcagtcggaattggctcacggcgctaacgcggggctggacatcgcggtgcggctgctcgagcccatcaaggaggagttcccaatcctctcttacgccgatttctaccagctcgcgggagttgtggccgtggaggtcaccggtgggcctgagattcccttccaccccggtagggaggacaagcctcaacccccacctgagggccgccttcctgacgccactaagggttctgaccacctgaggcaagtttttggcaagcagatgggcttgagcgatcaggacattgttgccctctctggtggccacaccttgggaaggtgccacaaagagcggtctggtttcgagggggcctggactacaaaccctttggtctttgacaactcttacttcaaggaacttctgagtggtgataaggagggccttcttcagctcccaagtgacaaagccctgctgagcgaccctgttttccgccctcttgtcgagaaatatgctgcggatgagaaggctttctttgatgactacaaagaggcccacctcaagctctccgaactggggtttgctgatgcttaaatagaccctatcttggagtgatacattctgctgcctgtatggaatcatgtggtcttttgcatctggagtcaatgtgaacaagcagattgtcgtattgtctttctcgtaataaatttgtcgatgttgagcccttaggctgttgttggtacattggtacttcgtcgatgcttgaattgggaccctttgtccgttttcctagactctgatgctgtatgcaactgaaacaagtaaatctatgatcttaaggctgc

SEQ ID NO: 5451 - DNA, 2167 bp, Zea mays
  Clone ID: 700455918_FLI
gctctggtactctcttctctctccctgctgacccaagtcccacgcctgcgtctcgtgatgccgccgaaatcgaaggcgtccgccgccgcggagccggtggccgtcgaggacctcttcgcctcgctccaccgccacatcgaggcaggtgctttcaaacaggccgccaaggtcgccgaccaagttctcaaggcagcgccgggagatgaggacgcggtgcgatgcaaggtggtggcatacatcaaggccgacgagatcgacaaggcgctcgccgcgatccgcgccgccgagcgcctcccgatcgatctcagctactacagggcctactgctgctacaggcaaaacaaactgcatgaggctcttgagcttttaagaggccaagaagaaacttcagctgttctccagctggaatcccagatcttttaccgactaggaagaatgaatgattgcatgagtagctatgagaagcttaaaaaatttaaaattgactcaatggatctgaagataaatatcattgctgctctagttgctgctggaagggcttctgaggtacaggcagctatgaaggcgcttaaggttgatcttaccacgagagcactcagggatactcgtagttttgagctcgcatacaattctgcttgctccttgatagaaaacaagaagtactctgaagccaaggagcaattggacttggctaaaagaattgggaaagaagagcttatggtggaagactacggcgaggcggatattgaatatgaattagctcctgtttctgctcagcttgcttatgtgcagcagctacaaggacaatctcaagaagctatgcaaacatatgttaatatgataaatgggcagtcagctgatttatcatcacttgctgtggcaacaacaaatcttatttcaataaaaggtacaaaagataccgcagatagcttgaagaagctcgatcggcttattggaacaactacagctccaaaccagttgcatcttgttgaaaaccttgactacaagttatccccatggcagaaagaagctctgtattctgcacgtgttcttttactgctccatgcaaataaaactgaacaggcacatgagttggtcagggggctgcttggtatgtttccagatagtgtattccctgttttacttcaagccgctgttcatgttaaagaaaagaagattcacaaagctgaagatgttcttagccagtacgctgagaagcgtcctgagaattctaaagggctcctccttgcacttgcccagattgctgctaatgccaaccattttcagcttgctgctgactcactatccagaatacctgacattcagcacatgcctgcaacagttgctacattagtggcccttaaagagcgcctaggtgactccaatgctgcagcttctgtacttgattctgctatcaactggtggaagaattccatgaccgaggataacaaattagatatattaacacgggaggctgctgcatttaagctcagccatggacgtgatgaagaggcttgtttgttgtatgaggaacttgtgaagagccatggaagcatagaagctttggctgggttagtaatgacttcagcgcgcactaacttggagaaggcagaacaatacgagaagaaactgaagccattgccaggcctcaaaggagttaatgttgagagcttggagaagacatctggtgcaaggcatgtggaagggccccaagacatgaaggtagatgttcccgaggaagtgaagaagcaaaaggcaaagaagaggaagcggaagcctagatacccgaaaggcttcgatccagcaaacccggggccgccaccagatcccgagagatggctgccaaggagagagcggtccagttaccgtccaaagaggaaggataagagggctcaggtcagaggtgctcaaggagctgtgtctagggaaacatcggccaccaatgtcggtgcttcctcaaaaggaagccaaaccaccaattcatcaaagacaccggcggtaaatgctgaacagccaaaaactagcaacaaatctaggaagaagaagtccaggcattagatgagaattttatgttacattaccgtacaaaagaatatgttcgtttatcttctggatgacttgcaattttggactggattgcattcaattgcagatttgctttgctttt

SEQ ID NO: 5452 - DNA, 900 bp, Zea mays
  Clone ID: 700455961_FLI
tgaaggaaggcgacgaggtgtacggcatggtcagcgagaatccgctgcaggggcccaagcagtccggctcgctggcggaatacaccgccgtcgaggagaagctgctggcgctcaagcccaagggcctcgacttcgcgcaggccgccagcctgccgctagccgtcgagaccgccaacgagggcctggagagggcaggaatatccgccggcaagtccgtcctcatcctcggtggcgccggcggtgtcggctcccttgcgatccagctagcgaagcatgtctacggcgcgtccaaggtagctgcgacggccagcaccaagaagatcgagctgctcaagagcctaggtgccgatgtcgccatcgactacactaaggagaacttggaagagctaccggacaaatacgacattgtcttcgacggagtcggtcagggtgacaaagctgtcaaggtagtgaaggaaggcggcagcgtggtggttctcaccggcgccgtcagccctccagggttccggttcgtcgtcacctccaacggctccgtcttggagaagctcaacccgtacctcgagtcagggaagctgaagccactcatcgacccggaggggcccttctccttctcgcaggttgtggaggcgttctcctaccttgagaccgggagggcaaccggcaaagtagtcatctctcccatcccatgagagctgtagattgcagagcctgttcactggccatttgcgagccggcctccgattatatcaagagtgtcagtctaaaatggagttcatttcaggtatacagtccatggaattacaaagaggtgtacattgtgcccattgctgagacacttagccacgttccaggttttgtgtgaacgggtacatacagtaagaagcccctctgttgttacat

SEQ ID NO: 5453 - DNA, 1197 bp, Zea mays
  Clone ID: 700455972_FLI
ctccattccttcctcctttgccaatgcagctctgatctctcctacctgagaatgtcagtgtgagtggccattccatctgcacaacatcctcctccacgcacgcacgcaaaacatacaaaaaggcagaagcggaggagatgaaggcaatggccgggccaaagctgctcgtcgtccacgcgtcgtcgaacaaggccctgaacgggatggcgcccacgtcgccgccgtcgcccggctggtcccggtgcctgtggctggtggtgttcctggccttgttcacctgcgtgtccctcctgaccgtgctctccacggcgcgcgcctcggccggggcgccggcgtgccaggcggcgtcgctcacggacagcgctgccggcgccacggaggccggcctgccgcggcacgtgttcgacgcgctggtgcagtacgcggcggcggcagggaacttgtcgtcgagcatgccggagccggacgtgcgcgcgatcgcgtcggtgctccggcggcgcgcgccgtgcaacctgctggtgttcgggctgggcgcggagacgccgctgtggcgcgcgctcaaccacggcgggcgcacggtgttcctggacgagaacccgtactacgtggcccacctggagggcaagcacccggggctggaggcctacgacgtggcctacgccacggcggtgcgcgagctccccgacctcctcgacgccgcccgtgccgcgcgcgccgccgagtgccgccccgtccagaacctgctcttctccgagtgtcgcctcgccatcaacgacctccccaaccagctctacgacgtcgcctgggacgtcatcctcgtcgacggcccgcgcgggttcatggaggggtcgccggggaggatgtcggcgatctactcggctgcggtgatggcgcggaccaagggcgcggagacggaggtgatggtgcacgactacgagcgggaggtggagcgcgcgtgcggccgggagttcctgtgtgacgagaaccgggtcacggcgaccagcacgccgtcgctcggccacttcctcgttcgcggcggcgccgccgccaaccgggaagccttctgcgggccgcccgccggcgccgcccagaaatcgaaaccgagctaagcgagtcgtagtcgttacttctccttcccgggcaatgttggcgatctctctttgacaggggaaagtaatgaactcgcagaattgactc

SEQ ID NO: 5454 - DNA, 2324 bp, Zea mays
  Clone ID: 700455980_FLI
atgcgaacaagattaacccattggtcccggtggatcttgttattgatcactcagtgcaggtggatgtagcaaggtcgcagaatgccgtacaagcaaacatggtgttgttggcaaatttgttgaattctatggtgaaggtatgggtaagctgtctttagctgacagggccacaattgcgaacatgtcaccagaatatggagctaccatgggcttctttcctgtggaccatgtgacattggattaccttaaactgacaggccgcagtgatgaaactgtgtcaatgattgaagcatacctgcgagccaataaaatgtttgtggactacaatgagcctccaacagagagaatatactcatcttatcttgagctgaaccttgatgaggtggagcctagcatgtctggcccaaagaggcctcatgatcgtgtccctttgaaggaaatgaaatcagattggcatgcttgcctggacaacaaagttgggttcaagggttttgcagtgccaaaggagcagcaggataaggttgtcaaatttgactttcatgggcagccagcagaaatcaagcatggtagtgttgttatagcagcaataactagctgcacaaacacctcaaatcctagtgttatgcttggtgctggtcttgtagctaagaaagcttgcgagttgggtcttgaggttaaaccatgggtgaagacaagccttgcccctggatcaggagttgtcacaaagtacttgcttcagagtggtcttcaagaatacctcaaccagcaaggattccatatcgttggctatggctgtaccacttgcattggaaactctggtgatctcgatgaatccgtatcaactgccattacagaaaatgatgttgttgctgctgctgttttgtcgggtaaccgtaacttcgagggtcgtgtgcaccctttaactcgggctaactatcttgcttcaccacctcttgttgttgcttatgcacttgccggaactgttgatattgattttgagaaagagcccattggatttggaaaggatggcaaggaagtctacttcagggatatatggccctcaacagaagaaattgcgcaggttgtccaatccagtgtgctgcctgacatgttcaagggcacctatgaggctatcacaaaaggcaacccaatgtggaaccagctaactgtcccagaagcgtcactctactcatgggattccaaatccacttacattcatgagcccccttactttaaggacatgaccatgtccccacctggcccctctacagtgaaagatgcctactgcttgctgaacttcggggacagcatcactacagatcacatttcacctgcaggaagcatacacaaagacagtcctgctgctaagtatttgatggagcgtggtgtggaccggaaggacttcaactcatatggtagccgtcgtggtaatgatgaagtaatggcaaggggaacgtttgcaaacattaggatcgtgaacaagtttttgaacggagaagttggacccaagaccattcatgttcctactggggagaagctttctgtttttgatgcggccatgagatacaaatctgagggccatgctactataatcctcgctggtgctgagtatggaagcggcagttctcgtgattgggctgctaagggtccgatgctcctgggagttaaagctgtaattgccaagagctttgagcgtatccacagaagcaacttggtggggatgggaatcattcctctgtgcttcaaagctggtgaggatgctgattcgcttggcctcactggacatgagcggtacagcatcgatctccctaccaacctcagtgagatccgtcccggccaggatgtgactgttactaccgacaatgggaaatctttcacttgcatcgttcgctttgacactgaggtggagctggcgtacttcaaccatggaggcatcctcccttatgtcatccgcaacttggcagctgcgcataactgaggcaagatcacacaccgtttgacccacaatggcagtggcaggctccatgttcccagggctagcgacctggttctcaatgtagtgacatttgtgatggatctaggggtctctttgtcgattcagcccataaataaagtgtgaaataaaagccgcaggtggaggcaggaacctgctgattgagggaacagttttgcctgtgtttggttacatgaattatctgtttcacagatgtgtagagcatggtgtaaatgcttcatgtgctgttcgtttcgacaaattgattatgctgtagcccttcaggtttcatcttgacatttcggtgtcttggagcacattcttttttctg

SEQ ID NO: 5455 - DNA, 757 bp, Zea mays
  Clone ID: 700455983_FLI
gtcacctggaagagggccgccaccatggaggatgtcctcagggaggctgacgtgataagtctgcatccggtgctggacaagaccacctaccatctgataaaccccgagaggctggccatcatgaagaaggaggctgttcttgtgaacgcaagccgagggcccgtgatcgatgaggccgcgctggtggagcacctcaaggctaaccccatgttccgcgttggcctcgatgtctttgaggatgagccttacatgaaacctggactcgctgacatgaagaacgccgtcgtggtaccgcacatcgcatcagcctccaagtggacacgcgagggaatggcaaccctgtctgctctcaacgttcttggtaagatcaaggggtaccctgtgtgggggaaccccaatcaggtggagcccttcttgcaggagaatttgacgccaccgcctgcctgcccaagcatcgttaatgccaaacaaattggcctgccatcggcaaagctttaggagcgaacactgacaggctggtatctacatgttgaagatgtgtcgtcgtcgtctccaccacgcgcacatatatgtacatgcatgtggattgaggtcatgcatctgcagagcaggtagcacatattaatttggatcatatatattgaccaatacacactgtatgctagattgctaggttgctgtgcatggatcatattgatcaatgacgaccaggcctccctccgtttcccttctatatttaggacctatttggttcctt

SEQ ID NO: 5456 - DNA, 941 bp, Zea mays
  Clone ID: 700456021_FLI
ggaagaggaggaacaacaaattttaaaaggtgatgaggtgattgttgaactggatgcttcattagaggacttgtacatgggcggttcattaaaggtttggagagagaaaaatgtcataaagccagcaccaggaaagaggcgctgcaactgtaggaacgaagtttaccatcgacaaataggtcctggaatgtatcaacagatgactgagcaggtctgcgaccaatgtccaaatgtgaaatttgtacgagaaggtgaattcttgactgttgatattgagaagggaatgaaagatggacaggaggttttgtttttcgaggaaggcgagcctaagattgatggcgaaccaggcgatttgaagttcaggatccgaacagcattacacagccacttcaaacgagaaggcaatgacctgcatgcaacagttacaatatccctgctgcaagctctggttggtttcgagaagacaatcaagcatcttgacaaccatctggtagaaattggcaccaagggcatcaccaaaccgaaggagatcaggaagttcaaaggtgaaggcatgccactataccaaagcaacaagaaaggtgacctgtatgtgacattcgaggtgttattcccgaaaaccctaaccgctgaccagaaggccaagcttaaggatgttctcgtgtagaccattgttttccacttgtatgctactgagtttgaggcagagcgccttgaggaaaattttcggagtagcttgcataggaagcagcagctgcttcctttttatgtgattttccattgcaaatcctagcagcatggtcttctttttctttcccttgcgttttgttatgcgcccttaacagctcggtgtaggtttagaaggcacaacaaaactgtaccagaatatttgtacctttggaattctgaatacatagattgaacacctcgggtgcttgctt

SEQ ID NO: 5457 - DNA, 2059 bp, Zea mays
  Clone ID: 700456028_FLI
gaggaacagagcagacgacgcgaggcgatttctgcgggtttgcttgctccatctgtagaccttaggccgccgccgggcgaccgtgcgcgtgcggtgctcacgccccaccccgctcaggtgaaggcacttcaagatgggcgaggtacacgaagctgacaagaacattgagatctggagggtgaagaagttaatcaaggcacttgatgctgcaaggggcaatggaactagcatgatttctctcatcatgccacctcgtgatcagatttcacgcgtcactaagatgctgggtgatgagtacggaactgcctcaaacatcaagagcagagtcaacagacagtctgtgttggctgccataacctcggctcaacagaggttgaagctttacagtcgagttccccccaatggtttggtgctctatactggtaccattgtcaccgatgatggcaaggagaagaaggttacctttgacttcgagccatttaggcccattaatgcttccctgtatctctgtgacaacaagttccacactgaggccctgaatgagcttctgacgtctgatgacaagtttggtttcataatcatcgatggcaatggtacactgtatggtacactgagcggaaacagcagggaggttctgtacaagttcagtgttgatcttccaaagaagcatgggcgaggagggcaatcagcagtccgctttgcccgcctgcgcatggagaggcgacacaattacctgcgcaaggttgctgagcttgcgacacaatacttcatcaatcctggcaccaaccagccgaacatcgttgggcttattcttgccggttctgctgacttcaagagtgagctgggtaaatctgagatgttcgatccacgccttcaggccaaagtagtgaagatgattgacgtgtcttatggtggggacagcggcttcaaccaagccatcgagatgtctgccgaggttctttctgatgttaagtttgtccaagagaagaagctgatcgggaagtacttcgaggagataagccaagacacagggaagtacgtccttggcatccaggacaccatcacagccctggaaatgggcgcggtagagatcctgatcgtgtgggaaaaccttgatgtcaggcgttatgagctcaagaacagtgccacaggagagacagtcgtgaagtacctgaacccagctcaggaggctgaccagagcaacttcactgacgaggcgacatccggagatctggaggtcattgacaacacgcagctgctggagtggttcgcggagaactaccaccagttcggctgcacgctggagttcgtcaccaacaagtcacaggaaggttctcagttctgccggggattcggcgggattggtgggatccttcgctacccagccgacgtcagtgcctaccaggacggtgacttgtctgatggggagtatgatgaagacttggaatagcaatcaaccagaactcaaatgaatccggtccgggaggagcctgcgctggcccgggccgtgccgggagggaaccctgaaacttccaaacgatcggtgcaaggagaccatggtggaggatctgtagggaaggaggcttgagcaacttatataggatatatatatatggaagcttgtcaagctggtgagtggagactttggagacggtgttttgctctgttgatccgagcttgcagtctggtgatgctactaggaatcagccgtggacgctgccttctgttggtcaggagagcctataatgagtatcgatcaactagcatcctattagtattgggttggtgccagtagtatggtgaataaaatacctggaggactccgaggttgcacgtacgctttatgatgtgcgtgatatctatgattgtgaaaatgtctgtgacctgtcatttcttataatccatgttctcgttgttgtggattgaggcaatattttgtggaagatttgtcattgggtagtaacttctcgcagagcaagtgcagtaggatgatgtgtgaaagaggaacagggagagaagaaaagccagatgttcatgaacagacttgatattttgtaag

SEQ ID NO: 5458 - DNA, 593 bp, Zea mays
  Clone ID: 700456043_FLI
ctggtgttggacggagggggaggggacgtggatggcggggaggattacgtggagacgcgatactacgatggcctcataggcatcgacaagcagcatcacacgactgggacaggctttatcaaagtggagagatccaatggcagcaccttcagtgtgatgactaacggctacccacctgccagctctgtccgctgcacgagcaatcctgcgacaaatgattggataccatcttctgaatcgatcatccctgcttcgaacaagcccagcaggagcgactcctgaccagccttgccttgccttgaagtgccgtgaattgcttacctgcaaagataataaaatgcactgcttctgtgtggtagtaccgtacgcgccagagatcgtgcctcgacactcgagagagagaagggaagcatactgccggagtgccgggcgcgtgggtgggggacacgagatgtgactacttcaacgaaaaatgtgtacgggtacgggtgcgtcagcacatgttacttgttgctgcacctgcatactactgttcgagtgttgataatgaactacagaccctgaatgaatgtgcctatgtgatggtttggtcc

SEQ ID NO: 5459 - DNA, 828 bp, Zea mays
  Clone ID: 700456059_FLI
caactatgcagctgcctactgcactggccttctgttggctcgccgtgtgctcaagacccgtggtttagataaggaatatgagggcaatgttgaggccactggtgaggacttctctgttgagccagctgatgagaggaggcctttccgtgctctcttggatgttggccttattaggactacaactgggaaccgtgtctttggtgccctcaagggagctttggatggtggactggatattcctcacagcgagaagaggtttgctggtttcaagaaggatgacaagcagctggatgctgatatccatcgcaagtacatctatggtggccatgttgctgactacatgaggaacctcgctgaagaggagccagagaagtaccagtctcacttcagtgagtacattaagaagggaattgaggctgatgacatggaagctctgtacaagaaggtccatgctgccatccgtgctgatccttctgtggtcaagtcaaccaagcagccaccaaaggagcacaagaggtacaaccccaagaaactgacatacgagcagaggaaggccagtctcattgaaaggctcaaccaactcaactcctcgggcggcgcagatgacgacgatgaggatgacgagtaaagtttggtcccaccgaagtagtgctatcttatgcggcgatcagtatttgtgctatggcatttatcgctacctgtagtcgtgcaacatgcatttttgtttaagtttgtcgatgcgaacaaagttgtttctgttagtttggagctggagttctgaatatttacttttataatattaaaattggaccgagttgaacaaagttt

SEQ ID NO: 5460 - DNA, 1251 bp, Zea mays
  Clone ID: 700456081_FLI
caaaacaaaacaatggcgacagcgagtgagatcgcggcggtgggcgtaataggcgcggggcagatgggctcgggcatcgcccagctcgccgccgccggaggctgtgccgtacttctcctcgacgccgaccccactgccctctcccgtgccgtcatctccatctccgcctccctacggcgcctcgccgccaagggccagctctcccaggccgcgtgcgaggactcaataaagcggataaggtgcgtctccgccgtgcaggatctcagggacgcggatcttgtgatcgaggccgtcgtggagaacgaagctgtcaagaagaagctattcgtggagctggataaggtcacgaagccctcggccatcctcgcctccaacacgagctccatctccataacccgcctggcttcagctaccaaacgcccctctcaggtgataggcatgcacttcttcaaccctcctccggtaatgaaactgatcgagattatccgaggagccgatacgtcagatgaggtgtttgctgcggtcagatctttctccgaaagactcgggaagtccgttatatgctcgcaagattacccaggattcatcgtgaaccgcatcctcatgccgatgatcaacgaggccttctgggctctgtacaccggagtggcaaccaaagaggacatcgacgcagggatgaagctgggcacgaaccacccgatgggccctctgcagctcgccgacttcatcggcctggacgtctgcctctcagtacttcgggtactccacagcggcctgggagatagcaagtacagcccctgccctctcctcgttcagtacgtcgatgctggccggcttgggaagaagcgtggagtaggcgtgtattcgtatgggcacaggccttcgtccgtcaggccgaagtcgtctctgtaggcgtgagagcaaactgttgggcgaataaaaccaggtgcgtgttgcaattgcacgtcagagaaaaagggagcacagcctagttcagaggtactcagtcggacgcttcaggtcgtgtagattcgtaatggcagggtttgctgctctatgtagaaaagatggttcagtgtttttaatctgataagtggaagtcatgaaacatttccgcagtttgcgttctgctcgagagggtgggagaaacagaaaagctatacttcttttgtattgtaatcctctgtaaactacaaacagacagatctcactctctgaaccggtaaaggaaaccaatgagtttctattgtg

SEQ ID NO: 5461 - DNA, 1327 bp, Zea mays
  Clone ID: 700456110_FLI
cagcgagcgagagcaaggcgcccaagcaaccaccgcgagaacaagtcgcagccaaacagccccgtctcccagcgaagcttgagcttgcattattctaccatgtcttccatggagctgctccacgccgtcgtcccggagaagcagagcgaggaggaggtcgcgcccgcagcgacgaccacgagcagcagcgccaccgccacgggcggggacgagggcgcccacgtgctccaggggtgggccaagaggaagcgctcgcgccgccagcgatcggaggaggagaacctcgcgctctgcctcctcatgctctcccgcggtggccaccaccgcgtccaggcgccgccaacgccggtcccgtccgcggcgccggccgccgcggagttcaggtgctccgtctgcggcaagtccttcagctcctaccaggcgctggggggccacaagaccagccaccgcgtcaagctgcccacccctcctcctcctcctcctgctgtaactgtcccggcagcagtgcccgtcccggaggcccccgccccgaccaccgtcgtcgtcccgccgctgccgccagtcgaggtcggccgcgagccggccacgtcatccaccgccgcgtcctccgacggggcggcctcgagcagagtccaccggtgctccatctgccacaaggagttcccgaccggccaggcgctcggcgggcacaagaggaagcactacgacgggggcgtcggcagcgccgccgcgtccaccgacgtcccggcggcgcccgccgagacgtccgccgaggtcgggagctccgccgcgcgtgcgttcgacctcaacctcccggccgtgccggagttcgtgttccggtgcggcaagcccggcaagatgtgggaggaggacgaggaggtgcagagccccctcgccttcaagaagccccgcctcctcatgaccgcgtgaaaccgctgcgcgcgcgggcggcggatcttatctcatcacccgtccaagattttggtccgcagctgccgagttcagcggtggaagtggaacacactattcgttcattcatttcgtatggtgccagtagcgctattgtttgatttttgtggctgctcctcttgtacagtaccgagtgcgagaaaagatgcatagtcatcgtatacataccaatacaataccgtacctataggtcttcctattcctgtggaagagtagaacttgtatccttattagctgtcagttcatacacacttggttctcattatcagagatcattggtgaattagtggttttgtatcataagcttattgtaaatgatggattggagattagtatggaatcagatacccatttgttc

SEQ ID NO: 5462 - DNA, 1527 bp, Zea mays
  Clone ID: 700456113_FLI
atcaacccaaaccctagcatcccctttgctcgagggagacgaagatggcgccgaagaggaagacgagtggcgacggcgtggtagaatcgccagctgacgagttcgcaaagccggcggacgacacgaagggatcgccagccgagttcgccaaaccggtttaccttgtggcggcgcgcgacgacgacccggcggcctactccgttctggagatcgacgccgctgccggtggcgacgagccgccgcgcatccgcaccgttgccggtctgacgggcttcatctccgagcctggcatgtccttcgtcgcggcgcattcgaagcacggctcctggattgtcggcgtcggcggtgggttaagagcgggcaccatcatcttcgacccgaggacattgaagactttccgcggcccgcggctcaggtaccccaagcgcgaacccgtcctgatctcgcacggcagcgagatatacgctatctcacgccgccccctggtggtgcgcccgatcgactgcgaaccatggttcgaatgcctcagcttcaacaagggtgtgccctccaaagattgcggcctttgcgtccactggagcatcctgccaccaccacccttcttcccttgcttcctgaacccctatgaatttcgcaatccacccaaaattacagtctcatcctatgctgtcgtgggctcatacatcttgatttccccgcaaccagagctagtggtaggaacctatgcttttcatgtggtgaacaagacgtgggagaagatccacgacgagaacctgccttttgttggccaggctgtgccactctgcggcagcctcttcgccgcctgccccatatccaacaacagtatcactgcttctgcctctgtgttccacatgtccatcaaggtccccccatccacccttgttgcggcagtgagcactccctcattatcaatccaagggttcaaagtggtggcatcagagtacaagattccctggccactcttctgcccccgtggaaagggcagcttctgtttcatcaggttggggtcctcttgtcgtcggcagagccgcaaagccttgaagcggcttaaggttagcttgactgccttatggatcgaaaacattgaggctatcatgactcactgtcagtcccagggagccaaggctaaggatctgctagttgcagttcaagtgaaggaacagagtcatacatgcaaatccaagggcctatttggcatggctgtggttgctgccttctccatggacactgaaaatgttgagctgggggatgaaacgatggatacaaatgcaagctgcgccactaatagcactgtcttcgaagcacctgtaattcgcataggctgatgagtgccaacttttgtgttaaacagatgtagatgtcccttctcactctcccatttggtcgtgtctgattcatttaaacaaacttggtcagacataaaatggtagttagttatccatacactgctacggtttctataaactttgattaaataatatatttatcgaaatataattatttttt

SEQ ID NO: 5463 - DNA, 1627 bp, Zea mays
  Clone ID: 700456128_FLI
ggacgacgcaccgcacactacccgacggtggaactcctcgcccgcgtcgctgctccggtctccgcgctgctagccgccgactgtaataactataacatttcaggtgtgcttctgaagagagatttcgttgaacaggatgaatgcattggcagcaaccagcaggaacttcaagcaggcagctaagctgctgggcctcgactccaagctggagaagagcttgctcattccattcagggagatcaaggttgaatgcacaatcccaaaagatgatggaactttggcatcctatgttggatttagggttcaacatgataatgctaggggacctatgaagggtggaatcagataccaccatgaggttgatcctgatgaagttaatgccttggcacaattgatgacttggaaaacagcagtagctaacataccatatggaggagccaaaggtggtattggatgtagccctggagacctgagcatctctgagcttgagaggcttacccgagtttttactcagaaaatccatgacttgattggcatccatactgacgttccagctccagatatgggcaccaactcacagacaatggcatggatacttgacgaatactcaaagttccatggttactcacctgctgttgtgacaggaaagcctgtggacctcggaggatcattgggaagagacgccgctactggaaggggagttctgtttgctactgaagctttgcttgcagagcatggcaaaggcattgcaggccagcgtttcgtcatacagggattcggtaacgttggttcctgggcagctcagctgataagtgaagccggtggcaaggtgattgctatcagtgacgtcacaggcgccgtcaaaaacgtcgatggcctcgacatcgcgcagctagtgaagcactcggcggagaacaaggggatcaagggcttcaaggggggagacgccatcgctccagactcgttgctcactgaagagtgcgacgtcctcatcccagcagcgcttgggggagtcataaacaaggataatgctaacgacataaaggcaaagtacatcatcgaggctgccaatcaccccacagatccagaggcagacgagatcctgtcaaagaaaggcgtcctcatcctccccgacatactggccaactctggtggcgtcacagtgagctacttcgagtgggtacaaaacatccaggggttcatgtgggacgaagagaaggtaaacgcggagctgcggacgtacatgacgcgcgccttcggggacgtgaagcagatgtgccggagccacagctgcgacctccgcatgggcgccttcacgcttggcgtcaaccgcgtcgcgcgcgccaccgtcctcaggggatgggaagcatgacctccctccgtgtcgtccgtgtgcccctccctgttgtatcctcttggtcttgggcccttgtttttctttggttaattattgtcgagatcaacggagatccgagaaaaacgggctcagttaataattccaagaagtgcgtcttcttggagataaaatagcggaaggagagttataataagtctgtaactgtaacccatagctgagatgctgtctgcaagcagcaatgccaatgccaatgccatctggttttcgtgc

SEQ ID NO: 5464 - DNA, 1508 bp, Zea mays
  Clone ID: 700456175_FLI
tcctcctcctccctccctcctttccatcccgtttcttcgccgcctccatctccaggccgcgtcgaattcttccatccaccgcaccggtcgacgacgacgacgaggatgctgggcgcagcgaggaggcagcttggatccggtcccatgctgggacagattttgcgaaggctccgaccagcggtgtcggctgaggtggcgaggggctactccgctgcggcgaaggagatgactgtccgtgatgcattgaactctgcattggatgaagagatgtctgctgatccttccgtttttctgatgggagaagaggttggagagtaccaaggtgcatacaagatttctaagggcttgcttgataggtatggtcctgatagggttcttgacacgcctatcacagaggctggttttactggcattggtgttggtgcagcttatcatggtcttcggcctattatagagtttatgacatttaatttctcgatgcaggctattgatcatatcatcaattcagctgccaagtcaaactatatgtcagctggtcagatatctgttcctattgtttttagaggaccaaacggagctgctgctggagttggtgctcaacactcacagtgttatgcagcttggtttgcacatgttccaggacttaaggttctcacaccatactcttcagaagatgcccgaggcttgctcaaagctgctatcagggaccctgatcctgttattttcctggaaaatgaattactttatggagaatctttcccagtttctgctgaagtgcttgattctagtttttgcctaccgattggcaaagctaagatagaacgtgagggtaaagatgttaccattactgcattctccaagatggttggctatgctctccaggctgcagagatactgtccaaggaaggaatcagtgctgaggtgatcaaccttcgatcaatcagaccacttgatagagctgctattaatgcatctgtcaggaaaaccaaccgattggtgactgttgaagaaggtttcccccaacatgggattggtgccgagatatgcatgtctgttgtagaagaaagcttcgcgtaccttgatgcaccagttgagaggattgctggagctgatgtacctatgccctatgctgccaaccttgagagaatggctgttccgcaggtcgatgacattgtgcgggcggcaaagcgggcctgctacagggcagtaccaatggcagcagctgcctgattggtggacaagcctttctgttttccttccatcggctttcgctctctagccagaaacatgtagtattcataaggcgcaggcaaattggccggaacccagactccaagcgagctaattttgtagatctgccatggtgtgctttgtcccgttagtcgatatatgtggcgttatttctagattcaagtccatttgcttctctatgatttttgtacaccgctaaataatcttcttaagcccctgaatggatgcaaaatatttaagatgttttaggaaaatac

SEQ ID NO: 5465 - DNA, 961 bp, Zea mays
  Clone ID: 700456186_FLI
gataaaactgaagctcaaagctgtctacatgtatgctgctggattttacacatattcaattttcgctctcctgttctgggaaacaagacgttcggactttggagtatcaatgtcccaccatatagcaactgttgttctgattattctttcctacattttccgattcgctcgtgttggcactgttgttttagcccttcatgatgcaagtgatatattcctagagattgggaagatggccaagtacagtagctgcgagtggctagcagttatggcatttcttctttttgtggcatcgtggatacttcttcggctcgttatgttccctttctggatcctaagaagcacaagctatgaagtgctgctgaccttggatagggagaagcatcgattttatggccccatatactactatgttttcaactgtcttctgttctcactcctagttcttcacatatattggtgggtactgatatggcggatgctagttaaacagattcaatcgaaagggcgtgttggtgatgatgttcgatccgattctgaaggcgaagatgagcatgaagattaactttttaggttgaatgattaactgaagaactacattgtgtgatacctgcagcaaggcacaccttctgaaccttttttttttcttttacagaagatatccagatattgtaattcattaggtcatatcattcgttcagcatagaagatgacaaccatcatttgggagttgtcaatgaagccgcctatcggatgctttttatcaaaacagaagtgcattgtatttatttcactaaaccatcatttataagagatacagaatgatcccttgttcatccattcttgtagctagacagttgatttgctttcaaatcatgtaatttgctacagaagcttagttgatttcttggtgtatcattcattgtgatggaaatggaaatcttgggaagaagttcccaac

SEQ ID NO: 5466 - DNA, 1330 bp, Zea mays
  Clone ID: 700456230_FLI
ctcccatatccgctcccctacctctccagcatctcccgtctccgtcgtctcgtctctgctcctcacctcgccgccagccatgggcaagatcaagatcggaatcaacggtttcggaaggatcggcaggctcgtggccagggtcgccctgcagagcgaggatgtcgagctcgtcgccgtcaacgaccccttcatcaccacggattacatgacctacatgttcaagtacgacaccgtgcacggccaatggaagcacagcgacatcaccctcaaggactccaagacgcttctcttcgtcgagaagccggtcaccgtctttggcatcaggaaccccgaggagatcccgtggggtgaggctggtgctgagtatgtcgtggagtccaccggtgtcttcactgacaaggacaaggctgctgcacatctgaagggtggtgccaagaaggttgttatctctgccccaagcaaagatgcacccatgtttgttgttggtgtcaatgaggacaagtacacctccgatgttaacattgtttccaatgctagctgcaccacaaactgccttgctccccttgctaaggtcattcatgacaactttggcattattgagggcttgatgacaactgttcatgccatcactgccacccagaagactgttgatggaccctcagccaaggactggagaggtggcagggctgccagctttaacatcattcccagcagcaccggtgctgccaaggctgtcggtaaggttcttcctgaattgaatggcaagctcactggcatgtccttccgggttcccaccgtggatgtgtcagttgttgacctcactgtcagaatcgagaagggggcctcttacgaggaaatcaagaaagctattaaggctgcttctgagggcccactcaagggtattatgggctacgtggaggaggatctggtttccaccgacttcaccggtgacagcaggtcgagcatcttcgacgccaaggccgggattgccctgaacgaccacttcatcaagctcgtctcttggtacgacaacgagtggggctacagcaaccgcgtcgtcgacctgatccgccacatgttcaagacccagtagagagagatatttctgcctccctatcgagggtcgtccccgatggcctttggtcgcagaccatctttgctgcttgtctatgctgagaataaatgtgaacggtgcccctggacgctggatccatgctggttttggacacggttgtctttttgtgtttaacttatctgctgccgtcctgtaacgaattcgctaagttttagttcttttgtgctttgttaagaatataaacaatgaggtttc

SEQ ID NO: 5467 - DNA, 481 bp, Zea mays
  Clone ID: 700456281_FLI
ccagattttctggacaatgtgtatggcgttgatccttctgaagtccacatccacgtcagaatggttcagctccatcacatccccacaacagaagacaagataacagaatggatggtagagaggtttaggcagaaggaccagctcctggcagatttcttcatgaaggggcactttcctgatgaaggaactgaaggagatctgtcgacgccgaagtgcctggcaaacttcttaacagtagtatgcttgacggccatctgtttgtacctaactcttttctcatttgtgtggttcaaggtctatgttgtagcaagctgcgcttacctctcatttgttacctattactccatactaccaccccaactgataggttcaccagagggtgatgtcaaggccaaaaaggttgtgtagatgttgatgtaacttgccatgaaaactgtacatccgcaaacgatttttactgctggagtttctgccttgtgac

SEQ ID NO: 5468 - DNA, 885 bp, Zea mays
  Clone ID: 700456303_FLI
caggatgagctggacgacatggccaaaacctatcctggccgctttaagatctactatgtgttgaatcaggtttgtgtcacattctttagaaaatttgaaggtattactgtatcaacattctttatttcatgtataggaacacattagtttttttttgtaaaaagaacagcaggcttcactgtttcaactctccatttattcaaaacttttagaatgactgcagaattcatgttatagctaaaacaatatccaaatgtacttccttgctatgttgttctctatcatttgaagttattatcctgagaaatctgctttacgttatactaattagcacattgtttccaaagacatccgacatacacagtgtttttacttgtgcagcctcctgagaactggaacggtggtgttgggtttgtgtctaaggaaatgatccaatctcattgtccagcgcctgctgaggacattcagatcctgagatgtggtcctcctccgatgaacaaggccatggctgcacaccttgacgagctcaactacacaaaggagatgcagttccagttctaagcaatgttaagtttgcaaataataattagtgaccgacatggttcttcggtcacaggaatagtacctgactctgctcgttagctgatatcaggaggaattcaggatcacatgatgattagtagtgcgccagcattttttgcaatctctatttttgaggtcaaatgatatctacctccacataaatccacattggcagagacaacattttgttactatcattattgattttaaatgtggaccattggatgcgataagaaatgtctcactatcatcagttaaccatagcaatgcaaagaaccttacttttggttcatatatacaacc

SEQ ID NO: 5469 - DNA, 573 bp, Zea mays
  Clone ID: 700456329_FLI
cttcagccgcgttctgaccaccatgcggggaacgatgggctatctggcgccagagtggctcgcgggcgcgccggtcaccgccaaggccgacgtgtacagcttcggcctgctcctgttcgagctcatctcgggacgccggaacaacggctcctcggaggcagggtccaactccgctgtgtacttcccggtgcacgccgccgtcaggctgcacgcgggggacgtggccgggctgctagacgacaagatcgccggggatgccaacgcgaaggagcttgagagggtctgcatggtcgcgtgctggtgcatccaggatgaagaaggcgaccggccgaccatggggctcgtcgtgcagcagctggaaggtgttgctgatgtcggcctgccaccgatcccgtcacggcttcacatgctggcgatgatgaataaatgtgccgtcggtggggaagcagaggttgaaccctgttcaaatagcggtagcaaaatagacacagaagtttgaaggtactacgcaggtccgataggtaattgtagtttcagcatgcgagtcccattgttcatatgcctgtttgccgt

SEQ ID NO: 5470 - DNA, 1342 bp, Zea mays
  Clone ID: 700456337_FLI
atcccgcctccgccttaaaccctaaaccatgacctctcgcgccgccgcggaggccgccctcctccttccgctccgcctccactctgccccgctccgcctgcgcttcttctgtacctccgcctcccggctccgatgggcgtgttccgcggcggcgctgcttgccgtcgtttcgctcgtcaccgccatctgcgctatgcccgacgccggcgccggcaccaacgttgaagccgatgccgacgctttgcggttggagattgaagcgctcaggctaaaggtcgcgcggctggaatctcttctagaggcaaattcgaaggcattagacattaaggctagtatcttggaggaggacaacaaactcaatgaagcaatggaacgtgaaatccagcttttaacgaatggaccagacagaactaagaactcccaaagcaaatcatattctgctggcaatattaaatctatggaagatgaggtgcggcaacttcagcacgagatcattaagataaacagcaattcttacaccgttgaatcattagcacatgatactgagaaaagggtggaagctttgagcttggaggtaaaaaagatagaggatatgactgcagaacaatggatccaaattcgacaacttgaacaagcatttgtgttaaccaagatgatgatgtcaaaagttcatgagagaagtaggccatcagatacagtttataagtggcctggaaaagaaataattgttaagtatgtcaggaatatcaagcttgatggtatttatcttagaggggcgtcatacgtgaggtcctgtttttcacatacatataaacagtccagaagttttgtacaagcaataagcagatgctaccatgagatttctcggttccgcaaagcaattcgtcacaggtatacatctgatattaacaagcctgatgtgttctttttgggtggtaccatttcaagatcaaacatttctcttccatataaccaattcaagattttcatctcattggcacggaagtttcattacaaggcccaatgttttatacgtgatgtgatggaatccaacaaatatagttgtggtttgtcgaacgagccagttacatttatcttggcatatcttgttgtcatttctccattgtggatcgcttggttcctttattcaacatggttcagctcaaggaagtgacaacttgttggaaaacaggaacgttgcagtcatgggttctttttttttcttcttttttaggttcaaaaggtatacacgtgtgacggaagacaaatatgtggaaaatttgcaatcaccaggacttctaagaaatataactgttatatatatatagaactaacttatcgt

SEQ ID NO: 5471 - DNA, 1083 bp, Zea mays
  Clone ID: 700456460_FLI
ggaatgcagatatagatggtggtgacccatcagctgactgttcttgcttgattcgaactgccatcagatgcgttaaggaaacggttcacgttgatctatctagttgcacccactggaaccggtttgtcgaggtacattacaatagaataggcaaagatggactgttcagtcataaagaaattactgttctgtttgtgccaaacttgttggaatgcttgccttcagtggatatatggaagaataactggattctgtacaaaaaatcaaaggcagaaagggagcagctcactgttaaaaagagccctggtgatccaaaagagcagatgcaaggggagctgaacgatggtaaaaatttagatgctgatcaattaaaagaggctgatgttggttgcagtgatatgaaaaatgagaaagacgatgttgatatcaaacagcaaggcaatgatggagagggtacgggtaaagttgaggaacctgttcagaagatgggtggggatgttgaaggaaaaagtacgggtgactcctctattgaccatgcaacaactggggataaaaagcccacaaaaaagaaaataataaaaaaggttgtgaaagttgttcgaaaaaaaaataactggaccttcagttgataaatcttctgaggacaagattgttgtagcagaatctgcaaacaaaactgcagaaggggggcaaagtcaacaaaagaatgatgatgctggaaaacaacaggagggagctggtataagtcaacaaccagaagcaaagaaaactgtgaagaagaaaataattcgaaggattgttaaaaggaaagtttctggttcaggttctcagttgaatacccctactacacctgctgaaactagtaggcaagaagcagaagttcagccagaaaaaaatgttgagagttcggccgacgttggaaactctcagactaagctacaagaagggtccaaaattccatctgaagatatctcaaatcagaagaaagaggagaaaccagcggaaaaggaacacccattgactgatctcagtttaaatgcagataagggcaatcacaaggaagcttttgaacaaaaagacatg

SEQ ID NO: 5472 - DNA, 796 bp, Zea mays
  Clone ID: 700456476_FLI
cggcagggaagcaacccttgacatggcacaaggcctacttcagcgcgccgtccggcgacgcgccggtggccctggacatgggcagcatgggcaagggccaggcgtgggtgaacggccgccacatcgggcggtactggtcgtacaaggcatcctcctccggcggctgcggcggctgcagctacgcggggacgtacagcgagaccaagtgccagaccggctgcggcgacgtctcccagaggtactaccacgtcccgcgctcctggctcaaccccagcggcaacctgctggtgctgctcgaggagttcggcggcgacctgcccggcgtgaagctggtgaccaggacggcgtgatcaggaatggagaggggagggcatgccgcacgcacacaggatgtgaataatttgctgggaagagaagcgagctgagggcagggcgcgcgcgcgcagacacgacaccgattctttcttcctcgtgaagtatctatagatacggcgtacatacggtcacaattcgtgcccactatacgtacgtacaaaaaagattagtacactagcgtttactgtaggtctgttcttggagttggccgtcgccggcacggctgcaggaactgcggctcacggccggctggtaatggtactagtagcatggtttttgctctgcagtccgcatgaatctcaaggcgcacgcaggcttaattttcttagcacaaatttgcgaaactgagttgtaaatgaggttatttattcctacgattaagtaggatacaagacgaataattattatgtgagttcttttt

SEQ ID NO: 5473 - DNA, 725 bp, Zea mays
  Clone ID: 700456477_FLI
gtgctgccgagcgcactcatctggacagtggcttcggctgctgctatacccgaaatggaagtccagggacaaggacgagctgcaaggcttcgccgtggaccgccccgagcccctggtgcacttcgcactgtcctccggtagctactcggatccagtggtgcggctgtacagccccaagagcgtgttccagcagctggaggcggcgaaggaggagtacgtccgcgccaacgtgggcgtccgcgggcgggggcagcacaagatcatcctccccaaggccctggagctgtacgcgagggacgccgggctgggcgcgcaggaggtggtggccgcggtcgagtgccacctgcccgagggcctccgggacgccgtgcgccggagccagcagcaggccggccgggcgcgcgccgtggagtggaagccccacaacctggcgttccggtacctgctggccaaggagctggtcggcgggtcccccgcgtgcagccggcagctggaaccggtcagtgcgccgctgcgggctggtccgtgatccatcatcagatcgccgtgggtccgtggccgtgccgagccgagcgcgagttgagatgtgcggcggtggctggcggcggcacactgcgttcgggccttgggggcatttgtatgtacagagaagtcagagatagatggacggcgaaacagacatctgattttactagtactagtatgcgccctgctgtcaaactgtc

SEQ ID NO: 5474 - DNA, 1361 bp, Zea mays
  Clone ID: 700456490_FLI
cgccgcgagtgaattccgctaccccaatcaatccgacgccagagagagagtggcgactggcgacgcggtccggtccccccaattcccaacggccggcggcgcgacaccccgatccggatcccatcgcctgccgggagcctcgattcgggcggcggggacgacgattcgaccgcgtcggtaaccaggcaggggaaaggaggggatgagcttccaggacctggaggcgggccacgtccggggggcgccgcccggcggcggccggaggagcggccgggcggggggcgccggcgccggcgccggcgcgtcgcaggccgtggcgtcgggcgtcttccagatcaacaccgccgtcgccacgttccagcgccttgtcaacacgctcggcacgcccaaggacacccccgacctccgcgacaggatacataaaacacggcaacacataacacagctagtgaaggatacatcagacaagcttaaacaagccagcgaggcggatcatcgcgttgaagtcagcgctaccaagaagattgctgatgcaaagctagctaaagatttccaagcagtcctaaaagaattccagaaagcccaacgattagcagcagagagagaagctgcatatgcaccttttatttctcaagcgggcttgccacagagctacaactcaagtgaagtgaataatggtgctgataggttggcagagcagcgcacacagcttctagaatctagaaggcaggagttggtcttcttggataatgaaatcgtgttcaatgaggccatcattgaggagagggatcagggaatacaagagattcagcaccaaatcactgaagtaaatgaaatcttcaaagatctcgctgtgctagtccatgatcaaggagcaatgatagatgacattgattcccatatagagaacgccgttgtagcgacttcgcaggctaaaggccagctttcaaaggctgctaaaactcagaagtcgaactcttctctgatatgcttgttgctcgttattttcggagtggtcctgctcatagtgataatagtacttgcagcctaaaagcttggaaggcagctggggttccgaaatctgatcgagagcttattgcgacaaattccttcataagttatttttgctgtgctgctaggaatgattcctggtacccaggcggtgattggcgctctgcttgtggtgtggcggtatatgtggtgatgatgaaatctgatacataaaagtactctttcctgcaagtgtagtgcctcatgcacgtttttgtttatatattgtgatgtatgagtgcgtgctgtagaacaaggttggattatccgtggcatgaagtttctcgatctcatgagaaacgcttttctat

SEQ ID NO: 5475 - DNA, 696 bp, Zea mays
  Clone ID: 700456535_FLI
tcctcgagcaagtaaagttgcttttcctattatacttcattaataacatcttttattattaacctccaaatatagtcaacatgctctagcttaaattttttggttttcttcagcatgctttggtcatctaattgtgttgttttggtcagaatttgtctcaaacaaggatgggcggcaggaggatgatgagttcagaatctgatccatcactaaatgttgaacatcggagcatgaggagggcaccattatcgtcagctgggaacctccctcctatggggaggccaatctcttcgtcgcagcaggcatcagatcgcagagggggatcttcagcttccaacacaaggaaagatgagtacaactggagatacgataccaccgatgatatatctgaagaggtgctacgggcatcgactgctctagaaagtgttcagctagaccgcaaatctcggaatctgccaacatcttggaggcattcaggggatggcgccgagtaacaacaaggctttggagctggttgcttgacttgaccctgtatcatgtaatttgtatgccaatcatttgcagtgatacgatgcttggattgctgctatcttagagaagtggtaaactggttatgcgtgtttgtcttgtaacgaacaaaacaactttagtgttagtttcatgttgcaattttcaaagctctcatgttggaactgc

SEQ ID NO: 5476 - DNA, 1432 bp, Zea mays
  Clone ID: 700456578_FLI
gtgagagagacaaagcagtgcaggatctggctcggctgaagcagcatttgttagataaggatcttgaagaccaagaaaagatggatgaagatagtaaactcattgaagagttgcgggtagtatgcgagcagcaaagggctcatataatgcagttagagagggctttaaaggtcgagatggcaaagcaggaggagaacaaaaaggtcataagtgaagagcaccagaggtcaaatgaacaaatagaaaatttgaactacaagcttgcaagctgtatgagtgcacttgaatcaaaaaatgtggagctgctaaatcttcagactgcccttggacagtactatgctgagagtgaagccaaggaccgacttggaggtgatttagctgttgctagggaagaactgtctaaattgtcagagtcattaaaggtggcaaatcaaaccattgagatttcaagaagggaaaaggaagatatggctaccaaactttcacaagcagagaggatgttggcagatgggaaacgatccatgcagaagcttgaggatgacaattcaagattgcgaagagcgctagaacaaagcatgacaactgtgaataggatgtcactagattcagataactccgttgacaggcgcattgtgataaaactgctagtcacctacttccaacgaaatcacagcaaagaggttctggatctcatggtgcgcatgcttggcttctccgaggaagacaagcaaaggattggctttgcacaaagtaatgctggtaggggtgtcgttcgtggtgttttgggtctcccgggacgcctagttggaggaatcgttggtggaggtccatctggcaaatctactcaatcgtcccaggatagccagtccttcgcggacctatgggtggacttcctgctcaaggagacggaagaaagggagaaacgggaagcctcagaagctgcaaggcaatcacagcaagagagccacaccaccaccggtccaagtacatcgtcgagtatccaacagccatcacagcacaacccctcaaacgttgcacctggcccatccacaatgccacacaccgcttgggtctcccagaatcggaatcctcaacagttccgctagcatcatcatgctcgtccgtgctggctccatccccaagaccacctctaagatgatactcgacgatgccaattttctttttatggagtagaaatcaagtgcacactgtacagtatcggatacctttttgttgtgctgggagtgatcccgcatgcggacgccaaggctatttgttccattcgttgacaatgcgatgatgatagtagtagattcaaaaattggcctccttcctggagcatgtaaagagatcgatatgtaaaatggattcctaccctcgacaacagatggaggtaaaatgggagttggttatacgtatgttttgaagtaag

SEQ ID NO: 5477 - DNA, 910 bp, Zea mays
  Clone ID: 700456612_FLI
tcgtggttccctcgcctcccaggaggtcccgccggcttgccaatgtccctgaggtcaagtacgcagagatagcaccacaccgtgcagatagaatgacaaggtctcctagaagaccagctgacctcatctacttggcaagacgcggatcaatttccatgaaagctaggctggaggcaacaaggaaggctgaggagctagaatcacaactcgatcctgaaatcccatccttcgtgaaggcgatgttgcattcgcatgtggttcgaggcttttggctgggtctcccgagccatttctgtgacacttacatgccgaagcaagacgccactatcaccttggtggatgagaaggatgaagaattcgacaccaactaccttgcctacaagaaggggctaagtggcgggtgggctggttttgcgctataccatgcgattcaggatggagattcaactgtttttcagttgattaagcccacgaccttcaaggtgcatatcgtccgagcagctactgatgatagcagtgaagtagatgagtgactgcatgacctgacacctgtacttcgtacctacttagtgcttgttcggttattcctgttgttttcctgtcacatgtggattagatgggatcatgaaaaaatatgaaggattttgacttgttcgggatttaaacccatccaatctcacccaatccacatggattgagaggaaagcgaacaagcccttagcaggagccaggaggtggaaagcgggattttgagtatttttaggctttatctagcagaatgtattttatttgtatgcctgttgttattcatgctactatattagtgagaatcaggctcctaatttgcagaagtcataacttgcaaaatgcattatgagctattttctgcccagctgcatgttgctgtccc

SEQ ID NO: 5478 - DNA, 697 bp, Zea mays
  Clone ID: 700456654_FLI
gcttttattgttgaatatgggaaagacagggatgttgaactaggttttcatgttgatgattcagaagttacattaaatgtttgccttggaaaacaattctttggtggtgaattatactttcgaggtattcggtgtgagaatcatgtgaattcagagacacaacatgaggaaatgtatgactacacacatattcctggttgggctgtactccaccatggtcgacacaggcatggtgctcgagctacttcatctggtctcagaataaatctgcttttgtggtgccggagctctgtgttcagagagatgaagaaataccagaaggattttccgagctggtgtggtgaatgccagcgcgaaaagagggaaaggcagagtcagtgtgttaaagcaacgaagatggcctttctcaggggttctggaggtgcagcgatttaatttgtcgtaggtcatttatgttatatactgttttgcgtcatactgaacttcatcgtttaggacttgacaggggcattgtatcgatggccagctttgtgctagtgcgtttattggtgcgatcccagttgtatgtaaatgtaaacattgaccaaatgcagccgaaagaaatgtaatagcgggtcataaactgctatgaatttggatacttttgttgccaaaattgataaattggaacgccaatagcttggcgtgattattgatt

SEQ ID NO: 5479 - DNA, 1360 bp, Zea mays
  Clone ID: 700456677_FLI
ccagctttggcctgtggctgcactgttgttgtcaagctatcagagttaacacctctgacatcattagctgcagcagatcttgctcttcaagctggaataccagcaggtgcactaaatgttgtgatgggcaatgctcctgagataggtgatgcattactgcagagtacacaggtcagaaagattacgttcactggatcaacagctgttggcaaaaaactgatggctgaatctgcaaatactgtgaaaaaggtctctttggaacttggtgggaatgcaccttgcattgtttttgatgatgcagacattgatgttgctgttaaaggcagtcttgctgccaagttccgtaacagtggacagacatgtgtttgtgcaaacaggatattggtgcaagaaggtatctacgaaaagtttgcatctgcattcatcaaggctgttcagagtttgaaggttgggaatgggctagaagagagtacatctcagggtcctctgattaacgaagctgctgttcaaaaggtggagaagttcataaatgacgcgacttcaaagggagcaaatgtcatgctaggtggtagaagacacagcctggggatgtcattttatgagccaactgtagtagggaatgtcagcaatgatatgcttcttttcagagaagaagtttttggtccagttgcaccccttataccattcaaaactgaggaagaagcagtccatatggccaacgatacaaacgcaggcttagctgcatacatatttaccaagagcatacctcgttcatggcgtgtatccgaatctcttgaatacggcttagttggggtaaacgaggggattatttcaacagaggtggcaccatttggcggagtaaagcagtctggtcttgggagagaaggatcgaagtacggcgtcgacgaatacttggagctcaagtacatctgcatgggcaacttgggttgagttctgaaatctggcctgaggctagaaacgcttggcagatgatgaaccgagagaccaagaaggcaagcgttttgctgcaagaccggaggaacatggctgaaaggggccggccactggttgtgggggagcagttttcgaataaagcgaataagccgcggaacatgaacaaaagaaagccgaaatgagttgtaaatgacgtgaactataaagtatggcttcgcctccggacttttgtatacgtaatcatggcactacttgtctatagtgtctccaaagacgtccatgttacagaataaaagcgtatagggtggatgctacgttacaggctgtcggtggtatgtacacctcgcctgattcctgacgaaataaagctggatactgcattcttgcggctcttgcctgcaggggt

SEQ ID NO: 5480 - DNA, 553 bp, Zea mays
  Clone ID: 700456778_FLI
gttcgcactaaaatttcagcaaaccaatctattgagaaagttgaggtgttgcaatctaggacttatccattatttgttccatggaaaggtggagtgattttgggcgtccttgatattggtaaggatgcgtggattcatagagaagattggattaaaaatggtgtccacatcgggagtggcagaaaatataaggattcctattttcttcaggcgcaagtaatgtgctactacaacgtataacagtatcttatttccgagctacacacgaagacttgcacttatacaggttgttcgaccgtccaaaccatcctagaatatgattggtggactgcgattaaattgcgtacatgatgcatcagttctatgcatgctcgctgctgtctgttcggaggtcatcaactcgggacctggactaagggccttgtcgttcgctcaacccctatgaaaaagtttggctttctaaagatgtagtagaagtactcatttattccctgccaattgaacatttcaaatcttcgtatggtgttaatgaaaaatctgatgtttggattcg

SEQ ID NO: 5481 - DNA, 1582 bp, Zea mays
  Clone ID: 700456789_FLI
gcgccgccgccctaagccacgtgctgaggctttcgttggtctcttcgccggcgacgagcacccagttctgtagaaatggctgatggtgaggacatccagcctcttgtctgcgacaatggcactggaatggtcaaggctggttttgctggcgatgatgcaccaagggcggttttccctagcattgttggccgtcctcgccacactggtgtcatggtagggatgggacagaaggacgcatatgttggcgatgaggcacagtccaagagaggtattcttacgctcaagtacccgattgagcacggtattgtgagcaactgggatgacatggagaaaatctggcatcatactttctacaacgagcttcgtgttgccccagaggagcaccctgtgttgctcaccgaggctcctttgaacccaaaggccaacagggagaagatgacccaaattatgtttgagactttcaatgttcctgccatgtatgttgcaatccaagcggtgctctcactctatgctagtgggcgtactactggtattgtactcgactctggtgatggtgtgagccacactgtgcccatttacgaaggatatgcccttcctcatgccattcttcgtttggatcttgctggtcgggacctcacagactccctcatgaaaattctcactgagaggggttactccttcacaacctcagccgagcgagaaattgtaagggacatcaaggagaagctagcatatatagcccttgactatgagcaagagttggaaactgccaagaacagctcttcagttgaaaagagctatgagctacctgatggacaagtaatcaccattggtgcagagagattcaggtgccctgaggtcctcttccagccgtcgatgattggtatggaggctgctggaatccatgagacaacatacaattcaatcatgaagtgtgacgtggatatcaggaaggacctctatggtaacattgtgctcagtggtggttcgactatgttcccgggtatcgctgatcgtatgagcaaggagatcacttcccttgcaccaagcagcatgaagatcaaggtcgttgcaccgcctgagaggaagtacagtgtctggataggagggtcgatcctagcctcgctcagcactttccaacagatgtggatatcgaaggaggagtacgacgagtctggcccggcaattgttcaccggaagtgcttctagggtttcacaagttcctcgtcgttacctagtctcaaattatgtcccctccatttctcgagatatgtgtggcagatttgcatgatacgtttgtttgtttccatcggacctgaagtcttcttggggataggctcccccctttgtatgttgtggctccaatccatgtgcgagcacgctgtgtctgtcgtgacacctggttcgtgagatgggttgtcaaacttgattggtttgttgtgcgtggctggaagagctgatagttatatatttggcttggactgtgccgcttgtatgtatctgaattctgaaagcgttgtaatctgagcatccgtgcaaagtatgaatggcccttttatatgggctggattttccggtttct

SEQ ID NO: 5482 - DNA, 1168 bp, Zea mays
  Clone ID: 700456801_FLI
tgagccttggcgccgccgggtacaccacggccaccgcgccgcctcgtccccgaagatgcaccctgccgtttcgcgccgccgcctcccctgcggcactggaccgccggcgacggccgcataatgtggctggcgacttcttcgtcgaccaccgctgcatcgactgccagacctgccgatggatggcgccggaggtgttcaagagggtggatggcaaggccgccgtagcggcgcagcccagctccgaggaggagaggaccaaggccctgcaggcgctgctatcctgtccaacatcctcaattcacactgagaaacctccaaaagacattcttaaagtgcaaaacatgtttcctctaccaatcgacgacaagctactcccaggtgtttatctctgtgggtataattctgaagactcatatggggcaacatcgtacctggtaattcatccacaaggaaacatactgattgacagcccaaggtatactccaaagctggccaacaatattgaaaagcttggtggagcgcgctacatgtttttgacccacattgatgacgtagcagatcacaggaagtgggctgagcagctaaaatgtgaaagaataatacattcaggagatgtggaggaggctaccgcagatgttgagtggaaacttgaaggaaatggtccatggaacttaggaacagattttgaacttatccatacgccaggccataccccaggctcagtgtgcttgtacttcaaaccgctaaaggtgctgttcactggagaccatgttgcaaagtcagaagaatcagacgatctgaacctctttctgatgtacagcaagcagtcagtgagccttcagctggaaagcatcaggaagctactggagctagagttcgagtggcttttacctggacatggctatcgaatcaagtacaaagatgtgcgtgccaagaatgtagccatggagtccctcctagctaattacacaagctaggagcctatgagcatcttacttgagttagtgctcgcaaataagcattccaggaggctgaatgttgatgctatgtttccagagaatagtgtgcatgatgctcatcagctcttgaatgtgcatttgttaccagagactgtaccttgtgctgcacaccaagcaagtgaatgaatcaagcatacatgactcggccc

SEQ ID NO: 5483 - DNA, 1088 bp, Zea mays
  Clone ID: 700456807_FLI
aatggatctagcagaggaactgcaaagggaaaagaggataaatgctggcaaaaaaggaggatcaaaagctgcacccaagaaaccacgtaaaaaggctgcatctaaaaagctggatagcgatacagaagatgatgattttgaaccagcggttgcaaagcgtggagctcaaccgaagaaaacatccagcaaggcaaatgattctgcgtctgaagatggagattatgtggctgctgaaaatcaaaagaaacaatccaagaaagcaagtgcccatgtggacgaagaagttgacatgccttcgttaaaagaccgtctggctgcttttaatatcagcgactcctctccggatcattctgccatggaaactgaagtaacagaattgacagaacagcagaatgaaaacaaagcgacagagggagcaagcaaaagaggcggacgaaagaaggcgtcatcatccttggcgacgataccatctgatgttgatgaggaagtcctagaggtccaagctcagaagaaaggtagaggaaggaagcctgctgccgttgtgaagcccaaggctcctgccgccgccaggaaaagggcgccggctcagggcaaggtaacgcagaagaaaatagatgagatgctcaaggccactgaggataacaacaccagtgcatcttcccctgagaagaaggtccggaagatgaggtcctctcccttcaacaagaagagcggctcaatcttacagagaggctcgaccgcttctgcaagctctggaacaactgttgaagcttcaccaccctctggcagctctgcagagccagttggtgctgcacaacctagaaggacagccagggctaccaagaagcctatctatattagcgatagcgaccctgaggatgaagtggagttgattgatgattcggactttgatgcggacggtgactctgacgagtgaagattgtagtcatccgtactttggctgcaacaatatccagtttgtgtcgttgcatgtgacaatttgataatgcatttcttgtgcgttgtatgtgttcgttgcgttgttcagaactgttgccaagagctcaagacaacctggttaactggtt

SEQ ID NO: 5484 - DNA, 713 bp, Zea mays
  Clone ID: 700456813_FLI
cataccactcggtggtgcagacacggaacgtgacgctgtacgagagctgcgactacaacgactcggggcccgacgacaccgtcgagtgggccgccgcgccgccggagttcagcaaggacgccgtcaccgtcgccgtgccgctcctcgacgagggccgcgcctacttcttctcgggcaactacgacggcgagcagtgcgagagcggccagcgcttcgccgtcgacgtggcccacggccagggcctgccgcctgacctcaggccgccggtcgccgacgcgccggcgccctcctccgcggggcccgccgacggcgccgccgcgctcgacttcagccaccccaagaacgtcaccacgccgagcgcgacggacgatgacgacgagcaactgggcggtggctcggcctcctccagcctcaggtccgctctgcccgtgaccgcgacgctgctcatcaccttgctcttcgcgttcgcggtgtaggtggcatgcgttagtttcgcttttgtttgtgctgctgctgcttgggcctcataatttgtttgtttaatgcactagtacagttgaagggtttctctgtatagggagagagatgagatatgtttagtgctgtagttgttagtgaaatgctttcacttgtatattctggctgtttatttggtccgtaccgtgctccgtagtaatggatctcgataaaataataattatctcattctttgg

SEQ ID NO: 5485 - DNA, 1405 bp, Zea mays; identical to SEQ ID NO: 2517
  Clone ID: 700456835_FLI

SEQ ID NO: 5486 - DNA, 1012 bp, Zea mays
  Clone ID: 700456836_FLI
ctctgtcccaatcaaactgattgatccgtcgcccgcagggccacagcagccgcggcgaggtcgtccgtcggattcggaggctcagttattactgaaaagataatacagtacctatggcttctctggacgccgtgcgaggagacctcgccctgctgattctgtacctgaacaaggccgaggcgcgggacaagatctgccgagcgatccagtacgggtccaagttcatcagcaacggcgagccagggcctgcgcagaacgtcgacaagtccaccagcctggcccggaaagtgttccggctctgtaagttcgtcaacgatctgcacgctttgatcagccctcctgccaaggggactccgctcccgctgatcctactcgggaagtccaagaacgcgatgctgtcgactttcctcttcctggaccagatcgtgtgggcggggaggacaggaatatacaagaacaaggagcgggcggagtttctcgggaggatagcgttctactgcttcctcggctccaacacctgcacggccatcatcgagctagccgagctgcaacggctgtccacgtcgatgaagaagctggagaaggagctgaagcaccaagagctgtacaagaacgagcagtaccgcatgaagctgcacaagtcgaacgagcggctgctggcgctcgtcaagtcgagcctggacatcgtggtggccgtggggctcctgcagctggccccgaagaaggtgaccccccgcgtcacgggcgcgtttggcttcgccagctccctcatcgcttgctaccagctgcttccaagcccaccagcaaagcagagcaagtgaggactcccactccaagcactgtttaccaggaaaataatcccccccggataggtttgatttggttgccacatccccttgtatggcagactagactaatatatgtaatcatcatcataataattgataaaccatcccactatggataggtttggtcactccaaacactgttttttttattcatcgctaggagc

SEQ ID NO: 5487 - DNA, 859 bp, Zea mays
  Clone ID: 700456843_FLI
cggacacaggcacgacacgagctcagccggcggcggcagagcgggaggagggagaacgcttcggtcccccccaacccaacctcctccccttcccgacaaggcgacgcgaagcgagatgccgctgtacgactgcatgctgctgctgaagacgacggtgaccagggaggtcctagcggaactggtgacgcgggtggcgcgccgcgcatgccagcgcaacggggtcgtcaccgacgtcaagtcattcggcaaggtcagcctcgcctacggcatcaggaagctcgacggccgccacttccagggccatcttatgcaaatgaccatgatggttcccccttcgttcccgcaagaactccactatctgaacaaggaggacaggctgcttcgctggctggtcgtgaagcacagagacacggtatacgggttggagttcttgaacgcggatggcgggagggacgagctgagaagtttcagccatggtcacacgaagggcgactacgatattgaaattgactccgatgacgaagactccgacgactccgacgacgaagagtacgcaatcgaggaggaagaggaagaggaggcggcgaacgatgaggagaagaagtagaactgtttggccaggtttctgcagtctcatctgtattggcagatgcgcgttttcttagaaatcaaatgttctctttgtaacatctgcgactttttataaaggctgtagggtatgggatgagagtcagaacctatcacttgtgtttctgaacttttaaaaccaggaaaacgggagctggaacttaccggttggttgtaacatggatgacatgaatttggaaaatctctccgtgacaaagcgtgctttgatact

SEQ ID NO: 5488 - DNA, 877 bp, Zea mays
  Clone ID: 700456868_FLI
cgttagccgagagctcctctgctcctctcgtgtctggccgaacaggcagagcgaccagtctccagagcgctccccatggcgtcaggagctgcggcggcccctgtcgttcagactgtggtgctgaaggttgccatccactgccatggctgcaagaagaaggtccggaaggtgctcaggggcatcgaaggcgtgcaggacgtgacggtggacgcctcgcagcacaaggtgactgtgacgggcaccgtggacgccgacacgctcatcaagaggctgtacaagtccggcaagaagggagtgccctggcagtgtcacccgcccgccaagaacagcgagcccgcgccggaggccccgccggctccgcagcctgccggcgacagcagcaggtagttggggggaggcggcgccgctagctaccgcaatagagaaccctctctctctctgtggttgtaagtagagtagcctgttgctggcctcttccacttagtatagaggtcaaacctctctccatgcacgacagagctttttcttcgtttccttttaatatcttttttactgtttctaatgataatgagatacgcacgcgcgtttacctgtagtgatgttcaccgcgtctacgcccgccggctacttcaagaaattttgtactatgggctaggacaaatagatatacgtatatggctagctagtagttttctctgtctagagaaaggcaaatgcgtattttgtatctccttattagtatatattactcctgcctgaccgaatatccttccacttctactcgtcagttgaaacatcagtgatcactgatcagtcttcgacctgccatttggtttttttaaaacaacttagaaaattgggtctttggacctgccgt

SEQ ID NO: 5489 - DNA, 1418 bp, Zea mays
  Clone ID: 700456869_FLI
aggcaggcagctctccgttcggcttggcttgggcggctgccgcgtcgcgcacctgcgggcgggcagtggacagtggctgggcggtccgggtccggggcagccaggggcgtcgtcgcgctcgtagccactgaggccggcggcggtggcaacgtggcagtgcggtgccgagacaccgttccaccgaggaggctggggcaccgaacagcgaacaacggaagaagagcagctgaacaggcaggggagaggttccagctatgctcaccgcgcagccgccacctgaggtagcgggtgaggatgacagcagttgccaccatgtcttcgtggagtttatgaccaaagccgctcagttcgaggagctcgctgaatctggggagcgattgcttgggagattccgtgaggagcttgagtattttcgtaggccccagattcctaaggaatcagatgtcatgaatcagatacttaaatccaactgcactgtcagaatgaggtcctatgttgaagctggctgcaggcttcactaccaaaacatctcaaacataaatcagtgtgagttatatagctttggcagtgaacaaccttttttattcttacatgctaatggttgatatgactcgcttatctgaatttgtcccgtacttgtttcttgccctgtctataaaagtacagactattgtggtttttagctaattctatgcattcttctgttattacaggatttctagttgaagtatgagctctagacaacatacttgttcaattttaatgataaataattccatacccttaatcacttagctattttttttccttgtgccagtaagctcatgcgaagctggacttaaagatcatataaagaaagctaagactttgctcgaagaacttgaatgtctagtcgagaatgtctatggcatcacattaacatccagtttaagtgctctggaagtttcagacagtcattgcctcgacaacatgccaagcaccgattgctacgccatggaggaggataaatgtgcagatcatttggacatggacgtatcgctcgttacggtgatggtcatggttcgcaacatgctgaagcttgactacacgatgcaggagaagattgtcactgcattgtccttgaaaacaccagcatcggagctcgagggatactgcctcatgtgggatctacgcccgtacatcgatgacgacgtgatgcgtcttgcgtggaacatgtgtccttgaagcattggggctttggagttgtttctgctgggatggatgtctggtctgttcattattatgtgtttgtcgaaggtcgagagatatgttcagtgttatgtatgacgacgtggttgtgtgttcattgtcgtcttctggagacgagaaacagatatagtttgtcagattgaaccccttttgggggttctttttcagag

SEQ ID NO: 5490 - DNA, 864 bp, Zea mays
  Clone ID: 700456894_FLI
cacgttcacggtagcgagagcttatcgtcgtcggcggtgaagatggtgtcgctgaagctgcagaagcggctcgccgctagcgtcctcaagtgtgggaaaggcaaagtctggcttgaccccaatgaagtcagcgagatctccatggctaactcccgccagaacatccggaagttggttaaggatgggtttatcatcaggaagcctcagaaggttcactctaggtcccgtgcaagaagggcacatgaggccaagcagaagggaaggcactctggatacggcaagcgcaggggtaccagggaggctaggctccccaccaagattctgtggatgaggaggatgcgtgttctgaggcgcctgctccgcaagtaccgtgaggccaagaagatcgacaagcacatgtatcatgacatgtacatgaaggtcaagggtaatatgtttaagaacaagagggtgcttatggagagtatccacaagtccaaggctgagaaggccagagagaagacactttctgatcagtttgaggccaagcgtgcaaagagcaaggcaagccgtgagaggaagattgctaggagggaggagaggctggcccagggcccaagagaaccaacagcacctgtcgcagccccagctccatctactggggtgccaaagaaagcaaagaagtgaagtatggaaacaaagctgtagctttttggtactatataagcatgactttggagcacctgaagtattttgctgttatatagttcgtgtctcaatattctgagtcttgtatctctaccgttctgttggataatgcatgccgtaagagttgtttatggagcttttgttgttacaggacccctaaaaatgtttgtttgacgg

SEQ ID NO: 5491 - DNA, 949 bp, Zea mays
  Clone ID: 700456919_FLI
ctggaggcatctacttcggcaaacccaggggttttggaacaaatgacaatggagatgacattgggttcaacacagaagtttattcagcttctgagattgatcgtatcgcacgagtcgcatttgaggttgctcgcaagagaagagggagactatgctcggttgacaaagcaaatgtcttggaggcatctatgctttggaggaaaagggtgactgcactagcttcggaattccctgatattgagctctcacacatgtatgttgataatgctgcgatgcagcttgttaggaatcctaagcagtttgacacaattgtcacaaacaatatttttggtgacatattatctgatgaagcatcaatgattacgggaagtattggaatgctcccatctgccagtgttggtgaatcgggacctggtctttttgaacctattcatggctctgcccctgatattgctggacaggacaaggccaatccattggctacaattcttagtgcagcgatgctattgagatatggcctaggagaagaaaatgctgcgaacagaattgaagctgcagttactgaaacactgaaccatgggttccgaactggggacatatattctcctggaacaacattggttggatgcaagcggatgggggaagaagtcctgaagacagtgaactcactgaaggaagtggctgctgtaaactgatgcatgttggtacttaatttataaccctacaggatgagatggttgaaagggacttgcattttattagaagttgagcctggtgaaagagagcactgcgtctggttttgaatcgcaactgtagcggctgaaccgacggtcttttttcatttctggtgtttgttggccttcctgtaactcaattttgtacaaggaaggataagcatatgtatgataaaatgggatagtttatgccagttgaataaaatatgttctat

SEQ ID NO: 5492 - DNA, 1303 bp, Zea mays
  Clone ID: 700456981_FLI
gtcattggagcaatcgctgctggaaatgctgttgttctgaagccatcagaaatagcgccagctacctcgtcactgttagcaaagctgctacccgagtatgttgacaactcctgcattaaagttgtggagggaagcgttccagaaacaaccgcactcttggaacagagatgggataagatcttctacacaggtaatggaactgtaggacgtatagtgatggcagcagccgcaaagcatctgaccccggtagctctggagcttggtgggaaatcccctgttatcgtggattcaaatgttgatctgcatgttgctgctaagaggattgttgttggcaaatggggatgcaacaacggccaagcatgcattgctccagattacatcataacgacaaaatcatttgcaccggagctggtggcctctttcaaaagagttttggaaaggttctatggggaggatcctctgcaatcagcagacttgtctcgtattgtgaattcgaagcagttcaaaagattgacaaatttgatagaagaaaaaagagttgctgacaagattgtgtacggcggcaaggctgatgagaagcaactaaaaatttctcctacactattgttagatgttcccgaagattcagaaattatgacaggcgaaatatttgggcccttgcttcctattgtgacggtcgaaaagattgaggaaagcttcgacttgatcaatgccaagcctaagccactagccgcctaccttttcaccaagaataggaagctgcaagaggagtttgtggcgagcgtccctgcaggagggatgcttgtaaacgacactgcgctacatctcaccaacccgtacatgcccttcggcggcgtcggcgacagcgggatgggctgttaccacggcaagttcggcttcgactgcttcagccacaagaagggagtcctgatccgcggctttggcggggaggcgaacgccaggtacccgccctacacgacggagaagcaaaagatcctgaggggcctcatcaacggcagcttcatcgccctcatccttgccctcctgggcttccccagggagaagcgttagatgctccggcctctttttggtttcggtacagcctttgtagtccctgttcgtcgtcaggtgcacagtatacaccgtcatatgctgtcaaatagatgcaatgcaacgactgcgcgccgtgcttgtgttgcaagcgtggataatgcatatattatattgtagcattgacatgatgtgcgttattgcattttactgtacgtaagggagttggataaataagtgtgatttgtttgtc

SEQ ID NO: 5493 - DNA, 1343 bp, Zea mays
  Clone ID: 700457051_FLI
ccccttctcactgcctgtccaggcgccgccgcttcgccgctgcccgtttcttcgaaccactccgaagctgccccgccatggacagctccgccactgacggcgcgaggctaccgccgccaagggccgggagtcgcctctgcgtcaggtgcggtgagaggaaggccgcgctgaagcggcccaaaaccctagaacagatctgtagggaatgcttctatatcatctttgaggacgaaattcatcaaactattgtccagaattctctgtttaaagctggtgagcgtgtggcaatcggagcttctggtggaaaagattcaaccgtgcttgcatatgtgttatcggagttaaaccgtcagcacaactatggtcttgatttgttccttttatctgtcgatgaaggaatcacaggatatagagatgactcactagaaactgttaaaaggaatgaaatacagtacggcctgccactgaagattgtttcctataaagatttgtatggctggacaatggatgatattgtcaaagcaattggtctaaaaaacaattgtactttctgtggagtttttcgacgtcaggcactagatcgaggtgctgctctcctgaaagctgataagattgtaactgggcataatgcagatgacattgcagaaaccgtcttgctgaacattctgcgtggtgatattgcaaggttaagtagatgtacctttataactactggtgaagatgggccaataccaagatgcaagcccttcaagtatacctatgagaaggagatcgttatgtatgcatacttcaaaaagctggattacttttccacagaatgcatctattcaccaaatgcataccgtggttttgctcgtgaatttattaaagatttagaaagaatgaggcctagagctatactagacatcataaaatccggtgaaaatttcagaatctccacaacaacaaggatgccagagcaaggaacgtgtgaacgatgtggctacatttctagtcagaaattatgcaaagcatgcgtcttgctggatggattgaatcgaggcttgccgaaactaggcattggaagtaccaaagcaggtgctagagctgacagtgatggtaagcaacgcaccaaacgttcagagaggaatacatcgagtctacaagggaaacatgggaacttcgatttctagatctctactgctatttttctccaaaaattgtaataaattttgatagtcattggtcatttagtggattttcttctaagccactgttgtttatctgacttcattctgcagtcgtgaaccaaaagaaattatgtggccacaattttgacgccatctttagtttgcttaaatccc

SEQ ID NO: 5494 - DNA, 856 bp, Zea mays
  Clone ID: 700457081_FLI
ggcaactggctgaatgtgattgaggagcatcatctgaagtactcggggaactgtcaggtaaacgacatcctggacattggctgctctgttggagtaagcaccagatacctcgccgagaagttcccatcagctcaagctgttgggctcgacctatcaccgtactttcttgctgtggcggcacaaaaggaagaaaaactgtcacggccaaagcctattcgctgggttcatgccaatggtgaagcgaccgggctgtcttcagattcatttgaccttgtctcccttgcttatgtgtgccatgagtgcccagcacgagcaatcacgggattagtgaaggaagcattcagggtccttcgcccgggaggaacaatcgccttaactgacaattcgcctaaatccaaagtgcttcaggaactatccccagttttgttcactctgatgaagagtaccgagcctttcctggacgagtactacatgctggatttggaggagacgatgagaaaagtgggctttgttaacgtttgctccgtcctgacagaccccaggcacagaacagtcactgcaaccgtgccttactaattgggtcagaccatcaaatcccaagcccggccggtgtacaacaattgactatttgaaattttgtatccttactggtatggttgcacctgtataaagtagagcaatctgagtgaaacaacaaatcgaagtacaccaatttaccttccacgcatggacattatgaagtccaacactaggactgttatggtcagatgattcagggaaccaatctaaaaaaaaactcatgtgatattgtagccaggaatcactttcatgaaccttaattaactctgaaatattt

SEQ ID NO: 5495 - DNA, 1347 bp, Zea mays
  Clone ID: 700457187_FLI
agctcccatatccgctcccctacctctccagcatctcccgtctccgtcgtctcgtctctgctcctcacctcgccgccagccatgggcaagatcaagatcggaatcaacggtttcggaaggatcggcaggctcgtggccagggtcgccctgcagagcgaggatgtcgagctcgtcgccgtcaacgaccccttcatcaccacggattacatgacctacatgttcaagtacgacaccgtgcacggccaatggaagcacagcgacatcaccctcaaggactccaagacgcttctcttcggcgagaagccggtcaccgtctttggcatcaggaaccccgaggagatcccgtggggtgaggctggtgctgagtatgtcgtggagtccaccggtgtcttcactgacaaggacaaggctgctgcacatctgaagggtggtgccaagaaggttgttatctctgccccaagcaaagatgcacccatgtttgttgttggtgtcaatgaggacaagtacacctccgatgttaacattgtttccaatgctagctgcaccacaaactgccttgctccccttgctaaggtcattcatgacaactttggcattattgagggcttgatgacaactgttcatgccatcactgccacccagaagactgttgatggaccctcagccaaggactggagaggtggcagggctgccagctttaacatcattcccagcagcaccggtgctgccaaggctgtcggtaaggttcttcctgaattgaatggcaagctcactggcatgtccttccgggttcccaccgtggatgtgtcagttgttgacctcactgtcagaatcgagaagggggcctcttacgaggaaatcaagaaagctattaaggctgcttctgagggcccactcaagggtattatgggctacgtggaggaggatctggtttccaccgacttcaccggtgacagcaggtcgagcatcttcgacgccaaggccgggattgccctgaacgaccacttcatcaagctcgtctcttggtacgacaacgagtggggctacagcaaccgcgtcgtcgacctgatccgccacatgttcaagacccagtagagagagatatttctgcctccctatcgagggtcgtccccgatggcctttggtcgcagaccatctttgctgcttgtctatgctgagaataaatgtgaacggtgcccctggacgctggatccatgctggttttggacacggttgtctttttgtgtttaacttatctgctgccgtcctgtaacgaattcgctaagttttagttcttttgtgctttgttaagaatataaacaatgaggtttcaattttggtggcgcc

SEQ ID NO: 5496 - DNA, 2059 bp, Zea mays
  Clone ID: 700457230_FLI
agcgacgacggcgccagggtcgtggtgctagtcgcgggttctcccgtcgattccgcctccgattccctccctcctcccgttgcggcgactcctgctcctgcggcggaggccaagcaggagtcggtgtcggagacggaggaaactaagcaggcggcggcggcggcggcagcaccagcaacagcggcaggaggtgtgcaggccatggcggtcaccgtagtgcgggacgtcgagacgggcctggacgcgagcaccagcgaccgggacggtgacaagccttcctggttcacacctaagagattacttgtcatgttctgcattatcaacatgctgaactatattgatcgaggagtaatagcaagtaatggggtcaatggtacccgcaaaagttgttctggtggcacatgcacctcgggctcaggaattcaaggagacttcaatcttaataatcttgaagatggtacactgtcctcagcatttatggttgggttgttggtgtcttcgttgatatttgcaagccttgtaaaaagggtggatcagtggatgtgacaagccagtttttgtacagttggagggacgagggtggatgatataatcctttcaggcttattggtgttggcttgttagtgtggactatcgcaacagctggttgtggagtatcatttgatttctggtcaattactatatgccgcatgtttgttggcgttggcgaagcttcatttataagtctcgcagctccattcattgatgacaatgcaccggtagctcagaaaacagcatggcttggtatgttctacatgtgtataccaactgggatagcattaggctatgtttatggcggactggttggaaaatatctgaactggcgtgctgctttctggggagagtcaatattgatggttccttttgttattcttggttttgtaataaagccactaaacctcaaaggatttgctcacaacacaacaaaagaatatggccagatgcttaatcctgaggttcaagatcagataaataataatgcgacaaagcatgttttgcctggtggaattgaggatctttcagggaaggttccacaaaagttctccttgtccagtttttgccacggtatcatgactgaaattggtcgcttcagcaaagatatgaaagaactactacaagagaaggtttttgtcatcgttgttttaggttatatatcctacaatttcgtcattggtgcttattcctactggggcccaaaggcaggtcaagagatctacaatatggggagtgcagatcttatgtttggtggaattactatagtgtgtggaattattggatcactagcaggaggtttcatccttgacaagatagggtctactattcctaatgccttcaagcttctttcgggtgcgacatttgtaggggcaatattctgctttggtgctttttgtttcaagagcctttatgggttcataccctcctttgcagttggggagctttcagtgttcgcaactcaggcacctgtaaattttgtatgccttcacgccgtgaagccacatttgcggccattggcaatggccgtatccactgtttcaatccatatatttggcgatgtgccttcttcacctcttgttgggcttcttcaggacaaaatcaataattggagggccacagctcttattttgacatccatccttttcgctgctgttgtgttctggttcattggcatatttatccccagcgtcgatcgtttcaatgaagagagcgagcatggccttactgtcgccgagagatcaaatctcaggccgctccttgatgaaaaggacgagccacggacatctgactaaaacctacgcaagtcataaccttttatttcttggcttagtccgtagtttttcccttatgccatcaacatgtgaaatgtaaatttgcatgcccattggctgtacctgtacatatacgaggtttgttcgttttgcgttattcttttacttttttttgtacaggctacagaaacaagcaaaagagtgctagaattcctttttttacgaattaaaacattttagaatttctttttacg

SEQ ID NO: 5497 - DNA, 764 bp, Zea mays
  Clone ID: 700457257_FLI
gcctgatgtcgccatgactcttgctgtggttgccctctttgccgatggcccgacagccatcagagacggtaaaacattctcagccctacaaccatgcctcttctacatcactacttgacaagactaaaaactattggctcgttggcagtggcttcctggagagtaaaggagaccgagaggatggttgcgatccggacggagctaaccaaggtaaggctacatacttcacatgtctcacgtcgtctttccatagctcgctgcctcttagcggcttgcctgcggtcgctccatcctcggttgctgtctgtgttttccacagctgggagcatctgttgaggaagggccggactactgcatcatcacgccgccggagaagctgaacgtgacggcgatcgacacgtacgacgaccacaggatggccatggccttctcccttgccgcctgtgccgaggtccccgtgaccatccgggaccctgggtgcacccggaagaccttccccgactacttcgatgtgctgagcactttcgtcaagaattaataaagcgtgcgatactaccacgcagcttgattgaagtgataggcttgtgctgaggaaatacatttcttttgttctgttttttctctttcacgggattaagttttgagtctgtaacgttagttgtttgtagcaagtttctatttcggatcttaagtttgtgcactgtaagccaaatttcatttcaagagtggttcgttggaataataagaataataaattacgtttc

SEQ ID NO: 5498 - DNA, 1436 bp, Zea mays
  Clone ID: 700457272_FLI
gccacaagcatcaccaggttcgcgacttgctcgtgaactttggcaagtttgatcccaagcgcctggagagctcggagccggatgatatcctcaaacccaccgtgcagtgtgacgagatattccggtacaggaacaaaatggagttctcgtttgggacgaagagatgggtgcaaaaagagttgaaggacaagggtgaggaggtggaggtgaagcaggaaacgaatgaaactgatggatatgcgcttggactgcacgcaccagggttcttcgacaaggtgctacatgtgcagaaatgttttctgcagagtgagccagcagataaggttcttgcagttgttcaagaaacctggatggatcctgccataggcctcacaccttatgatgtccataagcatgttgggtttctcaagcatctgatgataagaactggaagaaacatcagcactggaactccagaagtaatggtcaattttgtgacgtcatgttataagccagatgtattgatgcctcttgttgataaaatcacaaaaatacctgaagtggttagtgtcataaataatgtgaactcgtctgttggtaattcatctgtgggtgaacaagaatatactttgtacgggaagccaaacattacagaaatgttgagaggacttgcgttccagatatctgccaactccttttttcagactaatacaaaacaggctgatgttctttacaagcttattgaagattctgctgggcttaaaggagatggctctgaaattgttcttgatctgttttgtggaactggaaccattggtttgacccttgcccgaagggcaaagcacatttatggatatgaagttgtccctgaagccattgaagatgcgcgaaagaatgccaagttgaacggtatcaacaatgcaacatttgttcaaggggacctcaataaaatcaatgaatcattcgggaaggaatttccaaagcctgacataatcatctcagatcctaatcgccctgggatgcacatgaagttaatcaagtggctgttagaagttaaagctcctcgaatagtgtatgtctcatgtaatccagctacttgtgctcgggatttggactacctatgtcatggcgtggaggagaaagatttgagaggattctatgaactgaagagtgtaattcctgtggatatgtttcctcatactcctcatattgagtgtgtatgcttattggagctgcgttgattttcagttttggtcaggtaaacccactggagccttgtttgggtgacgagtattcacctcaatccatataaggccttgttcggcactctagtatttaatacatattgggatccaatacatggtgggattgagtgaatccatcccatgtcacttaaaccatgtgtgtttcaattacagctgagatttaatacatggctaattttccattgtttagtt

SEQ ID NO: 5499 - DNA, 897 bp, Zea mays
  Clone ID: 700457284_FLI
agaagatactgcagcgagagtcttaccaccgctgcctccaccacctagtttgccacctttacctccaaggcctccaatgcaatctgatatgctagctcctggagtcatgagatttccaccacctccgccaccaccagattcaaggccatcgcttatggcggctggagttaacaggccccctccacctcctccaggatttccaccgtctcaaatgccaatgccaccgtatggtgtgctccctggtccgccgccgatgcttaggcctccatttttgccaggacctcctatgcaactagatgagtttgctgcctttgccccaaggcctcagttacctcagcagccatcatacgtgaagtcggctgccccaacagttgtgaagagaccattagcacagcacactcctgagctgacggctatggttcctgcatcagtccgtgtcaagagagaatctgctctccccaagccaaaaccaaaggtgcagcagcagccacaactatcaacagtatccatttcaaagccctcggtgaccctcataagaagcgacgctcggcctccttcagcggcacccaagccgccaagcatcgacgactcttacatggcgttcttggaagatatgaaggagctaggggcacttgatgggtaactcaagtagagcaaatgcctgattgcacttagcagcttaattcatggaaacctgggcatggaaccttttttttttgcaacgtgagaatcaatagtctctggtcaatcaatcggagaaaatcatgcattagtttaattaaacactgggaaaacaattgtaatctatctttttcatactaaaggctctgtggcccaactgtacaagctggagatatttgaaacttgaatatctggctctagcaaaggacatctccc

SEQ ID NO: 5500 - DNA, 1096 bp, Zea mays
  Clone ID: 700457290_FLI
gtcagcagcttctgcttgctctggggggaaggagagagagagagcgagagagatctagtagagaggctagctaggtggtcctcgaacgaagatgttggcggtgttcagcgggcaggtggtggaggtgccggcggagctggtggcggcgggcagccggacgccgtcgcccaagacgaaggcgtcgcagctggtggggcgcttcctggccgcctccgagccggccgtgtccgtgcagctcggcgaccacggccacctcgcctactcccacaccaaccaggcgctcctccgccccaggtcgttcgcggcgaaggacgaggtgttctgcctgttcgagggggtgctggacaacctgggtcgtctgagccagcagcacgggctgtcaagcaagggcgccaacgaggtgctcctcgtcatcgaggcctacaagacgctgcgcgaccgcgcgccctacccggccagcttcatgctcgcccagctcaccggctcctacgccttcgtcctcttcgacaagtccaccaactccctgctcgtcgcatccgaccccgagggcagggtgccgctcttctgggggatcaccgccgacggctgcgtcgccttctccgacgacatcgacatgctcaaaggctcatgcggcaagtcgctcgcgccgttcccgcaaggctgcttctactccaacgccctcggagggctcaagtgctacgagaaccccaagcacaaggtcaccgctgtccccgccgacgaagaagagatctgcggtgccactttcaaggtggtggaagggtctactgtcctgacggcgctgcactgatctatcatcatcaggcggaggcgatgcgatgatgatgcagaactttgtacatgcgttggtggatggtggtgtaacatagtggctgccaacaagtcatgctcatgcaaaccgatgaatctatctctgtatcatcgatctcggttgcttgctagtccagactccagacatggctatatatatatagctggtgctaataaataggagtataatcgtcatatcgatcggttgcgtgtggaatgccaatcatgtgtgtaatctgttggcaaataacaaacctctgttcctccc

SEQ ID NO: 5501 - DNA, 1425 bp, Zea mays
  Clone ID: 700457437_FLI
gcgagccaagaaggtgttgtcagtagcagtttataatcactataaaaggatctattgtgaatcactcatcaacaggtctgctgcggattgcagtcagagtgattcttgcacgagtgacaccgacatggtagagcttgagaaaagcaatattcttgtcatgggaccaacgggctcggggaaaacattgctggcaaaaacactggcaagatttgtgaacgtgcccttcgttatagctgatgcgacaagcctcactcaggctggatatgttggtgaggatgttgaatctattttgtataagctcctagcggctgctgatttcgacgtagctgctgcccagcagggaatcgtctatattgatgaagttgataaaataacaaagaaggctgaaagcatcaatcttagcagagatgtttcaggtgaaggtgtgcaacaagcattgttgaaaatgcttgaaggaacgataggttgttagtgttcctgagaaaggggccagaaggcacccaaggggtgacaatatccagattgataccaaaaacattctcttcatctgcggtggtgcttttgtggacttggagaaaactatttctgaaaggagacatgattcttcaattggtttccgagcgcaggttcgttcaaatatgcgatctggtggtgtcataaatgctgagattacatcatcgctactgaaatcagttgaaagtggcgatctcattgcgtatggactaatcccagagtttgttggtagatttccaattcttgttggtctatcctccctcagcgaagatcagcttgttgaggttctcacagagccaaagaatgcccttggcaggcagtataccaagttgttcgaaatgaatgacgtcaaattgcattttacggaggaggctttacggcttattgccaaaagagcaatatcgaagaatactggggctcgtggtttaaggtccatattagaaagtatattgacagaagctatgtatgagattccagagacacgaactggaaaagataaaatagatgctgtggttgttgacgaggagtctgttggatctgtaaatcagcatggaattggagctaagattctttgcggagaaaaagctttggatgtctatctggccaatcacaacaataaagaatcaacgggccaactccaggagagaccaaacggggaatcagagatcgatacggaagccccctctagagtggccagcatgtagaggttcctggcaacaataattatgtatataaataacttattgtctgccttgtaactgtaaccaattcaaatgtaaagtcgggccatataaattcatcatgtgaccggcgctgggttgtaatttgtcatgttgaatttcgggggactgaagcttgatcttgcagtatttacataaggaaagtaaagaggatcgctttgcgtctttgggc

SEQ ID NO: 5502 - DNA, 1578 bp, Zea mays
  Clone ID: 700457507_FLI
gcgcagtatcgtgattcagtcaggcagcattatactgaacttctatctggcgttagagaaggtctaccaaccgatcttgcgcgacctctagcagttgggcagcgtgttatagcctgccatcctagaacaagggaacttcatgatgggaatgttcttactgtcgatcataatcagtgccgggttcagtttgatcgacctgaactgggtgttgagcttgtgaaggatatcgactgcatgcccctacatcctctggaaaattttcctgaatctctcagacatcaaagtgccatcaatggatactacagccacttatcggaagcaaaatatgaggatcagatgaaagagttggctagcggaggtgcagcaagatccacatcgaatttgaatggtaccgatgcaaccttctataccccttctggtcatccgatgagtaccttaatgaagcaagcaaaggccaacacggcagttaatgaggttgcagttgcgacacaacagtcaatgtacaatcaaccatgcacactttcgcagatacaggaaagagaagctgatataagagctcttggtgagctatcacgtgctcttgataaaaaggaagctttgctggtggagttgaggcacatgaatgaagaagtgtctggaaagcagaaagatggagaaattattaaagacttggagcatttcagaaagcaatatgctatggtgcttgtgcagctaagagattctaatgatcaagtggctgcagctttgctttcgcttcgccaacgcaatacatatcatgggaattcagggcagtctaaatctatggaaaatggcatagcccttgctggagcaccagatccgtataaccttttcagttatattaatccagagtctggttctcaagtgatcgaagttatcgagacttcaaagtccagggcaaaaatgatggttgatgttgctatccaggctatgtgcaaagtgagtgaaggagagaatgctttttcaaaaataggggaagcactagatcacttgaatagccgcggtactggctctggttcaagtatacttggcataagacggatacctcccgattcaggacagtcaaatgcatcttatcatgacgactgcacagcggcccctgcagcaaacagcagttcaaggttgccgaacggctgtgattcggaagctcaatttcccaaagagttgatatcatcctgcgttgctatgatgcttatgataaagaactgcacggagaagcagtatcaccctgctgaagtcgcgcacatcctcgattcggcactgtcaagcgtacaaccgtgcagctcccagaacatcccgatcttcagagagatcgaaatgtgcatgggcatcatcaagaaccaaatgctggcgttgatacccactccaagtggctaagcttcaatcctgccgcgggtatttaactaatgtactctgaaaacgaaaaaaacggatacctgtatgtgatgtgcaatattccttgttttgctgttgtctgtatgtacaaggcgtgtgttattattcattgcctgttattattatattcaactgggggtaaaaaaaaatatcatgtactctgtc

SEQ ID NO: 5503 - DNA, 1484 bp, Zea mays
  Clone ID: 700457553_FLI
ccagaacccagctcagacagacgccgccctccgctgctctgctctgttcctcttcctccttgccccctgagcaggcgatttgtcagcccggaaaccattcgaacaggccgagcccgcccgcctccattgctcgcgtgcgtcagagaaggaaggaaaagaagaactaggagcagagttgaataggtcattatgcgccggtggctttgctgcagtcattttgacacgccgtatgtcgaaaacgaaaatggatttatgagcagtcctgatagaacaagtggtaatggaaacggtttaaatgcaaacagtgatcctgcaaaaccgccttccattgaaatacctgcattgtcatttgatgaattgagggaaaagacggatgattttgggtccaaggctttggttggtgaggggtcatatggaagagtatattatgctgttctggaaaacgaacaacatgtggctgtcaagaagcttgatacttcagcagatcctgagcctgataatgaatttctagcacaggtgtccgctgtttcaagattgaagcatgaacactttgtggacatgcttggttattgtatccaaggagatcaacgtctactggcttatgaattcgctacgatgggctctctacatgatattttgcatggaagaaaaggtgttgcaggtgcacaacctggacctgctcttgattggatgcaaagagtcaaaattgctgttgatgctgcaaaaggtcttgaatatcttcatgagaaggttcaaccttccatagtccatcgagatatacggtccagcaatattcttttatttgaggattacaaggccaaaattgcagacttcaatctttcaagccaatctccagatatggctgctcgtctacattctactcgtgtccttggaaccttcggatatcatgctccagagtatgctatgactggccaactgactcaaaaaagtgatgtatatagttttggggttgtccttttagagcttcttactggaaggaaacctgtagatcatacaatgccaaggggccagcagagtcttgttacttgggcaacaccaaggcttggtgaggacaaggtgaaacaatgtgttgatccaagattgaatggagagtaccctccaaagggagtagcaaagctagcggcagtggcggctctctgtgtccaatacgaatctgagttcagaccaagcatgagcattgtagtcaaggcgttgtctcctcttcttgtgaatgcaccgtatcagccggctgctgctcctgatgtatcttcagatgcctgacagcatgagcaactgaaaacccatgtaaagaaacaccatttactgtcggtatgccattttttccatgaattattcatctttcgtaaaatcagaattgtgtgtgtgtgtttattggagaggaagggaagaggaaagagtaacgcatttgttttgaacccatgtacttcgtgcttgagagctgctgcagttgaaattaattactt

SEQ ID NO: 5504 - DNA, 995 bp, Zea mays
  Clone ID: 700457589_FLI
ctccctggccgtgtccaacgagtagtaattagtttgtgcccgtgtccgtgtttggttgaataataaattgacgaaagagggccaagtatagcttagagagagaagctagctagctgaaatggaggctagcagccgccgccgcgtctctcttgtgccactgctggtggtgatcatcgggtgctgtgcctgccgcgcccagatcccgatcccggcgaggacggacgggttcgtgtacggcgggaagccgccggcgtggggcgagacggtggtggtagaggcgttcttggacccagtgtgccccgacagccgcgacgcgtggccggcgctcaagatggtcgtcgagcactatagctcacgcgtgtccgtcgtcgttcacctcttcccgctgccttaccacagctatgccttcattgcgtgccggtcaattcatgcggtgaacaaactaaatccgtcgttcgtgtaccctctgctggagaagttcttcaaataccagaaacgttactataatcagccaacatacgaaaaatcaagagctacagtggttgatgaaataaccaagaaccttgttgtgcccatcatcggtgaaactaatttggcggcattcagagcaggtttcaacgattcacattctgatcaggctacaaggatatctttcaagaacggctgtgcacgaggtgtgaccgggacaccctacttctttgtgaatggcatacccatcaacgattcaggttctcctctggaatacaaggactggatttctatcctgcgtcccttggttggaaagatgtaacgcggttgctagtttgttcatcaataaagtcctagtggagagtaaacaaacaaaagctgaataataaataacattaatcagcatcgtcattctcaggaaaaaaaaagagtgctaactcagtaactctcctcggattcaaattgtgtacaagcaacagttcattctgtcaggcaacatatcatgcgtgtgcaactgtcccggattc

SEQ ID NO: 5505 - DNA, 829 bp, Zea mays
  Clone ID: 700457613_FLI
ttggacaccgtcgaaggtgatagcgcgccttggcaaagaaataaatgatgaaagctcctatctttattgggcatacaagaataacatccctgtatactgcccagcattgactgatggatcacttggagacatgctgttctgtcatgcagttcgtaatcctggccttattattgacattgtacaagatatacggctgatgaatggggaagccatccatgcaacaccaaggaagacagggattatagttcttggtggaggccttccaaagcatcatatatgcaatgccaatatgttccgcaatggtgcagattatgctgtctatattaacacggctcaagagtttgatggtagcgattctggagcacaccccgatgaagcagtctcatggggcaagatcaagggttcagcaaaacctgtaaaggtgcattgcgatgcaagtatcgctttcccgcttcttgttgcagcaacatttgcacgtaaggttcataactccaaatgaacagactgaatgggattcagtggagtgaatgggcaacagaattttgttgaactctccaaatgacctttttggagcacgaggtctacttcacctgcacagggatcatgtgcaagttttttcggtgactcgcggcaaccacatgccataattcttcgatgttcacttgatgctgtactagctggttgatagcatttttgttacaacagataatttattgaaatacagacatacgattgttcatccgagtcgtctgcttacgaattttttgtagacgaaacatctgcttacgaaattaacaaatggcctgttttatgaacacgtttttttttc

SEQ ID NO: 5506 - DNA, 677 bp, Zea mays
  Clone ID: 700457671_FLI
cgcagggcacgagggtgccagcgtgaaggaggaggacctcatccagccgccgcggggcgcgcgcactgtggacggtctgcggctcaacgtccgcgtgggcgtgcagtacctcgcggcgtggctggccggctccggctccgtcccgctgtacaacctgatggaggacgcggctacggcggagatcagccgcgtccagaactggcagtggctgcgccacggagcggcgctggacgccggcggcgtggaggtgcgcgcgacgccagagctactcgcacgcgtcgtcgaggaggagatggcgagggtcgaggctgaggtcggccccgacaggttccgaaaggggcggtacgcggaggcgggcaggatcttcagccggcagtgcaccgcgccggagctggacgacttcctcacgctggacgcgtacaacctcatcgtggcgcaccatccaggtgcgtcaccgtgcaagctctgaatacatgcatgcctttgtggcagtggagtcagctttcaaaaataacacatcgctgtccaatgcagccatcgaaataaggacggatgaccaacaaacatgatagacatgaacagccttgtaaagcgcactgcatattctctgctctgggacttttagtcgtgcttatgatagtacagggtggtctatgtaataaactgagcttctgttg

SEQ ID NO: 5507 - DNA, 870 bp, Zea mays
  Clone ID: 700457686_FLI
gccggcgcctccacttcgcgttctcgcctcatctcctcccgctcaggatccggcggcgaaggtaaggcaagatgtacaccgcgaggaagaagatccagaaggataagggccttgagccctccgagttcgaggactccgtcgcccaggctttcttcgacctggagaacggtaaccaggagctcaagagcgacctcaaggacctttacatcaacggtgctatccagctggatgttgccgggagcaggaaggctgttgtgatccacgtcccataccgcttgcgtaaggccttcaggaagatccatgtcaggatcgtcagggagctggagaagaaattcagcggcaaggatgtggtaattgttgccacaaggaggatcgtgaggccgcccaagaagggttcagctgttcagcgccctcgcaccaggactctgactgctgtccatgatggcatcctggaggatgttgtcttcccagctgagattgtggggaagcgtgtcaggtaccgtctggatggtgccaagatcatcaagatcttcttggacccaaaggagaggaacaacacagaatacaagctggacacctacactacggtctaccgcaggctgtgtgggaaagatgtggtctttgagtaccctatggccgaaaatgcataaatatgacgcccggatatccccattttattttgttgaatctggatgtttctttggggtctcaactagactgctccgtatgtacttcaaaaaccatagttttgatgccaaagttgttgcctaggaatttggtactcgggaattggtagcggacctgaacaatgttaagttttgagcatttaaatttacctttgtcatgataacatgttgcgagtttttattt

SEQ ID NO: 5508 - DNA, 616 bp, Zea mays; identical to SEQ ID NO: 5284
  Clone ID: 700457789_FLI

SEQ ID NO: 5509 - DNA, 1271 bp, Zea mays
  Clone ID: 700457857_FLI
aagacactgagctggtctgtttagttggaaagccatctgtactgtacgtttttcgccgatcatggaggatgagaggaacacccagcagcaccagggcggtgagcaggcccaggaccaggagaacgaggtgaaggacaggggactcctggacagccttctcggcaggaacaagcacgacgaccaggagaagaagaaccagcaggaggaggaggagctcgcgaccggcatggagaaggtcacggtggctgagcccgaccacaaggaggagggacacgaggccgccgagaagaaggacagccttctcgccaagctgcaccgcaccagctccagttccagctcgtcgagcgacgacgaggaagaggaggtgatcgatgagaacggcgaaattgtcaagaggaagaagaagggccttaaggagaaggtcaaggagaagctggcggcccacaaggcccacgatgagggcgaccaccaccagccgggcgtacctgccccggcgcccgcaccgcccgtggcggtggacacgcatgctcaccaccaggagggagagcacaagccgcacttcccggcgccggcgcctcccccgcacgtggagacgcaccaccccgtcgtcgtccacaagatcgaggacgacgacacgaagactcagaccccaccacaggcaccggaggaggagaagaaaggcctgctggacaagatcaaggagaagctacccggtggccacaagaagccggaagacgctgctgccgccgccgccgcgccggccgtccacgcgccaccgccgccggcgccccacgccgaggtcgacgtcagcagcccggatggcaagaagggcttgctgggcaagatcatggacaagatacccggctaccacaagagctcgggtgaagaagaccgcaaggacgccgccggcgagcacaagaccagctcctaaggtcgcagcgtgtgcgtgtccgtcgtacgttctggccggccgggccttgggcgcgcgatcagaagcgttgcgttggcgtgtgtgtgcttctggtttgctttaattttaccaagtttgtttcaaggtggatcgcgtggtcaaggtccgtgtgctttaaagacccaccggcactggcagtgagtgttgctgcttgtgtaggctttggtacgtatgggctttatttgcttctggatgttgtgtactacttgggtttgttgaattattatgagcagttgcgtattgtaattcagctgggctacctggacattgttatgtattaataaatgctttgctttcttct

SEQ ID NO: 5510 - DNA, 817 bp, Zea mays
  Clone ID: 700457875_FLI
aaatccaagggcgccgccaaggccgatgccaagctggcggtgaagagcaagggggcggagaagcccgccaagggcaggaaagggaaggccggcaaggaccccaacaagcctaagagggctcccagcgctttcttcgtgttcatggaggaatttcgcaaggagttcaaggagaagaaccctaagaacaagtctgtcgctgcggtggggaaagctgctggcgacaggtggaaatccctgagcgagtcggacaaggctccctatgtagccaaggctaacaagctcaagctcgagtacaacaaggccatcgctgcctacaacaagggcgagagcactgcagctaagaaggctcctgccaaggaggaagaggaggaagatgaagaggagtctgacaagtccaagtcggaggtcaatgacgaggatgatgaagagggtagtgaggaggatgaagatgatgacgagtgatggagctcctcgagacaatggaccgtgcttcatccaacaatggagcggctacacaaggccccgtggcgatcacaaaaaaggagcctatatccatgtactagaattattcagtttcactccacatcgtgatgttttatttttacttttgtcgtgctataacggatagcgctcctcgttggcgccactggcgggtggttctgcctctggtctggtgtgtttgtgtgtggtcacacttgccagccagcagaggcgcctgcttgtacctagattactgtttccattgtcgtcatcatcggctaacattgtcataatgtcagtttgggtaatgttagattaagtaattattgtgttctgt

SEQ ID NO: 5511 - DNA, 539 bp, Zea mays
  Clone ID: 700457890_FLI
gagagagtgaccctaccgggcgggagagagccaggaagaggagggcgacgatggcgtccggctggggcatcaacgggaacaagggccgctgctacgacttctggctggagttcagcgagtgcatgagccgctgccgccagccctccgactgcggcctcctccgcgaggactacctcgagtgcctccaccactccaaggaggtgacctatctacccccgcctgtccctcggcttcctccgtttcattcgattcgtcgcctccgactccgaaccctagcgtcagttccagcgcaggaacaggatctacaaggaggagcaacgtcagatcagagctgctgctcgcaaggccaaggaggaagctgagggtgcccctgctgttgcagcacaccattagtctctctgtctattttttgtgttgttgttttctgttaactcatctttggttcagttatgatgctaagggcaaggcaataatctccagctgttggactacacagattttttcccccatgacttaaatatcaagactcattttgtgct

SEQ ID NO: 5512 - DNA, 501 bp, Zea mays
  Clone ID: 700457949_FLI
gaagtttgaaactgataatggctacgaacttgttcctctgaacccaattgaggtggacgacgaggccgtggaactaaacaaggaacttgtttcaaatttgctagagcttgatgacgttgatgccgtctatacagaccaaaaatgagtgaattcatgagctacagctctcaattcaagacgcgctcggccaatggactttgttcgagtatattcacttttcattgatgggaaaaaaatgttaggtctttttatgaagcctggttgagcaccatcggctctacccaaaaacttaacctagttatccagcatcttcttgatactttggcatttcgcaagctcatgtctataccttggtttcttcccagcccatcgtgttgggatggtttgatacatgttcagaaagcagatgtgagaaaccatagtaaaataatacgttgatgctgatccatttttgggtcttgttaaattgcaatggaaatgctatgattttggtaagcattg

SEQ ID NO: 5513 - DNA, 1728 bp, Zea mays
  Clone ID: 700458002_FLI
taggcagccaaaatggagtccaaatgttgagcccctcggaaatcccacaaagggactggttcccctctgacttcaccttcggtgccgccacttcagcgtaccaaattgaaggtgcttggaatgaagatggaaagggggaaagcaactgggatcacttctgccacaatcatccggaaaggatactggacgggagcaattcagacattggagcgaattcgtaccatatgtacaaaacggacgtcagattgctcaaggaaatgggcatggacgcatataggttctctatctcttggcccagaatactgccgaagggaaccaaagaaggaggtattaacccggatggcatcaagtactacagaaacctcatcaacttgttgctagaaaacggcatagagccatatgtaacaattttccactgggatgtacctcaagcactagaagagaagtacggcggcttcctagataagagtcataagagcattgtagaagattacacatactttgctaaggtgtgctttgataacttcggcgacaaggtgaagaattggttgacctttaatgagccccagacatttacttccttttcctacggaactggggtctttgccccaggtcggtgctcacctggactagactgtgcctacccaactgggaattcactcgtcgagccttacactgctggccataacattctcctagcccacgctgaggctgttgatctttacaacaagcattacaagcgcgacgacacccgcatagggcttgcgtttgacgtaatgggtcgtgtgccatacggaacatcgtttctggataaacaggccgaagaaaggtcctgggacatcaacctaggatggttcttagagccagtggttcgtggtgactaccccttctccatgagatcattggctagggaacgactacccttcttcaaggacgagcagaaggagaagctcgccggttcctataacatgttggggttaaactactacacctcacggttctccaaaaacatcgatatctcaccaaactactcacctgtgctcaacactgacgacgcctacgccagtcaagaagttaacgggcctgacgggaagcccattggtcctcctatgggaaatccatggatctacatgtaccctgagggcttgaaggatctccttatgatcatgaagaacaaatacggaaacccacctatctacatcacggagaacggaatcggggatgttgataccaaggagacacctctacccatggaggatgccttaaatgactacaaaaggctagattacatccagcgccacatcgctactcttaaggaatcaatagacttgggatcaaatgtgcaaggctacttcgcttggtctctgctggacaactttgaatggttcgccggcttcaccgaacgttatggcattgtctacgtcgaccgcaacaataactgcacgcgctacatgaaggagtctgccaagtggttgaaacagttcaacgccgcgaagaagcccagcaagaagattcttacgccagcttagaaatcgggggcctcatgatgtgggtgcagcccataaaaaactggtgtgtggtttcgaaccgaaaattttctgtttttttccgccacgagaggttctggaggcatactctccagcaccgtggctaataacgcattgttccaattcagtctggccttgtcatgcatgcaataaataaagtgatgggtttccctgtttcaat

SEQ ID NO: 5514 - DNA, 1063 bp, Zea mays
  Clone ID: 700458009_FLI
cgccaccacatgctgggccgtctctcctcgatcatagccaaggagctgctcaatgggcagaaggtggtcgtcgtccgctgcgaggagatctgcatgtcgggcggcctcgtccgtcagaagatgaagtacctccgcttcctccgcaagcggatgaacaccaagccgtcccacgggcccatccacttccgcgcccccgccaagatcctgtggtgcaccatccgcgggatgattccgcacaagaccaagaggggggaggcggctctggcgaggctcaagacgtacgagggcgtcccgccgccgtacgacaagaccaagcgtatggtcatccctgacgctcttaaggttctgaggctacagcctggacacaagtactgcctcctcggcgagctctctaaggaggtcgggtggaactaccatgacaccatcagggaacttgaggagaagaggaaggagaaggccaaggttgcctacgagaggaagaagcaattggccaagctgcgtgtcaaggccgagaaggcagccgaggagaagttggggtctcagttggagattcttgcccctatcaagtactgaggagctgtgctttgtcatcagttttggggaacatctagtctttgttttaagtgttcggtaacagtttgtgacagtataatctggtaaaccgtgttatttttctgccactcctatttgaacacattttctagctggtgaatgaactgtttggtcgatcttgttcagatgtctggttcgcattcgcattctgagagatttcatgtctcgtgctgactcaagctgtcacgcccatgtgcttcttgcacacgattatcaattcagtagttgtgattaaccaaatttttatgtgtactggcagaacccagttgcaattgcaatgaagctcgatgttgctctatcagatcagatcccagttgcacagtcaataagactttatcacttgtagttctatttattttagaagaatttaaattgcagtcaataagactgtcacttgtagttctattcattttagaagaatttgaatttactaataaagtaattttccatc

SEQ ID NO: 5515 - DNA, 986 bp, Zea mays
  Clone ID: 700458018_FLI
ctccatcccacgcgcgcgcaggccaaggccggatcggcggcctctcagatctcgccggccgccgtgagacagagaccgaagggggggttgaccggtgctcgggaggaagatgtttagcgggacgcagcagaagtgcaaggtgtgcaccaagacggtgtacccgatggaccagctctccaccgacggcgtcgtcttccaccgctcctgcttcaagtgccagcactgcaagtctaccctctcactgagcaactattcctcgttcgaaggagtgccgtactgcaagacccatttcgagcagctgttcaaggagaccgggagttacaacaagagcttccaatcacagtcacctgcaaagattactccggaaaagttggcccctgagctgaccagatcaccaagcaaagctgcaaggatgttttcaggaacacaagacaagtgtgcgacttgtggtaaaactgcgtatcctcttgagaaggtaacagtcgaagagaagtcctaccataagtcatgcttcaaatgctcccacgggggctgcgcgattacaccttccaactatgcagccttggagggcatcctctactgcaaacaccatttctcccaacttttcaaggagaagggaagctacaaccacttgatcaagtgcgcgtccgtcaagcgcgctgctgaagcacagccagaacaaccggcctctgattcctcctcctgaccacgccatttaaacagtgggggtttggaggcgagagagttgggaagcctcctgtttctacttaaaaccgcgtgatgtatgttattccatctatgccccgaggatactagactactctatttcggtatcctctgctgtgctagctggatcatatcagcgaaccatggaattgctgtcattttcaatgaaactgttgtgcatcaagtagtgaaatcttcactgaaatcgggtatcttgcctttattgatcaatatattatctatgttgttttgttgtcttt

SEQ ID NO: 5516 - DNA, 630 bp, Zea mays
  Clone ID: 700458045_FLI
aatctccctagcagcagatcctcgtgcaacgcaaagcgctagccttcctactgtcccgatggcccgcacgaagcagacggcgaggaagtccactggcggcaaggcgccaaggaagcagctggccaccaaggcggcgcgcaagtctgccccggcgaccggcggagtgaagaagccccaccgtttccgccccggcaccgtcgcgctccgggagatccgcaagtaccagaagagcacggagctgctgatccgcaagctgccgttccagcgcctggtgcgtgagatcgcccaggacttcaagaccgaccttcgcttccagagctccgccgtcgccgcgctgcaggaggcgtccgaggcctacctcgtcggtctcttcgaggacaccaacctctgcgccattcacgccaagcgcgtcaccatcatgcccaaggacatccagctcgcccgccgtatccgtgtggagagggcctaggcgtcgtggcggtggaggtcgaagtagtagtcgcagtttctgtcatcaccgtctggctagaaggtgtagagatgtgccgggttctggagtttgggttatcggtcgaatcatgatgtagttggttcttcacagctgtaatttaactatgacgatgccatggc

SEQ ID NO: 5517 - DNA, 1369 bp, Zea mays
  Clone ID: 700458068_FLI
caagcgcactctagcaatggcttctgaggttgtccgccctagcgacgccgagctactaaaggcacaagccgacatatggcggctcagcctctcctacctcacgcccctgtcactgaggtgcgccgtggagcttggcatccctacggcgatctaccgccatggcggggctgcctcagccgctgagctggtcacggcgctgtctctcccctccactaagctgccgttcctccgccgcctgctgcggctcctcgccgcgtcgggcgtgttcaccgtcgacaagcagagctcggaggaggagcggtaccgcatcagccccgtgtcctacctcctggtggacggcatccctcacgaggaccacatgaaccacaccgctctggtgctcacctgcacctcgacgcgctacatcgaggcggggatagggctggcggagtggttcaagagggacgtggtcacgtcaccgttcgaggagctgcacggggcgactctgttccacgagagcatggggagcctcgacgcagatttccacgacatggcgagcgaggccttggacgcccacgacaacttcggcatcgagatagctatgcgggagttcagggacttgttcgaggggatccagtccatgacctactgctgcggtaacttcggtgatgacaagggtgccagggccattgtcaaagccttcccacacataaaatgcactgtgctggcccctcccaagatcattgccaccaaaccggccgatggagcgatgataaactatgtcgaaggtgacatgttcagtttcattccacctgctcaaactgtcgtgctaaagcttgtgctgcaccacctgaccgatgaggagtgcgtcaagctcctggctcaatgccggaaggcgattccttcacggaaggatggcgggaaagttataatcggtgatattatgattgaccactctgggcctatgctggaaactcacctcctgatggacatcggcatgatgaccatgacaaaaggacggcagagagatgaaaaagaatggagcgagctcttcaccaaagcagggttcagcgaatacaagatcctgaaggaatttggagctcgtgttgccttcgaagtctatccgtgagattgcacctggactatacatatatatttacatacatatatgtatgtgtgtgggtgccttgcgtggcttggcgtgatgatgtcataaataaagagggtgggtgtgcttgcggtattcatggatggccatggatctgagcacatgacgttggatgctttcttaaggctctcgtggatcttctatatttggaagaagctgtaaaataatatatcgccatctagtgttggcgttggcttgtatgtactttgtacctgctttgtt

SEQ ID NO: 5518 - DNA, 1478 bp, Zea mays
  Clone ID: 700458127_FLI
cgagttaccatctcatcccaactccggaacgaacaagttaccatctcatcccaactccgcctcgaccggatctcgtcggactcggatccgcccgaccaccccgcgccgccgcagatcaaagaagatggcagctgtcgacacattcctcttcacctcggagtctgtgaacgagggacaccctgacaagctctgtgaccaggtctcagatgccgttcttgacgcttgccttgctgaggaccctgacagcaaggttgcttgtgagacctgcactaagaccaacatggtcatggtctttggtgagatcaccaccaaggccaatgttgactacgaagaagattgtcagggagacctgccgcaacattggttttgtgtcaaacgatgttgggcttgacgccgaccactgcaaggtgctcgtgaacattgagcagcagtcccctgatattgctcagggtgtgcatggccacttcaccaagcgccccgaggagattggagctggtgaccagggacacatgttcgggtatgcgaccgatgagacccctgagttgatgcccctcagccatgtccttgccaccaagctaggtgctcgtctcaccgaggtccgcaagaacggaacctgcccctggctcaggcctgatgggaagacccaggtgacagtcgagtaccgcaatgagggtggtgccatggtccccatccgtgtccacaccgtcctcatctccacccagcacgacgagacagtgaccaatgatgagatcgctgctgacctgaaggagcatgtcatcaagcctgtcatccctgagcagtaccttgacgagaagaccatcttccaccttaacccatctggccgctttgtcattggtggacctcacggcgatgctggcctcactggccgcaagatcatcattgacacctacggtggctggggagcccatggtggtggcgctttctccggcaaggacccaaccaaggttgaccgcagcggagcctatgtcgcaaggcaggctgccaagagcatcgtcgccagcggccttgctcgccgcgccatcgtccaggtgtcttacgccatcggcgtgcccgagcctctctccgtgttcgtcgacacgtacggcaccggcgcgatccccgacaaggagatcctcaagattgtcaaggagaacttcgatttcaggcctggcatgatcatcatcaaccttgacctcaagaaaggcggcaacgggcgctacctcaagacggcggcctacggccactttggaagggacgaccctgacttcacctgggaggtggtgaagccactcaagtcggagaaaccttctgcctaaggcggcctttttttcagtaagaagcttttggtggtctgctgtgcttaatcatgcttttatatggcttctacatgttgtggttctttcttgatctgcaccgcgcttatcgtttgtgttgtactgccctaataagtggtgcttatgaggactgtttctggtttt

SEQ ID NO: 5519 - DNA, 1134 bp, Zea mays
  Clone ID: 700458188_FLI
gcagcagccggcggcggccatcgcccaggagcccggagctgtttcttcgtcgcaggaatgggcaaggacggcatccagtacgcagtggtggacgccttcacggcggacccgttcaagggcaaccccgccgcggtgtgcctcctcgaggacgccgccaaggccgccgacgagcggtggatgcagtccgtcgccgccgagttcaacatctccgagaccgccttcctcctccgggaaaagtcctccgcggccggcgccgtcccgctgttccagctccgatggttcacccccgtcgctgaggtggagctctgcggccacgccacgctggcttccgcccacttcctcttcacatccgtcctcgcggagcacgagaagctcgtcgagttctcgaccaagtccgggattcttacggccaaaaaggtccctgcgccgcagagcacgggcgtgtcgggcgaggggaagctgttcattgagctggatttccccacgattgaccttgttgattgccatccttccgagctgccggcaatccccgagaccctcaacggagcctccattgtcagcgttcacaagtcaacgacggccggtgacctcattgtggagctttcatcaggaaaggaggttgctgatatcattcctaaccttcatgaaattaaaaagtgttccggcagaggaattattgttacagggccagcgcctgctggatctggctacgacttcttcacgcgttttttctgcccaaaatttggaatagatgaggatcccgtttgtggcagtgcgcattgtgttttagcaccttactggggtgggaagctggggaaacacaaactgatagcgtttcaagcatcccctcggagtggaatactatacctggagttagaagctgcaggcaggagagtgcgaattcagggagaagctgtcagtgtgatgactggaaccctcttagcataatccccggtcaatgaacatcctatgtcttaacttcagttgtgtggcatgatttctctgcagctaggaataaattaagtctcttttcacctgtccaaaggtgttagatacactgcttccagactatgaaagcagagtgtatgaggatgtttcttttgaataaatcagtgggtgttcaatgtgaaaaat

SEQ ID NO: 5520 - DNA, 683 bp, Zea mays
  Clone ID: 700458196_FLI
caagcttccagacgatgcatttgttgtttatcagggacaccatggagacaaggctgtctatagggccaacgttatcctgccatcttcagcattcagtgagaaggaaggcacctacgagaatactgaaggatgcacccagtggaccattccagccgttcctacggttggtgatgctagggatgactggaagatcatccgtgctctttctgaggttgctggggctctactgccttacgacagtctctcagctgtgagggaccggatcagtacggtcgcacctaatctagtacatgtagacgagagggagccatccacaatctccgtcgaggtgaagccgcctgtaaagcaaaaggtcagctcgacgccattcaaaactgtggtggagaacttctacatgactgatgcaatcactcgagcttcgaagattatggcccaatgcagtgcgacattgctgaagaagtgagatttgcacccttcgagctaatcttcagcaaacaacttcttagttccctccctttttttttttacttgctacgagtttcgccaccgttgcttgttttcttgggaggttttggtgtataatttggactgcctctagattttcttcagagcagcaaaacctgatcagtacatctccgtgctgtgtatgagaagcagagcatactcaataagcttgttgcccc

SEQ ID NO: 5521 - DNA, 807 bp, Zea mays
  Clone ID: 700458338_FLI
tcatcccctgccacgcacctccgtccgccgcgccatggaatcgaggaggagggccgtgcccaccgtgacggcggttgcggtggcgacgctgctgctgacgatgatgacgtcgtcgggcgtgggcggcgacttcgcggcggaccgggcggagtgctcggagcagttggcggggctggcgacgtgcctgacgtacgtgcaggagcaggcgacggcgacggcgccgacgcccgactgctgcgcgggcctcaaggcggtgctgcagagcagccgcaagtgcctgtgcgtgctggtcaaggaccgggacgaccccaatctaggcctcaagctcaacgtcgacaaggcgctcggcctccccgccgtctgccacgcgcccgccaacatctccgactgccccaggctgctggacctgccggccggctccaaggacgcacaggtgttcgagcagtacgcgaagcagcaggctgcggcggcggcgcagggcggcgcacccaccagtggacgcagcagcgcggcggcgagcacgaccgcgggcgcgcagaagagcggagcctcagccgccggtcggtggttgggagtggggagggtcggtggtgctggtggcggcgcacgcgcggtggcgccgctcgccgtgcctttcctgctcctgctcgggtagataataatcactttacgcgcggccaacggcccgagtcccggcggtttggttggcgccgcgcgttgccgacttgtggtgtgcttcgggtgcgtgcgtgtgtggtggggtacttttcacactatattggaaaaagaagctattatctttggatg

SEQ ID NO: 5522 - DNA, 697 bp, Zea mays
  Clone ID: 700458374_FLI
ggcaagtgggcggcgccgtccacgccgtcgtccacgaccacgaggcggcgctgcggttcaagggcaccaaggccaagctcaacttcccggagcgcgtgcagggccgaaccgacctcggcttcgtcgtcacccgcggcatcccggaccaccaccggcacccgcgggcggcggcggtgaacctggcagtgcatggccgtacggtggggagcaccacaggaataaaaaggacgcgtgatcgtccagctggccggccgatcgaggatatggatatgcatgcatgcaacttgcagtgcgaggggatcagatcaagaagtagctgtgcggaggaatggaatatgcatgcacgcatgcaatatgggcggggtaagtggcagcgacgatttttggtccaagcataaccatttcttggccctttagtttccacgtcgatttcttcttcttttttttctcacgagatgatcttcttttgttcatttcttggaggatcttgatcactttggttaattagagagctagctcgctatagctgcttgcttaggtgcttttactactaccttccttttgtataatggcctgctctaggtgctcatatctttaatttgttcaagtgtcaactgagattaactacctgtgtgcaaactaatccaaagcaaagaagagtggaaccttatgtatatggggcatgttctccctctct

SEQ ID NO: 5523 - DNA, 789 bp, Zea mays
  Clone ID: 700458453_FLI
ctcagactcagagcaagctctctcgtaagaggcatttggcggcaagtaacaagataagaatgagaatggcggcggcgagcaacggcgcccccctggtggtgttcgacttcgacaagaccatcgtcgactgcgacagcgacaactgggtcgtcgacgccctcggcgcgacccgccgcttcgacgagctcctgcgccacctcccatggaaccacgccatcgatgcaatgatgggcgagctgcactcggagggcaagacggccgaggacatcagaggcagcctcagaagggcgccgctgtccccgcacgtcgtcgcggccatcaaaaccgcctacgccctcgggtgcgagctgcgcatcctgagcgacgccaacgccttcttcgtcgacaccatcctcgcgcaccacggcctcgccgactacttctccggcttcgaggacctcgccagggttctcctcggcatcgtcgacggcgagatcgcccgcgccgccgcggaagaaggcgctggcgcgggcgtcgttgtcgtcgtgccggcgcgtcaggaggcgctcatgccccaggcggtccgcgtgcccaactgattgatgatcgttctctgatacaggtggatgcgtggaatatggcgcgccaaattactagtattaataactccaggctccatctattgtgctgagtgctgactggatcatgctggaaatctgcctcaaactgagagccaattagttgctggtttcttcgtgatatgtactagtattcctatggatccacccaagatatccattcccttgctgc

SEQ ID NO: 5524 - DNA, 1498 bp, Zea mays
  Clone ID: 700458467_FLI
ccttggaggtggtaccttcgatgtctccctccttacaattgaggaaggtatctttgaagtcaaggccacagctggcgacacccatcttggtggtgaggactttgacaacaggatggttaaccactttgtccaggagttcaagagaaagaacaagaaggatatcactggcaacccgagggctctccggaggctgaggacctcttgtgagagggccaagagaactctgtcttccactgcccagaccaccattgagattgactcgctgtacgagggcattgacttctactccaccatcacccgtgccaggtttgaggagctcaacatggacctgttcaggaagtgcatggagcctgttgagaagtgcctgagggatgccaagatggacaagagcagcgtccatgatgttgtccttgttggtggctccactaggatccccagggtgcagcagctgctccaggacttcttcaacggcaaggagctgtgcaagaacatcaatcctgatgaggccgttgcctatggtgctgccgtccaggccgctatcctcagtggtgagggcaacgagaaggtgcaggacctgcttctgcttgacgtcactcctctctctctgggtctggagactgccggaggagtgatgaccgtccttatcccgaggaacaccaccatccccaccaagaaggagcaggtgttctccacctactcggacaaccagcctggtgtgttgatccaggtgtacgagggtgagaggacccggacccgcgacaacaacctgcttgggaagttcgagctctccggcatcccaccggctcctcgtggtgtcccccagatcacggtctgcttcgacatcgacgccaacggcatcctgaacgtgtctgccgaggacaagacgacggggcagaagaacaagatcacaatcaccaacgacaagggccgtctgtccaaggaggagatcgagaagatggtgcaggacgcggagaagtacaagtcggaggacgaggagcacaagaagaaggtggagtccaagaactcgctggagaactacgcctacaacatgcgcaacacgatcaaggacgagaagatcgcgtccaagctggctgccgacgacaagaagaagatcgaggacgccatcgacgcggccatcagctggctggacgccaaccagctcgccgaggcggacgagttcgatgacaagatgaaggagctggagagcctttgcaaccccatcatcgccaagatgtaccagggcgcgggtgccgacatgggaggctccggcggcatggacgaggacgctccggctggaagcggtggccctggccccaagatcgaggaggtggactaagcggtttgtgtcaggtctcgtgtgtctgctgcagtggctggctggcccagtcgctgctcgatttatcgtcgtcgtcgcggtgtatccgcgttagaaccttttgttggtgaacaatattatcgtggcacgcgttttaagtaatacggtattctggttcggttt

SEQ ID NO: 5525 - DNA, 1431 bp, Zea mays
  Clone ID: 700464617_FLI
cagctggcgacacccatcttgggggtgaggactttgacaacaggatggtcaaccactttgtccaggagttcaagaggaagaacaagaaggatatcactggcaacccgagggctctccggaggctgaggacctcttgtgagagggccaagagaactctgtcttccactgcccagaccaccattgagattgactcgctgtacgagggcattgacttctactccaccatcacccgtgccaggtttgaggagctcaacatggacctgttcaggaagtgcatggagcctgttgagaaatgcctgagggatgccaagatggacaagagcagcgtccatgatgttgtccttgttggtggctccactaggatccccagggtgcagcagctgctccaggacttcttcaacggcaaggagctgtgcaagaacatcaatcctgatgaggccgttgcctatggtgctgctgtccaggctgctatcctcagtggtgagggcaacgagaaggtgcaggacctgcttctgcttgacgtcactcctctctctctgggtctggagactgccggaggagtgatgaccgtccttatcccgaggaacaccaccatccccaccaagaaggagcaggtgttctccacctactcggacaaccagcctggtgtgttgatccaggtgtacgagggcgagaggacccggacccgcgacaacaacctgcttgggaagttcgagctctccggcatcccaccggctccccgtggtgtcccccagatcacggtctgcttcgacatcgacgccaacggcatcctgaacgtgtctgccgaggacaagacgacggggcagaagaacaagattaccatcaccaacgacaagggccgtctgtccaaggaggagatcgagaagatggtgcaggacgcggagaagtacaagtccgaggacgaggagcacaagaagaaggtggagtccaagaactcgctggagaactacgcctacaacatgcgcaacacgatcaaggacgagaagatcgcgtccaagctggctgccgacgacaagaagaagatcgaggacgccatcgacgcggccatcagctggctggacgccaaccagctcgccgaggcggacgagttcgatgacaagatgaaggagctggagagcctttgcaaccccatcatcgccaagatgtaccagggcgcgggtgccgacatgggaggctccggcggcatggacgaggacgctccggctggaagcggtggccctggccccaagatcgaggaggtggactaagcggtttgtgtcagtctcgtgtgtctgctgcagtggctggctggcccagtcgctgctcgatttatcgtcgtcgtcgcggtgtatccgcgttagaaccttttgttggtgaacaatattatcgtggcacgcgttttaagtaatacggtattctggttcggtttcg

SEQ ID NO: 5526 - DNA, 2199 bp, Zea mays
  Clone ID: 700466311_FLI
cttctcccgccgccgccaatcccctcccgttctccgccaccgccaatcccctcccgtcctccgccacctctgctgagagcgagaagagatggccggcaagggtgatgggccggcaatcggcatcgatctcggcacgacctactcttgcgtcggtgtgtggcagcacgaccgtgtcgagatcatcgccaacgaccagggtaaccgcaccacaccctcgtacgtcgccttcaccgactccgagcgcctcatcggagatgcggccaagaaccaggtcgccatgaaccccatcaacaccgtctttgatgccaagcgtctcattggcaggaggtttagtgatgcctctgtccagagtgatattaagctgtggcccttcaaggtcattcctgggcccggtgagaagccaatgatagttgttcagcacaagggggaggagaaacagtttgcagccgaagagatctcctccatggttctcatcaagatgcgtgagatcgctgaagcttaccttggcagcacgatcaagaatgctgttgtcacggtccctgcctacttcaacgactcacagaggcaggccacgaaggatgctggggtgattgctggcctcaatgtgctgcgtatcatcaatgagccaaccgctgctgctattgcctatggtcttgacaagaaggcaaccagcgtcggtgagaagaatgtcctcatctttgaccttggaggtggtaccttcgatgtctccctccttactattgaggaaggtatctttgaggtcaaggccacagctggcgacacccatcttgggggtgaggactttgacaacaggatggtcaaccactttgtccaggagttcaagaggaagaacaagaaggatatcactggcaacccgagggctctccggaggctgaggacctcttgtgagagggccaagagaactctgtcttccactgcccagaccaccattgagattgactcgctgtacgagggcattgacttctactccaccatcacccgtgccaggtttgaggagctcaacatggacctgttcaggaagtgcatggagcctgttgagaaatgcctgagggatgccaagatggacaagagcagcgtccatgatgttgtccttgttggtggctccactaggatccccagggtgcagcagctgctccaggacttcttcaacggcaaggagctgtgcaagaacatcaatcctgatgaggccgttgcctatggtgctgctgtccaggctgctatcctcagtggtgagggcaacgagaaggtgcaggacctgcttctgcttgacgtcactcctctctctctgggtctggagactgccggaggagtgatgaccgtccttatcccgaggaacaccaccatccccaccaagaaggagcaggtgttctccacctactcggacaaccagcctggtgtgttgatccaggtgtacgagggcgagaggacccggacccgcgacaacaacctgcttgggaagttcgagctctccggcatcccaccggctccccgtggtgtcccccagatcacggtctgcttcgacatcgacgccaacggcatcctgaacgtgtctgccgaggacaagacgacggggcagaagaacaagattaccatcaccaacgacaagggccgtctgtccaaggaggagatcgagaagatggtgcaggacgcggagaagtacaagtccgaggacgaggagcacaagaagaaggtggagtccaagaactcgctggagaactacgcctacaacatgcgcaacacgatcaaggacgagaagatcgcgtccaagctggctgccgacgacaagaagaagatcgaggacgccatcgacgcggccatcagctggctggacgccaaccagctcgccgaggcggacgagttcgatgacaagatgaaggagctggagagcctttgcaaccccatcatcgccaagatgtaccagggcgcgggtgccgacatgggaggctccggcggcatggacgaggacgctccggctggaagcggtggccctggccccaagatcgaggaggtggactaagcggtctgtgtcagtctcgtgtgtctgctgcagtggctggctggcccagtcgctgctcgatttatcgtcgtcgtcgcggtgtatccgcgttagaaccttttgttggtgaacaatattatcgtggcacgcgttttaagtaatacggtattctggttcggttt

SEQ ID NO: 5527 - DNA, 1903 bp, Zea mays
  Clone ID: 700466555_FLI
gagacagacagagaagaaaaactgcagccgccgagctcagcctcagccgccgcgacggggacagggaaagatggccgacggcagtgcctccgcctcgccgccttccgtttctccgcaccagtaccaccgcgacgccatcaagtcctcagtgcgtaatacagctgctaataggaggagggaacatgccattgcaatagggaaagaaagaagggaagccttgatgcgtgcaaagcgtgtatgccgagctcctctttctggcagtgatgaggctgcaggagaagagggtgacatggttgttgatgaggagaaagcagatcttgagactagaacgactcaggctgttgaggagctgaaatctgctttgtcaagccagggaaaaggtgcacagaataggaagacagaagtgcttcgtgctttaaggcgtttgttgtcccagtctgaagtacctccagttgatgcagcaattaaagctggagcagtccctctattagtgcagtctctgtcatttggatcgccagatgaacaattgctagaggcagcttggtgccttacaaacatagcggcagggaaacctgaggaaactaaatccttacttcctgctctaccattgctcattgctcaccttggtgagaacagctctacacttgtcgcggaacaatgtgcatgggccattggtaatgttgctggtgaaggagcagagctgagaaacacattacttgctcaaggtgctttgtggcctcttgcccgtttaatgctgtcaaataagggttccacaacaaggactgctgcttgggcattgtcaaatctcatcaaggggcctgattccaaggctgcgaatgaacttattggtatcgacggcatactgaatgcaatcattcggaacttggaaaaggcggatgaagaacttgtaactgaggtggcatgggtggttgtctatctttcagcactttcagaaaaagctaccagcctaatagtaagaagttcgatgccacagttgctgatcgggcgccttctagcatctgaaaacttgcagttgctcattccggtacttcgcggtttaggaaatcttgtagccggtgatggttacatggttgattcagtccttattgttggaaacagtgtaacagatcaagccttatcaagtcttatcaagtgtttgaagagcgaccatagggttctcaagaaggaggcatcatgggccatgtcaaatatagcagcgggcagttttgagcataagaaactgatatttggtagtgaggcgactcctttgctgatgcacctcctcaggactgcacagtttgacatccgcagggaagcagcatacacgctgggcaacctgtgtgttgtcccagcaggcagtggtaaccccccaactataatcgttgagcatttagttgccatcgtagatggtggagcccttccaggatttataaatttggtgaggtcggccgatatagagagtgcgagacttgggcttcagttcctggaactggtgatgagaggataccctgacagccagggcccaaagctcgtggagacagaggacggcattgaggccatggagaggttccagttccatgagaacgagatgatgaggaatatggcgaatggtttggttgataaatactttggcgaagactatggcctgtgagttgtgccgccgatacatctgggtaaacgtggagctatttgtgggtttgaaatgtaacgatcctggaacagaaggatgcgccgttcatcatggtttccatgtaatttagcccctaatatatagctggaaatgtgaatgtgttgaaactgaccgtgagctggagatgttaagtgtggataccttagatagacatagactgacatcttgcacagtgcttcctctatctcaaaatattttttcgtctcgtatttt

SEQ ID NO: 5528 - DNA, 1333 bp, Zea mays
  Clone ID: 700466578_FLI
ggcttgcagtctcaggaacttttttgctgggaagccaattccttactgatctaagggacaacatttttgtttgcctgatataaggcaaagtgtgaaagggaaacgcgaaaagaaacgtgtcctggtcccaagtcacctgccatactgaacacgattgatcgcagaaagaaacacgttctggtctagactgacagttttggagctggagccggccatgcgctcgatcagagttccgctgcagccacgacctctctcccgaacgcgcacgagaagaccaggtggaacatatgcaagcaggttctagagcaataaccccatgaatccacatcgggggtctgcatctacacgggcgtgtactccgcaccgctcccctccggccccgaccgccgtgtgctcgttgtagccggggtcgacctcaaccacgacgacgatgcggtctccttgccctaggctcgacctcctcgctgacctcgccctgctccacctcaactcgcgatgaggattgtcggcacgttcacaccgcgccgttgcagaacgttggagcctctcagaactctagaagctgcctaccaccacgcaccctaagataggggcatatctgtgttagtcgcctgcacacatactgaaatatgggcatatccaccatgtattctactcttagttatgttagataaggcttttactctatcatttactgatctggtctgtttttagctccattagcttgttcacaagcttatgttagagaaggcgttatggcttttctcaagattataacatttctgaataactgttctgcataggcatggtaccatcttcatcatgtagctgggatgagctggcaccatgaaagaattcaagtggttaaatcatgcatctgcagaaatattgtactctcaaatggtgggttgctgcgtcacgggagtttgggtgaaggcctgaaggatgtgatgcaaaacgtcgatgcaggtctgggatgtccgcctcattatggatcaaaattcatgacgttctaaaggtgtcggatgagtacctatatactccctcccagaaacaaggcgcctcattacactattggaagctggacgacatggatgactctggcaagatgcggtgggagcacgacgacatggatgactccgaccatgagttcgacaggaagcctagcaacagtacgcagtagcaaggttgacccagaggggcagtggagagtaacccaacaccccctcctccgaccgtcatagcgcttctttcctctggcttcatttcttacctatgtatggatggtcttcaccgctggttacatctagcaagtcctcccaggggtgatctc

SEQ ID NO: 5529 - DNA, 2466 bp, Zea mays
  Clone ID: 700466646_FLI
cgctttcttagccgctaagcatatccctctccgccacgatctcgatggtggagatgtctgtggtggagctcaggacgctgccgctcggcttccgcttccaccccaccgacgaggagctcgtcacccactacctcaagggcaagatcaccggcaggatcaactccgagtccgaggtcatccccgagatcgacgtctgcaagtgcgagccgtgggacctcccagataagtccctgatccggtccgatgatcccgagtggttcttcttcgcccccaaggaccgcaagtaccccaacggtagcaggtctaacagggccaccgaggcgggatactggaaggctactggcaaggacaggataatcaagtccaagggcgacaagcgcaagcagcataccatcggtatgaagaagaccctcgtcttccaccgcggtcgtgcccccaagggcgagcgcacggggtggattatgcacgagtaccgcaccaccgagcctgagttcgagtccggcgagcagggtggttatgttctttatcgcctcttccgtaagcaagaggagaaaactgagcgctccagcccagaggaagtggatagaagtggctactcacctactccttctcgttcttcacctgacaacctagaggcgaatgaggaagctaatacaccattaaataaggaatctccagaatctgctctgcatgaaagcccgattgagctgccaaaatctgttgaaaccaatggtggttcaatgacaaggtggctggcggacagaaatgataacttgatggttactgcaccagatgtttcccatatacctttccacggacatgctgctggtgtagctaagcaggttgatccttctgttggtgcttcaggccacttagttaatccccacaatggaaatgatgattataacaaatttgtgtctgatttcactcccattctaccacttgaaaatgcattcttcactgatatacaacaaggagcttttggttttgatggcatcatgaatcctcttgatccccttgatgctttcttgaatcaaacacttgttgatcctgatgaacattcatcaacaacatcaaaagttcagtatgattctgacattccaacagaatttgagaaccattggaatatgaaggttgagcctcaagatgatcaatgctggtgggcaaacataggatttgagccagacgaaccaaatcctctgcttccttgtgacaccactgaccaagacatactttctgttgactctggtgctgattccttcaatgagcttttcaatagtatggaagagactggaattattgttaggcctcaacagttggactccactgtgcaaccaaaccatgtgttcgctagccagggcaatgcagcacggaggctgcggctacaggttgagtctagggagatcataactaaagatgagagtgaagatgaagtatcatgtgttctaactccagactgtttgaacgattctgttgaggagtccactgcagagaaggatgtggcttctgatggggatgaggctgagtcaacagggattgttattagaagccatcaccctgctccaagatcaagctcagagagttcattcactcaacagggaactgctatgcaaaggctgcggctacagtcaggccttaacaaaggccagcgtcctagtactgatgattcatcaagctgcattatagacgaaccaggaagtcagcacaaagcagaaaaagcagagattgaagaggatgcgagtacaaacctcgctggaagtgctgatgatctacctggtaatatccatgatgatgagcaaaagaacatccctgaacatggtgctgaaatgacttctccagaagccaaatctgttctgaggttgcggaagacttctgaggaaggcaacaaggatgtcaagcaggagagttgtctcgagccacacgtgagagcaccaatgcagaagggaggcttccaatcatacatcatctggctggttcttccggtggctctgctcctgcttctctgtgttgggacatatggatgggtatgaaatctatcctggtgcggtgcaaggcatgacattttgcgcacatgggttcctggcgtcaacctggtgtgcggtcttctgtacataacctgtggcatcctttcaacagccgtaccctgcagtaagacatcccggcattgccaaggcagctgaaaaataaataaaaaaacaagtggtagaaatgacaaggtggaaaagagcgaggtgtgttattgttggttttagtacatcgtagtcttcttttgctgttgttgtagatgtcttgctaatgttgtcgctgttgtgtagttgcaattcaagcccagggctgccagttttatttcctaatgtaatgtagcaagagcgagaccctgttagacgggtgcgctgaaattctgaacctctgtaatatctgatgttcttgtggatacctgtttcagaattttcggttcctgaaccc

SEQ ID NO: 5530 - DNA, 500 bp, Zea mays
  Clone ID: 700466728_FLI
acggcatcctgttcggcttcccggcgcggttcggcatgatggcggcgcagatgaaggcgctgttcgactccacgggcggcctctggcagcggcaggcgctggcgggcaagcccgcggggttcttcttcgcgctgggcacccagggcggcgggcaggaggagacggcgctcacggccgtgtcgcagctcacgcaccacggcatggtgttcgtgcccgtgggctacacgttcggcgccggcatgttcgacatggacgaggtcaggtgctgcagcccgtacggggccggcacgttcgccggcgccgacgggaggagcaggctgcccagcgacgccgagctgcagatggccgcgcaccagggcagctatttcgccgccttcgccaagaagctcaaggcgggagcggccgtcgtggcctgagcctgcctgagtagtgctctctcctctctgcccatcgatgccagctgctcttgtctgcggaaataaaataaagctccattacgt

SEQ ID NO: 5531 - DNA, 1252 bp, Zea mays
  Clone ID: 700466753_FLI
catcaagtttgctaaactattacggcaacatctaagctatgcatatcatacaccaacgcagttcgattgtccagctgataataataaaacgaaagctacgttgtctcctgctcctagagtgaactgagtcgacagaccacatactgacatacgccttgtattcttgtaaatatagcagattttgcatcatctggacgctagatagtttttttcttgtgttcagactttcgaagttgaattgaacaaattataaggatgtttagaactgctactgaattgttagagaattatatagatatgttatgttaccgcctttttttttacctgatgtgttcttttatctcgacaaccctggattaaaatcctagctccgccactgccgccacctccctgctccaaccccgcacctccgcttcgccatgaacccttcgtcgtcatccacctcctcctctggcgggtaccactctagggccgctgcctttgcttccccgcagccgcgcggcggtggcggtggcggcggccgagatgggagcgaccgcatcgacgccctcggtcgcctcctgacgagggtgttgcgccacatggcggcggagctgcgcatagatatgaggaccgatggatacgtgcgcgtccgcgacctgttgaagctcaaccttcagaccttcgccaaggcccctctcaagtctcacactgttgacgagatcagggaggcagtcaggcaggacaacaagcagcggtttagtctgttggaggaagatggcgagctgttgatccgggcgaaccaggggcacacagtaacaactgtcacatcagagagcctgctgaagcccattttgtcccccgacgaagtgtcagaaaaaaccttgactcgattttgcaatttgggctaaagcgtatggcaaggttacacatacatttctcaagcggcttaccatcagatggagaagtaaccagtggtgtacggcagaatgtaaacatcttgatacatctggacgttagtaaagcacttaaaggtgggatgaagctttatatttcagacaacaaagtgatcttgacagaaggttttgatggcgtcgtcccggtgaaatactttgaaagagtcgaaacatggccaggacgagctccaataccgttccagagataacaggccatgttaccatttttcggtaattcacatacatgattttttttttggggggggggagggggggcttaatatgcattgtgggtgtggaatatatcagcatttggt

SEQ ID NO: 5532 - DNA, 1773 bp, Zea mays
  Clone ID: 700466755_FLI
ggcgctgccacgccacggccgacgcttgagacgctccccgccgcctgccaggccgccaccgcgcgtgacttcgcctcatcctctccggagatggacttccaggtcgtcgtcctcgccggaggcacctccgagaaactctcgcccctcgtttccaaggacgttcccaaggcgttgctcccggtcgccaatcgccccgtactctcttacgcgctggacctccttgaggccagcgacctcaaggacctcatcgtggtggttgaggggcaggaggcagcgcagcttgtcgacgcttgggtatccagtgcgtacctggatcggcttcgagtggaggtagttgtggtttctgaagaccttggaagtgctggtgcattacgagctatttcaaagcgactgatggcaaacgatattttggtagttagcggtgacctggtaacagatgtgttgcctggggctgttgctgctactcatagaagaaatggtgctgctgttactgctttactatgttctgttcctgtcagtggtccttcagacacttcttcttctagtgggaaagataaagctaaaaagccaaatcgtttgaacatagtaggactggacaggagtaaacaattcttgttacatattgtgtcaggaactgatgttgaaaaagatattcaagttcataaaagaaaaatacaggctgttggtcagatggaaattcgaagtgacctaatggatgcacatctttatgcttttaagaggacaatattacaggacgtactggaacaaaaggaagcataccgtagcattagacttgaagtcctcccgtatttagttaggagtcaattgagatcaactccatcaggtggcagtggaacatcagttgacgaaattgagagtagtgcctttcagtccagtggtaatttgcagtgtttgtcgcagcatcgggtcattgcaccatctgctttcaagcaggatgtattatcaagatcaagtggtggacataggtgctgtgcttatattgctagtaaaagcaaatactgtcaccgcttgaactcaatccagtcatattgtgatatcaatcgagatgttataggggaagttagccacctgtctggttattcgttttctgcacaaaacaatattatccacccatcctctgttcttggatcaaagactacaataggaccacactgtattcttgctgagggttcacagcttggtgacaagtgtagtgtgaagcgatctgtgattggtcgtcattgccgaattggttccaatgtaaagatcgtcaactctgttgtgatgaatcatgttgttattgaagatggttgccacatccaaggttctgttgtatgtaataatgttcaactgcaagaacgggcagttctgaaagattgccaggttggagctggttatattgtgactgctggcagcgagcacaaagcagaatccctagcaagaaagtacagtgagctttgactggtttgttagatcctgaatgttttttttttgtgttcacttgagatgcaccccctcagaaaaaagggtagcagttgtccaaattttataaaatgtcattatgtacaacagcacagttcagtgcgaaaggtttggttgcttatctttcctaccaggcggcttgttagagcgaaaggtttggtcgcctatctatcctaccagctgcttgagcaagttgcatgctgtctgaggacgatgggttgatagttggggcatgtagttgggacctactattgtcggaaattctggattcggtttctctaaaaaaaaaac

SEQ ID NO: 5533 - DNA, 706 bp, Zea mays
  Clone ID: 700466764_FLI
caaggtccaggcaatgcgttcgccggttcggctggaacgagcttcactccgcacatcatcacggcgtctccttcagaggacgtggcggcgaagatcgttgcgttcgccagccagtcgtcaaaggcggtgtgcgtcctctcggcgatgggttccgtctccagggccgtcctccgccacccggccgacggctctcccatggcgagggttcacgcgtcgccgcagccgtacaagaaccctgctgtctacgagggtttctacgagatcctgagcctaaccggctcgtacaacctggcacagggcggcggcctcagcgtcacgctctgcagccctgagaggaacgtgatcggaggcgttctgggcggcccactggtagctgcaggcaccgtgcaggtggttctggggagttttcaccagggagggtcgagatccaagtccaagaaagccgggaagcagcagcaggcggcggccttcagccccgactcgctcaccggcggccaggaggcgtcgcccagctccgggcacaaccaaaatctaacgccgccgccctccgtgacgggagggtggcccacctccggcatatttgacaccagaagttccagcattgatatcaactcgtctagaggctagctcattcgtcgatataattccagctcgacagaaattttctgttttcgcacaagaatacccaaaaaccatacttcgaaat

SEQ ID NO: 5534 - DNA, 2048 bp, Zea mays
  Clone ID: 700466783_FLI
acgaaaaccctcgcggcgaggagcgctctccgtcccacacacgcgcgccgcagcctccgcagtccgcacctgcctccacgacttgtcgtgctcgtgcgctactctcctcgagcgcggcgcggagcacggggacatcaaatggcggcagcggcggagatcggtggtttcgcggcggcgagagtggcggtggcgacgctcaggccggctgcgcacccagccccggcggcggcaccgcagcagcctaggagggcggtggcggcgcagtcgctgcggacgaccgccaccgaggcgctgacggcggatctcgccggcacgaccaacggcgctgtgcatgctcggatgaatagtaaggctacaagtgaaatcacttcacaggcagttactgcaaattctaggagaaagacaaagatagtctgcaccataggtccctcaaccaacactcgtgagatgatttggaagcttgcagagactggaatgaatgtagcacgccttaatatgtcccatggtgaccaccagtcgcaccagaaggttattgatttggtcaaggagtacaatgcacagaacactgatggcaatgttattgccattatgctggacacaaagggtcctgaagttagaagtggggatgttccagagccaatcatgctcaaggaaggtcaagagttcaacttcacgattaaaagaggggtgagcactgaagacactgtcagcgtgaactatgatgacttcataaatgatgttgaagctggcgacatactattagtggatggaggaatgatgtcgcttgctgtgaagtctaaaacaaccgatacagtcaagtgtaaagtagttgatggtggggaattgaaatcacggcgccacctaaatgtccgtggaaagagtgctactttgccatctatcactgagaaggattgggaagacataaaatttggtgtcgaaaacggtgttgatttctatgcagtttcctttgtgaaggatgccaaagttatccatgaattaaaagactaccttaaaagtgctaatgccgatatacatgtcattccaaaaattgaaagtgcagattcaataccaaacctgcagtccattattgctgcttcagatggggcaatggtggcgcgtggagaccttggtgctgaacttccgattgaggatgttcctttgctacaggcagagattgtccaaacatgtcgaagtatggagaaaccagtcattgtcgctacaaatatgttggaaagcatgattgaccatcctactcccactagggcagaagtttctgacatagctattgcagttcgggaaggtgctgatgccatcatgttatctggcgaaactgctcatggaaagtatccactaaaggcagtcaaggtgatgcacactgtggcactcagaacagaatccagcctttataacccaactacttctcctagtcttgttgcatctgcacagaatgaggacttctccccaagccagctaagtaaaatgttcggatctcatgcaacgatgatggccaacacccttcgcacaccaatcattgtatttacacagacaggctccatggctgtcctcctgagccattatcgtccctcgtctacactatttgcatttacaaacgaggaacgagtgaagcaacggctagcactctaccagggcgtcatccctattcacatgcagttctctgacgacgcagaagaaactttctccagagcaattagcagcttgctgaaagcacaatatgtgaagaagggagactacgtcactcttgttcagagcggagtgacttcaatctggagagaggaatccactcaccacatccaagtgaggaaagttcaggtctgatgtgccggtgggaattggtcgtctgagaaattttgatagcgccgcctgatgtgttatcatcattatatgtgtaattttactgttttaccaggagattgctacgtcgagttatatgttgtgtcgaattcacgtgtaggctctgaatcttgactgtgtccgttcattttcgcttgtttcacactgaagtgttataagctcaactttactgcttt

SEQ ID NO: 5535 - DNA, 1214 bp, Zea mays
  Clone ID: 700467103_FLI
gccgcagagcggctggctgacatcaaggttgccgcggggattccgaaggacctcgacggagacgtggtcaccgtacccaaggagcgaaacagcggtgagatgcaggtgtggaaggacctcatcttgtccccgaccccggcgatccgacgcatactgctatcggccgtcggcctgcacttcttccagcaggcttctggctgcgattccgtcgtcctgtacagccctagcgtgttcaggggcgcgggaatcaccggcgacaacaagctcctgggcgtcacctgcgccgtgggcgtcaccaagacgctcttcatcctggtggccacgttcctgctggaccgcgtggggcgtcggcctctgctactgaccagcacgggtggaatggtcatctcgctcatcagcctcgggacggcgctcaccgtcgtggggcatcacccggacgccaagatcccgtcggtcgtcgctctgtgcatcgcgtccaccctggccttcgtcgccttcttctctatcggcctcgggcccatcacgggagtgtacaactcggagatattcccactacagctgcgcgcgctgggctttgcggtcggcgtggcgtgcaaccgcgttaccagcgccgttatctccatgaccttcctgtctctctccaaggctattaccatcggcggcagcttctttctctactccggcatcgccgcggtcgggtgggttttcttcttcacgtgccttccggagacccgtggtcgtacgctggaggagatgggcaagctgttcggcatgccagacacggacatggctgaagcagacgacaccgcagccaaggagaaggtggtggaaatgtccaccaagtaggaaagtagatggaacgaaaatacaatattcggcggtgctcgggcagataggcaatgattggtgcagcgtcgcttacaagagcagagctcaacccaacacaaacaaaataaggaaaaaaaaactgaagcagcgtggcaagattggcctctgagaatcagagatgtcgtggtgcactagtgctgcaggacagagacggcgtggtccagcaagagacttccgcgagacaggctgccaagtgacagctattagtcattgttgtcagagtcgcgtgtgctttgtcatgatcgatgatgttttcgtccttattttacaagaaaattccctctcaacgaatgtaaccaataaaccattctaagtttttttggcgc

SEQ ID NO: 5536 - DNA, 1433 bp, Zea mays
  Clone ID: 700467941_FLI
atcaaaggtagtggattcatttgaaaatcaacggagtatgccaagcagttcaaggcaagtacgtggtgctaggcgtgttgcccataatccaagaaaaactcttcttgtgtctccacctagctactggccaccatgggataagtcaataacaatggatcttcttgagatgaagaatggtttgaattacttcaggtacacatatgacccttcagtcagccatgtgcaggaattatttgaagccgccaaagcagcaaatgatctcaatgctattgcagctatattagggaaatatccatatcatccagaatcactgttgacatttgctgagcttttcaaatattctggagagcatcaatcatcagcagatgcagtggagaaatgcctatttgcattggagtgtgcttggcatcctttatttagcccacttcagggcaactatcagttgaaattcaaccatgacacaaataagccactgtttacagcactctttagtcacatgaaaaatctggataggcgtggctgccatcggtctgctttagaggtctgcaagtttctgttgtcactggacttcgatgatccaaagggttctctattttgcattgattactttgctctaagatcacaacagtacaaatggctggagcaatttgcagaagagtaccagtgtgataactccttgtggttatttccgaatttctcattttctcttgctactgcacggttttaccttgagtgtgatgcagcgtcagagggttctgatgatgctgacaaatcaacatctcttgatctcatgaagcaagctctgatgcttcatcctatggtgcttcgcaagatagttgacaaggctcctctgaaagactcatcatggacccaaatactcagaaatgtattctttggatcagcaaaaccgggaagcccttcacttgagcatatgatcaatatatatgtggaacgccattatatcatgtggagattcccagaactgcagaacttgctgaaagaggctgctcttttggtgattgaatcactaaagcaggataacagagaagccctggactgggcttgtgttagaaaagaagcattctcgtcagacaagaatgagtactctcatctgcttgtttcagacttcactgacacaacgccgtcgctcccaccagaagaactgcgaccatttatggtcggtccaggaatgttgcatgagatgccacctgttgaacaagaagctggacccgagagactccgtgctcctcgtgaagtcgctgggcgtaatcctgcagtagtcttccttgaatcactgctcccatgggtcgactatggtgacaatcatcaaggtgcaaatgacgacgacaacgacgacgaatgatcagttggatgtataaagtggcaaggactcacaattgcgcctgaattattgaatgtgacacatgattaag

SEQ ID NO: 5537 - DNA, 2802 bp, Zea mays
  Clone ID: 700467980_FLI
ccgagatccaagacccgcgagatccgcttgccctcgtcgccagccagagcccggagcggatacgtgtccatggcggccggagaggagcaagaagagttctttgactccagggaggtgctgtcgccggcgtccgtctcgtcgtcgccgtcgagttccggtcgccacgacgacggcgggtggctcttcgcccagcagctgctcgaggtctgggtccgggacccgggcagcgtccacgagcgccgccagaggttcgtcaagtccctgggcctcatggatccgagcccccacggcgcgcggcccggcgaggagacgtgctcgaggcctgaggccagagaagaaatcctaccggcaagccccagcaccgagctgttctcggccgtccctacctttgcgagcatgggaggggagccgacagcctccggcggcgacggcgctggcacggaagaggagccggagtgcgtgttcaagaacctggacgatggcacagtgttcgtggtcgacgagatgggaaaggacgggagcttccggagcctcagggagaggctctccaaccggacagtaacagctgcagaattcgagcaggcctttggctcatcacctttcatccgtgagctgatgaggagggtggacgattccgacgaaccctccaccccggagaagactgtgctgaggagaaggaggcggcggcggattgggtggctacgaaggctgggcatcggtgtctgtgttgtcgacgccgacgcagaggaggaagacgatgaggtcaattcgacatcatccacttcttcccggggttgctctaggaaggttgattgggtcaaggtgagaccttacaagaagcggtcaaaggaattatctgcagtgtacaagggccaagtcatcaaggcacatgaaggtgctattgtgaccatgaagttcagctccgatggccagttgctggctactggaggtgaggatggggttgtccgcgtttggcgggtggtggaaggcaagaggcctgatgaccgtcattttgttgacgatgatccttcatgtgtgttcttcactgtcaatgaaaattctgaattggctcccatcaattcctgcgaagggggtaagggcaagcacaataacagctcaaaggtggctactgatccagcttgtgttgtgattcctcaccagacctttgcgctatccgaggaccctgtgcatgaattccgtgggcaccatgatgccatcttggatctttcatggtcaaaaaatagggaattgctttctgcgtccaaggacaaaactgttcgattatggaaagttgggtgcgatagctgcctgaaggttttctcccataataactatgtgacatgtgtacagtttaaacctaccaatgacaattatttcatcagtggttgtattgacgggatggtacgtatttgggatgttcctagatgcctagttgtggactgggctgacagcaaagagataattacagcagtttgttaccgtcctgatggaaagggtgcagtggttgggacaataacaggaaactgccattgctatgaagcatcagaaaaccatctagcactggagtcacaagtccccctgtatggcagaaagaaatctccacttaaaagaatagttggattccagtattgcccatctgatccaaagaaactgatggtgacatctggtgactcacaagttcgcattctcgatggggctcatgtcgtttccagctacaaaggattacgaagtccaagtcaagtccctgcagcatttacaccagatggagatcacattattgctgctagcgatgactctagtatctatatgtggaattatgcaaaccaacttgccccagtcacgagccgtgtgaaaaccgtatggtcatatgagcacttcttctgcaatgacgtgtccgttgcaataccatggaacgccttgcctgcaaggagttctatttctcttgcttgcaacatccccctttcacggcaagaggtctctgaggagctccacaactcgcaagagtctgtgtcatgctgcagtgctgaaggctcacctaaagctgatagctcgtgccggctgccatccggcaatttcactcttagcaatgcattctccgcggagttggcaccaagggggaaagcaacatggccagaagagcagctgccatcatctgattcagtgacaccgtcgtcgtcgtctgctttgcgtaaatctcagtataagttcctgaagacttcttgccagagtgccgccacgcatgcctggggccaggtcatagtcactgcaggttgggatggaaacatcaggtcgttccagaactatggtttacctatgcaagtgtgacacatggtacaagacatgcatctctttgctaattgcttggtcagtggggtatcccaggaatggcagacgagaagtcgcttgcggaacttttacgcctccaggaacttggtttgctgaagggcgacgccccgtccagattatggttacagtacaaagagtttacatgggtgtgtggctgtgctgtgttgctcgtggaccagaagttgtatgtagtccagtggtcctgcgagatctcggcggcacattgcgagagaagggccggggaagatggatcccctcgcagacccaactaactttgcgcgaagagtggttgtatggctgcaatttcattgcattgctgtttgctgcttttctttgttttggcctccctttggggggatctgcagtaaatatatatagagtggatggatgaacatattttgtttgctcgattgagttcccctcgccctgatgcaaggcgagcgggggaggtagttg

SEQ ID NO: 5538 - DNA, 1550 bp, Zea mays
  Clone ID: 700467986_FLI
tgggatttcatttgaggtgaaggtagttgcagctaaccatgataacaaaagcacacagattaccaccctgcccaatgagccagaaatagattcatttaaggagagtgaagtgccaggtgtaccacctgcaggaaacattctcgtcaatgatggagttatcagcacctctgcaaatgttgtttctccagttaagaatgaccctgttgttgagacatatgtgaaagtggttaacgaggatgttgtgaagatacctgtagccgctccagcttcaactcctgttacagctgaggaagttgttaacaaggattttgtgaagattcctgagtctgctccggctctcccttcatcagttgagaaggctgctccagcacctcccgcatcagttgagaaggctgttgcagcacctcccgcatcagttgagaaagctgctccagctcctcgcgcaccagttgagaaggccgatccagctcctagtgcacctgttgagaaaggtgctccagctcttcgcgcaccagttgagaaggctgatccagctcctcgtgcaccagttgagaaggaagtaactaggaagacttatgcatcagttgttaaaatcccgagggaggacacacagcctgccccagctgccagaccctccaagcccaacctaaatataaagatggttcaaaatacggagaaaaatgtgtcctcaccatcgaaacctgctcatgctactgttaatgccctaccgggcgataaaggtgttcctaaaaacaaatcacctgatgagccagggtactcaatttttgttaagaatttacctttcgaagcaactgttgaaatggtcgaacaagagttcagcaagtttggtgctattaaatctggtggtgtacaagtcaaatgccagcctgatcagttttgctttggctttgtcgaatttgagtctcagcaatccatgctagcagcaatcgaggcttctagggtttatttcggcacaagagaatcatatgttgaggagaaaagaaccaaaacacgagttgttgatggtgttatcacccgtggggatgacaatggcaatggcggtggcggtcggttccattctggcagaggtggtggttactatggggacggctacaagcggcagtggggcggtcagaacaacggctactacaacggcggggataacatgaggaacgactactcaggtcgtgtccgtggaccgcaagggaacggccaccctcagaacggccacggctaccatcagaacggccacggctactactctgggaatggctaccaacagcgacgccccaacagcaatgggaacggactgagggtcgagcgcaacaatggcttcaggcagcaaggccctgcatctgcctagaccttgtcattttgcagtccatccttgatacgaaagcagtggggatattttgatgtctataggtagatactttgtcatggctgaattttgttgtcgcggttgataagagcaatcgtgcgtcctttgactggaactgtaatgaggagtggagtcagtcgtgtcgcaaaggggaaaaaaacatctatcg

SEQ ID NO: 5539 - DNA, 1318 bp, Zea mays
  Clone ID: 700467990_FLI
ccatttcccaacccaaaccagcggctggcacggacgccggcgagccgcgcggcccggaggaccactgcctcctgcatatagccggcttccgcggccatgtcatccgtacacttctttcctgcctcctcccagaccccggtccccgcctgccttctcaaaacctctccaaagtcacccctcccgtgcccccgcacccttgccaccacctctctccagagtgttggcggcaattgcaatgcgtggcaccgcccgcacctacggctgcagcggagggtccgcacccctgcagcaccgtccgacgcgccgcctgtgggccccgatggcgggagcgggggcggcggcgcggggggagggagtggaggggaggatgaggaggaggagggggagaagaagaagggactgttgcccgagtggatgaacttgacaacagaggacgccaagacggtgctggccgcggtagctatctcgctcgctttccgaaccttcgtcgccgagccgcgcttcatcccctcgctctccatgttccccaccttcgacgtcggtgaccgcatcgtcgccgagaaggttacttactactttaggaagccatgtgttaatgatataataattttcaaaagccctccagtgctgcaggaggttgggtatactgataatgatgttttcattaaaagagtagttgccagggagggagatgttgttgaggttcatgaaggaaaactcgttgtgaatggtgagggtagaaatgaagaattcattcttgagccaccttcttatgacatgaatcctgtgcaagtaccagaaaactctgtttttgtgatgggagataaccgaaacaacagctacgattcacatgtgtggggccctcttccagcaaaaaacatattggggagatcaatttttcggtattggcctcctggtcgaatagggggtactaccaagggttgcttcagccctgaattaagccctggagcaaagccagaatcacttactgatgtcaaatcgacaaagtaggagattgagaagttagttttggtggtgcctgatgtgcaggggaagcttcggttattcttcgtggtagaatgtcacagaggaatcctgtgttgtgtggcaggtagttctattagaacccagagagcggaagacaatttgattctcattgagtcattgggattgggattggattggccagaaggcacagaaaccattttgtctcagggtttcttgtccttttgccttgctgtatacgtacgtattagggaaacttgataccatgatggctgacctagttaagctgcaaaaaagtatggttccactgttg

SEQ ID NO: 5540 - DNA, 713 bp, Zea mays
  Clone ID: 700468004_FLI
acctataaaccgagacatttttacttatatttgttatacccatgtggatactaaaacagaaaagtcaagaaaaaaaataagaacgcattgggagagcatatgtgtttgagctcaactttatctttgtcaaaaaaaaaagaggaatttacagcgggaacaaccatctacaaacaagtccgtcctaagagaacaaagtgacgcaagaacaccgaagtcctctaatcagatcatccgcccgtagtcatcaagctctgtttcctgcgccgtcttgtagcccacgctactgctgcttctgatgtgggtggcttcgctgcgagctcggcgtcgggtccacggcaacggcgtcgccggccacgagctccatctggtcctcgaggtacttgtgcagcagcgcggcgcggtggccctccgcctcgtgcaacgatcgctcaccgggacagcaactcctgctcttcgccgccgtcaccagcagcctgcgccggcggcggcggaagcgggcgaaggcgacgacgacgcagagcagcgggaggcagagcagcagcagcggcagcgcgacgggcagcaggcacagcgctaggcacgacgaccgccaggccggcgccggcgccgcgcggcgggaggcggcccccatgcatctatcaggagactagcgcgacgacgacggctggtgggcagccagcggggctgctgccatggacagggtcggactcgag

SEQ ID NO: 5541 - DNA, 1076 bp, Zea mays
  Clone ID: 700468044_FLI
gcggaagtctgttgttcggattacaaccgggagccaggcacttgatgagctgcttggcggggggattgaaacactttgcatcacagaggcattcggggagttccggtcagggaagacccagttggctcataccctatgtgtctccactcagcttccaatccacatgcatggggggaatggaaaggttgcctacattgacactgagggaacattccgacctgaacgcattgtgccaattgctgagagatttgggatggatgccaatgctgttctcgacaatatcatatatgctcgtgcgtacacatatgagcaccagtacaacttgctcctgggccttgctgccaaaatggctgaagaacctttcaagcttctgattgtggattctgtgattgcactgttccgtgttgatttcagtggcaggggtgaactagcagagcgccagcaaaagctagcacagatgctgtcacgccttaccaagattgccgaggaattcaatgttgcagtgtacatcaccaaccaagtgattgctgatccaggtggcggcatgttcataaccgatccaaagaaaccagcaggcggccatgtgttggcgcatgctgccaccatcagattgatgctgaggaaaggaaaaggcgagcagcgtgtctgcaagatcttcgatgcacctaaccttcctgaaggagaagctgttttccaggttacatcaggtggaatcatggacgtaaaagactgattcgggttttcagccagagtttctgccgaagaagattgttcatgtttctgcagtgaagttcacatagcttgcataggtacacatcgagcgaagttacagcagtggtgtactctgttttatcattgacgtaggaaaaataaataggcgaaactctatgttgcttaggcctcccattgggtagttttttgccacggattacatgtttccttatggagggagtatgttaccgtgtcctttgctttcccaaatgagtgctaggcactaggcagagaccatctactgttagttgtttaagcatgctcatctccatgcttgcgtataaataacactgttctttctcatt

SEQ ID NO: 5542 - DNA, 2000 bp, Zea mays
  Clone ID: 700468937_FLI
ggtcaaggttgaaccagacgaagcaggacctcgatcagagggaggaggacatcatcaaagcatactcgaggcaacatgaaatggagaaagcactgatgaaggcgagcagggatttgactctacaagtccgacagatcaataacctgaaggttatgatcgaggaacaagacaaaaaacttgttagttcacaagacgcactttctaagaaggttattgaagtggataagcttaaacaagagatgctgaagaagaatgatgaagtagctttgctgcattcagagatcgagtccaaggaacaagagcttcttgtagctaatcaggccattgcacgtcaagaagcaacaattagggagcttcgaagtgaaactaaaagaaaggaaactgaggttgagagattaaatgaattggcgaaagctaatgaagacaaactgaaatttgcagaacaggaacttgagaagcagaattcaggatggattgcagcacagcaagagttaaaggaattggcacaaatggcattcaaggataaagatgatatcaagaatacaatcaatgacttcaaacgggtgaggtatttgctggatgctgtgcgttctgaactaatagcttcaaaagaggctttaaccttctcacgcaagcaagtagaagatcaagcggcacagttgagtaaccaagtgcaggaactcacagaccaaaaggcactgattatttcttatacccggaatctggaagctgcccagctggagattcaaggaaagtcaaatgagctcagtactgtacaatctcgttgtagtgaacttgaatctcagttacttgaggaaacggagaaggttgagttcctagaggctatgttaaccaaagaaagggagatcttggaacagaaaactaaggaagtggcgttccttcaagaggaggtagttcagaaggagaaggattacttcaattcacaaaagcttgttgaaacaaaagagactgagctgttagaggcgaggcatgaagtcgaagatatgaaattgaaggtggattccatacaatttgctgttcgagagaaggatttggagcttctggaggcacaaagaaaacttgatgaagttaacagcgaagttgttgaacttcagcagctgataaatagcaaggaggatcaactggtccaagttagaactgaattacaggataaagagcaatgcatacaattgatgcaggatgaattggataagatgagattaggacgctcgcaagctgaatctgtggttcaaaagatagtcgagcttactagcaatctcataggttctgtcaaaggcgaagaattcaacatttataacttgctggatgatgaaattttaagcacgagcacagcccttgagtacagtttgcataagcataaccaactggaggctgacatagacatgttaaaagaatccctgcgacagaaggacatggatctgactgctgcttataaagcgcttgacgccaaagatcgagagttgaaggcagtagttggaaggttagatgttagggacaaggaactagacaagttggaagagctatccatagacccctatggcaccaggaaactgtctagagttgctgatgaggcaaccgaagacaacattgctggtgaagcggagctccaaaagcatgagatggaatctgtggagatggaggcactagctgctagcactatgttgaagaagcttgcggatgtgactaagaaattcttgagaagtggtagaactgattctggtaccaatttagattcaaacgttagtgaaggtgcttctgaattggaaccacaaaggaaacttaatgtgattctcgaggctaaaaaggagattgtcgggctattttctttgacagaagagctcgtcactggtgctcaaacgaaggacgatgatgaggaaccatagcatcataagttcataactgaacatataactgcatcatgaatgttatgcatgtcaactggaatgacgcagctgaaattgttaccatcgtttcctttc

SEQ ID NO: 5543 - DNA, 931 bp, Zea mays
  Clone ID: 700458511_FLI
gaagaagacagcaacacaagcttagtcgtcctcgtccccccaatcttcagcccttgttcatcaacaaaccacatggccgcgctcggtcctgcttctgttacctccacgggcttggcgctgcacacccctgcgattcctcatcgtcggcgtcgccacgggaatgcagtggcctgtgcgtcgtcgtctcaacaccagcgaagccttaatggcttggcgatgagttcttcaggcacgaacaatgccttgcccatcaaaggaattaccactacacgggttcctgcagtcggtcgttcggtccctgcagcgaatccgtcgccgtcaggagggaacaacctcccggtgcccaagattcctccgtgggtcaagtgggtggctggcgccgtcatatttgcagtgcccatgtacaggaggttcagagctttagaagacaagatagagaagacggcggaggtggcgatcgaggtgatcgacaaggtggcggaggcgacggagaaggtcgccggcgaggtcgccgacgagttccccggcaacgagagcatcaaggaagcagcctccaggatcaagaaggtcatgcacgtggtcgaggaagacgccgacaaggctgaggccctgatcgagaaggtcgacgagataaagaaagatgtggattcgattgtcgatcctataatcggcaaggttgccaaggataaatcgcggagaatgaaccaaaaaggatgacagcagtcggtgaattgaaaggagcgcaaacattgctcggacggaaagggaagcaacaggacgcgtctcgtttcgtctcatgtttatctcgtgccatggcttcctacgtacaaacaggagatgaggcatatgatggtgtaaaacactcttttatattgtagattgtactaagagagaagttcgaaataagagatgagataagatgagagatgtc

SEQ ID NO: 5544 - DNA, 1123 bp, Zea mays
  Clone ID: 700458567_FLI
gcaatgcgtaccctgcccccatcctcgggcctcgacgccccctccccttcaccacctcgtcctcggcgcaggcacgcagccccacctcgctgcctcttggtgtctctccagccgtcggcgtacctgcagtccagccgcctccaaccgcagtggcgcagacgccccaccccgtcgcggaggaagaacaagaagggcatcatcggcaaccccagggcgctctggtggttgaggaccgcctgtgagagggccaaaagaacactctcctccaccgcccagaccaccgccgcacacgcaggcgtgtcttcggtgccgccgccaagaatcagatcgccatgaatcccatcaacactgtcttcggtgttgcatattggtgacacagatcaaaagctgcagagatgatacgtctgaaattgatgtcaaacctgatggttccaggagagttaaggatagagctgaactaaagaaccttacacagtggcatctaccagatggtactctctcagtgtccagtagtgttcaccatttcgctcgagaaacaccggtttcagagtaacaattaacgacgatgacgacgacgatgactccgatgatggtgttctccttgcgccgatgttgtaaggggtacagattctgaagagatcagcagcgatgatggtgatgaaggtggagcaatgatagtgatgaagatggtggtgacgatgacatacctagatcggatggcattgaagatgacccatagttcattgatgatggtggcagctttgaagagggtggggcttgatggatatttttggtaacgatgaaggggagggcgatgagagttatacggtggaatcctctagcattggcgacgaggtagttggaccttgtaggtttgttggcggttccctgttgtagaacatagagcatgaccctatatagttcaatgtttatatactcacatcacattatgactggaattattttcctgtgttctctaggagggtagcacaactcatgcttgctagggaatgtggaacataatgaagtgttgaggtgttagatgatgtaagttaaggggttgggtaaagcttgtgcgttctttttgtcgaagaaagatcagatatatatcgattgatgggtt

SEQ ID NO: 5545 - DNA, 1462 bp, Zea mays
  Clone ID: 700458583_FLI
gggaacaggcacctctgctgcctgtgcttgctccttctcctgggactggcgtccggccaggtcctgttccaggcgttcaactgggagtcgtggaagcagagcggcggatggtataacctcctgatggggaaggtcgacgacatcgcctccgccggcgtcacgcacgtctggctcccgccgccgtcgcactccgtctccacccaaggttacatgcctggccgtctgtacgacctggacgcgtccaagtacgggacggcagcggagctcaagtccctgatcgccgcgttccacggcaagggcgtgcaggtggtggcggacatcgtcatcaaccaccggtgcgccgactacaaggacgcccgcggcatctactgcatcttcgagggcggcacgcccgacggccgcctggactggggcccccacatgatctgccgcgacgacaccatatactcggacggcacggccaacctcgacaccggcgccgacttcgccgcggcgcccgacatcgaccacctcaacgaccgcgtccagcgggagctcaccgactggctgctctggctcaagtcgtccgacctgggcttcgacgcctggcgcctcgacttcgccaagggctactcccccgaggtcgccaaggtctacgtcgacgccacggccccgaccttcgccgtcgccgaggtatggaacagcatggcgtacgacggggacaacaagcccgagtacgaccaggacccgcaccggcaggcgctggtggactgggtggacagggtgggcggggcggcttcgccggccaccgtcttcgacttcaccaccaagggcatcctcaacgccgccgtcgaaggcgagctgtggcggctcatcgacccgcaggggaaggcgccgggagtcatcggctggtggcctgccaaggccgtcacctttgtcgacaaccacgacaccggctccacgcaggccatgtggccgttcccctccgacaaggtcatgcagggctacgcctacatcctcacgcaccccggcaacccgtgcattttctacgaccacttcttcgactgggggtttaaggacgaaatcgccgccctggtggcggtgcgcaagcgcaatggcatcacgccgacgagcgagctcaccatccttgagcacgacggcgactcctatgtggcggagattgacggcaaggtcatcgtaaagatcgggtccaggtacgacgtcggccatctcatcccggcgggttttgaggttgccgcccacggcaacgactacgccgtctgggagaaagccggcgccgaacaagtgactcgagcataatagagtgctcgagataccgatttgattctcagtacaatgtacacgggactgcattgataaaataagtggtttctcctctaataagtaagggagcgtaaaagggcaattggagccatgcatatgtaaccttaaaatattgttgagtaaaatataaaggtgatcc

SEQ ID NO: 5546 - DNA, 2037 bp, Zea mays
  Clone ID: 700458614_FLI
gtcaggttcaagggcgacctcgacctctggttccggtacctcgagttctgccgcgacaagcgacacggcaggatgaagcaggttctggcacaagctattcgcttccatcccaaggttcctgggctttggatctatgcagcagcatgggaattcgatcagaacctgaacgttgccgcggcacgtgcactgatgcagagcggtctcaggtcttgccctcagtcagaggatatgtggatcgagtatcttcgcatggagcttacctaccttaacaagctcaaggctcgaaaggttgctcttggagaggatgtcaagacgctgcaaaagaaagacaacgatgcgagccagtggaaagaggaaaacaaggaactgttcatgccactgaatgaacaggtcaaagatcctaaggagccaggctcggctggagatgccctggaggagaaggaagacctgttttggcgtcaagggttgttaatcattcagaccatatatcatggtgccgtggaagctcttccgtcaagcttaaccttgcggaagaaattcttggagatactaaacagtgttgacttggcacattctgatgagttaaaactggaggtcctggatgaccttaagagagatttctctcatagcgaggactactgggattggtttgctaggcttcagcttagcaacttgaacagttccagtaattcgaatagaaaggatgctatatcaaacaagttgaacagatcaattcaggtgtatgacgaagctatcaggaagctaccaaattccaaaatgtactcattgtatgcaaagttttggatggatgttatatatactgacagagaagattcagtcacattattccaggattctgaatttgatgcttcagagttcacttcatccatactgaaagtttatgaaaatgcagaatcatgtggatgtcttactgaggatcttgcttgccaatacatatcactttacttgaaactagaaagactggaggaagctaagactctcgcagaaaagctttgtgatggtcctctttcaaatgctgcaaatttgtggagcctgagatttactatggagataaattcaattgcaactgctcctggcagttcttccttgagcaaggagaacctgagctctctgcttgatctatttagcactgtactctccaagttgtctgtaactgaggctgagagactgtggcatatggccatgaagttgttttcccatgataaggtctgtttcgagaagctggtgaagtgtgcgatgctatcattaagtctggcaggtggcagtgattcaggagcatcagtttcttctgctatcgttggatggtatttgcaaagagatggtgtgaagcatgctaggaagatgtataagagattgcttgctttacctcggccaagcctcaagttcatgcaatactgcatagcgctggaggcgaaccttgcatcgctcggagacaacggcgccctcaaagatgctcggcggctatatgattcagcgctcgacctgtatccccaggaaagagaagtgtggcggagctactacgacctggagctgaagatgggaacatcggagtctgccaacgccgtgtactcgcgcgctcgtaaggtgctgggtgactccactgccttgactgctccccggggctaggtcgcagcatgcaatgtattccaagatgcaatgtgattttttttgtttggatctgtgttttccaatcctctctgtgagtctgggtcagcaagcaattgagctgatgcatcgaaattttggctctaaatgggagtggtaagctgctggggaacactgtatatcttgttcaaaaaacaagagtactgcagctgctggtggctgtctcctttcagaacacttgcctgtgtcccttttctttctttttcttttttgtttgagcagtagctgggctgttggtgatgctgttccttagtgttgagttgctatggtgtaacagtgtcaattgcgacttgaacaaattctgggatctcgaaccatttgttgagattttgaaagtgtactggtggtcat

SEQ ID NO: 5547 - DNA, 1236 bp, Zea mays
  Clone ID: 700458624_FLI
ggcgtcctctctctctctcgtggcgacgactgggcgacctccccgcccccgctgctctacgccagtcgccaggtgcccagatcttcgtcgggcccttcgccgaagagcagccaacaggttgccggtctgcgagttgaatcatggcggagcacttggcttcgatcttcggcactgagaaggacagggtcaactgccctttttacttcaagattggggcctgtcgtcatggggatcgctgctctcgtctgcacaacaggccaactatatcaccaactcttgtgcttgctaacatgtatcagcgccctgatatgataacccctggagttgatgctcaaggccaacctattgaccctgagaagatgcaggagcattttgaggacttctatgaggacatctatgaggagttggggaagtttggtgagattgagaatctgaatgtttgtgataaccttgctgaccacatgattgggaatgtctatgtccagttcagggaggaagagcaagcagccgcagcatacaatgctcttcaggggcgcttttactctggccgccctataattgttgagtattctcctgtgaccgacttccgtgaagcaacctgtaggcagtttgaggagaacagctgcaaccgtggtggctactgtaatttcatgcatgtgaagcaaattggcagggatctcaggaggaagctgtatgggcgttctgcttccaggaggtaccatgggagaagccgaagccgaagcccgccaccacaaaggaggggccaccgtgaccgtgatgactaccaccaccgtgaccgtgatgactaccgtggtggcggcggtggtggaaggggaagaggtagcaggtatgacaggtacgatgacggagcaggcagaggtggcaggcatggcaggtatgatgatggagcaggcagaggcggcagacatgacaggtatgatgatggaggaaggcgcaggcatggtagcccctcaaggcgtgcaaggagcccagtcagggaaagcagcgaggagcgaagggccaagattgagcagtggaaccgtgaacgggagggaaaacagtgagctctccgtggctactgttcgccggacttgttgcttagctccggctctcatcgctatattctaagtatgcttgtgtggatggcattctgcctggctaagtaaaaccttttaagatcaggaattcaggattcctcggttcattttatggttaaaccagacatcatttgtttcc

SEQ ID NO: 5548 - DNA, 466 bp, Zea mays
  Clone ID: 700458652_FLI
gtctccagcaccgggccaccggcggcgaggtcgcgcgagcgcaggcaggggtggtactgggaggggaggaggggaagaaggaggtgactgcgatgtcgagccggttctggaggtggtacgcggaccggcagttccacaagtgggagaagacggtgctgtgggacatggtggagccctaccgcccgccgcgctccttcgcgccactcgtcggcacctacgtcgccgccttctacaccggcgtcgtcggggccgccgtcaccgagcagctctacaaggagaagtactgggaggatcaccccggcgaggcggtgccgatcatgccacccaaattctactgggggccttggagggtgatgaacggagaagttccgcgcttcatccagccgcccgacgaggccaagacggcgtaggagcttcgagcttgcttgaaaacttttcagaagaagcatgtatctggtctcgatcg

SEQ ID NO: 5549 - DNA, 1307 bp, Zea mays
  Clone ID: 700458815_FLI
ctgagcactcggcgctgtcgaatgcgggcgccgcagccccgggccccggcgcggcctcgcctctctcgctcggccacatcgtctttggcgttgcggggtcggcgcatctctggccacgccgccgcgagtacgtccacttgtggtgaaccctccagcctccactatgcgcggcaacgtcgggctcgacgcgggcgcgcccggcgcgccggggcctagcaccccctgggtgggctccctcccgccgatccgggtgtccgcggacacctcgcggttcaggtacaccaaccccacgggccacccgtcggggctccggatcgcacgcatcgccgctgaggtcgtgcggctcgtcggcggaggggcgggggcgcggtgggttgcgcttgtcgacgacgacaccgtcctgcgcgcggacaacctggtcgccgtgctcagcaagtacgactagagggaaatggtgtacgtcggggcgctgtccgagagccactccgctaacacatacttcagccatagcatggctttcggaggtggcggcatcgcgctcagcttcccactcgccgctgcactcgcacagacgctcgacgtgtgcatcaagaggtaccccaagttgtatggaagcgacgatcgcctccatgcttgcattacagagctcggtgtgcccctatcccgcgaatacggattccaccagtgggatatcagaggcaatgctcatgggttattggcgtctcatccaattgttcctttcatcagtattcaccatgtggagcttgtggaccccatataccctggattgaactcccttggaaagtctggagctgtttatgaaggctatgaaaatggaacccatgagcttcctgcagcgttcaatttgttatgatcaaagccaaaagcttacgtttgctatctcgttgggttatgttgttgaagtataccccaatgttcttcttcctcgtgatttggagcgatcgcaacgtacttacattgcttataataggatgagtcagagaaatgaatttgattttgacactagagatgttcagaagtctttgtgcaagaagccaatcttatttttcttgaaggatgtctggaaggatggaaacataactacgggatcttacacacattctagtgctagggatgacctcaaaagaaaggtgttttgcttccggtcaccccctttatctgacatagatgagatccaagtttcttcgtctccattaagtaagcgctggcatctggcaccaagaaggttgtgtactgcacttaaaggatctattgatggtactctgtttatggttgttcggcaatgt

SEQ ID NO: 5550 - DNA, 1938 bp, Zea mays
  Clone ID: 700458828_FLI
accaaaagcatcccacacatctgctaataaggatggctgccctaacacaaactacagatggtcctcgcctcggcgagcaggagatgaagaagatgtctccctccttccatccaactctgtggggagatttctttctttcttacgaggctccgaccgaggcacaggaagctcaaatgagagaaaaggctggagtgctaaaggaagaagtgagaaacatgattaaaggttcacatgatgtgcccgaaatagtggaccttattatcaccctgcagcgactaaatctggactaccactacgaggatgagataaccgaaaagttgactgttgtttacaactccaattatgatggtggtaatttggacttagtttcccgccgattctatcttctgcgtaaatgtggctatcatgtttcatccgatgtattcctaaatttcaaagaccaatatgggaattttattgaggcagataccaggagcttgttaagcttatataatgcagcatacctgaggattcatgatgagacagtgcttgatgaggcaatttcgtttactacgagatgccttcaagatagattagaacatttggaatcaccaatagcagaggaagtgtcgtctgcccttgataccccactttttagaagggttggaactttggaaatgaaggattacattccaatctacgaaaaggacgctaaacaaaacaaatcaatattagagtttgcgaaactgaacttcaaccttctacagcttctttattcatcagagctcaaagagtgcacagcttggtggaaagaactccacgtcgaatcaaacttgagttttgtgagggatagaatagtagaggtgtacttttggatgagtgggggatgctatgatcctcaatattctcattctcgaattatacttacaaagattgttgctttcatcacgattctagatgatacccttgactcacatgctaattcttatgagagtatgcaacttgcagaagcagtcgaaaggtgggatgaaactgcagtctctctactcccagaatacatgaaggatttctacatgtatttgttgaagacattttcatcgtttgaaaatgagttaggaccagacaagagctaccgagtgttctacttaaaagaagcggtgaaggaattagttcgggaatataccaaggaaataaaatggcgtgatgaggactatgtccccaaaacattgaaagaacaccttaaagtttcactcataagcattggaggcaccctggtgctatgttccgcgtttgttggaatgggtgatgtagtaacaaagaagatcatggaatgggttatgagtgatgctgaacttgttaagtcttttggtatatttgtacggctctccaatgatattgtatcaaccaagcgtgaacaaagagagaagcattgtgtctccactgttcagtgttacatgaagcagcatgaactaacaatggatgaagcatgtgagcagataaaagaacttacagaagattcatggaagttcatgattgaacaaggccttgcactaaaagaatactcgataattgtgccacgaacggtactagagtttgcacgaactgtagactacatgtacaaggaagctgataagtacactgtctcccatacaatcaaagacatgttaacgtcgctttatgtgaagccggtactcatgtgaaggttctttattgttatcttggatcaagagaatatcaacatgaagcactactccaagcaggccaaaataactacaggagttatatatattgtacaccttaagtaatatcaagggatatggcggtatatatgtattactcaaagaataacgacaacaaccatcctatagttgttgttctcgggcattgtaggaaaatgcatatgtttccatctgttgtattgtgctatttttccttcagctaaaataaagaaatttttct

SEQ ID NO: 5551 - DNA, 1114 bp, Zea mays
  Clone ID: 700458854_FLI
tgcgtagttatgatgttcgttcagatgaggccacattcactagtgttctgaaagcttgttctgagatggcatctcttacagatggaaaagagatacatggcctcattgtaaaatctggttttgtttcctatgaaactgcaaccagtgccctcatggacatgtactccaagtgtggggatgttatttcttcctttgaaatcttcaaggaattgaaaaacaggcaaaatataatgccatggaactccatgattgttggttttgcgaaaaatggttatgcaaatgaggcacttcttctcttccagaagatgcaagaatcacaaataaagcctgatgatgtcacactccttggtgttctcattgcttgtagccatgctggtttaatttccgaaggcttacatttcttcgattctatgagccaagtttatggtatagtacccagagtagatcactatgcatgtctcattgatctacttgggcgtggtggtcaccttcaaaaggctcaagaagttattgaccagttaccattcagagctgatggtgtgatctgggctacataccttgcagcatgtcaaatgcacaaggatgaagagagagggaaagttgcagcaaagaaacttgttgagatggaaccacaaagctcatccacgtacgtgttcctgtcaagcttgcatgctgcggctggtaactgggttgaagccaaggtagccagagaagcaatgcgagaaaaaggggtgatgaaatttccagggtgtagttggatcacagtgggtaacaaacaaagtgtatttgttgtacaggacacacatcatccggacactctgagcatctacaaaatgcttgatgatctaactggaatgatgaataaagatggcagaatcaaggaatgcttacttgagggacaatgaccttgtttaaccaatatatcatgctaaataatcaagggcctagattgatcttctactgtaatggaaagatgtctggttatttaggtgaggaattcggtacccttgcatagtataagtaatacatttactcataaattaaggatttaggctttgatcacttaatgtttaattgtttatatttttatcatccaggctctaaacattaagat

SEQ ID NO: 5552 - DNA, 529 bp, Zea mays; identical to SEQ ID NO: 5444
  Clone ID: 700458862_FLI

SEQ ID NO: 5553 - DNA, 650 bp, Zea mays
  Clone ID: 700460657_FLI
aacttaattaactatgtcttgctgttgttgtattgcagtagtatgtacactgctagactcactatacttttcttattaaacattttgtttcagtgaaccctatagcctgggcagttcctacaaaacatgagggtgatgccagtgaagaagcttcttttgccgatgagacacttgcatcagaagtagtgctaacccggaagaggaaaataggaagctctttgtcagtagagccaaaccatctctctgatgaacttgaaccaaagttggaggatgcttagaacggggagacttctaactgaaaagtaaaagtgggcagcgtcgtgatgccaacttacccccctgccatggttttattggtcctctgcttgtttctcgttttccttgggagtcagcttctctgttttatgtggtcgcacacggccttatttgtagtattacaccacagaagctggctgacccaaaaaccgacattttgggggcagcaacttaacgaaatgtttgcacgagagtttagagccctatggaacttgtttggataaatatgtttattacgttgtagtacttagctaggaacctgcttatgtaagatgatctttctttaagtaagattaagaactgtcagcggcctagttctgctgcacctcggatct

SEQ ID NO: 5554 - DNA, 469 bp, Zea mays
  Clone ID: 700460849_FLI
ctgtcgccgacgtgggagaacctgatgcacgggcaggtgaacctgcgggacgccgtggctggcaccatcagcttccgcgacgcggcgcgcgggcggacgtacgagctcaacgaccgaaccgccaagctcttcgtccggccccgcggctggcacctccccgaggcacacatcctcatcgacggcgagccggccattggctgcctcgtcgacttcggcctctacttcttccacaaccacgctgccttccgcgcaggccagggcgccggcttcgggccgttcttttacctgcccaagatggagcactccagggaagcgaggatatggaacggggtgttccagagagcggagaaagctgctgggatcgagctcgggagcatccgggcaacggtgctggtggagacgttgccagcggtgttccaaatgaacgagatcctgcacgagctgcgcgagcactcggcggggctcaact

SEQ ID NO: 5555 - DNA, 691 bp, Zea mays
  Clone ID: 700460850_FLI
ggaactggggcatcaagtgactcttatccgccaagttgctgagaaagtgttcgccaatgtgggcaagactatcgggtacaaagttggaacaatgattgagatccccagggcagctctggtggctgatgagatagcggagcaggctgaattcttctccttcggaacgaacgacctgacgcagatgacctttgggtacagcagggatgatgtgggaaagttcattcccgtctatcttgctcagggcattctccaacatgaccccttcgaggtcctggaccagaggggagtgggcgagctggtgaagcttgctacagagaggggccgcaaagctaggcctaacttgaaggtgggcatttgtggagaacacggtggagagccttcctctgtggccttcttcgcgaaggctgggctggattacgtttcttgctcccctttcagggttccgattgctaggctagctgcagctcaggtgcttgtctgaggctgcctcctcattggcaaccggattgcctgctgctggtggatgtggtgatcaacagtattattacagagccatgctatgtgaacattactagtagcagtgctcataaaagctacaatcccatgtcctttttttccccagtcatgtaaaacttccaaactgctccatggttcaaaactctgttcttcaatacatcatcaattatcgatt

SEQ ID NO: 5556 - DNA, 1031 bp, Zea mays
  Clone ID: 700461101_FLI
tggaattgcactggttgtcagtcctttactttcccttattcaggaccaggtcatgggactgtcagctttaggtataccagcatacatgctaacttcaactaccaacaaggaagttgagaagttcatctataagacacttgataaaggagaaggagaactaaagatattatatgtgacacctgaaaagatctcaaaaagtaaaaggttcatgtctaagctcgagaaatgccatcatgccggtcgtctttctctgattgcaatagatgaggctcactgctgtagccaatggggtcatgattttcgtcctgactacaagaatcttggcattttgaaaattcaatttcccagtgttccaatgatagctttaactgcaactgcaacaagtaaggtccaaatggatttaatggagatgctccacatcccgagatgcatcaagtttgtcagcacagttaacaggcccaaccttttttataaggtgtctgagaaatcgccagttggaaaggttgtcattgatgagatcacaaagtttataagtgaatcatacccaaataatgagtctggaattatatactgcttttcaaggaaggaatgtgaacaggttgcaaaagaactgcgcgaaaggggtatttcagcagattattatcatgcagacatggatatcgttaatcgtgagaaaattcatatgcggatcgacacacaagggatgtgattgggactggccgtcgccgtaaatcttcgcctcgcctctacatcttggacaccttgcgtcttccttcacaccatatcactacaactcatgtgcttgctgcttcaggtcccacgacgtcgttcgcccagtggcatcattgtcttggtcacttatgtggatctcgtctgtctactctaataaagtcaggatgtttaggtcctacacatgttgagtctagttttcattgtaaaggttgtcatcttggcaaacaaatacaacctccatattttacccgtttgtttctaaaggtggtcataaatattatgtcattttattgatgatt

SEQ ID NO: 5557 - DNA, 1618 bp, Zea mays
  Clone ID: 700461113_FLI
cttctccctcttgccggtcccgaataaagagcagcagcgcaagaggtcggtagagcgagaagaaggcaatggcggccgagagcttccttttcacctcggagtccgtgaacgaggggcaccccgacaagctgtgcgaccaggtgtcggacgccgtgcttgacgcatgcctcgcgcaggaccccgacagcaaggtggcctgcgagacctgcaccaagaccaacatggtgatggtgttcggcgagatcacgaccaaggcgaccgtggactacgagaagatcgtgcgcgacacctgccgcgagatcgggttcacctccgacgacgtgggcctcgacgccgaccgctgcaaggtgctggtgaacatcgagcagcagtcccccgacatcgcgcagggcgtgcacgggcacttcacgaagcggcccgaggagatcggcgcgggcgaccagggccacatgttcgggtacgccaccgacgagacccccgagctgatgccgctgagccacgtgctggccaccaagctgggcgcgcgcctcaccgaggtgcgcaagaacggcacctgcgcctggctgaggcccgacggcaagacccaggtgacggtggagtacgtgaacgagggcggcgccatggtgcccgtccgcgtgcacaccgtgctcatctccacccagcacgacgagaccgtcaccaacgacgagatcgccgccgacctcaaggagcacgtcatcaagcccgtgatccctgagaagtacctcgacgagaagaccatcttccacctcaacccgtccgggcgcttcgtcatcggcgggccccacggtgacgccggcctcaccggccgcaagatcatcatcgacacgtacggcggctggggagcccacggcggtggcgccttctccggcaaggaccccaccaaggtggaccgcagcggcgcctacgtggccaggcaggccgccaagagcatcgtggccagcggcctcgcccgccgctgcctcgtgcaggtgtcgtacgccatcggcgtgccggagcccctgtccgtgttcgtcaactcgtacggcaccggcacgatccccgacaaggagatcctcaagatcgtgaaggagaacttcgacttcaggcccgggatgatcagcatcaacctcgacctgaagaagggcggcaacaggttcatcaagaccgccgcctacggccacttcggccgtgacgacgccgacttcacctgggaggtggtgaagcccctcaagttcgacaaggcatcggcttaaggttgggagtgtcactgtggacatgaggactaccttcctctggctctgctgttacctgcaagcattgctgctgctggatgtgtgtgtttgatcagtgactggctgctgctccatagaagatgaacggagagaaggatgatgaagggctttggcaatcgccgctgcaactgcaacccatgccatgccggcttagtgattgggtataatttggcttggcagcagccagcattattatgtgctgatctgttatcttttactagtttggtcgtccgatatctttctttctttttccccccttttcgactctgtactgaaactgctgagagattcgcagtattgttgtatcgtattcatatgctactgtt

SEQ ID NO: 5558 - DNA, 1221 bp, Zea mays
  Clone ID: 700461145_FLI
atcccctttgcaagtatagtctctctgctaagcgaagcgaagcttcaagctagtctcggcggctctagaagacgatgggcaaggacgacgtgatcgagagcggcgctggcggcggcgagttcgctgccaaggactacacggaccctcccccggcgccgctgatcgacgcggcggagctggggtcctggtcgctgtaccgcgccgtgatcgccgagttcatcgccacgctgctgttcctgtacatcacggtggccaccgtgatcgggtacaagcaccagacggacgcgtcggcgtcgggcgccgacgcggcgtgcggcggcgtgggcgtgctgggcatcgcctgggccttcggcggcatgatcttcgtcctcgtctactgcaccgccggcatctcggggggccacatcaaccccgccgtcaccttcggcctcttcctggcgcgcaaggtctccctggtgcgcgcgctgctctacatcgtggcgcagtgcctcggcgccatctgcggcgtcggcctcgtcaaggcgttccagagcgcctacttcgacaggtacggcggcggcgccaactcgctcgcctccggctactcccgcggcaccggcctcggcgccgagatcatcggcaccttcgtgctcgtctacaccgtcttctccgccaccgaccccaagcgcaacgcccgcgactcccacgtcccggttctggctcccctccccatcggcttcgccgtgttcatggtgcacctggccaccatccccgtcaccggcaccggcatcaacccggccaggagcctgggcgccgccgtcatctacaacaaggacaagccctgggacgaccactggatcttctgggtgggccctctcgtgggcgctgccatcgcggccttctaccaccagtacatcctccgggctggcgccatcaaggccctcggctccttcaggagcaacgcgtgatgagcggggcttggctgtggagcaatggcgggcgacctacgggcggggggccgtgagcgaggagaatgccatcattcatcgatcgacttgggtgccggtggttggttcgggtcgccttttttttgtttcagcagctgctgcgttgcgcgcgtgcgtgagatttggtttggtttcgttcccctgcaatgtaatcatgtcgtgactctcaagggattattccgctctgctcttatggtctctgttttctatttaatgattgttattaccatgtagc

SEQ ID NO: 5559 - DNA, 1100 bp, Zea mays
  Clone ID: 700461154_FLI
ggctcttgctacccttgtcgtcaacaagctcagaggatcactgaagatcgctgccatcaaagcccctggttttggagagcgcaagactcagtacttggatgatattgccatccttactggagcaactgtaatcagagatgaagttgggctatcacttgacaaggcagacaaatcagttcttggaacagctgcaaaggttgtccttacgaaagagtcgacaacaattgttggtgatggcagcacccaggaagaagttactaagagggttgcacagattaaaaatctcattgaggcagcagaacaagaatacgaaaaggaaaagctcaatgagaggatagcgaagcttgctggtggtgttgctgtcattcaggtgggagcacaaacagaaactgaactaaaagagaagaagttgagagttgaggatgccctaaatgcaactaaggctgccgttgaggaaggtattgttgttggtggagggtgcactcttttgcggcttgcagctaaagtcgacgccatcaaagatacactggagaacgacgagcagaaggttggagctgaaatagtaaggagggccctgagctacccacttaaattgattgctaaaaacgccggtgtcaatggcagtgttgtcactgagaaggtcctttctaatgataacttcaagtatggttacaatgctgctactggacagtacgaggacctgatggctgctggtatcattgaccccaccaaggtggtgagatgctgcttggagcacgccgcgtcggtggccaagaccttcctgacatcagatgttgtggtcgtcgatatcaaggagccggaggctgcacctgtcgcaaacccgatggacaactctggctatggatactgatgagatgctatggccatgccccatgggacgaaggtgatcaccatattaattttttggtaggcgaggagtcgggtcgaggtagctttttagacgaccgaaaggcgaaaataagttgaggatctgcatcccaaatttgtgatgtaaactgagacaacagcagccaaatgaagcagagatatgctgaaagattctgtaactggttgcagctaatgttgaatgcagtttgcac

SEQ ID NO: 5560 - DNA, 568 bp, Zea mays
  Clone ID: 700461156_FLI
aatcctcttcctcgagttctcctcaaccaaattcaaggtcacagcggcgaacctctcggctatcatgtctggccgcggcaagggcgggaagggtctgggcaagggcggcgccaagcgccaccgcaaggtgctgcgcgacaacatccagggcatcaccaagccggcgattcgcaggttggcgaggaggggcggcgtcaagcgcatctccgggctcatctacgaggagacccgcggcgtgctcaagatcttcctcgagaacgtcatccgcgacgccgtcacctacaccgagcacgcccgccgcaagactgtcaccgccatggacgttgtctacgcgctcaagcgtcagggccgcaccctctacggtttcggcggctaggtcgccctctctcccggtggcgaattacgtggtggcgatggcggtcgtgttgtgttcttggtctagtgttgtctgtgttgtctttatcggtgctgttttctgtggtggttgtgctgcatcgttctagtttctagttcatgtgctgtaatatctcgctgctgtaatcaatggaatggcctcgtttccaggctc

SEQ ID NO: 5561 - DNA, 221 bp, Zea mays
  Clone ID: 700461181_FLI
gagcgaacgatggagagaaagaaatgatcctgtagctcgaagaagttaatcgtgccgtgtgaatgtttcaaggagaatgtgtgtagtaattttctttctacctcccttcattattgtacatatgtttagggctgcctaatggaaggccttgtaactagagtagagatgctcaaaagactcggtcatgagttcagtataatgaatgatcttctcaaaagatt

SEQ ID NO: 5562 - DNA, 799 bp, Zea mays
  Clone ID: 700461278_FLI
ccgatcgccaccgccgaccggactcccctcaaaggcggccacagcacagcgagcatgggagaccggcatcagcatgggcctggcagcggcgtggaggacccggcgacgctgctgcggcgggtgcagacccgcgcgcccaactcgacgcaggtggtggggttcctgacgctgctcgtctctggcgccgtgctgctgctgctgacgggggtgacgctgacgggcgccgtggtggcgctcgtcttcctgggccccatcgcgctgctcaccagccccatctgggtgcccgtcgccgtcgtgatctccgccatcgtcgccgccgcgctctccgcctgcgccttcgccgccgccgcgctccccgtggccacctggatgtaccgctacttcacgggccgccaccccgtgggcgccgaccgggtggactacgcgcgcagccggatcgccgacaccgccagccacgtcaaggactacgcgcgcgagtacggcggatacctgcgcacccgcgccaaggacgccgcgcccggcgcgtaggcgcgcgccgcccggcgtgcatgtgctgcaacccccgtccgtggtgccgctagctataggtcatcattgctgtcgtcgtcgtcgtcttagttcctcttgcattgcgtgtgcgtactctgctccaatcatcccccgcccgtgttgtcaagcaatttctggtcctcttgcttgctttctctaggagatgctgttcatttcgatctcttggcgcaatttgatctttcgcttggtgtaattaggtcattagttaaatcataagagactcgtgttc

SEQ ID NO: 5563 - DNA, 441 bp, Zea mays
  Clone ID: 700464505_FLI
caaggagagggactccaaggcgttcctggacatggccggcgtcaaggaccgctccaagatggtcatgctcgaggaccccgccgccaaggccaagcgcctcctcgaggagcgccggaccggcaaggccgagcgcgccgccaaggccatcgcccgcgccgccctcgacgtcgacaagctcgcaaccaaggtgtcggcgctggagacgatcgtgagcaagggcggcaaggtcgtggacgcggacgtggtgacgctgaccgaggcgctgatgaacgagctggtgaagctggactccgtcgccgccgaaggggaggtgaaggcggcgcggcgggcgcaggagaagcgggtgcagaagtacgtggagacgctggacgccatccgcgccaagaacaaggcggcggcggcggcggcgccggccaaggcccgcagcggcagcaacaaggc

SEQ ID NO: 5564 - DNA, 1249 bp, Zea mays
  Clone ID: 700464507_FLI
agatctttcatttggtggatgaaagttctgcttggctgcttccttcttatattagtgggctatgtcttcgtgaaatggggggtcccctttgtctttgagaaggttctcttgccaatcatgcaatgggaagccagtgcttttgggcgtccagtattagctattgttctcgttgcatctttggctctctttccagttattctagttccttctggaccttctatgtggttagcaggaatgatctttggatatggttggggtttcttgattataatggccgggagtactattggcatggtggttccatattggattggttcattgttccgtgaacgtctgcatgtatggctgacaaagtggcctcagcagatagcactaataaaactcgcgggtgaaggaaattggttccagcagtttcgggttgtcgcgcttttcagaatctcaccattcccatatacaatttttaattatgccgtgactgtgacagaaattaagttcaacccttatctatgtggttctgttgctggaatggtacctgaggccttcatttatatctacagtgggcgtttaatacgtacattggctgacatgaagtacggcaactataaaatgacaccagtggaaatagcatacaacgccatttccttcgtcatcgctatcgccctcacggtcgccttcacggtgtacgcgaagagagctctgggtgacataaaaagtccggacgatggcatcggtaaagacgaagaagatcacggcccaaatggctcaggggtgcgtatgaatcgtcgtcaggagcgtgccgacgcacgttacatagaactagatgatatgtgatggtgtgttggcccggatcttgcttggaaggaggcaccagtaggtcattaggtgcacggctacggtaggtagctagctatagtttacaagaggaggctaaaataatccacacccagctgacgtggtttgcgtgattcgtttcgtgtgctttgcctactgcactgccatactgtctgaatctgaaggtgcagggctactcactactgagttactgaccgagcgatgctgctctcaacgatgtttctgtgaccatcagcgtatcaatcagtccttgatctgaagcctacactggagcttcatgttgaagcatacattggacttgagtagtacatttgtatataacgtaactgctaatagagttagcatatgatctagttttgaacatgaagctcgtgggctgttcagccatgttcggtcc

SEQ ID NO: 5565 - DNA, 785 bp, Zea mays
  Clone ID: 700464535_FLI
caatctgctgctcctgccgtgcctggagctggtatgaagtatccgatgccacaatacaagagcagccctcctgcttcgaccctaccacaaccatcatcactctctggttacggagggttcggaagtgcaaataatatccctggaaatttcagccaaaatcagggtgctcccgctgcacctacaactttgggatttgatgaagctttaggcacacaattcaaacaccccaatcattatgcagcactacagcagagtgataattcaacgatgtggcttcatggaggcgctggttcaagaacaatttctgcagttccgcctggtaacttctatggtttccagggccagagtcagcatggtggcttccgccaggcacatcagccatctcagtacggtggtcttgggtatccaagcttctaccagtcgcagaccagtctgccacaggagcacccccagaaccccactgagggaagcttgaacaatccccagggggtaccatcccagccttcacaccagctctggcagcacatctactaaaccttctgtgctctccttggagatgcctctctacgctgccagcttacctgcaagcgagcagactagctgagcccaacagcaatgaagtgtgttgtttttctttctttcttttttttctccagctgtgtgttctggaactaaattaggctgtcgtggtttttacttgatagtgagtggtgttgcagaggtgctatcttgtaacggtaaagtcctaactcatctaacagatctgcttttcatacccagtaatg

SEQ ID NO: 5566 - DNA, 1027 bp, Zea mays
  Clone ID: 700464574_FLI
ccacaatcagttttcaagaattaaaccaaaagaaataccgcacgccactacttctagggattggcctacttgtactgcaaaatcttagtggaatcaacggtgtactgttttatgcaagtagcatcttcaaagctgcaggggttacaaacagcgacttggccacctgttcacttggtgctattcaggtccttgctactggagttacaacatggctgttagaccgagctggacgacgcatccttctcattatttctacctctggcatgactctatgccttcttgccgtttctgttgtattttttctcaaggataacatttcacaggattctaactcatactacatcttaacaatgatctcccttgttggtattgtgtcttttgtcattaccttctcgtttggtatgggtgccattccatggctcatgatgtctgagatcctcccggttagcatcaagagccttggcggaagcatcgcaacactggccaactggctgacatccttcgccataacaatgacgacgaacttgatgctcacgtggagtgttggaggcacttttctctcgtacatggttgtgagcgccttcaccatcgtttttgttgtcctttgggtgccggagacgaaggggagaactctagaggagatacaattttcgtttcgctgagcattcagcgtcagctgcaatggttgcccgagtgtttatcttagggcctgtttcgatcccatgagctaaagcaaaaagaagctaaaatttagtcactttataaactaaagttccaatcaggaggagctaaaagtgaataaaatagcaaaagaatatcttttagtcacttttagcttctaaagaggagctagaatttagtcccttgttttagcttatactccttccatcctaaaaaaatataggtctttctaacttttcttttttctgttcatattcattcgaataatgataaatatagacatacgtataaactattcattaataaatgtatcaaataaattataggcctgtttggtttgctgtct

SEQ ID NO: 5567 - DNA, 905 bp, Zea mays
  Clone ID: 700464583_FLI
ctccaatccagaaaccctagccgccgtagcttgcgcgtcttgctctgtcttccccaatccagaaacgaggaacctagccgccatctctcctcctctcccgagagatctcctctgccgatggatgttcgtccgagccaattggtttgtgatgctgtagaagcggcgcgtgctgctgccgtcgctgcttcggaggcgagatgcgcggcagttattgcagagaaggaggccaaggctgcggtggagttcgccgccgttgccgtcaacaaggtcgaagcagtaaaggtctcctcaaatctggaaaatgtcgatttcaagtatcatgtgaacattaagaattcgttgcgatattccattcaagaaatgaggaggcaatgtacaatgttgcagtctgttaaaaaactatgttccacaatcccagaagttgaaggtggcaaggtaggaaaggtttgcggccatctggaacatgtttgcaagatgctagagaatacttcaattgtctgtgaacaagatttggaaacaaagaatcctacttgggacctttatgacaacccatccgtagatgatgaacatcctttagatgatgatgaaattggtgatggctacagtacagaagatcctgagctatgggaaatggttttcgatgacctgaagtgggaagagaataaagctaatgtttcatttgaagagcactatcgtgtcataaactacaggttcgaagagatcaatgatcgtaacatgtagttgtgagctcgtgtttggtttggatgaaggtattttgtatgtaatgctccaaatgtactatgtagaaccgttgttgtcatgaaacagtagtggagcagtaggcatttgttggatgaaggtattatgtatgctactatgtctgttttatgaagcagttcccattt

SEQ ID NO: 5568 - DNA, 1341 bp, Zea mays
  Clone ID: 700464592_FLI
gtgcagtgacacaagtgagctcagtaaagccagccaaagttcagacttcagaagaagcgagcgagcaggaggaggacaggaagtatggcgcactaccagcaggggaggcggcagcaagtggacgagtacggcaacccggtccctgggggccacggtgtccagggccagcagctgggtgaagccgccggcgggtacggcgtcgcaggcaccggcagctacggcggccagcagcaggccgggtatggccccacgggcaccggcacgcatgacgccgggggctacgacggctcggaccatccgggttacggggctaccggaacgggcgtcgacgacgccggtggcccaggtgcgtatggagcagccacgggcacgagagcccacggcacgcacggcggcgtgaccgggatccaggacggcgccgccggcctcaccggtggtggtctgcatggcgcaacaggcatggggacgactaccggtactggcgcgcacggtgccaccggaatgctcgacacgggggtcttgggcggcggagggcacgcggccaccggcatgcccgccggccacggcacgcgtcccggcgccacaggcgtagctggaaccggcggcgcgttcccccatgcagctgagcacaagacgggcggcggcatccttcgccgctccggcagcagctccagctccagcagctcgtcatctgaagacgacggcatgggtgggcgccggaagaagggcctgaaggagaagatcaaggagaaaatgccaggaggccacagggaaggccagggccaggcgacggccaccggtgcgtacggcgggacagggtacgtggctgggccgacgaccggaggcccccacgagaagaagggtgtggtggagaagatcaaggagaagatcccaggcggccacaaggactacgaccagcatcagcacaccaccgcggcaaccggtggcggcggtggctatggcggaaccaccgacaccacgtatgggacgacgaccactgaaggcactcacgagaagaagggcttcatggacaaaatcaaggagaaactccccggtcagcactaagcactaagcagctgcctctttcctcttccggctagctgcctctttcctcttccggttggcgactgcctgtaagtacatgtatacagaataaataaagcaataaagaataagcggcagctacgtatgtgtgtgtttttgtgtgtttgcattgtaaggcagctacgtatgtgtgtgtgtttgcattgtaaccacctcagtaatcctgtgcgttcatgatccttctatgtgacttcatgtgacgaagtagaaggaataagaaagtcaaatcttactatt

SEQ ID NO: 5569 - DNA, 284 bp, Zea mays
  Clone ID: 700464609_FLI
aggccatcttcatgtgacgtgattatgtagttgtgtcacttccttggacacattcacccagagtttcaaaaaggaaggagactaaaagaacgggtagagaggaagcagtggttatgggagttgtggacaatggaagagcagcttaggctgttggaaagtagggcattgtactatacttgtcggtgttaattgacaccagcaagcatgtatatattgtcaggcgtattatagatgaacatattagatatttctattgtagtattttctcaaattttaaaagaatc

SEQ ID NO: 5570 - DNA, 2083 bp, Zea mays
  Clone ID: 700464621_FLI
ctccctcttcctccggagctgcgaaattttgagacccagccgggaaagcggaggcggagactacccaccccaccaccagccccctggaattcgcgcaaatcacagaagctccctagccgccggcgagcactcgcgggcgcgcgcgcccccggcggcggcggcggagccctcctctctgccggcgccggcgatgggcaactcgctggggtgctcggcctccggcgagcggctcgtctcggcggcgcgcgacggggacgccatcgaggcgcggatgctgctggagctcagccccgcgctcgcgcgctactccaccttcggcggcctcaacactccgctacacttcgccgccgccaagggccatctcgacattgtcacgatgctgctggagaaaggcgctgacgttaacgcccgcaactactgcggccagactgcgctgatgcatgcttgtcggcatgggcactgggaggtggtgcagatgcttcttctatttagatgcaatgttactagggcagattacttgagtggtcgaacagcactgcattttgctgcacatgatggatttgttcggtgtattagacttttagttgcagactttgtcccgagtgtggccttggaggatattgcttcttctgtggtggatggtggtgattgccagacaaacagtgggagcagtcctaattcatcgtcggggcagaagtttaatgaatcggcccgtgtgaggtacatcaacaaacctgcagatggtggtgttacagcacttcacatggcagcattgaacggtcacttagattgcatgcagttgttgattgacttgggcgctaatgtctcagctgtctcattcccctatggcactactgcaaatttgataggagctggcagtacaccgttgcattatgcagcaggtggggggaaacaagaatgctgtgagctactaatatcaaaaggcgctagcaggttgacactcaattgcaatgggtggcttcccgttgatgttgctagaatatttggacggcgctctttggagccattactttctccaaattcacactcgaatgtccctgtatttcaaccgtccagttatcttgccttgccactcatgagtatacttaatatagccagagaatttgggttgcagcataccacaccctcgattgatgataatgatctatgttcagtttgtctagaaaggtcttgttctgttgctgctgaaggttgcagtcatgaattctgcatcaaatgtgctctctacctctgctcaaccagcaacatccgtgtcgagttcacaggcccacctgggtccatcccgtgccctctttgtcggaacggcataatgtctttcaccaagttaccaagcacaccaacagaagggcttaaatcaggttcagcgctcacattctgcaacccatgcatactgaacacccggtccatggactcgccagccactttctccaaagccgaaatcagacggaaccgtgtggcagctgtctcttcggagctggtctgtccaatcacctgcagcccattcccgtcgtccgccctcccaacctgcaggtgcagcgacgacgatccatgcggcgatacagacgtgcaggatggtcccgagttccagtctccccggccctcgcacagcgcaagcatggagctggacaagaggggggagggggatctagaccgggccagctgctcaggcatgttctggagccgaagaagctgccacagggagcagcagtgtgatgcggagatcaacgcttgattctttatctgtggttctgaattacgttgggattcgtagcagctccaacgcgggagatgagcagcggttgttttttccgccccagctatgttccttcctcctatctacagccaatgttttcttgattggtgaaatgctgctgcgtcctttgcagccgtagagtgtgtgttgtaacagttttgttactatggttcatgtgtacgtgtgaatctagatagccttcgaagttgctagccagttacggttctttgtagctgtatgtaaattgcagatctggatggaattactttctgtccctgatgataaatatttatatacaacgagtgaagt

SEQ ID NO: 5571 - DNA, 1517 bp, Zea mays
  Clone ID: 700464627_FLI
gtcaaccagcttggcattgacaaggctgttccaaagaaaatattggatcttatgaatgttgagaacatcacaagggagaacgttgcaagtcatctgcagaagtatcggctgtatctgaaaagactcagcgcagatgcaagcaggcaggctaacctaactgctgcatttggaggaagaaaccctgcttatgtgaacatgggactagacgccttcaggcagtacaatgcatatgggagataccggccagttccaaccactaaccattcacagccaaacaacctccttgcaaggatgaactctcctgcatttggtatgcatggtctgctgccttcgcagccacttcagattggacacaaccagaacaatctgagcacttccctagggaatgtcggggggatgaacaacggcaacctgatcaggggtgcgcatatgccactgcaggatactagcaaatgctttcctactggcccttctggtaattcgttcgcgaacatatcaaacagcacacaactggttacgacaaacaacttgccattacagtctcttgagccaagcaaccaacaacaccttggtcggctgcattcctctgcagaccctttcaactcatttgttggtgagcccccccagtttgcagatcttggaaggtgcaacaccacctggccaaccgcggtctcatcatccaatgttcaggagattggccagaaggacaggatcgtgaataggcccaagcttgagcctctctcaagctttacagaagcatccagtcagatccctttgctgggaagtgaaatgcagagccaccaagtagcatcactagccagcaacggtcttccgatgccgttcactcaggaagcggtgcccttcgcttatggaagcagcacgaactcgagagagatgctgaataacaaccttgcgcttagtaattcaggcgtcaactctacattgccgaaccttcgcatagacggttctgttgttccagggcagacactgggtggtagcaattcaggtggttgtgttgtcccccctctgcaagatggcaggattgatcaccaagctgtcagcagtcatctaaactacaacaacgaactcatggggacaggtaggctgcaaaggggacttagtggtggtctggatgacattgtcgtggacatgtttaggccggaccgcgcagacgatggcgtctccttcattgatggggactgggaactggtctagcaagtttcagttctctacatcaagtctgccttcgtgtgagattttccgcatttgtggttgtggaggggttcggcgcttgattggtccaaagttgtttatagtagcaagattgcatcacaaatgccctttgcatttggtttttcagtttagcgaccaggttccagtgtcacgtccgaatatcaactatgtggtatttgctaccttaactcgtatggctatgttttcaagtcaggtgttaactgtggctatcgtgatatatacagcatggttatgagccaaggaatgctgtcctgtttcctctt

SEQ ID NO: 5572 - DNA, 1149 bp, Zea mays
  Clone ID: 700464720_FLI
ggacacgagtaattgttgagaagcccttcggccgagactcagaatcctctgctgcattaacaagcggtctgaagcagtaccttgtagaggaccaaattttcaggattgaccattatttgggaaaagaactggtggagaatttgtctgtcctgcgcttctcaaatctcgtttttgagcctctctggtcaagacaatatataagaaatgtgcaacttatattctcagaagactttggtactgaaggacgtggaggatactttgatggctacggtattattcgagacataatgcagaatcatctcattcagatactagctttatttgctatggaaactcctattagtttggaagcagaggatataagaaatgagaaggttaaagttcttcgttccatgaagccgttgcagctggaagatgtggtcgtaggacagtataaaagtcacacaaaaggtggtaccacataccctggctataccgatgataagacagtgcccaaggatagtgtgactccaacgtttgctgctgcggcgcttttcataaataatgccagatgggatggagttccctttcttatgaaagctgggaaagctttgcacacaaaacgagctgagattagggtacagttccgacatgttcctggaaatctctacaaggggagttttggcacagatcttgatagggccactaatgagcttgtgatacgtgtgcaaccggatgaagcaatttacctaaagattaacaacaagattcctggtctcggtatgcgactagataggagtaacttgaatctccattatgccgcaaggtactcaaaggagatacctgatgcttacgagagactcctgcttgatgccatcgaaggagagcgcaggcttttcatccgctcagatgagttggatgctgcatggtcactcttcacacccctcctgaaggagctggaagagaagcggatagctcctgagctctacccatatggaagccgtggacctgtcggggcccactatctcgccgccaagtacaacgtaagatggggtgacttgagtgcggagcactacaaggcatgaaacgaagatggctatatctttgtgatattcttgcttttccatttctgtaagtttgcacgccctcgcagtgagatagatttaagag

SEQ ID NO: 5573 - DNA, 1535 bp, Zea mays
  Clone ID: 700464738_FLI
atttccctagcactgcaagctttacagatcagatatggtattcctaacaaaagcaacctatataggcagttcttgactagcaaagttactcaagtgaattacttgggcttccgtctgtatcgtgctttaccattcttgtatgaattgcggtgtgtacttgattggtcttgcacaaccacatctttaacaatgtatgattggctgaagttggaggacatatatgcaagcttgtttcttgtgaaatgtgatacacttttgaacagagctaatcatcgtcagggagaaaaacaaacaaaaacgacgaaattctgcagtgggatatgcttattctttgtacttatttgtgttatttgggctcctatgttgatttatagtagtggtaaccctacaaatattgccaatcccattgttgatgtaagtgttaagattgatataaaggcacttggtgggagattaaacttgtttaagactactgcttgtgaaaaaataccttggaagtacttgaaggcctatgatgatgttgatcctctagattaccttggggcatacaatgtggatgacattcagctgatttgctgccagcctgatgcatcaacaatgtggttgatacctcctccagtccaaaacagattcatccagtcccttgaggagagagagatgctttttggaaagatggaacttattttaaattgggattttctcagagctagaccaaaagggaaggaattagtgcgatatgaatcccctattgaacactgcccgagtgtagatgatgttaaacgagtgcttaatggaactgcaaacagcttcagtataattgatgcttacccaaggtactttcgagttactggatcaggtgaagtccggcgattagaagcagcgatagattcagtaagtggcgaattgctattaaataatggcactccttggtggtcattctatgatacaaacccatcagatttggcaggctgtcaagggctgaatggtcccatggctatagttgtttctgaggagacacctcagggcattattggcgaaacactcagtaaatttagcatatggagtttatatattacttttgttctagctgttgcgagatttattaggcttcagtgctcagacttgagaatgagaataccatatgagaaccttccgtcatgtgacaggctacttgacatctgtgaaggaatatatgcagcaagagctgaaggagagttagaagtggaagaagttctgtattggacattggtaaacatctatagatcaccacatatgctgcttgaatacacaaagcctgactagggcacccgttctgctaaggaagccattctgcaaaaaaattccatgtaatgtagtaatgtacaagtagaacacttctttcctttgaggtcacaacgaagctaacttaatcctctcccccccttgtgtcaggacaaaaaacgtgcaaataggctttgtagttgtagttcgtttttgctaacatgtatacggttgaccattatttttggagaagtatacatcaaagtttcattgtg

SEQ ID NO: 5574 - DNA, 1053 bp, Zea mays
  Clone ID: 700464882_FLI
accctactaaatgttatatcagtaacttcatatcctcaatgaagtgcctctttactcacatagctgaaaattcttacaaagcactcatcttgcacatctttggcacactttgcgccctatcaggtgctggaagcaatatttacatatctggaatgggtagtacttcacacagcttgagtggttatccttctgcacaaagttacacaagccttgagtctagtgcttctctcagcaaggacccatccacatttgcccctcaaaataatcctccatgccctactctttttgttgcgaacctggctccagcttgttcagagcaacagctgatagatgttttctcaagttgtgcgggatttgtgaaactcaagatgcaaaacaagcttggagctccagttgcatttgttgatttcaaggcagatatgggaaaaatgatttcttaaaaattaagccaagaagacttcttaaaccttgagatggtatttgctctagtgaagcaggttatgaaaggagaacatgtattacaatatcattgcatcattatatagttaattccaattatctcagtttggcatgttaaacaatcaagatgaactcaatcaattaaggatgcaatcagttcaactgaagccataaatcgtctccaaggagttatcctgtactcatcatctggcgagggaatgcgtttagaatatgcaaaatcacggatgggccttcggaagcgtgataagcacccctaagtgcagctgaaagacgacacggcagttgtattttcattcagcacaagcggcagctgagcatgctcaatgatgtctaatagcagacgacctgtcctgacacctgagtccaatgtcatcttcatgcagcgaacgttttgctcatgagttaggctatgaggtccttcagctgcgtagcattatgttacttggtctggttgtatcacttattattacatgtgcacctctttttttcctccttcggaccttgcctcctagtcatcttcagattttaagctaggattatcccttatttacagttggagttattattagaatc

SEQ ID NO: 5575 - DNA, 1391 bp, Zea mays
  Clone ID: 700464908_FLI
ctctctcacactgcgtctttggctcctgctccatctcctttgctgcgaagctccgagctctgctcggccggatttttcatggcgcccagccccttgcgtcggccagcccctgccatggagccttcggctgtgcagctctctccctctcgcgtgccttggatttgtgccgcgccctgcagagctcccttggtgagcgcccaggtcgtccctctccgactctctctgctggcggctgagttccctggaagccgtgctctgctcgccatggatgtcgtccaccatggtgctcggtctagacgtcgattccctcgtcgcagtgagctccagccgattccttgcctcttccccgtttaaatcatggagcatcagccgctgctccctgtttccggcagccaagcccctgcgcgcgcatcctcccgcgcagtccccagcgccaccggccaacctcgccggccaagctccctcgccttcaatcctttagccgtcgcgcccctcagctcgctggccgtgacctcgccgaggtttttcccatggccggctcactgctcaacccaagccgaggtcttgtacgaaacagcaccttccatggccgctgcgtcgcgctccttgtgcttgcgcagctgaacgccatactgcgcagtgttttgtccgatgtcgagcttagctcagtctctgtttctctgcgcacgtcgagttccttgccgcgcgctgagctttctgtcggtctccaactcgccatggtgtccaactcctgtaccaaccgtgacctacgcttggtcttcccagctgcgttgacctgcgttgacctctgctcgcttcgctcgggatgtcgtgctgggtcgctccatacttggtgcacacccagctgggcgtcgcgatgctgtgcaccatgcgtcaccagtcattctcaccatggtcagcagcttcaaaaacatggacgcccaagcctttttcccatctttcacgcccacctcggtcttcatcctcaacctttgccagaaatttggttaaatggacgaaccagaagatctccagaattttatggatgaagaagaaaataaagtcgaagagtgacgctcgctagatgctcgacgaaaggcgtgaaccgaagatttatcactattcctcaattgccgaattaaattttttttgaggtgagtgattcactgctcctccatgatagatcgaagcatggaatggtttcgtatattagatgcgataattttcttgtcgtggttaggatgtgttgtggctgtattaaatattcgttgatgtatcatatgtgcgatgtatgtttgaattggtgacgagaaggataggtctagtatttttattgactagccatcatatttttcaggattatgctagttttgtttattaagatgtagtcg

SEQ ID NO: 5576 - DNA, 1213 bp, Zea mays
  Clone ID: 700464936_FLI
caatttctcacaaaatatacctttttatactgcagtttctaaaacatacgagtactggtgaagtgtatgtaattgctttaggtagttatatcttgtgcttgttcagagggtttaggattcatctatgtatttccttgtacatgcagatatattcttctagccttttaaatgtcagtatctttccagtgtagactctggcattagtaagaactatggctaattgaatctttgcagtagctttgctacaaattttgcatctgttttaatggaagaagactatgtttttttattgttcccactatcattgaagcctaacataagtttattattgtgctggataaaaaatcaggttgacacattgctagacagtgtgaagtgggacagcaaagggttggctgttgccattgcacaaaatgtggatactggagccattcttatgcagggttttgctaataaagaagcccttgcaaaaactatatcaaccaggaaagccacattctttagccgttcacggtcttccttgtggacgaaaggggagacatccatgaacttcattaatgtgcatgacattttcctagactgtgaccatgactctataatataccttggaaagccagatggacctacctgccatacaggagcagaaacgtgttattatacttcagtttatgatgctctacaaagttcaaagcccaatgaaggcaggcaggttatgacaaccctatactcacttgaagatacaattagtagacgccacgaggagaaagttactgatggaggtggcaagccatcatggacgaaaaagctactccttgataaccagctactttgctcgaaaatacgtgaagaagctggtgagctaattcaaacgctgcttgagaacgaggaccaatctcgtgcagcttcggagatggctgatctgctgtaccacgctatggtgctgctcagagtcaaggatgtaaagatggaacaagtccttgaggtcctgaggaagagattttcgcagtctggtatcgaggagaaggccagtcgcaataaatcttagcgtgattggttaataatgccttgatggtggatgactctgatttgctatcggtgcggaatgtgcactattgaagaattttgtgtttgatggatcagttgtgtttttgttttctccgacaagacatctatgaaatatgtggcaggtgtcaataaagttatctcatacagc

SEQ ID NO: 5577 - DNA, 912 bp, Zea mays
  Clone ID: 700464948_FLI
cccgaacgtgcgctgtctctcgatcctgcatctctgcacctgctcgcctccccagggaggcagggacaatcgacttcgccgggcgccggctagccccaccggcgacgacaggcacagtggaccacggaggagaaagtactctgctttgaatgggaagtgccatgaacaaagacaaagttcatgacaaggagactcacggaacaagtagtgatataactgagaaaacacctgtggaaacggtgaagggtcccaatctgcttgagcgagcaaaggaagagatcgaggcccttgccggagctgttcatactaagatggagcaccattccagtccccacgcgaagaaggatgaatcacataaggaaggcaaggaggggagcctgcacaaaataaaagcccacacggatgaaactcacggaacaagtgctgacataaatgagaacacaccagttgacaaagtcaaaggtccgaatgtgtttgagcgtgccaaggaagagattgaagctattgtggaagctatccatccgaagaatggatctgacagtaagtgaagactgaaacccctggggctgttttgccttaactggctgcaaaagccttaacgtgaggccatgtgctaccagatagataaatgctgtcaaagacgttcacccaatagtctttttatacgcgctctggagctgtaaaagctaagagcggacttgtttttatgctacactgttttccgttgtatcattgtggtttgtttgtccagaggtgtgtagaaatactcaacatggaattgtgatgcttaaattgttgagcttgacaggacattatattgtgccaccaactcgccatggtctggaagttgtaataagagtgatcatgaaacagggcataaatctattgctagtacttttttagtggaaaccc

SEQ ID NO: 5578 - DNA, 1929 bp, Zea mays
  Clone ID: 700464955_FLI
gtaggccgcacgcctgcagcagccgccgactcagggcgagcgttgagaggaggacgaagaagagactgaagaagagcagaccgaagtgaggccggaggaagggatcgggccttgcgggattcggcagtccatcacgaggtaaatgcggcgctaggagctgcagcgatggcgtcgctggtacccggggtcctcctcaagctcctgcagcacatgaacagcgacgtcaaggtcgcgggcgagcaccggtcgtcgctgctccaggtcgtcagcatcgtgcccgcgctcgccgggagcgacctgttcaccaaccaggggttctacctcaaggtgtccgactcgtcgcacgccacctacgtgtcgctgccggacgagcagcacgacctcatcctcagcgacgtcatccagctggggcagttcgtccatgtcgaccgtctcgaggcagccaccccggtgccgatcctcaggggggtcaggccggtcccgggccgccatgcctgcgtcggcagcccggaggatcttgtggtgaccagctcctccacttttcttcttggcagcggcaaggccgcccaagcctcctccaccaatggtagttccaaggatgccggtgccctgtcgctagagaaagagcagggcaggttagagaagatcaatgctcctcccaagagcaacggcacagagagcaagaagccccagctcaccaagtcgaactccaacctctcgaaacaggcgctcaatggcctcctctcggacaagaaggacgtggttagctcgaaggcaaaatcaaccagcgctaggtcgacgccgtcttccccgaccagcgcccattctctgcctgcgtcgttcgataaattctcgagtgacatgaaacagagagtgagaaccaaaggagcagagaaatcgccgccgtcaaggctgtccttgctagaaaaggctgcgtctgtgttgaaggccactacggcagggaggaagtcctccctgggtaactccattagtaacaccttgttgagcttcgaatctgggcccaaggccttgagaagaagctgggaagggaaagcagatgcaaaggacaaaggcaattcggattcaaagcctgccaaagctgaaaagaagtctgaaaatcgaagctcttcgactcccagacgaaaatcattagcagaagagaaaccatcgaataaggatgacagtaagattctgactccacccaggaagagctcagcgagtgctcctgcagacgattccgacaaagttgtgaacaacaagctttcttctcctataaggaggacatcaggggttttaaataacccgaatgtcactaatctagtgaaggttgctgcaagtaacaggaaactgacagatgctagcgcttcgtggacaacgcttcctccatcactcgttaaactagggaaggagcttctgaagtacagggatgcagcacaaatggctgctgttgaagccatgcaagaagcttctgcggcagagagcatcgttcgatgtttaagctcgtacgcggaggtgagctcgtcggcggaggagcagaacccacagcaggctgtcgagcagttcctcgctctgcatggagcaatctctcgagccaccatcgtcaccgagtctctaaccaaggccacgaccacggtctccaccgcgacttcaccagatcaatcagcagccggcgatgcgtcaacagccgacgaggaaaccatggctgtcgcggcggagcgccgccgccgggcagcctcctgggtcggcgccggcctcgccaccgatctctccgccttctccctctacaacctgaaacccgccccagccagtgtcatctccccgctggccgtcgtgctcgtggacgagtcagccaagccggcggcggcgaaggcagtgccgcccgcgaagtcgcggctgtccccggcgaaggggaggttgaaagctggttcc

SEQ ID NO: 5579 - DNA, 2382 bp, Zea mays
  Clone ID: 700465007_FLI
tgctctcttcttctggttctcctcatcacattcaccgtcgtcgtcatcacataagcttttatctaggcttgcggctacttgcatcggagcaagtcagtcacatctcacagctcagtgagatccagagccaaagggcggggcgtctcccactcccaatcccaagtccagccgccgccgtctcttgctcgctccaaaagccgttttccagagatctttttcagggccagacgccagccgccgtctctcgcttgcctgcatttccgatcctgaggcagtcctcatctcattctcatccaaccgggaggttgggaacgagatcacagctacagttacctgagtagtaggatcctcctcagatcggcttcaaaaatcaaagtgggggggacaacaaggcaggggatgagtgcagctgcaaccaaggtgaagagacgtgtgggcaagtacgagctcggccgaaccataggcgaaggcacattcgccaaggtcaggttcgccaagaacaccgagaccggggagccggtggccgtcaagatcctcgacaaggagaaggtcctcaggcacaagatggccgagcagattaagagggagatttcgaccatgaagctgattaagcaccctaacgttgttcgcatatatgaggtgatgggaagtaaaacaaaggtctacattgtgctggagtatgttaccggcggcgaacttttcgacacaattgctaaccaaggtcgaatgagggaaggcgaggcgaggagttacttccaacaattaatcaacgcagttgattattgccatagcaggggtgtgtaccaccgggatttaaaaccagaaaatctactgcttgactcatatggaaatctgaatgtctctgactttgggctgagcgcgctgtcccagcaaatcaaggatgatggattgctgcacacaacttgtgggactccaaactatgtggcaccagaggtcctagaagatcagggctatgatggtgcaatggctgatctgtggtcatgtggagttatcctgtttgttctgctagctgggtatttaccttttgaggactctaaccttatgacgctgtataagaaaatctcaaatgcagaatacacatttccaccatggacatctttccctgccaagaggttgttgacaagaatccttgatccaaatccgatgacgggttgattttgcgtccatattatagctgagcaactctttcattcctagcagattcatctcgggcgtactgtaagtaacataggatcaatgacgtaaagaactggcactaatttaacattaggatcagatactaatttaaacggtccaaccaatagatctatatgcttttttaaacggcgctggaatgcataactctaatcttaggttccaaatacagttaaatttgctgactagattggtcgaacaaagcagaagaaaattcgtgtgacttcagaataacaatccctgaaatactggaggatgagtggttcaaaaagggctacaagcgcccggagtttgacgagaaatatgacacgccattggatgatgtggatgctgtcttcaatgactcagaagagcaccacgtgacagagaagaaagaagaagaacccgtagctctcaatgcatttgaactgatttcaaggtcagcaggcctaaatcttgggaacctatttgactcggagcaggaattcaaaagagaaacgaggttcacgtcaaaatgtccaccgaaagaaatcattcgcaagattgaggaagctgcaaaacctctaggatttggtgtccagaagaaaaactacaagttgaggctagagaaagtaaaagcagggaggaagggaaacctgaatgttgctacggagatactacaggttgcgccctcccttcatatggtacaagtccggaaagcaaaaggcgacactctggagttccaaaagttctacaagaacctttccaagaccttaaaggacgttgtctggaaatctgaagacctgcaaatgcgagctgcttcttagcatccactagatggcgagatgttcgtacgtgtcagattccattcccgtagcatgatgtgtcgtcagccgtttctgttcactgcactctgcatggtccggtgggcgcgtggcttggcattttcagagaccgcgttgctcgttgcagcccgggatgaaggcgatgcagtaggttttgtggatgtggtgagctctgtatatgcctattgatgagtcatgttgcaagctgtaacgacactatgatccgtgaagtgtagaagcagccaagtatgttctttctatgctgccccatttcccggcagtttccatgcattttgaagaaaaaaatagtggctaactcattgatatttgtatttggtcatcattaataaatcgcctctccatc

SEQ ID NO: 5580 - DNA, 1976 bp, Zea mays
  Clone ID: 700465028_FLI
aagattgtggtgctcttaaagttaacccttttgccagcaagaacaatactgctgtgtatcagtctaaattgggcacacaacctgtctatgttgtggcaactagggcaaattgttttgcttctggttcgatgcagacaaataacagtgataaagaacttgcatccagtgccatggaacggattgatagcgtgaagaacagaacaagtaaagaaacaggatttgtcactgaagcttataacaatgatgcctttagtggtggtattactgaaaagggttttgcgcagttcagtaacagttctactcacataaagcccaatgcttctggccattgttcactacctgaatcaaaaactccaacaaatggaagtgatatcaactgcatcaagggctcttcggttaatagaggtgatgttagcttcacaaatggctcgtttgtcaataggcccatcaacaacaatgaaccaaatgtagctaggcttgaggtgatggagaagttgaataatgtgatgcaaaaccgttataatgatcacgctcctggttttgatcctcatgctgcagctagtgctagccggaatgccaatggtcttatgcctatgcatgccaattttggttgcatgtcctctacagttcaatctgttgctaatgtttcaacgaccagcacatctcaagatcagtgtgatttgcaacttggatttggtgtacagaagcagcatatattttctaggcatggagagcttagaacggctacagctcgatcccctctgcctgggagcattgccaaaagaaattctgtacccactgaatcctcacagtttgagagcatggatgggcctaaatctttccccaatggaacatcgcagttcggaggctttgcaaggcctacctttgtgcctgctgcaccttctcagtttgggagcatggctcaacctaattatgtgcattcttctcaatcctctcaattcacaagcttggttcaaccgaattctgtacctcctgctgagtcctcgcagtttggaagcaaagcccaatctagttctgcaccccttgctaaaacctctcagttcaagggcatggctggaccaaattctgtacctcctgctgagccctctcagtttgggagcatgattagacctaatttggtacctcccgcatcttctcagtttttggggagcatggttcgaccaaattctgtaactccagaatcctcacagtttggaagcatgaccagaccaaactctgtacctcctgtatcgtcacagtttgttaacatgcccagtcaaaattttgtgagcgcatccgagccaactctagttttggggtacgcaccgcagattggaagtgaccctccacatcaagtccagttaggatgggatttgtccttgccaaggatggttactggcggcagcatggtcacttgtttatgtatatggtgcaacagtcagttccatcattttggccctgttgatggacagcaggctagttcttttggcttcatttgccccacctgtaaagataggatgtctggtcatcacagtatgcccagcaatggttcatggcagccttgaggtgcagtgctgtttgttaatcatctgcatttctgcatctgagggatctcgtggttttctgtacaccatgtctggcgactgttgaggacagaaaattgtccgcacaagcagaagtggtcccgcctccaagttcagtggactgtcaagggtagctgggagctggaatgtatttagttggtactagggtatgcaatgagagaagttgggtttctctactacttgtcaaagatagcaatgggagaccatgatgaattcaggccatctttttttttcttgaatccaccagttaagctggcatgtttgtcggagctatatctcaggttattttgagctctagcttcgatggggagttgacttcattattggtactgaacttaaaatgactccagtccagtgtcttgttggttgtgt

SEQ ID NO: 5581 - DNA, 1577 bp, Zea mays
  Clone ID: 700465042_FLI
gaagttcaagattgctctttgccattctgctctatgtgagcaccgtgaagcacttcatgagatggaaggtattccttcaaaagtgagaacactgaaaatgaatatgatgttagggaagctttatcgaatatcaagaaatagccgtacagctgtagtctgttataaggagtgcttgaggcaatgcccttatgttttcgaagctatcacagctttggcggaaatggggctttcagcaaaggaattttctttattattttcacaagcaccaaatagaggaggcaagctatcgggtgacttcgtagacacacaacgttggtggagtcggtatgttgaggcgcagtgttgcattgcttcacatgattataaaggtggccttgacatatatctagaactaatgcaacgattccccaataatgtgcatatcttgttggaaattgctaaggttgaagccatcataggcaggaatgatgaagcgataatgaactttgagaaggtccggctgattgatccaaacattatgacatatatggatgaatatgcaattcttctaaagtcaaaatctgactacatcagactgaataagttggtacatgatatgctacatattgaccctgcaagaccagagacatgtgttgctcttgcagcaatgtgggaaagaaaggatgaaagaaaagctttgacatatgcagaaaagagccttcgagttgatgacagacatataactggctatataatgaagggcaatctgcatctttcattgaatcgaccagatttggcagtgacagacttcaggggggctcaagaattgagggctgatcttcgttcttatcaaggattggtgcgtgcttatctagcactttctaaatgcaaagatgcattattcactgcacgcgaggcgatgaaggttatgcatcagtctgcaaaagctcttaagctagttggtgatgttcatgcaattagttccagtgggagggagaaggcaagaaagttctatgaatcagccattcgtcttgaacctggatttcttggagctgcactggctctggctgatctgcatgttgcggaaggacggaataaggaggctgttatgctactggaaagatatatacaacaatggtcagatgattctctacacataaaggtggctcaagtacatgcggcaacaaatatgctttcggatgcactttcccattatcaatctgcactaagaataaacccacaaaatgaagctgcaaagaatggattggagcgcttggagaaacaaatgaagggagtggacccagatgctccagaagacgatgaagagaacgaggaggaggacgtcgatgttgatcgagatgactttatttgaagctggctcattacaggtctcttatacctgtggaagctggcgctgattgatcacgaccatctttgtatagcggtggtagcagtggttttgtgctatttgtgactgaatagcaggtgttctagcagaaccccagttgttttagcttgtaaaaatgccgcccgaaacgaattttgcacgtgttgtatgccatttcctttcagttcttctttgtgtattcttttgcacc

SEQ ID NO: 5582 - DNA, 262 bp, Zea mays
  Clone ID: 700465055_FLI
ggcgtcgcccagctctgggcacaaccaaaatctaacgcctccgccgccgccgccctccgtgacgggagggtggcccacctccgggatgtttgacaccagcattgatatcaactcatctagaggatagctcatttcatttgtcgataattccagccctcgagaaattttctgttctcgcacaagaatgatcgaaaccatacttcgaaatagattattcggtttctcccttttcccttttgagcaagaaaaacggaatttctat

SEQ ID NO: 5583 - DNA, 1123 bp, Zea mays
  Clone ID: 700465112_FLI
accgaattctattcctcccgctgaatcctctcagtttggaagcaaagcccaatctagttctgtgccccctgctaatacctctcagttcaggggcatggctggacaaaattctgtacctcctgctcagtcttttgggagcacggttcgaccaaattatgtaactccagaatcctcacagtttgggagcatggccagaccaaattctgtccctccacagtatgttaacatgcccagccaaaattttgtgagctcatccgagccaacactggttttggggtatgcaccacagattggaagtggccctccacctcaagtacagttaggatgggatttgtccttgccaaggatggttactggcggcagcatggtcacttgtttatgtatatggtgcaacagtcagttccatcattttggccctgttgatggacagcagcccagttcttttggcttcatttgccccacctgtaaagataggatgtctggtcatcacagtgtgcccaacaatggttcatggcagccttgaggtgcagcgctgtctggttaatcatctgtattgctgcattcgagggatcttgtggttttctgtacactactcatgcctgtcgactgtcaaggtctgaaaatggtcttctcaagcagcagttgtccgtcctccaagttgagtggactgccaaggaatgaacggcatctctgtatcaacagtgtcagctgggagctggtgtagtagggtaatgagagaagctacttttcaagatagcaatgggagaccatgatgaatccaggccatatttatattttttcttgaatccaccagttacgttacgtgggaatgtcttgagttcactggttgcattacatctggaattttgctgccctcggatgacccagccacctttgcattgggctccgaggatgttgccactcagcttccccatgttttggtttactttgagttctagcagcgatgggagtggcctttgttattgcagtgtcttggtggctgtgtaaagtatgcgttagctctagctgtctcaggtttaatttgtccccattgaagtagttgtgcctttgtcgatgattgctcatttaagttgtgtatactcaagctgaaaaggctgaaggt

SEQ ID NO: 5584 - DNA, 1261 bp, Zea mays
  Clone ID: 700465124_FLI
cgcgttcacgagccagaagagaagagaggctaaccaccgcagcagctgcgacctgcgagtgcgacaacctccgcggaggagttggagccggcggcggggatatttgcttgcccggctggggttgcggcggaaggagggagagacaaccggcgatggcggcgtccgcgaggcccggggagagggcgacaagcttcgccgtcgcgtgcagcctcctcagccgctttgtccgccagaacggcgtcgcggctgccgagctaggcctcaggatcaaaggcgaggtcgagcagcagaggacgccggcgacaactagcttgctccccggagcggagggcgaggaggtcgaaaggaggaaggagaccatggagctgttcccgcagagcgtcgggttcagcatcaaggatgctgctgccccccctagggaggagcaaggagataaagagaagcctaagcagctcacaatcttctatggcgggaaggtgctggtatttgacgatttccccgccgacaaggcaaaggatctgatgcagctggccagcaagggcagcccagtggtacagaacgttgttttgcctcaaccctctgcagctgctgctgtcactactgacaaggccgtgctggacccggtcatcagcttggccgctgctgctaagaagcctgctcgcacaaatgcttctgatatgcctattatgaggaaggcttctcttcaccgcttccttgagaagagaaaagatcgcctcaatgcaaagacaccatatcaaactgctccttcagatgccgcaccagtcaagaaggagcctgagagccagccatggctcggattaggaccgaatgccgtggattccagcctgaacctcagctagtacacaacaacacagccataataagacggcacagcaacggcacccaccatgacctggaatttgctttgccactagatcgagttcagaaaccataaatattcttagttatcgtgttttagtgttcgcttatgtcatggttctacgccctcttgtcgcatagttctggatgtaaagaaaagtaaccagtcatgaccatcaccgggagtcggggagaagtttttggagggtgttaacacacggcgactctgaattggccatgctaaggaaaaggatagtgcaatgtgaggtatatgtattttctgaaagccagatcgtttgggtctagccctgatgtatgcagaacaagtgattattgtaatggatcctgattatcctcatcatcctattgttgttttctgatc

SEQ ID NO: 5585 - DNA, 1141 bp, Zea mays
  Clone ID: 700465160_FLI
gctcccctctccctccctccctctctctctctctcttcgccgtccgaagctccgcacccaatctaatcgacacctcaccgagatgggccgcaagttcttcgtcggtggcaactggaaatgcaatggaaccacagatcaggtcgagaagattgtcaaaaccctgaatgaaggacaggttcccccttcagatgttgttgaggtcgttgtcagccctccttatgtcttccttcctgtggtcaagagccagctgcgccaagagttccatgttgctgctcagaactgctgggtgaagaagggaggtgctttcactggtgaagtcagtgctgagatgctcgtcaaccttggtgttccctgggtcattcttggacactctgaaaggagagctctgctgggagaatcaaatgaatttgttggagacaaggttgcgtatgccctgtctcagggactaaaggtcattgcatgtgttggtgagacccttgagcagagggaggctgggtctaccatggatgttgttgctgcacaaacaaaagcaattgctgagaagatcaaggactggagcaacgtagttgttgcctatgaaccagtttgggctattggaactggtaaagttgccaccccagctcaggctcaggaagtgcacgcctccctgagggattggctaaagaccaatgccagccctgaggttgctgaatctactaggatcatctacggaggctctgtaactgctgcgaactgcaaagagctagcagcacagcctgatgtcgatggttttcttgtcggtggagcttctttgaagcctgagttcatcgacatcatcaacgcggccaccgtgaagtccgcttaagatgttacgctgaagacgaacatactttttttgctcaactgtgctatgtaagctagtagcttttgcgcaggagcagagactgttttgcctgcccccaacttttagcttgagcttgctaataatgtttacctctggacgtatcaataatggtgcttatgtaccccctttttttgtgccgaattacggtggatccgtcatctgaaccatgggtttggtgtatgtaattgcgtcacccgatgcctagggtgcgagactgaagtttttggacatttgggacaaggtagccttgtgccccac

SEQ ID NO: 5586 - DNA, 1883 bp, Zea mays
  Clone ID: 700465186_FLI
agcccatggaatttctgtccaaagtttcaatggtgatttactttacgagccgtgggatgtttatgatgagaatgggcaggcatttacaacctttaacaagtactgggagaaatgtatgaacctacctattgagatatcacaatatcttgcacctacaaggctggtggcagcgccaggtctagcaaatgttcgctgttgttcgattgatgatctaggtcttgaatctagtaaggatgtggaatcaagcaatgctttgctaagcagggcctggtctcctggctggcgcaatgcagagaacatgcttgaggaatttgtgtcttatggtcttctagaatattcagaacatggtatgaaggttgggggaagtactacgtcattattgtcaccgtatctccatttcggggagttgagtgtaaggatgatttatcaacttgttaaaatgcgtcaagtcaagtggcaaaatgaaggaaaatctgaagctgaggagagtgttcgattgttcctacgatcaattggttttcgagaatattcacggtacttatgctttaactacccattcacacatgagagatcatttttaggtaacttgaagcattatccctggctattggatgagggccgtttcaaatcttggagacagggaatgactggatacccattagtagatgctggcatgagggaactctgggctactggttggacacataatcggataagagtgattgtctcaagtttcgctgtaaaatttctacagataccctggatttggggaatgaagtacttttgggatgtgcttctggatgcagacctagaaagtgatattcttggttggcagtacatatctgggagtttgcctgatggacatgagctcagtcgtcttgataatccagaggttcagggtcaaaagtacgatccggacggtgaatatgtaagaacttggattcctgaacttgctagaatgccaacagaatggatccatagtccatgggctgcgccaaactctatattacaagttgctggagttgagctgggctttaactacccaaagcccatagtagaacttcatatggcgcgggaatgtttagatgacgccatctccacaatgtggcaattggacacagctgcaaaacttgctgaactagatggtgaagttgttgacgacaatctgaataatatcaggaattttgatatcccaaaggtggttttgaacaagaaattatcaccaagcacttcatccatggagcacagggtgctgtctactaatggcaaggacgaaaagtcgcagcctactgaagtgaaggccctgtacaaacagattattcgagatgatatgatgaatgactcaaacatggatgatacatgctctactgctaacttgaaagtgacaaggaaaagatctagcaatgatagtgcgttcaatgttccctcatgttcatcctcattagtcatggaatcacggattcatcataatgaacctagttctgttctgtattcaggctacttccagaagacagcagacagagatggcactagtaaggttgaagataatgacagtgaagatagtggtacgagcatctctaggccatccaagaaagctgcttagcattagcgcattgaagatgttgcaaatcttcaatgagaaatatttaccgtcacatgtaatttagttggtgcgtttgtagtgatcatgcaaaagctgttctatgaattataattagttttacacggcctatccttattccgatagaaggcaatttttgtttggtgaaaaaacatcgctcacggacaggccatagtttgctgtcgctgctgaacagcctaaagcctggtgtaaatgactcatcaacgttacgacattattagcgctggttggttttgctatc

SEQ ID NO: 5587 - DNA, 1197 bp, Zea mays
  Clone ID: 700465222_FLI
ggcttggccgagatctccccactaccccgcagcgtctttaaaaccaggacctgcttgtttgattgtttcatcgatcgtcaatgcaagtttgtccattcgcattggtctgaatactgtagctactagcgcgagtgccactgtgccgcagctgcctgctcgccattactgcaagctgtgttcaatcaaagcttaattaggctccctctacatctgatccagctaagtagctagccagcactacagaagggcgtggcaagaatcaggagagagatagcaggggggctagctagctgagctcgtgcgacgaagaatggccggaattggcaggaacatggtggcgccgctcctggtgctcaacctcatcatgtacatcatcgtcatcggcttcgcgagctggaacctgaaccacttcatcaacgggcagaccaactaccccggcgtggccggcaacggcgcgacgttctacttcctggtgttcgccatcctggccggcgtggtgggcgcggcgtccaagctggcgggcgtgcaccacgtgcgcgcctggcgccacgacagcctggccaccaacgccgcgtcgtcgctcatcgcctgggccatcacggcgctcgccttcgggctggcctgcaaggagatccacatcggcggacaccgcggctggcgcctgcgcgtgctggaggccttcgtcatcatcctcgccttcacgcagctcctctacgtgctcatgctccacacgggcctcttcggcggcagcggtggctaccgggaccacgactacggcgtcggcggcgcggccggcgagcccaagggggtcaccagggtctgaggattctgatcgatgcagctcgtacatgtgtcatcatatcaggcgctgctggagtgtgatgacgtaataagtagtacccatatatatatatggtgtgtgttgacgtaccacgtacactacgtacgtgtgtacctagtagctagctagtcagtccatcgtctgctcatctcgtcaggtcatcagatctctcggttctggtttgtacatcagtacgtgcatgcatgtatcccgtgtcaaatgtatttcgtcacccgtcagtttcagccggtcagtgaccaagtttatttcgtcacccctcagttcagtgacattggtgacatgaggtcgtggtgtcaacttttggctcaatgtattatgtacctgatcttttttac

SEQ ID NO: 5588 - DNA, 405 bp, Zea mays
  Clone ID: 700465228_FLI
ggctaagcaagacatggagagggagaaggctgcccaagaccaagggaaactagaacgctcgctactcagtaagcctgcagaaggcggcactggtgatgtactggtggagcagcagacaaatgggtcggcgacgagcaaagcaactggaacagagagctcgccatcgaactcatcggccccattcaatagatcgtagttaggagagtgattacagcgagcagagataatcggcatttaaaataattcgtggctttcgagtttgtaacagcgtgcggcttgaagctgcccgtaattttcctttgtaataataacatgagcaagatcttgacagccggcagcgaatgtcgctctggagatggcaaatgtgtgttttgaactgaatggtaaaatgtgcggtttctcttc

SEQ ID NO: 5589 - DNA, 1774 bp, Zea mays
  Clone ID: 700465264_FLI
cattgggaatcctcaatcccttggtcagcaacctgtgacgttcttcagggaggtatgcaactttacctgcagattccacctttgtttcttcgatatttacatggtaccttgcaggttcttgctctttgtgatcatccatgcctcttggaaaaagaggaaaccaaatcattgttcagtgctgatgctatttctcgagcaaagcagattcttgcaactattcctggacgggcaacaggtgcatatagtcacagtcagggtatcaaaggattgcgtgatgcaattgctgctgggatcacctcacgtgacggattccctgcaaatgcagatgacattttcattacagacggagcaagtcctggggtccacatgatgatgcaattactgattaggaatgagaaagatggcattctgtgcccaattcctcagtaccccttgtactcggcctccatagctcttcatggtggagctcttgtcccctattaccttgatgaaaaaactgggtggggtttggagatctctgatcttaagaaacaactcgaagatgctcggtcaaaaggcattgatgttagggccttggtggttatcaatccaggaaatccgactgggcaggtttatactgatcatttctcctcttgttaaagaacatctctgcttatccacaccatactctttataattgatgtaataacatgagatgtgtatttattgtactcctattttaagtcagtgaatactttgtatacttgtattgtctagggaaaggttttggttgaaaaaaataagtgtttttttgtcgttctgcaatgcgaatgaatgtttttcaatgctggtgaccaaaacacaaattttattgaagtggttcatttatttgtaggttcttgctgaagacaaccaatatgatatagtgaaattctgtaaaaatgagggccttgttcttctagctgatgaggtatatcaagagaacatctatgttgacaacaagaaatttaactctttcaagaagattgcaagatccatgggatacggcgaggatgatctccctctagtatcatttcagtctgtctccaaaggatactatggagagtgtggtaaaagaggaggttacatggagattactggcttcagtgctccggtaagagagcagatctacaaggtagcttcagtgaacctgtgctccaatatcactggtcaaatccttgcgagcctcgtcatgaatccaccaaaggttggggacgaatcatatgcttcctacaaggcagagaaagatggaatccttcagtctttagctcgccgtgcaaaggcactggaagatgcattcaacacgcttgagggattttcatgtaacaaggctgaaggagcaatgtaccttttccctcagatccatctgccacataaggcaattgaggctgctaaagctgccaagaaagcacctgatgcattctatgcgctccgtctccttgaatcaactggaattgttgtggttcctggatctggatttggccaagttcctggaacatggcacgtcagatgcacgatcctgccgcaggaagataaaatccccgcggtgatcacccgcttcaaggctttccatgaggcgttcatggctgagtaccgtgactgaactgttacagtggctgagtaccaccgtgtagaccgaaacaaaataaagctcccccctctctctgtgtctgtgcgtgtgtgtgaactgatctctgaatggacgaacaatgtactctgttggcgcctttaatggcaattgaggaaaattttgatc

SEQ ID NO: 5590 - DNA, 2240 bp, Zea mays
  Clone ID: 700465270_FLI
cttgatttctggacggaagaagatgattatgaattgaccgtgtcttgtccgggagtctgagagtgagacactcggagcagatcctagccacggaagcaatcgatgcttccccaccacgttaatcttcccgtaaccacaaattatggcctcctcgtcttttttatttttatttcagaaacaaccaaaactcctcctttgtcacatgcattttgagtcactgacatgtggaccctcagctacgtgtcaaactcatatattccacacgtttgaacaaaattatctctcgaacgataattcaaactcggaatatatagcgggagccgcatttttcaaccaggaaaaggtcgggaaaaaaatccgaaatggccgctagtggcctcggtctctccacctccttcctccccggccacgacaccctcctccggcgccggcgccggcggccggcgggccacgccgccgcgtcgttccggccggtgacggcggagctcggcggcgtcgcgacggagctgggccgccagctggtggaggcggtgggcgtggggctcccctgcaccgtcatgcagtgcggcgacgtcatctaccgcagcacgctcccccggaacgacgggctcaccatcacggcccccggcctcacgctcgcgctcgctaccgtgtcgtacctctggtccacgccaggcgtcgcgccggggttcttcgacatgttcgtcctcgccttcgccgaacgcctcttccgccctaccttccgcaaggatgacttggtatttgggaagaagctcggggagggcgcattcggggtcgtgtgtaaggcttcactggcgaaccccgaagcggcgaagaagcaaggggatttggtcgtgaagaaggcaacagagtatggtgcagtggagatttggatgaatgaacgtgtcaggagggcatgcgctagtagctgtgcggattttatttatggcttttgcgagacaaaagcaaaaggtaagggagctgaagaatattggcttatttggcgttttgaaggtgaggatacactttatgatctcatgcaaagcaaggaattcccttacaatgtggagacaaaaattcttggcggtatccaagacttgccaaagggaatagcgagagagaataagatcattcaaacggtgatgagacaactcttatttgctcttgacggacttcattcgacaggaattgttcacagagatataaaacctcaaaatgtgatattttcagagggatcacgaaccttcaaaattattgatcttggagcagcagctgacttacgtgtaggaattaactatattcctaaagagttccttttggatccaaggtatgctgctccagaacaatatattatgagcacacaaaccccgtctgctccttctgttccagttgcaacaactttgtctccagtcctgtggcagctgaaccttcctgacagattcgacatatatagcttgggtctcatattcttacagatggcattcccttcactacgaactgatagcaacctcatacaatttaatcgccaactgaaaagatgtgattatgacttacaagcttggaggaatctggtggagccacgagcgagtgctgagctccggaggggctttgacatcatggatttagacggtggtatcggatgggaactcctcacctcgatggtccggtacaaagcacggcagaggaccagtgctaaggccgcattggcacacccgtacttcaaccgtgaagggctccttggcctctccgtcatgcaaaacgtacggctgcaactgttccgcgcaacccagaaggactacagtgaagcagcgcggtgggttatcggcctcatggcaaggtcaggaactgaagatgtgggaggctttacagaagcacagcttcaagagcttagggaaataaaaccaaagaaaagcagcacccagcggaacgcgcttgcctccgtgctgcgcctgcagaggaagatcatgagaacgatcaaggagagcatggacgagctcaacagccagcgcaaaagcatctggtggagccggtggatacccagggaggagtaggccggccgcaggcgcacatgtacatcgtccacttctgtatgaaacgtcacctattagcactggtgaattggtgatagtataatacactatcctacttactgctttgtacatgctgacgactggtgagtaaaattcatctgaaaaaaaaatcggagtaacgcgatgtatagctgtaaatattttgcattg

SEQ ID NO: 5591 - DNA, 754 bp, Zea mays
  Clone ID: 700465282_FLI
cgaagccccgcctcgctgcgatgcccgacgacgtcgccgtcgccaactttgtggagaaggactggtcgttcctcgagtccgcgggcgcaaacctccagcgcgctctcgcgtcgggggcgctctcgccggcgtcgcgggtgttggcattgacgcccacggcgtccttcgtgaggtcgctcctcgcgtcctcgccctgcgagctactggtggccgcgcatgagtcgatgtacgtgctggcaggggtcaaggaggcgcacgacgaggtgaggtgcttccacctcgagggtgggggcggcggcagaggcggcggcgtggtggaggccgtgccagagaggttcgacgacttcgatgttgtgttcgtgtgctacttccctggaatgggagtctccgcgggggcgctcctcaaatcgctggccaagaggtgctcaaaaggtgagacctgttgaaacggcaccttatcctttcttagcttgttgtttcttgtttcagacttccagtggactgagcctgaggtggttagaaggatgcggcttattacgctgtgcattgcgtttgctaaaccacaactaaatcatttgagatgacaaattggtggggtttagagttgaggtattgattgatcagattggttattttgaggctgttgttgccagatatcatattgcatcaagcccttaacatatacttgaactacttggatacttccaatgttggtatacatcatacattttatgcacaaatgatctggatggtt

SEQ ID NO: 5592 - DNA, 1607 bp, Zea mays
  Clone ID: 700465286_FLI
agctatttgtaatattttttctttctgaccaaatgtttataatgtgcatccacaaaacatcttagttttattttggtcatatatatattttatattttttgttgatatattactattgtatgtatatgggccggtctgacacattaaggtattttgtgctatttggaccggcctggcacacataactaattgtgggccgtgccgtgggccgatgactgagcacacgtcctggcacgtcatgactcataattagatatgtgcttttgtgggccgtgcttttatgggccgtgcttttgtgggcctgtgtcgtgccgggccaggccgacccacatgtacatgtatagttatcattgtagccagatctagcacgtgagtgagcagcagggccggccctgagagggtgcggagggtgcgaccgcaccgggcctccaaaaacaaagggccccctagccattgggtgctagcacctttttctattaaacctatctattctagacacaaatacacaaagagcaatgcgctatcgaccagtctcgtttagattgttaaactcatgtctcaattacttatcgaatactccatccgttttaaaaatagtatttgttttagctcttgatttttatgtttatattcaactagatgacgatgaatccactaaagaagcaaataattctattgtgatctagagagtattatttactatacacatgatggttgtatcagcagagagaaactttttaaaattgaaatatttttgtgaactatttatggtcaacaataactcaagagatgttaaatgacttgacattctatatatcgaaaaaagttgctggatgagattgatctcaatgatataagcgatgactttgtatcacaaaatgttataagatatttttaatgatatcagataacaagtacgtgtttttttgctatattttatatttgttatcttataaacattaaaacagtatataatattttttgtacgtcaaatatttgatactatatgtataattatatatatttatgtgtggatggatcttcgtatcgaatttcgcactgagtatctaaaaagtcagtaacggctctggcgagcagttggattttatgaaccgagtcgtccaaacccgcactgcacccgcaccgcaccgctcctgcctcctgccccggcgcatccgacgtgtaggcagaggacgacgacaagcaaaggatatccagtagagcgcttggactagcaggctggacgaagctcatgaatttatactggagatcatgtgaattatcccggagatctccagtaatgggctgctgtgtgcagctggcatcagtttcagagccggggtgcatgatccatttttcagtgcgtgatcattttttttttggtcaagtgcaggctaccaatcgcaaaatcatttcatcactagctaagcttaaggcaggcacccacttgatcaagcaaaatcattgcactacctgttcttccactagaaaacgaaatctgcagagaatagagaactaactccccccaataatagtagaaactacagtttatagatgtatttgacattctacaattagtcggaccaacttgtccgttggaacggagc

SEQ ID NO: 5593 - DNA, 656 bp, Zea mays
  Clone ID: 700465319_FLI
ggcgggaggcctgcgccaacgcgttcgaggccatggacaaggagctcaagctccaggccaacgtggactgcaacttcagcggcaccaccgccgtgtgcgccatcaagcaggggaaggacctcatcgtcgccaacctcggcgactccagggccgtgctggcgaccatgtcggacacgggctacctcaaggccgtgcagctcaccaccgaccagaagcccaacgtgccccaggaggctgagcgtatcaagcgctgcaacggccgcgtgttcgcgctcaaggacgagccgtcggtgctgcgcgtgtggcttcccgacgaggactgcccgggcctcgccatggcgcgctctctgggcgactaccgcctcaagcgccacggcgtggtgtcggagccggaggtgacgcaccgccgcgtcgcgccgggggacctgttcatcatcctggccacggacggcgtgtgggacgtgctcagcaacgaggaggtcgtgtccatcgtctgcgccacgccgcggaagcagcacgcgtccaaggccgtcgccgaggccgcggcgcagcgctggcggaccaggtacccgacgtcccgcgtcgacgactgctccgccgtctgcctcttcctgcgggaccaggactgggccagcagcgtcgccgcggccagggcc

SEQ ID NO: 5594 - DNA, 1617 bp, Zea mays
  Clone ID: 700465407_FLI
gtcaagcaatcggttgctttgatgtgtgatagtaattgtaaagcaagagcgctacaacaagctgcccaagtgacagggacaatcgcagcaggtcagcaccagaatatctgaatgtgctgcgcccatgctgagttcctgaaaacctcacgaactgacctgaccgttaggagacaacacgttcctgggccctgtgttcgcggacggaaacttggcaccacacactcttatccacaacgagagcgtgggtgtgtgtcccaacattctccacgcgttccttccttccctccatctcctctctgttcatagcctcccaagaaacaagagccaaacagcgcttgcgaagctcaagcgccgcagcaatgtctctggccccgtccatcccttccatcaaggtgaaggtgggggccgtctcggtcgctcctccacaccgcgcatgccgatccttcgcggtgatcaggagctccaaggcagagggccccatccggagacctgcggcgcctccgctgtcgccaccgccgccgatgccacccaagacgccggctctgtccactcctcccaccctgtcgcagcctccgacgcccgtgaagcccgctgctccacccacgtcgtcgcagccgatgccaccttctcctgagcccaagccagttgacgccacagcccagatgcggaagccggtggctggggccatgacgctggagtaccagaggaaggtggccaaggacctgcaggagtacttcaagaagaagaagctggaggaggccgaccagggtccgttcttcgggttcttgcccaagaatgagatttccaacggaaggtacgtttgccccccttctcatgaaccgaacacttcaaaattccaagcatctgccaacagagacaccagcatgtctaggctgtagacaacacaaagaacttcacgtgtgctaggacgcctaggcggagtgacacgtgaccctgccgtgttcagtactgcctccctgtaacgatcgctgtttatcgctctttccagtacttttcgcctgttctggtgctcgcctgttctggtgctcgcctgttctggcgcactggagcgcaccagcctgatctagtgatgaccaaaagctgctatgttgggcagcccaaggacagtcatgaaaagacaacacctataaattagcaagccgaattaataaattcaattttaattttagatgctacaggtgtaagcttcgagtatttgacagatgcaattatttctttacaaattctatgggttgagggaaaatggaataatagttattgaatagtaaattcatgtcttaggagaaactcgaacagttattttatttgaatatatatatatataatttatatatatatatatataaaaatttatatatatatatatatatatatatatatatatatatatatatatatatatatatgacttaaataagagaaaggtaagaaacatgtacctagcatctggcaatgtggtatgacctgaaatgttaggaactggtgctaaaccaacctttcaaatcagttaccagtaatctccacaagaacacttcccatctttgaaatgatgaaatcggatagaatcccttaaaatgatttgccggctaatcatct

SEQ ID NO: 5595 - DNA, 1024 bp, Zea mays
  Clone ID: 700465509_FLI
cgagcgatccgatccgatccggaactgtgccggccagccatggcgactagggttttgctcaccgccctcctcctcgccttcctcctcgtcgccacccctttcaccgcccgagttgctagagctgattcggaggaagatgctgctgcagctgaggttgttgaaggggctgatctaggtattgtgggtgatgatacacaggtttccagtgatggacctttaagccctgctcctggtgtagagacagtagttgtattccccaaaaatgctggcaaaattgtactagcaggtgaagaaactgaattactagttggtctgcaaaatgagggtgaatcgactttgaatgttgttgctgttcattcaactctccatcttccttttgaccataatatgtatggccagaaccttactgttcagaatttcttcaacgcatcagttcctgtttctgtgcaagcaaccttcccttataaattcgttgtgagcaagttcttgcagcctggagcttatgatctggttggttacatagtgtatgagatcgaccagcacccttaccagaatgtattctacaatggcactattgaggtcgttgaggctggaggcttactcagtgttgagtctgtgttcctcatcacccttggaaccgctcttcttggtctctttggattatgggcatatggccaggttcagcagctctcgaagaaaacgaagaaggcccccaaggtggagctcggaactggaacaactgatgccaacatcgatgagtggctggagggcacttcgtttgtgcagagaagcaaatccaagaaagcagacctgaagctagctctccagagtagttaatccttggaggatctagaatgaggcatttgagggtagcccttcacaagtgacttctgcagaaagatagatgcctaaggaggtgctgaaaaatgtagtttcgtggtcgaacatctttgttgacaccattttcgaccttgtgtacttcacatggaacttttcttcaaacaaagttttgttaaaaaaaggt

SEQ ID NO: 5596 - DNA, 1137 bp, Zea mays
  Clone ID: 700465566_FLI
gccatcagggtccacgagctgggcggccccgaggtgctgcggtgggaggaggtggaggtcggggagcccggtgaaggggagatccgcatcaggaccaccgccgtcggcgtcaacttcatcgacatctactttcggaagggggtctacgccgcgcccaccatgcccttcaccccaggaatggaagccgttggcgtcgtcaccgctgttgggcctggcctcactggcaggaaggtgggcgatgttgttgcatatgccggcaaccccatgggctcctatgctcaggagcagatccttccagcggctgtcgctgttcctgttccaccttccgttgatcataagcaagcagcttctgtgatgctcaagggcatgaccgcccatgttctgcttcgccgggtattcaaggttgagagtggccatactatcctggtccatgctgctgctggtggtgtcggctcactcctttgtcaatgggcaaacgcccttggtgccactgtcatcgggactgtttccaatcaagaaaaagccgctcaggcagctcaggatggatgccaccatcccataatttacactagcgaggatgtcgtcgcaagagtcaaggatattacatcaggaaaaggtgtcaatgtcgtctatgattctgttggaaaggatacatacaaggcttccctggagtgcttggcgtcccgcggcttcctggtgtcgtttgggcagtcgtcaggcaaacctgacccaatcccaacgagcgacctggcttccaagtccttgttcctcactcgtcctagcctcatgcattacactgctacccgtgatgagctgctggagtcagccggcgaggtgtttgccaatgtcgctaacggggtgctgcacgtccgggtgaaccacacgtatccattgtcggaagctgcccaggcccatgcagatctggagggcaggaagacatcagggtccatagtgctcatcccgggatagactcaagggcatgtgaatgaataaatggggtgatctggttatgggaacggcgtaataataattatatctatgctgtttatgcggtatgttcgagtctgtttctgagttcctaaatctgaatgaataagtggcgcccttgtgttgttgggtcagggccgtgccggaatt

SEQ ID NO: 5597 - DNA, 1167 bp, Zea mays
  Clone ID: 700465988_FLI
tccagaaggagagcgtgcgcccgtcctcaagctgcttcccagcaaagatgagccgctgctggtctggagggatgccctccctgaccggcaagactatcaccctcgaggtggagtcctctgacaccatcgacaatgtcaaggccaagatccaggacaaggagggcatcccaccggaccagcagcgtttgatcttcgctggcaagcagctggaggatggccgcacccttgcggattacaacatccagaaggagagcaccctccacctggtgctccgtctcaggggtggtatgcagatctttgtgaagacactcactggcaagacaatcacccttgaggtggagtcttcggataccattgacaatgtcaaggccaagatccaggacaaggagggcatcccacccgaccagcagcgcctcatcttcgccggcaagcagctggaggatggccgcaccctggcggattacaacatccagaaggagagcactctccacctggtgctccgcctcaggggtggcatgcagatttttgtgaagacattgactggcaagaccatcaccttggaggtggagagctctgacaccattgacaatgtgaaggccaagatccaggacaaggagggcattcccccagaccagcagcgtctgatctttgcgggcaagcagctggaggatggccgcactctcgcggactacaacatccagaaggagagcacccttcaccttgttctccgcctcagaggtggtatgcagatctttgtaaagaccctgactggaaaaaccataaccctggaggttgagagctcggacaccatcgacaatgtgaaggcgaagatccaggacaaggagggcatccccccggaccagcagcgtctgatcttcgccggcaaacagctggaggatggccgcaccctagcagactacaacatccaaaaggagagcaccctccaccttgtgctccgtctccgtggtggtcagtaagtcatgggtcgtttaagctgccgatgtgcctgcgtcgtctggtgccctctctccatatggaggttgtcaaagtatctgctgttcgtgtcatgagtcgtgtcagtgttggtttaataatggaccggttgtgttgtgtgtgcgtactacccagaactatgacaaatcatgaataagtttgatgtttgaaatt

SEQ ID NO: 5598 - DNA, 1116 bp, Zea mays
  Clone ID: 700466018_FLI
cttcttcaagttgtgaacaatatgaatgcagtagtaaaagctttcccaggacaaaatggagcaaccggttctagggaaaaagcatcaattctttttattgagagtgacttctggaggcctgagacagatgttcagttattgaaccatctacgcgagcagaagaacggtcagttgtcggatgggcacaaggtagttcttttggtcacctctgaagccgacaaggacaaatatggatccatatttgatattgtgatgtgtaagcctataagggcaagcacaatcgcttcatctattcaacaactgctcaaagtagagatagccgaaagaaaagataatcaaaaccggccgtcgtttcttcgaagcttgctggttgggaagaatatattggtcgtagacgataataaagtcaacctcagagttgctgcggctgcactcaagaaatatggtgctaatgttagctgtgttgaaagcggcaaggatgctatcagtctacttcaacccccgcatcgcttcgatgcatgttttatggatgttcagatgccagagatggacgggtttgaggcaaccggacaaataaggcaaatggagttgaaagcgaacgaggaaaggaagaacaagttggcttcgattgaaggctcgacaactgccgagtaccatctgcctgttctggcaatgacagccgatgttatccaggcaacttacgaagagtgcataaaatcgggaatggatggatacgtatctaaacccttcgacgaggagcagctataccaagcagtctccagattggtagtgggaacgacggattcggctgtttgatgttcaaaatacgatggacctgacttctcattcatcgaagtgaagcatcaccatcttgcctctgtccagctgactctatatcccttgacaatgggcctctgacatggcctctcacaagactagatgaaaaaagaagatgaaagtgccgtgagttaggtacgtgtcacacatgacatgaagttgctgcggcagcccagaggagtgtaggtagatcaccctgtaactctcttgttctttgatgtttataggctgttgtgtcttctgacaattcattggaaataccacatctcgttgcaatcc

SEQ ID NO: 5599 - DNA, 861 bp, Zea mays
  Clone ID: 700466091_FLI
cctgcacatgtccacgctgtgtaaagggttttgatgaggatgcactacttgaggggttcaggtgcaagaaccaagcatgtgatggctttttgctgcccaactcaggtaaaaaggcttatacatgccaaaaatgtggtgcttctagagatgtggaagagataaaaaatatgagaagcgaaatactacagttatcggataaagcatcttcatttctttcatcaggaaataaggctgaagcaggttctatctacaagataatcgaacagttagagagaaatctgtaccatgctttctcaactactttgctgcacacgtgcgaaacactattgaagatatatctggaattacaagattggtggactgcgttgacatactgtagattgacaattcctgtttatgaaagagtttatccaccttttcatccgatgattggattacaattctatacttgtggaaagcttgaatggttgcttgagttcacagaggatgcactaaaatctttaaccagagcagcagatatacttaaagtaacacatggcgtaaaatcccagttcatgaaagagctctttggcaagttagaggaagcaagagctgaagtttcgtttagactatcctcgagacatggacatgatgagtaattttcataactgcaggccagttatgatggaaaataatatattgaaattatgtttctactgttgagatcatatttcaaggtacaataaaaaatgtggagactttgtaggcaaagaattagcactgttgtaaaacgattatgtgccgacacaaaataggccctaatttgttgtataaaaaatacaattttgaatttaattgtatatcatgtggtaggttgaactc

SEQ ID NO: 5600 - DNA, 1003 bp, Zea mays
  Clone ID: 700466142_FLI
cttccttaccgtctcgcgcccgctccgcagcctcgcaccacccgccgccgccggccgaccggccggcaccgccggtggcatttgaagtatggttagcttgaggcgacgccgactattgggtctttgttctgggaaagactcattgccagttgatcttcctaagccgattgaaaatgaaaaaactgtggaagttgcacactccaatgtgaagccattcagtgtgcatccactacccttggcaaagacttctgatgtgctcataaaatcctcaaatggttctgatgattcaaaggaagagaaaacccagtactatccaggcaaggaaatcaagtgcagaaaacggcatagaagaaagcagtatgtggatcaagagccatgcattatgaggggggtttatttcaaaaatatgaaatggcaggctgccataaaagttgacaagaaacagattcacttgggtactgttgggacacaggacgaagcagcccggctttatgatagggctgcttttatgtgtggaagggagccaaacttcgtgctttctgaggaagagaagcaggagctacggaggtacacctgggaggacttcttagcagtgactcgcaacacgataaccagcaaaaaacaaaggaaagtcggatcactaaggcgtagcaaggcagacctgttcatgggacagagtgacggcgacaccgagatggccaatggtggcggttcatcgaattccgacaatggcgacgcggggacgtcggcgtcatagatcgctcccaggggttctgccgttgtggcaactcaaagtggagtcctccagcacattcatcccggtcatgcatgatacgagctccgtctaggattttgttctctcaataattaatttccatgtgcataaggccccgttggtctaatcaaatcaaaggttagggaaaccatgccatctcagacgagaattagaggtggtccattgttagaaaacagttcatctgaatagtaatgtataccggttctg

SEQ ID NO: 5601 - DNA, 754 bp, Zea mays; identical to SEQ ID NO: 5591
  Clone ID: 700466147_FLI

SEQ ID NO: 5602 - DNA, 1034 bp, Zea mays
  Clone ID: 700466155_FLI
caaaatgtcgctttatccttcttgatgtcattccagtgggggccattgtccttgcagtaacaacactccttgattggtggatgtatggttcctgggtcatagtgccgcttaattttttgaaattcaacttattgtcttccggaggagactactatggaacacatgtcttccattggtactttacacagggttttccatccatgatttggacattcttaccatttgcattgtgcggtattgtaaagtctcaggaatggaggctttcaggtctaattgcttgggtgttaggggtttacagcattcttggacataaagaattcagattgaatactgcaggtttgttcttccagtgctacctttagcattgatgttctcaggttactgcttagcttccatgtcacagtccaagggcaaaaatcagcataggaaaggaagtctttcaaggctgcagctttctgttattcttctcgtcataaccaatgttcccatggctttatatatgtccttattccatcaaaggggaacagaagacgttatgtattatttgtcaaaagaagcctatgatggaagagtgaggagtgttctctttctcatgccttgtcattcaacaccttactactcaaccttacattacaatctacctatgcgttttttggactgcactcctagtgatagcaaagggaccttggatgagtcagatcgtttccttacaagtccatctgagtttgtcggcgatgtttttggaaatttatctgcattcagtcacattgtattattcgagtcagaagaaagacatgttctccagttgcttctgcacaattcctttcttgagatgaggaggtttttccactcacatttcaagattgacagagaccttcagtcggctgttgtggtttattcatggagggatgtgctatgatttagtactgatgtggcagaaaatgcctgttagctcgtgtaacaatccccacatgtttaatgttgtttcagcttttcatttgagaaatgagttgtggcattgctggatacttctg

SEQ ID NO: 5603 - DNA, 1049 bp, Zea mays
  Clone ID: 700466165_FLI
ctctcacaggtcacaggctcacagcacactgccactccgaaaccccaagcgccaccaggaccaggcagcctcctccgtcctatctcctccaagtccaacaagcacctatgggaggccatctccgcccggatgcgggaccaagggttcgaccgctccccgaccatgtgcaccgacaagtggcgcaacctgctcaaggagttcaagaaggcgcgcagccactctcggaacagcggcggcggctctggctctggagggaacggcaacgccaagatggcgtactacaaggagatcgacgacctgctcaagcgccgcggaaaggctacgggaagcggcaccgccggctgcgttggcagtagtgccgggaagagccccaaatcaaattgcaagattgattcctacctgcagttcaccacagataacggctttgaggacgctaacattccctttggtcctgtggaagcaaatggtagaacgatactgagcattgatgatcgtttggaggatgacaggcatcagcttcccttgacggctgctgatgcagttgcaaccaatggtgtgaacccgtggaattggagagacacctctactgatggtggagataaccgtggcaattttggtgggagagtcattttagtgaagtggggtgattacactaaaaggattggaattgatggtactcctgaagcaattaaggaagccatcaaatcggcatttggactaagaacaaggcgcgctttctggcttgaagatgaagatgaggttgttcgaaccttggacagagacatgccagttggaacatacacacttaatcttgatgatggtacttgtgaactctcgtcttagtcgtagtgtgaaattttactctatgaataactaggtctgtataggatgtagtgatgttgttatgccttgtctaagggacgaagggaaatgtggaaattagaaagaaactgacatggacaactagtgaataacggttcgtattatttcaaactccttttccgtctggatggtagagcgtatagactcataaaaatttgtgtgcgtgg

SEQ ID NO: 5604 - DNA, 1283 bp, Zea mays
  Clone ID: 700466170_FLI
gattcgttaactgcaacattagctgaacatcgccagcatttagtcagtatacagggtctaattaatcaactcaaggaggctattccagcaatgcagcagtctatagacgaactctcagaagaagtgaatagtgtatctattaactcaatggaccaattgaactcgaggctgccactgccagtacaaattgcagggtttggaacatcagaagaaagcagcagtgaagtttcggagatcaattctaagctctcttctacacacttggataagcctgggggcagtcctgctctaaagctaccaccattatttagtctgactccaagttcttctggaaaaggaatacagacacaaaaacggagtgcattggctcgtcaacgtagccaggacatcacatcagaacagaaaacgcttaccatcccctcaactaaggatcaaatgaatggttcaatgcacgaaaatgatgactattctgctcatgacattagacgttctgttcgtgaagctgctttatctaagccattgaagaatacagagagaccacaagataaaaatagtgatgatggttcggaacacttctttattccgctgtcaattagtgctgcgaagaaggaaatggattcggtggcaaatcgatgtaaccaaagattaggtttgtcacctcagatgaagttcccaaagagcacaagctacaatgcagataccccaatcaacaaaagtccaattctgttaagtgaactcaatggacatgattcgatcagtgccatgagtttccttgacccggctggtggtctggcacatcagtcctttatcactgatgatgctctggatcaagtattctctcctctattgatggaatcttcgttgttccatgatgcagatgaggatctacttgcacccttgtcagagactgatgcagcattaatggaatattaagcttcacatgtgcactatgtaatattttgaccactgcagacgcagcctggaggttattgtggcttatgtttgtcttattgactattcggctagttgcttgcgagttgcaaccatgttgagatacagatgcttcatcagaatttgtggggtatatgttgactattgatgcggggagaggtgatattgatgctgttttttccccttctggacaaggctctataggtgccggcgttgtaccaactgtagtggacgcaataggaaagcccaatcttgtatatttagttactatacatcagcagtatttgtgctgtaatactttttcgaattgctgaaatatgtgtttttctgct

SEQ ID NO: 5605 - DNA, 1077 bp, Zea mays
  Clone ID: 700466207_FLI
ccgtgctcggccagctcgccttcgtcttcttcggcgggtgcccgcgcacctggaccggcttctcctccgccgccttcgccgacctcgccgccatcgtcaggctgtcgctgtcgtctggcgtcatgctctgtttggagctgtggtacaacaccatactggtgctgctcactgggtacatgaagaacgcagaggttgcgctggacgccctctcaatatgcctcaacatcaacggctgggagatgatgatttccatcggctttctggcggcaaccggagtacgggtggcgaacgagctgggagccgggagcgcgaggagggccaagttcgccatctacaacgtggtggccacctcctccatcatcgggtccgtgctgttcgtgctgttcctcctcttccgcggaggcctcgcctacatattcaccgacagccaggcggtggcggacgcagtcgccggcctctcgcccctgctggccttctccatactgctcaacagcgtccagccagtgctgtcaggcgtcgctgtcggcgcgggctggcagagcgtcgtcgcctacgttaacatcacttcgtactacctcatcggcatccctcttggagccgtgctgggctacgcgctggggcttcatgtgaagggcatctggatcggcatgctgctcggaacgctggtccagactgttgtgcttctcttcataacgttgaagaccgactgggaaaaacaggtggaggttgctcaagagaggctgaagagatggtacatggaagagaacagaagactccaggggtccagacgaaacccttaggccggccctcagctccactgtgtatctctagttttccactcaccacgagaacaaaacgagggagacgactgctccacgtacaggccgatcgaggctgaaggatcatctctgggctgtatggtattgtagacacaaataatcatctgggctgggctgggcatgcaggtaatagtggtgtgcactagttctgaggttatatctctgccttgttcatcttaattcgatctgccggtgtcttgttgatcagtgcaatcctagctagttgttactgcattgc

SEQ ID NO: 5606 - DNA, 253 bp, Zea mays
  Clone ID: 700466251_FLI
cagttcctttatcgtatttcctctgctgtattttccatgcaatatcttgactgatgtatgctcatgctcagcacctccaataaagcgagacatgctatagcattgttgaatgcaagtgggtatgcagtttgcagtatgcttatgttgaattgatgtaacttagccgaactgaaagaggctgccccagcttgattggaacagaggaatttgctgctgtttttgttcttattacggaacaacacaagtcaactct

SEQ ID NO: 5607 - DNA, 1492 bp, Zea mays
  Clone ID: 700466268_FLI
gaagtacccaacagaacagacctaaatttgtttctgcattctgccagtcaaattgtggtgatgttagtccaaatgtcctgggaactttctgtatagacactggccttccttgtgacttcaatcacagcacatgcaatgggaagaatgaattatgctatggacgagggccaggatatcctgatgaatttgaaagtactcgtatcattggcaataggcaatttcaaaaggctgtagatctttttagttcagcttctgaagaaatacaaggcaaaattgactacaggcatacttacctagatttctcacaacttgaagtgaatgtccgtacaagcacaggaggtcagcaagttgtgaaaacatgcccagcagccatggggtttgcctttgccgctggaactacagatggtcctggagcttttgactttaaacaaggagatgtcaagggaaaccctttctggagattagtaagaaacttacttaagacaccagggaaggagcaagtcgaatgtcaagcaccaaaacctatcttgctagacactggtgaaatgaaggaaccatatgattgggcgcctgcaattcttccaattcagatcataagaatcggccagctggctatcttgtgtgttcctggagaattcacaacaatggctggcaggaggctacgtgatgccgtcaaagctgtacttacaagtgacaacagtggtgaatttaataacattcatgttgttcttgcggggctaacaaatacatattcgcagtatattacaacttttgaagaatatgagatccaaagatacgagggagcatcgacgttgtatggcccccacacgttgagcgcctacattcaggagttccagaaacttgctacagccatggtggcaaacaaagaggtcccgacaaattttcagcccccagacatgttggacaagcaaataggactcctcccaggcgttgtgttcgactccacacctcctggggtggagttcggagatgtcagctcagacgtccccgcaagctcaactttcaggaagggcagtgtcgtgaacgctacattctactcggcgtgcccgaggaatgaccttctcacggacggcacgttcgcgctcgttgagaagctggacggcagcaacagctgggttcctgcctacgacgacgacgactggtcactacgcttcaagtggtcgagaccgtcgaagctgagcccgagaagctttgcgacgctggaatggaccgttcctggagacgccccgtcgggcgtttataggttgaggcattttggtgcctccaaaccactgattgggtccatcaaacattttacagggacctctcgggcgttcgcagtgcgttaggttgcacaccgttgcgttgcgttcgacggcacacctgtcagagaatcgacaccgggtcatatatttactttgcatacctgccacagtatatggacatgttttccctatagtttttacatgctcctgatattaataacgctgtc

SEQ ID NO: 5608 - DNA, 2035 bp, Zea mays
  Clone ID: 700466320_FLI
gaaaggcagaggagtatctactgagtgttcctcaagacactccctactcggagttcaaccataggttccaagagcttggcttggagaagggttggggtgacactgcgaagcgtgtactcgacacactccacttgcttctcgaccttctggaggcccctgatcctgccaacttggagaagttccttggaactataccaatgatgttcaacgttgttatcctgtctcctcatggctacttcgcccagtccaatgtgcttggataccctgacactggcggtcaggttgtgtacattctggatcaggtccgtgctttggagaatgagatgcttctgaggattaagcagcaaggccttgatatcactccgaagatcctcattgttaccaggctgttgcctgatgctgctgggactacgtgcggtcagcggctggagaaggtcattggtactgagcacacagacatcattcgcgttcccttcagaaatgagaatggcatcctccgcaagtggatctctcgttttgatgtctggccatacctggagacatacactgaggatgtttccagtgaaataatgaaagaaatgcaggccaagcctgaccttatcattggcaactacagcgatggcaacctagtcgccactctgctcgcgcacaagttgggagtcactcagtgtaccatcgctcatgccttggagaaaaccaaataccccaactcggacatatacttggacaaattcgacagccagtaccacttctcttgccagttcacagctgaccttattgccatgaaccacaccgatttcatcatcaccagcacattccaagaaatcgcgggaagcaaggacaccgtggggcagtacgagtcccacatcgcgttcactcttcctgggctctaccgtgtcgtccatggcatcgatgttttcgatcccaagttcaacattgtctcccctggagcagacatgagtgtttactacccgtatacggaaaccgacaagagactcactgccttccatcctgaaatcgaggagctcatctacagcgacgtcgagaactccgagcacaagttcgtgctgaaggacaagaagaagccgatcatcttctcgatggcgcgtctcgaccgcgtgaagaacatgacaggcctggtcgagatgtacggcaagaacgcgcgcctgagggagctggcgaacctcgtgatcgttgccggtgaccacggcaaggagtccaaggacagggaggagcaggcggagttcaagaagatgtacagcctcatcgacgagtacaagttgaagggccatatccggtggatctcggcgcagatgaaccgcgtccgcaacggggagctgtaccgctacatttgcgatacgaagggcgcattcgtgcagcctgcgttctacgaagcgttcggcctgactgtgatcgagtccatgacgtgcggtctgccaacgatcgcgacctgccatggtggccctgctgagatcatcgtggacggggtatctggcctgcacattgacccttaccacagcgacaaggccgcggatatcctggtcaacttctttgacaaatgcaaggcagatccgagctactgggacaagatctcacagggcggcctgcagagaatctatgagaagtacacctggaagctctactccgagaggctgatgaccctgaccggcgtgtacgggttctggaagtacgtgagcaacctggagaggcgcgagacccgccgctacatcgagatgttctacgccctgaagtaccgtagcctggcaagccaggttccgctgtccttcgattagtacggggaaagaagaagaagaagaagcccaggccggagaaccatcgcctgcatttcgatctgtttcaccgcaattcgcattgttagtcgtgtattggagttatgtgtacttggtttccaagaactttggttccttctcgttttttttccttgtttgagcgtttttgggcagcgctggcctggttcctagtatggtgggaattggctgcaccttttgcttcgaataaaaatgcctgctcgttc

SEQ ID NO: 5609 - DNA, 1854 bp, Zea mays
  Clone ID: 700466358_FLI
agcctgctcctccggtgatcgccggactggcggggtaggaaccagcggagcgcagcccgcctccttccgctgtgtctgacagcagcagatcctcgatggagatggatggggttctgcaagccgcggatgccaaggactgggtttacaagggggaaggcgccgcgaatctcatcctcagctacaccggcacgtcgccctccatgcttggcaaggtactgcggctcaagaagattctaaaaaacaagttgcagcgggcaccaagttgtattgccttctcaagtcatgagcaactcctgtggggccatatcccagaactggttgagtcggtcaaacaagattgcttggctcaagcctatgcagtgcatgttatgagccaacacctgggtgccaatcatgtcgatggtggggtccgtgtacgtgtttctagggattttctggagcttgtcgaaaagaatgttcttagcagccgtcctgctgggagagtaaatgcaagttcaattgataacactgctgatgccgctcttctaatagcagaccactctttattttctggtaatcctaagggtagcagctgcatagctgtagagataaaggccaaatgtgggtttctgccatcatcagaatatatatcagaagataacactatcaagaaacaagtaacgagatataagatgcatcagcacctcaaattttctcagggtgagatatcgaagactagtgagtacaatcctcttgatctattttctgggtcaaaagagagaatatgcatggccatcaagtcccttttctcaactcctcagaacaacttaaggatttttgtcaatggatctttagcttttggtggcatgggaggtggtgcagatagtgttcatcctgctgacactcttaagtgtcttgaagatctcagcaagattagtggcctaaaactccctgacttcactgagctcctgtcagagacaatttttaggtctgaggtattaggcaacctgttggccactcaaaagctggatgatcatgacattgaaggggtaattcatctgtactacaacataatttctcagccttgtttagtctgcaaaaacctaactgatgtagagctattgcggaagtacactttcttgcattctcttcctttggacaaaagtctgaagatcgttagggacttcctcatttctgctaccgcaaaggactgtagcctgatgatcagctttcggccaagagagaatggtagcacagattctgagcatgattcagtgtttcttgaatcagcgaagcgaacctatgagtacaaggcatatttccttgatctggatgtgaaacctctggataagatggagcattattttaaactggatcagaggatagtcaatttctacacaagaaatgggggaggtcttgccatctccaaagggcagtaataccaaagacacttcgaggattcggctccaagaatggggagcctctcttcctgtatacatctggagaagggtgcatcagggagtgttggttgttgttcctgctgcttggtgctgctgttgtaacttcatgagtacagtcccaaggttgggaggctcgaccttaacgcctggaaagggcatagggagctgtgttgtccgtcagtcgctgtggcttgtcacagtaatttccgaagatgtccaacgttagttgagacaactgaactgcttaccgtggcaatcactcattgtaacatcaagttgaaaatgagggctgaagtttccctcataggctaccatatgtgagatatgtcctttgtaccactaagtgtccctgtgtcatgtatgaatgtatcttaatttgctgttgcagaaatgtttggtgaaactttcatcctcc

SEQ ID NO: 5610 - DNA, 364 bp, Zea mays
  Clone ID: 700466371_FLI
gactgatgatatcagtgtcgtgatcgtgcagttgcagaaattttcaagctcgtaacctagttggagaagctggaacaaaactctagccagtagcactaacagactggtgataggtagacatgatatgttacttcgctggcgaaagttttcatgagtcagcgctatttggaggggattttaacattcattctttggtgtagagccattcgtcttattattacatcatttaattcattcttggtaagcactgaaataaggggtgatatctcgcttcatgatattttttcactgttagggctagttttggaacactgttttcctaagcgattcggtgaattgcctctgtatattatattcatagatt

SEQ ID NO: 5611 - DNA, 714 bp, Zea mays
  Clone ID: 700466465_FLI
gtttttgcctaccgattggcaaagctaagatagaacgtgagggtaaagatgttaccattactgcgttctccaagatggttggctatgctctccaggctgcagagatactgtccaaggaaggaatcagtgctgaggtgatcaaccttcgatcaatcagaccacttgatagagctgctattaatgcatctgtcaggaaaaccaaccgattggtgactgttgaagaagggttcccccaacatgggattggtgccgagatatgcatgtctgttgtagaagaaagcttcgcgtaccttgatgcaccagttgagaggattgctggagctgatgtacctatgccctatgctgccaaccttgagagaatggctgttccgcaggtcgatgacattgtgcgggcggcaaagcgggcctgctacagggcagtaccaatggcagcagctgcctgattggtggacaagcctttctgttttccttccatcggttttcgctctctagccagaaacatgtagtattcataaggcgcaggcaaattggccggaacccagactccaagcgagctaattttgtagatctgccatggtgtgctttgtcccgttagtcgatatatgtggcgttatttctagattcaagtccatttgcttctctatgatttttgtacaccgctaaataatcttcttaagcccctgaatgaatgcaaaatatttaagatgttttagg

SEQ ID NO: 5612 - DNA, 1914 bp, Zea mays
  Clone ID: 700466493_FLI
acacagcccaacaaaggagcgcggcggcccctccttccttcctcccacttctctcgcgcggcgctcgcttacctcgcctcgcattccgttcgagcaggggagcggcagtgagaagggagggaattaaggcaagatgttcatcgagagcttccgcgtcgagagcccccacgtgcggtacggcccgacggagatcgagtcggagtaccggtacgacacgacggagctggtgcacgaggccaaggacggcgcctcccgctgggtcgtccgccccaagtccgtcaagtacaacttccggaccagcaccgcggtccccaagctcggggtcatgcttgtggggtggggaggcaacaacgggtccacgctgacggctggggtcattgccaacagggaggggatctcatgggcgaccaaggacaaggtgcagcaagccaactactacggctccctcacccaggcttccaccatcagagtaggcagctacaacggggaggagatatatgcgccgttcaagagcctcctacccatggtgaacccagacgaccttgtgtttggaggctgggacatcagcagcatgaacctggcagatgccatgaccagggccaaggtgctggacattgacctgcagaagcagctcaggccctacatggagtccatggtgccacttcccggtgtctatgatccggacttcatcgccgctaaccagggctctcgtgccaacaatgtcatcaagggcaccaagaaagaacaggtggagcagatcatcaaagatatcagggagtttaaggagaagaacaaagtggacaaggtagttgtgctgtggactgcaaacactgaaaggtacagcaatgtatgtgctggtctcaacgacacaatggagaatctgctggcatctgtggacaagaacgaggcggagatctcgccatcaacactatatgccattgcctgtgtcacggagggggtgccgttcatcaatgggagcccccagaacacttttgtgcctgggctgattgatcttgctatcaagaacaactgcctgatcggtggtgacgacttcaagagtgggcagaccaagatgaaatcggtcctggttgattttcttgttggtgctggaataaagcccacctcgattgtgagctacaaccacttgggaaacaacgacggcatgaacctgtctgcccctcaaacattcaggtccaaggagatctccaagagcaacgtggtggatgacatggtctcaagcaatgccattctctatgggcccggcgagcatcccgatcatgttgttgtcatcaagtatgtgccgtatgtgggagacagtaagagggctatggacgagtacacatcagagatcttcatgggcggcaagagcaccatcgtgctgcacaacacctgcgaggactcgctcctcgccgcaccgatcatcctcgatctggtgctcctggctgagctcagcaccaggatccagttaaaacctgagggaacggacaagttccactccttccacccggtggccaccatccttagctacctcaccaaggcaccactggttccacccggcacaccggtggtgaacgctcttgcaaagcagagggcgatgctggagaacatcatgagggcttgcgttggcctggccccagagaacaacatgatcctggagtacaagtgagcgaagtggcgtggcctgcagctagatatggaggaggctgcacgaaggggactagagaggcgagattagctgtggaattgtgttggcttctcgtgttttcttttgcgttcttttcctggtcatcgctgtggcgcttttgtattttatttgttggacccgtaacactatcagggctctgctattagcgcttgaagcctgtaatggcattggcatcgtatgataatgtgatcgagggtgctagttcccct

SEQ ID NO: 5613 - DNA, 2485 bp, Zea mays
  Clone ID: 700466512_FLI
atatcgcagtctggaaaacaaaggcaccatgttccatatcgtgattccaagcttacatttctattacaagaatcccttggaggcaatgccaaactggcaatgatttgtgctgtttcaccgtcccaaagctgtaagagtgaaacgttaagcacacttaggtttgctcaacgtgcgaaagctataaaaaacaatgccgtagttaatgaagagaaaattgaagatgtaaatgcgttgcgtgagcaaatcaggcaattgaaggatgaacttcaccgaatgaaatctaatggaggcatagaagggaacagcggcagctttgccactggatggaaccctaggcgcagtttgcatctgttgaaaatgagtttgggtcatcctacaacattccaatgtataaaagaagatagtgacgaggaaatggaaattgatgagaatgatgttgagaagccctacaatcatgaaaatatggcaatgtcttctattaatgttaaagaatccaaacgtttccaagcttcaatgaatgtaagtgctggaacttcacaggttgaagatcttgacagggataagattttgatatccataaaaaggtcctgctgtagtgctaataaatttaatactggtactgatgttggagatggaaaatgcaaattaaacattgccgccagtatacagaggggacttcaagtcattgaaagtcaccaaaataatagtgcatggaagagagcatcggttggattaaatgctagaatcatggatattcaaccttgcaaggttgatgttgcaattcagactgatcctgaagaatacgaaactagagataaccctctagctctggttcctagttgtctgcttgaagcttctgcaaatgagagtagggatcccagtacttgcagggacctacaactagtaccagttgatgtgacagtaccatctgatgaccaaaagcagcgacattttctgaaagctgtggagaaggtcttggctggagctatcaggcgagagatggctcgtgatgaacagtgtgcaaagcaagctgcagaaattcaacaactgaatcgtctggtgcaacagtacaagcatgaacgcgaatgtaatgctgtaattgcacaaacacttgaaggaaaaattgctaggcttgagagcctcatggatggaactttaccagctgaagaattcatgaatgaagagtttttatcacttatgaatgagcataagatcctccaaaagaaatatgaaaaccatcctgatgttttgcatgctgaaattgaggtaaagagactccaggaggaattggacatgttcaggaactctgtggacgagaaagaagttctacaggaggagatacaagatctgaaaaatcagttgcattatatgctttcatcatcgtcatcaatccgtaggctctggcctccagtgccgttgtctcagggaagtaattctgaacgtggaacaaaagatatagatggagatactaattttgtggacactcccaattggactgaggctgagagtaaatggattacactcactgaagagcttagagttgaacttgaagcaacaaaatcccttgttggaaagttgcagtcagaactggattctgagaagaaatgttcagaagaactaaaggaggcactacaaacagctatccaaggagctgcaagacacctggaacaatatgctgatcttcaagagaatcattttcgtttgcttgctctgcataggaggatgcgcgagggtgttgaggatgtgaagatgagggcagaaaaagctggtatcaaaggtgctgagttgcggttaattaactcccttgcagctgaaatctcagttataaaagctcaaaatgaaggccttcagggccagctaagggatactgctgaagctgttcaggcagctggtgaattgcttaatcggttgaaggatgcagaggaagcagaaacactagccaagaagcaagctttagtggcagagcaagagacggagaaagcttatcaggagattgataacttgaaaaagaactacgaccaggaaatcctcgctctaaagcagcgtctcgctgagccctctccgtgcaaggacgatatggtacagccacaagaaccgaacaatcttgagcctcctatgtatgacacagctggtagccacagtaggcagaattggaaggagttcaataccttgcaacaaggaggatcatttgaggtctccaagagcacagacctcaactcgtggttttacggatacgacaaatgtaacatttgatgctggagtgtttaattcgttcagtcctagtttgtaccattgaaatagtgataatataatgttgtacaccgggtaagcagagggaaaggatactattgaatgctggcggctcctcatggtcttatgaggtgtataccgattcttcagatccttggcgaagttgtattctgtcttgtaaatctagatgaaccttttttttcttacaacgaagtggtggcaccaatattctgtt

SEQ ID NO: 5614 - DNA, 1870 bp, Zea mays
  Clone ID: 700466554_FLI
cacacacacacaaccagatctcccccaaatccacccgtcggcacctccgcttcaagatgcagatctttgtgaaaaccctgactggcaagactatcaccctcgaggtggagtcgtctgacaccattgacaacgttaaggccaagatccaggacaaggagggcatccccccagaccagcagcggctcatctttgctggcaaacagcttgaggacgggcgcacgcttgctgactacaacatccagaaggagagcaccctccaccttgtgctccgtctcaggggaggcatgcagatctttgtgaaaaccctgaccggcaagactatcaccctcgaggtggagtcctctgacaccattgacaacgtcaaggccaagatccaggacaaggagggcatccctccagaccagcagcggctcatctttgctgggaagcagcttgaggacgggcgcacgcttgccgactacaacatccagaaggagagcaccctccacttggtgctgcgcctcaggggaggcatgcagatcttcgtgaagaccctgaccggcaagactatcaccctcgaggtggagtcttcagacaccatcgacaacgtcaaggccaagatccaggacaaggagggcattcccccagaccagcagcggctcatctttgctggaaagcagcttgaggacgggcgcacgcttgccgactacaacatccagaaggagagcaccctccacttggtgctgcgcctcaggggaggcatgcagatcttcgtgaagaccctgaccggcaagactatcaccctcgaggtggagtcttcagacaccatcgacaatgtcaaggccaagatccaggacaaggagggcatcccaccggaccagcagcgtttgatcttcgctggcaagcagctggaggacggccgcacccttgcggattacaacatccagaaggagagcaccctccacctggtgctccgtctcaggggtggtatgcagatctttgtgaagacactcactggcaagacaatcacccttgaggtggagtcttcggataccattgacaatgtcaaggccaagatccaggacaaggagggcatcccacccgaccagcagcgcctcatcttcgccggcaagcagctggaggatggccgcaccctggcggattacaacatccagaaggagagcactctccacctggtgctccgcctcaggggtggcatgcagatttttgtgaagacattgactggcaagaccatcaccttggaggtggagagctctgacaccattgacaatgtgaaggccaagatccaggacaaggagggcattcccccagaccagcagcgtctgatctttgcgggcaagcagctggaggatggccgcactctcgcggactacaacatccagaaggagagcacccttcaccttgttctccgcctcagaggtggtatgcagatctttgtaaagaccctgactggaaaaaccataaccctggaggttgagagctcggacaccatcgacaatgtgaaggcgaagatccaggacaaggagggcatccccccggaccagcagcgtctgatcttcgccggcaaacagctggaggatggccgcaccctagcagactacaacatccaaaaggagagcaccctccaccttgtgctccgtctccgtggtggtcagtaagtcatgggtcgtttaagctgccgatgtgcctgcgtcgtctggtgccctctctccatatggaggttgtcaaagtatctgctgttcgtgtcatgagtcgtgtcagtgttggtttaataatggaccggttgtgttgtgtgtgcgtactacccagaactatgacaaatcatgaataagtttgatgtttgaaattaaagcctgtgctcattatgttc

SEQ ID NO: 5615 - DNA, 898 bp, Zea mays
  Clone ID: 700466822_FLI
cgctcgcctcgggtcaaaccctaagcagggagttgatttatccgctgcagccatgagtaagttgcagtctgagtctgtcaaggatgccatctcccagattgttggggatgccaaggagaagaataggaagttcactgagactgtggaacttcagattggtctgaagaattatgatccacagaaggacaagcgtttcagtggctctgttaagttgccccatatccctcgtcccaagatgaaggtgtgcatgcttggtgatgcccagcatgttgaggaggccgagaagatgggacttgactacatggatgttgaggctctcaagaaaatgaacaagaacaagaagcttgttaagaggcttgccaagaagtaccatgctttcttggcatcagaggccatcatcaagcagattccccgtctccttggtcctggtctcaacaaggcaggcaagttcccgaccctggttactcaccaggaatccctcgagtccaaggtgaacgagactaaggcaaccgtcaagttccagctcaagaaggttctttgcatgggtgttgccgttggcaacttggcgatggaggagaagcagatccagcagaacatccagatgagcgtcaacttccttgtttcccttctgaagaagaactggcagaatgtgagatgcctctacgtcaagagcaccatggggaagccatacagggtgttctaagtatgctcttttgtgaagtctgctaggttctggcaccgaggttttattgaattaaacttttgttaagagtatgtttttggacgatcctatatttcgtcctggcgctactatgtttcagaatggtggtactactataagtatcctggcgctttaagtattgcttgaaaggatcaatataatttgcgtgtcataccc

SEQ ID NO: 5616 - DNA, 1319 bp, Zea mays
  Clone ID: 700466826_FLI
ttgcgaccttccgcctcttcccgcgcgccggcgccgccgaccccaacgaccgcgtgttcgtacgcgtcgacaacaacgactacactgtccccgggttcgccgacgaggactccttcgacccatcccggtccgacccttccgccggcaatggaaacttcggctccgcatccggccccctcccggagcacgtccgccgcgagatcctcgagctcggcctccctgacgacggttacaactacctctcccacctccgcgagctccgtcccgccgccgccgcagcctcatccttcgtccccagctccaccggtcgcccggagcccctcccgctcgatgtcaaggcttatgatgcaagcagggtacgcattggtctcagcgagggtgaactggacgaggggaagacgatgtgtaaggtggctgccaagactgcgccagtgaggcgaattgagaaggctgtcgacccagatatcgccaggttgctcgatgagagcgatgtgtctcatgttgggtccgaggatgaggggctggaggaggattttgtcatcatagctaaccaagctgaggaggaggaggaggatgaggatggagacatggaagaaaagcaagagtggaatggtgtcttcagtgatgttgaagaggaggagttcgattttgaggaggatgagccaaagccaagagtgagacgattgctggatgaacaatttgatttgcttgctttagaggaatatggagacagtgatgatgatgacatgggtgttaaaggtggggaatatgaactgccaaatgaggctattgatgaactgaaactgttccaaaatcagaatgtatgtgttgatgaagaatatagaacaccagcagattttgttcgtcaaaaactggattcaagcatggctgatgaggtggatgaatctgctcgtgtgataaaaaaatgtgctgaatatgctgaaatatatttaaatgaaactgcagaagaggaggtggttgtgcttgtttcggaaagcagtgatgaatctgaagtttgggactgtgagaccattgtttccacattctctaaccttgataatcatcctgggacaattgaaactccaggaatctccagagcgcggttccctagggttttccctggagaaacaactacaacaaatggcatcatcaagcttcatgggaaagagaaactgccagtagaatacctgccacagaggagaagaaatggtgaaaaggagaagaaagtaaagcctgtagaagcttctgtcactgataaatttaaaaaaggagctgagaaggaaacaaaagaggagaagaaggcaagaaaggcagcagtg

SEQ ID NO: 5617 - DNA, 2701 bp, Zea mays
  Clone ID: 700466916_FLI
gctactatccccgctaccgctagccgccgcgctgctcatctggtggcggctcgcctccctccccccatccgccgccgccggctcctcctctagctccctccttaccccgagctttaagctcgtgctacctgcctacctatccgtagggagagagagagagaggggagaaggttcggtcggtcggtcgggggctctcggatctcgccgctgcctccccgtttcttcgttgggatctcgctcgcttcgcgccatggccgccgtcgcgacgccaccggcccccgcgcccgccgcgccggcaccggcaccggcaccggctgctgctccggctcccgtcaccgtcgcccctgccgcggaccaaaccacggatctgctgcagaagttgtcgctggattcgcagcccaaggcggcgggtgcgacagagcctgctgctgctgccgccaaggagggtgctgtgacaagccagccgctgagtgtggccatcccgccggagcggtctatcacgccggtgcttcaggactttatggatcccaacctgttctatctaccagcgtattactatggaggctacgacagttccatgagcgagtgggatgattatccaagatatctaaattcagatggagtggagattgccccagcagtgtatggagatatttatggatatgggtatgctccttacggggcatactctccggccacttccccagttccaacggttgatggtcagatgtttggcgcacagcattaccagtatccaaccacgtattttcagcctcctacaccaattccttctaccactcaaagcaacctccagtcttccaacaatcctgaaaagccagcagctaaagcagatcctgccaaggcaaccgctaatggtgttccaaatggtactggtcacactcacagttacagtggaactgtaccaagccaacaaagttcagcactgacgcctgatggaacttatagggcgcccttgctaggtggagttccttctgctggttacctagacacgacatattatgggtatgacagcacaggggcacaatttgcatggtatgatggctctgcttatgcaaatggacagcaaagaacaaccacaactaatcgttttccatcctcgtcattcagtggtaatggttcatctgcaatatatcagaacaagagctccaccacgcagcagatgggtatgcagaatagaagacctacaactacatcagcagctcctacctatcccaataggatgtaccctagcccccgaccgtacacccagtatgggaattcagtaaaaactggtcttccctacgggagtaacggttatgattccaggatatatggtcgatgtggtcttggtaatggtatggataacaggtacaggcccagggcatgtagtggatactatggttatggcaatgagagtcaggatggaacaattgagttaaacagaggtcctagatctggccggttcaagaaccagaaattgtacggtcatactgtcactattgctgtgaaagggcagtctctcccttctagtgaaagcaagaatgatagtgctgtgcctgatagagcaaagtacaatagagatgacttccctgttcagtacgatgctgcaaagttctttgtcattaaatcgtacagcgaggatgacatccacaagagcgtaaagtacaatgtgtgggcaagcacaaccaacggaaacaagaagcttgatgctgcttaccaagaagctcagtcaaagggatctgcatgccctatattcttgttcttctcagtgaatacaagtgggcagtttgttggtgttgctgaaatgactggcgccgttgattttgagaaaaccctagagtattggcaacaggacaagtggaacggctccttctctgttaagtggcacattgtcaaggacgtgcccaacaatattctcaagcacatcatcctggagaacaatgagaacaagcctgtcacaaacagccgtgacactcaggagatacgcctcgaacaaggccttcagatgctcaagatattcaaggatcatgtcagcaagacttccatcctcgacgactttgccttctatgagagccgccagaagttgatgcaggataagaggtcgaaacagcagcagctccaaaagcaggtctgggacactaggacccccgtttctgtcaccggtgaacgaccgcaggaacctgctgatgggaagcccaatccgtccgtaccagatggtgtcacggcagaggtgaaggcggtgaaggctccctcagagaacggcatcactgctcctgttgtttcctatgcagcaaaggtggcccagacagcaccagagaaacccgtcctctccaacggagtcgccaagaccggttaactcgaccgtgcaaccagagctccatagccagggtggggtgggtgtcctgaagactcagatgcggtgcaagggaactggtgaccaaccaaggcatgtgttgctcgatcttctcatcgctactggatggagagcagttggctagttgttagcggtttccctagtttctcttcctcttgtgttcctcgtttcagtttgcttatagccccgaagactcttttctcccgtagtgtcggaatgccagggtctgtccctgtgggtgtgttgcgtaactgggatccgagtataccctgctgtgttcgtcgttacattgaatggatctgaatgaaagtgggttagattggagct

SEQ ID NO: 5618 - DNA, 1034 bp, Zea mays
  Clone ID: 700466968_FLI
ccgacacttaaagattgttgatctctcagcggacttccgactacgcgacatcaatgagtatgctgagtggtatggacattcccacagggcaccggaacttcagggggaagctgtgtatggtttgaccgaacttaaacgagatgacataagaaatgcacgcctggtagcaaatccagggtgttatcccacatctattcaacttccgctcgttcctttggtaaaggcaaaactgatcaagctaaccaacattattattgatgcaaaatctggagtcagtggtgcaggacgtggggctaaggaagcaaatctttacactgaaatcgctgagggtatccatgcttatgggataacaagccatcggcatgtgcctgagattgagcaaggacttacagatgctgctgaatcaaaagttactatcagctttactccacatttgatgtgtatgaaacgtgggatgcaatctactgtgtatgttgaattggcatctggagtgactcccagggatttgtatgaacacctaaagtctacttacgagaatgaagaatttgtcaagctgttacatggtagcaatgttccttgcacaagccatgttgtgggatcaaattactgcttcatgaatgtctatgaggatagaatacctggaagggccatcatcatctctgtcatagataatcttgtgaagggagcatctggtcaggctttgcaaaatcttaatctgatgatgggactgcctgagaatatggggctgcaataccagcccctgttcccttgatcttttgtgtcattatctattattacattatttaggagtccagaaaccaaattatcattactgtcaagaggtggcaaggagcctgacatcagaattcagtcaagtcgaagttagacagttagtgtagcttggtctgtgttgttttagctttattaaaccattaagagaataatgatgatggcaatttagcagtacaatggtagtattatgtgggcagcttggttccaataaaatcataagcctatacacatcttgtgcccgc

SEQ ID NO: 5619 - DNA, 1240 bp, Zea mays
  Clone ID: 700466989_FLI
ccggtgtctatgatccggacttcatcgccgctaaccagggctctcgtgccaacaatgtcatcaagggcaccaagaaagaacaggtggagcagatcatcaaagatatcagggagtttaaggagaagaacaaagtggacaaggtagttgtgctgtggactgcaaacactgaaaggtacagcaatgtatgtgctggtctcaacgacacaatggagaatctgctggcatctgtggacaagaacgaggcggagatctcgccatcaacactatatgccattgcctgtgtcacggagggggtgccgttcatcaatgggagcccccagaacacttttgtgcctgggctgattgatcttgctatcaagaacaactgcctgatcggtggtgacgacttcaagagtgggcagaccaagatgaaatcggtcctggttgattttcttgttggtgctggaataaagcccacctcgattgtgagctacaaccacttgggaaacaacgacggcatgaacctgtctgcccctcaaacattcaggtccaaggagatctccaagagcaacgtggtggatgacatggtctcaagcaatgccattctctatgggcccggcgagcatcccgatcatgttgttgtcatcaagtatgtgccgtatgtgggagacagtaagagggctatggacgagtacacatcagagatcttcatgggcggcaagagcaccatcgtgctgcacaacacctgcgaggactcgctcctcgccgcaccgatcatcctcgatctggtgctcctggctgagctcagcaccaggatccagttaaaacctgagggaacggacaagttccactccttccacccggtggccaccatccttagctacctcaccaaggcaccactggttccacccggcacaccggtggtgaacgctcttgcaaagcagagggcgatgctggagaacatcatgagggcttgcgttggcctggccccagagaacaacatgatcctggagtacaagtgagcgaagtggcgtggcctgcagctagatatggaggaggctgcacgaaggggactagagaggcgagattagctgtggaattgtgttggcttctcgtgttttcttttgcgttcttttcctggtcatcgctgtggcgcttttgtattttatttgttggacccgtaacactatcagggctctgctattagcgcttgaagcctgtaatggcattggcatcgtatgataatgtgatcgagggtgct

SEQ ID NO: 5620 - DNA, 1781 bp, Zea mays
  Clone ID: 700467013_FLI
cagaaacagagctttggtcacttattgaagccaagggtgatatccctgcagctcgaagcggacacacggtgattagagctggtgctacattgatactttttggcggtgaggacacaaaaggaaagaaacggcatgaccttcacatgtttgatctgaagtcatcaacatggcttccattgaactataaaggcactggaccttctccaagatccaatcatattgctacactgtatgatgatagggtccttttaatttttggaggccactcaaaatctaagacacttaatgacttgtattctttggatttcgatacaatggtttggtcaagagtgaagacccatggtcctcacccatcacctcgagctggttgcagcggaactctctgtggaactaagtggtacatagctggcggcgcaagcaagaaaaaacgacatgctgaaacttgggtttttgatgttctacaatgtaaatggtctgtttgtgtagtgccccctagttcatcgattactacaaaaaaaggttttagcatggttcctttctaccacaaggacaagattgctcttattgcatttggaggaaacaaaaaagagccatgcaacaaggttgaagtattagtggtactgcaaaatgagcattcttttagttggcgctcagccccagaagtggacaccatggtgtatgagtattctccaagcaataaggagcttgctgatcatctccacaaatgtgcccccttgtactctaatagttccatcgcaaggcatagtctcacttctgtgatagaacaccctcctagaagggaacccctctctgagtcattgttgaagcagtccagtttgggcacttcactccatacgcagttggatcacgcagaagagtgcagcctaggtcagaaactgcagaaaccaatcgatgatgacagatatgatgacgtagatgactcttcttcatgccaagatagcactccaaaagggccctacagcaaaaggacagggcctggttttcagaatggcgcggaaaacatggtgactggaggatcaaaagtgagaaggatagctagatgctcttcagatgttggccagagccacttgtacaacacaaaaatagcagacttgatcagaagaaacaccacgctcgaagaccagcttgcgaccgcactggcaagcaaagatcagctagacaagagcttagcatcggtcattcacagcagaggacagctggagaagatgcttgccaacaaagataaggaggctgagatgctgaaagagaagatagcatgcttagagctggcgcaagaagagtcgaacagcctctcgaacacagtgcacgctgataatgtgcgcctggagcgtgaagtggcgttcctgaaggccgtcacaggcgaaacccagaaggagctgcattccactcgtagagttttagcaggggaacagtcgcgcgcgttccagctccaggttgaagtgttccatctcaagcagaggctgcagatactggagggaagatcaggaacacccaacaaacaaccgctataggctatagtggtcacatttctacatttctgcacatcgatcgttgcaagtttgcaaccccccaccccccaatgtaaatgattgtgtggcgagctttatggtaccatgttagtacatgcgctgatgttgatctgtaatttgcagggtatggtaaaactataaatagctgacggattgaaccatgctaatatgtgtagatattgatctgtaatttgcagggacatggtaaaaaaataaaaatgtgcaagctct

SEQ ID NO: 5621 - DNA, 2111 bp, Zea mays
  Clone ID: 700467020_FLI
tgaggcggcatgggtggcagctcccgtaccaccctctccaggtggtggccgtgtccgtcttcctggcgctggcgttcgcgttctacgtcttcttcgcacccttcgtcgggaggaaagtgttccagtacgtggtcatggggctatacactccgctggtattatgtgtcttctttctatacatctggtgtgccgcagcaaacccagcagatccaggggtcttcaaatcaaagaagtatctgagcttgtacggaagcggcaaacacaagcatctgaaggaatccagaaagacttcttcagatgctcggttacaaatagagggaactagagaaaaacaagagcatgaggtcgcagcatctagcgagaggtcaattactcaatacaaggacaataatccatcttgcttgagttcaaccctctctccttctctccttctattctaccctctctcttttgttttctcctgctgccaaccacatgaaagttcctctgagcagcaagccaccgaggaagggatgtttttctgcagcctatgtgaagttcaggtgttgaagtatagtaagcattgcagagtttgtgacaaatgtgttgatggttttgatcatcactgcaggtggctcaacaattgcattggaagaagaaactatagaaggttttttattctaatgtcaactgccgttatcttggtctccatggtttgtgcaatttgggccagcttatcctacaatcagcaattggagtattggtgctagtgctatgctttgttgagcgaaaggaattctctatgcaaattgtttcaaagcttggaagcagcttctctgtagtgccttttgttattgtggtggcatcatgtaccatcctagccatggtcgcttcactgcctgttgctcaacttctttttttccacattcttctgatcaagaagggaatcagtacctatgactacatcattgccctgcgagagcaagagcaagatgatctgagtgggcagcagagtccacagatgtctcgtgtaagctcctacaccggactcagcagtgctagttcctttggtccacttcgtcgtggttcatggtgcactccgccaaggctgtttcttgaggatcagtttgatgttattccatcggaggctgcttcttcgcataattctgctacgaagaggaaagaagaccaggggaagaggaaaaagggctcaggggccgtgaaaataagcccatgggcattagctcgtcttaacgctgaagaagtttcgagggttgctgcagaggcacggaataagtccaaagttttagtgccaatcagaaaagatgactattcacgaggccacgaaacagatagtagctatggaggcaccagcagtggtaggatcgatctaggacccgatagcaagaggagaacaaacagaagaggaagacagcccagtgatctctttctcaaacctgttgcaaagatatctacagatgctattgattctgccagcagcgacatgtccaatttagcaccattgcaacttgaggcacggagcgccttccatcccagcagggctgcatcctctgtgaatgttggtgggtcatctccagatagcagcttggattcgcctgacctgcatctgtacagagtctcagctgtctcatcgtctggagccgaagacttgcagctgacagctctcactgctccaggaagcacttcacatcaagggattcaactgtcgagatcgaccagcgatgggtatgaagcgtcagggggtgaagacagcgaccgcattccgtcacagatagtgcaccgctcgtcaaactgggcaagcatcatcctcaactctgaccagagtgcgtcctcgtctggcattcttgtgccgaagaacagattgtcctgaattcagataaatgaagattgtaaatgatcaaccaagaacgggaggttccagtatctgagctttgttttcaatgtcgaatcttgttgcagggatggcttgatactgcgcaaatcattaatttttttattagtttctgaatcgctaggtaggcaagtgtctgaatttcttccgtggggtgttcaggtgcttgtaattttgctgtcagacgacaatgaactgatttgtttagaggttggtacct

SEQ ID NO: 5622 - DNA, 2240 bp, Zea mays
  Clone ID: 700467025_FLI
ctcatccgcaccacctccccctgtcccccgctcctgcctcgcctcaccaccattagagcgcgcgcgccaagctcgtggtgaggttttcgagatgaaggttatcgagaagatcctggaggcggcgggggatggccggacggcgttctcgttcgagtacttccctcccaagacggaggagggggtcgagaacctgttcgagcggatggaccgcatggtggcgcacggcccctccttctgcgacatcacctggggcgccgggggatccaccgctgaccttaccctcgaaatcgccaaccgtatgcagaacatggtgtgtgtggaaaccatgatgcacctgacatgtacaaacatgccagtagagaagattgaccatgccttggaaaccatcaaatccaatgggattcaaaatgttttggccctcagaggggatcctccacatgggcaagacaaatttgtgcaagttgaaggcggatttgcttgtgctcttgatttggtgcagcatattagagccaagtacggtgattattttggcataactgtagctggttatccagaggcacaccctgatgcgatacaaggcgagggaggtgctacattggaagcatatagcaatgatcttgcgtacttgaagagaaaggttgatgctggtgctgaccttattgttacacaacttttctatgataccgacatctttctcaagtttgtgaatgactgccgccaaattggtattacttgtcccattgttcctggcataatgccaataaataactacaaaggtttcctgcgcatgactgggttctgcaaaactaagataccttctgagatcactgctgcactagatcctatcaaagacaatgaggaggctgttagacaatatggaatccaccttggaactgagatgtgcaagaaaattcttgctactggcattaagactttgcacctttacacactaaacatggacaagtctgctataggaattttgatgaatcttggattaattgaggagtccaaggtttcaaggccattaccttggaggccagcgactaatgttttccgtgttaaagaggatgttcgacctatattctgggccaacagaccaaagagctatcttaaaaggacattaggttgggatcagtatccccatggacggtggggtgattctcggaacccatcatatggagcacttactgaccaccagttcacaagaccacgaggccgtggtaagaagctccaagaggaatgggctgttccactgaaatctgtggaggacattagtgagcgcttcacaaacttctgtcaagggaaactcacaagcagcccatggtcagaattggacggtcttcaaccagagacaaagattatcgatgaccagttggtgaatattaaccagaagggtttccttacaattaacagccaacctgctgtaaatggagagaaatccgactcgcctactgttggttggggtggtcctggaggctacgtttatcagaaggcctacctcgaattcttctgcgcaaaggagaagttggaccaactaattgagaagatcaaagcattcccttctctcacttacattgctgtgaacaaggatggagaaacattctccaatatttcaccgaacgccgtgaatgctgtcacgtggggtgttttccctggcaaggagattatccagcctacggttgtggatcatgcaagttttatggtttggaaggacgaagcatttgaaatctggactcgggggtggggttgcatgttccctgagggtgattcatcgagggagctactagagaaggttcagaagacctactacctggtcagcctcgttgacaacgactacgtccagggggacctgtttgctgccttcaagatctgattatgctctcatggtctgtattgttgtatggttggacccaacaatattcttgcatccccgactacaggtctgatcgccatgaaagcttctgttcatttgagctcgggggagtccgctagtcttatttttcttgatttctcttggctttctggaaccatacgaatcaataagaaatgagctgtgttcactttccagttcctccgtgcaagtggcgcaacggccaggttctagatgtaaaattcgtcctctaatacagagattggtattgtatgttagtgtaggatgcgctgctcgcattgcactgttattgtgcttctgtttggtggaaataaagattggtcgaaatctgagggccagattgaaagcc

SEQ ID NO: 5623 - DNA, 918 bp, Zea mays
  Clone ID: 700467055_FLI
ggcttcccctcccgcctctcgccagtcgcctcgctccctcgcctccggtcctccgcacaccgtccgttgatcctgcgtgcgtgcctctctctctcctcccgcctccggtggatcgtcaatggcgctcggacggcaatgggagccagcagccgctgctccaccaaggcggtcggctgctttgggagcgcttatgcccgaaatcgaagcgttacccggcctcttagcgcttcagcgcgctgaagcgtgcgcttagtgccgccatttggaaccctggttacaaccatgctcttctggttagatagatggaggtgccaatgaactctacgcaatctggtcctcacttccctgtgcagcatcagtccctctcattagacatcaagggaaataaaacagatattgttatcagtaaatatgaagatacctttctgctgattgtggcacaaatcggctgcatgggaaccatactagctgccaagaaagacgaaagtgttttctcggacccaacctacaatgtgtctgttctttttgggaagagaaatgagccactcctacaagcttgcgcacgtcaacttattgagcacataagtggcagtggctcagctcggtcattggttatttctctgggtctgaaagatcattctcagggaacactgaaggatatcattgtagctgtgatcgagaatcgcctttggtgatgattgaataactgagctgggcatgggattgacatattcagcccatcgataaagatattgcttagcattgcgcaagaggagccatcgtttataccatgcactaaattctggtagttttgtagttagaccttctatctacttggattaacaaaaggtggctttaagctgctgtcaaaatttgagtgtcagctctcacgctaaacaaaaggcactgtatgctggt

SEQ ID NO: 5624 - DNA, 2016 bp, Zea mays
  Clone ID: 700467061_FLI
cagaaagtcaagcgaaaaaaaaacagtacaggaagaaaatagtagataaaaaaatcctcttcaccgtttcctcttccttctccccgtgcgagctgtgactctgaagccgccgccgcctcccgcctgcctctccatctccgtccacgccgcgtcataaaaatcccccttcaaggcccgacctagcacctaccctcgccacccgcccattccagttcccaatccgatcggtgcacgagctccgaatccactatccctgttgttggcggcctccagctcccgctgggaccatttccgtttcagggaggcggtctactctgtatttagatccgccccctccttgcggtagtcgggggagcggatttaggtgaacaagcatcttgattttttttgaccccccaatctttgctctacccaccgcgtggtcttcgcctttaaatcctctggaggtggatagacggacgaggcaaagccgaaggcaagaacggtcgtttcaagtatcctgctaccggcgtccgaaggaaccttcaagtgttccagtggaggtattaggagtggtggggaaaaagggattgtagaggtaacgatgttgagacagagctctagtagaaatcagagatccagaggtctgaagctgaagaaagctcttcagattagtctcttgcttctggtttctgtttggttgctctaccaagttaagcattcttacgagaagaaggcggcgtacagcgaaggtgaagtgaatgatttgcataaagatgacaagggccagggagaggcagtcagattgggcaggaaggatgtgcctccaaagatggaggctgattcttcaacactggatgagcgggttgaggatgaagagaacgatgaagtggagcaagaaatgaagcatgatgagaacgatgaggatcccatcgatgagcaagacctggagaaggacgaggatcttcccgagcctggcgagcattcttctgaaaaggatgaagatgtgggtgtgtttgaggacgaagagcggaaggagcggtcacaggaggatcaagagaagagcttccatggtgacgatgtgtctagtgctgttactcatgatcctcaatcgtccgagcaagatgagctgttccatcatgcccaagacacggtcctattcgtggatgatgcttcaactgcagtgcccaatgaaaaccatgtggctggaaacgacgaggaggaagtgcagagggctagggaaaggagtttcagaggcgatgatgtgtcaagctccgtggatcatgacgccaaggtggcaaagcctctcccagaggaacaactgaacagcatggataagatatttgaaggcaccacaaacttgtctaacggaatttcgtttcgagctcctggaataaatggatcatatgccggcatggacaatgtggctacagtaccaactaattcaccttcacagaaaaacgcaggcactcctagcaatgacatagaaagcaagacccacccatctccggcaaatttgaccggaccagagcaaagtaattcgactttgaaagatcacccagatcaacaagtgaattcaacagcagtgctgggcaaccaagtacagcctttgactaaccagacgccgtggcccgagttggattctccaaatggcaccttggctctggtaacagatgtccaaaagtccacatctggagctggagatgatggcagcagcactgtggacaagaggacggacggtagagatggtcccaaagaagacgtggatgtgtccacgaaaataatgaacagggcaatcagtgaggatgaagtcgttccagagtgacaaggagatctctcttgccggcttctggtgtaacctgtaagtttgtaggacttggtttcgtctcctagactagacttggagatgcgcaagcaggctgtctcgttgtgcacgccttttgtgtaagtttgatagatgtctgcttttgtactgccagttagtagtccatcacaatgatctgggtcgagtggagaacaagaagcatgtgtacccac

SEQ ID NO: 5625 - DNA, 3234 bp, Zea mays
  Clone ID: 700467150_FLI
ggttcgccctcacccgcaaataccgacactgtttgttcaccggcaaataacctctacctatgacgcattgataacaagtacacgagccataggatagaatttctctacatccaggacaacaagcagctaagaacatgctcgtttgttactgttgtgcactttatactactggtaactttcagaactagtatggccttgatgttagattgtcgcttagccagacattggttcgtattcaccacagactggggatccttctgatggctctgccatggttaaattgaattgtttagctgctgaggctagatgcagatagcatagcaggcaacatttgttcatgttttttaagcaacgctgacctgtgggcaccagaggaatatttaaattaggtttaattaccttgagttgaggtgaggtgatcgagtttctttggaggagaaagaagttacttatctgccctaggacaactgattttatactaaagctgatgaaaactgcacaatgtaaatgttcaacaagaaaagggtcgcccctctgaggtgaactgtttcttgacaacatttagttccatatggcccattgttctgtactcatcaaatctgataaaaaaaatttcccttgttggagttttagcagaaacatgtgtcatttttttgaaaaaggatcgttattttctgagtgtttttttacatgtcatactcaacagttcgaaaactgccgtatctatattatcatgtgtgtgttctttccacacggagggtggagagcattttgggaacactattatacgtctatacctgtcatatatttgctcgtcaacataatctgaacagtatcacataatttcacttcctgggggtactataaagctcttggatgcaagggaaaagtatggaaaatcgttttatgtctggcactacctttcttctagaaacttagccagttgtctactttacaggtacagcctaacgatcgacttggatgtcaaagcatgatttcttttgttgtaagctcgtagttggttaagtattgttacatgtcaatacttctatctgaggaaataattttcatctaatataaacagctagtggttcaattggtttgttacatctacaatttgccagtacgtgtgctcattgaatctgataaaaaaattgttatgtgaaggctcattaccctttctttttcttataagccccttggagtttcagcagcaaaatgtatccctttgaatctgataaaaaattgttacatctacaatttgccagtacgtgtgctcattgaatctgataaaaaatttgttatgtgaaggctcattaccctttctttttcttataagccccttggagtttcagcagcaaaatgtatccctttacttttcaatagttgaaaaatatgttgtaactatattatcttgtgtttttttcgatgactcgtggttgtggtggggtggggaacactttactatacctgacatatatatgctcttcatcatcaatcaacataacaatatcccacaatttcacttcctggggggtgggggcatctaaagttcaaaccagatgcaggaaaactgtatgggcaatggttttacgtttattctagtactacctttcttcaagaaacttagcactttaaaacctaccaatcgacatagatgtcacagcatggtttcttttattgtaaataagtagagttgatggatgattgctgtttgttggaaacgtagtcaggtgtcatggtttttacacagtagatctgattgagcttatgtaggccaagcataatacatgtcaatacttaagaaacagctattggttcagtacttcagttggttgtttctgaaactagaaatgttcttttttagtgatcaggagcggttgcccctactgtaataaacgtagataaaaaaagatagcagaatacaaaagcagagtttaataaatgtaaaaagaaacaaagaaaaaataatgctattagaaaaaatagttagtacagaaaaaaaactcgacctgcgagggtaagacaacacccggttattatattaagaaaaataccttcttacacaggtcaagaaaacctctgaatccctgcctcaaccatacgcagcggcacgacaccgtaacccatgtgagaacacgaccgcgaccgggccttagacttgtgctttgatgtgggacagatgaggaggatttttttaaccatattctgaaattcgcttccatggggagttgaactcaagacctgaggagtactactcagaccacctaaccaacttggctagaggccctttcgctagttagtacagataaaaggtacctccagatatgcctccgttgatgatcattttattttttatagttacgtgcagtcttaatttggtccctgttttcaaattgaccaatgcatccttctagcgtagatgtgactacgtgaatatgtccttagacctatgctgtgctaagcttagtgaatcatgttagtttacgagtacatcataagctgggattggatcatggtctggggcttcaaacattggtccaagggcctgggatgagttggatagctgctcctgactgtttggctcaaattcttctgaaagcttgtactttattgtaaggaagaagaaaaaaaacttgtattcctgtcatgcacaggacatgtcacggtaaatgagatgtctccctaacgtccacgcttgatgctgttctggtgcaggatctgaagtgcttcgtgttttcactcatcaacctccacttcaagatcaagccaatccagtcttgagctccatctcaagccttcatgcgactgttttggagtgttttaagagagaaccttgtaccatgttaagatgatgttgagcttgtgacgatgcgcacggtagaagtggaacctttttttttttttgcggttggattgtgcaaactgcgagcagtagtgagtgtggtatatttgtgccttcagtttcctgttgggtggagtgttcttgtcgtttggcacggcacactagtattcttctctgttatcagcgctctgttgaaggatggaatggatatccagattgtctgggacttgtggtgatgcagatccagccagtaactagtatgaatttctctagtggggttgttgggctgctaaaaaccgccggactgagcaaaggaaccttgcgtctttgtgtaaagcagcagtcgaatctgtgtgtgtgtgtttgtgattaaagtcgtcattcggtcc

SEQ ID NO: 5626 - DNA, 2277 bp, Zea mays
  Clone ID: 700467163_FLI
gtgatccgaattggttgttgtatgatggttggaatatgagccatctagtgcttccgtgactggccaattttttttgtttctcaaagttttctttgaaaaactgtttgtcgagcgtcaattcgtatttacctgaatttactaattcttaatacagtatgtcgttattttgggctaagcttgtgtaagaagggtcgtttgacattttgtactgtattaatgctgttttgtgtttctttgttcggagcagcattcaatgctccttttgttgtttgagagaatctgatatttgccatcgtaccgaaagtccgaaaccaactattcaaattgggatttcatttctttttttttctactgtttttagagttctctttttcgctgctgtgctcttgtgggtcagtacgtgcatttctctctttttttcttttttttttctgatgttactcttctgttgaccaaaggagttcagaattattttggccctgtatatcaatttgcaaccaacaccatttattgagcccatttttagttttcttgttctgtagagttatgcattgtttcaggtcttaactgttgtcagggaagtaacgtgttcaacatgattgtaaacgaatacaattctgttgctaactgtgtaatgatgagaaggataattgaatagtctttgtgaagtattactgtctgaactgtacgcaaatgctacattcattctgtgttcatgtaaatatcattatacataaaaatgctgcattgcattcccgtcgtccgttctaaatcagaactgacgattgctctggtggctgaagctcctgaaagaaaaggaaaaggccgaaaagaagaaagagaaaaggagtgacaggaaagatcccaagcagtgtgagacgtccaaacactcaaagcacagccataagaagagaaagcttgaagatgtcatcaaagctgagcagggtcccaaaagagtacccaaagaatcagttgagcagttggagaagagtggactctcagaagagcatggagctccttcttttgtacatacgatacgggactctcctgagagctcacaggacagcggcaagagacgaaaggttgtcctgtccagtcctagccaacctaagaatggaaacattcttcgcttcaagattaaaagtagtcaagatccccaatcagctgttctggagaaaccaagggttcttgagcaaccattggtccaacaaatgggatcaggttcatccctgtctggcaagcaaaattcaagccatcataagatgaatgtgagatctacctctggtcagcggagggtcaatggtgactcccaagcagtacaaaaatgtttgattacagaatccccggcaaagaccatgcatagacttgtcccccagcctgcagctaaggacacacatcctgttgatccccagtcagctgttaaggtgccagttggaagatcgggcctacctctgaagttttcgggaagtgtggacccttcgcctgctagagttatgagaagatttgatcctccacctgttaagatgatgtcacagagagttcaccatccagcttccatggtgtcgcagaaagttgatcctccgttaccgaaggtattacataaggaaaccggatctgttgttcgcctaccagaagctgcccggcctactgttcttcaaaaacccaaggacttgccttctatcaagcagcaggagatcaggacctcttcctcaaaagaagagccctgcttctctggtaggaatgcagaagctgttcaagtgcaggatactaagctctcccggtcagatatgaagaaaatccgcaaagctgagaaaaaagataagaagttcagagatctgtttgttacctggaatccggtattgatagagaatgaaggttcagatcttggtgatgaagactggctgttcagcagtaaaaggaactccgatgctatcatggttcaaagcagagctactgatagttcagtgccgatccatccaatggtgcagcagaagccttctttacaacccagggcaacatttttgccggaccttaatatgtaccagctgccatatgtcgtaccattttaaacatctggcgaggtagatgagaattagatgagatgttgggagagagctgtgtggatgtgggagataatgggttccctgccgcagttttccagctttgttccatagtgtttctttgaggccaatagagttctggcagaacttataatgtaatattgattaattatttcgctcatgtatgtaagcagttgaactgcaaaatcttgtttct

SEQ ID NO: 5627 - DNA, 255 bp, Zea mays
  Clone ID: 700467204_FLI
caaaattcagttcacaacgaatttttgtaaaatcaaaatttctcctatatggaaagcgagaattgagccaaaatgtcgttttttcgtatggaccatgttgtataacataattttgactgcagacaacctacaaaagcgaggatggccttgcaatccaatttgttgtctttgcaacttatcacaagaaactatgcctcatttaggcaaagactgcccgtttttgtagaggtttggaacatgatcctatcttgggcc

SEQ ID NO: 5628 - DNA, 1609 bp, Zea mays
  Clone ID: 700467207_FLI
acgacccactggagccagcaaacaacaacgagtccctttcgcctcttgcccgttgcccctcggtttcgtcgccgctacccggcgatctccgcgacagcgacccggtgccgccgccgcagatctcgccgagaagacaggtatcggtgccgccgccagatcaactggacctgtaaaacgagggcctgcgctacctgtggagttcccgaggcgctgttctgccaggattcggcatctttggttgcccacatggccacttccacatctcagcatgcgctttcatccatcaaattgctgtccacaggctgcttgcatcccgataagagaaattgccgcgtgctttctgtttcagtagggcgtcgctgccccagtgcccgcaatttgggtctactttgtgcttcaaactctcaatcttcagtgattcagccggtccagctaccgaggagccctaaaagtggcgtagctccaaagaaatcaggtgaaagtgcactcattctgatacggcatggagaatcgttgtggaacgagaagaacctgttcactggatgtgtcgatgttcccctgacccctaagggcgttgacgaggcaattgaggcggggaaaaggatatgcaatatcccagtcgatgtaatatacacttcgtcgctgattcgggctcagatgaccgctatgcttgccatgatgcagcatcgccgaaagaaggttccaatcattttgcacaacgagagtgaacaagctcacatgtggagtcagatatacagtgaagagacaaagaagcagtccattcctgtcataacagcttggcaattgaatgaacggatgtatggtgagcttcaaggccttaacaaacaagaaaccgccgatcgatttggtaaagaacaagttcatgaatggcgtcgcagttatgatattcctcccccaaatggtgagagccttgagatgtgtgcagagagagcagttgcttatttcaaagaccaaattatacctaaacttgtggatggaaagcatgtaatgatcgcggcccatgggaattcacttcgttcgatcataatgcatttggacaagctgacttctcaagaggttatcagccttgagttgtctactggcattcctatgctgtatatatttaaggaaggtaaattcatcaggcgaggaagccccgctggaccttctgaagcaggtgtctatgcttataccaagaatttggctcagtacagacagaagcttgatggcatagttcagtagccatctgcaggcttttcgtttgctactcatccgtcgaacatgcatttggtcccagaaaacaaggggccaagctcctaccgtttcatcgacattcaactgccaagcagtccattcctgtcacaagtttgtagcggctcatttatctcttcagtaacctcccaccacgtggtagtaaaatatacggagtagatgctaattttaggtggtgagctgtagatacaaatggggatatactggatggcagttgtgttatctttccgctttccccattcacttagatctgagatgtttgtaatggtgcagtaataaacacttgtagtgaactgcatggaacgagacgatgttatcgaatgcttgttccccgtct

SEQ ID NO: 5629 - DNA, 1419 bp, Zea mays
  Clone ID: 700467256_FLI
ctgccttctataagagcttgacaaatgactgggaggagcatctggctgtgaagcacttctctgtggagggtcaactggagttcaaggctgttctctttgttcctaagagggccccctttgatctctttgacaccaagaagaagcaaaacaacatcaagctctatgtgcgcagggtgttcatcatggacaactgcgaagagctgatccctgagtggctgagcttcgttaagggtattgttgactctgaggaccttcccctcaatatctctcgtgagactcttcagcagaacaagatcctgaaggtgatcaggaagaaccttgtgaagaagtgtgttgagctcttctttgagattgctgagaacaaggaggactacaacaagttttacgaggctttctccaagaacctcaagcttggcatccacgaggactcgcagaacaggaccaagatcgccgagcttctgagataccactccaccaagagtggtgatgagctgaccagcctcaaggactacgtgaccaggatgaaggagggacagaatgacatatactatatcactggtgagagcaagaaggcagtggagaactcccccttccttgagaagctgaagaagaggggctatgaggttctgtacatggttgatgccattgacgagtatgctgttggtcagctcaaggagtttgagggcaagaagcttgtctctgccaccaaggagggtctgaagcttgatgagactgaggacgagaagaagaggaaggaggagctgaaggagaagtttgaggggctgtgcaaggtcatcaaggaggttctgggtgacaaagttgagaaggtggtggtgtctgatcgcgttgtggactcaccgtgctgccttgtgactggcgagtatggctggaccgccaacatggagaggatcatgaaggcacaggccctgagggactcgagcatggcgggctacatgtcgagcaaaaagacaatggagatcaacccagagaaccctatcatggatgagctccgcaagcgtgccgaggctgacaagaatgacaagtcagtcaaggatctcgtgatgctgctgttcgagactgctctcctgacctccggcttcagcctggatgaccccaacaccttcggcaaccggatccaccgcatgctcaaactcggtctgagcatcgatgaggacgagcctgttgaggcagaggctgagatgcctcagcttgaggacgacgctggtgaaagcaagatggaggaggtcgactaagtgtcgcatcgcatgcttgccgtttatcttatccctagctaagctacctgtgatagcttaattttcactattgttcgaggtttttggcacgttatcggttgtcctgctggccaggctataagtctggtttatctgttatgtttaccctttttaacagtttgtcgtt

SEQ ID NO: 5630 - DNA, 1025 bp, Zea mays
  Clone ID: 700467318_FLI
cttaccatttatttgttgaagatcctgtagagagacctgataatgccgctagagcagttagtatgaaaggccttgacctcattgctattgcattcaatgatgcttgtcacaagtttaagtctctggaacatatcgaccggaatgaattattggcactgttgtgtacccctgttgttcgcttgaaacttggtgtgagagtcagagagaactcttacccaaaatctccaaggaataatgtgcatagcaggattagaggacagatgtggcgtgatcgaggccaagcacccagcgcgagagggtttactggaaccagatcagtccatgaaaatccactagcgaacactacagcacatgaaacagcagtgcaataccacaaccatgtgcagccgacaacagttcggcaaacagccatccgcaatcaagtaacaaatactgcagtgcatcagaccgcgccttaccagaaccatactgctcgacaggtgtatcctacttggtcccagacagctgaaccctaccagaatcataatcagcaggtttacgctactgggtttcaaacagggccataccaaagccataatcaagtccatgcttatagagcagggttgccacctggaggaatatatgagatccacaatcaacaggtgtataatgcagggttccaaaccgacggtccgcaccagaatcagcagcggcgaaagggatacacatcaaaccatcagactaacaggctttctgcgacggcagcgaggtacgagcctgttcgtggacagtttaacaacggatcgacatgggactcaaggtcccaagcaccgggcagtgcagctctgcgaaggtagccgtcagcatctcaggaggatagtagtaacaggcaaatcggctggattttgactgctgggcagctcttccttgtgtaaaaaatttctagcacttctttacgggtggacaactcttccttatgtaaaaattgctgttagcagtcggttcgtagtatgtgtcaattaattttttaaggtgtgattgggttt

SEQ ID NO: 5631 - DNA, 787 bp, Zea mays
  Clone ID: 700467374_FLI
cttgcttgctaccacgcctcgcctcctcatctgctgccaccggcgtctctccttcccagctggggccctgagctgagagccgagccgggagcgaaactttgcgctgagattgagctgctcctctacttactactactagaaggcggcggcgtcggcgtcggcgtcggcaatggggtcggagacgttcgtggagatcctgctggccatcctgctgccgccggtcggcgtcttcctccgctacggcatcggggtaattaacactcagcttagcatctgattaattgatgcatcgtcgttctcatcagatgtgtgtaagtaaagtaactgcttgctcgcgatctactgtgtgcctgccctgcaggttgagttctggatctgcctgctgctcaccatcctgggctacatcccgggcatcatctacgccgtctacgtcctcgtcgcgtgacagcacaacatggtgtggtaggtatgacgatggtgaccgtccgcccgccggccgggagctggaatatatgagacttgagacccagtgcttctgatccatccattccatgcatgcagtgatgcaggcatacgtacgtttagcccatgctgtatgtttgtgtcttgctttagttagctttagctagctgctgcagcttagcttctctcagctcgtctaccgatccgttttgctgtgcccatggacatggatgggaagaaggaaccgtagcttgtatgcaagtgtgtactagagtccagagtttctactctgctactgattctgaatccagacatgttttctgag

SEQ ID NO: 5632 - DNA, 996 bp, Zea mays
  Clone ID: 700467376_FLI
agcatccatttaaaaggaatgagtgagatcaacgacagagtgaaggagcttcggtcaaaaggttgtggtgcagatagtgttagggccaaaaggaaatcaaccgccaatactggaaatggagtggttctaataaacgaggaagcggctgcgctgttacaggatgttatcaggaaatatttggtacctgctgaatgcttacctttccatgaaatagtctgcttcaagaatgttgacatcctccgatctgcgctgattggaaacccaagaagaatgattcaactcgatcttctgaggtcacagagccatctgaaatgctcttgttgcagtaggagtggtgctgccgtgtcaggatcgttgcacgacacatcaatcctgtgcagtctagcccaagagtatggtgacatgattaacctccatgactggtacacggcctttgaagggattataaagagcacaaactcaaaagccaaagggaaatcttgcagctctccctcgaagaagaagaagaaatcaaaccccacgcctctggagggtgatggcatgatccaagcaaggttctgcagcgccgttactgagatgcaggtcactggccttgttcggatgccgagcaagagaaggcccgatcttgtgcagagaatcgcgttcggtccttaacagctcggtgattacatgcatgctatacagacgaaacgttttgtgcacgctgacgataatcccaccatgtggtaaattgggcagccgtggaaggaaggtttggttacttgtatcggtgcttcgaagagagctgtgagatggagcagcagccgccgcttcagatatgcagtgctgatgttgcgtctgatggctaagctatgtcgttatttttttcctcttaagagcagtattaaacatgttttagctattgattcggctctctgtagagctgacatgggctcatgtagcccaaggggtacatttgagaaatttttatccttgaaacaaagggcatttcgaatt

SEQ ID NO: 5633 - DNA, 817 bp, Zea mays
  Clone ID: 700467394_FLI
gagaaagtgttcgccaatgtgggcaagactatcgggtacaaagttggaacaatgattgagatccccagggcagctctggtggctgatgagatagcggagcaggctgaattcttctccttcggaacgaacgacctgacgcagatgacctttgggtacagcagggatgatgtgggaaagttcattcccgtctatcttgctcagggcatcctccaacatgaccccttcgaggtcctggaccagaggggagtgggcgagctggtgaagtttgctacagagaggggccgcaaagctaggcctaacttgaaggtgggcatttgtggagaacacggtggagagccttcgtctgtggccttcttcgcgaaggctgggctggattacgtttcttgctcccctttcagggttccgattgctaggctagctgcagctcaggtgcttgtctgaggctgcctcctcgttggcaaccggattgcctgctgctggtggatgtggtgatcaacagtattattacagagccatgctatgtgaacattactagtagcagtgctcataaaagctacaatcccatctcccttttttttccagtcatgtaaaacttccaaactgctccatggttcaaaactctgttcttcaatacatcatcaattatcgattatatacgtggcaaggttttttctttgtttgcttttttcttttctttctggcatgtgtttttttggttttcttggtgtgtgtgtgaggtgtgcatgtcgctgttgaggcccttgctgcacagaccacctcaaactttaagcctcgaaaaagctggtactattttttt

SEQ ID NO: 5634 - DNA, 1501 bp, Zea mays
  Clone ID: 700467428_FLI
aagaagaagaatggcgttgctcggcgagtacagcagtcaggagctcctccagggtcagctccagctctggcaccagtccctgggcttcttcaagtccctcgcgctcgcggtcgccatggacctccgcatcgccgacgccatccaccgcctcggtggcgccgccacccttccccagatactcgcggaggccgggatcaagatcgacccgtgcaacaacaagctccgcgacctgcgccgcgtcatgcgcgcgctcaccgtgtcgggcatcttcaccgtcgtccagcgaccagcgtcgtcgtcagatggaggcggcaggcgtggcgcagaagcggaaggtccggtctacaagctgacggcggcctcccgcctcctcgtcgtcggagagaaggagagctcgacgacggcgacgacgaggcagctgcctcctcctccttctctgaccgtttatgtgcagctcttactcgaaacctgccgaggatccgcgttcagcagggccgtgcgcgagtggttccagttccagcagccgccgcaggatgatgggcagcaccagcagccggctggccgcctgtcgtccccgttcgccctggcgtgcggcgggcagacgatctgggagcgagccgagcgcgacgcccacgcgttcccgttcgacgacgccatggcctcggacaccgccttcctcatgccgatcgtgctgagggagtgcggcgacgaggtgttcggccgtggcctgacctccctcgtcgacgtcgccggcggcctcggcggggctgccgccaccatcgcggcggccttcccggacctcagctgcaccgtcctggacctcccgcatgtcgtcgcaaaggcagctgccggcaccaccgacagcaacgtccagtacgttgccggtgacatgtttcaatgcatcccaccggcggacgcggtgttgctcaagtggattcttcacgactggagcgacgacgagtgtgtgaggatactgaagaactgcaagcaagccatacccccacgagcggcgggagggaaggtgataatcatagacatggtggtggccggaccaggatcaggatccgcggacgatgagccgtcggagtcggacttgaggcacgtagagacgcagatcttgtttgacctcttgatgatgtgcgtcaacggagtggagcgagacgagcaggagtggaagaagatcttctccgaggctgggtttcaggactacaggattatgccgcttctgggcgttcgatccatcatcgagctctatcctaattaaaattagtatactgaattgaaagctaagctcgccactcgcgacaagcttgttgtggttgtggctgggcgtgtggtggtgatcgaacgtgtgtttgccatgctcagggatccatgcatgctatatgtactccctccgtttctttttatttgtcgctggatagttcaattttgtactatttagcgacaaataaaacgaaacggagggagtaataaaataacatccactacatgattgatt

SEQ ID NO: 5635 - DNA, 429 bp, Zea mays
  Clone ID: 700467466_FLI
caatattagtaacggccttcacgctccaggatggatcatcacattatctgaagggactgctgcttgtgttttgctacattgtcatctccttatgctttttcgttttgagacagcatggaaatggaagcaacgatgatcagctgggtgtagcaagcaagccatggaggatttagggcgcctgagctggcagtagtttctcaacaagtagcgtggactttggtttgcacgattttgcatggaacactggaggggagacccgtgaagtttgactaaagtatgtagactgcgggaagatgctgttcagctgatgtgtgaatgtaagtacatacaaagactatagatgaaaactgatgttgcgtgagagactatttgtgtgtgtttttcttgttctttccaccaagcaatggctagaattcggttgagctgttg

SEQ ID NO: 5636 - DNA, 961 bp, Zea mays
  Clone ID: 700467507_FLI
cgctcctcgagatcctgtcattggttatcttgaaagatacaaattacatcagcacgcttgcatcagggccttatggtctcatatttgcctcttttgttcccttctttcttgacattccaatcacatcacggttccgtatttttggtctgaatttcagtgacaaatcattcatttacttagctggttttcagcttcttttatcttcttggaagcgctcccttattcctggtatatttggtctggttgctggttctctctatcgtctaaatgtgctcggcatccgcaagatgaagcttccacaggttatttcatcattttttgcaagatatttcgccccttccccaggaagcacatctcgcccctccaggagtcttgttggaaacacaccgtcccatagaggccgtgctgttcagaatcagccatcaactggatttgcacctatcgtggagcctccagagtcctccgttgctatgctggtctcaatgggctttgatggcaataacgcaaggcaggcactcgtgagggctagaaatgacatcaacgtggcaacgaacatcctactggaagcacagtctcattgaactaacgcactgcaactttctggtggtaaattagagggaagaactggttatattccaagatgaacaaacaatatgagcacattggactacagatcggtagattagtgcctcatttcatctaccttgaactgcaggccgacagtttagtaaatcagcgtatacatttgcggcagttagttttatcgtgtcaatacttagatgccttacatacagagaatgtaatattccaatttcagcttgtaggatagatgatataagcattcatagtgtacaattcatccgatgttttacagctttagaacttgttccagcacgatatgtggatcgtgctgagttccttgatgttgcaaagaaaacgaggaaggacatcagggatcggt

SEQ ID NO: 5637 - DNA, 1782 bp, Zea mays
  Clone ID: 700467522_FLI
caccgaaatatccgcgtggcgtggactcgggcaccactctccattcctgcatcccattcccatctcttcttcgcctcctccgcctcgccggcgtcaccgtccggccccgcctcttccccccgctcgaagctcgatctctcctcccgttctccgcccacgcaatccctgccaccgccgaatgcggaacactcgcctttggtgaccgactgacctaccctgcttctgccgggttagttgagtgtccgcgcctaccggaccccgcgccgcgtccggatctcgaatgcgccgccgccgccgtcgcgcgatctagcggctgcgcgctgccccgcaggagggtagagctccaggggcccggtgtggtcaggcggcggatatggcaacggaggcgtctacctctgcggcgggcgggatctgggtggaggggatgtccgcggacaacatcaaggggctggtgctcgcgctctcctccagcttcttcatcggggccagcttcatcgtcaagaagaaggggcttaagaaggccggtgcgtccggcgttcgcgcaggtgttggtggttactcttacttgtatgaaccattatggtgggcaggaatgattacaatgattgttggagaagtggctaactttgcagcatatgcttttgctcctgctatcttggtcacaccacttggtgcacttagcatcataattagtgctgctcttgcagacattatgttgaaggaaaagctgcatatatttggtatacttgggtgtgttctttgtgttgtgggttcaacaactattgtacttcatgcccctcaggagcgcacaattgaatctgtagcagaagtgtgggatcttgctactgaaccagcctttctatcttatgctgccatcgttcttgctgcaacatttgtcctcatatactactttattccacgatatggtcagacacacatcatggtctatattggtgtttgttcccttgtaggatctctgtcggtcatgagtgtgaaagctcttggaatagccttgaaactgaccttttctggcatgaatcagctaatttatccacaaacatggttgttcaccattgttgttgttgcatgtatagtaacacagatgaactacctgaacaaggctcttgatactttcaacacagcagttgtatcaccgatatactatacaatgttcacgtcactaacaattttggctagcgtgataatgttcaaggactgggatcgtcaaaatccaactcaaattgtaacagagatgtgtggttttgttaccattctttcggggacgtttcttctccacaagacaaaagacatggttgatggcctcccgccaactctacctgtccggattcctaaacatgaggacgatggagctgaaggaatccctctcagatccgctgaaggcatcccgctcagatcaccgagggcaacggaatcgtttcgatcaacgctataatggttggtgatccttcttcaaaggccatggtcagccattctttcatttgataacacacctttgtagattgtattttaggattcccaaaaggtaaaggcaccgctccccatgtaatttttttgagacaccggtgtagagtattgggggagcttatgttatacatctcgaaatgcccagaatgggcttagatccagtttttgatacacaccagacaccacggtggcatacaagacccgttatcagcgacacagttactgttgtattcttttggatagaaaattagaagataggggaagaatctgaagaaggctcctcgaagaaacttcttt

SEQ ID NO: 5638 - DNA, 1320 bp, Zea mays
  Clone ID: 700467533_FLI
catcgccacctcgctgctcttctccgccttcgagtcctggctcgtcgcagagcacaacaagagaggctttgacccgcagtggctgtccataacattctccaaagccatcttccttgggaatggcttaattgccattgtgtctgggctattcgcgaaccttcttgctgagaacttgggttttggtcccgtggctccgtttgatgccgctgcatgctttctggcgattggcatggctgtcataatgtcctcatggagtgagaactatggagacccatctgatagtaaggacctgatggcccagttcaaggttgcagctaaggcaattgcttcagatgaaaagattgcattactgggagccatacaatcattgtttgagggctcgatgtacacatttgtcttcctatggactccagcattgagcccaaatgaagaagacattcctcatggttttatttttgctacattcatgctgtcatccatgttgggtagctccgttgcgtcacgtctattagcccgaaagctcaaggttgaaggttacatgcagattgtgttctcgatatcggctgtcacccttgtcctccctgttgtcaccaacatcctagtgcccacatcttctgtgaaaggaggcagcatatcgattggaggttctcttcagcttcttggtttctgcacctttgaggcctgtgttggtatattctggccatcaatcatgaagatgaggtctcagtacattcctgaggaagcaagaagcacaatcatgaatttcttccgcatcccgctcaacttatttgtttgtgtggtgctttacaatgtgaacgcattccctatcactgtcatgttcgggatgtgttctatcttcctcttcatggcagcaatcttgcagagacggctgatggttgtctcggatctacacaaatcatcaactaaagcacaagaaatgatcggggaagacgagccactaaatccttagacgtcgacagaaccatacgtgcaaatcagatacgaaggcggcatacacagagcaattcatttccacccgcgcaataagatggaagtcagaaccatgtagttgttttcgtttgtaattttgtttctatagtgtaagatttgacaaggctgttagtttgcacctcggatctgcttatatccacagggcaatcgatagttcagcaagtattgagctatacctatgtcccgagaagattagatgagttggcgtcttggcgatcgatgtgggcttttcccgttgttgttccttgcaatttattttcgaaaaaaaagaaacatgttcgctttaaggtttacgatacggtatatatt

SEQ ID NO: 5639 - DNA, 332 bp, Zea mays
  Clone ID: 700467714_FLI
gatcgaggcctgggatgagctgaacccggctggccccgcggctgggaaagacaaggccaagtagatgggagtccctgggggtgcattcacttccctgctgaagtgaaaagaaagtatgattgggtccagcctaggctcccccatagatatagctctttttgagagggaagagggattaattcagcagcaggttctttttataaattctttgttgttatgaagcaggcggtacttttgtagttgatgaaggggatttgtcgccactgtcatttacataattcggacaataatttatattgtgtaatcttgagaatcaaagcactgtttgtgtt

SEQ ID NO: 5640 - DNA, 1909 bp, Zea mays
  Clone ID: 700467776_FLI
ctctatgtcaaggttgagttgcgcccgtttggtcttcataacctaggcaacagttgctatgcaaatgctgttcttcagtgtttgatgtttactcgaccactcacaacatatcttttggaagggcttcactcaaaaaactgttctcaaaacggatggtgcttcatgtgtgaatttgaaaaactcattgtggagggcaaacggcgcaagattgccttgtcaccaactgggatactctctcatttgaatgacattggcagtagctttggtcctggtaaacaagaagatgctcatgaatttcttaggtatgcaattgatgctatgcaatctgtatgcacgaaggaagctagaaaaggaggtgttcttcggtcagcggaagaaacaactcttgtccaattgatatttgggggctatttgcgatctaagatcaaatgttcaaggtgccatgttagttctgaacaatgtgagcccatgttagatcttactgttgaaatagacggtgacattagttcgctcgatgaagcacttgtgcgctttacatccacagaagccttggatggagaaaacaaatatcactgcagcagatgcaaatcttatgaacgtgctaaaaagaagctgacaatagaagaagcgccgaatattctgactattgcactgaaaagatatcagtctggcaagtttggaaagatcagcaaagccatcagatttccagaaaccctcaacatagtttgctatatgaatccagatactgatgacatatcgccagtttacagcctctatgcagtggttgtccatcatgatgtcatgaatgctgccttctctggtcattatgtatgttatgttaaagatacacatggaaagtggttcaaggcagatgacagtcaggtgaaacctgtatctctggacaatgttatgtcaaagtgtgcttatatgctgctgtatgcaaggtgttcaccgagggcaccgagctctgttaggcaggctatttcggacccagcacgcccgaagaaggccaaacagaaggtggttccaggaggaacaacatggcgaggaggttctttcaacaggcaccaagatggtcagcggcatagcaaccacacggcagatgaccttacccatgcatttgacgaatataggaatgcaccatattcgccttcagattctccgagtcctagtgagagttcatccctctttagcaactctgatgcagggtcgcacagcactgtaagcaccgatagcagcgagagcacgaggaactcgaccagcaccgaggagtatgagtatgtgttcggagctgctgatcagatgtacccaggaggccccatgggaggagcacctgtggagagtgatcaaatgtacccaggaggccccatgggaggagcacctgtggagagtgactattctacgtattcccgatccaggtccagcttgaataccagctcatcaggccgggatgcatacagtgcggctagctctgccgaccacaagcatcaggtcgtcggttccggtgggcaggttgagggcgatgagagcacgtccttgttgtatactgacagaagtaatcagcagttgagcagtaagttaacagaccaatataggcagttagatgggagcggacatgaccctggagaaaccaggggcggtgtcttattgagaagaccatctagggacaggaccgctcaaacattttattgatgtgcagggtttgggctgtagagaaataatgtaatgtagcctgtaatattatctcgctgcattgtgtaaaaagagaagagagatgtcgtagtccataaaagttgaatccccaacttggtgatataatcccgaggaacctgtaacaaatgtcacgtattccacgggatcgacgtaggactgtaggagtagatcataagattaatgcaaaagttcattg

SEQ ID NO: 5641 - DNA, 2056 bp, Zea mays
  Clone ID: 700467803_FLI
cgggcattgccgtttgatgacaacattaacttccacaagactattgcagcagcaattgtggttggtgttgtccttcatgcagggaaccaccttgtatgtgattttccacggctcattagttcatcagaggtgaagtatgctccactgcgcaaatactttggggaaaataaaccaacatatctggatctggtaaaaggagtggagggcataacagggataatcatggttgtgtgcatgcttatcgcttttactctagcaacaaggtggttccgccgtagcctggtgaagcttccaaggccatttgacaaactaactggcttcaatgcattctggtactctcatcatttgttcatcattgtgtacatatcacttgttattcatggagagtgtctataccttatccacgactggtacaaaaggacgacatggatgtaccttgctgttcctgttggtctgtatgtaggggagaggactctgaggtttttcagatcgggcagttattctgtccggttattgaaggtggctatatatcctggtaatgttttgacattgcagatgtctaaacctcccacattccgttacaagagtgggcagtatatgtttgttcaatgccctgcagtttcaccttttgaatggcatcctttctcaattacttcagcacctggggatgactatctaagcattcatgttcgacaacttggtgactggacacgggagctcaaacgggtattctcagcagcttgtgagccacctgtgggtgggaaaagtggccttcttcgagcagacgaaacaaccaagaaagcgttaccaaaacttttgattgacggaccatatggttctcctgcacaagactacagcaagtatgacgttttactacttgtcggattaggtatcggtgccacaccttttattagcatactgaaagacctgctcaataacatcatcaaaatggaggaagaggaagaagcttcaagcgatctttacccaccaattggtcgcagcaaggcacatgttgatcttgacacccttatgaggattacctcaaaaccaaagagggtactgaagacaacaaatgcttacttttattgggtgacacgtgaacaagggtcttttgattggtttaaaggggtcatgaatgaaattgctgaactagatcagaggaatatcattgagatgcacaattatctcacaagtgtttacgaggaaggggatgctcggtcagcactcattacgatgctacaagctctcaaccatgccaagaatggtgttgatatagtttctggaactaaagtgcggacacattttgcaaggccaaattttaaaaaggtcttatctaagatagctaccaaacatccatatgctaagattggagtgttctactgcggggctccagttctggcacaggaactaagcaagctctgttatgaattcaatggcaagtctacaacaaaattcgaattccacaaggagcatttctgacatacaacaaggttaatgcagaatattggaacaagggggagaagatgtgatgtatgtaagtcacttgtgctttaacatgttgctttcttggcgatgagtttgaaagagcaagggattctgcacaaggtgttgtatcaccacagcttactccgcatttgtgatactactgtcccccagttacaactgcattatctattgcttgagatactaaaatacaataagatcgcatagaaaggaaaatgggggtcagcagcacatcacacaaggtttccatcgaaggttcaagagcacataccccaggtggagtagcaagggaatctctcccatggagtccacaaccataaattgtgattatataagtagcgtgatgtaggacacatacaatgaaggccaggatgtcacaaggctacctaactgtatatttgcatgcagctgagtggctgactgaggccacaagtttgatctaactttgtacttgtacacagggttgaaaaacaggaagaaggtacattttgtttttgtaagtagcgtaggttggtagtgactgggctcagattgggggccctcaagtttcatt

SEQ ID NO: 5642 - DNA, 1527 bp, Zea mays
  Clone ID: 700467903_FLI
attgatttgaggggaatggggattgagtggtaattgcttcaccctagcccctcttgactccacaatcccttccaatccacaaggagattattttatccaaattagccctttgagtttacaagaaggatttaatgtcatgaaagtacacatccttcaagatgggataccattggcgtgttcttcaaaaaaaaacttgactcttcgactctgtgtaggttttattttgatttcagcccaacctatattggatgtggtcttatttgtccgcatattgttaattgttctacacttcttggtgccataatatcgtggggtattctttggccatatatctccacaaaagctggggactggtatccagctgaccttggaagcaatgacttcaaaggactctatggatacaaggtttttatatctgtatctgtgatacttggggatggtctttataacctcatcaagatcatttatgctactatcaaggaaataatgaatgcacgggctaagcaaggaagactgccactagcccaagttcaggatggcgatgaaggttcaaatttatcagctgaggaaaagcatctgaatgagacattcataaaggacagtatccctccctggttggcaggatctggttacattggccttgcagcaatatcgattgcaaccgtcccaatgatctttccgcagatcaagtggtaccttgtcctctcggcatacgttgttgctcccctcctcgctttctgcaactcatatggcactggactaacggactggaatcttgcgtctacatatggaaagatcggcctcttcatttttgcatcatgggttggtcagaatggcggtgtgattgctggcttagcagcctgcggtgttatgatgtccatcgtgtccactgcagccgatctcatgcaggacttcaagaccggttacctcacactctcttcccctaggtccatgttcgtgtcgcagttgatcgggaccgcccttggttgtgtcattgctccactcaccttttggctctactggtcggctttcgatattggtaaccctgacggcgcattcaaagctccatatgctgtaatcttccgtgagatgtcaattcttggcgtggaagggttttctgcactgcctcagcactgcctagcgatctgctcgtttttcttcattgcatctctagtgatcaacctcctcagggacgtcaccccaaagaatgtctccagattcatcccaatcccgatggctatggccattcccttctacatcggtgcgtacttcgccatcgacatgtttgttgggacagttatccttttcgtctgggagagggtgaaccgcaaggagtgtgatgacttcgcaggtgcggttgcctctggcttgatctgtggtgatgggatctggactgttccttctgcgatactgtcaatccttaggattgacccgccaatttgcatgtacttcaagccatcccttagcagctaaagttgggacaagtgttatccattttctgtatatcaaaataggacctaattgtgt

SEQ ID NO: 5643 - DNA, 580 bp, Zea mays
  Clone ID: 700468053_FLI
gacaagagccgccgccgccgcgcaaagccacttcaacgccgtcactcctcggggcgcaacccatggtggccgcaaagaagacgaagaagtccacggacaacatcaacaacaagcttcagcttgtgatgaagagcggcaagtacacgctcggctacaagactgtcctcaggaccctcaggaattctaagtcaaagctagtgatcattgctaacaactgtcctccgcttcggaagtctgaaattgagtactatgctatgctggctaaggtgacagtccaccacttccatggaaacaatgttgaccttggaacagcctgtggaaaatacttccgtgtctgctgcctcagcattatcgatcctggtgattctgatatcatcaagactacaccgggcgagcagtaaggatgccacaacagctgtactcggcatctgaattcttagtagctgatgattttgatgtacttgtcttttatcgtgttccgtcagaatttagagttcttggcaacattgtgtggattgaacatttcgttccagacatttgctaattgttgaatggatctcttgccggatgtgctcggatt

SEQ ID NO: 5644 - DNA, 385 bp, Zea mays
  Clone ID: 700468059_FLI
gtcctcgtccacgccgcgctgcacaaggcggaggacaacgccgccgacgaggctgaccgctggtacgcgccggtgtcacagcagccgtcgcactgaggatctgaatgtggccgttctgcgccttggctgtgatcctattctgtactccctgtttccgagttcctccagctgcgcgagctgggccatccccatctcatctgcgatgaaaaacctgtccctgttggttgtgattcacctgctgccggttccatgggaagttttggatccagcgacgacgcagggctgttaaacttgttctccacgcccatttctgtggtacgtttaaagcgtctcgttcacgtgtatcaaatccggactgaagtctagtgtacattttgagttggag

SEQ ID NO: 5645 - DNA, 705 bp, Zea mays
  Clone ID: 700468110_FLI
caattgttcatcatgaaacattggaggaaggttctttaatgaaggaacattgctccaattgttcatcatgaaacattcttcagcaatgttcagaatgactacaatcaaacaggattagtgcctttggagggatgttctgccagtgaggcttcacagcttctcagtgatcgctggactgctgcaatcaacatgtacaatgaccaaacaattgacccctcagagaaaccggtaatgtattctggatctagcagctcatcatggggtcacctgaagcttcctcatcagatgaacttcctcgaggagttgcgccgtgcagtggacgctcatacagaatttgcgtcgcctgtcgtcacctggaactaatcgaagctgttcgccaggtctatgtatgatgtatcccatacacggatgatgtgccaaaaggctttcgtctgacctgcagctgcttctggaatctgcatctgtacaattgtaccattgttacccctggccttgtagctgcaaagcagtttgttgtaacaattaaatgaggcgccggatcctcacgccatcgaaagtttgaaacagcttggttgttgtatggtagttccaagacttggtgattataatgtgcgcattttctcgacctggagttttagaatatgtagaaggtaatgcttattgaaaacctcagcttttaacttcaacggtatttctcgctgcgcc

SEQ ID NO: 5646 - DNA, 1035 bp, Zea mays
  Clone ID: 700468131_FLI
gccgctgggagagcagacaacactgcaacggggtgcgcgcccgcccgtgccgttctccgtcgtcaccgttcgcccgctgccgatccatggggtgggcgctggctctgcacggcggcgccggggacgtgccgcgcacgctgccgcccgagagcagggagccgcgcctcgccacactccgccgctgcctcgacatcggcaccgccgcgctccgggagggccgcaccgcgctcgacgttgtcgagctcgtcgtgagggagctggaggactgcccgcacttcaacgccggccggggctccgtgctcacctccgccggcaccgtcgagatggaggcctgcgtcatggagggagccaccctgcactgcggcgcggtctccggactctccaccgtcgccaacgccgtctccctcgccagactcgtcatggagaagacgccgcacatctacctcgccttcgatggcgccgaggccttcgccagggaacagggggtggagactaaggatccaagccactttatcacggacaacaatatcgagcgtctgaggcaggccaaagaggccaacagggtgcagatcgactacacccagccagcagcaggccaaagccaaaaggcccaggccgtggtggacgacaactgccagacgggcacggtagggtgcgtggccgtggacgcggcgggcaacctcgcgacggcgacgtccacgggcgggctggtgaacaagatgcccggcaggatcggcgacacgcctctggtgggcgccggaacgtacgccaacgcgctgtgcgcggtgtccgccacgggcaagggcgaggagatcatccgccgcacggtggcgcgcgacgtcgcggcgctgatggagcgcggggacgcgctcccgctgcgcgacgccgcggcgcgcgtcgtggcgggggcggcccgcggcgccgtggggctggtggccgtgtcgcgccagggggaggtctgtatggcgcacaacaccaccgccatgttcagggcgtgcgccaccgaggccggccacaccgaagtcggcatctgga

SEQ ID NO: 5647 - DNA, 2527 bp, Zea mays
  Clone ID: 700468168_FLI
gagtaaactaaaagatcatatttcttccatttctgaagaaaaacgtcaaatgcagttaaatacttctgctgtacaggaggagttggagaaaacaaacgaggaactggcaatcaatttcaggaaccttgaaagtgccaacaccaccattaattcactacaagatgcactatcacaggctagatcaaatatttttattcttgctgctgaaaagaatgaagctgaagctaaatatgaaacagaaataaatgctcttaatgctgagctaaccaaatgtttggaggagttggataaaactcatgggcacttacaaagtcattcaacagaatatcatggttaccttgagaagcttggcatgtttatgatggatgatagtctcttgtctctgatagctgaagaatatggaaagacattcaacagcttgagagatatgtgtcttatagtcaagagtatgcatgagcagctttctgtgaagagttttcagaatgattcaattgtggaggattcagaactctcatcacttttatctcttccggactatgagagctttgttagagaaagattggtcaagaacataaatagaaaagggaatattgatgacacttcatccttctctactattgttgaacagttgagcaaccaaactgaatacctttctagttttttaaaagatttgtcaacctacatgaatagcaatattattgtggtgcttcgttctctgcaactagtgagcaacacctttgcccatactctagaagagcatgacatgttgaaggttgaattggggaacaaggatgctcataacagagctcaagaatctgaagtgctttctctacaaaaagatctgagagcaatgtcatcaaaatgtatttattgcgtccaacaaattgaaattgtttttgacgatatggttgatcttggatatgcaatagacttggctacaggcagctcaagcatagggtctgaactagaggtaactgtgtctgatctgaagaatgaggataccagtgattatagtaaggtggctgatactttgcttgctacaattgacacacttaagtccaagtctgaaaaattatctaccattaaggggcttgtgataacttcattggatgacttcaaaatgaagctgaaacaagctgaagcagctgctgaaactgcttcacatgagcatcagttgtctgttgaaagggtatgcatgctggagaaagaactcaaaatattacaggatgagtgcaacaaaatggaactaaatattcaagagtataaggaaagggagggtgcattgaaggcaagggagttagagttgctatcagttgagcacactcaaatttcagcagacagaggtttaactgacaatgcaatttcaaaagatcaaacggaagctcttgttgagaagataagtaagttaaatatgctgtcaggcgagtcaaatgtgcagagggaagaggctacaagtccgcttgacaaactttttgttgtcattgatgaattcagtgcacttcaacacgaggttgagaccttaagatatgaaaatgaagatttacagttaaatattgaatcctatacccgtgaaattgaacagctaagagaggtctccagaaatagtgatctaactaatagggagttggaatccaaaggaagtgagcttcttgaggtagctgttagtatggagcgaatgattcagcggttaggatatcttggaggaaaagatgtactagaagataacaaacctgctagcacacaagctctcttatcgaagctggaaaagctaataatagcttcaagtactgaatctgggaattctaaatccataatacaggagctgggagcaaagctgcagtcaagggaaaaggcagttgatgagctatcaacaaaagtaaagatgctcgaggatttgtgccatgcacaactttctcagccagaacctagtaaagacagatcatttgaagcatcttcctcaacaattgggtcagatatgtctgatattgaagatgcgggaccagtgggcaagacaacatcagtttcatctgtttctacagctgcacatgctagaacaatgcggaaggggtcagcggatcatcttgttgtcaacattggttcagagtcagaacgattgattgctgcacaagattcagatgacaaggggcgtataaaatcgctccatacatctggcttcattccagctcagggaaagcacatcgctgatagggtcgatgccttctgggtctcggggagccaaattctgatgaaccggccacgagcaaggctagggcttatgttgtactggctggctgtgcacctatggttgatgggcagcatcttgtgacaccgcttctcaataccgagacccatctcataattgtacaatagcacgtattagcagtttcttcttccattcatacaatacatggtagatgttagaaataccatttttttcattgtcttcctcctgctgagatttgcacttgagcagtatgtgttgaatttttgcacacaagatgtaacgcgcagaaaaaataacgttgtc

SEQ ID NO: 5648 - DNA, 1446 bp, Zea mays
  Clone ID: 700468172_FLI
ggaggggatggaggaggccaacaggacggcagtggagagctgccaccgggtgctggcgctcctctccaacccgcacggccagctcgtccccagcccgagcccgatccttggcctccagctgttcccgaggtaccaccagtttgagggctcgtcgtctaaggatcctgtcaggatccctacccagttccccaagaggttgctgctagagaagccgactgccggtatggaggggtcgacgtcgcagtcccctccgatcgtccagatggtccagccggtgtccgttgcgccccccgcagggacgcccaccccggcattgccccccgctcaccttcatttcatccagcagcagcaaagctaccagaggtttcagctcatgcagcagatgaagatccagagcgagatgatgaagaggagcaatcttggtgatcagggtggtagcttaagtggcggcggcggcggcggtcgtaagggtgtgaatctcaagtttgacagctctaattgcacggcgtcatcgtctcgctcgttcctttcgtctctgagcatggaagggagtcttgcgagtttggatggaagccggaccagcaggccgttccagctacttagtggctctcagacagctagcacgccggagctgggcctggtgcaaaggagaaggtgcgctggcagggaggatgggactggtcggtgtgcaaccgggagccggtgccattgttcaaagaaaaggaagctaaggataaggaggtccatcaaagtccctgcaataagcaacaaggttgcagacatcccagctgatgaattctcatggaggaagtatgggcagaagccaattaagggatccccacatcctaggggttattacaagtgtagcagtgtgagaggctgccccgcgaggaagcatgtcgagaggtgcgtggacgacccctcgatgctgattgttacctatgaaggtgaccacaaccacaaccgagttctagcccagccagcctgatctttcaggctatcaattcaagatcgcttctacagtcaccctccctccctccctagagaagggatgacaacgacgacagtagcaataacaagagcctagtgcctgtacatatgttctgcttctaacagttggaggagagagtcagttagctagctctttcagaaaaatcaatggtgacaggggggaaacttgtcatgtcgatggagaaagggggaggagggttcctcatcaaatactctagttttgtagttttggtttctcttttgtgttcgtcctgtgctagggcccatcttgtggttgcagtgtgacattgagccgcagttgtatgtctggtaatggtgttaggggattggatcgagaagaagagcacaaggcaggaaaagtgcctgtaaaagtggctacacctaggaacagaatgtacaatcgtcttcagtccagtggtacaatcttgttgacgc

SEQ ID NO: 5649 - DNA, 3605 bp, Zea mays
  Clone ID: 700468220_FLI
gtctgctgcctgctctagtggtgccggacctggggtggagcggagatccacaagggcttggattgctttcgttgtcttgctggctttgaggtggagatgacactaagttgaaatttttatcacacgaggaagcaagaacaggaaaaaaaatcacatttcagtgttgcactctgtggagggttcattgttggtccaccaaactactgcagtgctggagggtttttgttgaagtgctcttcatgttcaccatttctaaattgtcataggctcatagcattgtagctgatcagtcttcaagatcttcctatgagtacatagaaaaatcatcatcgtatctgtgttaagtatgccaccatggtggggaaaatcttcatccaaagaagtgaaaaagtctgccaaagaaaacctcatcgacacatttcagcgtctcataagttcaaatgagcaaaagggaagcagaaaatcacgaagtagtcgtagacatggtaaagacacagctggtgacaaaggttgctggtccactgctcaatcccgctcaacatccccttcaaaagaggtctctcgatgtcagagctttgcagcagatagaccacatgcacagccacttcctcttcccaaatcacgtgctaaggtgacacgtacttcttctgatattaccaactcaaagtccactttggaaaagcatggcaaaggacaactgcttccactccctccaattcagcctaaaaaaagacctgaagctactgaacctgttactgaagtagctactgcttcggtctccagcaactgttctattgacagtgatgatcctggtgattctcagcttcagagtcctgtgggaaatgaggctgaaaatgcgactagaattactgcaacaagtagttcaagtgttgtgcgcaaagaatgttctagtgctattaccagaaagaacacaaaggaagttgcaaagccaaacagtgctattctcagtaaccaaattctgtcaacatctccaagaggtacctttgctgatggttatcaatccaatttacaaagcccccgacagattgccctggagagtgctccgaatagtttgatgtcaagtccttctcgaagcccaagaaatatatgtcctgttcagattccaacttcagctttttgggcaataaaacctcatactgatgtaactttccttgggtctggtcagtgctccagtccaggttctggtcagacatctgggcataattcagtgggaggtgatatgctaggcccaatcttttggcagcctagccgaggtagtccagagtgttcaccaattccaagcccaagaatgacgagtcctggtccaagttctcgggtgcatagtggaagtgtctctcctttgcatccaagagctggtggggtcactcctgaatccccaacaaatcgacatgctgaagggaacaagaagcaaacccatagattgccgcttccgccattaagcattgctaatagttctacctttttgccaaacagctctaacccaactagtcctatatctcgtagtcctggtagaacagagaatccaccgagtcctggttcacggtggaagaagggaaaattgattggccgtgggacatttggccatgtatatgttggttttaacagtgacagaggtgaaatgtgtgcgatgaaggaggttacccttttctcagatgatcctaaatcaaaagaaagtgcaaaacagctctgccaggaaatatcacttctgagccgactgcagcacccaaacattgtgcgatactatggatctgaaactgttgatgataagctttacatatacctggagtatgtttctggtggatctatacataagcttctccaagagtatggacagtttggtgaacaggccatttgcagttatactaagcaaatacttttgggcctagcttatttgcatgcaaagaatacagtacacagagacatcaaaggcgcaaacatattggtagaccctaatggccgcgtgaagctcgctgactttgggatggcaaaacatatcaatgggcagcagtgccctttctcatttaagggtagcccgtactggatggctcctgaggttataaaaaatgctagcggatgtaaccttgcagttgatatatggagtttaggatgcacagtcctagagatggctacttcaaaaccaccatggagccaatatgaagggattgccgcaatgtttaagataggaaacagtaaggagcttccaccaataccggatcacctctcagaagaggggaaagacttcataagacagtgcttgcaacgtgatccatccagccgtccaacagcagtggatcttctgcagcatccattcgtacaaaatgcaccgccacttgaaaaatcatctgcctctcatccactggaacagttgacggctatatcatgcagaacaaattcgaaggtggttgagcatgccagaaatatgtcctcgcttggtttggaaggccaatcaattttgcagagaagagctgccaaattttctttgccaaatagtgatatccatatacggagtaatatatcttgtcctgtatctccatgtggaagtcctcttctaagatcaagatctccacagcatcaaaatggtagaatgtcaccttctccaatttgcagccccaggactacttcgggtgcttcaactcctctgactggtggtagtggagctgttcctttaaaccatgtgaggcaaccagcttacagaaatgagggcttcacggtcacatcaagaggttttgatgaccacatgcctagccggcctgttgatccagtacatggacgttttattcgagtgcagcaattttccgtgggtcggcaggagagggtagtctctgaagttgacattctgagctctcaatatggaaagatgagacatgcaaatgtgtgggatccgcatgataggccattaccttctgagcgttcctctcaacagtgctttgggaatcatgcgaagctaaaaccttcactggacttgagatctggtcctcggcaccctgggcgcaatcatggccattgattctgtagcaaaagttaatggataagctttcagtcgtgtctatgtgatagctagtggtcctaagctggttcactgaaacctttaattgtatcatagtagaagagatgttcattaattatttcagatgctgacagttggcagtggataaagattctcaaatgtcaatctcatattcccattactctaaagaagatgagacatgccctatcaggaaggggatgttgtatactcaaggaccctaaacagtgactctgaacctgtatactcttactctcgtatctacaacaatttagttttcgttttcttctatgggtttggaggccattgtacagaagggaactctcaacaagaaatccagattacatggcacaggcgaaagcaagtgagccgttcaccaatctttccttttttttttcgttttaatcttatataacagatacacatatgccgactgctcactgtaaagtgttgatcgaactgtggttgtaataccggttcgatccattaaacgtatctgttactctgaatatcatgtgaagagtctaatcgttaatcaaaactggtccagttctaaaac

SEQ ID NO: 5650 - DNA, 523 bp, Zea mays
  Clone ID: 700468226_FLI
gtgagatcaagattgacgagacagagattcaggcagcgaagtggatggcgctggaggagttcgtgaagcagcccttcatccaggaagaccacatgttccagaagatcatggacatctgcatccagcgcctccgcaagtgctactgtgggctgacgccgcaccacgtcgtctccaagttcgacgacagaacgtccacgctctactacaatgtcgccgagcccgaggacgtgaactgcagcgccgcctgatgtaatatgatgtgagggggagggggagccaccccagcatctactagtctaatttttgctgcgcagaagtttcatgatgcagcagtgttagtcgtgcgattactgagagtgaaatactagtggcagactgcgcgaggcaatagagttgccgagcctgtacatatacgtgtagggcatatgcataaccagagagctgtatatcccggggcggatccccgggcaggaggaaaattttcattgccgccgtaaattacaatttaactttagctcgccct

SEQ ID NO: 5651 - DNA, 3547 bp, Zea mays
  Clone ID: 700468241_FLI
caaccagtgaatgctggtcaagatttggcgtgggggatgcacgctcaagattctagtagtacaaacccgttcctggatcctgcctacttgatgagccacactcaaatttattcatcttccagtatgagtagccaaccatgtttccctgaagaagaggatttcctttcagagcttgtaatacaacatgacaatatgggagtaactgctgatgccctttgggaacctgcaactccacctgatgatgcgccattaccatcagaaattatgactgaagatgatttcagatccttctgccaagaatatcatgagatagatttttcatctgtcactaactgttctcacagtgaaccagcctcagattctaacaaaattccaaatgcttttctgatcagagagtcagattttccatgttataactctgccttgccagtgaagttagatcaggaagcctgtattcattctaagttctgttctgagtgtgtcgaatattcatgtgctgtggaaagacaaggcactacatcaatggttgtttctggtaaagaagatcgcgtggacaaggacgagacaccaggagtagatttccatttaaattttctcgagttttccaatgataacagaagtcctgaattaaatatgctctccgttccagtggatttacggcaggaactgcatggcttgcctgaagttgattctcgtgatagttcccctttgctgcataaggagaagactagtgaagaatgctgcttttctttaagcaacaacgttgttgaagtgaaacaagagctggaaatccgtgctgaccttgttccacattcttctattaatgaaaaagtagatggattagatgaggctgtaccggtggaaccagaggcccatgcctgtgccttggatgaatatgacaaccaagatgtcccacacatttcaactagtgagaagaatgaaacccttactttgggcaaacctgttttagtccaggggccagaagtttgtgcctttggtggatttgaatgtgatcctccaatcattccatcaccttcagttgatgagactaaggacaatctagaagtcagaatgaatatgatcctccaatcattccatcattctttgaggacttcttttcaagcagaacagaagtcagaatgctacacctcaggtgaacatgattctcaaaccgttccatttcctttgcatgatgagaatatcaatgaactggatgatcctcctttgagcaatgctgacgaactggaccgggaatcaaaagcttgtgttccacatgaatgtgatgctcaaatcgctccatgttcaactgatgaggatatacatgaattggatcaccctcctttgagcagtcccgctttagtggatcttgaatcagaagaccatgtctcggatgaccgtgattccgaagtcaccccatgtttggttaaagataagattgatgaatctgtagatgctcaaccaaacctgcttcctggggagctagagcaggaaactcatgcaccccctgaattagactttcgagttgctccacaatcagcgaaagaatctgattgctcaactgaatttgattcccaggccgcaccatgttcttcaaatataccagtactagctaacacaacagtgtcgacttgtatttctgccatgcctagcagtgaggaaacgtatcagttgtctcctgttccaccacctactgtacaatttcaaaatgattcctacaaagatcctcaagctctactcgctgattcctacaaagatcctcaagcgccaccccctctccctcctctccagtggaggcttggaaagcctcggctaggacttctgagtagaaaaggctgtatgactgaacctgcaagggtaatagatcctgttttgcagatatcaagccaagagatggatattaggccaggtttgcttgatccaacggatagatctatagaaccagtatcctgtcaagaaatcaaagaagatagatgtgagagttctttgatagatcataatgatcaaaatgtggattttgatagattatcgaccagggttgcagtaactgatgttgcaaggactgaacacaggctatccttagagacttcagaggacattaagcaacaggggcatatttcttcatcggcaacaggagttggggaacacctggatgctgggttcacatcaacaatggcagatgaggaacatctggatgattctgggatgacacatggaacagctctatacttatcagaccctctgtttccattacctacatatgaactgcaggaccctcaaccagatactcgagaaaatagcgagcatcccagtcaaacacatggagctgcatctggggatgataagtcaatggatgctgttggcagcatggaaagcaccctaacaaaaggacatgtttctggaaataggtgctaccagcaacctcagcatggtgaatcgtcctcagagacttcagaccataaagagcatattacaaatgcatcagaggatggtgttaagcatcagtcaggtacaagtgaggcaccttcagacacagcaaagcattctgcaccaggcacgctgttgaaagggaatgtccaagagagtcaaattttacaggaacataatgtggggagttccgaggacgatcaaccaggaggcctgttgtacagcttagaaccagtggcacctcaaggggaaaacaaaaaccaggttaacaacccaggcctgttactggaatggcctggagatacaagtgagttggtcactggccttgaaaaaagttgctatgcgcatgctgagcagccacctgtgatgggatggactgttggacctcagatgcttcatcctaaatatggtattttagaagaagagagccaatttgagcctaatatcgccgacaatcatttaatcaggaagcctatttcgataaaaaacatcccaaggaatccactggttgatgctgttgctgctcatgatagaagctcgatgagaaaggtttcagagcttgcaccaccgactgacaagccgaagcctaacgagagaaacatgttgctagaacagataagaaacaagaccttcagcttgaaacctgttgctccagctcagcaaacagcaatgagatcccctgctagaaccagtactagaaacttgaaggttgccgctatcatagaaaaggcaaatgccatacgacaggcagtgggaagtgacgatgaagacgacgcagatagttggagtgatacataaatcccccaccgttttccctaccctcttggtgcttctttccatggctgaaaggtaccgattcatcaagagcattggggacaggttggggatgcacaaccatgtcatcgtttttgttagtaatataatgctagtcttgtgtatagtatacgcccataatccttttcattttttgtatgtgtattctttcgaccgattgtttgtatacctgcctctctctcccacagcagcaaaggctgttgcggttggcatgatcctaggatagcatgcatggtctatgtaaattaaacagtagtagttaagtaaagaattgttccatcttttctgg

SEQ ID NO: 5652 - DNA, 3467 bp, Zea mays
  Clone ID: 700468253_FLI
atcgccttgcttccaggttttctccaaccatgtccaccaacacactgatctagtactaggactagtactagatcgatcctgcctgcctgcctgcttgtaacagcaacagcagcagaagtggcgcactgtgctttgcggtggcggaggctgcgagagaggaggaacttgcaagccgacttccatggctgccgccttctccgccgctatcctcttccacctgctgctgctcctcttctcgccgtccgctgcgcagcctggtttcattagcttggactgcgggggagctcgtgatcacacggatgccattgggatccagtggacctctgatgccagcttcgtctctggcggccaggccgcgcagctgctggtccagaatggcctgcagcagacccagcagcagctgaccaccgtgcgctacttccccgcggacaacaggaagcactgctacaccatgaacgtcaggaacaggacgcgctaccttgtcagggccactttcctctacggcaacttcgataacagcaacgtctacccgaagttcgatatctccctcggagcgtctccctggtccaccatcgtcgtcgacgacgccaccacccccgtcgttgaggaagccatcatcttggctgctgctcccacgctcagtgtatgtctctccaatgccagcacgggacagcccttcatctctactctggagcttcgacagtttaacggttcgctctactacaccactgacgagacacgcttctttcttggactgtctgcgaggataaattttggcgcaggaagcaatgattcagtgagatatcctgatgatccatttgatagaatctgggaatctgattctgtgaggagagcaaattaccttgttgatgttgctccagggactgaaagaatatcaactacaaaacccatatttgtcggtaccaacgaagaaccacctgaaaaggtcatgcaaacagcagtagttggccaggatgggtcattgaactaccgccttgatttggaaggtttcccagcaaatgcttggggagtctcgtattttgcagaaattgaagatttggcaccaaatgaaacgaggaaatttaagttagaggtccctggcatgccagcactcagtaaaccaactgttgatgtggaggagaatgctcaagggaaataccgtttgtatgaaccaggctacacgaatttgtcacttccgtttgttttctcctttgggttcaggaagacgaatgattcttcaaaggggcctattttgaatgccctggagatttacaaatatgtccaaattactatgggatcacaggatgcaaatatcatggccagcatggtatcacgatatccacaggaaggttgggcacaagagggtggtgatccgtgcttaccagcatcatggtcctgggtgcaatgcagttcagaaacttctccaaggatattctcaatcacattgtctgggaagaacattaccggaagtatcccggtggaactgacaaagctatcagggttggttgagctaaggcttgatggtaattcattttctggccaaattcctgatttcagagaatgtgggaatttgcagtatatgtgagtttccagttattttgataatattttattcttaaatgattctactaatatactgtgctttgattctgaaatgattctactaatatatggtgcatttattcattctagtcaccttgagaacaatcagttaactggtgaattgccatcttctttgggtgacctacctaacctgaaagagttgtaagttaaacatccacgtgtacaccttgtcttaatctccacattttggaggccatagtataatattccttcaatttatttttcttcctgactttttttatttgtattcatttctttttttttctgctcaagaaaccaaaaggcaaattgatgtcagtgatttaggctttttcatatgattacatctatgtgaggatctttatggaaaaaagacctctcttattatgaatgaaaaaatttgcaggtatgttcaaaataacaagctgtctgggcaggttccaaaagcacttttcaagagaagcattattttgaacttctcaggtaacagtggccttcacatagtaagcaatggcattagccacaccataattgttatatgtctggtgattggagccgttgtcttactgggtgttgctattgggtgctatttcattacatgtaggagaaagaagaaatctcatgaagacactgttgtcattgcagcagcaccagctaaaaaacttggttcatattttagtgaagtggctacagaatcagcacacagattttctttatctgaaattgaaaatgctactggcaaatttgagagaagaattgggtctggaggctttggcatagtatactatggaaagttggctgatgggagagagattgcagtcaaacttctcacgaatgactcgtatcagggaatcagagaattcttgaatgaggtgacattgctttccagaatacatcatagacacctggttacattccttggttacagtcagcaagatggcaaaaacatactagtgtatgagttcatgcataatgggacactaaaagagcaccttcgtggagctgataatgaaaagataactagctggctgaagcgtcttgagattgcagaagattctgcgaaaggtatagagtatctccacacgggatgctccccaacaatcatccatagagacctgaagagcagtaacattctcctagacaagaacatgagagcaaaagtggcagacttcggtctttcgaaacctgcagtggatgggtctcatgtgtcaagtatagttcgagggacagttggatacctggacccagagtactacatctcgcagcagctgacggagaagagcgacatctacagcttcggcgtgattttgctggagctcatctctgggcatgaacccatctcgaatgacaactttgggctcaactgccggaacattgttgcgtgggtaagaaagaagagtattcctgttggttctgctgaagcaaaagcgttaaataaataaataaataaatgcaggcccgatcgcacatcgagagcgggaacatccacgccatcattgatgagtcgttggacagaggctgctatgacctgcagtcggtgtggaagatcgcggaggtggccataatgtgtgtgaagcccaagggcgcccagaggcctcccatctcggaagtgctcaaggagatccaggacgccattgccatggagcgggtgctcgtgtccaattgcagcaacaggatgggttcaggtagcgtggagcagaatggaggagcatctttcgacgagctgctcatgcagccgggtctcagatgagatgagaacaacctactcgtaccttgagtccattgtatgtagtaattaatgtgtttactacattttttttgagaaacaaattaagtaatgctagcaaaggaaccagtatattatt

SEQ ID NO: 5653 - DNA, 1541 bp, Zea mays
  Clone ID: 700468256_FLI
atgcagcagcaccctgggatttgtggatttgtccactaaccgactcacaggcgatctgcccagctgtctgaacggtaatttgaataacaaggtcgttaagtttgatgggaattgctttagagttgaccctgcccaccagcatgaagataaatattgccaacaatctcataatgggagaggatcaaaaaaggatgttggacttgtagtcactgttgttggcatattgtttgttattcttgtgctttctctgttgttaatggcttccaacaaaagaagctgtcagaaagttctggccgaacaacagatccagcaaaagcatacacaagataatttgttgtcaggaatgtcgtctgaactgctggtgaatgcaaggtgcatatctcaagctgtcaagttaggaacacaaatacaaccgtcatatcacatattttctttagaagaactcaaggaagcaacaaagagctttgaaaggtcagcatttttaggcgagggagcaattggaaagctgtacaagggaaggttagagaatgcgaccctgattgccataagatgtttgccattgcaccagcgatattcaattaggaatctaaagcttcgtttagatctccttgcaaagcttcgtcatccaaatttggtttgcttattggggcactgcattgatagtgcggttgatgaatcaactgtgaagagggttttccttgtgtatgaatatgtgcctggtggaactctttcttcttatctttctgcctgtagtccagacaagactctgaaatggtgtgataggctgcaagtgctgattgccattgctaaggctgttcatttcctacatacaggaataattcctggttccttatccaatcggctaaaatcttccagtattttggttgatgaacaccatacggcaaagttgagtgactatggattatctataatcacagaggagatatacagacatgagttactgtgttcaggtaataggacaaaaggaaaaatacttgcaaaatgatgctacagaaatggaaaatttggaggatgatgtatgctcttttggttatattctactggaagtacttatgggcccaaaattaaatgagaaaggtggccctttcattttgaaagatctggttgtgtcaatgtctactttggaagagcgcgatcaagttgtggatcctgtcatcattggcacttgttcacaggattcgttatccatcgtggtttcaattatgataaaatgcctgtccatcgaatgctcggcccgaccttccatggaagaagttctctggaacctgcaatatgctgcccaggtccagacaatggcggacagcgaccaacgatcagaagtttcctcacaagcttgttagcatggaaactggaaatagctcgaaactgtaatctagatcggatcaaagatgataggaagcaagaatcatgtttatatgatcttgatttgagaacaggggatgaccggatgagtgagctcggctaactgttgcttcatggctatcctgaatttgatctctccattgcaactgtttgctgct

SEQ ID NO: 5654 - DNA, 1517 bp, Zea mays
  Clone ID: 700468260_FLI
taaaccgtgaatggccatcgaggtccaaaaatccatctggattctggagagaggagaccccaaaatcgcagcgcgcgaaaacgcaggagcaacccgcccactcgccaccaccgcccgcgcgcacggcggcgaccgatggccccgctcgtgccgatgtcgcagccatgggtggagaaataccggccgaggcaggtcaaggatgtggctcaccaggaggaggtgattcgggtgctcaacaacaccctccagaccgccgacctgccgcacatgctgttctacggcccgccggggacgggaaagaccaccaccgcactagccatcgcctaccagctctacggtccagagctgtataagtcaagggttttggagctcaatgctagtgatgatcgtggaattaatgtggtgaggacgaaaatcaagaactttgctgctgttgctgttggtactgcacggaaagctggttatccctgcccaccttacaagattattatacttgacgaagcagattcaatgacagaagatgcccagaatgctttgaggcgtaccacagagacttactccaaagtgaccagattcttttttatatgcaactatatcagcaggataatagaaccacttgcatcaagatgtgcaaagtttaggttcaagcctctttcagaagaagtgatgagtagtcgcattatgcatatatgcaatgaagaaggcctcaatcttaatgctcaggcgatgtccacactgagtgtcatttctcaaggtgatcttcgtcgtgctataacctaccttcagagtgcagctcgcttatttggatcttctatctcttccagtgacctgatcagtgtttctggggttatccctgaagatgttgtcaagtcactgcttgcagcctgcagatctggtgaatttgacgtggcaaacaaggaagttagcagcattatagcagatgggtatccggtctcacagctgatggcacagtttctagatgttattgttagcgcggatgatattccagatgatcaaaaggcaaggatatgtaaaaagcttggggaaaccgataagtgcttggttgatggggcagatgagtatctacagctgctggatgtcgccagcgagactatccgctctcttttcaacatgccgcggacgctggtcttctaagagttcataaagaggaatggcggttccgatccttggcgaaaactttttcctgcctcttagatgccgcccaaggttaatctgcctcccctaccgctctgatgttggtagcttcggacgggttgaaaaagcgatgaactcagacttaaaatcccgctgaactgtgcctgtggatggatgcccaatatgacaatgaacatttctcagcgttcatcttgtgtgttatattccctcttctacttccgcctccagagtgcagcagttgacgttttttttttcgcactatggcattgcagtcagattttgttattgtgacttcttcgtggcacaggtcctataacaaagttacattttttgggtgcagt

SEQ ID NO: 5655 - DNA, 1486 bp, Zea mays
  Clone ID: 700468289_FLI
cccaggggtacttcagcacaattcaacacctggggcctttcatccgcagttgaatactcctggactttcagaactgcctcatgccttatctagttcaattgatagtaatggaagtgaagtttctgcttttctcgctgatctaaatgctgtttcttcagcctcagctttgtgttccacattccaaaatgcttcttcattcatggaaccagtaaatctagaagctttcagttttcaaggggcacaaagtgattctgttttgaacaaaacaacccatccagatgggaatatctcagtatttgacagtgctgccttggcatcactacatgatagcaaagagtttatcagtggtaggctcccctcatttgctagtgtccaggaaacaaacgtagctgctagtggtttcaagactcagaagcaggagcaaaatgcagtgtgcaacgttcctatccctacgttcactgcacttaatcaaattgcagttgctgcaatgcccggatcactgatccctcaaaagattccttcatggatcaatgaaaacaaaagtgagggtcctgttagccatccttctgatgtacaaatccaaccaaattcagttggaaatggtgttggtgtgaagccacgagtaagggctcgtcgtggacaggcaactgatcctcatagcattgctgaacgacttcgcagagaaaaaatttcagataggatgaaaaatctacaagatcttgtcccgaattctaataaggcagacaaggcatccatgctggatgaaatcattgattatgtgaaatttcttcagcttcaggtcaaggtgttgagcatgagtaggctaggagctccaggagcagttcttccccttctcgcagaatctcagactgagggttaccgcggtcaacttctgtcagctccaaccaacgcacaaggattactggacacggaagaatcggaagacaccttcgccttcgaggaagaggttgtgaagctaatggaaaccagcatcacaagcgcaatgcagtaccttcagaacaagggactctgcctgatgccagttgcccttgcttccgccatatccacccagaagggcgtctccgccgcgtcaatccctcccgaacagtgaaataaagacatgctgctgctcccatgagtacgaggaaacaactgcagaagacagaaaactcaagatggctgaagaatgcagcaaagcccgtatagagtacagggtaggaagttagtctgaccagtgttcatgacctcatctactaatttgcttttcagaatcagctttttggtatctattgcgcataagttggtttttccttttcccttgctctgtctctctctctccctggggccgtatccgggtgctccgtggatagttgcgtttcagaaacttgaactgtatctggatgatctatctggtttctcttttgagcatagaaaaaactgtaaaatcttctggttctgttctgctagatgagatctatggccggac

SEQ ID NO: 5656 - DNA, 3903 bp, Zea mays
  Clone ID: 700468301_FLI
tgcaaatgcggttatgatatttgtgtttggtgctggcaccacatcatagacatggctgagaaggaggaaacagtgggccgctgccctgcatgccgcacatgctatgacaaggacaggatcgtcaagatggctgccacttgtgacaggacagtggcagagaaaaatgcagagaagaagcacaggacccaaaaggttaagccaaaggcagcaccttcagcagcagcaacatcaactgtagaatctaagaagcatctggctagtgtcagggttatccagagaaatctggtgtatataattgggctacctgcacatttatgcaatgagagcgtacttgagtgtagggagtactttggccaatatgggaaaattttgaaggtttcagtttcccgtccgactgggcctccctctcagcaggcatcagcaaacagcaatattagtgtctatattacttatgccaaagaagaagaggccatccggtgtattcaagctgtacacaattttgtcttggaagggaaagtgttaagggcatgttttggtactacgaagtattgccatgcatggctgcgaaacatgacatgtgggaatccagattgtctctatttgcatgatgtaggcagtcaggaggatagttttactaaagatgagatcatctcagcatatacaaggactagagtccctcagatggcatctggtgtttcgcaaagacgcacaggcactgtgttgcctcctccaggagatgatttctcttacagtgcggtggtttcagccaagcatacatttaagaatggaacacttaataccaccagtcagcccagactttcacctccaaacagtagttctgggaggtccacgcttccatcagctgcctcatgggggcagcgtgatttgaatgccaggacaacagctactggagcgacatcgtcacaatctcatacaaaaccaaaatcagaatcacaaagtaatccattttcaagttcttcagtattttcctgtacaaaaacaccctcttcatggaatgatgatacaagtacagcagcaaaaatatctgaaggacagcaactgtcagaaaaagagtctagaaccttgcagccgtataagcctggtatttcaaaggaaacacaagctttatcatcactggagtcatcactggacatagacttctcaacaataccttcagcttggaatgacgatgacattgtagtaccagatgtgatgccaaaaggaagtgatgaaaatcaagttgcaaataaaaatggtgagctaacccatccagcatccaagtcactggttttatctaagaaagacataaaaatgaacattaccagcaaaactccttcagattttgtatcaagtccagcaatatctaaatcagatgtaagtactagtgatggtgaccactcactcaccaatattactcctaaatgccttgcttcaaatgctgtagaatgccaatctagtcatactgctgtggagaaaatgttggaggatattggatccaaggacactgacatggagaagctatctgctcagatatcttcagtaacattaggtggcaacgacgagattcagagtatggcaggaaatcaacaaccagatgtaatgccatgcacatctgttgatgtgctcatggatcagaattttggcagagacctagctcatcccaatcctgacgagctcttattgccttctgaaaataaggatagtattgtttcttgtcaatatagttctgataagcgtcttgattggagtttggagatgcaaaattgtagcgttactcctttaaatgatagaatggactctgcactgctcactgacaaaattcatagtagacagctggatggttcagagcaatcatcatattcatcatttgttgaatttcctagtacagtggatacctcattgtggaatgatacagaaaataacgctgcattgacgattgacaatataacttcttcacagatgcagccagggttttcttcaactgataacacttatgccttgctaaatggaggtcaagatgggctaggtactgtatatacacatgataatgtttctgtatatacacatggcaatgtttctggacatcctggaatgggaagtcatcaccatagagcaatgggttcattaagaaacaatagtataggaagttttgacaagaccataagcgtaaataagtatgaaagaagaataatttctgatacgttgtcagagtttaatccatgggatgattcatattcgactgctaacaattttgctaggatgcttagggaatctaaaaataatgatgtccattgcattgcgccttcatggaaatcaggaaccgggatcaaagagtccagattttcatttgctagacaggataaccaaggaaacttgtttgattcatctctcagaaactgtggtactggtactgagcagaatttcagtttgctaccccagaattctcgaggaaatatttaccagaatggccttgcattccaatctctagagaatgaattttcaaacaataactctcctggtgtattagatatggcaactactggtacatcgatgtctaaaatatctgcccccccaggattttcggcaccaacaagagtaccccctcctggattttctactgcatttccatcccaggatagtttgaaccccactcctgtgtttccttctggaattttgtgccatggcgggtctatcccccctcctagattctcttcattttcttctggaatttcaactcaggaagtgtctaagcctcctactagaccgccttctccattttcttctagattttcatcacaggacggtcttgacccctcttctagattccctttttcttctggattttcatcacatgatgggtctaatcagtcgtatggctcaacgaacccagaaaatcttctccggggtactgttcagggtggcaacagtaatcattatcaatctcagtttggaaggcactcaagtgacatggagtttgatgatcctgctatattagccatgggcaaagggctgatgcctggaattggcgattcagggctggagatgaaaaatactcctgcttttcaagcacagttgcaaccagcaagtagtgatccaagatttcagttacatgtacagccaaatgtgcagtctcgtcaaaacatgagattcacagaccctatgcaagatggtttgaaccatatgaacgataattacctggcatccagatttttagctcagaaccagggtcctctatctccttatgtgcagattccgcaacaacccagaaactcgcaggttataaatggtcactgggacgggtggagtgatttgagacaagggaataacgctcctatgtcagacatgtccaggatattatatccaagtgaagtgaacaagttgcatatgctgggttcaaatgatgtccataacagagcctttggaatgtgatcgtctcctgggataatgtgcgactttgagctgacatgttcaacttggggcgttttgtgcaagtaactggttgcacaacacatagtatacctgaggtggttaatggtgttgtgctcatgagctggcacacgactatttattgctgttggagttgaccaaaatgaaccttagttttggtccatccatttggaattaccaggttcattctcgtctatgatttgtgaagcttgaatgaaaagaaagattacgtgcctgagaagaacaaggcagctgaagttgaaatagatagagatatgtctattatgggatgtggtgtgacttgcgagcgaaagagatgaagaagattaggtgggcttggcttgatggcagcttgttttttcttgtgtcttgtacatgatgatattggtcggtggttgtatatgacttgtgatcgacggtggctgcattaacctgtagtggttgcccttgctcctt

SEQ ID NO: 5657 - DNA, 967 bp, Zea mays
  Clone ID: 700468318_FLI
gtaaacctgaaccttctatgacgccagttgggccccactctccaattaagaatgaggtctgggaaacatcagtgccttttgtaccttcttttagttttcctgatagcacaacagcttcagaaagtcaatatgatccatttgttgactatgttgaacctcctaaagttgggaatacaaataatctcaagccctccactatatcctgcaacattacaagtcagcatacagatcagtacgcagttactgataaatccttgaattgcaatgacaaattgaccaggaatataactgccaaaggatcaaatgaacctgcttactttattgctcctgatagaggatgcagctctagcctggatgatactatcaaggtgaaagcttgtgacagaaaaaaggatgcagttgattacaatgagaaaacaagggatttccgttttcatttggcagaacatataaaggagttggtcaaaccaatatggaaaaaaggtaatctgagtaaagatgctcataaactggtagtgagaaaatctgtcgagaaggttgtggactccattgagccaaatcaagtaccaactactgaagagttgattacgaagtacatagccacatgtggaccaaagatagaaaaacttgtgaaggcatatgttgataggcacagtacatgtcatccaaccatcaaatacagcagctctgagatgggagcttgagcttaatggtgatgacagcttgaaccttctgtcctaccaatctggttaaccttcatttgtaggcccaacaagttaatattggtatggcagtcgtttcaaataatatgttttgtagcttgaacctggttggttttgcagacttcagtctgaactcccttaagagtaactggagatggtagatttttagtttatgtttgcatgttaaatgtgatgtcatctaatgcagctaagaacaagcttaactgcatgtatggttattggtt

SEQ ID NO: 5658 - DNA, 278 bp, Zea mays
  Clone ID: 700468443_FLI
gttaccgcccgtaatcgaatgtaaaccattatcattaccctttacgttacatttcgtgaaccaaacagcaccttagttctgtaatgctagttacaacttacaacacgctgacatgcaaacgcagttcgcgagccccccacagaaagtgacagcaaacaggctcctatggatcctgtacttagtgtccgaacaacaaaataccaataagtcgcacatggacctgccaacctatcgttcctggttcttgagttcatgatcaataagccggaccttcagac

SEQ ID NO: 5659 - DNA, 1601 bp, Zea mays
  Clone ID: 700468444_FLI
gcgcgggagcagatggaacaccgcaactaccagatcgccatcgaggtctctgagcttgaggcatcgctcgcatccaggtctgccgagggcgaatccctctccaagtccctctcccagcgtgaagccgagatctccgagctccgtgataaaatcacctctctcgaggggaagctcgccgcgcagaggcccgtgctcgcggaacagatcgggtgcacctcgaagctgtatcacgagatgcgggaggtggtcaagctggtcgatgccgaagctgtcagtgccctatcggactcggtttttgtctggaaggagactgacgtcgaggagagcctcaaggtgtctctggaagggacgaaattggcctatgagcttgcggcaatagctctggagaaggttggggcttgtatcgatgacaaggagagcaagcttagacgtttggagaacatggtggatggactgattaaagagaaggagcacattagtgtactgctccggaacgcactgcaggccaccacaagtgaggtgttaaaggttgcagaggatggtctgagagaagctggcattgagattggacttaacgagcgaaaggagcacatgctagggagtgtggagaaggacgaggtttataccctggcaggggctcttgagaataccatgaaggagtctcaggtcaaaattattgagctccaacatcttgtcgaagcactaagggcggagtctggtttacttagaacaaggctagaagggcaagagaaggagattggtcagctaagaaagcaaataaaaaatcttgaagagaaggagaaggtggcaaatgaaagcgttgagggtctgatgatggacgtgacagctgctgaagaggagattaaacggtggaagatggcagcagaggaggaagctgaagctggtagatcaattgaacaagagttccaaattcagatatcatcccttcgcaaggagttggacgaagcaaaccgagctatggtggagctagaaaacaagctgaagttcaaggaagagacagctgctgctgcaatggcggcacgcgatgctgcagagaagtctctaaagctagcagatacgcgatcgtccaggctacgtgagaggctggaggagctcaacaagcagctcgaagaatcagatacgagaaccgagtcggtgaatcgcaatggccataggtacatgtgctggccatggcagtggctgggactgaactacgtgcagttacctctagcggagacagaccagacgtccaacgagatggagctatctgagcccctaataatataggtgctccgacctccatacttgtacagattacagatatatacagatcctgctctttcactagataagggggaacagtagttttttttttgggaggggggttgggttgatgggttcttgtgtagatgttttcgcaatttcttgatgcatgctttgcggaaaacgggcgggtgctggaaggcgccgtgtaattgtaaaaggtaccacttagtgaagatgctgagaagttcattctttgacaagattgttcttgaaacaagtctcgcttgatcttcattgtgataacaatgtgctacactgctactctacttagacgg

SEQ ID NO: 5660 - DNA, 900 bp, Zea mays
  Clone ID: 700468448_FLI
tatgatttcactcgaatactgagctccttttatttcaaggggtatactttattgacaaaaatacagcgcatcgaatggaacaataggggtatgtccagcgcacatgcaatttttatcacggctgtatcattatatattgtcacgtcgactgatcttttctccgattgtgtcaaggggcctattacattccgtaattcgataatatccacttctgcattgggggtttctgttggctacttcatcactgatcttgaaatgatcttctggctgtatccttcccttggtggaatggaatatgtcctccaccatactctttctctggttgcaatagcttacacaatgttgtctggggaagggcagttttacacatacatggttctcatttcagagacaaccacccctgaaatcaacttgcgatggtttcttgacactgctggactgaagaaatcaagtgcttacttggttaatggaattctgatgtttgttgcatggctggtggcaaggatatttttgttcatgtatgtattttaccacatttatttgcattacagtcagataatgcagatgcatgcctttgggtactacctgacgtttgttgtgccatcggtgctctttgtaatgaacacaatgtggttcatgaagatcttaaaaggcgtgatgaaaacactggcaaaatggtcatgatggatgatgccaagaggatcccagaactatcaacaggatttggtctttctggcatcattgatctgtaaagttatggatatcagggtaactagagaaagttaatatgtaaagtattagcaaacaagctagattaggtgaaattgccctattttcagcagtgctggaagttcataaccagtttggtttgtaccggagatccagcacgctgttctgctt

SEQ ID NO: 5661 - DNA, 1858 bp, Zea mays
  Clone ID: 700468454_FLI
gttcggagcgcacacacacacaaccagatctcccccaaatccacccgtcggcacctccgcttcaagatgcagatctttgtgaaaaccctgactggcaagactatcaccctcgaggtggagtcgtctgacaccattgacaacgttaaggccaagatccaggacaaggagggcatccccccagaccagcagcggctcatctttgctggcaaacagcttgaggacgggcgcacgcttgctgactacaacatccagaaggagagcaccctccaccttgtgctccgtctcaggggaggcatgcagatctttgtgaaaaccctgaccggcaagactatcaccctcgaggtggagtcctctgacaccattgacaacgtcaaggccaagatccaggacaaggagggcatccctccagaccagcagcggctcatctttgctgggaagcagcttgaggacgggcgcacgcttgccgactacaacatccagaaggagagcaccctccacttggtgctgcgcctcaggggaggcatgcagatcttcgtgaagaccctgaccggcaagactatcaccctcgaggtggagtcttcagacaccatcgacaacgtcaaggccaagatccaggacaaggagggcattcccccagaccagcagcggctcatctttgctggaaagcagcttgaggacgggcgcacgcttgccgactacaacatccagaaggagagcaccctccacttggtgctgcgcctcaggggaggcatgcagatcttcgtgaagaccctgaccggcaagactatcaccctcgaggtggagtcttcagacaccatcgacaatgtcaaggccaagatccaggacaaggagggcatcccaccggaccagcagcgtttgatcttcgctggcaagcagctggaggatggccgcacccttgcggattacaacatccagaaggagagcaccctccacctggtgctccgtctcaggggtggtatgcagatctttgtgaagacactcactggcaagacaatcacccttgaggtggagtcttcggataccattgacaatgtcaaggccaagatccaggacaaggagggcatcccacccgaccagcagcgcctcatcttcgccggcaagcagctggaggatggccgcaccctggcggattacaacatccagaaggagagcactctccacctggtgctccgcctcaggggtggcatgcagatttttgtgaagacattgactggcaagaccatcaccttggaggtggagagctctgacaccattgacaatgtgaaggccaagatccaggacaaggagggcattcccccagaccagcagcgtctgatctttgcgggcaagcagctggaggatggccgcactctcgcggactacaacatccagaaggagagcacccttcaccttgttctccgcctcagaggtggtatgcagatctttgtaaagaccctgactggaaaaaccataaccctggaggttgagagctcggacaccatcgacaatgtgaaggcgaagatccaggacaaggagggcatccccccggaccagcagcgtctgatcttcgccggcaaacagctggaggatggccgcaccctagcagactacaacatccaaaaggagagcaccctccaccttgtgctccgtctccgtggtggtcagtaagtcatgggtcgtttaagctgccgatgtgcctgcgtcgtctggtgccctctctccatatggaggttgtcaaagtatctgctgttcgtgtcatgagtcgtgtcagtgttggtttaataatggaccggttgtgttgtgtgtgcgtactacccagaactatgacaaatcatgaataagtttgatgtttgaaatt

SEQ ID NO: 5662 - DNA, 1735 bp, Zea mays
  Clone ID: 700468496_FLI
tgcagctggggcagggagctatatccggtggatgattcctgcgctatttgtgtatggtccactacagtgccatgtccggtttctgcaaacgcagaacatagtcctcccagtgatgctgagctcaggtgccacagcactgaaccatctgctggtgtgctggctgctggtgtacaagattggtatgggcaacaagggtgctgccttggccaatgccatctcatactttaccaatgtatcaatcctggcaatttacgtcaggcttgcaccagcctgtagaaacacctggagagggttctcaaaggaggcttttcatgacataaccagcttcttgaggcttggtattccatctgcgctgatggtttgcttggagtggtggtcatttgagctcctggtacttctttctggacttctccccaatccaaagcttgagacatcggttttgtccatttcgtgagttaactttgcatgtgacacttccaatttgattttcccttccttggttgtaactctttagtttcctgcagcttaaacacaggctctttagcgtttatgatcccttttgggcttagcgcagccataaggtcagactgagcagatcaggctcacaaactttaacatgtcatgctgatcaacagattattgtggcactgatatgtttcttttgctcctatagcacccgtgtttcaaatgaacttggtgctgggcgaccccatgctgcccatctggctacccgtgtggtcatggtgctggccatcgtggttggcgtattaatcggactagctatgattttggtgcgcaatatctgggggtatgcatacagtaatgagaaggaggtggtcaaatacatctccaaaatgatgccgatcctagccgtgtcattcttgttcgattgcgtgcagtgtgttctttcaggtaaatgtatcaatgatacttcaagtataccaaattttgcaaagacagtgaacccatttcctaatcttttgggttgatatatttttatctctttgtatattatgaactgtatttattcctttggaacaatatcacctacatcatggctcacacaatagcggattcttgatattgtcccaggtgttgctaggggctgtggatggcaaaagattggggcttgtgttaatcttggtgcatactaccttataggaattccagctgccttctgtttcgcctttatgtaccatctaggtggaatgggactttggttgggaataatctgcgcactcgtcatacagatgctattgcttctcacaattaccttgtgcagcaactgggagaaagaagctttgaaggcaaaggacagagtatttagtacatccgtaccagctgacatgatgacatgatatttctgaagatatttttttgaaggaaatgcccatgaaactttgccaaggaacatactaagaattggttgttcagattcaaggcctttctccatgccatcagaatgatgcttgggtctagtaatagctcctgagcagtctgttttttacttttggtcaatactcaatacatggaagatgtttggtttgaagaaccacgccatcctagatgaggtggtatattataagttgatataacggctccatactagttattgaggaatgagacgatgattatctcatgtaataataatgcttttccccctctagttattgatgtaagacaattgaggcaaatgaacaaaatgtcacatttgattaaataagttgcattgtct

SEQ ID NO: 5663 - DNA, 913 bp, Zea mays
  Clone ID: 700468530_FLI
atcgcaatggataaactgtgacattcggaacttcaggatggacatcttaggacaatttggagtaattatggctgaccccccttgggatattcatatggagctaccatatggcacaatggctgatgatgaaatgaggacgcttaatgttccaactctgcaaactgatggtttgatttttttatgggtcactggtcgtgccatggagcttgggcgagaatgtctggagctctggggttacaagcgtgttgaagaaattatttgggtgaagaccaatcaacttcaacgtatcattcgaactggtcgcactggccattggttgaatcacagcaaagaacattgtcttgttggaataaaaggaaaccctttagtgaacaggaacatagataccgatgttattgttgctgaagtccgtgaaacaagcagaaaacctgatgagatgtacgcaatgctagaacgaattagcccaaggacaaggaagttggaactgtttgcaaggatgcataatacacaagctggatggctttcactgggtaaccaattaaatggagtaaggcttgttgatcaagggttgagagcaaggtacaaagctgcttaccctgatgttgaggtccagccaccatcacctcccaggacaagcacgccaatggatgttgaccaaagtagttcacagaaggttgctgcgctagatggtggcgagaggcccgcctgatgctagcaaacttacttgcgagttatcgtgtcaggacccactactgatcatataggtttcatcgcgttacccctgttgtaaaattaggcagctcagtttgtgtttggctactgaggattgtttcagtatatcatgtgaaagaaattgcactgtaacagccccagcaaatattgccgccaatgtaatcagggcccatcttgtctt

SEQ ID NO: 5664 - DNA, 1148 bp, Zea mays
  Clone ID: 700468560_FLI
cagacatatttgtctctgatggtgccaaatgtgacatatctcgcttgcaggtcctttttggatctaatgtgacaattgcggtccaagatccatcataccctgcatatgttgattcaagtgttatcatggggcaaactgacttatatcagcaagacgttcagaagtatggaaacattgagtacatgagatgcggtccagaaaatggattttttcctgatctgtcaactgtccctaggacagatattattttcttttgttcacccaacaatcctactggtgctgctgcatctcgggaccaactaaccaaattagtaaaatttgcaaaggacaatgggtccatcatagtctatgattctgcttatgcaatgtacatatcagatgacagcccaaagtctatctttgaaattcctggagcaaaggaggttgctattgagacagcctcattctcgaaatacgctgggttcactggtgtccgtctaggttggactgttgtccccaaggagctccttttctcggatggacatccagttgctaaagatttcaatcgcatagtttgcacttgcttcaatggtgcatcaaacattgcgcaagctggtggtttagcctgcctctctccagacggtctaaaggctatgcaagatgttgttggcttctacaaggagaacactgaaataatcgttgagacatttacatcactcggattcaacgtgtatggcgccaagaacgctccatacgtatgggtgcacttccctggccgcaattcgtgggatgtgttcgctgagatcctggagaaggccaatgtggtcactactcctggcactggatttggaccgggtggcgaaggctttgtgagggtcagcgcgttcgggcacagagagaacatcattgaagccgcaaggaggttaaagcagctgtataagtgagcaccgatgcagcttctgtgccctcctagacagatgtatcaataagaacacatcagggcaccaaaaaggcaaaaaaacgcttggtgaagctgccagaaaatgttagttttttttaaaattctcgtgtggtgtccacattcaaaccatttcgaactctagacagtgcttgttgtaatcctgagacccttcattcactggtgaagttgtgattgtcttgtctgtgtt

SEQ ID NO: 5665 - DNA, 1096 bp, Zea mays
  Clone ID: 700468671_FLI
ccaagatggaagagggtgcttctgaagattgggggcactgccctatgtggagcagctcatcaaaatgttgatcccaaggtgattatgctgatcgctagagaagttcaagtggcatgccatcatggtgtggaggtggcaatcgtggtaggagggcggaatatattctgcggtgacaattgggtagctgcaacaggcactgatcgagcctcaacgtacccaattggaatgatggcatcagtgatgaattcagtacttcttcaagcatcgctagaaaagataggtgtggagacacgagtccaaaccgcattgatgatgcaagaagttgcagaaccttacattaggcgtcgagccatacgccatcttgaaaaagggagagtggtcatctttggtgggattggtgtgggcattgggaatccattgttcacaacagatacagctgctgccttaagagcttcagagatcaacgcagatgttgtccttaaaggtattgttggtgatgatgagtatggctgtcctcctaggagcaacagtaatgcttcatttgagcacatctcctttagggagttagcagcaagaggaatcaccaaaatggacatgacagcagtaacatgttgtgaggagaacaacattcctgtcgtcatctttaacatgttggagcctggtaacatctcaagagcaatttgtggagatcaaataggcaccttagttgaccagtcaggaaggatcacataaaactaggaggatgaatggtagcagagctccaggacatgccgatactctgggtgggacatcactctggggggacatcctgaattctttgctcgtggatcttttccgtatagaaggaaaacatgttcatcagatggaagcgttcaccttgatttgcctgggatgcctattgtgtattatgcgttgtggtcgcaattgcccacattgagaaaagtattaccttgtaatgtctatttgtaatttgtctgtagattagtggaagggctcatgtaaagtgtttcacggtgcccagatcagaatgtagtgttgtaagttgtaatgctattatttgagtcgtagtgtttgaggtgtcacgttttgcacgatt

SEQ ID NO: 5666 - DNA, 937 bp, Zea mays
  Clone ID: 700468724_FLI
gcaaaaggaagggttctggagaggacagttcatcactacgttctctaggtgaaaccagtgcattgcagcgagaagtcagcatggagtgtgctgatgagaaggcgggtgatgctagagccaagagagaggactacgtgcatgtccgggcaaagcgcggccaagccaccaacagccacagccttgcagaaagatttcgaagggaaaagataaatgaaaggatgaagcttcttcaagaccttgtcccaggttgcaacaagattacaggcaaggccatgatgcttgatgagatcataaactatgtgcaatctctgcagcgacagattgagttcctttcgatgaagctctcagcgatcggccctgggctcaactgtgacctcgacctacaagatatcctctgcacacaagatgctagctctgcttttccaggatacaacctgcaaacgagcaatgtgcatattaatctgtacagagcatctgaagaaggtttctcacacaggaacaggatcatccctagtccagcaaatgttcacgtgacaagaaacgcccagctatctgcatttcctcaggttttcattcgacgcccttgaacagcttcaagtgctttcctatgtcgattatactagtttctgccatggcagagaggagttatctggaacgaggagctttgcagcatcgcttcagatagaaatgctgattcaatgaaagtggagtgacattgtggcaactgacaagccggcagtttaatggtgatcaactctgaaagtcttgacaagttgggttgctactgaggtgccttttcaagttgcagtggtagcacgacttctcttgggatgagctagttaacttttggtatttgagaggaattctggtgtgtccacccatcctgtacagttattagaataactaatcaaaggagtactgtgaaattcttgcgatc

SEQ ID NO: 5667 - DNA, 549 bp, Zea mays
  Clone ID: 700468728_FLI
ccacggaggaggcgatgcggaacgccatcgagggcatgaacggcaaggagctggacggccgcaacatcaccgtcaacgaggcccagtcccgcggcggccgtggaggcggcggcggtgggtacggtggtggccgtggaggcggcggctacggcggtggcgggcgccgtgatggcggtggcggctacggcggtggcggcggctacggtggcggcggcggctacggtggtggtggcggcggctacggcggtggcaaccgtggcggcggctacggcaactccgacgggaactggaggaactgagcggtggggcccgcgcggccaagttatcctgttcgctaccgtgatgtttaccctagtccagagggtttatcttcgttcgtgtcgtgtttgttgttgcccatctgtgtttttgattgcaaggtcgctctgtgtcagttgttagtgctgtgttcatcctcggtttcagcagacccatgcatcaaacagcatggactgcggatcgatggatgctgttacccccgtcaggctttattctaagttaatcttaagg

SEQ ID NO: 5668 - DNA, 997 bp, Zea mays
  Clone ID: 700468730_FLI
gggagagcaattaagagatacatccaaaagcctgataagaaacagttgctgctgtgcctcttggactggatgattggacaaggctattctgtagactcgtcatcaaggaacttacttttgaagaatgcacaactttttggcgaaaaacaagttatagcagaaatcctttctaagcagcagatagcatcaaggactattggcctaagacacaaaaaatgataaaggaaagattttgtatatgtaaattgttcatatacatccaggatatgcctaggctgattgtttgaggatcaatttattgtgctctgaggggtaagttagagacaagatatcagttatcatcctcaagtgcggatatgcctaggctgcaaacaaactttattaggatttcagattatggtatgcggtatatattgaatcaacttgagtgctctaacatctcatggcttacgtctatgtctgttgtggccaggaattttccaatgaggcatgcttgttccagtagcggtacagctgggagtggagtatgaccatgcttgctatgatatgtgtgttagattgtgttgtctgaaggcttacagtaagtttttgatacatatggacatacccatacagctaaagcaaagacaatttgatttgattttagaggattttgcatgtaattcaacatggttgaggtcactgtacctagaaagcagcatacagatctaattttgttgacaatcgtacaaggtattattacttaattactttggtgaaaagaggttgctttgaagatttgacttcacgttgtacatacaggcagagtatcagacaggtggatttttcctaaaaagtggggaatatgtttctaacctgttttgttctttaggaaactggattgcacactattgtgcctttatgcaaaccaagttatgtatcatttttaggtgatgaattgtatctttttttagaagatgaacagttatgtatcctttttagtggatggattgttatt

SEQ ID NO: 5669 - DNA, 2079 bp, Zea mays
  Clone ID: 700468775_FLI
atcgcgtaccgtcgctcgccgtattcccctgccgcgcacagttcactcgcgcacctctcgccccctcgctctacgacgactagtgggccgccggcgctggcgccgccttacgccaggtgccgaggtcttcgttgatctcttcgccggcgacgagcacccaccagctgggaaaaaatctatagccaaacataataatggctatgattgatgaacctctctacccgattgctgtactgattgatgaactgaaaaatgaagatattcagttgcgccttaactccatcaaaaagctttctacaattgcccgggcattgggtgaagaaagaacaaggaaagagctgattccattccttagtgaaaacaacgatgatgaagatgaggtgcttcttgcaatggcagaagagttgggcgtttttattccttatgttggaggagtagagcatgcacatgttttgcttccaccactggaaacattgtgtactgtggaggagacctgcgtcagagacaaggctgtggaatcactttgtcagataggagcacagatgaaggaaaatgatattgtggactggtttgcccatgtcgtaaagaggttggcggtaggtgagtggtttacagctcgagtttcttcatgtggcctttttcatatcgcctatcctagtgcacctgaacaactgaaggcagaactgaggacaatttatggccagttatgtcaagacgacatgcctatggtacggagagctgctgcatccaatcttgggaagttcgctgcaacagtggaacaaagtcatttgaagacagaaatcatgtcaatgtttgatgatctaactcaagatgaccaagattcagtgcgactattggcagttgagggttgtgctgctcttgggaagttgttggagccccaagattgtgcagcacatattctcccagttattgtaaatttctctcaggataaatcttggcgtgtgcgctatatggtggcaaatcaactgtatgaactatgtgaagctgttggtactgaacccacaaggggtgatctggtgtcagcgtatgttcgccttctctgtgacaatgaggctgaagtgcggattgcagctgctggaaaagttacaaaattctgcaaaatattaaacccacaaattgcaattgaacatattcttccgtgtatcaaggaattatcatcagattcatctcagcatgttcgttcagctttggcatcggttattatgggaatggctcctgtattgggaaaggacgccactcttgaacaactgcttcccatttttctttctttgctgaaggatgagttccctgatgttcgactcaacattataagcaaacttgatcaagttaaccaggttattggaattgacttgttgtcgcaatcacttctgccagccattgtagagctctctgaagataggcactggagagttcggcttgccataattgagtacatacctttgttggccagccagttaggtgttggtttttttgatgacaagttaggggcactttgcatgcagtggttggaagataaggttttctcgatcagagatgctggtgccaataatttaaagcgtttgacagaggaatttggccctgagtgggcgatgcaacatataattcctcaggttttggagaagataaacaacccacattatctgtatcggatgaccactttgcaagctatttctttgctagctcctgtcatgggtcctgatatcacatgccaacagttgctccctgtcgtcattgcttcttcaaaggacagggttccgaacatgaaattcaatgttgctaaagtcctgcaatcacttgtaccaatccttgaccaatctgttgtggagaagacagtgaaaccatgcctagttgagctcagtgaggacccagatgtagatgtaagatactacgcacaccaagcccttcgggcgtgtgaccaaatggtgatatctagttgactagcctgtccaggaattagcaaatgagatacatattggtctattctttttgaacattttaaagtgttatgtagtcttaaaaattattgtaccaccaatgaagttgatgcatctttttatt

SEQ ID NO: 5670 - DNA, 3318 bp, Zea mays
  Clone ID: 700468778_FLI
gaaatcagagatgtttgtattggaccatggctgttatgtggtgattttaatttgattttcaagcccgaggataagaataattccaacatcaataggactttgatgggtaatttcaggagtctaattaactccatggagctgaaagaaattcctttgattggcagaaaatttacttggtcgaaccagagacaggatcccacccttgtgaagctcgatcatgttttttgcacttctagttgggaggattttttccctgattgtctgctgtatagcaacgcctctgtttgctctgatcattgccctttaactctcaaatttcgagaggattgtagagggaagcgcagatttcattttgaaggtttctggcccaagctccctggtttcaatgaggtggtggctgattcatggaatcagccaatgttggcaacctgccctttggaaaggctgtccctaaagctcagaaggcttgctaaacagctgcagtcctgggggcatagagaggtgggaaatgtgagtaaccagttgggtcttgctagagaggtgatgcataggttggaatcagcacaggactttagagttttgtcagaagatgagttttggctgattggaaagctgaagcaacattgttttgtttatgcttctatggaaagaacaattgcaagattgaggtccaggattaagtacctaaaagagggggatgcaaatactaaattctttcatatgcaggctcgtttcaggaagaaaagaaatttcatttcatatctagaagatgaaggtagagtggtctctaaccatgaggatatgcaggaggtgctagatggatttttttccggtcttttgggtgctgattttctgaggcaaagcactattaatttatcgagttgtcacagagaggccgtggatctcagtgatcttgagtgccccttctcagagaaagaagtgttggacacaattgcgtgccttccgtctgataaggctcctgggcctgatgggtttacagggaggttctataaatcttgttggagtatcattaaggtggatctgctggcggctctgtctatcatacaccagggcaattttcagagattggggcaactgaattcctcctacattattttgattcctaaaaagatggatgcttcgtcggctggtgatttcaggccaattagcctaattcatagtgttgctaaattggtcacaaaattactcgctaatcgtttgggccctcgtctgcatgaattggttgaagctaatcaaagtgcttttatcagaggtagatcgattcatgataattttatgttggtccaacaatcgattaaatcccttcacaagagaaaggttgacagcctgtttctgaagcttgacatttccaaggcctttgactcggtatcgtgggctttccttcttgaagttttatctcacctgggtttcggtcctatttggcgcaatttgatttcaaatctgctggctacagcttctacgcaagtgttattaaatgggtctcctggaatccatataaagcatcggagaggtcttcgtcagggagaccctctctctcctatgttgtttgtgctgatcatggacgtgcttagcagtctatttagggctgctgaatgtaggggattgctgcatagtttggaaagggcaggagtccgtaataggctttctatctacgctgatgatgtggtcctgtttgttaaacctattgaggaagatctgaaatgtgttagattaattctgaattgttttgggtcagcctctggattggttaccaatttgaataagagttatgctattcctatcagatgtgaggagcatgtggttcaagagggctgcaatgtgctgaggtgcagtttggcctcatttccttgctcttacttggggctgccaatctcagacaggaagctgaagcgaaatgatcttaagatgtggatagataaaattgcagacagactccctaactggaaggctcgtttattgaacctggccggcaggacaacattggtgcggtttgtcttatcagccatcccaatttatctccttattgcaattaaaattcccaaatgggttattaaatcaattgacaagattcgcagagggtttctttggaaagggcgaaaggaggtgaatggtggaagttgtgctgttccctaggagagtgtgacaaggccactaagtttagggggtcttggtgttcctaatttgcaattgatgagttgggcactgcaggctaagtggctttggctagagaagactgatccaactcggccgtggcttggtttgtgtatccctgtgcagcagcaagttagacaattttttaatgcttcggtgatctctgttgttgggaatgggaccaatacttttttctggtcagacagatggctgaatgggcagaggatacaggattttgcacctgaagttgttaatatggtgagcagcaagccatttagttcgagaactgttgctcaggcgttgcataatgggcaatggattcgcgatatcacgaatcctttatctttgattggtcttcatcagtatttgcagctgtgggatgctttaagtggagtggtgcttaatctggaggaggacagacatgtgtgggtgcactcgagctctggtgttttctcttccaaatcttgttattcggcgttgtttatgggagctattattttccagccatggaaatgggtgtggaagtcgtgggcaccccccaaatgcaaattttttatttggctggcgataaggataaatgttggactgcggatagacttcagaggaaaggattacctcacccggtggtctgtccactttgtgatcaagagcaggaaactatattgcacctcttgtgctcctgcagtttcgctagacaattttggcatattatattttcagctttgaggatgggtcatcttacgcctactagggaggcgggctcttttgtggattggtggggcaaggtgcatagaagggtccccaaacatatcagaaaaggtttccatagtctcattatcctgggggcctggtgtttatggctgcatcgcaatagggcggtttttgatggtgtcaatccgtcattaagcaccattcagaggcttttcttggatgaggtggagtgctggtgtttggctggtgcgaagcagctcgagagtcttgggcttctggctgcatttgctaggggggctagggcttttcctagtgtatgaggctacactgttttagtttctttgtatttttgcctgttagggctttgtactttggtccatttcggacctttctctctttcaatataatgacgcgcagttctcctgcgtgttcgag

SEQ ID NO: 5671 - DNA, 1803 bp, Zea mays
  Clone ID: 700468802_FLI
gataattacatggagatgaactcaagaaaaccaaactggcgctgtccatattgtaacacctcctcaagcttcactgacctacgtattgaccaaaagatgatgaagatactagaagagactggagatgatgtcactgatgtccttgtatttgctgatggatcttggaaagttgttccagctcaggatgaaaaatctgatagacatagaggtgacacaattcagcaggctggagatgctgtagaaactggttcaccttctcgagatgtcatagatctgataaatggcaatgatgatggtgatatgcaaatggattgggcatcggctccagaagattcaaagcctgtgttgaatagtcaagatttgtctgtatcagactatcttacagatttccctatgacagctcagacagaagatctgaatcgaggggatggaaataatgggggaagcaacatggcttccacttcacgtcaaaatttgttactacctcctactagtgggctgggctcaagttcattagggaccttggaatctattctacctcaaaatgttctgcaccctgttatcacagatgcagtctctccttctcttgaaacctcttcagcatctggcatgcaacatgtttcacaggaaacacattgtggaactgtacagctgcagccacaaataggtccagtacatgggtccgaagtgagaaggcttcctatacctagaaatcccaggagagagccaataggagtacaggggttgacggttccaccacagaatcctgggtcatcaacaaggttgcagccaaatattctcaattgtccacctcctatcccgctatctagtccatcctcttcaacttaccaagcacatcaagtgaagaatccagacagtgtcattgcttcaaggaacagtggtagtgggccattaccaaggactcctagcgtcgctgctgcatcattgcacctacagtcgacagcacgggatattcgcaacacatcgagccatctacccagtcgagttgttggtctgcctgcgccacacctcatgggtgcacgaccaccaccaggaatttcagtgcaggctggaggagcgaacgcctacagaactatgcaacagactccaactatggatccactgaggcacacacggatgagcatgaaccaaacagcactggctgctgccggccaaaccaccgctgccgcgtatgtccgaccaacccaagcagacatccaaaaccatctctttcctgtgcagcaaagccaggcaccacgatcgcaacaagtgccacgaacaacaaccccgcctctacagcgggcgccaccgcacctgcaacctcccagtgtaccaccgactgttccaagcacacctcaggctggaccttcgcatggtcttccaccggagctccctgtggatgatagctggcgccccacgggacagatgagagggagtctgacaggcaatgcttacagttctgcaattaggcactatcggggccattctgagcagcagcagggcgagcctcggcctcccaacacttcaggtgcgcgaaggcctcagtaactgccagacattgcggcgttgccctgattatcaagcagggcttgggcagctaatttaccaagagattttaatttattatcatagctaatttggcgctatgatgatctatgttagtgtaggtaggggagcctagtgagtagtgatagtgctctgcttgtctacaacgcactctgatgttaaattagtagtatcaggtgaaccatttgtgtacccaatatggaacgtggattttttatgctaatgttttgcctgtgt

SEQ ID NO: 5672 - DNA, 792 bp, Zea mays
  Clone ID: 700468820_FLI
gctattcaggttcttgccacttttgttacaaccatgttcttggacagagctgggcggcgaatcctccttattatttcttctgctgggatgactctaagtcttcttgtagttgctattgtattttacatcaaggataatatttcacatgactctgacttgtatgacatcttaagtatggtgtccttggttggtgtcgtggcttatgtcattgccttctccttcggtatgggtgccattccttggatcataatgtctgagatcctcccagttagcatcaagagtcttgcaggaagcttcgcgacccttgccaactggttgacatcctttggaataacaatgacggcaaatttgctgatcagctggagtgctggaggtacgtttacctcctacatgattgtgagtgccttcactctcgtgttcgtaatcgtttgggtgccagagacaaagggaagaaccctcgaagagatacaatggtcgttccgctgagcaccaacatcgtcaaaatgcgaaatggttcttcgagttttgtcgctttagatactcaaatcactcgacgaaggccacacattctttctgttcataaaaggtcttgtacatgagattgcatacaccgttgttataactttacccccaatagacttgtaaatgcttgtgcagtaactcttatattacttttgcttcaacattgtaagatagaagacttgccaaaataaaatctgaaccttgggtccaatattccatgtaaacacgagcatgtttcttgatcaatcaaaatctcaagcatttttgttg

SEQ ID NO: 5673 - DNA, 1332 bp, Zea mays
  Clone ID: 700468850_FLI
tgctagcgctgctgtcccttctcctgctcgcgctccggcacgcggcgctgtccgctcccggggccacattcccgggcgacaaggcggcgctcgcggcgctgaggtccgccgtggccgcgtcctcggtcccgccccactcctgcctctcgtcgtgggacttctcccgcgacccctgcgcggcgttcccgtgcggcgtcagctgctacgctcctcccgccgccaactcctcctacctccgcgtcaccgccgtcgcgctcgaccccgcgggctactccggcgcgctcccagcggcgcttctgtcctcgctccccttcctcgcgtccttgtccctcgccgacaaccggttccacggcgcgctcccggcgggggtcccgctgccgccgaccctccgcatcctcgacctctccggcaacgccttctccggcgccataccggcgtctctgttcaccgcctcctccgcgctgcaggagctctacctctcccgcaacgccctctccggagggataccgccgcagctggcgctcctgggcgccctgacgcggctcgacttgcagcacaacgcgctcacggggaccctgccgagcctgggcgcgatgcgctcgctggtccacctcgacgtgagcggcaacgtgctgtcggggtcgccgctccgcgtgccagggacgctgccgccgtcgctctggtccgtcgcggcccggaacaactccttctcagggccgctcagcgccgcggcgctggctgcgctccccgcactgcgggtgctggacctcactggcaacgcggtgtccggcgcggtcccgggcgccgcgttcgcgcacccggcgctgcagcagctgcgcctgggttccaaccagctcgacgcggtccaggaggctcccgacggtggatcctcgagccagctcgtggagctggatctgagcggcaacaggctcgctgggcggctgccagcctgccttggcgcaatgccgcggctcgcggcggtcgcgctcgacaggaaccggttcaccggcggcattcccgaacggtacgccgtccgtgccgcggccgaggaatccacggaacagtgggtgccgttcgtcaggctgatgctgcaaggcaactatctgtgcggagccctgccgaggcagttgaggcagatccaggagggcagcgcagtggtgagcttggcggacaactgcctgccgaggtgtccacacaagttcttcttctgccaaggggccccgcagaaggaccacgccacgtgtcccaagtgcgatacttcgatccgtcgtcaggacattctgctgcggatgccctgattgtacattctgagctagtactaaaatctttgac

SEQ ID NO: 5674 - DNA, 2020 bp, Zea mays
  Clone ID: 700468853_FLI
gcgagagcgagagagagagagagagagaggagagagagagagagagaggagggagggagctcgagaggtcaacgagggggagctggcacgaaagctcagggctccttgctcctcctataaacccagcgcacccgccttccaggctcccattttctcgcccgggagccgcaattccatcctgctgctcgagttatatactcacccaatagaacaattctatgcctgatgattgtacttcttgaggtagaagatcatactgaagcagaactcgagcggtgttgaatcgaaatggaaggcaggatgacaagtttggaagccaccatgaaagtttcctcatcgatggcaagcagcatatcaaggaatgctgaccctgaccaacagactctacgccccaattcggtggagcagttttattttccaagacctggtcaatctttgccaggcattcctccattctttgggcctccctcctccagtttgtatcttcctaatgacaatgaagctaaatttggcaatcagtttgaatcaaatccttcacagaatacagattgggatccgcaggctatagtgagcaacctaaccttccttgagcagaagatcaagcaggtaaaagatattgtgcagtctatgagtaatcgagagaaccaattagctggcggttccagtgagctagccgcaaagcagcatcttgtaactgctgatctcactagcattataatccagctcatatctactgctggttccctgctcccttcaatgaagaatccacttcttagcagcaatccagcagttaggcagcttggcaacactcttggttctcctatgggccttggcatgaatgctaatcagagaccaagtgtagacagcaagactgatattcctgacacaggaaaaacttctgattatgatgaactgatgaatagccttaatcctgcccaagatgaaagagatgagatgatcaaatgtccaaatccctgtggtggggaagggtctgaaccgactcccatggaggaccatgatgtgaaggaaagtgatgatggtggtgagggagagaatctcccccctggttcatatgtagtcttgcaattggaaaaggaggagattttagcaccacatactcatttctgcttgatctgtggtaagggtttcaagagagatgctaaccttaggatgcacatgaggggccatggagatgagtacaaaactccagctgctcttgccaaacccacaaaggattcaggtgcagatcatgcacctgttacaaggtactcatgcccatttgtgggttgcaaacggaacaaagagcacaagaagttccaacctctcaaaacaatcttgtgcgtgaagaaccactacaagcgaagccactgtgacaagagttacacctgcagccgttgcaacaccaagaagttctctgtcatcgcggacttgaagactcatgagaagcactgtggtcgtgataaatggctctgttcttgtggaacaaccttctccaggaaggacaagctttttgggcacgttgcccttttccaaggccacacacctgcgcttcccatggaagatgtgaaggtatcagaagcatcagagcaacctcaggacagtgagccgatgaatgaaatggcgaggagtaatatgtatagcttcccctgtagttcgtctgatggtatatcgaacctcgacatgaaaatggctgatgatgtgcgtggttatttctcgccgctgaactttgatccttgctttggcgcgctcgacgatttcactcgccctgggtttgacatctctgagaaccccttctcattcctgccttcaggatcttgcagttatgggcagcagaacggagatagctgatggatgccgccatcgatgatgacgacaacagcactgccaacctttatttatgttgttgcatgatgctagcttggttcttcctctgttcaagagccatttgagattatgcctttatattttccctaaatgtacttacgtttgtggtcattaataatgatcaaggacttctagc

SEQ ID NO: 5675 - DNA, 2144 bp, Zea mays
  Clone ID: 700468961_FLI
ctttgccagcgccgccgaacccgccaccagccttctcccatcctcgaagcacggaaggctcccagaaggagctctcacctcgcagccatctctggcacgtccgtccttcttctccctcggtccctccccttctccacagctatcggattggcgttggagtggagatcgacccgggctcggtattcccttcgttggtaaggaaccctaatttggtcagatgggatttccaacttcgacaaagcccgcgagctcgatcgatctcagttgacgcgagggattggaaaactaagttgcgggtgtagttaattttctaggaagattggggtttcagctcaaactcccatgctcgacgctgaggacgaccctggcgggagatgacgaggatcttcgtgcagcgcgggaccgccggctcctcgtccagctccggccgctcgggcacgcagccagtgcagccggcagcagctgcccgggaggaggagttgccgctgcaacctcaaccacagctgccggagctattggccatagatgatacaactgataatttaaatgagggcagcgagaatatcagcaataagcctttgaggacggatgacaccatttcagagagctcaagctccgcagaggagagggctgccagggagaagcctcttaaggatgactctaatgtaatcaaccccactttcttagtagaggaacctgtagggatccagatccctgatcagattgagcatgaaaattctgtgctgtcagtcactggttcatcacagatggcaggtgcagcatcgcacccaccaccaccgccagctccacctccaaaaccattgttggggaataatggcttgcggagaatggggcctggaagttcgaatagtgtgcggattggatcttcaagaaggccagtagcttggccactagtggcagcccggacatctgcttcaggttctcggccttcttcacctaggtcacttgttgatggggaaggttacaacagtgctgatgaacagggcccctgttatgccttgagttatgatgattcggaaagggagcgtatgtttgaccatgacctaaggcgagtgaaagggttggaaatcagaaagatggccgaagatgggaactgtctattcagagctgttgctgatcaagtttatggagacgcagaagcttatgacatggctaggcagatgtgtgttgattatatggaaagggaacgggatcatttctctcagttcataactgaaattgaaagttttacattatactgtaagaggaaaaggagagataaggtttatggcaacaatgttgagatccaggcatttgcagagatgtacaatcgtcccattcacatatattcctacagtacagagcccattaatatttttcaaggaagctataacacagacgttcctccaattagattaagttaccatcatggtaatcattacaattcagtggttgatccccgacggcagacagttggggcaggacttggatttagctcccttagagggacaaataatgttgacagggaccaggtgaaggctgcaataaaagctcagcaagaccagcaaattgagaatgcacttttagcagaagggcgattctactctgatctggagttaacagagagggaaatagaacggatggtgatggagtcctctcgttcagaatatctcgccaaggagaaaaagcttaacattcgggagtcatcgacatcaagggcagagccatcttcatccgccgcaattagtggttcctcccgttcagttgctggagctgatagaggcaaagaggactactttgtgcttccagatactgcactaactcgcagcatgcagttgctcctcgcaatgggcttcagctacatccaggtcatggaggcctacagcatattcggcgaggacgtggactcgatggtctgctacctgttggagacaggaggcaccggagcctcagcaggcggtagcaatcaccggaaaggaaaggctgctgagtgatctgcacaccttcattgctgtggatgtaatcgttgatcgaaatcgttgggcatgaggaagcataccagataatgacagccttgtgagttgatatgtcgatacacctgctaccttttgggtgatgaataaatggaactcacacttgagact

SEQ ID NO: 5676 - DNA, 718 bp, Zea mays
  Clone ID: 700468993_FLI
gggccctggccgacggccgcatcacgcagatcgtgtacaagggcgcgcacaaccaccccaagccgctgtccacgcgccgcaactcatccggcggcggtgcggcggaggagctgcaggccggcaacagcagcctctcggccgtagcggcggccggctgtactggaccggagcactccggcgccaccgccgagaactcgtctgtcaccttcggcgacgacgaggcagagaacgggtcgcagcggagcgacggcgacgagcccgacgccaagcgctgcaggaggacggcgagaacgagggcagctctgcaggcggcggcggcaagccggtccgcgagccccggctggtggtccagacgatgagcgacatcgacatcctggacgacgggttccggtggcgcaagtacgggcagaaggtggtgaaggggaacccgaacccgcggagctactacaagtgcaccacggcggggtgcccggtgcggaagcacgtggagcgcgcgtcccacgacaagcgcgccgtgatcaccacgtacgagggcaagcacaaccacgacgtgcccgtgggccgcggcgccgccagccgagctgctgctgcggcggcggcgggttccggggccttgatggccaccggcggcggccagctcgggtatcagcagcaccagcggcagcagccatacaccctggagatgctgagcagcggatcgtacggcggcggcggctac

SEQ ID NO: 5677 - DNA, 2567 bp, Zea mays
  Clone ID: 700469003_FLI
cggctcgcctccctccccccatccgccgccgccggctcctcctctagctccctccttaccccgagctttaagctcgtgctacctgcctacctatccgtagggagagagagagagaggggagaaggttcggtcggtcggtcgggggctctcggatctcgccgctgcctccccgtttcttcgttgggatctcgctcgcttcgcgccatggccgccgtcgcgacgccaccggcccccgcgcccgccgcgccggcaccggcaccggcaccggctgctgctccggctcccgtcaccgtcgcccctgccgcggaccaaaccacggatctgctgcagaagttgtcgctggattcgcagcccaaggcggcgggtgcgacagagcctgctgctgctgccgccaaggagggtgctgtgacaagccagccgctgagtgtggccatcccgccggagcggtctatcacgccggtgcttcaggactttatggatcccaacctgttctatctaccagcgtattactatggaggctacgacagttccatgagcgagtgggatgattatccaagatatctaaattcagatggagtggagattgccccagcagtgtatggagatatttatggatatgggtatgctccttacggggcatactctccggccacttccccagttccaacggttgatggtcagatgtttggcgcacagcattaccagtatccaaccacgtattttcagcctcctacaccaattccttctaccactcaaagcaacctccagtcttccaacaatcctgaaaagccagcagctaaagcagatcctgccaaggcaaccgctaatggtgttccaaatggtactggtcacactcacagttacagtggaactgtaccaagccaacaaagttcagcactgacgcctgatggaacttatagggcgcccttgctaggtggagttccttctgctggttacctagacacgacatattatgggtatgacagcacaggggcacaatttgcatggtatgatggctctgcttatgcaaatggacagcaaagaacaaccacaactaatcgttttccatcctcgtcattcagtggtaatggttcatctgcaatatatcagaacaagagctccaccacgcagcagatgggtatgcagaatagaagacctacaactacatcagcagctcctacctatcccaataggatgtaccctagcccccgaccgtacacccagtatgggaattcagtaaaaactggtcttccctacgggagtaacggttatgattccaggatatatggtcgatgtggtcttggtaatggtatggataacaggtacaggcccagggcatgtagtggatactatggttatggcaatgagagtcaggatggaacaattgagttaaacagaggtcctagatctggccggttcaagaaccagaaattgtacggtcatactgtcactattgctgtgaaagggcagtctctcccttctagtgaaagcaagaatgatagtgctgtgcctgatagagcaaagtacaatagagatgacttccctgttcagtacgatgctgcaaagttctttgtcattaaatcgtacagcgaggatgacatccacaagagcgtaaagtacaatgtgtgggcaagcacaaccaacggaaacaagaagcttgatgctgcttaccaagaagctcagtcaaagggatctgcatgccctatattcttgttcttctcagtgaatacaagtgggcagtttgttggtgttgctgaaatgactggcgccgttgattttgagaaaaccctagagtattggcaacaggacaagtggaacggctccttctctgttaagtggcacattgtcaaggacgtgcccaacaatattctcaagcacatcatcctggagaacaatgagaacaagcctgtcacaaacagccgtgacactcaggagatacgcctcgaacaaggccttcagatgctcaagatattcaaggatcatgtcagcaagacttccatcctcgacgactttgccttctatgagagccgccagaagttgatgcaggataagaggtcgaaacagcagcagctccaaaagcaggtctgggacactaggacccccgtttctgtcaccggtgaacgaccgcaggaacctgctgatgggaagcccaatccgtccgtaccagatggtgtcacggcagaggtgaaggcggtgaaggctccctcagagaacggcatcactgctcctgttgtttcctatgcagcaaaggtggcccagacagcaccagagaaacccgtcctctccaacggagtcgccaagaccggttaactcgaccgtgcaaccagagctccatagccagggtggggtgggtgtcctgaagactcagatgcggtgcaagggaactggtgaccaaccaaggcatgtgttgctcgatcttctcatcgctactggatggagagcagttggctagttgttagcggtttccctagtttctcttcctcttgtgttcctcgtttcagtttgcttatagccccgaagactcttttctcccgtagtgtcggaatgccagggtctgtccctgtggg

SEQ ID NO: 5678 - DNA, 1586 bp, Zea mays
  Clone ID: 700469008_FLI
cgaagggacactgcgtggggaggggaagggcggagagcgccagccacgcggtggggggaaaacccgaaaagagaaagggctgtgtacctttcgctttgttgcctggctctggtattgggttccccgttctgctgctcagctcagcccagccccagagcccctgacctgccgtcctccctccttccctccccgtgagtcgccgtacggcggtacgggatcgccaccgcggcgtccagggatggcggacgggagcctctacgcctggtggtgctgtgccttgggctgggcgctggcgcttgtcgcagcggacggcttcctcgtggacatcacctatgtggaaagcgccgtggccaaaggagcagtgtgtttggatggtagtgcgccggcgtaccatctcgcccgcggctccggctccggtgagaacagctggctggtccatttcgaggggggaggatggtgcaacaatgtcaccacctgcctgcaacggaagcgcactcggttgggttcgtccaaggagatggcgacgcagattgccttctccggaatcctgagtgacacgccggatgacaacccagatttttacaattggaacaaggtcaaggttcggtactgtgatggttcatctttcactggagatgttgaagaagttgaccctgcaacaaagctacattatagaggtgccaggatatggcaagctgtcatggacgacctgcttgccaaagggatggacaaagctgaaaatgctctaatttcaggctgttctgctggtggtttaacctccatactacactgtgacagatttcatgaccttctgccgccggctgcgagggttaagtgcctttctgatgctgggttcttcattaatgagaaagacgttgcaggagttgggtacattgctgcctttttcaacgacgtcgttacaacacatgggtcagcaaagaatttgccgccttcatgcacttcgacgttacctccaggaacgtgctttttcccccagaacgaggtgaaacagatacagacacctctgttcatcctcaacgcagcatatgattcatggcaggtaaggaacattttggtgccaggagtagctgaccctcatggaaaatggcatagctgtaagcatgatatagaccagtgctctgcatcgcagctacgggattcaggggtgattttctgaaggaagtggcagaactagggaactccgactcgagagggttgttcataaactcatgcttcgtgcactgccagtctgagatacaggagctatggttctcatctgactcccccgtgctcggaaacacaacagtagcaaacgctgttggcgactggttcttcgaccgcagctccttccagaagatagactgcccatacccttgtgactcgacctgtcacaatcggatctacgatgactcatcacaagcatagcaattacagtggcctcacttcgtactgccattcaccatgttattacatttgacgcttccagcattgctaacagtagggcaatgcgttgatagccattgatttttttttttctttttacgaataagatcaggtgccggcggctttaactcggttgctaccgg

SEQ ID NO: 5679 - DNA, 998 bp, Zea mays
  Clone ID: 700469036_FLI
ccagccgccaccaggtgcagagtctttcgtcatctcttctccggcgaagaacccccagtcgcccaccagatcacttgttaaactttgttgaggggtgatggcggtttctttcgcaaacctcaacaccgaggcagggcttaaaaagcttgatgagtaccttctcactcgcagctacatcactggctaccaagcttccaaggatgacttggctgtctacacttcgttttcgtctgctccctcgtccaagtatatcaacgtagcaaggtggtttaatcacattgatgcgctcgtgaggctgagcggaattactgcagagggccaaggtgtgaaggttgaatcctcagcagttccttcagccccaactccagatgttgctgaagcacaggccccagctgctgaggaggaggacgatgatgatgttgacctttttggtgaggagaccgaagatgagaagaaggctgctgaagagcgtgctgcagctgccaaggcttctggcaagaagaaagaatctgggaagtcatcagttttacttgatgtgaagccatgggacgatgagactgacatggccaagctcgaggaagctgttaggagtgtcaagatggaagggctgctctggggcgcttccaagcttgtcccagtcggatatggtatcaagaagctgcaaatcatgatgaccatagtcgacgatcttgtctctgtcgacactctcattgaggactatctgtgcgctgagccagtgaacgagtacgtccagagctgcgacatagttgccttcaacaagatctaggcgtgactttcgatcagtccttcccctggggtgctggcgatggtggtggctgggcaatgcaccagcctaatttatccatagctctatgtctgctttgtttggccagtgatattgccgtgagtatttttggatcctattcgagtcgaatgtaccagtaccagagttaatttgctttaattcgaaacaccgttccggttggaattctgttacc

SEQ ID NO: 5680 - DNA, 1466 bp, Zea mays
  Clone ID: 700469048_FLI
cccccacgcgcagcaggcagagcgcagcgagctcgccggcgtccatggcgtggcacctctgctctccctctcgcagcgccccctgctccttctccctcgcacagcagcagccgagcgccctccctgctcctcctcctggcgagcggctgcagcagggagtcgtcttctccgtggtcggccagcaatcgagctccccagcgtttccctctgctgtccatggcgtgggcgagctctgatccatggcgccctcctccccttcttcttcctcaagccagcaggcgcctccccctactccctgggcacagcgcccccttctctccccttggtcacggcttcctctgcttcttgctccatggcgccctgaattttcagcagagagctttttttccccattgccgacccccactattgcagactgagccccagcgtcgcccagcagccatggcgcccaagctctctgctcccatctcctccttggcgcagtgggagaagctcccatgggcgccacccccctgcagcttcgccttgccggcgcccagaaattgcagcagcagctcctcccctctctccatggccgacgctcagagctccagcagccgctcctccaactccccatggcgtactgcagcagacgccttggagcaaccccgccatggcttgcgactcggtgtcctccctgcttgcgtgctgctgcgcagtgcccatggtgcttgctaggtgctcgacgaaatgtgcggcaaccccgtcgtcttcgtgcgctgtcgactcgctgtttggttgagccaatggacaacacgccgtgatgccgccgtgtgttcgctgtttttgcgcagccccgaacatcgacgtcgttcaccccggtgagatcgcgacgctccttgtttggttccgcatcggcgttattttcatacgattaattgtgtatgtgtgctgttttatttttgtggaggagagaaccccgtgttttgcgagaagaagggaagccgctcgacgctcgtcgatgttcgtagcgatgcacaaatcggaatctccatcgtcctcacaaacatcgattgggtttgtttatggaccgagagatgctgatcgtgcaagtgatgtggtgccaacaacaagatgcagttggtggacgacctaaagagtgatggacttaaccagtggatgctcgccaagcgagtacctcccccagcaaacactatctaagtgttaaaaattaaaggtactccttaggatgattggttgatggtgtgacttggccttcatccctgccaccgggatagacggtcgagtgggttattgcttccgcaggagaggacccggaggagtagcgtggccaggcttcgccatgttactcggttttctccgttagttatttccgctgcattaagatttatggttattatttctgaaactccgataatgtaatcactaattatacttattaaatttgtggtattatgttttattgt

SEQ ID NO: 5681 - DNA, 1721 bp, Zea mays
  Clone ID: 700469055_FLI
ctcccctccgcttctcctctaggtccctctcctacagaacccttccaatccaaagcgaatcctccgggccgccgcggcggcgtctccccgggcgcccctagcacagctcgcgttccggtggaacagagaagagaggcgagaggatggagatccagtcgtctggccgctccatcgaggggctgatggagaaggtgctgtccgtgaacatcctctcctcggactacttcaaggagctcttcaagtacaagacctaccacgaggtcgtcgacgagatctacaaccaggtggaccacgtcgagccctggatgaccggcaactgccgcgggccctcctccgccttctgcctcctctacaagttattcaccatgaagctcaccgtcaagcagatgcacggcctgctcaagcaccaggactccccctacatcagagctattggattcctctacctacgatacgttgcagaaccgaagacactttggacttggtatgaaccctatatcaaggatgacgaggagtttgcacctggatcaaatcgtaaagtgactacaatgggcgtttatgtgcgtgatctcctccttggtcaggtatatctcttgaagttatttcacaattattccatataaaaaaacagtatcctgagctgctatcacagtgtctccttagttatccaactacatccgagggcagagaccgttaaccatattattttctgaacttaaatgcaattagtcttccttgaatcactcacctgttgatttggcatactgaggggatgtttcaattgtggagttgcttttaagaggagacatcatctcttccgccagtaacatcactgtataagtactatttcgacagtctccttccacgagtgcctctcccaatcctccgacaggtcactagccaccttgagaagctaaagcttccaacaaagcagtcaggaatgactggggattccaacaggcttgaatcaaatgataccgccagaaggcctccttccgtaaaggcttctttgtctgtctcctttggtcagcgcgctccacaccgtgcatccacaagggattcttccccggtccgaagaacgttaccttccaaacaggacaaggaaggtgaccgtgcgaaatcgccaccgatgaagcaccggagtcggagctctgagcgtgatcatgatttggagagggagcgctcggatcgtgaacgtggcagtggcaggtactacaaggatagggagcctgatcggcatgctcgtgagcacagagaccgcgatcatcgtcggtctgattattcgaacagggatggcgaaacacgaggccgtgaaaggagggacagggattctgaccggagtagacatgcaagcgtccgcaggagcaggagcaggagtccagtccgtggcagaagtgatggcgacaaacatcgctccagcccgtttggtagggctccagaattgtcgaacctggcgaagctgaaggatctgtacggcgatgcgacaaacgtgaagaatgatgctggcgacgatagggcgcacagggattctggaacggaagaggtgatccgactgggaggggcaaggtggaggtgagtctcatgttaagggacagtgggacaccacggtgatgcatttaggtccatgaatgaatccaaacagcatcagtggaggaaatgatgggctgtatgtcttaacttgaacctacgatttcaatgctttattctgaaggttttcctct

SEQ ID NO: 5682 - DNA, 1025 bp, Zea mays
  Clone ID: 700469088_FLI
attggagagagagaaaagaaagaaagaaagaacggcgaaaaatggtcgatgccggcgacataacggccggagggccgccacgcgctcacgaggaggagcaagcgggaactccggcatacggttcggtggtcctcggcggcacttttgaccgcctccacgacggccaccgccgccttctcaaggcctccgcggatttggggagagaccggatcgtggtgggcgtctgcacgggacctatgctcgccaagaaggagtatgcggagcttattgagcccgtcgacaagcgcatcaagggtgtggaggattacatcaagtctataaagccagaactgatagtacaagtggagcctattgaggacccttatggcccatccataactgacgagaagttggatgccattattgtcagtaaggagacattaaatggtggactggctgtaaataggaaaagagaagagaaagggttcccactgttgaaggttgaggttgttgatctcctttccggtggtgtggagggggaaaaattgagttcttctgctttaaggaaacttgaggcagaacaagctcaacaaagtgaaacaaaatctggtagccttgaagcttcttagggaggaaaatgaatactttgatctggttagctgaatgcacaaatacgggggtggtctgctccaagctcagtgtgaacaaaaaatatgatcagagctgacagtttggttacctttctagaggaataatcttcgaacactggcccatggccctgtaacagtattgctctaaccttctaaaatcaacctggcaacatagactctcccctactaaccaaatttacaaattttgtattggcaatgccatctgaatgttaaaaggaaatcttcttgggtttgtataaatatctacaattgtgacaaagctacaaacgaatatggttccccttcgcaagaacccatgcaatgtagcttgtcattataatctttgttctcttgaaacatattgtataattatgtgtatatacgcattggttgatc

SEQ ID NO: 5683 - DNA, 1261 bp, Zea mays
  Clone ID: 700469144_FLI
ctttcaatgcccatgcctatgccaaaaaatccaaagattgcccttatgttcttgacaccaggttcattgccctttgagaaattgtgggagaagtttttacagggacatgagggaagatactccatctatgtgcacgcatcacgtgaaaagcctgttcatactagttctttgtttgctggccgggatattcacagtgatgcggtagtatggggattgatttcaatggttgatgctgagaaaagattgttagcgaatgcactggaagatgttgataatcaagtttttatcttgctttctgacagttgtgttccactgcattcatttgattatgtgtataattacctcatgggaacgaatgttagcttcattgattgtttcaaggatccaggtccacatggcagtggaaggtactctattgagatgtatcctgaaatagacgagagggattttagaaagggtgcccagtggtttgcagttacaaggagacatgctttaatgattctggctgacagcttgtactacaagaagttcaagctatactgcaagccagcagaagggcgcaactgtattgcagatgagcattatttgccaaccctgttcaatatggtagatcctggtgggatctctaattggtctgttacacatgtggattggtctgagggaaaatggcatccaaggtcatatagcgctgatgatgtcacctatgatctcttgaagaacattacagcagttgatgagaacttccatgtaacaagtgatgacaagaaacttgtgatgcagaagccgtgtttgtggaatggatcaaagagaccgtgctatcttttcgctaggaagtttaatcctgaagcacttgacaacctactgaagcaatttaccagttacacatctgtttgagtcctaccggattctttgccttgtgctgtcaaatccgacaagcttttttctcttcctgtttatatgtaaattgtgaagtccgtacttattaggatctgggcctgaagataccggtacaactgcaacagctgtgatggcttggagctgagtcatgggtaaaacggccacagcgatgtttatagaatggcactgccctcatagtaatttatcgtgttcaatgtatgtctccatagtcttccacccaactcccaactcattagttctttattcttggagaacagtttttgtcagagtgttatactgtcatgatatgatccattctttgtagacacagagattacaacagatgtatcacaaatgcagtctt

SEQ ID NO: 5684 - DNA, 1703 bp, Zea mays
  Clone ID: 700469166_FLI
gttgcaggtgcttttgtattggtattcaacagatgtggacatcatcaacaatgctgttattttgtttatatattacttcataggtatctttatttttctttaggaacaattggatctataccattaaaagatccaaactttagatatataccatggaccccacatgtcattgactcatgtggacccacatgtaagtgagatagtaatggtatggatccaaattggtgatcttttaatggtatggatccaaatttcccttttctttatgtctagcaacaacacaccagttgttatggtcgctagatcggtgagggattggagagggaattcaatggttggagctgctggtggaggtggttcggtactgttcacagggcgccggccgggggggggggggggccctctgcccacgggcgagcaagaggggttttatttctcatccattgattacataaataggccggctggccgcccttatttagctagagatccttatctccttaaaactctcaacaaactactaactgataactttcctagataatcttaactgatcttctaaataatctcaactaatcttctaatcttatctctaactatccttatctaattccccttggaggactcatggttgctgctgccgcagcccctccgtaggcctcctttggccctgacacctgttgtctcatctacagtccttcactaacgtagtttgtgtttccaatgccgtttatactcaaaagcgggtgttcttgttattaagcactgttttctatgcaagtatgcattttgccatcaggtatatgtacttacgcttctaggccagatccttttttccttgcatccatatccccagtcccacctgcaagcattcatgtgatttggtgttggacttggcactatttttctgtaagggcattacaattcactttcctttgtgtgtttgggtttatttgaatctctatccatgtctttgcagcttattgccaagctgtattttacgaagcaaatgacatgctgcttggtttgtagatgcaaattattgttgtgaatagatcttgaaaatttgtacttggtgcacttgcgctgtgcatgtcgaagtgcaatgtagaattattttaaatgaaaggatgaaggtagaaaccatggtgtatgttagcttgtttacacattaaaaatctagactagactacctcttgagttttctcttttccaactgtgcttatttactggatcattggtgtatatttcttgtaggctcgtcagtgccatcaggatttgttctatggatcatgagagagatgcctcatcggcaggtagttgaaagatccgtagaatcgagggtggttactttgttcagggaaagaccatcaactacgcaggatccacagtggaggacagctgtcacatcctcaaacaaggccctcaagtcaagcccaatttaacctgaagacaaaccatcgacagtgatacctcacgttctgcttaatgtgctgggactaataccaacacgtcagggtcacaactggcgtctgctggcattgcgctaactgatgcatttagaactgaaggttggggcaatatttgaagaattaacaaaatgtaaatagctttggcagttactttacccttttagatgtaacaaactcatcccgttggttacatgtaccttgttttatttagcgcttcatctaatttaccgt

SEQ ID NO: 5685 - DNA, 1138 bp, Zea mays
  Clone ID: 700469208_FLI
cagccgacagccgccgagcaaaccggctcctccggtcggtcatccactcatcctcatcccctggcccctgcccatccgatccgatcggtcatcccctacccctacctgatcggatcccctgctcttccgccgagcaccaccaggcagcaggctgcagccgtcgagcaccagcaggagcacggccaggaggacgacgcccgcatcctgcctcttctctgctgctggagcttctgctgccaggagcacggccagaaggacgacgcccctgctgctgccggtgagcggtgatctgctgcgcccccatcctgcctcttctcctccctctcggcctcgcctcgatctgctgctggttgctcttctatggagacttccaaagaacaggcttccaaggactatgctggtttcgagaagaaagttaagaggacaatatatattgaccacctttctcctcaagtaaaggaatcggccatcaaagctgctcttgcacaatgtgcaaatgttgtccatgtggagttcatcgtcaattacacgatcccatataaagatattgcttctgctgcattggtggaattggatgatgacgtgcaggctaaggctgctgtagaattgatgaatgatttcccgttcataattgggggaatgccaaggcctgtaaaagctatccatgccaaggctgagatgtttcgtgatcgccctccttgccctggccttcgaaaagatttctgctgggtaaaacaaggagataaggactatgaagcgatgcagaaattgaaaaaccttgcaaagaggcaggaatctgagaacatggccctcatacagaaaatcttgaaagatgagaaggaactggcgactcggcagcaggaggtgcttgatggaaactgcaagaagtacgacatgctggaagctctagtgcagaagggagacatcactaaccttgctcaacaatacggagtgaacttgaacgactgatgagtcattcgtgtctttttcccccttccccttggagcgatggcgcaactggtgtgatgatgatggaataggatagcatgccatagttttggtccggtatctggaccctccctctggtgtaaagactatcccaacttaggcttgggcttttcagccttctttggctctc

SEQ ID NO: 5686 - DNA, 753 bp, Zea mays
  Clone ID: 700469321_FLI
gccctaccgaatctttcgccgccccatcagcccagcagttcttcgctgttcgttgccgttggttccatcggttgatcgaccggcctggagcagagagacagagagagatgggcaagtcctgggcgctcatcagccacctccacaccgtcgccgggccgagcatcaccctgctgtaccctctgtacgcgtcggtgtgcgcgatggagagcccgtccaaggcggacgacgagcagtggctgtcctactggatcatacactccttcgtcaccctcctggagatgctcgccgagccgctcctccactgggtacccgtgtggtacccggccaaggtgctgttcgcggcgtggctggcgctgccgcagttcaagggcgcctccttcgtctacgagaagctcgtcagggaacagctccggaactaccgcgccaggtacctgcgcaagggcgccgccgccgccgtcgtcgacgacgacgaccataaggtgcacatagccaagtgaaagcgtgtggagactggagacgacgcaggagctgaccggagatcatcatcagaggaacttatgtagatctggtgttccaaggtgttcattcgatgtatcatcctacgtatctctgtaactcttgtggactgccggtgtcgcgtaatgtatctgaactcttcgtgagtgcgatggaacccccctccccttgcagcacgagatgcttctgtaagaacgataacatgtagacaagccaagcgcctcagctccttaagtg

SEQ ID NO: 5687 - DNA, 1116 bp, Zea mays
  Clone ID: 700469525_FLI
atctcatcctccagcgcatatgatggccttctggaaaattgcagggttgctggtgactccacgaacaccgcaattttccagaaggccatctcatcctccagcgcatatgatgatcagttcaagcagctcatttcgggcggaaaggacgcggagagcgcttactgggaacttgttataaaggatatccaagacgcgtgcagtctttttgagcctatctacgatgagaccgatggggctgatgggtatgtctccgtggaggtgtctcctaggttggcaaatgacactcaaggaactgttgaggccgcaaagtggttacacaaagtggtcaaccgccccaatgtctacataaagatccctgctaccgccgaatgtgttccttccatccgggaagttatcgctaatggcattagcgtcaacgtcacgcttattttctctattgcgagatacgaggctgtgattgatgcttaccttgatgggctagaggcttctggcttgagcgacttatctcgagttaccagtgtcgcatccttctttgtcagccgagtcgacacccttatcgacaaaatgcttgagaagattggaacacctgaggcacttgccttgagagggaaggctgccgtcgcacaggccaaactagcaaatcggctctaccagaagaaattctctggcccgaggtgggaggcgttggccaagaaaggtgccaagaaacagaggttgttgtgggcatccaccggtgtcaagaacccagcttatcccgacactctttacatcgacagtctcattggacctgacacggtcaacacgatgcccgaccaagctttgcacgcattcatagaccacggcactgtctcgaggacagttgatgcgaatgtgtccgaggcggaaggtgtatacagcgccttggagaagcttggcattgactggggcgaggtcggaaagcagcttgagctggaaggtgtggactccttcaagaagagctttgacagcctactcgtgagcctacaggagaagggcaacagcctcaagacggcaactgtgtaaaactgagaagattgggtaccggcgggtgaacgattttactaaataaaatgctagcttgctggctctcttagtttt

SEQ ID NO: 5688 - DNA, 959 bp, Zea mays
  Clone ID: 700469527_FLI
ccaacgccgccggagtctgtcgccaccgtcgctgctctcccgccttcaccgcgcccaactctcctccttgcctcccctgcgcgcttcagccgcttcactccccatcgttttcgcctggccaggatctactgggaccatggatcaagaaaaaaaaactagaagtatctaataccagccatacttacaagcatcattgtagcgttggagttgacgtccacgagatcttttttaagaggagcagattgcgggttgttctgtcatacattggcattattttccttcttgtgaatgcctgccaaccattgctgacaaaggagagcctatctcttggatctgtttggaatattacgtttgctgttctggtcgccaaatgtttgcaatacaaacctgtgaagagagaatcagtagtgataatgccagcttttggagttcagctagaaatacatttttggagattctcaagccaatgataaatgagtgcgtgacaccggtgacctgttactggagcttggcgctgcttctgcgtgatgaagaggaactcctgctcgttttccagagatctcgtcctcctgtcaaaatgttggttccaatatggaaagctctctgcacgttgacaaactctcaacacccaagcccttctcaaattcctaaccatgacccttgaggaacatgagtcagctggggcgttgtgtagatgtacgtatcatcagaagaggcacctgcagttgagccagattcagataggatagtaactgttgatgccagtgctaggggcatttgattgttagggagtgatttcggctggaagtgtatacggataaacactagtaatttgtgacactgaatactctcctttacttgcatgcttcattttgttggatatctgaatgaggtgccgaatataagcaaattcaagtgaaactttggtatgtacgtaaagatgcaaacttttgttaaac

SEQ ID NO: 5689 - DNA, 1196 bp, Zea mays
  Clone ID: 700469566_FLI
tgatagtgcattctttctttacttgttaataaaaagttttagtttgtagatttgtcctgaaaatgttaggagcttattacattatcttgtggtgagaaactgttttgctaaaggagaatttattatctttattgtgttatgtggaacttctacaggtggttccattcttgggttgcctcttcttgatccactagctggacttgttgtctctggcatgattctgaaagctggtattaagactggatatgagagtgttctggaattagttgatgctgctgtggatccttcacttctagcaccaatcaaggaaactattttgagggttcacggtgtgaagggatgtcatcgattgaggggaagaaaagctgggacatcattatatcttgatgtgcatatagaggtatatccttttctgagtgttagtgcagcacatgatatcggtgaaactgttcgtcatcaaattcaaaaggagcacaatcaagttgctgaagttttcatacacatagatccctcgtactcagtaggcccgaccatggacctaaaaaggattctgaaggactctgatggaacaaattcagaagctatcccacggcaacaaagtgcagaagccatcgtgtctaatattatttcatctcatttttcggagaaaatggcgctcgaacatctaatgctgcattacgtgcaaggaagagtgttgctccaggtccaagtttcaatgtctccagaaattttgattcgggatgcaatggaagtcgcgaagcaagccgaagaggagatactcagggctgatgccagcataagccaaatcagcttgcagctaagattgggccaacaaatcaagcaacttcagctagcatcgcaagaacgtcgctgatctacatgcaggagatcactgatccatttgctggctgcttcgtgggtctactcgggagtatttcctttcgctaatttttctgacatacatgagagcttggtctgctgatgaggcagtaggctataggattctaggaaccgactgtgtacattgtaatcagagtgttcggagacgtgaagctgagtttgtaataatacacaagcagccttgctcagaaatgtactgggcaacaaattgtctgccacatactgtcaatgtaaaatgtatgaacaagttcctcactggccccgctataataacaacgaaccattgctactgatgc

SEQ ID NO: 5690 - DNA, 2191 bp, Zea mays
  Clone ID: 700469710_FLI
gctggatatccaggagccgcttcccttggtgacatgatctgtggaatggcagtggctaagatcacgtccaaggacattcttttctggttcaggtcacatacagctgctgaaatcaagtggggaggtgcaaagcatgatccatctgatgaggatgacagcagaaggatgcaccctaggctgtcctttaaggctttcctcgaggttgtcaagatgaagagtttgccatggagtgactacgagatggatgctattcactcgttgcaacttattcttagaggtacactgaacgatgccttgaagccggcccagtcatctggtttagataaccagattggtgatctcaaacttgatgggctcgccgaactgcaagcggtgacaagtgaaatggttcgcctgatggaaacggcaactgttccgatcttggcggtagatggcaacggattggtcaacggatggaaccaaaaggtggcggacttgtcggggttgcgagttgatgaagctataggaagacacatacttacacttgtggaggattcttctgtaccaattgttcagaggatgctatacttagctctgcagggcagagaagagaaggaggttcgatttgagttgaaaacccatggctccaagagggacgatggccctgttatcttggttgtaaatgcttgtgccagccgtgacatgcatgaccatgttgttggggtgtgctttgtagcccaggatatgactgttcacaagttggtcatggacaaatttacccgggttgagggggactacagggccatcattcacaacccgaacccgctcattcctccgatatttggtgccgaccagttcggatggtgctctgagtggaacgcagccatgaccaagcttactgggtggcacagagatgaggtgatcgacaggatgctccttggcgaggttttcgacagcagcaatgcttcctgccttctgaagagcaaagacgctttcgtacgtctttgcattatcatcaacagcgcattagctggtgaagaggcagagaaggctccaatcggtttctttgaccgcgatggcaaatatattgagtgccttctgtcagtgaacagaaaagtgaatgcagatggcgtcgtcaccggagtgttctgtttcattcatgttcctagtgatgacctccagcatgcgctacatgtgcagcaagcctctgagcagacagcactgagaaggctgaaggctttctcgtacatgcgacatgccatcgacaaacctctctcaggtatgctctattctagggaaacactcaagggcacaggcctggatgaagagcagatgaggcaggttcgtgtcgcggataattgccatcgccagctaaacaagatactcgccgacttagatcaagataacattactgacaagtcgagttgcttggatttggacatggctgagtttgtgctgcaagacgtggtggtgtctgctgtaagtcaagtactaataggttgccaggggaaaggcatcagagttgcttgcaacctgccggagagatccatgaagcaaaaggtttacggggatggtatacggctccagcagatcctctccgacttcttatttgtctcggtgaaattctctcctgctggtggctctgttgatatctcttccaaactgaccaagaacagcattggggaaaaccttcatctcatagacttcgaacttaggatcaagcaccaaggagcaggagtcccagcagaaatactgtcacagatgtatggggaggacaatagagaacagtcggaggagggcttgagcctccttgtttctagaaaccttctgaggctcatgaatggcgacattcgtcacctcagggaagctggcatgtcaaccttcatcctcactgctgaactcgctgctgctccttcagcagctggacattgaagacatcactgcaaacaagtgccaaatgtaacacagtcctcaagagtattatttctgcccttggtgccagctgcccagctccctcagagttcattcggaaagccacggtggttcgcggagaatgggaaatgctgcagcctgtaggatcaccgaatgcataagaaataagattgacttgtatggttgtttgttaggcggggaagttgtgcaggcatagtaagactccatacttctgctcttttctgcctgtaaccaactgttttctatcagttattaggct

SEQ ID NO: 5691 - DNA, 464 bp, Zea mays
  Clone ID: 700469733_FLI
gttgatggggaaattcctaatctgcgcagtggagatcaaaatgtaaattttgcagctcaaaattctgaagcagcaacaatggagattgacaatgaaaatggagcagataataatagtgaaccgaatgagcgaaacacaaaaaatgcatataatgttggagagcttgagcagtggtgtctctgtacactgggttatctcaagtcattttcccgccaatatgcaagtgagatttggtcaaacattgcaatgttggatgaggtcttcgttggggatgttcacccacttatccgaaaagctgctttctctggtttgcgcagatttaccaatgaagggtctcatccttgaatttgacaccatacccatattctttatagaactgagtgtattgtacctgtatgatagaggacaacttttctccttgtttaactaatcaaataggcataaacatttttccttggtttcgt

SEQ ID NO: 5692 - DNA, 955 bp, Zea mays
  Clone ID: 700469751_FLI
cggcagggtggccggaaacaaggacctgtacttgggcactttcagtactcaggaagaggcggcggaggcgtacgacatcgctgcgatcaagttccgcgggctcaacgccgtcaccaacttcgacatgagccgctacgacgtggagagcatcctcagcagcgacctccccgtcgggggcggagccaccgggcgcgccgccaagttcccgttggactcgctgcagccggggagcgctgctgcgatgatgctcgccggggctgctgccgcttcgcaggccaccatgccgccgtccgagaaggactactggtctctgctcgccctgcactaccagcagcagcaggagcaggagcggcagttcccggcttctgcttacgaggcttacggctccggcggcgtgaacgtggacttcacgatgggcaccagtagcggcaacaacaacaacaacaccggcagcggcgtcatgtggggcgccaccactggtgcagtagtagtgggacagcaagacagcagcggcaagcagggcaacggctatgccagcaacattccttatgctgctgctgctgctatggtttctggatctgctggctacgagggctccaccggcgacaatggaacctgggttactacgactattaccagcagcaacaccggcacggctccccactactacaactatctcttcgggatggagtaggtgcatgcgctgacaagctagctagctgaaatcaggtggtaggcctaggaagaagctaggactgacatggaactgatcacaattttggctgctacatataccatgcatgccccatgtatggatgggggtgcgtgtgcttccttctgcttgctattcacgacacttgctgacttactgtggcagagccgcagagggctcgtgtaccatcagcatttctaaattctaattatcaagctcgtttcaatctatattaattctgct

SEQ ID NO: 5693 - DNA, 1332 bp, Zea mays
  Clone ID: 700469752_FLI
atcgatggttcctcgtactacattgctgatggaatcgctggatgcaaggcaagtgtgttgaattgcaaccatccagtgactcagaagctgattttggacagcctccgccattgggtgctcgacttccatgttgatgggttctgcttcatcaatgctcctttcctcgtcagaggtccacgtggtgagggcctctcacggcctccacttctggaagccatagcatttgatcctgttctttcaaagactaagatcattgcagatccttggtctccgcttgacatatctaatgtgcaatttccattccctcattggaaaagatgggctgagatgaacacaagattctctatggatgtgcgcaagtttcttaagggagaagcacttatcagtgatcttgctacacgtttgtgtggcagtggggacttattttcctcaagggccccagcattttcgttcaattatgtatccaggaattctggactcactcttgttgatctagtgagcttcagcagtgatgagcttgcttctgagttcagctggaattgtggtgaagaaggaccatcggagaacaacgcagtccttcaaaccaggctaagacagatacgcaacttcttgtttattctattcatttcccttggtattcctgttcttaacatgggggatgaatgtggaaactcagctgctggttcaacatcatacaaggatagagggcctctgaactggaaagccttgaagaccgcttttgttaaggaagttaccgggtttatttcgtttctatctgcactaaggagtcgacgagcagacattttccagagatgcgagtttctaaaacttgaaaatatacattggtatgggagtgatttatctgagccatgttgggaggatcctactagcaactttctttgcttgcacataaatgcagagctggacgagaagctaccagattcgactggaggtgatttgtatatctgtttcaatgcaaacgaggagtcagcgagtgctactttaccagctattgcagaaggatccatgtggctgcgcttggttgatacatcacttgcatttccaggtttcttttccagagggtctagtcatgaaacacaccaggtgctaggattttcctcatatcaagtgaaggcacatagctgtgttctgttcgaatccaagagggttctttcatagtttgtgatgtcaaacatgaagctcgtgtggtttcagcaataattaggaactttgtggttactatattactatctaattttgggaggccctcagttccaataaattgccaattgtagatggaatgtttatgataataaagttcttcattttcat

SEQ ID NO: 5694 - DNA, 1455 bp, Zea mays
  Clone ID: 700469777_FLI
ggcgacacggcgtgcccccacgaactccgccaaattcccccaaacccacctagcaggtcggaccccgcaaatcgccccccaaaccaaccgggccggccgacacaagcagcatcccgtcggcggcgatggacctggcgtcgagcgacctcgcggcgctgggcgcggcggagctgatccgcgtctcggcgtcgatcccgcgcgcggctccgcgcaccttcgcgctgctcaccgcctgcctcgtcttcccgctctccttcgccgtgctcgcgcactccctcttcacccaccccatcctgctccgcatccggggcgccgcccactcggggttcgcgccgtggctcggcctcttcgcgtaccagttcatctacctcatcgtcctcttcaccttctccctcctctccaccgccgccgccgtcttcaccgtcgcctccctctacaccgggaagcccgcgtccgtctcctcctcgctcagcgcgctgcgccccatcctgccccgcctcctccgcaccttcctctgggtctccctcctcatgctcgcctaccacctcgccttcgcgctcgccgtcctcctgctcatcgtcgtcttcgcccccaacgcgtccgagtccgcgccgccctccctcgccttcgtcctcttcctcctcctcgtcgtcctcgtcttcctcgggatccacgtctacatctccgcgctgtggcacctcgccagcgtcgtctccgtgctcgagccgctctgcgggctcgctgccatggccaagagcaggcagctgctccagggccgcaccggcaccgcagccacgcttgtcgtctcctacttcgcggtctgtggcgcgacctcgttgctgttccgtgccgctgtcgttaagggacgcaccgaggaggggagcttcggcctggccttgcctggccggctgcttgtcggcgccgtgctggtgtgcgttcttgtctctgtcaatctgctaggactgctcgtgcagagtgtcttctactacgcctgcaaggccttccacagccagcagattgaccgcactgcattgtatgagcaccttggaggctaccttggggagtacgtgccactcaagagcaatatccagatggagaacctttgagagttggagcataggacaagggtaatcttctcacctctcgttgctacatactagcagttttctatggatctttctcgaaagatgactatggtttacttggagctatatatctggtcttgttgattctaatatcctgtagtagtttagtttagaatctgtacaagtgaaaatgcgcagtatggaaccaatctacgaaatggaacgtagatgcatgaacaaggttgtctttcgtctcacaaacggtgttcttgtttatcattgctttcctgtgtgtcatgttattgttcttgactgtgattcgtcattttgagactgagggttaacatgcactgacgcacaattggtttcc

SEQ ID NO: 5695 - DNA, 865 bp, Zea mays
  Clone ID: 700469921_FLI
gccgtgccgaaggcctcgccgcgccgctcccacacactacaccctcgccgccgctgagactcggcaaactgcctcccgttccatgggctgcgtaggatccaccccggccaccaaagatgccgggggaagtagcgatgtcaatcatggcactaagagagtgaggaaacccaaagcttggaagcatccccaaccgataaccatggcccagctcaggcagatgcgtgaggagttttgggacaccgctcctcactacggtggtcagaaagaaatctgggatgcccttcgagttgcatcagagtctgaggtatcccatgcacaggctgttgtggaaagtgcaggcataattgtttctaatgccgatctgactctctgctacgatgaaaggggtgctaagtatgaattgcccaagtatgttttgagtgaaccaaccaacctgatccgagacagctgaacggcagccggccgtaggaagacccaccgatgtaaaaactgtaaatgactgcagatgccgccaaattggtcccttgcttgtggtaactggagtgcctcgagtaaccttcagatttgctttggcaactttcggcaatagggttttccagttctagtgttcagataaaaaaaaacttttgcgtaccctcgtctattgttcttggttctactgtaaacatgagtctgcttagaattctttggagcgagaatgctgctgagattgttctcgtccactatcatgatacaagctggagcatacgttttagaaacttgtcacatctcgtgcaactaattatattattatgtggtctggtctgacatttgaaatgaaatgcatgataaggagcaaatcgcaatctaatttttacattatcgc

SEQ ID NO: 5696 - DNA, 1182 bp, Zea mays
  Clone ID: 700469944_FLI
gtcgttccctgttctcttcgtcgggattcaaggatgcgacgagagggaaggcaacaatccatcatggttcaacaggattgaagttagtaaagtagtatctatcatcaggaacctgacaaggggtgaggatgttcatgaatctgatataggagtgatcactccatatcgtcagcaagttgccaagataaagaaagccctggaggcatttgaaatgcccagcttcaaagtcggaagcgtcgagcaattccagggccaagagagggaggtgataatcatctccacagtcaggtcgaccgtaaagcacaacgagtttgacaaattttttaacctgggattcttgagcaaccatagaaggttcaacgttgccatcactcgcgcaaaatcgctgctcgtcatcatcggaaacccttacattatcaccaaggaccgtcactgggataggctcctgcggtactgcgctgacaacggctcctatcaaggatgcccccttccaccaccagagtctccttattcagacgacgccagattcttttccaagtacgacgaagaccaaggtggaccttctgggcaggactacagccaagagcctgcctactgcaactacaaccaagagcctgcctactgcaactacgacgaccaagagccttctgacttcggttcggggcatgacactggtgttgctcaacctgaacctgcttcggagaatcaagagtcatggtccgaggagttgcctgaagacgagagccagccattcagcaacccccaagcagatgttgaggagacgccgaagcaggacggcgaggaaggggctgcagctgcacagggagacgcgcaggccgaccagtcgttgaccaacgacgacagtcagctccaggacgcaggcgcggggaagtacaccttccctcccggttggtgcgacgtttcgagcatcccggcaacgggctggggcgactgatcagacccgcaaccgcaaccgcccctggcaggggggtacgttgggagaataactgaggctgatggcctttcaccctccttccatcaagcctccactcagctcactgctgaacagttgttgtagcgagtgagctgcgtccgtgtgtttaggccacgtgtgccaggtgctggcaacgtgcaatatggtgggttagctcgcgtgccattgagcgtgtgctaatggttttt

SEQ ID NO: 5697 - DNA, 1905 bp, Zea mays
  Clone ID: 700469953_FLI
gcttattttgatctccacaagaatgaagattggttaaaagacaagtaccacccaactaacttgttgtctgttatcgaaaggaggaatgaacgttgcaaggttatagcaaaggatttctttcttgatttgcagaatggaactctggacctaggccctggaataactgccggtgcagcaagtaaactaggtggtagtgatggaaattctgaggatgacatggacaatgacaagagaagaaagcatggcaaagattcctcaaaagcaactgattctctttctggtgcccccaaggctcatccagttagttctgaatcacgtcgagtccaagctgacatagagcaaactctagctctcgtgcgtaagcttgatgctgagaagggcattgatggcaatgtactgtcaagtggtgatcatgacaagtcagatgtagacaaatcacacataggatctatggggcctatagttataatcagaggtttaacgactgtcaaaggcctggaaggcgttgagctcctagacactattcttacctatttgtggcgtattcatggtgttgattactatggcacatcagagtcgcatgaggccaagggccttcgtcacgtgagagtagacagtaagacttctagcacatctgatgtcagttctgctgattgggagaagaagctggatactttctggcaggaaagactgaatggtcaggaccagctggtcatacttactgccaaggacaaaattgatgcagcagctgctgaagttttagaacctcttgtcaggaaaatcagggatgaaaagtatggatggaaatatggctgtggagccaagggctgtacaaagctttttcatgctcctgagtttgttcacaagcatttgaagctcaagcatccagaccttgtattagagtcaacgtcaaaagttcgagaggatctttattttcaaaattacatgaatgatcctaacgcaccaggtggaaccccagtgatgcaacagtctgcaccagacagaggaagacggagacctagcatggacagtcgtctgaaatttgaccgtggcagtaacagagaccatgataaagctgatagagatggagtcaggtatggtagaggtgaccactctccaagccgtgatgggcctgatgatcagatgtttgatggtttccgcggacggccctcgaatgctccttttgttgctgaattcccagctccaccgatattgatgccagtacctggtgctggtcccttgggcccatttgttcctgcacctccagagatagcgatgcatatgctgagagagcaagggccacctcctccttttgaaccaaatggcgcaccacatggcaatgctggaatgcttgggccaatgatgggtggcccagcaccgattatagctatgcctccaaatttccgccatgatcctcgccgcctgagaagttataacgacctcgatgctcctgatgaggaagtcactgtccttgactacagaagcttgtagggtccagcacctccagatacccgtagtcaagtttcccgttcccccattggtgaattgggcttttttctctttatgaaggcaaaagatggaaggttatgttcaattaaaccaatttttgggtcacctgtagtctgttagattctgttgtaacttgaatactctgtggatgcactgcggttgctacagttcttgtccaacttttttttgacacagtgctgtaataaataggcgtctgtttggaacctgggtggggtggttgtagtgagagatacgtacttcgccaccttgttgcagtctgcaatgccccttgaacatttgctgcaatccgtgacttcgtcagaagtcagaacgaagacttggtactgggtgttgaacggtttacaaacaataaggtcaaaattcttatcaactcgc

SEQ ID NO: 5698 - DNA, 1642 bp, Zea mays
  Clone ID: 700469963_FLI
gaaaccatgagttctaggtttgctgaaatctcctttgatctttaatctgttcatctccttgcgtgagtctgtggcgttagcgtgatgccttctcctagttcatgaacttccttccggttcgcaatccctagtcgtcttgtcctgatcttacttgagtgctcgtgagctctttccagtggctaaagactgcagatttgagttctggcccaagaaccgcgtgctagcccgccatggaggtgaggtccgagcaagggctgatggcggggagggatctattcggcatgccgaagagcccgccggcgcccgcgccgccgtcgtccgccgccatgcagagcgtgcgcatggcgtacaccgcggacggcaccgccgtgttcgctccggtgagctcttcgcctgcgacgccgtcttaccagccgcagggcgcagcccacggcgctagcatgtccgcggcgacggtcgttggaggcaatggcgctccagctgcgccgagcatgggtgagccgctggccaagaagaagcgcggacgaccaaggaagtacgggcccgacgggtccatggcgctggcaatggtgcctgcttcggcggcttcagggtcgccggcgacagggcagggtttttctgggccgttctcaccgcctgcgttaaatccggcgagctctctggtggtggcgtcgccagacggattcaagaagcggggccggcctaagggttctaccaacaggccacgcgtggacgctgctgggtcatcaggagctggatttacacctcatgttatcacagttcaagctggggaggacgtggcatcaaagattatgtcattttcccagcatggaacacacggagtttgtgttctttcagcaaatggctccatatcaaatgtaacgcttcgtcagactgctacatcaggcagaactgtaacatacgagggtcaattcgagatactgtcgctgtcggggtcattcttcctggctgaggatggtgtccagcgcagccgaaacggaggcctcagcgtgtcgctggctggtcctgatggccgtctgttgggtggtggggtcgcaggacttctagtagcggcttcaccggttcagatagtactgggaagcttcaattctggaggcggaaaggagccacaaaagcaggctccttcagaacctacatcggctccaccgagggttgctccgacagctgggatgggaggacccagcagcccttcttcaagaggcacattgagcgagtcatccggtggcgctggaagcccaccgccactgcatcgagccatggctgctagtgctagcaatagtaaccagccaccgttcttgtccagcatgccttggagatgagtttgcagcttgcattctcttggccaattccaggcaggatgtagcaatctgcgctttcagtagcgcccgttgtgtgagtagctgtgtgcagtacaagccagaagcttgggtgggaatataattgcgtctggtaaatctgtagctctgttgtaggttccaccctgaattcctgtgctaggtgtgttgagctgtgtaagcaatgtaatcctttcagcgttatcaaatgctatttagttaaatgtttctaccaaggcatgtcgatttgaatcataagatatgaatttgctgtttgcgtctcgggc

SEQ ID NO: 5699 - DNA, 327 bp, Zea mays
  Clone ID: 700469967_FLI
gcggctgtaccagtgaaggagaagccgcacacgatgaatcgtcttgaacgttccagacgattcatcgtgtgcggctgtaccagtgaaggagaagcgccaaagcgtgtgccctttacgccgcggaaggtctacaaacagggacatactcctatataggaagatgcaatgcaagagctgtggtgtacttttaattgtaggtgatgtagtagtgtatggtagtatcagcattttctgcattcatgaaatgcacacgcaggtggtgggaaatgtgggcatggatcgagagtcgctgcgctgttaagtagcaataaatgttaaggttcagtg

SEQ ID NO: 5700 - DNA, 433 bp, Zea mays
  Clone ID: 700469996_FLI
gcctcctgagaactggaacggtggtgttgggtttgtgtctaaggaaatgatccaatctcattgtccagcgcctgctgaggacattcagatcctgagatgtggtcctcctccgatgaacaaggccatggctgcacaccttgacgagctcaactacacaaaggagatgcagttccagttctaagcaatgttaagtttgcaaataataattagtgaccgacatggttcttcggtcacaggaatagtacctgactctgctcgttagctgatatcaggaggaattcaggatcacatgatgattagtagtgcgccagcattttttgcaatctctatttttgaggtcaaatgatatctacctccacataaatccacattggcagagacaacattttgttactatcattattgattttaaatgtggaccattggatgcgat

SEQ ID NO: 5701 - DNA, 1246 bp, Zea mays
  Clone ID: 700470006_FLI
gttccaacctccacctgcgccgcccgatagcaaaacgcagcgacctcgccccccctgccccgctcctccccttttcccggtagcagagacggagcaccgcagcccgccagaaaggaagacgaaacgcgccgcggcgcaacgcaccgcgtgctagtgaaagggcgcagcggaaggccgccgccgcgctgctatttagacaggaagcggggcgatcgaatcgcgtctctcaaccaatcgataaatctgccggtaggtcgatcaaggagagcgcggtccacgtctccgttccgttccgttgcggggaaggaaggaaggagagagaggagcgatggcgtccgggtaccgcgcggaggaggagtacgactacctgttcaaggtggtgctgatcggggacagcggcgtggggaagtcgaacctgctgtcgcggttcgccagggacgagttcagcctcgagaccaggtccaccatcggcgtcgagttcgccaccaagaccgtccaggtcgacgacaagctcgtcaaggcacagatctgggacaccgccgggcaggagaggtaccgcgccatcacgagcgcatactaccgcggcgcggtgggcgcgctggtggtgtacgacgtgagccgccgcaccaccttcgacaacgcggagcgctggctgcgggagctgcgggaccacacggacgccaacatcgtggtcatgctggtgggcaacaaggccgacctgcgccacctccgcgccgtctcgcccgaggacgcggcggccttcgccgagcggcacggcaccttctccatggagacgtcggcgctggacgccaccaacgtggagcgcgccttcgccgaggtgctccgccagatctaccacgtcgtcagccggaacgcgctcgacatcggggacgaccccgccgcgccgcccaggggcaagaccatcgacgtcagcgccgccaaggacgaggtctcccctgtgaacgcgggcgggtgctgctcgtcggcttagccctggtcaaacatacgctttgctgattaaggaagacataacgtgatgacaatctttgttgacttcgtcaagcggttgggggtggttggcgctcgtgatgtgtttgcagactagcaatcgctgtcctcgattgtatttttcgggctattttttgattgatgcacttgggtgacgcacacatttacaagtggcaggttatggaccatatggggagcgatttacactgatttggatgaaatattgacatgttttgac

SEQ ID NO: 5702 - DNA, 1699 bp, Zea mays
  Clone ID: 700470027_FLI
aaaaaaaagaataagaagaaaggaatccctcctacgcggaagcgaagagattcgtcgcctcagccgcctctctgctcagatctgcggcggagcctcgccggcggcctgcgccccgcggcgccgccgatccaagatgccttcgtgcgtgcagggatgctgctgctgctcgtccctgcgccttctcccccgcgacgacgcgctctcgtccccctccgcctgcgcgcaccgcctgaagccttggtcttggcgtgcccaatcccccacctcgtcctcctaacgcttgtccccgcccgctccccaccctgatctacctgtctctacccttccctcctccatttctacatctccccgttgctgctctgctcctgctgccacaagagtattcgccttcaatcgttgctcgcgcctgtcatttcgtgccgcacgccgacttgtttgccgttttcgctgccgtcttctgttggatcggatttgtctggatcgattccaaggtcggatctacgctgctgcgggtcagcatcagtagcgcagcgtggttgtacgtttgcggtgttgctgtatcactctgcgtctctgcaagtgctaaaccagtcactttatggacggtggttcctgtggtctcgagggagcgtcggtagtgacatctactaccagcactggtattccgcttctgccagagaagcactgcgccttgtttgatgaagcttgtggagccatggcgggcagtaatggtcctgaaggagtgccagtagtgacttctgctgatgaccctccgacccgtgccgatattccatttgtctgcaattcagttgatgaaacctgtgaagccacagggggcggcagtgctcccttggagggtcagatatgtacgggtttctccaagttgatcagcttggaggtgaagaaaggcctccagaagtgtgcgacgttcccaccctcatctggtcagcctcagcaggaggattgttcatgctgccatgtaggtgacgagctcacgtgtgctcctgcctatgggcgatctgtgtccttacctccaactttgaagctggtctctgccatgaaaggaggtcgtgaaaagaacggagtggcatcatcaccaagtgaaaaccgccatgtcaagtgggctcctgatgtgtacgacccccctgtgacatcggtatgccattcagtgaccaacagctatcagcgccggtcaaagcaccgcaagaaggagaagaacaaacagaagaagaggcagaaggggaagtcgaagaagaaccaacaacagagttctgcccagaatccatctgcaccgcaggttcctggtatcgggccgaaaggcgttagcaccactggtggccagtctccagcagacgatctcagcgaacatgaggccgggatcatggactacagcatgggtagccaggaagccaactgtggaagcagcttcttgcgcgagtctgttgctaagatgcacttctcgaccgccgaagcttcctgagaggcgtgcctcagttctgtaaatatgatggacgggatgtgtataaataaacccagcatgctgttttttttcgtcgtcgttgtgtgcgtttgagagctcgcctagtgttttggaacaataatttttggacagactatgtgttctgtatgttttggtcgtcagacatatctatcctcagtccatggctttgcttaacggtttaacctggactcttctgag

SEQ ID NO: 5703 - DNA, 1673 bp, Zea mays
  Clone ID: 700470059_FLI
tgccactacactacaatactactgcgcggtagcgctcgcactcgcaccacaccacgccaccgctgctgcctgctcctcacagtcctccccgcgctcgcattgcgattcgcgttccacaaatgggaggaaacaatgaggacaaagcagtggttatccagacattgctgttcgttgcaggtatcaacaccctcctgcagagtttctttggtaccatgttgcctgcagtgatcggcgggtcatacacctttgttctgcctaccatttcgatcatccttgctggacgttatgctaatgaacctaatccacatattaaatttctccgcatcatgcgtgggacacaaggtgcgttgattgtggcttcagccttacagattatagttggcttcagtggcctttggcgtaatgttgccaggtatctgagtccactttcagctgctcctttggtggcactagttggatttggactgtatgagctaggatttccatcggtcgccaaatgtgttgagattggtctacctcaactcatccttcttgtgatctttacaatgtacctgccacatgctgttcacatgctgaagtctatcttcgatcgatttgctgtcctgttcactatccccatagtgtggctctatgcatatcttctcactgttggaggagcatacaggaatgcaccaccaaagactcaatttcattgccgcactgaccgttctggattaattggtggcgcaccctggataagagtaccatatccttttcagtggggtgctccaacttttgatgcgggtgaagctttcgcgatgatggcagcatcatttgttgctctcgtggagtccactggggccttcattgctgtctctaggtatgctagtgctacaccaatcccaccctctgttcttagccgtggtattggctggcagggcatcggtattcttctggatgggctatttgggactggaaatgggtcttctgtatcagttgaaaatgctggtttgctagctttgacacgcgttggtagccgaagggtagtgcagatatcagctggtttcatgatattcttttctattctcgggaaattcggagctgtgttcgcctcaattcctgcacccatctttgcagctatgtattgtatcttctttgcttatgccggttctgctgggatcggcttccttcagttctgtaacctcaacacctttaggaccaagttcatccttgggttctcagttttcatgggcctttctgttcctcaatacttcaatgagtacacatctattgctggttatggtcctgttcacacacattcaagatggttcaacgatatagtgaatgtgatattctcgtccaaggcgtttgttgctggcttcgtggcatatttgctggacaacactattgacaggcatgaagcttcagtcaggagagaccgaggctaccattggtgggacaaattccggtcgtacaggaccgatacaagaagcgaggagttctattccctgccattcaatctgaataagttcttcccatcggtctgagcttttgctgtggttaatgtgagatgctcttgttactctggaactgcccaccccctgttctccggcggtggcaccgtgatctggattttctcggtacatgaaaaaattactgtatattaaaacccgctcagctcgggtttcccctcc

SEQ ID NO: 5704 - DNA, 1879 bp, Zea mays
  Clone ID: 700470105_FLI
caacaaaggagcgcggcggcccctccttccttcctcccacttctctcgcgcggcgctcgcttacctcgcctcgcattccgttcgagcaggggagcggcagtgagaagggagggaattaaggcaagatgttcatcgagagcttccgcgtcgagagcccccacgtgcggtacggcccgacggagatcgagtcggagtaccggtacgacacgacggagctggtgcacgaggccaaggacggcgcctcccgctgggtcgtccgccccaagtccgtcaagtacaacttccggaccagcaccgcggtccccaagctcggggtcatgcttgtggggtggggaggcaacaacgggtccacgctgacggctggggtcattgccaacagggaggggatctcatgggcgaccaaggacaaggtgcagcaagccaactactacggctccctcacccaggcttccaccatcagagtaggcagctacaacggggaggagatatatgcgccgttcaagagcctcctacccatggtgaacccagacgaccttgtgtttggaggctgggacatcagcagcatgaacctggcagatgccatgaccagggccaaggtgctggacattgacctgcagaagcagctcaggccctacatggagtccatggtgccacttcccggtgtctatgatccggacttcatcgccgctaaccagggctctcgtgccaacaatgtcatcaagggcaccaagaaagaacaggtggagcagatcatcaaagatatcagggagtttaaggagaagaacaaagtggacaaggtagttgtgctgtggactgcaaacactgaaaggtacagcaatgtatgtgctggtctcaacgacacaatggagaatctgctggcatctgtggacaagaacgaggcggagatctcgccatcaacactatatgccattgcctgtgtcacggagggggtgccgttcatcaatgggagcccccagaacacttttgtgcctgggctgattgatcttgctatcaagaacaactgcctgatcggtggtgacgacttcaagagtgggcagaccaagatgaaatcggtcctggttgattttcttgttggtgctggaataaagcccacctcgattgtgagctacaaccacttgggaaacaacgacggcatgaacctgtctgcccctcaaacattcaggtccaaggagatctccaagagcaacgtggtggatgacatggtctcaagcaatgccattctctatgggcccggcgagcatcccgatcatgttgttgtcatcaagtatgtgccgtatgtgggagacagtaagagggctatggacgagtacacatcagagatcttcatgggcggcaagagcaccatcgtgctgcacaacacctgcgaggactcgctcctcgccgcaccgatcatcctcgatctggtgctcctggctgagctcagcaccaggatccagttaaaacctgagggaacggacaagttccactccttccacccggtggccaccatccttagctacctcaccaaggcaccactggttccacccggcacaccggtggtgaacgctcttgcaaagcagagggcgatgctggagaacatcatgagggcttgcgttggcctggccccagagaacaacatgatcctggagtacaagtgagcgaagtggcgtggcctgcagctagatatggaggaggctgcacgaaggggactagagaggcgagattagctgtggaattgtgttggcttctcgtgttttcttttgcgttcttttcctggtcatcgctgtggcgcttttgtattttatttgttggacccgtaacactatcagggctctgctattagcgcttgaagcctgtaatggcattggcatcgtatgat

SEQ ID NO: 5705 - DNA, 876 bp, Zea mays
  Clone ID: 700470155_FLI
ctttctttttcaacacactctatgatccatacaggaaaggtgctgactttgtccgtggttacccattcagcctgcgcgagggggttgagtgcatgctctcgtgtggtttgtggcttcataatgctgactacgacccgatgactcatgttgtgaagagaaatcaacggaacacaacatatgtggatgctgtgatgacggttccgcttggtgccatgctgcctgtgagcgggataaatgttgcattcaaccgcgatgtgctggggcctgctatgttcccaggcctgcgtctacgaaacgaagggaagcacagatgggatacccttgaagacatatggaatggcttatgtgctaaagtagtctgcgacagcttgggatatggtgtgaagaccggactgccttatgtgatgagaagtgatgcagaagcaggtaaagctctggagagcttgaaagagtgggaaggggtaaaagtcatggatgatgttctcccattcttccagtcgctcaagctatcgaggactgcagttactgttgacgattgtgttaaggagcttgctggagttgtccgtgagaagctaggacctaagaatgcaatcttcaccaaagcagccgatgccatggtggaatggaacaatctctggaaagtgcatggtgctcagaatgcatagtttgggagtttgcatgtttcctacagagcatctaatagttgtttggagtgcgcgttttacagttctaaattttccctgtggaactcatgaagctgaaataaacaacggtcctttatgccgtgaatttggcatgaatagctgagcatctcattgtatacgcttaagaattatgtaatgtaatgcatcaaaagaacatgtgatgttttcttgc

SEQ ID NO: 5706 - DNA, 876 bp, Zea mays
  Clone ID: 700470322_FLI
ctaccccacacagaagcggcggcggcggagcaaacgcaggcgaaggcgagggtgtgagggaaggagcaccagccatggtgcacgtcaacttctaccgcaactatggtaagacgttcaagaaaccaaggcgtccttatgagaaggagcgtcttgatgctgaactgaagctggtcggtgagtatgggctgaggtgcaagcgtgagctttggagggtccagtatgcactgagcaggatccgtaatgctgcaaggcacttgctcacccttgacgagaagaacccccgtcgtatctttgagggtgaggcgcttcttcgccgcatgaaccgctatgggctgcttgctgagggtcagaacaagcttgattatgttcttgccctcaccgctgagaacttcctcgcaaggcggcttcaaacacttgtcttcaaggctggcatggccaagtccattcaccatgctcgtgtcttgatcaagcagcgtcacatcagggttggcaggcaaattgtcaacgtcccatcattcatggtgagggtggagtctgagaagcacattgacttttcactgtcaagcccattcggtggaggccccgcaggaagggtgaagagaaagaatcagaagaaggcaagcggtggcggcgatgctggcgatgaggatgaggagtgaggatggacaagtagcgttacccaatataataatattatctagttttcttgaacttgttcgaatgatgagtgcttagctgtgtgatctgacgcagagttccctgtgctgactctgtgtcatggatggtccattttatcttgtggtattatcagcctttacataactgctatgtttggatatgttcaattctgttgcaattttatgtggttgttttttg

SEQ ID NO: 5707 - DNA, 2110 bp, Zea mays
  Clone ID: 700470404_FLI
gctttccgctgtcggcatccggaagttgcgtggcagagtggacggagacgaggccgggtcctccagctcctctcaaacgtcacggcaccggcatccggcagccagcgcggtccttcccaaccactcgttcccaacccatcccccttcctcgcccgccgtcataaatagccagccccatccccagcttctttccccaacctcatcttctctccttttgctcggaacgcacacaccgcccggtctccgatctccgatccccgatcccctcgtcgatccaagatgcagatcttcgtcaagactctcactggaaagactatcaccctcgaggtggagtcctctgacaccattgacaacgtcaaggccaagatccaggacaaggaaggcattcccccggaccagcagcggctcatcttcgctggcaagcagctcgaggacgggcgcacacttgccgactacaacatccagaaggagagcaccctccaccttgttctccgcctcaggggaggcatgcagatcttcgtcaagaccctcactggaaagactatcaccctcgaggtggagtcttctgacaccatcgacaacgtcaaggccaagatccaggacaaggagggcatccctccggaccagcagcggctcatttttgctggcaagcagctcgaggacgggcgcacgctggccgactacaacattcagaaggagagcaccctccacttggtgttgcgtctcaggggcggcatgcagatcttcgtgaagactctgactggcaagactatcacccttgaggtcgagtcttctgataccattgacaatgtcaaggccaagatccaggacaaggagggcatccctccggaccagcagcggctcatttttgccggcaagcagctcgaggacgggcgcacgcttgccgactacaacattcagaaggagagcaccctccacttggtgctgcgtctcaggggtggcatgcagatcttcgtgaagacacttactggcaagacgatcacccttgaggtggagtcctcggacaccatcgacaatgtcaaggccaagatccaggacaaggagggcattccaccggaccagcagcggctcatctttgctggcaagcagctggaggatggccgtacccttgcagattacaacatccagaaggagagcaccctccacttggtgctgcgtctcaggggtggcatgcagatcttcgtgaagactcttactggcaagacgatcacccttgaggtggagtcctcagacaccattgacaacgtcaaggccaagatccaggacaaggagggcattccaccggaccagcagcggctgatcttcgccggcaagcagctggaggatggtcgcaccttggctgactacaacatccagaaggagagcaccctccacttggtgctccgcctcaggggtggcatgcagatctttgtgaagacattgactggcaagaccatcaccttggaggtggagtcgtctgacacaatcgataatgtcaaagccaagatccaggacaaggagggcattccaccggaccagcagcgcctgatctttgctggcaagcagctggaggatggccgtaccctcgccgactacaacatccagaaggagagcaccctccacctggtgctccgcttgcgaggtggtatgcagatctttgtgaagaccttgactggcaagaccataaccctggaggttgagagctccgacaccatcgacaacgtgaaggcgaagatccaggacaaagagggcatccccccagaccagcagcgtctgatcttcgccggcaagcagctggaggatggccgcaccctagcagactacaacatccagaaggagagcactctccacctggtgctccgcctccgcggtggtcagtaagccatggttcatttaagctgctgctgtacctgggtatctgcgtcgtctggtgccctctggtgtacctctatatggatgtcgtcgtctaataaacatctgtggtttgtgtgtcatgaatcgtggttgtggcttcgttggtttaatggacctgttgtgtcctctgtgttgtacccaaaactcttctgcagcagtatggcttgaatccttatgaagtttgatatttgaactt

SEQ ID NO: 5708 - DNA, 247 bp, Zea mays
  Clone ID: 700470413_FLI
acgaagtgcatgtgtccatgaggccaccctcgtcctggtgccaatgaaacctgtttccaaggtgtgtgatggatgcccttgcagtagttattactagtccattcttgttggcacctgactgatgttttgttttctcctaaccctatagcttgcggggggagacacacatacggtgtggaggtttgccgtaaggctaaggctactgcacaacaaatgcagctcagttttgctaattttgatgggaaac

SEQ ID NO: 5709 - DNA, 1248 bp, Zea mays
  Clone ID: 700470447_FLI
ggaaggcgaagggtcaaggcgtctggcacttcagcttgtcccgcttgcagcttgctcctggagtcctggttgctccgtcttctccggtcgggctcttgtccgacgaacgtgtggctgtggcactcgaggaagtacactgagcagagcattccatggagctcgaggcgatcggaaagcgactccgtataagcagcggcagcagcagcttggcccgcgacaggctgacctccctgccggattgtgtcatccaccacatcatgtccttcttgagggcccgtcaggtggtgcagacctgcgtgctgtccaccaggtggaggcacctctggcgctctgtgccatgccttgacattgaccaggacgagttcaaggccgccggctcgaaccgcatcacagagaaggaacgggagcacttcgaggacttcaccgaccacctgcttatacctaataatatttccattgcgctcctggatacacttcgtctgcatgttagcgatgatgaatattatcatcgtggagcatcagttagatggatccgtcatggcataaagtacagtgcccagaatcctggcattatgcacaaggaatcgaacttagccttttggcgcctcaaaaaactacacctctccggtgtatatctggatggcagtttcatgaagcatgtcagttcagggtgcccgtatttggaggttctcgagctcaaagattgcccgtgcacatttgaagaggtcacatcccacacactgaagaacttgattctggaaaattgcggatgcaatgggctttatgggattacaattacatcacccacgctgaagagtttaacaattattggtagtgaatattacaacacaattacgctggttttgaaggcccctgctgttgcttatctgctcctggatgtgattgcttattttgttaaattcggtgtttcatttgatgagatgtcatctcttgccaaggcttcaatttatctaagggactgtgtaggaagtggactcagcaagcaccaattcaagcttctttgtagtgtgtttaatgtgacaactttggtgttgtcaggtttccagacaatggtttgactgctgtcttcatcgatgttttcttattgctcttaattatattgcggttccatttttgttactcaacgagctatacaatacattccagatgttggcaaactttcttcagcattcacctgatttggagaagctcactttgggccgttgcaagttctcaaaagatcccaag

SEQ ID NO: 5710 - DNA, 2137 bp, Zea mays
  Clone ID: 700470515_FLI
cggcctctcctgctactcgcacttactgccccgcctcctctccttctactcacaccacccgtcgctcctccccgccgcctcctccctcgccgccggttccacgtgccccgaaccctacaatgtcctcatctccaactgcctcaaccacggcctcccgcaccacgcgctggccgcgtaccatgagatgatcgacaaggatgccgttccccctgatgccttcacttaccccaaagtgctccgtgcctgtgccgagaccgggaacctcgctctcgggcgggcggtgcacgtgcgcgccgtggacgccggcatggacgggcacctgtttttccagaacgcactggtgtccatgtacgccaagtgttgggaccttgcggctgcgcgcacggtgttcgacggaatggaacatagggatgtggtgtcgtggaactcgatgatctctggctacgctgcatctggacagtggagaaaggcagtagagctatttcttcgaatgcaggctgagggtgcggagatgaactcagtgacatggaacacgatcgccggcggttacattcagatgcatgattacagggcagcagttggattaattcgggatatggtgagaggtggtgcgagcattgattttgtgactttggtgattggatcaaacgcatgctcacgggcaggatggttgaggcttgggaaagagatacatgggttggcagtccgaatgcaatgtcacgaaatcgacagtgtgatcaatgcagtgatcacaatgtatgccaggtgcaacgatatggagcgtgctctcatgctgttcaagatgataagatgcccgggtctagtagcatggaatacaacgatagctggttttgcattattggatgatgcagaagcagcttctagacttttccgtgaaatggtggtatgcggtgatgtgcaaccgaattatgttactgtggtcacctaccttgccttgtatgcccgtgttgctaacctgcagcatgggcgggagcttcacacgcacattgttaagcaaggattcaaagggtatcgtctactgtggaactctcttattgatatgtactcaaaatcagggaggctttcagtggctcaaaatgtatttgatactatggatgaccctgacatgatatccttcacttcaatgatagcaggatatggaatgcaaggaaaaggaattatttctctgcgctttttcaaacagatgattgacagtgggatcatgccagatgccatcatcatggttactgtactctctgcttgtagccactctgggcttgtgggtgaaggggaagagctttttgacaagatggtgaagtcatatggtataaagccccagatggagcactattcttgcatggttgatctatatgcacgtgctggactattggaaaaggcggaagaattgctcaaccagactcccttccctccgacatcaacaatggttgcagcattagtaggagcttgccatgagcaaggtaacataataattggtgaaaggtcagcaagaaggctcttggagatgaagacagagaacgctgggcacttcgttctgattgctaacatgtatgcagctgcaggttgctggaatgagctagcaacagtcagaaaactgatgagagatctgggtgtcatgaaagcacctgggttagcatgggccgaccttggtaacgggtttaccccttttctggttggggataggtcgaaccctctagctccagaaatctatgaggttttggatgaactaactgaacaaatgagtaatatgaataattgcagtgatccggacatactatccatggaggaacacatggagtaatgtgttcatggtaggacaaggacagattgcggctttggtgtaaaatggagttcattaatacaatgtagagatttcaccatgaagcgaaagggttaaaagggaaaaggtgatgtccttcaagaagcagctcatgcaatcacaagttgcttcctcatcgatggtgtcttagctgggatgcatgctaggtgatcgctacggtcacgacaagacttgacggctgtaaggtgaaggtagcctcaactcgatgccaggataactgatactgatttttgagggtgtgcattcagtattaaccagctgcctgatttgagatatgtc

SEQ ID NO: 5711 - DNA, 1594 bp, Zea mays
  Clone ID: 700470594_FLI
ctcccatctctccccctctccctctcgtggccacgactgccgctgccgccctacgccaggtgtccaggtcatctccggcccattcgccggcgacgagcaccccactagatcgaccgagatatggacggcctgtggcatctgggggacgagctccgcgggcagcccaaggtggtggaggaccgccagtggtcgctcatgacgtccaagctggcagagatcaccaggtccaggggcgagaggatgaacgatctcgactacgccaggatgaacgccgcccccgacgccaagcagtggggcaaggcggcgtcctaccagcaccacgaggagggcaggatggaccaccacgtcggcctcagcctcaagatgaacgatctcaagatgaacgaggccgccgctgccgctgtcatgaagctccccttccgcggcgtgccctacaacgtcaacccgatgtaccccaaggggagcaacgccaacgccaatgtcaacgcgttcaagatgaatgtcggggtgaacaagtactccagcagcgcgaacgggaaagactccggcgggaaaagcagtggcggcggcagtaataacaacagcggcggcggaggcaacggcaatgggaccgccaacggcagttccgcggtcgacaagcgcttcaagacgttgccgacgagcgagatgctgccgaagaacgaagtccttggtgggtacatctttgtctgcaacaacgataccatgcaggaggaccttaagaggcagctttttggattgccagcaagatatcgtgattcagtccgggcaattactcctggcctgcctcttttcctctataactacaccactcaccagcttcatggggtatttgaggctgccagtttcggtgggtctaatatagatcccactgcatgggaggataagaagtgtaaaggtgaatctagattcccagcgcaggtgaggatccgcgttaggaagctgtgcaagccgttggaagaggattccttcaggccagttttgcaccactatgatggcccaaagtttcgcctcgagctctccatcgcggagaccctgtccctgctagacctatgcgagaaggaagacatctgagctgttggctgcctcgcgaggttctagtaaatatcaatcatccttgtatgttctgtggatggtggttggcaatgttgtttatttttcaagcgcaagctgctccctgtcctggatggaagcaaagggacctggtactttgaagggcccccctcaaacataagctgtgagcctgtcagtgcacgtgtccgccgttgtcgtcaagaaccaaaccaaatcttgagatcttgcgccgacggagaattggagcgtgtatgttttgctatctctatctacatgtctcagtagagtggatataccctggggtccccaaaagatgggggcctgtatgtaacactacgtgtaatggttaaggtgaatgtgccgtgaggccccccaaaagttggagtgtgtatttttgttgtcaccttgaaccgactttgcgtatgcttttttttagtgctgctaccttctgcgctgtgtttggcttctggttcatgtttttgtaatataaggtggcttgcgc

SEQ ID NO: 5712 - DNA, 1197 bp, Zea mays
  Clone ID: 700470673_FLI
gttagtggcaatcaagagatccaaggaagggtccatgcagggtggccttgagttcaagacagaaatagaactcctttccagggttcatcacaataacttggttggactggttggtttctgctttgagaagggcgaaaagatgttagtttacgagttcatacctaatggaacactaagcgaggctttatatggtatgaaaggaatacaattagactggagcaggaggctcaagatagctttggattcagctaaagggctagcatacctccatgaccatgccaatcctcctatcattcacagagatgtgaagtccactaacattctccttaatgagaagatgaccgcaaaggtttcagactttggcctgtcgttgctggtaacagacagtgaggaagggcaactatgcacaaacgtcaaggggacactgggctacctggacccagagtactacatgacccaacaactcacagcaaagagcgatgtctacagcttcggcgtagtgctcctagaactcatagtgggtaagccaccaatacacaacaacaagtacattgtccgtgaggtgaaaatggcactagacgaagacgatggcacgcactatgggctcaaggatgtgatggaccctgttcttcagaaaattgggggcctctttggcttcccacggtttctaaaactagcactgcaatgcgttgaagaggtggcaaccgcccggccctcgatgaacagcattgtgagggagattgaggcgatcatgctggacaatgggctcacaccgggctcaatgtctacgagctcttcattcagcattgaatcaagaacgatgaaggttggacctaagcacccatactccagttcatccatgtcaacctcgacgtttgatatggatagcagggcctttgagtacagtggggtgttcccttcttctcatggtagcttgaagccctgaagatcagaacttttggactccaacaatctgtacgagctgttatatatgtttcagtaggactgtacagaattgatgaactttgattcgttttgcctagagagacaaaagtatcttttggtttttttctttttaaagaagagatgtatataatattggccaaaacttttctccagtgatattgaagcttaggtgaggatgaaccaattataatgaactctcgagaacatgataagtactccctgtgtaattat

SEQ ID NO: 5713 - DNA, 477 bp, Zea mays
  Clone ID: 700470690_FLI
gacggcgaggacgatggtggggagtggtcgccgacgccgaggctcgcgaggggccaccgtttctagctagctatgctatgctagccatagccagcggggactggtttctagcgcgcagcagggagctacgtacgtgtcttttattttgtgacgctgatccatcggtcagcctgtgctgattgacgcgaccgctacctagctagcttcgttcgtggtgtgtcctctcgtgacccacgagagtggagtagaataatcatgcattgttgtatgcaacgtgcttagcagcttcgtggttcgtgcgtgtgccctctcgtgacacacgcgttgagtaaaaataacgtggatggatcagcctactgctcctagccaggctgccagctagctagcagctgggagtagctgcgtgcccttgctgatctcgtgtctctgtcagacctgttgtaaaatctagttgtactgtgttataaattgtaatct

SEQ ID NO: 5714 - DNA, 604 bp, Zea mays
  Clone ID: 700470737_FLI
atcatgaatggttctatggacgagctggctcgatgcccaggaatcggtgagcggaaggtaaggcggctctatgataccttccatgagccgttcaaacgggttcctgcccgaccacgaccaaacctcgtagtacccgataccccggaccgggagaaagcaaaaggccaaccttcgtctacagatggcagcagtttgcaagatgcggtagagaagccagatgcgtcgaagaagacgaagaaaggctctgatgtaagatcagccctcaccgttgcctttgccaagtattcggagaagatccgcagtcagggccgcgatgcgccaaacgaggccggtgagagtactggcggctcgaccgtggaagctgagagggcgggagactagatttagctgtaggatggttaacggtgctggagtaatgctagtttgttccttcctgttgggtgcttgttgttgtgactcggccgccgatttgcgcgtgcggcaccagtatttcccgcggcgtcctaggcatgtgtttttttaggctaaagaggggccagagaatcttcaacgatatcgaaacatttaagtgagattcctagacggtggcagccattccatcacc

SEQ ID NO: 5715 - DNA, 2987 bp, Zea mays
  Clone ID: 700470805_FLI
gttactaggagtcaagtttttgttgagatgagggagcatgagcgacgtgtgtggtcggtggacttctcaattgtggacccaacaaaattggtcagtgggagtgatgatggatctgtgaagctgtgggatatgaatcaggcaattttattcttgcacctactgtatgtcagctttttaactaacgataacatggttatcgaacttgtatgtggattagagttgcttctcttcattgttataacacattttttgtgaactgtgcaggctgggagtattggcactattaaaacaagggcaaatgtgtgttctgtgcaatttcaacctgatactgctcgctccattgccatcggctctgcagaccacaaaatttactgctatgatctacgtcacatacgagctccttattgtacactagttgggcacacaaagactgtaagctatgttaagtatctggatgcatcgacaatagtatctgcatctactgacaactcattgaagctttgggacttatcgatgagtccaggaaggataattgacagtccagttcaaacatttaaggggcatacaaatacaaaggttggataaaacttccacatgtacttgttctcttttcataatattcgtctacaagtgattaatgtctggttttatcttttgtaagtgtaactagtagaatgtctgatgaaaagaatatgctagtttaattttggaagttatactgttgcaatgaaacactagggtacggttggttacttcacttgctttgctcaccttgtctcgtccagcaaggtgagctttgccagcatgggcgagccaatcttgctctcctccaccagcaagcaaaaatcttgccagcacaagccccaaagcgaactcaccaaggaaacaaacgctagttctatcttgatttatgtctgagcaaggaaatgaagtctggctggagaaccaaacacactctactccaatactgtatccgtatgtttggttacccgcaccgtctcatcttgaaccaccgtatgcgttgactctgtctgagctcctgtttggttgcctgtacaagggagacgcaggctgcatgagcggatgcaaaataaaccattttatagttatttggttgcatccactcatacgcagaaaaataccgtatcaggtcagccagggccatccgagcctgcgcgtccagatacaggcatccaatcaggcgatatatgtatggattatcctactgtgacaattatcggtgctatcctttatacaactatagcgccttttacaactgtatctgattgatttgtgaggttatgaacaagtcatcaacattggtgatccagatgttcttttcctttttttctcatcaacatcagtgtgcaaaggaagtgttttaaatcccactgcaccacttattttttagatatttagttgcttgacaaccataaattggttcacttggtgtgtttcctgcgatttagttacctgcttttcctatagcatatttacatcatggtttgtagttcgttcagtcaattgatttcatgaaatattttagtgtctcagttgttcatagttgaagggtaggcttggtgcagtggtgagagttgtctcactgagcaaccacatcgcaaattcaaagcatttgcgggggaaggcttgtctcgttttatgtgggagcctccgacactgagtctgtccttcattttatgtggcagcctctggcactgaggctgcccttttattagttgagttcataattaactctcacgaaggacacggctagggctttttttaggtgagttcataaacccttttatcagtttagttcataattaactcccacaaacgacagggctggggctttttttagttgagttcataattatctctcacagaagttgtgttcataaacccttttatcagtttagttcataattaactcccacaaactacatggctgggtttttgtagttgagttcataatttactctcacaaaggacatgtttgagacagttgtgagaaacctttccactggaaaaaagttcataattaactctcacaaaagataggtttaggacaattgtgagaagcctttccactgagccaaagcttctgggttcaactaggtccactctttttttagttgagttcataattaactctcacgaagaacaggcctgggcagtggtgagaagtctttccacggagccaaaggtcctgggttcgatgtagcttctaagaaaaaatgcacgggtaatagttgccttggttattccttcattttccatcatgtgggagccatcaacactgggtcttttccataattagtctcacgtgtatacagtggttacccttcagctgttgctttctgcgctgaaaggcacatgttttcattgagtggctgatttacttatttggtaaacatcttccagaacttcgttggcctttccatatctgacggttacattgctactggctctgaaacaaatgaggtttttgtgtaccacaaagaatttcccatgccagtgttggcctataaattcagcgtgacggaccctatatcagggcaggagattgatgaccagtcacagttcatttcatgcgtctgttggagagggcagtcttcaaccctactttctgcaaactccagcggcaacattaagatcttagaaatggactgaggattggagttgggcatctgctgagtctcagctataaatggactgacttcttaccaagttgtgtgcgtgtgaatttgtggcaacggagttgccaacggtgcgtggtgcagagttgggagaggtaggagtagctgtaacaggtttagcatggtttgataggattaaactagcgtggtagcaaaagtagcataaataggaaacagaattgaggtgtggggtagtactgcaaggaaaggttttgtacatcattggttcgaggtatacttgtacagccaatcaatccagtttttacctagcagcaccaggcttttgct

SEQ ID NO: 5716 - DNA, 1698 bp, Zea mays
  Clone ID: 700470880_FLI
tgaagattgcccaaaacctttatgagggtatcaacctttcctcagaagaaacaactgggttaataacgtacataagaactgatgggttccatatttctgatggagctgtggaggacattcgttcactagttaaagaaagatatggtcagaagtacgtttcggaggacattaggaagtatttaaagaaggtgaaaaatgctcaagaagcccatgaagccattaggcccaccagtataaggaggccgccatcatcattggttggaatacttgatgatgattctctaaaactgtacactctaatatggaaaaggacaatggcttgccaaatggaagcttccagaactgagatgattcaagtggatgttggcattcctgaaggagagatgaattttcattccactgcatcaaaactggacttcaagggataccgagctgtctatgaggatgatcaggccagtccatgcattgacagctctgagggagattgtgtgcatgagtgtaactttgaggccttgtcgaaattaatggttgcagtgacaattccatttctttatcctctttctttctcaggctactgcagattatttgttatcatttaactactccattacgtaattcatctccttaccaggttaaggacttggtgtttcctgttaacgtgcatcttggccagcacttcactaaaccaccaccacgatattctgagggtgcattgattaaaaagctagaagaacttggaattggaaggccatctacttatgcatctataatgaaagtgttactggatcggaagtacgtgacagcaaaaagtcgagttctacaccctgagttccgtggtcgaatggtctcggcattccttttgcaccatttctctgaggtttctgattacaactttacagctaacatggagacagagctagataatgtctctgctgggtcaactgaatggaagggtcttctgaaagactactgggaacgattcagcaaatattgtgcagatgtgagtaaactggatggcagaaaggtagagagaatgcttgaagaaaaatttggtcctatcctcttttccgatgtttacaaggattgtagaatttgccctagttgttctgaaggaaccttgagattcaaagttagtaggtacggtgaaggctattttgtaggttgtgatcgacatccaaaatgcaagtacattgctcgctcactgtcacagcaagaagatgaaactgaacccatagaagaaaatgcaaaatcttttgaacccaggttacttggtgtcatgcctgattctgatcaaaaggtgtttttgaaacaagggccatatggctactatgttcaagttggagaggacaaaaaaggtctgtttccaaaaagggtttccctttccaaggtcaaagatatagactctgttactctagaagatgcaattgagcttttgcaatatcccaaaatcctgggaaaacatcctgaagatgataatcttgtacttataacacattctaaggttggatacaacatcaagcacaggagatttattgctcaagtgccaaagaacatggacccaaagaagatgacacttgagcgtgcactcaagcttctgagtagtaaaagtgtcagacggattggtcgtctaaaggggaaggtcgaaaagaaggaacccattgaatggcattagctgagcctgcctgcactcgtgtgtgc

SEQ ID NO: 5717 - DNA, 1115 bp, Zea mays
  Clone ID: 700470902_FLI
tgttccctggttcatgattatattatcctatttcctctgtttttaactagcttggtggtctgaactcgttgctgcaagttgaagcatcttcgtcaataccacatgtgtcgcaagtacccaccatcatcttaggtatggatgtttcacatggtcatccaggacaagatagaccttcggttgcagcggtggttagttctcgtcaatggcctcttatctctagatatagagcatcagtgcacacccaatctgccagactagaaatgatgtcctcgttgtttaagccgcggggtactgatgatgatggcctcatccgggaatcactgatcgacttctacactagctctggaaagcgaaaaccagaacacataattattttcagggatggagtcagtgaaagtcagtttacccaggtcatcaacattgagctggatcagatcattgaggcatgtaagtttctggatgagaagtggtcacccaagttcactgtgattgttgctcaaaagaaccatcacaccaagttctttcagacggcatcaccagacaatgttcttcctggaactgtggtggatagtaaagtttgccatcctaagaacttcgacttctacatgtgtgcacatgctgggatgattggaacaacaaggcccacccactatcatgttctgcacgacgagataggttttaatgccgacgagatgcaggagtttgttcattcgctctcttacgtgtaccagaggagcacgacagccatctcagtggttgctccagtgtgctacgcccacctcgctgcagcccaggtgagcacgttcctgagattggaggagatgtcagacgcgtcctccagccagggaggagggcatacctcggctggcagtgctcctgtgccggagctgcctcgcctgcatgacaaagtcaggagctccatgttcttctgctagctgatgtgcgtgcgcatcaggatcgagctccatgttttgtgttagtaaggcctagttagtaaggctgtagaaagaatgtttaatgtttgcatgctaaagtagctcaggaatgaaacgagccaagggcagaaccaaacaatcaaaaccactactatatctaccagagcacactgatcgatc

SEQ ID NO: 5718 - DNA, 1820 bp, Zea mays
  Clone ID: 700470940_FLI
cgacggcaaaaccctagatccctctccctcttaaaccctctacgaggtaacgtttcttgcccggagattagagctttggctctagatctctcttctccccgtttcctcgattggttcgggaccttccatacgaccaatttcgtggtgtatattggctgctgcctgtgttacagtgcgggaggatgtcggagccttccaaggtaatccacatccgcaacgtcgggcacgagattgccgagtctgatctccttcagctgctgcagccgttcggcgtggtctccaagatcgtcatgttgcgtgccaagaaccaaactcttctgcagatggaagacatacatgcttccgtgagtgcgctgcaatattacacttccgttcaacctagcataaggggaaggaatgtttacatgcagttctcatctcaccaagagcttaccacagaccagagctcgcatggaaggaattctgatcaggagtctgaacccaaccgaatcctcttagttactatccaccacatgatctatcctataacggtggaggttctacatcaagtattcaaagcttatggatttgtggagaagattgtcacatttcaaaagtcagctggttttcaagctcttattcagtttcactcgcgccaagaagctgtggaagcatttggttctttgcatggaaggaacatatatgatggttgctgccagctagatattcaatattcaaatctcagtgaactgcaagtccattacaacaacgaccgatctagagatttcacaaatccatcattacctacagaacaacgccctagggcctctcagcaagcttatcctgatccagctaatctctatgccttccaacaagctggagcttcatatgcacagatggggagggctgcaatgattgctgccgcatttggtggaactttacctcatggagtgactggtaccaatgaacggtgcacactcatagtcagtaatctgaataatgataaaattgatgaggataagctcttcaatctgttttccttgtacggaaacatagttcgtatcaaggtactgcgtaataaaccagatcatgctcttgttgagatggctgacgggttgcaggctgagctagctgtgcattatttgaagggggctatactatttgggaagaagctggaagttaactactcaaagtaccctaacattacacctgccccagatgcccacgactacttgaactcgagcctaaaccgattcaacagcaacatggtaaaaaactaccgacattgctgctctccaacaaagatgatccacatctctgccctcccccaagagatctctgaggaagcaatcctgaaccatttgtctgagcacggtactgttgtcaacaccaagctatttgaggtgaatggcaagaggcaggctctcgttttatttgagactgaagaggcagcgaccgaggccctcgtgtcaaagcatgccagcacacttgagggtaacacgatccggatctctttctcccagatgcagagtatataagccacctcaagggaaagctcatgtcgccctcgcttaccacccggcgagcactatttaggaagcatttcagactaagatgtgaatcctctgcgccattctccaagacatgctgtctgagctgtacctccccctgaccttcgggttttcttttcactctacactggccttgcaccaaaaggtttctgtgtttctttccaaatcctgttggctaggttatcaaaggacatttaccccttgtcgtgatattctgagttggaaggcctgttaattgtgtgaatcgtattatccttttgcctggacgct

SEQ ID NO: 5719 - DNA, 2045 bp, Zea mays
  Clone ID: 700470960_FLI
ggagatggaaaaggtggagagagcatttatggtggaaaatttccagatgaaaacttcagattactgcacaatcagcctggtgttctgtccatggcaaattccggcccagacaccaatgggtcacagttttttattacattcaaggctctacctcatcttgatggcaaacatgtggtctttgggaaggtggtcagtggaatagctttgcttaaaaagcttgaagcagttggtagtgaaactggaaatccttcttatcaagtgaaaattgtagactgtggtgaagtttccaacacaaattctccggatctgctaaagggagagaaagaaaaaaaactaagaacggcagatggtaactccactgctgaagggagagccaaattaaaaaaaacatccggtgatcataagcaaaggaagaagagaaaacactattcgtctgattcatatagctcagatacttcagactcattgtcctattcttcagatagtggctctgattcagaatcagattcatcaatggatactagctcatccagtgatcataggcgtaagagaagaaaaggatctaagaaggataagcgcaagcccacaaagagaaagggtaaacatacaaggagtaagagaaagagtagaggatccaaaaggcgatctagacggagccatgggagttcaagtgatgattcagtaagctcaaagacagataacagcagttctgacagtgaaaagggtggccatcataccaagcgttccttgccgaaagataaagagagtaccaaaatgacaatttcagaacaaggaagaacttttcaagaagcggacaaagacgaacaaacagttactaccatcaatcgatcacaatcacatgatggaagtaaaccctcaaacaaagatggcaacagggctgatgaaagatctggaaattacaattcagaagataggaatggtccaggtggaagctccaggaacaatcccattcaggttgatgtaaatttaacgaaaccagtaaatgtagatggcaacactggtggtgataatgcagaggctggcatgtctagaactggtgaaggaaggcaccttccaagcaatgattctgtgtccaccaatggtaaagatttaggtgtgggttctgcagacaatgggcaacctcaacgaatcaggaaaggacgtggttttactcagaagtatgggtatgcacgccgatacaggacgccatctcccgagcgtccccctgttcgaccccgctacgatggagggagagatgatagatggaacaatttcaataggtatgaaagaaatggtccttacagtagacgctcgccagtaaggagataccatggctcgccaagagccaatagcccatccaggtacccaagaagagaacgaatgaggagtaggtcacgcagcccagtgaggcgccatgaccgtggagggtatcaccgccccagcccaagacgtagccgcagccctgcagaaccgagacagaatgtgaatgataggcctcgatcaggtcatggcggaggcgatcctgaccacagccctcctgccaacaggtccagatcgaagagccgggaccccttgggacccagatctcctgatgctgccccagccaagagggagagctccagatacaaccgcaggcgcagcagcagctcaaggtccagcagccctgatggaaacaaaggcctggtttcgtactgagaagtaacggcacaacagtttgcaggctccatggaccatgtttcttgctagtttagcatcatgtactcttttgtaatggattctgaacttgaactgctttcgatgcaggtgtagatttatatgttctgttagatttgaatgtttcttatgccagatatttatagaactactgagtagagcaggggaaaggctcgagcctcgtgaactggcttgagcttgctaaggcttggagaggctcgcgagtttgtaagcctgaatcgagactacttttatgactcgctcaaacgccgagccctgagcgaacttgagtcgactcgggagtctgcctaataatattgtgctacgttgtt

SEQ ID NO: 5720 - DNA, 2373 bp, Zea mays
  Clone ID: 700471011_FLI
gtgttgtcatctccatctccagctccagcgccgccttgctctgtgtgcttccgcccgctctgtgttgctattgctaaactagtgtgttctgtcgctatgggctccctggccaccgcggacgggccgttgccgccgctcaagtaccctcaggctcgccgggacgaagacatcgtcgacgactaccacggcgtcctcgtgccggacccttacagatggatggagcaggtggattcgaaggaggtgaaggagttcgtggacgcgcaggcggccgtgaccagcgccgtgctgtccagctgcgaccaccgcgggcgcctgcgcgggcagctcaccgcgctcttcgaccacccgcgcttccgcgcgcccttcaagcgccggggcagctacttctacttccacaacccgggcctccgcccgcacagcgcgctctacgtgcagcacgggctgggcggcgagcccgacgtgctgctggaccccagcacgttcagcgaggacggcacggtgtcgctcggcgtggtcggcgtgagcgacgacggcgagcacctggcctacggcaccagcggcagcggcagcgactgggtcaccatcagggtcatgcgcgtgcgcgacaaggagcacctgcccgatacgctgtcctgggtgaaattctcgcgcatcgcgtggactcgtgacggccaagggttcttctactcgcgttttccggctccaagggatgcgctggattctgggatgaagactggcgtcaatctcaaccacgaagtctactatcatttccttggaacagagcagtcacaggacgtgttgtgctggagagaccctgatcatcccaagtacatatacatccctcaagtcacagaagacggcaagtacgtgatcctttcggtctcagaaacgtcagagccggtgaacaagctgtactactgcgacctgtcggctctcgctcacgggctgggcggcgtgaagagcgcccatggcaacggcatgctccccttcgtcaagctcgtggacaggttcgaggcctactacgggctcatcgctaacgacggcacccagttcacgttcctcacgaacaaagacgctccaaggtacaagctggcgagggtggacgtcgacgacgacgagcccgggtcgccgtggtggaccgacgtggttcccgaggacgaggacgggaaggcggtcctggagtcggcgtgcgccgtccacggccacaagctgctggtgagctacctgtcggatgtcaggtgcgtcctgcagatgaggagcctggtcactggggagctgcttcacgacatacccgtcgacatcggcactgtcagcgggatctccggcagacgatgcgacgccgaggtgttcgtcgagttcgcgagcttccttacccccgggatcatctacaggtgcgatgtcggctctgcggtcccggagatggacgtgtacagagagatctcggttccaggattcgatcgaaacgagtttgaagcgaagcaggtgttttatccgagtaaggatgggaccaagatcccaatgttcatcgtatccaagaaggagatcagcctggacggatcgcacccggcactactgttcggctacggcggcttcggcgtgagcgtgacgccgcagttcagcgtcgcccgcgtggtcctgatgaggaacctggggttcgtggcgtgcgtcgccaacctcaggggcggcggggagtacggcgagggctggcacagggccgggtcgctcgccaacaagcagaactgcttcgacgacttcgtcgccgccggcgagttcctcgtgtccgctggctacaccagcccggcgaggctgtgcgtcgagggcggcagcaacgggggcctcctggtagctgcctgcaacaaatttttttcccaatctccgcgctcgcgtcaactgtagacgtctccagcagctcccgcatcgcgcccccatcctccgcgccccctctcgccaacgcccattccggcgcgcgctgctcgcgccccgcatctcgcactcgccaaccgagacgcgccgcgtgtccgccgcgcggggcccacagacgacgctccacaggcgagatgcgccgtcgctgcccggatgcgtgccgctgctggagatggtggccgcgcatctgtgggccccgtcctccacaacgcgcagaaagggggtcgggagcggggacgttgctggagatggtcttaggttacaatgtatcggtgctgtattgtaagcggccaggctggcaacttggcgtgacacatgtttggttctgcttctggtttggaaaattagaagctgaactaaaagggcttcttttctgcgactactttaaaaaaaacagcttttctttagtgtaaatttgagaccttgttattgatacttacgaagtttgtt

SEQ ID NO: 5721 - DNA, 891 bp, Zea mays
  Clone ID: 700471069_FLI
ggctaggaagatcgagactagacagattgtggtcgaagagattagaaaggaggagcacatcgagaaggcactgaacgaagaggccaacatcgaggatgtcgatacagacgacgagttgaacgaagcagaggagtacgagtcgtggaaaaacagagaaatagcaaggattaagagggacagggaggaaagagatgcgaggttgaaggagaaggaggagatcgagaaagtcaggaatatgaccgaggaggagcgtcgcgaatgggagcggaagaatccgaagccgcttcgtcagacgaaacagaagtggaagtttatgcagaagtattaccacaaaggcgccttcttccaggaaggtgctgatgatgttatccagtcagcgggtaaagaggatatctacacccgtgatttctctgagcccactggagaagataagatggataagagcatcctgcccaaggtcatgcaagttaaacatttcgggcgcagcggcaggacgaaatggacgcatcttgttaatgaagacactacagattggaatgccccatggtcaacaaatgggcctctgcgagcaaagtataatgcaaaaatggcaggcatgaatgcacctattgctaaaccaaagggaagtaagaagctgaaggattgggatgcaaaatgagatgccaggttagctggtattatctaagcgttataagaactatgtagccaaaaagtgcaaacaatgcttatgcagatgctttcttctcattttgactgcataaacaatgtgacctttatgtgctattatctgttgaagtgtcccaatagtatgatgtgatgatccatgaatgatcattattattgacttcctgtgatgttctatcaagtgtatcccatgtatttttttcctcg

SEQ ID NO: 5722 - DNA, 1512 bp, Zea mays
  Clone ID: 700471070_FLI
aagctattgaagagacaccaccaccaccttcggcatcaaaggcaccagatgtagagagcgctacagctaccgaagctgcaccttctgaagccacgattaccgaagctgcaacggccaaggatgcaaacttagaaagcacattccctgatatagataaaatacttctggatatggccgcagaagaagctgctgcagccactgaagagaccatggccacagtgcctgggaaagagaaggatatagccaaagatacttcagaagaagaaaacttcaattttcaaaacttaattggacaagaattgtcaatggctgagaaagaagaattaagagactatgccatatcctgcgggtatcagtcagaggcaatgctcttcggcggtattgacgatgaaagcttaggttgtcttcgataccggactgcagcgaaggtcgtcggtactctgtcgaagagtattggtttcccgaagcttgagaccgatatcagccgctaccgacgacagcatatcgtcggtagtttattctattctaacttcaaggtaaaaacttttcttcgacttttcattgtttttaacgacgaaggtgtttgctgacgaagcttgcttctactcagagtatgctattaagcaaagctttgaggatgcaacaggaccttaaagacaaaaaacatgagatcataattgaaggtttagaaagcaaaataaaagatcaagcagctgttcttgaaaagaaagatttcgaacttcagacaatggaaggtttactggcaaaagctgaagccaaaattgcaaagttagataaggagcttctctcaaaatcagaaagctttgaacaagaaaaacatagatttgatatgaagtttgaggctgaggtcaaaaaaagttcaaatttgcaaaaatcattgaaagaacttcaagataaatgtctagagttcagcaaccgatgcgtgcagcggttaaggcagatcttcaactcggttggagccagctctgagaaattcattccttcgattgaggacttgccagggaccttcaaacacattaagggcgaagttgatgctcctgatgaagttatagccggacacggtgatttctgtgccctgctagcttctcgaggcacggctgttgccttcatgaaatctggttgcacgcatggaaagattgttaatagaccaaacttcagcttatcactagcagatctgatttatatccccagcctagcttgaagcataggaaacagatttataaagcaaatatgggcaaagggtgggcgaagcctagctggtgacgaagctcgaagtcacctcaagccggatgacgaagccgaagaacacagagtcgaagcttagcagacaattcgaagctcaacagatggtgatgaagctcgaatacctagctgtggaagaattctaagaaaactcttgtattaacctttataaagagtattgtaacttaagaatcagattctactctgtaaatttgtccataccttgtaatatatttttatttccatttt

SEQ ID NO: 5723 - DNA, 904 bp, Zea mays
  Clone ID: 700471083_FLI
aaaaaaaattgtttttcatggtttcaccaattcttcaaaaacacaacatcctcgttgttactattattaccattacaagtaacctcacaatatctgaagcagcaggttccatattattccttttggcaggagagatcagatggcaggagtgtgttccaagatgaagcgatggaagtcctgttggactctctatcatctcaagaaaacagtagagtacaggcattatcagcatgttttctttcaaacctcggagggacttattcctggtcaggagaatcgtacactgcagcatggctcacaaagaaagctggtctcacatcaacatcacaaagaaatacaatcaggaacatcgactggcttgattcttgcagaattgcctcttatgcactgcatggctcggaagcgagctggctgcccttggtgaaaatgccataagatattctgcttgtgagatcttgttgcatgacatagcaagtcaccttcatccaggaaatgagcttgacgaaagggttctagcatgcatgtgtctctataattacacctctgagccgagccccccccccagcgcgccgccgtagacaacggtcttggcgcatttggccgagcacctcgcgggcaccttccctgtctgtctgtgcagacgatgcctaaccttgccgcctaacattccaagagaagcacgagccgtaccgctgtacagcagctgatactgacagctcttgtcctgattccttgaatttcccccggcttggtgagtccgtgtggtgcgcagggtgccaggacgacccagcccatgtggaagtcaaagaatgtaccaccggcaacccaacagcaggactgcaggagcacgacgcaacgaaacggacggcgacgatgatgatgatgccgtgcgcggtgcgccctg

SEQ ID NO: 5724 - DNA, 1868 bp, Zea mays
  Clone ID: 700471165_FLI
cttcgctcacattcatcccgcgtgctctctctctctctctctctcgggccgtggcgtcgagtgggcgaccgccgccacccccgtgccgtgcgctctctctctctctctcgtgtcgacgggtgggtgggcgaccgtaggccgccgccgccgcctaggccaggtgcccaggtcgaccttcaacagcgacgagcatccaccagatttctacatgagtgtgatcttcctattgtgaattcagacgcaatcaagtatggcttcaatggcaatcattaggagaaggaagtatttcttggatcatgttaacacacctaccatttcatcgtctgctttctttacattccaacatggaagactcggtttggaggttgagccaagaacagaacagcgatttctcgagcatagttctggggattccaaatgcgagaaggagcaacacaatatgaatttgataaaaaaggatctactaggtcttggtaatgggttttggcaacgtccatcttatgtgatttctctttctcatggtggatttggaaggaatgaatttagattgcctctgagcctgggagctagatctttgctgcagtcggtccgcacagcatcaactgcaacagcaaggcagcctaagatggatacagatgatgaacagagcgaggaccacaagcaaaataaaaggaaaaaggaggcatccccagaagaatgtgatcaggctgtggaaggcctcagcactgcaaaagctaaggctaaagctaaacaggtacaagaatctctgaaggttggccaatcaattatacagaaattttgggcaagagtcctgggtgtgggccctgctcttcgtgctgttgcttcaatgagcagggctgattgggcagcaaaacttaagcattggaaggatgaattcgtttgtacactgcagcattactggttagggacaaaactactctgggcagatgttaggatctcatcaagattgctggtgaaacttgctggggggaagagcctttcaagaagagagaggcaacagctgacacgcacaacagcagatatcttcaggctggttccgtttgctgtgttcatcattgttccattcatggaattcttactgccagtcttcctcaagttatttccaaacatgcttccatcaactttccaggacaaaatgaaggaagaggaagcattaaaaaggaaattgaaagcaaggatggagtatgcaaaatttttgcaagataccgcaaaagaaatggcaaaggaagttcaaacatctcgtagcggagaaacaaaacaaacagctgaagatctggacgaatttttgaataaggttaggagaggtggacgtgtctctaatgatgaaatcttgaattttgcaaagctattcaatgatgaacttactctggataacatgaacagaccacgcttggtaaatatgtgcaaatatatgggtatccggccttttggtacagatcactacatgaggttcatgcttcgcaaaaaacttcaggacattaagaatgatgataaactgattcaagctgagggagttgaatctctctctgaagaagagctccggcaagcctgccgggaacgtggtcatctaggcctgctgtcaactgaagagatgtgccagcagctccgagactggttggacctatcacttaatcatgctgtgccatcttcacttctcatactttcaagagcctttactgtgtctgggagaatgaagccagaggaggctgttgtagcaacactatcttctttaccagacgaagttgtggatacaattgggacagtattgccatctgaagattcagtttctgaaaggaggagaaaattagaattccttgagatgcaggaagaacttatcaaggaggaag

SEQ ID NO: 5725 - DNA, 1835 bp, Zea mays
  Clone ID: 700471169_FLI
atcggcgacggtgcgccatgtcgatgctggacaccttcttcagcaagggcggcggcggcggcttccgcggcgccaagtgcaagacgctgctgaagctgtcgatcccgcggataaagctgctgcggaaccggcgggagctgcagctgcgccagatgcgccgggacatcgccaagctcctagaggccggccaggaggccactgcccggatcagggtggagcacatcatccgggaggagaacatgatggccgcgcaggagatcctcgagctcttctgcgagctcatcgcggttcgcctgcccatcatcgaggcccaaaaggagtgtcctattgatctcaaagaagcaatatcaagtgtctgttttgccgctccaagatgtgcagatctacctgaactgatgcaagttcaaatgatgtttgcaactaaatatgggaaggaatttgtcgctgcagcttcagagttgatgcctgattgtggggtcaatcgtcagataattgaattgctttctattcgtcctcctcctgttgatgcaaagttgaaactgctgaaggagatagctgaggaacatgaagttgattgggatccatcagagacagagacagaatttctcaaacctcatgaagatctattgaatggaccgacctacttcaatgtatccacactacctcttcccaaggagaaacatgaggaaacagtagttgcaagtgctgccgagcagcctgatgaagactatgagtcagataccggtcttgactcactggatttgcctgaagtcccaaaagctgcaattcgtccaccttctgacgcaccattgaccccagatatttgcccacatgttcagggctctcagtcacttcctcatgagttctcagatcctggtaacttggaggagaatccaacagctggtggtgcttttaatgttattcagatgaaaagcttggagcatcttgtttatgcaccatctgatcagtcaaacataccggatttgccaaatgaaaagaagcagtttattccttttgcatctccaccgcccgttctttctccttcggtgggaaaagccgagacagttccctcaccttctctgtctcctccagtgaagccgacagagccagaaccagaaatcctcacaaagaaaattgatgaagtgaccacacctccagtacttccctcagattatattttcacaaaacagccagaacaagtgcggacaatctctccttctgagagtggggcaaatattgacttggacgacgttttatctgctgcgcagacagctgctgaatcagctgagcgagctgcatcagcagcccgtgctgctgcaaaccttgcacaactgcgcatttcagacctgaagaagaattccaaggtttatagcaattacggtgatagcgtccaaaaggaaagccatcatcagactgaggcgacacaggaaccggtatttgatcaccaggactccttcaccaatgatacacaggactatgtgtcatcccatgtgccgcagaggtcgtcatctttggaggacgatccatatttctcgtatcccaacttgttctcagcgccaaagccctgaaggcggaaactagtggtctgcaagtagttgttcagaatagtctgaaacatgagatatcactttttcagctctgtccggtcctcttatgtttggtcttttctgatgcctccgaaaattctgtgtatgttgagttggtacatagcggacaaaagggagactatgaaacctctgtctagttttgtctctgtaaattgtacatgtgcggtgtttgtatcagttgtctgaaacatttctgcagtctactggtaataacagaaattgaatctc

SEQ ID NO: 5726 - DNA, 497 bp, Zea mays
  Clone ID: 700471170_FLI
caggaagcaagtcgacgctgccattgctaaagcgaaggagtgtccactgcctgatccatctgagctcttcacaaatgtttatgttaatgactgcggtttggagtcgtttggtgtagacaggaaggaggtgaggaccgttcttccgtaggctggcaaacaaaaaaaaggttctactgatacagtacgaagaagtttgctgcgtatgtatatggacgcatcacaccgcagtagtttcctcacttgtggttatggtcctatggaccccgggttataatttcctctgctcgtcgagctatcacaatgtgcagccgagattttgtcaggtgctcatgtcatgccgatgtttcgtcttctgctctactgcaacacttccacagatcccctttctgagcagtgcccccacgtaaacagtagtagttggctgcattagctagggggcggctaatagctttttattagttacaaaacagtttctttgttaactatagctgtttctg

SEQ ID NO: 5727 - DNA, 1151 bp, Zea mays
  Clone ID: 700471253_FLI
ccactaggatccccagggtgcagcaactgctccaggacttcttcaacggcaaggagctgtgcaagaacatcaaccccgatgaggctgtcgcctatggtgctgctgtccaggctgccatcctgagcggtgagggcaatgagaaggtgcaggacctgcttctgctggacgtcacccctctgtccctgggtctggagactgctggaggagttatgacagtgctgatcccgaggaacaccaccatccccaccaagaaggagcaggtattctccacctactcggacaaccagcccggtgtcctgatccaggtctacgagggtgagaggacccggacacgcgacaacaacctgctgggcaagttcgagctctccggcatcccccctgcaccccgtggtgtgccacagatcaccgtgtgctttgacatcgacgccaacggcatcctgaacgtgtctgccgaggacaagacaacggggcagaagaacaagatcacaatcaccaacgacaagggccgtctctccaaggaggagatcgagaagatggttcaggacgctgagaagtacaagtctgaggatgaggagcacaagaagaaggtggaggccaagaactcgctggagaactactcctacaacatgcgcaacacgatcaaggacgagaagattgcgtccaagctgccggccgatgacaagaagaagatcgaggacgccatcgacgcggccatcagctggctggacgccaaccagctcgccgaggcggacgagttcgaggacaagatgaaggagctggagagcctctgcaaccccatcatcgccaagatgtaccagggcgcgggtgaagacatgggcggcgctggcggcatggacgaggacgcccccgctggcagcggcggccctggccccaagatcgaggaggtggactaagcggtttgttgtcagtcttgagcgtgctgcagttgctggctggcccagtcgctgccgcgagttatcgtcgtcggtcggtgcggtgtgtccgcttaaactttatttgtggtgggctggtacttttgtggtggttatttttttttggacctcgtgatagtcggtcggttccatgttatcgcggctactggcaaaccttaagtgatacggtaattcttcttttcggtatttgtttctgca

SEQ ID NO: 5728 - DNA, 1345 bp, Zea mays
  Clone ID: 700471286_FLI
gatcacttggtctgtttaacaaatacaatgaggtaccatcaatcatggctattaagattgcttgctgcttcttgtctgtaattttgatatgggaaatccctggggtatttgaatcattgtgggccccctttacgtttctgctaggctataaagatccatcgccatccaaggcacacttacccctgctacatgagtggcatttccgatctggcctcgatcgatacatatggattattggaatgatttatgcttacttccatcctaatgttgaaagatggatggagaagctggaagaatctgagactaaggttagattatcaatcaagggaaccattgtcactctttcattgacggttggctttctgtggtatgaatatatatacaagctagacaaagttacatacaacaagtaccatccctacacatcatggatccctataacgtacgtataagaaatttaacatgtattcataatcgatgtggcacatgccatgccagcaatatgcttagagcttagttgcagttgacaatgaactgtgtttctttcagtgtttatatctgcctgcgcaattgcacccagcagttgaggaatgcctctttagctcttttcgcatggcttggcaagattacactcgagacttatatttctcagatccatatttggcttaggtctagcatgccaaatggacaaccaaagtggcttctttgtttcataccagattatcctatgcttaacttcatgcttactacagcgatctatcttcttctatcataccgtgtgtttgagatcacaaacgtcttgaagtcggcttttatccccagtagggataatagccgcctataccaaaatttgattgctgggatcgccatctcagtgtgcttgtatctctgctcgcttattcttctgaagattcctggtgtatagggatgaagatcttgatagaaggtttcttgtaaaatgtttgcttgataggatgtttcagctcgggcctcgatccccttttgctgttgtggagatagttgggatgcgcggagaagcggctaaagttggacatacggggaattgaattgccagaggctgcagatacagaagtccgaatcttgatctttttgttcattcaaaacacggatggatacaacaagtaggcaatccttccattcttttggaagttgtagcaactgttcgctagactatgttgatgcaacctcgttgtatgagttatcctgtagaactgcaccgtgttgtgccataggtattctgaagctgtaaaaaaaacgacgggcatttcttcttccttgaaaagaagaaatataaaggcagaggcgcagagccctttcttctcct

SEQ ID NO: 5729 - DNA, 1776 bp, Zea mays
  Clone ID: 700471303_FLI
actgtctctaatccaacaggtttccttgggaggcctatagttccacctgctgctcctttgccccaaacaccaccaccaattgcaacccaaggtggcacaccacagaattctcaacgaccgttttacccgtcctatccttcaggacctggtattgtcccacctcaacctttatggccacaccctcatcctccacaacctactggatttcagcagcctcccttccagtactatccagctggtcctgtaggctctcttggcaggccaataactggggcttctgctgcaactatggcctttgccaatgtgcaaccacctggcgtgtcaactggtggggataggaaagtacaagcatcaacaaatgcaggatctgaacagtccactcatgctgcagctgagccagattctacaggacatggaggtcaagtcactgagcagctggaggacaatagaaatactggagttcaggattcagatgcatggtctgctcacaaaactgaaactggtgttgtatattattacaatgctttgacaggagagtcgacttaccagaaaccaaccggttataagggggagcttgagaaggttgcaacagaaccagttccagtttcttgggataaattggctggtactaactggagcatagtaactacaagtgatggaaagaaatattattatgataacaaacaaaaggttagcagctggcaacttccgccagaggtgtgtgagatcctcaagaatgcggaatctggttccttaaaagaaggttcaacttcactgcaggatgctgcaactatagagaataagggagtaataagcattgatgcaagtactcctgccatacagacaggtggccgtgattcgttgccacttcggcaaacagttgcccctgcatcgccatctccattggatttaataaagaagaaattgcaggatgctggtgcttccagtgcgccttcagctctggctacttcatctgctacctctgaattgaatggatccaaaccagctgatgctgcacttaaggggcaactagtggcgaataatggtgagaaattaaaagataacaatggtgatgtgaatatctcagattcttcttcagattcagatgatgaggaacatggaccaagtaaagaggactgcattcgtcagtttaaggtgatgctaaaggaacgaggagttgcaccattttcgaagtgggagaaggaacttccaaaaatagtttttgacccacgctttaaggctattcctagtcactcaacaaggcgggctatatttgaccactatgttcgcacacgtgctgaagaggagcggaaagagaaaagagctgccctgaaggctgcagtagaggcgtataaagaattacttgaagaagcatccgaggacatcaaccagaaaacagactaccaagaattcaaaagaaaatggggtgctgatacaaggtttgaagccttggatcgaaaggaaagggagattctttttagtgagaaagtcaaggctgttcaagaaaaagtccaatcaatgcgcaaagctgtcatagctaatttcaaatcaatgcttcgagaaagtaaagatataacttcaactagccgatgggcaaaagttaaagaaaatttccgtagtgatccaaggtacaaagccatgaagcatgaagaaagggagactatatttaatgaatacatagtggaactaaaatctgctgaacaggaagcagagcaagctgccaaggccaaagtggatgagcaagccaagttaaaggagagggaacgtgaaacacgt

SEQ ID NO: 5730 - DNA, 1225 bp, Zea mays
  Clone ID: 700471347_FLI
aatccaccccctctcccccttctcgtcgtcgccgccgccgccgcccatccggggcttggactgtcctttccccgttctgctggtaggtaaggaattcctcttctggctccgacggattctctcgctccgtttgtctctggtacaattcgttcgctgctgcgagccctcgaatccgtttgtatccggagcagcggcggagtagtaatactagtacaattccttagtcgtgttcccaagtgggtggatgcgtctttgactgcccggcgcccgcccgcaccccgcagcagcaatggacgacggggacctggatttctccaacccggacacgtacctgtgtccggccctcggcaccgacccgcccagcagctgctccatggacagctacttcgacgagatcctcaaggacacggagcacctcgcctgcacgcacacccacacctgcaacccgccggtgcacgacctctcgcacacccacacctgcgtccacgtccataccaagatcgtcgcggcctcgccgggcgacgccgagtcgccgtccgagaacaacagcaacggcaacgccgcctctaagaagcgcccgtcggggaaccgcgccgccgtcaggaagtaccgggagaagaagaaggcccacaccgcatcgctcgaggaggaggtggtgcacctccgggcgctcaaccagcagctcatgaaaaagctccagagccacgccgcgctcgaggcggaggcggccaggctccgctgcctgctcgtcgacatcaggggcaggatcgagggggagattggtgcgttcccgtatcagaggccgccggcggtcaagaacgtcgacctcctgtctagtgttgaccaggaaagcctccttggcagcgctgctgcccaggttgccaactcctgtgattttagatgcaaccatcagatgtactgcaaccctgggatgcagggcgctatcagcggtcaggtgttgggacaaggtgcctgtgatgtcgccagtatgcaatgcattggaagcaccaagtctggatccactaagctacctgtttgtgggggtctggatacactacctgctgtctgcttaccaaatgttgaaaagaagtgatggactcctggcggtgtttatggtctctcctttccagagacatgctgtataaactgctagcttttctatgtaggactgcatctggttcaaactgctatactgctatgttagtatgtcactgagtttgtcgcc

SEQ ID NO: 5731 - DNA, 1538 bp, Zea mays
  Clone ID: 700471369_FLI
agcaaaacgatgaattgttctcagatttatcaacaccacttccaaaattgcagttccagtgcgatgatcgtcaggtttggcttgatgccgaaatgggacatgaagtttatgctgcggatcctactgccagcagtggtgctgttgtaactgcagaatgcactgtcacagaacttccacttggagatcttgaagggcttctgctgcaaatagccaatgaccagcacatggtcgaatcccaatcagatctttctgcaccaactccacatcataacttcaatcaggctgacattggggatttacatgaatctcatggtgctcgggttggtaatctttcttgtatagttcaggaaagcacattttgtgaaccacggactgaaccaagtgatcaatttccacagtctaatgtaaccaatttgccatttagcggagaagcaaattcttctgaagggaccagtgtggcacattctgtgtcaggtttgatcagttaccacagtcaagatgctgatgaagagttccttgaaatcaacgatttctttgatctggaggatgtaggtcagaatgcaaattgtatgacaactgagtacatgatgtctgcaacaaatgggatgtttgacaatttggaatactctgatgcttcttcgtttctacctgggtcatttgacacagttggattggtagctgaaaatcaatattttgataccgattacagtggaattcaaaaccagggatatcaaaatacaaccgaagtaaggacatataatcaggctgctcttactgtgcggagccatatgaagcatgatcatgtagtcttatcctcgcatgcatcaggcactctgaatatccatgcggcaaatgagctacataaccagagctccacatcttcacaatcatggttcaatgcggctctatcagccttgttggactctgtacctagtagtccagcattagctgctgaaatcgaaaacactgttatcaacagaacactccagcgcatctctagcttccgaccacatcaaactgcaggtgaagaaaacacttttatcaacagaacacttcagcacatctctagcttcaggtcacagcaagcaacaggggaagaaccaggcacccctagtattcaggttaccagaggtggcaggctgatgttcatatctctactggttatacttgcttctgttatatggacctttacttcaggctccgccctcaacttttgcaagggtttatggaaatcctcttctacgtgacagattaagtgggaacctggtgaccttgtcctctgtaaattttttggtcctcggtaccatttatggtttgaatatcatttccctttcaaaagggtgaagaggtagaaacattttgagggtggtaatatgattataggttgtagagcctatttaaaacggtaaaatgcaagggggaaaagcatatctgatggtaatatttgaaactaatgggttactgttctcatttgtattttgacagatatatgtactgaatgcaattaacctattaatatagcttcagtttctgtgcat

SEQ ID NO: 5732 - DNA, 1621 bp, Zea mays
  Clone ID: 700471371_FLI
caccgctgtcccttcccctcccagcgctacccaccatctccgctcttccctctccggctcatccccgccgggcttccgccttcctgcacacctcgccccgtttcttcctcgaacagattctctgccccaccccgattctacctataaatcacaactgcacacccccgaatcccggcaaaacccaacggccgaagctaagctcgagccgccgccgcgatgatcctccgtatccgcagccgcgacggcacggaccgcatcacggtcccagactcggcctcagtcaccgtcgccgacctgcagcgcctcatcgagtcgcacctcaccgtgcccgtcccgctccagcgcctctccctcgacccggccctcctgctccctaacccctccgccgttgtcccactcctcaccgactcggcggcgccgcttgcctcgctccgcctcgccaacggcgccttcgtctacctcgcatacccgcccgacgcgcgctcggcccgcccgccgccgcccaaggcactttccgccgctggctctttcggcaaaaagatgaccatggatgaccttatcgcgcgccagatccgcgtcacacgccaggagaacgcgctctgcgccgccgcctcttttgaccgcgatgccgccaacgcgttccagctctacgtcgccgagttcctcggcttcggcgtcaagcgggcgggtttcctctacggccgcgtcgacgcagagaccaaggatgtcttcgtcgactttatctatgagccgccgcagcagggctccgaggacgtggtccacctcttgagggaccccgacgaggaggcccgcgtcgataccatcgccgaggggctcgggatgcgccgggtcggcctcgtgttcacgcaggccgttgggagaaaggccagcgagactggtgagtacaccatgtccaaccgggaggtcgtgcaggcggcccagctgcaggctgagggcgggatcccggagtgggtcaccgccatagtcaaactggaggtgggggatgacggcaccggggatgtgcacttcgaggccttccagatgagtgagatttgtgtcaagctcttcaaggatggggtactggaaactgaggttcaggatgctgatgatccccgtctgtcaaagatgcggaaagaggtggtggctggggggaaggatactatggaggtggataatgacttcttcctcgtgcccgtcaagatctctgatcaccagggtccactctcagtaggctttcctatagagaaccgtggaaatcctgtgagcatcagcgcgttgagaagtcacctggagcggatgaagcatttggcatttgtgaagcggatctcggacttccatttgctcctcaagctcgctactttcctagatgtaaaggcagacatgcctactatagctgcatgtgtgaaaactcagagcagggtgcccgaggggtaccagcttctgatcgagtcctttgctagccagggataatatcgcatctgaaagcatggcatggcgatgcataatttgtttacttgatcacatcatgcatgtgtaacttatggatgtctcttggtgtataagtattgtgtgaattccttctttgccatcaaaatatatgtttattccttctcatgtcatg

SEQ ID NO: 5733 - DNA, 443 bp, Zea mays
  Clone ID: 700471374_FLI
tttgttgttaacatagtgtataacatttgatgtcgtaatttgttttggaagaaaatttaatctcaacatagaattttttactgacaggtttatggtcttttaatatctacaggttgtggaaactgagatcattgtaactcaaatgagagcttggcacttagcatatagatgccactagaaccaatctggaaatactgtgagaggccagcaagaatggagtcatggaacatcggcaggaggagtgcagcagcggcaaccgatgtatcccttgaacaatctggttttgacaagatgcaaatcaatctagtgtacattgtattccacacttgcaaagattgtttggctaattacaagattatttcagtgttttggtttggattaagagtacacttatgtatgaaatattgattggtactcatttatattatttttattatatcatt

SEQ ID NO: 5734 - DNA, 1590 bp, Zea mays
  Clone ID: 700471383_FLI
gtaatgagaaagaagtggcacttgctgacagagagcgtgctcaagtaaatacactgtatagtgaccattttcaagatgtcccatctgatttgcatagtactgatgcaaacatttctagtcaagatgtgactctagataactctggccaagcttgcgctcacgcaacggacggcatgacaagggagcttactcattttgttcatagtaatgctaatattttcgagagtaatgaggtccctgcttctgagattactggggtggaatataatcaaggtgcctctggtttccctcaatcaacggaggatgaaaatgcggtggggtataatcaagatgtctctggttttcctcgaccaacggaggatgaaaatgcggtagattataatcaagatgcctctggtttttctcgaccaacagaagatgttcaagatgcctctggttttcctcgaccaacggaggatgaaaatatggtagattataatcaagatgcctctggttttcctcgaccaacagaagatgtaaatgcggtgggatataatcaagatgcctctggttttgctcgaccaacggaagatgtaaatgcggtgggatgtaatcaagatgcctctggttttcctcgatcaatgaaggatgaaaatgcggtggaatataatcaagatggctctggttttcctcgaccagctgaaaatgaaaatgatgtgtctgctatgggagataattctggcttccatgaaaacaacatgggttctcttacggatctggatatggtgaatgactatgaactgaaggaaagcaatgattttgggagtgcaattaatggtgttgatacagattttctgaactacgacgatgatgacggcggggacttcgacgacgccaacgacgatgagccaaatcccaacgagtttcagtctctcgacaacagtggttggtcttctcgcaccaggggcgttgcaagatacctcaaggctttattcgacgacgagtctggtctggagaggaagagcgttgctatcgaccatctggtgcgcgggaagacgcggaaggaagcgtcgagaatgttcttcgagaccttggtgctgacgacgaaggactacatcagcgtggaccaaccgaaccccttcgacttggtgagaataaagccaggctcaaagctgctgatgtcggaattctagaccgtccaagccagcttttacccctggcgccatacatacgtgttaccaattgtatccatcacaccgacctaccgcaccccctcctttaccccctccaaatccatttttgtttgtttgtttgtttgtttgttgttgttgttgttaagttatcctcctctgtgtagcatctcccgcgcgctagggctcgagtaggatggctgctatgttgtaccgtcggctgtatatatgatttagtgacacatgtgaagcctgccatgtaatctgatagcgctggctccctccctccctcccctccgatccactaaagctattgtataatttgtatttgcttggctaaagcccgtaggaatttgcgtattggtaacaagacgatatgatggtgtacctgttgattatgtcaggatctattgacagcttt

SEQ ID NO: 5735 - DNA, 1799 bp, Zea mays
  Clone ID: 700471395_FLI
tgggctccgcggtgggtccccacttcagcggcctccgtctcgactcgcgccgcctctccctctccccttcctcctccccctcccgctccgccagcggcaacggcacgctcgtcgccgcgccggggctcgcgttccccaaggcggaggacgggaccaggaagcccttcgtcataggcgtgtgtggaggcaccgcgtcgggcaagacgacggtgtgcgacgcgatcattcagcagcttcacgaccaccgcgtcgcgctcgtcaaccaggattcattctaccatggtttaactgaggaacagtctgagcatgtgcaagactataattttgatcatcctgatgcattcgatacagatcgacttttggagtgcatgggaaagctaacaagtggacagtccgtgaatattcctatatacgattttaagaatcacaggcgatgctctgaaaaatttaggaaggtcaatgaatcagatgtcattttggaggggatcttggtttttcatgatcagagggttcgtgatttgatggacatgaaaatttttgttgacgcagacgctgatactagacttgctagacgtgtgaggcgtgatactgttgaaagaggtagagatgttacctcagtgcttgagcagtatgtgagatttgtcaagcctgcatttgatgcttttgtcctgccttcgaagaaatatgctgatgtgatcataccaagagggggagataaccttgttgcaattgatctaattgtgcaacatatcaacacaaaacttggccagcataacttgtgcaaagcctacccaaatgtctttgtagttcacacaactttccagataagaggaatgcatactctaattcgtgacaagaacattactacacctgactttgttttctactcagataggctgattcgtctggtggttgagcatggtcttgggcatttgccatttacagagaagcaggtggttacaccaacaggatctctttacatgggagttgacttctgcaagaagctctgtggagtgtctattattcgaagtggagaaagcatggaaaatgcactgcgtgcttgttgtaaggggataaaaataggcaaaattctatttcatcgcattggagacaatggacaacaactcatataccataagctgcccgtggatattgctgaacgccatgttttgcttttggaccctgtgcttggtacaggtaattcagctaatcaagccattgagcttcttatgagcaaaggagttcctgaggaccgtatcatttttctgactctcgtctcggcccctgaaggcatccattgtgtgtgcaagcgcttccctcatttgaagattgtaacctcagagattgatagtggattgaacgatgaatatcgtgtcataccaggacttggagagtatggtgatcgatacttcggcacagactaaccgatgactgatgctgttgtagttagcagtgtgaaaaggtactcaaattagagctgacattaccgtggcagatatactggtgtttggttgctttatggtatactggaagacaaacgtggataggtttctggtaggtgctgaaaccgtgaccgtgtggtcttgtccattatcatatgttttgataccacaaaccgttggttgtgaggcaaatttgttttttttttgcattttgaggctcctagctgaagtgcctgctcctcgtcacacaatactgttatacagccttgtgaaatgtatgactgaaccctgttcccggcatctaacagttgccgtggggtcacagctgtggttggaatgaaattcaaaggttgtgac

SEQ ID NO: 5736 - DNA, 2300 bp, Zea mays
  Clone ID: 700471422_FLI
agccattcctgatcccgccccaaccccaatcgacaaacgccgccccttctcgtctcgacctctccccaccggctaaccctagcagcggcacgcgggcgacggcgaccagtagagggctagtcgcgccaccggcgaagggattcagcggtctacccgtcctccgacacaggcgcggcggcgtcctgcagattattattggtttgttgcaaaatgtctacggaagcgactttgaacaattctggtggttctgaatctgcattgctgttactggaacagcttgctgaagtttttggaaagttaaaaactcacaccgaaacatttctgcatttgcaaaatggcataaaatgggaagatattgaagggcatttcctcagccttgatgagtcgtacagaagcaagtttgatgaactggtagagaaggagaaggcattagaagaaaagaaagctgaagcttgtaggttgattgcagagaaagaggctaaagtttctacaaaagagcatgcctcactgaatcagcttcaggagctaagggatgctgctgtctcttctctagcagaggttcgacaaaaatataaggtggagcttgctgagatacttgaagcaagtggaagcaaagacaaaaaggtaagtacctcaatcaatgacaacaatgcatctcgtgcttcagaggagaatacccctgctagtgggtcgggtgaggcatctgaagctttacctgttgagactaagccgcgccctgtattgaagcaactttgtgaacagatggacaccaaaggccttctgaaatttctttcagaaaactgtagaaaacttgctagctttcgtgatgaactttctgttgcactaaaatgtgcaactgatcctgcacgcttcgtacttaattccctggagggtttcttcccaccagaccaaactaattcacctgggagtaaacataatgcccttgaggtccagcgcaagagctgcattcttttaatggaagctatagcacctgcactagggatgaaggagcctggtggcgacgacccttggagctctgaaattaaggagcaagccaaggaaattgccgaagagtggaagagtaagttagctgagattgacctggatgcttctaatggctattcattggaggcacaggctttcctgcagcttcttacaacttttaatgttgattcggtgcttgacgaagatgaactatgcaagatcgtagttgctgtctctcgtcgcaagcagactgctgtatcctgtcgctctcttggtcttaatgagaaagtaccaggtatcattgaggagttggttaagcggcacaggcaaattgatgcagttcatttcatacaagcttttgggctttcggagacattcccccctgcacctctgctgaagacatatgttgaggaacaaaaggatacaattgaaaataatggcgatgcaactgcgatctcattaacggatgaccccaaatctagggagctaattgctttgagggctgtgattaagtgtatcgaagagcataagcttcagaaggagtgttcacttggacctctccagaagcgtgtttctgagctgaagcccaagggtgagaaaaggccatcaagtgatgctgggcgtacttatgcaaagaagcctcgaggccctggcatttcatttcctaggagacctgccggttctgttggttcagctgctcgcaggcctccatttccgggctatacctggcagcgtgctcctgcgccgatgccctcccgtggtcctgctccagtgccctcccgtgcccctcttcctgcccctcttcctgatagatatggagctgctgaccggtaccattacacaccaccagccccagcatacgactctggtgcattttcgtcttacagtgaacctttcagtgccccaaaaccattccagtacactccagggtcagtggcagcatcatacaattcaagcccctataaagtcgcttatggtggcccaggagcaccagtcagaagcacctatccaggttatgccagcgcatctgggccggctgcttccagcagctatgcaaattatatgggatccgtatatcgccctccccagcaaccatagattcgactcctccctcaaaaaatgttgtgctggtgatgcaagacatggaaaccagtccctcccatccaactcccatggcggagatgtaaacttgagctattttcttgtttcatcgtccacaacagtggggtttggaggtgtatactgatgctctcatgtccagctacatctacaatgtaccttgcactcttgtttgcttttagctgtgcttattcctg

SEQ ID NO: 5737 - DNA, 1064 bp, Zea mays
  Clone ID: 700471442_FLI
ggcggaaggcctacggcacgcgcacgctcttcttcctgacggccgcgggcacgctgaagcccatcgcgatcgagctgtgcctgccgccgatgaccgacgggtgcgcgcgcgccaagcgggtgttcacgccgcccgccgatgccaccagcaactggctgtggcagctcgccaaggcacacgtctgctccaatgacgccggcgtccaccagctcatcaaccactggctgaggacgcacgcggccatggagccgttcatcatcgcggcgcaccggcacctgagcacgatgcaccccatcttcaagctgctcaagcctcacatgcggtacacgctcaagatcaacgcgctggcgcggcagatcctcatcaacggcgacggcgtcatcgagtccgggttcacccctggccgctactgcatggagatgagctcgttcgcgtaccgggagctctggcggctagaccaggagggcctccctgccgatctcatcagaagaggaatggccgtggaggacccgacgcagccgcacggtctccggctgctcatcgaggactacccgtacgccaccgacgggttgctgctctggtcggccatcaggcggtggtgcgacgcctacgtggccatgtactacccgtccgacgagtccgtgcagggcgacaccgagctgcagtcgtggtacagggaggccgtgcacacggggcacgcggacaagcgcgacgcgccgtggtggccgcgcctgtcgacgcccgcggacctggcgtcgctgctgacgacgctgctgtggctcacctcggcgcagcacgcggcgctcaacttcgggcagtacccgctgggcggctacatcccgaaccggccgccgctgatgcggcggctggtgcccgccgagggcgacccggagtacgcgcacctggtggccgacccgcaccgcttcttcctgtcggcgctgcccagcctgacgcagaccaccacgttcatgaccgtcatcgacacgctgtccacgcactccgccgacgagcagtacctcggggagcggcctgatgaggcgtggacggccgacccggcggcgttg

SEQ ID NO: 5738 - DNA, 1441 bp, Zea mays
  Clone ID: 700471463_FLI
tgagaggagaatagcatcaggagacctagtagatggcgatagctttcaggttgatacaattcaacaattacaagggctctatgaggagttgattgagaatggagaagactgccagctggatagatataagtcatctgagaaatcaggacggagtcgatggctatggtcccgcctcattactcagccttctagctttgctccagttaagggcctttacctctatggtggtgttggtacagggaagacgatgcttatggacttgttctatgaacagctgccatctaattggagaaaaaaacgtattcactttcatgatttcatgttgaacgtacatagtcgtcttcagatgcataaaggtgtttcagatccccttgatgttgtagcagctgagatttcagatgaggccatcatattatgtcttgatgagtttatggtaactgatgttgctgatgctatgattctgaaccggctgttcagacaattgttcagcaaaggcattattcttgtttcaacttctaaccgtgctccagataagctttatgaaggtggcttacaacgggaccttttcttgccatttattgacaccttgaaagaaaggtgcatcgtgcaccccattggatctgcggtggactatcgtcaactgggttctgctgaacaaggtttctattttgtcggaaagcattacagtacgcttctgaaacagaagctccagtctttaattggagatgaggaacccagcccacaaactgttgaagtaattatgggaaggaaattacaggtttctctgggagcaaatggctgtgcatattttccttttgaagatctctgtgatagacctttaggtgcagcagattactttggactcttcaaaaaatttcacaccctggcacttgatggtgttccaaagtttgggtctagtaacagaacagcagcttatcggttcgtcacactgattgatgttatgtacgagaacaaagcaaggctgttatgtacagccgaggctggaccagtagaactgtttgagaatatcatgactcttgctgaagcacagaaggtttcaccaagatcttcgcgctcacagaaaagtgacgaccctgacctatgtgtggacaatgagcttggatttgccaaggatcgtacgattagcaggttgacagagatcaacagcagagaatatttggaggacttcgaaatgagattagggcaacagcagctgctgcccttgcaagctctagataatggtggtgatgttgtactagcataataagcagaaggcttctgggcctcatttgaaattcttgtattcgcacccacctggcttacataggcaactgagaagctatgcttttctagcagtggtgcatgtaaatgtgcaataaagctatgaaagagtatttttgctaataggtgggtgatctataaaatggctcaatctataggg

SEQ ID NO: 5739 - DNA, 1173 bp, Zea mays
  Clone ID: 700471467_FLI
agcatctggtctcgtctctctccgatccctctcctctccctccccctagccactacccacttgagcgagccctaggccctagcaggcgaaagccatggcgtccttgggtgttcgtgccgccgccgccgctcgtcttccctccctccgtcctcgccgcgacggcagcagggtgctcaccggcttgagggtcgggacagggcactacggcgtgcggctcgcgctttcttcgtccacatcagcttctcccagagagttcaaggtcgctggccttcctgtcgatgacagcagtttgggcccgggggatgaatatgagtttggactctatactcctaagctgcttgcagttactggagatgattatgtgtctaacccccgcatgccagacgaggatgagttcgaccatttctaccgtgttgtcgccaagaagactgacatgctgctcagctgccaccttccaaagccgcttgcagtttctgaagaggagaaggccgtgcaggagaagttcaaggagatggcgaacgaatgcatcgacctcctggttgatgcgatgcgccgcatcccagcggagaaaaggcgcccactgttctcggtgtttggtgagctgtacccggtatttgagtcagtgaggtggactgccgagggggggtgtgccaagtggtggatggcgctgcagatcatggagaagctggagatcgtgcgcaagatggtgtcgagcgcttgcggcggcacccctcttgacagaggcacggtgttcgccaggaaggtggacctcaccggtgtcgacggtcaggcgctcgccggccacggcctcgggagcaacttatcagtggtgatcttcgtgctgctccacaacgtcttcagcaacgtcaagtcggacatcgatggcatggtctctgcttccactccttattagccatcgtcacctagctacctacgtgtctacagatttgcagtcactagcctcaagtctccaagtgattggatctctgctacagtgctcttactactgccctagcgcaaatcttgatgtgtccgttctagctactactagtatctaccttggttatgttggatcatgcatgtgattgggttctgctagtactatggtttctgttctacccagtagatggctacttcactgtgttggatcagtcacattacatgatttctgat

SEQ ID NO: 5740 - DNA, 2426 bp, Zea mays
  Clone ID: 700471484_FLI
ggtgtgcactgttatgtctgggtgctttgggtttgcttcttgagacagctagacgcgcattttctgcggacgcaatggaacctgctgaaggtattctactaattgtagaaagtcttactatggaagctaatgagagtgacataagcattgcccaaagtgtttttacaactagtactgaagcgattggcgctggtgaggaggccaggaaaattgttctcatgtttttggagagaatatgtcatccttcaggtgccaaaaaaatcaaacaagcaacaaaggaatgaggagatggtggcaaggatcctgccgtacttgacctatggggaaccaacagctatggaagctcttattcaacattttgagccctaccttagggactggtctgaatttgatcaattgcagaagcaacatgaagataatccaaaagatgataatataagccaaaagctgtcaacacagcgatctgctatcgacaactttgttcgtgtatcagagtcactcaagactagttcatgtggtgagaggctaaaggatattattctggagaagggcatcacaaaagctgctgttgagcatgtaaaggaaagctttgcttctgctggacagactggcttcagaacaagtgaagaatggacaacaggcttaaaactgccatctattccacccattctgtcaatgttgaaggggctggctaagggccatctgcctacacagaaatgcattgatgaagaaggcatattaccactgctccatgctctggaaggggtgcctggtgaaaatgaaattggtgcaagagcagaaaatcttttggatacactagccaataatgaaaataatggtgatggcttccttggagagaagattcaagagctgcggcacgctacaagggatgagatgcgtcgccgtgctcttgagaaaagagtgatgctacttcagggaatgggaatgcgccaagaatttgcttctgatggaggtagacgtattgttgtatctcagcctacaattgaaggtttggatgatgtggaagaagaggaggatggtgtagcctgtatggtttgtagagaagggtacaccttaagaccaacagacatgttgggagtctatgcattcagtaaacgagtgaacttaggtgcaacaagttctggtagtggccgtggggactgtgtttacaccactgttagccacttcaacatcatacactaccaatgccatcaggaagctaaacgagctgatgctgcactgaagaatcccaaaaaggaatgggacggtgctaccttgcgaaacaatgagacattgtgcaattgtatctttccattgagggggccatctgttcctcttgggcagtacactaggtgtgttgatcagtactgggaccaattgaattctcttggacgagctgatgggagtcgcctccggttgttgacatatgacattgtgctgatgctagcaaggtttgcaacaggcgcttcgtttagcacagactgcaaaggtggggggagggagagcaactcccggtttcttccattcatggtccagatggcttcttatctttctgatggaagtgccaaccagcagcgtcatgtgatggccaaagctgtcaccacctacttgtccggctccccaacactggaatctcctattcgagtttcagcatctctctctgggtcccgtggtggttcaggttcctctgaggagactgtacagttcatgatggtttattcacttctgtcggagtcatacgagagttggctccaacaccgccctgtgtttctacagaggggcatctaccatgcctacatgcaacataggcacgggcggtcgaccctcaagctgtcatcggactcgtcatcatcagcagttcgggcagacgaaagttcatcctctgatacaagtgacaacaagaagctcttcgccatagtccagccgatgctggtgtacaccggcttgattgagcagctacaacagttcttcaagaagggcaaatcgtccagcttgatcaagacggatgagaaagatgaatcctctgccagcctccagcaatgggagatccagatgaaagagaagctgggcaacatgaaggagatggtggggctgtccaaggacctgctctcatggcttgaagacatgacctcgtcaggtgatctgcaggaggcctttgatgtgatgggggcattgacggatgtattctcgagtggttatgcgacatgcgaaggttttgtccgggcggccatgaatgccagcaggagctggtcgtgagaacggaatggaggtttatatgccttgtgcctgtctgttttgtttctatgggtatgcagctgtaaacattattgcctttttcgtggccctggagagagacaaaatgaggcccttgtatcttgacaaatgaacgttgtatctgccgtgtttgttaagtgacagtgcatgtc

SEQ ID NO: 5741 - DNA, 1260 bp, Zea mays
  Clone ID: 700471486_FLI
catttctagaataggtaggaaaaaaaaaagagggagcggtagagcgcgcgcgcgagagtgagtcgatctgtgtgtgagtaacaaagagtgagcgctacattaacagatagatagagggtgcgacacagaatgcattctgcgtgagtattagtatgcaagatctgtgggggctggtctgttcgcgcgtcagctagataacgacagatgtatataaaggcatgtgatttaggtcgctaaagatttgtctcacccaggcttttctatatacaccgccgtacaaataattgcacttagctctatatataggacactatatagcacgcatgcgtgcgcacgtgcgcgcgtgcgagcgctcgagatcgctctcgagagctctcgatcactctcactcattctcactcacagctcctaccttccgttagtctcagtgtgtgtgtgaagacgcgatacagacaccacatatatatatatatatatatatatatatatataaaatagtccttagggactgggtgaagtctgtcaattctcaggatgacagcttacttcaaccagacaggatggccggctaaagcaccaaagacagatgacaaaagaaaggagttcatagcttctcttcacaagaggaaaacagaattattcatggccctaattgagaaaaagttgcttcctctccgtccaggtgttcaaaggttaatcgatgaagctttaggaaaggcagttaaagttgcagtgtgcagtacatcaaatgagaaagctgtttcagcaatagtgtcgtacttattggggcctgatagagctgataagattaccatatttgctggagatgtggttcctcacaaaaaacctgacccagcaatctacatattagcagcaactacacttggagttgatccacaaagctgtgttgttattgaagacagtactatagggctcgcagcggcaaaagctgccggcatgaagtgtatcgtaacaaaaagcggctacactgcagaagaggacttcgagacagcagatgcagtgttcgattgcattggtgacccgccagaagtgcgcttcgatttggatttctgcgccaagttgctcaagaaacaatatgtgagctgaaagggggctagtgcaagtgatataccaagtacaggttcctgaatatggagaaagagtccatggcatgccaatgttaaagaatgtatggcaatcaaactattctaagactacacttataaatatttattgataataccattacatttgcaagag

SEQ ID NO: 5742 - DNA, 1376 bp, Zea mays
  Clone ID: 700471512_FLI
ctcgtacttctctttcatggatgatcttattgacaaaatgggggacaatgaagaagcccctctcgacatcaagttgtcttatctaccacggagcatggtcgttgccttaatcgccgttccagtggatgtgctgctgataagcgcagtggctttgtggaaaagcccctgcatgttgttcaaaggatggcagaggttatgtgaggatctagttggaagggaagggccgttcttagaaactgtctgcgtgccttttgctggtttggccattgtgttatggccacttgcggtgattggggggttacttgcttcatttttcagcagcttcttcttcggttttcgcgcgggactggttgcttatcaggaggcttctttccaaatgggacttgcatacatgatttcagcagtagcaattttcgatgaatacaccaatgacttgctttacctaagagaaggatcatgccttccaaggcccaagtatcggagagcagatatcatgagggagtgtgaaactgagcctgcagagaggcaacaaactggccatcacaagcatagaaggacgttacctcgatcaaagacgttcatgcaaaccgtccagcgactacgaccgattcaaatatgggattggttcttccggtcctgtgagctcaatggaaggatactactgagcgagggcctgattactgcccaagacatggagcaatacatcaccaatggaaaatgcaagaagctggacactaaattaccctgctggtgtatcttccagtgcctattacgatctgcgaactctgattcagacggtttggtcatatctgatcatgtccaagtgacgaccctcaactggcccaaagacagagtccttgactggctgctcggaccactcctgctcatcaaggatcaaatgaagaaactggaggtcaccgaagacgaggagatgtgcctgaggaagctgatcatgacaagcaagaacgagaagccatctgactgggacgattcgggtttcccgtcagacgacaacataaagagaggccagctgcagtcgataatcagaaggttgcaagggattgtggcctacatgtcccgagtgccgagtttcaggaggcgcttcatcaacctggtcaaggccatgtatctagaggccatcgaagcaggggccatcgacggatcgcgcaaagttaaggcggatgtggctgacaggtgtgcggaagatattgccggttcatgttcatcaaccgacacgccagcgaacattcacatggtctgatgatgtttcaccagcatagcagagctcgacgagctgtgctgaattctgctatttcttctgtaaaaagaactgtgctgaattgttgtgctaaactgtgccaaggctgcaaacaaat

SEQ ID NO: 5743 - DNA, 1838 bp, Zea mays
  Clone ID: 700471545_FLI
tctcaacgtaaagacaggcagggcgggcacgaagcgaagggaccagccagcgagcggctcgccggcgacgaccctctccccgccccaccccgcccacggaagcacggagaagatgtccgccgcataccctcgtctcctcctctgtctcctgaccctagccctggctctcgcaggggtcgccgcgggcaagatctcggccccccgcaccccgatctcgcgcgacatctaccactccagtgactctcttctgcgtgaaatcaaggctttggttgctcggcattccagcaaattgagtatggacactatcaaaacaagcaacaaaggctattctgcagagctgtttgtagttacatttaatcatgtgaaggagcgcatggataatggctcaaaagttcatatccttctgaaaggttcattgtcttccagagctttgggcagcatggcagagaacttatcacctccgaagttgcattacgtcttctctatgttttaacggagaagcccaagatcgctggtgtggatatttcatcctttgagaaactgctggagaaccttgtgatcaaagttgtgccgatggaaaatatgaatggtcgcaaacgtgtcgaagaaggggagctttgtgataggagaaatggaagaggagttgatctcaacagaaattggagtgttgactggggaaagaaagaaaaagactacgacccatacgaggagaatcctggtattgctccttttagcgaacctgaggcccagatcatgagggaattatcaaggtcgtttaaacctcatatttgggtgaacgtgcattctggaatggaggccttatttatgccatatgatcacaagaataccacaccaaatggagcatctgcacattcgatgcggtcagtcttagagaatttgaaccgtcgccatttccaagatagctgcctagttgggtcaggtggtggatctgttggatatcttgcacatggtacaacaactgattacatgtatgacattgcaaaggtgccaatgccgttcacctttgagatatatggagatgagaaagcatcttccgatgactgcttcaaaatgttcaatcctgttgacaagaaaacattcgacagagttgttaacaagtggtgcatggcatttctcattctcttcgaggaaggcctgcgaaacctgcgagacgcgcagatagtgtcgcaaggcacgctggaaaactgggtcccaattggaggagacatcgtcgagataaatgtggagcggaagagcagcatccgtgagaggaggaagctggaaggcctcgaccttggaatgcaggagctaaggacatatttccggctattcttgctgtcaacattcctgttgatgttcatgttctgcgcgcggatatcaaagaacagaaaccgagactcaggtaacttgtttgacccttgaatgaagtaccaaagagagcatcggtgggggggggcctcctccgagctgaacttcgggtgcaaagagcgatcccctcagatcagacgaacaaagcgatctgaaacattcagagctggaatacagctctgccttcgcaccctggtattcggagctggacgtcccgtatactttggacacgaaggatggtggcaggcagtgtctgtttaggttacagcagagacgccagacgatgtggctaactgtttaacaaaattgtagctgtaaaaatcgcccatgtcagttttttttggtgatgcataggttttactactacattttgatggaaggttgttagtgcacccaacacttggtacggtgccatcagttgatgtaacatctcactgatcgagcggtttatgtggaattgtgttggctcg

SEQ ID NO: 5744 - DNA, 1989 bp, Zea mays
  Clone ID: 700471556_FLI
gcagattgtaatcacgccgatggtacagttactgtaattgaggcaccacgccaatcagatttactgattgagttgatcaggaagctgcagcctcaggtggttgttactggcatggctcaatttgaggctatcaccagtgctgcttttgagaacctactaaacgtaacaaaagatgttggctcccggctgttcctggatatttctgagcatctggagttgtctagcctgccaagctctaatggtgtattgaaatatcttgctggaaagacattaccgtcacatgcagctatactgtgtggtttagtaaagaatcaggtgtactctgatctggaggttgcttttgccatttccgaagatgcagctgtatataaagcattatcacaaactattgagctattggaaggccacacttctctgatcagccagcactattatggttgccttttccacgagcttctggcatttcagattgctgaccgtcatccacagcaagagagacaacctgcggaagtgatacctcagcagatgataggattttctgacccagctgtgtctaccctaaaggctactgaatttttcgttcctggttcagctgaatccagcattattcatatggatttagatcgcagcttcctgccagtaccttcagcagtgaatgcgtctgtttttgaaagttttgtcaggcagaacatcactgattctgaaaccgatgtccgttccagcatccaacagctggtgaaagacagctatggtttatccgcagctggttgtgcagaaattatctacggaaacacctccgtagcactcttcaacaagctcgtcctttgttgcatgcaagaacagggcaccttgcttttccccttgggcaccaatggccactacgtctccgcagcaaagtttgtgaacgctagcaccgtgactataccgacaaatcccagttcagggttcaggatcgagcccaaggttctagctgacactcttaagaatgtatctcggccgtgggtgtatgtttgcggccccacgatcaaccctactggctttctgtacagtgacagtgacatccgagagctgctctccgtatgcgctgaatatggagccagggtagtgatagatacatccttctctggcctggagtacgagaccgatggatggaggcagtggaatctggcaggatgcctttcctctttgaagcgttcagagccatcgttctctgtggtcctgctcggagagctgtcctttgcgctgactgcaggtgggcatgactttgggtttgtgatattgggtgactcgtcgttggctgagacgttccatagtttttctagcttgagtcgaccgcacaccacattgaagtacactttcaagaagctgctggggcttaagaaccagaaggaccagcatttctcggatctgatagtggagcagaaggaggagctgaagaatcgcgccaaccagttgatacagacactggagagctgtggctgggaagctgccatcggttgcggtggcatctcgatgctggcgaagcccaccgcgtacatggggaaggccttcaaagctgctggcttcgacggcgagctggacgcgagcaacatccgggaagccatcctgagggccactgggctgtgcataaacagcagctcctggacggggatccctggctactgccggttcagctttgctctggagaggggggaattcgagcgtgcgatgggatgcatagctcggttcaaggagctggttctgggaggcgctcagatgaatggtgcctgatggagcaatccatgttatacgtaaccttggtgctgtgtagtagcgatgatattgttccaggtgatggagatatcaaggaataacaagagcctacctgctgtgaagtcaatgtactactaggatggatagggcgcttcgatgcgccctttctgtcttcgaattgctgtgctgtgcacggagaataaacatatactattatatatatacatacaatttgct

SEQ ID NO: 5745 - DNA, 2047 bp, Zea mays
  Clone ID: 700471623_FLI
gattttcggagcagctcagagacctgttacgcccctacacctgaatttcatggtcaattcgagtttcagttcagttcagatgcatttgatgtagcccaaaatgcaccctgtggacatcacaccatctctattcaagttccacttatcaaagacatgatttcaagcaagattcagcaactccctgcatatcaccatcccaaatttgaagcaaagctgcgtgcttacgactcagaggttggcaagtcatttgccactatcaaccaacgtcttagcaagattgtcaaaaagcagtacgacctagcagacacatttggagagttgattgacgaggttcttcgtgctgagataaatagtccagacaacaaagatgacatgatagaaccttccaatccctcagcatcaggtcagtcatccagttactatatatgtatcctgtatccaagcataaattacaccaatacatcttcagctggattaacatgctccagtttgaagattgtttcaatccatacactcggtaacttttatacttcaatggttactagttttttacagagcattgcacacagtctactgaccaattcatctcagatccactaatgacagccacgcagctggagtcgcagatgatagtcactcaggtggaggccatatataaaagacaacaggaaatgtgccgagccttcgagagttctcgtgatgaatcagtcacacctcaaaacatcgtttgtttctacctttaactttatgatttcttattctttaatttctgtacgaccgttttcatacttaaccaaccgaagcaacattatgagggccacaatgtttgcaattggctaggtttgttactttgtttatcaattgtgcattttattctgtttttaaattgtcatattgttttgtgaagcggggtgacacgacggaagatgatgctcttcaacttgactctggcctagttttggaccagattctaagtggcaatgagacatatatgatgcacaaaacacgacacgactctgtgccactcacacaaatggactgtgttcgcgcccttcgacaattcctgtgtgctaaggtcatggatttgaacagaaatgtcattgattttggtgaatatgtcggtacttgtcgtgatatacaacgatcgtttgccgatggggagtgccttgacaatgttttcatgcaatgcttcattgattgtgttcgtgatgacgccacaaatcatatccctccactaactgctcatcaacttatcctagacgccattgttggggctatattgaacttcgaggagcaggaacaacacagtaacactcatcggccgtatgacccagccatcctagagaattacttgtcaaagacactgccttcgttcaagcagttggacgaatacaaatcgatcatggtccctatgctccgcgcgggacattggacgttgtatgttatcaattttcagaatcgatgcatacacattctagactccaatccatacggaccagaacttggtgagactacatgggaaagttaccattatgttcaaatggacatcgggaaaaggaagttaccatgggccagactaataatggttagactaaacatggctctccaacatgttcgaccaagatcaaacctacctagatttgacaactttccaatcgacatggctccaaactgtcccacaatgaaagcagggtctaacgactgtggcttctttgctatgaggtacatacaatattatgactatatggatggtgctatcaatgtagttatagactcggataattcaggtgacctccgcgctcttgccttgtattacctgatcttccatcgactaaacaagaatcgctcattgtctccagaattagaaagattcaagttcccccattattagattagtctagagcaatatcatcagattgatcgttgcactcaaaggtgtgctagcatgtatttagtgtatatgtttgtccatatgtatagtgatctagtgcctaaaactgttttacaacctttacacgttataaacttctgtcacttcttatggatc

SEQ ID NO: 5746 - DNA, 961 bp, Zea mays
  Clone ID: 700471645_FLI
cccttcttccgctcgctggggctctccgacaagatctggaacaacgggcccatcagcttccagctggagtggttccagcaggtcgcgtccgccgtgtgcggcgtggggcaggcgcagcaggccgactgcaagagctacctggccaactccctgttcgtgttcggcgagttcggcggcaacgactacaacgccatgctgttcggcaactacagcgcggaccaggccagcacgtacacgccgcaggtcgtggccgccgtcgccagcggcgtcgagaagctggtggccatgggcgccaccgacgtcgtggtgcccggcgtcctccccatcggctgcttccccatctacctcaccttctacggcacctccagcagcgccgactacgacagcctcggctgcctcaggaagttcaacgacctgtccaccaaccacaacaaccagctgcaggcccagatctccggcctccaggccaagtacaagtcggcgcgcatcatgtacgccgacttctactccgccgtctacgacatggtcaagaatccaggcagctacgggttcagcacggcgttccagacgtgctgcgggtccggaggcggcaagtacaactaccagaacagcgcgcggtgcggcatgccgggcgcctccgcgtgctccaacccggcggcgcacctcagctgggacggcatccacctcaccgaggccgcgtacaagcagatcaccgacggctggctcaacgggccctactgccacccggccattctccacagctaaagcgacaggggggcccaattaattattaattattattatttgttgtttacgttgccgggagagaaaaacaaagtgtctcagcaactgcatgcatgtgttcctggtccctcactgctatgacttacagagtattatatattagtactatgtatactggtcctcatttacaaatcaaatggtatagggttttctattt

SEQ ID NO: 5747 - DNA, 2066 bp, Zea mays
  Clone ID: 700471664_FLI
gtggtttgtccgctcgcatccttccctcccttccgccctttcctcccacttgctcgccgaacccagagccccgcccacctcttttcggttttttctcgccggcggttgtgccaggatcgggctttgggctccgtgcatcgacgcgccgccgcctcctgatcgcaaagggtgtttcccccaggctttcgtgctccggaagtggcgagattcgccgagaaaggtcagatccggtggcctggttcgagcaacagtgtgttggcgtatcgatctgcattggatcgtcgggcgattcgtgtgacggagacgacgtcctctgtggtggctccggtttgctcctcagctctagatctggaaggactgggtgatctgctgcctcaagcagcttgaggtgcattggaaagtgaccatctttcccagacatcggcacaacgtaactggacatggaggctcttgtggttttcccggagcagcacagccaccaccatcaccgccaccctggtacccgcagcaagtcatcgggtccatacttttcatcaccgcctaactctcgtggcttccgtggaatgaactgccggtctttccactctggtcgttgcgtcggtgctattccattcccagcacctcctgctcgcacctactcatccccagagcccaagacacccaagcagcaaccacgccatggtggcaagcgaagccggccaatttccataagcctctccacatcccctccctcccattctgagctctgggcaggtccagcattctccaactctccaccacctagttcgcttcccatccccaaattctcgctccgccagaagcgcagcatctctctcgagctgccaccggttgaacgccctgatgatgtggtggtcaggctgcattctaaatcagcaccttcatccccagttgagggatatgggtatgacttcttcaatgacgatgcaatcgctagtgcgatagcaacggagaatctgaggaggattctccagctggatatcgcagatcattgaataatgggaggatggaagggtggttcctgtgtacataggttatctttcactgacagctttctacttgcattggtagtgtatagggtaatgatgatagatacttggtggttgtaagatatggtcaggatcatgggagaggtgtaggttgtaggtgaagcatcttcagaagcttagacggttgaaggtgatagtgccctgttaggtgttattaaggtggggtctgggtcgaggatggggttgcacggcagttggtagtattcacctatatgcttccttcatctcttaggtgtaggatttaaacctttttaaaaacagcatcatttgcatccacagtacctgttctgagctggcggtgggcactctgccatagcagtaacatacgtcctaaccccaaaccagatgtcaaatatttgtagggtaccatgcatcttacatacccttgcatacttatttccttctgtcctctagccaactggctctaactatcctcgcttcctggtgctctgcaaagaacaccattatctcctcagcagctcttctgttttttttggtaaggaagaagctgcgtggaagatggaagaaattctgctctatccgtcttgttcgaaactaactttcctatcccgcccctttgttgcatatctggcatataccatagtccatatccgtcgcatatctccaggcttttatgttcatctagcgctcctgcattgcatctagtgcccttagtcagttagcatgctcattcgttcccacttcaagttcatgaaccagtttgagggttctgattttcttaaaacgtcgaaagagagtctggattctggatcccttcgtgcaggcaaaccctgatgaggttgctctgtagtgacataacgcccaagctagctcgtgccggtgttacacgcttctgtagccctgcgcagttttagcactagcagtgaagcagcagtactgctggatctagattagtagtcatcggaaatgccgaggtttggtcagttatcttgtgctctggtgttaaatcagcagatgacattgtgtcgttgttacttc

SEQ ID NO: 5748 - DNA, 1890 bp, Zea mays
  Clone ID: 700471693_FLI
gaagccctagcaaacaggttttccttatatctactcgagcaggtaatttaggtgtaaaccttgttagtgctaaccgcgtggtgatatttgatccaagttggaaccctgcccaagacttgcaagcacaagacagatcatttcggtatggacagagacggcatgttacagtatttcgcctacttggtgccggttcacttgaagagctcatttattctaggcaaatatataaacagcagctttccaacattgcagtctctggaaaaatagagaggcgttactttgaaggtgtgcaggaactagatcccaagtgttattttttcatcagcgcatcaaattcagcattgatggcgttcttccaaagttccaattgtcgtcacctagagcttcagacatgtcttgaggttcaccggtggtggtaaaacaaccatatttaatgagtaatttttccatcttgtgatcttgtccgaggacgctggtctatgtaaatagtgagaacgggaggtcggtggggtgatggagttgttggtcctgatgaaaccgtgcactgatgtcgagtcatctgaaggttctgttgcactactttctgctacttaagggaccggtagagctcgatgatgttgctgcattgtgatcaggcgcatcagagacatgatctacacgcagtgctggtctggttgctgtatctacgcaccaccctcctgaacttgggtagagcttgtacaacatcttctagcctatcaccaataacacttcatgattttcattagtagtattgtcatatgaatcattagacaacgagttcccatgttgtcaaagttcgatgaaggtaaaagggtgcaagacaacatattgatttggcccttagtctagcatcaacattagggtgaagcccaacaaatggaaaaacttcttcatcatatcctaccaaaatgatgacaagaaatttcaaggtgagctctttgggatctgcaatcttttccgtgacttgtccgataagctttttactagtgagattattgagatgcatggagaacatggcaagagtagtgcaacagaagcaacagggataagagaaatagtcgatactgatttatttggttcacaagagaataggaagtcttccacagcaacaacacatacggatgatcagaaattggttgattttgggatagtttatgcccaccgcaacgaggatgtcgtgaacatgaggacagacggaagagagaaaggtggagcagacgagactgtccagagctccttagaggagctgcttagtaagaatgaaacaaagcacactgccatggaaaaatcttattcatcggaggagaaaagggaagtggcaagatcttattcactggagcagaaaaagaaagagtttagctgcatcgcatccttcatgggtatggatgaccttgaatttagcaagtggttgctatcagcctcaccgcaccagcggtctgaagtgctgcaggactacaggaggaagaagaaaaatcagaaatgatgatgcaggtcctcggagctaaccggctaccgcaaagctttgacgtagtgattagcttgtgtagctaattgtggtagttatgacaagggaatggtagtaaaattgacccgtggcaccgatcagtatgtatgtctgcagccccgcttattttgaaccttatattggtgcaaactgagctcagcaaggccttggtcactctccctggccgttttttttcggtcaggtgaaatataatctgtattgtgtctgttagttcctgttcagctgtctaagcctttgtgtagcgagtcttatcatgttaggtggcttgcaatgttaccttggtctgtactaatcatttggatatcgtagtcttctccgtactaaaatataattcgttttagatt

SEQ ID NO: 5749 - DNA, 1398 bp, Zea mays
  Clone ID: 700471753_FLI
ccctttaccattgtctcccccctcgtccgacctcctcgccgccgcagacgaccgccgccgccgctgccgctgccgctgcgaaccctttgtgaatcttcgttgtccgggctgtgtggggcaggcatggcgctccggaggctgctgcaggggagcgtcctgccgcggataatcggcagggatttggcaccggccgtggcgccgttttcaacggagtccggggagaccattcgtgccacgctctttcccggcgatggcatcgggccagagatcgctgagtctgtcaagcaggtattcaatgttgcaggggtaccaattgaatgggaagaacactatgtcggtacagaagttgatcccagaacagagagttttttgacttgggaaagcctggagtcagtgcgtagaaacaaagttggcttgaaaggacctatggctacacctattggaaagggccatcgatctttgaatcttacattaaggaaagaacttgggctctatgccaatgtcagaccttgcaacagcctcccaggttacaagaccagatacgatgatgttaaccttgtaacaattcgtgaaaatactgaaggagaatatagtggtcttgagcatcaggttgtgagaggtgttgtggaaagtttgaaaattattacacgccaagcaagtttgagagtggcagagtatgctttccattatgccaaggccaatggccgggaaagagtctctgcgatccacaaagccaatattatgaggaagacagatggtcttttcctcaagtgttgccgtgaagtgtctgaaaagtaccctgaaattcaatacgaggaggtcatcattgacaattgctgtatgacgcttgtgaagaatcctggtctttttgacgtattagtgatgccaaatctctatggtgacattattagtgatctatgtgctggtttgatcgggggcttgggcctaacacccagttgcaatattggtgaaggtggcatttgtctggcagaagctgttcatggttctgctcctgatattgctggcaagaacctcgcgaacccgactgctcttatgctgagtgctgtcatgttgttgcgccacatgcaattcaacgacaaagcagaccggatccacaacgccatcctccagaccatcgccgaggggaagtacaggactgctgatcttggtggaaaggcatcgacatcagagtttacaaacgcagtctgtgatcacatctgagaaacggatgtgattcttccttctgattgttttgtcatcctaatatttttttgtcacatatgagaggagctttagctttaagaggttaactggcagcacctcgaacttctttggggtgtttaacacggtttgagaccgtcaaataattttgtcacatttcttgcggttcagaaattc

SEQ ID NO: 5750 - DNA, 722 bp, Zea mays
  Clone ID: 700471759_FLI
ctctctctctctctctctctctctctctctctctctctctctctctctctctctctctcggccgccggccctccgtcgcattcaacacgtacgccatggcgcgcctgctccgcgccgccgccgtcctggcgctcctggccgtctccaccgccgcgctgtcggcgccggcgtgggcgggcggcgtgtccgccggcgacctggcccatctgggcgccgccgtcgtgattcggcgcggcggcgggcgggcgtgccgcggcggtacgacggtgggcgagtgcatggagtacctggacgtggacgccgagggcgaggccgacgtcgccggcatggccacgggcggcagcaagcgccgggtgctgcagggcggctccggctacatcggctacgacgcgctgcgccgggacaacgtgccctgctcgcagcgcggcgcgtcctactacaactgccagcccggcgccgaggccaacccctactcccgcggctgcagcgccatcacccagtgcaggggctgatcgatgcatgcatggtttcacattccattctccggcagcagggtaaatcggttgctgctagcttcattcatgcatgtgtgtggtgcttgattttcttttttggggtctttaattgtcgtccgtcgattattgtggtgcagtggagatgtgtctgtgctgttgctagcatccttttcaggatgaatctaaaagtaataataataattatat

SEQ ID NO: 5751 - DNA, 1780 bp, Zea mays
  Clone ID: 700471854_FLI
tgcagtgccacaggaaggagcaagacgatccatatttggagaggccatttggcatccagagcatccagataaacttgaaagagcaagaaaaacgaggcctcgtttcttgcagtgcctgtgcgtgcggcggcagcgcatgcgcattctctcccctccccgttctcctctccccgggcaacccggccgcgccgcccccctttcttccaccctcgttggtagagtaccgatatagttcccccatcggccaggaatcctcgcatcgcatcacgacacccggttcctctccctcccttcccttcctctgcttccggggaggaggagaggaaagagacagacgaagggcgcaccgggaaggaggacctggaggaggaggcacacaacacaatccttcctcttgcacgcggagtcctcaagcgggcctcctcctcggccttggctcaaattccgggtgccataacacgacctccgccggcggccaccggcagccatgtcgcccttctacctcgctcgcggtgcttccaagctagtgagaaggattacctcggagacatcggtcgagctcaagattctatctgataaatggcggcttctcctcgctggcctcattttccagtacatacatggtttggccgctcatggggttcattatctgcaccggccgggccctacccttcaagatcttggcttcatgattcttccggagcttgggaaagaaaggggttacatcagtgagacattgtttacattcgtcttcctcaccttcgttttgtggacatttcatcctttcatccttcagactaaacgcttctacactgttctgatatggcgcagggtacttgccttcttatgtgcttctcagtttcttcgaataataacattctatgcaacacagcttccaggacctaattatcattgtcgcgagggctcgcctctggctagattaccacctccccagaatgcagctgaggtctttctgattaatttcccaacaggagtgatttatggatgtggtgacttgatattttcatcccacatgattttcaccctagttttcgtcataacataccagaaatatggaagcataaggttttgtaagatgcttgcttggtgcatagctgttgctcagagtcttcttattatatgttctcgcaagcattacagtgttgacgtcgttgttgcatggtatactgtgaatttggtcgttttctttgtggataagaagcttacagaacttcctgatcgatcagtgggatccacatcagtacttcctgtgagtgcaagggataaagataccaagttgaaagaagaaaataccagattgctgaatggtaactctatggattcagctgatcggaggccacggacacaaatgaatggaaagcaaattgagaatgaaagccatgttgatagtgaaactgtgaaaacatgatcaactatcaaggaggggattttgttagctaagagacgtttcagacgactaaagaaatatgggatgccatccgctttggtgcctactgcctagctccttgacgacttcatgaaatatagctacgaaggaaatagttttacatctcgctgttctaggcagcagaagttttgtttgcaaaactgtacatcttcctcggctctctcatttgtaaccctttttctttctggtttctttcatttatttaccagcttggaattcagattatttatactagttgtgtatagttagcacaggttctttgcatgtgaacagtaatcatatggacaatataagattgttcttgttataagc

SEQ ID NO: 5752 - DNA, 1255 bp, Zea mays
  Clone ID: 700471870_FLI
ataaggtaaggggcgacgaaaatggctccaacgaccgccaccaaggacgacagtggctacggcgacgagcgccggcgcgagctgcaggcgttcgacgacacgaagctgggggtgaaaggtctggtggactccggcgtcaagtccatcccgtccatcttccaccacccgccggaagccctgagcgacataatttctccggcgcctctgccgccgtcgccgccctccggcgccgccatcccggtggtggacctctcggtgacgcggcgcgaggacctagtcgagcaggtgaggcacgcggccgggacggtgggcttcttctggctggtgaaccacggagtgccggaggagctgatgggcggcatgctccgcggggtgcgccagttcaacgagggccccgtggaggcgaagcaggcgctctactcgagggacctcgctcgcaacctgcgcttcgcctccaacttcgacctcttcaaggctgctgcggccgactggcgcgacacgctcttctgcgaggtggctccgaacccgccgccgcgggaggagctgccggagccactcaggaacgtgatgctggagtacggcgcggcggtgacgaagctggcgcggttcgtgttcgagctgctgtccgagtccctcggcatgcccagcgaccacctgtacgagatggagtgcacgcagaacctgaacgtggtgtgccagtactacccgccgtgcccggagccgcaccgcaccgtgggcgtcaagaggcacacggaccctggcttcttcaccatcctcctgcaggacggcatgggcggcctgcaggtgcgcctcggcgacgggcagaacggcggctgctgggtggacatcgctccccggcctggggcgctcatggtcaacatcggtgaccttctgcagctcgtgaccaatgaccggttcaggagcgtggagcaccgggtgccggccaacaagagcagcgacacggcgagggtctccgtggcgtccttcttcaacacggacgtgaggaggtccgagaggctgtacggccccattccagaccccagcaagcccccgctgtacaggagcgtcagggcccgagacttcatcgcaaagttcaacaccataggactcgatggccgcgcgctcgaccacttcaggctctagctacctggctacgtttcagattcgtcctttcatttgctttggtctctaattaataattccaaataataagcccgcggatggacctctgtctgtctgtctgtaatttagtttc

SEQ ID NO: 5753 - DNA, 922 bp, Zea mays
  Clone ID: 700471883_FLI
gagaaacttcagaatcttgttaatgatgctctagacagaggtgccgaaattgccgtcagagggagctttggcaatcttggtgaagatgcagttgatcaatttttcccaccaactgtcctggtgaatgttgatcacacaatgaaaattatgcaagaagagacatttggacctattataccaatcatgaaattcagttctgatgaagaggctatcaaacttgcaaacgactcaaaatatggtcttggctgtgctgttttttctggcaaccagaagcgtgccatcagaatagcgtcccagttacactgtggggtagcagcaatcaatgattttgcttcaagttacatgtgccagtctttgccattcggtggtgttaaagacagcggattcgggagatttgctggcgtagaaggcttgcgagcttgctgccttgtgaagtctgttgtagaagatagattgtggccatatattagaacagtgatcccgaagcctatccagtatcccgtctcagagcatggatttgagttccagcagttgcttgtggagactctgtatggctatagcgtgtgggacaggttgcggtcccttgtgaatcttataaagatggttaccgagcagaattctgccccggcttcaaatgcgaccacgaagaaaaggcgatgagacgaatgcccggggggttcattgaatctgtttatggtaagtctgatctctggacgctgtaaacctccccaagctgctgtaatcggccttgtttgctctctgaaacaatctcgagcctgggagcttgtgtattcaagcgctttagctttcatttcagaaccttcttttttttttctctctctccctctctccctttcttattaacacccacatgcgtgggcaatggaaatgaaattccactgtggatgtgctaggaactgtc

SEQ ID NO: 5754 - DNA, 518 bp, Zea mays
  Clone ID: 700471924_FLI
ggcagacaagaggatggctgttgaagcagcaaagccgcagtccaagaggcctcgtgccaatggatcggcctttgcaacccgtgctacaggctttgctgacaagagcttctactcagcaaccccagagaggcatccattcaatccttgcgagaggcagtttgtgtatggcgctgaggttcatcttcctcccatgatgacctcagcgtcttacacgatgcaacctgcccatggaccttattacggtaatggctacccagttcagtaccaggtctcgtatatccactaatggagacagccaggtgcaggtgctctttcctaacaatctagcttaacctgctgctctttgctgtagtcgtatcagttactctgcaagtttccctagctggaaatatttggaccactcaatgtgtgtgctctgagtggctgttgtggtaattttatgccctaatgacatgacataaattactcctaatatttagctatcgatgaatctcccaatgtacttcattcggcttgtg

SEQ ID NO: 5755 - DNA, 1188 bp, Zea mays
  Clone ID: 700471931_FLI
atcttcgatcgtgtcaccactggcgatggacatggcggcgagcggcgcgctccccgtggtggacctggcgccgttcttcaccgacggagacgagggcggcgcctcccgcgccagagccaccgaagccgtgcgccaggcgtgccggacgcatggcttcttccgcgtcgtcaaccacggcgtgccggcacacctcatggcgcgcgcgctcgagatgtcgtccgcgttcttcgcgctgccagacgacgacaaggccagggcccgggcagccgagggctccgaagcaccgctccccgcgggctacgcgcggcagccggtgcactcggcggacaagaacgagtacctgctggtgtttggtcccaagcttgggttcaacgtgtaccccgccgagccatcaggattcagagaggcagtagaggagtgctacgccaagctcaccgagctggggctgctcgtgcaggaggtcctgaacgagtgcatggacctcccgccgggcttcctcacggactacaacagcgaccgcagcttcgacttcttggcggcgctgcgctacttcccggcgacggaggaggaggacaacggcatcagcgcgcacgaggacgggaactgcatcaccttcgtcatccaggacggtgtcgggggcctcgaggtcctcaacgacgacggcgactgggtcccggcggagcccatcgagggcagcatcatcgtcaacctaggcgacgtcatacaggtgctaagtaataacaagctcaagagtgcgacgcaccgggtggtgaggaagcccgtgcacaggcactcgttcgtgttcttcttcaacatccatggggccaagtggatcgagccgctgccggagttcacggccaagatcggcgagccaccgcggtacagagggttcgtgtacaacgagtacatgcagctgcggatgaggaacaagacacatccgccggcgaggcccgaggacgtcgtccacgtaacccactacgccatctagcttgcttgcgaatccaaaacaggcttcgagacgcagaaactgcacaaacaagcaacctgcacacaaatggctgtgtcagctcttgttaagattgttgtggtctggccatcccacgcaccatgctatgctatcattaaaatcgagattaaataaacaacaaatccagctatgcacagtcgccgttgtttccgcttttccct

SEQ ID NO: 5756 - DNA, 745 bp, Zea mays
  Clone ID: 700471944_FLI
gatctaactgccccccgactcacgaatcccaaagcctccatggcgacgcaccgccactgcctcccactcctcctcctcgtggccgccgccctcgccgccgtccctgctcgcgcggcgctgggcggcgggcgcggcccgctgctgggcgggtggaacccgatccctgacgtgagcgactcgcacatccaggagctaggcgggtgggcgctggggcaggcgaagcaccagaagctggccgccgacgggctgcggttccgccgcgtggtgcgcggcgagcagcaggtcgtgtccgggatgaactaccgcctctacgtcgacgccgccgaccccgccggccgcaccgtgccctacgtcgccgtcgtgtacgagcaggtctggacccgcacccgccagctcgcctccttcaacccggtgccccgcgcccactgaaaccatacgcacacgggtgggccgaagcgacgttctccgtcaattacgtgtcgagctaatcttattattgtttctattattataataatgcttctccctgttcctatggacctatagtagtatactagtatgttgcgagggagcgagtagaccgtgtgtttcgctatcgtgggactagaataagccatgtcaatgaacatgagccgaatagaggctacgtactgttattgtatcagtactagtaccatatatatatatgggcgcactacagtctgtgatgtaatggattgtgctagtatttgactcttgcttttgt

SEQ ID NO: 5757 - DNA, 819 bp, Zea mays
  Clone ID: 700471983_FLI
agattttactcgtgatggttgatagcttagctaaattaagtatggatgttggggataaggatctggtgtacagtttgttacttgtcttctctggaatgttgatggatgaaaaaggcaaagagtgcattttggacaacatccaaatcacaatcagcgttcttactgaacttgtttcctatcctcacatgatggttgtgcgggagacagcattacaatgtttagtagccttttcgacgtttcctcactcgaagatttatcctgtgcggcgtaaggttgtgcaggcagcagtcagggctctcgacgataagaaacgggctgttcgtcgagtggctgtccgatgccggcacacatggcagtccttcgcttaaggggagtctctttcggtggtgtcaggtagtcgggggaggcaagcacaaaaaactgctcttactgggcgatcctgttgggagtcgatgagtgtacatggatctagagctgtcattgtaaggtgagatactgggagcggggtctgctgactagtttttatgtccgagacctggtctttggatcagctgatgccaagttccagatgttcgaagttctccgaagagccatggggccatggggaggaatgtccctggaaattggccctcagtctgggttgccagctcttgtgcccttttcttttccttgatcctggacattgccttgtgtgtctgatacagatcagaaaactgatgcaggatcgcttgggagttgggaatgtaacctaaagtcccagtattcttggcctcccgatgttggagaattcaagcatgctggcatgcgtgcgtttgtgcc

SEQ ID NO: 5758 - DNA, 580 bp, Zea mays
  Clone ID: 700472059_FLI
atcggcttcatcatcagcgctaacaattaaggagtcaatgcaatttctttgtgtgctgaaaaaatcataaacaggccatgccgcagctgactgacagaacgaaactccccaacatagttgacccagtgatcagggacacgatggacccaaagcatctgtaccaagtggcagcagtggcggttctctgtgtgcaaccagaaccaagttacaggccgctgattactgatgttctccactcccttgtccctttagtgcccgtggagctcggagggacgttgagggtcgcagagccaccttccccaaacctaaaacattctgcttgttgagatgtcatggtcggtcgaagatgacagttacgtgctgatgaacttaggaagatgtttatcagtaacttatcactctagctgtgtgccagaggatgacggttccaacctgccggtcgctgagaattctggtttgcaaagagttgtctcctatgtctttgcttgtacaaagaagtgaaagaaacaacacccttagaatttagggtccttctgtacagatcaaagtttctccaacactataacataaagaatttgag

SEQ ID NO: 5759 - DNA, 1875 bp, Zea mays
  Clone ID: 700472125_FLI
ctatcgaggatcttgcacagttgatttatgacctccatcagataaatcctaaagctaaagtatctgtaaagcttgtgtctgaagctggaattggaactgtagcttctggagtttcaaaggcgaatgcagacataattcagatatcaggtcatgatggtggtactggagctagcccaatcagctccatcaaacatgctgggggtccgtgggaacttggtcttacagaaacaaatcagacacttatacaaaatggattgagagagagggtagtacttagggtggacggtggattcaggagtggtcaagatgttcttattgctgctgctatgggagctgatgaatatggctttggttctgtagccatgatagctactggatgtgtcatggcacggatttgtcacacaaataattgtccagttggagtggctagtcagagagaagagcttcgtgcaaggtttcctggtgttcctggtgatcttgttaactacttcctctttgttgccgaggaggttcgagctgcattagcccagttgggttatgagaagttggatgacatcattgggcgaacagatttgcttaaaccaaagcacatctcattggtgaaaacgcagcacattgatcttggatacctcctatcaaatgctggattgcctgaatggagcagctcccaaattaggagccaggacgtccacactaatggccctgttcttgatgagacaatccttgcagatcctgagatagctgatgctattgagaatgagaaggaagtttccaaggcatttcaaatctataatgttgacagagctgtctgtggtcgggtagcaggtgtgattgccaagaagtatggagacacaggttttgctggccagctcaacatcacgttcaatggaagtgcagggcagtcctttggttgtttcctgactcctggaatgaacattcggctagttggggaggccaatgattatgttggaaagggtatggctggtggagaactggtggtagttcctgtagacaaaacaggatttgttcctgaggatgctactatagttggaaacacttgtctgtatggagctacaggtggtcaggtatttgtgagaggcaaggcaggagaaagatttgctgttagaaactctctatgtcaggcagtggttgagggcaccggagatcattgctgtgagtacatgactggtggctgcgtagtcgtacttggcaaagctgggaggaatgttgcagctggaatgactggtggtcttgcctacattctagatgaggatgatacacttgtcccaaaggtcaacaaggaaatcgtcaaaatgcagagagtgaatgctccagctgggcagatgcagctaaagggcttgattgaggcctatgttgaaaaaacgggcagcgagaaaggtattgcgattttgagggaatgggaggcctatttgccgctcttctggcaactggtaccgcccagtgaagaagactcgcctgaggcttgtgcagagtttgagagagtacttgccaagcaagcaaccacccaattgtctgcgaagtgatcgaatcagactacaggaaggtggtaggtgttttctatttgacacaaagtgatctcatcttatcacttcaagaaaatcgaagaccataaccggcactctgaggcaccgaagtgcccgtctgaagactgcaactttgtggaggctctgcccaggccatctttttgagttgagctaacagaaccgagggttcttctcgacgctcgtgcacctaggtaacccctgtaaattggtttgctgacgctaggctgcaaggggcctgccctgtttgaactgctgtactgtacatgattcttggccgttgccctgtgtaattatgttttggttagctcgt

SEQ ID NO: 5760 - DNA, 1374 bp, Zea mays
  Clone ID: 700472168_FLI
aagcgtcggggttttggctcctgttcaaaatccgcagctcgccgttggacaagtgaggaaaggagagagaaagagaaagagagagagagagacggtcagccatggcggcgaaggcaagggtctcgctgacggctgtgctcgccgccgcggcgtgggcgtgcttatctgtcgtggccgcctccgcattcgacgtcccgaccgtggccttcgaggaggggttctcgccgctgttcggcgacggcaacctcgtccgctcctccgacgacaggagcgtccgcctcctgctcgaccgccggtccggttccgggttcatttcttcggactactacctccatggcttcttcagcgcgtccatcaagctgcccaaggactacacggccggcgtcgtcgtcgccttctacctgtctaacggggacgtgtacgagaagacgcacgacgagctggatttcgagttcctgggaagccggtggggcgggcagtggcgcgtgcagaccaacgtctacggcaatggcagcactagccgcggccgggaggagcgctacctcctccccttcgaccccaccgtcgaggcccacagctactccatcctctgggctcccacccacatcatcttctacgtcgacgacacgccgatccgggaggtgatccggcacccggacatgggcggcgacttcccggcgaagccgatggcggtgtacgccaccatctgggacggctccgcgtgggccacggacgggggcaagtacaaggtcaactacaagtacgcgccgttcgcgtccgacttctcggagctggccgtcgtcggctcccgcgccgacccggtgctccgcgtcccgcgccgggacggcgccgcccaccaggacctcctcgcgctcatgacggccgactacgccgtcgtgacgccgcggaagcgcgcggccatgcgcgcgttcagggcgcggcagatgacgtacacggtgtgctacgacgccgtgcggtacgcggacgggccgttccccgagtgcgacaactcggacgaggagagggagtccttctcggcctggggcgagtccaagaccgtcgtcatgaggccacgcgcccggggccgccgccggggacgcaaggccggcaggggacgggctggcgtgtcaagcagctgacatccttcaaaataatataaatgccagggtctgtcgcgaaagctattggcacaatggttagggatgatggtcgattggtccggtaacgtagtaggtcgattcgttttttatttttatattttttggcgacccatatgcaggctgtaaagctaggtgtagggacggagtactagcagggattaatgcgttatgattctttgattccttgggtggcagctaataaaatgctcattat

SEQ ID NO: 5761 - DNA, 1064 bp, Zea mays; identical to SEQ ID NO: 5737
  Clone ID: 700472170_FLI

SEQ ID NO: 5762 - DNA, 2821 bp, Zea mays
  Clone ID: 700472244_FLI
ctcaattagcgacccgtgtcctgttgcacaattatatagccaccatttgagaagataggggggaggtggagcagagcgcaaggagaggggacaaggagggacgggaaggggaataagctgaggggaaggcaaggcaagcaggaatcggctgggttgcgcgccgacttcctggccgagtttttctagccatcggatcgaggcagtcccatcggcgaagacccggttccgttcggcggccatgcggttggtttctctgcttggtctgtcaggactctgatgggcatggttcatcctaggtttctggttgcttgctcggggtccaagctgtgcttcatctccagttgccgcggtagcagcgcaaagatgatgatgtcctttctccggaggcgtccggagcgtcgttccacgcttcctatattgattgagttcggtagatgattcttggacatcggtttggtgttcggtggggctcaaatacggattctgaaggacttcaaaggtgcttgaatcagtacatcttaggtgctatcccagactaggctgcgatgggtttaccccaaccttcaacagtcgaggatgatgcgccaacagcactgcgcacctctatttcttgccctccacattctggaggagttagtgcctgtgatttggatgggcttcctgcgggaagctctagcagaagggtgctttcgtacccattgatatgtgattttgatagaaaggccacattagatgctcctaatgaatcaaatgggtattctaaagacggatgtgaatttggcgaacccgcagacctccatggactaaacattgattcaagaaatacaaattcttggtcttctcctaaattagtgccttctgtccatatgccggcaaggagggttgtgggctttgattctggttgtattggaggttctgatggggcagaaacggatatggtcgattcatctttggtcgacagaaattctcatttgccatttgatcagcatgaacttcaagcaaggaaaagactgttctctccattgaaaaatgtgctcgttaaacagttcaatggtgatatgctcaaccttccttctggtgattctagatttaggcattctgattcagccgataaactatacagtactggtttccaagataataaaaaagccaacacgggatgcatcaatttttttgaaacgcgggatactccagcctctaggtgctccagccggagcccagaatgggatgttactaggagcaattctaattcattcactgatggtcctttacttgggagcaaggattatatatcctattatgatcatctagcagctagtgcaaaattagcgcactctccgctttctctgtctcctctcagccctaaatatatgaacaaaattaaagtgacaggatctcaaagatatataatgaaagatcttgaggatgacttcctagatttaaaggaaactggaggttctggcggagctaggatgccggaggtatcaaaaggatctaacttgttacatgatgaacttgatgttatgacacctaaatggggttcattgagaagatatcaaaattggggccctgaatcttcccctacatctcccagaattggttatggtcggagtttgtctttgcatgtaaggaggtcacttgttggctcctttgaggagtctcttttatctggtcgatactcgtatggaaaagacagtcagacaattgatggtttcttagctgttctaaatgtcactggtggtagtttcttccccacaactcagaaacttccattctcagtaacaagcatcgatgaggatagctccttactatactattcttctattgatcttgctgggaggttgccttcgaataacaccaaaagcccaaagctccaaagaagctacagtaataatgattcgcggtcagcaaagagtcgtttacgcatccctgttaagggtcgcatacagctggtggtaagcaacccagagaagactccacttcatactttcttctgcaactatgacttgagtgacatgcctcctggaaccaagactttcgtgcggcaaaaggtcactctctccccctctgccttgccttctaatccagtggaagaaggaagcaagacttgtgatgttaattctggtcacaaatcttctcagtcagtttcatgtggaaatgaacctagcgaacggggagctcgttctgaatgctgcaacggtggacagaactgcaactcaaatgatgaatcagaaaaaggagatctgaaaacaagatgtcgatcattggatagtgattctaatgaatcaaataagtctagttctccaggaaataagaaagaccagtctgattctgatggttgctgctgtcaaatggataagtttggcatgggagaaaagaaatcatgctgctcaccttctaagatcaatgatagttcaggtggagctgtgcttcgttatgctttgcacctgcgatttctgtgcccctccaagaaaaaatcctcgaaatcaatgcttcgttgcaaatctgatctatcaacggcaccatatagcagcaatacgctacctgaggaagaacggaggttctatctctacaatgatcttagagttgtatttcctcaaaggcactcagatgcagatgaaggcgagctgcgagtggagcatgatttccccgccgatcccaagtactttgacataagcaactgatggttgcgctgctgcaccggacaataataatctgtaaatatgttatcatgactaacttggtcaccagccgtttcatcttttcaccaacaaatgtacaggtcaatgttccaaataaaatgcaccatttagttgtgcct

SEQ ID NO: 5763 - DNA, 1403 bp, Zea mays
  Clone ID: 700472248_FLI
gccgccgtcccgtcaccaccaccaaccttggtagcagccgccgtccggtcatcaccaccaccttggtagccgccgccgaagcgcgccgcgggcgcgggcgctcgcgatggctaaccgcacggaccccctcgcgaagagcatccatgggacgaacccacaaaacctggtggagaagatcgtgcgctccaagatctatcagagcacctactggaaggagcaatgcttcggcctcaccgcagagacgctagtcgacaaggccatggagctcgaccacaccggcggaacctacggcggcaaccgcaagcccacccctttcctctgcctcgcgctcaagatgctgcagatccaaccagacaaggacatcgtagtcgagttcatcaagaacgaggattacaagtatgttcgtgttctcggggccttctacctgcgtctcactggcacaattgctgacgtctaccagtatcttgagccgctctacaacgactaccgcaagatcaggcacaagctcagcgatggacagttcacacttacccatgttgatgagttcattgatgagttgctgaccaaggattactcctgtgatacagccatgcctcgcatccagaaaagatgggttcttgaagcgtctggaactctggaaccgagaagaagtgcacttgaggacgattttgaggaagaagaggaagacaaggaggaacagcctatggaaattgatgaaccgaatggtcgtgaaaatgataatcatcgtggaaggagccttgccagggaacgggatagggactgggaccatgacaggaaacatgaaaggcataacagggacaaagattatgatagagatcgggattatgatagggactatgggagagggcgggaaagacaccgagatagagatcgtgaaagagacagaaaccgggatagggatagagaccgtcaccgcctgcgagatgatgattacaatcgcaacagggatagggacagggagagggatggtagggaaagggagcgccgagacagagaccgtggcaggcacaggagccgctcaaggagcagagatcgacgggacagagaccgtgaagatggagagtaccgcaggaggcgtggtcgtggcagtgtaagtcctcgaggacgtggtgaagacggtggcccaagagaggaacctaagaggaagaaggaaaagaaagagaagggtgaaggaaatgctccggacccgaatgaccctgagatcatagaaatgaacaagctacgggcctcactggggttgaaaccactaaagtagtttacacgagtaatgttcaacttgacctgcatccaaccttttttgtgctggactttttcagcttgatgtaactaaacttttgtattgatgtggttatatattcatcagggcttccatttctgtctgc

SEQ ID NO: 5764 - DNA, 994 bp, Zea mays
  Clone ID: 700472290_FLI
gataccgcttcgctctaccgctccgaacgtgccgtcggcgacgccgtggccgaggcagcgcggcgcgggatcgtggcgtccagggaggaggtgttcgtgacgaccaagatgtggtgctcgcagtgccacccggatctcgtgctaccttccctcaaggagagcttgcagaaccttcaaatggattatgttgatttgtacctggttcattggccgatagctgcaaagcccggcaagccacagttcccgtttaaaagggaggacatcatgcccatggacctaataggtgtatggcgggcaatggaggaatgccaccggcttggccttgctaggatgattggtgtcagcaatttcacaacaaagaagctccaagagctactggccattgctaaaatccccccgtcagtaaatcaggttgaaatgaatccaatttggcagcagaaaaggttagctgagttctgcaaagacaaaggtattcatttgactgcctattctccgctagcaggccaaagcacgtctaaggtcaatccagtaatgcagtctgaggttctgcaagaggttgcaaaggctagaggaaagtcagtggctcagatttcgctgaggtggatctacgagcaaggcgctagcgtggttgtcaagagtttcggaagggataggctcaaggagaacgtggaaatcttcgattgggaactgaccaatgaagacaggcgtaagattagtcagatacctcagcacaagagggtcacagtgttggggatcctcagcccagacggcgtctccagcgtggatcttgctgagcttgatattgttgaaatgtagcagaaatctccatctatcaggttgcaaggacaaaaaatggtgattggagtagctttcatacggctacgttgaatcagttgcttagatacggccatattgaatcaagaattagaagtagaggacgatctctctacttgtcgtccggacctcattttcttaaaatgtattttcaggtgtc

SEQ ID NO: 5765 - DNA, 473 bp, Zea mays
  Clone ID: 700472369_FLI
caactcttcatgacagctactcaagaagggaaaagatcagaatcgcaaggccagattcttagggtggaatgctatagcttaatgccctaatctttatatgcctcttcttatatctgcacttccatgggcaccgggcgacactaaattcacaagataccccctccacctcaaggtggtacggagttctgtgtatcacaagagacatctaggttgacctcactcttcttagtgttcatgcccactacgcaagacaacaccgcaacgccgatggagttggaagatttcatcagtttcgattggatctggatgagatggactctgcttgtaaggagagagagagagtgcatggcttgggaggagcatatttttgttcatccttttcatgagtcatgttacctgccatgtcagattatgtaacttcagatatttctgtttttgttagaaaagtaccaaaatagtttcacttcatggct

SEQ ID NO: 5766 - DNA, 994 bp, Zea mays; identical to SEQ ID NO: 5764
  Clone ID: 700472389_FLI

SEQ ID NO: 5767 - DNA, 1700 bp, Zea mays
  Clone ID: 700472410_FLI
aaaaaaaaagaataagaagaaaggaatccctcctacgcggaagcgaagagattcgtcgcctcagccgcctctctgctcagatctgcggcggagcctcgccggcggcctgcgccccgcggcgccgccgatccaagatgccttcgtgcgtgcagggatgctgctgctgctcgtccctgcgccttctcccccgcgacgacgcgctctcgtccccctccgcctgcgcgcaccgcctgaagccttggtcttggcgtgcccaatcccccacctcgtcctcctaacgcttgtccccgcccgctccccaccctgatctacctgtctctacccttccctcctccatttctacatctccccgttgctgctctgctcctgctgccacaagagtattcgccttcaatcgttgctcgcgcctgtcatttcgtgccgcacgccgacttgtttgccgttttcgctgccgtcttctgttggatcggatttgtctggatcgattccaaggtcggatctacgctgctgcgggtcagcatcagtagcgcagcgtggttgtacgtttgcggtgttgctgtatcactctgcgtctctgcaagtgctaaaccagtcactttatggacggtggttcctgtggtctcgagggagcgtcggtagtgacatctactaccagcactggtattccgcttctgccagagaagcactgcgccttgtttgatgaagcttgtggagccatggcgggcagtaatggtcctgaaggagtgccagtagtgacttctgctgatgaccctccgacccgtgccgatattccatttgtctgcaattcagttgatgaaacctgtgaagccacagggggcggcagtgctcccttggagggtcagatatgtacgggtttctccaagttgatcagcttggaggtgaagaaaggcctccagaagtgtgcgacgttcccaccctcatctggtcagcctcagcaggaggattgttcatgctgccatgtaggtgacgagctcacgtgtgctcctgcctatgggcgatctgtgtccttacctccaactttgaagctggtctctgccatgaaaggaggtcgtgaaaagaacggagtggcatcatcaccaagtgaaaaccgccatgtcaagtgggctcctgatgtgtacgacccccctgtgacatcggtatgccattcagtgaccaacagctatcagcgccggtcaaagcaccgcaagaaggagaagaacaaacagaagaagaggcagaaggggaagtcgaagaagaaccaacaacagagttctgcccagaatccatctgcaccgcaggttcctggtatcgggccgaaaggcgttagcaccactggtggccagtctccagcagacgatctcagcgaacatgaggccgggatcatggactacagcatgggtagccaggaagccaactgtggaagcagcttcttgcgcgagtctgttgctaagatgcacttctcgaccgccgaagcttcctgagaggcgtgcctcagttctgtaaatatgatggacgggatgtgtataaataaacccagcatgctgttttttttcgtcgtcgttgtgtgcgtttgagagctcgcctagtgttttggaacaataatttttggacagactatgtgttctgtatgttttggtcgtcagacatatctatcctcagtccatggctttgcttaacggtttaacctggactcttctgag

SEQ ID NO: 5768 - DNA, 974 bp, Zea mays
  Clone ID: 700473737_FLI
catgggatgatgttggaggtcttgattcgttgaggaaagagtttcaccgctacataagatgtattaagagccctgaagattgtgatgtatttggagtgagaatgcaagatggcttcctgctgtttggacctccgggttgtggcaaaacactcatagcaaaagcagtggcacatgaggcaggggctaattttattcatattaaggggcctgatatattgaacaagtatgttggcgagagtgaatcagaaattaggaaaatattcaaccgagcacgtattaatgccccatgcattgtattttttgatgaggtagattcattgacaacaaaaagaggtaaagagggggggtgggttgttgaacgcctcctaaaccagttacttatcgaacttgatggtgctggtcagcgtaaaggtgtctacgtgataggagctacaaacagaattgatatgatagatgatgctatgctacggcctggtagattcgggaagaaacattatgtacctatacctggtgctcgcgaaagggtttcaatattaaaggcactagccagacgcatacccgtttcatcaaccgttgatttggatgtgttggcacttcgagaagagtgcagcaatttcactggcgccgacctagcatcactggtggatgaggcagccatgttagctatggcagagagatggatgtacctcgatagcgggacatcaacgagtccatcttctctgattgaggcatcacactttgaagaagccttatcaaaggtgaagccatcaatatccaaaaagcaaaagagatgttacgaaaaaatgcgcaagaaacacttgtcaacaacctgatcagatcaccatacatccatcttgtgtgtgtggcacaaactatgccatcgctatctatgaaaatggttctgccggcactgcagaatgctactataaatttgtgcattacaatcatgcttgaaatatagtgataaaccgtat

SEQ ID NO: 5769 - DNA, 2519 bp, Zea mays
  Clone ID: 700474755_FLI
attttatcaagctcgctcgccgtcacactgcgccaccagcggcgatcccgccatggcctcctggctcaaggtcgccgaagacttgctcgaagtcgtcgaccggagggccaagatcgtggcaacagaactgtcggatgagcagtctacctctcagccttcaggaccaaacaaccaagaagtgcaagcaaagaagggaaagccgagggagaagggtccattgaagctcactaatgccgatggtggcaacaagatatctgctcagaaggaaaagaggagtaggcaacggccgcgagagcggatgaagatcgagaagatcaggccttcgccacctgcaggttcatcaagtgttgataccagtgctagtgaaccagaagtcactccgatcgatgttaaggaagtgggtaatgagggtacattggagaaaggagagaaaggtactgatggccttaagactgatgggtctgggattgttaataccatggttgaagttcaactgatgcagaaaaactctgacaatgccactctggatggtgttacacataccaattcagagattgctgttgaaagctatttttcagttatggatgcaaaaagtgagtcgagcagcagtaaccagacttccgagattggttcagtgattaatttggaggagagagactctactgtggctgttatccaggacacaaatgcgtctgaattgccaaatacagaggttactggcaaactgcaggaatcaaagaaagcgagtgtttcagattcatcagaaagcatagaagatcgacgcaaacaaaaatctgatacaatttctgtgaaagaacaagaccaacttgaggaggctcagggattgttaaaaagtgctgtcaagactggccagtcaaaagaagctaggttagctcgggtttgtgctggactttcatcccgcctccaagagtataagtctgaaaatgcacagctggaggaacttcttgttcaagagagagagaaatctacattgcatgaagctcatataaagcaactacagcaagagttatcaatgtccagagtagaaggttcaagagctgaattgaatatggttgatgctttgactgcaaaaaatgcagagattgaatctcttgttaaatcattggactcttggaagaaaagagcagcaacttcagaagaaaagcttgcttctttagaggaagatatagatggtctcaagaggaactgtgaacttactgaaaccagagttatacaggctttacgggaggaacttgctaccacagagcgtagggctgaagaagagcgcattgctcataatgccacaaaaatggcagctgttgagagagaagtagaactagaacatcgggctgttgaggcatcgagcgctttagctagaatccagagagctgctgatcaaagctcatcaagagtgctggaattggagcacaagttggctgttcttgaggttgaatgtgcttcattgcaacaagaactacaggagatggaagctcgtaatcgccgcgtacagaaaaaaccttccgaagaagctaatcaagttcttcagatgcaggcttggcaggaagaagttgagcgtgcacgccaaagccaacgagaggcagaggcaaagatatcatccttggaggcagagttgcagaaaatgagagttgaaatggctggaatgagaagagatgcagagcattattctagacaggagcatgttgaacttgagaagagataccgtgagctaactgacttactgtaccacaagcaaacacaattggaatccatggccagcgaaaaggctgcgttagagttccaactggagaaatcattgaaacaatttcatgaagtgcagattgaggcagaaaggagtaaagctactcgcagatcagcatcgtcgtgggaagaagatgctgatatcaaggcattagagcctcttcctctacatcatcgacacatggcaacagcaaatcagcagttacaaaaggctgcgaagcttttagacacaggagctgtgcgcgcaacaagatttttgtggcgacatcccgttgcacgagtcagcctgctgttctatttggcacggaccacataacttgagcttcctctatgtttgcacttctctttttttaacccaaattaagacttctttctgactataaatctgctttcgccacaccaggtgttcgtgcatttgttcttgatgcacttgttaaaccgccttcaggacttcgcgtccagagaaggaacatcagccatgggggatctggccagcgcgaacctgccatagcccatagtctctgtgcccttcttgttgattcaggcattccccactgattcttggtccacatgccttcaaagtttcatttcatcctcctgtttctttttttttccgtcttccccatcttttgtaaagtagtagtgttcgttgtttggccatgcgctgtataatccattcttttacattgactgatgagtcagattgagtatgtaccaagtaccttgacatgatataccaagccaattgagccagttcttgt

SEQ ID NO: 5770 - DNA, 626 bp, Zea mays
  Clone ID: 700474904_FLI
tgcgaagggtgcgagcgcaaggtgaagaaggcggtggagggcatgaagggcgtgagctccgtggaggtggcggccaagcagaacaaggtgacggtcacgggctacgtggacgccgccaaggtcatgcgccgcgtcgcctacaagacgggcaagcgggtggagccctggccctacgtgccctacgagatggtgcagcacccctacgcgccgggcgcctacgacaagaaggcccccgccggctacgtccgcaacgtcgtcgccgaccccaccgccgcgccgctcgccagggcctcctccaccgaggtccgctacaccgccgccttcagcgacgagaaccccaacgcctgctccgtcatgtagacccacccaccgaccccttgttttctttctggacttctggatctcgacctcaagaggtggcagctccatcgttcttcttgtctctagctattagttagtactagtatagtaggtgcttgcttgggagagttgctcttggagggaggttttgctcttcctgtttttctttttctttttttttcgttttccggtttcatgtagatgtagtgtgcgttttgatttttgtgaaaaaaataaaccagtttgtaacggtagaccacttgtgc

SEQ ID NO: 5771 - DNA, 748 bp, Zea mays
  Clone ID: 700474991_FLI
ccggaatagttttcggctacggtttcggcttcctgatcatcatggtcggggtgaccatcggcatgtctataccttactggatcggcctactgttccgcgaccgcctaaacctctggctggagaagaaatggccacggcagattgctctgatcaaactggtaggtcaagggagctggttccagcagttccgcgtggccgcgttgctcaggatctcgccgttcccatacgcgttgttcaactacgctgtaaccgtgacggagatgaagttcgtcccttacatatggggttcggttatcggaatggtgcctgatgtgttcatcaacatctacagtgggcggctgatacgcacgttggctgagctgaattatcggaagcaccggatgacagcagtcgagatagcgtacaacgctatatctgtaattgttaccgtcgtctttgcgattgtatttacagtatacgcaagacgagccctggacaacatggaacagtccgaagtcgcctgcgctgaacctgtcgtcggtgaccctgctggatcgaccgagtccagggatcaccttcagggatgttcgactgcacgttctgtaccaatcgatgttgtgtaatgacacaggtacagtacacgtctaaacgactggttgacttaaagttcctttgttgtacatacaacacgatagatcggtagaagggagatcttaacaatgtgtgtaattgttacgtactactgtaagtctgtaaatatgttatgacc

SEQ ID NO: 5772 - DNA, 1456 bp, Zea mays
  Clone ID: 700475015_FLI
gggttttagcttctgccgccgtaacctcacctcccggcccttgtcgccgcaagtccgcaacctcaccatccttcgaatcccatacgaatccctagcccgcaacccgccgggcgacgagcggcggagcccgcagccaacatggaccggtaccatagggtggagcgggcgcggaaccagtcgaccatcgaagagaacgagatccgcatcaccgcgcagggcctcatccgcaactatgtctcatatgctaccttcctcctccaggaaaggagaattaaagagattgttttgaaggccatgggacaggcaatcagtaagtctgttgctgttgcagagattatcaaggtggtagtcttgcttgctctctattgttgcatttttttgccaaccaaacgaatcagccatatatgacaaaatatctttgaaacagaaaagggcccctgagttacaccaggataccaacatcagctctgtcagcatcactgatgtctgggaacccatagaagaaggacttgtcccattggagatgactcggcatgtttctatgatatcaattactttgtcccccagagagctggacaagcacactcctgggtaccaagctccagcatatgttgaacatcccaggcaacagcaggtgccaccactgcagcgccaacctcgcagaccatcaggacaacaattccagcagctggagtatgaagattcctatgcacggggtcgaggaagagggaggggccgtgggcgtggaaggggttgggctagaggtggctatggtggatatggaaacaatcaaggtggctataaccaaggtggtgggtattacgacaatcaaggtggatatggtggctatgatgatcaaggtgggtatggtggtggatatggctacaaccaaggcagatatggaaactatcaagaaaatggtggatataaccgaggtagaggaggtggtatgcgaggaagaggcaattggggttaccgtggaggctatgaaggtggcaggggtggtggctatgaaggaggcagggtcggcggcggctatgaaggtggcaggggtggtggtggtcctggtggaaggggatatggtggccgaggaaggggtagaatgggtggcggcggacgagcgaactaagtgcatgcagacttctggcgtttccttcaatgcatgccttatcaatatatcagggaaaatacgagcattttatgttggaagcagttcagttacgtgtgaggtctgttgtttttttccctgggcgcgaggtttggttgtgagcataatgcatatgcaagttttatcatgtaagtcatctttcaattttcctgctgcagaggttgttttccactttttcccatgatcgttgatgctgagcatgctgccctatgttcatgcctgcagtattaactgatggcaactcttgccctgagttaaaatgttaattctatttgtgcagtttccttt

SEQ ID NO: 5773 - DNA, 2569 bp, Zea mays
  Clone ID: 700476457_FLI
taaacatgaaccttcactgccatggtctgcaataataatatcaacagctgtagctataattgttttgcttgttggacatattatttatgcaactctgaactcccttgaaaaggctgaacatgattatagagtaatgagagaacttaaaggacaagctgaagctgcagatatagcaaaatctcagtttctagcaactgtttcccatgagattcggactccaatgaatggtgttttaggtatgctgcagatgctaatggacactgaacttgatacaactcagcaggattttgtagtcaccgctcaagaaagtggaaaggtattaataaacttaataaatgaagtccttgatctggctaagatagagtcaggaaggattgagctggaagcagtgccttttgatgtccgtgatattcttgacaatgtgatatctcttttctacgataaatcacaagctaaaggcatagagttggccgtgcttgtatctgaccaagttcctgatgtcctaattggggatccatggcggttccggcagatcattacgaaccttgtggggaattctatgaagtttactgaacagggccacatctttgttcaagtccatttggtcaaggaactaaacaggaaaggaaacaatttttgtgatgtttctgctcataacagagaaattctgtatgattctgacaactcgatgctatggaacacactaagcggacttgaagtagcagatagctggaggtccttggagaattttacgatgttcaagaattcaaatggtgaaacagatacaattaggttagctgtcagagttgaagacaccggcataggaataacaaaagatgctcaaatgcgtatttttacacctttcatgcaagctgacagttccacctcacgaacatatggtggaactggaattggcttgagtattacaaaacgtttagttgaattgatgggtggagaaatagggtttactagtaaatcaggagttggtagtacattttcttttactgccattttcaaggagaacagaggatgtcctggagatatgaaaagatactattctgaacctactccgttggattttcaaggaatgagggctcttattattgatggaaggagtgcacgtgcagaggttactatgtaccatcttcgtagacttggaatacagtgcagtcttgttgccacatctgaatctgaatctgcatcttcagctttgatgaaagcctgcacctcaagcaaaaacaatccggacatggtccttgttgatacagaagcttggggtaaaggttcaggtttggcattctatcatcgttttgtagattgtcaactaaagggcgcacacaagttttctcagcccatgccaaagactattcttttgggaagctcaataagccctgttgaatctgattatttaagattgacaggatttggtgattgcataaggaaacccctccgtcttagtactattgttgcctgtcttcgcaaaaccttaggggttggggttacaaggcagcagagtagagaccaatctttggttcttcaaagtgtactaactggaaaacagattctggttgtggatgataatgcagtcaaccgtaaagttgcagctggttctttgaagaaatatggatctaaagttacatgtgttgatagtgggagtgatgcaattgatatgctcaagccacctcacacatttgatgcttgcttcatggatgttcagatgcccgagatggacgggtttgaagctacaagattaatccggtccatagagaaaaaaataaacgatatgatcatgatgggtgaaatatccgctaataattatggaaataaggcccattggcatgtaccaatattagctatgacggcagatgtaatccaagcgacttttgaaaaatgtatgcagtgtggaatggatggatatgtgtcaaagccatttgaagaacagcagctctactttgctgttgctcatttcttagagactgatgaaacagaataacaaatccaacttcgtaggagattgatttgccgcaacactgtttcaacatctgccaaaagaccatctgttcaacaggttctgaaaaacagcgatcggcagcatatttggaaacaaaatacattggactcccactgaccagaagaaagaagataagatagtagggggtacaaaatgtttggtctggtttccgcagcaattttttttctggccgtgttttctggaaccaatacaacatgaccttgcaacagtggtgtcagttgcttctgtaatgccttatgacaccacgatatttccaaatgctgtgttgtaagtgctttacagacaaaccgaggtccagctttctaaaacattgagttcaatgacatcacttcatccattatttaagaaagcgagggtcttcaaatcaggaggatacaattgtatcaccaagtcaggcacacagtttcaaggtgactttgttctgatctgattgttaatgcaatctgtaaagaggcaactatgagttagggattgtttgatgccttgaatgtcgtatattcatattccatcatttttgtgggcacttgtatatacatt

SEQ ID NO: 5774 - DNA, 2179 bp, Zea mays
  Clone ID: 700476808_FLI
cccctcccgttctccgccaccgccaatcccctcccgtcctccgccacctctgctgagagcgagaagagatggccggcaagggtgatgggccggcaatcggcatcgatctcggcacgacctactcttgcgtcggtgtgtggcagcacgaccgtgtcgagatcatcgccaacgaccagggtaaccgcaccacaccctcgtacgtcgccttcaccgactccgagcgcctcatcggagatgcggccaagaaccaggtcgccatgaaccccatcaacaccgtctttgatgccaagcgtctcattggcaggaggtttagtgatgcctctgtccagagtgatattaagctgtggcccttcaaggtcattcctgggcccggtgagaagccaatgatagttgttcagcacaagggggaggagaaacagtttgcagccgaagagatctcctccatggttctcatcaagatgcgtgagatcgctgaagcttaccttggcagcacgatcaagaatgctgttgtcacggtccctgcctacttcaacgactcacagaggcaggccacgaaggatgctggggtgattgctggcctcaatgtgctgcgtatcatcaatgagccaaccgctgctgctattgcctatggtcttgacaagaaggcaaccagcgtcggtgagaagaatgtcctcatctttgaccttggaggtggtaccttcgatgtctccctccttactattgaggaaggtatctttgaggtcaaggccacagctggcgacacccatcttgggggtgaggactttgacaacaggatggtcaaccactttgtccaggagttcaagaggaagaacaagaaggatatcactggcaacccgagggctctccggaggctgaggacctcttgtgagagggccaagagaactctgtcttccactgcccagaccaccattgagattgactcgctgtacgagggcattgacttctactccaccatcacccgtgccaggtttgaggagctcaacatggacctgttcaggaagtgcatggagcctgttgagaaatgcctgagggatgccaagatggacaagagcagcgtccatgatgttgtccttgttggtggctccactaggatccccagggtgcagcagctgctccaggacttcttcaacggcaaggagctgtgcaagaacatcaatcctgatgaggccgttgcctatggtgctgctgtccaggctgctatcctcagtggtgagggcaacgagaaggtgcaggacctgcttctgcttgacgtcactcctctctctctgggtctggagactgccggaggagtgatgaccgtccttatcccgaggaacaccaccatccccaccaagaaggagcaggtgttctccacctactcggacaaccagcctggtgtgttgatccaggtgtacgagggcgagaggacccggacccgcgacaacaacctgcttgggaagttcgagctctccggcatcccaccggctccccgtggtgtcccccagatcacggtctgcttcgacatcgacgccaacggcatcctgaacgtgtctgccgaggacaagacgacggggcagaagaacaagattaccatcaccaacgacaagggccgtctgtccaaggaggagatcgagaagatggtgcaggacgcggagaagtacaagtccgaggacgaggagcacaagaagaaggtggagtccaagaactcgctggagaactacgcctacaacatgcgcaacacgatcaaggacgagaagatcgcgtccaagctggctgccgacgacaagaagaagatcgaggacgccatcgacgcggccatcagctggctggacgccaaccagctcgccgaggcggacgagttcgatgacaagatgaaggagctggagagcctttgcaaccccatcatcgccaagatgtaccagggcgcgggtgccgacatgggaggctccggcggcatggacgaggacgctccggctggaagcggtggccctggccccaagatcgaggaggtggactaagcggtttgtgtcagtctcgtgtgtctgctgcagtggctggctggcccagtcgctgctcgatttatcgtcgtcgtcgcggtgtatccgcgttagaaccttttgttggtgaacaatattatcgtggcacgcgttttaagtaatacggtattctggttcggttt

SEQ ID NO: 5775 - DNA, 2213 bp, Zea mays
  Clone ID: 700477929_FLI
ctagtcctctgttacttctcccgccgccgccaatcccctcccgttctccgccaccgccaatcccctcccgtcctccgccacctctgctgagagcgagaagagatggccggcaagggtgatgggccggcaatcggcatcgatctcggcacgacctactcttgcgtcggtgtgtggcagcacgaccgtgtcgagatcatcgccaacgaccagggtaaccgcaccacaccctcgtacgtcgccttcaccgactccgagcgcctcatcggagatgcggccaagaaccaggtcgccatgaaccccatcaacaccgtctttgatgccaagcgtctcattggcaggaggtttagtgatgcctctgtccagagtgatattaagctgtggcccttcaaggtcattcctgggcccggtgagaagccaatgatagttgttcagcacaagggggaggagaaacagtttgcagccgaagagatctcctccatggttctcatcaagatgcgtgagatcgctgaagcttaccttggcagcacgatcaagaatgctgttgtcacggtccctgcctacttcaacgactcacagaggcaggccacgaaggatgctggggtgattgctggcctcaatgtgctgcgtatcatcaatgagccaaccgctgctgctattgcctatggtcttgacaagaaggcaaccagcgtcggtgagaagaatgtcctcatctttgaccttggaggtggtaccttcgatgtctccctccttactattgaggaaggtatctttgaggtcaaggccacagctggcgacacccatcttgggggtgaggactttgacaacaggatggtcaaccactttgtccaggagttcaagaggaagaacaagaaggatatcactggcaacccgagggctctccggaggctgaggacctcttgtgagagggccaagagaactctgtcttccactgcccagaccaccattgagattgactcgctgtacgagggcattgacttctactccaccatcacccgtgccaggtttgaggagctcaacatggacctgttcaggaagtgcatggagcctgttgagaaatgcctgagggatgccaagatggacaagagcagcgtccatgatgttgtccttgttggtggctccactaggatccccagggtgcagcagctgctccaggacttcttcaacggcaaggagctgtgcaagaacatcaatcctgatgaggccgttgcctatggtgctgctgtccaggctgctatcctcagtggtgagggcaacgagaaggtgcaggacctgcttctgcttgacgtcactcctctctctctgggtctggagactgccggaggagtgatgaccgtccttatcccgaggaacaccaccatccccaccaagaaggagcaggtgttctccacctactcggacaaccagcctggtgtgttgatccaggtgtacgagggcgagaggacccggacccgcgacaacaacctgcttgggaagttcgagctctccggcatcccaccggctccccgtggtgtcccccagatcacggtctgcttcgacatcgacgccaacggcatcctgaacgtgtctgccgaggacaagacgacggggcagaagaacaagattaccatcaccaacgacaagggccgtctgtccaaggaggagatcgagaagatggtgcaggacgcggagaagtacaagtccgaggacgaggagcacaagaagaaggtggagtccaagaactcgctggagaactacgcctacaacatgcgcaacacgatcaaggacgagaagatcgcgtccaagctggctgccgacgacaagaagaagatcgaggacgccatcgacgcggccatcagctggctggacgccaaccagctcgccgaggcggacgagttcgatgacaagatgaaggagctggagagcctttgcaaccccatcatcgccaagatgtaccagggcgcgggtgccgacatgggaggctccggcggcatggacgaggacgctccggctggaagcggtggccctggccccaagatcgaggaggtggactaagcggtttgtgtcagtctcgtgtgtctgctgcagtggctggctggcccagtcgctgctcgatttatcgtcgtcgtcgcggtgtatccgcgttagaaccttttgttggtgaacaatattatcgtggcacgcgttttaagtaatacggtattctggttcggttt

SEQ ID NO: 5776 - DNA, 1679 bp, Zea mays
  Clone ID: 700548656_FLI
ttcagctcggcgtcttcacaaacgccggcgcaaactctcgcccgagcccgacagatcttcaattccccattccgcccaccgatcgaccttcacgccagtctcggtctcttccgaaggcgtcgcgcgcggttgtttgagaggagaggaggaagatgagggagtgcatctccgtccacatcgggcaggccggcatccaagtcggcaacgcgtgctgggaactttactgcctcgagcacggcatccagcctgatggccaagtgcctggagataagaccgcgggacatcacgatgatgccttcagcaccttcttcagccagactggtgctgggaagcacgttccccgtgcaatcttcgttgatctagaacccactgtgatcgatgaggtgcgcactggcacgtaccgccagctcttccaccctgagcagctcatcagtggcaaggaggatgcagctaacaatttcgcccgtggccattacacaattggcaaggagattgttgatctgtgccttgaccgtatccgcaagcttgctgacaactgcaccggcctccagggcttcctggtcttcaatgccgttggtggtggcaccggctctggccttggttctctcctccttgagcgcctgtctgtggagtacggcaagaaatccaagctgggcttcactgtgtacccatctccccaggtgtcaacctctgttgtggagccttacaacagcgtgctctccactcactcactgctggagcacactgatgtctccatcctgctcgacaacgaggccatctatgacatctgcaggcgctccctcgacattgagaggcccaactactccaacttgaatcgccttgtgtctcaggtgatctcatcgctgactgcttctctgaggttcgatggtgccctcaatgtggatgtgaacgagttccagaccaacctggttccttacccgaggatccacttcatgctctcctcctacgcaccggtgatctcttctgcgaaggccttccacgagcagctgtctgtggcggagatcaccagcagcgcgttcgagccggcttccatgatggtcaagtgcgacccacggcacggcaagtacatggcttgctgcctgatgtaccgcggcgacgtggtgcccaaggacgtgaacgccgcggtggccaccatcaagacgaagcgcaccatccagttcgtggactggtgcccgacggggttcaagtgcggcatcaactaccaggcgccaactgtggtgccgggtgccgacctcgccaaggtgcagcgtgccgtgtgcatgatctccaactccaccagcgtcgtcgaggtgttctcccgcatcaacagcaagttcgacctcatgtacgccaagcgcgcgttcgtgcactggtacgtcggcgagggcatggaggagggggagttctccgaggcacgcgaggacctggccgccctggagaaggactacgaggaggtcgccgcagagggcggcagtgatgacggtgacgaggaggaggaatactgatctgcttgcatgaatctgtttggctgtcgagccaggttgtggtgttgaaaaacctttgtttgtgtcctggccccctgggtaatgtttgggtgtttccttccatcatcacttgctgaactgctctagtatttgcatttgtaattgaagtctgtcgctttaagcactcttggttct

SEQ ID NO: 5777 - DNA, 1510 bp, Zea mays
  Clone ID: 700548720_FLI
aaggaatctttgaggtcaaggccacagctggtgacacccatcttggtggtgaggactttgacaacaggatggtcaaccacttcgtccaggagttcaagaggaagaacaagaaggatatcactggcaaccccagggctctccggaggctgaggaccgcttgtgagagggcgaagaggactctgtcttccactgcccagaccacgattgagattgactcgctgtatgagggcatcgacttctactccaccatcacccgtgccaggtttgaggagctcaacatggacctgttcaggaagtgcatggagcctgttgagaagtgcctgagggatgccaagatggacaagagcaccgtccatgacgttgtacttgttggtggctccactaggatccccagggtgcagcaactgctccaggacttcttcaacggcaaggagctgtgcaagaacatcaaccccgatgaggctgtcgcctatggtgctgctgtccaggctgccatcctgagcggtgagggcaatgagaaggtgcaggacctgcttctgctggacgtcacccctctgtccctgggtctggagactgctggaggagttatgacagtgctgatcccgaggaacaccaccatccccaccaagaaggagcaggtattctccacctactcggacaaccagcccggtgtcctgatccaggtctacgagggtgagaggacccggacacgcgacaacaacctgctgggcaagttcgagctctccggcatcccccctgcaccccgtggtgtgccacagatcaccgtgtgctttgacatcgacgccaacggcatcctgaacgtgtctgccgaggacaagacaacggggcagaagaacaagatcacaatcaccaacgacaagggccgtctctccaaggaggagatcgagaagatggttcaggacgctgagaagtacaagtctgaggatgaggagcacaagaagaaggtggaggccaagaactcgctggagaactactcctacaacatgcgcaacacgatcaaggacgagaagattgcgtccaagctgccggccgatgacaagaagaagatcgaggacgccatcgacgcggccatcagctggctggacgccaaccagctcgccgaggcggacgagttcgaggacaagatgaaggagctggagagcctctgcaaccccatcatcgccaagatgtaccagggcgcgggtgaagacatgggcggcgctggcggcatggacgaggacgcccctgccggcagcggcggccctggccccaagatcgaggaggtggactaagcggtttgttgtcagtcttgagtgtgctgcagttgctggctggcccagttgctgccgagagttatcgtcagttggtgcggtgtgtccgcttaaactttatttgtggttggttggtacttttgtggtggttatttttttggacctcgtgatagtcggtcggttcaatgttatcgcggctactggcaaaccttaagtgatacggtattcttcttttcggt

SEQ ID NO: 5778 - DNA, 1879 bp, Zea mays
  Clone ID: 700472522_FLI
agcgcacacacacacaaccagatctcccccaaatccacccgtcggcacctccgcttcaagatgcagatctttgtgaaaaccctgactggcaagactatcaccctcgaggtggagtcgtctgacaccattgacaacgttaaggccaagatccaggacaaggagggcatccccccagaccagcagcggctcatctttgctggcaaacagcttgaggacgggcgcacgcttgctgactacaacatccagaaggagagcaccctccaccttgtgctccgtctcaggggaggcatgcagatctttgtgaaaaccctgaccggcaagactatcaccctcgaggtggagtcctctgacaccattgacaacgtcaaggccaagatccaggacaaggagggcatccctccagaccagcagcggctcatctttgctgggaagcagcttgaggacgggcgcacgcttgccgactacaacatccagaaggagagcaccctccacttggtgctgcgcctcaggggaggcatgcagatcttcgtgaagaccctgaccggcaagactatcaccctcgaggtggagtcttcagacaccatcgacaacgtcaaggccaagatccaggacaaggagggcattcccccagaccagcagcggctcatctttgctggaaagcagcttgaggacgggcgcacgcttgccgactacaacatccagaaggagagcaccctccacttggtgctgcgcctcaggggaggcatgcagatcttcgtgaagaccctgaccggcaagactatcaccctcgaggtggagtcttcagacaccatcgacaatgtcaaggccaagatccaggacaaggagggcatcccaccggaccagcagcgtttgatcttcgctggcaagcagctggaggatggccgcacccttgcggattacaacatccagaaggagagcaccctccacctggtgctccgtctcaggggtggtatgcagatctttgtgaagacactcactggcaagacaatcacccttgaggtggagtcttcggataccattgacaatgtcaaggccaagatccaggacaaggagggcatcccacccgaccagcagcgcctcatcttcgccggcaagcagctggaggatggccgcaccctggcggattacaacatccagaaggagagcactctccacctggtgctccgcctcaggggtggcatgcagatttttgtgaagacattgactggcaagaccatcaccttggaggtggagagctctgacaccattgacaatgtgaaggccaagatccaggacaaggagggcattcccccagaccagcagcgtctgatctttgcgggcaagcagctggaggatggccgcactctcgcggactacaacatccagaaggagagcacccttcaccttgttctccgcctcagaggtggtatgcagatctttgtaaagaccctgactggaaaaaccataaccctggaggttgagagctcggacaccatcgacaatgtgaaggcgaagatccaggacaaggagggcatccccccggaccagcagcgtctgatcttcgccggcaaacagctggaggatggccgcaccctagcagactacaacatccaaaaggagagcaccctccaccttgtgctccgtctccgtggtggtcagtaagtcatgggtcgtttaagctgccgatgtgcctgcgtcgtctggtgccctctctccatatggaggttgtcaaagtatctgctgttcgtgtcatgagtcgtgtcagtgttggtttaataatggaccggttgtgttgtgtgtgcgtactacccagaactatgacaaatcatgaataagtttgatgtttgaaattaaagcctgtgctcattatgttctgtct

SEQ ID NO: 5779 - DNA, 1321 bp, Zea mays
  Clone ID: 700472525_FLI
acgtacttcacacttgtactgaaatataggtttatccaatataggtttcgcatgcgtcgccatgtgtttgagcgtctcgttcttgctgtgcaacaagtggatccgtacttcgttcaacgtccaagctgtgcgggtgagctaggcctatctgcccttcagaaagttgttgctgccgtacgtatccttgcatacggtgttcctgcggatgccgttgacgagtacgtacgaattggagaatctacagcacatgaggctttgaaacacttttgcactgccatacaaactgcttttggggggtattatcttaggaaacctactcctgctgatatcgctaggcttctccatgttggagaatcacgcggctttcctggtatgcttggtagtgtcgattgcatgcattgggagtggcgtaactgcccaactgcatggaaggggatgtttaccggtcgtggtaaacaccctacaatgatcctcgaagctgttgcctcatatgacttatggatttggcatgcatacttcggcatgccaggtagctgtaacgacatcaatgttcttcagcgttctaacttgttcgattcgcatcttcatggtgatagtccaccagtgagtttctccgtcaatggacacacctacaacatgggatattacctagcagatggtatttatccggactggccagcgtttgtgaagacaatccgtcatccgtatgatgtgaggacccaacattttgccactgttcaagagtctgctagaaaagacattgaacgaacatttggagtactacagaagcgatgggccatagttcgtggtcctgcatatggttggtctccacaacacattggagatatcatgaaaacatgcatcatattgcacaacatgatcgtagaagatgaaggaccttcgtctatgaacacaagctttgacaacatcggagttctggcggatactagtcatggttcattttccgagcgcaatgagtatatcaacaacaggtacgaccaactacatgatccagtcaaatataatcagttgcaggttgatctaatccaccaccactgggcgcggcttggatcgggagctgcttaagtatgaagtttatgtctcccatgtgttaagtatgtttgtcattgtctagtctagtgtgctatgtcgtgaagctatggtaatccgaaggtagtatgtgttaagtaacaagtttgtcatgtcgtctgttccgttattccgaagctactatgtgttaagtacgatgcagtttatgtttgtactatgtttgtagtaatccgaagctggcgaatgtgtaatgctataattcaggaatgat

SEQ ID NO: 5780 - DNA, 1694 bp, Zea mays
  Clone ID: 700472530_FLI
ttatcctctcggctgctcaccaccccagacaagtccagtcctctccctcccctcaacctagtgccgccactcgtgcccaccatgccgtcgcaccgccgccgccgctggtgaacggatccgtgcaccccgtacacctgccttggcctcctcccccctcccctcaacctagctccaccactcgcgcccacctccgtccgccggtggcgcaggggaggagccggccatcctcagggtggcgctgggctccggcaagctgcgcatcgaggggtcgctgggctttggcaagcttccgcacgcggcgccagctcaccgaccgcgccgtgctcgtggagcagagctggtggaagctgctggactgtgccgtgctcgaatttggacgcctctctctctctctcatgttgccatgctggacgcaagaaccgagcagcgggcagatgaaggagcagttcgtcgtggagatgctcgctaggccctcgagtgcggcggggtcaggccccgggagatcgcagcagcgtcaggaggacgcctcctcagctcaaggcagcaggccgcagtcgtcggctgcttctgatacaccggtggcgcagcaacctgacgcgaactctgtgcgagcgaagctcgagctcgccaagaacaccaagctcgaggcggccaagaggaagctccaggaaggctaccaagagtttgataatgcaaagaagcagagaagcatacagatggttcatccccagaacctgcccaagcaagcgaacaacacccagaatttccaacctagcgggccagcggcaagccaaggaatggcagcaacaggaattggtagcagttccaattccttttgagcgccaccagggatcatagacttcaaatcccttcctccctctttcttcctttggttcttgatcgactactaagatttttttagaccatgcgagtacagaaaacagcaataaggctagtttcgaaagtgcatggagacgtggagtctattgaaagttctggtcaattttgacgaacttttttgagagctcgtcaatctgcttgtgctctgtcctctgtggcttgcagcttccaggcaacaggattctttcgtgtgaacaccattaacttagtatggtgaccatctaaaatagaaaacagcaggacaattgctatgtcatcaaacatgatcatcatcagtactagggtttctttaggccatgttattagtcttgatctgtctaggcagcattgatgcatgttcatgtgttctttttcttaaactgtcagtcattatttgactatgttgtattgttgttggcatgtaccaatatttcatggcaaatcttatatcccaagtttttatatgccgcagaggactaagtacaacaacatggagccggatgctgttgatttctttggggaatgtatgaatagtccccgaaatggtcatactctgcttgcaaatgagatatatgagaaaatggttgccgagaaggaaagagagctagaagaaggagaagcacaaaagtcaccctccaagattgttgctgatagtctcagccagatcagtcgctcatccaccttccttccaaacattggtgtctgtttgaatgcttcaaacctttgtggtggaacctttgtatgtttgaacctctgttgtggaagaactagtgtgctggaattatgtatgacttgtgatgagaatgttgtgtatg

SEQ ID NO: 5781 - DNA, 2215 bp, Zea mays
  Clone ID: 700472543_FLI
ccctagtcctctgttacttctcccgccgccgccaatcccctcccgttctccgccaccgccaatcccctcccgtcctccgccacctctgctgagagcgagaagagatggccggcaagggtgatgggccggcaatcggcatcgatctcggcacgacctactcttgcgtcggtgtgtggcagcacgaccgtgtcgagatcatcgccaacgaccagggtaaccgcaccacaccctcgtacgtcgccttcaccgactccgagcgcctcatcggagatgcggccaagaaccaggtcgccatgaaccccatcaacaccgtctttgatgccaagcgtctcattggcaggaggtttagtgatgcctctgtccagagtgatattaagctgtggcccttcaaggtcattcctgggcccggtgagaagccaatgatagttgttcagcacaagggggaggagaaacagtttgcagccgaagagatctcctccatggttctcatcaagatgcgtgagatcgctgaagcttaccttggcagcacgatcaagaatgctgttgtcacggtccctgcctacttcaacgactcacagaggcaggccacgaaggatgctggggtgattgctggcctcaatgtgctgcgtatcatcaatgagccaaccgctgctgctattgcctatggtcttgacaagaaggcaaccagcgtcggtgagaagaatgtcctcatctttgaccttggaggtggtaccttcgatgtctccctccttactattgaggaaggtatctttgaggtcaaggccacagctggcgacacccatcttgggggtgaggactttgacaacaggatggtcaaccactttgtccaggagttcaagaggaagaacaagaaggatatcactggcaacccgagggctctccggaggctgaggacctcttgtgagagggccaagagaactctgtcttccactgcccagaccaccattgagattgactcgctgtacgagggcattgacttctactccaccatcacccgtgccaggtttgaggagctcaacatggacctgttcaggaagtgcatggagcctgttgagaaatgcctgagggatgccaagatggacaagagcagcgtccatgatgttgtccttgttggtggctccactaggatccccagggtgcagcagctgctccaggacttcttcaacggcaaggagctgtgcaagaacatcaatcctgatgaggccgttgcctatggtgctgctgtccaggctgctatcctcagtggtgagggcaacgagaaggtgcaggacctgcttctgcttgacgtcactcctctctctctgggtctggagactgccggaggagtgatgaccgtccttatcccgaggaacaccaccatccccaccaagaaggagcaggtgttctccacctactcggacaaccagcctggtgtgttgatccaggtgtacgagggcgagaggacccggacccgcgacaacaacctgcttgggaagttcgagctctccggcatcccaccggctccccgtggtgtcccccagatcacggtctgcttcgacatcgacgccaacggcatcctgaacgtgtctgccgaggacaagacgacggggcagaagaacaagattaccatcaccaacgacaagggccgtctgtccaaggaggagatcgagaagatggtgcaggacgcggagaagtacaagtccgaggacgaggagcacaagaagaaggtggagtccaagaactcgctggagaactacgcctacaacatgcgcaacacgatcaaggacgagaagatcgcgtccaagctggctgccgacgacaagaagaagatcgaggacgccatcgacgcggccatcagctggctggacgccaaccagctcgccgaggcggacgagttcgatgacaagatgaaggagctggagagcctttgcaaccccatcatcgccaagatgtaccagggcgcgggtgccgacatgggaggctccggcggcatggacgaggacgctccggctggaagcggtggccctggccccaagatcgaggaggtggactaagcggtttgtgtcagtctcgtgtgtctgctgcagtggctggctggcccagtcgctgctcgatttatcgtcgtcgtcgcggtgtatccgcgttagaaccttttgttggtgaacaatattatcgtggcacgcgttttaagtaatacggtattctggttcggttt

SEQ ID NO: 5782 - DNA, 945 bp, Zea mays
  Clone ID: 700472552_FLI
cagtgcccatcccctgctccagtgaggagagagatagagagtcgccgccgccgccgctgccgccatgaagatcctagtcgcggtgaagcgggtggtggactacgccgtcaaggtgcgcgtgaggccggaccggacgggcgtggagacggccaacgtcaagatgtcgatgaaccccttctgcgaaatcgccgtcgaggaggcgctccggctccgcgaggccggcgctgctgctgaggtcgtcgcggccactgtgggccccgcccagtccgctgaaacgctccgcaccgcgctcgccaatggtgcggaccgcgccatccacgtgctccacgatccggaccccgcgcggcccctcctcccgctcaccgtcgccaagatcctccgcgctgtcgcgctccaggagaagcctggcctcgtcatcctcggcaagcaggcgattgatgatgattgcaaccaaacaggacaaatgctagctggattgcttcagtggccacaaggaacctttgcctccaaggttatattggacaccgagaaacaaaaagctactgttgagcgagaagttgatggtggaattgaaaccatatgccttgatttgccagcagtgatcaccacggatttgagacttaaccagccaaggtatgcaactttgccgaacataatgaaggcaaagtccaaagttattaagaaagttgtccctaaagacctcggtgtagacattagatcagacatggaggttattgaggtcaacgaaccaccaaaacggaaggcaggggtgattctttcgtctgtcgacgagctcattgacaggttgaaaaatgaagcacgtgtcttgtaacaatttgtatattattccgactgaatatggtctgacgttcatttatgtaagttataataaaagcgttctccaaatgttcagaccatatttacaaataagagaagtgtttctac

SEQ ID NO: 5783 - DNA, 1240 bp, Zea mays
  Clone ID: 700472565_FLI
gatcaagggaccttcacctgaaatggttgagtacatcggaatgcaaaacttgattaatgccataaagagtagtgttggactgagtgaagggaaactgctatttggtttcaaaggcaacttatctggagagattgtgtggggagctcttgatgacgttgtgatgggtggtgttagtgaaagtacattccaaatcttgccaacaggaagtgaaagtagtggaccaactgggttgttcaaagggactgtatctacttcaaataatggtgggtttactagtataaggacaaagaattttactgtgccagaggacctgtcagcatatgatggtattgagttacgagttaatggtgatgggcgacggtataaactcattatacggactagctatgaatgggatactgttggctatacagcaagttttaacacaactaaggggggatggcaaagtgttaaagtacctttctcttctctgaaacctgtattccgtgctcgtactgtgactgatgctccacccttcgatgcaagcaacattacttcactacaactcatgtttagcaaatttgaatacgatggaatactcaacccaacatttactgaaggtccgtttgagcttcctttttcgagtattagagcatacatcaatgagccgatcactccaaggttcgttcatgtgagttctgcgggagttacaagacctgaaagaccggggttagatttaagcaagcagccacctgctgttcgattgaacaaagagcttggctccattttaacttttaagttgaagggagaggatttaattcgggaaagcggtattccgtacactattgtaaggccatgtgcattaactgaggaaccagctggagccgatctcatgtttgaccagggggacaacatcacaggaaagatatcaagggaagaagttgcccgtatttgtgtagcagctctggcaagcccagatgctgtgggcaaaactttcgaggtcaagagcactgttccattcagcgaaccgtatgtgattgaccctgcaaatcctcctcctgaaaaggactatgaagtatatttcaaagaactcaaagaaggcatcacgggtaaagaggcgttagaggcaacacctgctcaagtttgaagatgtcgttgaattaagaatttcgtctgttttcttaaattctgacacagtaacccccactctgaatgtctaaagtcatctagaaacatagatgacactaatgctaaattttgt

SEQ ID NO: 5784 - DNA, 2210 bp, Zea mays
  Clone ID: 700472651_FLI
ctctgttacttctcccgccgccgccaatcccctcccgttctccgccaccgccaatcccctcccgtcctccgccacctctgctgagagcgagaagagatggccggcaagggtgatgggccggcaatcggcatcgatctcggcacgacctactcttgcgtcggtgtgtggcagcacgaccgtgtcgagatcatcgccaacgaccagggtaaccgcaccacaccctcgtacgtcgccttcaccgactccgagcgcctcatcggagatgcggccaagaaccaggtcgccatgaaccccatcaacaccgtctttgatgccaagcgtctcattggcaggaggtttagtgatgcctctgtccagagtgatattaagctgtggcccttcaaggtcattcctgggcccggtgagaagccaatgatagttgttcagcacaagggggaggagaaacagtttgcagccgaagagatctcctccatggttctcatcaagatgcgtgagatcgctgaagcttaccttggcagcacgatcaagaatgctgttgtcacggtccctgcctacttcaacgactcacagaggcaggccacgaaggatgctggggtgattgctggcctcaatgtgctgcgtatcatcaatgagccaaccgctgctgctattgcctatggtcttgacaagaaggcaaccagcgtcggtgagaagaatgtcctcatctttgaccttggaggtggtaccttcgatgtctccctccttactattgaggaaggtatctttgaggtcaaggccacagctggcgacacccatcttgggggtgaggactttgacaacaggatggtcaaccactttgtccaggagttcaagaggaagaacaagaaggatatcactggcaacccgagggctctccggaggctgaggacctcttgtgagagggccaagagaactctgtcttccactgcccagaccaccattgagattgactcgctgtacgagggcattgacttctactccaccatcacccgtgccaggtttgaggagctcaacatggacctgttcaggaagtgcatggagcctgttgagaaatgcctgagggatgccaagatggacaagagcagcgtccatgatgttgtccttgttggtggctccactaggatccccagggtgcagcagctgctccaggacttcttcaacggcaaggagctgtgcaagaacatcaatcctgatgaggccgttgcctatggtgctgctgtccaggctgctatcctcagtggtgagggcaacgagaaggtgcaggacctgcttctgcttgacgtcactcctctctctctgggtctggagactgccggaggagtgatgaccgtccttatcccgaggaacaccaccatccccaccaagaaggagcaggtgttctccacctactcggacaaccagcctggtgtgttgatccaggtgtacgagggcgagaggacccggacccgcgacaacaacctgcttgggaagttcgagctctccggcatcccaccggctccccgtggtgtcccccagatcacggtctgcttcgacatcgacgccaacggcatcctgaacgtgtctgccgaggacaagacgacggggcagaagaacaagattaccatcaccaacgacaagggccgtctgtccaaggaggagatcgagaagatggtgcaggacgcggagaagtacaagtccgaggacgaggagcacaagaagaaggtggagtccaagaactcgctggagaactacgcctacaacatgcgcaacacgatcaaggacgagaagatcgcgtccaagctggctgccgacgacaagaagaagatcgaggacgccatcgacgcggccatcagctggctggacgccaaccagctcgccgaggcggacgagttcgatgacaagatgaaggagctggagagcctttgcaaccccatcatcgccaagatgtaccagggcgcgggtgccgacatgggaggctccggcggcatggacgaggacgctccggctggaagcggtggccctggccccaagatcgaggaggtggactaagcggtttgtgtcagtctcgtgtgtctgctgcagtggctggctggcccagtcgctgctcgatttatcgtcgtcgtcgcggtgtatccgcgttagaaccttttgttggtgaacaatattatcgtggcacgcgttttaagtaatacggtattctggttcggtttcgt

SEQ ID NO: 5785 - DNA, 1011 bp, Zea mays
  Clone ID: 700472656_FLI
cgtcacggcctcgcgcggctcccgctcccgcgaggccgcggctcccgctcccgcgatgaggaggaacacaaccgtcgcttctgcgtgaacgacgcggctcccgccgggtccgcgagctcgtgttcggacctgaccagtggcggcttcttccccgagggcgcgaacggcgggacgcgctccgccgcttttcccccatccgcttgccaacgcgactcaccgactcctccacgccgcgtcgagatcgctcaggccttcgcttctagcaactccaccactcagcccacccgccggagcaatggggagcacggggcgcaagccggaggttaccgcgccgacttccccgacggcttcgtcttcggcgtcgccacctccgcgtaccaggccaggagaagctggaattccaaatcgtagtccgtgtgaaccggttgaatttcatcaatcctatcaggtcatctcaagttcagcgactcatcaaccagaacgttgacgaatatacagatgactaagaatgaattatcatcaccacccaaaaagatgaagcacacccaggttagcaaaggcatgccagattctacatgttccaagaatgacaacatttagtccatcatgaaatacatcaaggtatgaggctccatcacttttggtcatgagacttttatgtacatattaacctgatgtttaaacctttctaaaaaaggtgtctatgcaataaaagctaggtcacttttgatcagtagactcttatttgcaccttgcacgcatagaaaaggccccatcacttttggtcacaagacttttatgtacatattaacctgatgttgaagccttcttagaactatgtgtgtacgcaagaaaaactaggtcacttctggtcagtagacttttatgtacatatgactccactgttggagtctttctacaactatgcttgcctatataaactctgcagatacactattgttggacactcaagtatgtcagtttaatgtaacttgctacttattgtactct

SEQ ID NO: 5786 - DNA, 1656 bp, Zea mays
  Clone ID: 700472680_FLI
tctacttgcaaggacagccgtcttaataacaacagtctttctggtcaaattccgaaaaccttgaccaatatcaacactctccaagttctggatctatcaaacaacaatctctcgggaggggtgccatcaagcggttcgttttctctctttacacctataagttttgctaacaacccaaatctttgcggccctggtactacaaagccttgtcctggggctcctccattttctccaccccctccatacaatcccccagcaccaacttcatcaaaaggcgtgtccagcactggagcagtagctggaggcgttgcagctggcacagcgttgctgatcgcagtgcctgctattgggtacgcattgtggcggaggcgaaaacccgaagagcaattcttcgatgtccctgccgaggaggatcccgaagttcaccttggacagctcaagaggttctcgctgagagagctgcaagtcgccacggacaattttaacaacaggaatgtcctgggaagaggcggttttggaaaggtgtacaaagggagactaacggacggttcactggtagccgtgaagagattgaaggaggaacgcacccccggcggagagctccagttccaaacggaggttgaactgattagcatggcggtgcacaggaaccttctccggctccgtggattctgcatgacccctacagagcggctgctagtgtatccatacatggctaacgggagcgtcgcatcgcgccttcgagaacgcgcgccaaatgagccccccctcgaatgggaaacgagggctcggatcgcgctggggtcagccagaggcctgtcctacctgcacgaccactgcgatcccaagatcatccaccgcgacgtgaaggccgccaacatcctgctggacgaggacttcgaagccgtcgtgggtgacttcggcctggccaagctcatggactacaaggacacccacgtgacgaccgccgtccgtgggacgatcggccacatcgcccccgagtacctctccacggggaagtcctccgagaagacggacgtcttcggctacgggatcatgctcctggaactcatcaccgggcagagggcgttcgacctcgctcgtctcgcgaacgatgacgacgtcatgctccttgactgggtgaaggcgctgctgaaggagaagaagctggagcagctggtggacccggacctgcagggccggtacgtggaccaggaggtggagtcgctgatccaggtggcgctgctgtgcacgcagggctccccgatggagcggcccaagatgtcggaggtggcgcggatgctggagggcgacgggctggcggagcggtgggagcagtggcagaaggtggaggtgatgcggcaggaggcggagctcgccccgcgccacaacgactggatcgtcgactccacctacaacctcagggccgtcgaactgtccggcccgaggtagggaggtagatgatcgccgtcgggatccttgtcgtctgtgaatatgacagcggataggtagcttggtggttggtcctgtctttaatgatagctgcgaaactgtagatgaaattgtgtgctcgtcttctgtaacctgagtacctgacatctctgacattttttttctgatattagagagccgtatgacaccagcctctgttgagcc

SEQ ID NO: 5787 - DNA, 1246 bp, Zea mays
  Clone ID: 700472694_FLI
cactctctccgtccgcgaatccgtaaatggaaggggacgaaatgctcagggtgaagctcggcaggcagggccttgaggtgtccaagcttggcttcgggtgcatgggcctcactggagtgtacaacgcccctgttcctgaccaagctgggatcgacataatcaagcacgcgtttgaggccggcatcaccttcttcgacaccgctgatgcctatgggccacacaccaacgaggtcctgctcggaaaggcattgaaacattttcctcgtgagaaggtgcaaattgccaccaaatgtggcattgcaggatttgatgcaagtggcatgcgtgtgaagggcactccagattatgttcgagcttgttgtgaagcaagccttcagcgccttgctactgactacattgatatatactaccaacatcgcattgatcagtcagtgcctatagaggaaactatgggagagctcaagaagttggttgaagaagggaaagtgaggtatgttggcttatcagaggctagtgccgataccattcgacgggcacatgctgtccatccaattactgcggtgcagttggagtggtcactatggaccagagatatagaggaagatataattccagtctgcagggagcttggtattggaatagttccatatagcccacttggccgtggcttctttgctggcagggcagctgtagaacgtgttccatcagaaagtctattgtctaaacatccaagatattctggggaaaacttggagaagaataaagttctgtatacacgacttgaaatgttgtccaagaagtatgggtgcacacctgctcaactcgctctctcctgggttcttcatcaaggagaagatgtggtccccatccctggaacaacaaaagccaagaaccttgacgaaaatatcggtgctgtaaaggtaaggctgagcaaggaagacctcgaagaaatctcaggcgcattccctgctggtgaggtggctgggtctagactccttggagtcttggagcctttttcctggaggctcgcaaataccccgcctccaaaatagcgagttcagatgcaaattcttggccatcctaccatttaggtcatgttatgttagatcatatctacatgatgcaaatgattgttcctgtgctcgcgcgtgaaaatgcatgtacctgaaacaaagagatgtaacagttggttctctgtgtggaacgtgctgattgctatagttgatcaaagaaatacgttggaatt

SEQ ID NO: 5788 - DNA, 762 bp, Zea mays
  Clone ID: 700472710_FLI
aaaatctacagaaagcaaaagcagaggcagctatccgtaagctggagatgaaacttgaaaagaaacggtcatcatcaatggacaaaattttaggcaaactccgctctgctcagaagaaagcacaagacatgcgaagtgtagtttcttctagtgaaggtcagtgtagtgtgagggcaaccaagaagacatcttcctctgtcaaaactggcaggcctttcagctgctgctttacctaccgtgcttgctagttgtgatacacagttggtgcctgtggatacagcaatggatataggtctattcgacctcttctcaggcaacagttatggacgcgaagggaagtcagttgggttttgactacaaggcctaattgttaatgagatttgcactgatgaatgagatatcgttatggagcagcagacgaagaaagccacgcgaaatccactcatgtaactgatggagtggactaatgcagtctagtatgcgacgatcaatctctgtacacccggtagaaaaagttcatgagcttcatggcagttagaatcaggattgagctgatattcatcccgcttgatgtgtagctagcattcttgtaactggaattgtgtgtgtaatgcaaatcatgggcgcattagactgtaatgaagaaaaagtcagggctgcgcctttagaatgcagcttgctcactttttgagtttagtactgagactgggcttgtttgttattggttggcagcaattggaactgtgacgacgtatattttcc

SEQ ID NO: 5789 - DNA, 1809 bp, Zea mays
  Clone ID: 700472751_FLI
cacgatcattcattttcttcgccccatctccctctctgtccacctgtggttttgatcaatcggggtgcgtggcggcgtgctactgtcagctatggctgttgcccctttgcaaaactccacaatttggcatttatggggcgaatcttgttagcgttgtagtagaacaattgtttagggtatcgtcttaggtcgaatgaactgtttccttgttatagcatagcgtgttgacaacttggcgataactttaaattacatgtgtccactatatatctagtatatatgctcaattatcttgttgagatgtttttccttttctaaatccaacagagttagtgtaccttttgacaaatgaagtgctgctaacggtaaacactgttgaattggcatctttgttcacacccaaattaaatccaatagaaaccataatgatttcggatggttacttttgatttatgagccttgatgggtcaaatttctgtgatgtatcgtttattcgttttcctgcttcttcttatgtagggctttaagaaaattgatcctgaacaatgggagtttgcaaatgatgatttcattaggggacaacagcaccgactgaaaaatatacacaggcgtaagcctatattcagccattcatcgcatactcagggttctggaccattaccagataccgaaaggagggattatgaggaggaaatcgaaaggcttaagtgtgacaatgcagctctgacctcagagcttgaaaagaatgcacagaagaaacttgttacagagaaacgaatgcaggagctagaagataagttgatctttttggaggatcggcagaaaaatctgatggcgtatgtcagggatattgtacaggcaccaggatctttctctagctttgtgcagcaacctgatcatcacggaaagaaaaggagactaccagtacctatctctctctaccaagattctaatgctgaggggaaccaggttgtgcatgggggcttcatcaccaacccaccagcttgcagggaatcattcgacaagacggaatcttcgttgaactcattggagaatttccttcgggaagcgagtgaagcgttcaatatttcatatggtgatggcctccctggcccttcatctgctgtcgttatcacagagctccattcatccggagaaagtgatccccatgtgccatcacctgtctcaagaatgcatacatcttcggctggtgcgggagattcgctctcttcccgcgatttaacagagtcaactagctgcgctgagagccctcgcctcgctcagatccaaccctgtacagattcacggactaaggtgtctgagatcgatgtcaatcgggagcctgctgtcacagaaactggtccgacaagggaccaacctgccgaggagcctccccacgtagcagctggggtgaacgatggcttttggcagcagttcctcacagagcagcccggtcctgatgtacaccaggaggcccaatcagaaaggagagatggcgatgatgataagggcgatcagacgaggataggggaccgagaaaatttttggtgggggaagaagaatgttgagcagatgagagagaagctggggcgtctcacctcggtggagaaaacctgactgtatttcttgtagctggaaaaaaaaagttagcacagaaacacatataggacgctggtgcctctgactgacatgtactttgcagtgtaccatatatcttcgccaccagatatgctgactgacatcgacctcgtagtcgtacttcttccacctgtacttttgccgagtttacagtgagatttagttgttgct

SEQ ID NO: 5790 - DNA, 1234 bp, Zea mays
  Clone ID: 700472796_FLI
gacaccagccccatcgcaacagtcccctccacgaacccgtcgcccgccatcatcaccgtgccttccacgaatcccaccatcaccatcccttccttgaaccctctgcccacacccatcacagccccctcaacaaacatcccttctccttccaccatgctgccgccggttccggtcatatatccgctgccaacgccgtcaacatcctccccaccagctgtgccggtcaccaatcctgctgtcaccacgccttccacgtcccctccgtcgacaccaacaccattcaacaacccaccattgttgaacccaacgccgacccctgctcctacagtcacggccccagctgcttcaggccgggaggtctggtgcgtggccaaggctgctggctcaagtgaagccgcgcttcagaacgcgttggactacgcgtgcggcattggaggagtagattgttcggcgattcagccgtcagggagctgctactatccgaataccatccaagcccatgcatcctacgcgttcaacacttattaccagagaaaccctgtttcttccagctgcgactttggggggacggcaatgctcgtcactgctaatccaagctctgggagctgtgtctttgcatcatcattgccatcgtcgtcaagctctactgttggatatgatcccgcgtccacggctactccatcgtcaccgtcgtctggttccgactcgggagcacccgtgctgaatgccagtggggcaggttcttctgaatcatcagattttggctttgacatcccaggagctgtcaatttgggcagcggttggaggtcagtctcaccacccaactggccctgggcagccctggtctggattctagtagcattgtgtgtgcacaaagaagggatggtctgaaaacctgtgagagcatctgcagtattttggagacagattgcaaagtagccaggtggtgtagagaccagtagagagctacaaagctagagaatcggaccttagcatggctaagtttatcgatgtatgtatgaagtatggtgctccagttcgtagtagcaactgggaactgatgtagtcctgatggatggacttggactcaccctgatcggtcactcaggcactctgtagtgtagatgtaggcatgtagctgctgctagtagtagtagtaatgcaagtactgctttgcatcgtatgggtgagagagttgaacaactaatggaatgcaaatgtgccgttttgtttt

SEQ ID NO: 5791 - DNA, 1358 bp, Zea mays
  Clone ID: 700472831_FLI
ggctcgaggcttggcccagggagttgcaacctgcagcagctgctccttattactttggtgagttggaggaggcccttatccatggcacccgtacatctgttgatcacggcatgatcggaagtgatgtggacacagagcgtaagacagctggataccttgcagctaggccccccacactggagatcttcccttcatggccaatgagtcatctacagcagccatacagtggtaactcgcactcagtagggagcaccactgagtcgagctcaggtcagaacagtatgccacagaccgagctggtgtccccagggagcatgagggccgactctggacagcgtcaggagcttttgatggtgactgttgatgattacaactacgagcaaggactcggagccgcagcaaccacagctccaatctttcagcagcatgcagcaggccaagacaagggaaagcatggatccacaaggaaagacggcaggctgttagacgccaagaccgagaggcgattggcccagaacagagaagctgcgaggaagagcaggctgagaaaaaaggcctacgtacagcagctagagacgagtcggatcaggcttcagcaaatcgagcaggagctgcatggagcacgctcacagggtctgttcccgggaggaggtggtgcggctggagacttgagttcaggcgctgtgattttcgacatggagtacgcccggtggctagaagacgacaccaagcacatgacggagctccaggccgtgctgcagccccagatcatcgacgcgaacctgggggccatcgtcgaggactgcatgcggcactacgacgagctgttccacctgagggccatgctcgcaagatccgacgtgttccacctgatgaccggcctgtgggcgaccacggccgagcgatgcttcctctggatgggagggttccgtccttctgaaatcctcaagatgctgataccgcagctcgaccctctcgcggagccgcagctgatagggatgtacaatctgcaacggtcgtcggagcagaccgaggaggcgctcgtgcaggggcttcagcagctgcaccagtcgctggcggacgccgtgggcgctagtcctctcagcgacggcgcgaatgtcgccaactacaccgctctcatggccctggcacttgacaggctcgacaccctcgagagcttttaccgccaggcggacagcctgaggcagcagaccttgcaccagatgcggcggatcctgacgacccgccagacggctcggtgcttcgtctccatcagcgagtaccaccgccgcctccgcgccctcagctccgtctgggcatcgtcccgccctccaactcctccaagcgagggcgtcgtt

SEQ ID NO: 5792 - DNA, 1649 bp, Zea mays
  Clone ID: 700472844_FLI
ctacagctgcgcagcttcgccgcgagctgcacacggcgcttggtaccgccaagtggcagcttgatgaactggcgcgggcagtcagatcgaacgatctggttatgtcagcaggaaaagacacaagggctaggcatgatgattttgttacagcaatcggctatcgcatattagaggtcgagaactacttgaaagaatccaatcttgcggacgggagggggccattgagctgggttcacttggatgaggatgaaagggacgaccttgcagcttttctatctgccagtccttttcaacagaaagacaaagtggtcacaattccttcagcaggtgacattgaagtgggcagcaatgcagcaaggatgaaaaatgatatatcaactgacagctccaaggattcagctggttccacggatttgatttcaggcacagcaaagcaagatttgcatcgtgggcacagaagagcagctagtgccagtgctgatataggctcatggagcatgtcaatccctaatgaatgtgaaggaactacagaacagttatctgatggctcagacaaattgcctttgcataagatagtgaaaacatgtgctttgacaagtaccttgcaatctaagactagaacgaagtggaaaaatggagctgttaggtgggcaggcagtaaccaacaggatgttgaagaggctatccctctgaatacttctcagttgagtcagggcttagaggaatgctttgaaaggaacaagagttgcttaagtacatgtgatgagcatacatacaataagaaacttcatggttggctcggagcccttcgtagacaacttcaaaggtctcagtaccaaattcaatatgggcatcatattcaattgattgttttggcacttgctgcccttgtaatcattgtatgcatagtgaggacaatctggtgactatatttatttgctcatgattggatttctagcctcacaagatcagcagcttgtatggtaaattcactggcagttaagttactcttggtcaacttgatcctgaagcatgcatatgaggcaactatggtagaccattttggtagtcaaggttcaaaatcacgtataatgatctggttggggccacttatcttgccacatgttcagggcaggctgcctcgtccttggaagaacatctacaggacaatccttgcagcacggttgcttcgccacacttggatatgctcccgaatggtgccttgaacaattgatgcacctcgagaactcaatcctccgtggtgagttggtgactgggtggcacctatgcaatggcccagtataaattagtggtgcagtgggctggcgatcatgctgctagcaaccgaaattgcaagacttgtatcatacatcaacgctattgcttttaccgcctgacacggaagggtggtgatcatgcatcaatgctattgcttttactgcctgacacagaagggtgtcattttttttttgtaggagttgccatctgaactgtagagctccataggggataggttctgatcggaatgtgaatggcactagaaaattacttttactgtatctgcttgtgttgtcaagaaccgaatgaggtgcctggcagccttgtctgtaccctgtacactaaaattggagaatgttgaagccctcggc

SEQ ID NO: 5793 - DNA, 2205 bp, Zea mays
  Clone ID: 700472952_FLI
gtcctctgttacttctcccgccgccgccaatcccctcccgttctccgccaccgccaatcccctcccgtcctccgccacctctgctgagagcgagaagagatggccggcaagggtgatgggccggcaatcggcatcgatctcggcacgacctactcttgcgtcggtgtgtggcagcacgaccgtgtcgagatcatcgccaacgaccagggtaaccgcaccacaccctcgtacgtcgccttcaccgactccgagcgcctcatcggagatgcggccaagaaccaggtcgccatgaaccccatcaacaccgtctttgatgccaagcgtctcattggcaggaggtttagtgatgcctctgtccagagtgatattaagctgtggcccttcaaggtcattcctgggcccggtgagaagccaatgatagttgttcagcacaagggggaggagaaacagtttgcagccgaagagatctcctccatggttctcatcaagatgcgtgagatcgctgaagcttaccttggcagcacgatcaagaatgctgttgtcacggtccctgcctacttcaacgactcacagaggcaggccacgaaggatgctggggtgattgctggcctcaatgtgctgcgtatcatcaatgagccaaccgctgctgctattgcctatggtcttgacaagaaggcaaccagcgtcggtgagaagaatgtcctcatctttgaccttggaggtggtaccttcgatgtctccctccttactattgaggaaggtatctttgaggtcaaggccacagctggcgacacccatcttgggggtgaggactttgacaacaggatggtcaaccactttgtccaggagttcaagaggaagaacaagaaggatatcactggcaacccgagggctctccggaggctgaggacctcttgtgagagggccaagagaactctgtcttccactgcccagaccaccattgagattgactcgctgtacgagggcattgacttctactccaccatcacccgtgccaggtttgaggagctcaacatggacctgttcaggaagtgcatggagcctgttgagaaatgcctgagggatgccaagatggacaagagcagcgtccatgatgttgtccttgttggtggctccactaggatccccagggtgcagcagctgctccaggacttcttcaacggcaaggagctgtgcaagaacatcaatcctgatgaggccgttgcctatggtgctgctgtccaggctgctatcctcagtggtgagggcaacgagaaggtgcaggacctgcttctgcttgacgtcactcctctctctctgggtctggagactgccggaggagtgatgaccgtccttatcccgaggaacaccaccatccccaccaagaaggagcaggtgttctccacctactcggacaaccagcctggtgtgttgatccaggtgtacgagggcgagaggacccggacccgcgacaacaacctgcttgggaagttcgagctctccggcatcccaccggctccccgtggtgtcccccagatcacggtctgcttcgacatcgacgccaacggcatcctgaacgtgtctgccgaggacaagacgacggggcagaagaacaagattaccatcaccaacgacaagggccgtctgtccaaggaggagatcgagaagatggtgcaggacgcggagaagtacaagtccgaggacgaggagcacaagaagaaggtggagtccaagaactcgctggagaactacgcctacaacatgcgcaacacgatcaaggacgagaagatcgcgtccaagctggctgccgacgacaagaagaagatcgaggacgccatcgacgcggccatcagctggctggacgccaaccagctcgccgaggcggacgagttcgatgacaagatgaaggagctggagagcctttgcaaccccatcatcgccaagatgtaccagggcgcgggtgccgacatgggaggctccggcggcatggacgaggacgctccggctggaagcggtggccctggccccaagatcgaggaggtggactaagcggtttgtgtcagtctcgtgtgtctgctgcagtggctggctggcccagtcgctgctcgatttatcgtcgtcgtcgcggtgtatccgcgttagaaccttttgttggtgaacaatattatcgtggcacgcgttttaagtaatacggtattctggttc

SEQ ID NO: 5794 - DNA, 994 bp, Zea mays
  Clone ID: 700472953_FLI
ccgcccgcagctcttcgtccccggaggaccaagcctgcgcaccagagatgtcgtacgcctacctgttcaagtacatcatcatcggcgacacaggcgtcggcaagtcgtgcctgctgctgcagttcaccgacaagcgattccagcccgtccacgacctcaccatcggcgtcgagttcggggcccggatgatcaccatcgacaacaagcccatcaagctccagatttgggacacggctggtcaagagtcattcagatccataactagatcatactacagaggcgctgctggtgctcttttggtttatgacataactaggagggagactttcaaccaccttgcaagctggctggaggatgcgagacagcacgccaatgctaacatgacaataatgcttgttgggaacaagtgcgatctgtctcacaggcgtgcggtgagctatgaggaaggcgagcagtttgcaaaagaacatggtcttatcttcatggaagcctctgcgaagaccgcacagaatgtcgaggaggcatttgttaagactgctggagcaatctacaagaagattcaagatggtgttttcgatgtatctaatgagtcctatggaatcaaagttggatatgcaatccctgggcaatctggaggtgctggtagctcgtcttctcaaggtggtggctgctgcagctaatctgctaacgccgttaacaaatgcatatctgtcgtgtgtcacataccagctgcgctgtgaaaaatagttattgctgctccagggtgccttgttatttgacgcaccaatggatcctgtgcctgatcgacttgagagattcagtttatttacgtcaggtgtttataaactccctgtaaatcactagattcttcactgttttccgtcattaggcactcaacaatcgtgtgtccgtttgcatgtgtaaataaggcacatctacatattgtttgatatgatattaatttgtcctgttcgaatatgttggcaagtttcgt

SEQ ID NO: 5795 - DNA, 1721 bp, Zea mays
  Clone ID: 700472983_FLI
gcccaagtcacagccaaacgaaatactagttgacatggcagtgtgtgctgccaccaagctccagtgccttaggcatttgtcacggtacttcaaacaatctgctacgacaatggagcaacagttccaaaaggagactaggttctacagctccttaataagattacagcagaactggaaagtgaagcggcagcggtctgttgggagtccaggaagtgagggcttcatgtttgatctagttgatacttctcagctagacacaacaacaatgcctcgattatcaccattatctttgattccaattgatcaagactcttcaggcactttgtctgtacaaattccacagaagtgtttccattccttgagccttcgatttcatggagacatagccaataatgcagaaagcagtgctgtcaaaaggaaagaaggcacattaaccaacactactaccggagccgaaaatgatgttttggagaacgatgatgtcaataagtctactgaacatgcacattccatcttgcgcgacatccataagtccatatttgaggagcaggtttttgatatggtgatccaggagacatttatccaatctcaaggcatcaatgttactggaatgtgcgaagattttctccaattagcgattggtcaggaatgttctttgtgcctttcgcatgatctctctgggcagaataataactcggggacagtagggcaggaagatcatatggatatagatcatactggaaatcttgcagtagccactgtaaatgggaaggagtcttcaaataaggatgtgagagggtttcctaaccccaaaagcttagaaatttacctgctacatgtgttccatgaaggcatccttagaaaactcagggagaaatctcgtcatgtggttcggtaccagagttctgctcagggtacacctgacgagtgtggcctgctaagtcatttttgcatgacagtgtctcacaggatattttctagcaaagtacatttggagcttgaaagtgtggttagtagggttccttatctccatctgtgttcccttcctacatggcattctcgaacgtcctcctggtctctctgcctgaaagttcctcagcctatcctggccactgatcgagtcagaaggccttcagactacagtgagttgaagtgcaaatccaggtcacagttcggtacaaaggtgatcttgaaagatggacagattagtttaatgggcgagggctctccaagcattgctggatcgttagctgggaagccatccgatggacgcctggtaaatagttacaattgtgacttggaagatctcccaatgatgcttctgcagcaggttgccagccaagtaatccactggctccacgatgaagcggtggtccttgggatgaacgcgacaatagatttcctgtgcctgtacttggaccttgaccaaggtgaaacactaggcctggtggcacacgttgacccggatgacacctacggctgcgtctcatggtacctcactcttgatcatcacccaacggaggaagggaagatgtcagcgggtagtccggagctagaggagcgcaggtttttggggtacctttccccggaattgctttactctaccctgatggacctggtaaaactgtgcagcacaggtgtccaacgctgagactctgcccacggagtagtgggagtctcatgcgcggtaagtctcacggataggggtagtaatgggcctt

SEQ ID NO: 5796 - DNA, 667 bp, Zea mays
  Clone ID: 700473003_FLI
ccacctccaaggctcttggtgtagcttgccactctcacaaatcaagttttcatgtctgatctcgacattcagatcccaactgccttcgatcccttcgctgaggccaatgctggggactctggtgcggcagcagggtcaaaggactacgttcacgtgcgcatccagcagcgtaatggtcgcaagagcctgactaccgtccagggattgaagaaggagttcagctacagcaagatcctcaaagatctcaagaaagagttctgctgcaatggtacagtggtccaggacccagaacttggacaggtcattcagctccagggtgatcagaggaagaacgtctcgaatttcctcgtccaggccggcattgtgaagaaggagcacatcaagattcatggtttctgagcaaccgccgggtccatagcaaaccaaccctgcatgcagggccagcttattatatataatatctgaggtggagcatatctatctggctgtgtactacaagcaggcctagtacgccgcctgcgcgttcctcctattacacataacacatatagccccctccctgcgtgtatgcttgttgccgtcgtgtcgaatcttgtactacgaggctccgtcgaacctcgatggcttgcttctttatcagaacatgtttgaataaacgctatttggt

SEQ ID NO: 5797 - DNA, 2236 bp, Zea mays
  Clone ID: 700473036_FLI
ctaattagaggctcctccgcgctctcggcgggggtttagctgccgtggcctgaggatttgtagaagacatggcctcgacgttcggtgccacttctacagttggccttatggctgctccaacggggaagaatgtgcgccttcagaggagggctaacttcagagtaaaagcggctaaggagctgtacttcaacaaggatgggtcagctatcaagaagctccagactggagtcaataagcttgcagacctagttggagttacactcggaccgaagggaaggaatgtcgttttggagagcaagtacggctctcccaagattgttaacgatggcgttacagttgcaagagaggttgagctggaggaccctgtggaaaacattggagctaaattggtcaggcaagctgcagctaagaccaacgatcttgctggagatgggacaaccacctctgtggtccttgctcaggggctgattgctgagggtgttaaggtggtagcagctggtgctaatcctgttcagattactcgtggtattgagaaaacagctaaagcactagttgaagaactacggaagttgtctaaggaggttgaagatagtgagcttgcagatgttgctgcagttagtgctggcaacaactatgaaattggtaacatgatagcagaggccatgagcaaggtcggtcggaagggcgttgtcacccttgaagaggggaagagttctgagaactttctctatgttgtggagggaatgcaatttgaccgtggttacatctctccgtactttgtaacagacagtgagaaaatgactgcagagtacgagaactgcaagctgcttttggttgataagaaaatcaccaatgcaagggatcttatcaacgttttggaagaagccatcagaggtgcatacccaatcctgataattgcagaggatattgagcaggaggctcttgctacccttgtcgtcaacaagctcagaggatcactgaagatcgctgccatcaaagcccctggttttggagagcgcaagactcagtacttggatgatattgccatccttactggagcaactgtaatcagagatgaagttgggctatcacttgacaaggccgacaagtcagttcttggaacagccgcaaaggttgtccttacgaaagagtcgacaacaattgttggtgatggcagcacccaggaagaagttactaagagggttgcacagattaaaaatctcattgaggcagcagaacaagaatacgaaaaggaaaagctcaatgagaggatagcgaagcttgctggtggtgttgctgtcattcaggtgggagcacaaacagaaactgaactaaaagagaagaagttgagagttgaggatgccctaaatgcaactaaggctgccgttgaggaaggtattgttgttgggggagggtgcactcttttgcggcttgcagctaaagtcgacgccatcaaggatacactggagaacgacgagcagaaggttggagctgaaatagtgaggagggccctgagctacccacttaatttgattgctaaaaacgccggtgtcaatggcagtgttgtcactgagaaggtcctttctaatgataacttcaagtatggttacaatgctgctactggacagtacgaggacctgatggctgctggtatcattgaccccaccaaggtggtgagatgctgcttggagcacgccgcgtcggtggccaagaccttcctgacatcagatgttgtggtcgtcgatatcaaggagccggaggctacacctgtcgcaaacccgatggacaactctggctatggatactgatgagatgctatggccatgccccatgggacgaaggtgatcaccatattaattttttggtaggcgaggagtcgggtcgaggtagctttttagacgaccgaaaggcgaaaataagttgaggatctgcatcccaaatttgtgatgtaaactgaggcagaacagcagccaaatgaagcagagatttgatgaaagattctgtaactggttgcagctaattttgaatgcagtttgcacacgaccaattcaaatggctccggcaacgtcagattatgctgcgtcgaaactgatttgaaactgatacaccggagcggtctcctctctgggagcgatccatatttttgtgtactttctgatttgatgacccatctgtttgtttctagaagataatgtatttgagggcgtctgtttttaaaagaaaagtttgcatgagt

SEQ ID NO: 5798 - DNA, 580 bp, Zea mays
  Clone ID: 700473104_FLI
gatctctgggccacaaaggtttcagatatcccttgaagtgcactaaaaccttccaacggtacctttgaaggttttagtgcacttcaagggatctctgggccacaaaggtttcagatacataaggcctacggcagcacgaaccatctgccttcagctcatacttgctttaaccaactagacttgcctgagtacacatccaaagagcagctccaggagcggttactgttggcaatccacgaagcaaatgaaggtttcggatttggctaatcagttatactcgtttgtccgtgccctgagaactgcaaataggcgagcagcacgtgtgtggctgatctcattctgaactccacgtgtgtgatgagagatggccggagagaacatgtccaggatagacgaatgcccgtgggagaggtactactgttaagagagagagcgacgattttgtgtttataatctttgtccgtttgtagtttttgccttacattggtcgttgctccgaagtttttccccttcttttcgttcatagactggtgtaagttgtaaccgaacattatgtcaaatgcaggtcatcttacgctgg

SEQ ID NO: 5799 - DNA, 1044 bp, Zea mays
  Clone ID: 700473131_FLI
agcagcacattccgtactgctccaccctctttttagtttctattggctcacataccaatcgaactatcttctctgtcgattttgatggtcggtttgggtcacagctggacgagctagagaagaagctcgccggcgaggtcagggtgaggaacagggcggagaggaggctcaggagggccatcaagaagctggagtccctcaagatcctggacgtcgagctctcggaaggctccattgggtcgctgtcctccaacggccgttcggatcaccaggcgccggaggccgaggagaggaacggccctggctcgttgaccactcgtgggtctgtgctggcatccggtccttccggagaccccgacgccgacgccgacagggaatcgtcagagggatcatgcacccaggtgaattcgtcctcccgggacgggagctggtgctccgttgcgtcagagcaatcccggcctggttcttgcatggatcttgccggaaacaccaccaactgcggctcagaggggagttgcggtgaccatgattcagagagggaacaccttgatgcatccagtggctgtggctcagcaaaatcggaagaagcgttctacgaaagcgacgacaggctagcgctatcgcggggtctcgttgaaccaccaccagcagctgcaggcgaaggtccaagaacgcaggataacgacacgcatgcaggagaggtccgtgccatggatcacgaggaagaagaggagaccaacaagcttgcgatcgttctagccgacccccagccacagtcgcaaggcgacgtgtagtccgttctcctggcgctgcggcgggtgaaggagcagctgcgctacaccatgaaccaggaactcgccgcgccaaccaggagctctacgcccaccgagcgagcgtgccacactaggaaaccgtgtggctcacttctactacggtgtccaacattcggttccgtgaattattcgtagtgctgtttaggggagtggagtatctgtacagaatggaataaggtcgctcatgtggatgtggagtcactattttatt

SEQ ID NO: 5800 - DNA, 2010 bp, Zea mays
  Clone ID: 700473146_FLI
tgtacctgcgcctcaagcatcaaactttggtgttccaacaacacagcaaaatgtcacaaatgcaccgcaggctgcctctaatccggagaatgctcagggaaataattttaatcctgtgcagcatggttcaatgggtactgcattgcaacagggaagcactggtcccatgcagggtgcattgaatgcacagcatcagtccaatagtaacatgatatccaacaatgcaatgagtacaatgcagactaataccaatgccatgcaagcaaacgtgaattcattgcagcagctaaagcaacatcaggagcatcagatgatgcaaaatcagcaaatgaagcagcgtcagcagatgctgcagcagatgcagcaaaagaaaatacttcaacaacagctcccaatacaacaactacagaaacaacagcagcaagggccgattcaggttcaacaacttcattctggaaatgatgtgaatgagctaaaggtcaggcaaggagctgcaatcaaatctggaatgtatcaaccgctgaaccagcgtaactattatcagcagataaaacggggggatgtctttccaatttcttctccgcaaaacctccaagcatcgtccccacaaatttcacactattctcatgttgatcagcacagtctgttgcaatctcaagtgaaaaccgggacaccgttgcattcagctaactcaccatttgtcccatctccatctcctcctgttgccccatcaccggtcccactggattcagataaaccactctccaacctatcttcactcactagtgctgggcaggctggacatcagcaaacatcccttgcacctctaacacaatctatagctgttaacacaccaggtatatcagcgtcacccttgcttgcagaattcacaagtgctgatggaggtcaggttagcgtaccaactcaagttccaacaaaatcaagcgcagcagaaaggcctctcgatcgcttgcttaaagcattgagaacaacacagcctgagtcccttagtgctgcagttagcgatattggatctgtcgtgagtatgattgacaggattgctggatcagcgcctggtaatggttccagagctgctgtgggtgaagatcttgtcgctatgacaaagtgccgcttgcaagccaggaacttcataacccatgatgggagtggtgcatcaaagagaatgaagcgggacacaggtgctatgcctcttaatgtgtcatccgctggaagtttgaatgacagcttgaagcaatcatatactgttggcactccagagctacaatcaactgcaacctcacgtgtcaagtgtcaaagggctgaggtaaaccatgttctgttagaggagattcaggagataaacaaacagcttatagatacagagctccatgtctctgaggatgatgctgagtccttcactacatctgatatggccgaagggacagtcattaaatgcacattcactgctgttgctgttagccccagcttgaaatccatgtttgcttcagcgcagatgagtccaattttgccgttgaggttgcttgttcctggtagctacccaaaatgctccccggtgcttctagacaagtttcctgatgaacaatgcaggaactcggatgacctgtctacgaaggccaagtcaaagttcagtgtgttgctccggggtctagctgagcccatgtcattgcgagaaatcgcaaggacgtgggatgcttgcgcccggaaagtgattgcagagtatgcccagcaaactggaggaggcagtttcagctcgagctatggttgctgggaaagctgcgttggcgcttcataagtttattgtatctattactccgtagtatatttattattctttattacactaagcatttatgtgttgagcaaaagaaaataacagtttatcttccttttggtatcgagtcactgttagcttgataaataagatcgtgtacagtacagtgtatggagcaagcttgggtgcttcagcccggttaatatttactatcttgt

SEQ ID NO: 5801 - DNA, 1025 bp, Zea mays
  Clone ID: 700473239_FLI
agtctgtgctgaaagatagcaataccaataaaacagaaacaaggaaagtactcccagtgggtgatctggctttacctagctatcatgacctgaagacttctgataacaaaaaagtgaaaagagggtcattttctggcccaatagcttccagaccacggtcaacagagaacattgatgttatttctgcagcgcctaggcatagctcagcacatcagccagtgcacatgagagtatcccccggcaactcgccgccacccatttcctcaccgaagatcaaggaacttcatgagcttcctcgaccacctgttaatacatcaaaaaatatagcattccccagtttagttgcccactccgccccattggcaccaaatcctgcatctttgactcccaaagttcaagatcattttaggacaaaacaaacgctccaaagaactgcttcacctttaccaactccaccacctggatctatagcccgcagtttttctataccttctaggggtatttcagacagtaaagagacagaagatcaacacaagggagctgccagaatgagtctttcttctcttccttcagcacaaacattcttggaagatcgtcagccattgtcatcagctgctggatcggtcagcaaaacataggagtattctctattatcattatcaagcagctcgccgagccctcttcctgaaagaatgttgtacatattagcatttgaactctggccagtatcgcggaagaagttgggtgctgtttggttcacgaaatgtaacgtaaagggtaatggtaacggtttacactcgattacggacggtaacaagtttgaatagtccggtatcaaattttagtatggtatctgattacggttggactaaaacaaacatgatttaacgttatcacttacccattacgttacaaatatttgaaccaaacggtaccttggtgtttcgcgtgccctttggttggttaagatgtagcctgtgcaaataatgggttctgcggaaataaaatccccatttttctcaccc

SEQ ID NO: 5802 - DNA, 1458 bp, Zea mays
  Clone ID: 700473240_FLI
ctgatttgagaaaagtgggcaatgcatctttagtgcctccaagaccaaacaagctaactaaggagtctgttgtttctggaggtcaatatattgatggccatatgcctgatatgaacatgcatgctgccataccctcagaagaagactcatgttttaaggatatgcacacagttaaattgaacaaaggacctggagaagatagtatcaagcgacaattacaagctgttgctgaaggggtagccgcatcagttcttcagccaccctttcctgaaaaaacagtggtgttctctggggatcacatcgattcgcatggagcagaagttgatgtcaagttccaggatgaagggaacaatcagtcagacaaaataagtcaaggggttcaagttttagatgacaacgataaccttcagataataaagaacagtgaccttgaagaattgcgtgaacttggttctggaacctttggtactgtttaccatggaaagtggagaggttcagatgttgctataaagagaatcaacgatcgatgctttgctgggaaggcttctgagcaagagcgtatggtatgaaaatgctgtgttttaaattgaatccaccatgttctaagttttcttttgtcagtagaggactgatttctggaacgaggcagacaagcttgcatctttgcaccatccaaacgtagtagccttctatggtgttgttgtagatggacctggtggatctgttgcaacggtaacagaatacatggctaatggctcactccgacaagcattacaaagacatgaaaagatctttgatcggcgtaggcgtctactaattgcaatggatgttgcatttggaatggaatatctccatgggaagaatatagtgcattttgacttgaagagtgacaatctgcttgtcaacctaagggatcctcaacggcctatatgcaaggttggtgatttgggattatcaaaggtcaaatgccagacactaatctctggcggagtaagaggaacacttccttggatggcccctgagttgttgaatggcagcagcagccttgtctcggaaaaggttgacgtcttctcgtttggcattgtgatgtgggagctacttacaggtgaagagccttacgccgagctgcactatggggccattataggtggaatcgtgaataacacgctgcgacctccggtgcccgagtcctgtgatccccagtggaggtcactgatggagcggtgctggtcagccgaaccgtcagagaggccgagcttcaccgaggtcggcaagagcctgcgcgccatggcttctcctaccaaggcacaacaatcgaaatagatgctttagccttgcctctcgcgtccttctgttcagcagattgtttcagtcttcaaaccgaggaggtgccaccatggctggcctgccttttgtacatgaataagttgaagaaaaatacgagaatgtggcatgctt

SEQ ID NO: 5803 - DNA, 2041 bp, Zea mays
  Clone ID: 700473276_FLI
gttgtcatctccatctccagctccagcgccgccttgctctgtgtgcttccgcccgctctgtgttgctattgctaaactagtgtgttctgtcgctatgggctccctggccaccgcggacgggccgttgccgccgctcaagtaccctcaggctcgccgggacgaagacatcgtcgacgactaccacggcgtcctcgtgccggacccttacagatggatggagcaggtggattcgaaggaggtgaaggagttcgtggacgcgcaggcggccgtgaccagcgccgtgctgtccagctgcgaccaccgcgggcgcctgcgcgggcagctcaccgcgctcttcgaccacccgcgcttccgcgcgcccttcaagcgccggggcagctacttctacttccacaacccgggcctccgcccgcacagcgcgctctacgtgcagcacgggctgggcggcgagcccgacgtgctgctggaccccagcacgttcagcgaggacggcacggtgtcgctcggcgtggtcggcgtgagcgacgacggcgagcacctggcctacggcaccagcggcagcggcagcgactgggtcaccatcagggtcatgcgcgtgcgcgacaaggagcacctgcccgatacgctgtcctgggtgaaattctcgcgcatcgcgtggactcgtgacggccaagggttcttctactcgcgttttccggctccaagggatgcgctggattctgggatgaagactggcgtcaatctcaaccacgaagtctactatcatttccttggaacagagcagtcacaggacgtgttgtgctggagagaccctgatcatcccaagtacatatacatccctcaagtcacagaagacggcaagtacgtgatcctttcggtctcagaaacgtcagagccggtgaacaagctgtactactgcgacctgtcggctctcgctcacgggctgggcggcgtgaagagcgcccatggcaacggcatgctccccttcgtcaagctcgtggacaggttcgaggcctactacgggctcatcgctaacgacggcacccagttcacgttcctcacgaacaaagacgctccaaggtacaagctggcgagggtggacgtcgacgacgacgagcccgggtcgccgtggtggaccgacgtggttcccgaggacgaggacgggaaggcggtcctggagtcggcgtgcgccgtccacggccacaagctgctggtgagctacctgtcggatgtcaggtgcgtcctgcagatgaggagcctggtcactggggagctgcttcacgacatacccgtcgacatcggcactgtcagcgggatctccggcagacgatgcgacgccgaggtgttcgtcgagttcgcgagcttccttacccccgggatcatctacaggtgcgatgtcggctctgcggtcccggagatggacgtgtacagagagatctcggttccaggattcgatcgaaacgagtttgaagcgaagcaggtgttttatccgagtaaggatgggaccaagatcccaatgttcatcgtatccaagaaggagatcagcctggacggatcgcacccggcactactgttcggctacggcggcttcggcgtgagcgtgacgccgcagttcagcgtcgcccgcgtggtcctgatgaggaacctggggttcgtggcgtgcgtcgccaacctcaggggcggcggggagtacggcgagggctggcacagggccgggtcgctcgccaacaagcagaactgcttcgacgacttcgtcgccgccggcgagttcctcgtgtccgctggctacaccagcccggcgaggctgtgcgtcgagggcggcagcaacgggggcctcctggtagctgcctgcgtgaaccagcgccctgatctgtttggctgtgccctggcccatgtcggagtgatggacatgctacggttccacaagttcaccataggtcgtgcatggacatgcgacttcgggtgttcggagaacgaggaagagttccagtggcttatcaagtactcccccctgcacaacgtgcggcggccgtgggagaac

SEQ ID NO: 5804 - DNA, 2096 bp, Zea mays
  Clone ID: 700473295_FLI
aaccaattcggggtggttccttgtggccttcgtagaaggcgcaagtcagagacccttcgtgctcagtatattgatgtcagggagctcaggatttgtgctggaacatggaatgttgcaggcagacttccacctaatgatttggatatccaagaatggttggatatggaagagccagctgatatatatgttcttggatttcaagaaattgttccactaaatgctgggaatatatttggcgctgaagacaaccgccctgtagcaatgtgggagcatattattcgtgaaactttgaataagatcagcccagataaacccaaatataaatctcacagtgatcctccttctccgtcaagattcaagccatctgatgatgcttttgttatggaagatgaacttattagtgagtctgatagtgaaggtgatggggaggtgcacccattgaacgaacaagatttggtcgactctgttgatggcattcatggtaacaaatgtgaacctcaaacaattttacaagatgacgagttcagcaggttgccttcagtgaagacttttgacagatccaataacctaagttttaaagaatctaatttggaagagaagatctgccagaagatattaactaaaacattcagtcactcagagaggcttgggatgatttggcctgaaccaccattggatatgttggcccagcgtcttccagacagcacaaagtcatttgcttcaggaaaggttttaagatcatatttgtctttcaagtcggtaaatggagattctggctcatttgctgaggacaattcagttcctgattttcatatgagctgtgcagcagttaaaagaaaaaggccatactttgtaaggataataagcaagcagatggttggagtgtacctatcaatatgggtacgaagaagcctccgaaagcacattcagagtctgaaagtatcaactgtaggggttggtgctatgggctacattggtaataagggatcaatatcagtaagcatgtccatataccaaacacacttttgctttatatgttgtcacctgacctctggagaaaaggaaggagatgaactaaaaaggaatgctgatgttcaagaaatccatcgaaggacaatatttaatccagtttcgagagtcaacatgcctaaaacgatatatgatcatgaaaggattctatggctaggtgatctcaactataggatcaacttaccatatgagaagacacacgaactcatatccaagcaggactggaacgaattgtttgggaaagaccagctgaaagtagagctgaagaaggggcatctgtttgaaggatggaccgaaggggtcatcaactttcctccaacgtataagtacaaggttaactcagaaaagtacataagtgatgataacaaatctggaaggagaacacctgcatggtgtgaccgaattctttcccatggtaagggtatgagattactgtcatataagacagttgatctcagactatcagatcaccgccctgtgactgctgtgtacatggcagatgttgaggttttctcttcaaaaaagctgcagagagctctgaccttcaccgatgcagaggctgaggaacagctctccttcgaggaagacagtgcttctggaatatacaaccttggactatatgaaagttcaaggtaatcttggacacacattgaaacagactttatgcttttctcaagtatccaaggaagaacaggcaagttggtagtaggtagtcctgtacaattttatccaaaatatggtcagagattacgacttagtcctgctgcccagcatgtgcctctctatttttctgagaccagcagttggtagtaggtagtcctgtacatttttatccatgctctgaccatattttgaaatcagatgacatgcatttgctgcttttgagtactgtgtacctcatatgtgcaaaaataatctctgaccatattttgaaatcagatgtcatgtattttgctgtttttcccctccccctttttgaggtggtgtgcctcatatatggaaaccttttagctgtaattaaaaatgttggatacagtaaatatttcacacagattgtgacattctgt

SEQ ID NO: 5805 - DNA, 1926 bp, Zea mays
  Clone ID: 700473306_FLI
gaccaaagccgggcatacgcccccaagtccaaaagccctctccgccccgctctcccactcgtaggtgttctccccgtctccgcccgcactcgctcgtccgcgcgcaggaaggttgacctgtcgggggccggcgagcccggtaagtaagagtgaaaatggatggaagtagtaaagggagtgggcattctgaagcattaaggaactacaacctgggaagaactttaggtatcggtacatttggaaaagtgaagattgcagagcataagcttactggacatagggttgctataaagatcatcaactgccgccaaatgagaaatatggaaatggaagagaaagcaaagagagaattcaagatattgaagttgttcattcacccccatatcattcggctttatgaggtcatatacacacctacagatatatatgttgtgatggaatattgtaagtatggcgagttatttgattacattgttgagaaaggcagattacaggaagatgaagctcgtcgaatcttccagcagatcatatctggcgtcgaatactgccatagaaacatggttgtccaccgtgacctaaagccggaaaacttgttacttgattcaaagtataatgtaaaacttgcggattttggtctgagcaatgtcatgcatgatggccattttctgaagactagctgtgggagtccgaactatgctgctccagaggtaatatctggtaaactatatgctggacctgaggtcgatgtatggagttgtggggtgattctttatgctcttctttgtggaactcttccatttgatgatgagaatattcccaatctgttcaaaaaaattaagggaggtatctacacacttccaagtcatttgtctgctttggccagggatttgatcccacgaatgcttgttgttgagcctatgaagagaatcacaattagggaaattcgggagcatcaatggttccagattcgccttccacgttacttggcagtgcctccaccagatacgacacaacaagccaaaatgattgatgaagatacacttcgagatgttgttaatatgggatttaacaagaaccatgtgtgtgaatcactgtgcagcagacttcaaaatgaggcaactgttgcatattatttactattggacaatcggtttagagcaactagtggctatcttggggcagattatcaagaatcaatggacaggaatttaaatcagctggcgtcatctgaatcatctagttctggtacgaggaattatgttccaggaagcagtgatcctcatagcagtggtttgcggccatattatcctgttgaaagaaaatgggcgcttggacttcagtctcgggcccaccctcgtgaaataatggttgaggtcttaaaagcacttcaagaattaaacgtcagatggaagaagaatgggcactacaacgtgaaatgcagatggtgcccagggtttcctgaagttaatgacacgttagatgccagcaacagctttcttggtgactctaccatcatggataatgatgatgctaatgggaggctacctactgtgatcaagtttgaattccagctttacaagacgaaggacgacaagtacctcttagatatgcagagagttactggacctcagctgctcttccttgacttctgtgcggccttccttaccaagcttagggttctatagtggtctaccatgtgcaaattttcactgtggtgatgaataaccgaaagcatgtaaataggaaccttgttctcgtcttttggacaacgaacatgtttgagtgactggtcttgtgttgagcgcgtaaaggtcatgtatacttaggttagtactatttccgttcttaaatatttgtagtctgctagtgatagttcatttttgaactaaaacgttacgaataaaaaaagagtatattactgtctgc

SEQ ID NO: 5806 - DNA, 2016 bp, Zea mays
  Clone ID: 700473307_FLI
actttctgtgctatttgacgaatataaggatgcacaacaaacagcctagtgcacttgacattaagaattagtgaattactccattcgctggggcaagatgttccagggtctggtggttctaactggactgaccatgagacattgcttcttttggaagcgttagaaattttcaaaggaaaagaatggcatgagattgctgagcatgttgctacaaaaacaaaagaacagtgcatgttacacttccttcaaatgccaatttctgaaccgtttcttgatggcgatgatttcaatgaaacaccccagaagatcacaaaacaggattcagcagaaactggtccttctgatgtacctgacaagatggatgtagatggtaatgcggaaggaaaagagagcactgatgaaaaagcttacaagaaagcagattccagttccgcagaaacaagaacaaaattagctgaccaaaatatttctgctaaagaggatactatgaaattaggtgatgatgacctagttgcttccattgttgatgaaccaaataaatcttcattggtggatcctgcacataagaagaattctgctaatgctgatgtctctggggaacacccatccaactttattactaatatcctgagatccacttttgaagcagttgaccactttctgggtaaagaagacatgggttcgtttgctgaagcaggaaatcctgtgatggcactggctgcgtttcttgcttctcttgtggaacgtgatgatgctgtttcttcatgttgtagttcgttgagagctatatcagagatgtctcctgctctccaactggcaactgaacactgttttattcttccagatccaccaagtgacctcaaagatccggcttccactttcagcccttgcgcaggcggtgagagccaagaaggtgctgatactactcaaaatgtgaatgataccgataaaaacaacagcgaaagggaagatagtgatttagctctggagaaggagagtgctacattcacctcacagaagcagcacctggaagaattatctgacgcaaaggaaacatttattggaggtcctgaggcagaggccaaatccaacagcacaaaggattctgacaatccaattgctaaggtggggagcagtgtagcatctgacaagatgagagatgggtgcaatgctaatgccattccgtgtcctgctacttcaaatcatacaactgaacccagctccgtagcttcccaggaagccagtccagcaagtacaaaagacacagctatccctgaacaagttgaaagaccaagttctgaggaattactagctgatgtttcacttccacaagggaaggtagagccgaagaagactgaacctgcacctgctgcctcgtctagtatccaacagcatgggtgcaaacaagctggaaatggcaacactgaacctaaaagcaaggaaaacgctgcggccgatgatgaccccataacaaggctacagcgagcggccggtactgccatttcggcagctgcagtgaaggccaagttccttgtggagcaggaggagggttacattcggcagctagctgcacttgtgatcgaaaagcagtttcagaagatggaaacaaaaatgtcgtttctcaccgaagttggaaacctggtgttacgatcgagagatttgacagagaggatgcggaagaagcttttgttggagcggagcatgataatcgcttctcgaatgggtgcagcagcggcttccagaacaatccagcacggggctccggtgaccaccagactcccagtagggcatgtgcatgccttgaatccgcagctgaggcgcccttgaagctttttatagtatgtatatgatcagtaagactggcctatgtaggaggtgtgctaatccgcctctgtataaaatgcagtgtactgtagacgcgtctagggttctggagtcagtaggctttgatgctcaccacaccacacgacttggcttttcttttccttttcgtttaaccaagagttttcttctttg

SEQ ID NO: 5807 - DNA, 1382 bp, Zea mays
  Clone ID: 700473317_FLI
cgtgtgcttctactgctcctcgatttgatcaccgattaggggaggcggtttaccagtgagcacgcgcgagagataggataggaggaaagggaagctagcggcttcgctctcgcggggagatggcgcaggcggtggaggagtggtaccggcagatgcccatcatcacgcgctcctacctcaccgccgctgtcgtcaccaccgtcggctgcaccctcgaaatcatttcgccgtatcacctgtaccttaacccgaagctcgtggtgcagcactacgagatttggcgcctcgtcactaacttcctctacttccgcaagatggatttggattttctattccacatgttctttcttgcacggtactgcaagcttctggaggaaaactcatttagaggaagaactgctgattttttttacatgctcttgtttggtgctactgtcctaactggcattgttctgatcggagggatgataccttacatttctgagacatttgccagaattctgttcttgagcaattcattgacatttatgatggtttatgtctggagcaagcacaacccttttatccatatgagctttctgggcctgtttacctttacggctgcgtacttaccatgggttcttttgggcttctctatcctcgttggaagcagcacatgggtggacctcttgggtatgattgctggacatgtgtactacttcctggaagatgtatacccacgtatgactgggcgtcgccccctaaagacaccgtccttcattaaggcgctatttgctgatgacaatgttgtggtggcacagccacccaatgctgggattggtgctggtgcaaggttcggtgctattggtgtagatccccaggctcaatgatgaattactttcagtgacctgagggccgaggctgtgactgatctgggatgcggcagtttgtattctctgcgcaaattgcggaactgtacaagccattgttcttgtgtatttatacaggctagatgagagttattgtgcataacaaaaagattagtagtatcggaggcggctaagtttgtcacctgttggcagggcccggaggaaaatggatcgtgatgggcaaacaggccaacccctgttgcagaaacttgttcatgtgacggtttaacatctgacctgctaccctttcatgcatcggtgaatttagtctaggaaactgtttgaagtggggaaatttggtgctttggcagcgagaatttggatggagcgctgtaattgcagaatggtgcaaggaatgactcctaacattgtggacgcctggatggtgttcgttttccttcctgattctgctgtgttcaccgatccggatgatctggtctcctggaagcagtctttgtccatttttccttcatc

SEQ ID NO: 5808 - DNA, 2245 bp, Zea mays
  Clone ID: 700473318_FLI
cccaaaccccgggccactgctccgctcctcctccttgccgccgtgcggttgagcgccgacgagcaagcccgacgccaccctatggctatggaggtccgccgcagggttccgccgccgcacgggagcgccccacggcgccagcaggcgaccggcggcgaggggcagcgggtgcgtgtgcaggcgggggacgcgctgccgctgccgatccggcacacgaacctcatcttctcggcgctgttcgccgcgtcgctggtgtacctgatgcggcggtggcgggagaagatccgctcctccacgccgctccacgtggtctccctcgccgagatcttcgccatctgcggcctcgtggcgtcgctcatctacctcctcagcttcttcgggatcgccttcgtgcagtccgtcgtctccaacagcgacgacgaggaggacttcatcatcgactcccgccacggacaggcgcgggcgccgccgccgcccgcgccggcggccccgtgtgcgctgctggggagccccgccgccgcgccggagaaaatgccggaggaggacgaggagatcgtggccgcggtcgtggcagggaagatcccgtcctacgtgctggagactaggctgggagattgccgccgggccgccgggatcaggcgggaggcgctgcgcaggatcaccgggagggagatggacgggctcccgctcgatgggttcgactacgcgtccatcctcggccagtgctgcgagctgccggtggggttcgtgcagcttcccgtgggcgtcgccggcccgctccttctcgacggccgccggctctacgtaccaatggccaccaccgagggctgcctcgtcgccagcaccaaccgcggatgcaaggcaattgccgagtccggtggggcctccagcgtcgtgctcaaggacgggatgacgcgagccccggccgtccggttcccatctgcacgccgcgccgccgagctcaaggcctttttggaggacccagcgaactttgacaccctggctatggtgtttaacaggtcgagcagatttggaaggctgcagggagtgaagtgtgcgattgcagggaggaacctttacatgaggttcagctgcagcacaggggatgccatggggatgaacatggtctccaaaggtgtacagaacgtgctggactacctccaggctgacttccctgatatggatgtcatcagcatatcaggtaacttctgttctgacaagaagtcagctgctgtgaactggatcgatggccgtgggaagtcggtggtttgcgaggcggtaatcaaggaagaagttgtgaaaaaggttctcaagacaaacgtacaggctctcgtagaattgaacgtgatcaagaaccttgccggttcagctgttgctggagctcttgggggtttcaatgcccatgcaagtaacattgtggcagccatcttcattgctactggtcaggaccctgcacagaacgtggagagttcccagtgcatcaccatgttggaagctataaatgatggcaaagatctccacatctctgttactatgccatctattgaggttggcacagttggtggaggcacgcagctggcctcacaatctgcctgcttggacctgcttggcgtcaaaggtgccaacagggaatctccggggtccaacgcgaggctcttggccacggtggttgcgggtgcggtcctagctggggagctgtcccttatctctgcgcaggccgctggccatctggtcaagagccacatgaaatacaacagatccagcaaggatatgtccaagacccttgcagaggaaacagacaaacccaagaaatgctgaataatatcaagtagttgttctatagccctttgggagaaaaggagcagaaagggtcgtacaggatgactttcttgcggcatgctcaggtggaaaggggggaaaaagaccttcaggcgaaaagagataattcagtcgccttgtcatatttaccaggcggtgagacctgttgtggatcctggagtatgacctatttaatttgttgatgttgttgttatagttcctctaccgtacttgaccccgtttgcatcttgttttgaccgtcccatgggcattggagaatctgaccatgggttttgtcccaagcttgcatcacactggggggacctctgctttgcggcggccccgtctcagaaaaaaaaattgcgctggtaactgccgggtactgtgtatttcagctttgaaacttttatccaatgcttttgagtcg

SEQ ID NO: 5809 - DNA, 1434 bp, Zea mays
  Clone ID: 700473376_FLI
gttgaccatcctgttgaactcctggacgaagtggttgaccacttcttcctcttgaactcctggacgaagaacaagaaggatatcactggcaaccccagggctctccggaggctgaggaccgcttgtgagagggcgaagaggactctgtcttccactgcccagaccacgattgagattgactcgctgtatgagggcatcgacttctactccaccatcacccgtgccaggtttgaggagctcaacatggacctgttcaggaagtgcatggagcctgttgagaagtgcctgagggatgccaagatggacaagagcaccgtccatgacgttgtacttgttggtggctccactaggatccccagggtgcagcaactgctccaggacttcttcaacggcaaggagctgtgcaagaacatcaaccccgatgaggctgtcgcctatggtgctgctgtccaggctgccatcctgagcggtgagggcaatgagaaggtgcaggacctgcttctgctggacgtcacccctctgtccctgggtctggagactgctggaggagttatgacagtgctgatcccgaggaacaccaccatccccaccaagaaggagcaggtattctccacctactcggacaaccagcccggtgtcctgatccaggtctacgagggtgagaggacccggacacgcgacaacaacctgctgggcaagttcgagctctccggcatcccccctgcaccccgtggtgtgccacagatcaccgtgtgctttgacatcgacgccaacggcatcctgaacgtgtctgccgaggacaagacaacggggcagaagaacaagatcacaatcaccaacgacaagggccgtctctccaaggaggagatcgagaagatggttcaggacgctgagaagtacaagtctgaggatgaggagcacaagaagaaggtggaggccaagaactcgctggagaactactcctacaacatgcgcaacacgatcaaggacgagaagattgcgtccaagctgccggccgatgacaagaagaagatcgaggacgccatcgacgcggccatcagctggctggacgccaaccagctcgccgaggcggacgagttcgaggacaagatgaaggagctggagagcctctgcaaccccatcatcgccaagatgtaccagggcgcgggtgaagacatgggcggcgctggcggcatggacgaggacgcccccgctggcagcggcggccctggccccaagatcgaggaggtggactaagcggtttgttgtcagtcttgagcgtgctgcagttgctggctggcccagtcgctgccgcgagttatcgtcgtcggtcggtgcggtgtgtccgcttaaactttatttgtggtgggctggtacttttgtggtggttatttttttttggacctcgtgatagtcggtcggttccatgttatc

SEQ ID NO: 5810 - DNA, 485 bp, Zea mays
  Clone ID: 700473457_FLI
ggacgccggagatgagatcaaggaagcagctgctgcccccaaagaatccgcccccgagggccagtaagacggatccgatctcccgacctgatgcgtgtctgctgatgtcggggagtttaccaggactgtgccgttcttgatttctgatagcttatcttctagtacacctcgtgttgttctcttcgtcacggcgccggtgcgtgtgcgctgaagctgcctgccattgccattgccgctgtttttaattaagcacacactctagatgttatgcccgcatgctatgtttcgattctcaaagttgataaatgatggctggatgctggttttcgtgctccaagcctgctgcttcttccagggaaaaaaagacctgcccttgttgcagcgttgttgtttagaatgacctatatttgactggtattctgttacggtggctttgcaaagctgtttgtttggtttaatgtctcggaataatatgaattggctgc

SEQ ID NO: 5811 - DNA, 1487 bp, Zea mays
  Clone ID: 700473493_FLI
ctggctgttccaagttaagtaaattggatctagagggtaacaagcttgtggcactttctgaaaacatgtttgtgtcatggacaatgctcacagaattgaatctcgcaaagaatctacttacagccatcccaggtagcattggagcacttccaaaactaatccgcttggacatgcatcagaataaaataacatcgattcccccttccataaaaggttgctcttcgctagccgagttgtatatgggaaataacttattgtcttcaataccagctgatattggcacgttatcaaagttaggcatacttgatctccattctaatcagctaaaggagtatccagttggagcctgcaacctcaaattatctttccttgatctatcaaataactcattatctggtctaccagctgaactaggtaaaatgactaccctaagaaagcttctgcttactggaaatcctatgaggacacttaggagttcattggtttctggaccaacaacaacattgctgaagtatctgcgcagccggctttcatccgatgaggaagcatcaggatccagaagcaccccaactaaagatgaccaaattgctgcagcaaggcgcttgtccttatcttcaaaggaactggacttgagtggccttggagtgaccagtgtaccagctgccgcgtgggagacaagtgatgtggtgaaactggatctttctaaaaattcaatagaagatctaccaaatgagttgtcattatgctcatcacttcaatccttagttttgtctaataacaagataaaaaggtggcctcacacagtggtttcctcccttccctgtctgtcttccttaaagctggacaataaccccttggtagagatatcatccactgatcttgtgcctctgtccaaacttgaagtacttgatctaagtggcaatgcttcagcacttcctgaaccttctgcagtttctgcattaccacagctgcaagagctttacctaagacgaatgaaactccatgaatttcctaatggtttgctgggcctaaaactgcttaggattcttgacctgagtcagaatcaccttacaactgtgccggagggcatcaagaatttcactgcactcattgagcttgatctgtctgacaacaatataacagcactcccagcggagctgggattgcttgaagctaacctgcaagtgctgaaactggatggaaatccgctaagaagcataagacgaactctgttggagcgaggaacgaaagcagttctcaagtacctcaaagaaaaattgccgtctgaataatatttatagaacaaactattgttggagtaatggaataaaatgtttttttgccactgtatctcagttttctggactgaattttgtgcaaaagtatctggaccttgtgtgagaagagagctttgtgagtgtgttgttggatatactggttatagtccacatgttttattggaacaaaaatattttctctgttcaatc

SEQ ID NO: 5812 - DNA, 983 bp, Zea mays
  Clone ID: 700473501_FLI
ataagatcgagaccgccatccatggaccagtacacgattagcgagcaatataatcacacacttcatcaaacccatacacacgaaccgtaagtacactacacactccctgtccctgggagtcagagagacatggcgcggcagcatattgcaccgtcgcggcaacggctgcacggtgctccggcccctacctacgccgtcgtccgttcagttccccggcgccggcttgccgccgaatcccttcttgcgctcctcgatgaagctggaggagcgctcgttgatgttggacggcacccttggcgcctgcggcatccgcggccggagcccgctccgcctcggcacccgggcgccgctctgctcctccgctccggcgaccgacgacgcctgccgcttccggaacagcgacttcttcctctccaacgaggcgccgccgctgccctcctgcgcaggacggtcctccttgatcgtcaccgtcctcctcgtcaccttcgtctcctccgccttcgccaccgctggcgccgcggcctccgcttccaccgggccgtcggccgcagcagctccgtcctgcttccgctcaggatcaggaacgcccctcgccgtcgtcgcggcgctctcttccaagacggtcgtcgcgacgccgctggggcccccatcgccatggccgccgagctgctggaagtcgaactcggccctctcgatgggtatggcgaactcgtcttcttctatgccaccgtcgcctcctcctccctccgtcggcggcggagggtggccgccggcgccgttgctccttggcccctcggcgatgctcttcatcctgctcaccgacaggttcttggccaggaacgtcaggaaccggtcgcacatgccgccggccgccctcgtcgctggctccacgtcgccgccgccgctgcctttctccgccattaccgcgcgcttgttgtacttgtacctggcagcgtagtggcgcgaagcagcaaagaatccat

SEQ ID NO: 5813 - DNA, 1061 bp, Zea mays
  Clone ID: 700473568_FLI
gtgatattttctgtcttccatatctccccagaagtcgctggacatctcctaaataatcctcagccgttacttctgctagtccgtgccatgcttatactggtgatcaagatgcctatgtctccaccaccgtcgctcagctgcttgcctctatgttggctggccggatctactgtccgacgcgccactgtttgcgctgtgcttaaggtcctactcaccggtcttctcgtcgacagtgccagtcgtgtctcccgctacgctgacactttttctccatcgctcgactccatgctcagcgctctcaccatcaccgcgcctctcttcgccggtgttcgccgggcatacgctcaacctcgccaccgtgggacttacctcgccttcaaaccgtgttcgccgcagcccagccatcgtctacctctacgctcagcacgaaaccgctcgccctacagcctcgtcgcgtcaccattctgcaggcactgagctccacccacctcggtgaaggccaccgtcccctttttcactgtgcactcggcatcagcttcctggtgcacaccgacacaacgctctggtcgtgcgccctccatcgcacgctcagacacttgcccctgttcgtcacctcgggactttgccgtcacccgtacttcgttggttgtcaactttgctggctgtgttcgacctccagccatgtcaccatcgtgcccttcattcgttcgaagaacacctagaagaagtgatgtttgaagaagttcacttaagtgcctgttgattcagtggtggaggtttatctaactacttaccagagtagaataattttaggatcttctcctgcaataaggagaagttttattcccttatctttgggtaagttacttcatgtggaggacttgaagcttagaaggtttttatatatctcttatggaaaggcttcccccttccaattattgtaataagttatgcactttgagtactatcaagacttgtaataaatacatctcattctaccatgtaaaacttgagttctggaatgtaaactgtactttgtaaaagtcttccgctctatctcc

SEQ ID NO: 5814 - DNA, 1235 bp, Zea mays
  Clone ID: 700473576_FLI
caggcagtgactctgaaagcgaatcagaaaaagttggcagccctggaaagcttgcgaaggggactaagaaacctgatcagctggtggagcaagaaaagagtgatgttattagtccagctgatgccaaccgtcctgctgctattgtggggcttcatggggaggacagtgagtcaaagcctgcaccagggggggaaaactcagaacccgatacacaagtctcaccagacaggctattgcgagcagcccttttgaggagccgttatgctgatgtgattgtcaaagctcgtggcattcttagtcagggtggagacaaacaggaggagctggaaaagctacagaaggaagagaaagagcgcttgttggctgaaggtactgcagccatggaggcttgtagagccgaagctgaagctgaaaagaagcgtaaacggaattttgagagggagaaggctcgtcaggccctacaggagatggagagaactgtagaaattaatgataacctccatctcaaggatttggaattgcttggaacagccacaacagaacatattgtaagctctgttgatgagactagtccagaacgctctcatgatggcatggccggctatcatccaggagctgtcaatcctttggagcaacttggactgttcataaaggtagacgatgaggaagacgacgagcagtgttccctgcattaaagaaagaagagaaaggagaaatcagctgatggtgctgtgtttttccatgccctgtcacgggctaggggctggtgccaacctattgatccaaagtgatcacctgttgcgggccatcatgtgtggcaatggttctaaactggggtggtgagagccgtccattttgttaaaaatatgcatgggaaggatgaagatcatcttgcatagtcatttgcttccaggaggcgcacaggaggtggagtaaaaacgaacgtatttatggtgcctagaggacggttttttcagccactgccaaaacggcttgaatgacgccaccgaagtagtggagttcaaatggctcattgtttgccgcaacctcaatttcaagcgggtttgttcagcggcttatagcttcttctctccttttgttgtctcatctgttttagattgtagaatttgggctagttgcttcctgctgtaaatccgaattttgatgtagtgacggaagtgctacctttttgttgagcatgatcgaaaagtttacaagaaaaatcgtttttttgt

SEQ ID NO: 5815 - DNA, 580 bp, Zea mays
  Clone ID: 700473586_FLI
aattagcacatggagaaggtgctcttatctggagctctaaaagattggtcaaagagctaaaggaatcggagaaggaactcgatctagaactgaaggaaaccaggtcgacatcgttgcaaggaaaactcctgcagcacaagctgaacccaaaggttgtgcgcgcactgaaaggtcttaggaacaagcttgaagaacaagagcggggaaagaagtgaacaggaaccactggttgacaggaaagagagcaggtgtacagaagtggcgtttgtgcggccgacggacatcaactaacactggaggctggatccactgacggggggagaggagagctaaaagttcgatgccaaacatcatgtaaatggatctggcttccttttaggtgcagtcagttttgtgaaaaatagaagcactcacgcatggtagcagcctgttattgttgttagctgctgacgctttgaggcatgtcaacaagtagagatggattgcaaatcctaatcaatgtatattactttgtgtgtgtgtgtgtttttgttgttattgcgataacaatcaaaaccttcctgtactggttcaccgcacc

SEQ ID NO: 5816 - DNA, 1711 bp, Zea mays
  Clone ID: 700473587_FLI
ctttgcccttggcccttggcctcctttcgtcgagagagagagagctgtgctggctgctgctgccccgggtccgtcgggacgggtagatgaggaggaagagaacagctcgtgactgactgactccctccctcagcgtgagtgggttgcggacgaccacatccatccgttcccaccattcccttctcccacctcgcctcctccccttgcccttgcccttccacagccggaatcagggggtaatgggccagatgggaggacccgacggcgacggcgacggcggcgcgggcccgcaccaccagtaccactaccaggcgcttctcgccgccgtgcagaaccccagccagggcctgcacccctttcccctccccttccacgtgcctctgcacgcaggagcgggagcacccgccgccggaccaggacctggagctgatgctgatgcctccacacacaatgccaatgccgctcaccactctcaacctccaagaggtttcaccgattggagcgcgtccaacagtgccttcgccgccgttgcctcacagcccgcacctgctaccaccaatacacccttccattacaacctctcccagtcttatgccctatggacccattacatgcttaacaagaatgtatcctactctacttaccctacaccacatgaggagcatccccacccattgcgccatacccacatccaggagaatccccacccattgcgccatacccacatcccggataaggattcaggttgtgcatctagccttggatttgactctttcactacaatgtcccttggaccaaatatttgttcccacatgacgcccatggaaggatctatatctgccaaagaacccgagaattcagaggatttgcctgcaatagttaggagcagtgatgaaatggacactagaaacagtggcaaagttcatcgtgacacagttggcactcttcctgagtcgaagcagagccatgaaagttgtgcttccgtgaataataagttcaactctggagagtaccaagtcattttgcgcaaggagttgacaaagagtgatgtcgcaaattccggacgaattgtgcttcccaagaaggatgctgaggctggtcttccaccattggtgcaaggggatcctctgatactgcagatggatgacatggtgcttccaattatatggaaatttaagtatagattttggccaaacaacaaaagcagaatgtatatcttggaagctgcaggtgaattcgtgaagacacatggccttcaggcaggggatgcgctcattatctacaaaaactccgtgcctggcaaatttattatccgtggggagaagtccattcagcagacaaacccctagacacaatttgatgtgactgtgcaccatcagatatggcgtccgaggatacaccatatgttcacgttccagttgttatcgacttttctaatgtctcaccgtcacactgagataagtcgaaaaaggagatacaccgtgtggatggagaaaaggagaagaaattttgggagacattggaagtgctgccagtgagcctacgtctaagctcagaacaaatggtttatgttttttcccctaattcggtcgtatttggatgcttgagtcctgcattgcatgatgaagaacattctcagtctctctttttttgtaaatattttaattcaggatctataaggtaaaggaagtggtttggaagcagatttctg

SEQ ID NO: 5817 - DNA, 788 bp, Zea mays
  Clone ID: 700473589_FLI
ggcgcagccgccgccgccgccggagatggagagacctgctgcttccggggcgctcatctacgccatggtggcgcggggcacggtggcggtggcggagcacacgtcctacacgggcaacttccgggacatcgccgcgcagtgcctgcacaagctgccggcggggaacaaccggttcacctacacctgcgacgcccacaccttcaacttcctcgtcagcgacggatacgcatactgcgtcgttgccaccgagtcggctgggcggcagatccctatggccttcctggagatgataaaggaggaattcaacaggagatattcaggtggcgaagcaggaacggctacagccaacagtctcacccgagatttcgggcccaggcttagagaccagatgcagtactgcacggatcacccagaggaagtgagcaagctgtccagagtgaaggcccaggtggatcaggtgaaaagcatcatgatggaaaacatcgacaaggcctttgatcgcggacagcagatcgacgggcttgtcacaaggacggagcagctccacgacgaggccgttgatttcaggcggcaaggcgtgcagctgcggcgcaggatgtggtaccagaacatgaaggtgaagctcatcgtcctcggcgtcgtggtcgcgctcatccttatcatagtcctctcaatttgccatggcggatgcagcaagtgattatttttttttttaaaaaatgtgctggtgctggtcttttgctcgctacctataaacatatctaatttagagattctacttttttact

SEQ ID NO: 5818 - DNA, 1121 bp, Zea mays; identical to SEQ ID NO: 188
  Clone ID: 700473710_FLI

SEQ ID NO: 5819 - DNA, 1625 bp, Zea mays
  Clone ID: 700473780_FLI
tgattgtgaaagtagtttttttccacttgatttacatcttttctagtctgttctcacctattagcacgttttctatctacagggaaggatgtactagccaaagcaaagacaggaactggaaaaactgtagctttcttgctaccagcaattgaagttgtttcgaaattgccacctgttgatcgtgatctaaagaaacctcccatcagtgttgtagtagtgtgccctacacgtgagcttgctgatcaggctgctgcagaagctaacaagcttcttaaatttcatccatcaattggagtacagcttgtaataggcggcactagaatggcacttgaacagaagcgcatgcacactaacccttgccagattctagtagctactcctggaaggcttagggatcacatggagaacactccagggtttgctacaaggttgttgggtgtcaaagttctaattcttgatgaagctgaccgcttgttagatatgggattccgatcagatattgaaaaaattgtggctgcactaccaaaacagcgtcaaacacttctattttctgcgacagttccagatgaggttcgtcaagtatgtcatattgccatgaaaagagatcttgaattcgtcaacactgttcaagaaggaagtgaggaaacacactctcaggtgaagcaaatgcatttaattgcaccactggacaaacaattctccaacctatatggtcttctaactgatcatatttctgaaaatgttgactacaaggtgattgtattctgtacaacagcaaaagtaacaagccttgttgctgagcttctgtctgagttgaagttgaatgtacgtgagatccactccagaaaacctcaaagctacagaactaggatatcgaaagaatttaaggagtcaaagggtctcattcttgttagctctgatgtatctgccaggggtgttgattatcccaatgtcacactagttgtgcagttgggggtgccaactgacagagagcaatatattcatcgacttggtagaactggtcgcagaggcaatgaggggacaggaatcttactattggcaccatgggaagaatatttccttaggagcatcaatgacttgcctattacagaggcaacacaaccattaattgatctggatactaagaaaaaggtcgataaggctcttgcacatgtggaggttaaagacaaggaatccgcttatcaggcgtggcttggttactacaattcaaataaggtcattgggcgcgacaaataccagcttgtatcacttgccaatgagttcagcagaagcatgggtctcaacaaccctcctgcagtgtctaagcttgccctcaggaagatggggctgaacaacattccaggtctgagatcaaagtaaccaattgccatgtatactgtatacatgtcttgaagtcttttttgcacatgatctgacatctgagcacgctattccatactgatcgagttgagttagtttctggtaataaatttattgtacgttttatgcttgcagaagtgcacgaatattcataatatgttctcattcgtttgttctgttactgagataacaaatgataaagatgaacgtgttttgctattagtctcaagtatatgttgttgaat

SEQ ID NO: 5820 - DNA, 880 bp, Zea mays
  Clone ID: 700473795_FLI
gttcctccggtggaagctcccggcgctcaaatccggcgaaagaaaagaggggaaagaggcaggagccggctcaaatggacagcggaagcgattccgacggcgctcccgaggagctcaccgccgtccagggtgttgagaagcacgaagagatcagtcaagttgagaaggatagtgccatcagagtaacacgggaaggaaaggagcggaggaaacgctgggcccaacgaagaacatcctctaaaccagataagaaggcaccaaaggaagtagtagaagatgaaggtaccaaacaaagcgaggagacagatactatgcctggaatgctccccactagtgtaattgaaattctagcagctcgtgagaagcaaaccttcgcatcagattctgaggaagaaaatgtaaagcagaaggtccagaaaaggaagaagaggatgaaaactgctgggcctgaaactattctgctgaaagatgtccggtcaacacagcacgtgaagaacgcccttgatttcttggagcaaaggaaaaaacaggttccgagatcaaatgcagttttgaagaatgccagtaaggctttgcgtctcctatcttcgaaaggtaattttctaagttaaccgtgtggtaggatagcacatttttcagagtatgtgtttagaccatcatctcaacagcagatatggtcgagatactttggaccgatgtatttgaatggaatcgatctggcacgtgagatgtgatgcagtatatcctttggtgtggaagtgtgatgattagcacacgtgtgagttttagttatctatttttgtggatttgcgctgcaaatttctgaagaaaactctgaaagatctccaaattttgatagccatgtggcacttcttgtatc

SEQ ID NO: 5821 - DNA, 924 bp, Zea mays
  Clone ID: 700473796_FLI
ggaaacacttgctacaatgttagggatggggttggggatgctgttagctcaaattaccagagggcatgctttgagtgtatgggcatcttttctttctcttacgatgttccatatgtatgcaaattacaaggcagtgcagtcactttcactcactacgctaaactatgagagagcttccatcttgctacaatacttcaagggatgtggtgaagttcttgtgccacggaaggtttcccagcaggaacatattcttccttcttggtcaaactggaggaaactgaacagaattaaactgccacatgagcgtgtgcacttgggtgctaaagcctcgatgcttacacacagtgacatgttggtgattgcaaaaacaagataccactatgaaaacgcgaactactttttgctggataaacaaggcatcgtttacgttttcatccacaaggaggcaacaccagccgatgttttaaggtccttcgtacacgggctcgtgctagctagctcgacacagaacagcaaacctcagcacttagaggcccgtcgatggatggacgagatgtataccagttttatctcgaagctgcagactgaaggttactcgacggaacgccttctgtcgcattcgattctttggagggcacactggcttcacggacagctggatgagaagctcaagtaggaggaacactgcaagaccgcgtctgcttatccaagggcaggtatatcgcccaggacgcgattattagctagggtgagaacgtgttaattgttcgcttgtgcatggcatgactgcatgatgaaagatagatgcatgagctgcaccgagcaccaccaaatattagttaaccgcttcgaggttgtagcatatggacggacttcacgataaaagtgctggcctgtacgctcgagttcagcatgttaatggtt

SEQ ID NO: 5822 - DNA, 978 bp, Zea mays
  Clone ID: 700473850_FLI
aggaacttgactaccttgttggagctgttgccaacccaaagaagccatttgccgccattgttggtggatccaaggtctcaactaagattggtgtcattgagtcgttgctggcgaaggtcgatatcctcatccttggtggtggtatgatctacacattttacaaggcacagggatattctgttggaaaatctctcgtggaagaggataaactcgagctcgcaacttctcttattgagaaggcgaaggcaaagggggtttctcttttgcttcccactgatattgtagtagcggacaagtttgcagccgatgctgagagcaagattgtccctgccactgctatccctgatgactggatgggtcttgatgttggccctgatgccaccaaaacattcgacgaagcattggacaccaccaagactgttatttggaacggccccatgggagtgtttgagttccagaagtttgcagctggcaccgaggcgattgccaagaagctagctgagcttacaaccacgaagggtgtcactaccatcatcggcggtggcgactctgtcgctgctgtcgagaaggctgggctggccgacaagatgagccacatttcgaccggcggcggtgcgagcttggaactcttggaaggcaagactctacctggtgtccttgccctcgatgacgcctagatccgctgctgctgctgctactcaggttctgccagctttgcgtgtcatcttgtttcggaccttggtgtagcactgcaaggctaaggtttactcctccacacatggactttcgaggataggcttgccaccgtgttttgctagatgagtcgtgaaataagcttttacttcctcgctgctgtgggtgaagtgactggaattcggaaatttggaactaacaaaaccccccgtggatttgtatgatacgttttgttcgacagtttgcgtcccatctttcactgtggtatctggtatggtatgttct

SEQ ID NO: 5823 - DNA, 1490 bp, Zea mays
  Clone ID: 700473881_FLI
gcaggccgacgcgtcactcaaggctggtaaatggcagcgcaacaagtatgttggtgtatctcttgtgggaaaaactctcgctattctcggatttggaaaggtcggatctgaagttgctcgtcgtgctaaaggcttaggaatgcatgtgattgcacatgatccatatgcttctgctgaccgggctcgtgcaatcggggttgaactagttagcatggaggaggccatgacaactgctgactttatctcgttacacatgcctcttacgcctgcaacggacaagatgctcaatgatgaggccttcgctaagatgaagaagggtgttcgcattataaatgttgcacgtggtggcgtaattgatgaagaagctctagtcagggcacttgattcaggggtagtagcacaggctgctcttgatgttttcactaaagaacccccagcagctgacaacaagttggtactgcacgggaatgttactgtcacacctcaccttggtgccagcacagtggaggcacaggaaggggtggctattgagatagctgaagctgtcattggagctctgaaaggggagcttgcagcttctgcagtgaacgcgccgatggttcctgctgaggtgctgtcagagcttgcaccttttgttgtgctcgcagaaaagcttgggcgcttggctgtgcaactagttgctggtggtggtggtatcaagtctgtgaaagtgacctatgcatctgcgcgggcccctgatgatcttgacacgagacttctccgtgcaatgatcaccaagggattgattgaaccaatctccagcgtttttgtcaatctggtaaatgccgacttcaccgcaaagcagaggggagttcgcatcacggaggagaggatcctgctggacggctcacctgaaacacctatcgactacattcaagttcagattgccaatgtcgagtccaaatttcccagtgcgatatctgagactggagaaatcactgtggagggcagagtgaaggatggtgttcctcatctaacaaaggttggagcattccaggtggatgtgagcttggaaggaagcctcatcctctgcaggcaggttgatcaaccgggtatgattgggtcagttggaagcgtcttgggtgaggagaacgttaatgtcagtttcatgagtgtcggaagaattgctcctcgcaagcatgctgtcatggcaattggtgttgatgaggaaccaagcaagggcacactgacgaagatcggggagattccagcgatcgaagagtttgttttcctcaagctctaggcgcgaatgtatgtttgaagttgcaagcatggtgtgcaattttgatgtagctagcaatccggaggacggatggttctccttgaaataagcttttaggagtatttttgtagtggcgctcttgaatatggtctggtatcgatgcctacttttgaacggggtgtttattaataaaaacttatatatcaatgcttggctcattggttgattc

SEQ ID NO: 5824 - DNA, 1875 bp, Zea mays
  Clone ID: 700473983_FLI
cttggaagttgaacttggactggaccttaaacctcttcctcttccagacaagactagagaagatatatttcttctcttcaaactctatgaacctgaaaaggaacagctacggtatgttggtaggctctttgtaaaggcttcaggaagaccacaggacattctgccgaagctaaagatgttggcaggtttttcacaagatgatgatattgaactttatgaggaaattaagttcgaacccaatgtgatgtgtgaatacattgataacaggcttctgttccgatcttgccagcttgaagatggggacataatctgttttcaaaaatcttcaaaggcagatagtgctgaccgatatcgatttcctgacgtaccatcctttttgacgtatatacgtaaccgacaggtggtccactttcgttcactggagaagcccaaggaggacgattttttcctcgagatgtcaaagattttcacatatgatcaagtcgtggaaaaagtagctgaaaaacttggcgtggatgacccatcgaaaattcggcttacatcacataattgttattcgcagcagcctaagcctcagccaataaagtacagaggcgttgaacgtctactggacatgctgattcattataaccagacttctgatattctgtactatgaagtattggacataccacttccagaattacaagcgctgaagacattaaaagttacataccatcatgccacaaaagatgaggtgtcagttcacagtataagattgccaaaaaacagcactgttggcgatgtgctaaacgatatcaaaacaaaggttgagttatctcatcccaatgctgaactgagattacttgaggtcttttatcacaagatatacaaggtgtttgcaccaaatgaaaagattgaaaacattaatgatcagtactggacactgcgtgcggaggaggttccagatgaggaaaaaaaccttggtccctttgatcgattgattcatgtatatcattttacaaaagatactcaaaaccaaacgcaagttcagaactttggagaacctttttttatggttattcgtgaggatgagaccctatcttctatcaaagagcgtatacagagaaagcttaaggttccagatgaggatttctcaaagtggaagtttgcatacatttcacttggtcgtccagactattttgaagattcagatactgtagctttaaaatttcagagaaacatgtatggagcttgggagcagtatcttggactggaacatccagacacagctcctaggaaggcacacacaattaatcagaaccggcattcatttgagagacctgtaaaaatttataactaggcatgatagaaatttgagcaatgagctgccaagcaagggctaaaattgctgtcctgaaataaagcgtgccggggcatgttgctcaggtttttcgtggagctggtgagctagttcatgagactccaagtatgatcggggcggcttctcatctttccctgcttttccccggatacatataaagttgtgcagagatgaccccaccgaacaattgtctttagtagataagccagtacttcccgttagatgactttatacagtcgaatagccggcattttagtcgatctttccgttctccagttgctgttggtgctaggaggccttgagctgttgagggtacttgccctgctgtatattatgacgtagagtgtacaagtctttgttgttgacaattacacggtgttttgtaatttcagtgatacacttccaggtccttcagtacgtacttgcctggatggtgtcaatttggcattctatgttagatattgatccatctgttctaaattaaaattataaggcagtttgacttttttaag

SEQ ID NO: 5825 - DNA, 1190 bp, Zea mays
  Clone ID: 700473986_FLI
ctccaggtcgcgggagcggccatttctctggggcgggaccgcggtagagctctagctcttgcagcagtagaactctactgcagccagagttaagagaaatggataaggatggcagctccgagagaagtcgcccagatcatggtgatgtgaagatgctcaagttcagaccaaaggtgcctcgacagaagcaaaagccaaagcaacaagaccctaagccaattgatgaagatgtgatgaagatattgaggacttgccaagtggctgcaaaaagtgcaccaaacacagaagatgagtgctcaccacagaagaccctctcgacgccaccttctgcagatgttgtttgcttgtcaccagcgcaactcggagtgcaaaaacaaaatcaattagtgagtgcccctagaagccactccaaattcctagatccttccctgttcctgttaattcaggattggtttatgaagaagagagtagtgatgacgacgacgataatgatagtgacaatgttgggttgctggagactcagccagattcaattgaaagtgaagctttaacatgtccggccgaggagcttgatttgcttcagcaagaaggtagcaaagaaagaatgttcttcttccagttcccaaactctcttcctttacccaaaaggtcgtccagtgccggcaaggaggtgatggaaggatccaacctgcagcagctgcctcagggttatttgggcaaaatgctagtatacaagagcggcaagatcaaaatgaagttaggagacatcatctttgatgtgaacccaggagtagaaagtaggatgctgcagcgtgcagtagctctcaacactcgagacaaacactgttgcttgcttggagagattgagaatcgtcatgttattgtgactcccaatgttgattctttgttgaacgacaagtagggaccaactgtagcagctttgtcacagattgtgtgtagacctgtagatatgcagggttagtgacatctgtagaaattatatcagctctgtcaaatgatgtataggattttagttgtgtagtgttgtgaacgttttattgtgattgcagtgctatgttagttttagaactgcatgcagctccctgtggatgaatgtttgtaaggatcggtatttgaccttgattgtattggaaggcaaatataataaaaatcacgtcgttcttgtgggc

SEQ ID NO: 5826 - DNA, 1951 bp, Zea mays
  Clone ID: 700474023_FLI
gcacctcactcttcactagcctctgctcctctgaaatggcggcggcgacttcctcttccacctacctcgccatcggccgcaaaaccctaaaccccgccccctccgtagccacagccgccacctccgtctccttccccgccacgcagcacccatgcctcgtcgccgcctccgcggaccgccgccgcgccgtggctgcgaaggtctcgtcgccgtcggtcatcggcaccgccatgccgtcgctcgacttcgagacctccgtcttcaagaaggaaaaggtgtccctggccggccatgaggagtatattgtgaggggtgggagggatctgttcccgctgttaccggaggccttcaagggaatcaaacagatcggtgtaatcggctggggctcgcagggtcctgcgcaagctcagaacttgagagactcacttgttgaggcaaagtcagatattgttgttaagattggtctccggaaaggttctaaatcttttgaagaagcccgagcagcaggattcaccgaagagagtgggacgctgggtgatatatgggagactgtatcaaacagtgatcttgttttgctactgatatctgattctgctcaggctgataactacgagaaaattttctcgcacatgaaaccaaacagtattcttggtttgtcacatggatttctccttggacatttgcaatctctgggttttgatttccctaaaagcatcagtgtgattgctgtatgccccaagggaatgggcccatcagtcagaagactttatgttcagggcaaagagatcaatggtgctggtatcaatgctagctttgctgttcaccaggatgttgatggaagggcaacagatgtagctctagggtggtcagtagctttaggttctcctttcacatttgctactactctagagcaggagtaccggagtgacatttttggcgagcgaggtattttgcttggtgctgtccatggcatggtggaggctcttttcaggagatacacagaacaaggaatggacgaggactcagcatataagaatactgtagagagcatcactggaattatatcgaaaactatttcaaagaagggtatgcttgaagtgtataactccttgactgaagaaggaaagaagcagtttattgaggcctatagtgcagcatattacccatgcatggacatattgtatgagtgctatgaagacgtctcttctggaagtgagattagaagtgtggtgttggctgggaggagattttatgagaaggaagggctccctgctttccctatgggaaaaattgatcaaacacgtatgtggaaggtgggtgaaagggtccgttcaaccaggccacaaggtgatcttggcccactgcatcccttcactgctggagtgtatgttgcactaatgatggctcagattgaggtccttaggaagaagggccactcttactcagagataattaatgagagcctgatcgagtccgtggactcgttgaacccgttcatgcatgctcgcggtgtggccttcatggtcgataactgctccacaactgctcgtttgggatctaggaagtgggcaccacgcttcgattacatcttgacccaacaggcgtttgtgactgttgacaagaaagcaccgatcaaccaagacctcatcagcaacttcatgtctgaccctgtccacggtgccatcgaagtctgcgctcagctgaggcccactgttgacatctcagtgaccgctgatgctgatttcgtgcgtccagagcttcgacagtcttcataagcttgtatggatccgcagtgtgactgcaatggctagtttgtaagaacttaatatgcctgggcttttgaactcttagattgtgcctgtattgctcgtgcttgaggaccagaaaagtaaactcttggcggtgtggtactgttgtgatttgcaagaataaaaataaatttctgttgatc

SEQ ID NO: 5827 - DNA, 2323 bp, Zea mays
  Clone ID: 700474048_FLI
atgagcttgatggacaagagacaactagtatacgaagttgcaagatggccgcaaggtgccgtggagattcttaagtgctggactcgaagggaacttcttgagcttatctgtgttgagttgggcaaagagaggaagtataccaatgtcccaaaagctaagatgatcgcttatctcttgaaattagtttcacgaaagagtggaaagaatgggcaactcaaggatgataatgcaaatgttatgttattagagcaggataacaaagatgaaacacaaatgaaggaatctgaggaacaagaacaatcacgaccactcaaaactgcaaactctgactcatcaatacgtagagaggctcatgcctgttgttcagtggtgtgcagcaatgttgcatgccaagccacacggaatgcaggagataattattgcaaacgttgctcttgctgcatttgcaataaatatgatgataacaaagaccctagcttgtggttggtttgcagctctgataatccatacagtggttgttcatgtggtgtctcttgtcacctaaactgtgctctaaagaataaaaaggctggcattgtcaataatggctgcaacaagttagactgtagtttctactgtgttagctgtgggaaaatcaactggctaatgaggagtttgcagaaacaacttgcaattgctagggaggcaagaagagttgatgtgctttgtgagaggctgtcattgagccataaaatggtaaaaggatctgaacgttataaggaaataacgagcataatcagctcagctgcgaaaacacttgaaaaagaagttggtggtgcattagatcaggtttctgcgatcacggggcgtggcattgttaaccggcttacttgtggtgctgaagttcagaagctttgttcaagtgcattagaaattgtagactctacagtggatagcatcttggagttcgagtcaaataatagtccaaaactcttaggtccccagccccaaatcctttttgatgaaatcactccattttctgtggtaattgtgttgaactatcaggatagcatcggtaaggagcaggttgatggttccaaagtttggcaccgaagtgccaaggtttgcaactattcatcggagcccacatgccacatattgaggccaaatactaggagcctggtttctggtctgagcccttcaactgaatacttcttcaaggttttgccttttagcagcgtacaggggtttactgagtgggaggcaaaatgcagtacacgcagcctggaccatggcagcagccagtgctcaactcagaactctgagagcatgtgcctcaaagtggatccaatgcagcatcagaaaaaggatttgaatgtgcagaatcatcagagaactattcaatatgattcacctaaggggtctacaaattcaagtgagaacaatttattgtgtgaccggtattccaagcgggctaaggttgcaaggctagatggtgcaagtgacaatgatgaaagccagttgccgccaacttctgaagttttaccgtttgcaagctccaactactctccttccgaagctccaagtaaacctgacttgcttattggcaccccagattcggcatccaagaactatgtggagcagcagtacgagtactgtgtgaaggtggtcagatggttggagcatgaagggcacatggacaatgacttccgtgtgaagttcctcacttggttcagtctgaaggcaacagcgcaggacaggcgaatcgttggcgccttagtagatgttcttatcggtgatcctgcaagcttggttgcccaactggttgatgcattcaaggatatcatctacaccaaggagaagccctttcaaacacaacagaaggatgcacgctgcaagatttggcactagaaaccttcataactgctctgtgtcgctgtgtgacatcatttttctggtaattttctggcgactgaatgatgaactactgaagttatatcacctagcagattgcgtgcggattctgttgagatggatattgtgcactctcttaaaggttataagatgctgtagatgcttcatttggcattcaggtccatcagatctctcatttgttcattcaaattcagtcggtaggcagactattaatccatgaagacaatcatggtggaaccatgtgctggtaatcatgaatcggttctgagtttaggtttcgactagtaagtagttgaagcttgttagcagacaagcaactgtattcatatgtggaatgctatggtggatctgcaagctaactattgtgaattcatatcatgacttaagagatgtttattattattagttg

SEQ ID NO: 5828 - DNA, 2590 bp, Zea mays
  Clone ID: 700474077_FLI
atcctgaagttacccagaaattgaaggtgcatacttccgtcctgtgctactactgccattggagcgaagtatgatcctgaagttacccagaaattgaaggtgcattttgagaaagatccatatcctagccgtgaaacaaaagaaaatctatcagaagaactaggcttgacatttaatcaggtctccaaatggttctctagtactcgtcactattcaagggttgcttctgccaaaaaagaaatgcatcctgacagccatacttgtgagaataatgatgagacaactgtagacagcatgcaagcaaaacaacccaatgctggggtgatggaaaagttgacgggggatagaaatggcattgttcctgagaaaccgatggtgcaggacaatcttaaccaaggagcgatggaaaagttaactagggataaaaatgacattgttcctgagaaaccggtgatgcagagcagtcttaaccaatgtaataatgaagatataccgctttctggaacagaaattgagatggagtcttacgaacaagaatcatctgactcaagtgatgaagagtggtccatacttagcacaccacgaaaaacaagattacaagaccatggaaaatcatcagttactgaatcacttcgttctgcaaaacggtgttccagaagagcaccagctagggagcagaataatgaacgtattcagagtgagcagcttcatggttctgcaagtgagcagcaaactgaatttcttcgctccaatgtcagcagtggcaaggtctcaaaatatcattttggccctatagttagtcagaagcttaaggaacattttgaaaaagatccatatccttgccgtgcaacaaaagagagtctggcacaagagctaggactgacatttaatcagatcagtaagtggttctctggcactcgtcattattcaagagatgctgttgccaagaatcagaaacgcccgggagaaaatactactgtgaataataatagcacaacctttgatgacatacaagtaatagaacccaatgttgggttgatagataaaccagctgcagatgtaaatgacatgatttctgaaaagttgatggtccaaataaatcttaacgaaggcattgaagaagatatcccaccgagccaatatgccaggtgtgaagagaaaataactatgactccagctgccatctcaagggaagctggtcttccaggatatggtcctggtcctggagaaaactttcttcaggtcagttcaaggaatactagctgtgagcagagtgtgatactggctcctaccgctatcgcaagagaagttggtccaccaggatatgcgactggagaaaaccagggcaatggggctccatggaatacaagttatgagcgaagactatttatgaatcctgtgaccagctcaagagcagtcagtcctccaggatatgggcctgaagaaagccgaggcagtggcatttcctggaatacaagcagtgaacaaatattgtttatgagtcctacaaccatctcaagagaacttggtccaccaggatatgggcctagagaagaccagtgcagtggcacttcatggaatgcaagctgcgagttgggagtatttatgagtcctgtgaccacctcaagagaagacagtccgccaggatatgggcctcgagaaaaccaggagaatgacaatatgagatgcgagttgagaatgtttacaagtcctacaaccatctccagagaagttggcccaccaggatatgagcttactggaaaaaacaagggcaacggcgcttcatgtactacgaattaccagcagggagcgtttacgagtcctgaagccttcccaagagaagcctgtcctccaggatttgtgtctggagagaaccagggtaacgacactccatggtatatgagcagcaaacagatggcgtttacgagtcctacgaccaaccctagagtaggtccgccagggtatggacaggaaaaccagggcagtcgtgtttcttggaatacgagttatgagcagggagtgtttatgagttctacaaacatctcaagagaagccggtccgccaggttatgggcctggggaaagtcagggcaatatcacttcatggatttcgacaggcgggcagagaatgtttacaggtccttcaactatcccgaacgaagtcgggcagcaaggatatggcccttcaggaatcccgggaacggatggctcaaggagtatggacttgaaagcctttccaccaggatatggacctgctggagaaaaccagggcggtggtgcttcagggagcgtcataagcccccaagctcggtctgcagagaacgtagagttttcagacgacgctagaaaaaaggctatacagcgggagctgagacggcggcagaagttcaggtgatggccgtgatgcgaatttctgatcttgctcatcgaattttgactacggattactactttttaagactacatatccagtcttgatggctgaatgagtgacgaccctagttgtcgagacgcaaaaccttttgttgtatgtgttccttttacagacttccttggcttgtcatgaatttctaatgtgaacttgtgctgtg

SEQ ID NO: 5829 - DNA, 1284 bp, Zea mays
  Clone ID: 700474104_FLI
cctcgtttgccttgtttaccattcctccccaaaacacatcctgcgatcctcgaagcctccgccgagcatcgatcatgtcggcctactgcggcaagtacgcggatgagctcatcaagaatgctgcctacatcggcacccctggcaagggtatccttgctgctgatgagtcaactggcaccattggcaagcgcctttccagcatcaatgtcgagaacgtggaggagaaccggcgggctctccgtgagctcctgttctgctgccctggtgccctccagtacatcagcggtgtgatcctcttcgaggagaccctctaccagaagaccaaggatggcaagccttttgtcgatgtcctcaaggagggaggcgtcctccctggcatcaaggtcgacaagggcaccattgaggttgttggcaccgacaaggagaccaccacccagggccacgatgacctcggcaagcgctgcgctaagtactacgaggccggtgcccgctttgccaagtggcgtgctgttctcaagattggccccaacgagccgtcacagcttgccattgacctgaatgctcagggtctggctcgctacgccatcatctgccaggagaacggtctggtgccaattgttgagcctgagatccttgttgatggccctcatgacattgatcgctgcgcttacgtcactgagacagtccttgctgcctgctacaaggctctcaacgagcaccatgtcctcctggagggtaccctcctgaagcccaacatggtgactcctggctccgactctaagaaggtgacacctgaggtgatcgcccagtacaccgtccgtaccctccagaggaccgtccctgctgctgtgcctgctgttgtcttcctctccggtggacagagcgaggaggaggccaccctgaatctcaatgccatgaacaagctcagcaccaagaagccatgggccctgtccttctccttcggccgtgccctccaggcgagcaccctcaaggcctgggctggcaaggtggagaacgtggagaaggctagagcggccttcctcgccaggtgcaaggccaactccgaggctaccctcggcacctacaagggtgatgctgccgccgacaccgagagccttcacgtcaaggactacaagtactgagttgcttctctttgcgatcccgttgttttggaactcctgcctgcgagtaggttgctgagtgttgtttgcttgttagagcttttatattcggacatgaaaaaaacatgcttcctatgtggatgatggttatctttatattcgt

SEQ ID NO: 5830 - DNA, 1039 bp, Zea mays
  Clone ID: 700474107_FLI
cctatacagattcagaaacctgattgatgaaacggttgctgtagacagtcctaggaatagagtgctcaacaccataaggcaagtaaacccagcaattttcattcatggaattgtgaatgggtcatacagtgttcccttcttcatcacacgtttccgtgaggcgctgttccatttctctgcattgtttgacatgctagagacaactgtcccacgggatgatgcacagcgtgcactcatagagagggaaatgtttggccgagaggcactcaatgttattgcatgtgagggctcagacagagttgagagacctgagacatataaacagtggcaggtgaggaacctcagggctggatttgttcagtccccgttaaaccaagaaatcgtgatgaaagccaaggacaaagtaaaagacatttatcacaaggactttgtcatagatgaagacagcggatggctcctgcaaggctggaaaggaaggataatctatgcaatatctacctggaagcctaagaataactaggttcttggtctcacatgttacgtttcctattccattgatggtagcagctaattaaccagtcctgctatgttatagcatgtggaccttgacctgtgaacctgtctgatcaaggaaatggcttgaagacggataatgatcaacatggagctttgctagcttcacatctgtccagccagtactctgatagactgggtgtagacctctctaccttggtgttggtaccattacttctattaaatttcgtagttttcttctttccatttacttctatgatcggcctggcgtcctattagcaataaccagatcactgcttctagttaattggttagccaaactacctactatcttgagcttagtatttttgacttgtatccatccatgttgaacattatttggttttcagcaccagcagataaaaaattccccaacgaggaagcatgaagcatctaaatttgttatacgagaatggacgctgctgtttgtgtggaatgtagtatctcatggagtgctttgcctttg

SEQ ID NO: 5831 - DNA, 553 bp, Zea mays
  Clone ID: 700474231_FLI
cccggcgttcgcgctggtgaacaaggcgaccggggaggccatcaagcactcgctggggcagtcccacccggtgcgcctggtgccctacaacccggactttttggacgagtcggtgctgtggacggagagccgcgacgtcggcaacggcttccgctgcgtccgcatggtcaacaacatctacctcaacttcgacgccctccacggcgacaagtggcacggcggcgtccgtgacggcaccgacgtcgtgctctggaagtggtgcgagggcgacaaccagcgctggaagatccagccctactactgaaccaacggatgatatgaccatcgcgcccatcgatcgtgcacatgcatgcatacgtactagcagaataacaggggtcttatctcccgaggcgtcttttgcatgcatgccagcagttgcatagataaagcaggagcgagacaaagggtgttcatgtatattgcagctgtatcactgtatgtatgtgccattgtgccttgtaataatacatataataataaagttgctcggagtgtattaattataacatac

SEQ ID NO: 5832 - DNA, 619 bp, Zea mays
  Clone ID: 700474339_FLI
atcgggagacgcagaggtcccgcggcttcggcttcgtcaccttctccacggaggaggcgatgcggaacgccatcgagggcatgaacggcaaggagctggacggccgcaacatcaccgtcaacgaggcccagtcccgcggcggccgtggaggcggcggcggtgggtacggtggtggccgtggaggcggcggctacggcggtggcgggcgccgtgatggcggtggcggctacggcggtggcggcggctacggtggcggcggcggctacggtggtggtggcggcggctacggcggtggcaaccgtggcggcggctacggcaactccgacgggaactggaggaactgagcggtggggcccgcgcggccaagttatcctgttcgctaccgtgatgtttaccctagtccagagggtttatcttcgttcgtgtcgtgtttgttgttgcccatctgtgtttttgattgcaaggtcgctctgtgtcagttgttagtgctgtgttcatcctcggtttcagcagacccatgcatcaaacagcatggactgcggatcgatggatgctgttacccccgtcaggctttattctaagttaatcttaaggaaaaaatggtgcttcttggtgctgc

SEQ ID NO: 5833 - DNA, 1224 bp, Zea mays
  Clone ID: 700474380_FLI
cgcccccgccccctcaccctcaccccccgacgccgacgccctaggcggctacgccaggtcccgagggacgggcccttcatcttcgtcagtctattcgccgggcgacgagcacccgccagaaagaagatcagcggtttgttggagtatcgaaggtggtgatttcgtagcgtggtgttgcagtttggttggagcttggagtttagagggaagatttggtgatgagcagccgcagcctgccgccgaaggatcgcaggatgcgtactgaacgcacctcataccgtgatgcaccatatcggagggacagccgccatggtccaagcaggtttcgtaatgatttgtgcaacaattgtaagcgtcctgggcattttgctagagagtgtcctagcgtggctgtctgccatacctgcgggcttcctgggcacattgcagccgaatgttcttccaaaggtgtttgctggaactgcaaagagcctggccacatggctaacagctgcccaaatgaagggatatgccgtaactgtggcaagtccggtcacattgcaagagactgcaccgctccaccagtgccgccaggagaagtgatcctttgcagcaactgctacaaaccagggcattttcgtgaggaatgcaccaatgagaaggcctgcaataattgccggcagagcggccaccttgcccgtaactgcaccaatgatcctgtttgcaacctgtgcaatgttgctggccatctggcccgtcagtgccccaagtctgatacattgggtgagaggggtgggcctcctcccttccgtggtgttggcgctcccttccatgatgttggcgctcccttccgtggtggcttcagtgacgtggtctgccgggcctgcaaccagattggccatacgagtcgtgattgcatggctggtgccttcatgatctgccacaactgtggcggccgtggccacatggcttatgagtgtccctctgccagtctcatggaccggttcccccctcgccgtttctgaaggaaggacatccaagggctgttcagatggctgttgttttcagcccattttgtcaggagcacctgttttgctttgctttatgtatttctaaacccgaatggattctagatatttcagattcataactcgtcagcgctatttgtaattctggatatgttacccgactccgatgttcttgatgataatgtttgaagacggggatacttgcccttacgaactc

SEQ ID NO: 5834 - DNA, 443 bp, Zea mays
  Clone ID: 700474494_FLI
gcaatctttccatgttggaaagaaccacaatttccgtgtgccaacctgtgatcgtagcccgggtaaagtaagcacaggttatcattctgacttgaacagccaagtatggcaaagtaggcaccccgatccgggagcccaaagggcccggcattgtgaggtcaatgcagctgggagcagcacggagtgtatgtttacagggaggcgctactacaccggagctcagctgccgccgaatctcccaagaacaaaatctgtacccctgaatgctgtcgacgcctgaaatgctttcttgccatgtaaatttttatagagtgtacatttgttttggttccttttgtatccattatgaaacatcgttgttgggcaggagagactggatgtggattttggctgagctgtttgtaaatttttaatcttgtgaatccagagaggttaggctgtac

SEQ ID NO: 5835 - DNA, 1317 bp, Zea mays
  Clone ID: 700474511_FLI
ctcatctcttcctcaagctccaaccgaactccctcacgccatcctcttccctggcgttcatccctgcggcagccaccacttgggcactcctctccctacccctcccatggcgtcaaagccccgagccaggttcccagccccctcatggctgcccctctctgctccctggtttctccccatgccagcagcggcaagcagccatggcgtccagtcccagctcgcctagcccctctctgtttgtggcgtgctccagtttcccatggcgtcggtcctcaacctctaggcaccggtcgcccgtactccctgctcctgttcctcccatggtgtcccagtcgagtttgccctagccctctccctcttggttctttgctagtcacgctcctctccatgggcgcccaggtctcttccccatggtggcagatcccatgccaagctcgccccatgtccgaactccgaaggctgtcgtctctactcctctccccatggcgacttcgccttcactgcttctatttcttccccagcagcatccctccttgtctctatgcgagcagcagcacgccggagcagtccaatgtccacgacgcacgccatgtgttcgacgggaggattgaccagagttcatcctcgttcttcatccgtgacaccgcaagtttttgcacgaccatgaggttatgttcttacttgggtgttttgtttctcggcgtcgcttataagaaattaatcatgtgtatatttatgtgtggttgtgtggagcgaatcccggatgttgggtgaaagcaagcgagatccgggtggggcttgacaggtgtctgatagaaagactgaacccaaagccatcgccgtgtttgtggacgccgctttgagtttagtcgtggtacgctagatgattatgcgagctgaaggacatggatcagagcgaaccatgagatggtattggaggattaatcttgtggatgcatcaagccagcaccagaatggaagatacttaccaagtggtcgtcaattaacaacactaacataatgtttatcccaggggtttattccctgttgtttttcaggttgtaattttgttctgttgtggatggtgctaagtgccggtgggctcggccttcttatataagtatatcccatctttagcttctatattgaggattgtcacttaagctagcatgtatcttcaaatttacaaatattttataacatttcaaatttgtaattcttttgaatctttttctcttgtaatcactccgataattgtataatgtaaaattattgtaacatgtaatcattttgtaataaagaatttatttccgctgc

SEQ ID NO: 5836 - DNA, 710 bp, Zea mays
  Clone ID: 700474522_FLI
cgtgtactacccgcggcggccggagatgagcccgctccaggccatcagggctgcctgcggcgaagaccactacatgtgccgcttccaggaatttggtgttgctgaagctgaatttgctctatatgacatcaagtgggtgtttaagaagacatttggcatgcgcaagccagctcctcttattctgcccaaggacaagagcttctttgactctcttgattcagatggaacttgtcctccatggctatcagaggaagatatttcttactatgcagaaaaatttgcgaaaacaggctttactggaggacttaactactacaggtgcatagacaggagttgggagctttctgcggcatggactggagctccgataaaagttccgtcgaaattcattgttggggaccttgacattacatacaacgctccgggggtaccggactacattcacaagggtggcttcaaggcaagcgtgccaaatctagaggacgtggttgtaatggagggagtgagccacttcatcaaccaggagaaacccaacgaggtctctgatcacatctgcgagttctttagcaagttctgatacgtattggaaaaatctcaaggagccgttatatgattctgagctactcgtgtttttatgtcaaaaaaatgcggttgcgagtgtcaccatacaaatatacgatctaaataaaattcgtctgtctcaccttttt

SEQ ID NO: 5837 - DNA, 1048 bp, Zea mays
  Clone ID: 700474549_FLI
aagaaaccgacgtgctttcatggtcaccgaaggacgcaacaggaagaagaagcaggagaaccaaatgaaacttgaggcaaaactgcataatttgcagattgaatggaatggaggctcggatactatggatgaaattcttgctaggatacaacaacgggaagaagcagcagtaaagcgtgagcgagccatggcgtacgcgttcaaccatcagtggagagcaaggtctgccacaagtctaggaaacttcagctatgaagtcggtaagggtggctggggctggagctggatggaccgctggatcgcagcacgaccatgggagccgcgatccatggtccaccctgagaacccgaagaaagcacaggcaaagaaggagaacaccacaaacccatcagctctcaagctgcaaggctccattaccctaagcaacaatatcaatgaccggaaaaccctgaaaaagaagccattgccttcagcttctcctgctgatcagaagaagccatcaccgtcgccttcttccgatcagaagaaaccagtaccgaaggagcagagagcaaaggcagctggcactcctccaaaaccaaaggccaaagatatgaaggggagtcaagagaaaaagccacaaccacaacagaaagtgcctcctccggttagcgcatgaagcttcctgctgcgaaaatggttactgatcatgtaagatacatcttgtgaagttatctcatgttcaacactcatgcttgtatgtttttgttttttgttttatggtgttatgggacgaggggtgcccaatctagaatgtgcttggtttgagcgattgcgcacgcacaacatatctgatgagaattgtttttggttaggattaggatctctgttattcattgttgtgatgctgtaataagacttgccttgcctggctatctgcttgaatggaaagtcttgttggaacaacatgtaagttcgttttctgtccataactttaggatcaaatgacaaatcgtcatatgtaaactgtttattacatccagattaggattaaattcaaatttgatgc

SEQ ID NO: 5838 - DNA, 710 bp, Zea mays; identical to SEQ ID NO: 5836
  Clone ID: 700474747_FLI

SEQ ID NO: 5839 - DNA, 1513 bp, Zea mays
  Clone ID: 700475101_FLI
caaccagacaattcaccatggcggcgccggcgcaggcgcaggcgcaggtcctgcctctcctccggtggagccggagcgcctccttcctctgcgcctcgtcgcgccgcctcttctccgccctccaacgcccctctgccgctgctcgctgcgaggccggctccaaggccatgctcaaggggatggactactcggaactcgagaattgggtgcaggcgcaggggtttcggccaggccaggccatgatgctgtggaaatgcctgtacgggaacaacgtttgggctcattgctacgacgagttggctggtttaaataaggatttcaggaagatgataaccgagcatgctgatctcaaggcattaactatgaaggacatccatattgcatcagatggaacccgtaagatattgttctctcttgaagatggttcagtgattgaaacagttatcattccttgcgctaggggcaggacaactatctgtgtttcaagccaagttggttgtgccatgaactgccagttttgtttcactggaaggatgggtttgagaaaacatctctcgacagctgaaattgtcgagcaggctgtgtttgctcgtaggttattctcagatgaattgggatcaattaacaatgttgtatttatgggcatgggtgaaccatttcacaatattgacaatgtaataaaagcctcagcaataatggttgatgagcaaggtcttcattttagccctcgcaaggttactgtctccacaagtggtcttgtccctcagttaaaacgcttcctccaggaatccaattgctccctggctgtcagtcttaatgcgacaacagatgaggttaggaactggataatgcccataaacagaaagtacaatcttaacttgcttcttggcactttaagggaggaacttaacctcagacaaaaacaaatagtgctatttgaatatgtcatgctttctggagtgaacgacagtatggatgatgccaagaggcttatagagctagtccaagggatcccatgcaagataaacctcatctctttcaatccccacggcggttcccaattcaagcccacaccagacgataagataattgagttccgcaacgttttaattcaaggtggcctcactgtttttgttcggctcagcagaggggatgatcagatggctgcctgcgggcagctaggagagcctggaggctatcagctacctctgctccgtgtgcccgagaaatttcaggtcgccttgtgatgctaaacagtgcatacagtaaaaatggtcctgagcagcttgacgaacacacggagtaattggcttggaacgacgattcgatcgtgcaaatcttgcaagttctaccgccttcggaagcttgtgtggacttctgcaataacgtgcaaatctgaacctgggtacttgtgcgacaacacatttagacatggtgttgcttctgctagtacgtggtgtacccaaaccaaattcgataagattattattattataaattggtattttctggc

SEQ ID NO: 5840 - DNA, 3601 bp, Zea mays
  Clone ID: 700475141_FLI
agagtctgcagactcaccgctgactctggcaagatcatctggatattcaaactacccttcggccctgctggtgtcaaacactaattctagattctgtccacttcctgagtccaatgtgacgtcaccgtgcttactgtggcctgcgtacctcagagatgatgggattttacatgtgcttggcaatgccagtagttcaaccattgtgcagcagagatcatcattagttcaaccttccacatcagatactgcaaatctacagcttgaacagtttgctacccctatggatgtatgtcctggagagccaacttcatttaataacatatcagatgcagtaactgtgcctacttcaaatgcaattgaaatgcatggtgctggcggccagtctaacccaagactgcagggcagcagctctattagtaatcttgagaggttcagtgctagagatgctttgcaagtgtcttccctgagcagcattgagccaatcccatcaacagctgggtcttcgggatccaattcacgccgtgctatgccactgaatatgctcctcactggtggattagatgttcaaatgttccaaagaaatgtaggaagtggacaacaggatcattttctcttcggcgactcaagtaactgggaagtgccatttgtgcagggttttttgatgacccaaaaccatacaggtttgcaccctgcacttgtgaacaataatgtccttgaagacctatctggtgctggtactgcagggattaacaactcaactagggaatcatcacacatgcataactttggacgtccaggtgcttcatcatcgattccccttacttctggcagttctaggagaccaaatcgacactatgcctcacgctctgtgcctggggttgggagtttgctcctagtaggtcctcaaattgacgaagctgaagctcatgctgcttcactaggtgctggttcagaaatcactgcgtcgatgcttgctcctggtactgaattgccttgtacagtgaagctcagaatatggcggcatgatatcaatgaaccatgtgttcctttagcacctgaggcatgccgtctgacgatttctcatgccgttctttgcagtgaaatgggtgcccatttttccccatgtggacgatttcttgtagcctgcgttgcatgtttgttgcctcaaacagaaggtggccgtggtagccaattgcctgtgccttatgaagaggctggatcatcaccaactcgtcatccacttccctctcaccgagttatttatgagcttcgggtttattcgcttgaggaggagacatttggggatattcttgcttctagagcaataagggcagcacattgcttaacttccattcagttctcacctacatccgaacacatacttttggcatatggtcgtcgtcatagctcgctgcttaggagcatagtcgtggagggagaaaatgggattcctgtatatactattttggaggtagatatgacaatcatatccaatttctaaatcacagtttgattggtaactgatgtcatattaattattgtatggggatattgacagtgctggttctgcagttgcatgatactttttgatacatgggattcaaaatgatttgcttattatcctccacaactactcatattgctcatactttgtgtacaatgtaagccaaactatcaatctttttttttaatttattactttaggtatatagagtttcagatatggagcttgtgagagtgcttcctagtgccgaagatgaagtcaatgttgcatgctttcatcctttaccaggaggtggccttgtttatgggactaaggaagggaagctcaggatccttcaacacaatggcgcaaacatgataaacatggggtcgggttgcttcattgaggaaaatatggttgagatccagaggtatgcattggaatgctgaataagcttgaccacatcatgtgaattttaggcttacttccatggtaattactgaatcctattttttgtatcactattatcttttatgctgtcatggatgcattgttggcctcaaacattgtcttgttggatttttcattgttggcaagaagctcaatgatttatacagattaaacttatgggaagtagtggacttggttgttgatctgaaagcatgattgtttgccattacagaaagacttctctgcaggcttcatctgtgtgatccgtccaagggaaaacattagatccatctccaactacattagaacagataattctcaatgggctctttcaagtgccttggggactggtatgggactctttgcactttaggattaactaatattcctggtatggatataatatcttttctctgctgctagctacaagggacctgagtatcttaagtcgattttgtacacagtaggataatcaagtaattaatgctgtaggaaacattggtatccagtttactgattggaatcgtgtccttacaagcatcattagctcttacaacttgctgaagcaagctgccctacaaattttttccgctggatcaggagccttgaatatttgtccagttttgcaggtgggcttggatgtccaataagctagctcgattttgacagtaggttgctttatgtttttaaccctttggagcgcctttgcaacctttgatcatccttatctgcctttacgttttttgtgtggcaaccgtgctatttatggttaagtctgtctaggttaatcatgttttgtaaaaaatggatatggttctagtggaaaattgtttttctaaccttggaaaaattattctagtcccgttcatactattttctgcatttaggtgtttggtttcttagtcaccctcctttctatttgggaggcctccttgagacatattgtttggctttttagggacaaagtgactaagtttaggaggtaggaaccaacaccctcttagtgcatgttgtatggacactaaagttacttttgaactacatatgttacgtgtaaacacgatccagtaaaagaatgtttttatcatagcctctagaatatatatttctttggcagtagaatgattctaatgccttgctatttacaacttgatttaggtctttgcaggggcggcaggagatgtaaatctacatggccaccgtcgtggctgccatcacgatgctgtaattataccttttgtacatgtattccaatcagcttaactcgattgctgttgtatttcagaacgttgacggtgctaatacttctgaagtctttttgttgtatacttcacctatcctaacaagcggtcgatgatgcaagaaattacaaaggcgaatgggattctctgggtttgattttacacgtgataatcatgtattttttttcctgttctcgtctgggttgattaatcattaaacgtttggagtttctatatctgtatgaaatagcatctgttgcaacataagaatatggttgacactagacgtctacaagggctggtctagaatgccgtgctattgtcattattttttaagtttaccaagagctatctgaacgcgttccatttggattgaggtgtattgaagtggatggatgaggattttgattagtagtggatttattcc

SEQ ID NO: 5841 - DNA, 1275 bp, Zea mays
  Clone ID: 700475148_FLI
acaagctctgagctcatgtcatatatgcatctcctttacgagatctgcccattctacaagtttggttacatgtcagcaaatggtgccattgccgaggctattaagggcgagaactttgttcacataattgatttccaaattgctcaggggagccagtgggttactctgctacaggcccttgctgcaagacctggggggccaccatacattagaatcactggtatagatgactcaaattctgcttatgccagaggaggcgggcttgatatagttgggaggacgttgtgtgatgttgctaattcatgtggtcttccttttgagttcaatgccgttccagctgctagccatgaggttgagcttcagcatcttgctataagacatggggagattattgctgtgaattttgcctatcagctacatcatgttcctgacgaaagtgtaagtacagaaaatcatcgggataggattataagaatgatcaagagcatcaatcctagggttgttactctcgttgaacaggagtcaaatacaaacacagctccattcttcccaaggtacatggaaactctcaactactatacagccatgtttgagtcgatagatgttgctctcccaagggatgataggaggcggatgagcgcagaacaacactgtgttgcaagggatattgttaatttaatcgcatgcgagggtgctgaaagggttgagaggcacgagctgtttggaaaatggaagtcaagatttgcaatggctggatttagaccgtacccactgagttcagttgtgaacaacactatcaacacattgttgcatacctacaacagctactacaggcttgaggagagagatggtgtcctttaccttggatggaaaaacagagtattggttgtatcttcggcatggtgttgacatttcctctgcaggttccatcgcactttggcctccatctgacgtttctaaggcaccattatgcttgtctggtatactcagtatatgcttgtatgtaatttgcaaccataccttacccaatggttatcttaccaactagatcttcatggcaaggtgaagtgtcacttaaaatctagaagttgtaactgtcgtgttgacgctagatatagatagttctgctttggtttgacatatgcagatgtgctgtaatgctcaggggttatgctaggcaggcccaagagggtgcctgtttgttatctatcaggctactgtgttgccgcctgctttgtgtgtgcatatatatttggaatgctactgtcctttctc

SEQ ID NO: 5842 - DNA, 1359 bp, Zea mays
  Clone ID: 700475155_FLI
ggaaaaagtagctgaaaaacttggcgtggatgacccatcgaaaattcggcttacatcacataattgttattcgcagcagcctaagcctcagccaataaagtacagaggcgttgaacgtctactggacatgctgattcattataaccagacttctgatattctgtactatgaagtattggacataccacttccagaattacaagcgctgaagacattaaaagttacataccatcatgccacaaaagatgaggtgtcagttcacagtataagattgccaaaaaacagcactgttggcgatgtgctaaacgatatcaaaacaaaggttgagttatctcatcccaatgctgaactgagattacttgaggtcttttatcacaagatatacaaggtgtttgcaccaaatgaaaagattgaaaacattaatgatcagtactggacactgcgtgcggaggaggttccagatgaggaaaaaaaccttggtccctttgatcgattgattcatgtatatcattttacaaaagatactcaaaaccaaacgcaagttcagaactttggagaacctttttttatggttattcgtgaggatgagaccctatcttctatcaaagagcgtatacagagaaagcttaaggttccagatgaggatttctcaaagtggaagtttgcatacatttcacttggtcgtccagactattttgaagattcagatactgtagctttaaaatttcagagaaacatgtatggagcttgggagcagtatcttggactggaacatccagacacagctcctaggaaggcacacacaattaatcagaaccggcattcatttgagagacctgtaaaaatttataactaggcatgatagaaatttgagcaatgagctgccaagcaagggctaaaattgctgtcctgaaataaagcgtgccggggcatgttgctcaggtttttcgtggagctggtgagctagttcatgagactccaagtatgatcggggcggcttctcatctttccctgcttttccccggatacatataaagttgtgcagagatgaccccaccgaacaattgtctttagtagataagccagtacttcccgttagatgactttatacagtcgaatagccggcattttagtcgatctttccgttctccagttgctgttggtgctaggaggccttgagctgttgagggtacttgccctgctgtatattatgacgtagagtgtacaagtctttgttgttgacaattacacggtgttttgtaatttcagtgatacacttccaggtccttcagtacgtacttgcctggatggtgtcaatttggcattctatgttagatattgatccatctgttctaaatt

SEQ ID NO: 5843 - DNA, 615 bp, Zea mays
  Clone ID: 700475216_FLI
caggcattgtgtggaatatcactgggggaactgacctaactttgtttgaggtgaatgctgcggccgaaattatctacgaccttgtcgatccaaatgctaatctgatatttggtgccgtcatagacccgtcactgagtgggcaggtgagcataaccttgatagctactggcttcaaacggcaggatgaaccagaaggccgcgtgtcgaagggtgggcaacaaagtgagaatggccgacgcccgtcccccgcagagggcagcagcacggtggagatcccagagttcctgcgacgtagaggaccttctcgcttcccacgagtttgactgtcctgtcctgcacctgcacctgcacctgtatgatatggtccacccacccttaggtcagaattagatgctcttgtgtggcactgagtcttctctaggcatcgatcgtctctagcgcggtttgttctttctagttttccttttttcttttcttttccccgccaccgattcttatggttatggtcatcaataatgtgtagctgttgtgagctctctagcgctatatgtaatgtagtccgtggagaatgtgttttccctgttacactggttctgaatagaatggtagctgaag

SEQ ID NO: 5844 - DNA, 1801 bp, Zea mays
  Clone ID: 700475313_FLI
ggccggagggtcgaggaggatcgtggcgcgtgctgctgccaccagtcttgtgcggcgcgggagaagagggacagcagcaggtcgacgtctcacaggaaggcttgctcccttgccctcttgagatccgccgtccaagatgtgttgccccaccgagcggcagtccagcagatgggtctgggggcggtgattacaaagagagcgggctgttgctacgactagtgaggttggaggtactgcagattaattgagagaggggaaggaagcctggttcgtcttagtgtttgcaggcagtgatgatgatgagttcagaggagactgaagcaaaaaggttagaggaagaggctgaaaaaaggacaatgattcatggtgacaagaaagaagaggatccactaatcacaaaaagtgagatgagaaatgagatgaggagtatggttcaggaactcatgggactaggtatgattggccccaaggctttgcctatctcatctgaattaaaattagaactcgttccaaatgatgtgaagctagaaggaagcaagaattatttgagttggtctaggagagtgcgagtgctcttagaaggtaaatgagtggagcactatttagaagagggctgtgttgaacctgttgataggctcagccctgaatagagggtttggtataccaccaactcagttattgtgacgtggttgttagcatccatgtcttcgtctgtaagtaagatggtcgaagccatgcgtgctgttgcacaaatttggaagaccttgaacaatatgtattcgagaaaggagaatgtgatgatgatgatggagatccgaagtaaggcagatgcagtgaaacatacagggagaccagtggaacaatatgctagtgaaattcagtacttgtggagagaactagatcactacgctcctctgcaaatggtttgccctcaggatgcacaggttgtccacaagtgggtagaggacaggagagtaactcactttctaaagaatttggacccggagtttgagagcaggagagatgccttttgtcaccaagaaagtcttcctaccatggatgaagctgtgtcagcaatgattaatgaggaaagcaggctccgggtaatgacatctaatgatcctgcgaaatcagcctacaccgcaaatgatgatagagactgctataattgtggtgagaagggacacttgagctacaattgtcctcatcctcgtggcagtggtgaacgaggtggtggaactcgtggagccacttgtagtacctatggaagaggtcgtggaggttatggaagggggcgtggtggccgtgccaggggcagaggtcgtggtggccctcatgtcaatgtagcggttactgaagacaccccctcaatcaccctgactagggaacaagctaaacggtgggaagaatggcataagggcaaagaatccgagtgtccaaccagcactcctcttggttctgtggcaactacatccacccagcacttcggagaagagaactgggaagaggattgggactgaagtcaagcgtaatgggctatggttcatcaatcaagaggagcaagctttgtcagcaacaacagaaggaaataaaagggaaatcatgctgctacatcatcgattaggacatgtatcttttgagagcttgagtaaattgtaccctgattcctttaagggaatggagaaaggaactcttgtgtgtgatgcatgtgagcttgccaagcataccagatctacttaccctagtgttggacttcgtagcagtgattcatttatgttaatacattctgatgtttggggtt

SEQ ID NO: 5845 - DNA, 965 bp, Zea mays
  Clone ID: 700475325_FLI
ggacatctttccctgccaagaggttgacaagaatccttgatccaaatccgatgacgagaataacaatccctgaaatactggaggatgagtggttcaaaaagggctacaagcgcccggagtttgacgagaaatatgacacgccattggatgatgtggatgctgtcttcaatgactcagaagagcaccacgtgacagagaagaaagaagaagaacccgtagctctcaatgcatttgaactgatttcaaggtcagcaggcctaaatcttgggaacctatttgactcggagcaggaattcaaaagagaaacgaggttcacgtcaaaatgtccaccgaaagaaatcattcgcaagattgaggaagctgcaaaacctctaggatttggtgtccagaagaaaaactacaagttgaggctagagaaagtaaaagcagggaggaagggaaacctgaatgttgctacggaggttgcgccctcccttcatatggtacaagtccggaaagcaaaaggcgacactctggagttccaaaagttctacaagaacctttccaagaccttaaaggacgttgtctggaaatctgaagacctgcaaatgcgagctgcttcttagcatccactagatggcgagatgttcgtacgtgtcagattccattcccgtagcatgatgtgtcgtcagccgtttctgttcactgcactctgcatggtccggtgggcgcgtggcttggcattttcagagaccgcgttgctcgttgcagcccgggatgaaggcgatgcagtaggttttgtggatgtggtgagctctgtatatgcctattgatgagtcatgttgcaagctgtaacgacactatgatccgtgaagtgtagaagcagccaagtatgttctttctatgctgccccatttcccggcagtttccatgcattttgaagaaaaaaatagtggctaactcattgatatttgtatttggtcatc

SEQ ID NO: 5846 - DNA, 1551 bp, Zea mays
  Clone ID: 700475408_FLI
aggggtgctggttcagtccaacagggactacaaagtctagccaagagcacacttgcagcaagacttcaacaacgtagcaagggccctgtgaaggtacttaatactgctcggccacgtccccctgaaaatgttgaagccctctctagttccacccagacatggcctacacctgatcagggcctagtcctgtctggatattctcagcttcgatctggaactcaaccaacaagggaaaatgccatgccaactatctccagtaacacagtgtggaatcctgttgctccaaacaagatgaagcactctgtttctacgcctaatcttgtgtctggtggatcctctgcccaagtatcattgagtacagcttatggtagcaacaaaagtcaggatcctcctcaaggtaaccaaactttgcctgttccagaggatttccgtgctgcaaacaaaactctggttgaaagaatgcgttctgctctgggaatggacgaggacaggtactctgcattcaaagagattgctggtgaataccgtcaaggtatcataggtactctggagtatctttcatatgtcgagcagtttggactgtcacaccttgttcctgaaatggctaggctattgcctgatcctcaaaaacagagggaacttgctgatgcatattatacaaatactcgatttaaaagcctacaagaaaacggaggtggaactagctcacaagagggcaaccgtaaaaagaaggggaaggggaaagctcctgtcacagaaagcagtgctgctaatgatgtgaatagtgcactagcagataacattctggagactgtaagaaggcttcaatcaaaccagcaggctcgggaaggaggagctgaggtgctgtcgaaggatgggtatcgaccttccaagggggtccaaccggcagctggatcttcatctaatctggacagtgatactagttccaacacaaaatcatctggtgcaaaagataacataggcaagggaggaggcaataagcaaccgaagaagacagcaaagtttctcagagctcgtttaggtgacaactcattagccacacttgatttaagtcgtccaagtgcaagccctgaacgtccagaaagggaattacaaggccctgagacagggttgccagcgcgaggtgcttggaagaatggcggggggcagaaactcttttcgagcaatggacggaaataagtcattccaactgcatagccgtggggacggggttgacagcgccaggtgcttggaagaaatggtggccagaaactcgtttttgagcaatggacaaagtgagtcactgcaactgcatttaggtgtgtccatatacctgatcaacaattaggcaatgccctgttcattgctaccggcagactgcgcaaatttcatagtcatccatttcaaattcgtaatgatgtggtgggcaacatttaatgtggtacaaatatactactagattttctgtgcattacaacggaacatgtttggtagtattgtccaaaaaaaacttgtcaagctaaaaccaagatacagagggtccgtgtcaac

SEQ ID NO: 5847 - DNA, 2042 bp, Zea mays
  Clone ID: 700475463_FLI
taatcggcaatagtgcgggctgcggcaccgcagcagcgccatgaacgccgtcgaaccctccgccgccgccatcgccgaagaccccattactccggccgcctccgcagccccgtaccctggccgcctccgcgaagcacttaccgccctttccgaggcttgcgagtccggcaacttcaatgcttccgaaaccgcctccttcaccatctccgacattcttgacaccgcagccggcgtaagtggcgagctcgatgacgggagcgacgacagccaagacgcgtcgaggtcaggggcctccgaagtgctgcttcgcgaggtgctcgagttcctctctcgcccgtcatcgatctcgaaccagatggcccttgacgcgctctcgcttgtgcttcccaaacccgtggcgaagctaggggctcgaatggggagatgccgggatgttgccgcagctatcctaaagttcttcgtgacgaattgcaatccgagggacatgctctccatcctctgtgaggcattagatgcaccaatggagctaccaaatggcttatccagttttgttcttctactcgatgcacttgctaaagtgtttactttaattcagaggcgacatatcgagcaagtaaaggtggcactgcccgttgtacttaaagttatgcatgctactgtatcagaatgtgttgaggaacatggaagtgctgctgttgatcttttcaatgcagcacatggtgttggcaaggccattcaagaaatgtgcatatcaatgttcaacaaaaacaaagatctctgtgcaattcttggtttatactcccttcagaatatagctcttgtatcacgaagcagacagcaggatattctctctgcttgtggttcagttgtttttcagagtttcagatttcttaaaactagtggattcacctatcgtggcctactaactggcagtgatgtcacagctgcaacggttgaactttccaaagaggaagatgctgattttatggagcatttttcctttgctatggatggtgcagcactttcagttgtgtggacacttatgcatgatgataaagatatgtcaaagtatgctggagaagagttggaattagcagtaaaggaagttcagggcaaccatatggaaaaatgggaagcaattaacatgcttaaatatgtcctatcctcaattcattacccatggataatcaaatcccacagtttaaacttaatgctgattctatccggtgaagatcatgttgaagagatcaataatcatgtagatttcacatgctttgctcatcgcatttttgaaacactcaaggccattgaaagcgttatgattgctgcccctatggcattggtgcggaaaaaagcatttgctgctttgaaaaaggttatttcaatggtgccatcatcccagagatttgacatcttacatggtcttgtaaacaatagtacatctccagctttgactgcaattctccttgatctagtgaggcaggaagtttcgagagagagtcgccaagctgacaatgattgtattgaagacgaaggatttcgaggtaatgggttaccgcgctgggcatctcatgcacttgagttagttgagctgattttgaggcctccagaaggtggtcctccttgccttcctgatcacagtgaacaggtaatatcagctctaaacttgctaagatttattctgataatagattcaagaggacaaagatctgcaaaattgtttcggaaagagacattgcacaaggtgcactcggagtggctgaccccattaagaccaatcgcggagcaaattcagttggaaaatgaaaaggatgctgatgagattacaaaacaaatagtgtgcatgttaaatcttgttcaactggtgctataccgctgcatcgagttggtggaggaaaagatgaaaggctgctaatgtttttggtacctgtcatttctatacagtagcatctgctgtatctggatggaatgttcttgaggatataaattccatcttctcaggttattgtatatttacatggccaggaagtctggttttattt

SEQ ID NO: 5848 - DNA, 1975 bp, Zea mays
  Clone ID: 700475469_FLI
ggggcggactcatttctctgagggctccttccttccttgttggcgatgaggaggcacgggtggcagctaccctaccatcctctccaggtggtggcgatagcggtcttcctggcgctcggattcgctttctacgtcttctttgttccctttgttggtggagataggctgcagtatttgctcatgggcctctataccccactgatcacctgcgttatcctattatatatatggtgtgctggaacagatcctggtgatccaggcattttcttaaattcaaaaaggccacctgaaaagcaaggaagttcaactcacgaatatccagaaggagtgtcattcagcaattgttgcagggttgttcataacagtgagaatataagcaataattttgaagtaaaggattcatcttcatacctgacatttaccagggttctttgcttgatatacttcccgttttcttgcttatgcaaaagatggttccactcagatgatcaatcttcagaacagaacacaagtgaagaaggcatgtttttctgcagcttgtgtaaagcagaggtcttgcagcacagtaagcattgtagggtttgtaacaagtgtgtcgatggctttgaccaccactgtaggtggctcaacaattgcataggaaaaagaaactacaaaggattcttcatcctattggcttcagcagttctcttgcttataatgaagtggttagtgggtgctcttgtgttgattcttttctttatgaagcggggagaattctctgggcagataacctcaaaacttggaagcagcttctcagttgtggcttttgtaattgtcgtggtgacatgtacattgctagcgatggttgcaacaataccactctcacaacttctatgcttccacattcttcttatcaagaaaggaattagtacatacgattatattgtagctttgagagagcaagagcaacaagaacattcggagcaccagagcccacagatatccatcattagctctatcacaggacttagtaccagtagctcttttggtccacttcatcgtggatcatggtgtactccaccaagactattagttgaagatcaggatgtttttcatccggatatgccacagaattccactggcaagaaggccaggaaagacgaaggaagcaaaaggaaaccaccaggagctgtaaaaatcagcacatggtcactggctcgccttaacgcagaggacgtcacgaaggcagctgttgaggccaagaagagatctaaagtcctccagccgatcacaaggcgggggaatattcttaaacctgacaagagaacagacaaaagcagggtgttcctacctgtacctgaacaatctccggatcccatggcaaggacatccgcaagtggaaccgacggtaatttgagcgacatgatgatggaaacacccgctagcttagccccattgcagcacgaggccaggagtgactaccaacccagtgctgtgacgtctatcatgaacctcaaccttacttcatcaccggagagtagcttggagtcacctgatctccaccccttccgtatctccatgtcaggagcagatgaactccgaagcttcatgtcacttgcagcctcagagtcaactgctcagaagactattgcactttcgaggtcgacaagcggtgggtatgaagcctcgggaggcgacgacagcgaccaaataccctctagaattgtgcacaggtcgtccaattggacaaatgtcattctcaattcaggtaggcaggcaactatgtccgatctgaacttgcctaggctacacctgtagggttcataactaacaccaggctgacatagctcaaaattgtgagttgctgacttcttaattagctatgtgttgttagcctgtgagcatgcattggtcagaaccagtgttgggaacctggtttttgggtttaagagtcgggttatgttttgcgatcaataaatacatgtgcctttcc

SEQ ID NO: 5849 - DNA, 1853 bp, Zea mays
  Clone ID: 700475473_FLI
agatgctcaaccagacagtggaagtggagatgcaagccataaatcacctggaagttctagtccggcaaagagcattgcaggagatggcgaagttgagggtagtaagagaaacgtgagtgttgttccaactgttaatcaaactgggagtccggcatcggtagggcagaaagatgttggttctcccaggaacaacaacacagttggagcatcccccccagtgaagaacccggaacagacctggagccaagttgctcccggcgggagcagtggtacagtgaataatccgaaaggaaatgctgctgctcagggcagtgctggttcatcagagaaccattcggcccaagtaaactcctcaaaatctggaaataacagcaagggtagcaggtcatcaataacacaggatggtggttctggtggaaataagaaaggtgattggtacaaggaaatggctagttgcgatatgtttagtgggaattgggttagggatgactcataccctctctaccctgagggatcgtgtcctcacattgatgagcccttcgactgctacctcaacggtcggcgagatctagcttaccagaagctccgctggcaacccagtggatgcagtatcccaagattgaacccaaccgatatgttggagaggctgagaggaaaaagactggtgttcgttggtgattcgctcaataggaacatgtgggaatcccttgtgtgtattttgagaaattctgtcaaagacaagaggaaggtttttgaggcatctggcaggcgcgagtttaagacggaaggctcatactctttccttttcacggactataactgcagcgtggagttcttccgctccccattcctagtccaggaatgggagatgcaagtgagcagtggaaagaaaaaggaaactctcaggcttgatctggtagagcaatcgtcattgaagtacaaggatgcagactttatcattttcaatacggggcattggtggacacatgagaaaactgctcttgggaaggactactatcaagaaggtaaccatgtgtataatgagctgaatgtcatggatgcctttcataaagctcttctcacctggtccaagtggatcgatgccaatgttaaccccagaaaaactctggtgttattcagaggctactcagcatctcatttcagtggcggacaatggaattcaggcggtggctgtgacaaggagagtaaaccaataaccaacgatcagtacctttcaacctacccaccaaagatgagcatcctggaggacgtgatccacaagatgaaaactccggtcgtttacttgaacataacgagaatggctgactacagaaaggatgcacacccttccatctaccgcaagcagaacctgactgacgaggagaggagatcgcccgaaagatttcaggactgcagccactggtgcctccctggagtaccagattcctggaatgaactggtttatgctcaacttctgatcaagcagcatcaaatgcgccaacaataaaggcaactgcggttttttgctgtgtgcctgtatatgatctgttgttttctaggataaatggataatagtcaacacggtggtcgaagtaaagtcgacatgagaccgaggattttcttaaatcccggcttgttcgctgcggctttaatccggccgtggcttctacagtattttgtctctctatagattgcaactgcggctgccagccagctgatgaattcctcagttagggctacctcccaatacccacataaattcctcagtagaggtttctgggacatcatattgtaaagttcatgtctatcggtaatctgaaataatatgaagaatagtatagatgtgatgatat

SEQ ID NO: 5850 - DNA, 1289 bp, Zea mays
  Clone ID: 700475478_FLI
ggttttaaacatgttttatatcacccatccagttgacaccattcatgttttgttctttatgaacaactggcactagatgatgctcatcatgattgcatattatttggcagaatgctactaaagtctcaagcgcctttgctggcaccagagagaaatgtgttggatgcagcaagacagtctatccaactgagagggtaagattctgtgttcaaccatctcaatcattcttccggtagtttgagccttcttcacttgacaaccggttaagcatccaggtcactgttaacaacactatgtaccacaagagctgcttcaagtgctgccatggagggtgcaccatcagcccttctaactacattgcgcacgaggggaagctgtactgcaagcaccaccacatccagctgatcaaggagaaggggaacttcagccagcttgagaatgaccacgagaagacatcacaggctgggtcactggaggaggatgaacaagagtattgatcactgagcacaaccacagatgaataatgaatcctcttgcatttgcctagagcactatgtatttctgtggcgtggttcgatttcagttttaccaatggaggtcatgtgtgttcagagaacaatgatattgttgtcttgtatctgcatgtaaacgttgttatctttgagtcagatactctacctggtttcaccattttcattggtcagaagatgcctctgcaccttcaccaggaagttatggtctgttgaagctaccttcaccaggaagtcgtctagcccatgctcatctccttgatccatctcccattggcttccccctcatcccaaccgccccagcctgaaattctcggattggaacacatgttccatcgcggcaaagcagaacagcgtccccgacttatccttgttctacagatcacgcagacaggggagagtgctaatccacttgatcgatccgccgttgactcttctggatctcccgcattgggaagctgggatccccaccgtctctcgtgtgcatccaactcatgaagcggatcctctcggcctcccttgctcccacctcacgtaggcacacggctcaatctcggcatcccgtatgagctcgagctgcacgccccccgtctcgaacagcgggatcatagcgttctccggcgcgagcccaatgaccacctcgctcgcccgcctcacagtcgccgccaccaaatccgccctctgttgctttaagttttttgccaacctagcaaagcgttgaagctcaaaattgtcgttttatcactcctcagttacttt

SEQ ID NO: 5851 - DNA, 658 bp, Zea mays
  Clone ID: 700475536_FLI
agcgggctttcgcccccggcctcgtaacgtcgggtaggttttccccgactcgactgcgcttctcttcgtctccttcgcgaacccgccgtcgcccactgcctcctctccttctacctcgcgcacccgccgccgcttgctgtctcctctctcgcgcgcaccggtgttcccatcgccgtctccttatctccctcgtgcagccgctgttgtctcctctccacccttgtacccgccgccgcctcctcttcagatttcctcttcttcaccctcgctgcctcctcttcaccctcgctacggcctcctcaaatcgttgagacaactagtacagttgagacaactggtgcgaggtcggacggcggggaccatgcgaacaagctcgttgctgccttctcggctcgtgcaccctcatctcaagaagtgaatcgcctcaggtgatacacaagggattttcatcaacaagtggtcgccagaagaactgaaacatcaagatggcgtttgcttttaggtcatgccattcaggagatgatgttttattattatgcactgagactatgtttgacattggtcgtgtacactgagactgttttattatgatgcactgagactatgtttgtgtacactgagactatgttttattatgatgcactgagactgttttatt

SEQ ID NO: 5852 - DNA, 915 bp, Zea mays
  Clone ID: 700475602_FLI
gagagagggagaagggagaggatggagaggcagagggagaggttaaggcagatcgagagggtgagtgctcgtggcagagagaggacggaaagcttaatactgatcaactccaacaacgaggctattattctgcagggaacattcggatctgatgacaaccaggaggactcaagcaacacaagttctggtgtatcacttggggattactttcttggtcctgccttagacactctcttgcagcgtttggcggagagtgacctcagtcgttctggcacaccgcctgccaagaaggaagcagtcgccgcgctaccaaccgtgaacatcgaggaagcgttgggctgttcagtctgtcttgaggatttcgagatgggaggagaagcgaagcagatgccctgtcagcataagttccactcgcactgcatactcccgtggctggagctccacagctcttgcccaatctgccggtttcagttgcctactgaggagacgaagaacaacccatgcgaatcagccagcaccgcagggaccgtgaacggcggtggagacaacgctgctgcaagcggcagcgatacagaaagtactaaccacaatgaagatgaccattccgatagccctatcttctctgctctgagcacactcttctctgatccgttctcatccgacgatgatgaaagtgttccacactcttacgagaactgaagatagcgtcggacgcaggcttgcaatatggtgaagacgttctgcttctgaggctggcatctttatattgtagcttctgtacatatctctctgaacggtcgccccccataagacaaactattacctctccgttttactgaaaactatgtggcttgtaatctgctagtgcttgctatgttcacttgcctcgaataaatgttatcctttagcgtgctt

SEQ ID NO: 5853 - DNA, 456 bp, Zea mays
  Clone ID: 700475620_FLI
gaacaacacccggtacggcctggccgccggcatcgtgaccaagaacatcgacgtcgccaacaccgtgtcgcggtccatccgcgccggcgccatctggatcaactgctacttcgcgttcgacccggacgcgccgttcggcgggtacaagatgagcgggttcggcaaggacatgggcatggacgcgctcgacaagtacctgcagaccaagaccgtggtcactccgctgtacaacactccatggctctgaccgaccgacctcatccctgtccgatgaacagttcaacatcacaaacaagaagaaacatgtcttgtaagatactcctccaaaggatcggttgcctgtagctgtactcttacacctgcatggattgatgatgcagtgcaatgtagcattcagaacaataaagacatgtttcggactgctggtgtctgatcggttgaagagcatgtttcagt

SEQ ID NO: 5854 - DNA, 1772 bp, Zea mays
  Clone ID: 700475623_FLI
tcttatttccattaccccgagcgtacattctctcctctctctcttggcggcgactcggcgaccggcgctgctgccccacgtttggtgcccaggtcttcgtgggccccttagccggcgacgagcatcaccagctgaaagatggcgaggataccgtctttgaagagcctcaatgcgtttccacatgcggaggaacacttgttgaagaagacttactctggtgctgttgtgacaattcttgggctacttataatgattacactgtttgtacatgagctgcagttttatctcaccacatacacagtgcatcagatgtctgtagatctaaaacgaggagagactctgccaattcatgtcaacatgtcatttccttctttgccatgtgaagtattgagtgtggatgcaattgacatgtctgggaaacatgaagttgatttgcatacaaatatttggaagcttcgcttggacaagcatggccatatcatcggtacagagtacttgtctgacctagttgaaaaggagcatggggcacatcatgatcatgaccacgaacaggagcatcatgatgaacaaaagaagcatgaacaaaccttcaacgaagaagcacagaaaatgatcaagagtgtcaaacaagcactgggaaatggtgaagggtgtcgagtctatgggacgttggatgtgcagagggtggctggtaacttccatatctcagtgcatggtttgaacatctttgttgctgaaaagatttttgaagggtcaagccatgtaaacgtcagtcatgttatccacgagctctcatttggcccaaagtatccaggaattgacaacccactggatgatacttcaaggatacttcatgacacaagtggaaccttcaaatactatatcaaggttgttccgactgagtacaaatatctgtcaaagaaaatattgccaacaaatcagtattctgtcacggagtattttcttcccattcgcccaactgagagggcctggccagcggtgtacttcctgtatgatctctcaccaattacagtcaccatcaaagaggaaagaaggaacttccttcattttataactcgcctttgtgcagttcttggtggcacatttgccatgacaggaatgcttgaccgatggatgtaccggcttgtcgagtcagtcaccaactcgaagaccagaagtgtactgcggtaactgcacaattcatgataggcggaaaacagctggtaccgtggctaagagcatctctaagagactttttatttttggctctctatttaactctctatttattttttcataaagattacattatatatatagcatctcactccaacagactatctatctagttttgctagtcaggtggctagtcaaatttggctagtgagagagctgatttggagagtcagatagcttagcgagttagataactagtctgttggaaagttattttattgttgagtagctaaaatttggcttgacgagtcatttaactagtctcttggaggtgctctaatgaagccaatagacggacctttgcccccaagctaacggatgaagccatgctgatttgcatgttttattttctccgtacatgactaactttatcatcagttatgttaaattgacacaaagtccacggactacagttttgtaaaacttgatgaggaatatgtatgcaaagaaagcgtgggtccagaatagttttctgtgaaaaatcaatacaaatgtagcttcagtgtgctctgtaatagcaacctgatgctttattt

SEQ ID NO: 5855 - DNA, 768 bp, Zea mays
  Clone ID: 700475631_FLI
gagatgctcaaggaacaaactggaaaggatgacattgatgtgggttctatccggatgacgctgttcaacatctttggtgatgatgccagcccaaagattaagaagttcatgaaggtcatgctcggaaagttccaccagggccagtcaggtgagcaaggcagtggtggtggtggtgtctttggcatggttggtgcccttgctcaggagttcttgaaggctaagcttgaagggaaggaggaagaggctttcaaacctgcattagagcaagaggttcacagtgttgacgaggtgtacgccgggagtaaggcctgggcaccaaacaatggcattctgatcagtgggtgccagactaaccaaacatcagcggatgcaactacaccgcagggtgtctcctttggtgctctgagcaatgctatccaaaccattcttgcagacaagcacgggaaggtgacgaataaggatctcgtgatgaaagcacgtgagctgctgtccaagcaagggtacactcaacagcctggactatactgcagcgatgagcatgttcatgtcgctttcatatgctaaaacttggattgttacagcgattgctttcctccatccttttgtgttgatcggtgcaccagaggttgatgtttttcttcccatgtatgttacagctatattgtatcagtgtttgttgcttgaggatatgtttcaatggactatgtcaatattgaaataacttttgagaaatgtttctatatatgaataatatacacacttgtatcc

SEQ ID NO: 5856 - DNA, 1546 bp, Zea mays
  Clone ID: 700475643_FLI
agttacactcaattcggtcgttttctgcattaacggagtcaggcccaggcctaacctcagttcatccgagcagccgaacacgcccgccgccattctacgccctgctgcccaggtcggacggaccctttgccggagacgagcacacgccacagcagagcagcgcgaagcgagagatccaatggcggcggcggaggggcagtgggtgctcatggcaacggggcggacgccgactaacattgcggtgatcaagtactgggggaagcgggacgaggcgctcatcctccccatcaacgacagcatcagcgtaacgctcgaccctgaccatctctccgccaccaccactgtcgccgtcagcccctcattcccttccgaccgcatgtggctcaatggcaaggagatctcgctattaggaggaaggtttcagagctgcctcagagaaatcagaaagcgtgctcgtgactttgaggacaaggagaagggcgtcaagatcaagaaagaggactgggacaagttgcatgttcacatagcctcgtacaacaacttccccactgctgctggtttggcctcttcggctgctggccttgcctgtttcgttttcacccttggaaagctgatgaatgtgaaagaagattatggagaactttcttcaatagcaaggcagggatctgggagtgcatgccgcagtatatatggtggttttgtgaaatggtgcatgggagaaaaagatgatggaagtgacagtattgccgtgcagcttgctgacgaaacacactggaatgatcttgtaattattattgcagtggtcagttcaaagcagaaggaaaccagtagcaccagtgggatgcgagatagtgttgaaacaagtcctctcttgcagtacagggcccagacagtggtgccaggtcgggtgttgaaaatggaagaagctatcaagaaccgtgactttgaatcatttgccaaattaacttgtgcagatagcaaccagtttcatgctgtatgcttagacacgagccctcccatcttctatatgaatgacacgtcacaccggataattagccttgtggaaaaatggaaccactcagaaggaaccccacaggtcgcttacaccttcgatgctgggccaaacgctgttctaatcgcccaaaaccgtaaaactgcagcacatttcctccagaagctcctatactatttccctccacaggataatgatttgagcagctatctggttggcgataaatcaattctaggtgacgccggattgcattccatgaaagacgtcgaggctcttccagcacctccagatacgaagataccggatcagaaattcaagggcgatgttagctacttcatctgcagcaggcttggggcaggtccaaaggttgttgttgacgaaggtcaagcactgatcgattcagtcaccggacttccaaaaggcgtgtagttctagatttaggttggaataatggtttaagctggggattaaagacaatggtatcatacaagcaacctgggccggccaataaagatagaacacgttctcgctttt

SEQ ID NO: 5857 - DNA, 842 bp, Zea mays
  Clone ID: 700475738_FLI
ctccgcgcctctctcccgccaggccgccgcccaagcaaccatggtggccgcgctgctccgccgcgcgctccacctccgccgtgtgctcccctcgcccgccgtcaccgccgccgcctcccagcgcctcatccccgccttctcgaccacccccacgccgaccccgaccacctcccagcagaacgccgccaccactacgatcgacctctcctccgacgagagccgccgccgcctcctcaataggttggtgtaccggagcaagcagcgaggttttctggaactggacctggtgctggggacctgggtcgagcagcacgtgcacgccatggacgaggccaacatccgcgccctcctgcaagtgctcgacctcgaaaacccagatttgtggaaatggttgactagccaggagcagccaccagaggatctgaattctaatccggtgtttgctgccatcaaatcaaaggtcacagataacctgaccaagcatgcttctcctgagacccgatctacaccaggtcaaccatgggttagaggatgggacgacataaagaaaggcaaagatggacccaagtatggaaatcagtgataagctgcttgaaatggggatgacggctttccatcctaaataatagctgtccgcccaccccaccccccaatatgcttgttttgtgattgtgtagaataaagtgaactgccaccggcatgtgtgaagtttgttaaattgtagaatcagcttgtaactatggatggtactcctgatgtttgcctggcaattccacccttccaggtatcgtctactacttggaaatatgttatattatgcattgcagtctgttagtgatggc

SEQ ID NO: 5858 - DNA, 1094 bp, Zea mays
  Clone ID: 700475782_FLI
gtcagcttctacttcctccgcggccggctccaccagacgtggagcgtcccgagatatggcttccagtatttcatcccgtcggcgaagaagggcatcaaccgccagatcgagctcgccatcctcagggcagacaagatgggcgtcaaggtcatcagccttgctgcgctgaacaagaacgaggctctcaacggcggcggcacacttttcgtgaacaagcacccgaacctgagggtgagggtggtgcacggcaacaccctgacggcggccgtgatcctcaacgagatccccagcagcgtgagggaggtgttcctcaccggcgccacgtccaagctcggcagggccatcgcgctgtacctctgcaggaagaggatcagggtcctgatgctgacgctttcgacggagaggttcctgaagatccagcgggaggcgccgccagagttccagcagtacatcgtgcaggtcaccaagtaccaggcggcgcagggctgcaagacatggatcgtgggcaagtggctgtcgccgcgggagcagcggtgggcgccgccgggcacgcacttccaccagttcgtagtgccgcccatcatcggcttccgccgggactgcacctacggcaagctcgccgccatgaggctccccaaggacgtcgagggactcggctcctgcgagtacacgatggagcgcggggtggtgcacgcgtgccacgccggcggcgtggtgcactgcctggaagggtgggagcaccacgaggtgggcgccctcgaggtggaccggatcgacgtcgtgtgggaggcggcgctcaagcacgggctcacgccggcgtgagcgagcgggcgcccggagcgggagaccgagacggccggcgcgcgcggccccgcccggaaataacgcgtcgtctattcgttgtcgcatggctgttgcgacgggtgggtgggtgtgctaccgagtactactactactaccagctactagctaccatagtccaagactgctgcaagcgcaatgcaacagagttgataggctggttcgcatataccaatactcttatgtacgtacgaatactgcaatattgcacgaggcatgggcttccgttactt

SEQ ID NO: 5859 - DNA, 2136 bp, Zea mays
  Clone ID: 700475822_FLI
caatctttgaggaggagagcgaacagtcctgttcacactgcctcaccatatgattccccacacctgccaataccaaatgggagcattaacatgaattctgttagaaatacaggtgatgcgagtcccaggatagcaggtcttattggatatgatcgaatgccaaacccatttactccgcccaatggcagcatactatatagagttggtgggcatgatgttcctgcagctatggagaacactagtgcttttggtcctaggtctagtccaactgctgctcagtatgttcagccttttattgctcctgaatcaatccagcatcaacctggagttcccttgagggaggtttatcctgaaagagcataccctgaacccatgccgtcatcatatgctgatggcaaagtagctgtttctgcattgcccctaaccgaccaattattcaggttggatataaacacaatgaagaaacttgaaggacaagatgatgggaactctactcgaaatgtgaatgaaacaactcttttgcatgctgtggatgaaccaagtaccttaccccaccatgttggatctgtacatgaagtcgatcctaagcaggagaagctaaccgaaaaagaaagcaggcaaaagcaacatgaagctggggctacagcactgcaggaatgtggggatatttcagaggatatgttgaatttccttcctgaattaattgcctctgttaaaaaggtaacactggatgatgctgctgagacacaaatagcccaatcagatgctaatgctgctgtttcacctgttcctgatgatgacgataatggaaagaagctggatgaggcaacagctggtaatacaaatgcaaatcaggaccctgatttgcaaggaaaccttgatcggcagaagagtttcaagattgagtctacaactgctgaagctgaagctttgtcgaaaggactacagactataaaaaatgatgatttagaggaaattagagagctgggttcaggtacttatggggcggtctatcatggtaaatggaggggatgcgatgttgctattaaaagaataaaagcaagttgctttgctggaagaccatctgaaagagagcgtttgatcacggatttctggaaagaagctctgatcctaagctcacttcatcatccaaatgtggttgcattttatggtgtagttcgtgatggtccagatggaagcttagcaactgttactgagtttatggttaatgggtctctcaaacagttcctgaggaaaaaagacagatcgccggaagagagtaatattagccatggatgctgcatttggcatggaatatttgcacgggaagaatatagtccattttgacctgaagtgtgagaatctactggtgaacatgagggatccacagcgaccaatctgcaagatcggtgatctcgggctatcaaaggttaaacagcatactttggtatctggtggtgttagaggaaccttaccgtggatggcaccagagcttctgagtgggaaaaacaatatggtgtcagagaagattgacgtctattcgtttggaattgtcatgtgggaactgcttactggggaagagccatactctgatatgcgtgctgctgaaattattggggccattgtaaacgattccctacgccctcaaatcccttcatggtgtgatcctgagtggaagggattgatggaaagctgttggtccagtgatccagccgagagaccgtccttcactgatatatctcaaaggttgaggaaaatggccgctgcaatgaatgtgaagtgaaggttcggaagccatatttgtcttgtaagtgctcccacatccagtataagtgattacaagaggaaggtagagttcaaacaggattgatttgagtaaatatggccaaaatgtcttggcagcatctcagtttaccctactccaagtgataattttattatgtcatggagattccaaagcatgtttgatgcgagccagctgttgggtttatttactccttgtatgaccattagtaaaagggaaaactgacgtttctgcttacctgtttcaggattttccttagtcctggagtaacccggctgtcatttgccttgtgtcgaaaataagtatgctataaagcgttctgtcttgatggg

SEQ ID NO: 5860 - DNA, 1615 bp, Zea mays
  Clone ID: 700475858_FLI
tggggtcttgatggatcagtctggttttcttcagagatgaaggcattgagtgatgattgtgaacgcttcataacatttcccccagggcatctctactccagcaagacaggtggtctaaggagatggtacaacccaccatggttttcagagacggtcccttcaaccccttacaatgctctcttcctccgggagatgtttgagaaggctgttattaagaggctgatgactgatgtgccatttggtgtgcttttatctggtggactcgactcttctttggttgcatctgttgcttcgcggcacttaaacgaaacaaaggttgacaggcagtggggaaataaattgcatactttctgtataggcttgaagggttctcctgatcttaaagctgctagagaagttgctgattacctcagcactgtacatcatgagttccacttcacagtgcaggagggcattgatgccttggaagaagtcatctaccatattgagacatatgatgttacaacaatcagagcaagtaccccaatgtttttgatgtcacgcaaaatcaaatctttgggtgtgaagatggttatttctggcgaaggttcagatgaaatttttggtggttacctttattttcacaaggcaccaaacaagaaagaattccatgaggaaacatgtcggaagataaaagcactacatctgtatgactgcttgagagctaacaaagcaacttctgcctggggtgttgaggctcgtgttccattccttgacaaaagtttcatcagtgtagcaatggacattgatcctgaatggaagatgataaaacgtgacctcggtcgaattgagaaatgggttatccgtaatgcatttgatgatgatgagaggccctatttacctaagcacattctctacaggcaaaaggaacagttcagtgatggtgttgggtatagttggatcgatggattgaaggaccatgccagccaacatgtctccgattccatgatgatgaatgctggctttgtttacccagagaacacacccacaacaaaagaagggtactactacagaatgatattcgagaaattctttcccaagcctgcagcaaggtcaactgttcctggaggtcctagtgtggcctgcagcactgccaaagctgttgaatgggacgcatcctggtccaagaaccttgatccttctggccgtgctgctttgggtgttcacgatgctgcgtatgaagacactgcagggaaaactcctgcctctgctgatcctgtctcagacaagggccttcgtccagctattggcgaaagcctagggacacccgttgcttcagccacagctgtctaaccttatgtttatcacccagcaatgcttgaaacagcaaaggttgtccattgcttgtttcagtttccttccgatcatgtttttagttccatcaatcaagcaatggagacatgcttgtgcttcatacttggcagcatcgtgtttgggttttcactgggcagtactgtttaatttttatggactgaaaagactcagttttgtaaatattcgtcactgtgaccaattcctgtggtggtttatgtgatttgcagattgcagtggttagtgtatcttcccaattttcact

SEQ ID NO: 5861 - DNA, 1739 bp, Zea mays
  Clone ID: 700475895_FLI
gaagtttgaatcgaagagcactatgctgaacattacaaattggagtaagtctcagccatgttatgtgaaccgtgaaattatctctcttctttcaacattggggataaaggatgaagtatttgaatcgatgcaacaagatgacatgcacgaatcagatggaatgctaacaaataaagaagctgctttgtctgtcctagggaaaattggtggcggtgataccaagacggcagctgatatgcttctgcaaggctatgaaccaagttcagagccttacctattaatgattcttaaagcccatcgggctaataggctgaccgacataagaactcggtgtaagattcatgtccagaaaggccgtgttcttattggttgtttggatgaaacttgcaaattagagtatggccaagtttacatcagaattacaaagaatcacaaggagcagaagtacagtgaacagccgttcttttgcaacgatgatggcaaaacagctgtaattgtaggaaaagttgcaatcacaaaaaacccttgtctccatcctggtgatgtcagagtacttgaagctgtatatgaccctggattggatgctaggggtcttattgattgtgttgtatttcctcagagaggggaaaggcctcatccgaatgaatgctccgggggcgatttggatggcgacctcttctttattacttgggatgacaaactgattccggagaaggttgatgcacctatggactacactgcaacgaggccacgcataatggaccatgctgttacacttgaggaaattcagaagcacttcgtcagttacatgataaacgataccctcggtgccatctccaccgcccacttgatccacgcagaccgtgatccactgaaagctcgcagccccgagtgcgtccagctggccgctctgcactccatggcggtcgacttcgccaagacgggagctccagccgagatgcccctggcgctgaggccccgggagtttccggacttcatggaacggtgggagaggccaatgtacgtctccaacggcgtcctcggcaagctctaccgcgctgccctgcggcacgaggaggacgcagaagcgctcctgcctgcgggcccaccgagctgcgtgtacgacccggacctcgaggtcgccggtttcgacgagttcctggacgcagcggaggagcggtacgaggcgtacgccgagaggctgggcgccctgatgacctactactcggcggagcgcgaggacgagattctgacaggcaacatccggaacaagctggtgtacctgcggcgggacaacaagcgctacttcgagatgaaggaccgcatcatcgccgccgtcgacgcgctgcacgcggaggtgagggggtggctcagggcgtgcaaggaggacgacgcgtcgagggtggcgtcggcgtggtaccacgtgacctaccacccggaccgccgcggggagaagcggttctggagcttcccgtggatcatctgcgacaccctgctggccatcaaggcggcgcgcaggtgccggaagcgggtggaagacgccgccgtgcccatggactgcgacggttcctagacggaggtgccactgtggcagtgaagtgagcctgtgatgcgagtggaaactgtagtaataagatgcagtaccgctgagcgctgattgctgtaaaaagaagttagcgcgggttgtcttgagctcctcctaacaggcgtacgtatggtggaaccgtggaatcatgatt

SEQ ID NO: 5862 - DNA, 1753 bp, Zea mays
  Clone ID: 700475904_FLI
ccccttctcagtctctgaacatcccactatagctggaatagctgatgaagcagaaattcttaactcccttcagaaaccaaagaaggttgttttcctcggaagtgatggggttgaacgtccatttctttgcaaacctaaggatgatcttaggaaagactcacgcatgatggagttcaatgcaatgatcaaccgtctcctctccaaggtccctgagagccgcaggagaaagctctatattagaacttttgcagtggtaccacttaccgaagattgtggaatggtagaatgggtgcccaatactcgtggtcttcggcatattcttcaggacatctacataactcttgggaagtttgatagggtgaaaacaaattcacagatcaagaagatatatgacacatgccatggcaaaatgcctgacgatgtgatgctgaagacgaaaatccttccaatgttccccccagttttccacaaatggttcttgatgagattctctgaaccagctgcatggtttcgtgctagagtggcatatgcacataccacagcagtgtggtcgatggttgggcacattgtggggcttggtgacaggcatggcgaaaatatcctttttgactcgacgaccggggattgtgtgcacgtggattttagctgcctttttgataggggcttgctgctggacaagcctgaggtggtgccgtttaggctgacacagaacatgatcgatggcttgggcatcacaggttatgaaggcgtatttctcaaggtctgtgaaatcactctatctgttctcaggacccacaaggagaccctcatgactgtccttgagaccttcatccatgatccactcgtggagtggaccaaagttaacaagtctagtggaggcgaagtccagaacccgcacgcacagagggccatcaccaacatcaacgcaaggctccagggagttgtggtgggtgttaaagccagcccttccctgcctctctccgtggaaggccaagcccggcggctgatcgctgaagcagtctccctcaacaacctcggcaaaatgtacatctggtggatgccatggttctaagttatacatatctaacagataacacacacatacgctgtgactgtgaaggaggaggaagtgagtcagtagcagcaagcaagggtccaaaaccatctttctgcacggcacagactttgaaaggctcaacccctcatgactcttgaggcacaggggattcagaggcaggtctgggtacgtaggacagaatagtctgcacacacagaaactcttgtccacaccccacccaccatcccaaactttggtgagtgagtgacatacatgaaccctcgcgcggaatgaggcccgtgattttgcttccccttctacagcccagggctaattctatatgttgtggtgctgtgttgggtcatgctgctgatgctagctgcagcaaggttctttttattgcccaaacacaaacagtacctgccggaaagatggaattcctgttgcatatataggggtggaggaaggatgaggaggatgatgaaaaccacgtgtccaagttccccccttctctgcctcctcattgtcatgccagctgaatgcaatgaaacggagtggattgatttctgtgacaaacattttctttagtcgctacgtactaggagcagtcgtgtatacactcttgcaactgctgctacatgttacgtgttcctgatcctacatatgtatatagcagaagcaataatgttctggttc

SEQ ID NO: 5863 - DNA, 172 bp, Zea mays
  Clone ID: 700475908_FLI
gaagtgattaagtgaagcgttcaatgtttagtgaaatggctgaaaacaatcagggttagtattatgtaccttctcgtttgctcgtaaacaaacagatgataagttgtaaagggtacctgcagtggtacgatctagttgtttcctctaactctaagttaacctcttcgatggc

SEQ ID NO: 5864 - DNA, 2050 bp, Zea mays
  Clone ID: 700475981_FLI
ccgcgcgcagctatataatggtggattaaccctaggaacctgttgggtccgcgcaatcgtcgactgctgctgcgttctgttccgttcggaagatgttcttggagagcttccgggtggagagcccgcgggtgaagtacggcgacggcgagatccagtcggagtaccgctacgacaccaccgaagtcgtcccgccggggaatggcggcggcgcggggtgggtggtgcgcccaaagtccgtcacctacaacttcaagaccagcaccaacgtcccaaagctgggggtgatgctcgtcggatggggcggcaacaacgggacgacgctcacggccggggtgatcgccaacagggaagggatttcgtgggagacgaaagagaaggttcacaaggccaactacttcggctccctgacccaggcttccaccatcagggtcggctcccacaacggggaggaggtctacgcgcctttcaagagcctcgtgcctatggttgaccccaactctatcgtgtttggtggatgggacatcagcaagctgaacatggccgacgccatggccagggccaaggtcctagactttcacctccagaagcagctcaggccctacatggaatccatgctgccactccctggcattttcaacccagacttcgtcgccgcaaaccaaggtgcccgtgctgacaatgtcatcaagggcaccaagaaagagcaggtggagcagatcaagaaggacatcaaggagttcaaggaaaaaaacaaggtggacaaggtagtcgtgctgtggacggcgaacaccgagaggtacagcaacgtggttgcagggcttaacgacaccatggacaagctcctggcttcgttggacaagaacgaagcagagatctcgccatccaccttgtatgcgatagcctgtgtcctcgagggtgtcccgttcgtcaatggaagccctcagaacaccttcgtgcctgggctgatggagcttgccataaaaaagaattcggtgataggaggcgacgacttcaagagtgggcagaccaagatgaagtctgtgttggtcgatttcctcgtcggcgctgggattaagcccacctcaattgcaagctacaaccatctgggaaacaacgacggcatgaatctctctgccccacaagtcttccggtccaaagagatctccaagagcagcgtggtggacgacatggtcgctagcaatcccatcctctacaagcccggcgaacatccggatcacgtaatcgtgatcaagtacatcccctacgtgggtgacagcaagagggctatggacgagtatacctctgagatcttcatgggtggcaagaacaccatcgcgctgcacaacacctgcgaggactcgcttctcgccgcgcccatcatccttgacttggtgctcctagctgagctcagcactcggattcagctcaaggccgaagggcaggataagttccactccttccaccctgtcgccactattctgagctacctcagcaaggctcctcttgtacctcctggcacaccagtggtgaatgctctagccaagcagagggccatgctggaaaacatcttgcgggcctgcattggccttgcccctgagaacaacatgatgcttgagcacaagtgaagagtttcacgtcccttaattaactaccacaagataggatgaatggaaaaaggagggatcaagcgaaggtgtgggaataatcagtgactcctctgagcccaacgaagaaatgtcaggaggctacaggaaggagaagtgtaaggagagaagaccaagcatggatatatcctcttttcgaaggcaatctatctattctttttttgtagatttgactcgttttttgtactcgtgggacgagattgtgtactggctatatatccactgtatgcagcatgaaacctttatttgttctgttgtgtgatagaggttatatatagaagtgtccagcctagtttttgaaactcctagttgattaatattttcactaggtggttgatgaacacatttgatatgctctagagacgtcaatggagctttgatcgctg

SEQ ID NO: 5865 - DNA, 2314 bp, Zea mays
  Clone ID: 700475984_FLI
aggagttgttgcagtaccttgatacagcagaatttgcaatgcgtgaagagttgtctctgaaggcagctattcttgcagaaaaatttgctccgcaactattgtggtatgttgatgttattcttcaacttatagacaaagctggagattttgtaagtgatgatatatggtatcgagtggtacaatttgttacgaacaacgaagacctacagtcatacgctgcaactaaagcgagagaatatcttgacaagcctgctttacatgagacgatggtcaaggtgagtgcctaccttcttggggagtatggacatcttttggcccggagacctggctgtagccctaaggaattgtttgctattataaatgataaacttcctacagtatcggcaagtactgtagctattcttctctcaacctatgccaagatattgatgcacactcaacctcctgatgttggactgcaacaacaaatcctcacaatatttaaaaagtacgagagctatattgatgttgaaatacaacagagagcagttgaatattttgaactaagcaggaaaggtcctgctttggcagatgtgttggctgaaatgccaaaattccctgaacgtgaggtaactccattgataggacactttctcttggtcaacgtcaatttattccattgagaaggattttccccttactgtgggttatttgccaaatctagtctgcactgttgaagaaggctgaagacgctgaaattgacacagcagagcaaagtgccataaagctacgcagtcagcaacaaacatctagtgctcttgttgtagctgatcacccccctgcaaatggatttgcaccaccagttaataatctcactcttgtgaagatgccaagtcaaactgtttctgacactcaggagagtggagtaagttatgaagaagctcctaagcctcctgttgaagctcccaaagaaaatgggactcctgtcgaagtgcagaacagggacacaaacattactgaaatcaacaatgagattaaagctgaacctccctctacatcccattctacctctcccggagacctcctcctggcagatcttttgggtcctcttgcgatagaaggccctcctgctgtagagcaaaatcctgcccaaggattgaatgctaatcaaagtccagctggtgacttggcacttgctacccttgatgatcagtccaactcagttcagccaattgtcaacgtcgaggagaagtttcatattttgtgcacaaaagatagtggggtgctgtacgaggatccttacatccagattggcttgaaagcggagtggcgtgcccatcatggccgtcttgttcttttcctgggtaacaaaaatacttcagcccttacgtcagtgcgggcgctgattttgcctcctagtcatttgaaaatggaactttcgtcagttcctgatactattcctccaagagcgcaggtgcaagttccccttgaggttgcgaatctccttgcaagtagagatgttgcggttctagatttctcgtatgcttttgggacttcactggtggatgccaaacttcgactccctgttgtattgaataaatttttgcagactataactcttacccctgaagaatttttctcccagtggaaagcgcttactgttcattcgctgaaggttcaagaagtggttaaaggtgtgaaacccatgcctctttctgagatggctaatcttttcatgagccttcacttggcggtcgctcctggacttgataacaacccgaacaatctggttgcatgcacgacattcttttctgaagcaacacgtgccatgctttgtctgatacgagttgaaacagatccacaagacaggacccaactgcggctaacagttgcctcgggcgaccaatatttgacattcgagttgaaagagttcatcaaagaacatctggttgatatcccaaggactcaggtcgccccacctcgcgcagcagtccagccacagttgcctactacagcacctgccacatacaatgaccctggtaccatgcttgctggattgctatgagaagtaacccgaaggaatagtgttttgatgtacatgacagttatttaatacgaggatctaacatctccacaagcatcttgctgccaagacgtacacgtggagcaaccaagaaagagctggcggagtgtagtctccatgaggattctaaaccgagaaagagcttagattctttttgtgcggtttgaaggccccctccctctccatgtagcagttgccgtattgtgtaagcgtaacttgttgtttctcattattatcatccccttttggtcc

SEQ ID NO: 5866 - DNA, 1590 bp, Zea mays
  Clone ID: 700476017_FLI
gcaaatatgatcatggtattttgcagcaaaaggcagatgagagtaagttaaaatctcaaattgcttccctagagtctagggtgagtatcagtgagggtagattatcggcaacacgtgaacaggctgattctgctcaagaggaagcatccgaatggaaacgcaaatatgaagttgctgttagtgaggccaaaacagctctgcagagagcggcggtagcacaggaacgcacaaataagaaagtgcaagagagggaagatgctttgagggtagagcttgctaaccaactatctgagaaggaagaggaaattgcaagattacatgcaaaacgtagtcaaatggaaattcatgctacaagtttgatctcgaggcttgaggccactgaagcgaagtcgaagagccatgagtctgattcgttggctttgagggaggagatcagattactgactgataacctggagtctattagaagtgaagctctgtcacgtgagaaggaagttgggatcctggaacaggaaaagaaccatcttgaggagaagtatttgtcacagtgcaaaaagtttgatgagacagatattagatgcaaggaagctgaaagggaagcaaaacgagcaacagaattagctgatgtagctcgtgtagaagcttctgctgctcaaaaggataagggggaagctcaacggctcgcaatggagaggtttgcactgatagaaagaatggagcgacaggttgaagctctagaaagggacaaggctaagttggtagaagagattgagagacttcatcagtcagagaaggatgctgtgtccaaggtcgcattgcttgaaagaaatgtaggtgagcgggaaaaagaaattgatgagatgttgaagcagaacaaccagcaaaggtccagcacagttcaagtgcttgagagtctgctggcaacagaacgtgaagcacgtgctgaagccaataagagggcagaggaactgtcgttgatgttgcaagcaactcaaggcaaactggacatgctccaacaagaaaccacacttgatagcaagctcaagacctctgcaaggcgcttaaggggtgatgctacagagtctgtacatgatatggatatcgatggggacaatgggaggcgtcggaaacggtcaaaaagcacaacaagcccgttcaagaacaatcacacagaggatggcggttccgtatttattggcgaagatacttacaacgggagtcagcaagggacagaaagcgaagactatactaaattcactgtgctgaagctgaagcaggagctcaccaagcacgggtttggtgctcaactactccagttgaaaaatcccaacaagaaggatatcgttgccttatatgaaaagcatgtcatcggcaagtagttcctcggcaatacttgtatttatgctttatagacttccctctgtagcgttgaaactttaattgacacgatcggattgaagcaaacaatgcatgtaacttagtttaaatctctggtctgtgtattgcaacaatggtgcagttcattttagcatgcatcgtcggcaagtttgtagttaggagtcgtgattgaaatgtttgtctttccaatcc

SEQ ID NO: 5867 - DNA, 1233 bp, Zea mays
  Clone ID: 700476066_FLI
gcgacgggcactccgacgactactgcgagctcggcgactctcctgacggcggcaacgtccagagctcatcggatgctgcccttagctccatgagggaccaggacgacggcacgaagcacctagcggctctggacgattccttgacgtacttcgaggtggagagactctccatcctggaggaactcaagacgttggaggagaggctcttcacactggaagacgacgatatcaacaccagcaaagaagttactggccattcctcgagtgacatggatttaccacacgatggccttcagtcgccggagtacattctcaccggtgacaggccaagattcggaggaagggcctctatcagcagagggaagagccttctgcctctgttcgatgcagtcggcgacgaggcctgtgaccgaatgccgccatctgcaggagcaggagaggcagaccaggccgacgatgcagcaacgaagccggcatccgtgcttgtcaaagagcaggagaggctggcgatcatagaggaggtcgaccatgtctacgaaaggttgcaggcgctggaggcggacaaggaattcctgaggcactgcatcaagtccctgaagaaaggagacaagggcatggaccttctccaggagatcttgcagcaccttcgcgatctccgcagtgtggagcttcacgtcaagaatgccggtggtgccatggctgcaaattcagcctagcaagttcatctatacgcggtaacgatgacactactagcttggtatggattcagtcgattggattgtaggactccaaagcactgcattggtgatggtccctgcaaggtactgccggagttatagggaggctctgctcattttgcctgtgggccggaagcaagccctcccttttgtgctggtccagcactgccaactttttctgtcgtggtggtcgcctggtctggtcggtcggtcgtaggaatcattagcccttccaaagctgcacaaagctgaatcacggtgacagcttctgcagcatgcacggggcaaaagaaaaaagatagccccagtggagatgtggatgtttttttttcttgtctgatttaatcttttgattaactttggatttgtttgtgcgctgaggtagggagtcctcgtgtattttttttttggtgaggatgtagcttgaacggttggtatgtgcagtttgtgctttctcaatatccaggtttataatgaaaggaaaggcggtctcacg

SEQ ID NO: 5868 - DNA, 1566 bp, Zea mays
  Clone ID: 700476085_FLI
tgatgacgaaaccgaggaaaccgaggacccgcatcagccccctccagcaggaccctccgccgctgcagcagattctgatgacgacgatgaagaggaagaagtggaagtgactctcggtgtccttagcaaaccgaaacacccaggcctccttctccgccacttgttccccagcaaggccggcggcatcccggcgtggctagaccccgtgaacttgccgtcggagaagtccagctgctgcggtttttgtggcgagcctttgcagttcgttcttcagatttatgcagcagttgaagacaatgtagcagccttccatcgaactctgttcatgttcatgtgcccatccatggcgtgcttgcttcgagatcaacatgaacaatggaagcacaagcatgggaatccatgtagaagcgtgaaggttttccggtgtcaattgccacggactaatgccttctactcagttcaacctccaaagcatgaccggtctgacaaaccactgtgtccaggagcccatgtatgccactggtgtggtacctggaaaggtgataaaatatgtagtagctgtaagaaagcaagatactgttctgagaaacatcaggcactgcattggcgtactggtcataaaaatgattgcctccagataataagttcttccgctgcttcaaattcagttttgccaactgttggaaaagttcctgctaacacttcttggccagaatttgagataaaaatagactatgaaggtagatttgattgcgatagtggtgatgagaataactcgaagttgttggtgatgcaaagacatgggaaacctgatgctatgatgcagtcatggatggatcaatttgaggctgattctgacaacaaatgctgggcatcttttcaagagcgggtctcaagagcaccaaatcaagtgttgaggtattgtcgagaaccaaatgctaaacctctctgggcgttatcttctgggtgtccatcaaatgctgatatcccatcatgtagctactgtaaaggtccattatgctatgaatttcaggtaatgccacaattgctatatttctttggtgtgggaaatcaaccagactcccttgactgggcaacaattgctgtctacacgtgtcaaggggcatgtgaccaaagtgttagctacaaagaggagtttgcttgggttcaattgtaccctacaacaactacgaggcaataataatgtttgcctattccttgctgtccaatgctgcaggtgtcaaaaagtttgcagaaagtcagaaacaattcagtaaatacccccaccagaagaattggaggttgggatgctcgaggcagtgagtagtgagcgcttcttgattcccattattgcacttatgccgagtatagatattttaagtttcacttgttctacattttaggtgcctgattttttttttgttcaggcaataggcaatgttgttattgtttgaatatagaaaaaacatgaattgtctcttgtgagttatctttttaattgtactagttggttgtataagattgttgcatgctcaaaacgcaggcacttgaaatatagtaactctc

SEQ ID NO: 5869 - DNA, 3047 bp, Zea mays
  Clone ID: 700476093_FLI
gtaggtggacatggaaaaagttgtgccctcgcttcctcttcatctccttgctgtatgtttggagcttgggcaaggcccggacttgacctatgtgcttcgtggcatccgttttttgcatagtttgtctgatctagcatcccgccatactagactggagcaggttctccttgatgatgtcaaattatccgaacaagtcatggacctgatattctttctactttctattcttgctgaacagaaggtctcaatgggttaaaccaaaatgtttttattcattgatgtgtggtccactttgaattatcatctgatactaattctggtaacagctgttgtttttaaattaggagaataacaatgttggtgcttctccgcttgtgcatgcgtcacttgtagcaggtagtcttcatctgttgacaaattacttctcttcccagtggcatgaacttgtccatattctgcttgcacatccaaaggttgatatctttatggacgtggcctttgatagtttgcatgaagatgtgaggctgttaagtatcagattatcatcaatgggcttcggtttctttcctgttggttctttggaatctcgtcttgctcacttcatctgtcaacagtgtgaagcatcattgcaatttctcttgttgttgtgccagcaaaagctatttcgagatcggattttaaaaaataaggaactctctagaaacggaggcatactgtcactttctcacactatactgaagttagttgtccctgaatgtttgaagcaatcaaccgaccttgttgcttctatttccaggctcaaggcaaagatactttctattctgttgcaactttgtgaggctgaaagtgtctcttaccttgatgaagttgccactaatccaaataacatgcggctagggcaaaccttggctctagaggttctaaatttgctgaagatttcatttggaagaaaaataaacattacttctgattctcatgacaagggtaagatttaccccatgggatctgtgcttatcagtgcattgcgtcttgttgatgtcttctctgatgattcgaacttcagatcattctttttgaccaacactgttccatttttaatccagattctagctgctcctcacgatgaatttgtttcgagttggtgcgctgtcaacttaccaacaattgaggaagatgcaagtctagattatgatccttttggtgcatctgaggtggcactattagcttctgataatatgttgactgaagctaaagctaactattcttgcccttttcgccctagcgtgccttcaatggcatatgcacagacaagaacatcatgcgtagtgaaaataatagcaaatttgcatgtttttattccaaacatatgtgaaggtagactatttctacatgttatgagtttaaatttattcacaacacattgttaaaataagttctgttctgacaacagagcaagaaagggatctttttcttcagaactttcaaaagcacttggcgtctgggagtcctaaactatcagcagatctgccagcttctagtgattttaaggccactaaagtctgtagaaacttaggtgaagttacctttgttgtttctagttatctgttggttaatatatccattatgtggcatgtctaactttttctgtgggttttgtaggatttttgtctgattatgctaaaacattggttcctaatttgttaaatggggaagacttggtgttattaagtgattttgctgataagctacaatcttggtgtaaatcacaagttgcagtaaaggttgtacaaaatgatattccaccagaaagcatggatgccatgtgcccggtgcagcagctcttgccaacacggacaagcactccagcctccaaaatgaataaccttccaaaggatgcacagaacatggaagtgtctacaccagtacccccaataaatccggaaggaaatgatgaggacgagactccaaagaacactgtctctagaaatggtggtttcctgcagaatgcagttggccaagacctagtccatcttggcgttgcaagaacaacaagtggtggcccttcggctgtcgcttccggtgttagcactggacaccagcacaacagaatggatcttgatccagcatccagcagcgtggataatttcaaaacaccagaacttacaaaagaaaacggtctcgaggaggatgggaaaggagagagtagtatgtatgatgagaggcaacctaagagaaggaagcggacccttatgaataatgagcaaatagatgaattagagaaggctctagtagatgagcctgagatgcacaaaaatcctgttctattgcagagttggtcagagaagttaagtctgcagggcccagagatcacagcatcacaacttaaaaactggttgaacaaccggaaagctaagcttgctcgcattgcaaaagaaagggcggagaatgctgataaaccatctacttcccatcccggcgagtcttcagaaagtgccggggaggacaactatctaccccctgcaggtgtgatgactgttctatccaaaggtggtagcctgttgagcccggactgcactgagcaaacgtcgcaggcagagctatccccgaacacgacgatgatggtccgtccattcacgagatccttctcgttggaacccggccgcctcgtttcattagtcgacagcgatgggaaggaggttggcaggggcaagatcttccaagcgccagggaagagcacaacggagagccgcgtttgcgtggttgatgtcactgagctcaggaccgagaagtggagggagctcccccacccttcggaggcatttgggtggacgttccaggaggcggaggcgaggaatggtggcatcatcagggtctcttgggacgccgtcaggttgttccctgtagcgtagcaaggccgattgtataacaagatgagtagagggaaactgtggcctaagtaacattatgttaaaagctgtggttaactgtgttgtattcatgaactaattgttttgagcaattcaggtggttactgattttacattttt

SEQ ID NO: 5870 - DNA, 2069 bp, Zea mays
  Clone ID: 700476112_FLI
attgaatcatttctattttattactatgaagaaataggaatgatatcatattacaagtgtaccttcggcttgaggaaaggtaaagagtacaagcgtgacgcaaaagcaaatgccaagtcagcgtaaacagtactggagcactgttcatctatttataggcacgggacgcagcccatgtaaaattacactcatgctctttacatttgctaataattctatagtaatccatcggggtctagatagccttttcctctttaagtcggtttccttttctgttatcatgccgaagctcccttgcgcacagcttcagcttcgttccattcttcgtatcccttgtgcttcttctcactgtgattttgactcaagcccgaagggtccgagttcgaaggtacctgctcatgtattatactccagaaacattgttaaatcatgtttttgaggaccttcggaagtcgaaggtccccaacagtagcccctcgcaatattaatttgttagaatgataaattcagattgcgatatggacgaaggccttaagccgaaggtccgaaaaaacaccttccctatgctagaatagcatcaatcaatgacaagcggggccctcccacttgcaacgcgctaggcgtataaataagagcacactgtgagcacatttggcacgcttccttgccatctgctcttgctttcgcaaattttagttcttgcataccaacgcttgcctgactttttagaatttttagcttcggccttaagagctcgttttcaacatttccgaagatgtctcaggataacaaagctgccgccgaaacaaagctgagcctttctgaggagaagaatcttgggtttcttgaatcaatagcaaagactaatacagagaagattactagggagattttagaaggtttatctgaagacagcggtgatagtgacagttatgacgtggagagtgggggtaaagactccgaagatcgaccgtggcgaccaagtcacaaagtcttcggaaaatcgagtattaaacagagtcatctcgataacatgagggggagatattttcgggacatgtctactgtgagggcagatgacggagagaggactgtgcttactcccgaagagaatgaagttgtgatcttccgaaacttttttaaagctgggcttcggttccccttaagcaaatttgtggttgaggttttaaagatctatcaggtctaccttcatcaaattactcccgtagctatcacaagaatgagaatctttgtctgggtcgtgaggaaccagggcttggagccaaatgcaaaaagtttctgcaatgtgcatgaactgttatatgagacgaaaccctagggcaaagagcaatatcataacaattttggctgctatagcttcgtcgctcgctctggctcgagctgtcccgtgccaacattccagaaaagatggcctggggactggatgaaggaatggttttacgtgaaaaacgatttaaaggcacgagaagacgttaaagatattatcatgcgtcctatctggcagcgcttcggccttcggaagccgaaggtggaaattgatgaagcagccgaagaatgccaaaaggctttcggcatagtctgttctttcatcgggacgagggatttagtccaggagcacatagccttcagagtgtgtccacttgtagagcaatgggaaatgccaaaggaaactataagcaagtctgacgaaggtggactggttagattgaaatacaccttcagatacgagggtaagtttattgagccagatgatgattggttgaagtgcatcgaagctacaagcaacagactgcttggaccatattcaaaggtagaagataacacgctatctgcgaccttcggaggccggaagaagaagaggctgaatagagtttttgatgctattgggtttatgtaccctaattaccgctacccgctgaaagggcaaaagagaaaaagcgcaacttctggaaaaggtgatgctgtagttgctctgagtgaggccgcaccaaagaggaaaaagatgaaggtccttactcaccgaccgcacttcatcgaaccggcctcag

SEQ ID NO: 5871 - DNA, 361 bp, Zea mays
  Clone ID: 700476119_FLI
cagttgcagaattggtcgagactgtggagtatttcttggctgaggcaatccagtcataccaagccgaaagcgataccgagctcaacctttcaactggtgactacatagtggtccgaaaggtgtcgaacaatggatgggccgaaggtgaatgcagggggaaagctggttggttcccctacgactacatcgagaaacgggagcgtgtgcttgcaagtaaagtcgcccaagttttctaagtcttccgctgagccatgtagtatccccggggttgtacaatgtgtgttgtttatgcttgtcatcttcagagaatcagaggagatctgtaattttgctgaaagctgcctgttgggtggtttgtttc

SEQ ID NO: 5872 - DNA, 1432 bp, Zea mays
  Clone ID: 700476240_FLI
cgcctccgaggccgcgggcggcgtcaggctgatcggggtggcgcgcggcgccggggagcgccccatcgtattcgtgcctctcaagaggttcgcggacgcaggtcggaccactgccgcgcccttcctcttcctgccggccgccgcactcccgccagcgccgtactacttactacctgcatactgtattctgtagtagtatgaaaaggtaaaggcggcgtactgctatagtatctctgcagaatgttcggaggaggagtacaccaactgaaagaggtttaggaaagttgcaccgtggatctagaattctagatgcattagtgtagcctacagtagccctgtacacacataaaggcatttttcttataaaattgtctcgcaaaatgggatttttttgtgctaattatagggtgctttagcgccacctgggatttttttgtgctaattatatgcagcttccatagaccaccacaggcattcccgcatgcagttcgctctgaatgcctcctttcattctattactatccctgaacgacgacccatctcagggaaatagccattaaatgatagcagccttttttaaagtatggcttggtttgcgatgttattatggttcgaaaagttgctctattttagtctcatttattttataaattgcagtactaaactgttttagtctatagttcctttttagatgactaaaagggattaaacaaaaaagacacccgtaaattaatcagtcgttaaacagtgctagtactatgcatttcatcgcgtaaattaatcaattgaatggtttcaattggtgattttgcagcctaggccatggagggggtatcatcagctccagaaatggacgaggctatctcaactgaccaatcaagcagatcaacaaaaagaagggctaaagtgtgggatcatgttgattcagagctaatagatgggaaagagaaggcggtttgcaaatacttgtaaacaatagagcaatgaaagatatgcgagatgctttgggcagccagatgtttttcagtggtgaacacctccatgtgaggtgttcttctcatgtgctcaacatcatggttcaagctggactaaaggctaaggagttccttggtgcttccggtgacaagcgaaaggaagtcaattaactctgaatcagtggttctgctgcaaggttacacacaacattttattgaatggaaagaggacactcggtgaccacaagatcatcagatgatcatttgttgagctctggaactaaatcctctccgcaggtggtaaccaggcgggttcccatccgagttccgaggtcactgtaatgctaaattgtcaagttcagttatctgaattcagtttgagttataattctcatcaagcatcaatgtcaccaactgtgtagaaatactgaattttagcatggagcgtctttataaac

SEQ ID NO: 5873 - DNA, 1747 bp, Zea mays
  Clone ID: 700476288_FLI
caccttttaatgggggcaatcagatccagttgcttaaaaatatactcaggacatgtgaaatacgcttcccatctgattgtgacttgagccatggctgcattgacttgtgcagaaagttgctgcggctcaattcagtggagcggcttacagttgaagaatttgtgcaccacccatttctttctgaacatgctccagagaagactttgagccttacacaatctgacataagagatggctttccaagaaataatagcagtccaacaaggcattcaaaccatagttcacaagaagattgtatgccttttcctttagatgatgagtcaagtggacaggacgagggtccagttcctgacagtaagagtctgatgaaatcttatggatttcccatgggtaaaagattggataaaacttcaggccagaagagtccaccgaaacataacagtttgttctccaggtatgtcttgggcaataatcatgcacctagtagccaacaccatggccattctggtaaagtgaccaaggaaagcaagattcatgaagtacaaggtcaaaaggttgtttatccagaagattcccctatcattgattcattagagtttgtagatcaggaatacgtcttcgtgtctggaccacacctggagggatcatcatcttcaacaaatgcctctcagcagcttaatgtaccagcaaaatatgataattcgtctgtttcaccaccaaagttaactttcatgagtgcaccaatgccgataaatggtttgccgattaatagacaacaacttgctgggactggtagctttgacagccactgttctcctgcatctggcacttcacagggatctgcagatataagtgatgccatggatcagcccccatctgattatctgacgaggattagattgttggagcaatatgcatcagccatagcagggttggtcagagatgagatcaaaggtggcagacacttggaagcgttctctattcagctaattgttcttgcaacctggaagcaagcaattcatataggaaatacctttgtagcttcacctgcaagggagagtccctcacaggatatccctatgaaggggcatattgctggtgcttcccatttgcctgcgaactcaaagctagctgatgatgcctgcatgcagatagagaaacagtttctctctgaagttgaatatgctgaagaactagccagcattgtgggacagatagctgatggtacagagatgccagatgcaattgaaatgatatttcagtcggctttactcataggaaggcgaggcggtgttgatgaaatgtttgggaaagccgcggatgccatgactgggtatatgagggcggtatccatgctgcggtttctcctggtcgaggcaccatcactcgccctcaacccccctttgactctaacgagatccgatcggaatcgactgcgcacatacattgacgctctcaacaccaggctctgtcagatgcagagccagaggcattgactgctgccatgcgccctcaaatcttgtccaggtgttgtacaatattctttcatttgtaaatatatttgttggcccaaactagggcatatgtaacatgtcagaactgtggaactaggcagagcagcgaaaatctattgtaaatatatttgtagtgtggaattaggcagagtgtacgtggtaggttcattctgtgtcgattcaggcagaagcttgaaaaccgaataaccaataatagtcacgtgtggaaatgt

SEQ ID NO: 5874 - DNA, 730 bp, Zea mays
  Clone ID: 700476350_FLI
atttctcagtgatgtcgatgtcctgtactcctgtatatttggattcaacaatatgccattagtatgctgtcaagcgtcctatttgcaagagataaatggcttacgcccgaggggcttattcttccttatcatgtgcattggtgccacaacactggatgagtataggaagcatatagagaaagatcctgccttggaaagaaggtttcaaccagttaaggttccagagcctactatggatgaaacaatacagatcttaagaggacttcgtgagagatatgaacttcatcacaaactgagatacacagatgatgctttaattgctgctgcacagctgtcttatcagtatatcagcgatcgttttctgcctgacaaagccattgacttgattgatgaagctggatctcgtgttaggctgaggcatgcgcagctccctgatgaagccaaagagctggacaaagagctgcggcagataagcaagcagaaaaatgaggctgtacgtggccaagattttgagaaggtatactgttgtttggcacagcggtgacaaagccgatccgctcccacctctctagcaacgtcgatatggttaataccaagcattatgttgtttccttttgagataaatattttgttactgattttaccttttgtctcctcttcttgttttttgttctagaatctgtagcaaatggctaacgatgaggatatccattactttgtttatgacaat

SEQ ID NO: 5875 - DNA, 2019 bp, Zea mays
  Clone ID: 700476462_FLI
agtcgttcatgtctgctattagtgaagaatacccgttaatcatacttgtatattcaaaggggagtcctcggtgtgctcaatttattgagtactggaagcaaattggcactcaattggatggaattgtcagaactgctatggtagaagttggtgattcacaagtggctggttatttcgccgaaaaacggttctcgaaacggccatttttccgtaatggtgtaccaacacttgttgcataccctgctaactgcaaaagtccatcctgttacatgaggtacccaggtgggctttttgtggattctgttgttgattgggttgcaacatcagttgtaggattgcctcggatcttgtactattcaaaggagacattgggcccccaattcattgggaagagtggcaatcataaggtcaaaactatctttttctcaagtactggagagcgtgctgctccattccttcgccaagctgcccaagagtattcaagttattcatcatttggatttgtcctatggagagaagacgaatcccagatttggtggaattcgttaggggtggaatcggctccagcacttgttttcttgaaggggccaggcacaacgccttttgtacaccatggattttttagcaagtcagagttcatagagatgatggaggagcacaagcaccatgaactgcgacagctaagaagtgacacatctttggaactgggttgtgatgctagaggtcattcacgtgctggcaatgatgcagcaatttggtattgtgtaattgttgctggtcgtccaggtgcagaattaagcaagaagagacaaattttgcggaaggctcaagacaaattgttaggtgatgttgacagaagtgctgggaacgttgacaattcagtagagacatcaagtgctgcaactgccttcaaagatgataggttaacctttgtttggttagatggagaagtacaaaagcaaatttgtgccttctaccttgccactgattatactggagcctgtggccctcgagactttggagatgacaatgataaacctgaaatttttattgttcgattccaaagaaatgcaacatatgaggcactgaaagctgaaaaaaagaacaatcttgtggatgttctccagggacagcatgctgatgcgtcccagttagtggcaaggtacaagggcccagttgaaattgaagagataaataggtggatctctcagattatcaaagatggagatactagagaaattccttactttacttcaaaggtgccagatcttgtaccagaggaaacaagcaaagcatggaattctaaaagtatccgctcagcagggaaaagtctaaaagagaacatcggtttccatttccaagattacctaacccacccaatgattggttcaactttgcttatgtgcggatgtatttctatgggaatattatggttcaggaacaacacacccactcaaagtactcgacaggagaaagctcggaaagacaaggcaaagaggccccgtccgaagcttagcacgtcgctcttcggtgaaccttctgtcccagacgtcgacccaaaagatgctcatcagtgggaaatgtcaggctcggattcagactaatgactcgcttcttacatttggacctgacgtactgcaaagacgttttaaaattaagtaaactacatagtagtgcggtggccttagttttgggaaatggaacagagtataaccgatatagtgaaaacagttggaccactgaagtaatccagttgccatctttccgatgcttcagctgccctgtgacgtgactccagggacgtatttgttgacacctgcttgaaaactgacaagcctctctattagacagagtgttaacctgtggtctcagaatggagtaaacaatggtagacagagtgttaacgtacatcatgtctgatgtaagccggcaggtattttcgtcgtgagccaaaactcggctaacgtcgtgacacggactattatttttatttttcttaaataataatccctttcagcc

SEQ ID NO: 5876 - DNA, 1878 bp, Zea mays
  Clone ID: 700476463_FLI
agggcttacatcgtaaattacatggcaaggaatggctctcttcgccaacaactttacaaagaaatcgaggttgctagtgtagactcatttcagggtagagagaaagactacattattctatcttgtgttagaagcaatgagcaccagggaatcgggtttctcaatgatccgcgcaggttaaatgttgcgctaactcgtgcacgttatggcatagttattcttggtaatccaaaagtactaagcaagcagccactttggaatagcttgttgacacattacaaggagcatgagtgcttggtagaaggacctctgaacaacttaaagcagagtatggtgcaatttcagaagccaaaaaagatatataatgaccggagattgttcctgggcggtggtcaaggtgttatgcatggaactaactttggggctggggcctcaagccaagcagcagataagagaagtggcagagggaaagaaggacaatcgtttgctccttatggccctccaaatggggtgcataagcctggtgtgcacccggttggctatgctgtaccacgtatgccttttcctccatttcctggggctccacattctcaaccatacgcaattccaacccggggtttgcatgggccccttggagctgttccaccggtgcatcaacctggaagtagaaactttgggtcagctcgttcaaatactggtgggcctattggtggccaccttgctcatcaacagaactcccagcaagctatggggagcattgggtcaaattttaactacactggaatggagaatccaagtagtcagccttctggtggagcacaaatgtcccaaactggattaatgacccaggtgcctgtccaaggactaagtcaaacattccgtgatggtttttctattggtgggatgtcacaggacttctttgtagacgattttaagagccaagggtcacatgtgccatacaatattgctgaattttctacccaggcttctcaaggtggttatggtgttgagtttactcaagcgccccaatctggatactctgggaattatatgaaccaaaattcacatcctggatactcccatattggtacaacaaatgacattgtatctcaggatcacatggcccatggatctcatgggatgtttacacaagcgggatataatgatccctcacaagatgagtcgtctcagattcattatggaatggctgccgctggccctctacagtcgcagggcatgatgaaccccttgtactctcaatcctatgctcactacaacacccaaccacagtctcttcaacctccgccccagtgataatgaaagcttgtgataggatgaagccaaattttggaagtttggtgggttgcatcttttggcccacatgtgcacttctccgctgtttcagactcgatggtgcatagacatcagatgcaagcaatgaaggcacactatgtattggctatttatcggggcaggcttgactgaggggcacaaggattgcaacgtatcattgatcgttgtagttcactgcccactttggccacaggagaggtcatatcatcgagaggttgacggcactaccctcatccctcacctgtatagaaaggcaatcggggccaatagtggtacgatgtgaatattccaggatttgctgccattcagaaagtcaagttgcagcaactgcatgcctccatggtaccatgaagacacgcccgtagagtggctttgtatagaggtgctataggcgaggtggacaaccctttcggatatcgcacatggcaagatatttacattgacattttgtatgcacctgatatggttttgatatttatgccacaaatcatttaggtggtgatgcaagtagtttgttgtgattgg

SEQ ID NO: 5877 - DNA, 1410 bp, Zea mays
  Clone ID: 700476464_FLI
ctcccgtcgctcctctcctccacgcctccctcgctcgctcgccccctcgtccggtcgtccctccctcgctcgtcttggcatccccgcaaggaatgtcccttccgtagcgtcccttgcttcttccccaccccatcctgtattagtgcgttctctgccgctttattttccggtttctttgggctctttcgccgccttggatcttggttgcctcatccggttcataggattagcattgaagggttatccaatattcagtgaaaactagctactgaagaataggagtagcaatacctttgatgccccataaccccattcattagtttctgcaatgtctttgtcttctatttgctgtgcgaagttccatctactaaggaactctataggagacacttgcagtgtcagatggcttaaataccatagcagattgatatatgaaactttcctctcaagcagaatacatcaaagtaggcctcctagtacaacagtgctagcaagaagcacaagaaaaggaagtaagcagtcatttagcaatggccgccatttgcacagtaaatcggttgaatcatcaattgaagtgttcaagcagtcagagcttgagcagcttaaatcacttcattgctacaatgttgaggaagagttttctgaagtcaagaccgaatggcctgcaactatccttgtttttgatattgaaactactggcttctcacgtcgtgatgacagaattattgagtttgctgtccgtgatcttatggggggaaagaatagcacttttcagacactcataaatcctgagaaagatgtgaaaaatacatatgttcatggtattaacaacagtatgctctgcaggcctgatgttccaagatttggagagattattcccattctgctacaatatgtgtggagtcgtcaaatggacggtaaaccagttctctgggttgctcataatgggcgttcctttgacgtaccctttctcatgtttgagtttcgacggtgtaaagtagaaatgcctggtgattggctctttgtggatactcttcctatcgcaaaacaattggtcgattctaatgggtcaaaactcagttctgtgtcattgaagttcctgagggaacgctacaaaatcccactcacagggagcgcgcatcgtgccatgcaggatgtgacaaccctctcttacgtgcttcagaaattgacctttgagctgaaactaactgttcctcagctgctcgagaagtctttccgagcatcggatcttccagctaatcgtcctgcaaagtgactgtatctgcctcacctgaatatcgcctgaagcactaaattattatcaccgccgttttcgaatatttgtcgtctgcaagtttatttttgaactaaaacacgacaaaaaaagagggagtacattgttgttgtatt

SEQ ID NO: 5878 - DNA, 1609 bp, Zea mays
  Clone ID: 700476487_FLI
gtccacctctctcgctctgggccgccgccgccgccctaagccacgtgctgaggctttcgttggtctcttcgccggcgacgagcacccagcagttctgtagaaatggctgatggtgaggacatccagcctcttgtctgcgacaatggcactggaatggtcaaggctggttttgctggcgatgatgcaccaagggcggttttccctagcattgttggccgtcctcgccacactggtgtcatggtagggatgggacagaaggacgcatatgttggcgatgaggcacagtccaagagaggtattcttacgctcaagtacccgattgagcacggtattgtgagcaactgggatgacatggagaaaatctggcatcatactttctacaacgagcttcgtgttgccccagaggagcaccctgtgttgctcaccgaggctcctttgaacccaaaggccaacagggagaagatgacccaaattatgtttgagactttcaatgttcctgccatgtatgttgcaatccaagcggtgctctcactctatgctagtgggcgtactactggtattgtactcgactctggtgatggtgtgagccacactgtgcccatttacgaaggatatgcccttcctcatgccattcttcgtttggatcttgctggtcgggacctcacagactccctcatgaaaattctcactgagaggggttactccttcacaacctcagccgagcgagaaattgtaagggacatcaaggagaagctagcatatatagcccttgactatgagcaagagttggaaactgccaagaacagctcttcagttgaaaagagctatgagctacctgatggacaagtaatcaccattggtgcagagagattcaggtgccctgaggtcctcttccagccgtcgatgattggtatggaggctgctggaatccatgagacaacatacaattcaatcatgaagtgtgacgtggatatcaggaaggacctctatggtaacattgtgctcagtggtggttcgactatgttcccgggtatcgctgatcgtatgagcaaggagatcacttcccttgcaccaagcagcatgaagatcaaggtcgttgcaccgcctgagaggaagtacagtgtctggataggagggtcgatcctagcctcgctcagcactttccaacagatgtggatatcgaaggaggagtacgacgagtctggcccggcaattgttcaccggaagtgcttctagggtttcacaagttcctcgtcgttacctagtctcaaattatgtcccctccatttctcgagatatgtgtggcagatttgcatgatacgtttgtttgtttccatcggacctgaagtcttcttggggataggctcccccctttgtatgttgtggctccaatccatgtgcgagcacgctgtgtctgtcgtgacacctggttcgtgagatgggttgtcaaacttgattggtttgttgtgcgtggctggaagagctgatagttatatatttggcttggactgtgccgcttgtatgtatctgaattctgaaagcgttgtaatctgagcatccgtgcaaagtatgaatggcccttttatatgggctggattttccggtttct

SEQ ID NO: 5879 - DNA, 1272 bp, Zea mays
  Clone ID: 700476495_FLI
agcttctacacattccttaatacacataatggattaaactgttcctcaatatcacatgatggatcactggttgttggtgggttttctgattcgtcagtgaaggtctgggatatgtcaaagatgggccagccagcaaaaatatcaagatcacagggtgagaatgggccttcccagggtgagcgcatatcaacattagatgaggggaaacgaacctatacactatttcaaggccattctggaccagtttattctgcggcctttagcccgtttggggatttcctcttgtcatcatcttcagactcgacaattagactatggagcaccaagctgaatgctaatcttgtctgttacaaaggacacaactacccggtttgggatgtccaattcagtccagttggccattactttgctagtgcttcgcacgacaggactgctagaatttggtcaatggataaaatccagcctttgcgaataatggctgggcatctttctgatgttgattgtgtccagtggcatgtaaactgtaactacattgccactggctctagcgacaaaactgtaaggctatgggatgttcagacgggtgaatgcatacggatgtttattggtcataggagtatggttttatcactggcaatgtcacctgatggacgatacatggcctccggagatgaagatggaacaatcatgatatgggatctctcgactggccgttgtgtttcaccactactaggacacagctcttgtgtgtggacacttgctttcagctgtgaaggagcattgcttgcatcgggatcggctgactgtactgtaaagctctgggatgtcgcttctagcacaaaaaccctgaagacagaggataccaaaggcagctcagctaaccgactgagactgcttaaagctctccctacaaaatcaactcctgtttatagcctgcggttttctcggaggaaccttctatttgcctctggtgctctctcgctaagctcgtcgtaagctgtgttttttttttgcagaaaactagaactggtcctgttttgacattgagtagtgaagctggcatttcagagactgcctattgtacagctaatattttcattagcaattccaacgaactcagcatgtactgccgaattgagcaccgcagattcgttgtagcgggttgtgatattgtaacaatattattaggtaattacgttctgtaaaattgttttttaggttgtgaccttatgaacgcaactaaatgtacaagtgctgacaggcgatagcgtg

SEQ ID NO: 5880 - DNA, 1875 bp, Zea mays
  Clone ID: 700476588_FLI
aaccgaacacgcaggtgctaggtccaaagtctcaacagcaggacgtcttcaaccatgctgttgtgccacttgtcagtgaggttttggacggttataattgcacaatatttgcatatggccagactggaactggcaaaacatacacaatggaaggaggagggggcaaagcactagtgcagtttttattatatatattcacatgctacacatgtttctgaattctgatgcagttagtttgctgcttcaactgacgccataactctactccattcctgtagaatgatgacctcccgactgatgtcggtgtcattccaagtgctgttaagcgcatatttgacatcctcgaggcacagagtgcagagtacaacatgaaggtttcttttcttgagctgtacaatgcggagctcactgatcttctagctctacaatgagattgcaagaacgggactgctaagcaagctaagatttcaatggcctattccttcatacataggccattgaaccggaagattttgtcggtattcggtaactataggatcatgtggttgttggtcaagttggaccaattatgctggctcatttgttggatgttttgacaagtcgattctagcttccttatgatctatgttagatttggtaatgcataccagttagtaaagcatttatgatgtacattgttatacatagagctttacatcgcaaaaattatcagtttccctcagttacgatatgcatttagtatttatcgtattttgaaaattaataacctattatactatgataggcttgacttcatgtttatctaaataacttagtgcgatgatgcttgaaaacgtatcttccattttgccagatcaatgaataaaaggattattcatatcaatgtccatgcaccttctcagaaaatccttttgtgatgttggtgttggtttcctggacctgtactagtacatatgctaagtcatccacaaatctgacccagaattgtaccgttctttttatagccatgtttggtacttgtttgagtgctccatagttcgcaagtttgttttgttatgatgtattttgacatttgaatctcatacatgcttaggaactactgatttgaatttatgggctaacagttccagcatttcaaatagaaagtatgctatatcaaataagttgatgatacttttggtactggagaatgaagctagactgcatttgatattagaagtctgtttgtctgattgtagttgattataaagaagctagagctgatattagaagtctgatattagaagtatgtttgtctgattgcagttgattataaagaagctagagcttccagtcaagtttgatattagaagtcttcttttgcttttacattttgtttttttatgatcttgatcttagaagcagggttttggtaccagcttaactaattttctgaagttttatgttcttactttaattataactagatgattgcaataagatatcatgaggcgcgccgaggagaacagggacctcctctccgcctcctccttcgacaggcagctgctgcggaaggaggtggtgaggagggtcaaggccgcggtggcgggacgtgagtgaagtgagctttgtcgagcctatatgtggaggtcggtcgtgaagctgggactaggacaagggcgagctgaaggctagaagctgtaaatgcacccttcaagagtcttcataggccaagtctctacgtaggtgttgacaaaaaggaaaattcatgacaatgcgtttatatgagattgtccaatatcgaaaccaagaatacatgggggacaactgtattcgatttttgtttctctttcgtggagtattactgaaatatatgcttccaatgttgaagtttcc

SEQ ID NO: 5881 - DNA, 2223 bp, Zea mays
  Clone ID: 700476617_FLI
tgcaaaagcaagctctacaaaagcggaagagccaaatcgcttctgttgtggaagatgctgttgaagctgctgatttgagggactatagttcgcgaactcgtgattccttatcctgttggaatcctgattcaattggttttaatttaatagaaaatgtcttatgccatatttgtcaaaaggaacgatctggtgcaattcttgtatttatgactgggtgggatgacattaatgcattaaaagagcagctccaagcaaatccattgcttggaaatccaagcgcagttttgttgctcgcttgtcatggctctatggccagttcagagcagaaattaatatttgataagcctgagcctggagtaaggaaaatagttcttgccacgaatttggctgaaactagtattactatcaacgatgtagtttttgttgttgattgtggcaaagcaaaagagacatcttacgatgcactgaataatactccctgtctgcttccaacctggatctccaaggcttctgccagacaaagacgaggacgagctggccgagtccaaccaggggagtgctaccatctttatccacgatgtgtatatgatgcatttgctgactaccagttaccagaacttcttagaactcctctccagtccctctgtttgcaaataaaaagcttgaggctgggaagtatatcagaatttttatccagagctttacaatcacctgaatctctatcagtacaaaatgccattgaatatcttaaagtcattggagcatttgatcagaatgaagaattgacggttcttggaaagcacttgtctatgcttccagttgaacctaagttaggaaagatgcttatttttggggctatttttaattgtctggatcccatattaaccatagtttctggacttagtgttagagatccctttttaacccccttcgataagaaagatcttgcagagtcagctaagttgcagttttcatgccgggactacagtgatcatcttgcacttgttcgtgcatatgatggatggagggaggctgaaagagaccgtgctggttatgactactgctggaaaaattttctttcggtgcaaacattgaaagcaatagattctcttcggcggcagtttctctttcttctgaaggatactggtttggttgacgaaaacatgactatgtgcaataaatggagtcgtgatgaaaatctagttcgggcggtaatttgtgcaggactgtatccaggtgtttcctctgttttgaacaaggagaaatccatctccctcaagacaatggaagatggacaggttatgctttattcgagttcagttaatggtaaagaaaccaagattccattcccctggctagttttcaatgagaaggtgaaagtgaattctgttttcctccgggattcaactgctatatctgattctatactgttgttattcggaggctgcataaaacaagggggcttggatggacacttaaaaatgcttggaggttatcttgagttcttcatgaatcgcgatcttgcttcaacttatgtgagtttgaagagagaacttgagaatttaatccattgcaagctccaaaacccaaggatggatatccaaacgagtgaagagctgctatcagccatccgtttgctggtgactgaggatccatgcagtgggcggttcgtgtacggccgacaggagccaagatcaaagaaagcaaagacgatgctttcgccatcctctctgagtgaggctggtggcaacggaggggataatgccaagaaccagctccagacttacctgacccgggccgggcacagcaaccccacctacaagacgaagcagatcaagagctatctcttcagatcgacggttgagttcaacggcatgcagttcgtggggcaaccgtgtgcaaacaagaaacttgcggagaaagatgccgcgagcgaggcactgaactggctcacaggagatggtggagcgattactgactctaggggggctcaggatgcagaccccatgtccttgctgatgcaaccaccgcgtaggcgtcgacatagccatcgtcggaggaactgattagcacgacatgcttttcttcctttttgatcgttttcttatttatgtagcattcgagaagcatagttaagcatagaaggtagcgaggaaaaaatgttatagactcttgaaatgtactacaatagttttgacgtgcagtgcctgtgaattttagagc

SEQ ID NO: 5882 - DNA, 1050 bp, Zea mays
  Clone ID: 700476631_FLI
tctacacgaaaaaaagattgtatacatatccaaaataacaattgaacgagctaaactgggattcagagttgttgacaatccttatatggtaaagctcaacaagagaaccattgtgcttgaagataaggatcaaattcaaggttttcctaaatatacattctcactaacacccttagataagttggaccaatacaaaaacaagaccgatcgttttatagatgtcattgctaagatcagtggagtatcaaatgtagcaaaggttcctacaacctcaggagatcagcaaatgaggagagttgtattattagaagaccttaagggaaacatgattgagctatcactatcaggaaaaagagctttggaatttgacggagatcaagttttagatgtgggtcagcaacatcatgttattgcaatatttgtaggaaccttagtcaaactttacaaaggtgaatatacattcttgagtggaacatcagcatgccggtggtacatcaacgaaaatgacattgctgaaatcaaggctttccagaaaagtttgccaagtgaacctgtacctatcaaaaagacctatctccaaaatgatgatgcaactcacaaatttgaggagaaaagtctggaacagctcaagcatgtagaccctttccttgacatgggacaaagatatcagtgcacagctactataattggtatcacagaaaaccaaacatggtgttacaaagcatgcaagatctgtaactcagcaatcattcaaaaggaaaatggttataaatgcacaaaggaaggatgtccatctacacaatttgaatggaagtacaagataccattcattgcaagtgaccacacctataatctagagtttatgttctttgaaaaaaagggaatggagcttataggaaagagtgcatcgactcttcgaaaacaatatgaaccaaaggagataccaccggatataacatcttggataggttataaattcacttttgttgttagagtcctatcaaagaaaagtgtcaagactattgatccatcctttgaagtgcttatgat

SEQ ID NO: 5883 - DNA, 1309 bp, Zea mays
  Clone ID: 700476666_FLI
atcgtttatctccctgggatatttcctgcgcgtcatcatcttcatccggccgccgctcatggagaaaagatctccagtcgccaggggataaaatctcgccgcccacggttcctttttacctgcgcgctgtgcaccttccaacccagccgtgcctgctcgccaccattcggcgtttcttccggtgggaacagagggcaacagttgacgcggcagccaaaatcgccacgccctggacttcctcctcggtgcgctgctcgctcgtcttcctgacgtccggctagagctccattttttcccccagttcccatcgtcgcgcccctggtcccagacatggccaccgtgccgtgaaactccctgtgtcgagctcggtccctgctccagtctctgctcggcgttctgcgcgcccatctcccccggctcctttcagctcggatccctgcccgcggagtttttcccctagccaagatcgtccttgcgcgctgccgtcgcctagttcgcgtcccgctcttgctccagctatggcgcttcatcgccgcagttccctatcctatgcgcgctccgctttttgtgcgcgtgtgttcgtcgtctctgttccagtcatccgcacaattttctctgctcccttgccgtggtcgtcgcgtgcctgcgcgcagctcacgccttgctagcccctgctgcgggttgtcgagctctctgcgcacgctcacctcgttctttccttgtttgccgagcgcacgaattttatctgctctccacagcgtgtcgagctcccgcactatcatcgcttctatcgcaagctcgttagccacagttatcttgaccgcgtcagctcgccagacctgtaactctatatacagcaccctcccgtatcgtcgtcaagctcgtcgaacctcgttcttctctgctcgctttcgtcgaacaccgaatcccggatattagacaaaaataagtgaggcccctgtgtattgcttatcaagtactcggttgaagacttcaatcgaagatcgtcgccgttccgcgcgtcatcaagaatgccaagaatcggatgaagacgaagctagcagcgcaatattccccaagcgctcgaccaattgcctggatcggaaaatcactaccgatctcgcggattcgagtcaactattgaaacggtaaattaatgtattattcagaatagttcgatcgttaaataaattaatgtgctagtgcgatgcccattaggtgctcgattatttgtgtgagtcacggaactctcgtgacttcatgatctttgcaattatcaagctagattcagttatggcgagttatttcg

SEQ ID NO: 5884 - DNA, 1220 bp, Zea mays
  Clone ID: 700476677_FLI
ctatcatatctgtcagtggttctgtctgtggttcaggtaatttaaacccagaagatcaagcaaattgcagtgatctggacctaaataaggcttcatttttgttaaagaatgtccttggaaactggagctcaaagttgtttgcagttgctttgttggcatctggtcagagttctacaattacggggacatatgctggacaatatgtcatgcaggtttttggaacttataccttatttcagttctagttcgcaagttgaatggcaggttgttttatgatgcatattactcgaggcatttgatgttgatcagaagtaatcaagcatttgcttgcttgcaacattagtttgtttagctgttagatatgaaaagtacagaaaataaattagtacataactcttagatttgcaatgaacaagcttgggcttatgagtttcagtgccaacctccaaggttctcttggtcagctagattgcagagaaaaaggacagatacggggggtttttagatcttcggatgaaaccctggatacgcaatcttgtcacgaggtccttggctatcctgccaagtttgatcgtgtcaattattggtggttcttcagcagctggccagttgattatcattgcatcgatgatactgtcatttgaactcccttttgctttagttccactccttaaattcaccagcagcaaaacaaagatggggcagcatacaaattcaatattcactgctgtgctgacatggatgatcggctcgtttattgttgtcatcaacacctactttctgataacaagctttgtgaaattgctcgtccagagcgggctgaccaccatttctcaagtattttccggtattttcgggtttttgggcatgctgatttacatagttgcgatcctatacctcgtctttaggaggaacaggaagtccacccagccattgctggagagcgatgctgagcttgcagtatcgggtagcagtgctgatgccggagcagaatgctcgctgggccatttgccccgtgaggacatctccagcatgcaacttccgcagcagcgttcagcttctgatctagattagataacagctgccaggaaaataaatgttttttttgttttttatatagtatagtaattacagaatagggtacgtcaggtattggcttctgttcatcctactgatgatgcttaaggaatgtatacaagaggacggatatctatgctgcc

SEQ ID NO: 5885 - DNA, 1529 bp, Zea mays
  Clone ID: 700476759_FLI
cgccgtctgccttctgcgcctccatttcggcctctgtcccttgcaagttcaatctcacctccaaccatgggtaaagagaagtcccacatcaacattgtggttattggccatgtcgactctggcaagtcgaccaccacaggacaccttatctacaagcttggaggcattgacaagcgtgtgatcgagaggtttgagaaggaggctgctgaaatgaataagcggtccttcaagtacgcgtgggtgctcgacaagctcaaggctgagcgtgagagaggtatcaccattgatattgctctgtggaagtttgagaccaccaagtactactgcacggtcattgatgcccctggacaccgtgacttcatcaagaacatgatcactggtacctcccaggctgactgtgctgtccttatcattgactccaccactggtggttttgaggctggtatctccaaggatggccagacccgtgaacatgctctccttgcgttcacccttggagtgaagcagatgatttgctgctgcaacaagatggatgcaaccactcccaaatactccaaggcacgttatgaagagattgtgaaggaagtctcatcctacctcaagaaagttgggtacaaccctgataagattgcctttgttcccatttctggttttgagggtgacaacatgattgagaggtccaccaaccttgactggtacaaaggcccaaccctgcttgaggctcttgaccagatcaccgagcccaagaggccttcagacaagcccctgcgtctgcccctccaggatgtgtacaagattggtggtattggaactgtaccggttggtcgtgtggagactggtgtcatcaagcctggtatggttgtcacctttggtccaactggcctgactaccgaggtgaagtctgttgagatgcaccacgaggcgcttcaggaggctcttccgggtgacaatgttggcttcaacgtgaagaacgttgctgtcaaggatctcaagcgtgggtttgtggcctccaactccaaggatgaccctgccaaggaggctgccagcttcacctcccaggtcatcatcatgaaccaccctgggcagattggcaacggctatgccccagtgctggactgccacacctcccacattgctgtcaagtttgctgagctcattaccaagatcgacaggcggtctggcaaggagcttgagaaggagccaaagttcctgaagaacggtgatgctggtatggtgaagatgataccgaccaagcccatggtggtggagacgttctcagcgtatcctccccttggtaggtttgctgtccgtgacatgaggcagacggttgctgttggagttatcaagagtgtggagaagaaggacccgaccggcgccaaggtgaccaaggcggctgccaagaagaaatgatgcgatcctgcgcctgctttagcaatacctagttttcatcatcacaagttttgtttgtgatcgttgctgttatcgtgtgaactgttgagatctgttagcatgtgcacttttatctattt

SEQ ID NO: 5886 - DNA, 1098 bp, Zea mays
  Clone ID: 700476763_FLI
ggaagcagaaaatgagaaaagccataccactcacatgtctagaagattctgtccaacttagtttcacaagatgagggcataaaggttgacagatccatagagttctcatatgaagaactttctgatgctacaaacaactttagtatggaccataagattgggcaagggggttttggttctgtttattatgctgagcttagaggcgagaaagctgccataaagaaaatggatacaaaggcatctcaagaattcctcaatgaattgaagattttgacacgcgtccatcacacaaatctggtgcgcttaattggttattgtgttgagagttgcttatttcttgtttatgaatttattgagaacggaaacctaagccagcatctgcatgggacgggttatgaacctctctcatggaccagtagagtgcaaattgcccttgattcagcaaggggtctagagtatatacatgagcacactgttccagtgtatgtgcatcgagatatcaagtctgcaaatatcctgatagacagagacttacgagcaaaggttgcagattttggactgacaaaactttcagaaattggaactacatcacagtcactcccatcactacgagttgttggtacatttggttacatgcctccagagtatgctcgatatggtgaggtttctcctaaggtggatgtctacgcttttggtatagtcctgtatgaacttctttctgccaaagaagctattgtgagatcaacagaattcactgatgcacaaggcctggtttatctgtttgaggagactctcagcatgccaaaccccatggaagctcttcaggaaatgattgatccaaggctaggaggtgactaccccattgactcggctgtgaagattgcgtaccttgcaaagtcatgcacgcatgaagagcccaggatgaggcctaccatgagatctgtagtggttgctctcatggcgctttcatccaaggaccatgagttaactcggggacacgattagcatagcacattgtccctggggctgctttccatgtcagatgaaaacaatacaaaagctatcgtgtacagatgcaatgtattttcgttctgattt

SEQ ID NO: 5887 - DNA, 711 bp, Zea mays
  Clone ID: 700477049_FLI
gtgtatcaaaattgacggcaagacacctttaactacaagacaaaccttagtcacagatttccaaaacaatgatgacgtcaaggcagcagtgttatccatcaaagccggaggctacgggataactttgacagcagcgagcacggtaatctttgccgagttatcatggactcctggggacatcattcaagctgaagatcgcgcgcacaggatcggtcaggtctcgtccgtgaacgtgtattatcttctctcgaacggtactatagatgatcttatgtgggacgttgttcagggcaaacttgagaacctggggcagatgctggacgggcaggagaagacgctggaggtttcccagagggactgcaggccaagcccctcgaagaagcagaagacactggtcggcttcctcaagcggcccagcgcgtccacgtccgcggaggagggtatgcccagcacttaatgaagcagcctcggatctgaggcgcggtcgtggcttgtgagcgaaccagatcaggtcataggctgccagcagccacaatggtgttcaggctctatcacgttgtaacacttctccctccgcatttgctcgctctttcgagatgacagatgtattcatacttggaggatgtatcctgagaattctaaccaggttcgggactcgtggagtaattgcgtttggctgacgaagggaagaaaaggagcaaaacttgaagt

SEQ ID NO: 5888 - DNA, 1421 bp, Zea mays
  Clone ID: 700477131_FLI
gctcttcttcctgcgcggcgacggcaggctcgcgcccctcgccatcgagctcagcgagccgtacatcgacggggacctcaccgtggccaagagcaaggtctacacgccggcgtccagcggcgtcgaggcctgggtgtggcagctcgccaaggcctatgtcgccgtcaacgactctggctggcaccaactcgtcagccactggctgaacacgcacgcggtgatggagccgttcgtgatcgcgacgaaccggcagctgagcgtgacgcacccggtgcacaagctcctgagctcgcacttccgcgacaccatgaccatcaacgcgctggcgcggcagacgctcatcaacggcggcggcatcttcgagatgaccgtcttcccgggcaagtacgcgctgggcatgtcctccgtggtgtacaagagctggaacttcaccgagcagggcctccccgccgacctcgtcaagaggggcgtggcggtggcggacccgtccagcccgtacaaggtgcggctgctgatcgaggactacccgtacgcgagcgacgggctggccatctggcacgccatcgagcagtgggtgggcgagtacctggccatctactaccccgacgacggcgcgctgcggggcgacgaggagctgcaggcgtggtggaaggaggtgcgcgaggtcgggcacggcgaccacaaggacgcgccctggtggcccaagatgcaggccgtgtcggagctcgccagcgcctgcaccaccatcatctggatcgcgtcggcgctccacgccgccgtcaacttcggccagtacccgtacgcggggtacctcccgaacaggcccacggtgagccggcgccggatgccggagcccggcagcaaggagtacgaggagctggagcgcgacccggagcgcgccttcatccacaccatcacgagccagatccagaccatcatcggcatctcgctcatcgagatcctctccaagcactcctccgacgaggtgtacctcggccagcgcgacacccccgagtggacctccgacgcccgggcgctggcggcgttcaagaggttcagcgacgcgctggtcaagatcgagggcaaggtggtgggcgagaaccgcgacccgcagctgaggaacaggaacggccccgccgagttcccctacatgctgctctaccccaacacctctgaccacagtggcgccgccgcagggctcactgccaagggcatccccaacagcatctccatctgagcgactggtaccactaccaccccaggagtgctacgtacgagctggtacatgaataagctaatataagcaatcgtgtaaacgggaagagagcggccggcacgagacggaccatgtattttgcgtaaacgtgtgggctggtgaatcgaattactaccacgtaataagtgaagtgcttgttgcaatc

SEQ ID NO: 5889 - DNA, 2465 bp, Zea mays
  Clone ID: 700477144_FLI
gtttcatttgttcactatatgatttacttgtaggtatacttactgatgtggttgcataggtgtcatttgtctctctctgcaggaatgtctcgttatcctgcaccgtatcctatgattcgtcctggttttgttccacgtccaatgccgccgcctggtgttgtgccaattcaacgaccaacaataatttctgggatccgggctattcctcctttggtagccccaactgcccggccacctgctccagctgttaagctggcagataaaccgccaaccgcagtttatgttgggaagatcgccccaacagtggacagtgatttccttctttcacttcttcggctttgtggatctgtcaagagttggaagcgtgcccaagatcctagtaatggaaaacctaaaggttttgggttttgtgaatttgaatctgctgaaggcatccttcgtgcgacacggcttctcaacaaattgagcattgatggtcaggaactggtgattaatataaatgatgccaccaaggaatacctgaagaaacatgttgagggaaagaagagagcacaagagaaggaaaaagaaacagaagatgcaagcggggatggaactacagctgttgctgaaaatgaatcatcaaaacctgtccctgatgaattggatgagacaggagatgctggagataagtacagggaagacaacactgataaatttgggattgttactgacgaagactctcaaactgacaaagatgtcgcagaaaaaataagcaatatgattgaggagtggttaaagactagaccgccacccccaccttcaccagttcaaccatctgctgatagctctggcgtagataaggcaaaaaatgattctgatgataagaatgctgctgatgctgataaaagggcagctaatgaaactgagagatctgaaactgcctctcctgataagaggaaggatagagagcatgataaggacaaacgggacaaagatcttgaaaggcatgaccgtgaacgtgaaagagtacggagggatagagagaaggatcataagcatagagaagctgataggctctacagggatcgccttaaggagtgggaatctagggaaagagagagagaatatcagaggtatagtgaaaaggagaaagaaagagatagagatcataaccgcagaagggagatcctgaagcaggaagatgagagcgatgacgaggataataggaaaaggaaacgaaggagtattagctcacttgaagataggaagaggaggaggcaacgtgaaaaggaggaagatttggcagataaaataagggaggaggaggaaattgcagaagcaaggaggctggctgtagagttgcaacggcaagcagatgaagcagctgcggcggcggctgcagccgccgaagagtctgcatcacttatggagattgatggtgatgacgaaaaggaaacagatgcacaaaacaagtcggctgttgtggaagctgataacatctcgagctttgctaatggtgttggtgctggtcgacttagtaagggaaataatggtgaggaaacatgtatgacacctggtcaaaccgcagatactaagcaaaacaacaatgttccagcaaagaaactgggttttggtttgattggcttgggcaaaaggacatctgttccatcagtttttgctgtagaggatgacgaaaataatgttgataaaagcataagacctctagtacctatcgattactccactgaagaattacaagctgtacatgctaattcttctactggggcaaatgtcacagcagctgccgagtttgccaagcgcatctcagtttctaattcaaaggaagagaaggctgaagctgagaaggataggaataggagatccagtgaagctcgtcctaatgatgagcgaagagagaagctacatgatcgcgagaaggataagcccaagtcagagaacaagaagattctggatgcaaagcaactaattgatatgatcccaaggacaaaggaagagctttttgcctatgatataaactgggcgatatatgacaagcatgagttgcaagagagaatgaggccttggatttcaaaaaagataattgaatttcttggcgaggaggaatcaactttggtggactatattgtttcctgcaccaaagaccatgttcaggctgaaaagatgctagatcttctacagtcgattttcgatgttgaggccgagatgtttgtcctcaagatgtggaggatgcttatatttgagatcaagaaagtcgaatctggactatcaggaagagcaaagtcatgaagcgaagcctgttaccctgtatgacctctgatctgcattactcatcaactgtgaccacacttgtaaggtcatactgcactacaagtatcaaaaaccatttttagtgacagagttgatggatctttttacttgtttcttgtacaaatgcatacgagagttaatgagatactgtgcgt

SEQ ID NO: 5890 - DNA, 433 bp, Zea mays
  Clone ID: 700477184_FLI
ggagcaagaggaggaggaggaacgcgaagaacgccacggcggccatggggagagggaacgccacggacgtgaggagcgggagaaagaggaggaggaacgcgaaggacgccacggccgcgggcgccgcgaggaggtggcggagacgctcatgaggatggtgaccgccaggatgtgaggggccgacgcgctcgccaaaacgagcaggaagcaacgagaggatggcgcgcgaccgacgtgcgtacgtagcatgagcctgagtggagacgttcgacgtgtatgtatatacctctctgcgtgttagtactatgtacgtaagcggcaggcagtgcaataagtgtggctctgtagtatgtacgtgcgggtacgatgctgtaagctactgaggcaagtccataaataaatgatgacacgtgcgtgtacggtgcgggtaacc

SEQ ID NO: 5891 - DNA, 1513 bp, Zea mays
  Clone ID: 700477196_FLI
gggcctgtggctgcaataaggatgccgatgttaagggtgtcaaatttcaaaggagggactccggaagtgatgcagacgagctatgctatcttggttctggttttgcctaatgatggttcattagggtggggtcgaagagagttggagattgttgaggtagttgctgaccaagttgcagtcgctctgtcacatgctgcactcctagaggagtctcagctgatgcgagagaagcttgccgagcagcatagggacttgctgcaggcaaaggatgaagccatgagggcaggggacgctaggaattccttccagactgcaatgtacgatggaatgcgaaggccaatgcactcaatccttggtctcgtctcaatgatgcaacaggagagcatgaatccagagcaaaggcttgtgatggatgccattgccaagacaagcagtgttgcatccacactgatgaacgatgtgatgcaaacatcgacaatgaactgtgagcacttgtctttggtcaggaggccgttcaaccttcattccttcattaaagaagttgttggagtggtcagatgtctaactggttgcaagggtgtggagtttgagtttcaagtggagaattctttgccagaaaggatcattggtgatgagaagagagtcttccatattgtcctgcacatggtaggcactctaacagaccgatgtaatgctggctgtatctcattatatgtaaatgtccataatgaggttgaagataggcataatcatgactggatgctgcgaagagcaaacttctctgggggctatgtatgtgtgaaatttgagattaggattagaaaatcaaagggctatctgttgagttcatcaagcagtcagataagtcagggatccaaacccaacaattctgagatggggcttagcttcaatatgtgcaagaagattgtgcagatgatgaatggcaatatttggtcagtatcagattctaaaagcatcggagaaactatcatgctagtcctccagttccagttggaacctgtgactccggtctctggagcgtcctcagatttgtacagatcatccgcaattcccaactttaatgggctcagagtcctccttgcggacagcgactgcaccaaccgagctgtaactcacaggctcctagagaagcttggttgccgagtcctttcggtcgcttctggcgtccaatgcatcagctccttcgctgcggagtcgtccttccagctggtggttcttgatcttgacatgcagacgatggatggattcgaagtagcccgcgcgatcaggaagttcagtagcaatagttggctgccgttgattattgccctagcagcaagaatcgacgacaacatccgggatcgttgccagaggtcaggagtaaatggcctgatccagaaaccggtcacattagccgcgctgggagatgaactgtatagagtccttcagaacaattaaaagagcctgacggttctcatttctttcaatctcaatagattgctatagcttgatc

SEQ ID NO: 5892 - DNA, 1971 bp, Zea mays
  Clone ID: 700477419_FLI
ctcatgtgaaaggaaggagacgagatggagagaagcaaagatggaatggtaaacagtggaaacaaggacgtctctggataacaatgttgaccgagatgatttacaaagaaaaattgtgaggccaccagcaaatctactggtgtttgaaggggacgttctggatagtgaagcgagtgagctagactcatatttgttatcaacatgtgatttttatggagatttccttctgctggatccttgtgatgcaccatctgtttttgactttctgcaaggaaaacattctggtaaagaaaatagtgtggctcgccaaggcagtccagcaccttctaaaagccaagccaatgttttcacttccccaaatgcaagatcagcgggcacaggctgtaaagccgcctctggaaaagtcctaggaggtctagattcaactcagaagaatcctgaccaaccttcaactcaagaaaccagtccagatgacaaacattggtctgatcctgttgaacctaactttactgatgatgttgaaaagcctcacccagacgatataggggatcctgttggagattattctgatgacgaggatccgtggaaacctttaaatccacatgaacctggcagcttaaagattcggccttacaggagagtgaaaggttctctacggggggttattggcactttgagaaagaaaactctcacatctatatttcctgtggcaaagatggttggtgtcatcatacctgaacatgctaaatcttttgaagcacagcagtctcagcaggaggaacattatggttcccaatcaccccctcgttttgaaaagtatttggcatcatttgaatttggagaagaaaattccaatgtgtttggagatctgaaagatgacaatggatccgatattggcattaattttgattataatgatccagacatgccaaacgacatagatgttgatcctgacgttccaacatatcctgacgagattattgctgcaactcccaaaggtactcatggtacacaggatgacagagatacacgtgaaagcctcgatgacttgtgtcggtcacatctgaatgctctccttgccagcattgctgaggttgaaaagcagagtgagatggatgctcgagtttcaacatggaaagaaagaatcgagattgccttggaagagcaggataaaaacccaccttttgatatcggttcatacggggagcaaatccttgacgcgctttcatcaagaactgacagcacaggaactgcatcttttagcgagattgtttgtggcagaccgaagtatgaggttgccagaacattctctgcccttctccagctggtaaacagcagaagtgtttatctggacaaaggacaagccacgaatgagttggtgtgttacacagctgagaatccattccatgtaaggctcatcagtcccaaccggaggccagagatggaggcacactttgctcggaagagagtcaagtccccactgcgaaacgctggcaaaggtggtgagtcctccctggcacgacatgagtgccccaagaagccattgcataaaaatggcaagattcaagtcaagacggcgatcaggttgactccagacgggaagcgaaggcgaaggtcagtcactcatctaatgcagccgatcaatctggaatcagcggatgaatgccaatggcagactgactcatgggcatctagagcctgatcgccaatggcagactgactgatgggcatctagagtctgattcttctaattgttgcaacttcagtggcggtttcattggcaggcaacgactgctgtgcaatcagctcccttgacgagacagtgaccatggttcctggttcagatggcgtactgctgacattaggcctagctagcgggtgtacatgtaacatgtacaatagttcattgtgctgttttgtacgtatttgtatcagctctcaagcctaatgctaacagggcaagatttgtct

SEQ ID NO: 5893 - DNA, 816 bp, Zea mays
  Clone ID: 700477430_FLI
caacactcaccgatagcaagtagcgccgccgacgtttcgagagcagagtatccaagctagccaagcgcgcacctcggtgacctagctagttcaggcgacgatatggcgtcaggtcaggaaagcaggaaggagctggaccgcaaggcccgcgagggcgagaccgtcgtccccggcgggaccggcggcaagagcgtcgaggcccaggagcacctcgccgaaggtatatatagccgactgcggctaaccatctgcatatgttaattcactgtcgttggctttaattacacgagtagtgtggctacctgatatgttctgaaatgttgcttgcacgtactgagtgattgcctctacgtttgcagggcgcagccgcggaggccagactcgcagggagcagctggggcagcaggggtacagcgagatggggaagaagggcggtctgagcaccacggacgagtccggcggcgagcgcgccgccagggagggcgtcagcatcgacgagtccaagttcaccaagtagtcctatcgcgtgcgtgcgtacgcagcgttcgtagctgtctgcgtagtgtaccttggccgtagctagtgctactctctactttggagtagctgaatgataataatgtagctagcagcatgcatgtaggcgatcatacatacgtacgtacacaggtacgtgtgtgtgatcatgtatgcttccagaagggtatcctagcttaatcagtcacgtcgtcaagtcgtcaatatggcaggttcgcgtcagggctttgtagtttgatagcctgtttcacgactcctcaataatcaagtagtgtaatg

SEQ ID NO: 5894 - DNA, 1811 bp, Zea mays
  Clone ID: 700477436_FLI
tcctcgcctccaccccttcccttccatctcctcccacccggcgactcctcttcctctctgccgcgccgatcgattggcccacccatcgatcgagcacggggaagaagattccagtccggagtggtttcaattcggtcgggttcgttgcccgtgtgggtgggcgctatggcggcgatggatgcctcggcagataagaacgccgtcttccgcaagcttcgcgccaaatcggacaacaagatgtgcttcgattgcaacgccaagaacccgacgtgggcgtccgtcacctacggcgtcttcctctgcatcgactgctcggcggcgcaccgcagcctcggcgtccacgtctccttcgtcaggtcaacaaatttggattcatggactccagaacaactgaaaatgatggtctatggcggaaataaccgtgcgcaagctttctttaagcagcatggttggacagatggtggaaaaattgaagcaaagtatacttcaagagctgctgacttgtaccgacagttgcttgctaaagacgttgctaaaagctctacagaagatggaaacaatagttggccatcttccccagttgcagcatcccaggctccaaatcaagctgctgcatttccagatctcaagctgacagaggtgtcaaaagaaaatgtaagtgaaaagaaagattctgagattgttcgttcgcctagagctccaacccattctttcaagaagccgattggtgctaaaaagcctggaaataagactggtggacttggtgcacggaagcttacatcaaagccaaatgaaagcctctatgagcagaagcccgaggaaccagctcccgtcctgccatcatcggtgattgagagtactacaactaggagcaaatcacatacttcccgatttgattacgttgaaaatgcacctgctcttaagaatgggaatagctcagaaggcaaccacatgagtggacatgttgcacccccaatgtcgtcaaacttctttgctgaatttgggatggacagtggatatcagaaaaaatctacgtccagttcatccaaagtgcagattgaggaaagcagggaagcaagacagaaattctcaaaagcgaaatcaatttcttcctctcagttttttggtgatcaggccagttttgaaaaggacgctcaagtctctctccaaaagttttctggttcctctgcgatatcaagtgctgacctatttggccatccggcaaacaattctagcgtggatctcagtgcttcagatttgatcaacagaatctcgttccaggccactcaggatctgtcttctctcaagaacatggcaggggaaaccgggaaaaagttgacatcgatggcatccaacatcatcactgatcttcaggaccgcatcctctgagctttaaactcacagtaaacttctgcgttgtttcagtggctggcttctcccgtcgacccgggtgacaaactggcctggcctggcctgcagatctgtctaggagttcgtaggcgtctgagaacttcctggcaatctggcatatctgtctaggagttcggaagcatctgaaaagtggcatatctgcctaggagttcgggagcagctaaaatcttgaagttagagagagagagagagaaagagagagagagggtgaaagaagagaacttatgaccaatactgtaattggctaaagtcatgtatgcttctagagctgtaacgcaaatgtcttttgccattggttttatctcgggtttgagatatatacttttgctttgtaatgatacatacatgttttctaattatgcgtagatatttcttgcccc

SEQ ID NO: 5895 - DNA, 1382 bp, Zea mays
  Clone ID: 700477461_FLI
ggtcaccctgcccatccttgacttcctcggcggcgggccgtctccggacccgttcccggtgatcctcttcttccacggcggcagcttcgcccactcgtcctccggcacggccatctacgacaacctgtgccggcggttcgtgaagctgagcaagggcgtggtggtgtccgtgaactaccggcgcgcccccgagcaccggtacccgtgcgcctacgacgacggctgggccgcgctgaagtgggccacgtcgcagcccttcctccgcagcggcggggacgggcggccccgcgtgttcctgtcgggcgacagctcgggcggcaacatcgcccaccacgtggccgtccgcgccgccgacgccgggatcaacatatgcggcaacatcctgctgaacgccatgttcggcggcaccgagcgcaccgagtcggagcggcggctggacggcaagtacttcgtcacgctccaggacagggactggtactggaaggcgtacctgcccgaggacgccgaccgggaccatccggcgtgcaacccgttcgggccgaacgggcggcggctcagggggctccccttcaccaagagcctcatcatcgtgtcgggcctggacctcacctgcgatcggcagctggcgtacgccgagggcctccagcaagacggccaccatgtgaaggtcgtgtaccgtgagaaggccaccgtgggtttctacctgctgtccaacacggaccactaccacgaggtcatggaggagatcggcgacttcctcgcggctaacctctagcagcacatgcacacaaacttcacatgttatagcaagaagatgggtggtaagcttgactttatagttgtaccgatctgcatctgctgctgcttggggtggtggtggtgggctttgctgctgataaaactctctatctaggaaagaaaccacagtgactcttttttttttttggtttcgtcgtcgggttgctgatcacaaagctgcttgatgatctgcgtcgtggttgatggagggaagcctataatttcgccgtcaatcatctaacattctgtgtacagtggtggactgatggaccaacaaggaggtggacggccttttttttgttgctgtgtctgatgtagtagtatttctcatctttttatggatcggatgggatggtgcctgcctttcattctatgatgaatcgtactgtctgtctatctatctatctacccaatgccgtcgtggaacatgtttccaatctagtactactactactaggctagatgcagaggcataagaaaatgtgctactacacctctactgctggtgtgtggcttttgtctcttttcttgtccatctctgtatacaatgctgaactgctgctaaatatattgttgtaaccttg

SEQ ID NO: 5896 - DNA, 2173 bp, Zea mays
  Clone ID: 700477624_FLI
ctcccgccgccgccaatcccctcccgttctccgccaccgccaatcccctcccgtcctccgccacctctgctgagagcgagaagagatggccggcaagggtgatgggccggcaatcggcatcgatctcggcacgacctactcttgcgtcggtgtgtggcagcacgaccgtgtcgagatcatcgccaacgaccagggtaaccgcaccacaccctcgtacgtcgccttcaccgactccgagcgcctcatcggagatgcggccaagaaccaggtcgccatgaaccccatcaacaccgtctttgatgccaagcgtctcattggcaggaggtttagtgatgcctctgtccagagtgatattaagctgtggcccttcaaggtcattcctgggcccggtgagaagccaatgatagttgttcagcacaagggggaggagaaacagtttgcagccgaagagatctcctccatggttctcatcaagatgcgtgagatcgctgaagcttaccttggcagcacgatcaagaatgctgttgtcacggtccctgcctacttcaacgactcacagaggcaggccacgaaggatgctggggtgattgctggcctcaatgtgctgcgtatcatcaatgagccaaccgctgctgctattgcctatggtcttgacaagaaggcaaccagcgtcggtgagaagaatgtcctcatctttgaccttggaggtggtaccttcgatgtctccctccttactattgaggaaggtatctttgaggtcaaggccacagctggcgacacccatcttgggggtgaggactttgacaacaggatggtcaaccactttgtccaggagttcaagaggaagaacaagaaggatatcactggcaacccgagggctctccggaggctgaggacctcttgtgagagggccaagagaactctgtcttccactgcccagaccaccattgagattgactcgctgtacgagggcattgacttctactccaccatcacccgtgccaggtttgaggagctcaacatggacctgttcaggaagtgcatggagcctgttgagaaatgcctgagggatgccaagatggacaagagcagcgtccatgatgttgtccttgttggtggctccactaggatccccagggtgcagcagctgctccaggacttcttcaacggcaaggagctgtgcaagaacatcaatcctgatgaggccgttgcctatggtgctgctgtccaggctgctatcctcagtggtgagggcaacgagaaggtgcaggacctgcttctgcttgacgtcactcctctctctctgggtctggagactgccggaggagtgatgaccgtccttatcccgaggaacaccaccatccccaccaagaaggagcaggtgttctccacctactcggacaaccagcctggtgtgttgatccaggtgtacgagggcgagaggacccggacccgcgacaacaacctgcttgggaagttcgagctctccggcatcccaccggctccccgtggtgtcccccagatcacggtctgcttcgacatcgacgccaacggcatcctgaacgtgtctgccgaggacaagacgacggggcagaagaacaagattaccatcaccaacgacaagggccgtctgtccaaggaggagatcgagaagatggtgcaggacgcggagaagtacaagtccgaggacgaggagcacaagaagaaggtggagtccaagaactcgctggagaactacgcctacaacatgcgcaacacgatcaaggacgagaagatcgcgtccaagctggctgccgacgacaagaagaagatcgaggacgccatcgacgcggccatcagctggctggacgccaaccagctcgccgaggcggacgagttcgatgacaagatgaaggagctggagagcctttgcaaccccatcatcgccaagatgtaccagggcgcgggtgccgacatgggaggctccggcggcatggacgaggacgctccggctggaagcggtggccctggccccaagatcgaggaggtggactaagcggtttgtgtcagtctcgtgtgtctgctgcagtggctggctggcccagtcgctgctcgatttatcgtcgtcgtcgcggtgtatccgcgttagaaccttttgttggtgaacaatattatcgtggcacgcgttttaagt

SEQ ID NO: 5897 - DNA, 1591 bp, Zea mays
  Clone ID: 700477714_FLI
gccgtccgcttccgtctccttggataaccacgacgcccgccggcaagcgaaagcgaagcgagccaacccagccatggagaaggcgatcgatcggcagcgggtcctcctggcgcacctcctcccctccccctccgccgcctcctcgcagcctcagcttgcggcgtcggcgtgcgcggccggggacagcgccgcctaccagaggtcctcctccttcggggacgatgtcgtcgtcgtcgctgcctacaggacgccgatatgcaaggccaagcgaggaggcttcaaggacacctacccagaggacctcctcactgttgttctcaaggctgttctggacaacactagaatcaatccagctgacatcggtgacatcgtcgttgggacggtgcttggccctggttcccagcgtgcaaacgagtgcaggatggctgcgttgtttgctggattccctgaaaccgtccctgttagaactgtcaaccgccagtgttcatctgggctacaggcagtagctgatgtcgcagctgctataaaggctggttactatgacatagggattggtgctggtttggaatccatgtccataaattccattgcttgggaaggacaagttaacccaaaaataagcgcattccagaaagcacaggattgtcttctgcccatgggaattacttctgaaaatgttgcccatcgatatggtgtaaccaggcaagagcaagatcaggccgccgctgagtctcataggagagctgctgcagccacggcctctggaaaattcaaggatgagatcgtccccgtgccaacaaagatcgttgatcctaaaactggagaggagaaggaagttgtgatatcagttgatgatgggattaggccagggaccacagcatctggattggcgaaactgaaaccagtttttaaaaaggatgggactacaactgcaggcaattccagtcaagtgagtgatggtgctggagctgttcttctcatgaaaagatctgtggctctgaagaaagggctgcccattcttggtgttttcaggagctttgcggctgttggagtggatccagctgttatgggcgttggtcctgccgtggccattcctgctgctgtgaagtctgcaggccttgagattggagacattgatttgtttgaactgaatgaggccttcgcctctcagtttgtctattgctgcaacaagttggggctggaccgttccaaagtaaatgtaaatggaggcgcgattgcccttggacaccctctgggtgcaacaggtgcccggtgtgtggctactcttctaaatgaaatgaagcgccggggcagagactgcagatttggtgttgtcaccatgtgtatcggatctggaatgggggcagcagctgtgttcgagcggggagacgcggtggatggactctccaacgtgagggacatccaggcacataattttctgtctaaggatgcgaagtagaggcgcagaaaaaacatccatccttgagcagcataagcctgctgcatttgtaatatattcgaaatccgtatttttttttcttcacaaacactactctatatacgatgaataaaagggcgacaatacagtgtc

SEQ ID NO: 5898 - DNA, 2121 bp, Zea mays
  Clone ID: 700477731_FLI
gtcacagtgttctcggcagtttcaggcctcgagttctcgctgtccaaggatcaccgtgaatatgctgtcattccaataacctgtgtcatattagcattcctatttgccctccagcactatggtacgcaccgggttggatttctgttcgccccgatagttctagcctggctgttctgcatgagtgctcttggcctttataatatcatccactggaatcctcagatctaccaagctctaaatccgtcttacatgttcaagttcttaaaaaagactagaaaatatggatggatgtcacttggcggaatcttgctctgcatgacaggatcagaagcaatgtttgcagatcttggacatttctcatacagtgcaatccaggtaacttcttgacctgcatgagagttcatataatatttctatgtcaaattattgtgcagatcacctagctctacacttctggtgcagcttgctttcacttgtctagtttaccccgcactgattttggcatacatgggtcaagctgcttacttatcaaaacatcatgacttttactctagctcacaagttggattttacatcgcagttccagataagatcagatggccagtgcttatattggcaattttggcttcggtggtcggaagccaagcaatcatcagtggaacattctcaatcatcaaccagagcctgtccctgagctgcttccctcgagtgaaagttgtacacacatctgagaaaattcatggccaaatatacatccccgagatcaattggttgcttatgatcctctgcattgctgtgaccgttgggtttagagatacaaaacacatgggaaatgcatctggtttggctgtgatcacagtgatgctggtgaccacgttcttgacatccttggtcatcgttctctgctggcacaggccaccgctgctggcgttggctttccttctgttctttggatccatcgaggcgctttacttctccgcgtccctgatcaagttcctggaaggcgcttggctccccatcctcctggcgctcatcctgatggccgtcatgctcatctggcactacacgaccatcaagaagtacgagttcgacctgcacaacaaggtgaccctggagtggctcctcgccctcggggacaggctgggcatggtccgcgtccccggcatcggcctcgtgtacacagacctgacctcgggcgtcccggccaacttctcccggttcgtgaccaacctcccggcgttccaccaggtgctggtgttcgtgtgcgtcaagtcggtgccagtgccgtacgtattcccggcggagcggtacctcatcgggcgtgtcggcccgccgggccaccgctcgtaccggtgcatcgtgcgctacggctaccgcgacgtgcaccaggacgtggactcgttcgagacggagctcgtggagaccctggccacgttcataacgctggacgcctcgtaccgctgcagcgaggccagtgagcgggagctggagctggatcccggggagcaggagcggcggctgaccgtgatcgcgagcaacccgctgcggcgccgcgccagctacgacctccaggacagcgtgcaacattcggcagcgtccaccgtggaggtgcgcgccacggccgccgacagcctgagccccagggacgcggagatcagctcggcggcggggccgaagcaggtgcggttcttcatcgacagccacgtggtgagcccggaggccgcggagaacaagcaggtggcggatgagctggaggcgctggcggcggcccgggaggccggcactgcgttcatcctggggcactcgcacgtgcagtgcaagcccgggtcgtcggtgctcaagcggttggcggtggacgtcgggtacaacttcctgcggcgcaactgccgcggcccggacgtcgcgctgcgcgtgccgccggcgtcgctgctggaggtcggcatggtgtacgtgctttgacgaggctgagacgatgcgactttcttttatgaacatctgatacagtaatcacgactgttttcagtcttcccagtaacataatgaggccgttctgtatagcttagccgtttttcagctgttcggactgttacaactgcaatatatagagtcaaaatactgtag

SEQ ID NO: 5899 - DNA, 916 bp, Zea mays
  Clone ID: 700477742_FLI
atcgtgatagaatactgagaatggtcaagagcctctctcctaaggtggtaactcttgtagagcaggaggcaaacacaaacacagcacctttctttcttagatacatggagactcttgattattacacagcgatgtttgaggcaatagatgttgcttgccccagggatgataagaagcgcattagcacagagcaacactgtgttgcaagggatatcgtcaatttaattgcttgtgaaggtgcggaaaggatagagaggcatgagccttttggaaaatggagggcaagacttgtaatggctggttttagaccatacccgttaagtccagtggtgaacagaaccatcaaaacactgcttgacagttaccacagccattacaggcttgaggagagagatggcatcctttatcttggctggaagaacagaaagctggtcgtatcttctgcctggtgctgatatttccaacttcttctaagaagcattgttaagattctttcgtggcttggggttcaggcgttcagcacatgaatccaaggtggaaccgaaacttcagtatgaagactgcacaatcaaaaaagaacaagctggttgcttccttactatttgttgcccagccttgaaactctcccacgctcaccatcatcgctgatgtacttaccatgactcagttccatccttatatataggtgcaaacaatggtcttaatattgtatgttggtagaatctggtggtattagcttccaaatctggattgctgaatcgtttgtgttactacatttagccaggatttgacagtagacacaaggagtgctgtaagatcctgtatgtacaacgtgcttcagttggtgtattgtacgtacttgggtgctatggctggtttggttatcacagtgctgagtgctgcactgttcggcgtt

SEQ ID NO: 5900 - DNA, 2164 bp, Zea mays
  Clone ID: 700477758_FLI
caaaaagcagcctgccctgttcattttctctctcctcccgtcggcgaaattttatacgccagcaaaaccgccctgtggaggaaatagagaaaaaaaacccgaatcatacggccagaaatattaaacagacagaaaggaagaggagaatagcggcgaggacgaagtggcccgcccaggaaatggcgtcgatgcagagctggcgcaaggcctacggcgccatcaaggacaccacaaccgttagcctcgccaacctcaactcggacttcaaggatctggatgtggcgatcgtgaaggcgactaatcacgtggagtgcccacccaaggagcgacacctgcgaaaggttgttgcggcgacatccatcgccaggcctagggcggatgtcgcctactgcatccacgcgcttgcccgccgtcttgccaagacccgcaactggattgttgctctgaaagcacttgtagtaatccatagacttcttcgtgagggtgatcctacatttcgagaagagcttcttaactttacacaaagggggcgtattctgcaactttcaaactttaaggatgactccagtccaattgcttgggattgttctgcctgggtgcgcacatatggtttgtttttggaagaaaggttggagtgcttcagagttctgaagtatgatgttgaagctgagcgtttgtccaaacaaggtcaaggtcctgaaaagggtcacagtagaaccagagagttggattcacaggatctgttagagcagctgccagcattgcagcagttactataccgactcgttggatgtcggcctgaaggagctgcaaataataactacctggtgcaatacgctttagctttggtgctaaaagaaagctttaaaatttattgtgcgataaatgatggaattatcaaccttgttgataagttttttgagatgccaagacatgaagcacataaagctcttgaaatatacagaagggctggccaacaggctggaaatctatctgatttctacgagaattgccggggtttagaacttgcgaggaattttcagtttcccactctgagggagccgccacaaacatttcttgcaactatggaggagtatgtgaaggaggctccacgcatggtcccagttcgagaacccctggaacttcctgagaggcttcttcttacatacaaacctgaagaatcggaggacattcctgagcctgcttctgttgaagaggaaaatgcaccagttgaagagcctgttctggtaccacctgttactgaagttgtttcacctcccaagaccgaggtggccgatactggtgacttactgggcttagatgatccaaatcctgctgtatcagctatagaggaaagcaatgctcttgccttggctattgttccaacagatggggcttccacaactggtaacactgcatttcaagataaggggtttgatcctacaggatgggaactcgcccttgttaccgcaccgagcaacacgacttcatctgcgtctgtcggtcaattgggtggtggatttgacaagctcattttggacagcctttatgatgacggggcctacaggcagaggcaacagcaacaggtgtatggttcagcagtgcctaatccattcatgacaaatgatcctttcgtgatgtcaaaccaagttgctcccccaccatcagttcaaatggctgccatgtctcagcagcatcagcagatccccacgatgatgcaaccaaatccttttggaccacctatgcagccacaggtaggcatgggcccagcaacaaacaatccctttctggatgctggattcggggcattcccagtggcgaacaatagccatcagcaacacaacccatttggcagtgcccaacttctgtaggctacgtagttacaagagcaaatttgtgcttcagcagatgcgattttttcggtgattatatcgtgcattgtgctcggccattcttccatgcgatgcgtgtattatgaattggcttcaccacacggggagctatggcttgacccaacccttgttgtaaagaaattagcgacttgtgtaacatcgaatgtatgtcaataaacagtaggcaatgttattataactataaacaaaatagcggtggtatgtaggagttctgtttatttcattgctgtttgattgccggtcttgcatgc

SEQ ID NO: 5901 - DNA, 2097 bp, Zea mays
  Clone ID: 700477949_FLI
ctcaaacgctgtttcatctttatccgaatctagtcctatggatctcaagtgccagtatgattctgagaacctggcagacggatgcatcaaaatgcaaactgatgatgagattgttgtggatggatctcattctaacgaagattctgttattgagaaaaaaaggcgacgtgtggtcgaggagatagctgccgacggaactttaccatcttatggagatctagaggatgtaaaaggtggttctttgaggcatccttctaatgcagatggatctgaacttgctcgaacaatatcaagcaatgcatcattggcagaacaagtaattgaaccagcccttgtgatgtttgaggtgcatgtgccgcccgtttgcatgcttgatggagttcactctcaacatttttttggaacaggggttataatatatcattctgaacacctgggtctggttgcagttgataggaatacagtggctgtatctatctctgatataatgctttcttttgctgcatatcccattgaaatacctggggaggttgttttcctccatcctgttcacaactttgtcctggtcgcttatgatccttctgcactaggagctggagcatctgttgtccgggctgctaagcttctatcagaacctgctttgcgacgaggagattctgtctatctagttgggcttagtcgaagcttacaagcaacatcaaggaaatcaatcataactaatccttgcacagctgtcaatattgggtcagctgattgtccacgataccgtgccataaatatggaggtcattgagctcgatactgattttggtagcacattttcgggcatattaactgatgagcaaggaagagttcaagcattatgggctagcttttctacccagctgaaatatggttgcagcagctcagaggaccatcagtttgttagaggcataccaatatatgcaataagccaagtacttgagaagattatcactggaactgaaggaccttttcggcttatcaacggaataaagagggcaatgccatttgtcagacttttggaggtggaactttatccaactttgctatccaaggcaagaagttacggattgagtgataactgggtgcaggcccttgcgaagaaggatcctgtgcgtagacaagtcctacgggtgaaaggttgtttggctggatcgaaagcagaaaatcttctggagcagggagatatgattcttgctatcaacaaggagccaattacatgcttccttgacattgagaagacttgccaagagttggaccaatccattgggtcagatggagtgcttaacatgacaatattccgtcagggaaaagaaattgaccttgttgtcggaactgatgtaagagatggcaatggtacaacccgtatggttaattggtgtggttgcattatccaggatcctcactcagcagtgcgtgcacttggctttttgccagaagaaggtcatggtgtttatgttgctagatggtgtcatggaagtccggtacatagatatggcctctatgctctccagtggatcatcgaaattaatgggcaaccaacaactgatctggaaacttttataaaggtggtgaagggtctcgaagatggtgaatttgttagggtgaggacggtccatttaaatggaaagcctcgggtacttactctgaaacaggaccttcactactggccgacctgggagctcagctttgaaccagaaactgctacatggcggaggaaaataataaaagcattgcaatcagccagggcgtgatattttcatgttttgctgcgaccttttcatgctttcagaggagcatagaggtatggaagttagaggttcgtgcctttgtttggtaagctaaatcgtgcattatatatgcaggattaagcaaccctgcactttgtagggttagttgtgtgcattagcataggggtgcttgaaagatatataaaaggtacattaaaggtatatggattcattgtctgtggtctctggacaatttgaccacaggatttgccatttgtatatcgtctattcctatattttggtagaaaaagaaataaaccgttagcctttctagcggtcatttcact

SEQ ID NO: 5902 - DNA, 1855 bp, Zea mays
  Clone ID: 700478009_FLI
ggaggaggccccggcgcgatggagtacctgaccagcgtgctgtcatccaaggtgtacgacgtggcaatcgaatcaccgctgcagctcgcctccaagctctcccaccgcctcggggtcaacatctggatcaagcgcgaggacctgcagccggtgttctcattcaaattgcggggagcatacaacatgatggcaaagctctcccgtgagcagttagagaggggcgtcatctgctcctctgctggaaaccatgcccagggcgttgctctttctgctcagagactgggttgtgatgctgtcatcgtcatgcccgtgacgacaccagaaatcaagtggaaatcagtggagcggttgggagcaacggtggtccttgagggggactcatatgatgaagctcagtcatacgcaaaattacgatgtcagcaagaagaccgcacattcatacctccctttgaccatcctgatgtcatcactgggcaaggaactgtcggcatggaaattgttcggcaactgcaaggtccactgcatgcaatatttgtacctgttggaggcggtggattaattgctggaattgctgcctatgtaaaacgggttcgcccagaggtgaaaataattggagtggaaccctccgatgcaaatgcaatggcattatccttatatcatggtaagagggtcatgttggagcatgttggtgggtttgctgatggtgttgctgtcaaagctgtaggggaggaaacatttcgcctgtgcagagagcttgtagatggcattgttatggtcagtcgagacgctatttgtgcttcgataaaggatatgtttgaggagaaaagaagtatccttgaacctgccggtgcccttgcattggctggggctgaagcctactgcaaatactataacttgaaaggagatactgtggttgcaataactagtggggcgaatatgaactttgaccgacttagacttgtaactgagctagcagatgttggccgaaaacgggaagcagtgttagctacatttctgcccgaggagcatggaagcttcaaaaaattcacagaattggttggcaggatgaatattactgaatttaaatacagatatgattttaatgcaaaggatgcccttgttctttacagtgttggcatttacactgacaatgagcttggagcaatggtggatcgcatggaattggcgaaactgaagactgttaatctaactgataatgatttagcaaaggaccaccttagatactttattggaggtagatcagaaataaaagatgaacttgtttaccggttcatttttccagaaaggcctggtgcccttatgaaatttttggatgcattcagccctcgttggaacatcagtctttttcattaccgtgcacagggtgaaactggagcaaatgtattagttggtatacaagtgccgccagtggacttcgatgaattcaagagtcatgctgataatctcgggtacgagtacatgtcagagaacaacaatgagatatacaggttgctgttgcgtgacccagaggtctagtataataggtgccgatgggttcctttgctcctataatttcgtgtcacttttgaagtaaggttccactccaaggtagaaggtgcaagtttcttcttcagttggaatgcagtcattgccaaatataccttcaatgtgccatctcaccatctgtttactcagttagattttagcgtatcagtcgtgtatttttgttgttgtgcttcgtgaactcacttatccgtttgcggcacctagagtgtgtcaaataatgataactaatatgatatcgaaatgtctgataatatatatgtatttgtgatttgggcagcatcgttgttgt

SEQ ID NO: 5903 - DNA, 1520 bp, Zea mays
  Clone ID: 700478067_FLI
cggccgtgatggcggcggctgcgccgtcatattcggcaacaacaactgagtttggagccacgagatctttgtcgccggcaacagtcccggagtcgcccaggttcggatccatggaggcacaaatcactgcatcggccacagatccgaagtcgcctcctcgtccttccttcgctagatgttctccttcgccggcggtcttgttgctagaggcgcccccgacctgtgcatccgtttcaacgccaactcctccaccagtcagttcaatttctacagcctatggtcatgctaactcattcggagtaggtttagaaattgattgggattcaattcagctagaccctagatgggaggaggaagactacaagaagttgttaacgtggaagtggtgtatgatacactgggcctgacaaatgaggtgatgggtggaaccaattgtgatggttggcaaaacgattatggtgatgcaggggcagctatagaatgcaaggacattgacgatgacattgtaatgtttgatatgaaaaatccagttatgaggcttggtaacatatatatatagtagcatgaaggagtttaggctcgcaatgatccaatatgcaattaacaaggaatttgagctaggcattgaagctactagtactcgaaggtatagaggttattgtaaaggggatgattgtccatggagtattcatgccagaaaagaagtagaagaatcgcctatcatcattgttactgccatgacagatatccacacttgtacatctagtggtaggtgaaggacaaagacacctactagtggttgggttgctgcccaagcaatacctctcttgaagaagaaacctggcatgggagccaaggagttgcaaaatgcactacatgacacttataatgttcagattgcatatctaactctttggagagggagagagaaggctttgtatgagttgtttggtagttaggaggatagtttccaactttgttctcttggaaggaagctgtgttggagaaaagtttaagaaagcttacgagggaagaatagagcaactaggagataagtctttttggccaaaagtggagatggcaaatgaggtgggggcaccactgggtaggagaggtgtgggcagacaaaggaaaaatagaatcaaaggttgcctagaaggcggtaggggcaagaaagcatgtgcaaacgaaactgtaaagcaatggaaggccaaggaagcagcgacattactcaaaaatggtttcctcgcgacgacagatttacacaagaacctagaacaccgcatttcgacaaagttatacaagaccctggtacaccacatgaacagccatcgtcttcgcagccacttccaagggtattgataaaaaaaatcactccaagaaagaggaagtcggttccactaagcatggacgagatgtagtatctgttagttgtatcatccatgtgttgtcagcatgtgactgcagacatgtgccatgtatcagacttattgtatcagactacgttcagcctacttgtt

SEQ ID NO: 5904 - DNA, 1150 bp, Zea mays
  Clone ID: 700479534_FLI
gcggacggacatgatgcacgccaagtcggagtcggacgtgacgagcctggcggcgtcgtcgccgccgcggtcgccgaagcggggcggcggcgccggcaacggcggctactacgtgcagagcccgtcgcgggagtcgcacgacggcggctacaagtcctcgtcgatgcagcccacgccggtctacaacagccccaacgagtcgccgtcgcacccctcctacggccgccactcccgctcctcctccgtcagccgcttctccggcaacctccgcaagggcgccgccggggaccgcaaggtgctcaacgacaaggggtggcccgagtgcaacgtcatcgaggaggagggcccgtacgaggacctcgccggcgatagcggcctctcccgccgctgccagatcatactcggcttcctcaccttcgtcctcctcttcaccgtcttctgcctcatcatctggggcgccgcccggccgtacgagcccgaggtcatcgtcaagagcttggtgatggacgacttctacgcgggtgaaggcacggaccacagcggcgttccaacaaaattggtcacaacaaactgttctctgcacatagctgtctacaaccctgccacaatgtttggaattcatgtcacttctggccccatccacctgatgtattcagagatcccaatagcagtcggtcaggttcggaggtattaccaaccgaggaagagccaccggatggtgacggcggtcatccacggcgagaaggtgccgctgtacggcgccgggggcagcctgatgctgtcgacgagcacgggcggggcggtgcccctgacgctggacttggacctgacctcgcggggctacgtgatcggcaagctcgtgcgggtgacgcacaaggtgcacgtgacgtgccccgtcgtcgtggacgccaagaagaccaagcccgtcaggttctccaagaaggcctgcgccgtgtacagggcctgaacttcaaatgcgttttcgtaaagctgcgatccgacggcgcattagcaacgcgcgtaggatgccgtgcctgtatttagctatcgtgtttggtggtgaagaacaataagctgcacacacatatggtttctttgagccttttggttctgtcgataaatcgcgctgtacggcgggtgtcctcttgtt

SEQ ID NO: 5905 - DNA, 741 bp, Zea mays
  Clone ID: 700479603_FLI
ctccaacctacgcagcagaggccagccacctccccgtcgctctcacgctcttcgtgcccgccgcctcccctccgtctctccctctcccctcccgtctgacgcacatggcctccatcgccggatcttccgccctctccttcgccaggcccgtcaaggcaatcaacacaaattctctagctttctcaccgttgaggaagggcaacacattcctccgcctgcaaccaatgcctatgagatctgtttcctgcgctgccaagaaggatacaacagacaaggtttgtgagattgtgaagaagcagcttgctcttcctgaccatactgaagtttgcggtgaatcgaaattctctgaactcggtgcagattcactggacacggttgagattgtgatgagtctcgaggagcacttcgatattagcgttgaggagtccagcgcacaaacaatcgccacagttgaagacgccgcggacctcatcgacaagcttgttgctggcaaagcgtagttctgtacctcctctatcgttgtcctaccactctaggtctatcccttgatctaggtttctatggtctgaagatttgtgattttctccgcactgttgttgctatccccgtgtcgtaataatacgagatgttttaagcggttgaacattacggtggtgtaatcagagtaatctgttgctgttaaggtgcattgttgtatgaattgtctctacccgagtagaagaatcagaccattcgggattc

SEQ ID NO: 5906 - DNA, 875 bp, Zea mays
  Clone ID: 700479631_FLI
aacagagaaagcaatctcgttcttctctccagaactgtggataaagtgtaaacaagcacggacagtggtgagtgagagcccctggtatccagcgaaacagctctggagaaagcgtaaacaagcagggagactgagagcccccggtgtccagcaaaaccagcgtccgcggccacctgtttccgccggcctccctccggtatataacccacccgccggtctcccagctcactcccaagccccaatacacagcacaggagcatcaacacaacctcagaggagcactactgcgagtcaatcagcgaccagcacagcaaccgaactcaaaagcaagagcccaagatccgagcggtaggagaatccggacatggcggcggcagcgagggcgtcgtggatggtggcgatgagcgtcggcgcggtggaggcgctcaaggaccaggcaggcctctgccgctggaactacgccggcgtggtcggtggaggagtggacgtggaacacgaacagctcctgcgcgaagagcgctgccaggaggagcatggagagcgtcgtcggcgccggcgccgcgtggcgcggtcgtcgtcgtcgtccaggtatatgttggagctggtgtagacgaggagcgaggcgtagatgatggcgtgctcgtggttcggcagccgctcaggcgggatggagccgtcggcgcggaacggcatcggcgagtaggcgagcatctgggtggccagcccgtacgctcccgcggccagcatggcgatgggctcgaggcgacgcaccccgtggcgccgggaaccatgctgccggcgcgaggacgacgacgcgcgacgatgaggacgacggggtcggggcgagggagaccaagagcctcatgtggttgaag

SEQ ID NO: 5907 - DNA, 965 bp, Zea mays
  Clone ID: 700479650_FLI
agccagcaagccagcgcacgtcggtaggcacgccaccatgccggggctcaccatcggcgacaccgtccccaacctggagctggactccacccacggcaagatccgcatccacgactacgtcggcgacggctacgccatcatcttctcccacccagccgacttcacgcccgtgtgcacaacggagatggcggcgatggcggggtacgccaaggagttcgagaagcgtggcgtgaagctgctgggcatctcgtgcgacgacgtggagtcgcacaggcagtggaccaaggacgtggaggcgtacggcgggaagcagcagcagcagcaggcgacgacgacgaaggtgacgttcccgatcctggcggacccggcgcgggacgccatccggcagctgaacatggtggaccccgacgagaaggacgcggcggggcggagcatgccgtcccgcgcgctccacgtcgtcgggcccgacaaggccgtcaagctgagcttcctgtacccggccaccacggggcggaacatggacgaggtgctgcgcgctgtcgactcgctgctcaccgccgccaagcatggcgggaaggtggccacgcccgccaactggaagcccggggagtgcgccgtcatcgcgcccggcgtctccgacgaggaggccaggaagatgttcccgcaggggttcgagaccgccgacctgccctccaagaagggctacctccgtttcaccaaggtttagctagccgacgtacggcacggacatctagctcgtctgtcagtccgcgtcgaccggggtgcgcggatcttttgtgcctgctggtggtttctctgactagtactagtatatatataggctctatgtatgtgcgtactatgccgtgccgtgttgtctcgtgtagtggtggcaaccggttcgtggcactaccgcgctagtattgtccacccatatcaatgtcctcttctgaacttagcggcgc

SEQ ID NO: 5908 - DNA, 547 bp, Zea mays
  Clone ID: 700479660_FLI
caaatccagtaactcgcatcttcctgcgtcatccaagttctagcagcgcagcgctcggtttcgacaatgtcggggcgcggcaagggcggcaagggtctgggcaagggcggcgccaagcgccaccgcaaggtcctgcgcgacaacatccagggcatcaccaagccggcgatccggaggctggctaggaggggcggcgtcaagcgcatctccgggctcatctacgaggagacccgcggtgtgctcaagatctttctggagaacgtcattcgtgacgccgtcacctacactgagcacgcccgccgcaagaccgtcaccgccatggatgtcgtctacgcgctcaagcgacagggccgcaccctctacggcttcggcggctaggtcgcttcctcatctggtggcgaactgcatgtgtgtcggtggtggtcgtgttgtgtgtctaatctagtgtagtccgttctctctgttgtcgctgtgttgtgtggtgtcttgtagttcatttcctgcaataccaacttgccattatcaatggaaaaccctcgttttcatc

SEQ ID NO: 5909 - DNA, 838 bp, Zea mays
  Clone ID: 700479671_FLI
ctctgggcagcgtgcgcacgtggggtacctagctcgctctgctagcctaccatggctgatcaccaccggggtgcgacgggaggtggcgggggctacggcgacctccagcgcgggggcggcatgcacggcgaggcgcagcagcagcagaagcagggcgccatgatgacggcgctcaaggccgcgacggccgcgaccttcggcgggtcgatgctggtgctgtccgggctgatcctggccggcaccgtgatcgcgctcacggtggccacccccgtgctggtgatcttcagcccggtgctggtgccggccgccatcgcgctggcgctcatggcggccgggttcgtcacctccggcggcctcggcgtcgctgcgctgtccgtgttctcctggatgtacaagtacctgacgggcaagcacccgccgggcgccgaccagctggaccacgccaaggcgaggctggcgtccaaggcccgcgacatcaaggatgcagcacagcaccgcatcgaccaggcgcaggggtcttgagagaagaaccacactcgagcggaccgcgcgcgcgacctccttgaaccactgccggcgcggcggcatatggcccttaaaggcggtggctgctgctacgtacgctgccgtagagtctcggtcgccgcgatagctctagctagtcgtttatgtgttgtgctttgtgtgtgcatgcttgtgtctgggggcatgcagtgcagtgcagtactatatgctgtatgcgtctctctttgatcggagaggcggatgtacagcatgctcgatatgtctagtttggatgtcatgtttatgatgaggaataaaatgcagtgttcaggtg

SEQ ID NO: 5910 - DNA, 942 bp, Zea mays
  Clone ID: 700479692_FLI
gagagatcgcatacgcctgcctgcccacccacctccccttttccttcctcttcgccccagcgacgcggccgcccggagaccgagcgaggcaggcaacccaccaccgagaggcagggacaggaacaggaagccggaggcgaagatgtcgtcggtgttcagcggcgatgagacggcccccttcttcggcttcctcggcgccgccgccgccctcgtcttctcatgcatgggcgccgcgtacgggaccgcgaagagcggcgtcggcgtggcgtcgatgggtgtgatgcggccggagctcgtcatgaagtccatcgtgcccgtggtcatggctggtgtgctcggtatctacgggctcatcatcgccgtcatcatcagcacggggatcaaccccaaggccaagccctactacctctttgatggctacgcccacctttcgtccgggcttgcctgtggtctcgctgggcttgcagctggcatggccatcggcattgtcggtgatgctggagtcagggcaaatgcgcaacagccaaagcttttcgttggcatgatcctcatcctcattttcgcagaagcgcttgctctctatggtctaattgttggaattatcctttcgtctcgcgctggtcaatcccgggcggattaagtgcaccaccattctgtgattaccgcaccgtttattatgctattctgagaggattggaactctattcccttgtctagtttattcttgttaccatgtattaatgtaacaatctgtagctgatggaaggtgacttccagtcatgttttggttttggtggtgtcgagcagaggttatttatttttgggttaaggtcggagtcggacggatgctcttgggctaagtggatttaattttatccttgctgaataaagaacacggaattgtagccaaataagaacgtgatatataaatatttctttccc

SEQ ID NO: 5911 - DNA, 619 bp, Glycine max
  Clone ID: 700548008_FLI
tgctgattcacaaaggcacagacttggaccaaactatctgcaacttcctgctaatgctcccaagtgtgctcaccacaataatcatcatgaaggtttcatgaatttcattcacagggatgaggaggtcaattacttcccttcaaggtatgatcctgttcgtcatgcagaaaggttccccatacctcctgctatctgcagtggaaggcgtgaaaagtgtggaattgagaaggagaacaacttcaagcagcccggagagagataccggtcttgggcacctgacaggcaagatagatttgctcgccgatgggttgatgctttatctgacccacgggtcacccatgagatccgcagtgtctggatatcatactggtctcaggctgaccgttctctaggccaaaagatagcttctcatctcagcacgaggccaaatatttaatgttgttgccaactccagaatgattgttagagttgcagacgtgcaaagagtacgataaggatgtgattttggattacctgaaagaactaatccttttcttgcaatattatgttgtgtgtacccataactccatgaatgcaactcgttgacctatctcaataaatgccgtttgtatttgttagt

SEQ ID NO: 5912 - DNA, 3392 bp, Glycine max
  Clone ID: 700548142_FLI
ctttgaacatgaaccccaacgatggcaacaactctcccagtcccaagcccttggagatggtcaacccggttcctccgtttctttctaagaccttcgacctcgtcgacgccccgactctcgacccgatcatctcgtggaactccacgggcctcagcttcgtcgtgtgggaccctctcgagttcgcgagaattgtccttcctcgacatttcaagcacaacaacttttccagcttcgttcgccagctcaatacttatgtgagtatcatttcaatcaaagaaataactgtgttttggttttgttttttgggtaggttggtatgtaatgttttctttggctgtttttgtaatttggtatgtaagtattttttttttattatgggcgaattttagtttgttatgttagattttttttttttttatcaatgttagtttgatagtttgactagaaatttcagcagcttggagattcgaacctcgaactcttctgtctccctttctcaaccattggttcaattttatatctctgttagttatgttagttttgttaatagagtggatcaaacccgtgatcttttcgctctttacttctctcttaaccatatgtatgtactttgatgtactttgattggacaagttgatgtatcgagtgggaatgtatgagtgtaaaattttttaggcgtttttatggtgtgtactgtgtactaattcttggattggatggtcttgttatttattagaatgaaggaatcttctgaatgcgtgtgggtttgtaatggttgggtgtgtagtgtgtttgtggagggaggtagaatgatgcttaactttgtttaaggccttgtttgtttgtttacttatttcaagaatagttttttgtttttagaaatttgtctgtcccagcccttgatcatattgggaagtgtttgtcccatgagcatattttttgttttttaaaagtttgtttttttgagtacttggatagagagtacttgaagaaaaccaaaagatggggaaacatctcctagtttttgccttttgatttttaaaactcttgttttagaaacgattttcaaaacttaatgggttttggatgagaaattaagcgctaagttgtatcaaattgatttagaaaacaatttttaaaacaaatagtgagaagacaatcagacaagccctaagtttcttggcttgtgttttctcatttgttaaaggcagggttggtttcatatttgaataaagattgtaggacacctccactctagttgacacctagagagataaagagagccaagagagaaatatataggtataataggtaatataatataaaaggaagagaaagatagagataaatagtaggtgttaatgaggtgttcctaagggatttagcagtttcgggttattttcttttctttctaacgagtgaagggcattctgcttaaattaagagagttcatcaaccctcaagctagctcgtgccccatatcgtatcgtttgaaatgatggaatgttcacatatcactactctaatattttgttatgttgaatctgctatttgtaattgctatcttgaggtgtacttttttgaatctgctatttgttcctaaggaatatttctcaatgatggaatgttcacatatcattacttatggaattgagtaataagaatatggtttggatgtttaccatttgcattgtagttaggattgagacatgagagactactactattggaagtggcaacaggagaaatattcctcctcttgtagaagggatttcatatttcacaggtagtactgtactactactcagggttctgtgggttgtttgtgtcattttgacttttccttatgtctgtgtaaagcttgctttggatttgcagattgcattaatccaatacaagcttgctctctctattagctcatagtgcctaagtttcagtgtacctaaaccatatatcttgttttgctttgctgatctttcttcccttttccctcctcctcattcttgtcttggggctttctgcttctgctccattcattctcaggtaacttggtgtttgtcttcagggattccgcaagattgacacagacaagtgggagtttttcaacgaagctttccagcgagggaagaagcacttgctgaagaacatccaaaggcgcaggtcatctcaatcccagccggttggtagctatattggaatcggatcttctaccgaggcaggggggtcagaggttgagattgagatagaaaggcttaggaaagaaaagactatgctgatggaagaggtggttgatttgcagcaagagcaacgaagaacagctcaccacgcaggagaagtgaatctaaggctccaatctgcagaacaaaggcagaaacaaatggtttctttccttgccaagttgatccaaaaccccgcctttttagcccgccttagacataagaaggagcaaaaggaaatagattctccaagagtggtaaggaagtttgtcaaacagcaccatgaaactggaacaacaacaacagcagaaactctccaagaagggcagatagtgaggtatcaacctgattggagaaatatagccatgtcttctgaaactccaaaactaagttcagtttccattgaacaatctcctcactacctttcacagggtttggcaggagaaatgagtgtagtaggtgcagaagaccttactgctcaaattgacaatattgtatcagatgatttggctgcagtgcaccggattacgccatctcaagaaatgatgattggagaaggatcatctacctttggagctgaagaccccctcttcaaagggaagagtgtcatgagtccaattctagaagttcctccagagtattttccttccttcccagagggtttgaccaaggagaagaaagactttcaagatttttctgctcttggaactgaaggcatgataaagctagaagatatatgggactctggcctcaatgttagtggtgctgctttaagcagtgggaatgagctgtggggcaatcatgtcaactatgaagagtttccacaatttggagtcacaagtggtatgtctgactcagatatctgggatattggcttaggaagttttggaattgatacgtggccaactgatgaaccttctcttggtgaaacagatggtcaatctggtcagccaaatgaagataggtctaagaattttgatccatagggcttctttggtcctctgcacttgttgccctttggttactttgctatatttatggttcctaggggtcatattattgaatcatttgacttataaacattattccttcacctgctttcattccttatttactttcaatttttcttattcttttagattaattaattctttaattgtccatatttttctttgt

SEQ ID NO: 5913 - DNA, 1194 bp, Zea mays
  Clone ID: 700548345_FLI
gtaaaggcgacaggcaggtgcgagccgtgaaggacgggagcgagcagtgaccaccgcgccagattcagaccacaccacccaccgcaatcaggagcggagccaaggaaggagggggcagcgggcgacgacgaagcagcggcaatccgacggcgtaatggcggcggggagggggtgaggcggcgccctgagccgtaaaggagccggctttcgtagctcttcctgggagtgaccttctccgacgaaacgaaatggcccatcaaggaccaggagtgcctaagtttggaagttgggaggatgagggcgatcacccctacacacagtacttcgaaaacgctcgtaagggcaaatctccaggcagatctgctactcagaacgagcacagaactggagatccagaagcgctcttcaaagaagacacgacgccatcagctaaagcttctccgctgcggactgggtcggaggatcctgtggcgccaaagcccaaggacgcggcctttgctcgaggcaagccgtatgctgagccagcaacccataaacacggtgctaataccagctatgaaagaaaaaccggcatggagagatcgcctctgcatcctcaccaccaagcaaggctcgtaaacagaggaggggtttcgtctccttcgtgggaacgcaggggttcgtccgaaggaaaccgtggagctgcgcccaccacacctgggaggtcgtccaagatgaggccaggcggccgtggagacgagacgcctgagagaggatctgccgtgcccaagtttggagaatgggacgagaaagatccctccacaggtgaaggcttcaccgacatatttaacaaggtgagggaggagaagcagtccggcgatgctcctgtcatcaccagcggcaacgcaggtggtggttatagccgctccaaccaaggccgcaaatacgaatcttcggcttgctcatgcttcagttggttcaggaactgatgcttccttgcatggttgctgatgcttcagctggttcagcagctgataggtgccgttgaagatttggatgaaccagagccgatcgtatcattttcacatgagctgtagtcccatcgtgttctccctgttgtgatgttgtgtggtagcaggacgtgccagaacttgactttgagaagctgaggttcagtagtttgagctgtttttgcaacatgcggtttgtttctcc

SEQ ID NO: 5914 - DNA, 841 bp, Zea mays
  Clone ID: 700548408_FLI
gaaggccggtgctgttctactgctcgcataactttccctttccccatcccacgcagcagcgacaagagcaaatcgaagggctaacgactgagcgagtgccactatccctttgcttgccctggagaggagagggtgcgctatgggcgatacagggagcagctccattctggtgcacattctggtggtcgccctatgcctgaccgcctttggcttcgccgtcgccgccgagcgccgccgcagcacgggttcaatagtcacagacagctccaatgccacattttgtgtttatgactccgatattgctactggctacggtgttggtgctttcctgtttcttctctcaggccactcactgctcatgggtgttacaagatgcatgtgcttcggtgcaccacttgcaccaggtggaagcagagcatggtccatcatatacttcgcatcgtcatggatcacatttgcagttgctgaggcctgcctaattgccggagcaacaaagaacgcataccacaccaagtatagggatatggtatatgctggtaactggacctgccaaactctgcgcaaaggagtgtttattgccggagcagtcttcgtggtgttcaccatgattttggacgtctacttctacatgtactattctaaggccactagccaagctacaaaaaggatcagtaagacaactcccagcgttggcatgactggctatgcgtgagccacctaatgaaagtcccggtctgattagaaaaataactatttcttttttttgtgtcgtttttgtaccactgcaactatttctatgtttgttctattttcagtaacactgcagtgagtgatttgggat

SEQ ID NO: 5915 - DNA, 239 bp, Zea mays
  Clone ID: 700548484_FLI
cgagataccggatcagaaattcaagggcgatgttagctacttcatctgcagcaggcttggggcaggtccaaaggttgttgttgacgaaggtcaagcactgatcgattcagtcaccggacttccaaaaggcgtgtagttctagatttaggttggaataatggtttaagctggggattaaagacaatggtatcatacaagcaacctgggccggccaataaagatagaacacgttctcgcct

SEQ ID NO: 5916 - DNA, 220 bp, Zea mays
  Clone ID: 700548490_FLI
atgtaaatctgtacagattgtaatgaatcacgtggtctataatctggcaagctgaatttgccttccaacagtgattgtctgatcctaaccggttctcagcacaggtagagatgggaaccggttaggatcagacaatcactacctgtgctgagaatattgtaggcgctttatcatttgttactacagcggggaatgctctagtgtgcatcggggacggctc

SEQ ID NO: 5917 - DNA, 744 bp, Zea mays
  Clone ID: 700548546_FLI
gaagccggcagtagaggcggaggctgacgagcgagcggcggaggagatggcacctaagaaggcagcggctgccaagaaagcggccgaggaagttgaggtggaggaggtggtggacggggacgaggcggtcgatggggagggcgacggtgacgaggacgacgacgacgacgacgaggactcagacgacgaggaagaggtcgacggtgaagacgatcaggaggaggagctgggaaccgagtatctggttcagcctcttgggcgggctgaagacgaagagcactcgagcgactttgaaccggaagaaaacggtgagggtgccgacgatgaggagatcgatgaagaggacgatgacggtgaggactctgtgaaggcgcagacctctacgaagaggaagaggtcaggcgacgaagaagaagaagacgacgacgatggggatgatgatggtgacgatgatgacgatgggaggccaccatcaaagcgatagtatggttagctctagttttgtagctgtgtccttgggtgtttggtaggtaggtagtgctgctgatgttggtttagaagaactcatcatcacctgggatatgtgtgtgatttggcttggccgatggatgaatgatgaaggtcttgtacttgttgctgcttctttcatgttgatgaactcgcactgattcactgtacatgctagcttctaattgtctgtctagacagctttatgggtttaactagaatcggatttttttccct

SEQ ID NO: 5918 - DNA, 734 bp, Zea mays
  Clone ID: 700548561_FLI
atgcccttattcagatggaagtggtagaactggaagtattctcccggttcaaggtatggtggtggcactggtggacgtggtgatcgctttggaggatcagatcgttttgctcgctatgatgatgatcgatatgatggtgggcgctatgtggacagcagggatacttattatggttccgggcgcgatcgctatgcaccggcagcagaacgctattctggtgacaggtacagtggtgcagatcgatatgcgtccagcggctttgccagagaaaggagctatgagagagatggagggaggtccaatggaggttactaccgtgatgaaccgaggggcactggtggctatggcagaggtggttcacgtggcggcggcggcggtgggcctgctcgctttggtgggagttaccgagataggcctgctccatacgatcgtcccagcaggggaggagcagctcgtgcttatgatgatcgttactgaagaatgttcccctgaggcagaacagagatatctgtgtatttcagctatgcactagtatttacatttgccagcttgatccttcaattccgtgttatccagcagttgcagtttgttttattagtctatgaagacaatggttcagtccatgggttattaatatgctggtaccgtaatctttaggcagtgtgctcctggttgattcgtcatgtttgtgtaactactttggagtttgcactaaataatgaactaattccagt

SEQ ID NO: 5919 - DNA, 807 bp, Zea mays
  Clone ID: 700548595_FLI
acttcagtggtagaaagaaagggaagaacagagagacaaattatttttgaagatccagagcactcttcggcgtattgtcttgcatttagagtggttaatcccaatcatcttcctcctttaaaggagttgaggaagttgatgagaatccaatctctccgttgcaatgcattatataaccacagcgctaccagattatctgtagtccctatccacgcatcacgctctcaggccctaaggtacctgtgtatacgattggggatagaagtgccaaatgttgcagtcctcgtgggtgaaagcggcgattcagattacgaggaactgctggggggtctccataggaccgttatcctaaagggcgagttcaacatcgccgcaaacaggatccacacggtgaggagataccccctgcaggatgtcgtcgccctcgatagctcaaacatcatcggtgtcgacggctacaccacggatgatctgaggtctgccctgcagcagatgggtatactggcacggtaacaccttccggagcttccgtttccactaccaggtcaacgaagagaaacgagaaaacagacagaatggtgacgaaacaagtgcgaccgtttccatgctcgatgggaatgccgattttgcattgtaggctgtagcggttgtgttcgtgtgtgtgtgcccgcgcgcggtggtggcctattcttgtgctgtgaataactgcccctcctttgtttgtgatatgccaaattttgaagtgagtacagtacaaccaaacatgttgatgatggaaaaacgaatggagaaaggggaaaaacaaac

SEQ ID NO: 5920 - DNA, 999 bp, Zea mays
  Clone ID: 700548596_FLI
ggaattatcatcagattcatctcagcatgttcgttcagctttggcatcggttattatgggaatggctcctgtattgggaaaggacgccactcttgaacaactgcttcccatttttctttctttgctgaaggatgagttccctgatgttcgactcaacattataagcaaacttgatcaagttaaccaggttattggaattgacttgctgtcgcaatcacttctgccagccattgtagagctctctgaagataggcactggagagttcggcttgccataattgagtacatacctttgttggccagccagttaggtgttggtttttttgatgacaagttaggggcactttgcatgcagtggttggaagataaggttttctcgatcagagatgctggtgccaataatttgaagcgtttgacagaggaatttggccctgagtgggcgatgcaacatataattccccaggttttggagaagataaacaacccacattatctgtatcggatgaccactttgcaagctatttctttgctagctcctgtcatgggtcctgatatcacatgccaacagttgctccctgtcgtcattgcttcttcaaaggacagggttccgaacatgaaattcaatgtcgctaaagtcctgcaatcacttgtaccaatccttgatcaatctgtaagttgtagtcatcaactctgttgctgcgatcctatttttatcaatatttggctttttgcctgccccaattgaatgcgtatttgcaggttgtggagaagacagtgaaaccatgcttagttgagctcagtgaggacccagatgtagatgtaagatactacgcacaccaagcccttcgggcgtgtgaccaaatggtgatatctagttgactagcctgtccaggaattaacaaatgagatacatattggtctattctttttgaacattttaaagtgttatgtagtcttaaaaatattgtaccaccaatgacgttgatgcatctttttatt

SEQ ID NO: 5921 - DNA, 1362 bp, Zea mays
  Clone ID: 700548667_FLI
tactccttgaccaaggtgactttttggtccattttatggatattgctcgagaggagcttacaaagaaaccagaagaaatatccgctgaaaaacttcagtctctgcttgacattgctttacggagtactgcagctgcttcagatccaagccatgaggaattaatctgctgtgtggaaaggagttccctccttaagaaactggccactctgaaggacttggatcctgcagataagcttgctgcagcagatgttgatcgatcaatgcaattaagcatcacgggtttggaaacattctgccttagcaataaggtccagtggccgttatctcttgtaatttcaaggaaggctttgacaaaataccaattgatctttcgcctattgttccactgcaagcatgttagtcgccagctgtgtgcagcatggcaaatacaacaagcattccggtctgtcaagattctagggacaccaattctgcggtcatcaattctttgtcgtagcatgctcaagtttgtaaatagccttttgcattatctaacatttgaggttcttgaaccaaattggcatctgatgcatgaccgccttcaaacagcaaggagcatagatgaggttatccagatccatgatttcttcctccagaagtgtctaaaagaatgcttgctgttgtcgcctgaactccttgtgaaagtcgagaagctgaaaggtttatgccttcagtatgccacttccatccagatcttgatgccatctatcgatgtcgctaactctgagaacacatcgaagtctaggaagtcaagatcaagaatcgataaatcacaggacagagaccagcagctgaaactagcatcagagaatgttgtcatgtcagagtcgatcctgaaatttgaagcagcgttcaattcagagctgcagagtcttgctcctacgctgagtaacagttcacaagcggagccgtacgtgactcatctcgcacagtgcattcttggcgtgcgaatcggccaatgagttatttgatgggccgtacccatacctgcctgccttcatttggacttttggcacaatgccatactctatgtgcgccgctgcagtcaaggtaggtgcatatccgtttcttgtgaatgctaatgtggagctacgacgcgtttagtgaccctagggtggtgtcgggagccttgttatcttgagctcgaaccttgctgtgtgtttatcagctgcgactcagcatttcgtgctgttgatatctgacaatagcaatgtgtggttgtgttgtgttgtgttgtgagactcagatgtaagctttgtggagttcatttccacgtgtgtgggaaaagtgtttggtttgaatcgaactgggcattggtattcc

SEQ ID NO: 5922 - DNA, 1140 bp, Zea mays
  Clone ID: 700548672_FLI
gaatatttcatgtttctcctcagcacacgtgctggaggacttgggttgaacttgcagacggcggacactgtcattatatttgatagtgactggaaccctcaaatggaccaacaagctgaagaccgtgcccatcgtatagggcagaagaatgaagtgcgtgtgtttgttcttgttagtgtcggctccattgaagaagagatcctggaccgtgcaaaacaaaagatgggtatcgatgcaaaagttatccaggctgggttgtttaacacaacttccacagcacaggacagacgagcattgctgcaggagatccttaggagggggacaagctcgctgggaacagatatccccagtgagcgcgagataaatcgtttggctgcacgaactgatgaagaattctggttgtttgagaagatggatgaagaaaggaggcttagagaaaactacaaatctagacttatggatgggaatgaggttccagattgggtattcgccaacaatgatttacccaagagaaccgtggcagatgagttccagaatataatggtcggtgcgaagcgacgtagaaaggaggttgtctattcagactctttcggtgatcagtggatgaaatccgatgagggatttgaagacattccaaaggcgactcagaggtcgaagaagactgcttactcatctgacatccaagttgagtttagtgaaaggaggaaaagacctaggtctgtagaaaacagcgcagacggtgtgagcaacccgacgtggacgcctgacaaaggaagggctggagtttcatcatacagcaaggacgagactgaagatgatggcgaagacgaagtcattactagcggcttacaaaagggaaacagtttcacatggaataccctaggaagaagaaggtcaagccacttcagttcgtcatcggactcgagagggcgcccaacattctaatggcaacatacatgaatgttatggcctcgacctgttggttgatggaatacccttgtagagcagggctgcgactatgactgagtaccttcaagcttatgaactttattaggattactagtatactgtatggacttgttggcatgaatttgtaactcctttaaatattaattgtttaaacaactggtggtgtttgct

SEQ ID NO: 5923 - DNA, 1158 bp, Zea mays
  Clone ID: 700548828_FLI
ggtcaaggagctatttggtggggctggttccacaaccacacattgaattatactagaccacatcttgtggagttgatgtattctaccaatgtcgtcatatctaatctaaccttcaagaactcgccgttttggaatatccaccctgtgtactgcagccaagtgcttgtccggcatgtcacaatcctagcgcctttgaattcgccaaacaccgacggcgttactccagactcttccacgaatgtgtgtatcaatcattgctatgtaagaaatggcggtgatgttattgtcattaaaagtggctgggatgaatatggcatttcatttgctcaaccaagctccaatatcagcataagcgacatcacaggggagacaaggggtggttcagggattgcctttggaagtgagatgtcaggtggcatatcggaagtacgggctgtgggcctccgcattgtcaactcccttcacgggatcagaatcaagacggccccggggcgcggagggtacgtggagaatgtgtacatagcagatgtgagcatggacaatgtttcgatggccatcaggatcactggaaactatggtgaacatcctgatgacaaatatgacagcactgctctccctgtgataagcaatattacaatcaaggatgttgttggcgttaacattggggttgctggtatattggaaggcattcagggggacaatttcagcaacatttgtctgtccaatgtttccctcagtgtgcaatctgcacatccatggaattgttcacttattgaagggtattcgaactcggtgatcccagaatcatgcgaacagctcagaagcaattgtagacagacatccatttgctacgatggaagcagttcttcagtaatgagtgtgcagcaaccaagacatacatcgcccaccagccggttgctagatctttttactggagttggcttcattttagtgtaggtagagctgtgcttgttcttgctgcaaagggggcttgcttcatgtagtgagagccctattagtcatgtatatctgattcttgcaattatttgtgattagagtgccacttgcttcatgtatatagctgttgagatgactgtcggtgtatctttgcctgttttgttccaatttttggtatgtgaatgcaatctgcataacttt

SEQ ID NO: 5924 - DNA, 662 bp, Zea mays
  Clone ID: 700548926_FLI
gccacggccatcttgccaggtctgcaaaaaatatacgcgcgcctacttacattgcctggtcacaaaagatgctatgggttctcagctgctgtcatatcataacttatcatttatgatgcggttaagtagagacctccacatgtctattcttgaaggacgatttccagaattcgtgcgaggattcttgagggtgcagtttccaacgggagacgttccgcagtgggttcgcaacgcgatggaggtcgctggcattgacatatccgagtgctgtgcttccaccaatgtctgacaccaagcgtataggggccacctttaactgtaccggttgactgcaaatggagttgtgccgagttaagactcttcggcaagcaaaagacgacgacaggctttcacaaagaagtttttttccgtcatacatgtagggtctcacacggattcagcataggattttccaatagtatgctgaagcttggcgacaggttttgttagtgttttgtgttgtgtttggaaaccgcagaggtatgctatgctattcttctggggtctaggttatgcttcgtcttaatcactggatgtgatttttagtggtacggtcagatcaaaggaaggtgtacccaactctgacgaatattttttgttataacgaaaagaatgttatagtc

SEQ ID NO: 5925 - DNA, 1136 bp, Zea mays
  Clone ID: 700548931_FLI
gcagtgatgagaaaaatggccgtgaagaacaattgaaacaaatgcatctggacatggaagcattgcttaagtacctttcatccgtaagttttagaagttcagataacgaagacaaaggaaaagatgaaaggtacttaagcagtgatgagaaaaatggccgtgaagaacaattgaaacaaatgcatctggacatggaagcattgcgtgaagataaatcaaagctggaggcgatattggagaagaagactgatgaagagcgcaaactttgtagcagagtagaagatcttgaattgcaattgaacaaagagaaagatgatttccaaaggatgacctccaaaaccaaaaagctaatcaaagcacatgggcgttatataaaagcacaggaggatttaaagaggtctcaggctcgctttgagaggctagcagatttgcttgcttcagatattttgaagccttataccaaggagcagggttccatcggtattactgccaatgacgatccatataatggtaatgaaatgagcccaagcgaccaaagacaaaaccatgtttcagcatcgagaaagagacctatttccctcccaagaagtgaagaagcaaaaactgggaagagacagagagagaatggtgatgatatgattccaacaccagagaactatagacctgaagatgctctagaacatgtccaagatagcaagggaactgatcgactagaatcatttacagtgaagaagttaagagtgggtgactacgatgatgaaggaaacattgtttcttcaagcaatatttttgcggataggtacaagggcgatgatgaggaagttgatgttgattagtgacccgatgccgtcggtcgctgataacgatttgagctgtacgaagcaatttcagcagacgacatcgatgtcagcttctaaaactacttgtatgccttttgcatcgggtaatagggcctggtatatttggtagctatttatgtgcttagactgagttgtgatgctgtcaaacatgattacatgcgatgctagaattttcttcttttctgtgtttcctgagactcgaagaggatattaatctgtattcgcctcatgtattattcttagccagtttgagtatgagatttttggactggtgtt

SEQ ID NO: 5926 - DNA, 1030 bp, Zea mays
  Clone ID: 700548979_FLI
gatgatattgaacccagctggcctgctaagaggtcatcagtcagcccagttcatccgaaaaattcacctcaatcagggagctctggtgatgagactagatgtaacaaccaaataaaaagggctcctagtgatgcgactggtgccagtccggcttcacctcaggcatcagagagaagcccagatactattatgtctgcccctaggtgtacgactgcaggagcagtgttctggtgatgcaattagtaagcatgatgttcctcatgttgagaactgcaacactccaactgtagccgtgtgcacaactttgaagcgtgtagcggagaaagttgtatcagagctagttggaagtgaaaggatggggagcaacaacagtgctgaattgctggagagtatggaaaaggctgaaaatgtttgttttggtgggaatggagttagtcaaggtggccttccagaagagttagaggtatgaacaaggatacatcgtggaaatcattactgaggatcagtggcgtcaacgacacaaaattgaaggaagaattgtggagatagacaagttctaccgcttgctgggtggaatggtaagtagctcaactcacaagtttccttctggacacagatttgcaattgcggaggtttctctgacaggagatggtcgaaaatcatgccttgtaacggcatggcaaaaaacaacaaagaagatttcgtgtaagggcatagtcgaatattatgtcttgctggtacactctagatcagcatggacttttagtttttagtttttacttgttgagcagctggcttcccagagttgacttgtttgagtctgtgatgcccctgccatgctgttttctagaatagaactagatgagatgctgtgtcccctaaggcccttttgtacctctcctttgtaatataagattttttttgactttcttgttagtggtacctagggatgaaaacggtcggaaacggtatttattcggtaatcagttttttctttgattgcgaataaataggatatggaatatacaat

SEQ ID NO: 5927 - DNA, 1439 bp, Zea mays
  Clone ID: 700549002_FLI
agatggtgctgaagacggaactctgccgcttcagtggccagaagatctatcctgggaaaggcatccggtttattcgtgctgattctcaggttttcctttttgccaactcgaaatgcaagcgctacttccacaaccgcctgaagcctgcaaagcttacctggacagcaatgtacaggaagcagcacaagaaggacatccatgctgaagctgtcaagaagaggcgccgcgccaccaagaagccatactcgaggtccattgtgggtgcttccttggaagtgatccagaagaagagagctgagaagcctgaagtccgagatgctgctagagaagctgctcttcgtgagatcaaggagcgcatcaagaagaccaaggatgagaagaaggcgaagaaggctgaggtgtccaagcccctgcgcctcccgccgggggttcgtcacgtttggtggaggcgccgcccgcttctctcccacgctgcggtccggccgtgggttctctggtgtgcaaacccatgttgccgctgttgaacaagcaattgtaaaagatgctaccaagctggaagctccagttgttgttgttacaggtgcatctagagggattggtaaggcaactgctctagcccttggaaaagcaggatgcaaggttctggtaaactatgcccggtcctcgaaagaggctgaagaggtctccaaagagattgaagcatctggtggtgaggctatcaccttcggaggagatgtttcaaaagaagctgatgtagagtctatgatgaaagcagctctagataaatggggaacaatagatgtgctggtaaataatgcagggattacacgagacacattgttgatgaggatgaagaaatctcagtggcaagacgtaattgatctgaatcttactggtgtcttcctttgtacacaggctgcaacaaaagtaatgatgaaaaagagaaagggaaaaattatcaacattgcatctgtagttggtcttactggcaatgttggccaagctaattatagcgcagccaaggctggagtgattggtttcacaaaaacagttgccagggagtatgcaagcagaaatatcaatgtgaatgctattgcaccagggttcattgcatctgatatgactgccgaacttggagaagagcttgagaagaaaatcttgtcaaccattccgttagggagatatggccaaccagaggaagttgcagggttggtcgagttcctggcccttaaccccgcagctagctatatgactggacaggtgcttacaattgacggagggatggtaatgtaagatttgagttagcttgatgcacttctacttttgctgagcatttaatgttgaacacccttgttgtgcacgggcgattttggacaacaaattagtgttgtctctttctttgtaatactctctggtaataaatctagcatgtggaatgg

SEQ ID NO: 5928 - DNA, 914 bp, Zea mays
  Clone ID: 700549095_FLI
gattttagccgccgccgctgctcatctcacatccctcgagaagacgcctgctcctcgccgatcgatacgatggccgtcttctccgacctccacaccgccgacggcctcaagtccctcgaggctcacctcgccggcaaaacctatgtgtctggtgactccattactaaggatgacattaaggtcttcgccgcggtgccgtcgaagcctggcgctgagtttcctaatgccgcccgctggtacgagaccgtctctgcggctgtagcctcaagattccctggtaaggctgttggtgtaaatctgcctgcgggatcagctcctgcggcagctgctcctgcggatgaggctgaggatgatgatgaccttgatctttttggtgatgaaactgaggaggacaagaaggcagctgatgagcgtgctgccgctgccaaggcctcttctaaaaagaaagaaagtggtaaatcctccgtccttatggatgtaaaaccatgggacgatgagactgatatgaagaagctggaggaggctgtccgcagtgtccagatggagggtctgacttggggagcatcaaagcttgtgcctgttggatacggcatcaagaagatgactatcatgttgacaattgtcgacgatcttgtgtccatcgacactctaattgaggaccaccttacgcaagagcccatcaatgagtacgtccagagttgcgacattgtggctttcaacaagatctagagttcagtttctgagtttgggcaacggcagcggctcagctcgtcaagtttgtgctgggatgccagtttatcccttctagtctattacagaaacgttgttcggagctgagtctattataaacatcttggtctgagtttattgttgagtggtgccagtttttttcaatatacatttatcttaaaaac

SEQ ID NO: 5929 - DNA, 784 bp, Zea mays
  Clone ID: 700549103_FLI
gatttcggcctggcgcgatggcaacctgatggagacatgggcgttgaaacaagagttatcggcacattcggctatctggctcctgaatatgcacagagtgggcaaataacagagaaggctgatgtatactctttcggggttgtgttagtggaacttgtcactgggcggaaggctgttgacattaaccgaccaaagggtcagcagttactaactgaatgggcacgcccattcttggaggagtatgcaattgacgagctcatagacccacgactcggagagcgctactctgaaaatgaggtgtactgcatgctgcacgcggcaaacttgtgcataagacgcgacccacattcaaggcctcgcatgtcccatgttcttcgcattcttgagggtgacatggtcgtggaatctggtggttctgttactggcagtagtgattctgggagcagaagctggaggatgctgaacgaacagcaacattgccaggagtacagtagcccggctcaacaagagtcgcaaagggcaggcgaggggaaacgctcctacagtgccttgagggcctcttgggaccgagacaagcagagtatctccaacagatattagtgccgtctcataatgcagtgcagctgagattgtttagtcctgtattattccttcgccctacctcccggtctcaattttttttggcttgctcttttgtcttcacttcgtagcaatttgtaggccgaaagcttttgctgatacattgccctggtgtatagtagaaatgggtaataggtttacaagt

SEQ ID NO: 5930 - DNA, 1508 bp, Zea mays
  Clone ID: 700549105_FLI
gaaacattcagtttctagcccagggaagaattcttttcgtgatcatgctgaagagtctaattatgattctattggtgtatctgggagaccatctttacaagcagatcatcaacaattatctcgtagacatgaaaagagaagtccacgaaaattttctgagacttctctgtcaaatggattccatgggcgtgagcatagacattccaataaccatccacctctgccaccaatgccacctccaatttcatccgtgtccatgcaaaatactgattcagttaataggcagtcatcttcgttcagtgctcgagatcgaccaacacctaatccttctggttatcctacacaatcttttgactctagtatgcctagtgctttcacaggccttcagggtcaaactcaatacatgcttgcaggcgctggcagttcatcagcgaatgagttacccaatgtggaggccaagcttctatggaacacatttccagcaaataggatccctctggagaccttcagctcaggtttacctgctcggccgatgccaccccttacaccttattcagctgttgctactcagcacgctacgatgaactctggctctcctgcaaacctgtatagccagggcagtgttgtccagccttctccaactgcttctattattagtgattcaaatttggccatgaactccgcatctggcagcatgcttgcatcgaatctgctgccatcatttgcatcacaatttctgatgagcaggccttcaatgcctactccgttttttggcacgcctcttcaacaagttcaattctcatccggtcttccacaaaatatttctaaccctcagccacctgtctcaatacaaccacggccacccccacccccaccacccccgcagcagccacatccttctcagacactccaacaacttggtgctatccaattaccacaccaagatcagcagcactcatatccccatagtgctatcttgccacaagttacgttgcagtttcctaaccagctacccattcctcaagtacaattgtatcatcaaagccagcaggaatctgggcaaacactgaggcaagttggtgaacaatcacaacttcagaaccagggtatgcaagcagatagtttctctcaacagcagcaagactcagggatcaacttaaaccagttcttttcatctccagaagccattcagagtctacttagtgatcgtgagaagctctgccaacttttagagcagaatccaaaacttatgcaaatgctccaggatcgcattggccagttgtagtcgcactggaggtgctattgtgaaagtgaaatctgatgctggtcgatcgctaggttcctagagtatggtgttgttttgttttcggctatggctgtagctagatgaaagcaactgccagcttgctagtcgccgaaatgtattcctatgtacattatatgtaactttgttctgtaatgtgaaaatttgtaatgttagtgcgtatctaatttatagttttaagttt

SEQ ID NO: 5931 - DNA, 130 bp, Zea mays
  Clone ID: 700549310_FLI
agtttccctagctggaaatatttggaccactcaatgtgtgtgctctgagtggctgttgtggtaattttatgccctaatgacatgacataaattactcctaatatttagctatcgatgaatctcccaatgt

SEQ ID NO: 5932 - DNA, 1497 bp, Zea mays
  Clone ID: 700549321_FLI
gtttaatacacatgcttctcaagctgaggtattctctgatatccaacctctgatcagatcagttcttgatgggtttaatgtgtgcatttttgcctatggtcaaactggatccggaaagacttacacaatgagtgggccaggcacatcaaaagaagattggggtgttaactatcgagctttaaatgacttgttcgacatctctctaagtagaaggaatgctttctcatatgaggtgggagtgcagatggttgagatttataacgagcaagtgcgggatcttctctcaaatgatattgcacaaaaaaagacttggaatttggagtacatctcagcctaatggacttgttgtccctgatgcaagtttacatccagtcaaatcaacactagatgtgctacagttgatggaaattggacaaacaaatagagcagttggatcaacagctctgaatgaaaggagcagtcgatctcacagcattctgactgtgcatgttagaggggtggatctgaagaatggatctacttccagaggatgtctacatctaattgatcttgctgggagtgaaagagttgagcgatctgaagcaattggagatagattaaaagaagcacagtatattaacaaatccctctctgctcttggtgatgtgattttttctttggcacagaaaaatgcccatgttccttatcgaaacagcaagctgactcaagttctacagagctctttaggtgggcaagcaaagacactgatgtttgttcaaattaatccggatactggatcatattcagaaacaataagcactttgaagtttgctgaaagggtttctggagttgagttaggtgctgcaagaagtaacaaagagggtaaagatataaaagagctgctagaacaggtttcatctctgaaagacacaatatcacggaaagatatggaaatcgatcaactcctgaagaacaaagccaaatctccaggttcatcaatagatagaaatgacagtcgccaacagatccggcgactatcagggactggatcaagtgaagccgaatgtgaagataacatgtctgatgatggctgctcagtagcaggaaccgagtattcagtaggtggtgcttcagaggcgacagcagaacggatgcagaaggccccatcaaggatagccaggctattccacacaaagaatggacagcctgcaaactccaaaccaaaaccaagggagtctgctctgaaaccaccaggtcgcacgacatctacaggaggaagccaggcgacaggaggatctttagtgaaaccccctaagaggcggtagagaaataaagattccatcatctaggatttgccatgttgatgggggtatgtgacgatgtcactgtaacgggttcacttgtcatcaccatgatgagcagccgactgtaggctggatgttgtatgagctggacgccatgaggttggtttctcagccctgctgaccatcacgttagttatcgactatgttactgacc

SEQ ID NO: 5933 - DNA, 718 bp, Zea mays
  Clone ID: 700553279_FLI
aacgtcctcggcaccatgagtgaggctgacctagagttcatcgacaacccaaaggctcggagatacatcaagtcccttccctatacccctggtgttcctctcgtaagtatgtacccacatgcgcaccctcttgccattgatctgttgcagaagatgctcatcttcgaccccaccaaaaggatcagtgtcaccgaagctctcgagcacccttacatgtcccctctgtatgatccaagcgcaaatcccccagcccaagtgcccatcgatctggacatagacgaaaacatcagctcagagatgatccgggaaatgatgtggcaggagatgcttcactaccaccctgaagttgccacagcaataagcatgtcatgagagattccacagcccccaggacatcagcgggggctcacctcttctttttttgtctttgataaaagcctactgcgagtagccgattattgcggcacctagctgttatagtacacttaatgtctgcttggaaccaattatggcgcctagctgttgtagtacccttaatgtctgcttggacacttccgcttgtgtaaatatgcgcccaataagagcggcgtatggatatatgttgtcactatggaccattacttgttgtatgcactgtatatctatggactgttgtggtgttgtattagttcatgaaccatgaagctttgaagtaaaaatcccatgcatgttaagtttg

SEQ ID NO: 5934 - DNA, 1533 bp, Zea mays
  Clone ID: 700553382_FLI
gttatccatgtttctgaaatcgaagagtggaatatggtcaaaagcctacatatcaagacggtggatgaacttggacttccaagatctgtaatacaagacatgctagatgaactggagcaactattgaaaggtatcgctatgatgaaagagctgacgcctaggaccagtgactaccttgtttcatttggagaatgcatgtccaccaggattttttctgcttatttgaacaaaattcgtgtcaaggcacggcagtatgacgcatttgatattggtttcattacaactgatgaatttggtaatgcggatatcttagaagcaacctatcctgctgttgcgaagagacttcatggggactggatacaggatccagcgatacctgttgttactgggttccttgggaagggctggaaatctggtgctgtaactactttaggccgaggtggtagtgacttgactgctacaaccattggtaaagccttgggactgagagaaattcaggtatggaaagatgttgatggtgtacttacttgtgatccaaatatctacccacatgcaaagactgttccatacttaacatttgaagaggccacagaacttgcttattttggtgctcaggttttgcatccacaatcgatgagacctgctagagaaggtgatattccagttagggttaagaattcatacaaccctaaagctccaggcacccttattaccagacaaagagacatggataaggttgtactaactagcatagtgctcaagtcaaatgtcactatgttggacattgtgagcactcggatgcttggtcagtatggttttctggcaagggtatttgctatatttgaagatctatgtatatctgtggattgtgttgctaccagtgaagttagtgtttctgtgtcacttgatccatcaaagatctggagtagggaactgatacagcaggaacttgaccatgtagttgaagagcttgagaaaatagcaattgttcgtctacttcagcagagggcgataatttcacttatcggaaatgtggagcaatcgtctctcatactagaaaagacgggacgtgtgctgaggaaaagtggggttaatgttcagatgatctcgcaaggagcgtcaaaggttaacatgtcgctgatagtccatgatagcgatgcaaaggcactcgtagaagcccttcatcaggcgttctttgaagacgatgtcctatcacaagtcgaagcggagaacctactcgtgggctgatcaacgtaggctttgctgggtccaggcgtgttatctgttatagattcccactcgcctccatgaacggcatgggcattggatcattgatcatgttttgcttgaaacaagtatgtcttccaggttctcagccaatgactgcaaaactgtgtttctgttttagaactgtttgcagacaccacagtctgagctgcgagcaccgattgtcaacaagatggcaagcctgtgatataattccaactgtctctaatcaatatatataataaacattatcaatatctattaatt

SEQ ID NO: 5935 - DNA, 661 bp, Glycine max
  Clone ID: 700553684_FLI
caaagttgttgagatcagttgcaaattatcaagcaatcaatgtcgatactctaagggcccaaaatatggaatcttggccattcttcaaccaggtgacagcagatttaacacctttaaatccaaggaaagtagctgtaaaatttgatactttcaaaattggaggcattatacctattaaagcacctggaagagctcgtggggaactggaaataacatatttggacgaagaactgcggttatcaagaggtgataaaggaaacttgttcatcttgaaaatggtggatccgtcttacagggttcctatatgatggcattgtcagcattgcaatgcagtacttgtgttcttcctctctagggattcaaactaccatcatagctcactgaaaatacacgttggagcttatactagcactgcactattattcaagttgacttgaagcattttgggaccgttcttccagacttccagtacaaaagataaactgaaatagtataatcttaatctctgtaatgagttctactctttatctcctcaaggtcggtgaataaaataaaaaaaaataatcattaatattaatgagggcgagtcctggtgcagcggtaaagttgtgccttggtgacttgtgacaattatgtgagcttatcaattttttccctactt

SEQ ID NO: 5936 - DNA, 437 bp, Glycine max
  Clone ID: 700553710_FLI
ggcatcttgtgttgaaggatatccatgccaccttgaagaaatttggaagcaatataattttctcaaatggcctcttggatccatggagtggtggcggcgttttgcagaatatatctgaaagtgtggtttcacttgtcactgaagaaggtgcacaccacatagatttacgttcttcaacaaaaaatgatcctgattggttggtagagcagagggagactgagataaagctgatagaaggttggatcagtgactaccaccagaaaaatgaagctatgtttgatatgtaacagaatctttctactgtttgcttcagcactgttctgtatatatagctcagtaaaacacgtttgttaggtttgacaaaccttatgttcttgtttggttttgtaattgctcgggacaatatttgcaagcaatttttctttgaatttgagtct

SEQ ID NO: 5937 - DNA, 1895 bp, Glycine max
  Clone ID: 700553715_FLI
gattcttgatctttctcacaaccagcttaatggctattttcctgatgagtttgggtcattaactggcctaaaagtgctaaatattgccggaaataatttttctggttctcttccaactaccattgcagacatgagttcacttgactccctggatatatcagagaatcattttactggtcctctaccaagtaacatgccaaaggggctccaaaactttaatgcttcacaaaatgatctgtctggagttgtcccagaagttcttagaaagtttcccagttcttctttctttcctgggaataccaagttacattttccaaatggtcctcctggatcaatcagttcacctgctgaaagttccaagaggaagcatatgaacaccatagttaaagtcataatcatagtgtcatgcgtggttgcgctcttcatattaatcttgcttgctgtcttcatacactacatacgtatatcaagatctccaccagaatatgaaacaagtaaggatatccacaggcatcctcaaccaattatctcggctcctgttcgtacgacagatgggggtggcgctttggttgtttcagctgaggacctcgtgacctcacgcaaagagtcaccatcggagataatcagctctgatgaaaaaatggcagctgtaacagggttctctccatcaaaacaaagccacttttcatggtcaccagaatctggtgattcacttagtggtgaaaatcttgcaagactagatacgagatcgccagatcggttggttggcgagctacattttcttgatgatacgataacattgacgcctgaggagctctcaagggcccctgctgaagttttaggaagaagtagtcacggtacttcttacaaggcaactctggagaatggtttgttgttgagagtgaagtggttgagagaaggagtggcaaaacagagaaaagaatttgtaaaggagacgaagaaatttgcaaacatcagacatccaaatgttgtaggattgagaggatattattggggtcctacacagcacgagaagcttatactttcagattacatctcactaggaagtcttgcaagttttctttatgatcgaccaggaagaaaaggtccaccactaacttggacccagaggctcaaaatagcagttgatgtagcacgtggcctgaactatctccattttgatcgcgctgttcctcacgggaatctcaaagctacaaatgtgttgttagatacaactgatatgaatgcacgtgttgccgattactgccttcaccgactcatgactcaagctggtaccattgaacagattctcgatgctggggtcttgggttattgcgcaccagagttagctgcttccaagaagccaatgccctccttcaagtcagatgtttatgcttttggagtgatacttttggaacttctaactggaaggtgtgctggtgatgttatatctagtgaggagggaggtgttgatctgacagactgggtaaggttgcgtgtagcagaaggccgaggctcagaatgttttgaggctaccttgatgccggaaatgagcaatccagttgtagaaaagggaatgaaggaggtcctgggaatagcaatgcggtgcattcggtccatttctgaaaggcctggtatcaagactatttatgaagatctctcttctatatagtctgctcatgctaactgtttgaactttgacatattgtgggaattaatgtctcattagtgtcccatagttgttcagagcctggccttttaacatgtttgtattaaccatttttttagctgtaaaaatggggctgtgccaaaagcatatacatggatgatggatgttacttgatgggttataaccatctaattttgtctcgaaatggtatgtgttatgaatagtc

SEQ ID NO: 5938 - DNA, 454 bp, Glycine max
  Clone ID: 700553723_FLI
atcaatctcaagagacagatcatataattttttttagcaaaatccatggcagatcttcaagaaaaactggatgctctgaagggtcttgttggtgtgctaaataacatggatgagggtgaaactcacaacaacaatgcaacctcctcacccaataattcccatagtcctgctcctatgcctggaaggaatcgctctgttggaaaatataacaacagtggcactcagaagattaaaggtctgagtaaccaaaccggcttcaccgaaggcaacgctaacggagccatcaactttggcaatttacatgcctaaataaatcaatgtaccaagatcttgaaatccataaataataatgtgacgtacaaattaaaataagagcttcacagtttgagtgtggatccaatattttcagctttttattatatataaatatatgacttcttagattaacgtgcag

SEQ ID NO: 5939 - DNA, 1345 bp, Glycine max
  Clone ID: 700555826_FLI
attggaaatgtttgatggtgaataatatgattgtgcagatacaccatggccgtcttagtgaaaatgactctagaagatatttccagcagcttattgacggtgtagattattgccacagtaagggagtttatcacagagatttaaagcctgaaaatcttttactcgattcactaggaaatataaagatttccgattttggtttgagtgcatttcctgagcagggggtgagtatccttcggacaacttgtgggactccaaactatgtggctcctgaggtactcagtcataagggttacaacggtgctgtggcagatgtttggtcctgtggggttatcctctatgtcctactggctggatatcttccttttgatgagcttgatctaaccaccttatatagtaagattgagagagcagagttttcatgccctccttggtttccagtgggagcaaaaatgttgatacatagaattttggacccaaatcctgaaactcgtataacaattgagcagataagaaatgatgaatggtttcagaggagttatgttcctgtcagtcttcttgagtatgaagatgtaaaccttgatgatgtaaatgctgcttttgacgatgctgaggaaccgagggctgatcaacaatgtgacaacgatgacatgggtcctctaatgcttaatgcatttgacttgataattttgtctcaaggcttaaatcttgcaacaatctttgatcgtgggcaggactctgtgaagtaccaaacccgttttatctctcaaaaaccagcaaaggtggttttatcaagtatggaagttgtggcacaatcaatgggatttaagacgcatattcgcaactacaagatgagggtggagggtgtttcagcaaataaaacatcctatttctctgttatcctggaaatttttgaagtggctcctacattttatatggtggacattcagaaagcagctggagatactggtgaatacctcaagttttacaagaacttttgtagcaatcttgaggatataatctggaaaccgccccatgaagcaagcaaatcaaggatctccaagaccaaaagcaaaagacgatagtttcatcattcgtgataccttctgatttgattgaaaagaaaagagagaaaaaaaaaagtaatatggaacacatgcttttaatttaaagagggtttgacatatagacgcatgtcccaccaaatcgaggtataaatacggtttgccctggcttttttttttaacagcaatactgttttttccacttttaattctccaaataccacacttgaaacttgaaagattgtgtcccaaaatttactagtaattttttaggccccagg

SEQ ID NO: 5940 - DNA, 1711 bp, Glycine max
  Clone ID: 700556612_FLI
ttcttctcttgcggctagggttttagcgcagcttcttctagatttaaggaagatgggtaaggaaaaggttcacatcagtattgtggtcattggccatgtcgactctgggaaatccactaccactggtcacctgatttacaagcttggaggcattgacaagcgtgttattgagaggtttgagaaggaagctgctgagatgaacaagaggtctttcaagtatgcctgggtgctggacaaacttaaggctgagcgtgaaagaggaatcaccattgatattgctttgtggaagtttgaaacaacaaagtattattgcacagttattgatgcgcctggacatagggatttcattaagaatatgattactgggacatcccaagctgactgtgctgttcttatcattgattcgaccactggtggttttgaagctggtatttccaaggatggacagactcgtgaacatgctctgctttcattcacccttggtgtgaaacagatgatttgctgctgtaacaaaatggatgctactacacccaagtattccaaggccaggtatgatgaaattgtgaaggaagtctcttcctacttgaagaaagtaggatacaaccctgacaagattccttttgttcctatctctggttttgagggagacaacatgattgagaggtccacaaaccttgactggtacaagggtccaactctgcttgatgcacttgaccagattagtgagcccaagaggccctctgacaagcccctcaggcttccccttcaggatgtgtacaagattggaggtattggaactgtgccagtgggacgtgttgagaccggtgtcttgaagcctggaatggtggtgacttttgcaccaactggactgacaactgaagtcaagtctgtggagatgcaccatgaatctcttacagaggcacatcctggtgacaatgtgggattcaatgttaagaatgttgctgttaaggatttgaagcgtggttatgttgcctcaaactcaaaggatgaccctgcaaaggaggctgctaacttcacagcccaagtcatcatcatgaaccaccctggtcagattggaaatggctatgcccctgtcctcgactgccacacttctcacattgctgtcaagtttgctgaactcatgaccaagattgacaggcgatccggcaaagagcttgagaaggagcccaagtttttgaagaacggtgatgctggttttgttaagatgattccaaccaaacccatggttgttgaaactttctccgagtatcctccacttggtaggtttgctgttagggacatgcgtcaaactgttgctgtgggagtcatcaagaacgttgagaagaaggatcctaccggagccaaggtcaccaaggctgcccagaagaagaagtgaatcgtgcgggctggttcatcaggggatgttggttacaataaatgttggtttcttttctgtactcttgtgtcttcttttctaggtagcttgtttttcggacaaagtttgaagtctccaccatcatctcgcaactgttgttcccagaactgggttcttgatcgacggtggcaaaattgcttttatttatctgtgttttaatgtgttgtgtttgtcggaacccctgattacatttttgttaagcgcagcgagtttcaggactttgctgcgttgtgttgctttggtttattaaatgtcaactttctatttgtagtgttc

SEQ ID NO: 5941 - DNA, 1566 bp, Glycine max
  Clone ID: 700556639_FLI
aacaaggcaagggaaaagcgaagtgtgaagacagacacagtgagaatgatgaagcgtcggttccttttggttctcttggttctctatgtcacagtggagttctacgtagaagcagatggtagtggtgggtttgtgagaacaagaggagtgcagcttatgctgaatgggagcccctactatgctaatggctttaatgcctattggctaatgtatcttgcctctgatccttctcagagaaacaaagtctcatcagtgtttcaacaggcttcaaatcatggcctcaacattgccagaacttgggctttcagtgatggtggatatcaaccactacaatactctcctggatcttacaattaccaaatgtttcagggattggattttgcaatagccgaagcaagaaaatatgggatcaagatggtgttgagtttggtgaataactatgagaacatgggtgggaagaagcaatatgtggaatgggcaaagagtcaggggcagtccataaattctgaggatgactttttcacaaatcctgttgtgaagggatactacaaaaaccacatcaaggctgtacttacaagacgtaatagcatcactggagttgcttacaaagacgacccaactataatggcttgggaacttatgaatgagattaggtgcccttctgatcaatcaggaaggacagttcaggcttggatcactgagatggcatcttacctgaaatccatagatggaaaccacttgctggaagctggtctggagggtttctacggccagtcaaagcctcagtctaacccaaacttcaatgtaggaaccgatttcattgccaacaaccaaatcccaggcattgatttcgcaacagtgcactcctacccggaccaatggctatcaagttctagttatgaggaccaaatctcatttttaggccgttggctggatgagcacatccaagatgcacagaacacccttcacaagccacttctatttgcggagtttggtatttccacaaagagttatggtggcaactcaacaccaagggatcggttattcaacacagtatattctgcaatatactcatcagcaagcagtggcggggctgctgttggtggcttgttttggcaacttatggttcaaggaatggattcttatcgagacggttacgaagttgtcttagatgagagcccttcgacggctaatttgatcgctcaagagtctcaaaaactaaaccgaattcgcaagatgtacgccagacttagaaacattgagaagtggaatgaagctaagcaaattagaggtggaaactgaatatgatacgtcttaactaccatgatatatatatatagagagagagagagagagtgaagggagttagaaactttaattgataacttatttgcgtgtggattaatcttcagaatgaagtgtcccaataatcttagtggcaagaattgcctgttattttcgtcaaagtattccaagtgaagtgttctacaaatgcgatagacataactatttattattgagatatttcgagagaaactttgtaatgcacgaactagcatttcatct

SEQ ID NO: 5942 - DNA, 2757 bp, Glycine max
  Clone ID: 700556776_FLI
gaggatgatcttgtcgactgttggtcgtggaggtgaaggagatgtcggacagaggattcgggatgaaatccttgttatccagagaaataatgattgtaaaggtggaatgatggaggaatggcaccagaaattacacaataatactagtcctgatgatgttgtaatctgtcaggcactaattgattatataaatagtgactttgatattggtgtttactggaaaacattgaatgcgaatggaataacaaaagaacgacttctgagctatgaccgtgccatccattctgaaccaaattttaggagagatcagaaggaaggtcttctgcgagatctgggaaactacatgaggaccttaaaggcagttcattctggtgcagatcttgaatctgctatttcaaattgtatgggctacaaatctgagggtcagggcttcatggtaggggtgcagataaatccagtgccgggtttgcctaatggttttcctgaattacttgagtttgtcgccgaacacgttgaagagaaaaatgttgaaccacttcttgaggggttgcttgaggctcgtcaggaactccaaccatcactcagtaaatcccaaagtcgtctgaaagatcttatatttttggatgttgcccttgattctacagttagaacagctgtggaaagaagttatgaggaattaaacaatgctggacctgagaaaataatgtacttcattagcttggtccttgaaaatcttgcactgtcatcggatgacaatgaagatcttatctactgtttgaagggatgggatgttgccttaagcatgtgcaagagtaaagatactcattgggcattgtacgcaaaatcagtccttgacagaacccgccttgcactcacaaacaaggctcatttataccaggaaattctgcaaccatcggcagaatatcttggatcactgcttggtgtggacagatgggctgtggaaatatttactgaagaaattatccgtgctggatctgctgcttctttgtctactcttctaaatcgactggatcctgtgctccgaaagacagctcatcttggaagctggcaggttattagcccagtggaaactgttggatatgttgaggtcatagatgagttgcttgctgttcaaaacaaatcatatgagcgacctacaattttgatagccaagagtgtgagaggagaggaagaaattccagatggtacagttgctgtcctgacacctgatatgcccgatgtcctatcccatgtatctgtacgagcaagaaatagcaaggtgtgttttgctacatgctttgatcccaatatcctggctaacctccaagaaaataaaggaaagcttttgcgcttaaagccaacatctgctgatgtagtttatagtgaggtcaaggaaggtgagttaattgatgacaaatcaactcaactcaaagatgttggttctgtgtcacccatatctctggcccgaaagaagtttagtggtagatatgctgtctcatctgaagaattcactggtgaaatggttggagctaaatctcgtaatatctcttatttaaaagggaaagtagcttcttggattggaattcctacctcggttgccataccatttggagttttcgaacatgttctttctgataaaccaaaccaggcagtggctgagagggtcaataatttgaaaaagaagttaattgagggagacttcagtgttctcaaggagattcgtgaaacagttctacaattgaatgcaccatcccatttggtagaggagttgaaaactaaaatgaagagttctggaatgccgtggccgggtgatgaaggtgaacaacgatgggagcaagcttggatagctataaaaaaggtgtggggctctaagtggaatgaaagagcatacttcagcacaagaaaagtgaaactcgaccacgaatatctttccatggcagtccttgttcaagaagtgataaatgctgactatgcttttgtcatccacacaactaaccctgcctctggagattcatcggaaatatatgctgaggtggtaaagggacttggagaaacactggttggagcttatccaggtcgtgctttgagttttatctgcaagaaacgtgatttgaactctcctcaggtcttaggttatcctagcaaacctgtcggcctatttataagacggtcaattatttttcgatctgattccaatggtgaagatctagaaggttatgctggtgcaggtctttatgacagtgtgccaatggatgaagccgagaaggtggtgcttgattattcttcagacaaactgatccttgatggcagttttcgccagtcaatcttgtccagcattgcccgtgcaggaaatgaaattgaagagttgtatggcactcctcaggacattgaaggtgtcatcaaggatggaaaagtctatgttgtccagaccagaccacaaatgtagacctccatacctatgtcttctaagccaactacctcaactatgttctatgttcattcccgtgcaacatggcgtttcaaacgtggccgtggcagcttctgcgagtttaagagtaacccgcgggattaccaaatttggccttatagatttattacacgtgatatattgaaaattaaggaataatttataagtgtataaacatggaataatgtaaattaattaaaaaattagatggtcttattctttttccctactatatatattgtatctacttacttcttcctaattaaaattgctattcaaagtatctttct

SEQ ID NO: 5943 - DNA, 1228 bp, Glycine max
  Clone ID: 700560541_FLI
tcttttagaactccctctgaccagatcagtgttgcaaattcatctcctctggaaagcatatgtgaggatgcagaaattgtggacaaaaaacaaaacttaatgaactttgtccctactcttcggtctggagagtggtctgatattggagatcgcacttccatggaggatacacatatatgcatcggagacttggcagaaaaatttggcaataacgaactttacaaggaagctatttccttttatggtgtatttgacggacatggagggaagagcgctgcacaattcgttcgtgatcatctgccacgggtgattgttgaggatgctgactttcctttggaattagagaaggttgtcacaaggtcatttttggagatcgatgcagagtttgcaagatcatgttctactgagtcttccctgtcttctggtacaactgcactgactgcaattatattaggaaggtctttacttgttgccaatgctggagactgccgtgctgtattgtcccgtggtggaggggctatagaaatgtccaaagatcacaggccattgtgcattaaggaaaggaagaggattgagtctctaggtggatacatagatgatggttacctgaacgggcagttaggtgtgactcgtgcactaggcaactggcatctccaaggaatgaaggaaattaatggaaagggtggaccattgagtgctgagcctgaacttaaattaatcacattgacaaaagaagatgaattcttgataattgggagtgatgggatctgggatgtttttcgcagccaaaatgccgtagactttgctcgaaggaggcttcaagagcacaatgatgtgaagcagtgttgcaaggaggtgataggagaagcaataaagagaggagcaacagacaacttgacagtggtgatgatatgttttcactcagaaccaccagctcctatggttgtagaaaggcctagagtcagaagaagcatatctgctgaggggcttcaaaatcttaagtgcttgctagaaggataaaattttctacttctcggcaacacaaatgattctttttgagcttagattattatgtacataaattcatccgtcacagtgttgctgatccctgaggggatgttgtaaggaaaacaccaagatggcaaattcaaataaatttcatgtcatcgtataattattttccccattgctattgccttaatgggaaagtgataaacttgaattacgt

SEQ ID NO: 5944 - DNA, 1059 bp, Glycine max
  Clone ID: 700561610_FLI
aactttggtcaagatgctctgattggagagggatcctatggaagagtatattatggtgttcttaaaagtgagctggctgcagcaatcaagaagttggatgccagtaaacagcctgatgaggaatttttagcccaggtttcaatggtatcaaggttgaagcatgaaaattttgttcagttgcttggatattgcattgatggaagctcccgtattcttgcttatgagtttgcatctaatgggtctcttcatgatattttacacggcagaaaaggtgttaaaggagcacagcctggcccagttttgacatgggcacaaagagtaaaaattgccgtaggggcggcaagaggacttgaatacttgcatgagaaggctgatccacacattatccaccgggacatcaagtcaagcaatgtgctaatctttgatgatgatgttgctaaaattgcagattttgatttatcaaatcaggctcctgacatggctgcacgtcttcattctactcgtgtccttggaacctttggttatcatgctccagaatatgcaatgactggacaattgaatgctaagagtgatgtatacagttttggcgttgttcttctggaacttctgactggaaggaaacctgttgatcatacactaccacgtggacagcagagtctggttacttgggctacaccaaaactcagtgaggataaagtcaggcagtgtgttgatacaagactaggaggagaatacccacccaaagctgttgctaagatggctgctgttgctgcactgtgtgtgcaatatgaagctgatttcagaccaaacatgagcattgtagtcaaagctcttcaacctttgttgactgcacgacctggacctgccggtgaaatacccaattaatctctgtatcactttctctacatatttgtgagtatgtgcacaagtgtgcatgcaaaatataacttcagaagctggtggtaaattgctcagacatgactttatatcccattgtttacactgcattcattttgttcataatccatgaggttctttgctgtttccttgcttttattc

SEQ ID NO: 5945 - DNA, 638 bp, Glycine max
  Clone ID: 700561617_FLI
gttcctgctgtcacactattaaccttgtaccagtactagaatctaatcaagtcattcattgtacgaactgccggacaacactcatgtatccttatggagcttcctcagtaaaatgtgcaatttgtcgctatattactaatgtcagtatgacgaatggaaggcttccaattcctgtacagagaccaaatggaacagccaactctggaacagtatcttctacttcatcggtatgcctttctccttttcttttggtgattctgttagagcaattgttgcattcttgttatgatacctgatacgtcattttattagctgcagtcaatgcctcattctcagagccaaactgtcgtagtagaaaatcccatgtctgttgattcgagtgggaaattggtgagcaatgttgttgtgggcgttacaacagagaagaaatgatacttgtcacattatcatgttatacaagtgtaaagagaacattatttgattcatcagctgctggtgctcaaagatattgttcgtatatgtgactttgcagcatagaagttaaaaatatttttgttctaaacgacatttagactgatttaatttacgtatatgaatacgaggacaagtggaaagggcacaaaacttgtcatttgtgc

SEQ ID NO: 5946 - DNA, 1549 bp, Glycine max
  Clone ID: 700561635_FLI
gatgaaatgacgaggattatatggaggatgatcaaggataaacttatatttccttacctggatttgaacataaagtactttgatttggggcttcaaaatcgtgatgctactgatgacagagttactgtggaaagtgctgaagccactctcaagtataacgtcgctgtgaaatgtgcaacaataactcctgatgagacccgagtgaaagaatttggactgaagtctatgtggagaagccccaatggcacaattaggaatattttaaatggtactgttttccgtgaacccataatatgctgcaacataccgagaattgtttccggatggaaaaaacccatttgtattggtaggcatgcttttggtgaccagtatcgggccactgatgcaataattacaggaccagggaagcttaagttggtatttgtcccagaagatggtgatgctccaatggagcttgatgtttacaatttcaaaggcccaggtgtagcacttgctatgtataatgttgatgagtctattcgagcatttgctgaatcatcaatgtcacttgcatttgcaaagaaatggccactttacttgagcaccaaaaacacaattctaaagaaatatgatggcagatttaaggacatattccaggaggtgtatgaagaaaggtggaggcaaaagtttgaagaacactcaatatggtatgagcataggctaattgatgacatggtagcatatgcactcaaaagtgaaggtggatatgtttgggcttgcaagaattatgatggtgatgtccaaagtgatttacttgctcaaggttttggctcattgggtctcatgacttctgtgctgttatcttctgatggcaagacattagaagctgaggcagctcatggaactgtaactcgacattttcggtttcatcagaagggacaagaaactagtacaaacagtattgcttccatatttgcatggacaagaggactggaacatagagcgaagctggataataatgaaaaattacgggattttactcaaaatttggaggctgcatgtgttgagacagtggaatcaggaaagatgactaaagatcttgcaattctgattcatggacctaaggtatcaagggaattttacttgaacacggaggaatttattgatgctgtggcacataatcttcagaaaaagctccgagagcctgcagtggtctagacattatttttgcaggggggaagaggaacataagttggaaaagctaaaaagtggtttgatgggtgcttaattttttggcctgtgatgctgcttttggttggaatcatgggaccctaggatctgaggaaaattttaattggtggttgggtggataattgattcttggatttttggccactgactgtcccattcttacacacaccaccattacagttatttaaaacggtaaaaatccgtcagtacggaccagcagaattaggaaagtacaaaattttgatgtgaataatgcagatgatggatcatgtttttattgtaatttgattggtttatatatatatatatatatccaaac

SEQ ID NO: 5947 - DNA, 1921 bp, Glycine max
  Clone ID: 700562276_FLI
caaaactactgtaacagaagaccgagatgtgttggtagatgcagctgctgataagatggaaagggatttgattcttcttggtgctactgcagttgaggatagactgcaaaagggggttcctgaatgtattgaaaagctcgcccgggcaaaaatcaagttatgggtattaaccggagacaagatggaaactgcagtcaacatagggtatgcatgtagtttacttagacaagacatgaaacagatagtgatcactctggattcaccagatatcctatcattggaaaaacaaggggacaaggaagctctatcaaaggtacatgaccttggaagttttttggcatttaatttctctcagaattatagatctttgatacaacaattgcttaggcctctcttgaaagcattaagaagcaaattagagaaggaatctcacaaatcaagtctgcaaaagagagttctaatacaaataaaggaagttcttctgggtttggcttgataattgatgggaagtccttggattattctcttaacaagaatttggaaaggtccttctttgagctggcaattaattgtgcttctgtcatatgttgccgatcttcacccaaacaaaaagctcgcgttacaaaattggtgaaattgggaacagggaagacaacattatctatcggcgatggggcaaatgatgttggcatgcttcaggaggctgatattggagttggcattagtggtgctgaagggatgcaggctgtaatggcaagtgattttgcaatagctcaattccggtttctggagcgtttgctgttggtacatggacactggtgttatcggcgtatatcaatgatgatatgctattttttctataaaaacattgcatttggatttaccctattttggtttgaggcatatgcttctttctctggtcaagctgcttacaatgattggtacatgtcattttacaatgtcttcttcacttcacttccagtaatcgctctaggcgtttttgatcaggatgtttctgccaaactttgcctaaagtatccttatctatatctagagggagtagaggatatcctcttcagctggccccggattcttggctggatgttgaatggagtccttagttctttagtgatcttcttcttgaccactaattctgtcttgaatcaagccttcagaagagatggcaaggtggtagattttgaaatacttggggtcacaatgtatacatgtgtggtgtggactgtgaattgccaaatggcactttccatcaactacttcacctggatacaacatttttttatatggggcagcattgccttttggtatgtatttgtgttggtttatggttacctctctccagccatatccactacagcttacagggtttttgtggaagcatgtgctccaagtggtctatattggctggttacccttttggttgttgtgtgtgtgcttctaccctatttctcctataggtctttccaaagtcggtttctaccaatgtaccatgatattatacagagaaaacaagtagaagggcatgaagttggcttatctgatgatgagttacctaaacaagtccagggcaaactactacatctgagagaaagattgaagcaaagggagttgtgaaatgtaaatgcttctaaacatccattcttagaacttgaaattgtatttagtttcttgctgagttgggaagtggcattgaagtagtagtgagcattgcaaatagcttttaattaaaattctttacttttcctccttcggtttccaattttttatagaggcaggatttctgtagcagtcacctgatgtagattagctatgtaaagcttgtgtaattgttgtgccaaaaaaggcctttgtatttgtgaacggaaaaagcaatagatattttatatatatgatctttattgtc

SEQ ID NO: 5948 - DNA, 458 bp, Zea mays
  Clone ID: 700549362_FLI
gtgaaatagcctccatggaataacccaaagattggatcaaaatgatgcaataaccgctatgtggcaaatgattcatttgacccagtcggcaaagaggcccgcactagataggtgacccaataaggcaataatgaacccatggtcggagtagtggtgtcattacatgaacataagttactatttaattagcatcgagaatagaaggtggcgatcatttccttagctcctgttagtgtccctgaacataagttacccatggtctgagatgttacatctttctgagccatcttctctcggtttgtacttctgttagtgtccctggcaccatatcattcatttggagatattcaatcagctgtgtggctatgtaaaattggttgtattttaggtgatctgtgagcattaactttcaatgtaccaaaaatcgatcttaatatatgagatggattatatggggg

SEQ ID NO: 5949 - DNA, 300 bp, Zea mays
  Clone ID: 700549443_FLI
caattcaagcgcaaatcacgttgagaagcattgctagctcgacgcagatgcatgacctgatcaagggcacactggaaaatcagaggaatttcgtctgacatgtgcacggtgcaatcgttcacccatcctacagctgggcagtttacatcaagcgaattacttatctagtccacttaggcattacattagatattaataaaggtcagtctagatgtaccgaaatagaccaagataagtaattcgcttgatgtaaactgcccagctgtaggatccagttttaaagtcctgttccacgcactt

SEQ ID NO: 5950 - DNA, 1063 bp, Zea mays
  Clone ID: 700549462_FLI
cacaaggataccttggtgtactattttgggacatgggaaagctgtcagttatgtgaggttcttggatccagacacacttgtctctgcatcaaccgacaacacattgaagatatgggatcttaaccagactaattgcagtggattatctaccgattcttgccgcctgactctgaatggtcataccaacgagaagaattttgtagggctatctgttcatgatggatacataacttgtggctctgaaaccaatgaagtgttttcttactacaaaactttccccatgccaataacttctcataggtttggttctattgacccgataactggacaagtgacaaatgaagacaaccagcaatttgtgtccagtgtttgctggagagggaagtcaaacatggtagtggctgccaactccagtggtagcatcaaagtgcttgagcttgtgtgaatgaacgagagtcatattggagaagaaggttctagtgttgccatgcgggcctgcgatgctttcgtgcccttggtgatgctctgatggccctgcttatccagtgtctgcaccctcaatggaagcactaaccattggtctgcatttcactgttttgacagggcactaaaagactagactgctctatgcaagcatcctacaacaccgatcattggttattggaagctttgcttgaaactcacaagcaaactaaagttttttttttccaagagtatgatggcctcacctccatttttgtgtttggcattttgagacggtacctattcatcgtgatgcaaacttcttttgggctagaggtgcgcgggacttgctatgactgttaagagcaaacgatggaaagaaagggaaaaaaatgatcatgtagctcgaagaagttaatcgtgctgtgtgaatgtttcaaggagaatgtctcaaatagttttatacccccttcattattgtacatatatctagggctgcctaatgaaaggccttgtaagttgtaactagagtagaatgctgatcatgagttaagtataatgaatggtcttcacaaaagattaatcaatggaagattcatac

SEQ ID NO: 5951 - DNA, 1704 bp, Zea mays
  Clone ID: 700549516_FLI
gtcccttcaagcagaccaaaacgatgatacctgtgcatcatgtggcgatggtggtgaactgatatgctgtgacaattgtcctgctagttaccatcaagcctgcttgtcttgccaggatattccagatggcaactggtactgctctagctgcctttgcgacatttgtggtgaagtaatcgattcaaaggagcttgtaacttcccttcctgctttagattgctcacagtgcgaacgccaataccatgtaaaatgtgtatctgccaaagttccgtgcaatgaggatggatctggtacctggttttgtggaagaaaatgtcacgagatctatatgaccttccgttctcgtgttggagtgcctgatcacatggacgatgatctgtgtttcaccgttcttcgtaacaacggtgataagaaggttcgcacggcagaggagattgctctcatggctgaatgcaacatgaaactcatgatcgccacgagtatcatggaagagtgtttcctgcctattctagatcccaggacagggatagacattattccctccatattgtataactggaggtctgatttacatttcaattacaaggggttctatacagtagtcttggaaagtgatgatagcatggtatctgttgcctccataaggttgcatggtgcaattttagcagagatgcctctggtagcaacttctaaagagaatcgtcagcaggggatgtgcaggcgcctcatggattacattgaggagatgctgaaatccctgaaggtggagatgctgctcctatcagcaatcccgcacctggcggagacatggacatcgacatttgggttcagagagatagatgagtcggacaagaagaggctgagtaaggtgaggctggccgcagttccggggaccgtcctactgaagaaggacctgctgtgtgaatgttcaggcgcggacgccggtgagccgccgagccctaagcccttccaagtttactcgcgcgtgccgagaggccgcaccggtttggatgcagtgtgccaataaagatgacgcagtggatcgaatgcgccgcggtcagtcgtcgtcgtcggtgacagggggcagctggtggtcgtcacggggcctcgtctccggttgctgaagccgaggccgagcacatcagcacgcgccggtttgtgtggtggaaatggaaagcctcgttgctctggtaggagctctgaagatcgctgtcgtctgcttgtagtctgtaaatagcttctccgtcggcgagaagcccagggtccacggccattgtagaaccgaacctgtatgataaaactagaccgtgttggcgccccaccagcgtttagtagtttccgttgccctttgaactcaaagtttcaggctagtccattgtgttcgtttcagaagcctgcggttttcagggggaggggaggtgccagaaagggaggacataacgcacgtgcagaccgagtattatgtggtggtgtcgtagacacgcacgagttgacgaagctataggagcagctcgtgatgagcaatggttggtgcagatgatgatgtcaatgagctcctcccgcagggaccggacctgtggacacggatggagctgaacttgtttgaaggatgcgtagtactaataatatatgcagtcaagccagcctgaacttatttgaatgaggtgtagtactaataatatatgcagccaagccagcctgaca

SEQ ID NO: 5952 - DNA, 1327 bp, Zea mays
  Clone ID: 700549530_FLI
agcggtctagcccatactccgcatgcaaacaacctctcggcctcatcaggcccgctgccctccgcctccgcctccgccgatcccctccgctgaatcgaatagaagaatcgagcgccgctactggcgaggggctagcggtcggcgcacagcgcggtatggcgagcggcagcagcaacggggagccaagcacggcaccgcaggcgaaccggtggtacgacctccggctgggctcttcctgccgtgacccctcccccaccgccaagttctgcaccctccgttatgaatttaagccagcatcaattgacaagacacaagctgggtctctgcaaagcaccaaagataaccgggttactgtggaattccataataatcagcctggcaagccaaaggtgacatttgagggaagccaagaagagtacaaggataatgatggtgtcttattttttgatggtgagacctttcgcttagagaggttgcatagggctgtcaagaggttaaggcatgtccgagttccaggagagtctgcagcacttaatttggctggtacaactactggagtgggtgcagaatcacagtctcctccattacctaaagtcagcaagtcacagaccatgagcaaacctgctgttcactcagttccagttgaggttgagcgtattgacattggtgaaccagaaaatccaggcccgaaatacaacagcaggagtacatatcaacctgttagcatagacccatttgccctttcacctgatccaaatgagcaagagaaccttgacatatttggtgatgatgatggcaatgcttcaccgaataacttggcctccggagaaggggcacctactcgtggttttgacgtcaacttaccaaatcaagacaatatggatgatgaaattgctgatgtagatgtaaatgatgaggcagatgaggggctcaatgcagccgatgcgctgcgagctcaagtgaacgcagaggggcagcaggggcaggacagctcaagctctagtggaaccagcagtagcagcagcagcggaagtgggagcggcagtggaagtgggagcagcagcagtgacagcgatggtagtgatgctgattcagcaagctccggaggtgatgttgatatatgagcttgataatgcaagcttttgttttgacagatgccttgcttcacaatttttggttcacaagggaggtgtagggtatgtatatgttcagctaatattgttccggtcagtgagtgcattaaatttccgcaattcatggcgggcttggtctgttttatgtttgttaaaacctgggctggaagaatagaatctgtaaacatatctgt

SEQ ID NO: 5953 - DNA, 1261 bp, Zea mays
  Clone ID: 700549568_FLI
ggccgagaacaggcagagcaccgggatctagggtttcgcacccaacacccggagtgagcggcggcgagggatcggatcgtcggcggcgatggaggacgaggtgcagagggcagcggtgagcagttggaacgagcttgactatgaggcggaagcgcgtttggtggcggaggcgagggcgtcgtgggataggaaggcaaggggggaggaggaggatgaagaagaacatgatcctgagatgaccttggactactacgcctaccaggctaaaaagtttcgcaacacctggaacatcctctatttcggccacttcggtcgcttcgaggacaccacaaggatccctcctatgcgctttacagagaagccgcctgactccccggcgtacccgcgcactacactgcaggtcttttcgatcaaagttgcagggatagaggggggtttacagtggccactccatgtgtttgggaaggttgccctacgcgacgcagttgatcacaatcgcaatatggtcttcgatcgcactagagacaactgccaaatccttacaaaagaggttccaaatttgaaactgacaggtcctagccgtgctgttctgctggtggatcctgtgactattgaggctgacctgaaagttaaaggccgtactgaatctgaggataaacacttgagctttctagcagtgccattcttggtcatgatcccgctcgagtcatgcctgcgtacaagagatttcaccagcaagcttagcacgctgaggtttgctctcgcaattgttgttttctcagtggaggctacaattagtgtgcgagttcgtggtgggtcatggcctgatggtctccgtgcccagtttgctgcccacacggtgagtataggtcgtgaggaagttgtcttgcttgattctggggacgataaactgcctgtttctgatgatggcactatcacacttggtcgtcgagttgcatctgttgaagtgagtggggagctgaacgtttctgtcaaggcatggcaaggtggtgaagtctttacgcacagagagaggggtttcaaacctaaagaggcaggttggagttatggcactcttgacgttggcttctgccaaatggatgtatctgtggcctggtcgcttctttcgtcgtacggtgaaaatgaagctttgtaagagtcggtgttagccgtggtcgttgcttcgattctctagcatgtaatgataagttcacattgggatatgcttgctgttttgctgtaatgataagttcacattggg

SEQ ID NO: 5954 - DNA, 987 bp, Zea mays
  Clone ID: 700549595_FLI
gagcaaggccgtgggatcggaattcccttccggacaagacacctaccaccacccaccacccagcgcaaggccaggcggcccaggccaccactccttaccttttccccctcttttgttccttcattcacgaatcccgtcttcttcctttcttggccttctccacctcatcgccgagacgagatctctcccacacgaggaagggagagatgggcgggcgggtggatcacgagtactcctacctgttcaagatggtcctcatcggagacagcggcgtcggcaagtccaatatcctctctcgcttcacgcgcaaccacttctccctcgactccaagtccaccatcggcgtcgagttcgccaccaagtccctgcagatggacggcaaaacaataaaggctcagatctgggacacagctgggcaggaaaggtaccgtgcaattacaagtgcctactaccgtggagccgtgggagccctccttgtgtacgacatcacaaagaggcagagcttcgacaatgttcacaggtggcttcgtgaactccgcgaccatgctgactccagtattgtgatcatgatggtcggtaacaaatctgacctaatccacctgagagctatctctgaggatgaaggcaaagcgttggctgagaaggaggggttgttcttcctcgagacatcagctatggaggctataaacgtggagcaagccttccagactatcatgacggaggtctatggcattgtcaacaggaaagcgctggctgccaaagaagcagcagctgcaactgcttcgttgccctcccagggtaaaattatcagcattgacagcactgcaggaaacacaaagagggcatgctgctctacctaaaaatgttcaaacaccacattatacagaaccttggagacaattgttggtagaaaatggagcatagtgatcacaaatgatgtggtggcaatatctactcttattctattctattctattcttttctttt

SEQ ID NO: 5955 - DNA, 854 bp, Zea mays
  Clone ID: 700549604_FLI
attgattctgctgttctctcaaggctgaagcatttttcggcaatgaacaagctcaagaagatggcattaagggttattgctgaaagcctgtctgaggaagagattggaggcctcaaggagttgttcaagatgattgatactgacagtagtgggactataacatttgatgagctgaaagatggcttgaaaagggtaggctctgaattaacagagaacgaaatccaggctctaatggaagcagctgatattgataacagcggaaccatcgactacggcgaattcattgcagctacgttgcacatgaacaaactggagagggaggaaaacttggtttcagcattctcgttttttgacaaagatggaagtggctttataaccatcgatgagctgtcacaagcatgtcgcgaatttggtctcgatgacctccacctcgaggatatgattaaagatgttgaccagaacaatgatggccaaatcgactacagcgagttcacggcgatgatgaggaagggcaatgctggtgcaacaggaaggagaaccatgaggaacagcttgcacttgaatctcggcgaactcttgaatcccagcaaaacctagcgcgttactggaaggccttgtcaggtacattcccatggcatctgaagtttttggatgcgttgtcgatctgctggcctattctgagatgttgagtggttatcctgtggtattactaagatgctggacaattttcgtagtgctggtggtatcagctagagaagagggatggctggcacaatgtggctactatcgccaactgcttttgtatgtgtaactatcgatgtagattgactatggtctaaacatcagtttagttg

SEQ ID NO: 5956 - DNA, 2172 bp, Zea mays
  Clone ID: 700549610_FLI
agaacaagtccagtctgtccagaaatacattagaaaaaagagccaaagaggagaacaccggccggcgaggtggacgaagcggcccgccgaggaaatggcgtcgatgcagagctggcgcaaggcctacggcgccatcaaggacaccaccaccgttagcctcgccaatctcaactccgacttcaaggtgtgccttcgatccggatctggatgtggcgatcgtgaaggcgactaaccacgtggagtgcccgcctaaggagcgacacctgcgcagggttgttgcggcgacgtccatcaccaggcctcgggcagatgtcgcctactgcatccacgcgcttgcccgccgtcttgccaagacccgcaactggatcgttgctctaaaagcacttgtagtgatccatagacttcttcgcgagggtgatcctacatttcgagaagagcttctcaactttacacagaggggacggatcctgcaactttcaaactttaaggatgactccagtccaattgcttgggattgttctgcctgggtgcgcacatatggtttgtatttggaggaaaggttggaatgcttcagagttctgaaatatgatgtcgaagctgagcgcttgtccaaacaaggtcaaggtcctgaaaagggtcacagtagaacgagagagttggattcacaggatctgttagagcagctgccagcattgcagcagttactgtaccgacttgttggatgtcggcctgaaggagctgcaaataataactacttggtgcaatatgctcttgctttggtgctaaaagaaagctttaaaatttattgtgcaataaatgatggaatcataaacctcgttgataagttttttgagatgccaagacatgatgcacttaaagctcttgaaatctacagaagggctggccaacaggctgggaatctatctgatttctacgagaattgccggggattagaacttgctaggaattttcagtttcccactctgagggaggtgagggcttgtactctgtctagtcttcgctatgtgcactggattatgttatgacatcttttacatgagaaaattctcagccaccacaaacatttcttgctactatggaggactatgtgaaggaggctccacgcatggtcccagttcgagaacccctggaacttcctgagaggctgcttcttacatacaaacctgaagaatcagaggaaattcttgagcctgctcctgttgaagaggaaaaagcaccagttgaagaacctgttcttgtaccacctgttactgaagttgtttcacctcctcccaaggctgaggtgcccgatactggtgacttactgggcttagatgatacaaatcctgctgtatcagctatagaggaaagcaatgctcttgccttggctattgttccaacagatggcgcttcaacaactggtaacactgcatttcaagaaaaggggtttgatcctacaggatgggaacttgcccttgttactgcaccaagcaatacaacttcatctacttctgttagtcaattgggtggtggactcgacaagctcattttggagagcctttatgatgatggggcctacaggcagaggcaacaacaacagctgtatggttcagcagctcctaatccattcatggcaaatgatcctttcgcgatgtcgaatcaagttgctcctccaccatcagttcaaatggctgccatgtctcagcagcatcagcaaatcccaacgatgatgcaaccaaatccctttggaccacctatgcatccacaggtgagcatggcccctgcaacaaacaatccctttctggatgctggcttcggggcattcccagcggcgaacaacggccatcagcaacacaacccatttggcagtgcccaacttctgtaggtcacttagtcacaagagcaaatttgtgccccagcagatgcgatttttgtgtgattatatcatgcattgtgctggacctttcttgcatgcgacgcgtgtattatgttatggcttcaccacacggagagctgtgcctatgtcgtgatccaactcttgttgtaaagaaattagtcacctgtgtaacatccaatatatgtcaataaacagtaggcagtgttattacatctataaacaaaagaacagtggaatgtaggaaattcttaatattgtttattccattgctgttt

SEQ ID NO: 5957 - DNA, 955 bp, Zea mays
  Clone ID: 700549648_FLI
aggtgatcaagggagagcagtgtcttttatcaatgctttctcaacctcaaatgttcccaattttctcatcaagtgggctacttttcaatctggctctggtgcactcagcaaaccaattaccaatacaccgcaatctattattaagtggcttgtcgaccttgaagtcaaggggctcaaagtgtttggagactacagttcttgtattatggagaggtttgcttatgatggggtcaagaatggccatgggaacatgattcattcagatgcggaccttttcttttttgataagcagagtggtagggagtttatggacaccaaaggcagtgaggatgaagctgtggaggagatggagactgcaggtaatgcttttatggctgctgcccagtcaatgaagggggtgactgacggcatgaggaagaggaagagctgcggatatgaaggtgcagcagctgtgaagtttgtgaagtacaaggttgaagatagctcgctgaaggactacctgtcagcagctaatggcataagcagtggaagtgaggtagagaacccgcagtctgatgatgagatggaagaatcaaactgatgcatagaaacgagatcacccgctaatgcttactttggacagttgcttttgagagttccttggacagccgcctttttttggagccaggaccagtcttgtttcagctgccgcttgttaatgatgccgtgcagaatctgcaagacgggcccatctccagctaggcattcggatgtagtagtaaccgttagctgaccatacttgacatggagcatatgatgtttgctatgggccatatcgtgctctttgttgttataacgcagctatagtagagacctaaaaatgtagtcttgcttcaagttacttttgtaatagctgggtacttcgttatcccacggaaccagttggaagtaatgaaatcttaaccttctcttgtgt

SEQ ID NO: 5958 - DNA, 1328 bp, Zea mays
  Clone ID: 700549663_FLI
cggaacttcaggcctgaaagtctccttggagaagggggttttggatgtgtttttaaagggtggattgaagaaaatggaactgcacctgtgaaacctggtacaggtctcacagttgctgtcaagacgctgaaccatgacgggcttcaagggcataaagaatgggtggctgaagttgattttcttggaaatcttcaccatcccaatttggtcagattgattggatattgtgttgaagatgaccaaaggttgctggtctatgaattcatgcctcgtggcagtttggataaccatctttttagaaggtctcttcctctcccatgggcaatcagaatgaaggttgcactcggagcagcaaagggtctggctttccttcatgaagaagcagaaagaccagtcatttatcgcgattttaaaacatctaatatactgctggatgcggagtataacgcaaagctctctgattttgggcttgcgaaagacggacctgtaggtgataaaactcatgtttctactcgagtaatgggaacctatggatatgcagcaccagaatatgtcatgactggtcatctgacatcaaagagtgatgtctacagcttcggggtggtgcttcttgagatgatgtcagggcgcaggtcgatggacaagaaccgcccgaacggggagcacaacctggtggaatgggcgcgccccctcctaggcgagaggcagcggttctacaagctaatcgaccctcgcctggagggcaacttctcggtgaagggcgcgcagaaggcggcgcagctagcgcgcgtgtgcctgagccgggaccccaaggcgcggcccctgatgagccaggtggtggaggtcctgaagccgctgcagaacctcaaggacatggcgagcgcctcctacttcttccagacgatgcaggccgagcggatggcgcactcgagcagcatgaacgggaggagcagcatgaacggcggcttcaagacgcagagcccgtttgggcggcatgggcagccgcctcccgtgaggagcctctctgacgggccccgcgcgtctccgttccgctactcgccgaagcctaacgtgaagtgagcggagtggtggaggcgcggttttctgccggctggaaggcacggcccctggatgaaacctggtttgttgggggtgactggttcgggccgtgcatttgcattgcattgcattgatgtgtgtgctgtagattgacatgtgcacaaagtaaaaggatataggcgaaaaagggtggtgtaggtatcggagtttgcttggcggatgtttgctctgaggttttaactgaatgaatgcggatgcaccgttgctat

SEQ ID NO: 5959 - DNA, 383 bp, Zea mays
  Clone ID: 700549688_FLI
gcaagacgctcgtcgccaggaacgtcatcccggccaactggaggcccaacaccttctaccgctccttcgtccagtacagctagctagctagctggtttgcgcccctagttcaccacccaccactactaccaccgccacccactagactactgcttctgctaccaaatactacggcggaacggaacggctggttgccgccgccgccgtcgtccttggaaaggttgaggcgtctcttggtcatccgtatcgttaccgttgtcatggtcctttgagtcgttgcaaccctgattgcaagccggcaagggggaaaaaaccaacaaagccgtgtgggaaaatggaggaggcaggcgtacaatgtacgctctcccgcccactgttgcttt

SEQ ID NO: 5960 - DNA, 1311 bp, Zea mays
  Clone ID: 700549711_FLI
ggggtggaagcaagaaaaaacggcaccctgaaacatgggttttcgatgtccttgagtccagatggtctgtttgtgtagtgcctcctagttcctcaatcactacaaagaaaggtttcagtatggttccattgtactacagggacaagatcgtgcttgttgcttttggagggaacaaaaaggaaccatccgacaaggttgaagtactagtggtgctgcaaaacgagcactgtttcagctggcggtctgcgcccgaggtggaacccttactgtacgacgagtctcctccaggctcaagggaactcgccgaccatctcagcagctgcgctccaccgtatcctactagctccgcggcgaggagcggtctcgccgccacagcggagaactcctgcgggaggaaacccctcccggactcactgctacggacctcgaacctcgggggctcctcgctccgcaggcagttccgtcaggaagaggagtgcagcagcctggcgcaaaagctgcagaaaccgattgacgacgacaggtacaaggacgccgccgacgagtgctccgagcatcaaccgccctcggccacgaaccctaaaccgcggaacgacgcgcgccggtcgtccccggaggtcgtcgtcgacgctaaagcgagaaggctgctgggcaggagctcgtcggacatgaacaaccaccaggacgcaagggtggccgccctggtcaggaggaacgtggcgctggaagagcagctgtcggcggcgctggcgagcaaggacgaggcggagaagaacctgtccctggtcatcgacagcaaagacggcctggagaagaggctggccgagaaggacagggaggtcgaggcgctgagggagaaggcgacggggttggagctggcgcaggaggaggccaacagcctctccaacaccgtccacgccgacaacgtgcggctggagcgcgaggtggcgttcctcaaggccgtcatggacgagacccagaaggaactgcactcgactcgcggagttcttgcaggagaacgcgcacgggcattccagcttcagacgatggaagggaggtcacccgcagcaccaagaaagcctcagaatacgtagggtagggtgcaggcgtgtagagtttttgagcgatagatctgctgtagattcattcagtgttgtactgtaactgtagtaggtgccggagctactgtcatttgtaatattattcgacgcgatgcgatgcaaacgtatttcgcaactgggacgtacgtaattgtgtagaatgagttgcggtcgactatatatgcaagatgtcttttatctaagagttctg

SEQ ID NO: 5961 - DNA, 540 bp, Zea mays
  Clone ID: 700549749_FLI
gaaacagaagtctgtgccccacctacataactcttttgattattacagcctgcagcaaggtcaactgttcctggaggtcctagtgtggcctgcagcactgccaaagctgttgaatgggacgcatcctggtccaagaaccttgatccttctggccgtgctgctttgggtgttcacgatgctgcgtatgaagacactgcagggaaaactcctgcctctgctgatcctgtctcagacaagggccttcgtccagctattggcgaaagcctagggacacccgttgcttcagccacagctgtctaaccttatgtttatcacccagcaatgcttgaaacagcaaaggttgtccattgcttgtttcagtttccttccgatcatgtttttagttccatcaatcaagcaatggagacatgcttgtgcttcatacttggcagcatcgtgtttgggttttcactgggcagtactgtttaatttttatggactgaaaagactcagttttgtaaatattcgtcactgtgaccaattcctgtggtggtttatgtg

SEQ ID NO: 5962 - DNA, 526 bp, Zea mays
  Clone ID: 700549778_FLI
gagacaccccaatgcagtgatgatatggaacagtgccatatctgcctaaccgaatatgaggacggagaccagataagaacccttccgtgcaagcacgagttccacctgcaatgcgttgacaagtggctgaaagaaatacacagggtgtgccctctgtgccgtggagacgtctgcgaagtcgcctcgtgaagaccttggcgctgccatccttccgttgcggcaccggtggatagggcaccaccgccaggcgccagctgttccgtggttgaagctggttcggtcaggcaatggtgatcttgtcaacttggacagttgacaccgcaagagcacgtcaactttgactgtctccctgccgaagagaatggccaaaccaaccctgcgaccgatgagtcgctgttcctgtcatcaacttttaagataccgagactttgtatacagtagcttttgtagtctcccgcctcgtgtatgacagcctgtacatatttgtaaattctggaatcaaatgtcacaatcccctgttctcgtg

SEQ ID NO: 5963 - DNA, 924 bp, Zea mays
  Clone ID: 700549806_FLI
cttcaagagacacacttggaggagcgcgatgttgacctttttaaaaacctggtacatgaatatgattacacctgttggtcatgcagtgttgcaaggcttggttattcaggaactgctgttatatcacgggtacaaccaatctcagttcaatatgggcttggcataccagagcatgatcaggaaggcaggcttattaccttggagtttgatgatttttacttggtcaatgcttatgtcccaaattctggacgtggtttacgtagactgaattacaggatcaatgattgggatccatgctttagcgacttcataaagaaactggaatgttctaaaccagtaattgttgctggggatctaaactgtgctcgtcaaagtattgacattcacaatcctcaagcaaaaaccgaggctgcaggtttcacaattgaagagagagagtcatttgaggtcaacttctcaagaaaaggcctcgttgatacattccgtaaacaacacccgaatgcagtggcctacactttctggggtgaaaaccagcgcattaccaacaaaggctggagactggattactttcttgcgtcagagtctattgccgacaaggtccatgattcttacactctgccagatgtatcgctcagcgatcacagtccaattggccttgtgctgaagttgtaggcacttatacatctctcagctatttgacaactaaagcaggaagtttttacatcgtcctagataaaagacttgtagaaagattttgcttatgtaggctgaaaactatcaaactcgggtggtacttcgcgtggtctcctgtcgtctgtggaggttgtggatagactattcacgttgtgttcgagaagttaaaacatagcctagaacaattagctgatgttctatagcttgtgaatacatctgtttagtcggcgt

SEQ ID NO: 5964 - DNA, 1344 bp, Zea mays
  Clone ID: 700549862_FLI
cataattgtacttttcttttctttttctatatactaaattttcttgtttttattaacacaattgtgaaggcttatcattacacgtccatgtgtcattgtgctcacttggatcttactaaagacaaagtatgggctgagaaagttcattggcatttgagtttgcatggctggccttattttggtcgtattttctgatgtgtgttcttcttatcgagcaagtatgaacaagcttcattttttatacatatggaattgcactattacagttctgatgtcatactgaatgcattttcttgaaaaaatgataatatgaatttacaacaacgaatgttcatctcacagtatttacatagatgagaataatgtccatattacctcactatgacatggttaaataaaatttatcacaggaaatgaaactgtcagctatgaaaacccaaagccaactgctggaatacattgccttgtctttgtagtctcctgctagtttatccagcaaacagtttatgcataagggtcttcttttggttaattagggttcttttggtcagttatcatatgatcacttgttgctttattaggatcctgtctggggaatcttcatccttttcacccttcacctgtttttgtttcgaatacaaatttgtatgttttgaatgggattgctaaagtgatattacagttactttctgtcggtttaaagtctgatgataaatggagtgtggagtatggactactaccatttattcctactgcaaaatcatttaaaatggatatagttttggccatgttactacaattgcaacgatggataagttatccctgcttgttctttatgggtatgtgttctagattctagaagattaatgcttgaacccatctaacaatgttgtggctttaaccgatttcaggtgtggatctgatttgtaatggcttattaggatttaggccagtcactgatgttctgaataaaatactactattttgtgacaatcttatagcatggccttcgagttgtgtatgaaattgaagaggactatagtctatagatcatatgctcatttcaacatcaagggcaatttgattcaattaagtctaggatgatgattttcagtacctaggatgaagtttcagagctgccacctaatttcagagctgcaagatttctacagaattggaagactatgctaccaaaaaagctttcctaatttacctaagatgaagttcagtattgtttaggacgagtcatatgtttatgtctttgtgtctccaaaaatatttgtacacgtatcaagtggtgattattttaagtttcgctactctatatattggctattttatttc

SEQ ID NO: 5965 - DNA, 1065 bp, Zea mays
  Clone ID: 700549863_FLI
agcacttaaggctgtactgttgctgtcaaagatctcaaacaaaaacaaccttgttggggatccaatagaaagagaaaggttgcatgacgctattgattgccttctatcttttgcgaacaaagatggcaccttttctacatatgagtgcaaaagaacttattcttggttagagattctaagtccttgtgagactttcccaaacattgttgtcgattatccttacccagaatgcacttcatcagtgctccaagctctgatattgttcaaagacttatatcctggttaccgcacagaagagatagaagcattagttagaagtgcagcaacgtttattgagaccaaacaacaagaagacggttcatggttaggtaattggggtatatgtttcacctacggggccttcttttcgattaaaggtttagtcgcttctggaagaacgtacaagaacagcccttgcatacggaaagcatgccacttcatattgtcgaagcagctcagtactggtggatggggagaaagccatatcgctattgaaactcaggtgtatgtaaatctcaaaggtgaccgtgctcacgctgtgaataccgcctgggcaatgctcgctttaatttatgctggacagtttgaacgagatccaacgccattacatcgtgctgcaaaggaattgatcaacatgcaactggagacaggagagtttcctcagcaagagcatgtaggatgcttcaactgcagcctctacttcaattacccaagctaccgcaacttgttccccatctgggctctcggtgagtaccatcgtggccttcgtgcaaagaaagacaagtgagtccgtgtgtctatatatatatatatatagagagagagagagtacgtatagcattgtgaggaataaaacaggttgcgtcggtggtgagtgcgcagaaacaagatgtgcttttatgtaggcgtaccacagtgtacaatgttggtcgttgttagactgtaaggctatcatgacgttgtatattgtaatatatatatcgtgttccatatgtttcaaattatataagacgttttatcttctct

SEQ ID NO: 5966 - DNA, 1421 bp, Zea mays
  Clone ID: 700549916_FLI
agtgaatcctcgcagagcgacggcggcggcaccgacgagtttatgctagtgaaattagcagagatacggaaggaggttcagtgccctatctgcttaggcattatccggaagacaaggacagttatggaatgtttgcaccggttctgtagagactgcatcgacaaatctatgcgactaggaaataacgaatgcccagcgtgtcgcacccattgtgcaagcagacgttctttgagggatgatcccaattatgatgcactgattgcagccctgtatccagatattgataagtacgaggaagaggaatttgctttcagtgagcaggagaggattcggaataaaaagatacaagaaaccattgaggaaacattcagaagacagtctgacgcaattggtaagaaacgttccatggcaaaagcaactgcaaccgcctttgcaaggaagtacaggagaacacgggggagagttagaaccattccccctgatattgcccctactggctcttctgaggaggaaagtggagaaggaaattccaaagagacaatcagagagcaatcttctgctgatgatcattctccagatttaagacagaaaagatgcaggaagaggtctggaccacaaggatcacctgctggaaccattggcagtatcgactacagctttgaggagaatgatgaattagttggtggaaaagaaattttagccacctctccgttgcagggagaaatgcttgcttgggggaaaaatggtgcacggagccaaaatcgacatggcagtgttggttcaaatggcaggactggaaggagtgggcgcattgcaaaattggttgattacctccatactgctgatgaaatggataaagagtttcagttgtttcttcttctccttcctgtcgatggacaaaccatacctaacttggaaaagccttatctaagctgtcgaccaaccttgtccattaaacatcttgcacagttcgttgctcttcagttgtcttgtgaagtcgaagaacttgagatgtacataaggatggaccgccaccgtgtaagtgttggctcgaggccttccagtacaggtgaggcaaaatcacgtccatttgatgacttggaaagactgaacgaagaaaaacttgtttcggagcttcatccttcatttgtctctagcaacggtgatatggagttacgatatgctttgagaactcgagagtagatcagtttttatcctcagctatcaatttatgaagtcatactgtccttgtgtaaaaaaaatgttcgatgtgaacaatgttgacgctgtttttctcattggtcatgctaagttaatttaccatctttgtaatatacataatgaactgattagcaaatgacctcagtaggtgaacccagttgtatgctatgtactgttcatttatgcgagtcgatggcagg

SEQ ID NO: 5967 - DNA, 564 bp, Zea mays
  Clone ID: 700549956_FLI
agctgacctatgactataacataatgtacagatttgtccagtttggagcagctcaagtttgtcattgtgggtcttcgaactgcagaaaaatgctaggcacgacgaagtattcaggaagctcacagaatcatcatgccaagaagaaaaagcggaaaacaagttgtgagaattgcatacagcagtttcttcggctgtggcatccacataaaaaaatgtatgttggttgttggataattgacttcgatcaagaaactaaaatgcatactctgaagttcaatgatctccatactgaaaagttcaatttgaaggaagaagaatggcacttcttagaggtcgattttgatgaagattgatcattgaaggtaactgcaagagttggctgccatggtttgtgacagggttgccatggtttgctgcaccgccggcctactagttgggggttcatttgcgatggcagcatagacagacggacggccatttttcttccattttggagtaatagtccaagcctgaactgtgacattcgtgcatgcttatacgtgaaagtgtacctgagagcagatt

SEQ ID NO: 5968 - DNA, 726 bp, Zea mays
  Clone ID: 700549978_FLI
ggctgcttttgatgaggccgagaaaaagaaggaagaagaggtatatatttaaacaccatatagtgtttttgtgacgggtgtatgcatgagtgtcccgtatattgggttttgctgtatgttgtgtctttgccatgcatcctggtttatgttgacgtaggggaatatctttgttaggttgaactgaatgaactataaccagtggcaagtgcatgtgagtttaacagataaaactatcgagtttaaccgtccgttgtgtttttttgtgtcctgcatatcaacagtttggctgaactcatctttatgaaccacaaggtctgtgcttttctgttggaggtttgcacgtcgctgattgtgaatcgctttctcttgtcaacaggatgccgccaagggtggggatgatgaggatgatgacctagaggtcagcattgcaccttcatattcttcatgggccattacgtttcatatatgcagcttaaatgatctaataaataaattgtacatgtatcggtctcaggatgaggaagacgatgagaaggcagacgaggacaaggccgactctgatgccgaggatagcaaggattctgatgatgagaagcagcacgtaagaaactctttcttgagacctgaccaagccatttgtcatgtctctctctgtctatgccctcacacgcctgttgtgatgaaatgccatttgcaggacgagctctagatggcgaggatgatgtt

SEQ ID NO: 5969 - DNA, 791 bp, Zea mays
  Clone ID: 700549989_FLI
tcgagtactcgtgacagggggagaacttccacgaggagaacccgagctgctcctaagaataatgaccaattgttggcaatgagcacaatcacttctgaggttgatgatgagattgttgatgtaaagcccatagtatcaatgtctgttgaaggatggaatacttcaaattcaaagaaatctcactcaaggctagacaatattataatggaggctataaagaacttgaatgagcctacagggtcccacagaactactattgctaattacatagaggagcaatattggccacctagtgattttgatcacttattgtctgcaaaactgaagtatttagctaccagtgggaaattgttgaaggtgaatcggaagtacaggatagcacctagtttgctggaagacgtgcaaagagaacccttgaaattagggagtgatgctagtagaacccttacaagatcccaagtcgatgctgaattggtccgtatggcaactatgactgttgaggcggcggcggcagctgctgctcatgcagttgcagaggcagaggctatcatggcagaagctgaagcagctgctagggaagcagaagctgcggaagcagaggcccgagctgcacaggcctttgctgaagcagcagttttgacactgaagaacagaaatgctgcgaaattggtatagctcgagtccatgaatcttagatatgccctcttgtccttccacacgtagaatccagttccgtagctctgtatgcaactaattggttactaaaagaacctgaaatcagaagttttcac

SEQ ID NO: 5970 - DNA, 912 bp, Zea mays
  Clone ID: 700550008_FLI
cacacgttcacggtagcgagagcttatcgtcgtcggcggtgaagatggtgtcgctgaagctgcagaagcggctcgccgctagcgtcctcaagtgtgggaaaggcaaagtctggcttgaccccaatgaagtcagcgagatctccatggctaactcccgccagaacatccggaagttggttaaggatgggtttatcatcaggaagcctcagaaggttcactctaggtcccgtgcaagaagggcacatgaggccaagcagaagggaaggcactctggatacggcaagcgcaggggtaccagggaggctaggctccccaccaagattctgtggatgaggaggatgcgtgttctgaggcgcctgctccgcaagtaccgtgaggccaagaagatcgacaagcacatgtatcatgacatgtacatgaaggtcaagggtaatatgtttaagaacaagagggtgcttatggagagtatccacaagtccaaggctgagaaggccagagagaagacactttctgatcagtttgaggccaagcgtgcaaagagcaaggcaagccgtgagaggaagattgctaggagggaggagaggctggcccagggcccaagagaaccaacagcacctgtcgcagccccagctccatctactggggtgccaaagaaagcaaagaagtgaagtatggaaacaaagctgtagctttttggtactatataagcatgactttggagcacctgaagtattttgctgttatatagttcgtgtctcaatattctgagtcttgtatctctaccgttctgttggataatgcatgccgtaagagttgtttatggagcttttgttgttacaggacccctaaaaatgtttgtttgacggatgtttggaattgtggtcatgtttatgaaaattagtgttgtgggtc

SEQ ID NO: 5971 - DNA, 1178 bp, Zea mays
  Clone ID: 700550015_FLI
cacagccttggctagaatactttgagaatggagtccccatgtccagaacttttaaccataagttgtattaaattgacttctatcatgttttaaactgtattaaattgactgatatcatgtttttttattggcaaagcaatgaacgggagttgttaagtgtggggcagactaccatgactgggggtcagctggaaaagtacgtaaatgaaggtgacaatggtgataaaatactcagagcattcatcacatgcttcacttgtgatgaaaagttcaatcaagggaacatcacaaccgtcatcccgccacatgaagtatccgaagagggtgaactctccaaagttgatgctgcacaacttgtagaagaaatcaaagctgtactcaaaggcaccaatgttgcacgtgtacgcaaagacaccgaatccaccaaagatcccaaagtgaaagtctttcgaaacatgaggaggacatttgtaagtagagattttttttcatggaacaatgattacactcagcattctgataaatgtgtttttgcagatattttttcctttctacaagaatgaagaattgtttgtatttcatgtcgatacgaaaagactacccatcattgatgctctgttttgcaagatgtcatcattgtcgtttgaagatagatcctgactaggaaagtctatcatgggctgtctactcaaagccatgaaggattccggcttcatggtgaaaaaatatggtgattgtaggttcacagttactgtaactgaactcgaattcaaagatagtgcctcagcgctcataagttttattgagaacttcacttctaagttggacgacaatgccaagaaactgaaaaagggtgacaaggactggctggaaccttacaagaagtcgacagtggcataccttgtttgtcacactgaaaataaggtggtgttgcctgacgatattgtgaagtacaagcaaaacaagtgaggtggttgagtcgttaatgggtccagtggctgtgttttaagacttgtatcacactacttgtatggctttattctctgaagctgttccattgttgccgttagtaacaggtgttgcttttgtctctgctcagtgggtgattcatttcatccagagttgctgcaactttaatcagtctatagtgttgggttcctagctcagtgttgagttct

SEQ ID NO: 5972 - DNA, 957 bp, Zea mays
  Clone ID: 700550026_FLI
tagtgagcgcttcacaaacttctgtcaagggaaactcacaagcagcccatggtcagaattggacggtcatcgataatctttgtctctggttgaagaccagttggtgaatattaaccagaagggtttccttacaattaacagccaacctgctgtaaatggagagaaatccgactcgcctactgttggttggggtggtcctggaggctacgtttatcagaaggcctacctcgaattcttctgcgcaaaggagaagttggaccaactaattgagaagatcaaagcattcccttctctcacttacattgctgtgaacaaggatggagaaacattctccaatatttcaccgaacgccgtgaatgctgtcacgtggggtgttttccctggcaaggagattatccagcctacggttgtggatcatgcaagttttatggtttggaaggacgaagcatttgaaatctggactcgggggtggggttgcatgttccctgagggtgattcatcgagggagctactagagaaggttcagaagacctactacctggtcagcctcgttgacaacgactacgtccagggggacctgtttgctgccttcaagatctgattatgctctcatggtcggtattgttgtatggttggacccaacaatattcttgcatccccgactacaggtctgatcgccatgaaagcttctgttcatttgagctcgggggagtccgctagtcttatttttcttgatttctcttggctttctggaaccatacgaatcaataaggaatgagccgtgttcactttccagttcctccatgtgcaagtggcgcaacggccaggttctagatgtaaaattcgtcctctaatacagaggttggtattgtatgttagtgtaggatgcgctgctcgcattgcactgtattgtgcttctgtttggtggaaataaagattggtcgaaatctgagggcc

SEQ ID NO: 5973 - DNA, 288 bp, Zea mays
  Clone ID: 700550055_FLI
attatgacatggctgaatatctgaagctggaaatgctgaaggaaacaggatttgcacacatgagaatctgtgatggtgttggatcatttcttcagctttctggtctacttgccaagtttgcgcttgtgagggaaactgcaaaagcaccatgaactcgttgtattacagatgataatagcttgtgtcatgctgtgctatcatggtaacctagttcagttaatagcgctgtcatgcgtggcttaatttctacagacgtgatgtatctctgtaagatagtgctttctgaag

SEQ ID NO: 5974 - DNA, 1748 bp, Zea mays
  Clone ID: 700550074_FLI
atttggtaatgggatagttgccagcgacaatgattttctttcagcatcttctaatttgatggataatgctgtgcagtcaatcccaattccgcaactaccattgaataaacgaccatcatctgatcgtgggccttctttggttctgactaaagaaatttccagtggtgtcaccattaccaaacaagaaaataaggtcgaagtacacaagaggccagcgaggtcacgcagaaaaccagaggaaagaggtaaaagtaaaatatccagtagtgcaagtggcttctccccgagcaaattagagaattcatcatcaaatttgcaagctcctatgcaacatgtacagactcctcaatatgcactgttccaggatagcaagaagataggaaaggttcagcatgctaatcagtttatgtttcccgaatatgggtatcctgcatatccatttcctaccattccgttagtgtcaaacattcaagctgatggctatcagacaaaatcagctggcacaagttgccgaacttcagaagattccccaaaacagtcaagttcaatagaaatgtcacaagacataccatcgagaccactgtcaatgacaccacaagaaaagatagaaaagcttaggcgccggcagcaaatgcaagcgctgatagctattcagcgacagcagcaacagtttggtcaacagggttctggcagtgatccaatggtgtctcaagcatactctcttaggaacaaaaatctggattccttaggtagttcaattgtcatagatgaaaacacaaatgagattttttcgcctgagatgattccgacataccatggcccggttcacaagagttctgcaatttcagatgatccctttatagaggaaaaaatatattatcaactacaagatgctcttgacaagttggataccaaaactcgactatgcattcgagatagtttacttcgtttggcccatagtgcaacagagagacaaattgatggtgataggagcagcactaacaagacaaataaagatgaagatgaagcttcagaagatgcatttactaggagaacaaggtagagtacaccaaaaatggttttgttaacgtgtttctgtattactctcaggtaactgatgatatgcaacgtgacctcaaatcatgtcttacttaccatcatggctcagtttatatttttatgatctcaggtctcccactaaggaagaagaaacaatcactaatccaactgatcgtatagtggcctatttgctgtttcatagacattgctcccaggttgcagcagcaacaaaagaagaaatcatatcctcaacccccttgacactagaacctgagctgaaggtaccattgggaactactatggtactatcagaagatcaactgctttcagaggatcaacgagatgagcaaaaaaatgtgttgcagccgtcacaataaggtgagatgtgctagaagataaggctttacttaatttgagtaagattatttgcatttaattagcctatgaatctattgtcgtccttctaatgagcatacagatgctgattgatcaactgttcagaatcaatatgatagcaaaccccgtgatgatgacagtctgctgatcacctgtggctccggagatcccttgtgtaatatgtaaccatttcaacattgtagcattctttttttttcatcatgtaataacatctcagactgtatacgaacctacaattgtgtgtcgagccctaaaaagagcaaaccttggac

SEQ ID NO: 5975 - DNA, 931 bp, Zea mays
  Clone ID: 700550082_FLI
tactgctagggctggaaaggaccttgcagtaactatagagttatgagcaccagatacacagggaccatggtccgcacaaagcatgatgctcataactctatagttactgctagggctggaaaggaccttgtttccagcttggtgtctggattattgacaattggcccccgttttggcggagcaattgatgatgcagcccgatacttcaaagatgcatgtgataggggcctcacaccatacgagtttgttgaaggcatgaaaaagaagggaatccgtgtgcctgggattggtcacaggattaagagcagagacaacagggataagcgtgtgcagcttctacagaaatatgctcacacgcatttcccttcagtcaagtacatggaatacgctgttcaggttgagacctacaccttgtcaaaagcaaacaatttggttatgaatgtcgatggtgcgatcgggtcactttttttggatcttctgtctggaagcggaatgttcaccaaacaggagatcgacgagattgtggaaattggttatcttaatggtctctttgtccttgcacgttcaattggcctgatcgggcacaccttcgaccagaagaggcttaagcagccactctaccgccacccatgggaggatgtcctgtacaccaagtgagatagagccattctttgcaaagcataaagtattattgtcgcttagggctttcagctgtctgtacacttcataaatcgagcagttgcaaaaaaagctcgaaattgtgattgttgatgaagttaggggcagggggagagacatcgaggggaggcactactagattgtgtgttttgtgttgagttgtttcacgatatacggcctcagaatagaagttccctttgaaatgaagtaacgctcgctgatttatgagttgataaattgcatttgttcaggc

SEQ ID NO: 5976 - DNA, 726 bp, Zea mays
  Clone ID: 700550128_FLI
cctagacttcttccgttgcatcttctcttctgttctccacgacgcagttcggctgccagacaaaaaccctaaacgccgccgccgccgccgctcttcctcgagatgggaggcaagtgcccgcaccgcaaggtaaagaagcgccgcctatcccacaagacggctcgccgcggcaagttcctcctgaaggccgacgatgccgtctatgacgagctcgtcaagctggccgaccagggcaaggacgctgaagccaaggagctccccgtcgatgaggacctcccaggcctgggacagttctactgcctccactgcgatcgctactttgcaagtgaaagcgtgaaggatgatcactaccgctcaaagcgccacaagaaaagggttaaggtaatgtctggaccggccccgcacacgcagcttgatgcagaactcgctgcagggatgggaaagcctgacaacggcctgaagctcatgtccatgtgaaggaacctcttgctggtactggtacttgttccgtgcctttgttgctgccgtacaattgaagctgctttgcgcagtaagtaatagcaagagttatagcagacggtttttttttgttgtacgcaagactttcgaagtgggtgtaagttgttttagagtggtggcagaggggggggggggggggggtgtcaatgcatgtatcatgaaaccatttatcgacccataccagtgatgatgatgatgatgtctcgt

SEQ ID NO: 5977 - DNA, 1169 bp, Zea mays
  Clone ID: 700550135_FLI
ttcagtgtgatagtgaagcaggtgctggggctgtcgccagaggagccggtcactgcaaggatactggaggacttcctggccttcatgaagggactcatctccttccccctctacatcccagggaccccatatgccaaggctgtccgggcgagagagaggatatccagcactgtgaagggcatcatcaaggagcggaggagcgctgggtcatggaacaagcagggcgacttccttgacgtgctgctgtcaagcaacgagctatctgacgaggagaaagtgagctttgtgctggactccctgctgggaggatatgagaccacctcgctcctcatctccatggtcgtttatttccttggccagtctgctcaagatctggacctggttaagagggagcacgacagcataagatccaacaaaggcaaggaggagtgcttgacttcagaagactacaagaagatggaatatacccaacaagtcatcaacgaggcgctgagatgcggcaacatcgtcaagttcgtccaccggaaggcgctgaaagacgtcaaatacaaagagtatctgattccatctggctggaaggtcctaccggtcttcactgccgttcatctgaacccctcacttcatggagacgcgcagcagtttcagccctgtaggtgggagggcacaagccaagggacaagcaagaggtttacaccgttcggtggtggccccaggctctgcccaggatcagagctcgctaaagtggaggctgctttcttcctccatcaccttgtcctcaattatagatggagaattgacggcgatgacattccaatggcatacccgtatgtggagtttcagagaggtctgccaatagaaatcgagccaacgtcccctgaatcttgactctcctggagctacagccatcagttatcacaccagagagaaaaggggaaggtgcatggagtatacatgaatggtcagtgacagatctcacaagtgaaggaacactgagggcgcgtgctagtagctagcatatgaggcagctgagactgtaatttaatgtacatggtgtagatatattttgtccatggcaattgcttgaagtggctgattcacttcaccctgtaaaacattctccagtggtttcaactgctatcctataaaaaagaagggcccctgtgtttagt

SEQ ID NO: 5978 - DNA, 1331 bp, Zea mays
  Clone ID: 700550149_FLI
aacccgttctccttttccgtctcctcgacgcaactcgtcgccgtcttctccaactcgcacctcgttcctcgccccaccatttgccgctcccgcctacgatgtcgacgagtgaggtgtggagcttgtccgatttcgaaatcagcaagtacatcggtgagggcaggttcggcaaggtctacctcgcccgcgagaagcagagcgggtacgtggtggcgctcaaggtgatatttaaggcgaaactgcagaagtaccacttccacgcgcacctgcggcgggagatcgagatccagcagagtctcgaccaccctaacgtgctccgcctcttcacctggttccacgacgaagagcgagtcgtcctcgtcctcgagtacgcggcccgtggcgagctctacaaggtccttcgcgctgctggccgcttcaccgagcgcacgtccgccacatatgtagcgagtcttgctggtgcactggcatactgtcacaaaaagcaagtcattcatagggacatcaagcctgagaatttgctaatcgacatcgagggccggcttaaaattgcagattttggatgggcggctcgttcaaatgctaaacgccacacactctgtggcacaatcgattatctggcaccagagatggtagagaaaaaagctcatgaccatgctgtggacaactggacattaggaatcctgtgctatgagttcttatatggttcacctccttttgaagctgatgaacaggatgataccttgagaaggatagttagggtggatttggcattcccttcatctccttgtgtatcttcagaggctaaggatctcatttccaagcttctagttaaggattcaagcaagaggctttgccttgaagacatcatgaagcatccatggataaagaagaatgcagacccttcaggcagttgcattaagcaaaaagatgtcacaagatcaaagcttctgtaatatcagtacaacctgcttgccagtgggcaagaatcttctgatgtggtgccaaactcgtcactactggaggacaaatatgatgacatgttgtagttttaagttccgatagttctggattggattggtgtgtgtccctgcaagctttctcctacaggctggagttctagttctgatgcagcgtttgtgtttcccttttgaactgagtcgtgaaaaccaatgttcactggagaggaatgtagttttctactgagttgttgaaccttcgcaaattggagggtcaatggtctgtggagactggagaggaacgtggctttcgctgtggcgatcgtattttgtaattgtcgaatctgcagtattttggcctttagcaatgat

SEQ ID NO: 5979 - DNA, 718 bp, Zea mays
  Clone ID: 700550176_FLI
aacatatctcctcgcattttccttgcaaccgattgcctatccccctcccaaccaaagaccgatggcgcccaaggccgagaagaagcccgcggcgaagaagccggcggaggaggagcccgcggccgagaagacgaccgccgggaagaagcccaaggcggagaagcgggtccccgcgggcaagtccgccggcaaggagggcggcgagggcaagcgtggcaagaagaagggcaagaagagcgtggagacgtacaagatctacatcttcaaggtgctgaagcaggtgcacccggacatcggcatctcctccaaggccatgtccatcatgaactccttcatcaacgacatcttcgagaagctggccggcgaggccgccaagctcgcgcgctacaacaagaagcccaccatcacctcccgcgagatccagacctccgtgcgcctcgtgctccccggcgagctcgccaagcacgccgtctctgagggcaccaaggccgtcaccaagttcacctcctcctaggcttgcacgctcgccctttgtaggcttctcttgtgttgatgttcgccttgtgttgtagttagatgttgctggtttctctgtcggcgctgctctgcttctgtaggaactgcgtcatgtaacctagcaaggacttgtttatttgtgaatcatcaacactttgttgttgatcacttatgttccaaattctgagtttgacgctggagc

SEQ ID NO: 5980 - DNA, 2333 bp, Zea mays
  Clone ID: 700550221_FLI
cagtcctcccagctccagctaccacagcagccctctcgcttaaaggaggagggagaagagggcggggcgagcaatgtcggagcagcagcagccattgccgcagcctcggagcagcatgcgggaggctctggagaaggaggacaaggagaaggcggcggctgctgcggcggccaaggagaaggcggccgtccccaagaacggcaacggcaacggcggcaagaatggcggcggcgccggcagcggcaacggcggagcgcccccgcagtccggggaggagacggcccgcgagatccaggtggtcagggaggcgtaccgccgcgagacggccgcgccggcctacgtcatacccgaggagccgccggccgtggtcgagctcgtcggctggtacatctacggcttctgctcctacttcatcacccacctgctgctgccggtcctcttcccggccatcatcacgcaggtcgccttccccaactccgacttcacgcccgaccccaagtacaccctcaagggcgtcacctgctccgtccacgagatgtccatgtaccagaggcttaccaagcactccattgtgatcgatggatcccggatgtcaccattgggctggagtggactgtcgtgggcaatcggcatcctcatcgtggcgccgctcctcacccagaccgctcaccatctcgaccgtggccagtaccagtcgctgatcctcattgccgccacgtccttcgggtccttcttctgcctgctaacaggcttcttcaagacggtctgggtgttcctgttctacatcctcttcatcgctggctcgatcatcgtcgctgaggcggtgcacacccgcaaccttgggctgatgatccgtggcctggctgcgcatgactcgggcaagcaccttgtccttcgccgccgcgctgctgccagccagctcagcctgtactgcactgccataggaggcattggagctgccctcatggcagctttcatgtaccacatgctgcggcgcactgaccagctcactggcctctgggtcgtgtccatcttctgtggccttatctggttcatcggcatctgccatggcctcttcacaaacaggcccagcagctcgtcacccaccaccgcattcgagcccaacttcttcaccaagctcagctacagcatgaccctcctccgttacccgcaggccattggcagcctggttgcggtgttcctgtcctctttcgccacaatgtgcatcttcaccagcggcacgctctatgctatcggtggtgtctgcatcaagccggtgctcgtgcttgcgctatggatcctctactttctgttccccttgatctcgctcccgctcctccacccgatccagatcataatccgcgcggacgccgtgcgcatgcagctgctcgggttcataatctgcctgttcgtgtccggtgccgggttctacttcaagagccacaggtggagggctgcccacatcatcgtcatcgccctggtccagagcaccgccaatggcatactgtacgcgttcggccgcatcctgctcctcgatgcctcgccgccggggaaggagggtgcgttctcggtctggtacgcgtttgttcgtgtcaccggtgccatgatcggcttcgctgcctcctccgctggccctgggcgcgcgggagggtcctttgctgctgcgttcctcgggagcttcctgggcatcatcgtgctgatcttcggcaacgtcagcaacatcggggcgctgaaggcggccgggcacctcaaggggatggacgacgagaagaggatgggcggtctcgggatggagaagggcgagggcatgggtagcgccgtcgctgattctggcgagagcagggggagggtatgatgatgactattcgtgacagtgaattcctgggaggtgggggagaaaaggattgcgtcctgtggaggttgtgcttgtgagaaggatttgttctctcttttttttcttgtttctttggccgtgtttcagtgacactgttgatggatcccagtgcttcgcccgtttgatgcatcatggtggtggtggtgatgatggatgacatagtggtaggggagtgtgtgctagttgttaatgtgttatttattcttttgcttgcaagacaattgtaactgatgatcgttagatcatatggttcttccttcgttcttcacccgcccccaaagtctcttgcagtaaagcttcattcatgattcagcctgtgtccgtgtggggaaaaaaatgtgatggtggcattgtgtagacagaagtaaaacatctgtaaactcacttgtagcgatcattctgttctctctgatgccagatgctcgtatgcatttgaatc

SEQ ID NO: 5981 - DNA, 2923 bp, Zea mays
  Clone ID: 700550259_FLI
agaccacagtaaaaggatatgaagatcaacagcagcatgatgacccatctagttcaagcaaagctaaacagaaaaagaggaaaatttcagatttagatcccaaatggagcaaggatgaacttacacgcttttatgaagcctaccgtcaacatgggaaggattggaaaaagatcagcatagcgataggcggtaagtcgtcggacatggtgcggtctctttacagtgcacatcggactttcttatctcttccagaacatcaagctactgccatggggtttatcgcgctggtgactggtcatcacaatgcttcggagaaaaccacgagtcatagaggatatgatcacatagccagagcatctggaaaggcaaggaaacatggagaacaacagaaatcaattgatggacctgacctgcacaactgtcatgaaggggaaattactggattttcagcttccttcaaaaaacgatactatggcgaattggtcaggaacagccgaaatcatgctgttcagaggcgtactcctcttataccagttatagctcctgcagacaggagtaccattgatgagcccacaccaggaattgaaaacgtcatcaattttaattctaccaagagaaaatatgaagcggccaatcatggctgtgctgttgctccaacaaataagtactcttcggacagagtttctggattcgctgaaacatacaaggctgatcaaggccatagttacttggataccatggaaattggggacatagcgatgtgtcaacaacattttaagaaaacacgaattcagcaaactgtggaggaaagtcagactggtatagttgagcatgagacaacgatggcatctaaagaagggaataagctagtctcttctgtaaacaacaatcagatacttatcgacagtatttctgaagatgatatgttggtcttggatgtattgaatagcctggtgaatgcaccctctaaaatgtcagaactagagattaatattccttcaggttcgcttggaaaaactgactctgtgttaagggaggaaggccaccctaccattgatctgtctaaacaagggaagccagttcgtaaatccagtgcttccaagactaggaagaaaaaacataagaagatattaggtgcagaggtgcctgctgaagcacaaaaaaaatgtgacgataatttagtcctgccggaaacactgagggttggtatcactgatgattcttccttgtgtactgactctggaagagcgaggacaccggaagcatctgaagatatttctgctgaagtccccaatacacaaacagaagccaagcctgaatttataatgtctggaaggaccaggttgaaatctcagatgcattgcaaaacaaagcctatgtcgtgcaatgaaggttcagataattttcaggcaaagaagttgctgcactgtttgtcatctgaaccacttcgtagatggtgcacatatgagtggttctacagtgcagttgattatccatggttttcaaataatgagtttgtgcactacttagatcatgcaaaattgagtcatctttcaaggttgactagatcagaatggagcgcgattcgaagctcccttggtaaaccgcggcgattttcaaatcattttctggcagtggaaaaagaaaaacttgaggattatcgggagaaagttagaaaaatctacgctcaactcaatgatggttcacgggattctctacctgcagacctagctaggccattttcaattggtcagcaggttattgttcgtcatccaagttctagggaactttgtgatggcaaagtggtgatgatggggccggattgttacaaggtccattttgatgatcctgaccttggtgttgatactgtgaaggacactgattgtatgccagttaattggctgcataatcgtcctgacaacatgagaaggaactacctttcaaatgatgtgtacaacatactggagatggatcacattcctgaccttacaccaagtgagaacgggaatcatgctataaatggaactactgtattcgaggagctcaaaagtctgcgcttaacatcagatagacagcctaaggcagaatctattatacatagtgaacggccaccatataggagtacatctgatggccctacaagttctagtggtttctcttgcccagacaataatgctggtcacaacggtgaactagagtcatatgtagctgcattttttgaaaactcactatcacaagccaggcagatggttgacgaagccatccaggcaaactctggtggtagtgatgatgaaaaggtatgcatgttaaatcaagtgacaggatgtctaggctcagattctcgtggcgtgcaacttccatctgacctgatatcaaactgcatcgcaacggttatttcaatcaagcgccttagcgactcgcgacatccatttggtaacgtagcaggcgtcttggagcatgctttatcaatgctgcgtccaagctgtccacagaacctcggagtttacacagaaataaagagagacctttgcaccatagcgaaccagatttttgcacttgtgccaacagcatcgggcaattgcagccctcctgtctcgcccatgtaactgggacctgccccggatagacccgttgccttcttgcaggccctgcagtagacacgctgcttcctctgctgtgagttcaaaacagaggttttgctgctgttggagcttgatgttatgaagtccggttgaatggtagcatacggaggacgcaagtctgatgtgctgacttgagcttgtatatgcagcgtgcgatcattaattggctagcctccttgtaacctgtgtatatacctgaatgaataatttataggtccatatacagattcaggatagttaatatctgatatagtagtgaataaagatgtatttctgcagtc

SEQ ID NO: 5982 - DNA, 424 bp, Zea mays
  Clone ID: 700550261_FLI
cctggaggttgagagctccgacaccatcgacaacgtgaaggcgaagatccaggacaaagagggcatccccccagaccagcagcgtctgatcttcgctggcaagcagctggaggatggccgcaccctagcagactacaacatccagaaggagagcactctccacctggtgctccgcctccgcggtggtcagtaagccatgggtcatttaagctgctgctgtacctgggtatctgcgtcgtctggtgccctctggtgtacctctatatggatgtcgtcgtctaataaacatctgtggtttgtgtgtcatgaatcgtggttgtggcttcgttggtttaatggacctgttgtgtcctctgtgtgttgtacccaaaactcttctgcagcagtatggctcgaatccttatgaagtttgatgtttgaactt

SEQ ID NO: 5983 - DNA, 539 bp, Zea mays
  Clone ID: 700550275_FLI
gaagcagacggcgcgcaagtcgaccggcggcaaggcgccgcggaagcagctggccaccaaggcggcgcgcaagtcggccccggccacgggcggcgtgaagaagccgcaccgcttccgccccggcaccgtcgcgctccgcgagatccgcaagtaccagaagagcactgagctgctcatccgcaagctccccttccagcgcctggtccgcgagatcgcgcaggacttcaagacggacctgcggttccagtcgtcggcggtggcggcgctgcaggaggccgcggaggcgtacctggtggggctcttcgaggacaccaacctctgcgccatccacgccaagagggtcaccatcatgcccaaggacatccagctcgcccgccgcatcaggggcgagagggcttgagctgtcgcgctgctgttcgtcgttgtaatatttgaagatggcgggttcgtttcatgtcgtgcttatcgtggatgtgttgccctcactgaatggaatgcgactgcccttgtccgaaattaatgaatgcccttgttccttc

SEQ ID NO: 5984 - DNA, 1121 bp, Zea mays
  Clone ID: 700550309_FLI
gaagaaaactcatcctgaatgtgctcgattttcacctgatggtcagtaccttgtttcatgctcagttgatggaataattgaagtctgggattatcttagtggaaagcttaaaaaggatcttcaatatcaagccgatgaaagctttatgatgcacgaggaacctgtgctgtgtgttgattttagtagggattctgaaatgctggcatctggatcacaggatggaaagattaaggtttggcgtatacgaactggtcagtgcttgcgacgccttgagcgtgcacattcgaaaggtgttacaagtgttacattttcacgtgatggaacccaaatattgagtacatcctttgacactaccgcgagggtacatggcctcaagtctggaaagatgctgaaagaatttcgaggtcattcttcatatgtaaattatgccatcttcactactgacggtagccgtgtcattacagcttccagtgattgtactgttaaggtctgggatactaaaacaacagattgcttgcatactttcaagccaccacctcctttgaggggaggagatgcatctgttaattctgtccatttatttccaaaaaatactgatcacattgttgtctgcaataagacttcatcaatattcatcatgactttacaaggacaggttgtgaagagtttctcatcaggtaagcgagaagggggagattttgttgcagcttcagtttcaccaaaaggagaatggatatattgtgttggtgaagacatgaacatgtattgctttagctaccaatctggtaaactggagcatctgatgaaggtgcatgagaaggatgtcataggcattacgcaccatcctcacaggaacttagtagccaccattgctgaggattgtatgatgaagatatggaagccttgactttttttctttttaaaaaaaccttgaaccgatgattaaataggatgtattttgttttgtaatttagataactggtaggcgctacagctatggactcgttggtgcttatgttgccccatgtcttactaccattgtatcctgtactagatttagggacctttcaatggtgtaaacacagcttactacgactcctcgctacaagttcattatggtt

SEQ ID NO: 5985 - DNA, 1695 bp, Zea mays
  Clone ID: 700550325_FLI
cttcacaaacgccggcgcaaactctcgcccgagcccgacagatcttcaattccccattccgcccaccgatcgaccttcacgccagtctcggtctcttccgaaggcgtcgcgcgcggttgtttgagaggagaggaggaagatgagggagtgcatctccgtccacatcgggcaggccggcatccaagtcggcaacgcgtgctgggaactttactgcctcgagcacggcatccagcctgatggccaagtgcctggagataagaccgcgggacatcacgatgatgccttcagcaccttcttcagccagactggtgctgggaagcacgttccccgtgcaatcttcgttgatctagaacccactgtgatcgatgaggtgcgcactggcacgtaccgccagctcttccaccctgagcagctcatcagtggcaaggaggatgccgctaacaatttcgcccgtggccactacacaattggcaaggagattgttgatctgtgccttgaccgtatccgcaagcttgctgacaactgcaccggcctccagggcttcctggtcttcaatgccgttggtggtggcactggctctggccttggttctctcctccttgagcgcctgtctgtggagtacggcaagaaatccaagctgggcttcactgtgtacccatctccccaggtgtcaacctctgttgtggagccttacaacagcgtgctctccactcactcactcctggagcacactgatgtctccatcctgctcgacaacgaggccatctatgacatctgcaggcgctccctcgacattgagaggcccaactactccaacttgaatcgccttgtgtctcaggtgatctcatcgctgactgcttctctgaggttcgatggtgccctcaatgtggatgtgaacgagttccagaccaacctggttccttacccgaggatccacttcatgctctcctcctacgcaccggtgatctcttctgcgaaggccttccacgagcagctgtctgtggcggagatcaccagcagcgcgttcgagccggcttccatgatggtcaagtgcgacccacggcacggcaagtacatggcttgctgcctgatgtaccgcggcgacgtggtgcccaaggacgtgaacgccgcggtggccaccatcaagacgaagcgcaccatccagttcgtggactggtgcccgacggggttcaagtgcggcatcaactaccaggcgccgacagtggtgccgggtgccgacctcgccaaggtgcagcgcgcggtgtgcatgatctccaactccaccagcgtcgtcgaggtgttctcccgcatcaacagcaagttcgacctcatgtacgccaagcgcgcgttcgtgcactggtacgtcggcgagggcatggaggagggggagttctccgaggcacgcgaggacctggccgccctggagaaggactacgaggaggtcgccgcagagggcggcagtgatgacggtgacgaggaggaggaatactgatctgcttgcatgaatctgtttggctgtcgagccaggttgtggtgttgaaaaacctttgtttgtgtcctggcccccctgggtaatgtttgggtgtttccttccatcatcacttgctgaactgctctagtatttgcatttgtaattgaagtctgtcgctttaagcactcttggttctaaagatctctgtgcttttggggggtgtt

SEQ ID NO: 5986 - DNA, 404 bp, Zea mays
  Clone ID: 700550326_FLI
agggcgtgtggacgacaaacatccacgactgcattcacggcaaggtatggccagtcatgggcgctgggtatcacaccatccaccatacgacttaccgccacaactatggccactacaccgtctggatggactggatgtttggtacgctccgtgagccagatgatatcctcaagaaggcctgagttcgtcgtagctgtggttttcctacggtgctggatgtgcttggtctgttctgtccccagtgcctctaatccgctgagcctgttcagcgctctgtttctgtaggctttggtgtgctatttagtttgctaggttttatatgttgtgcttattctgtaatttagtgatgtttgtctgatgacgcaacggagttcaggacgaataaaaagaaagatttgctagac

SEQ ID NO: 5987 - DNA, 541 bp, Zea mays
  Clone ID: 700550328_FLI
cagcaactttggctgatattctcagacaattagggacccatttcgaaatggacctcatggacagaaaagcagaagtgaaacgcatcatagaagatgtaataaatagcatgtctgatgatgaaggtgaagaaggctcggaagatgaagcagaagacaacggcaaggtggagaagtcaaagagtgatcccgatggaggagaagagaagtgattctgtggaccggatgtgccagtggtggtttggattgaacctggaaggactattttccggccaattctcccgtgtttggaggtttttggctctgtacaattgggggcaccgcgagaacgagccggtgacctgggtactggttacaaagattgttaaccatttcacagccatacacacctagttgtgcttgacttggtagtggatgtagtctctagtgtatggtcatgtacgatagtttggttgcgtaggtagctagcgtgactgtaatatgcagaacaattctgggcttgtttcatctatttatccatgtaaacctctgtatccgagttctg

SEQ ID NO: 5988 - DNA, 2029 bp, Zea mays
  Clone ID: 700550363_FLI
atatgggtttagaatttcctgtaagacaaactgatgtctgtggcattcttcaccgccgggagatggaattgaaaaggctggctgtggatagttcttttggaagaaaagcatatatggcttttatcccagaaggattcggaaatatgctggactgggatcaagttatgaagtttcagaggaagaatggatcattgttcagcactccttccacaactgctgttgcattaatccacaaatacaacgaccaagcccttcaatacctaaatttgcttgtcagtgaatttggcagtgcagtaccagcaatgtatccttcaatggtacattgtcagctttcaatggtggacgcgcttgaaaaaatgggaatttctcagcgctttgtcagtgaaatagaaagcatcctggacatggcatacaattgctggttacagaaagatgaggaaatcatgatggacatagcaacatgtgcaatggcatttcgccttttgaggatgaatggttacaatgtttcctcagatgagctgtctcacgttgctggagcttccactttccatgattcactacaaggatatttaaatgatacaaaatccctactggaattgtacaagacctcaaaagtcaccttatcagaaaacgatctgatcttagatcgcataggttcctggtctggcaacttattgaaggataagatgtgctgtagtagggtgcaaaaagactcgatttttggagaggtgctgcaaaaaaaatttaaattctcattttcacctgggaggttcagtttatgtctgtgttttgtgatttcagatggagtatgctgttaattttcccttgtattccacactggagcgtctagaacacaagagaaacatcgaacattttgatgcttggggttctctgatgctaacaacaaaatcctcatcttttcgtatcaatcaagaattcctagctttggcagtcgaagatttcagtttctctcaacgtgtttaccgggatgaacttcggcatcttgatagttgggtgaaggagaacaagctggaccagctacaatttgctcggcagaaactgacatattgctatctgtctgctgctgctaccgtattttcttctgaattgtctgacgctcgcatttcatgggccaaaaatggtgtcctcacaactgtggttgatgacttcttcgatgttggtggatcaaaagaagaattagaaaacctgatagcactagttgagaaatggcatgcgcaccatgcagttgagttctattcggaacaggtgaaaatagtattttctgctatttatacaacagtgaaccatcttggagcaatggcttctgcagcacaaggccgtgatcttacaaaccacctagtagaaatatggctggatttgttaagatctatgatggtcgaggcagaatggcagagatgccaatatgtaccaacagttgaagaatacatgacaaatgctgttgtctcatttgcactgggcccaattgtgctcccagcattgtattttgtagggcaagagctattagagcatgctgtcaaagatgaagagtacgataaattatttaggctagtgagcacttgcgggaggctcctcaatgactaccaaagtttagagagggaaggcaaccaggggaagctgaatagtgtttctctacttgtgctccacagtggtggttctatgtccatagaagccgctaaaaaggcaatgcagaagtccatagacgtgtctaggagagacttgctaagattggttctcaggaaagaaagtgctgttcctaggccatgcaaggagctcttctggaagatgtgtaagatacttcacctgttttactctcagaatgatggatttagctccccaaaggaaatggtcagtgcagtgaatgctgttatcaacgagccactcaaagtccaaaatagtactacgtttttgtctagttcatcaaggtagcgaggatatcatgtaatttatcctgttcatatggatcagaagcaacagcagcaagcttaagatacaaaaaaaaaatataagg

SEQ ID NO: 5989 - DNA, 852 bp, Zea mays
  Clone ID: 700550386_FLI
ggtcccttgtatgctggatttgataccattctgggcttccatattccatcatacaagggaccttggaaacgcaagagaattaaaaatcctaactacaagggtaaatggaagaccccatggatcgataatccagagtttgaggatgatccagatctttatgtgctgaagcctttgaagtatattggaattgaagtttggcaggtaaaagctggttcagttttcgacaacattctgatttgtgatgaccctgagtatgcaagaaaggttgttgaggaaacttggggtgcaaatagggaggctgaaaaggaagcttttgaagaagctgaaaaggagaggaaagctagggaggatagggaaggtcaaaaggcaaaggacgatggtggccggcatcgaatacacaggcgtcataaaaaacactacagagatcactgggacgactaccatgatgagctataaaagtccccaaatattgcattcctcaaaagcataagctggaagttgcttcggacattgtgggtgcttttcaataataataattgattcgcctggtcagaacaacctgaagtgtttcttgctatgcgccaacaaattattgaactacaggatttgatatgtaatggacaaccgaagatctgcagggcattccagcgaaaacttggctctggtactgaaatagaggggacgagagactgtagtttgtgtctgtacaacggtgccggccatgtgctagctttgtaatctcaaaacattgtctttgcatgaataatgtaagttacccaaaaattactgcataccaagttacaaagtgttgtagctgacatatgaggaacactttaattttaatcttcatat

SEQ ID NO: 5990 - DNA, 1358 bp, Zea mays
  Clone ID: 700550419_FLI
gaaggagcatgtgcggacaagctcggtttgatgggcttgatccaaaagcccgcataggctgagcaccgtctagtcgtcgccagtttcgttccgctgcagcagcggcagcgctcccctcctcgacgccgcggcttctcctcatcctcgcccgctccgtccgctgactggaagtggtctacacagaaggttaccatattgttaagttaaagttggatcattggaacaatgccgccccataagattgagactgggcatcaagatgtggtccatgatattgccatggattactacgggaagcgcctagctacagcctcctctgataacacaataaagatcattggcgtaagtggaacctcacaccagcagcttgcaaccttgagtggacaccagggcccagtatggcaagtcgcatgggctcatcccaagtttggttccatgcttgcatcctgcagctacgacggccgggtgatcatctggaaggaaggaagcaagcctgatgaatgggcactagcacacacctttgctgagcacaagtcctccgtgaactccattgcatgggcgcctcatgagctgggtctatgcttggcttgtggttcatcagacgggaacatttcagtcttcgctgctcgttctgatggaggttgggacaccacacgtattgaccaggcacatccggttggtgtgacctcagtttcctgggctccagcaatggcaccaggagctctaatcagcgcaggatcttctggccagtttgagtatgttcagaaactcgcttctggtggctgcgacaacacggttaaggtgtggaagctcaacaacgggagttggcggatggactgtttccctgccctacagatgcacaaggactgggtgagagatgtcgcgtgggccccaaacctgggccttccaaagtccaccatcgccagcgcctctcaggatggaacggtcgtcatctggacagcagcaaaagaaggcgagcagtgggacggccgggtgctgtatgatttcagaacccccgtttggaggctgtcgtggtcactgactgggaacatactggcggtttccgacggcaacaataatgtgaccctgtggaaggaagctgtggatggcgaatggcagcaagtgacgactgttgagccataggtcctctcgagttattcctcgcctgtattttctaaataataattgtagttttcgtgtaaggtaaagttatgcccctgtgggtagcatgtgggactgtttgtggttcacagctgttggcgaggcacagtgcacgagacatggtttcaggctcgggcaaaagtgaacaattaacttgttatacagtccattctgtttattcagtgccttttcgttcc

SEQ ID NO: 5991 - DNA, 1347 bp, Zea mays
  Clone ID: 700550438_FLI
cgacaagctcaaggctgagcgtgagagaggtatcaccattgatatcgctctgtggaagtttgagaccaccaagtactactgcacggtcattgatgcccctggacaccgtgacttcatcaagaacatgatcactggtacctcccaggctgactgtgctgtccttatcattgactccaccactggtggttttgaggctggtatctccaaggatggccagacccgtgaacatgctctccttgcgttcacccttggagtgaagcagatgatttgctgctgcaacaagatggatgcaaccactcccaaatactccaaggcacgttatgaagagattgtgaaggaagtctcatcctacctcaagaaagttgggtacaaccctgataagattgcctttgttcccatttctggttttgagggcgacaacatgattgagaggtccaccaaccttgactggtacaaaggcccaaccctgcttgaggctcttgaccagatcaccgagcccaagaggccttcagacaagcccctgcgtctgcccctccaggatgtgtacaagattggtggtattggaactgtaccggttggtcgtgtggagactggtgtcatcaagcctggtatggtagtcacctttggtccaactggcctgactaccgaggtgaagtctgttgagatgcaccacgaggcacttcaggaggctcttccgggtgacaatgttggcttcaacgtgaagaatgttgctgtcaaggatctcaagcgtgggtttgtggcctccaactccaaggatgaccctgccaaggaggctgccagcttcacctcccaggtcatcatcatgaaccaccctgggcagattggcaacggctatgcccctgtgctggactgccacacctcccacatcgctgtcaagtttgctgagctcattaccaagatcgacaggcgctctggcaaggagcttgagaaggagccaaagttcctgaagaacggtgatgctggtatggtgaagatgatacccaccaagcccatggtggtggagacattctcagcgtatcctccccttggtaggtttgctgtccgtgacatgaggcagacggttgctgttggagttatcaagagtgtggagaagaaggacccaaccggcgccaagtgaccaaggcttgcttgccaagaagaaatgatgcgatcctgcgcctgctttaacaatacctagttttcatcattacaagttttgtttgtggtcgttgctgttattgtgtgaactgttgagctctgttagcctgtgcacttttatctatttatttggtaccttcttgctatttcaccttctgcaatacaagaatgctgtaagagctatatgtt

SEQ ID NO: 5992 - DNA, 2244 bp, Zea mays
  Clone ID: 700550458_FLI
ggtgtggaatggcgctttcgccacatattcagaggtcaaccacgaaggcatcttttgcagagtggctggagtgtttttgttagtgccaaacgtcttgttgctggcgatgccttcatctttctaagaggtgatagtggggagcttcgtgtaggagtcaggcgtgccatgaggcagcaagcaaatgttccgtcttcagtaatatcaagccacagcatgcatcttggtgttcttgctacagcatggcatgctgttaacactgggaccatgtttactgtctactacaagcctaggacaagtccagctgagtttgttgttccctgtgatcgctatatggaatcactgaaacgaaattaccctatagggatgagatttaaaatgaggtttgaaggtgaagaggctccagaacaaaggttcactgggaccattgttggaaatgtggatcctgatcaagctggatgggctgaatctaaatggcgttacctcaaggtgaggtgggatgaagcttcctccattccacgtcctgaaagggtttctccctggcaaatagaacctgcagtcagccctccccctatcaacccacttccagtgcacagacccaagagacctcgctctaatgctgtagcttctctgcccgagtcttcagctccaacaaaagaagctgctccaaaggtcacattagagactcaacaacatgccctgcaaaggcccttgcagacccaggataatgtggccccgaaaagtgtttttggtgataacagtgaattggactctgctcataagtcctccctgcgaccgtcaggttttgatctggacaagagcaccattggcatgcagaggaagctgggttcagatatttggatgcgaatgaacagacctgatggttacagtgaaatgttatcgggatatcaaccacctaatgaaggtgcacggaattcgcagggtttctgttctttacctgatcagattgccgctggacgtcctaatttctggcacactgtaaacgctcattaccaagaccagcaaggcaatcacaatctgttccctggttcatggtccatgatgccttcaagtactggctttgggatgaacagacagagctatccaatgatccaggaagtcggtgggatgtctcagagttgtacaaacaccaagtttgggaatggagtttatgctgcactacctggccgaggcattgatcgatacccatctggatggtttgggcacacgacacccggtggtcgcgtggacgatgcccagccacgcgtgattaagcctcaacctttggtccttgctcacggcgaagctctgaaaatgaagggcaactcgtgcaagctttttggaatccatctcgacagcccagccaaatctgaacctttgaagtctccgccaagcgttgccacaccggcagctgagaagtggatggcagacggaatcgacacagacaaaagctccgagccgcacaagacgccaaagcaactcggtgctacacagacacaggtggatcctgtcccagagagatgcccacaagcttcaagaggcacacagtgcaaatcacaaggcgggtcgactaggagctgcaagaaggtccacaagcaaggaatggcgctgggcaggtccgtggaccttaccaagttcaacggctacacggagctggtggcggagctggacgagatgttcgacttcaacggcgagctgaaaggctgtagcaaggagtggatggtcgtgtacaccgactacgaaggcgacatgatgctggtcggggacgacccctggaatgagttctgcagcatggtgcacaagatcttcgtgtacacgagggaggaggtccagcgcatgaacccgggcgccctgaactcgaggccggaggacagcggcctcgccaattcgacggagaggggctccgcatctactgctgctgctagagaggcacccggctaccagtccgcctcgtcgcttaactccgacaactgctgatgccttggcagctagctggtcgtcccaagtagtagagaacaaggcaaatgtatccatagatctccttgtagcggagcttaatgcctttttttcccctttctaatatgcattggatgagcccgtagcgcaccgtagtagtatctaaagctggtgttctgagttggttggaccttcctgcagttttggtttctccttctgatgtggcaagttttagctggtcgcacctacctaatgtatgcttagcaaacgaagtcccactaagcgctgtac

SEQ ID NO: 5993 - DNA, 392 bp, Zea mays
  Clone ID: 700550479_FLI
ctatttcaataccttgccgctgtatttgcaactgatttacactctagagcttttctgcgccttccaaaaactcttggagtggacttccgtgcttcgtgtttctgccataagaagactattgacatgggatatgtctgttcaatttgtttgtcaatattctgcaagaatcagaagaagtgttcaacctgcgggtcagaattcagtcgtgccatgcctgatttgaactccgtgccggatcaaagcaagtagtgtccagtgcgaagttaacccatcaacagacaatgcttttctctgtgcgtctcacaggttcctttcggactagcaccttcacgtgtgcagtgtgtacgagacgtttctttggtcgatatgtgaatcaatttccatgtctgaat

SEQ ID NO: 5994 - DNA, 1108 bp, Zea mays
  Clone ID: 700550537_FLI
ggaactccggatccaccgctaccgccgccgcgtctaaaccctccaccgccgcggtgcgtcagaggcagaggcagagaggcagaggcagaggcagccatggggagccgcctcgggcgccgcgtgatccactttgccaacctcccgctgaaggtcatgctgccccccgcgccgctctcctccgtgcaggagttcgccgtgcggaccgtcccctccgcttccaaggtggacatccggcgctgcctcgagtccatgtacggtttttccgtcgccgaggtccgcacgcttaacatggagggcaagaagctccgccggggcccctttctctccgccaagcccgactacaagaaggcctacgtcacgctccgcgccccgctcgcggtctcgcgcgacctgttccccatcggggccatcctcgcggagcgggagcggaaagccagcgcagccgctgcgaggaggaaggcggtggagggcgccgaggtggagggggagagcaaggggaagcactggatggaggacgagagggagggcttctccagggctggctgcgggaaggtcgtgtatgggaaccctgggaggctggggaggaagaggaggggaggggataaggtgaaggagcaagctggggacgaggcggccaagttcccgtggtccgggatgcgcctggctaccgagaaaccgaggagggtgagacgctctccatcgaagaagggaatagtcctgaagcaaaaatcacggaaggtatccctgcagcaccgctcaaagaagttgaaagcttgatagtacttgacttgagctgctgtaccgaaccactggaggatcctgccatcgagcgtggatgcaggccgtggacccataagttcgctggcggacctgccttgtttttaaattaccaaataaacaccgaacgttgaaggacttgtaaggattttgtgcctttgatatgggatttagaaggctgcatcgggcatgtgtgctggaggaccagacctggaagggttcatgggcgttccctatcctatactgtcccttcgtttgatatgagaattgagatttgtttagtaattaactgactactagcattgctgattagagatcatgtactgttatt

SEQ ID NO: 5995 - DNA, 583 bp, Zea mays
  Clone ID: 700550602_FLI
aaattatttaggctagtgagcacttgcgggaggctcctcaatgactaccaaagtttagagagggaaggcaaccaggggaagctgaatagtgtttctctacttgtgctccacagtggtggttctatgtccatagaagccgctaaaaaggcaatgcagaagtccatagacgtgtctaggagagacttgctaagattggttctcaggaaagaaagtgctgttcctaggccatgcaaggagctcttctggaagatgtgtaagatacttcacctgttttactctcagaatgatggatttagctccccaaaggaaatggtcagtgcagtgaatgctgttatcaacgagccactcaaagtccaaaatagtactacgtttttgtctagttcatcaaggtagcgaggatatcatgtaatttatcctgttcatatggatcagaagcaacagcagcaagcttaagatatttgtaagtttgtgactgggctggtgtggatctgtgaagctacaactttgctgtatgtggatcaaggtattaggaagatctggttcacatattgataacataatggataaaccataacgttaaatt

SEQ ID NO: 5996 - DNA, 666 bp, Zea mays
  Clone ID: 700550605_FLI
agcgagagcttctgcataagaacaacaaatcaaaagcgtgatcagctcggtgccaacaaaacctcaacaaccaagtttcatgtctgatctcgacgtccagcttccatctgcctttgatccgtttgctgaggcaaatgctgaggactctggtgctggtcctggaacgaaggattatgtgcatgtgcgcatccagcagcgcaacggcagaaagagtctgactacagtccagggtctgaagaaggagttcagctataacaagatcctcaaggatctgaagaaggaattctgctgcaatggtactgtagttcaggacccagagctaggccaggtcattcagctccaaggtgaccagcgcaagaatgttgctactttcctagttcaggctgggattgcgaagaaagagaacatcaagattcacgggttctaagggacctgtaaatgcttgtgccctatattgtgtgcctcaacatattggggagcttgaagcatcgacagttgctagtcattgcttacttatataagaacataagtagtatttgctattgtcaagtgtgccttgcttgatgcaagttgtgttttcgtctcattattattatgcacggccatcgtacgtgtatggcttgtatgggttattgccaacttaataaaagcacactctgtttgcct

SEQ ID NO: 5997 - DNA, 1068 bp, Zea mays
  Clone ID: 700550649_FLI
aagaagatctcccatttctttgccaatcaaaccattatgaatgctgtggagaaggcgaagaaagtccacatcgtggactatggtatatactacggctttcagtggccgtgcctcattcaacggctctctaccaggcctggtggccctccgaggctccggatcacggcaatcgacacaccgcaccctggttttcgcccagcagagcgcatagaggagacgggaaggtatctaaaagattatgctgagaccttcaatgtgcccttcgagttccgagccattccatctaggttcgaggcggttcagatagaggatctccacattgccaaggacgagctgctgatcgtcaacagcatgttcaaattcaagacactgatggacgagagcgtggtggctgagagtccaaggaacatggtcttgagcacaatcaggaagatgaacccacatctgttcattcatgggatcatcaatggctcctacaacgcacccttctttgcgtctcgcttccgggaggccttataccactactccgccatctttgacatgctggagacgaacatcccgagggacaacgagcagaggctgctcatcgagtcagcactgttcggtcgagaggcaatcaacgtaatctcctgcgagggcctggaaaggatggagaggcccgagacatacaagcagtggcaggtgaggtatcagagagctgggttcaggcagctcccgatcaaccaggacatcatgaagcgtgctcgcgagaaggtcaggtgctaccacaaggacttcctcatcgacgaagacaacaggtggttactgcaagggtggaaaggacgcatcgtgctggcgctctcaacgtggaagccagatcacaggtcttcctagctcctcctcgagggcggctacatggttgcagatcgagcactgcactgtagatggatggaggcctgttcgtatctttggatgcttgggctggttgttcctgggatgcaacatatagctaggctaggctgtgctattcgaactactaaagcatgttttgcactgtctttatatagtgatgccatcaagggtccctgt

SEQ ID NO: 5998 - DNA, 716 bp, Zea mays
  Clone ID: 700550656_FLI
gtgcaacaagaagggcggcatacgtttcaccatcaacggccactcctacttcaaccttgtgctggtgaccaacgtgggaggcgccggcgacgtgcacgctgttgccgtgaaggccgagcgctcccccgggtggcaggccctgtcgcgcaactggggccagaactggcagagcaacacgctccttgacgggcaggccctgtccttccgcgtcaccaccagcgacggccgctccgtgctctccaacaacgccgccccccgcggctggtctttcggccagactttcagcggtgcccagttcaactgaacacacccccaccgttcatgcagcgtcgacgcagtggcactagtactagttgttccgtccaccccgattggagcctgccgagaggcgccatggttttatgaatggtctgcacctcgcatttgctcctgggaattaccagtagtttaggcctagtaatagcgcgggttttatcgtgcttgcgttagcatggtgttttagtgttccttggttgtatccggcttggaaattggaggtggtggtaaggctggtctgcagataaacggaggcaggctgccttgtatcacccgccaattatgcgtttagggcctcatggtgatggctccttcgagatgagatgttttctgagttattcaagtgtgttagttgtaatgaatcttatcaagttactatttcctaatatattatccttcgg

SEQ ID NO: 5999 - DNA, 618 bp, Zea mays
  Clone ID: 700550660_FLI
cgcctcgtctaaccaccaccacgagggagagttaaagtcgccagtacagaagagtgaaggggagagggttgctgggtccgattcggtgggctcatcgccgtcgggtccacgaattggtgcctaggagtctcgcgtgcttcggggacataatcgatggtctcgctgcggtgggttggtggctggagacctcagaattcgtcgtcatagtgcgagctcctccgcgtgtgcaccgtgcgccgtggccaggggtgtctgcgctgcaattgccaggcatacaagatgacgatggtgcaatgcaagtgtttggtgcttttggttgatagaagctgctggatgcttttggtatttttgaaagatgcaagtcgtgcttctggttgatacttagaagttggtggttcaaaactgaaaaacctgtcaggctgtcacttgcttttggtattgttatgcttatatatgatgttatgcacttatgcagttcagcatgtttgctgcctgcctgcttgctgctcagctgcagcctggaggctggtgcttatctgagagtactaagttatctgatgtgatctgtaaaacttactcagttcttgtcaaacttaatctgttaacaggtttcttgtc

SEQ ID NO: 6000 - DNA, 921 bp, Zea mays
  Clone ID: 700550662_FLI
gaaaaagaaaagctatactttcaacattcggtatgtattcttcgaccagaaagtatagcttttctttttcttgggcatcgaggcaatatcccagaaaaagaaaagctatactttctggtcgaagaatacataccgaatgttgaaagcttggagaaatttattaatgtctctcgactcgattggtcctcgtgtttcaagataattcaggggatagcaaagggcttacattgcttacataagcatcatattctctatatggatttgaatccagccaacatcctcgtccgttcagatatgaatcctgtggtcatcaattttggatcatcaatagtgctggatcgtgatgatgataaggtcaccggggatgccgtagcaggcacactgggttatgtcgctccagaaaaacttatggaagcttatgcatcaatgatgtctgatgtgttctcttttggaatcatcatcattgagatcattaccggcaggagagcttcacctttcgttgatttaccggaatggggttcagttgatgagatgattacatcagcgaaagggttatttgatccggcgctagctaacgagtctcagctgatgaagattaataggtgcagagaggtcggactgaagtgcattgagcgggatccgaaacgtcggcctaccatgggaaatgtccttgagatgctaagtagctagagtgacaggcaccgatttgaggtgttctcggttaggagtggattgaagcggattagagataatcaaatctcttaaaactgaatagaaatgggtttactttccctcaatcccctcctacctatgcaaccaaacaaggccttatgggtttcaacaatttggtttgatgtattgtcacaaattgatcatttgtaacattcaagatttatgcgcaaatgtattggcgtgtggatt

SEQ ID NO: 6001 - DNA, 998 bp, Zea mays
  Clone ID: 700550673_FLI
gccaaactaatggattacaaggatacccatgtaactactgctgttagatgaagacttcgaagctgtggtgggggatttcggtttggccaaactaatggattacaaggatacccatgtaactactgctgttcgaggaacaattgggcacattgcacctgaatacctttcaacaggaaaatcctctgagaaaactgatgtatttggctatggaattactcttttagagcttattacaggacaacgtgccttcgatctagctcgtcttgctaatgatgatgatgtcatgcttcttgactgggtcaaggggttgctcaaggagaagaaactggagagtctggtcgacgaagatctagaccacaactacatcgatgtcgaggtggaatctctgatccaggtggcgctcctctgcacgcagagcaaccccatggaacgtcctaagatgtcggaggttgtgaggatgcttgaaggcgatggtctcgccgagaggtgggaggagtggcagaaggtagaagtggtacggcaagaggttgagctaggccctcatcgaacctcggaatggattctcgactccaccgacaacctccacgctgaacagctgtcagggccgaggtgaaggcaagcttgagatcagactcccactaattctggtacggaggagtattttgcaagggcaatagagatgtgtatcaatcatcctagtaaaaaaatccaccaatttgttaatataccagtcagtgggtgaagcgaagatgggcagccatggctttggatgtatattgcttgatgtggtcagccatgccttttgagttcttgtatgccagggcagcagagctggaggagcttatgtcatgtgcagttgccgtatgcgccaatgctcctgtgtttgtaaaggtcggagctgaggtgctgcggctatcatctgggtccgcgataagttaattgtactgatagttgatatctaactactattttgtgtatcaaatgaaaatgttggaact

SEQ ID NO: 6002 - DNA, 219 bp, Zea mays
  Clone ID: 700550701_FLI
cactgagtggtggtcgccgtatgtgctgctctagttcctgatctgtttcttggcgatcgtggagtcctgaaaatgtattgtgtggttgggtgtctactgctggattgaaacgatgatgaaatggaatcgaattgattatatctgaaatgggagtcgaattgatggatatctttgtgtaatcctttgaattttatgaacatattgcattttgggactgtc

SEQ ID NO: 6003 - DNA, 1351 bp, Zea mays
  Clone ID: 700550751_FLI
ggatccttgaaggaaaatcgtgcatcagagcaagtgggcgctccaagtgatcaaaaggggagcggtgagccaaaacgcaaggtcatcaagcatagcaagcttgagaaggacaaagagttatttcaactagcccagcaataccacaaagtggttgcagaaagggatcaagccattgcagtcaaagatagactagaatctctttgtagggaatttcagcgtcaaaacaaaatgctaaaggaagagtgccaaagggtatcgacagagggacagaacatgcgtacggaattgtctgaaaaatttgatcatgccataaagggtgtcagtgccaaacttgaggagcagagagttgagcgcatttctcagctagaagagaacaatacgttgagaagtaaactgaaagaccttgctgatcaatataacattactcagcagaaatatgctcaccaattgaaagagaaaatgctggaacttgaacttgctgatctgagacttcaacaacatcaagagaaggctgctcaggaacatacacaaatgcagttgtatgctgaacaagtttctcagcttatgactactgagaagaacctgcggttgcaactagcttctgacggggaaagatttcagcactttcaggatgccttgtcaaaaagcaatgaagtctttgaaacttacaagcaggagatggaaaagatgatttcagtgataaagaatcttaagaaggagaacgaatttctgaagggaaaatgtgagaactcagatattgctattgtgaagctcattgaagagcgtgagctaacaaagaagcaaatagagaaattgaaaaatcaaagggagaagctcgaatccctgtgtcgaacactacaggcagaaaggaaacaaggcccctccgccagtattccagatgccccttctagccaagaagtgtcagcgacaagtcaagaatcttaacattccagttgccccttctagccaagatgtgtcagcaacaagtcaagaatcttggcagttgtgcttgtcaatataccgttggtgccagctacagcttgcggagatttctgaagcctgacattcagctgtcaacctaccgtccgtctcaggccttttgatattgtggctagagcctagtggtgcattcctactcggtgttgttaccaagcatataagctctcggctgattccatctcttgtttttgtttgagacaaagcctgctgcattggagataattagatttttgccaatcataatattgtcttcttgttataattaccactgtgtctatgaattgtgggtctagctgggtctatgaaatgtgagtctgatgacaattttacaaacttgtttcttgctgatggt

SEQ ID NO: 6004 - DNA, 1028 bp, Zea mays
  Clone ID: 700550772_FLI
acgtcaaattctgaaggaccataaatttatatcggcagatttgtctttcataaaacgctatccgcatatagtcaatgaacaagagtgtgcttggtctgctcgggagaccactctccgtgagtccctagaaatgagcactactttggcaaagaagaccatgaattcaaccagacctaatgttgcttctaaagggcctcattcaaatatgagcaagggcagggatggcccatctcaaggaagtgatgaccttgcgcgatctgttttgggcactgttttcactgccaataaagttcgcagcatgcaggcagttgttagagacttgcgccagttggctgcaaaatatgcttccaatagaaaggatggatccaaactgcaagctctgtgcaatgctgcaaaaaattgtgcatcgctgcctcatgatgagctgaatcgaaaaatacatctagttgctgttcctgttcatagtgtttttgttgcaaagcatgaggataagcgagctctacgaaacatatttattttgctcttccgtcacaaagaacccaatggaacattgactaagcaggaagttgttgctgctgctgcgaaacatataaaaagagagattactgacagagagtaccatcaggttgtgacggagatctgcatttctacagaagatgggcacttgctgttgaaaaatggtgatgagccctgagttcgctatgatatgccctgtgaaggtccaccaaggtggaatcgtctctgatgcgtagaatagggtcattcggagtttgggatttggccggtgagaatgagtattgatcaggcagttcaagatagctacagcaaactgttctaggtggctttgtcagccatttttggctcagcagtttttgctgggtgctaattgagcggtgtttttcggttagtcgtctttatttgtgtccattgaatccttgctggtctagcttggcgtaattcagttagggatgttattttgtcttttaagtgctgatattgtctgccttaagtaaagtaaagtggaaacc

SEQ ID NO: 6005 - DNA, 786 bp, Zea mays
  Clone ID: 700550793_FLI
aggcgatcgctgccctcaaggagaggaaggggtcgagctcggtggccatcagcaagtacgtcgaggggaagcatggcggcaagctccccaccaacttccgcaagcagctcactgtgcagctgaagaagctcgctgccgccggcaagctgacgagggtgaagaactccttcaagctgccggccaccgacgccaagcccaaggccgccaagcccaaggcacccaaggccgcgcccaagcccaagccctcgccgaaggcgaaggccaagaccgctgcgaagcccaaggcggcgtcgcccaaacccaaggccaaggccaaggccaagcctgtcgctcctgccgccgcgtcgcccaagccccgcgggcgccctcccaaggtcgccaagacctccgccaaggcctcccccgccaaggcagccaagaaggcggctgctcctgccaagaagggaaaggcagcggcggctcctaagaaggtggcaaccccgaagaaggctgctgctgctgccgccccggccaggaagggcgtggccaggaaggccaagaagtagtctgcctgccttgtcgctggcgagatccccccctcaattccgcctatagattcccctctttcatggattttgatccaatcgtaatattgtcagtagctctagattcgtcggtagctccagcatgagtgtcggtggtagttctgtgcctgtaaaaacttgggatagttgatcgcgtgtgatcagccgtcatgctcctccagtctctatgaacaagctaagctataatagtattttgctatcc

SEQ ID NO: 6006 - DNA, 1123 bp, Zea mays
  Clone ID: 700550830_FLI
tgcagatctttgtcaagaccttgactggcaagacaatcacccttgaggtggagtcctcagacaccattgacaatgtcaaggcaaagatccaggacaaggagggcatcccacctgaccagcaacgtctcatctttgccggcaagcagttggaggatgggaggacccttgctgactacaacatccagaaggagagcaccctccacttggtgctgcgtcttaggggtggtatgcagatctttgtgaaaacccttactggcaagaccatcactcttgaggtggagtcttcagataccattgacaatgtcaaggccaagatccaggacaaggagggcatcccgccggaccagcagcgtcttatctttgccggcaagcagctggaggatggacgcacccttgcggattacaacattcagaaggagagcaccctccacctggtgctgcgcctcaggggaggaatgcagatcttcgtgaagacattgaccggcaagaccatcaccttggaggttgagagctccgacaccattgataatgtgaaggccaagatccaggacaaggagggtatccccccggaccagcagcggctgatcttcgccggcaagcagctggaggatggtcgcaccttggctgactacaacatccagaaggagagcaccctccatctggtgctccgcctgaggggcggtatgcagatctttgtgaagaccttgactggcaagaccataaccctggaggttgagagctctgacaccatcgacaacgtgaaggctaagatccaggacaaggaggggattcccccagaccagcagcgtctgatcttcgccggcaagcagctggaggatggtcgcacccttgcagactacaatatccagaaggagagcaccctccacctggtgctccgtcttcgcggtggttattaagccatcagtcgttgaagctgctgctgtatctgggttatctagtgtctctgccattgcccatggatggtgctgtctttcaaagtatttgtatggtttgtgtcgtgagtcgtgactgagctggtttcatggaccagttgtgttctcgttacccaaaactatcgtgcgaccgcatatggcttaatcatgaataaatgttgtttgaattt

SEQ ID NO: 6007 - DNA, 367 bp, Zea mays
  Clone ID: 700550874_FLI
caaaatctggtggatctattgtgttcttgactcagattattggtgctgagagaggattgtatccaggcgctgcagcatatggcacaagcttgggagccatccaccagttggtccgtctgtgtgcgatggagcttgggaaacacaagataagggttaacgccgcctgccgcggcctgcatctgcaagacaagttccccgtgtccgtgggcaaggagaaggcggagaaggcaacggcggaggtgatgcccctgcggagatggctggatccggagaaggacctggcgtcgacggtgctgtaccttgtcggcgacgagtcccggtacatgacgggcacaacaatattcgtggacggtgctcagtccatcgt

SEQ ID NO: 6008 - DNA, 2317 bp, Zea mays
  Clone ID: 700550878_FLI
cacaagagcttgtagccaaggacctgcatggtgtggaatggcgctttcgccacatattcagaggtcaaccacgaaggcatcttttgcagagtggctggagtgtttttgttagtgccaaacgtcttgttgctggcgatgccttcatctttctaagaggtgatagtggggagcttcgtgtaggagtcaggcgtgccatgaggcagcaagcaaatgttccgtcttcagtaatatcaagccacagcatgcatcttggtgttcttgctacagcatggcatgctgttaacactgggaccatgtttactgtctactacaagcctaggacaagtccagctgagtttgttgttccctgtgatcgctatatggaatcactgaaacgaaattaccctatagggatgagatttaaaatgaggtttgaaggtgaagaggctccagaacaaaggttcactgggaccattgttggaaatgtggatcctgatcaagctggatgggctgaatctaaatggcgttacctcaaggtgaggtgggatgaagcttcctccattccacgtcctgaaagggtttctccctggcaaatagaacctgcagtcagccctccccctatcaacccacttccagtgcacagacccaagagacctcgctctaatgctgtagcttctctgcccgagtcttcagctccaacaaaagaagctgctccaaaggtcacattagagactcaacaacatgccctgcaaaggcccttgcagacccaggataatgtggccccgaaaagtgtttttggtgataacagtgaattggactctgctcataagtcctccctgcgaccgtcaggttttgatctggacaagagcaccattggcatgcagaggaagctgggttcagatatttggatgcgaatgaacagacctgatggttacagtgaaatgttatcgggatatcaaccacctaatgaaggtgcacggaattcgcagggtttctgttctttacctgatcagattgccgctggacgtcctaatttctggcacactgtaaacgctcattaccaagaccagcaaggcaatcacaatctgttccctggttcatggtccatgatgccttcaagtactggctttgggatgaacagacagagctatccaatgatccaggaagtcggtgggatgtctcagagttgtacaaacaccaagtttgggaatggagtttatgctgcactacctggccgaggcattgatcgatacccatctggatggtttgggcacacgacacccggtggtcgcgtggacgatgcccagccacgcgtgattaagcctcaacctttggtccttgctcacggcgaagctctgaaaatgaagggcaactcgtgcaagctttttggaatccatctcgacagcccagccaaatctgaacctttgaagtctccgccaagcgttgccacaccggcagctgagaagtggatggcagacggaatcgacgcagacaaaagccctgagccgcacaagacgccaaagcaactcggtgctacacaggtggatcctgtcccagagagatgcccacaagcttcaaggggcacacagtgcaaatcacaaggcgggtcgactaggagctgcaagaaggtccacaagcaaggaatggcgctgggcaggtccgtggaccttaccaagttcaacggctacacggagctggtggcggagctggacgagatgttcgacttcaacggcgagctgaaaggctgtagcaaggagtggatggtcgtgtacaccgactacgaaggcgacatgatgctggtcggggacgacccctggaatgagttctgcagcatggtgcacaagatcttcgtgtacacgagggaggaggtccagcgcatgaacccgggcgccctgaactcgaggccggaggacagcggcctcgccaattcgacggagaggggctccgcatctactgctgctgctagagaggcacccggctaccagtccgcctcgtcgcttaactccgacaactgctgatgccttggcagctagctggtcgtcccaagtagtagagaacaaggcaaatgtatccatagatctccttgtagcggagcttaatgcctttttttcccctttctaatatgcattggatgagcccgtagcgcaccgtagtagtatctaaagctggtgttctgagttggttggaccttcctgcagttttggtttctccttctgatgtggcaagttttagctggtcgcacctacctaatgtatgcttagcaaacgaagtcccactaagcgctgtacataactgcccctccctgcatcaactctaatatatcatctgcttaatcgtc

SEQ ID NO: 6009 - DNA, 376 bp, Zea mays
  Clone ID: 700550925_FLI
ggattctcagataatgtggtcctcagaacattgcagatgtagcctcagcgacttccgttacaacttggtgtagtatcctgcccagcttctgtgaaccgaaccaatatgttttgcacggtggctggagcgagatatgactatgagtttacctatatgctatggaccatccttgttggcggcatatgattctaccagtgattagatctagccaattacaatcagttctgtgagcagactgtttccttgtgttgtcagatctcggtagctagtgtgtgcgttccaggtctttttgatcttatcacaagatgtgctcgtgatacttgtgttgaaggaactgtggtatcttagcgccttatatcaagattagtttttggct

SEQ ID NO: 6010 - DNA, 720 bp, Zea mays
  Clone ID: 700550972_FLI
aattgcacgacgacatcaaagcacacaaagatattgcacattttgaaacggcatatgttgtgaaactacaccgcatagcgacacttgcacctccacaacaggtttttactttcacccatccaaatttctcaccaaatgccagcaaccaaaggtacaccaagttgcaatttgaaatgctgccagacatgggttcatgccttgtgcacggatttgctggctattttgactctgttctttataaggatgttcatcttggaatcgagccaaacaccgctacaccaaacatgttcagctggttcccgatctttttcccattgagaaagcccatctacgtgcccgaagggtctcctatagaagtacacttctggcggtgctgtgcccccacaaaggtgtggtacgagtgggctgtgactacgccgaccccatcgccgatccacaacagcaatggccggtcctattgggttggtctataataagacatcaagatcatctgtgttgtaacagagaggaaaaagaacagagatgatatggtttagttctatctgagttgagcagtgtgcttagtgctactggtttctgcctggagagctgatcaaaggatatctgtagcgtgttgttatctgatctgaaagggagtgcttgacctccaacgttgttcaactcgattttgctagcgtttcagtagggtttttctagacttgcaaacgttatgctttcgtc

SEQ ID NO: 6011 - DNA, 747 bp, Zea mays
  Clone ID: 700550992_FLI
cgaggagaggaaagaacctggaagagaggagcttgaggagatggcgagcgccgagggcgagaggtgggtgggactggcgacggacttctcgcaggggagccgagaggcgctgcagtgggcggcgaccaacctgctccgcgccggcgaccacctgctgctgctgcacgtcatcaaggagcccgactacgagcagagcgaggccatcctctgggaatccaccggctccccgttgattcccctctcggagttctctgaccctattatcgcgaagaaatatggagcaaaacccgacatggaaaccttggacctcctgaacactacagctacccagaaggaaattatggtggttgtgaaagtcctgtggggagatccgcgtgagaagctctgtcaagttatccatgacaccccgttgagctgcttggttataggaagcaggggccttggcaaactcaagagggtgctcttaggaagcgtcagcgattacgtcgtgaacaacgcaacctgccctgtcaccgttgtcaagtcatcaagcaccgaaggttgatctcatcaccgaaatgcctgaatattgctgttgttataataaaagatggttggcctcatgaagaacatgcactagtttctagctacctgaaacatgttgaaccgggcaatcctattgtaataatagacaaagtgccttatgaagggcatggttatgtaataggtctgttctccagagtagatgtgccatgcttttgtgtcatc

SEQ ID NO: 6012 - DNA, 368 bp, Zea mays
  Clone ID: 700550995_FLI
ttcctcgctggggccaactccatctttgccggcgagaaacttctcacaaccgcaaacaacgactttgatgcggaccaggcgatgttcaagatccttggcctgatccccaaggctccaagctttggcgaggaagaggtgtctgcggcggctcccgcagaatccgagaggtctgagcaagctgcttcgatgtagaatatatacatatcattaccgattatccgtatcacggttggggcgaaactagaactaccgttgtagctagagcattggattgtagaaaccacaacatttcattattttgtaattgcttgagactgaatgggggatacccatgtcgggctagatcaatggataacttccacacaacc

SEQ ID NO: 6013 - DNA, 891 bp, Zea mays
  Clone ID: 700551024_FLI
ccatcctcagacagaacaggcgaacagcctcccaagcgacacaacagcctcaggaggcacccccgcggttagtctcgaagcttccgttcggaaccagggttagggtttcgcgtcctcccgtcgtcatcctcagccatgtccgggcgcgaggtccgcgagtacaccaatctcagcgaccccaaagacaggaagtttggtaaagggaaggataagatcgacgatgaggacatcaccttccagcgcatggttgcaaagatgcaagaggttgctggtgataggggaggctaccttcacggacgaggagcattggacagcgatgatttgctttacctgaaagagcaaatggaagctgaggaagatgcagagcgccttcttcgtcatactgagaagcgggcatttgctgcttttaagaaagcagcaattttagctgattctacacctgctgtccctgtggctcttcgtgttgaacctaaacctaaaagtgatataaggcaacaagatcttttgaagaacattgttgggatcaaaccaaagcgcccaaaagttagcagcccttcacagccaacagatagcaataagcctaaacatacggaagaagaccctgtcagcgagttgtcgtcatcgcggaatccgttgggaccatctcatggggctgtgaatcctgaccacacagcgccaaggttagatgaaccaacagaggtgaagcaacagaacagagctggaagtttgcttggtttagcttatgagagttcggatgaagaatagttgatcatgcgattccaatgggaactggactatttcttgtcagatgtctgcattccaaacgacagaatgtaggttgtatattaggtttttttaatggactattattaggttgtgtttttgaaagac

SEQ ID NO: 6014 - DNA, 1559 bp, Zea mays
  Clone ID: 700551121_FLI
gaaacttcgtcctggaattcctttgaaatgtatgcatggacggatgaaacatgtggtacagcaggccatagttgcagatttcaatgaagctacctcagttcttttctcaactgatataacatctcgaggactagatataaagaatgtggattgggtggtgcaggttgattgcccagaaaacattgataattacatccacagagttggccgtacagctcgttacaataagaaaggaaaatcacttatattcctttgtcctgaagaagaagcaatgcttgaaaaattgaaggcaaccgaaagtaaaatacctatacatattcgaaagccaaaggcagaacaactggagcagatatcgcagagtatagcctcagtgctggttaaatttcccaatcttcaggaattgggtaaaagggcttttgttacctatcttaaggcagtatacctccagaaagacaaaaaagtgttcaacctgagcaggttctctgcagagcagtttgctgcatatgctgcttcgcttggtctgcctgttacccccaagatccgcttcataagccacaagaagaatgtgtcgaagaaggatatggaggacattgatatgaaacagatgaaatccagtttggaacatgaagttaccatcactccaaagatcaacattgatttaactttgtgtgatggagatgatgatatcctttatcccaagaagcccactgcagatgctaatatggatgacagacttgatgatgtccttcatcccaaggagtctgccacagatacaaatgtgactggacttgaaagacccttcaaaaagaagaaactgaagataaacgtgaacaggccatcaggaacaagggtcaagtatgatgatgagggcaacgccatcccacctcttgcatctgtcgctgaagaagtatctttagaacctgtggttcacaaggataaaagtctgttctgtctctgtttctttgtcgtcaataatttgcgtgaaggatgtgaaccctaaatttgaacttccttattgtctcttgctccagtttcccagcggtatgcagagatgttgagagaaatgcagaaacacgacaaggaggacaagcttgaacacaagaagaccttgcgggagaagaagctgcagaagaagatgaagcttaagcgcaagaggcaggaagacactggagcagggtcagaggaggatagtggatctgaatcagacagaggccaagacacagccaacaaaggtaaaaagaggtacttcaatagcgacgatgaagacaatgacgcagcaaaggacggtgatgttctcgcccagcaggaggcgttggcactgaagctcctgagtaatatgcacagttagctttgggatctgatggtataggttacccttgaatgggggtttgcctattagcgctccagccaggaaggggctgaaattttgaacgtgtcgcggttttttttttctgataaccgggagttaattcccactttcaggcatacgttcatggatgtatgagaaatcagtgtggccgtattaccccaagaaatcggacttagatgaggttttaagt

SEQ ID NO: 6015 - DNA, 1392 bp, Zea mays
  Clone ID: 700551126_FLI
gtcaagtattgcctcaagtgcctccttaacaggtatggcgagagtgccgaggaggcggccggcaaggaggactggatctgtcctaagtgcaggggcatctgcaactgcagcttctgtagaaagaagaaaggcgagatgccaactgggataatggcccacatcgccaaggcttccgggtgcacctctgtccatgatctccttaaaaaggggtcagatgtggtttctgctgcacaggcgattctcaaggtgaatggtagtgacaagggcacaaagagatcccgagggacagatgctgctgctgaggtggcgactgaaaaggatgtaaatataggcattgatatcaatacagttatagcagatgaaggagatgaaaatataggtgttgatctcaattcacttccttctgttgataccaagaaaaggcagaagcggcagaagctcaagcacaggacaaagaaggatcctgctgatgcaacgtcacatggagtcaatactgaaccattgcagatggatgggaaccttgattttctcaatagtaaaactgtgcgacccaggggtaccccagtcactaaaattgcaggcgcagagcttgatgacgaggatactggggctgcaattcagtttatagaattctgccgtgcatttacagaggtagtcaaagatttttcaaataaagaaagggcaaccagaaaaaattcttcaagatttagttggaggccgtgaacttcggtttgtatcctcagttgttgctgggtttcatataaatttgttatctgtcattcaagaaggaaaggggaagaagcctctggcttacacaagagacggagatgcatgggtaattgatattggcaaatatataagtgaatcagcttctatatcaaaagggtttcctctcaaccatatcaatcaggggatatcaggatataaaaacttgagcccttcttcaagctgaggaactggattgacatgcaaaatgacatagctgctgaaccagtgaatgctgctagagaaaaggcgcgtgctgcaaaagaaatggtaaaggagctaaaggaaaggctaaaggacaacatgaacaaaataattgtttcaccaaatgaagcagcagcctctaacagtgaagcaaataagtatattatttcccaaataaaggaggcacaggaagtcaagcgtgcagccataaatgacatggcaactatggagaagcaaggaggtttttggaccaagcctctgatggtagagaaaggggcagcatattggaagttagatggttactgtgataactcagcaatattgcttcaagagtatggtggcgatgaattaatggcaaataaagacaagtggtttatgtttactgaagacgaggagaaaataattgaaaaacatttagccact

SEQ ID NO: 6016 - DNA, 986 bp, Zea mays
  Clone ID: 700551130_FLI
aagctgatgaaatgctttctcgtggtttcaaggatcagatttacgacatcttccagcttctcccagccaagattcaggttggagtcttctctgctaccatgccccctgaggcccttgagattacccgcaagttcatgaacaagccagtgagaatcctcgtgaagagagatgagctgactcttgagggtatcaagcagttctatgtgaatgtggataaggaagactggaagctggacacactgtgtgacctgtacgagacccttgccatcacccagagtgtcatctttgtcaacacccgccgcaaggtggactggctcactgacaagatgaggagcagggaccacactgtttctgccactcatggtgacatggaccagaacactagagacatcatcatgagggagttccggtctggctcctcccgtgtgctcatcaccaccgacctgcttgctcgtggtattgatgttcagcaggtgtccctggtcatcaactatgatctccccacccagccagagaattacctgcatcgcattggtcgtagtggtcgtttcggtaggaagggtgttgccatcaactttgtgacccgcgacgacgagcggatgctgttcgacatccagaagttctacaacgtgttgattgaggagctgcctgccaacgtcgctgaccttctgtgatcattttgaagaaaaacagaactaaaagaacggtggtgggggtgatctggtaaggcttggttttgccgaaatattgtgggggaggagtgataaggtcggtggggtttctatgttaaagtcgtggtctcgggcaatatgcgatttttctttatgccatgttttgggaaattttgtagctgcctaggcctcgtgctgttgtggtggttcattagtatgaagacgaaggctctgctggctatgggagtcctttttctttttgttagtattttgtttaaaactatgtatgaccgaattatttgtcatccttgactc

SEQ ID NO: 6017 - DNA, 870 bp, Zea mays
  Clone ID: 700551134_FLI
caacggcgagctgtaccgctacatctgcgacaccaagggcgccttcgtgcagcctgctttctacgaggctttcgggctgacggtggttgaggccatgacctgcggcctgcccacgtttgccacagcctacggcggtccggccgagatcatcgtgcacggcgtgtctggctaccacatcgacccttaccagggcgacaaggcgtcggccctgctcgtggacttcttcgacaagtgccaggcggacccgagccactggagcaagatctcccagggcgggctccagcgtatcgaggagaagtacacctggaagctctactcggagaggctgatgaccctcaccggcgtgtacgggttctggaagtacgtgtccaacctggagaggcgcgagacccggcggtacctggagatgctgtacgcgctcaagtaccgcaccatggcgagcaccgtgccgctggccgtggagggagagccctccagcaagtgatgcgcgacggcggccacagacctgatcgatcgatgagcgagagggagcactcggagtgtcgtgtcttttcccttgccatttctttctttttttcccttcccggaggcgaaaaaaagagtctgcttttgctaggcggcgggcgttcgttgctgctctttgcttcaagagttaaatttacctaccttgtcaaggtcttgttccatcattgatccgggtgtcgcttttttagtagtctgatggactgttagtagtttgcgttgcgtcggttgagagggaacgttggtggtggtggtgtgtgtgcagtcaggcgtggtgctccctttgtttcctggatgggatgttgctccttgaataataatcgtagtggccttggagcccttttcctg

SEQ ID NO: 6018 - DNA, 611 bp, Zea mays
  Clone ID: 700551138_FLI
aggctaggctgggcatggagggaatcgtcacggcctgaaagaggtcctggccggagacgacgaacggggctgcagccgccgggaagcgctacaaagtttggacgcctctctggccggtggcataatcgacaagggtggggtcaacactaagcagagttacaagcgtcaagctatccatccgcgaccacgagtctaaccacaacctaaagaacatcgagctggaaggcaattttgaccagatcaagcaagccagcgacttgttgcgtgatctcatcgcaaccatcagcgcaagcatgccagcgaaaaatccatcttctgctgtggcgccagcaggaggaggccgaggcagtggtccggggggcacgagcagcaactacaagacgaagctgtgcgagaacttcttgaagctatgcgagaacttccaacacgactatgtatgagatattatctcttattatgactggatgagatgtgtcttatggctatagatgagacttttgtggtgtaattgatgagactatagatttaaatattgttatgtgattgtgtgtgagatgttttatgtgaaaatatgttgtgatatagttgtttatatatttgttatgttgtgg

SEQ ID NO: 6019 - DNA, 889 bp, Zea mays
  Clone ID: 700551141_FLI
ctctctccgtcgccgcctcgggccaaaccctacgcagggagttgattgatcgattgcagccatgagtaagttgcattccgagcttctcaaggattgcatctcccagatagttcaggatgccaagaagaataggaagttcactgagactgttgagcttcagattagtctgaagaattatgatccacaaaaggacaagcgtttcagtggctctgttaagttgcctcacatccctcgtccaaagatgaaggtgtgcatgcttggtgatgcccagcacgttgaggaggctgagaagatgggacttgactacatggatgttgaggccctcaagaaaatgaacaagaacaagaagcttgttaagaagcttgccaagaagtaccatgcttttttggcatcagagaccatcatcaagcaaattccccgtctccttggtcctggtctcaacaaggcaggcaagttccccactctggtcactcaccaggaatccctggaatccaaggtgaatgagacgaaggctacagtcaagtttcaactgaagaaagtcctttgcatgggtgtcgcggtcggtaacctgtctatggaggagaagcagatccaacagaacatccagatgagcatcaacttcctcgtgtctcttctgaagaagaactggcagaatgtaagatgtctctacatcaagagcaccatggggaaaccattcaggattttctaagtctgtttttttgtgaagtctgctctttatgatatttggtttttgaaccgaggttgtcttgaactaaaactcttgttagatcatgtttggttggtaggatatttgagtctgggcaggtgtcttactcttgcgccatgtctttgtaatctctctatataagttttttgagaggctcagtat

SEQ ID NO: 6020 - DNA, 529 bp, Zea mays
  Clone ID: 700551155_FLI
aaagcaagctcaaaagcagatgaatctgagttcagattagcacagcttcaacatcagctcccaaccaatgaacctggtgcactgatgaatcttgtagaagaatcaactgccgatgatgcagatgatgatgatactaaagattgtaaaggtttatttaagaacttaaagttctacttgagtcgagaggtgcctagggagtccctgttatttataattccagcatttggagggactgtttcatgggaaggagaaggagctccatttaaagaaatagacgaagatatcactcaccaggttgattccatttgcaataatttattacaccaaagtttaactatatagacggagacattgtgtaccatccctaaagtaagatgccactctaagtaccacgacagcaatgccatactagggcaatagttactacaatacaatttttgtatgtggctaactgttcatattttacactctaccatcatatgatcatatctagcgaagtaaaataaaatggcctgtggatttttttatg

SEQ ID NO: 6021 - DNA, 1577 bp, Zea mays
  Clone ID: 700551173_FLI
ggagaatgtacaaagagcaaattatggctaattgaccttgctggaagtgaacgggtagcaaagacagatgcacaaggagaaagattgaaagaagcacagaacataaacaaatcactttctgcacttggtgatgttatatctgctcttgcaacgaagacctcgcacataccctttaggaattcgaagctaacgcacttgctccaagactcactaagtggagattccaaaaccttgatgttcgttcaaatcagtcctaatgagaacgacgtgggtgaaactctttgttcgttgaacttcgcgagcagagtgcgaggcatagagcttggacaagctaaaaagcaagtcgatattggagaattgtcaagatacaagctcatggttgggcgagccaaacaggacagcaagaacaaagatgctcagattaaaagcatggaagaaaggatacagatacttgaagcgaagaataaggccaaagacttgctcactatgaatctccaagagaagatcaaagagctggaatcacagctcctagttgaaagaaagatagcacggcagcatgtcgacaacaagattgcccaagaccatctgcagaagcagcacggcatgaaagaagagaactcgtacccgagaagcccgatggccgagaggaacctcaactccacagcagagaaagcagcagcgcctaaagacttggggggcatctcgaagcagatgttctccgacagcaacactgacacttacagcttcaagcagctgatgtcactaggggacgagaaggagaacgaccctgaagctgctgtgcagctgccgccgacaacgaaggccaggcgagtgtccctctgcaacggtggagctcaccagcggccgttgaacccagcttcacgcaggacgtccctcataccgctgccacggcgcaactcgctgctgccaatgcccgtagcaaagcctgctgcagcggtgttgccgcttgacaagatcactgagaacctgtcctcgcccccgctgtgctctcctccggctgtatccaacgacaggggcagccggagtaggaggatcaacagcatactgcggcgaagcctgcagaagaaggtggtcatccggccgtcgctggcagcgcaggcagggaagaaagccgccggtgctgctgctgctgcccggggtactgacagcgcacgcagggcggcgcggcgggtgcctgtgagcgacggcgctggcgggcacaaggtacagcagaacagggacaaggagcgggggtggagcaacttctgagttctgaccatgagatcgcggcacctctattgttaaagaagcctgtggagatttaggtgtttattattttaggttagttgtacaaaatttaggtgttattattaggttgggtttgtgagttctcgcgtattgtgagagaactcgaccgtttgctgctgaccccgatcaggtcaggtttttacaatgcttccagggactttgtgggaggctgggagtgttcatgtaatgatctcttatgctgattactgacacagtggacagtgctttcccgatgcgtgaagaaaatttgcagggattttttttcgggt

SEQ ID NO: 6022 - DNA, 1057 bp, Zea mays
  Clone ID: 700551178_FLI
gctcctatcaacctttcggatcgtttgaatcaagtgcttcggtgggctcttggttccattgaaattcttttcagcaggcattgtcccatatggtatggctatggaggtcggcttaaattcctggagagatttgcttatatcaacacaacaatttatccactcacatcaatcccgctcctcctgtactgcatattgccagcagtttgtcttctcactgggaagttcatcatcccaaagattagtaacctagagagtgtttggtttatatcgctctttatctcaatctttgccactggtatccttgagatgaggtggagtggtgttggcattgatgaatggtggaggaacgagcagttctgggtcattggtggtatttctgcgcatttatttgccgtcttccagggtctcctgaaggtgcttgctggtatcgacacgagcttcactgtcacctctaaggccactgacgaagaaggtgattttgccgagctctacatgttcaagtggacaacgcttctgatcccaccaaccactattttgatcatcaacctggtcggcgtggtcgctggcatttcctacgcaatcaatagcggttaccagtcatggggacctcttttcgggaagctcttctttgcgttctgggtgattgtccacctgtaccccttcctcaagggcctcatggggaagcagaaccgcacgccgaccattgtcgttgtctgggctatcctccttgcgtcgatcttttccctgatgtgggttcgtatcgatccattcaccacccgggtcactggtcctgatatcgcgaaatgtggcatcaactgctaggatgagctgaagataattaaagagtggaactagacgcattgtgcatcgtaagttatcagtgggtggctctttttatagtatggtaggaacttggtcgggagacgttaattacatatgctatatgtacctccgctggtctttatccgtaagttaatatatatactgctttgagaattatgtatgggcaacaggttgtttacttgattttgtgtgtacatatttaaatgtctctgcc

SEQ ID NO: 6023 - DNA, 655 bp, Zea mays
  Clone ID: 700551208_FLI
ccacaccgtctcctccacaacacgctcctcacctcgcggcgactcttgccaagcattcctccgcgaaaaacgcatccgctccaaggggagttgatcgagaagcgttggtggacatgggtcagatccagtactccgagaagtacttcgacgacacctacgagtacaggcacgtcgtcctcccgccagaggtcgccaagctcctccccaagaaccgcctcctctccgagaacgagtggcgcgcgatcggagtgcagcagagccgcgggtgggtgcactacgcgatccaccgcccggagccgcacatcatgctgttccgccgcccgatcaactaccagcagcagcaggaggcggctgccgcgcagatgctggccaagtgagcccctggtggccagggcggcgaccaggaacgtttaaaaccctaaccccctttccatctctaaaaggggcgtcgctgttctgttgatcaattcctctatgctgttagttggaaacttcgggtgtagttggtggatttgctggtgtgtgccttgtgttcgtggaaattcctgtgaaggaactgccatgtgttaggctgttaccatgcccattttcttaatactatgtgttgactgtgatcaagatggcactcatgcagggatgatatttaatctgtttg

SEQ ID NO: 6024 - DNA, 1128 bp, Zea mays
  Clone ID: 700551229_FLI
acgaattacacgagggaagaacgctgatgaacaaatggcgtaaatctctatcgacgaagctgtggaggaaaacgaaggatctccccgtgcttgtgcatgccagatcgcctgctctacgtccgcatcccgtccctcgcgaaactcggcactcccagggtgtgcaaaattcatggcttcagacacccgcaagaagctcattcagatcgatgtgagctcggatacagtgtgcccttggtgctttgtcggtaaaaagaaccttgagaaagcaatggagcaaagcaagggcaagtttgatttcgaggtccgttggcatccattctttctgaaccccgacgcgcctaaggagggcgtcaagaaatctgacttcttcaagatgaagttcggtcctgtccaatatgagggtgcgatgtctcgcatgactgagatatttcgaggactcgggcttgaatacgacatgtcaggattgacagggaacacgatggatagtcataggctcataacacttgctggacaccaaggctatgacaagcaaaatgttcttgttgaagaattgttcctcaattaccattgccaaggaaagtacattggtgacaagcaggttttgctggatgctgcaagaaaggtgggcatagaaggggccgaggaactgcttgaagatcctatcaaaggagtcgatgaggttcaggaagagctcaagaagtactcatcggacatctccggggtcccacactttgtgatcaataataaatatcaactcagtgggggccagccaccaaatgaattcacgagggcgtttgagatggctgcaaaagatggaacttaatggcgcttatttgcgagaaaaactgtggaacccgttgtgtttcgtagttttgatgtggtgataattagtggtgaagatggtgtggatgttcactttcgaatagagttctaggtgattggatatggaacatgggttatgtcctgtaaatagaggccagtctgtatatttgatttgatttcaaccgaaagctgtggttttcagaacctgagatttcagcatgaaaacctattgtaagcacccctgcggacattaacatcgagaaagaatctataaaaataaattttcgcaatgctgtaagtttcagc

SEQ ID NO: 6025 - DNA, 627 bp, Zea mays
  Clone ID: 700551262_FLI
ggcgccgtactgcaagagcagctcaaccatgcccaggtccgcggcgcggcatgctagatggagcaaagataatccttcaacagattcaagagggcggacgccgcttcatcacagcatcatgaaagggcgacatgtgtacgccaagctactgctttccaggggcgccgattctcaagccgcggatcgagatggtaggacagcgttacagtatgcaatcgacagcggaaccatagaggacgaagagatccttgttttgctagaggacccaagtagataaatcacgtaggtgtagtagtccaagtctcgagttcctgccgtcctgcggtggtgcattgtggctgccttttgcagtcacctggcacacacagggtccgaggatgccttgctagtattcagtctctgcctttgtggcaagaggaagttatagtttttctaggtctgtctgcggttttggtcgcgcttagggtaaaagtggcctgtttgtcgtggatgcagtttgcaagttgttggtttgcctttgtttgcagatgtcgcagtgtacacttgggaagtggctgccattgttgcgactgatgtacatatagcgatgtctgatacaggttatttatgcaagaatttagatcggtg

SEQ ID NO: 6026 - DNA, 754 bp, Zea mays
  Clone ID: 700551407_FLI
cccgttccccaacctctcgtctgctgcctgcctgcctgcctgcctgcaaaaaggagtttgtcatggcgtctaagcgcatcctcaaggagctgaaggacctgcagaaagacccccccacatcatgcagtgcaggtcctgctggtgaggacatgtttcattggcaagcaacaattatgggaccacctgacagtccctatgctggtggtgttttcttagtgaacattcatttcccgccagattaccccttcaaacctccaaaggtttctttcaagacaaaggtcttccatcctaatatcaacagcaatggaagtatatgccttgacattctcaaagagcagtggagccctgctttgacaatttctaaggtcctgctctccatctgctccctgctgaccgaccccaacccggacgaccctcttgtcccggagattgcccacatgtacaagacggaccggccgaagtacgagtcgacggcccgcagctggacgcagaagtacgcgatgggctgacgaacgctttcctgctcgtctgggcgccattgttcccttggatttgttgttggtcgtatgtatccctgatccatctaggatcatcgtattgtattgtagtgtatgtatgtcgtcggcctaccatcgttgccatccaccatagtgaggtggttggacatgcttcgcctatatgcacctgtgcttgccttccttcgggtcggtgctgtttggttaatgttcatcgaagacgttgatttcgttgcccc

SEQ ID NO: 6027 - DNA, 738 bp, Zea mays
  Clone ID: 700551468_FLI
acgctccgtcgtgcccaagatcagcaagatggaccggacgtcgatcctgggcgacacgatcgactacatgaaggagctgctggagaggatcaagctgctgcaggaagagatcgggcagcagcaggaggaggcgccaggcatgctcagcgtcttccgggagctcaaccccaacgagatggtggccaggaacacccccaagttcgacgtggagcggaaggagggcggcgacacccgggtggagatctactgcgccgccaagccggggctgctgctgtccacggtgagcacgctggacacgctagggctcgacatccagcagtgcgtcgtcagctgcttcaacgacttcggcatgcacgcctcctgctccgagatgcagagggaaatgatcagcgccgacgcgataaagcaggagctgttcaagaacgctggctatggcggaggctgcttgtagaggggcatgtcatcatggcatgggaggaagaagaagaagaggcagcaataaattaatcttaagcagctgtgggagcagcagtagtagtatcagttcaggtccagtagcggaaaaggcaggcagggcaaagatttgggaggcctttttgcaatccatctcccccatcataacccacttcgatctatccatgttagcagtacgtgtccgtccgtcctatagcatcatgcaggatgcaaaggttgccctgtgctgctgaatctttctcctatatactattctatttaatt

SEQ ID NO: 6028 - DNA, 1432 bp, Zea mays
  Clone ID: 700551486_FLI
gaatgttccagtgaaacgcctaggcctcattttaaggaacctgttgtggacagctctgggttaacatcagcagcacctgaaagtttaacagctaagcaacatgtccactcaccagatgcctttataccaccaaagcctggtgctccaactggggaattaggtgatgtaaaatcagattttaaaggtgaagaaattattcaaaaagaacaatattgtgaaagcgaacctattgttgctacaagagagaatttgctaattgatctttcctgtggtgccgagtcgatagatgtgtcagatgtattggaatctttaatggaagaaaggagtggaacttcgtacgtgccagtatcaatagaggacttcctgggtgcttcagcagtggaagaaccacaatactctagccctatagcgttatctccttggggtgaacctagttactaccaaggtgatgctggtgattctgcgctatggggtattcaagattcgatcaatgatatgtggtcattgctttcaccaagacctatgctccaaccttcatctggtattggaactgaggggaaggaaacttttgatatcaacgaggtggctgtgacccatgttaatagtgatttttttcaaagaggatcgatgcttggggaggaaaatatgaatcaggcaaacttgagtgttgctgcagataggatgctgctgcctgagcaggtcccatcaataccaaatggtatgtcaacatcatcagtagacgagggcaccagagttataggttctcaagcatcaatcaatcagagcttagactggggtactacatggaggactagtcagaatctcagcgtgtatagcaatgaaatagcagggccctcgagtaaaagctattgggaagaatcaaggaagcaggaagccaccaattcgggcgtttctatttcaggggaagccattagaaacaagcgcttgaaccctcctgataatgctattcggggcagccatcatcaccgtggcaggtactcccaaatcagtgaatcttggctactcagttcaaatcactctaggagtagttctgctagatttggcagcggtggttcatcaagatcaacttcaaagggtcaaactaggggctaatgtaaattctcaggtgcaggagaaaggatgcatcttgtagctacctgcatccttgatctctgcagcaggaataggttttaaaattctctgttatatctttgcagtttgtataggctaattaaaattaagtcaacagagagcgtaaatgaccatctctgctccactcaactcaactgtagcaaggagcatatgtttagcatagaggtttgactgaatggccctgcccaagaagtagattcagctcttgggcatggtctgtatcatcctgacattctgttggatggaactgcaattgtgcaaccggcatctcttgacaccg

SEQ ID NO: 6029 - DNA, 663 bp, Zea mays
  Clone ID: 700551504_FLI
cctagcaatctctagcagcagatcctcgtgcgaagcaaagcgctagccccttcgtactgtcccgatggcccgcacgaagcagacggcgaggaagtccactggcggcaaggcgccaaggaagcagctggccacgaaggcggcgcgcaagtctgccccggcgaccggcggagtgaagaagccccaccgtttccgccccggcaccgtcgcgctccgggagatccgcaagtatcagaagagcacggagctgctgatccgcaagctgccgttccagcgcctggttcgtgagatcgcccaggacttcaagaccgaccttcgcttccagagctccgccgtcgctgcgctgcaggaggcgtccgaggcctacctcgtcgggctcttcgaggacaccaacctctgcgccattcacgccaagcgcgtcaccattatgcccaaggacatccagctcgcccgccgcatccgtggggagagggcctaggcgtcgtcgcggtggaggtcgaagtagtggtcgcagtttctgtcatcaccgtctggctagaaggtgtagagatgtgccgggttctgtagtttgggttatcggtcgaatcatgatgtagttggttcttcacagctgtaatttaactatgacgatgccatggcaatgaagttctcagctatcagttcccg

SEQ ID NO: 6030 - DNA, 418 bp, Zea mays
  Clone ID: 700551521_FLI
ccagccaccgccgctagaagaagagctcggcgattcccaggtcccgcgagaatatgccgaagcagatccatgagattaaggacttcctcctcaccgcgaggaggaaggatgcccgctcagtgaagatcaagaggagtaaggatgttgtcaagttcaaggtgcgctgctccaagtacttgtacacgctctgcgtcttcgatgctgagaaggcaaacaagttgaagcaatctcttcccccaggtttgaccgtcgaggaggtctgattggatacatggcaacgccgagttgaactacccaagcttctttatcagtagcagagcatgctactctatgtacttttggaacctaagctattagacctgtcagtgttggatgtctggatcttgcatttttggagaaataccaatttacctcgttc

SEQ ID NO: 6031 - DNA, 1305 bp, Zea mays
  Clone ID: 700551528_FLI
aacggatagagctgactgcttgcatatgcgctagtacaaatagagcgccgcagtgaatccggcccaattcactttcccatcgcgtgaagaggttgccgttaccgaccatgtcgcagcagccggcgccggcgccgccatatcggccgtataggcaggtgagggaggcgacgccccatagccgggcgatctcctgcgtgcggttctccccctgcgggcgcctcctcgcgacagcctccctcgacggaacggtagcgctgctctccccgtcctcactggccgtaatcgccgtcctgcgcggccactctgacggcgtttccgacctgtcctggtccacggagtcgttctacctctgctccgcctccgacgaccgcaccatccgcatctgggacatccggcccgtcctcgccggtggcgcccaggcagccgccgtctccggcgcagaccgctgcgtccgcgtgctcaaggggcacaccaacttcgtgttcagcgctaacttcaacccgcagaccagctcgcagatcgcttccggaggatttgattgtaccgtgcgcatatgggacgccacgagcggccggtgcacccgcgccatcgaagcgcactctgagcccgtcacctccgtgcatttcattagggacggatccatcgttgtatccggaagccatgacgggagctgcaagatctgggacgccaagagcggggcttgcctcaagacggtcatcgatgaaaagaagcccgcggtgtccttctccatgttctcgcccaatggcaagtttatcctcgttgccatgctcgataactcactgaagctatgcaattttgccaccggcaagttcttgaaggtatacagtggacatgtgaacagacaatactgcatacagtccgcgttttctgttacgaatggaaagtacattgtcagtggatcagaagacaactgcgtgtacatatgggacctccaagggagaaatgtccttcagaaattagaaggccatacggacactgtcatctcggtgtcctgccatccaacagagaacaagattgcttctggtggccttcataatgataggactgtaagattatgggttcaagatagctgatcaacttgtaggtgtctgcttcccatggagatggactgtaagactacgctcagaccagacctaaacagcacttgctatggatatggatcgctattctagatacgtttacaacttacacgcaaaaaaagacattaaccatgcgagctttgttttattctgatgtgttatcctaagttgtgaatgccgaataaatcaacatctcgtcatctct

SEQ ID NO: 6032 - DNA, 523 bp, Zea mays
  Clone ID: 700551565_FLI
cacgtgacgtggctgtcagcaagtagcagcttctgtcgcgtctccccctccctgaccgagcgatccagcgagagggagcgagtagcagccgcagccggaggagctcgccgaggccgccgaagacgaccatggggttctgggcgacgacgctcatcttcgtcctcgccggcgtcgccgcatccctcttcacgctcctctgctgcaaccgcgggccctccacaaacctgttccatttgaccttggtgactacagctgtaatttgttgctggatgatgtatgcaatcgtctaccttgctcagatgaagccattgatcaaccccattctgagcggagagtgagcgcagcatctgtattgaacagaacgaaagctagacctgctgtaccattgttcagtccgtgaactttctattcattttggccccacctgatgaaataaataaataaactggcatgatttttttggtgctactcttcacccgtgattagtgtatgcaattgtatgatatacgcagtaataacatct

SEQ ID NO: 6033 - DNA, 580 bp, Zea mays
  Clone ID: 700551574_FLI
aattccaggaatcagatgagaactcaggatacagggcacctgaggtgatcttggctggtcagtactccctgaagagcgacgtgtacagcttcggagtcgtcatgctagagcttctgactggccggaaaccgtttgacaggacccgaccgcggcctgagcagtcactggtccgatgggctactccgcagctgcacgacatcgaccccgcgctgcaagggctgtacccgtccaaatccctctcccgcttcgccgatgccatcgccctttgtgttcagcctgagccggagtttcggccgccgatgtcggaggtcgtgcagtcgctggtgcgcctggtgcagagggcgaacatgacgaggatgcacgagagccagtcgcggcgccacggcgaatccggcggggactacgagttttgagcgagacaaaactgtgcctttgcctagatttttttcttctaaaagtataaaaatagttataaactctccttgagagttttgaacttcaaatattcacatatagtttcaaactatattagataggtagtagttcagaataagtatttatctgaaataagtattggttc

SEQ ID NO: 6034 - DNA, 1135 bp, Zea mays
  Clone ID: 700551584_FLI
ataaagggaagtgggccagctaacacctcgcctagcataattaaaagtatgctcccaagggttcgtacaatcgttcgtttcagacctcagttagtaaaccctaacaacagtgaaggtgggataactggtattccctatgcaaatagacaagcacatagaaggaagtccaaaggataccaagtaaaaaagttcgatgttacaaaacggagaactgtgccgatacatgattctaactctgtctgtggagtgctgctggaagatggtttttgtctggagcacccagttcatggaagaaagaggtgcagcttacacaaaggtaaaagagtcaaaggcagcccaaaaagttcgcctactagccatccttgccaagttgggattgcaattactgagttttgcctaactgaagatttggacagctcggtcccaaaacaggaaagcgaaatacggcccaaaaatatgtctacaactctgaaagaacctcagaggcaaagcgataatttggaatcacaaaaggtgaatactggagaagcttctacagaagatggaacacaagaagtttctagggatgcttgtatcttagaagagaaggccttcttccatgctgactctgagtctcaggagcagcagccttctgggagaatgtggtttgagctgctcaaatcacagaggaaaccggcgagcgcacatccatcaagaagaggcttgggatctcagataacagcaatgacagataacaggtcctgcaaaatggtgtcaattgcaggaatggaaaggactgagaaggacagtggagtagaggtcactgctgcttcgttttccagaagctcaggatggccctgtacctgtggcgcccgtacgtcggacggttcacgttgtatgaatatgccgattgaagggaggaagagatgtgcattgcacaaagggcaaagggcagcattcccccctacaccatcggcataatagacaggacgggttttttttcttacttccaattgttgttttcacatttctgttagcaaattgaaacacagaaagctgttttcatatttcatgtgccccaaaacgactacatacattttgtaactgtattgctcatcattgaatttttcacatcaatttttaatgttttgcgctt

SEQ ID NO: 6035 - DNA, 1281 bp, Zea mays
  Clone ID: 700551628_FLI
caaagacttagaacagttgatgaacagcaggaacacttatctagccaagcaagaagagtgcacgaagaagatccgagatttgggcttgttgcctgctgatgcttttgaagcgtacaagaggaaaaacaagaaacagctacataagatactctatgactgtaatgagcagttgaagcagtttagtcatgtgaaccaaaaggctcttgaccaatatgtgaacttcacagaacaacgcgaacaactgcagagaaggcgagctgaacttgatgccggtgatgtgaaaatcatggaactcatatcggttttagaccaaaggaaggatgaatccattgagcgcacatttaaaggggttgcaaggcacttccgtgaagtgttttctgagctggtgcaaggtggtcatggatatttggttatgatgaagaaaaaggatggggatgcagttgatgatgatgaggaggaggatggacctcgtgatccaggccctgatgggagaatagaaaagtatatcggtgtgaaagtcaaggtatcatttactggcaagggagaaactcagtctatgaaacaattgtcaggcggacagaagacggtggtcgcactaacactgattttcgctatccaacgatgtgacccagctccattttatctgttcgacgagatcgatgctgctctggatccacaataccgaacagcagttggaaatatgatccgccgtctagctgacatggctgacactcagttcattgcgaccacattccggccagagattgctaaagtggctgataagatatatgccgtgagacacaagaatagggtgagcaacatcgacgtggtgtccaaggaggaggccctggacttcatcgagcgtgatcagacgtacaatgctagctgaggctgctgctgctgtgtattgattgatctgcaggcagatgctaacgcagacaggatagttcttgttgtgttatggatattctggcctattgttgtagctgtgtatatgtgtgatgcagttaggtagctattggaccagcttgtttggcgcatcaacgttgtgaatgtagcagctaccaccttggtttggtaccagctttaattaagtttgggaagcgctgattagactagacgtacgttacatgttgccccatgattgttgtatggcacgcccagcccaaaatggcagtaatcagttcatttcgacaattaacgtaagtgtaagtgtacgagtagtgggattcaaatgttttttaactgtatttttctagtacatttattttttgtacacat

SEQ ID NO: 6036 - DNA, 2275 bp, Zea mays
  Clone ID: 700551647_FLI
gttcctcaaccgacacttgtcctcaatcatgttccgcaacagggattgcttggagcccctgctggatttcctccgtggccaccggcacaaggggcatgttatgatgcttaatgatagaatacaaagcttggggaggcttcagtctgtgctgaccaaagctgaggagcacttgtcaaagctccctgctgacacaccatactcacaatttgcttataaatttcaagagtggggcctggagaaaggttggggtgatacagcagggcatgttttggaaatgatccatctccttctagatattattcaagcgccagacccatctacactagagaaattcttggggaggatccccatgatttttaacgttgttgtggtatcccctcatggatactttggtcaagctaatgtattaggcttgccagacacaggaggacagatcgtctatatactggaccaagtccgtgcactagaaaatgagatggttctccgtttaaagaaacaagggcttgatgtttccccaaagattctcattgttactcggctgataccagatgcaaaaggaacatcatgcaatcagcggcttgagagaattagtggaacacagcatacttacatattacgagttcccttcagaaatgaaaatgggatacttaagaaatggatatcaagatttgatgtgtggccatatctggaaacatttgctgaggatgctgctggtgaaattgctgctgaattacaaggtactccagacttcataattggaaactacagtgatggaaatcttgtggcatcgttgctatcttacaagatgggaattacccagtgcaacattgctcatgctctggaaaagactaagtatccagattcagacatattttggaagaatttcgatgagaagtaccatttctcctgtcagttcacggctgatataattgctatgaacaatgctgattttatcatcaccagcacataccaagaaatcgctggaagcaaaaatactgttggacagtatgagagtcatactgcctttactctgcctggtctgtaccgagttgtccatgggatcgatgtcttcgatccaaagttcaatatagtctctcctggagctgacatgtccatatactttccacataccgagaaggccaagcgactcacctctcttcatggttcaatcgaaaatttgatttatgacccggagcaaaacgatgaacacattgggcatctggatgaccggtcaaagcccatcctcttctccatggcaagactcgacagggtgaagaacataacggggctggtcgaagcttttgctaagtgcgctaagctgagggagctggtaaaccttgtcgtcgttgccgggtacaatgatgtcaacaagtccaaggacagggaagagatcgcggagatagagaagatgcatgaactcatcaagacccacaacttgttcgggcagttccgctggatctctgcccagacaaacagggcccgtaacggcgagctctatcgctacatcgctgatacccatggtgctttcgtacagccggccttctatgaagcgttcggtctcaccgtcgttgaggccatgacctgtggacttcctactttcgcgacgctccatggagggccagctgagatcatagagcatggcgtctcgggcttccacattgacccgtaccaccccgagcaggctgctaatctgatggccgacttcttcgagcggtgcaagcaagacccagatcactgggtgaaaatatctggagcagggctgcagcgcatatacgagaagtacacatggaagatatactcagagaggttgatgacactggccggggtctacggtttctggaagtacgtgtcgaagctcgagaggctggagacgaggcgctaccttgagatgttctacatactgaagttccgcgagctggcgaagaccgtgccacttgcaattgaccagccacagtagcttgcgcaactgcgactgcgtagcacttggtacaagactgaaacctgaaggaccttcagtaatttaggcgcggcagacggtagccaataaaatgtgccggagctgaactggtttttattatgtacataaggcagtataacaaaattactgaaggcaggtgggttgcagttgtgtgttcgttactgtttactgtattatgtcaagctgtcggctgcaatttctttgctggcaagccgcaggcactggtgaagtgctgataaatacatcatattctgttgacctgtgaagaaacttgttctaggtggattccattgtact

SEQ ID NO: 6037 - DNA, 774 bp, Zea mays
  Clone ID: 700551650_FLI
ctcgcccgcatctgcgacggcatcctcgcgctcctcgactcccacctcgtcccatccgccggcggcgccgagtccaaggtcttctacctcaagatgaagggtgactaccacaggtaccttgctgagttcaagtcaggtgcagagaggaaggatgctgcggagagcaccatgaatgcctacaaagctgctcaggatattgctcttgctgatctggctccaacccaccccatcaggctcgggcttgctctcaacttctcagtgttctactacgagatcctcaactcccctgaccgtgcttgcaaccttgcaaagcaggcctttgatgaggcaatctccgagctagacagcctgggagaggagtcctacaaggacagcactctgatcatgcagctcctgcgtgacaacttgaccttatggacttccgacaccaacgaggacggcggggatgagatcaaggaagcagctgctgcccccaaagaatccgcccccgagggccagtaagacggatccgatctcccgacctgatgcgtgtctgctgatgtcggggagtttaccaggactgtgccgttcttgatttctgatagcttatcttctagtacacctcgtgttgttctcttcgtcacggcgccggtgcgcgtgcgctgaagctgcctgccattgccattgcctttgccgctgtttttaattaagcacacactctagatgttatgcccgcatgctatgtttcgattctcaagttgataaatgatggctggatgctggttttcgtgctcc

SEQ ID NO: 6038 - DNA, 699 bp, Zea mays
  Clone ID: 700551730_FLI
tatgattctctaggcatatgttatgtactaattgaattttaatttcagtatacactgtgtaatggtaaaaggagaaaacttgatgaatggagaatgtacaaagatcaaagtatggctaaatgaccttgctggaagtgaatgggcagcaaagacagatgcacagggagaaaggttgaaacaagcacagaacgtaaacaattcactttctacacttggtgatgtcatatgcactcttgtaacgaagacttcacatataccctttagtacaggtggagattccaaaactttgatgtttgttcaaattagtcctaacgagaacgacgtgggtgaaactctttgttcatttaacttcacgagcagagtacagagcatagagcttggacgggctaaaaaacaagtcgatgttggagaattgtcaagatacaagctcatggttgggagagccaagagggatagcaagaataaaaatgctcataatatgagtatggaagaaaggatacaagcacttgaagtgaagaataaggccaaatacatgctcactctgaatctccaagagaaagcaaactcaacccaatatcttgtcatggaaccaaacccaatagatacgcaatcaggatttaacaataggctatccattatatatgcaatcaggacctaccaacaatgtgtggtacacataatagaaggtgttgttgtctt

SEQ ID NO: 6039 - DNA, 1422 bp, Zea mays
  Clone ID: 700551736_FLI
gggaaaatgtctcgctcccttcataacagattaagcaagacagaaacaaggcacgtgcgtgaagcaaatcctggaaagcgttctaagcctagtaatattgttgctaatgtggcatcttttatacctcttgtgaagccaaaggtgcaaccaacaacatgtgtgaaaaaagatgttagagtgaaagcacttgagacagctgaagctgcaaaacgtcttgaagaaaagaaacgaagtgaacgtgaaatgcgcaaagcagcagcaaaactagagcgtgagaaactgaagcaagagaaagagttaaagcaaaaagaggaagaggaacagaagaagaaaagaggtgctgatgtggcaacaaggaagaggcagagggatgaggaggaaaggagggagaaggagagaaaaaggaaatgcattgaagaagctcgaaaacaacagaagcgacctattgaaagaaaacatgccaacattaacaaagatgctcatccagaaggtcatgataataaggagctgcagcagaattcggctgaagcagtgaaaggcccagtaaaatttgatgaaatgacaggtcttggaggaaatgccactaacagtaacaatgaaatggttgtgattaccgatgagaggcctgcaatttctggacctaattgtcaggaaaatatcccaaacagtattgaggagtcatacataatgactccatataaagattctgatgatgatgatgatgaggatttcaaacatatagaacattcaaggcgtaggaggaaattggttccttcatgggctcggggagagaacttggagaaaatcttgttatccaattatgttttggaccctaggaaaatctttgcacgaaaacgctcctctgatctctctgaaatttgtcctgcccacataccgcaacgtggtttcagatgagtttctttcctagttcgaaaataggtcccagatgagcttgcattgactgaactcttggttgtacgctgctgcctttcgtcaggcagtttgtgtataagctggtttcactagtttcatatactccctccgtttctctttatttgtcgcctagtagttcaaatttgtacaacgacatatattaaggaacggagggagtatgtaagaacaacattcttgtaccgttaggcaactgcggcaacgatcgtacgttgttgtacatagtttcgattagttcaccaaggcttttgcttcgacgcactccgtgcaaggagatataagctgttggttgacaagagtagtgatcttgtctgagcactgtgctcaaaggagcagccatggttgttaaggtgtttctgtgtaacatcatgtaatgccatgatggagtaacttgtacacatggaaacgataaagatcggctatttttaacgcaaagaaatgacgcatcggattgtttaaacgatttggatc

SEQ ID NO: 6040 - DNA, 1381 bp, Zea mays
  Clone ID: 700551738_FLI
ggagatggccacttgttgatgctgaaattgaaagagtggccccgacccagtgtcttggaggcgtttctgttgtgccaaaggccagaatttattgtcaactttcctcttgttgattttattcatcctagatggggtctcctaaaccttgctgccaagttacccccagatgccttacaacctgaattagggatgaaactgctaattgcacatggaagtcaccgagaacttggtaaaggtgattcaatgacaaatctaatgattaacatgagcgatgtggttcacatgttaatgcatgcaactgaagtgcattaccaatgtcccaagagggtaagggtacagtctgatgtatctgaaatgattgctaatggaactagtgtccatgtaaatgctcatactcctgttcaaaatttgaatctggatattgaagagcaatcacacaaacactcgaaatcacacatcgaggagccaaacactaataattcagaaggatccctggctggtgctgtctgggatgtattccgcaggcaggatcttccaaagcttaatgaatatctagctgctcatcgggaagaatgtgcagctagatgtcaagcagtgtcttctgttaagtatcctatttatgatcaaactgtgtaccttaacgattatcataagaagatgttgaaggatcaatatggaattgaacccttcacattccaccaacatattggtgaggctgttttcattccagctgggtgtcctttccaattgaaaaacctccagtccacggttcaattggctctcaattttttgtcacctgagagtttgccagagtcagtccggctgtcccaagagatccgttgcctgccaaatggccatcttgcaaaactgaagatgcttgaggtaaaaaagatctccttatacgcagcaagttctgctgttagagaaattcagagaataacccttgatcccaagttcaatcttgatcctagttttgaggatcaaaatttgactagggcggtttcagagaacttggcaagagtaaacaaacggaaggtatcttgcagttgagattgtgggggcctggtgaaattatgacatgccattcagaggattgaagtagatatagtgcttgtacatgtattatattgtgtcatatgaaaggaacacattctaattcttattgggttacacattgactttacctgtatattgtgggttaggaagagtaacagttaagcttctgaggaacaagataaaaaggcgctggaaagctcatgtagaattgttagcacaataatctctgttggtagcatctgaagaataattaattagaccgaaattgttacattgtgaacacagggttcaagatttaaatactatattttcaccacggttttgc

SEQ ID NO: 6041 - DNA, 910 bp, Zea mays
  Clone ID: 700551783_FLI
cctcgcccagcgcagcagccgccgcagcacatcgctatctcgatctcagccatggcggaggtggagcagcaacaggacacgccgaagctgttcaaccgctggaccttcgatgatgtccaggtgaacgacatctcgctgaacgactacctcgctgtgaacgcgacgaagcacgcgatgtacctgccgcacaccgcggggcgttactccaagaagcggttccgcaaggcgcagtgcccgatcgtcgagcgcctcacaaactccctcatgatgcacgggcgcaacaacggcaagaaggtcatggctgtccgcatcatcaagcataccctggagatcattcacctgctcaccgatgccaaccccatccaggtcgtcgtcgacgcgatcatcaacagtggaccccgtgaggatgccacccgtattggttccgctggtgttgtgaggaggcaggccgtggatatctcacccctgaggagggtgaaccaggccatctacctcctcaccactggtgccagggagagtgctttccggaacatcaaaaccattgccgagtgccttgcagatgagctgatcaacgctgccaagggctcatccaacagttacgccatcaagaagaaggacgagattgagcgtgttgccaaggccaaccgttgaacggagcttgtatcctggtgcactctgcgctggaaacttttatgttgctggcagtcgtatcggttcctgttttaccaatgtttagagttttttgagacctatatgcggttttggttttcagtgcacaattaaaattactgagtaatgtagttgattgggaacagaaagtgcctggtttaccgaactccatttctcttgtcatttttctttattctgtagtctgtattatgtatgcgtatgagtattgagatgattctgc

SEQ ID NO: 6042 - DNA, 924 bp, Zea mays
  Clone ID: 700551785_FLI
tccaagagctcaagtccttccttgttctcctggatgttcggagcaaaaccaccttcgtcaccaacattcgtgagaacaaggaaggacttgagctcttgaaaactgcaattgagaaggctggatacactggcaaggttgtcatcggaatggatgttgctgcttcggagttttacagtgacaaggaccaaacctatgacctcaactttaaggaggagaataatgatggttcacagaagatatctggcgatagcttaaagaatgtatacaaatcttttgtgagcgaataccccattgtttcgattgaagatccttttgaccaggatgactgggttcactatgctaagatgactgaagaaattggagagcaagtgcagattgttggtgatgaccttctcgtcaccaaccccactagggttgctaaggctatcaaggagaaatcatgcaatgcccttctgctcaaggttaaccaaatcggatctgtgactgagagtattgaggctgtgaagatgtcaaagcgtgcgggctggggtgtgatgactagtcataggagtggtgagactgaggacactttcattgctgatctggcagttggtttgtccacgggtcagattaagactggagcaccctgcagatcagagcgtcttgccaaatacaaccagcttcttaggattgaagaagagcttggcgctattgctgtctacgcaggtgccaaattccgtgcacctgtggagccctactaaacgggcgggatgcaagtgcttttatgtctgcacaagtcctgtgaaactgtttactgcgacctgcagattttactcttggagtgccctgagtagattttagcaataatatccaacatgtaacatgttacggacatgtacccaaacgtgatccagttttagttaatgtgctccatgcttgacgttt

SEQ ID NO: 6043 - DNA, 1863 bp, Zea mays
  Clone ID: 700551803_FLI
agcaaacatcaaactcattctgggcacacaattgaatcaagtgaagctactagtaggagacggagtaaccgggaatggaaagggattggtcggaagggtaatgaaaaatttccgcttcgaaatgtactaactgatattcttcatggggaggacaaaagatcgcaaaagtccaatgaagtacgaccccctccatcaaaacaacagaacgacaggaagcgtgaaagggatgatgagacacatcaaacaaagaaggactcctcatcacgctccatgcttggtgatggtgcttcccgtcgtcttctacagtttgctgtccgagatgctgtaaaagctgtacagccaaccagtacctctgctgaaccagcatccaagcgcctgtgctctgtggtcgccactacttctacagagcacatgcgtgataggagatcaggaagatctcaggactacctgaacgatagaagatcagaaagatctcaagacaacttgagtgacagaagatcagaaagaactaggccaatgctacaggtacatggagctgctttagctcttagagctgcagcggaagctgctgcagattctgcaaaggttagatctactggaagtgttttcaagcgattgggtcaagggaatgttgtgaaacagccatctcgttctcgtgaagagaagagagattatgaagattttgagccagttacgatcgcagatgaacatgattctgatcaatatgttaataatgaggaatccgaagaggaatctggagagctaaccatggcagatagggtagctggaagtggaatgtatgttgattcgagctctgaagatgatatggaccgagatgagggtattacaagataccaaacttctctttcacatgacgatactttctcaccatttgcagagaagaaaactgtatcggcaccatgcagtgttgaactagagactgatgcaataagaccttcaagtgtgaatgacgaggaacaacctgttccttcaacaccaacagcaagtaaagctgtcgctatttctgttgatgtaaatatggtggagcctcccagttatgcaacaccaaaagatgttcatgttgtggagaagccttatgttgcacccatgaattcaaatgccgccagtattgctaccaatgccaaagaattaggtcatgctgaagttcaaaaggattctcagcggtctgcaccatctgttccggtttcatatagcacagcgcatccgatggaggatgcagattcaagaacgctttatgttaacaatgttcactttgctgccaccaaggactcattatctcgccatttcaacaagtttggtgcagtgctgaaagtagtcattgtcactaatgccgcaacgggccagccaacagggtctgcctatgtagagttcttacacaaagaatcagctgaacgagcattgtcgttgaatggcacatcatttatgacccgtattctcaaggttgtccggcgaagttctcatgaagcagctcacttttatggttggcctggtagtggacggtcatcaatatatgggaggcatggtaggatggcatacccaagagctgttatccctggtggttcctttagagggcgtgctccgatgaaagctggtgctagaagtttacagtggaaacgggagccttcaggcactgattcaagtgcaggtgcgaaaactgacatgagtgtggcattttcctctgaacaggtgcttccacgtgcaacataggggagtatgttaccgctgagctgatataatgagaaccaagtggtatcccactcgtcgctcctggccctaatggctgaatatggacagcaagctgagaagattgttccttcctgctgcactgtaaaagaaaagtac

SEQ ID NO: 6044 - DNA, 618 bp, Zea mays
  Clone ID: 700551855_FLI
aagaccttgaagcaaataagatcaagaaagactcaggtgttacttgatgaactttgcgacttaaagagaaaggaacaaatgctgcaagacgctaacagggttctgaaaaggaagctgcacgagtttgaggcagaggctgcttctcccccacaattggcgtggcaaggcggaggcggcatgttgtcccatgaccctccacagccagaacacttcttcgtggctctggagagcaacgcgcctctgcaacctacataccatactatggacatgaaccagcagccagagccagcgccgggcggctgctaccctcctgcgtggatggcttagccagcgctttggttacattgccttgagaagtgccgtgtccttcagagatcgctacgagtcctgctgctgcttttgcgaacccccctttgctgcctgccatgcttaccgaactgttcaaataagaaataaccacatggtcctatataggttgctgttgtctttatcttctgttgatcacgtccggctcagatgctttaagcctttaacgctatgcaaaatggcttagcgatgcacgctggaatgggctgaactgcttgtgtttcgagagtataaatcgcttgggcgcttggc

SEQ ID NO: 6045 - DNA, 2476 bp, Zea mays
  Clone ID: 700551895_FLI
ttctcgtcccagtcgacgaaaacgaacagcccctcgctttagattgccgcaagttcccccattcctgtagatcgccggcccctcgctcggctcggccatgtcggccggctccacggcgtccctcctcgcggccgtcatctgccttgccctcgccgtgcttgctcccgtcgttcctggagatggtgccacattggaatcagttccagaccttgtgaaggcaatgtacctaaacgttgaaagcttcccttgtgtgaggctgttgaatctttctggtgaaattggctgttctaatcctggaagtgagaaggtcattgcaccaattgtaagacttagaaaaggcagtgatcaattggttcaaccatctactattctcctttccttagatcagatgtcagatttctttctgagggtatccaatgatccagaacttcaccagaaggtggcaggtgtattggttgagtcaaatggtgtcaacaatgacttacaagagctgtctcctgatagaaaatttccacaagatgattttgcaccctactcaaatcacagccatgattggaatcctgctggatcaggtatcatgtggaacaaatataattttcctgtatttctactttcagaagagagtacaaacactcttcaaaagatttcagaaaaaaatgagaagactggcaatggatataaagcaaatgttgcagaattcgaccttgttatgcagacaaccaaagctcaaacacatgattcagcatcctgcctcaaagaacaatcatgcttgcccttaggtggacacagtgtatggacttcattaccgccacttaataacggatctacagagcatccgaaacctttaatattggctattgcgtctcaagactctgcatcattttttcgggaccgtagtcttggttcagattctcccatatctggattgattgctttgctcactgctgttgatgctctttctcacattcatggtctaagcaagcttaagaaacagcttgtgttcgctgtttttaatggtgaggcctggggttatcttggtagtcggaaattcttacaggaattagatgaaggcgctgcttctgtgaatggaattagtagcttaaagattgaccaggtactggagattggttctgttggcaaggctatacttgaggaatatccatcattttatgtgcatgctgaagggaatccatcagcttcaaaggaaatattagatgcactgcaaagtgccagcaagtctcttggttctgataatgttaaagtaaaacaagcagcttcatcaaatcctggtgttccaccatcttcattaatgtcattcataaggaagaacatgtcaacttctggagttgtgttggaggattttgattcccacttctccaatagattttatcatagctatctggataactctgtaaacatcaattcctcgtcaatagctgcagccgccgctttggttgcgaggtcgatgtatattcttgctagtgatgactcagttgttgaccttataacactaaacactataaaagtgaacgtttcattggtcgaagaacttattggatgcctgcttacttgcaatcctggtctttcgtgcggccttgtgaaaagattcatttctccaagcaatccctgcccaagtcattatgttggtgtttttctggatgacccatctggcacgcagcttccttcatatgcagatgacacgtctcggtttgtatggaactttttggcagacagaactaattcagcaggcaataaaagctcatgtactggaaagtgtggtgatgaaggtgaagtatgtgtaggggcagaggtggagggtggaggtagatgtgttgtatctacaaccaggtatgttcctgcttattcaactcgggtgaagtttgaggacaatgcatggcacgttcttccagcgaactcgtcagatccaatgggtgctgcagatcccgtgtggactgaaagcttctggaacactattggcctcagggtctacgccgtgcaagatccagcttacgattggcttattcttcttgccgggctcggaatcactgctgcatcttattgcgctgtacactttggcagagcatacatttcaaaggtggcgaagcttgactgaagcgtcagtgagctgccccactgataatgggtatctagagctggaaatagaactaattaggctggcaattcgtagaacattagcagcgcatgagacagggtgattaagctgcgagaaagccgcaataaattatgagaaccaagcacacccgaagcaagtcctccatcattatgcggacgtccaggtcgatgtaatattaatgaaattgtgaccgtgttacgttttgtgttgaactggtactggtaggtaggttatgacacgcctctagctctagttggtggatgtttccggtaacgtgtttttctgtttgtggatcctgcctactcagttttggttgcgtataagcctgcccctcatgaatcc

SEQ ID NO: 6046 - DNA, 964 bp, Zea mays
  Clone ID: 700551930_FLI
aaaatgcgacagttgtgagcatttcgagtattgaggaactgagggctataatttcaagaggctctgagaggaggcacactgccggaactaatatgaatgatgagagttcaaggtctcatttaattctttcagtcattattgaaagtacaaatcttcaaacccaatcatatgcaagaggcaagctaagttttgtggaccttgctggttctgagagggtgaaaaaatctggttccgcaggaaagcaactgaaagaagcacaaagtataaacaaatctctttctgctttggctgatgttattggtgctttatcttctgatggacaacatataccttaccggaaccataagttaacaatgcttatgagtgattctctgggaggcaatgcgaagaccttgatgtttgtgaatgtttcaccagcagagtctaacttggaggagacttacaactcgctgatgtatgcttcacgcgttcgatgcattgttaatgatacgagcaagcatgttgctccaaaagaaatcatgagattgaagaagttgatcgcctactggaaggagcaagcaggcaagcggagtgatgaggacgagctagaggaggtaaaggaagagaggatctcaaaagagagagcagacaatcgcctgactggctgacaacttgacacaaccactgaatgctcctggttccgttcttccattacctggagaagaggtgattgatgctgatgagcatttgcaactgccacgagttctgcgatcgctctctaacagaatgttccgatatcatctgacctgtacatacagtagctacgtattatatactatggcagcgatgcccgtttgtacaaagaggaatgtagcacacattgatagaaagggaaaaggttgtgtgactgggaggcttgatgcgccctaagcctataacagctggatcatgtctttttttcccccttggagcaggtatttaaagc

SEQ ID NO: 6047 - DNA, 455 bp, Zea mays
  Clone ID: 700551981_FLI
atggaaagctgaggataaagtttcggtggagggatagactttggattggggaccctgctgatattgttcttgatgatgtccacttattgacggaggcttctaatggcttggctttttgttcataggcttgtggtattctttcgataccatatctgatatattgcacccatccattttgcagcatttcaaatttagcaaaatcttaacctgcagtggacttgcaagttgcacataactatcatcgcatcggcatgccagggtgtatttcatgttgataaccggggaatgagaagacaacgatagtgtagagctggtaaccatcacctagttttttcttctttggtttacatgtataattatgcctcctgacacctttttgggtttcagtgtatcatataccagtgtacaggttcggacctgaacattaatttaattgatagtggtcttgtatgttt

SEQ ID NO: 6048 - DNA, 1623 bp, Zea mays
  Clone ID: 700552011_FLI
ataacaaggaaatgaaattggaaactgtgacagctgctatgtctgatggcaagttgctttcccaaaagcaacaacatggtattgaatctaaggtggaggaatgtggcattcctatgtctgaggaagaagctgctgcattcgctgctgctgaggctgctcgagctgctgctatagcagctgcacaggcatatgcatctgtagaggcagagataagtgtgcctcgtgagcttccaaagataccgtcgttccaatcttttgtgatgcgtgatcaccatttggacgaatctgatgcaagaaaaagaacattgaaggataattttgggagacttgagtgcatatcagaaaatgattccaagaatggcgaagttaaggatttgcctgaaaacaccaagtacgctgatggtgatagcttgaaaatgtctcatgataattttactcagcagagccactctaatgagacagcttgcctagcaaacgctcaggatcattcaacagatactggtgttgtagacggtcggtttacaagggcatgggtggatactgatacaatctgcattgatggtgtcaaggatcctctagccattgagaggtggcaggcacaggcgatggaggctgataaagaattctacagtcggatacgcatacctgatgaagatgattcaagtagtcagaagcacacatgccgtagttctgcttcacagggtgccgatagcaaacctgcatctgagcggcaatcaagaggtgtggagcatataaaacagggtctcgtgaactttatagcctcgctgctgatgccattatatagaggaaaaaagatcgaccgagaggggtacaaaacaatcatgcgcaaatctgttaacaagatcattgatacatgctcagaaggagagaaatcaatgactactcttgagtttcttgatgataaaaggaaaattaagattgaatcctttgtgggcaaaatggttgacaagcatttgcatgttgttagcaagtcggccaaaccttaagattcatatgtgtagtgaggtgttctctgcaaagggatctactctcttttaaaacacctatgaatcagtgattgttgatccaagtgaactaaaatctcacttcagaagccagcatgactcatcagtgttgccgcaagatcaacaagaacacatattacccagactatatgcgtggtccagaagagcattgaccagatcaacaccatgtaattctgtacttatataggcatcatttccatcttcgtagctatagctcagtcaaaggtttagacctctgtgcactcgacaagcatgttgggcatgcagtaagcttggatgccaagttaagtttctgtggcttgatgaagtggcgtatgaagatccgggattcagtgtggtctcatatgcaatgggggtttttatgtctttcatggcggtagttcagtctagcctagcggattaatcctgttcattgttcagagttaactttaccaaagtagatcctcctctctctttgttgtacagttttgcagtttctaacaagcgtttaacttatagaaaggctggagtttggcagagatttgcagcccgttgtatatccttggctgcctataatgagcctcattgatgattctcg

SEQ ID NO: 6049 - DNA, 334 bp, Zea mays
  Clone ID: 700552064_FLI
aaattactggactccatccatgcttctcatttgcttgttctgataatcatatgctcttcatctagtgcatattgaagtgatgtttcctgtcataaaatggaattgtactatctttgtcgtgcagtttaaactgaccgccggcatctcagttttttttctttggtttttctgcgttttcacgtttttctagagaaagtatatagattcatgacataagatttatgtttttagatttactatgaaaaatactttcataatatataattcatatgctgtggaactataaggacctgtttagaagtattctcataatttctaaacaataccatggttt

SEQ ID NO: 6050 - DNA, 744 bp, Zea mays
  Clone ID: 700552086_FLI
tgaagctcttcaaccgctggaccttcgacgatgtccaggtgaacgatatctcgctgaacgactacctggctgtgactgcggcgaagcacgcgacattcctgccgcactccgcggggcgctactccaagaagcggttccgcaaggcgcagtgcgccatcgtcgagcgcctcaccaactcgctcatgatgcacgggcgcaacaacggcaagaaggtcatggccgtccgcatcatgaagcacaccctggagatcatccacctgctcactgacgccaatcccatccaggtggtcgtggacgcgattatcaacagtggaccacgtgaggatgccacccgtattggttccgctggtgttgtgagaaggcaggctgtggatatctcacccctgagaagggtgaaccaggccatctacctcctgaccactggtgccagggagagcgccttcaggaacatcaaaaccattgctgagtgccttgcagatgagttgatcaacgctgccaagggctcttccaacagctacgccatcaagaagaaggacgagattgagcgtgttgccaaggccaaccgttgagtggagcttgtatcctggtgcacttgcactagtactacgtttctggcagtcgtattttttcttgtgtttttacccatgtttagactttgagacctatatctaaggttttggttctcagtgaacaatgaaaattactgtgaaatgcagttgttttggtgcagaaatgcgcactgag

SEQ ID NO: 6051 - DNA, 1248 bp, Zea mays
  Clone ID: 700552118_FLI
aagaaacaatgaaagcaacagataatttcagcacagtcattggaaaggggggatttggaactgtctttaaagctcaatttaatgatggctctatagctgcggtgaaaaggatggacaaggtttcaaagcaagctgaagaagagttctgtagggaaatggaactcttggctaggttgcaccatcgccatctcgtgaccctcaagggcttctgcatcgaaaagaaagaaaggtttcttgtgtatgaatacatggcgaacggaagtctaaaagatcacctgcactcatctggaaggaagccattaagctggcagacaaggctgcagattgcaacggacgtggccaatgctctggagtatctgcacttcttttgtaaccctccactttgccatagggacatcaaatcgagcaacattcttttagatgagcatttcgttgcaaaggttgctgattttggccttgcacatgcatcaaggaccggagcgataagctttgaagccgtgaacacggatatacgaggaaccccagggtacatggaccccgaatatgtggttactcaagagctgacggagaagagtgatatatacagctacggggtgcttcttctggagcttgtgaccggacgtagagcaatccaggacaggactaacttggtggagtgggcacagtcgcacctctcgtcgggagcggtctctcctgaacttgtagacccgaggatcaggggcgctgttgacgtggaccatctgcatgtggtggtgggcatcgtgcagtggtgcacccatagagaagggcggcagaggccctccgtgaggcaggttcttcggatgctctcggagaggctggacccggggaacggcagcttcggcgagggcatggaagacgcggagggcggcttctatccccggagcagcaggtgcggcggcgcacatcaccggaacgagctggtcccatacggcggcggtgacatgaggtctctgcattcctcgtcgagcacgaccaggtcctcttactgcagccgcagcatgctgctggagagcgggcagactcaatcgcccccagaaacccagtgatgaatgaatgaatctagttagttcataggcaacttgttggtggttgctgttatttattattatttgctgtttgtttgttttgtaagggggaaaaaaggaattgtcaagtggtcattggaaggaaccagtggcggcagtgaatgagcaaagcagcagcacatgttccatgtggttgttggtc

SEQ ID NO: 6052 - DNA, 399 bp, Zea mays
  Clone ID: 700552159_FLI
taatactcgccttccaaatggccgctttttgccaccacttttcaatttcaagcctcacgaacttaaaggagtcccatcagacattgtcgcgaaattgattccagaacatgcaaagaagcaatgctcctatgttggattgtgaaatgaccgcgccttgagactggaacctgtggttgcaattgtgcatttcccctgggatgtttgacgatctgaggcatgcgagcctgttgttgaagatgcaaggttacgtacttgtacgacaatgtgacctgtgtagctgagtagtctatgtcgcagtgacatgtaacggcaccccccttcctactaactgacgcttactcgagattgccatagttgatcttgtaatttgttatagagcagtatgaatgtatttatggt

SEQ ID NO: 6053 - DNA, 724 bp, Zea mays
  Clone ID: 700552168_FLI
gtcaaccggaaccttctctcattctccacctgcggcctctgaggaagacatgcttcgtgcttctcaagctgtgcttccgtttgcaaactccatgatatcgacggcgcaagtgattttctctggtgaaccttcaatgactctcaaagtattgcctttacttctgttcggtgctaaatatgggggccttgttacagtgtggaggcttttagctgcaggatttttcatcagttttacagtcccaaagctatatagctgttattcaagtcgtattcataaaagagttgagattttgagagatcaggctctagaagcgtggaagtcttgcccacgcaaaaaaacttgttgcagctattatagtaacaatgttctggaacatgttcagtgtgaagacacgcgtcatggcagcctttgtttcacttgtaatactgcgctataataagaaacaccacaaggcagcagaagttggaagttaccgagatgagcaggggcagacaatggagatggatagctaaaattttcagtactatgcggtcctaatgatgtagggttgtcagagtgcagccacaagtactgctactatttctgtacaataatattcagttagttccatgtctagtggtcctactagctaagatgtattttctgtacgttgcataagggagcctttgcaaacaatggagatggataaccaaagttttcagtactatgcagtcctaaatgatgt

SEQ ID NO: 6054 - DNA, 1434 bp, Zea mays
  Clone ID: 700552169_FLI
gactgcgctaccgctgaggcggtcgtcgctctcgggcgccgagcagcagtggaggaagacaaggctcatctccctcatggatgacgtctgcaggcgatacaagcagtactaccagcagctgcaatccgtgatctcctcgttcgagactgttgcagggctgagcaacgcggcccccttcgctttcatggctcttcggacgatgtcgaagcacttcaagtgtctgaaggggatggtgatgagccagctacggaacacgagcaaggtcatcgccaaccatgggattattgccaaggacgatatggcgaacttcgcgctcatgggtggtggagcaggcctcctgaggggaaacagcgtgaacgcgttcagccagcctcacaacatttggaggcctcaaagagggcttcctgagcgtgcagtgtctgttcttcgctcatggctgtttgagcacttcttgcatccgtatccaactgatagtgacaagcagatgctggctaaacagacagggttaacaaggaaccaggtgtccaattggttcatcaacgcaagggtgcgtctctggaagccgatggtggaagagatccacaacctggagatgcggcagctgcacaagaccacatcggtggaccagaatcaactcggcatgcagcagcagaaccaccactcgtcggacggcagcgggaggccttcctccgacccttcgaactcccagcggggccaaagcagcggcatgacaagaaacctcagctctcgggcaccacgccacatccaggacgacgagctctcccagatgccccacgacatggcaggacaggtgagctttgcgtacagtgggctcccccccgcgcaccacggtctcgcgctgtcacaccaccaccacccccagcaagcgcaagctgaggcggttggtgttggcggcgtggccgccagcagcggcggcggcgtttccctcacgcttggccttcaccagaacaacaacaacaacaacagggcctatatcgccgagcccctcccggccgcgctcccgctcagcctcccgcaccggttcgggctggaggacgtgagcgacgcctacgtgatggggccgttcggcggccaggaccgccatttcagcaaggggatcggtggtggccacaacttgctccatgactttgttggttgatcaaattcgtcctggaagtgtttgtcggcatgtattgtattgttaggggtagggggcagtggaagagagacgaccgtttggtccatctgcatccaagaacgctgtcgatatttgccaactcgaggtctatagagtggttgacgacataccgttgaagatgtgttccagttgcatgttgtagagttgaacgaaccctattctgttctaatcccagctggtgtggcgttaacacatgtaccgctgttccttcgacatgcaactgaaggtgaaggttg

SEQ ID NO: 6055 - DNA, 191 bp, Zea mays
  Clone ID: 700552229_FLI
gtcataatgtaccaattggtgtgtcaatgtacatctttataggacataatgactaccaacttcacttgctttcatcttctttcctaccaaagaaaatgaaagcaagtgaagttggtagtcataatgtaccaattggtgtgtcaatgtacatctttataggacataatgataattcaaatcaagttatgatc

SEQ ID NO: 6056 - DNA, 561 bp, Zea mays
  Clone ID: 700552234_FLI
ggcagaggtgaatgccatcaagcaagtcttcaaggacccatctgggattaaaataaatgcaaccaagtccatgataggacattgccttggcgcagcaggcggtttggaagccattgctactattaaagcgataactactggatgggtgcatccaagcataaaccaatttaacccagaggaagcagttgaatttgacactgtacctaatgtaaaaaagcagcatgaagtgaatgttggtatctcaaattcctttggatttggaggtcacaattctgtcgtagtatttgcaccatttaagccataaggtgttccttgcctcacaaatcttggtcagaacagtgagatctgatttctgcgttcaattttcatgtgttctcttcgggggggaagtaatgtcagatttgaaccagcaacgttaaaaatgaactaaagatgagatacattgcgttttagatgactccatgttcacttagattgagcgcggctgtacaacattcctttgaaccatttgtaattgattgtactgtttttcatgtaatggaagaggagtcttgtagatgc

SEQ ID NO: 6057 - DNA, 1219 bp, Zea mays
  Clone ID: 700552241_FLI
ggcacttcggcggggacgctcaaccgccccgcgggcggcgtcgacggtcggttcccggcggcctcgcggaggttgcatcccgtgtcgaatcgaggtatttgtcgtgcaggcaggatcctacgccaaatgcctctctttgataagaaacctttctccttgctggagccccctaaggacttggattcaaaggagaaggtgttccaaattcgattcacgaaggagatattccgagattatgaagaatacctgaagaggctaaacctttatcgtcaaagagtttggacatgtaatatatctggaaaatctaatttaacttttgaagaagctttggtatctgagcacaaagcgatggagaaggctcaaaatttgccaactgagctaatggctcaagttcttcggatgactcaatacagccctcttggtttatatgaacttgttgataagatatatgctagtctgctggaagaagtatttgagggaatagaattacatgctaataaggatggtaatgtggcaccttgcaagattttgaagattttagattctggtggcacaaagatgtgtgaagttggttggattcggaagggtaaggctataaccaacacatcagtaatcaaagctgcagatctgttttaccggagggcacctgttagcaggaatacgctgaagttttttattagagatgctacgtcacaaagtaatccatgggttatccatgagaatcttgccaaaaaatttggcataaccatcgagccccctgatagtgtaatgggagaaaaagacaagagaatgaaactgttgaagatggaaggaaaaagctcaagacagatgaagaacatgcttatgtgctgattaagtatccaatagatgatctgctagtaaggcccaatgcagatgatccgtctttatttaagagacctcttctggctacagattttagagtaccaagatgttctgtgggagatctccttatggtatgggacttctgctcgtcttttgggagggctctgaatctgtccccatttccgctaacagatctggagaatgcaatttgccacaaagaaagcaatgttcttcttgtggaaatacatgcagctttgtttcacttgcttatgaaggatgaaggtgactatttcactgttccgcagaacaagaaacagaagttaaaggtaagttcagtaacatgggctgagtatctatgtgacttcttggaaatgac

SEQ ID NO: 6058 - DNA, 376 bp, Zea mays
  Clone ID: 700552257_FLI
agcttttagaaatcaatttatagcctcgaccgtagtaaaacaaggccgagcaatatgctcaaatcatcaaaggtttacccactccggacaacctgcaacgcagaccattcccgaggaacttaaaaaaacaaaccacccaggaatgccttacggccttgcacatgattggactcaggctttactgtagccagatataattatacgacgcacaacctagagtagcgttctcaagaacccacactctaatgttcgacgattatataatcctattacagaccctgcgatattgatagccattattcccaagtgaaccatggctatcaatatcgcagggtctgtaatattgatagccattattcccaagtgaaccatggct

SEQ ID NO: 6059 - DNA, 956 bp, Zea mays
  Clone ID: 700552263_FLI
aattcaatggcaagctttctgattttggattggccaagctcttgggtgcagggaagagtcatatcacaactcgagttatgggaactttcgggtatgtggcccctgaatatgccaacactggtctgttaaatgagaggagtgatgtctacagttttggagtgctactactggaatcagttactgggagggacccagttgactatggtcggccagctaatgaggtacatctggtcgagtggctcaaaatgatggttggcacgagaagagctgaggaggtggtggatcctgacatggagttgaaacctgccactcgggctctgaagcgtgcccttctagtggcactgcggtgtgttgatccggactctgagaaaagacccactatggggcaggttgtccggatgctcgaggcagaagatgtcccgtcacgggaggaccgccggagccggaggggccacagcggtaacgcagacagcgagtctaaggcaagctcaagtgagttcgagataagcagtgatcgaagagagttggggccgtccgcgaggttccagtcctaacccctgacgagaactcggttttggactagcgatgaacatcagatgagcggtgtgtgtggggggggggggggggggctggttggtaggaggtaggaaggccattgcatttcattttcgcgaggacatttgcattttgtactgtgtagagatcggaagggcattgcatttctggaggggtaggcattatcctttggtagtaggcagcttagaatgcagagggagatgactccccctgagacgaaagattcagacttgctgtcgtgaatcttggtgttctgttggtgcggacggcagcagcttcagcttgtacagacatttctttctctgtcgtttggttattaggacttgttgggtagtaggaacattaaggtctctttcgtaatgtgatgaatgacttgaacc

SEQ ID NO: 6060 - DNA, 2182 bp, Zea mays
  Clone ID: 700552304_FLI
cttaaggatgtagagaaatcattcactggagttaccgagtcactttcatctttgcggagcaaatttgaatcgcttccatctggtgttcttattataggatcccacactcagatggacagccgcaaagaaaaggcgcatcctggaggttttcttttcacaaagtttgccagtagcagccagacactttttgaccttttcccggatagctttggtagcaggtggttgcatgaaagaagcaaagaaagtccaaaggcaatgaaacatctgaataagcttttcccaaacaaaattttgatccagcttccgcaggatgaagctctacttacagattggaagcagcagttggatcgtgatgttgaaacccttaaagccaaatcaaacattggtagcattcgcacgtttctgagtcgcaatggaattgaatgcaatgatattgaagaattattcatcaaagaccaatcactgagtaatgaaaatgtggacaagattgttggatacgcagtgagttatcaccttaagcacaataaaattgaaacctccaactcgaaggataataaacttgtactcacaagtgaaagccttaagcatgggctcaacatgctgcaaagcatgcaaagtgataacaagagctcgaaaaaatcactgaaggatgttgtcacagagaatgaatttgagaaaaggcttttggtggatgttataccacctaatgacattggagttacctttgatgatattggagccttggagaatgtaaaggacacattaaaggagctggtgatgctccctttacaaagacctgaattgttctgcaaagggcagctaacaaagccttgcaagggaatattgcttttcggacctcctggcactgggaaaactatgcttgccaaagcagtagcaactgaagcaggtgctaatttcatcaatatatcaatgtcgagcattacatcgaagtggtttggtgaaggggagaagtatgtaaaggctgttttctcactagcaagtaaaatagcccccagtgttatatttatcgatgaggtcgatagtatgctaggaaggagagaaaatccaggggagcatgaagcgatgcgcaagatgaagaatgaatttatggtaaattgggatggactgcgcactaaagataaggagcgtgtgcttgttcttggtgctacaaatagaccttttgacctggacgaggctgtgattaggaggttcccccgcaggttaatggtaaacttgcctgatgcatcaaatagagagaaaattctgaaagtaattttggcaaaagaagagctgggatcggatgttgatctcgactcacttgccaatatgactgatggttattcaggaagcgacctgaagaatctgtgtgtgaccgcagcgcattaccccattcgagaaatcctagagaaggaaaagaaggtacacaatgttgtctctgcttttgattatccttcgcagcagggagcagtgatatgtttttctgtgaaatgatgcctacattgggtcgctgaattccattgtgtgcaggagaagagtttggctaaaacagaaggtaggccagagcccgcgttgtatggaagcgagcacatccgtcctcttagcatagacgacttcaaatccgcccatgagcaggtttgcgcgagtgtttcatccgactcggcaaacatgaacgagcttctccaatggaacgacctgtacggcgaaggtgggtcgaggaagaggaaagcgctgagctacttcatgtgacggcgagagacataaaaccagaaggatcacaaccgcgccataaagccagaaggtatcgcagttgcgccatattgtacagccgccatagtacttcccccctcccggccctaaatccagccagggttttcctcctccctcctgggtagccgtggccgcctgtagtccctccctcgtgtaattagaaccgtgtaccgagtcgagttcatttacccactgtttgaggttccagagagttgagatttaaattttaagtggcgccattgcccttcctttcttcctcccctcctaagttattaactttgttgcggccattgttgtcgtgactctggccatagatccttttatgtacatgcgaaatgtaaccaagggatatggaataagaacatgttcatcctgttgtagacagcatggtggtacaggaattctttttattttt

SEQ ID NO: 6061 - DNA, 756 bp, Zea mays
  Clone ID: 700552318_FLI
gcctgcgccacagctgccgattcgaaagccctcgtcctgacccctcgcaaaaccctagctccaaccaccatgaagggcaaggccaacgcctccaagaaggatgaggccaggctccgggccggcggcggcggcgccggaaagcgcaagaaggccgccgcgagcggcaagcccaagcgccctccctccgccttcttcgtcttcatgtctgaattcaggcaggagtaccaggcgcagcaccctggcaacaagagcgttgcggccgtgagcaaggcagcaggggaaaagtggcgctctatgtcagagcaagagaagcaaccctatgtggaccaagctgggcagaagaagcaggactatgagaagactaaggcaaatattgagaaggagagcacaagctcaaagaaggctaagactgatgacgacgatggctcgaagtccgaggtcgatgatgaggatggcggtagtgacgaggataacgacgacgacgagtaaatagtatttccgctgttgtgaggtagcaaatcgattgttaggtccccaattagctcactggtttgctatctttaatgttaagttgtttggaacaggtgtttatgaaggggatctattagtttcgtgaggttgttagtttagtgcattagcaaagaaaaagccgaatgctgctagctattatgttgcttttcttttgctaatcacttgtgtcacaactttctgtacctgtttcattgactaatctagtgactagtcagttatgggttt

SEQ ID NO: 6062 - DNA, 1573 bp, Zea mays
  Clone ID: 700552327_FLI
agatcatcaaaagcaagcgaaggcacatctgcttgaagttgaaccttttgagcatgcttttgggccaaagggcaagaggaaacgtccgaaactaactgctcttgactacgaatctttgctgaagagagctgatgattcccaagatgtgtttgagcaaaagtatgcttcatcaaagttgccaagggaggaagaagaagatggcttacgtgatctagtgaggcatacaatgtttgagaagggacagagcaaaagaatctggggtgaactatacaaagttattgactcttcggacgttgttgtgcaggtgttggatgccagggatccaatgggcactcgatgctaccatctagagagacatctaaaagagaactgcaagcacaaacacttggttttcttactaaataagtgtgatctaatccctgcttgggctacaaaaggatggttaaggaccctttcgaaggactatcccaccctagcattccatgcaagcatcaacaagtcatttggcaaaggatctcttctctcagttttgaggcaatttgctcgtttgaagaatgacaaacaagctatttctgtcgggtttgttgggtaccccaatgttgggaagtcatcagttattaacacactacggtcgaagagtgtctgcaaggttgctccaatacctggagagacaaaagtgtggcagtacatcactctcactaaaaagatatttttgattgattgtcccggtgttgtatatcaaaacaatgattcagaaactgatatagttctgaagggtgtggtccgggtgacaaatttggcggatgctgctgagcacattggtgaagttcttagtcgtgttaaaaaggagcatctccaaagagcgtacaaaattcaagattggtctgatgataatgattttcttgtccagctgtgcaggaccactggaaaacttctcaagggcggggagcctgatctgacaacagcagccaagatggtacttcatgactggcagaggggtaaaatccccttctttgtaccccctccgcagcaaagcgacggcggtgcatctgaaagtgctgaacaacctattgggattaccaaagaggacggagtaagcagcgacaggactgccgcagccatgaaagccattgcaggaataatctcgtcacagcagaacatgaatgtgccctgccataaggaaaacaatgcagacaatgaagacactgaaaatgcagataacgaagacattgagagttcagataacgaagacaatgatgacatcgagcctgcagagcgatctgagtgatctttgggtacagatgtggattattagagttgatatgtcaaggctaatgaatttgtcagcccaggtgttgtgtagctacttgaccatatcactggcgtgccagaaaaaaaagcatcatgttgagttgcactttttgtaactatcgtacctgaatctttgtaatagggcaagaagagcagttttgctaggtacctggttgtatcgggatgcttatctgtgctgtctactacaaatacagttacatctattttacttaaatcaagtggaacttatctctaaattttt

SEQ ID NO: 6063 - DNA, 1546 bp, Zea mays
  Clone ID: 700552355_FLI
ccacacgacgccacgactgacgacggagagccccggtctccttccacggctccaccgccaccaccccgcataaaagtagggaagagagctttgcagcgagaaccgtatcgatctattctcgtctgaagcaattcgcccctgtcgtgagcagaatcctacagctcgtattcgcctcatctcgcagcagcagcagaagaacaagggtatggcgaaggatgggggtcccgactggaacggcctgctcaagtggagcctcgcccacggcgacagcaccaacccgccgcgtgctctcagcgaggaagacagaaaatggttcatggatgctatgcaagccaacacggtagatgttgtgaagaggatgaaggagatcactcaggtgatgaaaacaccagaagatgtcttgcagtctcagggtgtgaccccggagaacattgaagatatgttggatgagctacaggagcatgttgaatccattgacatggcaaatgatctacattctattggtgggctggatcctctacttagttacttgaaaaattcaaatgctggcatccgagcaaaggcagcagaagttgttagtacaattgtgcagaataatcccaagagtcagcaacttgtcatggaatccaatggactagagccactgttgacgaacttcaaatcagatccaagtacaaatgcacgcacaaaagctttaggagccatatcttctctaattcgtcataaccagcctggagtttccgcatttcgattgggaaatggctatgctggattgaaggatgctcttggttccgatgatgccagactccaaaggaaagctctcaatctcatacaatacttgctgcacaactacaaggcagacaggagtgttgccacagagcttggtcttccgaagctgatgatgcaccttgtgtccagcgatgattccttagtgcgtgaagctgctctaggcggcctccttgagttggcgcgggacaagacatctggtaacgcgctacctgaccaagaaaagctgaaagacatgctcaagagccgaatagaagggatcagcgcaatggacactgacgatctccacgctgctcgcgaggagcggcagctggtggattcactctggaaggagtgctacaacgaaccttcgtctctcagggagaagggcctcgtcgtgcttccgggagaggatgctccccaacagccgccaccagacgttgcagggaagatgtttgagccaccgcttcgtgcgtgggcggctgcaagacctgctcaggaagatgactctgactctggcagcggaaagaaggatccgccattgctgcttaagttttgacggccttcttatgccgatactagttcttaggctccaccatgggtgttgaaagctgaaagatcagatctgatggatgcctgaccttcttcgaacctcagttgtggttcttgtaatttgcaccgcatttcttctgagtatgttttttatgagaagactgggaagatgacagacagatactgtatcacgtgatgctcgtaaattaacactacctgtgaattctgt

SEQ ID NO: 6064 - DNA, 950 bp, Zea mays
  Clone ID: 700552370_FLI
ggcaaaaaagtggtgatatctgcaccatcagctgatgctcccatctttggatcatagctattctcattaactccaactacaaacatgggagcatcagctgatggtgccatgtttgtagttggagttaatgagaatagctatgatccaaagatgaatgttgtttctaatgcaagttgcactaccaactgccttgctccacttgccaaggttgtccatgaggaatttggcatcgtggagggccttatgacaactgttcatgcaacaacagctacccagaagaccgtcgatggtccttcgatgaaggattggagaggaggacgtggtgctgcccaaaacataattcccagctccactggtgcagcaaaggctgttggaaaagtcctgcctgagctgaatggaaaactcactggtatggccttccgagttccaacaccaaatgtctctgttgtggatttgacatgccggattgagaaaagcgcctcctatgatgatgtgaaagcagccatcaagacggcatcagagggtgcactcaaaggtattcttggctacacagacgaggatgttgtttccaatgattttgttggtgattcaaggtcaagcatctttgatgccaaggctggtattggactgagctcttccttcatgaagctcgtgtcttggtatgacaacgagtggggctacagcaaccgggttctggatctgatcgctcacatggctcttgtgagcgccaagcactgatgttcgtactcgttcctccagtaccagtagtagcctagataagaggctgcagttttgacggccattttcttttagctgttgtttggaataaaagaccaaatgttggaacacttggaactcgcgcaaaactggaatccgattcatgacctgtgttttagttgtagagggggcaaatttgcatcgtactatatgcgggattgttgatcggatgt

SEQ ID NO: 6065 - DNA, 1368 bp, Zea mays
  Clone ID: 700552433_FLI
agagaaattcaaactgatgcatccgttcaaaatttagttgaaagaacagatcacactttccaagatctagtttctttcaaacaacccccggcagatgataaaatagctcttattgacctaactactgacagggaattgccttctcagatggatctcgacatcactgatgcagagacaaaaagatctaatgcggtctggaaaaatcttgagctcgcaaccatgaaattgtcccaagaactggcagagcaattgcgcctggttatggaaccaactcttgctagtaagcttcaaggggattatagaactggaaagagaataaacatgaagaaggttattccatatattgcgagtcatttccgcagggacaagatatggttgcgccgaactaagcctaataaacggaattaccaagtggttattgctgttgatgactctagaagtatgtctgagggcaaatgtggaaaatttgctatcgaggcattagttactgtgtgccgtgctatgtcacagcttgaggttggacaatttgcagttgcaagttttgggaagaaggggaacgttagtgtgctacacgattttgatcagatctttaatagtgaagctggagttaatgtgatctctagcttgtcgtttgagcaagataacaaaattgaggatgaaccggtgtctgatctcttgacacatctgaatgttatgcttgatactgccgttgcacgggcacgcaccccatcagggcaaaatcctctccagcaactgatactgataatatctgatggaaaattccatgaaaaggaaaacttgaggcgccatgttagagacgttctaaatcgaaagaggatggtcgcgtatgtgctcctggatagccccgaggattctattattaatctaaaggaagcatgcttcagagtaggggagaaggtagagctgaaaaaatacatggattcctttccgttcccgtattatgttatgctacagaacattgaagctcttcctcgcacattggccgacctgcttagacagtggtttgagctcatgcagagcgccaacgagtgacccttgggagttgggagtagtgccacgcatttagctgtacagcaaactacattctagcttccatttttgcttgggcctggacagttctgtggtggcaagcttgattgtgcacaaatgccttcacggttcaaatcgctttcctgaaatatgatctctggtcgcaggcttgattgtctaaaagcatcatcacaattcaaattgtttttgggaaatttgaatagaatttccgctttcctgaaatatggtctctgctcgcaggctttattgtgtaaaaacatcatcacaatttaaattgtttctggcaaatttgaatag

SEQ ID NO: 6066 - DNA, 1029 bp, Zea mays
  Clone ID: 700552458_FLI
gcagcgttggcgggccttgtggcgaggaggaggaggagcagggggcgtggaggcgcggcgattgttcgcgggatgagctacggcggcagcagctccctcgcgcccggtgccaagaggccgttcgagtacgggagaacgcatgtggtgaggcccaagggcacgcacaaggccaccattgtctggctccacggccttggtgacaatggaaccagctggtctcaactgctggaaacgctcccccttcctaatataaaatggatatgcccaactgcaccttcaagacctgtgtcattgtttggcgggttcccctgcacagcatggtttgatgttgctgacctttctgaggatgctcccgatgacactgaggggatggatgcctcagcagcacatgttgcaaatttgttgtcaactgaacccgctgacatcaagcttggtgttggtggctttagtatgggtgctgctactgctctgtactctgcaacttgctttgctcatggaaaatatgggaacggcaatccataccctgtgaacctaagtcttgccgttggtcttagtggttggcttccatgtgccaggaccttgaagaacagaattgaagcctcaccagaggctgcacaaagggcttcaacaatacctcttttgctctgtcatggaaaagctgatgatgtagttctctacaagcatgggcagagatctactgatgccttgaaggcaaatggcttttccaatgtgctcttcaagtcgtacaatagtcttggtcactacactgttccagaggagatggatgaagtttgcaaatggctcacagcaaatttggggctcggcacttcgtcatcttgatcgcgagagaaagactcgcggtgtcggtgtcttctccagggtagtaaatgggctaatagcaaatttgggcttgggtatacggccatgttctagcttttcttcacgcagacgtgtctgcgagtgctgtacgcttataatttctatattctggtctacgtcgatttggttgacacggataatgtttgtttc

SEQ ID NO: 6067 - DNA, 971 bp, Zea mays
  Clone ID: 700552474_FLI
ggcggccgctgcagccctcagcgccgaggaccgcgccggcctcgtcaatgcccttaaggataagctgcagagcctggcgggccagcacgccgatgtgttagagacgctgtcgcccaatgttaggaagcgggttgagtttttgagagagatccagagtcaacacgatgaaattgaggccaagttttttgaagaacgagctgcccttgaggcaaagtaccagaagctttatgaacctttatacacaaagaggtatggaattgtaaatggagaagtggaggtagatggtgtttgtgatgaaccggccagtgagaatactgttgagggaaaagaaccagacgctaaaggagttccagacttttggcttactgccatgaaaacaaacgaggttttgtctgaggagatacaagagcgcgatgaagccgctttgaaatatctaaaagatatcaagtggtctagaatcgaggatcctaagggtttcaagctggattttttctttgatacaaacccattcttcaagaattctgtcctgacaaaaacgtaccacatggttgatgaagatgacccaattttggagaaagctattggaactgaaatcgagtggtatcctgggaaaaacctaacacagaagattctaaaaaagaaacctaaaaaaggttcaaagaatacgaagcctatcactaaaaccgaggactgtgagagtttcttcaactttttcaatcccccgcaggtccctgaagatgatgatgacatcgatgaagacactgctgatgagctgcagagtcaaatggagcatgattatgacattgggaccaccataagggataagattatccctcacgcagtttcctggtttactggtgaggctgtgcaaggtgaggattttggtgagttgggcgatgatgatgaagatgatgatgatgaagacgatgacgaagatgatgaggatgaagaagaggatgatgatgaggaag

SEQ ID NO: 6068 - DNA, 1083 bp, Zea mays
  Clone ID: 700552476_FLI
gcacctccactgcagtagtcttgttgccggcggcggcggcggcggcggcggcgcggagaaattcggcgaacgatggcggactccggaagcctgaggaagcgggaggagaaggaagaggaggacgacattgtctgcctggatccgtccttattcgtggaccgcagctacgagatgacgaccttcaccttcgggtcccacgagttgcgcctcctctgcctccgcgccgcttccactgattttgatcttactggacagttagtgtggccaggggcagtcattatgaacaactacctatctcaataccctgaaattgtgaatggatattcagtaatcgagctaggatctgggattggcattactggcatattgtgcagccatttttgcaaggaggttgtcttgactgatcacaatgatgaagttctggagattataaataaaaatatagagttgcagtcatgttctgagaatgcacatgcagtgttgacatccgagaaactagagtggggaaactcagatcatttaagcagtattattgaaaagcatcctggtggatttgatcttgttcttggagctgatatttgcttccagcaatctagcatttcctgcctctttgatactgtagagaggattgttcgtattaaagctggtaaatgcagattcatattggcttatgtatcccgaactaaagtcatggatgcactagtactcaaggaagctgaaaagcatggaatgcgtgttgaagaagtgaacggaacaagaacaaccatcgcgaatcttgaaggagtcatatttgacattaccctgaaatgacagtccgtccttcgactctcctttgtcgaagtgcttgagtggttattcgtcatgaagtcctgtgtaacttccttttagcgggaaaatcgaagttccgcatcatgatgagctggagttgtgtcagttgtattgtatctctgtagaggaggaggcaccacagtaagaacattagccgatgatggtctttgattcatgcgcccatttggtgtggctttctactgttcaactgctccatcctttaagctaatatataagatgtaagatgcgtgctac

SEQ ID NO: 6069 - DNA, 1366 bp, Zea mays
  Clone ID: 700552479_FLI
atcaaacattcttcttggagaaggatttcatccgaagctatcggactttggccttgcaaaacttggtccggttggtgacaagacccatgtttcaacacgtgtgatgggtacatatggctactgtgccccagaatatgcaatgactgggcagctgacggttaaatccgatgtgtatagctttggtgttgtgttccttgaacttatcacggggcgtaaagcaattgacaatactaagacccaaggggagcaaaatttagtggcatgggctcgtccactgttcaaggaccgaaggaaattccctaaaatggctgatccaatgcttcagggccgcttccctatgaggggtctataccaggccttagccgttgctgccatgtgcttgcaagagcaagctgctacacgtcctcacatcggggatgtcgtcactgctctctcatatcttgcttctcaggcatatgacccaaatgcccctgttcaacacgtccggagcaattcatccacccccagggccagaaaccctgctgggtggaacggcgaccagcgcagcgtgcgctcgcctaaccatcattctccagacccgcggcgcagagacgccgcgggggcatccaagtatggagcagaggttagcaggactagctctaccagcgactctggccggcgatcaggcctggatgacatggacctgaccgggtcgcaagtgggaagcccagcgcagaccggaagaagaagagaagctccaaggggcaccgacagacagcgtgctgtcgcagaggccaggacatggggggagaattcaagggagcgaacaaatggccatggcagcttcgacagcacccatgagtgaagccgtcaggttctgttccagtcatcattccagaacccccaccatgggttgagtccactcattcatcagcaccagtcagatccgatcttgggacatggcgtcggtccaagtgtctgtgaataaggcttttcttgccctcctgtggcgaatgcaattctcctggcgcccattccttgccaatgcgacctgtgtgtgtcatgcctctggcgactgggagcctcaggaggagcctgtaggattcagtcagaggtagacaggtcagtgaagaaagaggaggggcgcgcagtcacattggcgagtgttttgtttttttggcggctaaatgctgagtatgttcagctgcatgtgtcctttttgtgtatgtgtacgtgtaagacgtgtaatagcaaccgtgtcaggtttggctacctgagaggcctttgaagcttctgctgctgcttccttccccttgggaattgggagttcagagttgaaatgtaggataggggatgttgttgagtacagcaactgtttttacccttc

SEQ ID NO: 6070 - DNA, 1670 bp, Zea mays
  Clone ID: 700552550_FLI
cgacggaggtagtaggagacgagctcctcgtcggtgggcgatgggcggtccaccagcgggggcgcagggcggtggaggctggcaagcggcgggggccgcagggcggtggtggccgcgggtggaggcgagcaaggagcgggagcgctggaggccgccagggtgctggagattagggttttcatttgtcgtgggagatgggcctcgtacaaattggcagatgggcctcatatggcacatgtgtctttgtcttcatggtttgcaagttaaaattagtaccacattgcccaccggttggtgtttaaatctgcttatatgcctacctgtgcgcgtagtagtactgttgtggtcactggatgcgttgtgggatgtatttttttggctgaaccaggagcatgcacggggaacttgtcagagaccgggatcatacgcagagatgggttatgtgggctttacctgtcagagaccgaaccggtagaacacaaaaaggcaggctactattgtagccttaataagtagtagagattaagctagcctttttagttgtgaaagaatttaagatacctaagaaaagaaataaactaggctaatctaaaatttatggtaacagttaagacgtacgatataatctaccttggatcattgattgttaattttttctctatccgtttaggaagatcatgtgcgcgcacgaacccgctccggctctccatcacatgggttggccactctggaaattaacatgatgggcctcacattgtcgctttcacggccctctttccaaatccaggcccaactacaacacttctctcttcttagaaggaacagattcatcgagccagtgcaaaccctagccgacctcttctccttgcgccgccgccgctgctgccgccgccatgtcgaagcgcggtacgtacgctccggtcccccattcgcttcggacgatccgactcgttttcctgttgcttctctcgcttatcggcaaactcagcccgcttcagcgtcgaaatggatgaactgccgcagggaggggagggacggcggggaacaagttccgcatgtcgctgggtctccccgtcgcagcgaccgtgaactgcgcggacaacacaggcgccaagaacctctacatcatctccgtcaagggcatcaagggtaggctcaaccgcctgccgtccgcctgcgtcggtgacatggtcatggccaccgtcaagaagggtaagcccgacctcaggaagaaggtcatgccagccgtcatcgtccgccagcgcaagctgtggcgccgcaaggacggagtctacatgtacttcgaaggtaactctcgccactttccctagtactacaacgcccgacatcgatgtacccaacccaatccgttctggtgtattgcttgacgctatgcgtctgatttgtcatctagcttgtagtgttgctgttgcttgtagcgtattgcgttgtctgacgccttaatcctatttagaatgtatttatgcaaatctcaacttttatcccagttttccaacagtaacaatgcttattgaatccagctagttgcttatttgtggatcctctctctttgttgttggccacctttatctcgtgatgtttgtgtgcatgtgaatactctgaatgtgcatttcgaagtttgagaagttacgacgcgttactgccattcc

SEQ ID NO: 6071 - DNA, 1232 bp, Zea mays
  Clone ID: 700552568_FLI
agggctggcaatgctgataagaaggtgcaagagctaaatatgaagctggagaagaggacaagcagtgatcaaaagcgcaggattcagaagactgaacatgctcttaaagctgctgaggaggagctgatgaaggctcagttggaaacaacaacaaaagtaaaacagcttagagaggttcatggagcctggttgccaccatggttagcgacacatgcagcccgctctatggaggtgatgtcaaatcactggaatgaacatgggaaacctgcctttgacagcttcttgcagaaggcatctgaaaaaacagtgcagacaaagaaatgggctgagcctcatctggaaactgctaagacaaaatggatgcctgttgctaaagaaaaatgggttaccttgaagaaacatgcaaagccctatgtccaaatggtctcagagaaatcattggaggcttatcaaacatcaagtgactttgtcaggcctcatcttgtaaatgcacatcaagttgttgatccctatttccaggaagccaagaaattatccaagccatatgttgatcaaattgctacagctactaaaccacatgtcgagaaagttagaactgctctcaagccttatactgaaagagcacgacatgtatatggacagtttcttgagacagctactacatatcatcagcaggctcaggcaactatctcggattaccttcaccggcatgagtttacaaaacagtttgtaactaaagagttggtgtggtatctggcttctgctttattggttacacccttctttgttttgtacacactcctaactgaaacattctgtaccaagaagaagaagaaaacacctcggagcagtaataccaaccatggtcataggagacataagcgccggcatgctgacaagtaaaacattgatcaaccatggtcattactttttttataacgatcttggaagcttgaccatttacctttcacttatgcgtccgttgtctggtatagacactatcatccgtcatcgccgaaccttgttgtgtatccacgaactagaatacacacaagaaatgtgtttctgccccccatcgtgttgggagagttgtgtttttcatcagagtagggaccgcgagcttaaatctgtgggtgtcatttcataggttatttgttgtagcattgtgcttgagcttgtgtaattcatgattattttgtctcgcgtttgtggatcacttcagccactacatt

SEQ ID NO: 6072 - DNA, 3825 bp, Zea mays
  Clone ID: 700552571_FLI
gtgcactgtctatatatgtccatcaagtttcaatctaaattgcttaagtgcccttgcagttatatggggacaattacaggaataagtgatcttgatcctgttcgctggccaaactcgcactggcgctcagtaaaggtaggtctcgaaacaaacacagctttgtttttcttaatgccattctacatgccttcacacttctttaactgcgtcatgagtgaattccgagttagatggtggtctctactttcatacatatagtagtaagcatgcaaccaattttcgcctgaatcatgcaggttggatgggacgagtcaactgctggagagaagcagccaagggtatctctttgggagattgaaccgttgacaacttttccaatgtatccatctccttttgctcttggattaaagcgcccatggcctgcaggcctgccttctttatacggtacaagtgacagttacacacttagcaactcttccagtatacagcattgaacaatggattatattgatactgcttatgtgctaatgtcactagtcttgtttctgattgttttggtaggtggaaggggtgatggcttgacctcttctcttatgtggcttcgagacagggcaaacccgggtttccagtcactgaatttcagcgggcttggtatgagtccctggatgcagcctaggctggataattccttacttggtctccaatctgacatgtaccagaccatagcagcagcagcagcatttcaaagcactacgaagcaagttccaccttcagcaatgcagttccaacagcctcagaacattgctgatagatctgctcttctatcaagtcagattctgcagcaagtacaacctcggtttcagcaaatttaccctcaaaatctcaacgaaaacaaaattcaaggccatacacaacctgagtacctccaagtccaacagcagcttcaacgctgccaatcatttaatgagcagaagcctccgatgcatccacagcaacaacagcaggaaccacagaagcagcaatgcgtccaaacaccacaggatcaacaaatgcaagaacagaagcatctgcacaacttccactccttgccagatgcattatcggccttttctcagctttccccagccactcactccccaccttccgcattgcagacagttccagcattctcgcatcaacaaaacttcccagatacaaacattagctctctctcaccatctactggcccttcaatgcatggcatgttggggagattaccttccgaagcagcttcgagcctcccatgtgtggcaatgaacgcccctgtatcggtatctgacccatggtcatccaagagagttgcagtggagtctgttaacccttgtcgacctcatgtttcaccacatatagaacatttggatatggcgacgtgtaacatgccgcagagctctgcactagcaccattacctggacgagaatgcctagtggatgaagatgggtgctctgatcctcaaaatcacctcttgtttggtgttcacatagactcacattcacttctgatgcaagggggcattccagcccttcagaatgataacagttcaggcactattccatactcaacctccaatttcctgagcccttctgataacgatttccccttgaatcaaccgctacgcagcgctggctgcttagatgagtcggattatcttccatgtgcagagaatgccgaacaggcaaatcaacagtttgcaacctttgtgaaggttagtgatgtgtctatctcgtggaccatttgctcaacaaaaagttgttccattttgaattctttcccatgaagcaactttgctgacaaatgcgtgcctgagccctataggtttacaaatccgggaccgtcggaaggttgctcgacatcactagattcagcagctacgacgagctccgtagcgaggtggggcgtctgtttggcctcgagggccagctggaagaccctttgagatcaggctggcagcttgtatttgttgacagggaggacgatgtccttctggttggcgatgacccatggcagtaagttccaccaacaagcctaacaagttcctcaccgccttccgttttcgctgtccgtctcctgtttctcatacgtttgttgggctcggtgacgtgcagggaattcgtgaacagtgtgtcctgtataaagatactttcaccggaggaggtccagcggatgggcaagccgggcatccagctcctgagctcggctccttcaagaaggctgggcaatggctgcgacagctacgcgagcatgcaggagccgagaggcctggacgctgggatggcgccggtgggttcggtcgagttctgaagacggcggaggggagcccatggccctcggctcgaggattactctccctcctgtatgtttctgcagcacttgctagctctgcgacttggaacaaagcacgtagatcaaatggagctctgtgctgctccccgtctgatgatgtcttatggtatagactcgtagcagtaactactacatgttgtatacatgccgggcacttcagttcttatcgagtagcaataccgctagtttagtccatccaatcaactacgttcttgttcctatgatcctgttgttgcgatgcagtaaaactttttttttcataataacctgtatattgaaactgttcttggctcccacggtatgctgctgacgacgactgacgaggaaaactggaatttggggggatttcacagaattgaaactactgataattccaacttaccgatgcaattccaattccaacttggtcagaccaacattgccgttgctgtcaatgtcacgataattgctaaagctaccttcagtaaaagcaaaaggcagtttgttatgatcctggaaaagttgagagatagatatatagatatgatctctgagggaattcattcaggtgcacctttatgcttgcataatttggcaccacttggtgcagacaacgacgccatggaccggtcctcttcctctcatagtctcatgtgctccctgggtccctatctgactgaaacccctgagtgcggccctcccctggcgaagaagaaaaggatggcctcccgttccctgaggtcagtggtgcatcggtgagctgaatgcgacgccgctctcgccatcacagttcacggatccactatccctgctccgatccacctcacctggggccgccgccgccgcgccgggccttctgggatcgaccggtttggtggctgcctgctccgcctccgcgcggtggatcgtgacaagattctgagtgggagcacgtggagtgcgacggcaatggcggcgtgacacgcgggcgagcacagctcgcccgttcttgtcgacgctctgcgactctgggcaggtcgtccgtaggagcgaaccccggtagcttctctggtgatctctccatcgctttcatcatatcttcggctgggcccccgggtttggatcccggacgggtattgccatccccgccaatcttggccggcttttcgcggtggggaaggtagaaatctctgttgcctcccaaaaatctgtgccctttttggatgtctatcgacaacagtaacacgagcagagaccgtcagctcacacatatctatcgacgacagctcgagatgcacgaggctttgacttgttgcagccttgcaggtacatcaggtaaagtaccagccgtatctggaaaattgttggtcacctgctggcgatgggtgatcatggtcatggaaccctgagaagagattcaactgagaacacaaggaaaacgacggctctggacacgctcctgtccagctctggaaccgtgcggccgc

SEQ ID NO: 6073 - DNA, 1931 bp, Zea mays
  Clone ID: 700552621_FLI
agaatctttcccagtttctgctgaagtgcttgattctagtttttgcctaccgattggcaaagctaaggtatgttgtgtcttgggtgcatatgggtgtatgggaaggagattactttaggtaggactatttctataagtttaccttgggatggttttgagtggacttcctattgctttcaaaacggttctccatttccttttctggattatacttgataccatgtgcacttcactgtgggcctcatctttctgtagatagaacgtgggggtaaagatgttaccattactgcattctccaagatggttggctatgctctccaggtatgcgatgttgtactttgtaaacaatgtaaaggaggattaattattaattcattaatcgaataagcattaccctataggttggaaaataattagcatatgtgtttcccaatatatgtttacttctgtagggatttggatgtactgcatcaatgcacttttgttagtcgttaaactgatctacaaggttgtccgttcgaaaactgtaattttgatttttgtcctaagagggatatttaggtgacagatggttttagtagtgctcatttcacttgtctgtcttaatttttcatcatagtgggctgttattttggtgcattctcatgctaagtttgcttcaggctgcagagatactgtccaaggaaggaatcagtgctgaggtgatcaaccttcgatcgatcagaccacttgatagagctgctattaatgcatctgtcaggaaaaccaaccgattggtgactgttgaagaagggttccctcaacatgggattggtgccgagatatgcatgtctgttgtagaagaaagctttgagtaccttgatgccccagttgagaggatcgctggagctgatgtacctatgccctatgctgccaaccttgagagaatggctgttccacaggtcgatgacattgtgcgggcagcaaagcgggcctgctacagggcagtaccaatggccgcagctgcctgattggtgtacagacctttctgtttttcttcctcagttttcgctctctggcagcaagaaacatgtagtattcataaagtgccggcaaattggccggaccccagactccaagcgagctagtttttgtaaaaaaaaaattaaaaaaaaaaaaaaaaatataaaatttaaaaaaaaaaataataattaaaaaaaaaatttataattataaaaaaattttttttttttttatatttggggctccccgcccttttgggcttcccctccccccggactttttttccttccgggccttcccggtctttcctttttttcctttttggggtttttttttgctttgggcgtgttcttgtgttttctcgtttcccttttgattttgttttcttttcccctttcctccccccttagctcccgtcggcgttatggtttatcctctggggttcccacttgtggtcctcccctcccttttttgggttggttttccgtcccctttttttgtgggggacccttttttccctctcctcttttttggttcccccccccccccggtggagggctttttgcgtttttgccctcatctcgtttttttttttcccccgttgtgcgccctccccctttttttccctccccccgtggggcttttttttcccttcggtttgcccccccccctttttttcccccctctccgcgctttccttttggtttgtggttttcccgggtttttttttttgcccttttttttttttctatttttctccctttttcttgtttattctgtctctttttttttggcccggccttttgctgttttggcgcccctttggccctcctttctcccttcttttccgcggcggccccccacttctttggtgtggcctcttccccccccttttcaccttttctccgggccttgcttccccccctccc

SEQ ID NO: 6074 - DNA, 1614 bp, Zea mays
  Clone ID: 700552648_FLI
cataattcctacctcactgggaaccagctcaatagtgactccagtgacgtcccaattgtaaaggcgttgcagagaggtgttagagtcattgaactcgatatgtggcccaatccttcaaaggacaatgtcgatattcttcatggagggacattgactgccccagtggaaatgatcaaatgtttgaagtccatcaaagaatacgccttctgtgcctcaaattatcctcttgttattactcttgaggatcacctcacatcagatctccaagctaaagttgctacgatgctcactgaaacatttggagatcttcttttcgtccctaatccagacccgatgaaagagtttccttctccagcatctctaatgaagagaataatcatatcaaccaaacctccacaagaatataaggagtttctcaaagccgagaataatcgcagtggcagcggaaacatagctgagttgccagaccaaggaagcctgagaagaatagattcaaatgccgatgaatctgatgggaaggatgaactggatgagcaagacgaggaagactccgacgaggacgatcccaaatttcagcaggatacagcctgtgagtataggaaactcatcaccatccaagctggcaaaccaaaaggccatttgcgggatgcgctaaaagtggatccagacaaagtcaggcggctttctttgagcgagacacagttagctaaagcgacaatctctcatggtgctgaagtcataaggttcacacagaagaatatactccgtgtgtatccaaagggcacgagggttaattcttcaaactacgatccaatgaacgcctggacccatggtgcgcagatggttgcgttcaacatgcagggccatgataaagcgctccggttgatgcaagggtttttcagagccaatgggggctgtggttatgttaaaaagcctgacttcttgctaagaacaggtccaaatggggaagtatttgaccccaaggctagtttgccagtgaagaaaaccctcaaggtgaaagtttatatgggagacgggtggcgcatggacttcagtaaaactcatttcgatgccttttcgcctccagatttctatactagggtagggatcgcaggtgtgaaggcagacagtgtgatgaagaagacaagggtgattgaggaccagtgggtgccgatgtgggatgaggagttcacgttccttctgacggttccggagctggccctcctgagggtagaggtccaggagtacgacatgtcggagaagcacgacttcggggggcagacagtcttgccggtatgggagctgaagcagggcatccgtgctgtgcccctgcacgatcgcaagggtgtcaggtacaagtccgtcaggctcctcatgcgatttgattttgtgtagccgagccgagccgccattcagattcagcttctgtttttttccttcttgtgtgaattgaatgtattactcccttccttccatcttcaacgtatatgtgtatgtatgtacttatttttgtcggaataaaagttgtatggaatggaatggaaggaaggagtagaactgtcttcaaactccagcttctagatctgtacgggtgattcagttttacttgctggc

SEQ ID NO: 6075 - DNA, 443 bp, Zea mays
  Clone ID: 700552649_FLI
gcagagtcttgtgacttgggctaccccaagacttagcgaagacaaggttagacaatgcgttgactcgaggcttggaggggactaccctcctaaagctgttgcgaagtttgcagctgttgccgcgctgtgtgttcagtacgaagcggacttccggccaaacatgagcattgttgtcaaggcgctacagcccctgctgaatgcgcatgcgcgggcgaccaacccttgagaaaaatgctagctcaaaagcttcgcattgctcctctccgccctcttgtatgatagataagtaagatacgagtcgccgatgtcgttcttgcggacacatggctggcagcgtgtgacatttgtgattatttgtcccctgaattgtaaacaagattcttgtatccccacaacacttgattctttctatcggttgcaagatgacctgccgttttcttctt

SEQ ID NO: 6076 - DNA, 869 bp, Zea mays
  Clone ID: 700552679_FLI
ctggaggagcgaacgcctacagcctgcactgaaattcctggtggtggtcgtgcacccatgaggtgtggcgcaggcaggaatttcagtgcaggctggaggagcgaacgcctacagaactatgcaacagactccaactatggatccactgaggcacacacggatgagcatgaaccaaacagcactggctgctgccggccaaaccaccgctgccgcgtatgtccgaccaacccaagcagacatccaaaaccatctctttcctgtgcagcaaagccaggcaccacgatcgcaacaagtgccacgaacaacaaccccgcctctacagcgggcgccaccgcacctgcaacctcccagtgtaccaccgactgttccaagcacacctcaggctggaccttcgcatggtcttccaccggagctccctgtggatgatagctggcgccccacgggacagatgagagggagtctgacaggcaatgcttacagttctgcaattaggcactatcggggccattctgagcagcagcagggcgagcctcggcctcccaacacttcaggtgcgcgaaggcctcagtaactgccagacattgcggcgttgccctgattatcaagcagggcttgggcagctaatttaccaagagattttaatttattatcatagctaatttggcgctatgatgatctatgttagtgtaggtaggggagcctagtgagtagtgatagtgctctgcttgtctacaacgcactctgatgttaaattagtagtatcaggtgaaccatttgtgtacccaatatggaacgtggattttttatgctaatgttttgcctgtgtaattggaccgattttcatgtgaaattcctgaacgattcccatg

SEQ ID NO: 6077 - DNA, 614 bp, Zea mays
  Clone ID: 700552686_FLI
atctcacgatccactcgagcaccaagccgagggaaggtgaggagcgatggcgcgcggcgtggtgtcggcgaagggcggcgcggtcgcgggcaagaagaaggggtcggtttccttcacgatcgactgcaccaagccagtggaggacaagatcatggaggtcgcctcgctcgagaagttcctgcaggagcgcatcaaggtcgccggcggcaaggctggcaacctcggcgactccgtcaccatctctcgcgagaagaccaaggtcaccgtcacctctgacggacccttctccaagaggtacctgaagtacttgaccaagaagtacttgaagaagcacaacgtgcgggattggctacgcgtggttgctgccaacaaggaccgaaacgtctatgagctccgctacttcaacattgctgagaacgagggcgaggaagaagattagattgcactacgcttatattttagtattgaactcgttgcattttgatacctgtacccgtagtttcgcaaatgtcccatgttatggtgtggtatggttaatttgaagaatccttatgtactgaatctctgcaaaaagctatgttgtggacagaagtgtaacgtgccggatttcttgc

SEQ ID NO: 6078 - DNA, 1806 bp, Zea mays
  Clone ID: 700552739_FLI
aaggaatctcggatagcaatatcaaggaaatacctcagtcagctggtgctcaagtctccaatatcactggttttgggaggagtttggataatagtctgccggaggcatcatgtagagaggaccttactgtaaatgatactgttgtaggtagaggagaccatcaactgtgttctggtgaacaaaaggactttaatatggaggttcgtttaccactacctgatcagcattgttttggcaggattaacactgagtctggttctgttcgacatgaaagtaagaacattgaagttcgccaaggtagtggaactgctcagcggctgggcatgttatttaaaaaagaaaaatctcaccttagaatccttaatcgagatattcagaaccatgttaatcaagttgtcaattttcctttgaaaggaggtaaacaaaaggtctgccctacttcagtaaaatctgaatcgttgaaaatgaaagcaaagttagtgaggttcaatgttgaaactggagtgcaacatggcagtgttaagcaagtgacatcaagcactttggacacaagtccaatgaggaaggatggtagtatgattacatttgctctcaaggaagctagagatctaaagcataaagcaaatgatttgaagaataaaggacaagaacttgaaagtacaggtctgtacttcgaggcggctttgaagtttctgcatgttgcgtttcttctagaaactcctagttttgacatttcaagacaaggtggtggaggtcggtcaatgaagatgtactctgaaactgcaaaattatgcaatttttgtgcttatgaatatgaacggtgcaaaaaaatggcttctgctgctttagcgtacaagtgtgtagaagttgcttacctcaaggctgcatactacaaacaccgtactgctacaaaagatcaacaggaacttcaggcagctgtacagataacccgaggtgaaccaccatcgccttctgccctagatattgataatttaaatagccatggatcatcaaatgcctcctcattaaagggtgacaattcacctcatgtgccaggcaatcatttgcctctagctattcacaaccaagcccagctgttgagattacttgcctatacaaatgatatgaacttggcattcgatgcaactcgaaaagcagaatctgtgattgcatctgctactgggtgtccggaaagaggtgttgttggtgatggccttgcttcggtaaaagcagtcttggatcttaacttcaacaatgtgaatgaactactaaggcttgttcgggtttcaatggaatcaataagcagctgatgatgtgttcaaaaatcggaattgcacagaatgtcacacagtgaactgctgatattggattaacatgcaatctgtgctccgtgatgctggttgcagctatgtcagtatatttttacagtgcaaaacaaattaacttgaaatcaagcattccctttcctaaattggaaattatgtgaaccaaggttctggaattcgggagcggtactgctgcatcttgtggtagtgtaaccatgcattgatgtgtgtttgtttcaatgggtcagaggagatcgattgcgattacctgcactacctgtcatgtacgggcgctcgtacgccaggcagcgtcgcgcccgtgacaggcgccgcgcacaggagcgcgatctgggagatcagcaggaacctatggaaagcagtggccaggaaggaaattagaagaatggaaagttgagggaaggaaaggagagattgattagtgattgattaagtgattgattagtgattgattagtgttacc

SEQ ID NO: 6079 - DNA, 927 bp, Zea mays
  Clone ID: 700552758_FLI
gacagctgctgctcgccctctccctgtctcctctctatttcccagccacggtttccccttcccccgtccgcacgttagggcacgaggcaaatctgtggccctctcctagtctcccgaagtccgactcagccgtctcccatctcccgctcgctcgaactcgggttggggaggcacggagtcactgaccccttcgcgtttggcggtgcccctgcaccggctcttcgtctaaggtgtagtcaagctgccggccacgcccggcacccccctatccagtacaaggccttctccgagatccagtacaaggtcgtctccaagatccagtacaaggtcgtctcctccaagatctgaccccgacgctagtgagaagggaagagagggtggacgaagtgggggaggatgagcgaggagaggccggtgccgcggcgggagagcccatggggtcttcctgagggcgacacacggcagcccaaggctcaccgctgcaacgaccgcgccgaggacgtcgtccaggcttgctttgaagggaacccattcaagacagttccaggcccatttaagctcttctggcaatgcatgcgctcaaaacctggggaggaaccaaccgagccctatacctacctgcagctagatcctccgagaagggtggaagtgaatctggagcaaacaggaagtgaaccttgaacgagcatgcctagtttaccatctcgtgccgatgtgtcttcacctttcgagcagactttttcctcctagggatcacatcatgtgagcacaaagctgcatatgtttggatgtttatataatctacctaataaaccatgatccgcagagctgcctgtccaggctgccaactccttgaaatttgctgatgctggtgtaagaattgtgcccctttcttctgataaatggtgcacgtccaagtccacatgc

SEQ ID NO: 6080 - DNA, 881 bp, Zea mays
  Clone ID: 700552762_FLI
ctgttccaaagactcaaaggttaaagtttgggacacagtggctccttcgagtggttcatcatcatgtgtaggcagtgctcacctcaactcaaacggtccaccaattgctatgaaatgccatgaatccctttgctatatcgctgctggagctgaagtgacagcgattgacttgaggacaatgaagaaggcttctgtccttgcactccagaaccacagaatactttcttgtgagatgatgccttctgaatggttaatatgtactggcacgaaagacagggctcttctgtgggacatccgcaaggctcaggaactcccaaacacagtggcggagatgcaatcgaacggcccggtgacattgcttcacttggaccaatacaaggtggtgaccggagtgccgtcggacggccaggtccacgtctgggaaacacggacgggggactcgctgaacacgttgggctgtggcgaaccttcgagactgggcgtgccgagcagggtgtcggccatggccgtggacgggtgcaggatcgccatggcgggcagctctccggaaggctgcatgctgcactaccgtgacttcgcgacggcttctgcccctgtagtgtccttgccaggcaaggagaaggaggtctccaggttctggaggccccaggaattcgacgacagcgaggaagaggagtattgattaatcattacatccccagttccaaattataagtcactttgacttttttttacgtaaattttgccatgcatagtaaaattgatgtaccaaaaaaagagtcaaagctacatagtttggaactgaattagtattacgctatctcggtgagcttccagttctgctacatgcagacaagagaaaagcttgtatatataaaaag

SEQ ID NO: 6081 - DNA, 1281 bp, Zea mays
  Clone ID: 700552771_FLI
ggaaggagtccgtcaggtcgagatcgaaaccgactccgcttccgccttcccgccgttggggttcatcagcagttcgcagggtaaagaaagggcggccgcgatgtgggtggaaatcctgtgcggcctggtggtctacaagatcatccaacgcgtcttcttcgccggcggcgacgacgcttcctacctcgccgacctcgactcctcccactccgatctctgcttcgccgtcgcctccaggctcgagaagctctacgccggtcgatgcttcgtcggtctccgcatccccgaccccgacgccggcgagcgccagcatatcgacgttgtcctcgttaccaagagggaggtgatggtggtagcgatcaagaacttatctggttttgttgaggctgacaaggatggaaattggtcttgtcccactgacaagaagcataagcatgagatatttccaaacccggtattagaagtcaacagactagctgctaatcttcaatcatacttggagcaaaggggagcaaaactgcctgatgggcatatcatcgggagagttgttctgccaaatcccaactgcaggccttcctatactataagcacccaaccagaggtcatgttgtatgatcaatggaaggatctcaagacagactcaaagactggactctcagcatggattaaaggtgcatttactggaagcagaagtgacatgcaagattctgtactccagaatctacattttattctcagctcatcgcctatgtgggacaggttggaactcaaaggagacaaaaatgttcttggtgaattcattgaattcaaaggcaggcatgaggacgttcaacttctcaaaattctcaagaggtcaaaagtcagtcgcttcatcatccagaagtcaactcttttcggtggttttggtaggtcacgagttcaaatattgtattctcctcgtgactatcgagctgaggggacttcatcttcagagctgaaagagatttctgtgaagcaatacacggagatcgttttccagccgctgcgttccaaaaaggctcggaagttcaagctgtccaatgttgtttctgtcacactgagtgcctagcaagcagaagcttgcctttcaaatttaggctagccaagtagccatatctcttgtattttatatttgtcgtccgtgtgtgtaactcatcagttgtgtgcttctctgtttgcacttgtaattatgtgtctgttcttgatgatgagggaagtaacttacaacgacggctaactgaatatgcttcgtactgttgcttg

SEQ ID NO: 6082 - DNA, 1419 bp, Zea mays
  Clone ID: 700552831_FLI
atctggacatcaatggggagcttcttatgctcagcaggctgcatatcctgcatatggaacttatgactacagccatcaaatgccacagcctgctcctcaaacagctgcctatggtgcttatcctccaacatactctgttcaggcctatacaggaaggaaggtggccattgttggcagtggaccatctggtttggctgctgcagatcaactaaataaaatgggccacttcgtaactgtgttcgaacgtgcagatcgaattggaggtttaatgatgtatggtgtgccaaacatgaagacagacaagattggcgttgtccagcgccgtgttaatttaatggctgaagagggtgtcacatttgtggtgaatgccaatgttggtagtgatcctttgtactcgattgaacgtctacgttctgaaaatgatgcggttattttggcttgtggagcaacaaaaccgagagatctcaccatccctggacgcgagctatctggagttcattttgcaatggaatttctccatgcaaatacgaaaagtttactcgacagcaacctggaggatggtaaatatatctccgcccgtgggaaaaaggtggtggttattggtggaggtgatacaggcacagattgcattggcacatctattaggcatggttgcaccagccttgtaaatcttgaactcctgtcaaaaccaccaagcactagagctgctgacaacccatggccccagtggccaagaattttccgtgttgactatgggcatcaagaagctgctaccaagtttgggaaggatccaagaacttacgaagtcttgacaaagcgttttattggcgatggaaatggcaaggtgaaggcccttgaggtagtgcgtgtgaagtgggagaaagtagatggaagatttcaactcaaggagatggaaggatcagaagagattattgaggctgatctcgtcctcctagctatgggattcttgggtcctgaagcgacaatagctgagaaattgggtttggagaaggacaacagatcaaacttcaaagcgcagtttggagacttcgctaccagtgtcgatggtgtgtttgccgccggggactgcagacgtggacaatcactggtggtttgggccatcacggagggacggcaggctgctgcagcggtagacaagtacttgtcaaggtatgatcagaatgctgctgctacaggcgacagcactccctccgggacagggctcgttcagccggttgcggcatagtagcataaactggagcaagttttacgtttgtcagtgtatcctgtgggttccacacagcaaacaccgttcttgtagttgtctaaaagaaacagagaaatccgggctcattaaggaatgaaagcccttctatattttttttgacgatagataaacagttgaaagttttggtggct

SEQ ID NO: 6083 - DNA, 1268 bp, Zea mays
  Clone ID: 700552840_FLI
ccattcctgtgttcactggaaggacatggtcgcccggagctacgtcagtcacaccctctccaacactctctatgatacctccaggcgaccatgtccttcctgtgttcactggggagtgcaaggagtgtgcccactgcaagtcggcagagagcaacatgtgtgatctgctcaggatcaacaccgaccgcggtgtgatgattgccgatggcaagtcgcggttttcaatcaatgggaagcctatctaccactttgttgggacttccaccttcagcgagtacaccgtcatgcatgtgggttgtgttgcaaagatcaaccctcaggctccccttgataaagtttgcgtccttagctgtggtatttctaccggtcttggtgcatcaattaatgttgcaaaacctccgaagggttcgacagtggctgttttcggtttaggagccgttggtcttgccgctgcagaaggtgcaaggattgctggagcgtcaaggatcattggtgtcgacctgaaccccagcagattcgaagaagctaggaagttcggttgcactgaatttgtgaacccaaaagaccacaacaagccagtgcaggaggtacttgctgagatgaccaacggaggggtcgaccgcagtgtggaatgcactggcaacattaatgctatgatccaagctttcgaatgtgttcatgatggctggggtgttgctgtgctggtgggtgtgccacataaggacgctgagttcaagacccacccgatgaacttcctgaacgaaaggaccctgaaggggaccttctttggcaactataagccacgcactgatctgccaaatgtggtggagctgtacatgaaaaaggagctggaggtggagaagttcatcacgcacagcgtcccgttcgccgagatcaacaaggcgttcgacctgatggccaagggggagggcatccgctgcatcatccgcatggagaactagatttcgctgtctagtttgtgatctggcctgggcttggggttaataaaagaggcaatgctagcctgccctttcgatgaggaggtacatacacgctggcgatggaccgcgcttgtgtgtcgcgttcagtttggcttttgccaagcagtagggtagcttcccgtgtcggtaattatatggtatgaaccatcaccttttggctctacatggtatgaacgtaagatacaaattccaactacctctagctcgcttgtgtggtatctgtatcagtattcatgtgtttgtttgcttatgtgtttgtttgcttgt

SEQ ID NO: 6084 - DNA, 1624 bp, Zea mays
  Clone ID: 700552841_FLI
ggaattgctgatagcttctcggaatctggagtttttcaccaatggttatcgatatttgattcagattctgccagctgcagttgttgctccaatgtacttctcagggaaaattgagtttggagtaataaaccaatcggtgtctgctttcaatcatattcttagtgatttctctctcattgttttccaatttcagtcaattagtgcattctcagcagttatcgatcgtctaggtgagtttgatgatctattggatggaaacgagtcctctctatcatctcaacgtgatagcattgatgggatcaacattgttttcaaaagcagcggtccttgtgttcctagttctaatggatcgctaacacagtctgatccatgcatggttctggaaattcataacttgacattgttaacaccaagaagtggaaatgttcttattactggcctcactatggaactaaaagacaaggaccacctactggtgatgggacctagtggaagtgggaagacgtcgctgttacgtgctttggccggcctctggactagtggaactggggagatcatataccacgtgagaggttctacgcagcttcaaaaaccaaatccaagttctgataaaccatccagcatgaatttaaagggcgaagaagaatcgttgcaaagttccaagcaaagaagagataatggcatattcttcgtcccacaaaggccgtatatggttctggggacacttcgtcaacagttgctctatcctacgtggactgaagaggttcaacactcaccagataatgatgataaaaactcagcagatcctcttccttttctgtccgaagtctccacatcagatctggtcggtgccaaatccgaggtgccctcgacagctgaactgatcgaagtccttgaggacgtcaagctgggttacatattgcctcgtttcaacggcttggactctacccatgactgggccagtgttctttcgctgggggagcagcagcgtctcgcgttcgcccggctattacttgctacacccactttggtcctgctggacgagtcgacaagcgcactcgatgaagcaaacgaggctcatctatacagtcagattgaagctgccggcattacctacgtaagcatcggccaccggaaaacacttcacaagttccacaacaaggcgctgtacatttccatgtctgattcgacggacaccaatccacgcaactgggagctaaagcccgcggacaagcttccagctgaggagccatcgcagttcccttcatgataatctcagcatttgtacccctggttgctgcttcctcatttttcgtccgttatttggcccccaatcagaagtatggctcaactgtaatgtaccgccatagtgctgcaagctgaagttggactgtttcaggatgatcgtcaaggttgctgccatgcatgctacgacgacccgggccgccggacatgatagctctcatgtgcactcagaccttagagaacagaacagtatagaatgtacataactcggatgcaagtacttatggtcttggtgttggtaatcgttgatctgtactacgctcttaatgctctgattcttttgttggatgatgaagtgctaggaatttcagttctgact

SEQ ID NO: 6085 - DNA, 685 bp, Zea mays
  Clone ID: 700552868_FLI
gttctgacaaagaaaatttatttgaccaatcacatgtgtgcggattcaaggagcaagcaacagcgcgagacggccggagctcaggacgccgagcagcagaggcacggatccgctggagacacagagcagcagaggcagcggagtcgctgggccgcggatccgtccgcccggagctcaggccgcggagcagcagaggcacggagcagctggagatcgaccggatccgtccgcccggtaggccgccgcgccggtgaagatccacccgcctggagaagaccggcacgcctgcctgctccagctcgaggagcgctggagatccacccgcctggagaagacgctgccgcgtctgcctgcctggacaaaaccggcaggccgccgtgctttcgaagaatcagaccgcggcgccagtgaagaagcaagccgcgacgtcgaggatataccagggcaccaggcagcggagatccgtccacaaccggtaggccgcgcgccgaagatctgccaggcgccggagatccgttcgtccgtggacccgtccgctcggtaggccgccgtaggcctccgcgtcgtcgaagaagcaggccgccgcgccggtgaagaagcaggctgccgcgccgccgaggatgtgccaggcgaaggagagagggagagttggagtcgggatcggagaagaagaggctgcgcaagc

SEQ ID NO: 6086 - DNA, 744 bp, Zea mays
  Clone ID: 700552877_FLI
ggagaaaaacccgagagcggctggtttgctccacgctggtctggcgcaccggacactgtccggtgcacaccggacagtccggtgccccagcccgaaacagcctttggctgcacacagccactctccacttcctttctattcttcttctttctgtttcttacacttagataaatatattagtacacaaaaccaatgtactaagacttagaaacatacctttgttgtagatttgcactttgttcatccatgggcattgattcacattgaagcacttgtgttgacactcaatcaccaaaatacttagaaatggcccaagggcacatttccctttcagatacctcactcgtcaccttcgcacgaggcaactcacacttggttaagcggctcagttagccgacaggcgagtcctagtgctcgaaatgaggaaaaaacatggtattacaccaaaaatacctagatgttcaagctccgccttgagcggatgaacaagaagcacctcggtgcccgccagaagaaggcagctgaggcagagaaggaagacaagaagtgaagcagccaaactttgtagcctgttttgttctgttcagtcatagcgagatgctacttccatcaagtgcttgttccaagttttttttgggtgctggaaatagagaccagtcaaatattttggtgtcctactgtttgataccttgtatttgtttgcgaactcagctatctaatgggttaatgaattcttggcgacgc

SEQ ID NO: 6087 - DNA, 863 bp, Zea mays
  Clone ID: 700552895_FLI
caggagtggtgcaaaggaagttctagatgaaagacgccgattaaacatggcatttgatgtggccaaaggaatgaattaccttcatcgacgcagccctcctattgttcatcgtgatctgaagtctccaaatcttctagttgacaagaagtatactgtcaaagtatgtgactttggcctttcaagactgaaagctaacactttcctgtcttccaagtctttggctggaactcctgaatggatggcacctgaagtgcttcgagatgaaccatccaatgagaaatctgatgtctatagcttcggtgttatcctatgggaactaatgacactgcaacaaccatggtgtaacctgaatcctgcccaggtggttgctgctgtaggtttcaaaggaagaaggcttgaaatcccaaaagatctgaatcctctagtagccgtattaattgaatcttgctgggccaatgaaccatggcgaagaccctcgtttgcaaatattatggacactttgaaaccattaataaataaggttccggcacagttgatccgttcagattcgtagcctgttctatacgggtacgggaagatgtattttactgagtggtcctgataacatcaacatgagtgtcctaatactgatctgctataattgaataatccttggatggtattactcattatgataatacaattctcataatctttcaaatgaagtgtgcctggcaatttctttccatggcttaaggtatgctgccattttcagagggctctgttcccatcaacattttcaagtatttatggattgttgaatgtgaagtttacttaaatatttgcaaggatgtttaagttcacttcaatacaaaatcaaacac

SEQ ID NO: 6088 - DNA, 426 bp, Zea mays
  Clone ID: 700553088_FLI
cgggaagccagagtaaagcgtagaagaattggtgaaatcatggattcatctgcaatagactcacctggcaaaaacaaggacaccatattgccaggaaacaataccccacctagttctcatcaaatatcagttgaagatacatggcaggaactagagcgaagcaatcttcatgccacacaaaaaggtctacacgttcaactcaagccagagatttcgaagttatataagttgctgcaactgccggtactgctacacatatttaactctattgccccctccatgacttcatgttctctttttattttttaatcctgtgtaaaatcatttattaaattctcataaggtataagatagaatttggcactcttaggcttttgatggttaatatatctcagcttggagcctcgaaccatgtgtgaaatgtgt

SEQ ID NO: 6089 - DNA, 842 bp, Zea mays
  Clone ID: 700553089_FLI
atgcaaaggagttgcacactgccatagccatggtgtccttcaccgggatttaaagccacaaaacctgctggtggacaaggagaagggtatactgaagattgctgatctgggactcggtagggctttcactgtgcccatgaaaagctacacccatgagattgtgaccctttggtacagagctcctgaagttttgcttggagcaacacattactcaactggcgttgatatgtggtctgttggatgcatctttgctgaaatggcccgacggcaggctctctttcctggtgactcggagttgcaacagttgcttcacatcttcaggttgctgggaacacctactgaggaacagtggcctggagtgagtgatttaagggactggcatgagtttccacagtggaagccccagggtttggcacgtgtcgtcccaacactggaacctgaaggagttgaccttctatcgaaaatgcttcagcttgatccttcaaacaggatatcagctttagctgcgatggagcatccctactttaacagccttgacaagtcccagttctagccgttgtactatgtggttcagaaggcgctaccctcgtacagagagatttccaatggtgttatgaatctcaattgccatctaggcaactggttcatgattttaccaatctgttagtgagtgaaaatcgtgcgagggtcatatgtgttccccttgtcttaaaaatctggtgtggtgtagaacaagagttacctgtgggaggcctgtgataatgccctttatgtctcaacatccattttcgtgcattccatgttcttcaatacggacttgaaacaggaattctgattttctt

SEQ ID NO: 6090 - DNA, 1113 bp, Zea mays
  Clone ID: 700553122_FLI
aagaaagtcatacacatacacacacgcatccgcagcactccctcctcggtccctcctctgcttcacacagaccagtgcgcgctcaattcccccctctagcgcctccaccgcaccaaaccggtccaacgggacctatgctctagcctcagagcaaaccaccgcctgaattgtgcggcaattgggggaggattcgcggcaggcagggcgcggatccgttggcgggatgattgcggctgtcaacagagtgccggcgggctggggcgaggatgagatgtccgtgctgccacggcacaccaaggtggtggtcaccggcaacaaccgcaccaagtcggtgctcgtgggattgcacggggtcgtgaagaaggccgtcggcctcgggggatggcattggctggtccttactaatggaatagaggtaaagctgcagcggaatgctttaagtgtgatagaacctccgactggcaacgaggatgatgataaatttgattgtgaaaacatgcagtggaatagttcagatatggcctccatgatgcactatcaccaaagccacagcggtcacggagcaggcagcataggggtttccacagaaaatccatcagccgttcaatgtcatgtgactcccactccaagacgtctgtttcatcttcctcaagagctcacacgaaagttgacctaagcaagctagaactgactgcactgctgagatattggcgtcacttcaatctcgatgcatgtcctaatccatccagagagcagttagttgatgctgttcaaaggcacttcacagcccagcaattggatgagttgcaggtcattgtcggctttgtgcaagctgcaaagaggctaaagacgactatgaaagtggcctgactgtgaagcctgaacttcaactaacagattcaagagaggatgtagcatgtttgatgaatgttgccgtgctatgtaatatatatgcatgaagttctttagattcaggtggctaggttaatggacaactagactatgttagcctcatctgatgtagatatgcagtatcctgtctaaagatgtttcaacctctagctcagttctttcctgctgactggatgtggattgaaatgacaagtttaaaac

SEQ ID NO: 6091 - DNA, 571 bp, Zea mays
  Clone ID: 700553143_FLI
acaaatcctcttcctcgagttctcctcaaccaaattcaaggtcacagcggcgaacctctcggctatcatgtctggccgcggcaagggcgggaagggtctgggcaagggcggcgccaagcgccaccgcaaggtgctgcgcgacaacatccagggcatcaccaagccggcgattcgcaggttggcgaggaggggcggcgtcaagcgcatctccgggctcatctacgaggagacccgcggcgtgctcaagatcttcctcgagaacgtcatccgcgacgccgtcacctacaccgagcacgcccgccgcaagactgtcaccgccatggacgttgtctacgcgctcaagcgtcagggccgcaccctctacggtttcggcggctaggtcgccctctctcccggtggcgaattacgtggtggcgatggcggtcgtgttgtgttcttggtctagtgttgtctgtgttgtctttatcggtgctgttttctgtggtggttgtgctgcatcgttctagtttctagttcatgtgctgtaatatctcgctgctgtaatcaatggaatggcctcgtttccaggctc

SEQ ID NO: 6092 - DNA, 462 bp, Zea mays
  Clone ID: 700553155_FLI
gcgagacggagacagagagagagatggtgacgacggactgggggccgatcatcgtggcggtggtgctgttcatcctgctgtcgccggggttcctgttccagctgccggcgagggtcagggttgtggagttcggcaacatgggcaccagcgccctcgccatcctcgtccacgccatcctctacttctgcatactcaccatcgtggtggtagccatcggcgtgcatgtgtacacaaccaaaccggatccggtggagtagattgaaatttgcgtgtgtgtttttcagttctgctgctcttgtctattttttcagtactcaatataagtggatgcaggagtatctattttgtaatatatacgcagataacacgattatcgtctttattgatcatgatattgagcaagcgaagaacatatagagctacttctatgtacaattatccagtctaaagataaatttttat

SEQ ID NO: 6093 - DNA, 2285 bp, Zea mays
  Clone ID: 700553159_FLI
gctccgcagatattcaaaagcacgctctggtaatagtgttacatcgcaaaatgatgttaaccaagcatataagccaccaaatatcgaaatgtatgaaaaacgtgtccaagaactgacaaaaacagccgaggattctcagaagaaagcagatcagttgcgagaagatttacagttgaagacaaaacaagaaacagagatgcaagaagagttggaagggctaagagataccttgcaatctgaacgacaaagttccaaagacataaaaaatgagcttgataagctaaaatctctatgtgatgagaaagaatctgctttgcaggcttccctgatggaaaaaagtagacttgaaaccagattgactagtggccagggccgtgagagagatacattgacaactgtaggcagcgtcaataatgacattgagatgcttgccaagcttaaggaggagttgaaatcataccaaaaagagtttgatgcatcaaaagagatctcaaagaagctaatgtcggaaaagaatattcttgaccagaaagttcaaaggcttgaaagaatgaaaaatgaagagaaaagcgcaatggaaaaggtttatgcggatgaatgctgtaaactgaaatctcagattgctgaattggagcagaaattggaagttgctacacgatccttaaatgtggctgaatcaaatcttgctgtaagaaatgctgatgttgatagcttgcaaaatagtctgaaagaacttgatgagctaagagagttcaaagcggatgttgacagaaagaatcaacaaactgttgagattcttaaaaggcaaggagcacaattggtggaacttgagaatctttataagcaagaacaggttctacgaaagcgttactataatacaattgaagatatgaaaggaaaaataagagttttttgtcgcttgcgccctctaagcgacaaggaaatttcttttgaggagaaaaatatagtatgcagtcctgatgaatttacaatttcacatccatggaaagatgaaaagtcaaagcaacatatatatgatcgtgtttttgatgcaaacacaagtcaagaagaagtctttgaggatactaagtatctggtacaatcagctgttgatggatataatgtctgtatatttgcgtatggccaaactggttctggaaagactttcactatttatggttcagaaatcaatcctggtcttactccaagggccacatctgaactttttagggtgataaagcgcgatggaaacaaatattcattttctttgaaggcatatatggtggagctttatcaagataatcttgtggacctgttattgcccagaaatgcaaagcagctgaagttagagataaaaaaagattccaagggtgttgttaccgttgaaaatgtaacagttgtgagcatttcaagtattgaggaactgagggctataatctcaagaggttctgagaggaggcacactgctggaacgaatatgaatgatgagagttcaaggtctcatttaattctttcaatcattattgaaagtacaaatctccaaactcaatcatatgcaagaggcaagctaagttttgtggaccttgctggttctgagagggtgaaaaaatctggttcagcaggaaagcaattgaaagaagcgcaaagtataaataaatctctttctgctttggctgatgttattggtgctttatcttctgatggacaacatataccttatcggaaccataagttaacaatgcttatgagtgattctctcggaggcaatgcgaagaccttgatgtttgtgaatgtttcaccagctgagtctaacttggaggagacttacaactcgctaatgtatgcttcacgggttcgttgcattgttaatgatacgagcaagcatgttgccccaaaagaaatcatgaggttgaagaagttgatcgcctactggaaggagcaagcaggcaagcggagtgatgaggacgaactagaggagatacaggaagagaggatctcaaaagagagagcagacaatcgcatgactagctgacgatgctcctggtttcattcttccattacctggtgaagaggtgattgatgccgatgagcatttgtgactgccacgagttctgcgatcgctctctaacagaatgttcctatatcatctgacggccctgtaagtgtacactaattgtatagtagctacgtattatttctactaatggcggcgatgcccagcctgtttgtacaaagaggaatgtagcacatacattgatagaaggggaaaaagttgattatcgctt

SEQ ID NO: 6094 - DNA, 1074 bp, Zea mays
  Clone ID: 700553162_FLI
cataggttctccgcgacgcggccacctccgccaccgccagcgccacctgctagggtcaacacccgctctctgcggactgcgtgagcgtgaagcaccagcggcggccaccgggcaggacgagccccctccccaaacagagagggccggggatcagtgcgtgcgctcctggtggagggcgtggaagagcttggcaggcggcaagcaggggtttgggaggatggtttcgctctcgacttggttccgctatgccgcacaaaagttcgagtactgcgtttccctctcgttgaagaaatataatgatgtgggccggatcagcagcacgcagctaactgatgtgttgaacaaaaatttattccaaggcaagctcacctacgtgtgtccgaccaaaggggaagaagccatggctcccatcgcatctccaactggaggagccgtccttgtcagaaaactcgcaaatttgagccccacgcaagtgtttgtcggggacgttgtgttgttaaaagacccagagaaatctgatgatttaattattcgacgactggctgccctggaaggctatgagatggtctctaatgatgagaaggatgagccgtttgtgcttgagaaagaccaatgctgggtcctggcagacaacctagcccttaagccaaaggaagctagagatagccgcttgtttggacctgtcccaatgactgacatccttggcagagttatttactctttaagaaccgctgttgatcacggtctagtcgagaacagcggcatggccatgaaacaggatggtccagtactggcagttgagcttgatgtggaagagatggcgaagaacattaagccctagacagttgatgttttggacatgctgcgctgtaactcaccgtcacaatggatctttttttttttgtttatgatctgttgcttcaagtagaactgcattggaatgttttttcacggtttgcctttggagcagtcaataatggtcttgacagataatccagaggccgctggaccgtgttcactcagaatggctgtttttagggtttttcttattcatgaagttgctgtgaatcttgt

SEQ ID NO: 6095 - DNA, 974 bp, Zea mays
  Clone ID: 700553168_FLI
cgtggactccgcggaagggatcgcctacctgcaccacagcgcgacgccgcacatcatccacagagacgtgaaggcgagcaacgtgctcctggacgccgacttccaggcgcgggtcgccgacttcggcttcgccaagctggtcccggacggcgcgacgcacgtcaccaccaaggtgaaaggcacgctggggtacctggcgccggagtacgcgatgctcgggaaggcctccgagagctgcgacgtcttcagcttcggggtcacgctgctggagctggccagcgggaggaggcccgtggagaagctgagccccaccacgagcgcgaagcagaccgtgacggagtgggcgctcccgctggccgcgccaggaggttcggcgagatcgccgaccccaagctccagggccgattcgtcgaggaggagctcaagcgggtggtgctcgtcgggctcgtctgcgcccaggacaggccggagcttcggcccacgatgtctgaggtcgtccagctgctcaagggagagtctgctgagaagctcgacagcctggagaacgactgcctgttcaagcctggtggtggctcgttccagggctcggactgcgtcggcgagggcgaggggaggagccccggagcagatggagggatacaggaggcagttgattcgagcgagacagtttcctcagcaagctagtgtgtggtattggcagtagctggttcctcagcaagacagcagctccctgcctctgggagaaacgtgtgttgatcagtgtattttttgtgtggttaatccttgctattagcgagttaattcgggagtttcattgcccagttctcctatgtgactgtcatctcttcgtgttggcatggttctatcttctatgcttccagatgttcactgcactggtgttagcgtttcgctacttcagtgcatcaatggttttgtgtgcaagtccgtaataatacatttttgaggttttcatc

SEQ ID NO: 6096 - DNA, 1353 bp, Zea mays
  Clone ID: 700553171_FLI
aaaggacaaaaggagggcatttcttaaaatctgcagcaactttaggcctgtgatgcaccacttctttcttgaaagattcttgctgcctgctgattggttccaaagtagacttgcttacacaaggagtgtagcagcaagctcgatggtaggatatatagtcggtcttggggatcgccattccatgaatattctcatcgaccaagacacagctgaggttgtacacattgatcttggtgttgcatttgaacagggtctcatgcttaaaacacctgaacgggttccatttcggttgacaagggatattatagatggcatgggtgttactggtgttgaaggtgtgttcagaagatgttgtgagaaaactctctgtgtcatgagggcgaataaagaagcattgctcactattattgaagtcttcgttcatgatcctctatataaatgggcactctcaccactgaaagccttacagcgtcaaaaggaaacagttgatactgattcatgtttggatgactcccaagaaccttacgatggcaacaaggatgcagctcgagctatacttcgtgttaaacagaagttggatggatatgaagatggcgagatgagaagtgtgcagggccaggtccaacaactcatacaggacgcggtggatgttgatcggttgtgccaaatgtttccaggttggggaccttggttgtaagctccattgaaagggatgtaaattttgatcgaaggcaagagcaacttttttcactgcttatgaggttttattctttggtgtgtttttttccctcaccaccctgtcaacattcctacaaagtacagcaaacggcttttggtaccctgtaaattgatgggaaggcaaggacgacatttgagtgcaggtgggttgtaccactcctgttttagagcatgtccagactagaggatgggtgattgcatagtgaggccacagttttctttttttgttgagcttcattaataccccctctgtctaaaagtcctcatcgtttaagcgtcccgcaccaagaccaaggatgcccctccgcattgcagccgctgtgaagttaattatctggcgccgttttgtattttcaaaacacgcatatgtaatgtcgcaaaaattcagctgcttcgatggttggccggccagaggggcggtatccatacatcacaccatcgtgcagcgtacattcagctgcttcgacggttgcataccgtagtttttgttcaggatttactttgtaaagaagtgaggctgttttgtcatgtatgtaaagggcttgtttcgatgtagcatgaaatacgaagaattatgatgcatttgaatataccgtgctcccctgagcaaaaaac

SEQ ID NO: 6097 - DNA, 1118 bp, Zea mays
  Clone ID: 700553189_FLI
ctcttccccaaccccgcgcgcgggggagcgataaaccctagtcttcgccgtcgtcgcaggaggacccgcgatgtcgcacttcgggaggtcaggcccgccggacatccgcgacaccttctcgctcctcgtcctcaacatcagcttccgcaccacggccgacgacctcttcccgctcttcgagcgctacggcaaggtcgtcgacgtcttcatcccgagggacaggaggaccggggactcgaggggtttcgcgttcgtgcggtacaagtacgccgacgaggcgcagaaggctatagatcggctcgatggccgtgatgtggatgggagaaacatcatggtgcagtttgcaaagtacggccccaatgctgagccaatccgcaaaggaagggttaaagagggggttgagaaatcacaagacagatcaagaagccgcagtccaaggccaaggcacagagatagagatcatagaagccaaagtcgcagcaggagcagagaaaggcatgtccgtgatagagacaggggctatcgtcgtcggagcagaagtagaagccaaagtcttagttcaagccctgacaacagaagtcatcatagagcaagagatgatgataggcgcaagagcatgagtaagagcaggagcaggagcacaagtagaagccgctcatactatagtgcttcacctgcccggcacagtgctagccctcgcaagagcccaccgccacagaggagccccactcctgcaaagcatgccaatggaaaagattcacctctgtcacgctgtgtttctccattaccgaagcgtgcaacctcccgcagcccaggcagtgatggcaaggttagattgatgtctaactgcttgctatgtagtttgttgcccatgcatttgtttatgtagcttactcttgaaggcaattcacgtcaggagtaaagcttgctgatttggtgatgcctagaaaacagccttctcacggagtcacgggattgcagaaccttgagaaggttgattgagcacaatggaagtagcagtctgcaatcaaccgcgatccaaggttgctagttcttttaatggcttatagaattgtgttttccagttgtcaaaaatatgcgctggtttgtatttttgg

SEQ ID NO: 6098 - DNA, 737 bp, Zea mays
  Clone ID: 700553210_FLI
caatgagcttggagcaatggtggatcgcatggaatcggcgaaactgaagactgttaatcttactgataatgatttagcaaaggaccaccttagatactttattggaggtagatcagaaataaaagatgaacttgtttaccggttcatttttccagaaaggcctggtgcccttatgaaatttttggatgcattcagccctcgttggaacatcagtcttttccattaccgtgcacagggtgaaactggagcaaatgtattagttggtatacaagtgccgccagtggacttcgatgaattcaagagtcatgctgataatctcgggtacgagtacatgtcagagaacaacaatgagatatacaggttgctgttgcgtgacccagaggtctagtataataggtgccgatgggttcctttgctcctatagtttggtgtcacttttgaagtataaggttccactccaaggtagaaggtgcaagtttcttcttcagttggaatgcagtcattgccaaatataccttcaatgtgccatctcaccatctgtttactcagttagatcatgtagtgtatcagtcgtgtatttttattgttgtgcttcgtgaactcacttatccgtttgcggcacctagagtgtgtcaaataatgataactaatatgatatctaaatgtctgataatatatatgtatttatgatttgggcagcatcgttgttgtaaagtgtaaacccttgtcccttttgc

SEQ ID NO: 6099 - DNA, 1430 bp, Zea mays
  Clone ID: 700553255_FLI
taatgatacaaaagagggaccaaatttgcaggttgctgggcctggcggcgaaataactgcaggttaccttttgaagaaaagtgcaaaaaataatgaatggagtaaaaggtggtttgttctaaacgagaagagtgggaagcttggatacactaagaagcaagaggagagacattttcgaggtgtcattgtcctggaggaatgtaacctggaagagatagaggaggaagagatatcgaagagttctaaggattcgaagaaggcaaatggacaagagaaaggcccaagtcttgtttttaagattactaacagggtttcctacaaaactgtcttaaaagctcacagtgccgttatattgaaggctgagagtatggctgacaaaattgaatggatcaagaagataaaaggtgttattcaaagcagagggggctctgttaagggtcccactgaagatggtcctatgagacaaagccgttcagatggatcccttgatacaatggctcggaggcctgctgatcctgaagaagaacttcgatggatgtctcaagaagtccgtggttatgttgaagctgttttgaacagtttggctgcaaatgttccaaaggctattgtactttgccaagtggagaaatcaaaagaagatatgctaaacaaactgtacaactcaataagtgcacaaagcaatgcaaagatcgaagagctactccaagaggaccacaatgctaaacgtaggcgggaaaaataccaaaaacaatcatccctcttgtcaaagctcactcgccaactcagcattcatgacaatagagcagcttcatatgggaacgatagttctggagctgagggtagcccccggtctcctggccactctggtgaggattggaagtctgccttcgactcagcaacaaatggctctgttgaccggtccagttcacagcatgagacaaggtcaaaaagtgctgacagtcgaggccggcgccatgaaaacggggatgccaactctggcagccgacgcacacctaaccggttgccaccggcaccaccaaatggggggagatactaagtatgttgattgatcattacctgtgaccaatcatcatcatatgctcttgccaggttctcatcctctactgatactggttattggtggaagaaaacatatgggaccggagaacggaaagcttactggaagatttggatggacggtgtgtatcaagagaaccaaagttgtttatagaaaattagaatcatataggtcattgatgattgtcatttcccgatcgttttggtgtatttgatcttttggatcctcattgccagtgggattttgttgccacggatcagttaattttggttttgtacgcttcttctgtaagtctccccatcaaactggcaaatgtattctttacacacagtcatgtatcgttgttcttccc

SEQ ID NO: 6100 - DNA, 1161 bp, Zea mays
  Clone ID: 700553289_FLI
gaaaaagggaaaaaagtcaggcgtcgggtcctcagtcgtagcggcggcgatggcgcgcggcggcggggggcggtcgaagaaggaggatgaggaggagctgcggggggcgaagcgcggttacaaggaggcgtcggcggagggtaatcgggaggaggaggcgcgctgggctaacgtcatcggcgacatctacaagcgccgctgcgagtacgtcgaggccctccggtggcttcgggcggactacgaggtctccgtaaagcacctcccgcagcggcacctcctcccctcctgtcagtcgctcggcgaggtctacctccgcctcggccgcttctcggaggcgctcacctaccagaagaagcatctacagctcgcaaaggagtctgatgaccttgttgagcagcagcgagctaccacacagcttgggagaacataccatgaaatccttctaagatctgaaaatgaccatagtgccataaggaatgcaaaaaagtactttaaatcttcgatgaagctggcaaggattctaaaggagagatccccttcccaaaagtcggactttctaaaagaacttattgatgcgtacaataatatgggcatgcttgagctggaacttgataattttgaagaagctgagaaactacttatccagggcctgaagatatgcgacgacgaagaggtagattcgtatgatgatgctcgcactaggctccatcataatctcggaaatgtttatactgaactacagaattggaaaaaagccagggggcacattgagaaggacatagagatatgtagaaaaatacgccatcttcaaggtgaggcaaaaggattcataaatctgggggagttacattatcgagttcagaagtatgacaatgcaaaactttgttacaataaagctcttgaagtagcaagatccttggaagatgaggatgctctaattgaacaaattcaccagaatattgaaactgttacgaaagcagttgaagtatttgagcagttgaaggaggatgaactgaagctaaaaaaacttatccgggacacttctaatgctcgtggaacatctaaagagagaaaactcctacttgatcagcatgcatggctggatagtcttattgagaaggccaggatgatatgtgcatggcaaaaacacaaggaattctc

SEQ ID NO: 6101 - DNA, 1270 bp, Zea mays
  Clone ID: 700553303_FLI
gagcaaagaaatccaagtgtgccctggtctggcgcaccggactgtccggtgtgccaccggacagtgtccggtgcactaggaccgtacaactccaaactcttcaccttcgggtttctcaggcgtcgctccgctataattcaccggactgtccggtgtgatagcggagcaacggctcttcggcacaacggtcgactgcacagtgcccctgacagcgctacagttcgcggtagaagtcagagcagaggtcagaggcgcaccgaacaatgaacagtgcttgtccggtgcggcaccggactgtttggtgccaccagaagtcagcgctccaacggtcgactgcgtcagaaccctaacagttgggtgacgtggctggcgcaccagactgtctggtgtgcccatcgatagcagccaccccaacggttgttttggtgtttgagggctataaatacccccccaaatacctccactccaaccatccaagcattcaacgctctccattcaatacaagagcaaagtgcaacactccaagacataaatcaaagccactgatccgatcaaagtccccaattcaattctagtgcattaggacttgtgagaggatcacttgtgtttcttgttgctcttgtttgcttcgcttggctttcttttctttctcacttcttactctcaagtgctttgtaagcgaggcaagagacaccaattgtgtggtgatccttgcggggtctaagtgacccgtgagattaaggaagaagcctcactcggtataggtgaccgtttgagagagggaaagggttgaaagagacccagtctttgtgaccacctcaacagggactaggttctttagatcgaacctcggtaaaaacaaatcaccatgtcatccgctttattttcttggttgatttgttttccctctctctctcccgaactcggattttactctaatgctaaccccggcttatagtgtgtttaaagttgtaaatttcagtttccgcctatccaccccctctagacgactttcaattggtatcaaaacccggtacttcattagagtctaaccactcgaagtgatgtcgggaggatccgccaagagggagatggaaacggccacaagccacgcgaaggctccatcaagggagtccggcaccaaaggaagggaggaatcacctcccagcgttaagtcgcatcagagtggtgacaagaagaaaaagatgtagaaagtggtctactacgagaccgactcttcgtcgccctccacctccggatcagacaccgc

SEQ ID NO: 6102 - DNA, 958 bp, Zea mays
  Clone ID: 700553326_FLI
gacggagctggcgcgcaagctgggcctgcagcctcgccaggtggccgtctggttccagaaccgccgcgcccggtggaagaccaagcagctcgagcgcgacttcgaccgcctcaaggcctccttcgacgctctccgagcggaccacgacgccctcctccaggacaacaaccgcctccgctcacaggttgtgtcgttgaccgagaagctgcaagagaaggaggatgcgacggagggcggcgccaccgctgacaccgccgcgccggcggtggacgtcgaggcttccttggccgacgacgtcgaggagccagcagagcctgcggcgacgttcgaggtgctgcaggaggtgaagtccgaggacaggctgagcaccggcagcggcgggagcgcggtggtggacgcggacgcgctgctgtacggcaggttcgccgcggcagttgatagcagcgtggagtcgtacttccccggcggcgaggaccactaccacgactgcgggacgatgggccccgtgaatcatggcgccggaggaggcatccagtcggacgacgacggcgccggcagcgacgaggggtgcagctactacgccgacgaagccgccgccgccgccgccgcgttcttcgccggacacgccacccaccaccacgcggacgaggacgaggacgccggccagatcagctggtggatgtggaactagacgttcgatcttcccacgccgatcgatcgaccgtcttcgaatcctgtgtcaacaagaagaaaaaagaatcgtgccgtgatttttctttgcgcaacgctgctgtaagcctgtaatggtgaatttctagctatggttatgccgttatgaaggaagaaagtgtatgcatgcatggtagggtaaagagtgggtaattaatatcgttgatcatcccagtcactcgtggtgttccagaagatcaatggagttgggggagaaataagtgcgcat

SEQ ID NO: 6103 - DNA, 1214 bp, Zea mays
  Clone ID: 700553328_FLI
gtggatcctaatgtcaacaagtgggaccaaccttttgtgttgggagttgttgatctgcatgactcattatctcatcctgccggggtttctgatgtccaggctgagtccaccacttgtctagatcctgatctatttacgaactttttggtacgtgagctatatattcctttcattattgctatcttatgctagacttgaaaaaactcaaatgcagttaaaaaagttttatgatgagatatctcttgctttgacaacatgttgcgtctgatgcatctgcattaataaggttactcgattttttgcagtattattgtgtccataacagctggagtaggaacctatattccatatttttgtaatactatgttactaattgatcaatcaattgacattaatttttagtttctgaatgttctcacctaaatatgggtggtaatggggctttggcctctccagattcaataaaatattgtgggtggtaatatattgtgttgtggttctgtaaaagttacatctgatgcattttaaatgactacagtgtgcattttttcttgcaaaatattaaaaatggcagccagctaattctctatgcagattcctagttggtttgaagtagaaggacctaccaaatacaatccatttaccctgcctgaagtttattgggcgtcccaaaggaaaaagcatgcttctctggaagatattcaaaagaatatccgggagctggagatcgatgatatccggaagaaagaattggcatgtgcccttcatgctcaattcaaagattggttatatgcctcagggaatatccgccagctatactgtttgcaaggcgaatgagcataagatggggttcttgtgtaagcgcgagatgcagcagtacgcgtctgcaagtgcaatccaattccgggcgcctccgaaatctgaaagtgacttccaagctgagttggtgtcgcctgccctgatgcacttggtatttcagctgtagcgtttgtggaggcaagtaactgtaacgtttttgtttgttccaattagtttttaccacttttcccattcagttggccgcaaggtttctgtaaatctttcggtactgttggtttcatatttagaaaattcacaaagcggccactcaattctctttttggaaagtaactttatttttttttttttcaaatggtgtttggtttttagggactaatgtttagtcccttcatttt

SEQ ID NO: 6104 - DNA, 1112 bp, Zea mays
  Clone ID: 700553362_FLI
gaacaggacgatggccgagggaaagaggtggcggttcgcgatggtctgctcctcgaacatgaaccggagcatggaggcgcactcgcagctgggccgcgcggggctcgacgtcgagtcctacggcacgggcacccacgtcaagctccccggcccctccctccacgagcccaacgtctacgacttcggcaccccctacggcgccatctacgacgacctccgccgcaaggaccccgaactgtcagtacgagcacctactgtcatcttccctctccccacctaagctacctcctattgcctcctgatgctcctttttctcccaaccccacctttgttgatttgggggagaagatgtactccagtgtttagggttgtggatggagttctggcgaaatttagcgtgcatttgatggaaacagataacaaccattatagtcttctgcaatttgggatcgttgctcgcaatatctctgtctcctggcgaaaaattatttgcacacttgccgaactgggtctgcagggatgcttgtggcgttgctttcccgtttctttgtgtgctcacattgccttgtcgggcaccctgcacgataacttgaaacgctctgctctcgtggatttctgtggcgaaccatccaggtacaagaggaatgggttgctgcctatgctgaagaggaacacctcggtgaagctggcgcctcagcggtggcaggacaatgccggcgacggggtgtttgatatgataatgacctttgaggagagggtctttgacttggttgttgaagatatgaataaccgcgagccgaggttgatgaagtgtgtgctgataataaatatggatgtcaaagataaccatgaagaagctggtgttggggcaaagcttgctgtagagttgtgccagaagcttgaagcaattgatggtgactgggaggacataattgatgacttgattactgcatttgagaagcagcacaagcggagacttgcatacagcatttcattctactaacttgtatagtcccgtttggacagagatgttgcagtggatggttggtaacttggcattgtagtaagcaactgcataggagtgaagcatcatgtcgtggcagtgttgcttg

SEQ ID NO: 6105 - DNA, 634 bp, Zea mays
  Clone ID: 700553369_FLI
cctcagacccgagaagcgcagctgcggccatggacgccaccggcactggagctggagggaaggcgaagaagggagcggccggtcgcaaggccggcgggccgaggaagaagtcggtgacgaggtccgtgaaggccgggctccagttccccgtcggccgcatcgggcgctacctcaagaagggccgctacgcgcagcgcgtcggcagcggtgcccccgtctacctcgcggccgtcctggagtacctcgccgctgaggtcctggagctcgccggcaacgctgccaaggacaacaagaagacgcgcatcgtcccgcgccacgtgctgctggcgatccgcaacgacgaggagctcgggaagctgctgaccggcgtgaccatcgcccacggcggcgtgttgcccaacatcaacccggtcctgctgcccaagaagacggcggagaaggcgtccagcggcgggagcaaggaggccaagtcgcccaagaaggccgccaagccccccaagaaggcatagggtttggaggcggatccgatgttgtcatgtgtaggttgtaagcgggcaatgtgattggctgtgtatctgcttcgctcaagttgctttatgtcattcctaatggaataggaaatgccgtgtttctt

SEQ ID NO: 6106 - DNA, 446 bp, Zea mays
  Clone ID: 700553370_FLI
cctatggataattatggaatactgtggtggtggaagtgttgctgacttgataggcatcacagaggagcctcttgatgaatcccaaatagcttacatttgtagagaagcactaaaggttctaacaccacatttgtggggcaattaaatgtcttcgaatatttaacttttgtgtgcttattttcttctccagggccttgcttacctgcactccatttttaaagttcacagagatattaaggggggcaacatccttctaactgagcaaggcgaggtgaagttgggtgattttggtgtagctgcccagctgacaagaaccatgtcaaagcgcaacacggtattcttaacagtgtttcttttgctacttcaaattccaaagttcaagaaacttcacatcgatgtgacaaacaaaatgaagtgcagatgaaacttgtcaatgccagtttact

SEQ ID NO: 6107 - DNA, 547 bp, Glycine max
  Clone ID: 700553740_FLI
cactactaccctcttcatagttgagctctttttcattggctgggccgagggtagaagatgggctgacataatcaagccaggctgtgtcaacactgaccccatctttcccaacaacaagctcaccggaaccgatgtgggttaccctggtggcctttggtttgacccccttggttggggaaccggttctcctcagaagatcaaggacttgagaactaaggagatcaagaatggcagactggccatgcttgctgtcatgggtgcatggttccagcacatctacactgccaccggtcctattgacaacctctttgcccaccttgcagatcctggccatgctaccatttttgctgctttcacccctaagtgaaaaggctaagatcaacaatcagattaccagctgtttgggatgagaggagtgtttatatatgtctgtagaaattaagcttgtaatatggctacttctatgtcatatatgcacataatatcataatccaacgtgccgacacctatttaagttttagatgccatgaatgtaagttcaggtaat

SEQ ID NO: 6108 - DNA, 1313 bp, Glycine max
  Clone ID: 700553763_FLI
acactatagcaatagaaacatttgcttttgaaaaacccctcactcttcatcactacactagctagccacatacaatgtcgaccaaatttaaggtgtttcgtgaattcacaagcgatgactcattcctaaaccaagttatccctgaaaacatcaccgaattccaagtgactctgtccctcgctagagactacgatggcaacaactcaaccaacggaaagttcattccttactgggacactgaaaaggtcactcccgaagtgataaaaaaattcaagaaaaaatacgaacccaccgcactgagggttaaggttcttgtcagcattggaaacaaaaacaaacaatttcctttcaccattggctcggactcgaacagcgaagcatgggtctccgaggccactgcttcgctgaagagcatcattaaaacctacaaccttgatggcatcgatgtcagctacgaggacatcgccgccaacgaagccgactttgttaattccgttggggggcttgtgaggaacctgaagcagaacaagctcattactgtggcttccttcgcaacaagcgctgatgccgccaacaacaaattctacaatctcttgtacgcagaatatgctactttctttgacactgtggtgtttctgagctgggtagggtttactccttctcgcgccaacccagttgcgagcttggaggagaagatccttgccgtggccaacgagtataaggccgtgaaggcctttctggtcgcttacagcaccgttgctgaggattgggctaatttttcgccacctatcttctttatcactctccatggccttctgggtaactctgcggttaagggagcgtccattaaggtcattagtgacgccaccgcctcctttcccgccaagtggatccctgaaattttattgttggctgcctctaaatgaatgaggtatgacatgaagggtgaacacgtatctcagaagtgttatgtgatatgtatgatgtgtgaatcttgaaataatatcttaagggcaagaagttattagttaaaattattagaggtagttttatgaatgggtcataataataaatgctagctatatgtaccactatggaataagattgggtcataataataaagctagcttgctagctatatgtactatacgtaactatggaataagacccatactagtgctataggggcttgctatatgtatgtgtttcatctgcaaattaagagctgagacgcttgccatgcaaggcagacaactattatatatattatgttatgtgtttgaaaaaataatgcatgtgtgtgtcttgtgaat

SEQ ID NO: 6109 - DNA, 771 bp, Glycine max
  Clone ID: 700553813_FLI
ttttcctttcgggattggtttctatggcttctgaagtaatagagtaccgatgctttgtcggtgggcttgcttgggccaccgacagcgatgctctcgagaaagccttctctcattatggttatcatcgatcgtgaaactggaagatcgagagggtttggatttgtgaccttcgcctcggagcaggcgatgaaagacgcaatcgaaggaatgaacggtcagaacctcgacggtcgtagtatcacagtgaacgaagcacaatcccgtggaagaggcggtggtggcggtggatacggaggtggtggtggttatggcggcggcggttacagccgcggtggaggaggatatggaggaggaggccgccgtgaaggtggtggaggtggctataaccgcaacggtggaggtggtggatatggtggtggtggaggttatggtggtggtggaggtcatggtggcggtggaggttatggtggcggtgggagagaccgtggatatggtggtgacggcgggtcccgctactcgagaggaggcggtgcttcggatggaggaagctggaggaattaggattaggttttttagtgggtgaaaaaatggggggaggttctgttggagtaatatcatccccttgatattaattgtggtaattttaggtttggaatatgcgttgtggtttgagcatatgttactgttatggttggttggtttccgtgttactcctgtcctgtggttctcgtttttgacctctgataatgaatctgtgttcttgaaggaatg

SEQ ID NO: 6110 - DNA, 1541 bp, Glycine max
  Clone ID: 700553863_FLI
tctcactgttgagcaggctatccaaaacaagaagttgttcatcttagatcaccatgactatctcattccatatttgaggaaaataaatgcaaataccacaaagacttatgctacaagaaccatatttttcttgaaaaatgatggaactttgacgccattggccattgagttaagtaagccacatcctcagggtgaagcatatggtcctgttagtgaagtctacgtgccttcgagtgaaggagttgaagcttacatttggttactggcaaaggcttacgttgttgtgaatgatgcttgctaccatcaaatcattagccattggctaaacactcatgcggttgtggagccattcgtcatagcgacaaacaggcatctgagcgtggttcaccctatttacaaacttctgtttcctcactatcgtgacaccatgaacattaattcacttgcccgcaaatccttggtcaatgccgacggtattatagagaaaacattcttgtggggtaggtactctttggaaatgtctgctgttatttacaaggattgggttttcaccgatcaagcattgcctaatgatcttgtcaagagaggagttgctgttaaggatccatctgctccccatggagttcgacttttgatcgaggactatccttatgcttctgatgggctagagatatgggatgctatcaagtcttgggtggaagaatatgtctcattctactacaagtcagatgaggaacttcaaaaagaccccgagctccaagcttggtggaaagaacttgtagaggtgggtcatggggatttgaaggataagccatggtggcaaaagatgcaaactcgtgaagagttggttgaagcttccgctaccctcatatggattgcttcagctcttcatgctgctgttaactttggacagtatccatatggaggtttaatcctgaataggccaactattagcaggagattcatgcctgagaagggtctcctgaatatgatgcgttagctaagaaccctgagaaggagtttttgaagactattactggcaagaaagagaccctcattgaccttacaattatagaaattttatcaaggcacgcatctgatgagttctaccttgggcagagagatggcggtgactactggacttctgatgccgggccattagaggcctttaagaggtttggaaagaatcttgaagagattgaaaagaagcttatagagaagaacaataatgagacattgagaaaccgctatgggccggctaaaatgccttacactttgctctatccttctagtgaggagggattgactttcagaggaattcccaacagtatctctatctaagggctctatggttgctgaagtactgtccctggctttaaataaatgtgaaatagaaggaatctgattccttcatcagttgtgtatgtttaagttatgtatttggagtggctgaatgtacttgtatttgtcattaataaaccatgtttgtgtaatggaaaccaaaataataaatgcaatcatgcaggtttgaactttttaac

SEQ ID NO: 6111 - DNA, 1622 bp, Glycine max
  Clone ID: 700553960_FLI
cccgagtcatgcttgtgttcaacgaagacagccacaggcgcagcatgttattgatggcttcctcactcaccaaccaccaaaccacaccgtcgcacccattccatcgctgattcctccaatggcttccactaccaccactttctctctttctctccgcaccaaccaacaaactccattccccaaaccctctttcttctccaataacaaccatctgcatttcaactctaataattgggcctggacctctgtttccactgctcgcaagtcaaggatatgcgtcacttcctctcaagttttggattccttagcagcaaaatccgaacccgctcttcccaccaccgtcgaagtcgatttgggtaatcggagctatcccatttacatcggatccgggttactaaaccaacccgactatctccagaggcacgtgcatggaaagagggtcctagttgtaactaacaaaacggttgcgccactttatctagacaaggttgttgatgctttgacaaggggaaaccccaatgtttctgtggagagtgtaattttacctgatggtgagcagtacaaggacatggatactcttatgaaagtctttgacaaggccattgagttgcgactagaccggcgttgtacgtttgtcgctcttggtggtggtgtgattggcgacatgtgtggctgtgctgctgctttgttcctacgtggtgttaattttattcagattcctaccactgtgatggcccaggtcgattcttcagttggtggcaaaactgggatcaatcaccgccttgggaagaacctgattggtgccttttaccaacctcagtgtgtgctaatagacacggacacattaaatacgttgccggatagggaactggcatcagggcttgcagaggttataaagtatgggctcattagggatgcagagttttttgagtggcaagagaaaaatatgcacttattactggcaagagatcctagtgcaatggcatatgctataaagcgatcttgtgaaaacaaggctgaggttgtgtccttagatgagaaggaaagtggactgagggcaacattgaacttgggtcatacatttggtcatgcaatagaaactggggttggctatgggcagtggcttcatggagaggctgttgcagctggcacggtaatggctgttgacatgtcatatcgcctaggttggattgatgattctctagtgaagagagttggagatattttaaaacaggctaagttaccttcagcccctcctgagaccgtgactgtggacatgtttaaatctgtcatggcagtggataagaaggtagcagatgggttgctaaggcttatccttctaaagggccctctaggcaattgcgttttcacaggggattatgacagaaaggctctagacgatacgcttcgtgcattctgtaaatcctgatctttgtgctccatgtttctattgcagctttatccaattccttttagtgagtttttgtatgttgtgataacctcacttgtatttttcttatgtactttggatgccaaccatgtccccattatatacgcaagagtctattacaaagttgtattattagaaattgaggcatgatcaataattatcatttgagcat

SEQ ID NO: 6112 - DNA, 1924 bp, Glycine max
  Clone ID: 700553993_FLI
atttcctttaacaacttttctggcagcattccaccagcttttcagaaccttagaagactcacttggttgtatctccaaaacaattctatatctggagctattcctgacttcaaccttccaagtctcaagcatttgaacttgagcaataataacttgaatggctcaattccaaattccataaagacatttccttacacttcttttgtaggaaattctctcttatgtggtccacctctcaatcattgctctacaatctccccttctccatctcctgccactgattaccagcccctcactccaccaaccacacaaaaccaaaatgctacacaccataagaaaaactttggcctagctactatacttgctctagtcattggggtcattgccttcatctctttaatagttgtagtgatctgtgtgttctgtttgaagaagaagaaaaacagcaaaagcagtggcatactgaaaggaaaggcttcttgtgctgggaagactgaggtttcaaagagttttgggagtggagtgcaaggggctgaaaagaacaagctctttttctttgaaggttcctctcatagctttgaccttgaggatttgctgaaggcttcagctgaagttcttggaaaaggaagctatggaacagcatacaaggctgttttggaggagggaacaacagtggtagttaaaaggttgaaggaagttgtggttggaaagaaggagtttgagcagcagttggagattgtggggagagttggaagccaccccaatgtgatgcccctaagggcttattactactccaaagatgagaaacttctggtttacaactacatgccaggtggcagcttgtttttcttgttgcatggaaacaggggagcaggaagaaccccactagactgggactccagagtgaagattttgctaggagctgccaagggaatagctttcatccactcagaggggggtccaaagttcgcacatggcaacatcaagtcaacaaacgtgctcataaaccaagaactcgacggctgcatctccgacgtgggattgcctcctttaatgaacactccagcaaccatgtcaagagccaatggctacagagctccagaagtcactgactcaaagaagatcactcacaagtccgatgtctacagcttcggggtgctgctgctagaaatgctgacagggaagacccctctgaggtatcctggctatgaggatgtggttgatcttccaaggtgggtgaggtctgttgtcagagaggaatggactgcagaagtgtttgatgaggagcttctgagagggcaatatgttgaagaggagatggttcagatgcttcagattgcattggcatgtgtggctaaggggcctgatcaaaggcctagaatggatcaagttgttagaatgttggaggagattaagcatcctgagttgaagaactaccacaggcaatcctctgagtctgagtctaatgtgcagacaccaacaccatgatcacgatgagatgcatttgatgggagactaataaaattttctctgcagaatgggatggaaaaatagaggctgcaggaagcaactccaaaagaagtggacaggtttgttgggcctgaacaagatgagcagctttcggatgtggaggcacagccggaatatgactagagggttgagagtgggccttttcttcctacaccgtataaaaatcattttgcaccccttctcatttaaattttcgtgtgatttccaaaataccctgcattatttattccggatcacatgtttcgtaattatttttgaatatattacagaatgcattccagaattatgatatttagttacggaataggtgtttcagaaaaattacacttgtctgtaagatgttcagaaatgtcccttccataattattttaaatgtattgcgcccttccttcct

SEQ ID NO: 6113 - DNA, 1036 bp, Glycine max
  Clone ID: 700554078_FLI
caaaggagttgtaaattaagagcatggctgcacaagctcttgtatcatcatcatctcttaccttctcagccgaggctacaagacaaagtcttggaccaagatcactccaatctccatttggcttctcaagaaaagcctcctttcttgttaaggcagctgctactccccctgtcaagcaaggatcagacagacctttgtggtttgcatcaaagcaaagtctttcctacttggatggcagccttccgggtgactatggatttgaccctctgggactttcggaccctgaaggaacaggagggttcattgagccgaaatggctagcatatggtgagataatcaatggtcgttatgcaatgttgggtgcagttggtgcaatagcacctgaaattctaggcaaggctggtctgatccctcaggagacagcactcccatggttcagaaccggtgtgttcccacctgcaggaacctacaactactgggcagactcctacacactgttcgtgtttgagatggcactgatgggatttgcagagcacagaagattccaagactgggccaaaccaggctctatgggcaaacaatacttcctaggactagagaagggtcttggaggttctggtgagccagcttacccaggaggacctttcttcaacccacttggctttggtaaggatgagaagtccttgaaggatttgaagctcaaggaagtgaagaatggaaggttggctatgttggcaatcttgggttactttgttcaagctcttgtcacaggtgttggcccataccaaaacctcctagatcatttggctgaccccgtgcacaacaacatcttgaccagtctcaagttccactaaatgtattatatcatattctttaccctcttggtcttggttcttgttcgcttcgcagttaccaaagctcaaccacctttctatatcctctctttgctctttgggactctaccatcatctggacattttgttccttggtgtgccgctgtaagaattgacatgtaaaacaactagaaacattcgcc

SEQ ID NO: 6114 - DNA, 1616 bp, Glycine max
  Clone ID: 700554080_FLI
tgcaattgaagttaaaagccttagccttccctacaactccaaacacaaagacatcatcatccatggctgcctccgtctccactgtcggagctgtcaacagagctcttttgaacctgaatggttctggagctggagcttcagctcccagttcagccttctttgggaccagcttgaagaaggttattgcctcaagggtccccaacagcaaggtttccggtggaagcttcaagattgttgctgtagaagagaagaaagagattgaagagacccagcagaccgacaaggacagatggaagggtcttgcctatgatatctcagacgaccaacaagacatcacaagaggaaagggtttggttgactcccttttccaagctccacaggatgctggaactcactatgcagtcatgagctcctacgagtacctcagcactggacttcgccagtacttggacaacaaaatggatggattctacattgctccagcttttatggacaagcttgttgttcacatctccaagaacttcatgaccctgcccaacatcaaggttcctctcattcttggtatctggggaggcaagggacaaggaaaatctttccaatgtgagcttgtctttgccaagatgggaatcaaccccatcatgatgagtgctggagagttggaaagtggaaatgcaggagagccagcaaaactgatcaggcagagataccgtgaagctgcagacatgatcaagaagggaaagatgtgcgctctcttcatcaacgatcttgatgcaggagctggtcgtcttggtggaaccacacaatacactgtgaacaaccagatggtgaatgccactctcatgaacattgctgataaccccaccaatgtgcagcttccaggtatgtacaacaaggaagagaacccccgtgttcccatcattgtcaccggtaacgatttctcaacactctatgcacctctcatccgtgatgggcgtatggagaagttctactgggcaccaacaagggaagaccgcattggtgtttgcaccggaattttccgcactgatggtattcctgaacaggacattgtcaagcttgttgacaccttccctggccaatccattgatttctttggtgcactgagggccagagtatatgatgatgaagtgaggaagtggatttctggtgttggtgttgacagtgttgggaagaagcttgtgaactcaaaagatggacctccaacctttgagcagcccaagatgactctggagaagctcttgctgtatggtaacatgcttgtccaagaacaagagaatgtcaagagagtccaattggctgacaagtacttgaacgaggctgctcttggaaatgctaacgaggatgctattcagaggggaactttcttccagtcttgaattggaggcaaagcaaacttggcaagtaaatatttctgttcgtgaaggttgttgtactaatccaagtgctagaagttgtgatggaacttgcgtgtaacattcttagcattctcaatgtcttaggtgcaaagagaagatgctaagtttgagatgatcttactatatttttcatattggaccgtcttcctctataattttgagttacagtgtccacttaaattg

SEQ ID NO: 6115 - DNA, 1210 bp, Glycine max
  Clone ID: 700554113_FLI
cacagagaaagcattggggagtagaagtagaagcttcacttcactctgttcagttcttattgttgcatagataatttgtctctatttttgttattttctttctctctcctctttgtgcattttaatagcaactcttagtttccaatgtccaagatgttgggagtgtttgtgggacttttgctgttggtggggttggctgcctctgccaagtttgatgaactcttccagcccagttgggctatggaccatttcatccatgaaggagaacttctcaaactcaaacttgataactattctggtgctggatttggatctaagagcaaatatatgtttgggaaagtgaccatccagctcaagcttgtggagggtgactctgctggaactgtcactgctttctatatgtcatcagacggcccaactcacaacgaatttgatttcgagtttttgggcaacaccactggtgaaccttactcagtccaaaccaacgtgtatgtgaatggcgttggcaacagggagcaaagactcaacctctggttcgaccccaccaaggacttccacacctactccatcttctggaaccagcgccaagttgttttcctggtggatgagacgccaataagggtgcacacgaacctggaacacaagggcattcccttcccgaaggaccaagccatgggcgtgtacagctctatctggaacgcggacgattgggccacgcagggtggtcgtgtgaagacagattggagccacgcacccttcgttgccacctacaaggacttccaaatcgacgcgtgcgcgtgccccgtgccggtgacgtcagcagatagtgctaagaactgtagcagcagcgaggataagaagtattggtgggacgaaccaacgttgtccgaactgaacttgcaccagagccaccagctcatgtgggttagggctaaccatatggtttatgattattgcgccgacactgctaggttccccgttatacctgctgagtgtgttcaccaccgtcaccactgaaagggagaagagaagaggaagagaacgaactacttttgtttaacataacatgtgcttcatgtttcaccttgtaacatatttcgccttagctttatgtgaattcttttatttccttgtttaatcattagtaccatccaattttattctttttgttttttaatttggaccaagagagaaactagtgagattttcc

SEQ ID NO: 6116 - DNA, 1073 bp, Glycine max
  Clone ID: 700554165_FLI
aactcaactaagcgcaaaccaaaccaacacaaacaaaaacatctctcagcaaatgaatattctcggacaatcactccaccaatcaaacaacggcagctactcttgttcgtcgccggagactgcaaactcctctaaccttccgaccactccgaaagccgttcaccccgacgaggaagtgaacacattagcatcggctcatcctaagaaacgtgcggggcgtcgaatttttaaggagacaaggcatcccgtgtacagaggagtgcggcggaggaacaacaacaagtgggtctgcgaggttcgtgttcccaacgacaagtccacgaggatttggctcggaacgtatccaacgcctgagatggccgcacgtgcgcacgacgtcgccgcgctctcgcttcgaggtaagtcggcgtgtctcaacttcgccgactcggcgtggcggttgcccttgccggcgtcgaccaatgcgaaggagattcggcgcgtggcggcggcggctgctgtagcgattgcggcggaagacagccgcggcaagcagttgcggactaatgcgattgatgccgttgctgattgcgaagttagcagcagtgacataggcgtcgatgaaaattgcaataacaataaagcttcgcagaggttttgtgatttggatgaaattacaatgccagatgcaccggtttttgaggacatgcatgagtggcttcagactatggctgctgaaccattaagatcacctacttttgtaacatatgttaatgttagggatgtctggaactttgtggaggatgatgctgaggtttccttgtggagcttcaccgtctgaagagcatgcaatttaggctttaggtgtatttagtgtgtttagctttctttctcttcttttggtttttgtacataattaggaacggaggactacgaaaatgtacaaagaccgaaacgatataaggagatagctatctaggtaggaacataaaagtgtgaaacattgtaacttttctcattcggttgtttttgtaaaataaaaattctattttcatcaatacattatcaaagacactcactgttagcaatcctcc

SEQ ID NO: 6117 - DNA, 1585 bp, Glycine max
  Clone ID: 700554168_FLI
cttggattaccttggaagaaatggtgattccatgggtggaactggttggaagatgactgaatttggttgggatgtcaagtatgctggtgttcagacattagttgccaagttcctgatgcaaggcaaagctgggcatcatgctccagttttcgagagatatcagcagaaggctgaatctttcatgtgttcgtgccttggaaagggtgatcgcaatgttcagaagactccgggtggcctcatcttccgccagagatggaacaacatgcagtttgtcacaagtgcctcatttttagccactgtctactctgactaccttgcttcctctggtagaaacttgaggtgcagttcaggcaatgtgccccctgctgaacttatctcccttgcaaagtctcaggttgactatcttcttggtgacaacccaagagccactagctatatggtgggctatggaagcaacttcccacaaagggttcatcacagaggttcatccattgtttccatcaaggttaacccttcatttgtcagctgccgtggaggttatgctacttggtttagcagcaaaaggagcgacccgaacctgctcactggtgctcttgttggtggacctgatgcatatgatgactttgctgatgaaagagataactatgagcagacagagccagcaacctataacaatgctcctcttatcggtattctggcaagactaggtggaggtcatggtggctataaccagcttcttccagttgttgttccagctcctaagcctgttgttaccaagcctcaaccaacccccagtcccaagacaactccacctccagcttcgtggtcaggcccaatttccattgaacagaaaatgaccacctcgtggattgcccatggaataacttactacagatactcaacagtggtgactaacaaatctaacaagagtctcaattctctcaatctttcaatatccaagctttatggtccaatctggggtgtcacaaaatcaggtgattcatacacattcccatcatggctcagctcattatcagcaggcaaaagccttgaatttgtctacatccattctgcttcagcagcagatgtctccgtgacaaactacgtgttggcctgagagtgacatgggaatggtttactgctttgttgtgtaagattgtgtagccatacaaatgtgcagtgaggagagggtctttacgtttttccttctatattttgatgtcaaatcttcttcttcccttgtgtattttgcatttcagtaggttagatcaaaataggtagattatataagatggaaggaccggagcagaaaggagtgaagagacaaaaggcagagctcatcctctttcttctccgctttacaacttatatacagtgagtgatacaagacagacagtgaaacagtgttgttgagaagtttaaaaaacaaagtgaacttctcaatatttcagagaagagtcatctcttgtatttttcaacagctttggatgtcttttctgtgtttgatgttgtaagctttgcagcattttgtattctctacagagaaacagtttgtgctatatagtattatgtttttgtgctgtgc

SEQ ID NO: 6118 - DNA, 1606 bp, Glycine max
  Clone ID: 700554189_FLI
gttaaaagccttagccttccctacaactccaaacacaaagacatcatcatccatggctgcctccgtctccactgtcggagctgtcaacagagctcttttgaacctgaatggttctggagctggagcttcagctcccagttcagccttctttgggaccagcttgaagaaggttattgcctcaagggtccccaacagcaaggtttccggtggaagcttcaagattgttgctgtagaagagaagaaagagattgaagagacccagcagaccgacaaggacagatggaagggtcttgcctatgatatctcagacgaccaacaagacatcacaagaggaaagggtttggttgactcccttttccaagctccacaggatgctggaactcactatgcagtcatgagctcctacgagtacctcagcactggacttcgccagtacttggacaacaaaatggatggattctacattgctccagcttttatggacaagcttgttgttcacatctccaagaacttcatgaccctgcccaacatcaaggttcctctcattcttggtatctggggaggcaagggacaaggaaaatctttccaatgtgagcttgtctttgccaagatgggaatcaaccccatcatgatgagtgctggagagttggaaagtggaaatgcaggagagccagcaaaactgatcaggcagagataccgtgaagctgcagacatgatcaagaagggaaagatgtgcgctctcttcatcaacgatcttgatgcaggagctggtcgtcttggtggaaccacacaatacactgtgaacaaccagatggtgaatgccactctcatgaacattgctgataaccccaccaatgtgcagcttccaggtatgtacaacaaggaagagaacccccgtgttcccatcattgtcaccggtaacgatttctcaacactctatgcacctctcatccgtgatgggcgtatggagaagttctactgggcaccaacaagggaagaccgcattggtgtttgcaccggaattttccgcactgatggtattcctgaacaggacattgtcaagcttgttgacaccttccctggccaatccattgatttctttggtgcactgagggccagagtatatgatgatgaagtgaggaagtggatttctggtgttggtgttgacagtgttgggaagaagcttgtgaactcaaaagatggacctccaacctttgagcagcccaagatgactctggagaagctcttgctgtatggtaacatgcttgtccaagaacaagagaatgtcaagagagtccaattggctgacaagtacttgaacgaggctgctcttggaaatgctaacgaggatgctattcagaggggaactttcttccagtcttgaattggaggcaaagcaaacttggcaagtaaatatttctgttcgtgaaggttgttgtactaatccaagtgctagaagttgtgatggaacttgcgtgtaacattcttagcattctcaatgtcttaggtgcaaagagaagatgctaagtttgagatgatcttactatatttttcatattggaccgtcttcctctataattttgagttacagtgtccacttaaattg

SEQ ID NO: 6119 - DNA, 443 bp, Glycine max
  Clone ID: 700554207_FLI
caaagctgctgatgaaggcttggtaataattcagtctccaaaggtgggtttctttaggagatcacggacgataaaggggaggcgtgctccaccatcatgtaaagagaaacaaaatgttgaggaggggcaagtgatttgttatattgaacagcttggtggtgagctgccaattgagtctgatgtgtcgggagaggtcatcaagatcctacaaaaggacggcgatcctgttggatatggtgacgcacttgttgcaatattgccatcatttcctggaataaagaagcttcaatagcctcgaatttttggaaaacagtcattcttgccagccatgctgtaattgagtcatacatatatttcattacttttgagttcatgtggtccatagcttatttgttttgcatatcaaagacaaagggtaaaatcaaactactttgttttctcat

SEQ ID NO: 6120 - DNA, 2486 bp, Glycine max
  Clone ID: 700554222_FLI
gattgacaaaagactttctggaaaaaggacgttcattgtacttgatgacgtgaatgagtttggccaattaaaaaacctatgtggaaatcgtaaatggttcggtcaaggaagtgtaataatcattacaactagagatcgacgtctgcttgaccaacttaaagttgattatgtttatgatgtggataaaatggacgaaaacgagtcccttgagctttttagttggcatgcattcaatgaagcaaaaccaaaagaagacttcaatgagcttgcaagaaatgtagttgcttattgtggaggactaccactagctcttgaagtccttggttcttatttaaatgagaggagaaagaaagattgggagagtgtattatcaaaactagaaagaatacccaatgatcaagttcaagagaaattaagaataagctttgacggtttaagcgatcacatggaaaaggatatatttcttgatatatgttgtttctttattggtaaagacagagcctatattactgagatactaaaaggttgtgggctacatgctgatattggaataacagttctgatagatcgtagcctcttaaaagttgaaaagaacaacaaacttggaatgcatcaattgctacgggacatgggaagagagataatttgtgaaagttcaagaaaggaaccagggaagcggagtcgattgtggtttcatgaggatgtacttgatgtattgacaaataatactgggacagtggctattgagggattggctctgaaattgcatttcgccggtagagattgcttcaacgcttatgcttttgaggaaatgaagagattgagactgttgcaacttgatcatgtacaactaacaggagattatgggtatctttctaagcaactgagatggatcagttggcaagggtttccttcaaaatacatacctaacaacttttatctggaaggtgtgattgcgatggatttaaaacacagtaatctgcggctattctggaaagaaccccaggttttgaagtggctaaaaatcctcaatcttagtcactccaagtacttgaccgaaacccctaacttttcaaaactaccaaatcttgaaaagctcattctcaaagattgcccacgtttgtgcaaggtacacaagtccattggagatctctgcaatcttcatttgataaatttgaaggactgtaaaactctaggcaatctgccaaggggagtttataagttgaaatctgtaaaaactctcattctttcgggttgttcgaagattgacaaattagaagaagacatagtgcagatggaatccttgacaactctaattgctgaaaatactgctctgaaacaagtgcccttttcaatagtcaactcaaaaagcattggctatatatccctatgtggatatgaaggatttgcacgaaatgtttttccttctatcattcggtcttggatgtcaccaacattgaatcccctatcttatattagtccgttttgtagcacatcgtcatatctagtttccctggatatgcaaagttataattcgggtgaccttgggccaatgcttagaagcctttcaaatcttcgaagtattttggtgcgatgtgacacagactctcaaatatctaaacaagtaagaacaattctggacaacgtatatggtgtaagttgtacagaattggaaataacatcacaaagttcagagcattacttgaggtcttatttaattggaattggaagttatcaagatgtcttcaatactctcagtgatagcatatccgagggattgacaaccagtgagtcttctgatgtttttctccctagtgacaatgatccttattggtttgcccatatgggtgagggacattcagtgttttttactgtgcctgaggattgtcgtatgaagggaatgactttgtgtgtagtttatttatccactcctgaaagcaaagcaattgaatatcttattagtgttttaatggttaattacacaaggtgtaccatccagatattcaagcgagacacagttatttcctttaatgatgtagattggcatgacataatatcacattcaggacccggagacaaggtggagatttatgtgatttttgggcatgggttggtggtcaagaagacagctgtctatctaatgtgtgatgaatcaattgacaagggaatggacccttctcctgagccaaagatagagccaaagaaaaatgcctttgtaaaattcataaagaaaattgtatcaagtaaaaatgaagagcagtagaggtttcaaccaattattactgggcatgccaaagtcatagtatagtattcctattcattttcctggagagaggacgcaatatcctatgttacatcgatgtataggagaaattcattaataacattcctcaaatcttgttaagagtttattttccattgtgctaggcctcatgctttctggacaaggtatgatgcaataaaattgttgcaaatatttggtggat

SEQ ID NO: 6121 - DNA, 2328 bp, Glycine max
  Clone ID: 700554233_FLI
acggttttgaaaaggatgaaaatgagtccagtgttagtattactgttgttggagcctctggagaccttgctaagaagaagatatttccggctctctttgcgctttactatgaggattgtctccctaagcacttcaccatctatggttatgcacgaagtaagatgactgatgcagaactgagaaatatggttagcaagaccctcacttgtagaattgataagagagagaactgcaatgagaagatggaccaatttctaataagatgtttctaccattctggtcaatatgattctcaggaaaactttgcagcactagacaagaagctgaaggaacatgaggtagttgaaaaagggatgatctgaaatgactctagtctataacttaatgtagttcagattcctcctgtaagaactaagaagcaagcactgttttaaatttagttttttgaaacagtagtattttattaatgggaactaaatacaatttctcaattgaaagcaaaatcacatcttttttttttccccccactctgcacctctttttttgcatgatattttaatttgcaccaagtcctatattttaacagttaaaggaacttactcttctatttttttttttgtctgcatagttgaagctaatctgagcatttttataatttaaccattctgtttgaatatgaaaattgtttttgtagggtgggagaacttctaatcgcctgttttatctttcaattcctcctaatatattcatagatgctgttaaatgtgcaagcttgtcagcttcttctggtaatggttggaccagggttattgttgaaaagccttttggccgtgattcagaatcttcggctgcattaacaaaatcactcaagcagtatctgacagaggatcaaattttcaggattgaccactatcttgggaaagagcttgtggaaaatctttctgttctccgattctcaaatctcatctttgaaccattatggtcaaggcagtatataagaaatgtacagttgatattctcagaagattttggcactgaaggacgtggcgggtactttgaccattatggtatcataagagacattatgcagaatcatttacttcaaatactagcactctttgcgatggaaacccctgttagtttggatgcagaggatattagaaatgaaaaggtctcacatgattatataccttgaactcaactgttctaaatagtcatgttttttttttaccagaatttcaattacctgatggatgtcaggtcaaggttcttcgttcgatgagacccctacgacttgaggatgtggttataggtcagtataagagccacactagaggaggagttacatatccagcatacgttgatgataaaactgtaccaagcggcagcttaactccaacatttgctgcagctgccctcttcatagataatgcaagatgggatggggtaccttttctgatgaaggctgggaaagcattacacaacaaaagagctgagatacgggtacagttcaggcatgtgccaggtaatctgtacaatcggaatttcggtactgatcttgatcgggctacaaatgaacttgttataagagttcagcctgatgaggctatttatctgaagataaacaacaaagttccgggtctgggaatgaagttggatcgcagtaatctcaatcttcactacgctgcaagatattcaaaggagattccagatgcatatgaaaggttacttctggatgccattgaaggagaaagaagactcttcattcgtagtgatgaactggatgctgcttggtcactctttacacctgtactgaaggagcttgaagagaagaagataattccagagtactatccttatggtagtaggggtcctgttggtgctcactatcttgcagccagacacaacgtgcgatggggtgaccttgggacagacgtagaccattaaccctcgcattttgttgcacttctgatcggcctaagatgttagctattatgcatgctattttgtggtttcttcttggcatgcagtttcttttctcatcagcagcatggttacttctctggtggaagacaggtaccaggcacacacgaaaatcatacaaagcaataaaagcatcaaatttcaaagtccagtaataaagctcttagatcattgattttttttttttagtttttgttgctatttgggacagtttggacaagagcaaatatttcatttagttgccaatcgatctagttaggtgatgtattttgattttgcattttgcattttgtgaaacacaattaaagagaaaatgaagaaagttagcaagttggtatgaatctc

SEQ ID NO: 6122 - DNA, 934 bp, Glycine max
  Clone ID: 700554237_FLI
ttcaggaaccggaggttcaggttctggacccttcagatggtgctgttggtgtaaatgatagtgcaagtgataatgaggttagcgatgctgatgaaacatttgcttcacctttcttagtgatacttcaatcgtacagagaagcattggctaataatgacgaagtcaaaattgctgagttggaatcgtcattaaaatccattgaagatgagaaaatagaacttgaagggaaaatagcttctttatcagaggagttatcaatagaaaaggatcggattctaaggattagtgcagactttgacaattttcggaagaggacagagagagatcgcctttcattggtcacaaatgctcagggtgaagttgtggagagtttgttgcctgtgttggataattttgagagagcaaaaacccagataaaggtggagacagagggagaggagaaaataaacaacagctatcagagcatatataaacaattcaatgaaattctaacttcacttggagttgaaccagtggagacagttggaacaccctttgatccattgctacacgaagcgattatgcgtgaggattctgatgaatttgaagatggcatcataattcaagaattcagaaagggttttaaacttggtgaccgtctcttgcgtccatcaatggtaaaggtatcagctggtcctggacctgcaaagcctgaacaagaagcaccgcaagaagagcaagtcaacactgaaatttctgaggacagtaaagaaaatgagggcagcacagaaacagagtcttcttgagaggtcataactttttgcctgatttcagttttgcaataatatattaattttaatctccaggaacataatgttggctgtaagagtctcccaggagatattcctcccaaatttcccttaaaaataaagttagtattatgtgattttgaatt

SEQ ID NO: 6123 - DNA, 995 bp, Glycine max
  Clone ID: 700554268_FLI
cttactgactctctttgtcaccgggtttgtgagatgtcggatgcaccggcgagtccgagtcacgagagtggtggcgagcagagccctcgcggctcgttgtccggcgcggctagagagcaggaccggtaccttcccattgccaacatcagccgcatcatgaagaaggctctgcctcccaatggcaagattgcgaaggatgcaaaagacacaatgcaagaatgcgtttctgaattcatcagcttcattaccagcgaggcgagtgagaaatgccagaaggagaagagaaagacaatcaatggagacgatttactatgggccatggcaactttagggtttgaagactacattgagccgcttaaggtgtacctggctaggtacagagaggcggagggtgacactaaaggatctgctagaagtggtgatggatctgctagaccagatcaagttggccttgcaggtcaaaatgctcagcttgttcatcagggttcgctgaactatattggtttgcaggtgcaaccacaacatctggttatgccttcaatgcaaggccatgaatagtttagatgcttctacgcatcttatttatttcccttgaatgcttgtacgcatggaatgggtggaaacaatggtttggtgatttaatatttaggttctcgtttagaaggcatcagtgtcagaattttgttacggtactaaggtagatttttattaatacattatacatgtcatatttagctgcctgaccaactcaagggagagatgtgtttggggttattgcatgtgattcgccatgtagcttgtcatggtgagaagcacttgctttgagtgttttctttagattattatataatatataatatttgcagacactgcatttgttagtttatttagtttaggccatacagtttgcttctctcttaatgatgtaaaaaatattcacttgtcattcatctagaaaattcgtaatagtgtaatagaatctttaaagacttgct

SEQ ID NO: 6124 - DNA, 1617 bp, Glycine max
  Clone ID: 700554475_FLI
cttccctacaactccaaacacaaagacatcatcatccatggctgcctccgtctccactgtcggagctgtcaacagagctcttttgaacctgaatggttctggagctggagcttcagctcccagttcagccttctttgggaccagcttgaagaaggttattgcctcaagggtccccaacagcaaggtttccggtggaagcttcaagattgttgctgtagaagagaagaaagagattgaagagacccagcagaccgacaaggacagatggaagggtcttgcctatgatatctcagacgaccaacaagacatcacaagaggaaagggtttggttgactcccttttccaagctccacaggatgctggaactcactatgcagtcatgagctcctacgagtacctcagcactggacttcgccagtacttggacaacaaaatggatggattctacattgctccagcttttatggacaagcttgttgttcacatctccaagaacttcatgaccctgcccaacatcaaggttcctctcattcttggtatctggggaggcaagggacaaggaaaatctttccaatgtgagcttgtctttgccaagatgggaatcaaccccatcatgatgagtgctggagagttggaaagtggaaatgcaggagagccagcaaaactgatcaggcagagataccgtgaagctgcagacatgatcaagaagggaaagatgtgcgctctcttcatcaacgatcttgatgcaggagctggtcgtcttggtggaaccacacaatacactgtgaacaaccagatggtgaatgccactctcatgaacattgctgataaccccaccaatgtgcagcttccaggtatgtacaacaaggaagagaacccccgtgttcccatcattgtcaccggtaacgatttctcaacactctatgcacctctcatccgtgatgggcgtatggagaagttctactgggcaccaacaagggaagaccgcattggtgtttgcaccggaattttccgcactgatggtattcctgaacaggacattgtcaagcttgttgacaccttccctggccaatccattgatttctttggtgcactgagggccagagtatatgatgatgaagtgaggaagtggatttctggtgttggtgttgacagtgttgggaagaagcttgtgaactcaaaagatggacctccaacctttgagcagcccaagatgactctggagaagctcttgctgtatggtaacatgcttgtccaagaacaagagaatgtcaagagagtccaattggctgacaagtacttgaacgaggctgctcttggaaatgctaacgaggatgctattcagaggggaactttcttccagtcttgaattggaggcaaagcaaacttggcaagtaaatatttctgttcgtgaaggttgttgtactaatccaagtgctagaagttgtgatggaacttgcgtgtaacattcttagcattctcaatgtcttaggtgcaaagagaagatgctaagtttgagatgatcttactatatttttcatattggaccgtcttcctctataattttgagttacagtgtccacttaaattgaatttggtgccttttccttttgtcct

SEQ ID NO: 6125 - DNA, 985 bp, Glycine max
  Clone ID: 700554479_FLI
caaatcaaagccatggccacctccaacttctctattgttctctccgtctccctagccttctttttggtgctacttaccaaggcacactcgaccgataccgtttctttcaccttcaacaagttcaacccagtccaaccaaacattatgctccaaaaagatgctagtatttcatcctctggggtgttacaactcaccaaagttggcagcaacggcgtgcccacctcgggatctctcggtcgtgccctttacgctgccccaatccagatttgggacagcgaaaccggcaaggtagccagctgggctacatcctttaaattcaacattttcgcacccaacaaatcaaactcagctgacgggcttgccttcttcttggcacccgtcgggtctcagccccaatccgacgatggatttcttggtcttttcaacagtcccttaaaggacaagtctctccaaaccgtggcgattgagttcgatactttctcgaacaaaaaatgggatcctgcaaaccgacacatcggcattgacgtgaactcgatcaagtccgtcaaaacggcatcgtgggggttgtccaatggacaagtggcggagattctcgttacctataatgccgccacgagcctcttggttgcttctctgatccacccttcaaagaaaacaagttacatcctctctgacacagtgaacttgaagagtaatcttcccgaatgggtgagcgttgggttctctgccaccaccgggttgcatgaaggctccgttgaaacccatgatgtgatttcttggtcttttgcttccaagttgtcagatggtagcagcaatgatgctttggatcttccaagctttgtgctcaatgaggccatctaacttcaaacatcgtagttaaatgtgacaaaagaaaaatgtaataacgccctagcttgctagaggctggtgctactaataatgtttgtcacaaaaattatataataataggtgttttactccgtct

SEQ ID NO: 6126 - DNA, 1232 bp, Glycine max
  Clone ID: 700554545_FLI
ccccttcttattcgtcgttcagttcaatttctcgcgagtttttcttccatatgctaccaatcgttgccgttgatccacgcgccggcgaatttcagttttgattctccgccaccgttttggctgttgttactttggttcttccgagagaagggagccatatatagaaagtattttatggtgcgccgatgagcagaactgatgttattggcagtagaaggaggaggattcttctctgcttcggcttcagggtatactaagggcctgagccttctcctcttgggtcagaggaatgaggataaacccatgagagtagcgccgtggaaccagtatcagttggtagaccaagaatctgaccctgagctccagctggcttccacaaagaatcgcctctcccgcggctgtgcctcctttgtttgctttggtcgcacttccgcaggacttgatactccgtctcctcttaaagtgggccctgctcaacaacatgatgtctcaccagggccactggtttccaacaagggaaaggatccttctgcacatgtagatgatgaaagtgataacagaaaggctacactaaaaagtagcataaagaagccacaaaatagaaaatccgttcctgttgaggttgctaatgaacatgaagcatcaagtggacaggggatttgtactcctggaggtcaacccgaaagaaggaaagtgcagtggacagataattgtggtagtgagcttgtggaaattcgagaatttgagcccagtgaagtggatggatcagatgatgaatttgatagtggaaatgacagaacttgttcctgtgcgattatgtaaattggagtttcattaagttgataggttcatcgggtcattcactgctaacatccatcactcgatttgagacaaaagaggcaaaggtttcagttctgtggagatatatacacaaacatcttgcctgagtgatgtgtctgttattgcttgctgcggctttaaattttgctcctctgcccctcatcaatttgtataattcttgtcatgtgtgaattctttgcctttgattcatcatttttatgctactttatgttcttatttttataaggattaacaaagttttctttctatgatctggcattatcttgaaaaaaggtaatacaagtgtaagattttgtaaaaaaatcagtgtgccaacctggtaacaaacttgtgatgagactaggatttgttaaggcttatctgttgaaagt

SEQ ID NO: 6127 - DNA, 895 bp, Glycine max
  Clone ID: 700554617_FLI
ctctacctctgcatcgtcccacgtggcagctgagttgagatatcaagcagaagaagcactctggttctgaggcgcaacctcgtcccaacaaccatggcggtccctgctacatcctcagcccctgtccttcgacccatccgcaccaatcactccttctcttcccctttccgctctctcccctctcccgccgccagaaaacccctaaccgtcttcgccatggcccccaaaaagaaggtgaacaagtacaatgataagtggaagaaggagtggtttggagcggggatattctacgagggaagcgaggaggtggaggtggacgtgttcaagaagatagagaagaggaaggttttgagcaacgtggagaaagctggcttgctctccaaggcagaggacttgggattcacgctctcttccatagagaagctcggcgtcttctccaaagccgaggagctcggcttgctcagcttgctcgaccgagccgccagcttctccccctccctcctcgcctccgccgccctccccgccttcgtcgctgccattgccgccattgtgctcattcccgacgactctgccaccctcgtcgccgtccaggctgttgttgctgccgcgctcggcgtcggagccgtcgggcttttcgttggctccgtcgtgctcggcggcttgcaagaggctgattgattgaatggtgtgggaatggtatgtggatgaattcatcttagattttttttttttgtctttgtagttgtagaattgaggaggagagattatggcagtttcttttggtgtaaaaaaattgtaataaaaaaaatgaaatgacaataattgactggaaatggttgcatacaacagaatgtagtagtgtctctgtctcttgtgaatgaattgctgttttctg

SEQ ID NO: 6128 - DNA, 1054 bp, Glycine max
  Clone ID: 700554626_FLI
actatagataaataatgaagatgatcccttcttcagaatccctgctttccttttttgacttagatacttcttatgcaactatagtgaggctaagagttggtgcataattaatcaaaatgttggccatattccacaaagcttttgctcatccacctgaagagctgaacagtcctgcatcttacaaaggttccaagaagcctaaggttcctgaggaaactctcaaagatttcctttcccaccatcctcacaacacttgctccatgagctttggtgaagctgctgtgctagcttatgttcgtcctgatcaatccttctctcgtcatcaaaggttgttttgtgggattgataacatatactgtctcttcttggggagcttgaacaatttgtccctactcaacaagcaatatggattgtcaaagagtactgacgaggccatgtttgtgattgaagcttataagactctccgtgaccggggtccataccctgcagatcaagtggtcaaggaacttgatggcagttttgcttttgttgtctatgacagcaaggttggcagtgtctttgcagcactgggttctgatggaggagtgaagttgtattggggtattgcagctgatggatctgtggtgatctctgatgatctagaagtcataaaagagggttgtgccaaatcctttgctccctttccaacagggtgtatgtttcacagtgaaggaggtctgatgagttttgagcatccaatgaacaagttgaaggcaatgccaagggtggacagtgaaggggccatgtgtggggccaacttcaaagttgataagttcgccagagtcaacagcattcctcgagtgggaagtcaatccaattggatggaatgggaccaacattagcttagaaataaaaccttaggataatgtaaaataaaaaagtgccatctatgtatgttcctttcctaacttaccattctgaatttgttttgttttctgcttgcttgtgctgttttcccgtttccctttccggcattgtacatattgaattactttttcatacatgttaattgttc

SEQ ID NO: 6129 - DNA, 1242 bp, Glycine max
  Clone ID: 700554673_FLI
gtaggaggtagaaagaagaaagggaggaaccagtcccgctgattagtctgctgtttctagctccattctatagtaatggccaagtctgttgctaatcctcctttccttcgtcctctgcatcaactagaatttctgagatgccctcgcctttcttctaaatctcagtttcaccctcgccgcttccgctctcaaacccaaagcatcattcgtgctatatccgcagttgccgcagaatcggagttaggtacacagcaggatcaagcaattgaagcagacatcttcgcttgccctgtatgttatgaaccattgataagaaaaggtccttctggccttaacttaccagcaatctacaggtctggtttcatgtgtaagagatgtaagaagtcatattctagcaaagacaggtatctggatctaactgtaactgctggattgagagactacactgaaattcaacctgctcggactgagcttttcaggagtcccctggtttcattcttatatgaaagaggttggcgtcagaatttcaggcaaagtggctttcctggtcccgatgaagagttcaaaatggctcaagagtactttgaatctgctaaaggtggactaattgttgatgttagctgtggtagtggtttattttcccggaaattcgccaaatctggagcatattctggagtcatagcactagatttttctgagaatatgcttcggcaatgttatgaattcattaagaaagatgacacactttcaaccactaatattgctcttgtaagggcagatgtttctagacttccgttcccatcaggttcagttgatgctgttcatgctggtgcagctttgcattgctggccgtctccctccaatgctgtagctgaaatcacccgggtactaaaaagtggtggagtatttgttggaagcacttttctgcgttatagttcattaactccctggtttttacgccctttcagagagaggattccacaaggttatggctatctaacagaggaagagatcaaagacctttgcacctcatgtggtcttaccaattactcaagcaaaattcagcaggcttttattatgttcacagctcagaagccgtaaaattgggtctgatctatttataacattcattctcccctgcattttatcaattccttctgtatgtatgtataatgtattgtatcacttgtttcatctgtaaagaaattgtaaataaatgagaaatggaaaggtcaaaacctg

SEQ ID NO: 6130 - DNA, 1039 bp, Glycine max
  Clone ID: 700554813_FLI
ggatatcgattcaatctaatataacaggacctgggcaaacaattctcctcaaagaacgttgacttgtgacccattttctcagccagaatatcagctaatgtttttgacagaatggaaacttgggtagcaaactgttgaattgtcgcgctaaaagtgtcggatccaccagaacccagcatatcagttaaaggaatatgaaatgcttctgacagaatggaaacttgggtagcaaactgttgaattgtcgcgctaaaagtgtcggatccaccagaacccagcatatcagttaaaggaatatgaaatgcttctgaccaagataactgcctaatgcatgtagcattgagggatccccaacggtagctaccagcggaaaagttgaagaacttgttctctttggttttcttctcaaagggttgcttaaatatcttctcctgctcaagcttcaacccactgaaaacaccattggaaatcccatgcttcacgacctgaaagaaaccccattcttgagaagccttgaatatctcagatttgcaaatgctgaaagatggtaaatggattgctgtaaaaccaaaccctgatgctcttataatcatcattggtgacttattccaggcatggagcaatggagtatacaagagtgtggagcatagagttgtgaccaacccaaaattggagaggttctctgtggcgtatttcttttgcccttctgatgatacagtgattgagagttgcagtacagagccgtcgttgtacaggaattttagctttggggaatatagacaacaagttcgagaggatgttcacaacttgggctacaaaattggcctaccaaagtttctcttaagcacaggggacaagatagtgtgcatgaatatgtatcacgagttcaattttccaacctctacgggaacctaacaaagaaagcaagacaaccatatgagactgaggccaagttcggtttatatacctgcttgcactttaatttaaagaagaaaaaaatatataattgaaaatgatcagtgattagttaatataattc

SEQ ID NO: 6131 - DNA, 1051 bp, Glycine max
  Clone ID: 700554818_FLI
gagactatgagaaagcctttgcccaacaccaacaaagttccaggttccaagagaaggaaattacaacatggagagaagttctggaacgagtagccagtctctctggttgggatatcagaaataaggaacaacctacagtgattgatgaaattgttcagaagataaaaaaaatcgtgggttgcaaattttctattcttcgaaatgataatctagttgggatggaatctcatttttctacattatcaaagcagctggggccggttaatgatgttcgagttgttggaattactgggatgggtggaataggaaagtccactcttggtcgagctttatatgaaagaatctctcatcaatttaattcttcttgttatattgatgacgtaagcaaactttatcgactggaaggttcagcaggtgtacaaaaagacttactttctcagtctctaaatgaaacaaatctaaagatttggaatttatcttatggaacagaactggcatggaggaggctacacaatgcaaaggcacttatagttcttgacaatgttgaagaagataaacagcttaatatgtttactgcgaatagaaagaatctgttacgtgaacgccttggtagaggaagcatagtcattataatttctagggatcaacaaatattgaaggcacgtggagcagatcttatttaccaagtgaagccattggatgacaccgatgctcttcgattgttttgcaaaaatgcatttaaaaataattatattatgagtgattttaaaacgttgacttctcatgtactatcacattgtgaaggtcatcccttagcaattgaagtattgggctcatctttgtttggtaaagatgtctcttattgggggagtgcattggtttccttaagagaaagtaaaagtattatggatgtgttgcgaataagttttgatcaattggaggatacacacaaggaaatatttctagatattgcatgtttcttgtacgatcatgatgtgatatatgtgaaggaaattctagattttcgtggatttaatcccgaatacggcct

SEQ ID NO: 6132 - DNA, 1538 bp, Glycine max
  Clone ID: 700554838_FLI
ctctctctctctctctctctctctctctctctctcggatcggagcgaggctggcggttccggcgttggggacgttagggttagggtttccgagagatgtggtatgctccaggcattgatgaatctgttctcgctgtgttggaagccgtttggccgcgatgctgatcgaatcgattccatcggagttatcggaagagaaggcaaagacggcttgctctggttccgcgacttcggaaaatatggctccggtgatttctccatggctgtcgttcaggccaaccaggttctcgaagaccagagccagatcgagtctggtcctctcggcaccttcgtcggcatctacgacggtcacggaggacccgacgcatcaagatacgtttgcgatcacttgtttcgccattttcaagcaatatcagctgagtcacgcggggttgtgacaactgagacaatcgaaagagcatttcgccaaacagaagaggggtacatggccctcgtgtcaggctcgtggaatgctcgacctcatattgcaagtgctgggacctgttgtctagttggagtgatatttcagcagacactctttgtggcaaacgctggagattcccgtgttgtattgggtaagaaagttggcaacactggaggtatggctgcaattcagctgtctacagaacacaatgcaaatcttgaggctgttaggcaggaacttaaagaattacatcctcatgatccccaaattgttgtcctcaaacatggagtgtggagagtaaaaggcattattcaggtttctagatctataggtgatgtatatttgaagcatgcacagtttaaccgagaaccacttaatgcaaaattcagacttcctgaaccgatgaacatgcctatcttgagtgctaatcccactattctttctcatgctctccaaccaaatgattccttccttatatttgcatctgatggtttatgggagcatttgagtaacgagaaagctgtggatattgtaaacagcaatccacatgcgggtagtgccaagagacttatcaaggctgctctccatgaagcagcaagaaaacgagaaatgcgatattcagacctccgtaagattgacaagaaagttcgacgccattttcatgatgatatatccgttattgttttattcttaaatcacgaccttatttccagaggcacagtgctagacccgacactttcaattcgaagcgctctcgatcactgacttgtatcactgtaagcagtcttgtacgagtttttggcaactgtaccgatacctgaagcattggtaggtacctggctataatatgtcatttctatggcacatatggcttctggtaccgacatcattcttgaggcacgagaatttattaagttataacatattattagaaatttattcataaagaggaaaaaaataaatacaaaaatatcttattcccttttctaaccttatagttttacccgaaatactggattttatttatttgtttgtttttttggctgaacatagctaatcgaacagcatgttgattg

SEQ ID NO: 6133 - DNA, 973 bp, Glycine max
  Clone ID: 700554852_FLI
agcgtgctagggttcatcaggtgttgtagagagacacatctattgacactgtgaattactcaagagggctcgacaatcccacaaagtagaaaaagaggttatgttatggcgggcaaaggtgttagttcggtggctaaggcggtagcagaatatcagtatccttggcgtgagaagttggggaaatataaggatgagcttgccaagggtgtgtggggatactgggagctgggggcatggaagccgctgagtatcagtgctcggcatcgtgctagaattcgcaaggaagtcctccttgctggggaagattggccctacgatcctgaaaggaaggagatgaagaccaggaggaaaggacacaaatgtgataggatttctgccgaaaagcgcgcaaacacagcgaagttgatggagaagatgccccagatgttgctggattacaagaagagaaggtggcagaagaagatgaaggaggaagacaagggaaaactttgattttgctcctcctctaatttttgcaaggttcagcataaactgtgcctttgagaaatggagtatttaattatgccatgttacacctgtttgtgggcctaatggattattaactttggttatgtttttcaatccttaataacccctttcgagagtatggccttgtgagtatcaggggggaaagggctttactacaatggaaattactgttatgtggttttgtttttatgtatatgcttggatgagtgcttgtcggtactgacaattgcttatttggtgccaagggctacgctctcttcttaaggtctttgaacccaggtatgctgataccaccttgttacttattagtgcatgtatgattaagtttgtttttgaagaaataataacccccccccaaacattttagactgtttgcttttttaatactatttgttcctccagatttaagttcaactcaacctaactattgaaatttaggcttacc

SEQ ID NO: 6134 - DNA, 1858 bp, Glycine max
  Clone ID: 700554914_FLI
atgcattccagccctttgcttcttgaggaacccattaggatggcatccatccttgagccatccaagcctactttttttccggctatgacgaaaattgttggcacacttggtccaaagtcacgatcagttgatataatttcccattgccttgatgcaggaatgtctgtggcaaggtttgacttttcatggggtgatccagaataccatcaagagacattggaaaatttgagagttgctatcaaaagtaccaagaaactctgtgcggttatgctagatactgtgggtccagaattacagattgagaataagactgatcacccaatcacccttgaagcagacacattagttgtcttaactccagatcaaaataaagaagctagttcaaatctcttaccattaaattttaccgggctatcaaaggctgtgaagaagggtgatactatttttattggaaaatacttgtttactggaagtgaaacagcttctgtatggctggaggtcagtgaggtggaaggtgaggatgtcacctgtctggtaaaaaacactgccacactctctggatcattgtttactgtacatgtctctcagattcacatcgatcttcctactcttgctgataaagataaggaggtaataagcacatggggtgttcaaaacaatattgacttcctttcattatatacccggcacgttgaagatattcgtcatgcacgtgaatttctctctaaattgggtgacctgaagcagacacatatttatgcaaagattgaaaatatagagggaatgaaacattttgatgaaatattgagagaagcagatggtatcatcctcgctcgtggaaatttagggatagaactcccacctgagaaggttttcttattccaaaaggctgctatttacaagtgtaacatggttggaaagccagttgttgttacacgtgttgtggactctatgactgataatctaagacctactcgtgctgaagcaacagatgttgccaatgcagtgttggatggaagtgacgcaattctccttggagcagagaccctgcggggacaataccctgtagagaccatttctatagttggaaaaatatgtgctgaggcagagaaagttcataatcaagatttgtatttcaagaaggctgtaaaatatgtgggagagccaatgagccatttggaatcaattgcttcctctgcggttcgggcagctatcaaggttaaggcctctgttattatttgcttcacttcatctggaagagctgcaagattgattgctaagtacagaccaaccatgcctgtgatatctgttgtcattcctcaattgaagacaaatcaactccgatggacgttcaccggtgcttttgaggctaggcaatctcttattgtgagaggtctttttcctatgctggcagatccacgacacccagctgagtccagaagtggaacaaatgaatcaattttgaaggttgctttagaccatggcaaggcttttggcatcataaagccacatgaccgagttgttgtctgccagaaagtagctgactcgtcagttgtgaagattcttgagctcgaagattgaatgattacaacttatgcgttatttgatgcataataataaagattcttgggcttgtgtttgataatcggagcgatatccagttttgaaatcaagcatggtgtgctgatctttcggctacttatgttgtttaatagtaaaccatccgaattcgaaaacgaaattgattatcttctaatgaattttatgctgaaaagaaaagtatgaattataagacactttgtaaacactgagtgtgccagataaacttgtgagattattttagcttaatcatgagttc

SEQ ID NO: 6135 - DNA, 794 bp, Glycine max
  Clone ID: 700554929_FLI
ctcatcatacgtgggcaagaaaacaatcttatccacatggacaaatccatggatataggatgtcactttgggcagaacatacaggaacaattgaagagtgctttttgcaacccgagagccttgaatgtgtaagaagggttaaagcaatgggtgaaatgaactggaaacaattttcagctaaggaagcaacagagatgaaagggcatctactgaaatacccggtagaagttgatcgaaatggcaaggttagaccccttcaggactgtgaagagttcccggatgtgggaggaaaaatagttggatcttttcttgctatgaaggagaacctaaccatttgatattgagtttattacttattagtttgagtgttttcacattatgctagccaataggatatggtgtatgtatgtacattacaacatagaaacaattttgaaaagcatgatagttgaagaaacaattaccaacccaaaatccaaccaaataaagacaccatactgaaaaagaccaagtgaagatgatgtacaaatatacagctaagttctattgatctttctttcatgggacgtttacaagctttgcatgtctactacttccactcggagaccaagtgcagcaatttcaggcacatcagcaactaccctttggttctcatcattgttttgtcctccaacatattcctcacagaccatatgcctcattctctcagaaaaggattagtttatcagtaacacactgctgcaataacaatagagtttcattccaatgctggattttgtcttgtgcatgcttcc

SEQ ID NO: 6136 - DNA, 633 bp, Glycine max
  Clone ID: 700554943_FLI
gttttccatgtgggagaactatgtgatattggtttggaatgttgggtttttggttgctttgctctactcagttttctatgtttctttggatctgaaagctggctctttggctgctttgctttgtgctctttgttggattggtagtagctttgttgcaagccaacttgggttgtctctagcttggaaggttgttcttgtggttcagatagtatgttggacagggcagttcattggtcatggagtatttgagaaacgagctcctgctcttttggataacctcattcaggcctttgtaatgggtcctttctttgtattgctagaggttctccagactttatttggttatgagccatatccaggatttaattcaacagtgaaagcaaaagttgaagccaacataaatgagtggcaagaaagtaagcagaaactaatatcttagcttcttcttaagtttgtgcatctttaaaagttaaatgatctcccccaacagaggaagaataaaagctacaaatgatcatatatgtatggtactagggtatatatgcctttcaggataattgtgtatatgccttgtatatttgttgagaagacaccgtatatcatattatcatgggcatgctactatgttattct

SEQ ID NO: 6137 - DNA, 1652 bp, Glycine max
  Clone ID: 700554985_FLI
gtccctttctctctctcaaactaaaaactaaaacccattttcttctccaaaaccttcgactttcttttctctaaccgaaacgcgcttcgcagcacttcttctccactctctcacatctctgacccattgcgctatatttacgcactgtgtcaaattcccccataaaaccggtattgattctccctcagatcaaaatagagttctgagaggtagcagtgttactggcaatgaaaaatcttctgtagcttctattccgcactcaaaattgcattgtgacatggaggctcaaattcatctacttgaacaggaagcttactctgctgtcttgcgtgctttcaaagctcagtccgatgctcttacttgggagaaggaaggtttgataactgagcttagaaaagagttgagggtttctgatgatgaacacagagagcttcttaccagggttaactctgatgaaataattcaccgcattagggagtggagacaaactggctgttaccaacctgcaaggcgcagcacatctcagcctggtcatgacattttacctagtccaactgtttcagcttcccgaaaaaagcagaagacatcccattcgggtcaatcattgcctgctttatcttcagtgaagtctgtacagtatacttctgctggacctactggcggcaggcattttgcaaatcgcagttctagtgctcttgcgtctaatgtgcctgctgaagcagctgcctttgatccattgattgggaagaaagtttggactaggtggcctgaagataaccacttctatgaggctgttgtaactgattacaaccctgctgatggccggcatgctttggtttatgatattaataaagtaaatgagacttgggaatgggttgatctcaaagagatctcacctgaggatataagatgggaaggcgaagatcctggtgtactccatagaggtggacatggtgggcaaggtcgtggaggtaggaaattctttggccatggtggcgattcgttaggtgcaggaagagggagaggtcatcccaggtttcaggccagacaagaatttcttccacctcaaaatggtattggaaggcgagttttggatgacattgagttgctgaacactgattcactagttaaggaggtagaaaggatttttgcttcaagtcctccagattcaatggagcttgagaaggcaaagcaaatgctgaaagagcatgagcaagcacttgttgacgccattgcaaggattgcagatgcatctgatggtgaaagtgatggagaacagccgttcttgcagcatggtcaattaatggaaaggggatgagagcacaggaaccaactgcatgttggaggaaatctgtctttggagctgaagtctcatgggagtccaattttggttgaattcatagtccacctatatgcacttgtaggatccaacagcagcaaatggccgagatggtcttcttactgatgcattttgtcatttatttctttcccttcctgactgttgccacatgtgcgagttttgtgctcagtgacgattttgaatatagagcttcaatatatcacttgtcgggcacatcaattttttagtctgcatgtaaaataccataaattaatttatttttaccaatggaaactcaacgaaaaatgaaaac

SEQ ID NO: 6138 - DNA, 923 bp, Glycine max
  Clone ID: 700555020_FLI
gagaatagttcatgcatttatttcttgcattactactgggaatgttaaggtccagtggaatgtttgtcatgctctaggcaacttattcctcaacgagacattaaggctgcaagatatggattggactccagttgtgtttggtgttcttctgcaactattacgtaattcatcaaattttaaaatcaggatacaagctgcagcagcattggctgtgccaatgtcaatgcaagattatggcctatccttttcagagattgtgcaatctgtagagcatgtaatggagaatattgacgatgaccaaatttctgggccatcaaatttcaaatacagggtttcgttacaaaagcagcttaccttgacaatgttacacattctacgctttacctcaagcacaaatgatcaaaacctgaaagattttctagtgaagaaagcatcgatccttgaagattggttcaagggattatgctcatctggcgagggcatgctcgatgttcaagataagtgcattgcagaccgaaagagggttttgatatctggtgcgctacagtcgttgattgaagtatacaaagaaaaacaacaggatgcgatagctcagaagtttgaggaattgaagaacaatatgtaaaggagttgtaaaatgacaatggttcgtattgttttcaggcctattagtgtcaatgttttcccatttcagtaggtggaaatgaatggccacgggagccgaacgattggaatattggtaaaagattcaatccagtcgagaggaatttatttaatgaagcactttatggatggattatatcagttgtagaagagattgctatactgaacaggaggatcgtattgtgtatgcatatttctggtttgtggaatgctttcagttttctgaacttaatcaatgttataccacattcagattctgt

SEQ ID NO: 6139 - DNA, 1344 bp, Glycine max
  Clone ID: 700555039_FLI
ttgagggtgagatcttgcagtcatccaatctgaagaactttagtttgacagaactcacagctgccacaagaaatttccgtaaagacagtgttttaggaggagaaggtgattttggatcagttttcaagggctggattgataatcaatcactggctgctgccaaacctggcactggcgttgttgttgcagtgaaaagacttagtctggatagcttccaaggtcagaaggattggttggatgaagtaaactatctaggccagctttctcatcctcatctagtgaaattaattgggtattgctttgaagatgaagaccgacttctggtctatgaatttatgcctcgtggtagcttggagtatcacttgttcatgagaggctcgtattttcaacctctttcttggggtctccgtttgaaagttgctcttggcgctgccaaagggcttgcatttcttcacagtgctgaaacaaaagtgatataccgagatttcaagacctcaaatgtcttgctggattcaaattataatgcaaagcttgctgatttggggctggcaaaggacagaccaacacgtgagaaaagtcatgtctccaccagggtaatgggaacctatggatatgcagctcctgaatatcaaaccacaggaaatctgagtgccaagagtgatgtcttcagttttggagtagtcctgctggaaatgttatctggcaggagggctgtggacaagaatagaccatcaggacaacacaatttggtggaatgggccaaaccatacttagccaacaaacacaaacttttgcgtgtgttggataatcgccttgaaggccaatatgcattagatgaggcatgtaaggtggctaccctctctctgcgatgccttgcaacagaatccaagttgagaccaaccatggacgaggttgtcacggatttggagcagctgcaggttccccatgtgaatcaaaatcgttctgtgaatgcctctcgcggtcgtagaaaaagtgctgatgattttactcatggtagaatcgccacagcttctgtttccccgctctcacatgacattgcaaatacacgtccttgaaagctgatgcatgtttccacatgaactcaaacacgttcatatcatgcacacatgctatctaataggttttacgtatgtatatatttcaggttctgtttgtaatatgtagtcaaaatagctggaactactgcaggtactgtcttatttggctctggttagctcaattttgttgttttttatattggtataaagttttccaactttattttgttacacttgcaatgtgcagttttcacatatatagaacttgaagcaaaacttatagttg

SEQ ID NO: 6140 - DNA, 2074 bp, Glycine max
  Clone ID: 700555065_FLI
aaaaattaatgttaactatctcatttcttctagttataatacatctactgtatcttgtaaacataagagcaccttccaacattcacatagtcaaactattaaaagatgaaatatataatgagcaacctgcatgcagctatttctcagttctcacgccagtgaagacagttttccagagaatccaatcagaaactgccacgtgtcccaatgtgccaccacttctctgtttccttggctcaggttaagaatagaaggcatctttttacagcctctcccattcagcgatttaatcggcgtgtacctttcctggaaacctcgcacttttcacagttttcactcaaatgaaacccaaatacactccacataaataccaaacccaaatccacccccactcactcagtcactaaccttatctctctcctcagatagatacacacactctctcttttccactccctctttcgccgccaaaacaaaccaaacccacacttcactctcactctcatccaattccaaattctcgttgttggtgcactgaatgaccgagtaccggatgaacctgtggaccgacgacaactcctccgtcatggaggccttcatgagctcctccgacctctcctccctctggctccccacgccgcaatccgccgcctctactaccactcctggactggaaaccacccgagcaccgccgcctcagtcccactccctcctcaaccaggagaccctccagcagcgcctccagacacttatcgaaggcgcccgagagagctggacctacgcaatcttctggcagtcttcctacgactattcctccggcacctcccttctcggctggggagacggttattacaagggtgaggaggacaaagtcaaagccaaaggcaaaacccccaaaacgacgtcgtccgcggagcaggaccaccgcaaaaaagtcctccgcgaactcaattccttaatctctggcccctccgcttccgttgacgacgtcgacgaagaagtcaccgacaccgagtggttcttcctcgtgtcgatgactcagtccttcgtcaacggaagcggcctcccgggtcaggctttttttaactcgagcccggtctgggttgccgggccggaccggctgtccgagtcggtctgcgaacgggcccaccaggggcagatgttcgggctccagactctggtctgcataccgtccgcaaatggcgtcgttgagctcgcctccacggaggtgattttccagaaccctgatctgatgaacaaggtgcgcgatttgttcaacttcaacaacaaccctgaaactggttcctgggcgttgaattgcgttgccaccaccgatcagggggagaacgacccttcctcactctggctcaaccctgaaatcagagactcctctaccgttgcgccgccgaattcaacggttaacaagactctgcagttcgaaacccctggttccagtaccttaaccgatacccctagtgctgctgctgttcatgtacctaaatctaatggccagggtttcttctcgagggaattgaacttttcgaattcattgaagcctgaatctggtgaaattctgagctttggagagagcaagaagagctcttacaacgggagtttctttcccggtgttgttgcaattgaggagaacaacaagaagaggtctcccgtttctcggagcagcattgacgatgggatgctgtccttcacatccctgccggctgcaaatataaaatctggtagtggtggtgccggtgccggtggtggtgattcggatcactcggatctggaagcttccatggtgaaacaggcagacagcagagtgatggagccggagaaacggcctcggaagagggggcgaaagccggccaacggcagagaggagccgctgaatcacgtggaagccgagagacaaaggagagaaaagctgaatcaaagattctatgctctacgagctgtagttccaaatgtatccaagatggacaaggcatcgttgttaggtgacgccatatcgtacataaatgagctgaaattgaagctcaacgggctggattcagagaaaggggaattggagaag

SEQ ID NO: 6141 - DNA, 1090 bp, Glycine max
  Clone ID: 700555147_FLI
cttaccttttctcttaatccaaatacgatggcagccatggcaaccacaaccctctcttcaaaccccaaactctcattcttcaacggaaagcccgtcacatattcttcccgcgtcgcgcccaccaccaaattatcctcatccaaacaaagaatccatcgtgtcacgggaaatgacgcgccgctacatgaccgacatgataacctacgccgacaccgacgtcgtaatcgtcggagccggttcggccgggctctcctgcgcgtacgagctcagcaagaaccccgccgtgagcgtggccatagtcgagcagtcagtgagccccggcggcggcgcgtggctcggcgggcagctcttctccgcgatggtggtccgcaagccggcgcacctcttcctcgacgagctcggcgtggcgtacgacgagcaagaggactacgttgtcataaagcacgcggctttgttcacgtccaccatcatgagcaggctcctcgcgaggcccaacgtgaagctcttcaacgcggtggcggcggaggacttgatcgtgaaggaagggagggttgccggggttgtgaccaattgggctctggtttcgatgaaccatgacacgcagtcatgcatggaccccaacgtgatggaggcgaaggttgtggtgagctcttgtgggcacgatggaccctttggcgccactggggttaagaggttgaagagtattgggatgattgatagcgttcctggaatgaaggctttggatatgaatgctgctgaggacgctattgtcaggctcactagggagattgtgcctggcatgattgtcactggcatggaggttgcagaaattgatggctccccgagaatgggtccgacgtttggggcgatgatgatatcagggcagaaggcggctcatttggcgttgaaggctttgggtaggaacaatgcaattgatggaacgtgtggagttggaagggaagaaccccagcttattttggcttctgcggacactgaggaaattgttgatgcttaaattaagtttcaaattatataccttttcttttctgttttgtctctgcttatgatttgaattttagaataaattttt

SEQ ID NO: 6142 - DNA, 1153 bp, Glycine max
  Clone ID: 700555183_FLI
tgctgtgattgctgactggtttcaaaataatcgtgatcttatgcccataaagtcgcagtttgatagtctaattagagaaggctcctcagaatggaggaacctatgtgaaaatgatgcctatagagagcggttccctgacaagcattttgacctggaaacagtcattcaagcaaaaatacgtccgcttactgtggctcctgggaagtccttcattggtttttttcatcctgaagggatggatgaaggcagatttgactttctgtatggtgccatgtcttttgataatatttgggatgagattagtcgtgctggacaagagtgccctagcaatggtgaacctcacatttatgttgttagttggaagatcattttttcatcctcaaagttgaatatgattgttattacatcattgacactttgggagagagactttatgaagggtgcaaccaggcatatatcttgaaatttgacagcaacacaatgatgtacaaaatgccaaatgttgctcattcatcagataacaagacatccaatgaccagcaaactgtagcagaaatattagatcctaataatagtcaaacccaacaagtaaatagcaaggaggtggattctgttgcaggggaggaagaacagttgaggagtgagacagaagaagttatatgcagagggaaggaagcatgcaaagagtacattaaaagcttcctagctgcaatccctatcagagaattggaagcagatgccaagaaaggcctcatttcttcagcatccctttaccatagactactacaaattgagtttcattacacccaattgttaggtgaaacatcaatggctgaaccagagaccttagctcttgcaataactgaggcttctaccataaccaagctgtaaattgaagaaaatgcgtctatgctaacttattttactactttaaccattgatgttcttctgattttgaactgaatttaattataacatatggaggctcgtataagcttttggtgcgagcaaatgagtgagctgagcttttatttgcgcagttctgtttggcacttgccttgttttatatttacctgtaatctttcttgggaaggttattctgtaaatggctatgtagtttccttttcaagtcagtgcatacgtttggcatctg

SEQ ID NO: 6143 - DNA, 1863 bp, Glycine max
  Clone ID: 700555303_FLI
gtagtttggaattgttggatatggaattagtggtagtaaacattgatgtggaaggtggctatgctgtttgatttgctttttttttttatatttttccttgttgggtttggtgggggttgggggtttgtttgttgtagatttgtcagtggtacggaacaaggatccagagtggttcttcttctgtccgcaggaccggaagtatccgaacgggcacaggttgaaccgagctacgagtcatggctattggaaggcaacgggaaaggatcggaggattaagtctggctccaccttgattggaatgaagaagactcttgttttctataccggtcgtgctcccaaggggaagaggaccaattgggttatgcatgagtacaggcctacgctgaaggagcttgatggtaccaatcctggacagaatccatatgtcctttgtcgattatttaagaaacaagatgagagtcttgaagcttcaaacggtgatgatgtggatcggactgcttcaactcctatgactgccaattactctccagacgaaatacaatctgattcagctctggttccagcatcttcctcacaggttactgaagatgataagcctctaccagttatttctgagaactctgaggaagcaatatccaacattataacccctggtgagattcatagtgacggatgtaatgctcctgatgcacaagatcaaattgtagaaccagttgcagaggaggatcagccgttgaacgtggacatattttatgacccaacaaatctgccattagacgacaaattattctcccctgtccatgcacatttcccaacagatttttattatcaagctaacaatcaatcagaacttcagtatggtacaaatgagaatatttcagaattttttgactcggttgttaattgggatgcgttctctcatgatactagcagtctagatctgagctcatccttccttattaataatacggacaatggatcaggcagtgactcggatgttgaaatgaccaatatgccacatctgcaagcattacataattatcctaaggaggcagttgagcagaagagcaatgtgggattatttcagaacaatttccagatggcgttgtcaaatgatagtactatgggccaagtgcacaatatggtcaactattgcgagcaaccaagaaactttgatgcatttgttagtgctgatactggaatcagaataaggactcgtccaggaagaaatgaacagccaaacatggacacgatggtacaatcacaaggtattgcaccaaggagaatacgattgggagttgttaggcgtccgcttggttcccaggatgggagttgtgcttgtgccccagaagaccataattcaaaaaccatcattactgcagagaaaaaagcttcagaatcagaaaaccatgctgccgatgggagttccactgtttctgacatgagttccactgttacagatgatgtggatgaaccagaggaggcatctcccgagtcaaccgacctaagaaacattagtgagaaacatgttgcaactgcagaatccgtcgcagggtcgaaagtccttctagtgaacagaagggtccactacacctcaaaggtttcctctaaccgtgccacgtggtctaatgttctcgcagtttctgccgctgtattggtctcagcaatactccttgttaatatatgggcatatgtcagatcttaaactgcttacatgtagtggaagatcatttcttttgtgcgaaatttgcctccattgcttttttgcccggttaaggaggcgtgtaggattgacttgttctgacttgttgataacaatgttgtacaatatatatgtgcatatgtatgtagtagtcattccac

SEQ ID NO: 6144 - DNA, 834 bp, Glycine max
  Clone ID: 700555327_FLI
gaagaatcatacataaagactcttgtacttaatggaaaaacttatgacctctatgttcacagttacttgcactttggtaaagaagcatctcgtgcggagatgttgaaggtcactggtgattcagctaacccttgcattttagccggttataatgggacctacacatattcgggagttaaatataaggccttggcctccacttctgggtccaatttcgataaatgtcgagaggtagctcttaaagctctgaaagtgaatgaaccatgccctcatcagaattgcacttttggcgggatatggaacggtggaggggggagtggacaaaaagtcctttatgttactacatctttctattatctggttatacaggctggtatagccgatgcaagtaaaaccagttccaaagtttatcctgcggaattcaaggccgcagctaagcgagcgtgtcaagtcaaatttgaggatgctcaatccacttatccacttatgatggaggatgcacttccatacatttgcatggatattacgtatcagtatacgttgctcgtcgatggatttggcctggatccttggaaagagattatagtagcaaatgaaattgaataccaaggtgctcttgtggaaggagcatggcctctaggcagtgccatagaagccatatcttcattgcccaaatttaataaattgatgtattttatataacacttaaagagaagtgggcttcctttaattactaaataaaatgaagctcgatgtatatcaactctttctatccttattccattgtgtgtatgtggtcaccatttccgtatgattcatttgccaatatcatac

SEQ ID NO: 6145 - DNA, 2141 bp, Glycine max
  Clone ID: 700555329_FLI
ggcgaatgcttggcttggaacatgaatctaagaggggttacatagggcttgaatactttggccgtacaatattcattaaaatattgcctccagggattcacatgggtcgactgcaatctaccttagatcacccttcctcttccaacaaagtcagagaaatccaccaacaatataaggggaaaaagcttatagttggtgttgatgatatggacttattcaaaggtatcggtttaaaattcttggccatggagcaactcctgcagcaatatccagaacagcaaggtgaattaatattgatccaaattttaaatcccccaagtagttctgacaaagatgttgaggatgcaaaggaggaggcctacatttcagccaaaaggataaatgaaaggtttggtttggaaggttatgaacctatcatcatcattgatcgccatgttcctttctacgagaaggcagcctattatgctttggcagaatgttgcattgtgaatgcagtgcgtgatggtttgaatttggttccttacaagtacactgtgtgtaggcagggaagttctaaactggacgaagctttagaaatcgcttctgactccccacgtgtaagcgcacttgtcgtttctgagtttataggttgctcaccatctcttagtggggcaataagggtaaacccatgggatattgatgcagtagctgaagcactaaatttggcaatcacaatgcctgatggagagaagcagcttcgacatgaaaagcactatcgatatgttagttctcatgatgtggcatactgggctcgaagcttcgagcaagatctagtgttctcgtgcaaggatcattataataaccgatgctggggctttggctttggcctgaacttcagaattttgtccctatctcctagtttcaggaggctatctatagaccacattgtccctgcatatgaaaggagcagttgcagggcaatctttttggattatgatggtacggttgtgcctcaggcttccattgttaaaccgcccagtcctgaagtcatatccgtgctaaataatatatgcagtgatgttagaaacactgtgtttattgttagtggcaggggaaaaacctcactgagtgaatggtttgatcagtgtgagaatcttggtatagcagctgagcatggttatttcataaggtggggtaaacatactagttggcaaatgagtcatgcagatacagattttgcatggaaaaagattgctgaacctgtgatgagatcttatatggaggctacagacggctcctctgtagagaccaaagagagtgccttggtatggcattaccgtgatgccgatcctgatttcggatcttggcaagccatggagctgctggatcaccttgaaaatgtacttgcaaatgagcctgtagttgtaaaaaagggacaacacattattgaagtcaagcctcagggcattactaaagggtcagttgcacaggaagttctttcttccctaaccaagaagggtaaatcgccagattttgtactgtgcattggtgatgatagatctgatgaggacatgtttgagagcatattagccaaaccttatagtactacctcatcctcagcaccacaaatctttgcatgcactgttggacaaaaaccgagcaaagctaggtactacctagatgacactgtcgatgtgatggcattacttgagggtcttggtgctacttcagggcctaaatcaagatattctacagaaaccccttttgagaaaagagaagtatgttttgagaatgatgtttaaaaagtacactttaggcaccaggataggataaaggcacaattttgatggttgtttttgaaaagatgtacaaaagcaggatttaaggaaaatagctttaaatctgacttttgattgtaaagaatgttggtagcagcagctttaggtctcagaaactgagcacaggggattagagtgattggtttttattggttggtgggggcaattggatgcatctgttggctttagctgtagcttttaaaggatactcaatatattaacagatacaaaatctaggcattcttcccgggtgagaatttattggttggttgtatatttgaactcgttgggtttatattatacatggatgtcattcagaatctc

SEQ ID NO: 6146 - DNA, 3290 bp, Glycine max
  Clone ID: 700555358_FLI
gggggagcttgagtcattactaaaagactcatacttgaaaccacaagtattacctacattttttgatataagtaagggcattgaaggttccttggagaaagcattaaataagctttgtgaggctgcagatgaagctgtcagaaatggttcccagctgcttattctatcagaccattcagaagcactggaaccaactcatcctgctattcccatactccttgctgttggtactgttcatcagcatctaatccagaatggcctgcgaatgtcagcttcaattgtagcagatactgctcagtgctttagcactcaccagtttgcctgtttaataggatatggtgcaagtgctgtgtgtccgtatttggcattggagacatgtcggcaatggcgtttgagtaataaaactgtaaatctgatgaggaatggaaagatgcctactgtatcgattgaacaggcacagaagaactattgcaaggctgtaaaagcaggtcttcttaaaattctttccaaaatgggcatctcattgctatcaagttactgtggtgcacaaatatttgaagtctatggattagggaaggaagttgttgatcttgcattcagaggaagtgtgtcgaaaattggtggattaacttttgatgaggtggcaagagagactttgtctttctgggtgaaggcattctctgaagatacagctaaaaggttggaaaattttggatttatacagttcagaccaggaggggagtatcatgcaaataacccagaaatgtcaaagttgctccacaaagctgttcgtcagaaaagtcaaagtgccttttctgtttatcagcaatatttggctaatcgacctgtgaatgttctccgtgatcttcttgaattcaaaagtgatcgtgctccaatacctgtggggaaggttgaacctgcttcatctattgtgcaacggttttgcacagggggcatgtcacttggagctatttccagagaaactcatgaagcaattgcaattgccatgaacagaataggtggaaaatcaaattcaggggaaggtggggaggatcctgttcgctggaaaccacttacagatgtcgtagatggttactctccaactcttcctcatcttaaaggtcttcaaaatggggatactgcaactagtgccatcaagcaggttgcttctggaaggtttggtgtcaccccaacattcttggcaaatgctgatcagttagaaatcaagattgcacaaggtgcaaaacctggtgaaggtggacaattgcctggaaaaaaagttagcatgtatattgctaggttgagaaattctaaaccaggagttcctcttatatctccacctcctcatcatgacatttattctatcgaggaccttgctcagttgatctttgatcttcatcaggtgaaccctaaggccaaggtgtctgtaaaactggtggctgaagctggaattggcactgttgcatctggggttgcaaagggcaatgctgacattatacagatttcaggacatgatgggggaacaggagcaagccctataagttccatcaagcatgcaggaggtccttgggaacttgggcttacagaatctcaccagacactcattgaaaatggacttagagaaagggttattctcagagttgatggtgggtttagaagtggagtagatgtcatgatggcagcaataatgggtgctgatgaatatgggtttggttcagtggcaatgattgctactggatgtgttatggcccgcatttgccacaccaataattgcccagttggtgttgccagtcagagggaagagttgcgtgcacgctttcctggtgttcctggggaccttgtcaactactttttgtatgtagctgaggaggtaagaggcatattggcacagctggggtatgagaagttggatgatgtgattggccggactgacttgtttcaaccacgagacatatctctagcaaaaactcagcatctagatctgaattatatcctctctaatgttgggttgcctaaatggagcagtaccgaaattaggaatcaggagcctcataccaatggtcctgttctggatgatgttttgctagcagacccagaggttgccgatgccattgaaaatgaaaaggtggttaataagaccataaaaatatacaacattgatcgtgctgtatgtggacgtatagctggtgtcattgcaaagaagtacggtgacactggttttgctggacagttgaatataacatttacaggaagtgctgggcagtcatttgcatgctttctgactcctggaatgaacattcgccttgttggagaggctaatgattatgttgggaagggcattgctggaggtgagttggttatcactccagtcgacaagaccgggtttgaacctgaggatgcagctattgtagggaacacttgcttgtatggtgcaactggtggacaggtcttcgttagagggagagctggtgaaagatttgctgtcagaaactcacttgctgaagcagtggtggaaggcgcaggagatcattgttgtgagtacatgactggtggctgtgtggttgtcttgggaaaagtgggtagaaatgtagctgctggtatgactggagggttggcttacattcttgatgaggacgatactttcatacccaaggtaaacagagaaattgtaaaaatccaacgggtgtcagcccctgttggacagatgcaactgaagagcctgattgaagctcacgttgaaaaaacctgtagtaccaaaggtgcggctattctgaaggactgggataagtatttatcactattttggcagctggttccacctagtgaagaagatacccccgaggcaaatgccaaatatgacacaactacggcagatcaggtcacttatcagtctgcttagggtaacaatctaaggttacattacattgattacgccaggctatggagccattgttgtgtccctgatttgtacaggaattggagaggctatcaattaggtggaaatgctagccaaaatatgggattaaactatcccttgaaaccatggtgctgcatgtattctcaagatcatttttgccagcagtatgaggaaccccgtatacatccatctgaagcattagcattctcttttgtatagccatgtgaaaggaaaaaagctgtatataaaatgcagttgattcgaatttgattgggacttttgtggacggtcaaaataaatagttggggcttgatatgcctgggtcccctttgctctcctgaattaatgaaaaattattgttttttccttgcac

SEQ ID NO: 6147 - DNA, 1072 bp, Glycine max
  Clone ID: 700555378_FLI
ttccccattggctagaaagcctccaggagttacaggtactcagtttgcgatcaaataagtttcatggtgtcatcacttgtttcggtgccaaacatccatttctcagcctgagaatttttgatgtctcaaataacaattttagtgggtccttgccagcatcatacatcaagaactttcgaggaatgatgagtgtgaatgacaaccaaactggttcgaaatatatgggtaaccaatatttctataatgattcagtagtggttgtaatgaaaggtcaatacatggagctcgagaggatattaactatttttacaaccattgaattatcaaataatatgtttgaaggagaacttctgaaagtccttggcgaattgcattctctcaaagggcttaacctttcgcacaatgcaatcacgggtaccattccacgatcctttggtaatttaagaaatttggaatggttggacctctcgtggaaccagttgaaaggagagattcctgtgtctttgatcaatttgaattttctggctgtgttgaacctttcacaaaaccagtttgagggtatcatacctacaggtggacagtttaacacatttggaaatgattcctatgcgggaaatccaatgctatgtggattccctttgtcaaaatcctgcaataaggatgaagattggtcaccacattcaacatttcaccttgaagaatcaggatttggctggaaagctgtagcagtgggatatgcatgtgggtttctatttggaatgcttttgggatataatgctttcatgactgggaaagcacaatggctcgcgagacttgttgaaggtgtgcttaattaattaatgaagagtgaaaaggacaaatcatagggaaaggaaatagtttatccttagtttaatatggttctttggtgtgtgtctgtatgttttctgtaattttaacttatgtcctttgtgtaacaaatcacatctctcttgactcgagtgatgtatttcaagttgtttaaaaataagaaaaaaaattgatgatagtagatatcaaaatgagtggtcatcacatgtgatgatattggctc

SEQ ID NO: 6148 - DNA, 539 bp, Glycine max
  Clone ID: 700555436_FLI
ggcaatggattagtaaaaccaaagcaccctgatttcaaacgcaaggatcgcaattctctctggcttggcaaggatgaaaagtggggttttgcctaaattggaaggacttcaatttgatgttccaactgctatatccaaaaaaggtgatggtggtgagccctgtaatgatttggtgcaaaactatgctaactggtgggataatagattaaataagaggaatgcaaaagctcccgatttcaagcacaaagaaaccggtaaagggttgtggcttgattcttcatcagagtgggttttggaaaaattgccgccacctctgaagcctaaacaaagtgtagatactgaaaggacactggtttcataagcaatggacagtgaagtagaaaatggagtcattctctttgttacacttccatgtaattaacttatgccttccataaatagaaaggaaaaagctgaaaatatgtgcgttgacaatgtaaactttttttaatttcagttattgcttttacttttataataataatatctatcttaccatg

SEQ ID NO: 6149 - DNA, 404 bp, Glycine max
  Clone ID: 700555454_FLI
ctgtggtgagaggagctatgaagagcttggagtaggtggtgcagttgtgtaccaatcatttgttcaaggctgtgatggcagtacatctcccaggtctattctgaaatgctgctggagtgaggatgagaacgaagatgaagtgagggagatataagtacttctggtttttatgttctgttatttatctttactgttgagtgtgttattacctaataaataaatttgggggttatgatgtgagagtgaagcaatgaacttattgtgtagcttcacttaatttgtgtgattatgcagatgtttttttcgtttctactgccaactcatatgggagactcttatatgaggctgttgcacttgtattttattttatataaataaatataaatataattatattataatgt

SEQ ID NO: 6150 - DNA, 3061 bp, Glycine max
  Clone ID: 700555461_FLI
tggccatagaactcaaatgccctatctgttggagtttgctcgattctgctgtgtcgcttacctgcaatcatcttttctgcaactcgtgcattttcaagtccatgaaatcagcctctgcttgtcctgtctgtaaaattcctttcactcgtcgagaggttcgccctgctcctcacatggacaacttggtcagcatatatataaacatggaagcttcttcaggagttaatacatttgtaacccagaatgcccctgttactaacttatcagatggagaaaaggaatgtgaaggtgatgctgactctggcaagatgaaagctggtggaactcatgaaggtcgtccgcaggagaagaaaacccggaagaaaaagaagtctaagaagacggttcaggccagcatggaaagttcaggttctgagtttgcaaagccttcttttccagcaaagaaaagggtacatgtgccgcaaaatcttctttcagaaactccaatgaagaatttgaaaattggagactctctcagtgaaattaacaaagagaaagagggaacggaaaaggtcccagtcaaggaaagtgaaaggcccctccaaagtgaaaaagataatcctgttctttcgcctttcttttggttgagagaggaaaaagatggtgaaatgttaagtcaacaaactgatgaggatcaaattattgatggctcaacaccaaatcctccttcattcagtgatctcaaggactctgatgatgaagtccattctaatgttgatctaatggatgaggtgcaaaataaaagctctgttaatttatttgacagtgaaatgtttgaatggacacaaaggccttgctctcctgaattgttttcaagtccctctaaaatgcaggtcatggatacttatgaggatgatgaaaatcaagaggaattggtggcttcctcactagagctggaggcaaatctgccaagagttgatgctgacaacatggaatttgagaatcccaaagaaggaaatagaatggctgatgaagtacctccgagtgtatgttttcctcaaatcagaagttctgatgatctaaatggaataaagaagtctacaaaaagaaggaaggctagagataaaaataaacaagagcagattggagaaccaaaaaattcatttgatgaaatgtatgttgaggttactcaggaacaagcattggacaattcttctaatctggggaagggtagtagaagaggcaagagggtttgtttcaataccagtccaattccaacgcctataactgcttgtacagtccccaatacattaggagttcaaagcattggtgaaatgaagaaggctaagaatatagatattttgccatgtaaacaagaaaatgagaagcattatgctcaggaaatttctggaaaaagccagatgaaaatatctggaaaacaaaatatcaatcaaatgaatgagtttgctggttctgattcatccattttcagtctgcgaacagataataacgggaaggactctaataggaggcaatgcaaaagcaagtattccagaaaaactatatattgcagtaaagaattggaaactactaaaaggcaaaaactttcctcggcttgtatctctaagactaaaaacaatgaagaaattctacctattgaaagtattcatcaaggtcctgatgtcagggatttgaatgatacatcaaaagagaaacattgtcccttgatggatcaaacagtgttaaggaaatgtgagaatcttgtaaaaaattatcaatgtgttttctgtctctcatcagaagaatcagaggcttctggccctatggtgcattaccttgatggcaggcctgtaacatcagattatgaagggggatctaaagtcacgcattgtcacaggaactgcacagagtgggcccccaatgtatattttgatggtgattattcaataaatcttgatgcggaaataagtagaagtcgaagaattaaatgtagtttttgtggactaaaaggcgccgcacttggttgttatgagaaaagctgtcgcaggagctttcatgttccttgtgccaagtggacttctcaatgtcgatgggatacgcaaaactttgtcatgttatgccctctgcatgcttcctccatgttgccctgtgaaggttcaggatcccaaaaaaggagcaagaaatgcacagctagtgagggaaaagcccatggtcctaaacatgacacaacaagccaaagtcgggctgcttatttatcatacaaaaaaattgtactatgttgttctgctctatccgtgcaggagagggaagttgtttccgaatttgaaagagtatcgaaagctacagttttgaaaaattgggactcgagtgtcacccatgttatagcatcaacggatgaaaatggggcatgcagaaggaccctcaaagtattgttgggtatactggagggaaagtggattctcaatattgagtggatcaaagcttgcatgaaggaaatgggtcctattgatgaggagtgttatgaaattaatgttgacatccatggaattcgagatggtcctcgtcttggacgactaagagtattgaacaagcaaccaaagcttttttatggctacaagttttattttatgggagattttataccttcatacaaggggtatctgcaaaaccttgtggttgctgctggagggataattctgcacagaaaaccagtgtctggtgaccaagaatcaacttcaccagatatgcatacataccaaacccttataatttacagcctcgagcttcctgataaatgtaagccttcgaaaaaggatacaatttgcagccaaaggcgtcatgatgcagaggttctggcaagttctacaggttcaaatgtagcaagtaatacatgggttctgaattcaattgcagcctgcaaactgcaataccttgctcaatgaatgtgaaaattgaggtcatttacatgcatatgatctcaaattgatgtttttccttttcatctttaattatcatgttaagaataatattgacaatattattcaacaaaatatttagacctcataatatatactgtgaatgt

SEQ ID NO: 6151 - DNA, 977 bp, Glycine max
  Clone ID: 700555521_FLI
tgatgccaaaagatggaaaattgaaggtgaaaatgagggtatgtctgcccctggaagtagaacagtaagagaacctagagttgtagttcagacaaccagtgacattgatatcctagatgatgggtatagatggagaaaatacgggcagaaagtagtgaagggcaatccaaatccaaggagttactacaagtgtacacacccaggatgtccagtgaggaagcatgtggaaagagcttcacatgacctaagggctgtgatcacaacctatgaggggaagcacaaccatgatgttcctgcagctcgtggcagtggcagccattctgttaacagaccaatgccaaacaatgcttcaaaccctaccaacactgcagccactgccataagtcccttgcaagtgatccaacacagtgacaattcccatcagaaccaaagatctcaagcaccaccagaggggcaatcacccttcaccctagagatgctacaaagtccaggaagttttggattctcagggtttgggaatccaatgcaatcttacatgaatcagcagcaacaacaactatctgacaatgttttctcttccagagccaaggaggagcctagagatgacatgttccttgagtctctactatgctgaaggaatttctttttggtagctatggaaggttggaaattttggaagggggggactaggatttattggacaaataaggttcattccatttattgcattttttggtttgtttttgttgtaaattttatacagccacacaggattggtatagtatatatttcataactgttgtatgtttttacacatggtgttggtgaaattttttgattactttggggtttctcttttagttgggaggagaaccttatgttaatcttttgtaagattctgttaattttttcctgtcttcacaattgttcactatcaaaatagtaaagtttcacaagaaatgtgaattatttttgct

SEQ ID NO: 6152 - DNA, 2350 bp, Glycine max
  Clone ID: 700555559_FLI
aaggaactgagcagggagttagggttagagccattgcaggttaagttttggtttcagaacaagcgtactcagatgaagacacagcacgagcggcatgagaatacaaatctcagaaccgaaaacgagaagcttcgagcagataatatgaggtatagggaggctcttagcaatgcttcgtgtcctaattgtggtggaccaaccgctataggagaaatgtcattcgatgaacatcacttgaggcttgaaaacgcaaggctaagagaagagattgatcgcatctcagcaattgctgcaaagtatgtagggaagccagtggtgaactattcaaatatttctccttctctccctcctcgtccgttagaactaggggttggtggtgctggttttggaggccaaccagggattggtgtggacatgtatggagctggggatcttcttaggtcaattagtggacccactgaagctgataagccaataatcatagagctagctgttgcagctatggaggagctcattgggatggcacaaatgggtgagcctctttggttaactacccttgatggcacatccactatgctcaatgaggatgagtacattaggtcttttcctcgagggattggtccaaaacctagtggcttcaaatgtgaagcttcaagagaaactgctgttgttatcatgaaccatgtcaacctcgttgagattctcatggatgtgaaccaatggtccacagtgttctctggtatagtctcaagagccatgactctggaagttctatcaacaggggtggctgggaactacaatggtgccttacaagtgatgacagcagaactacaactacctacaccacttgtgccaactcgcgagagttattttgtgaggtattgtaagcaacatgcagatgggacttgggcagttgtggatgtttctttggataatttgcgcccaggtccttcagccagatgtagaagaaggccttctggttgcttaattcaagaaatgccaaatggctattcaaaggtcacatgggttgagcatgtagaagtggatgatagaggtgttcacaatctttacaagcagcttgttagctctggacatgcatttggtgcaaaacgttgggttgcaaccttagatcgacaatgtgaaagactcgctagtgccatggcaacaaacattcccactgtagatgttggcgtgataacaaaccaagacgggagaaagagcatgatgaagctggctgaaagaatggtgataagcttttgtgctggagtgagtgcttccactgctcacacatggacaacactctctgggaccggtgctgatgatgtaagggttatgaccagaaagagtgtggatgaccctggaagaccccctggcatagttctcagtgctgccacttctttttggcttcctgttccacctaaacgagtctttgacttcctccgtgacgaaaactctaggaatgagtgggacattctttccaatggaggagttgtccaagaaatggcacacattgcaaacggaagagacacaggaaactgtgtatctctacttcgagtaaatagtgcaaattcgagccagagcaacatgttgatattacaagagagttgcaccaattcaacaggctcttttgtcatttatgctccggtggacattgttgcaatgaatgtggttctaaatggtggagacccagattacgtggcacttcttccttcagggtttgctattctccctgatggaaccacatcgcataatggaagtggtggcattggcgaaactggccctagtggttctctcttaaccgttgcgtttcaaatattggtggattctgttccaaccgcgaagctttctcttggatctgtggccactgtgaacaatctcattgcatgcactgttgagagaatcaaggcttctttgtctggtgaacctgcttgatcagagcttcaagacttttggattctgcgttgcagtttacaagaaggatcaacgggacgcattgcattgtggaaaattaaaaagttggtgttgaacctcggcttatattacaaagacggggagaagtcaagagcgcaccttgcatgattccttctcagtgccccaaaagagttctgagaggattaaggttcgggaattgacttccctagctagatatagtaaacgttaagagcacattttaagatcttgctaccctttaccatttccaagactaaaatatatatatagctagctaggattaaccttttgagtaactagggtttaacattaatgtaaaactcttgtctttttcaatatctgattttgtgtgatttagaagtagtagcaccggcactagttggtgggaaaatttgcattt

SEQ ID NO: 6153 - DNA, 1864 bp, Glycine max
  Clone ID: 700555564_FLI
aaattaaggcttttctataatgcttatggtactatgagcaaatctgatataacttctgataatgtcttttctttaaccccaggttattgctgaatatcttcaaaaaatcgatccaaaatcagatggcgcaaagagggattgggttgctatttatgatgaatgtgcctctgtcttatatcaggagattgattacaccaaggaggctgctaatgcagaattgtttgcaagtaactttaagaacatggattatgtgaaagttcctacaatctactgggattataccacaccacagattctgacaatggagtatgttccagggattaaaataaacaaaatacaagctttagatcaactgggtgttgaccgcaaaaggttagggagatatgcggttgagtcatacttggaacaaattttatcacatggtttcttccatgctgaccctcatcctggaaatattgcagttgatgatgtcaatggtggaagattgatcttctatgattttggaatgatggggagtatcagtccaaacattcgagaaggtttgcttgaaacattttatggagtttatgagaaagatccagacaaggttctacaagcaatgattcaaatgggagttcttgtccctactggagatatgactgctgttagaagaacagcacaattcttccttaacagttttgaagagcgcctggctgcacaaaggcaagagagagaggaagcaacaactgaacttggattcaaaaaaccattaagcaaggaggaaaaaataaagaagaaaaagcaacgtctggctgctattggtgaagatttattatctattgcagcagaccagcccttccgatttcctgctacattcacatttgttgttagagccttctcagtgttggatggcattggaaaggggcttgacccacgttttgacatcactgagattgccaaaccttatgccctggagttgctcaggtttcgtgaagctggggttgaagttgtcctaaaggacttcaggaagagatgggatagacaatctcaagcattttacaacttattcagacaggctgatagggttgacaagcttgctgacattatccaaagactggagcaaggtgatctaaagctgcgagttcgaactttggaatctgagagggcattccagcgtgttgctgctgtccagaagactatagggagtgcagtagctgctgggagcctaatcaatcttgcaacagttttgtatctcaattcaattcgggtgcctgccattgcagcatatatcttctgtgcactctttggttttcaagtgctcttgggcattgtcaaggtcaagaagctagatgaacgggaacgattgataacagggactgcataagcagctacatgatttaggattaggaccgaaaaatagctcatgttaaggtcatggttacaagtcaaccttcagagcatgaaaaggattaaatgacctggggagctgaaagaaagcattacccaacatttcggaagacttcagcaagtataaaaatttcaattagcaaatgatgggggctttctccattcacctgtttcagttaataaaaaaattgtgctctacaatagccaattggctttagagccacatttttgtcattacaccccacctccctcccaaaaaaattatatgttattgccccatagtaacatgtataggtatgatgtagagtttggatatattcacaattcactactacattccacgcccgaacttaaccgaaatctgtcaaaattcagctactatttttctatgtagcatgactcttattgtaattactattacagtattatacagtatgatgcagcttccaacaaaaaattggagaggaagctttgcccg

SEQ ID NO: 6154 - DNA, 1661 bp, Glycine max
  Clone ID: 700555601_FLI
tttcaattttacacaaatattttcataaagcgaattatactttgatttgttttataaattctttctgcatttgcttcattatcgtaaatggatttataaaacaaatcaaagtataattcgctttatttcaattttacacaaatattttcatactagaaatccgaattcacataattcttgtgacatctcctttttgtcacaagcatatgtattttttaatttattacacacccgaattattaacataaacatctataagttaagatctgtttttcaatatcatggaattttttttttctgaaaaatgaaataaaggattctttttttggagcacaaggaatatttcattataaattaaaacataataaccctctcaattctgtaataaatcaatggacaaattggttaaaggatcattattatcaatatgacttatctaaaagtagatggtccagattagtaccacaaaaatggagaaatagaataactgaatatcgtatagctcaaaataaagatttaaccaaatgcaattcatatgaaaaaagccaattaattctttacaaagaacaacaagtaaacgcattaaaaaaaaaaattagaaaacaatatagatacgatcttttatcctataattttatcaattatgcagataagaaagactcatatatttatggatatagatccctatttcaagtaaaaaaaaaccaagtgatttcttctaattacaacacgtataaaaaagaattattggatatcatagataatctctttatcaagaattatatatcggaagatgcgattctagatatggaaaaaaatatgtatagaaagtattttgattggatgggaatcaatagagaaatactaaatcgttccatatcgaatccagaattttggttcttttcaaaatttgtgatattttatgacgcatataggggtaactcgcaggttataccaatcaaattacttttttttttcttctaatgtaaatcaaaatgttagtgaaaataaaaagaacattactagaaagaaaaaaaatgaatctcttgaattggagttagagactcgaaatcgggcaaaagcagaataccctgatcaacgaaatcttgaatcatctatctcaaaccaagaaaaagatattgaaaacgattatgtaggatcagacagtgaaaagaatagtaagggtataaagaaaaagaaagacaagaacaagatggaggcagaacttaatttcttactaagaaattttttgattttacatttaaattggaataatttcttaggtcaaagaatatttaacaatgtcaaagtatattgtctcctgattagattaaaaaatttaagagaaattacaatagcctctattcaaagaggagaactaggtctagatattatgatgattcaaaatcagaagaatttaattcttctaggcttaaggaaaaagaaaaataacaaatttatgaaaaaagaaatatttgttatcgaaccagttcgcctgtctagaaaaaacaataaacaattttttatgtatcaaaccataggtctttcattaattcaaaagaataaacgaaaaatttatcacaaatacccagaaaaaattcatgttaataagaaaaatttttataaatatattacaagaacaagagatcaaaaaataacag

SEQ ID NO: 6155 - DNA, 1295 bp, Glycine max
  Clone ID: 700555604_FLI
gagcctctcttctgatccatcttcaaaagacactgagaagggaattcaacgctttactcaaagctttgtacctggagtgcacctcttcacatatgatgaacttgaagaggccacaaattactttgactcatctaaagaactaggagaagggggctttggaacagtgtattttggcaaactgcgggatgggcgttctgttgcagtgaagaggttgtatgagaacaactttaagagagttgcacagttcatgaatgaaattaaaatcctagcaaatttggatcatccaaatcttgtgacattatttggatgcacctctcgccacacccgtgaacttctgcttgtatacgagtacattcctaatggaaccattgccgatcatcttcatggtcaacgatccaaacctggaaaactctcttggcatattagaatgaatattgctgtggagaccgcaagtgcattgaaatttcttcatcaaaaagacataatccaccgagatgtgaaaaccaacaatattcttcttgacaataacttttgtgtaaaagtggccgattttggactctcacgtcttttcccagatcatgtcactcatgtttcaacagctccacaagggactccaggttatgtggatcccgagtaccaccagtgctatcagcttactaaacaaagcgatgtctatagctttggagtggtgctggttgagctgatatcgtccttgcctgctgtagatattacaaggcatagacaagaaatcaaattgtccgacatggccatcaacaagattcatagtgaggcactgcatgagctagtggaccctagccttgggtttgaatcgaatttcaaggtcaggaaaatgataaatgctgtggcagagttagcatttcagtgcttgcagagttccaaagagatgaggccttctatggaagaagtggcagacactctcaaggatatacagagtgatggcaaacataaaagccagcctgaggtaatggatatcacaagcacagctgatgatgttgtgttgctgaaggatgaccctcctccaccatcacctgattctaatgcggtgagcaagttgacaacaccaaatgctagcggttaagaggaccttctttctcacttccatgaaattaaccttatccaaatttatgtaagcagagttagttagcatcacattggtaccagtatccacccagttactgcccgcatattgtcatcttcttatgaggataaattttaagattgagatgtatatattgatgataaagctgctttggttatgaaatttcatctttaac

SEQ ID NO: 6156 - DNA, 1386 bp, Glycine max
  Clone ID: 700555621_FLI
gagagagagagatggggctaagaagtaaattaagaatgtcagcgtcagtggtgcagcaggggatgaaggaaataagaaggagcgtgacgtacatgcctcgaccgggggacggtgcgccgcggggggtgacgctgataccgggggacggaattgggcctctggtgactcatgcggtggagcaggtgatggaggcgatgcacgcccccatatacttcgagaagtacgatgtgcacggggacatgaggcgtgtgccggaggaggtgctggattcgatacggaagaacaaggtgtgcttgaagggtggtttgaggactccggtgggtgggggtgtgagctccctcaacgttcagctcagaaaggacctcgatctctacgcttccctcgtcaattgcttcaacttgcccggcttgcccacccgccaccacaacgtcgacatcgtcgtcattcgcgagaacaccgagggagagtactccggtctcgagcacgaggtcgttccaggcgtcgtcgagagcctcaaggttatgtccaagttctgctccgaacgtattgccaaatatgccttcgagtatgcatacttaaacaacaggaagcaagtcaccgccgtccataaagccaacatcatgaaactcgcagatggtctcttccttgaatcttgccgacatgtagctaccaaatatcctggtatcaagtacaacgagattattgtcgataattgctgcatgcaacttgtctccaaaccagagcagttcgatgttatggtgactcctaatctctatggaaatctagtggctaatacggcagctggaattgccggtggcactggggtcatgcccggagggaacgttggggctgatcatgctgtgtttgagcaaggtgcttccgctggaaatgtcggaaaggaaaagatggtggagcagaagaaggcaaatcctgttgctctgcttctctcctccgccatgatgctcaggcatctacagtttccttcattcgcggaccgccttgagactgctgtcaagcgtgtcatttcggagggcaactgcagaactaaagatcttggtggagacagcactacacagcaagttgttgacgctgtcattgccaatctcgactagactacaccttcccatggctatgcacaatctttttcaaatatccttcccccagtttgttgtaatcaaagttcattttctattgctatttttcaacagggttgaagactctctataataattcggcttaattttcatgtaattatgtttgctcaaccaaagtcacacttgtaacctgtccattgtttgaggcaatttgctcaaacaaaggatgcttctctatccacataatgtgtaatgtaacgttgattgaaacgaacaacactgccttcccccc

SEQ ID NO: 6157 - DNA, 950 bp, Glycine max
  Clone ID: 700555631_FLI
caagctagcatttactggctcaacagataccggaaaagttgtactcgaactggctgcaagaagcaatcttaagccagtgacattggagcttggagggaaatcgcctttcataatatgtgaggatgctgatgttgacaaggctgttgaacttgcacactttgctctgttctttaatcaggggcaatgttgctgtgccggctcacgtacctttgtacatgagcgtgtctatgatgagttcttggagaaatcaaagaaacgggctttgagacgtgttgttggtgatccattcaagaaaggtgttgaacaaggtcctcagattgacgtggaacaatttgagaaagtccttaggtacataaggtctggaattgaaagccatgccacccttgaatgtgggggtgatagattgggctcaaaaggcttctttgtccagccaactgtcttctcaaatgttcaggatgacatgttgatagcacaagacgaaatctttggcccagttcagtccatcttgaaattcaaggacattgatgaagtaatacgacgggcaaataaaacacgctatggtctagcagcaggtgtgtttactaagaacgtgagcacagccaacacattgatgcgggcactgagagctggaactgtgtggattaattgctttgatgtttttgatgctgcaattccttttggtggatacaagatgagtggtattggcagggagaaaggaatctacagtcttcacaactacctgcaggtgaaagctgttgtctcaccagtgaagaatcctgcgtggctataaaatgtccacacttgtgtcccttgtgtcttcaacaataaaaatcgattgcacacaagagctgaattttaatcatgaattaatcacctcgaatttgatgtgatcttagctaacaaacgtgcttcgtatatttatttatccaaaataaaaagttccatgcatc

SEQ ID NO: 6158 - DNA, 2109 bp, Glycine max
  Clone ID: 700555654_FLI
tgttgaagcagttgttcatgcctgtgaacttgctgctgagtggcgccagactttccactctgatgtggttgtcgacttggtgtgttaccgtcgatttggccataatgagattgatgaaccatctttcactcagcctaaaatgtacaaggtaatccgaagccatccatcaactcttgagatctatgagaagaagcttttggaatcaggggagttgacacaagaagaaattgataggatacacaagaaggtcacatcaattctaaatgaagaatttttggctagcaaagaatacattccaaaaagaagagattggctttcagcgtattggcttggtttcaagtcacctgaacagctttcacgtatccgaaacactggtgtgaaaccagagatcttgaaaaatgttggaaaagcaatcacaaccatccctgaaaatttcacacctcatagagcagtgaagaggatatatgaacaacgggcccaaatgattgaaactggggaagatattgactggggatttgcagaggcgcttgcttatgctaccttgcttattgaaggtaaccatgttcgattaagtggtcaggatgttgaaagaggaacttttagtcaccgccatgctgtagttcacgatcagacaacaggagagaaatattgtcccctggacaatgttataatgaaccaagatgaagagatgtttaccgttagcaatagttcactttctgagtttggtgttcttggatttgaattgggttactcaatggaaaatcccaattcattgataatttgggaggctcagtttggtgattttgctaatggtgctcatgtcatatttgacaatttcttggcttctggtgaggctaagtggctccgtcagactggtcttgttgtgttacttcctcatggttatgatggccagggcccagagcattcaagtgcaagattggaacgctttcttcagatggctgatgacaaccctcatgttatccctgagatggatccaactcttcggaagcagattcaggagtgtaatttgcagattgtgaatgttacaactcctgctaattttttccatgttctaaggaggcaggtacatagagaattccgcaagcctctcattgtaatgtcccctaagaacctgcttcgtagcaaggcttgcagatcaaatttatctgagtttgatgatgtccaaggccacccaggctttgacaaacagggaaccagattcaagcgcctcataaaagatcaaaatgagcacaaagatgttgaggagggtattagacgtttagtactttgctctggaaaggtttactatgaacttgatgaacatcgaacaaaggttgatgcaaaggatgttgcaatatgtagggtggaacagctttgtcctttcccttatgaccttgtccaacgagagcttaaacgatatccaaatgccgaggttgtttggtgtcaagaagagccaatgaacatgggtggatacacttacattttaccccgacttatatcttcaatgaaagctgtaaataggggaggttatgatgatgtcaaatatgttggtcgtgctccatctgcggccacagccactggtttcctcaaggttcaccagaaggagcagactgagattgctgaaaaagcccttcaacaggaaccgatcgacttcccattttgaaaaggcatttgcacatgcatccatcttttttgagagtgataataatgcatttagtttaatttatccaccacgtaaggagctatagttggaaggaaggtgacttcatacatttgctttcgagttttgaccttttatgatcttttggttccttgcaaaaagtcagctaagctgaatttcaacatgcctatgctgaaaatatttttatttccttgcgatacgcaaaggcgtggttgccttactggttgaattgatgccttggtaattaccattttttttaattatactgtataatttggaaaagcatcttcaataatttgtgactatgtaattccattttccagaggcgtgccttggtagtatagcctcgggatcatggccaacagtttctcgtaattttttttctcaaatatgctttttaataccatcaattcaaaaccaactttgat

SEQ ID NO: 6159 - DNA, 2502 bp, Glycine max
  Clone ID: 700555656_FLI
ccactcgggacaagcatctgctaaaatgtcatgaggttgaaagaacttatgaggtgaaggttttgaatcacaatgctgctcttcaactgcttacttggaatgcttttaaaagagagaaaattgatccaagttatgaggacgtcttgaatcgtgtagtaacttatgcttctggccttccattggctttggaaatcataggttccaatatgtttggaaaaagtgtagcaggatgggaatctgcggtggaacattataaaagaattcccaacgatgaaatcctagaaattctaaaagtaagctttgatgctttgggggaagaacaaaagaatgtttttcttgacattgctttttgcttaaaaggatgcaaattgacagaggttgaacatatgctatgcagtctttatgataactgcatgaaacatcacattgatgtgttggttgacaaatctctcataaaggttaagcatggtatagttgaaatgcatgacctaattcaggtcgtgggtagagaaattgagcggcagagatcaccagaagagccagggaagcgcaagagattatggttaccaaaagatataattcatgttttaaaagacaacacggggactagtaaaattgaaattatatgtctggatttctccatatcttacaaagaagaaacagtagaatttaatgaaaacgccttcatgaagatggaaaaccttaaaatacttattattagaaatggcaaattttccaaaggtcccaattattttccagaaggtttgagagtactggaatggcacagatatccttcaaattttttaccgtctaactttgatccgatcaaccttgttatatgcaagttacctgacagttccattaagtcatttgagttccatggctcatcgaagaagttggggcatctaacagttttgaagtttgaccggtgcaaatttttaacacagatacctgatgtatctgatctcccaaatttgagggaactttcatttgaagattgtgagagtttagttgcagttgatgactcaattggttttctgaaaaaacttaaaaaattgagtgcttatggttgcaggaagcttacgagttttccgcctctcaacttgacctctcttgaaacacttcaactatcttcgtgttccagtcttgagtattttccagaaatattaggagagatggaaaacataagggaacttcgtttgactggcctttacataaaagaattgccattttcatttcaaaatcttactggactccgtctgttagccttgagtggctgtggaattgttcagttaccatgtagcttagccatgatgcccgaactgtcttcattctacactgattattgcaacaggtggcaatggatagaattggaagaaggtgaagaaaaattgggctcaataatatcttcaaaggcacaattgttttgtgccacgaattgcaatctatgtgatgattttttcttagcaggtttcaagaggtttgctcatgtaggatatttaaatctatcggggaataatttcacaatccttcctgaattcttcaaagaactgcaatttttaagaactcttgacgtgagtgattgcgagcatcttcaggaaattagagggcttccaccaatcttagagtattttgatgcaagaaactgtgtatcctttacttcctcgagtacaagcatgcttttaaatcaagtattgtcttattttatttaatgtatatgatttgatgatgtatgctgcacttaatgctgttaaacttatgaattatgactaataggaactgcatgaggctggaggaacccagtttgtgtttccaggaacaagaataccagagtggttcgatcaacaaagcagtggaccttcaagttctttctggtttcggaataaattccctgcgaaacttgtttttcttcttattgcacctgtgtcgggtgccagctatcctttccttgagcccaagttgttcatcaatggcaaagttctgccattcaaaaatgaggtgatagatatgttgaaattggatcatacatatatctttgatctccaagagttacctttcaaaaatgataatctgtttgaagaagtggcttgggaaaaggaatggaaccatgtggaggttagatatcaaagtgtgttagagtatgaaaatgaaaaaagaaaaggtgtgttagacttagagagctcactcattaaagcaactggaatccatatattcaaagaaggtgtgtcagatattcgatttgatgatccatatctcagcagctctgcatcagaaagcccctccttcctacaaaccatagctttggggacacgcaagttttccattgcttttttcttatttttttcatgttttttattttattattttggtttcagttgtcaaaagttcacttaacccaactgttgttcaccctatcttcaacatgtacttctgactcatttatattcatttttcacgactttatgcattttctatatataacctttcaagttttatctttct

SEQ ID NO: 6160 - DNA, 1088 bp, Glycine max
  Clone ID: 700555694_FLI
tgaccctgcccaacatcaaggttcctctcattcttggtatctggggaggcaagggacaaggaaaatctttccaatgtgagcttgtctttgccaagatgggaatcaaccccatcatgatgagtgctggagagttggaaagtggaaatgcaggagagccagcaaaactgatcaggcagagataccgtgaagccgcagacttgatcaagaagggaaagatgtgtgctctcttcatcaactatcttgatgcaggagctggtcgtcttggtggaaccacccaatacactgtcaacaaccagatggtgaatgccaccctcatgaacattgctgataaccccaccaatgtgcagcttcctggtatgtataacaaggaagagaatccccgtgtgcccatcatcgtcaccggtaacgatttctccacactctatgcgcctctcatccgtgatgggcgtatggagaagttctactgggcaccaacaagggatgaccgcattggtgtctgcactggaatttttcgcaccgattcaattcctgaacaggacgttgtcaagattgttgacaccttccctggccaatccattgatttctttggtgcactgagggccagagtatatgatgacgaagtgaggaagtggatttctggtgttggtgttgacggcattgggaagaagcttgtgaactcaaaagatggacctccaacctttgagcagcccaagatgactctggagaagctcttgacgtatggtaacatgcttgtccaagaacaagagaatgtcaagagagtccaattggctgacaagtacttgaacgaggctgcacttggaaatgctaacgaggatgctattaacaggggaactttcttccaatcttgaattggaggcaaagcaaacttggcaagtaaatatttctgttcctgaaggttgtgctgatccaagtgctagaagttgtgatgggacttgcgtgtaacattcttagaattctcaatgtcttaggtgcaaagagaagatgccaagtttgagatgattttactatatttttcatattggactgtcttcctctataattttgagttaaagtgtccacttaaattg

SEQ ID NO: 6161 - DNA, 1041 bp, Glycine max
  Clone ID: 700555713_FLI
caggaagctgctaaacgtcaagaatcaaacggttctggggctgaagtggaatacaaacctcttcccagtggaccaaatggtgccaatgaaaaggacaccaaggaacaagaggtgactattattgaaaatgtatattggaaggagtttggccttcttgtatttgtttgggtttcattccttgcactacagattgccaaggaaaactatacgactacttgttcaacattttattgggtactgaacttgttacaggttccagtttcagttggagtaacagcatatgaggcagctgccttgttcagtggacgtagagtaattgcttccacgggagaacaagggaaagatttcactgttctccagctaattatctattgtgtctttggtgtactggctggtgtagttggtggcatgttgggactaggaggaggattcgttatgggtccactttttctggaactgggagtcccacctcaggtttctagcgccacagccacctttgccatgaccttttcctcatctatgtctgttatagaatactacctgttgaaacgttttccaattccttatgctctttacttcgtccttgtggctactattgctgccttcgttggacagcacattgtgagaaaactaatcatcttatttgggagagcatctcttatcatctttattctagcctctacaatatttgtcagtgcagtctcattaggtggagttggcattgtaaatatggtacacaagatcgataatcatgaatacatgggatttgaggatctctgcaaatacgggtcatagcacatattggaagattattttgtcgtatttacattattattcaaggtccctaccaaagccaagaaccaaggtggccaaaattgacttcaatttcgtgccatggctacaatagtgttagttaggtgtcatttattttattgcttgccaagtcatggagtgattcggtggggaattcagatactgaattattcaaaatattcattgtgttcagcttcagcttttgtatcatctaagattttttaaatt

SEQ ID NO: 6162 - DNA, 1377 bp, Glycine max
  Clone ID: 700555716_FLI
gtgtgcttctgctggcggcggcggttcaagctggcgctggcggaggcgccgtcggaaatcaagaccctattcaatgagtactccgagaatgagctcatgacaccttcgcatcttaagagattcctggtcgatgtgcagaggcaagagaaggccactgaagaagacgcgcaagccatcatcgatagcttcaggcatttccatcgcagaggcgctggcctcaatctcgaaactttcttcaagtacctcttcagtgacgataatcctcctcttcttccttctcatggggtgcaccatgatatgactttacccttgtcacattatttcatatatactggccataattcctatttaactgggaatcagctgagcagcgactgcagtgacgtccccatcataaatgcactgaagaaaggtgtgcgggtgattgaattagacatatggcctaatgcatcaaaggatagtatagatgttcttcatggaaggtttactcagcggaatatactgagggtgtatccaaaaggtactcgcattgactcatcaaattataacccattaattgggtggatgcatggagctcagatggttgcatttaatatgcaggggtatgggagatctctttggttgatgcatggaatgttcagagccaatggagggtgcggttatgttaaaaaaccaaattttctattggagactggtccagatgacgaggtcttcaatcctaaagctaagttacctgtgaagactactttgaaggtgactgtatatatgggggaaggatggtactatgatttcaagcatacacactttgatcaatattcacctccagacttctacacaagagtggggattgctggagtccctaatgatactataatgaagagaactaaggcaatagaggataattggttacctacatggaatgaggcatttgagttccctctcactgttccggagttggccttgcttcgcgtagaagttcacgagtatgacatgtctgagaaagatgactttggtggacaaacatgcctacctatctgggagcttagaagtggcattcgagcaattccactgcatagccaaaagggagataaatacaacactgtaaagcttctcatgcgctttgagtttattaataattgattctgtgcaatgtgcatccttctgctccccattattattattattattatgtacagtcattaagatgtgttagtagcaagagtttgtatgtagtagctggatgatatcgtgaattatgtgccccgttaaatgatgtaagaaacaaaatgtgttgtgtattttgttttcttgaggagacttgttggtcttgtaaggcttgtcaatatatactacttatatatatatatatatataaac

SEQ ID NO: 6163 - DNA, 1205 bp, Glycine max
  Clone ID: 700555748_FLI
atgggatcagtttgtgaagagcgatggataacagttaccatcacaacggtggcattggtgatagcttcttcagcaccattattattggcggcatgcccttacacctccatcttcagcttcggtgattcacttgcagacactggcaacttgtatttcagcccctacccacccaccaaccactgccttttccctccctacggcgaaaccttctttcaccatgtcactggacgctgctccgatggccgcctcatcatcgatttcatcgctgagtcactggggattccacgggtgaagccgtatttgggaatcaagaatattgggagatggagtgtggaagaagggggagccaattttgctgttattggagccacggctttagatttcagcttctttgaagagaggggcgttcctgtgaaaaccaattattctttgtcagctcaattgaattggttcaaggaattgcttcctactctatgcaattcttccacaggttgccatgaagttcttagaaactcattatttctggtgggtgaaattggtggaaacgatttcaatcatcctttctctatacgaaaaagcatagtagaagttaaaacatatgtgccatatgtaatcaatgcaatatcttcggcaatcaatgaattgattggtctaggagctcgcacgctcatcgttcctgggaattttccaataggatgcagtgcaagttatttaacaatctatgaaaccgaatataagaaccaatatgaccaatttgggtgtttaaagtggttaaacaagttcgccgaatattacaataatgagctccaaagtgaattagataagcttcgaagactttatcctcgtgctaatatcatctatgctgattatttcaatgctgcattgcttttctatcgtgatcccacaaagtttggttttactggtcttaaagtctgttgtggaatgggaggtccatacaattacaacacatcagcagattgtggcaatccaggcgtgagtgcttgtgatgatccttcaaagcatattgggtgggatagtgttcacttgactgaggctgcatacagaatagttgctgaaggtttaataaaaggaccatattgtctcccccaaattaatactttgtgcttgatgaatgtaagctcgggctatttcaatagctaaaatgtttcttatgatgaaatgaagtgaaataaattcaatgtacc

SEQ ID NO: 6164 - DNA, 555 bp, Glycine max
  Clone ID: 700555760_FLI
gtagaactagtgatgcaggacaccagcattcttggtgctgaaagtcaccctctccatttgcatggctttaacttctttgttgttggtcaaggttttggtaactttgatccaaagaaggaccctgtaaacttcaatcttgttgatcctgttgaaaggaacacagttggtgtcccatctggtggatgggttgcaatcagattcctaactgataacccaggggtatggttcatgcattgccatcttgaagtccacaccagctggggtctgaaaatggcttggattgtattggatggaaaacttccaaatcagaagctgcttccaccaccagctgatcttccaaattgttaattattcactagaaattgcgatcataacttgttttttactatgttttttgtgtttttatctttttccgggttttttcttcttttttctcctttgaatggcccggcattcttcatgggctaactgactactactggcatattttccctcgggaaaagagtaaaacggtgtaatgtatcaagatttatgaaaaatatcaaatttattctc

SEQ ID NO: 6165 - DNA, 770 bp, Glycine max
  Clone ID: 700555795_FLI
cttgttcctccgctcaacaactataataacatctttctctctccgaacagatcacactatggccacctcaagcgccaaatcagtccatgatttcaccgttaaagatgccaagggaaatgatattaatcttggtgactacaaaggaaaggtccttatcattgtcaatgttgcctcacaatgtggcttgactaattcaaattacactgagctcagtcagttgtatgagaaatacaaacagaaaggtctggaaattctggcatttccatgcaatcagtttggggcacaggagcctggatctaatgaacagatacaagagtttgtttgtactcgcttcaaggctgagtttcccgtttttgacaaggttgatgtgaatggtgacaaagctgctccactgtacaagtatctaaaatcaagcaaaggtggactctttggggatggtatcaaatggaacttctccaagttccttgttgataaagagggaaatgtggttgatcgctatgcacccacaacttctcctctgagcattgagaaggacttgctgaagttgttggatgcatgaatgaagctatgaatgactggagctgccaataaatgaattgtgattagaatataaattatgaataagaaatgtattgcagatgctgctgcaatttcctgtgtgccttgtatgtgtaccgaaacagttactcttgtagctctgacattaggttcataaccatgagattgtgtacttattattgtgtgaatgtaaacttaagcttcctttagcc

SEQ ID NO: 6166 - DNA, 299 bp, Glycine max
  Clone ID: 700555828_FLI
caaattcttaaataaaagtgcccccattttcccaaaatcaccatctagagttttctcttttccactgaaaatcaaattagggtttggatttcggaattgccacagaatcatggccactctgaaagagcttcttcctcctgcaaaatcctcctccaccgcctactacgaccacaccaacgatccatggttcaagcagcgtttctcctcagaagaggaggagttggaatctcaactgatgcgactggagagaaagttggtacctttgcattggagatgcagctttatgtgcagcatatgcc

SEQ ID NO: 6167 - DNA, 1511 bp, Glycine max
  Clone ID: 700555866_FLI
gctaaaggagaagaagcaacagctgagcttgatgctaagatgaaaaaatttactgaagatgctatcaaatttaagatggatgacactgctgagttgtatgattttgatgatgagaaggatgagaacaaatttgatttcaaaaaaattgtgagtgaaaattgggtcgagccaccaagaagagaacggaagcgcaattactcggagtctgaatacttcaagcaaacaatgcgccaaggtggccctactaaaccaaaagagcctcgtattcctaggatgcctcaattgcatgacttccagtttttcaacacacacaggctgagtgagctgtatgaaaaggaagttcgctacctcatgcaagcacatcagaagaatcaggtgaaagactccatagatgttgatgaaccagaagaggtgggtgatccattgactgccgaagagttagaagaaaaggagcagttgctagaggagggattttcatcatggagccggaaggattttaatgctttcattagggcctgtgaaaagtatggccgaaatgatataaaaggtattgcttctgagatggaaggaaaaacacaagaggaagttgaaagatatgcaaaagtcttcaaagaaagatacaaggaattaaatgattatgatagaattattaaaaacattgaaagaggggaggcaagaatatcccggaaagatgagatcatgaaagctattgggaagaagttggaccgctacaagaatccttggcttgaattgaagatacaatatggacaaaacaaagggaagttatacaatgaagaatgtgaccgattcatgatttgtatgattcacaaacttggctatggtaattgggatgagttgaaggcagcttttcgaatgtcgcccttgtttcgatttgattggtttgtcaagtctcgcacaacacaggaaattacaaggaggtgtgacaccctcattcggctggtagagaaggaaaatcaagaatatgatgagagggagaggcaagctcgtaaagagaagaaacttgctgctaagagcatgaccccgtcgaagcgttccatgcctagacagactgagagtccatctctgaagaagcggaagcagttaaccatggatgactatttgagctcggggaagaagaaaaaataaatgggcgtatgcgtatattttactttgggtaaagcggggcggatgatgcggcgattttgatatgggcctagctgacatttcaagtgatggcctggtgtgacttcccaagtccgtgattttttgtgggcctgaatataatgtttgaatattgaaattttgtaaatttactaacaaaccgatagattagatgtttatttattgttaactgcagccaattcaacatatttaatgttgctattcttcatcctagtgttttttaattcatacttaaggcttaattactgttttagattttcaatttgaggtcttatttttatttttttaattgttataattgatatttaaagccgtccgtgttgaaaatt

SEQ ID NO: 6168 - DNA, 1228 bp, Glycine max
  Clone ID: 700555881_FLI
ctatttttcatttttgaatacatggattgtaatctttatcaattaataaaggagagagaaaagcccttttcagaggaagagatacggtgctttatgaggcaagtgctacaaggacttagtcacatgcacaagaaaggattctttcatcgggatttaaaacctgagaatatgctggtaacaaatgatgttttgaaaattgctgattttggactggctagagaagtatcatcgatgcctccatatactcaatatgtttccacacggtggtatcgagctccagaagttttgttgcgagccccttgttatactcctgctgttgacatgtgggcagttggtgctatattagctgagctttttactttgacccccatatttcctggtgaaagtgaaatagatcaactgtacaaaatatacggcattcttggtatgccagattccactgctttcaccataggggcaagcaactctcagttattggacatagttgctcatgaagttgttccgcctgtgaagctttctaatattattccgaatgctagtttggaagctatagacttgatcacacaactgttacattgggacccatcaagaaggccagatgcagatcagtcattgcaacatccatttttccatgtggatgcatgggttccttgtccgcccagtgatccacttgagctgaagctgagtagcaagagggcaaagccaaatcttgagctgaaactgcaggattttggccctgatcccgatgattgttttcttggcttgactttaggtgtaaagcctagtgtttcaaactcagatgtggtccaaaatgtatctcagggtgtcagagagaatgtgctattttgctcagatttcaatgatcattcagaccagtcagtattttggacattattatctcctgatcaaaatggaattcataactcagcagagacttcgttgtcattgtcattcagtccagttcaacatccgccaattggagttccacagtctgtgggattttcttttcagcctttgcagcctaacatcttaacctcaccatttttggctctctcttctcccttccagcgcggccactgcctttgaatcactctactttgaactgcagcactatgatattattgaatcttcataatgcatataacacttttatatttattttaattaatattttgtacagttctctctattatcatgaaatataatgtaattaccgagcaaattttat

SEQ ID NO: 6169 - DNA, 1798 bp, Glycine max
  Clone ID: 700555942_FLI
caagatcaaggaagaggatgtcgaaagaggatgtgtttgttggcgcgatcgaccaaggaacgagcagcagcaggttcataatatacgacgcgaagactggagtagtaggatgccaccacgtggagttcacccagttctacccgcaagccgggtgggtggagcatgaccccatggagatcttggagagtgtgaaggtgtgcgtggccaaggccgtcgataaggccaccgctgatggcttcaacgtcgataaaggcttgaaggccattggtctcaccaatcagagagagaccactctcctctggagcaaatccaccggcctccctcttcacaacgccattgtttggatggatgctcgcacttcttccatttgcaggagattggaaaaggagttatctggcggtagaaaccattttgtggagagttgtggcttgcctattagcacatacttcagtgctttgaagctgctgtggttgatggaaaatgtagatgccgtaaaggaggccataaagaaaaaggatgcgctgtttggaactattgacacttggttgatatggaatctaactggtggggtgaatgggggattgcatgttaccgatgtttcaaatgcatctcgtacaatgctcatgaatctaaaaacccttgactgggatgcatctaccttaaaaacccttaatattcctgctgaaattttgcctaatattgttagtaatgccgaaattataggagaggttgggtctggatggccaattgctggtgtccctattgctggatgtttaggggatcaacatgctgcaatgttaggacaatcatgccgtaaaggggaggctaagagcacttatggcacaggtgctttcatactactaaatactggtgaagggataattcaatcgaagcacggtcttttatccactatagctttcaagcttggcccaaaagctccaaccaattatgcattggaaggatcagttgctattgctggagctgcagtgcagtggcttagagacggtcttggcatcatttctagtgctgcagagatagaggagatggcattacaggttgaatccactggtggggtttactttgttcctgcttttaatggattgtttgccccatggtggcgtgaggatgctcgcggggtttgtattggaataacaaggtttacaagcaagggtcacattgcccgagctgtgcttgagagcatgtgtttccaagtgaaagatgtcttggattcaatgcataaagattcaggagaaagtgaatcccaaaaaacagagtttttgcttagagtggatggtggggcaactgtaaacaacctgctgatgcagattcaggcagatttggtgggatgtccagtaattagacctgctgacatagagacaacagcacttggagcagcctatgctgccggattagctactgggatttggaaagaagattttattttcaatactgaggagaagttgaagaatgctagagttttccgtcctgtaatgactgaggaagtaaggaaaaagaaagttgactcttggtgcaaagctgttagtaaaactttcgacttagctgatcttgctctttgatggtaaaacacagtttatgtttctttttatttttattttttatgtcctttacttctgggtataactttatttttagccttactaaaatgaagggagtaattatgtcaactcaaataaatttgacattatgtttctgtattgttccttcttttccttgtattttggagaagaaaaaagcatcacataaaatggaagaaatacattagtgggagtttcttatt

SEQ ID NO: 6170 - DNA, 857 bp, Glycine max
  Clone ID: 700555962_FLI
gcagcatagccacgttgtggcggccacgcgccaaacctgaaaaagaggaaatgctgtaatatcccaaaacaacgggacagagatagctcttcttcgatggcttccaaggcgatgagcgtggcagcagagaagatagggacggcggcgcggcgccaagccgtgtcgctaacggacgccgccgcctccagaatacggcagctactacagcagcgtcagagggccttcttgaagctgggagtcaagactcgcggctgtaacggcttatcctacaccctcaattacgcagatgaaaaagggaagtttgatgagttggttgaggataagggtgttatgatactgattgatccaaaggcccttatgcatgtcattggaactaaaatggattttgtagatgacaaactaagatcggaatttattttcgtcaatccaaattccaaaggtcagtgtggttgtggtgaatctttcatgacaacaggaagtagtggatcttctaagccatgaaatagttaaaattgctatccaagccgtggatcctcacgtaatgaagtcgtcctttcatgatttaattgataaatagacatacaagtacaactaatggatttctattattctgcctgcgagaacaagggaaacgaaaactttggtgctcagaacaaaaggatactgaggactgacatggtctcgatatacagagttctctgaagctgatggtaataggcttatttcaacaatttttattgtcatttgttttgatgattcttatttctaatataaaattctttgtatcatgagaattgtagtttgtaggtttacaatatcattgaaataattttcgttaagttgaagaaatttctctt

SEQ ID NO: 6171 - DNA, 416 bp, Glycine max
  Clone ID: 700556009_FLI
caacaattcgattatacattgagcaatatgagaaggatccatcaaagattgggagactttcaaacgaagcacttgctcctcttgtggaagttgcgttgaaactttcgaagatggaagaattcactggtcgatccgctccaacagtcattacatgaacacattcaagtggaaggtggttagatcctgaagcttctcccagtcatttcatttcttctttgtccagtatcttacggatagccgaacagtagatttggttgtttgcagcctttgctatgggaaattgagtggaatttgagtttctttatctaaattttgatatgctgaataatttgcaacagccgagtgctaattatatagtcttaatataatggtttctcttgtattggctttttatttttaggtttatagatctggat

SEQ ID NO: 6172 - DNA, 966 bp, Glycine max
  Clone ID: 700556019_FLI
tgcctgcaacagccttgatcatgaccctgatctgcagcacatgccggtcttcgccgtgtcctcgcggttcttcaattcgataacttctcatttctatgggaggaagttggagtttgatttcattgcaaggttcttgatctgctaccagcacttcactttttacccggttatgtgtgttgccagggtcaacttgtatctgcagaccattctgctattgttttcgaggcgtaaagtgcaggatagagccttgaacataatggggatccttgtgttttggacttggttccctcttttggtgtctttcctgccaaattggcctgagagggttatgtttgtgcttgctagctttgctgtttgttccatccagcacattcagttctgcttgaatcactttgctgcaaatgtgtatgttgggctaccgagtgggaatgactggtttgaaaagcagacaagtgggacattggatatctcttgctcctcttcgatggattggttcttcggtggcttgcagtttcagcttgagcatcatttgtttccaaggctacctcggtgccaattgaggaacatttcgcctttggtcagtgacctttgcaagaagcataatttgccttataggagcttgtcattttgggaggccaatcagtggacaattaggaccctcaggactgctgccctacaggctagggacttgacaaaccctgcccctaagaatttgttgtgggaagctgttaatacccatggctgaggtatttggagtttatagagtttaggattttgtcaaggtcttttttttttgttttctcttgaaaaagaaaaaaaaaaatctcattgtgattttgctagccaccacttttccagtttgggctttgaatttaactttttgttgggtgtggtgtagaaatggatggtgatccagatgttactgcagttcatgtgcttttcatcaatacaaaattaatatcatgt

SEQ ID NO: 6173 - DNA, 1005 bp, Glycine max
  Clone ID: 700556044_FLI
gtgaatcagcaccacattcacctgagctttttgtgaggattccaaagcatggcttcccttgcagcatccactgctgctgcttcccttggcatgtcagaaatgcttggaaaccccatcaacctcagtggtgccacaaggccagctccatctgcctctagccctgcctccttcaagactgtggctcttttctccaaaaagaaggctgcacctccaaaaaaagctgcagctgctgctcctgccaatgatgagcttgccaagtggtatggtcctgacagaaggatcttcttgcctgagggtctcttggaccgatctgagatcccagagtacttgaccggagaagtccccggagactatggttatgacccatttggtcttagcaagaagccagaagatttttccaaatatcaggcatttgaattgattcacgccagatgggcaatgcttggtgctgctggattcatcattcccgaggccttcaacaaatatggagcaaactgcggtcctgaggctgtttggttcaagactggagctctgcttcttgatgggggtaccttgaactacttcgggaaacccatccccatcaatcttattgtggctgtcattgctgagattgttcttgtgggaggtgcagagtactacagaattattaatggcctgaatttcgaagacaaacttcatccaggtggtccatttgacccattggggcttgcaaatgatccagaccaagctgcactgctaaaggtgaaggaaattaaaaatggaagacttgctatgtttgccatgcttggtttctacttccaagcttatgtcactggagaaggtcctgttgagaaccttgcaaaacatctcagtgacccttttggcaacaacttgctcactgtcatttctggatctgctgagagagctccaactctctaaatcattcatcttcatgtttttctccaatcttacttaatgtacaatacatatcactgagatattaaggcatttggctttgttccttgg

SEQ ID NO: 6174 - DNA, 2160 bp, Glycine max
  Clone ID: 700556046_FLI
cgaacccttcctgttagggatgaacttcttagagctcttctgaattctgaccttattgggtttcatacttttgattatgccaggcatttcctctcctgttgcagcagaatgcttgggatttcttaccaatccaagcgtggctacattggccttgagtactatggaagaacagtaagcattaagattcttcctgttggtattcatataggtcagctccaatctgtcatgagtcatcccgagacagaaagcaaggttgcagagttaaaaaaacagttcagagatcaaactgtgctgctcggggtggatgacatggatatcttcaaaggaatcagcttaaaacttttggccatggaacaattgcttttacaacatcctgataagaggggcagagttgttctggtccaaattgctaaccctgcaagaggccgtggaaaggatgtgcaggaggtacaaagtgaaacttatgccacgatgaagaggataaataatgcatttggaaggcctggatacacacctgtagtcttgattgatacaccacttcagagttatgagcgaattgcttattatgtgattgcagaatgttgccttgttacagcagtgagagatgggatgaaccttataccctatgaatatatcatttgtagacaaggaaatgagaagatagatgagattttagggacagacctgcttactcaaaagaagagtatgctggtggtgtctgagtttattggctgctccccttcgttaagtggggcaattcgagtgaatccatggaacattgattctgtcgctgaagctatggattctgcgttgatggtcccagaggctgaaaagcagatgcggcatgagaagcattataggtatgttagtacacatgatgttgcgtattgggcacgtagcttcttgcaggatctggaaagggcatgtagagatcatctgaggaggagatgctggggaattggttttggtttaggcttccgagtgattgctttggatccaaactttagaaagctatctgtggaacatattgtttcagcttataagaggaccaagcaccgagcaattcttttggattatgatggcactatggtgcagcctgggtcgatgagtttaacacctaatgctgaagccgttagcatcttgaacatcttgtgcagggacaccaagaattgtgttttcattgtaagtggaagggagagaaagactcttactgaatggttttcttcttgtgaaaggatgggaatcgctgcagagcatggttattttgtgaggacaaatcgaaatgcagaatgggatacttgtattccagtacctgattttgagtggaaacagattgctgagccggttatgcagttatatatggaaacaactgatggttcaaacatagaggccaaagaaagtgctctagtttggaattacgagtatgcagaccgagactttggttcatgccaagctaaggagctttttgatcatctggaaagtgttcttgccaatgagcctgtttctgttaaaagtagtccaaacattgttgaagtgaaacctcagggtgtgagtaagggtattgtagcagaacgtcttctcttaacaatgcaacaaaagggagtgtttccagattttgttctatgcattggagatgacagatcagacgaggacatgtttggggtaatcatgaatgcaaaggcaaccctatctccagttgctgaagtgtttccatgcactgttggccagaaacctagcaaggcaaagtattatttggaagacacaagtgagattttgagaatgttgcaaggccttgccaatgcttctgagcactctactagaacttctttgcaaccagcttctcattaaggttctttttaatgtgtagagtgcaaacacacacacacacaatttggctacaatgtagtactatttttctatactatactgggatatctatcttgtgttagatttcgtgatctattttattttctggctgacttgccttcatttattgatatcccaactatgttgcaactatcaataggttgttttgaaagtagatgaattacatggggtactgtatttattgtttcttttcttgactattggtttgggccattttgatgtatgataaagtgatttttgattgggaatgaatgaatgctaggattgtgaatc

SEQ ID NO: 6175 - DNA, 1356 bp, Glycine max
  Clone ID: 700556105_FLI
ctctcttcgcagcctaaaatcccaatggcttcactctctgttttgcgccacaaccacctcttctcgggccccctcccggcccgccccaagcccacctcctcctcctcctccaggatccgaatgtccctccgcgagaacggcccctccatcgccgtcgtgggcgtcaccggcgccgtcggccaggagttcctctccgtcctctccgaccgcgacttcccctaccgctccattcatatgctggcttccaagcgctccgctggccgccgcatcaccttcgaggacagggactacgtcgtccaggagctcacgccggagagcttcgacggtgtcgacatcgcgctcttcagcgccggcggctccatcagcaagcacttcggccccatcgccgtcaatcgtggaacggtcgtggtcgacaacagctccgcgtttcggatggacgagaaggtgcctttggtaattcccgaagtgaaccccgaagcaatgcaaaacatcaaagccggaacgggaaagggcgcactcattgctaaccctaattgctccaccattatatgcttgatggctgctacccctcttcatcgacgtgccaaggtgttacgtatggttgttagtacctatcaggctgcgagtggtgctggtgctgctgcaatggaagagcttgagctgcaaactcgtgaggtgttggaaggaaaaccacccacttgtaaaatatttaaccgacagtatgcttttaatctattctcacataatgcgtctgttctttcaaatggatataatgaagaagaaatgaaaatggtcaaggagaccaggaaaatctggaatgacaaggatgttaaagtaactgccacatgcatacgagttcccatcatgcgagctcatgctgagagtgtgaatcttcaatttgaaagaccccttgatgaggacactgcaagagatattctgaaaaatgctccaggtgtagtggttattgatgatcgtgaatccaatcattttcctactccactggaagtgtcaaacaaggatgatgttgctgttggtaggattcggcaggacctgtctcaggatgggaatcaagggttggacatctttgtatgtggggatcaaattcgcaagggagctgcacttaacgcaatccagattgctgagatgttgctatgagttctggtttttcaaggatctggtacttaaagattatgcttcttttgaaacagttttgtatgtgctagttgtatgtggttattcatttcttttgtgatgtttaactagtccaagtatcttttcaacgatgtggtagcacactagctggaaacagtttttttaaggtcttggtgcgtaatatctgcaatccttttcaccggg

SEQ ID NO: 6176 - DNA, 1780 bp, Glycine max
  Clone ID: 700556108_FLI
ctgagaatgggatggtgagtagtgagggtgaaaccagtttcacttgtgtcatgaagtttggtggctcctctgtggcttctgctgataggatgaaagaggtggctacccttatattgagttttcccgaggagaggcctattgttgttctctctgctatgggaaaaacaacaaacaagcttttgctggctggagagaaagctgtgagttgtggtgttatcaatgtatcaagtattgaggagctttgctttataaaagacctgcatctaaggactgtggatcagcttggtgtggacggatctgttatttcaaagcatctagaagaattggagcaacttctgaaggggatagctatgatgaaagaattgactaaaaggactcaggactatttagtctcctttggagaatgcatgtcgacaaggatctttgctgcatatcttaataaaataggtgtcaaggctcgccaatatgatgcatttgagattggttttataacaactgacgacttcacaaatgcggacattttggaagcaacttatccagctgttgcaaagagattgcatggtgattggctctccgatcctgcaattgcaattgttactggcttccttggaaaggcccggaaatcatgtgcagtgacaacactgggaagagggggcagtgatttgacggctacaacaattgggaaagcactagggttgcctgagatccaggtatggaaggatgttgatggtgtcctaacctgtgatccaaatatatacccaaaagcagaacctgttccttatttgacatttgatgaggctgcagaactagcttactttggtgctcaggttctacatccacagtctatgagacctgccagagaaagtgatattcctgttagggttaaaaattcttacaaccctaaagctccaggtactctcatcaccaaggcaagagatatgagcaaggcagtattaacaagcattgttttgaaacgtaatgtgaccatgttggatatagcaagcactcgcatgcttggtcagtatggtttccttgctaaggtgttttcaatctttgaagagttaggcatatcagttgatgttgtagctacaagtgaagtcagtgtttccttgacactggatccatcaaagctatggagcagagagctaattcagcaggcaagtgaacttgaccatgttgtagaagaactcgagaaaatcgctgtggtgaatctcctacagaatagatccatcatctctctcattggaaatgttcagagatcatcactaatattggagaaggctttccgtgttcttcgaacccttggcgtcactgtgcaaatgatctcccagggtgcatctaaggtgaacatctcattggttgtaaatgacagtgaagcagagcagtgtgtgagggctctccactcagccttctttgagagtgagctctcagagttagagatggattacaaaaatggcaatggttctgttgatgagttatcttaggggacacttgagtgtgtcaattctttgtcctaaagagtatgtgtcccaattttatatgctaatgtcaagcaagcatttttgaatttctcctagccttgtcactgtgatgtaccagaacaatgtattttacttgaagaaatatgctgggttgggaggaatggcaaagcattggtgtatcactagtcttggtagttggtattactagtgagtagtgagtaaacctttgtattcttttgtagctgctttcaaaaggttaataaccagctgcaaatcaattattattgactatattattg

SEQ ID NO: 6177 - DNA, 2221 bp, Glycine max
  Clone ID: 700556144_FLI
ggaggggagaaggagtaccattgtcagcggtgcaaacagaaagttaaggctctcaaacagctaacaatacataaggcaccttatgtgctaacgatccacttaaagcggtttcatgcccatgatactggacaaaagattaaaaagaaggttcaatttggctgtgcactggacttgaaaccttttgtcagtggctcaaatgatggagatgtgaagtactctctatatggtgttctggttcatgctggttccagcactcattctggacactattactgctatgttcgcacttcaaataacatgtggtataccttggatgacaaccgggtaagtcatgtaagtgagcgggaagttttaaaccagcaagcatacatgttgttttatgttcgtgatagaaaaagtattgttccaaggaagcctgttgacattgctaagaaggaaaatatgaagactaatttgaatgtaaatagagaatcttcaacttcaaaccatgtattgaaggaatatccaaatggtaccgtcgaaaataaagctgagaagggtgctctagttctgcaaaagcatagtgtcatattagcagaaaacttgatacaaagtaaaagacatggatctgaactttcttctgaggcacaggcacagaaagactcaccggatggactgtctgtagctaaatcagaacttggatgcttgtcatcattagatcactctggaaaagattatagtctccctcataatctgaaatctttagctgcaccagttggaaaaaataatttgcgcaatgagaatgtattttcaaaagagggcattaaagattctccttcaatagtgccctcatccactaatccccagaatgttgaactcactactgaatggaaatctcagtctctgaagaaaaatcttgtcaagatagttgatgttgctacacctcaagattcaagcacaaatatgaccaatggcatttgccctaagacatcactaattcatctgaaagttaaccatcagcttggaacttctgcaattggttcggtgtgtgagaaagcaagtagtgtggtgcatgaagatctggttggttctcagggactggttcttaataagtcagtaaatacatctttgaatacagagagtcttaatcaaaagcctttgaaaaaatcaaaaaagaagttccttaagtatcaggtatcttggatgcatcttcgcccaatcttctattacatggcatacttgggcccacggaagaagaatcacaaaagaattaaacgccgcactttgagtatgaagaatccaaacaaagacaagcttgataagcttgctttctcatcagaagatgccaaacctgatgtatttccttgtctatcaagttgttctgatagtaaagcaaccaaggctggttatagacctagtgctaattttaaatctagtgatgaatctctaatagagactagggctgaaggggaatttaggaagagaattgatcatagctgtgctgtgcttgcatcagcggcgcaaattgaaaatatatctggaagtggttcagtagtaagtcaatttgaagctagacaggctgatagtgcacaagatagtacaagagatcaaatgcataatggtttaatgagtatgcctaatggaggtccggaggagacagttgttgctcgatgggatgatatagaattaccttcatctcagcatttggagtcaaagaatgacaaaactgtcagcattggatatgttggggatgaatgggatgaagaatatgataaagggaagaggaagaagataaggggcttcaagcatagctttggtgggcctaatcttttccaagaaattgctgtcgagaaatcgaagtttaaaagggcaaagtttgaccaatcttgctcagggaaccctccatttaggatatgacatccagaagaactctatgccttctattgcttggaggcttcttttgtagcaattttgtcaaacgctgaaagtgtaatgaagagagcacctaccttattcttttctccagtaaaaaaatttgtttggtggttcacatcattgtctttgggacagagccgcagagggttgggtttttgtgcacctgtgttcctgttggacatttctcattttcagactgtattattgtaggagctgcacgccgtagctcagaagttttgttcatgattttaaatcattcaagacaatttgtatttcagttttatgttacgaagcgtgtttatcgtgt

SEQ ID NO: 6178 - DNA, 1386 bp, Glycine max
  Clone ID: 700556183_FLI
cggtgtttgctttagaaggggagagtttggtctacacacaccaccacatgaagagcatggtgacgccattgacgagggtcttaccctttcgtcacccaaatggccataatacccttccattttctcttacacgctacccttcttcaccaaacttctccttctcccctctcactctcactctttccatggctgcttcaccccaatcctccgctccaactgtgtcgcctggtgatgttaacatcgacaaagatggtgtatttcaattgattcaagctcatcaggaaaaagctgctagacttccaccagttgaggagattcgaactgtccttgatcgtagcgtgcgcgggatgctctctacattctcaaagaagtttgatggttatccatcagggtctatggttgactttgcatgtgattcaaatggatatcctatattagcagtgagcgacttggcagttcattcaaaggacctaactgccaatcctaaatgttcattgcttgtggctagagatcctgaagataggactgatttagtgattactgtacatggtgatgctatctctgttcctgaaaatgaaagagaagccgttcgagctgcatatttggcgaggcatcccaatgcattttgggttgactttggagacttccaattcttgcgcattgaaccgaaagttgtacgatttgtgtcaggtgttgccacagctttttaggatcaggagagtttagtggagatgagtataaatctgcaaaagttgatcccatagctcagttttccaagccagtggcgtctcatatgaacaaagatcatgctgaagataacaaagtgattgtgcagcattggacctcagttccagtggactttgccttcatactagatttggatagtcttggtttcaatgttaaggctggttatcagggtgatactttcaagcttcgtgtacctttccctcgatgtgcagaagatagaaaggatgtgaagactctcattgttgagatgcttcaagctgctaggcctaaagttgattgatcacttcacagatcaatgatgaacagcacctgccatccttcttggggagaggacaaaatgtatacgtcaaaaaaagtaaatgcagttataatttccaaagataaagatgacaaagcaaatggttgactttcctaatttcttgttcactctatttgggattttcaagagggaaagcacttgaatattctagcatacagcacaagtggtgtgatactttatctaagaaacaaacccttcatacataaatggttttattatgtatttcttcaggtgtgagttgaaacaatgtatggatggataataattaattatttttggtacttgcaatagcaaactctgagctagatgttgtgccatct

SEQ ID NO: 6179 - DNA, 1887 bp, Glycine max
  Clone ID: 700556204_FLI
actgataattgatgatcaaataataatataaaatatttactctgtatgcccatcatcaacaagaaattataagtaaaaagaaacatgtaaaataccagggagagctatagccctgggatataaccccatgacttttcaggtagtgctgcaagaaattataagtaaaaagaaacatgtaaaataccagacactaccaacagataacagagccctcgttttcttgagaaataaatgtccaatgtgtaaaagaaaatgaaattcaatattcaatttgaactcacaaggtggttttggacgctcagtacaagacttccatccttggaaagccagggagaccagagattagtttggagttcaactgatgtttggcgttgcaaggcaccctctagcaaatccacgtgcataggccccgaagcattccactccttccccaagtgtgagcctaataatttgtaatgggaattcgttgcagactcaagatcacttgctgaagggtttgggccatgagaatgtgatcctaagtatacaatataagactgcaacaaagaaaagacaaaacttaaaaaaccactgaaatttataagcataactggcacaagcaaaaaataccaaagaagcaacaatgaaataaggtgtaaaacagagaaacccattatatgttcctcagttcctctatgtgatgtgtcaacttgaagctatgctttcacctgcatatagtttcacttgttcttgaagtgataagtcaacaatgtgatagaattggacttcattatgaaagcaacatcgaacacaatcaatcaatcatgtagggaaacaaactttcaaaatcactcttcatgatgactaaatcttcaaagtaaataattagaaaataataaatttaattttcagatattaaagtaataaccttatcatgggagtacgcatgtatgatgcaaattattgttgtaaatatagctcaaacagttttgggaaatagattgctcacttggtatttgtaacgggcacatttgtaagcccaaacaattaataaacttgttctaagcccaaataaattaaaatcataattaagtagggaccaaacagaaagaaaagaaaagctatatatcttgctaatttaaaagtaagtttaatcatcaacaatttcctcactgtctgcagaagcgaaaataagctggggttctttcgttccaactccacacgttccatcaattgcattgttcctccccaacggcttcaatgccaaatgagccaccttctgctctgatatcatcatcgcccaaaacatcggaccctgcatatatagtgaataagggattgagagaatgcagagaacctgcgtagagtttggaaggagcagaaggcatggtatagtgtatgttgtgtcttctgctttcacttccaactcattttgtggtagaacaacgatgcaataacacttctcaagctttgaggcccaagttattttccaattgaagtttgcctttgttaacaattcagtgcccaacggcttgcgaaccaccatggcagagaagagttgtccgtcgtcacacaacggttgccctcgcaccagaccaaggagacgccgacctgcagcttggccatgtctctcctcggagagaccaatgccgtagaccaacgcctgcgtcgcccggatcttccagctgacccaagagatcgaccacaagttcgacggcaagaccatccggtggctcttggagcacgccgagtcggctatcatcaaggccactggcacgttcaaaatatcaaccagctcatccaacgagaaagaagccgcctctaacaagaagtggaaacgcccctcaaacaagaagtggaaacgcccctcaagagttcgagagatcgcggtttagctgctgcgcgtgg

SEQ ID NO: 6180 - DNA, 1265 bp, Glycine max
  Clone ID: 700556206_FLI
gagagacaagtatcgattattgatctgaaacgaaaaaaagagcaacaactgtgaaatctgtggaatcaaaggggcaagctgagaagtgtgccaagagaaagaggaagaaccagtatcgcggaatccgccagcgtccatggggaaagtgggctgctgagattcgcgacccaagaaagggggttcgtgtttggcttggaactttcagcactgctgaagaagctgcaagagcttacgatgctgaagcaaggaggatccgtggcaagaaagccaaggtgaatttccctgatgagccttcaggcgctgcttcctcaaaacgtctcaaggcgaatccagaggctcagccaatgaagaaaaatctgaactctgtgaagccgaaaataaaccagatgttcaattttggtgacaatcttgagggctactacagccctatagatcaggtggaacagaaaccactggttaaccagtatgttaaccgtgccccgtttgctggaaatggagttcaagtctcacctgttactccatctgctgatgttactgcttacttcagctctgagcattcgagcagctcgtttgattattctgacctcggatggggtgaacaagtccccaagacacccgagatctcatccatgctttctgctgctcctttggacggtgaatctcagtttgtgcagggtgctgctgatcagaatcagaagaagaacaacctgctggatatggcatctgtgcaagatgattctgcaaaaactctttctgaggagcttgcagacattgaatcccagctgaagttctttgagaccccttcttttcttgatgaagcctgggctgatgctgcattggcgtctttgctcagtgaagatgcatctcaggatgctgctggaaaccctatgaacctttggagcttcgacgacctgccttccatggcaggagtcttctgaacaccttcatatccctttttatgtaaataaagctacaagaattgtgatcgtgatgttggtgatggaatccacagcaagaaaaccaacctgcttaaagcatatgtggagtttatttatcttgtagctaatgcagtataggactatatataggtttttatagggtatcctttgtgtgaaactcaagagacctcgttttcaggggattttctgtttgatgtccataaggattatcaattatgttatatatggtctgggatacagtcttgacttacagtttttaacttggttgttttcattgttatggcaatttgattatgatttgagacc

SEQ ID NO: 6181 - DNA, 1324 bp, Glycine max
  Clone ID: 700556226_FLI
caaggatagagatcaggatagagatagagaccgttatagggatgatgggatgaaagaaagggaccgtgaattccgagaaagggacaaatctactgcgattgccaacaaggatgttttaggttctaagatgtctctatatcccagcaaggagaagtatttatccaaacctataaatgagctggacctttctaactgcgaccagtgcactcctagttaccgtctcttaccgaaaaattacccaatacctgtagctagccagaaaacagaacttggtgctgaggtgttgaatgattactgggtgtctgtcacttcaggaagtgaggattattccttcaaacatatgcgcaaaaatcagtatgaagagagtttgtttagatgtgaagatgacaggtttgaacttgacatgttgttagagtctgtaaatgtgacaaccaaacgagtagaagagctgttagacaagatcaatagtaatataattaaaggagacagcccaattcgtattgaggagcacttaacagctataaaccttaggtgtattgagcgattatatggtgaccatgggcttgatgtgatggaagtgttaaggaagaatgcacctctagctttgccagtgatattaacacgcttgaagcagaaacaggaagagtgggcaaggtgccgtgctgattttagtaaagtttggggtgaaatatatgctaagaactatcacaaatctcttgatcatcgtagcttctactttaagcaacaggatactaaaagcttgagcaccaaaggtaataaataacttttcatttcaataactttgaattctcgaagcttttaatgtttggatcagagtattcttttaaggctacaaaaatttaatcatgtaagatatcatcatcattttgttgatatacctaaaccagagttgtcaattgcacgctatagcgctggtgcgttgtggctattgccgctctgttaaagcccatcttgtcactgcttgctgttgtgcttggaatggtgcaaatcgcggccatttttttggctattcggggcattagcagacgcagctttgattaatggttgaaaacccctgtttacccccacaatactgcgtcgtttaaggtttattttgggggacacacttaccttatttaggttttgaaattgaaaccctattactaagagagctggtaatactgtagctgaccagttagctagttttgcttttttgttcaaagagatgtatttgggttgggggctatctccatcagattgaatctgctattttagctgatgtacagactttgatttctaaagaatagaaacagtatttgacgtc

SEQ ID NO: 6182 - DNA, 2002 bp, Glycine max
  Clone ID: 700556229_FLI
aggcccacaatcataacaaccaaaaagcccccttctccttccaacccctccattttcaacaacaattcctctaagcatcgttcagacaagggtacaccacaacagcttttgttagtcctcaccaagcgatgagagttcccgttccctcatccccacaggccaacccaaaacccaccaataacgttgtccgtaccattgcccttcccaacctcaacaatagcaccacgccccccacgggcctgtgctacgagcccacttctgtccttgacctgtgccggagcccgagcccgggcaccgaaaagcccaccaccgatcactccgttctcgtcaccaactcccaagactatctcgacctggaagaccatgcgttgcacaacttggactgggactccatcatgaaggacttgggcttacacgacgactccgccacccccgttttgaaaacttttctccaccccgacgacgacgacgacgacgacaacaacaacaacccatcatgcgacgacttcacactcttcgaccacgcgcttgaattcaccactctctccgacatctactccaaccaaaacttcgctttcgatttcaaccacttgcctcacgacttcaaccacctcaacggcttcgatttcatcgaagagctcatccgcgccgccgactgcttcgacaccaagcagttacacgtggcgcaactgatattggagcggctcaatcaacgactacgatcgcccgtcggaaaaccactccatcgcgcagcgttttacctcaaagaagctctccagagtcttctctccggttcgaaccggactccgaggatttcatccctggtggaaatcgtgcacagtatcagaaccttcaaggccttttcgggaatttcgccgatcccaatgttctcgatcttcaccaccaatcaaatagttctggatcacgcggcgagctccttcatgcacgtcatcgacttcgacatcggtcttgggatccaatacgcttccctaatgaaggagattgcggagaaggcggcggattcgccggtgctccgaatcaccgccgtcgttccggaagaatacgccgtcgagagcacgctcgtccgcgacaacctcgcgcagttcgccctagatctcaggatccgcgtgcaggtcgagttcgtgccgcttcgaaccttcgagaatctctccttcaaggccgtgaagttcgtcaacggggagaacaccgccgtgctcctgtcgccggcgatttttcgccacctcggcaacgccgccgcgttcctggcggacgtgcggaggatctcgccgagcgtggtggtttttgtggacggcgaggggtgtgcggagactgccacggcgtcggcggcgtcgttccggcgcggcgttgtgagcagtttggagtactactcgatgatgctggagtcgctggacgcgtcgacggtgggaggcggaggggagtgggtgaggagaatcgagatgatgcagcctgcggccgaagattttggcggcggtggagagtgcgtggcggcgggttccgccgtggagggaggcgttttacggcgccggaatgaggccggtgcagttaagccagtttgcggattttcaagcagagtgcctgttagcgaagtctcaaatcagaggatttcacgtggcaaaacgccagaacgaactggtgcttttctggcatgatagggccattgttgccacgtcagcatggcgctgttagaacatggagtgttattattggcagaggggattatgtaataatgtagtaattataataaactgcaacgaaagtaaatttaggttccaatttcgaagtccactacactcgttcaaactattgctatgatggaaaaaatctaggtatctttggcaaaaggaaaaggtggggagggggtggtagataagataaacttgtatttttctgtaccattttgttgtccttctttgttggatggactctttgttatcctgatgaactttactactggttttctaatcaaagggtttggcagatt

SEQ ID NO: 6183 - DNA, 831 bp, Glycine max
  Clone ID: 700556244_FLI
cttctctgtttatggcaaaaaccctgagaaattcaggtgtctgttgaacagttacatgtcttctgtgaggaagatggcatgtgagattcttgagttgatggcagaagggttgaagattcagcaaaaggatgtgtttagcaagcttctaatggataaacaaagtgactctattttcagggtgaatcattacgctgcttgtcctgaaatgactctgaatgatcagaacttgattgggtttggagaacacacagacccacaaatcatctctctgttaagatccaacaacacttcaggccttcagatttatcttagagatggaaattggatttcagtcccaccagatgacaaatccttttttattaacgttggtgattctcttcaggttatgacaaatggaaggttccgaagtgtgagacacagagtgttggcaaatgggttcaagtccaggctttcaatgatttactttggaggtccacctttgagtgagaaaatagcaccattatcctctctcatgaaaggaaaagaaagtctatataaagagtttacctggtttgagtacaaaaaatcaatctacggttcaagattatctaaaaatagacttgaacattttgaaagaattgcagcttcgtaatatatattctagagaattgtttgagacacttgtcaatacaaaatgggagattacaatatgtagtttgtatactataaatgctttttttttttttttttttacttttaaggttatttatcaatcagaaggcttcatagacaggataacatatgtatcccttttgtttaaatgctagtgaatgacatctaatgttgttatcc

SEQ ID NO: 6184 - DNA, 1072 bp, Glycine max
  Clone ID: 700556256_FLI
gtcaatggctgcaactctcactgctgtaagaattcccactttccaccaacgccatctcaaacaacacttcacggcaccctcttcctcttccttacgcctcctcaatctcgcaaagatggaaggaagtgagatcagtgagcaagtagtaggggaggatttgggagcaaagaagaaagtttttgtagctggagccactggtagcactggcaaaagaatcgttgagcagttactggcaaagggttttgctgttaaggctggggttagagacatcgacaaggccaagacaaccctttcctctgccaacccatctcttcaaattgtgaaagctgatgtcacagagggttctgataagctagctgaggccattggtgacgattcagaagcagtagtatgtgccacaggctttcgcccggggtgggatttacttgctccctggaaggttgacaattttggcacagtaaaccttgttgaagcatgcaggaaacgcaatgttaacagattcattcttatcagttccattttagttaatggagctgctatgggacagttactgaatccagcttacatctttcttaatgtttttggactcaccttggtagcgaaactacaggcagagaaatatatcaggaaatctggtataaactatacaataataagaccaggcgggttgagaaatgatcctcctactggaaatgttgttatggagccagaggacaccctttatgaaggttccatatccagagatctagttgctgaagtggctgtggaggcattggcttatcctgaggcattttataaagttgtggaaatagtgtctcgccctgatgctcctaaacgcccataccatgacctttttggttccataaggcaacaatgatgcctgagatttggacttgattgcagattagcaaatgttgatttgctttatggtggcaaatttgtatctcaactgtgttcctatgtgtgttgtttcattcaattggtacactagaataatgtgtaaatatttcagtatatctttaattttattctcctacctgccaaattaaaggttggtagataattcagcact

SEQ ID NO: 6185 - DNA, 575 bp, Glycine max
  Clone ID: 700556264_FLI
ggcaaaagggtttcctagtctgaaggtgttaggccttgatgatttagatggactgaaatcaatgactgtggaggagggagcaatgcctggtcttaaaaagctcatcatccagcgctgtgattcattgaagcaggtaccattaggcattgaacacctaacaaaactaaaatcaatagagttttttgatatgcctgaagaattgattacagcactgcgtccaaatggaggtgaggattattggagagtacaacatgtcccagcagtttatatctcctattggagggatgggggttgggatgtctactcattagagacattaggagagagagagagtgattccagttctggtactgcaaagagaagtcttgaaatttgtacactctggaaggtttaactttgattttttcttttaacatacttgcatgtgtgagtgatgacaattttttgttgtacatcagcttgcatatgcaagtgaatgtagtattttgtttttttgcagtcacctgagtcctcactgtaaatttcttcatgtttcgaccaaataaatcagggagcataatatgaattctgaggtt

SEQ ID NO: 6186 - DNA, 778 bp, Glycine max
  Clone ID: 700556304_FLI
gagctgtgctaagaagaagaaaatggcacttccccttcttcgaatccccgggattccacttgccaagcaacaccaatcattcccttccaatacccgccgcaaagccacgacggcgcaggcggagctcgagacagcggtggcgcggacgggcggaaccggttaccagtctccgtccgtcgatgttcccacgcataaggtcatagtccacgacagacaacgaggaatcgttcacgaattcgtcgtgcctgaggaccagtatatattacatactgctgaggcccagaatattacccttccattcgcctgcaggcatggttgttgtactagctgtgctgtacgtataaagaatggaaagattaggcaaccagaggcactagggatatcggccgaattgagagacaagggttatgcacttctttgtgtgggcttcccaacctctgatgttgaagtggaaactcaagatgaagatgaggtatattggcttcaatttggacgttattttgctcgaggaccagtggaaagagatgactatgccttggagttggccatggctgacgagtaagcaatgtagaaaatctgacaattattggagcaaagaatgtgaatattttgtttccccttcttttcttcttctcatatatctaccatgttatcttcttgtcttggtttatttttccctatatatactattgtgctaattccaagcaaagccccatgctatatgcctatactcctatcttttttcctatttggtatggtatacaaggtgtgggtaatt

SEQ ID NO: 6187 - DNA, 1332 bp, Glycine max
  Clone ID: 700556331_FLI
atcactttctgtatatttggaatatgtctctggtggttctatccataaattacttcaggagtatggttcatttaaggagcctgttattcaaaattataccagacagattgtctctggacttgcctatctgcatggaagaaatacagtacacagggatattaaaggggcgaacatactagttgatcctaatggtgaaatcaaactggcagactttggaatggctaaacatataaattcttctgcctcaatgctttcattcaaaggaagtccatactggatggcacctgaggttgtaatgaatacaaatggctatagtcttccagttgatatatggagcttgggatgcacaattattgaaatggcaacatcaaaacctccatggaatcagtatgaaggggtagctgccatatttaaaattgggaacagcaaagatatgcctgaaatccccgagcatctttcgaacgatgcaaaaaatttcatcaagctatgcttacaaagagacccattagctcgcccgacagcccataagttactagaccaccccttcattcgagatcaatcggcaacaaaagctgcaaatgtcagcataaccagagatgcttttccttgcatgtttgatggaagccggacaccgcctgtgttagagtcccattccaaccgaacaagtataacttctcttgatggagattttgcatcaaagccagctcttgcagcaccacgagcattaaggagtcctagagataacacaagaatgatcacatctttaccagtatctccctcttcaagtccattgcgacggtatgggccaacgcatcagagctgtttttttctctcctcctcatccagcttacacaataatgggacaaagtagttacactttgaatgacatatcatcatatccaatgacatcaaatgccacgtttgctcttgatccttggcatgaaacatctcgatacagagccaatacaccacctggtggatctccaagaatgagactcatttgagttgagattgtaaatagctatagaactaaaatatttccacgtctccccagcatacctcgtggtctgtggttgaacttcaatctggactctgaaacacaaactatcctaaatattctgcgggtccattctttatacttgagaaccagatgacggaagaaatgattctggccctatgctctcggtgcattgcattggggagaccatgctgcttgtaacaatttcttgattattgtaaatgcaatgtgctcactgtgtttgtagtaacaattatgttgtataatgatagttcatggcaggataaaaaataaaaataaaaagtaatttttat

SEQ ID NO: 6188 - DNA, 1072 bp, Glycine max
  Clone ID: 700556360_FLI
caaggttcctctcattcttggtatctggggaggcaagggacaaggaaaatctttccaatgtgagcttgtctttgccaagatgggaatcaaccccatcatgatgagtgctggagagttggaaagtggaaatgcaggagagccagcaaaactgatcaggcagagataccgtgaagccgcagacttgatcaagaagggaaagatgtgtgctctcttcatcaacgatcttgatgcaggagctggtcgtcttggtggaaccacccaatacactgtcaacaaccagatggtgaatgccaccctcatgaacattgctgataaccccaccaatgtgcagcttcctggtatgtataacaaggaagagaatccccgtgtgcccatcatcgtcaccggtaacgatttctccacactctatgcgcctctcatccgtgatgggcgtatggagaagttctactgggcaccaacaagggatgaccgcattggtgtctgcactggaatttttcgcaccgattcaattcctgaacaggacgttgtcaagattgttgacaccttccctggccaatccattgatttctttggtgcactgagggccagagtatatgatgacgaagtgaggaagtggatttctggtgttggtgttgacggcattgggaagaagcttgtgaactcaaaagatggacctccaacctttgagcagcccaagatgactctggagaagctcttgacgtatggtaacatgcttgtccaagaacaagagaatgtcaagagagtccaattggctgacaagtacttgaacgaggctgcacttggaaatgctaacgaggatgctattaacaggggaactttcttccaatcttgaattggaggcaaagcaaacttggcaagtaaatatttctgttcctgaaggttgtgctgatccaagtgctagaagttgtgatgggacttgcgtgtaacattcttagaattctcaatgtcttaggtgcaaagagaagatgccaagtttgagatgattttactatatttttcatattggactgtcttcctctataattttgagttaaagtgtccacttaaattg

SEQ ID NO: 6189 - DNA, 2442 bp, Glycine max
  Clone ID: 700556361_FLI
aaccattgaaggatttgcaagtggaccagttcatttcccctgcaattcatgggtacaatcaagaaaagatcttcctggaaagaggattttcttttccaataagccatatttacccggggatacacctgctgggcttagattattgagggagaaagagctgagaaatctcagaggtgatggcaaaggagttagaaacttatctgacagaatatatgactatgatatatacaatgatttgggaaatccagataaaggaattgaacttgccaggccaaatcttggaggatcagatatgtatccatacccaagacggtgtcgtactggccgcgaaccaagtgatacagatatgtacgcagagagtcgtgtggagaagccattgcctatgtatgtgccaagagatgaacgttttgaggagtctaagcagaacacattcactgtgaagaggctcaaggcagtgctgcataacttgatcccaggtcttaaggctagcctttcttctagcaaccaagacttcaatgaattctcagatgttgatggcctttacagtgaagggttgctcataaagttggggtgggggttgcaagatgacgtgttgaagaaaattccatttgtcagcaaaatccaagagtccagccagggtcttcttaagtatgacactcctaagatcatttccaaggacaaatttgcgtggttgcgagatgacgaatttgcccgccaagcaatagcaggagttaaccctgttaacattgagaagcttcaagttttcccaccagttagcaaactagacccagaaatttatggcccccaagagtctgctcttaaagaagaacatattttgaatcaactcaatggcatgactgtccaagaggaaatcatatgccacacgcaccatctttttcttgacaccacgtggcactctcaagcctgtggctatagaacttagcctccctcatgctggacctaattcccggtcaaagcgcgtggttacacctcctgttgatgctactactaattggatgtggcagcttgccaaggcccatgtttgctccaatgatgctggggtgcaccaacttgttaaccattggttacgtacacatgccaacttggaaccatttatattggcggctcataggcaattaagtgctatgcatccaattttcaagttgttggacccccacatgaggtacaccttggagatcaatgccttggctagacagagtttgatcaatgctgatggaatcattgaaaattgctttactcctggtcgctatgccatggagattagttctgctgcctacaagaacttttggcgctttgacatggatagcctccctgcagatctcatccgcaggggaatggccgtacctgacccaacacagccacatggtctaaagctcatattggaagactacccttatgcagctgatggaatactaatctggtctgcaatagaagactgggttcgaacctatgtgaaccattactaccctcactcaagccttatatgcaatgacaaagagttacaatcttggtactctgagtcaatcaatgtaggccatgctgatctcaggcatgaaagttggtggccaacattgaacaatagtgaggatcttgtgtccattctttccacattgatttggaatgcatctgcacaacatgctgctctcaactttggccagtacccttatggtggctatgtgcctaatcgtccaccactgatgagaaggttaataccagaagagggtgatccagaatatgcaagtttccatgctgaccctcagaagtattttctgaatgcattgcctagcttgctgcaagccacaaagttcatggctgtggttgacacactctccactcactcacctgatgaggagtacttgggggagaggcaacaaccttcaatttggtctggagacgccgagatcgtcgaggcgttctacgatttctccgccaaggttcgacagatagagaaggtcattgatagcaggaaccttgatcggactctaaggaaccgttgtggtgcaggggtgttgccatatgagttgcttgctcctagctctgaacctggcgttacatgcagaggggtgcccaatagtgtgtccacataactatactaaactaataaataagggagtcactcccacattttgatacgcattaatatatatgtaatggttggcttactatttactaccatggacagtgactctcagtggatgcccattttgtacctagatttaataagttgttatagtatatattggtaacctagggctgtatagactgtatatgaaaatgagtttggtggggttggaggatgtgtgactgtttataaagttattatcacaatttatagttttcttttgcactattatgtagttctttttttcatcgttgcaaatatttgcatattttagtatgaaataaagttatcaattagat

SEQ ID NO: 6190 - DNA, 1954 bp, Glycine max
  Clone ID: 700556451_FLI
ctccggcgagacagtaagtaacaagcttttcaatttctccgtcgtttggcttccaatggcatcaaataaccactcaccacctctcgagatattagttcgaggaccagaagatttctcgctctggaccggacctcccttcgcgaacggtcaaccaagcatcaagctcgagaaagtgaaatgcatcaacgcgaagttcagcgacgacggatccaagctcatggtgacaaaatcgaactcgctgattagcgtctacgattgcagaatcgccgaagagattagggcttttgaagtccccaatgtcgtcgccgcagctttgtcgcccaatggaacttacttgcagaccttccagaagccttcggcgccgcaggagaagaacgtcacgctgtggagcatcgagaccggtgctgctgttcaccagcagtcacagaagaacatgaccaaagccaattggcctgcaattcagtttagttctgatgaagctactgcgtgtcggttggcaactaatgaggtacaattttttgatactggggatttttcgaaaggagttgtctgtcggttaagagttcccggagttgctgctgctgagctttctagtttaccagggtctcatgtagctgcatttgttccagaatccaagggggttcctgctagtgtacagatatttgcttgtggaaatgcgtctcaaagtcaacctgttgctcgacgtagttttttccgatgttcaaccacccaacttaaatggaatcatggctcaactgggcttctagtggtggtgcagtcagatgttgacaaaactaatcagagttactatggagaatcaaagttatgctatctgaccacggatgggatgcatgaaggacttgtgcctcttcggaaagatgggcccattcatgatgctcagtggtcatattctggcttggaatttgctgttgtatatggatttatgcctgctaaagcaactctgttcgacaagaagtgcaatcctctactagagcttggaactggtccttacaacactattcgctggaacccaaaagggaaatttttgtgtttggctggctttggtaacttgcctggtgatatggtattctgggattacattgataagaaacaacttggagccactaaggctgaatggtctgtgactagtgaatggtctccggatgggtgctatttcatgacagctacaacagctccaaggcttcaagttgacaatgggatcaagatttttcactacaatgggtcattgtacttcaagaagatgtttgacaaattgtaccaggttgattggaaaccagagtcacctggtaagtttggtgatattgccgaattaattaagtctctaaatttggtacaacttgaagataaaaaaccatcaggtcaaggaccaccaaagtctacccagacttctacaaaggcctcttctgccaaccccacaacacaaaaacctgctgcatatcgtccaccacatgctaagaatgcatctgctattcaggcagagttgtttggagagactactgcagaaacactgagcaagaatgcattacgaaacaagaaaaagagggaaaaacagaaggagaaaaaggctgcttctgatgccagttcttcatgatggaatcaatgttcttcctgactcgttctaaattgcttttctactactgcactcgcgcacctgaaaatttgaggctttcagattttggtttactggcaactttgggcagttttggtttgctcagattttgacgtgattgaagtcatgttgtaggtttgtgctttcttgagttttcagctgggatataaaaggtgggagaagataaatctctttatcctcatgataaaagaagtatttattgtaagagaagtgaaattatacgttggtcacaaacattattttgtttccggttgggatataaaaggtgagagtagaagataaatgcccctttctcctcccgat

SEQ ID NO: 6191 - DNA, 1421 bp, Glycine max
  Clone ID: 700556462_FLI
ggttatcggataattcatcattgaatgtggtgtccttaagcttgaggaactgtcaatcttgccaacgtttgcctccccttggacttttgccatttctgaaggagctttcaattgaagggcttgatgggattgtgagtattaatgctgattttttcgggagtagctcttgttcatttacatccttggaatctttgaggttctccaatatgaaggaatgggaagaatgggaatgtaaaggtgtgacaggtgcttttccacgtcttcaacgtctttctatagggtattgtcccaagctgaaaggtttgcctccccttggacttttgccatttctgaaggagctttcaattgaagggcttgatgggattgtgagtattaatgctgattttttcgggagtagctcttgttcatttacatccttggaatctttgaagttctccgatatgaaggaatgggaagaatgggaatgtaaaggtgtgacaggtgcttttccacgtcttcaacgtctttctatatataattgtcccaagctgaaatggcacttgccagagcaactatctcatttaaatcgtctagggatttctggatgggactctctaacgaccattccgctagatatcttcccaatactcagggagcttgatatcagggagtgtcttaatctacaggggatttcacaggggcagactcataatcatctccagcgtctgagtatgagagagtgcccccaattagaatcattgcctgaaggaatgcatgtcctccttccatctcttgattatctgggcataattcgttgtccaaaagttgaaatgtttcccgaaggaggtttgccatcaaatttaaaaaatatgcatctctatggtagttacaaacttatgtcctcattgaaaagtgccttgggaggcaatcactctctagaaaccttacggattggaggagtggatgttgagtgtcttcctgaggaaggtgtactgccacactctcttgttactctagacatcagtcattgtgaagatctaaaaagactggactacaaaggtctctgccacctctcctctctcaaggaattgactctttggaactgccgcaggctccaatgcttaccagaggagggtctgcccaaatccatttcaactttgacaattcggaggtgtgggtttctcaaacaacgttgccgggaaccccaaggcgaagactggccaaagattgctcacattgaagacgtggatataaggtagtgaggttgattataaagaataatggtgaaagatgtagatgcttctctattgcctgcaatttactaattaattgttttctaaacttatttttgctttctgcttgctggacgccgccgctctgttatttattattcgactaaataattgtttaatacagtttcaagtgattgattctgcttggat

SEQ ID NO: 6192 - DNA, 203 bp, Glycine max
  Clone ID: 700556463_FLI
ggcaaccttgcctgtccgatgcggcggtaatgatggcccgagttatgttggggaacggttatgaacccgggatgggtttaggcaaagacaatggcggcataactagcctgataaaaacccaaggaaatcgtgggaagtatggtttaggctataagcccactcaggcgaacatgaaaagaagcatcgcgggaaggaaaaaaagg

SEQ ID NO: 6193 - DNA, 1830 bp, Glycine max
  Clone ID: 700556474_FLI
gctggcatacgaaactgtggccaggatgggattaatgaaattaaattcctgatcaaagaggcgcacaaacgaggaatagaggtcatcatggatgttgttttcaatcatacagctgaggggaatgagaatggtcccattatttctttcagaggtgtcgacaacagtatgtattacatgttagcacccaagggggagttctataactattcaggatgtgggaacacgttcaattgcaaccatccagttgtgcgacaatttatagttgactgcttaagatattgggtaacagaaatgcacgtggatggttttcgctttgatcttgcttctattatgaccaggagtagcagtctctgggatggagctaatgtatttggtgctccaatagaaggtgacttgttgacaacaggaacccctctaagcagcccaccattaattgacttgatcagtaacgatcctatactttgtggagtgaagcttatagctgaagcctgggatgctggtggcctctatcaagttggcactttccctcactggggtatttggtcagaatggaatgggaagtatagagacacggtgcgcctgtttatcaagggtacagatggctttgctggagcttttgctgaatgcctttgtgggagtcctaatttatatcagggaggaggaagaaaaccgtggcatagtattaactttgtatgcgctcatgatgggttcactctagctgatttggtgacctataacaacaagaataatttgtcaaatggagaagacaataatgatggagaaaatcataataatagctggaactgcggacaggagggggagtttgtcagtacctcggtgaagaaattgaggaaacgacaaatgcggaatttttttctttctctcatggtttcccagggagttccaatgatatatatgggcgatgaatatggacacacaaaaggaggaaataacaatacctattgtcacgataattatcataattacttccaatgggacaaaaaggaagaatcctcatcagacttcttcagattttgtcgccttatgactaagttccgccaggaatgtgaatcgctaggcttagctgacttcccaacctctgagaggctgcagtggcatggtcattttcctggaaagccagactggtctgaaaccagccgttttgtggcttgtaccatggtagattcagtgaagggagaaatatacattgctttcaatatgagtcatttacctttcacagttaccttgccggagcgtcctggatacaaatgggaacctcttgtagacaccagcaagcctacaccatatgatttcctcactcctgaccttcctggaagagatattgccatacaacagtatgctcagtttctggacgccaatatgtatcccatgcttagttattcttccattatcctcttgcgcattccagatgaaaatctgtagcttggaaaatcttgcttctttgtttttatcggctatatatataatcctgttcctagtatgctggaaaagaaatcgtagtaagatgggtctgcaggaagtaagcaccaaaggcccaagaggaaggaacgtatagcatggctggcatcatgcatcatgcatacatgcaccgtacgtaggaaaagcgcaaacccgtgtgatagcatcgtgtcttctagaagatgcgtaggtagtggaataaaggcatatttgctcttaggatatttcggattgcttttatcttttccgtttttgcttgtcgggacttgtcccctctataacagctatatatatatgtaaagaaatggtgttggaaggatatgagaaaatagcagaaaaacgttcctccgt

SEQ ID NO: 6194 - DNA, 2133 bp, Glycine max
  Clone ID: 700556787_FLI
gttccttcttcttcttccaataatgtcttcttcattctctgttcgttttcttgctcctcttcctccatcatcatcatcatgcttccccaccagctctctgccgaagacatggctctgcgccgccgccaccccaacggtggctccgtcaaccaccacctcctcctcggaggtggaggcttccaggttggagcctagagtggaggagagagatgggttctgggttttaaaggaagagtacaggggaggcatcagccctcaggagaaagtgaagcttgagaaagatcccatgaagcttttcatggaaggtgggattgaggaattggctaagatgtcccttgaagaaattgagagctccaagcacaccaaggatgatattgatgttagactcaagtggcttggcctttttcataggagaaagcagcatcatggtagatttatgatgaggctgaagcttccaaatggggtgacaacaagtgcccaaacacgatacttggctagtgtgataaggaaatacggaaaagatgggtgtgctgatgtaacaacgaggcagaattggcaaattcgtggtgtggtgctacctgatgtgccagaaattctaaagggcctcgacgaggttggattgactagtcttcagagtggaatggacaatgtgagaaatcctgttggtaaccctcttgcaggcattgaccctgatgagattgttgacactcgaccatacaacaacttgttatctcaattcatcactgccaattcacgtggcaaccccgccatgtcaaacttgcctaggaagtggaatgtgtgtgtggttggatcccatgatctgtttgagcatccacacatcaatgatctggcttacatgcctgcaaacaaggatggtcgttttggattcaacttacttgttggtggtttcttcagtgccaagagatgtgctgaagcaattccacttgatgcatgggtctccgcagatgatgtaatcccactttgtaaagctgtccttgaggcctatagggaccttggcttcagagggaacagacagaaaacaagaatgatgtggttgattgacgaattggggatagaagtattcaggtcagaggtggagaaaagaatgccagggaagaagctggagagagcatctaaggaagaactggttaagaaacaatgggaaagaagagactacttaggtgttcatccacagaaacaagagggcctaagctatgttgggattcacattccagttggtagagtccaagcagatgacatggatgagttggctcgtttagccgacgaatacgccaccggtgagctcaggctcacagtggagcagaacattataatcccaaatgtggacaataacaaaattgatggcttgctcaatgagcctctcttgaaggggagattctcacccgaaccttctctattgatgaagactctggtggcatgcactggtaatcaattttgtggacaagctataattgagacaaaggaaagggcattgaaagtgactgaggaagtggagaggcaagtggctgtgactaggcctgtgagaatgcattggactggctgccctaacacttgtggacaggttcaagttgctgacattggtttcatggggtgcatggctagggatgacaatggtaaggccactgaaggtgtggatattttccttggagggagaattggaagtgattcacatctggctcaagtgtataagaagggtgtgccttgcaaggacttggtgcctgttgtggtagacatactagtaaaacactttggagctgtcctaaggaatagagaggaaggggaagattaagtgcatgtttggatagttattacaaacagacatttgcatcaaaatgagttttgcaaaaggatcctcaccctttcttttgcaaaatgagttttgaagatcattgatttgatctcggaatttgtgcataagttgaattaaaaaccaaatatgcattaaattttaatggccattggtaattttagtttctttattaaatccaccattgtcccttggacaaaattattagtgtcctctacatagaagaagggatgatatatgcatgtacacttttggtttagacgtgttcattctttgctagtccctaatttacactttatttcttt

SEQ ID NO: 6195 - DNA, 2250 bp, Glycine max
  Clone ID: 700556808_FLI
ggataatctaccaaaatattccacagatattttttaaataaaccttaagctcaatcaaatttcaaacaacaaattaacaataagaacacgcaaacgcaaaggagctaagaggaagaggatgattgcgggttatgtttgattgatgtgttcagtgatcatcaatatgagaatgttgcctgtttgctcagccaccccacgttattccacatcttcccagattcccttgtttgggggattgcaccccattcgaaaggatcttgagagcagatgtgtggctgaagaaggtgtgcatttggcttcacaatatggaactcattcactgagaaattcatttgcagtgcaagctacaaagacagtattgggtagtttttcttctacaagtgaaccgggataccttacaagcacgtgggattatttaccagtgacaacagatgggcatcattctctgagtgatggggaagtcagacacatggaatattatcatctatctactgtgcctgatgaatttgcagattttgcagaacaggtaactgaaggatctaacacattagtgacaccagcacaaccagaaacactatcgactgctgatataatgccagagaactttgcaccaagtcctagttcaattaatgtggacaatgaatcattagtcagtacaaaagcaagtgttggagaccttgttgccggaatcaatgaatcattcagtgcctcaatcaataagggagaaaatgctttacgaagctcactggatacagctacttcttttgtagattctattgttaaaactgctactaaatctgtagataatgcttttagtaaggcattttcttctgttgatcaaacaggggaattaacaaataagaagttaaccagcttttcaagtgagctgactggagtcacaaataaagcacctgctgtggctattgatgtgttgcgccgcacaattatagttgtagagagttctctaacaagtggggcttcatatgttgtctacctatatggctcagcaaaggagctccttccagcaggaattagggatacagtcaatgtatatgaagataaagcaacagaaatcttgaggccagttgggtctgcaactcaaaggttatacatggctgtctattcattggagaagagtcttggcttggatccaaatgacccaatcattccatttgttgttcttttaggctcttcagccacattatgggccttttattggttgtggacatatggaggttactcaggagatttgtcccctaaatcagcttttgagcttttggccgaggatgcaaatgctgcacttattgatgtccgttctgaggaaatgcgagaaaaatatggcattcctgatctccgacgggctgctaggtttcgttatgcaagtataactcctcttgaggttgatggctccatacgcaagttgttgaagagtggtagagaacttgatgattccttgattgctgctattattcgaaatttgaagatggttaaggacagttccagggttatagtgttggatgctgatggtactcgttctaaaggcattgcaagatccttgaggaaaattgggctcaagaatccatacttggttcaaggtggctttcagtcttggatgcaacaaggtctccgcatcaaggaactcaaacctgagacagcactttccatactcaatgaggaagctgaagcaattctggaggatgttagtccttctcctgggcaacttttaggttatggtacagtacttattgcagggctttatgcattactagaatgggagaagacattacagttgattggtgcttttggcctcggtttgaccatctatttgcgggtttcttcatatgaaaagtcagaagatctaaaacaagatgtgaggttgttgctttctcctgttagacttggagctcaagcattttcatgggctgctggaaaattagaatcaaatggcttaggattacctacatcaccatcatcatcagatgttcagaaccgggtgttgcaggctgctgccaaacatgaatcccaaccatccgatagtgaaggtaaccaagatccagtacctgaaccgacagttcctctcaatcagaatgtatgagtcattccagattgtcatgtgctaacatgaaaattagaagagagattaatatggtcacagcaaatttaacttccatgattgaaagtttggaagttgacattatccaaacactgctgccacggactctgccctgcctgtaggcgttttgaatatat

SEQ ID NO: 6196 - DNA, 1134 bp, Glycine max
  Clone ID: 700556809_FLI
caaaaaataaaacaacacataataagcaagcaaaacacacacaaaaggaaataccatatattatacacaaaccaaaccatatatcttattctattttctccctctccaccactccccttctttctcctcctcctcaaccttaatcatggagaatattggagaagagtacaagcattactgggagaccaacatgttcctccaaacccaagaacttgacagttgggggttggatgaggccttatctgggtactacgattcgagttccccggacggcgctgcttcgtctgcggcatctaagaacattgtttccgagaggaatcggaggaagaagctcaatgaaaggctttttgcgcttagatcggtggtacctaacattagcaagatggacaaggcttcgattatcaaggatgctattgagtacatccagcacttgcacgagcaagagaagattatccaagctgagataatggaacttgaatctgggatgccaagaaagagtccaagctatggttttgagcaagaacagcttcctgtggttctcaggtccaagaagaagagaacagagcagctatatgattctgttacttcaagaaacaccccaattgaagtccttgagctgagggttacatacatgggggagaaaactgttgtggtgagtttgacatgcagcaaaaggacagacacaatggtgaaactgtgtgaagtgttcgaatctttgaagctcaagatcatcactgccaacatcacttcgttttcagggaggcttttgaagactgtcttcattgaggcaaatgaagaagagaaagatcatttgcagataaagatccagacagccattaaagctcttaataatgaccctttaagccccatgagcatttgaggaagaaaatatataaattggggttctcattttggggtcactagtatataaatagaaagtttaggaaccgtgggttttataggagtttctcgtatttggtttcgttaccccctttttttcttcgcactcaacattccccttaatcaggactcttcttcaactttattatcagggaaagtttgctagtttcatccccttgtgtgcttagtgtatcaattaatgttattcttataataaaaagttcacttcacatc

SEQ ID NO: 6197 - DNA, 1234 bp, Glycine max
  Clone ID: 700556816_FLI
aaaccactgaaccaggataatctgtcttcactcttcaatccgaacttagattgttttactgttaacaccattcctaggtaccatctgcaccaccctttctccttcttcttcaatcaatggcagcaacctcaacatcactcttcttctccaatctccattctctcaaccctcaacctttctcttcctcactctccttcttccgaaatgtccattccaccctctctttcccttcctcttctaaaccctcccgtggcgttgttgccatggctggctctggcaagttctttgttggtggcaattggaagtgtaatgggaccaaagactccatcagcaagcttgtctctgacttgaacagtgcaacattggagcctgatgttgatgttgttgttgcacctccctttgtgtacatcgatcaggtgaaaaactcaattacagataggattgaaatttctgcccagaattcttgggtgggaaaaggtggggctttcacgggagaaatcagtgtggagcaactaaaagaccttggctgcaagtgggttattcttggacattctgagcgaagacatgtaattggagaaaatgatgagtttataggaaagaaaactgcctatgctttgagtgagggtcttggtgtgatagcatgtattggggaacttctacaagaaagagaagctggtcaaactttcgacatttgtttccagcaattgaaggcttttgcagatgcagtgccaagttgggataatatagttattgcatatgagcctgtatgggcaattggaactggcaaagtggccacacccgagcaagcccaggaagtccatgcagctgttcgtgactggcttaagaagaatgtctcagctaaagttgcatctaaaacacgaattatttatggaggatctgtaaatgcaagcaacagtgctgagcttgcaaagcaagaagatattgatggatttcttgttggtggtgcttcattaaagggtcctgagtttgctaccattatcaattcagtcacttccaagaaagttgcggcttaattacttattatgtttttttaggagcgcattaaaaatatggcaatgacatgggtgtattatgagttttatttttatcacttctatagtcctatggctatgatgcatgcgtttagtttggtactttagcttgaagaaataatcgtttatttttgtcagcaccttaagagaataactttttgcaaaataaatgattatttctc

SEQ ID NO: 6198 - DNA, 1587 bp, Glycine max
  Clone ID: 700556829_FLI
atcaatttgggacgttcttcttcttctcagctgcaaggtccaaaaagtcagtgtagtgaaaacagacgatccgaagaatattaccctctttcatctctctctataacattattcataagttcagtttgatcttatgtcaatgaaggatttttagacaaaacccagattcacaggaaaaacccttaaagcggagaataaaaggcaacgacttttcatctctacgcaagtgattatggcggttgttgagaatgttggggccaaaatcggttcttcgagccagagtttggagaacggtgtagtgtcagcggattcgggtgaggttgagaaatcgaaaaccagaggcgatcaggatatgaacaacggcgttttcaaccatcaacagcaccaagagacagttcccggtaccatgccagttcctaacggcaatttcagctacaagcacgctaatggggtgaacaatgatgggtatgggatgaatggggtcatgagtgaagagaatgggggtgagagtttcaagcgtgatatgagggatttggaagagcttttgtcaaaattgaatcccatggctgaggaatttgtgcctccatcactagccaatacgcatggccttttagctggacctaatgctgggtttggttacactaacaattttatactgcctaataactatggaaatactaatggccaaactaacaacagaagaggaagaatggctataatcccgggaagcgaagaatgaatcataaaatggatatggagaaaagggaggagatgattcggaggaccgtttatgtgtctgacattgatcaactggttactgaagagcagctggcagctctctttctcaactgcggccaggttgttgattgccgtgtatgtggagatcctaactctattcttcgatttgccttcattgagttcacagatgatgaaggtgcaagggctgctttgagcctgtctggtaccatgcttggatattacccactgagagtgctaccttcaaaaactgccattgcaccagtcaatccaacatttttgcccaggtctgaagatgaaagggagatgtgctcaagaacaatttattgcacaaatatcgacaagaagcttactcaagcagatgtcaaacacttctttgaatctatttgcggagaggttcatcgcttgaggcttcttggggattaccatcattcaactcgaattgcatttgttgagtttgcactggctgagagtgcaattgcagctctgagctgtagcggtgtgatcttgggttcactgcctataagggttagtccatcaaagacaccagtgcgccctcgtgctcctcgtccccccatgcactgaaccatcctttcacatgtttctggggatgctgcttcttggagatatatctacatatatacatacatagaaacagatatattctaagggtacctatggcgttttgttgatacttttgtccatgagacttgcagtatggtatctctttgtttcctgttggggtcatgagttatgtgtttagcttgtagagttggatggcgttttgaggatctccaaggcttaatttatgatggcttgatcttgcaggag

SEQ ID NO: 6199 - DNA, 769 bp, Glycine max
  Clone ID: 700556872_FLI
gtgaaggcgtgaccctagccatctttgagaattgttcagttcttgaaggaaagcagagcagagaagagaagagagtttcaagaatggggagcgaagaggagaagggtgaattctacttgcgatactacgtgggccacaagggcaagttcgggcacgagtttctggagttcgagttcagacccgatggcaagctccgctacgcgaacaactccaactacaaaaacgacaccatcatccgcaaggaggtttacctcaaccctgccgttttgcgtgagtgccgccgtatcatcgccgagagcgaaatcatgaaggaagacgacaacaactggcccgaaccggaccgagttggacggcaggagctggagattgtgatggggaacgagcacatttccttcaccacttccaagattggatctctcgtcgatgttcagagcagtgcagatcccgacgggctacgcatattttactatcttgttcaggatttgaagtgctttgtcttctctctcatttcacttcacttcaagatcaagcctatataatgtgtttgcaatattatgcattcatcctctgagaaatgtgtacttgtttaacaaccatcacttttttttttctaatggagtttgacatctgatagtgacttcataatcatgaatatgatttggttctgtattggtggttacatgaattgcaacttttagatttgagggtatagcccttgtaccaaagtgttgattggattggtttttgtgcatgggttagttattctttc

SEQ ID NO: 6200 - DNA, 1250 bp, Glycine max
  Clone ID: 700556884_FLI
cacagcctcacaagtaacaaacttataacacacactctctctctctctctctgcaatggctggaatggttcccctttgcattgcatcattggtcactctttttgttgcaacaagtgctagaattcctggggttttcaatggtggtgcatggcagggtgcccacgccactttctacggtggaaatgatgcctctggaacaatgggtggggcatgtgggtacgggaacctatacagccaagggtatggcgtgaacaccgcggccttgagcacggcgctgttcaacaacgggttgagctgcggcgcgtgcttcgagataaagtgcgaccaagatccgaggtggtgcaacccgggaagcccttccatcgtcatcaccgccacgaatttttgccctcccaactttgcccttcccagcgacaacggcggctggtgcaaccctcctcggccccacttcgacctcgccatgcccatgttcctcaagatcgctcagtataaagccggcatcgtgcccgtcagttaccgccgggttccatgcagaaaggtcggtggaatcagatttacgatcaacggttttcgttacttcaacttggttctaatcaccaacgtggcgggtgcaggggatatcgcgcgcgtgagcgttaaaggttccaaaaccgggtggaacagcatgagcagaaactgggggcaaaattggcaatcaaacgcgaatttagtgggccaggccctttccttcagagtcacgggcagtgacagacgcacctcaacctcttggaacgtggcaccttctcattggaagttcggccagaccttcacgggcaagaatttccgcgtctgaaaaaaataacaaaatttaaacatggatgtttgtttttgtagttgcgttttggttttttagttttcccgcgttcaactttccctctattttcccgggaaagtttgaagccgtgttttggtttaagtgtgtagtaggggacagaaagtaagagaagggtagataaggtaaaatgaaagtgactttactataaatgctagtagtgggtgtgagtagatgtttctaccaccttttgttattggagggtgaatttgtgtgatattaattattactaaagtgtattgggtgttgctggcaatatttattacccagcaatgctttttgttgacttggtgggggctgaggaggctgcaaggttcatgtagcccgcatctcctttattatgaactagaaacattatattatgtaatatctttcagtt

SEQ ID NO: 6201 - DNA, 1725 bp, Glycine max
  Clone ID: 700556924_FLI
tttgggagttaggttctgcacgctctgcttccagcgagtgttctttcttcgtttcaacaccttaatttgcacacgctgcttcttcagcttgagaaatggcacaagaaacctttctattcacatctgaatctgtaaacgagggtcaccccgacaagctgtgcgaccagatctctgatgcagtgctcgatgcgtgccttgaacaggaccctgacagcaaggttgcctgtgagacatgcaccaagaccaacatggtcatggtctttggagagatcacaaccaaggccaacgtagactatgagaagattgtccgtgacacatgccgcgaaattggattcatctctgatgatgttggtcttgatgctgacaaatgcaaggtgttggtcaacattgagcagcagagccctgatatcgcccagggtgtgcacggtcacttcaccaagcgcccagaggaggttggtgctggtgaccagggtcacatgtttggctatgccactgatgaaacccctgagtacatgcccctcagccatgtccttgcaaccaaactcggtgctcgcctcaccgaggttaggaaaaatggtacctgtgcttggctgaggccagatggcaagacacaagtaactgttgagtactacaatgacaatggtgccatggttccagttcgtgtccacactgtcctaatttccacccaacatgatgagactgtgagcaatgaccaaattgctgctgaccttaaagagcatgttatcaagcctgtcattcctgagaagtacctggatgagaagaccatcttccaccttaacccttctggccgttttgtcattggtggccctcatggtgatgctggtctcactggaagaaagatcatcattgatacctatggtgggtggggtgctcatggtggaggtgccttttcagggaaggaccctaccaaggttgacagaagtggtgcctatatcgtgaggcaggctgcaaagagtgttgtggcaaatggccttgccagaaggtgcattgtccaagtttcctatgccattggtgtccctgagcccttgtcagtgtttgtggacacttatggaactgggaagattcctgacaaggagattcttcaaattgtgaaggagaatttcgacttcagacctggaatgatcaccattaacttggaccttaagaggggtggccataggttcctcaagacagctgcttatggacactttggaagggatgaccctgacttcacctgggaagttgtgaagccactcaagtctgagaagcctcaagcttaagattgttgtgaagttaatcactcccttcaatggatgtcttgctaggtgtggatgaataatttgcgtgttccatgactactactacttcattcataggtctaatgtcatctcatcaatacttaaactgtttttttttttccttttctccttttactcacaatttattttttggttatgcaatgttaccgttttgatgcaatggaaattttatcagaattttgtaccaattgattgcattttgagagggtgaaaaaggtctctgcaatgtattctttaacgaaattgaaaaattgtttcctttgatcctcccaagcaaaccgacattgaccttggggaggagttcaagttcaactcagttgcgcaggtcacattgaccggtttgattttgtaatacgatgatacaataggatttgaactcaagcaatgacttgtttggaatgcatcg

SEQ ID NO: 6202 - DNA, 1233 bp, Glycine max
  Clone ID: 700556931_FLI
cctacttctacttccctttgttctcaaaccttatcccttatcctcccaaaaccaaaccatgtctacctccgcagcttctctcgcactcccaaccctcactctccgaactcgacaacctctctgttctccccaatgcttctcctcgtccctctccctcacccctaactccaaacccatttccatttccgccgttttcctcaaaacaacgctgtcgtcgtcgtcgccgttgtcgctgtcgtctcgcttcgttccccatgtctctgtgttggagcaggaggaggacaccttcggcgacggagacggccccagcttctcccgcgaccttaagctctttgtcgggaatctccccttcagtgtcgacagtgcgcggctcgcggagctcttcgagagtgcggggaatgtggaggtggttgaggttatttatgataagactactgggaggagcagggggtttgggtttgtgaccatgtcttccgttgaggaagctgaagcggctgctaagcagttcaatggctatgaacttgatggaagatcattgagagtgaattctggaccacctcctgctcggaatgagagtgctcctcggtttagaggtggttcttctttcggttccagaggtggtggtccttcagatagtgaaaaccgtgttcatgtaggtaatcttgcttggggtgttgacgatgtagcacttgagtctttgttccgtgaacaagggaagaaggtcttggaagctagggtaatctatgacagggaaagtggacgatctagaggctttggattcgtgactttcggtagccctgatgaggtcaaaagtgcaattcagtccttagatggtgtggacttgaatggcagagctatacgagtctcattagcagattccaagcccaagcggttctgaagcttttcatctatacccgagagaggatttcggtagttgggacttgggagttatacagctgcaagatgtcattggcaatcagtttggacaagaaatacacttacatgcattgagactagatgtacacacagtttcaatatctgacagaggagaatatatcagtgtctcttgaagtttaaatgtatgttccaaatttgattgttgtcatttgtaactgatttgtagtccgtattttcactatagaagtagatgtctcaaatatttattggttaccccgttccaacattgttgtggaagaattttataattgcaatgtgcctggaaaattatctacc

SEQ ID NO: 6203 - DNA, 1571 bp, Glycine max
  Clone ID: 700556967_FLI
gtattctcagtttgtgaattgaaatgatgtcatcaactatgttctaaattcaccaacccaacgtcttgtaagctccgcccctggacaaaatcaaggtcccatttatgcaagctttgattcacattcctgttcgtttttccttcgcaccttttcttcttcttcgctccgtgccatgtcttcctctctcgctcttccttccactcccttcttcgccaatggaacaagaatcttcgctctcaagcactctctccctcgctctagggtttccatgagcgtctccgctggatctcaggcttccgttcaccaggctttgttcgccgattacaaggcctccacttcattcctcttcccgggccagggtgctcaagctgttggaatggggaaagaagctcaaaatgtgcctgctgctgcggttttgttcaacaaggcaaatgacattttggggtttgatcttcttgatatatgcatcaatgggccaaaagaaaagttagattccaccgttattagccagcctgctatttatgtcacaagtcttgctgctatagagctacttcgtgcacgtgaaggaggtcagcagattattgactcagttgatgttacatgtggtttaagcctgggagaatatactgctctggcatttgctggggctttcagctttgaagatggactcaagttggtcaaactgaggggagaggccatgcaggatgccgctgatgctgctagaagtgctatggttagtgtgataggactggactcagagaaggtccaacaattgtgtgatgcagccaatcaggaagttcctgaagctgagaaggttcagattgccaattacctgtgcccaggaaactatgctgtctctgggggattaaaaggagttgaagtgctagaatccaaggcaaagtctttcaaggctcgaatgacggtgcgcctagctgttgctggtgctttccacactagttttatggaaccagctgtgtcaagattggaagcagcattggcaacaacagaaatcagaaccccaagaataccagtcatctccaatgtgaatgcacagccacatacagatcctaacacaataaagaagatattggcacgccaggttacttcacctgttcaatgggaaacaacagtgaagactcttctaaccaagggtctgaagaaaagctatgaactgggacccggaaaggttattgctggaatcgtcaaaagaatggacaaaggtgctgatattgaaaatatcggtgcttaatgtggggaccttgctccttcttcgggttggaatgaacaaaactaaattgtgttagctataaatcaggatgcgtggaacttgaagctttgaaagcaaggagcagctacagtcatatttgaatgccagttttgaagttaaaatgttaaattataattcacgagttagataagtgattgtacttggcactagaattttttagtttttctaatcttatattcaatctgtctcggagttaattatgcctatgcttctttgtaccaaatatagcttttggcctttacacaggcttaataataattagaagaaacaacactttccattc

SEQ ID NO: 6204 - DNA, 1707 bp, Glycine max
  Clone ID: 700556983_FLI
ctgaaacgacagcattttttgatctattatggtgaaggggttgcacgggcagaacctccccgcccacgtggcacagctggttgatcagctggagcgccactgcttcgctcccgatggatctctcatctccaagcctctcttcaacgatctccaactcgccagagatgaaatgtgcagggaaagactgcgttacctggaagccatggctatatattctgaggctattgcaatggtggaggagtatcagcaagccatttctgtgtctaaccttggtggaatcagagatactggcaatctttatccacagcttgggttgaagaactctcctcaggtttatcagactttagagcatcaaatggttgttgctgaagcagctcaacgattgagactacctcttatctccaaagatggggaggttcatgatgaagacattgaaaagctaagtgtagtgtctcgaagctctcttgacagtactgttagtggggctaattcttctaactataacacaccaagcagctctgttagtggggctaatactgcccttgctgcttcggatccagtggaagtcggagttggtggtgttgccaatcgttttttgggaattacaccttcttatttgtggcaaactcagcatcaaaaagcaccattatccgtggatatgactgaatatcgcctgtctgtttcacgggaggtagaggctcgcttgaagatgaaatgtgaaaaattatcagatgcctttgtattggatgacaatgattcttcatcatctggaagtcatagttcaagttctcggcttccagaaagggtgaaactgttgattgaggagattgaaagagaagaaacagcgctgcgggatgacctttattctgcagatagaaagtttgctgaatattataatgtcttggagcagatacttgcagtgcttattaaacttgtcaaagatttgaagttggagcatcaacataaatatgatgagatgcagaagacttggctctgtaaaaggtgtgagaccatgagtgcgaaattgaggttctatcataattgtgatattttccattacatgtcagtgttctagagcacgttctcttgctcgaaacttacactaaggactctatacctgcccttcataagataaggaaatatcttgttgaggcaacagaagaagcttctattgcatataacaaagcggttacccgcctgcgggagtatcagggtgttgatcctcactttgacaacattgcaaggcagtaccatgatattgtgcagaaattggagaacatgcaatggacaatccaccaagttgaaatggatctgaaacgtttgccagataaacccagcacatagaagttttatgctttgtctccttgttcttggtttgaattctttttgtaaatggtattaaaggcatcaccctcaattaacctaacattcaatctgtgagcttttttttaaaaaataaaaaatatttggattattttgcattaccttacctgatagaggagaaaaaggaaactccaaaacctgctatttctgctagtttaagatgtcaaatagtattgaggtctttattcttttgtatttaatcaaagtatttttgtgtgcgtaggttctaatactcagcttctgaatgacacaaatatgggtggatgcaatgtataagtaaacatgcactaagggaattaaaaaatcgtgcttgcttcagttttt

SEQ ID NO: 6205 - DNA, 1126 bp, Glycine max
  Clone ID: 700557003_FLI
atggagcaaccaaggaaataggaagggcagcagtagtggcagtgactaaggccagaggaatggaggttgcaggagcggtggatacttgtcatgttggggaagatattggaaagattgttttcaattcttctagatatgtggcatggaagagccccttgaaatacccataataaatgaccttactatgattttgggctctatatctcagtccaaggcagcaggagttgtagttgatttcactgacccttcctctgtatatgacaacgtaaaacaggcaacagcatttggcatgaaaagcgtagtttacgtgcctcaaatcaaattagacacggtagctgcattatctgcattctgcgacaaggccagcatgggcgtcttggttgcaccaaccctttccataggatcaatattattgcaacaagctgcgatttcagcttcttttcattacagcaacgtcgaaatcgtggaatctagggctaatgcaaatgatcttccatcagcagatgcaaaccaaattgccaacaatctctccaacctgggccaaatctataacagagaagacccttcaacagatgtcttggcaaggggtcaagtcctaggagatggaattcgtgtacacagcatggtccttccaggcattccttctagtacaacagttcacttctctggtccaggagaggtatactctatcaagcatgatatcacagatgtgaagtgtctcatgcctggcttgctattagccattagaaaagtagtgcgcctcaagaatttggtatatggcttggagaagtttatatgaaaatagtccacctcttttatctccttgccaagaactttaacttggttgagctcaagggaccttctacttcagcatcttgacaaaattcatatagaaaggtttgcaagaacaaaagagaaacagatgctcaccaaattgctttttagtggcccaattattcaatcacatcatgcagcaccagaactgtgatttgatgatttttttttaaataaataaatttgtatatccaattagaattcagatcacatgacgacattttatgtgtagacagtgtagtcaatttagttttcaagacatacaactcgttcaaaggatgtagtttaaggt

SEQ ID NO: 6206 - DNA, 1265 bp, Glycine max
  Clone ID: 700557008_FLI
ctcagactcagaaaagagaagaaacaaaacaaaaaagagcagagagagagaggaaccatcaccaaccctaatttcttagctaaaccctattcgtttagcatttcctctcttttctcccactcgtaaatcctctcccaaacttttcagatccaaataaatcatggttttctgggtttttggctacggttcactggtgtggaaccctggattcgattacaatgagaagattataggtttcattaaggactacagacgcgtgtttgatttagcgtgcattgatcaccggggaacacctgaaaacccagcaagaacttgcacgttggaggagaaggaaggggctatttgctggggagctgcttattgtgttcgaggaggccctgaaaaggaaaaactggctatgcagtatttggagcgacgggaatgtgaatatgacagaaagactcttgtaaacttcttcaaggaaggagattcactgcaccctactttaactgatgtaatagtattcacatctactccagacaaagtgaacaacaaatactacctgggacctgctccacttgaagacatggctaggcaaatagcaactgcatatggcccttgcggaaacaacagggattacattttccttctagaaaaggccatgtatgatattggccatgaggatgacttagtgatagagcttgccaatgaagtgaggaaagtacttggaatgggaaatgtagtaccaaaggagaagaaactggttggagcagcacaacttccacaccctcctcatgtaacaatccctacccttcaactgcacccactgccagaacctattgcaatggatatatagctgaggggggagatgaccaaaaactgacgctgagttcggctactaaactgatttcctgctaaccctcattcaaatttaaataacatcacatatctattcctcttcgcctacttttagcggctttccagccattcccttgagatattgcttaaattcagtgaggcgcaatattttgaattggaatgttcgcggatattttacttctgcagactgcagtgttattattgaaaaagtttcattttttttatttatttcgtttacggcgatcttacacagttttttttatatcagttctgcattcaatcttaccgagttaatagctagctagtacttcgaaatgaataatacttctgttttgagcaagttcttgtctatttgtgtttcgtgtattcgcgtttggttaaaatataattttttttcttattttttt

SEQ ID NO: 6207 - DNA, 315 bp, Glycine max
  Clone ID: 700557013_FLI
gatggagaagtgttcctgagtttgcctgcacttgttggtagaggaggggttctgagtgtgaccaatgtgcacttgaatgaagaggagacacagaggcttaaggactctgccaagaccatccacgaggtgcagactcaattgggtatttgaattttctgtgatggtcacgtggatatccggttactgcttttttgtccttaagttttcttttgttcttctccccatgatgatatggtttgacctaaattattagtacttgctgctgttagtgttagtccctgcccccttctggcagtgcaagtgtttttgtgcgtc

SEQ ID NO: 6208 - DNA, 727 bp, Glycine max
  Clone ID: 700557015_FLI
gaatgacccttcacaggtttgggaacacttcctcttcttcgctgtggtatgagctcaactacattgagtccaagggaaggatgaagaagggtgatagggtgtggcagatagcgttcgggagtgggtttaaatgcaacagtgctgtgtggaagtgcaacagaagcattaagacaccggttgatgggccttgggctgattgcattgatcgttacccggtccatattcctgagatcgttaagctctaggatggagaattgttcaagaagataaagaaaattggttattactttggttccagttatgaaaaaaaaaaaatagatgagttcttttcataacccttctctttctgcttactgtagccgtaccacaaatctctcatttgtcagtcatattggttattttatcatatcatatcatcatatcccacttttcatatatatctttcttttacttttttctgtttattttccaaacaattacatgggcctcttgtgaattagcacagagatcgccgacggggaggggggggtctatgtgtttattcatgaatttgtgcaacatgtaagggaaacacagtttcaatttcaagtttgtatttgcttgcactattattggaaagcttgtaattaggacttgaaatattgtaagaagtgcttattttctttgttgttgttgttgtcttgtcagcgagatcatatcattaaattaaagtttcattagcatgacc

SEQ ID NO: 6209 - DNA, 1302 bp, Glycine max
  Clone ID: 700557018_FLI
gttccgtttgctgacctgacctcggaaatccaaagagggaaactcacggtgtttcgttgcgttgtgctctgctctgctcctttgggcctgggctgggctgggctgggctgggctgggcatggctattgcagcagcggccgtggtggtaccattgggcctgctcttcttcgcctccggcctccttgttaatctcattcaggcaatatgctatgtcgtcgtaaggccggtgtcgaaaagtttgtacagaaggatcaaccgggtagtagcagagctcttgtggctggagcttgtatggcttattgattggtgggcaggagttaaggtccaaatattcacagatcatgaaacctttcgtttaatgggtaaagagcatgcacttgtgataagcaatcacagaagtgatattgattggcttgttggatgggtttcagctcagcgttcaggttgtcttggcagcactctagctgtgatgaagaaatcttcaaagtttctgccggtcattggctggtcaatgtggttttctgagtatctttttctggagagaagttgggccaaggatgaaagcacattaaagtcaggcatccagcgactgagtgatttccctcttcccttttggctagctctctttgtagaaggaacgcgttttacacaggccaaactattagctgctcaggaatatgccacttccactggattgcctgttcctagaaatgttttgattccaagaactaagggttttgtttctgcagtaagtcatatgcgctcatttgttcctgccatttatgatgtaacagtagccatccctaagagttcccctgctcctacaatgctaagactcttcaagggacaaccttcagtggtgcatgttcatatcttgggcgtgtctggttgttgcggggtctgtaaagttcctgcaatggtcttcgttactctcttcctggaagggtgttgcattttcagcttttggtttggcagttgttactgcacttatgcaaattctgattcaattctcacagtcagagcgttcaaacccggccaagatcgtgcctgcaaagtcaaaaaacaaggggtcttgatttatttggcgaacttaaagttgcatttatgtgtgatgagtgactcatgtaatactcattattttgctttcaacatcttatcatagtatgcttctattctatatatgtactattatgaatgcttatcgattcattgtttttaatttaattaggatatccttttgtattgacagtctaggggatggcctagaaaaattcaaccacctattttattttactcttggcc

SEQ ID NO: 6210 - DNA, 458 bp, Glycine max
  Clone ID: 700557043_FLI
ccaattcaagcgtgcataggatcaaaagtgatcgctagtgaagcgatatccgcaataaggaaggatgtactagccaaatgctacggtggggatatttcgagaaaaaagaaattgcttaagaaacaggctgaaggaaagaaaaggatgaagtctattggtaaagttgatgttccccaagaagctttcatggcagttttgaaacttgaaaaggaggtaatatgatcgtgtttacgtgtaagttgcaacatgatatgaaattgtaaatatattaagaaaatattagaaccttgatctccttttgctcggtataattattcaaatgttgttattgtatgattcatagttgcatacaagattctggatcattgataggatctctttaccattaaaaattgaaatattgtttgtcaagatctagttaatgccttaatggtcaagacttcgacttatttattggc

SEQ ID NO: 6211 - DNA, 1349 bp, Glycine max
  Clone ID: 700557056_FLI
gtgatttacatctgaccactgagatgctcaatcagttagagcttcaagttgatggtggtttcaatcagaatctgaattcaaagactttgtctgctcccaatctcagtgcaatggactaccctgcacttacttcaccagatggccagactgcttcagtagaatatgtggttgataatgtgcaacaaagtggcaatccttaccgatcatatgacagtgatgtgctgcttttcaaatctgtctcttcagtttcatctaggggtggtgctattgactttgcttcagctgttaggaagttggcttctcgggattctggtggtatttggaagtatgataaaaatggctctggtgatgctgctatcggctcaagtaggaattcgaatgttctggctagtggttacaatggtggacaggggagagcacactttggtgatcggttacagaaccgtggttcagctcgggcatttcctgtttggcttgaaactggtgatgcagttgcaaatatgtattcagagttgcgggaagaggctcgtgatcatgcatgcttacgtaatgcatattttgagcaggcacagcaagcctatcttattggtaataaagccctagcaaaggaactaagtgctaaagggcaactgcacaacatgcatatgaaggttgctcatggaaaagctcaagaatccatttacctccagagttgctccagagttgcagggcgatggaagaggaaatgagaggataatagacctacacgggttgcacgcaagtgaagccattcatgtgctgaaacatgagttgagtgtgctgaaaagcactgccatagctgccgagcagcgtctgcaggtttatattcttgtgggcacaggtcatcataccaggggttctcgcactcctgcaagacttccaatagctgtacagcgttttcttcttgaagagggcattgacttcacggaaactcagccaggcctacttcgtgttgtgatatattgaacttgccaaggatgtgttttttgacacagtataaagtccaccaacactgggatattttactcatcgatgtatctgtatatgcccgaagaacaggaaaagaaaagaagaaaaaatcagttaggggagaaggaaagataaggttttgtagcagaattgtatcattaaggtttaggggcggcatcagatttacatttagtaagcaggatttctcatctgcccatgttatgggatcattttccttctgttaattttgtaccctaattttcatttttttgattcagatgtaattgatagaactcaattacgccatagaacaattgattttgcaaattagattcaatgtcaaacaatttatatctcacaac

SEQ ID NO: 6212 - DNA, 2521 bp, Glycine max
  Clone ID: 700557078_FLI
ctaggcttcagaccgtgaaccgcaaactcactgcaatgaacaagttgttgatggaggagaatgatcggttgcagaagcaggtgtcacagcttgtttgtgagaatggttttatgaggcagcaattgcatactccatcggcaacaactactgatgctagttgtgattcggtggttaccactcctcagcataccctgagagatgctagtaaccctgctggactcctatcaattgcagaggaaactttgacagagttcctttcaaaggctacaggaactgctgtagattgggtccagatgcctgggatgaagcctggtccggattcggttgggatctttgccatttcacaaagttgcagtggagtggcagctcgagcctgtggtcttgttagtttagaacctacaaagattgcagagatccttaaagatcgtccatcttggttccgtgactgtcggagcctagaagtttttactatgtttcctgctggaaatggaggaaccattgaacttgtttacacacagacatatgctccaacaacactggctcctgctcgggatttctggactctgagatataccacaagtttggaaaatggcagtcttgtggtttgtgagaggtccctgtctggttctggaactggccctaatccagctgctgctgctcagtttgtaagggctgaaacactccctagtggctacttgatccgaccatgtgaaggtggagggtcaatcattcacatagtagaccacctaaatctcgaggcatggagtgtgccagaagtgttgcggccactttatgaatcatccaaggtggttgctcagaaaatgacaattgcagcgcttcgctatatcaggcaaatagctcaggaaacaagtggtgaggttgtttatggattgggtaggcagcctgctgttctgcggactttcagccagagattgagcagaggcttcaatgacgctgtaaatggattcaatgatgatgggtggactgtattgaactgtgatggtgctgaggatgtaattattgctgttaattcaaccaagaatttgagtggcacttctaacccagcaagttcccttacattccttggaggaattctctgtgcaaaagcttctatgttgcttcaaaatgtccctcctgcagttttggttcgttttctgagggagcaccgctcagagtgggctgatttcaatgttgatgcttattctgctgcatcactgaaagctggcacctatgcctatccagggatgaggcctacaagattcactggcagtcaaataattatgcctcttggtcatacaattgaacatgaagagatgcttgaagttattaggttggaaggtcactctcttgctcaagaagacgcttttgtttctagggacattcatctcttacagatatgtagtgggattgatgagaatgctgtgggggcttgttcagagctcgtatttgctccaattgatgaaattttccctgatgatgctccattggttccttctggtttccgcattatcccattagattcaaaaccaggtgacaaaaaggatgctgttgctacaaatcggaccctggatttgacatctggttttgaagttggtcctgcaacaactgctggtgcagatgcatcatcaagtcaaaacactcgatcggtgttgactattgccttccagttcccttttgacagcagtctgcaagacaacgtcgcggtcatggcacgccaatatgtccgcagtgtgatttcctccgtgcagagggttgccatggctatatctccatctggtataaacccatcaattggagctaaactttctcctggttctccagaggctgttacactagctcactggatctgccaaagttatagttactatttagggtccgacttactgagatcagattctcttgttggtgacatgatgctgaaacaactgtggcatcaccaggatgccattctatgctgttcactgaagtcattgccagtgttcatatttgcaaatcaagctggccttgacatgttggaaacaaccctagttgccttacaagatatcacattggataaaatatttgatgaggctggacgcaaggcattgtgtacagactttgccaagttaatggagcagggttttgcttatctgccagctggaatctgcatgtcgacgatggggcgccatgtgtcatatgaccaagccattgcatggaaagttcttactggggaagacaacactgttcactgcttggctttctctttcataaattggtcatttgtatgaaaaatccaattcgtgtgccctgctttttcccacttgaacataaaaatgaaagggttaaaagggagacaagacaagtttggggggaaaaagaagtcgtaaatttttgtataacacatcaggatcaggtttgcatttaattcgatttaatttatttcttatttagtgcagagaccaaattgaattaatcttgtaaattatttagtgctagagtgaagttgagacttttgaatgacacatgttgagtactttgtttt

SEQ ID NO: 6213 - DNA, 2045 bp, Glycine max
  Clone ID: 700557079_FLI
cccaacctcccaactccaacaccctctctctctctctctcgtcttcaccaaacaaacaaactccactcatcgcgtgaagacgacgacgatggagatgctacgcagaagcagcagaagaatcttcgtctccgcgtgtgtgtggttgcttctgtcgctgtcaccgtcaccgcccagtgttgttaacgcctcccatggcgtattcaacgtgaagtgcaagtaccaggaccgctccctctccgccctcaaagcccacgactaccgccgccagctctctctcctcgccggcgttgacctccccctcggcggctccggccgccccgacgccgtcgggctttattatgctaaaatagggattggaactcctccgaagaattactatttacaagtggacactggcagtgatattatgtgggtaaattgcattcagtgcaaagagtgccccaccagaagtagccttggtatggaccttacactttacgacataaaggaatcatcctctggtaaattagttccctgtgatcaagagttttgcaaagagatcaatggaggtctgctgactggttgcactgctaatatttcctgtccatatctggagatatatggcgatgggagctcaactgctggttactttgtaaaggatatcgtactttatgatcaagtgtctggggaccttaaaactgattcggctaatggaagtattgtatttgggtgtggtgctagacaatctggagatctaagttcttcaaatgaagaagcacttgatggaatacttggatttggaaaagctaattcatcaatgatttcacaacttgcttcctctggcaaagtgaaaaagatgtttgctcattgcttaaatggagtaaatggaggtggtatatttgctattgggcatgttgtgcaacctaaagtgaacatgactccattattaccagaccagccacactacagtgtcaatatgactgcagttcaagttggccatactttccttagtctatcaacagatacatcagcacaaggagacagaaaagggacaataattgacagtggtacaaccctggcctatctgcctgaaggaatttatgagccgctagtatataagatgatttctcagcacccggatctaaaagttcagactctccatgacgagtatacatgctttcaatattctgagagtgttgatgatggatttccggctgtcacatttttttttgaaaatgggctctcgttgaaggtttatccacatgattatttatttccctctggagatttctggtgtattggttggcaaaatagtgggacacaatcaagagatagcaaaaatatgactttattgggagatttagtgctttcaaataaacttgtcttctatgaccttgaaaatcaggctattggatgggctgagtacaactgttcttcaagcattaaggtgagggatgagcgaactggaacagtccatttagttggttcccactacatttcttttgcttgcgtttttaacatcaactgggtggtgattttgtctctacttgctctacttcataaattgatttattgaaatggagcaacagatacatataccaaagtcaaaattatggtcaaagaaagaagataaaaaatgctatgtgagaaattgactttttaggaacttccatgatttctaaatgtaatcaagggaaaactaggacactgaccattgggaaccttcgccgtgggtaaaatttttcttctcaattaccaaggtgaatatgtaaattgcaaaatcttaccaccaactgtatatgttattagactttgattttttacttagcttgggtctgaatgccaaatgtataattaacatgatacaagtcatgtttggaattcaaggcagtgttgcaaatatttaacattaggtattgtagagcatttctgtgctggctggctccctttgtttgacctattttagccagtgttataatattccttacaacaaattcttatataacatttttaacaattcatttttttttctttatctctttcgaatgcattacctatgttatttc

SEQ ID NO: 6214 - DNA, 1043 bp, Glycine max
  Clone ID: 700557179_FLI
gagctagtatctaaggtatcaacaatatggtattttttatttttattattgtcaatctgaacaaattattatacacagtattgtttagccctgtacttttgtgctctgatcaaataagtgaagaacttggtgtagtataatcgtgcattccttgttttaaagagttgagagcttcttcttatgtactaaggttactgactgaaggtcttctcaattaataactgttcagagcgaattgtaaatcttgccagacaaatctctacttcgtttctgaagtgtttagttttgataaagttcaataggaggaagatctattaatgttcaaaaatattgttgatttcttttgttctatatccaatctccctggagtctttaaaaccaaggctttaacttgtatcgtgccattgataattaattaaatattgaggagtacatgaagtatatcgagaagtttgaactattaagtatgtccaaagcattttgagatttctttttcgcctttattacttttctcctcctcctcagtcctgaagcacaaatatgttctatatttatctcttttggtgcataagtgtatgattatttcctcaatttctttggaccttcacaggaacaactaagattaagaacctggatcaaaacataggtgccttagcagtgaaactgtcagaaaaagacctgagagaaatttctgaggcggttcccattggtgatgtagcaggtggtagatactacaatggattggatcacttttcatggaagtatgctaacacacctccaaaagattcaaaaatctcaacctgacgcacccaaccaaccctttggttagggaatctaccaagtcatcatgaattgagggtaacaaggctggcaaaggctaatatcaggatgctatttaaatatcaataatgtagcccttcttgatgttggacttcctagatatttggttggttaaaatttttaatttagactgtaatactattttatatgcaacagataattatgagcagtttcgaaggcatgacttgagtttaggatgggtc

SEQ ID NO: 6215 - DNA, 1495 bp, Glycine max
  Clone ID: 700557213_FLI
gcttctttccctctcttcgtcccttgctctgtgtcgccgtaacacaaaaagggaagagagagaaagaaccaccccacccaacaacagcttttgttcttcacaagacatagcttcgtgtgtgtgtttcttttcttccttccagcttggaaagactgaagtctctgtctttttcaggttttgggggtgttgttgaagatgttggtagcaaatagctttgatctatggcgaaaggacggttttttctctgcggcggaagaggtgcaggaatcagctgatataatggaatctgcatacagggcatggttgagagagaagagagaaaggtcaactcctgaggaattaaatgaactatgcagagagctgcaaactgctttaggtaccgcaaaatggcagttggaagaatttgataaagccgtcaggctaagctaccgacatcacggtgatgacaatacatccactaggcataggcagtttatttctgccattgaaagccaaattacccaggttgaagcagcactgagggaatcttacattgaggaaggtaagcaaccacttcggtgggtaaaccttgatgaagaagagcgagatgatctggctgcctttctatctggaacttgtcagaccacacaaagcactaacgatgactgcatggaggtgaaacaagccaagaaagaagataagattgtagatataaacactttccgcaaccgggatatatctgctagtgaaaagtcttctaaggatgtcatttctgttaacaaggatacagattatgtgatagaaataaaagcagatgctgtttctagaagtaatgatgatgtagtttctcaaacagatcgaacaactagtacaaggaaaacatggagtccacctaattatggtgctttaaaaattgtaattgctgatgaagatgagcagagagataaacctacacggactgttgatgccacccctaaagaaaaaggattcagaaatctattttggaaactaaagtttgaagagtatcctcaggccatgcgagtagttcatatgttcaatcagcgttttgggcgcataggtatatgccagagccagaggcagtttcaaagtcccttgcacttgcgatatggctgttctgttcaagttacacttgctctaatgttgaccatttttctcattgttccctttgtactttattcaacttgagttaaacggctgcttcacgcaaagagggctttacttgtcttggtgtatcgacaaggtcactgatcatttgagatctcagccactgccttcaagtattggtgggaaaagttatagctaaaggcacagtgagtgccaccttctattttgtcgttgttgagattaagatgaatttacctatgtgagtgtggatacagataggataaccaacctcttcgtcctacagggacacctgtctattttagtttctcagctattaaaatgtacatacattcatccaatatttaatgcaagttccgctttatttggttgc

SEQ ID NO: 6216 - DNA, 2257 bp, Glycine max
  Clone ID: 700557225_FLI
gtggcatgtgccattactacatcatagtcatttcctattttctctttcagagatctgagctccaacatgttaacaggttcaatcccagattcatttcaggatttgggaaatctaaattacttgtttctgactaacaattctctaagtggaccaattcctgattggatactgagcataaaacagcaaattgatttatctttgaacaatttcacaaagacttctgcaaataattgccaaaggccggatctgaacttagcttcaagcctctctcgcacagcaagcacttcaatatcttgtttgaagatgggccaaccttgttcaggaaaaccccagtttcattcactgttcataaactgtggaggacctgaaacaaagtttgagggcaatgaatatgaagctgacctcagtccacttggcatttcaaactatgttcctggtaatagtggcaaatgggcttatagcagcactggagtatatctaggaaatgcaaaagctgattatatagcaacaaatcagctttctttggatattaatggccctgattactaccacacagcccgcatagctcctctgtatcttaattactatggcctttgtatgctgaacggcaattataaagtgaaacttcattttgctgagatagcattctctgatgaccaatcatattgcaaccttggaaagcgtgtattcgatgtatcaattcaaggttttaaatatctgaaagattttaacattgcgaaagaagctggtggagttggtaagggaatcactagggagtttaatgttaatgttacagaaagcaccttggaaatccacttatcctgggcaggaaaaggaactaatgccattcctataataggtgtatatggacctctcatatctgctatcactgtgaccccaaactttaaagtttatgcacatgggttctctactggaacaattgttggaattgttgctggggcatgtgtgattgtcatattgatgctctttgctctttggaagatgggtttcctttgtcagaaagatcaaacagaccaagaacttctaggtctgaaaacaggttatttcagtttaagacaaattaaagctgctactaataactttgacccagcaaataagataggtgaaggaggctttggaccagtattcaagggtgtactatcagatggtgctgtgattgctgttaagcagctctcctccaaatcaaagcaagggaatcgtgaattcatcaatgaaataggcatgatatctgctttgcagcatccaaaccttgtgaaactttatggctgctgcattgaaggaaaccagctgctgctagtatatcagtacatggagaacaatagtcttgctcgtgcactttttggtaaagaacatgagaggatgcaattggactggcccagaagaatgcaaatttgtctgggtatagcaaagggcttagcttatcttcatgaggaatcaaggttgaaaatagtgcacagggatattaaggcaaccaatgtcttacttgataaacatctgcatgccaagatctctgactttggtttagccaaacttgatgaagaagagaatactcatatcagcacaagaatagctgggacaattggttacatggctcctgagtatgctatgaggggttacttgactgacaaagcagatgtctatagctttggaattgtagctttagagattgttagtggaaagagcaacacaaattataggccaaaggaggagtttgtatatcttttagattgggcctatgttctccaagagcaaggaaaccttctggagctggtggatccaagtcttggttcaaagtactcctcagaagaggccatgagaatgctgctgttagcactcttgtgcaccaacccttctcccactcttagaccatgtatgtcatcagtagtgagcatgcttgagggaaaaactccaattcaagcaccaataattaaacgcggtgacagtgcagaagatgtaagatttaaagcctttgagatgctatcacaagacagtcaaactcatgtctcttctgcattctcagaagaaagtatagagcaaagaagcaaatcaatggggggaccatggcttgactcctccatatcacttccaagtagaattgattaggcttcaaccgatcaacttattagatattccaattatgtgtgatttgcaagtcggggaagttaactcattaaattttaattcatagttgcttgctatatgtatggtggtttaaaggctattaatggaggtttcc

SEQ ID NO: 6217 - DNA, 603 bp, Glycine max
  Clone ID: 700557230_FLI
ggcctctgtttcagccacttctctcaggttccaaccctttctcaagttgtctacaaggactactacccaggggtgttacaaaacttcaagtttgggggcagtttctgtgggatggaataggagaacctttccctctttgagatcctcccgtttacgcatttgtgcagtcaaggcacaaccggagacagtgcagaaggtctgcgatattgtgaggaaacaacttgctctgcctgctgaatctgagcttaccccagacaccaaattttcagcacttggtgctgattcccttgacacggtggaaatagtgatgggtttagaggaagagtttggcataactgttgaggaggatggctctcaaaacatctcaaccgttcaagaagcagctgatttaatagagaaactgattcaagacaaaagtggagctagttagttaggaggtgaacaattctagggaaaatccattgagtgagggcacaagtgtaactgaatgaggttaattattcagcccattcactggccctttttttgtgcttacgcgtattctttagcaagctttttttggtgactttgttcaattttctatttgatgcaagaggtcaaccc

SEQ ID NO: 6218 - DNA, 806 bp, Glycine max
  Clone ID: 700557240_FLI
cgatgcggacgatgttctcatggtgaacttcgcgttcaagctgaacaagattccggacgagagcgtctccccggaaaaccctcgggacgagcttcttcggcgcgtgaagagactcgcgccgcgcgtggtgacggttgtggagcaggagataaacgggaacacggcgccgtttttggcgcgcgtggcggaaacgctgtcgtattacggcgcgttgttggagtccattgaggccaccacggtggggaaagataacagcattaacaactcagaccgagtcagactcgaggagggactgagtcgaaaattgcataactcggtggcgtgcgaaggaagagatcgcgtggaacggtgcgaagtgtttggaaaatggcgcgcgcgtatgagcatggcggggtttgagttaaaaccactgagtcaaagcatggtcgagtcaattaaagcgcgactcatctctgccaacaaccgagtcaactcgggactcaccgtaaaagaagagaacggagggatttgctttggttggatgggaagaacactcacagtcgcatctgcttggcgttaacttggctcatttatttttctttcttttttctttttattttggttcggaatattattatatataatatcacattgttactatattttaacgtcatctagagataatggaaaggcaaagagaatagatttggtaaattattattattataaatatagtatgataaaagggtgaaaagaaaatctcaaggaaagcccctcctcttggttctaccgaactaaaactaataaagaagtgtttggattccgag

SEQ ID NO: 6219 - DNA, 1234 bp, Glycine max; identical to SEQ ID NO: 6197
  Clone ID: 700557259_FLI

SEQ ID NO: 6220 - DNA, 1590 bp, Glycine max
  Clone ID: 700557301_FLI
ggccaccagagcttttgcttggagccacttattatggcactgctgtggatttatggagtacaggttgcatacttgctgagctgtatgcaggcaagcctataatgcctggaagaactgaggtggagcaattgcataaaatttttaaactttgtggttcaccttctgaggactattggagaaaatcaaagttgcctcatgcaacaatatttaagcctcaacaaccctataggcgatgtgtttctgaaacgttcaaggagtttcctgcacctgcaatagaattgatagagatccttttgtccatagatcctgctgatcgtggaacctcagcatctgctttgaatagtgagttcttctcaaccaagcctctaccttgtgatccctcaagcttaccaaagtatcctcctagcaaagaatttgatgccaaagttcgggatgaagaagctagaagacaaggagcagcaggaagcaagggccagagacatgatattgagagaagaggtgcaagagaatcacgagccattcctgcacctgatgccaatgctgaactggtcttgtcaatacagaagagacaagggcaggccaattctcagagtaggagtgagaagtttaaccctcatcctgaagaagttgcttctggatttcccattgatccccctagaccatcacaagctgcaggattaattgcagatcccccggttcatcaacataaaagatcctcccattcaggtccactgacccaccgtgcggcatgggctaataaagccgggaagaaccaggaagatgctccaaagatttcaatggggggtgacttatcaacagtatcgggcttagttgcagcaaggaggagtatgttgtctgacgatcgcagagaatggtctggatcatcacaagcagaggccccaaaactaataagcaggttcccaggatccttcaagtaggcttctgagtcaatgatgcaacaggatcagaagcatcatgcacatgctcctcaaaaggaagaggggagaggcagccgcaacaaagactcaaatcttgttggttatggctccaagggtcataaaattcattattctggtcctctgctagttccatcaagcaaccatgaccagatgttgaaggaccacgaccgccaaatccaagaggcggttcgaagagcacgactagacaaggcaaagatgagaagactccaagctgaagggagccagatatccaattcattatttgtttctggtcgttgagttatagaacccgatgctgcaaagcatcattaagaatatttgattcttttattttgcctgtacagggagttagcatcccccctgtggccatgttaggtaactctaactcagaaatcttccctccactttatcacagcacgtgtattttccttccacttatatggtcattcttgcaaagcttatcaaccttaagctgtagtagaatactgggggaccttgtcttccttgtgtttaacttatgatagagtaattatcactgggaagatggatatgtatatttgtgtactctctttttgtcacttgccccatgtctccgagatgcattttggtacgtcagtacatgattgaatat

SEQ ID NO: 6221 - DNA, 913 bp, Glycine max
  Clone ID: 700557332_FLI
caagttgggtgggatatgtagccgtttgcgaggacaggagagagataacacgaatgggaagaagagacattgtgatctctctcaggggaacttccacgtgtctagaatgggcagaaaatctcagggctcatatgattgacatgcccgacaacgatagctcagaagaagcccaaggaaagcccaaagtggagtgtgggttcatgagcttgtacaaaacaaaaggagcacaagtgccaagtctagcagaatccgttgtagaagaagtgaggagactgatcgatctatacaaaggtgaagagttgagcatcagtgtgatagggcacagccttggggcgacgctagccttattggtggctgaggagataagcacgtgttgcccccaagtgccacccgtggctgttttttccttcggtgggcctcgcgtgggtaacaaggcctttggggatcgcttagctgccaaaaacgtcaaggtgctgagaatagtgaactcgcaagacgtgattactagggttccagggatcttcgtgagcgaagagcttgaacagaaaatacggaacgttggtgggggtgtgttggaggagaacacgcccttagcatactcgcacgtgggaacagagctgcgtgtgcacaccaagatgtcgccatatcttaagcccgatgctgacatggcgtgttgtcatgacttggaggcttacttgcacttggtggatgggttcttggcctccaattgtcctttcagatccaatgctaagagaagcttggctaggttaatgcaagaccaaagtgccaatgtaaagaagttgtatactagcaaggcaaaatccctcactgtcaatcttagtaggcagggatctatgtctatgtctaattgtttgcctagtccatcttaatcaaaactcatatgcttcccttt

SEQ ID NO: 6222 - DNA, 508 bp, Glycine max
  Clone ID: 700557336_FLI
ggaaatgatgcaggagtgcaagaaatggccaacgaaaaattggagaggaggtgcaggttacatatcaaaggatgtggttgtgaaaggcttacccagtcctagtgatgatactctaatacttgtgtgtggacccccgggtatgatgaaagcaatatctggagaaaaggccaaggactggacacaaggagaggtttctggcatcctaaaagaggctggatacactgaacaaatggtatacaaattctgagaaatttagttttcttgcatctgaattccaagcacttgtccgctgcagaaatcgtgtactgaaatggttttctgataacaacagttaggtgcggttgaaaattccaacatgaaataaatcttgaattacagagcatagagaattattaatggtatcttgtattttcaaaattttgtggatatttaatcatgcggttgtctagcatggatgtcaacaatgggcatctgtgggggtaaatttacttctcccaccctattttct

SEQ ID NO: 6223 - DNA, 383 bp, Glycine max
  Clone ID: 700557339_FLI
gtcaagcgcgtgtgttttgttcattctggatgaaatgaggaagaagtctaaggaggaagggaagagtaccactggagaagggttagagtggggggtgctattcggattcgggccgggtctaaccgttgagaccgttgttcttcacagtgttcccttggagggataaatcatgctgatgcggtgactagtgatttaagagtgatcaataaggaaccctcggaaataccagggaaagtttgttattattactagtttcacttgtggatttatcgtagcataatgttgtacaagaataatttaatatgaacaagatcgtgtgtttgttattgattttttcaaagttatatagtccgtacttattcggcattgcatttcgttttcgc

SEQ ID NO: 6224 - DNA, 1598 bp, Glycine max
  Clone ID: 700557377_FLI
gccttagccttccctacaactccaaacacaaagacatcatcatccatggctgcctccgtctccactgtcggagctgtcaacagagctcttttgaacctgaatggttctggagctggagcttcagctcccagttcagccttctttgggaccagcttgaagaaggttattgcctcaagggtccccaacagcaaggtttccggtggaagcttcaagattgttgctgtagaagagaagaaagagattgaagagacccagcagaccgacaaggacagatggaagggtcttgcctatgatatctcagacgaccaacaagacatcacaagaggaaagggtttggttgactcccttttccaagctccacaggatgctggaactcactatgcagtcatgagctcctacgagtacctcagcactggacttcgccagtacttggacaacaaaatggatggattctacattgctccagcttttatggacaagcttgttgttcacatctccaagaacttcatgaccctgcccaacatcaaggttcctctcattcttggtatctggggaggcaagggacaaggaaaatctttccaatgtgagcttgtctttgccaagatgggaatcaaccccatcatgatgagtgctggagagttggaaagtggaaatgcaggagagccagcaaaactgatcaggcagagataccgtgaagctgcagacatgatcaagaagggaaagatgtgcgctctcttcatcaacgatcttgatgcaggagctggtcgtcttggtggaaccacacaatacactgtgaacaaccagatggtgaatgccactctcatgaacattgctgataaccccaccaatgtgcagcttccaggtatgtacaacaaggaagagaacccccgtgttcccatcattgtcaccggtaacgatttctcaacactctatgcacctctcatccgtgatgggcgtatggagaagttctactgggcaccaacaagggaagaccgcattggtgtttgcaccggaattttccgcactgatggtattcctgaacaggacattgtcaagcttgttgacaccttccctggccaatccattgatttctttggtgcactgagggccagagtatatgatgatgaagtgaggaagtggatttctggtgttggtgttgacagtgttgggaagaagcttgtgaactcaaaagatggacctccaacctttgagcagcccaagatgactctggagaagctcttgctgtatggtaacatgcttgtccaagaacaagagaatgtcaagagagtccaattggctgacaagtacttgaacgaggctgctcttggaaatgctaacgaggatgctattcagaggggaactttcttccagtcttgaattggaggcaaagcaaacttggcaagtaaatatttctgttcgtgaaggttgttgtactaatccaagtgctagaagttgtgatggaacttgcgtgtaacattcttagcattctcaatgtcttaggtgcaaagagaagatgctaagtttgagatgatcttactatatttttcatattggaccgtcttcctctataattttgagttacagtgtccacttaaatt

SEQ ID NO: 6225 - DNA, 435 bp, Glycine max
  Clone ID: 700557414_FLI
ttttaaacaaaggaatgatctcctagcagtttaaaatttaagatatccccaaatgtcagtaaagaccactaatgagaccattacaaaggcagaaagtacaaaaacagaagagcacttggtgcgatttgaggaagcctttgaaatgtgaggcacccttctgagcaagaaaaggtctttcaaccccaaggtggagcctgcttttgtaacttgttgagaaatcttaaattttaaactgctaggagatcattcctttgtttttttttttttgcctccatctcttttttgggccaattgaggggaggcatgtaggtctacttagatttgttgatagttcaatatatatttgagtgcatacgtagttggtatatgtatgctcacatggttggctagtctgtagactctgttcttgtacattatatatacagttttttttcc

SEQ ID NO: 6226 - DNA, 1015 bp, Glycine max
  Clone ID: 700557417_FLI
cgggaatccttcaagtggtgatatcttccatgctgcacccaatgttgatcattctcaggactttgtaaggaaagatatcaaggagtggttgaactggctgcgcaatgatataggttttgatggatggcgtcttgactttgttagaggtttctctggtacatatgtaaaagaatatattgaagcatcaactcctgtatttgccattggagaatattgggacagcttgggctatgaacatggaagtttgtgttacaaccaagatgctcatcggcaacggataattaattggatcaatgcaactggtggtacttcatctgcatttgatatgacgacaaaggggatacttcattctgctctgcataatgaatattggagactgatagatcctcaagggaaaccaacaggagtgatgggatggtgggcttctcgtgctgttacattcctagagaaccatgataccgggtccacacaaggccactggccattcccacgggataagctcatgcagggatatgcatatattttgactcatcctggaactcctacaatattttatgaccatttctatgattttggcatccacgatgtattaaccgagttgattgacgctcggagacgagctgggatccattgtcggagctctatcaagatataccatgcaaacaatgaaggttatgtagctcaggttggtgatgcgctggtaatgaagcttgggcagtttgattggaatccctccaaggaaaaccaattggaagggagctggcagaagtttgttgacaaaggaccagactaccaagtgtggttgagacaatagtttaataccaatctatagacattgctctattctgtaatggaaattgaaaatagcttcaataaagcacacacatcataggaaaaaaaaatttgtttgtaacatgtaacgaacaaacagataaggtatttcttatctgcttcgtatgagcttgagtcaaatgcctccataaaaaaacaataaatttcatctgcattttgagtt

SEQ ID NO: 6227 - DNA, 485 bp, Glycine max
  Clone ID: 700557423_FLI
ggactttcaaatgtgaagaaacccccaaaatgatcaatgacaacaatgacagcactaaggatttatcgtaacatgaatggtgttctgtgaaatgacacaacagagtgctcgccatcttggaaatatgtctgcttgttcttgtttgatttgtttatttttactcgaggaaacaaatcatataggaagagggttttgggttggggggagcgccaggggacatgctcgagatcccttgtggctcactattggaacataagcttaaattaaattgaagttttaaattaatggtttggatagaagtatgatacttgatagaacattatggcggaagttgatccatgtaaccgaccccacctagtgggataatgcgttgttgttgttgttgttgtatatgtaacagttagaagataagttttgccactttctttttactgcagcagattaatatgttccccactctaaatgggaactaaatatttggaatg

SEQ ID NO: 6228 - DNA, 904 bp, Glycine max
  Clone ID: 700557459_FLI
gatcaaggcagctgcggatcatgctggacattcagcacaactggggctttagaagcagcctatgcacaagcatttgggaagagtatctctctttctgagcagcagctagtggattgtgctggccgtttcaacaactttggctgtaatggtgggttgccatcacaagcctttgagtacatcaaatacaatggaggacttgagacagaggaagcatacccctacactggaaaagatggtgtatgcaaattctcagctgaaaatgttgccgttcaagtcattgactcggtcaatatcaccttgggtgctgagaatgaattaaaacatgcagttgcatttgttcggccggttagtgtggcctttcaggtggtgaatgggttccatttctacgagaatggagtttacactagtgacatttgcggtagcacttcccaggatgtgaaccatgccgtccttgctgtggggtatggagttgaaaatggcgtcccatattggctcataaaaaattcatggggagaaagttggggtgagaatggctacttcaaaatggaattggggaagaacatgtgtggtgttgcaacttgtgcgtcttatccagttgtggcataaattgcataagaatatggtccctggtgactaccaccttgtcatgcttcagagtttaaagataagtgtcattgtataatgaaaattgctcctagttgggttggtatgatgtattaaataagttagaagttgctgtaaatcacgtaagaatatcatggcctgaattgtgtgtatcacagacataaataacgatcatatattgatagttcatagttacatattgtattgtattgtattgatgcgccccgctttaattatcagttataagaattaagatagcatgtctttgctactttgcact

SEQ ID NO: 6229 - DNA, 1169 bp, Glycine max
  Clone ID: 700557575_FLI
cagagaatgacaggatcttctttggggtacccattttctcctacaaggaacttcaagaagcatcaaacaattttgaccccactagaaaactaggagatggaggctttggcactgtttactatggaacactaagagatggaagggaagttgcaatcaagcatctatttgagcacaattacaagagagtggagcagtttatgaatgaaattgagatccttactcgcctacgccacagaaatcttgtgtccctctatggctgcacttcacgtcacggccaagagctactgcttgtatatgaatacgttcctaatggcacagttgctagccatctccatggtgatttagcaagggttggtttgttgacatggcctattcgaatgcaaattgccatagacactgctgctgcattgacctatctccatgcttcaaacatcatccaccgtgatgtcaaaaccaacaacattttacttgacattagtttttcggctaaggtagcagattttgggctttcaagattgctccccaatgatgtaagccatgtctccacagctccacaagggtctccggggtatcttgaccctgaatatttccaattctacaggctcacggacaagagtgatgtgtatagctttggggttgtgcttattgagctgatatcatccatgccagcagttgatgcagccagggaaagagatgaagttaacttggcaaatcttgccatgaaaaagattcaaaaaggaaagcttagtgagcttgtagacccatccttggggtttgagtcagaccaagtagttaaaaggatgctaacttcagtagcagggttggcctttcggtgtgtgcaaggagacaatgaattaaggccttctatggatgaagttctggaagcactcaagaaatttcaaaatgggaattatgagtctgagaatctagagaaaggagatgatgatggtgttatctcttccacttcatccagcgaagtacatccacctgtttacactggaatttggtaaacaaccgctagtctaagttaattgcttgcgagaccaactagtgaatctcaggagcatgtcaattatgtgtttgctttaaaatgtcaagttttttgatgttcatcattgcaacaaacgtttactggttcgaaatttacagaaagaaaaattgtttaacag

SEQ ID NO: 6230 - DNA, 1639 bp, Glycine max
  Clone ID: 700557585_FLI
gctggatcaaattgcacaatggacagctacacacttcagacagttctaaggagaggtgcaaccccctttgaatcatattttttacctgtggctgttggtgaaggagcatcttctgccaattttcctcttgagccacttttaaacaagtcatcaaatgtgggagaaagtggtgacatttggacttattttactttggatattccccgtggtgcagctggacggaatattcacatacggctatctgcagatgtgaagatcagttatgaagtctatgctagatttggtggattgccttctcttcatagctgggactattattatgctaacaggacaaggaagagtgatcaatccgtgtttttcatgctatatgattcaagtgatgacgaaattgacttttacattatttatgctagagaaggaacttggggtataggtctaagacatctttatattggcagtgattctttgaaagcacaaactgtcatgtctatttcacttgaaggatgcccaaaacaatgctcctctcatggagactgtaaatattcttttgatgccagtggattaacatcatacagcttctgctcttgtgatcgaaaccatggtggctttgactgtagcattgaaattgtatcacataaagggcatatactacaatcaatttttctcattggatcaaatgctgcagccatacttcctgcctattggtcccttcggcagaaggcatttgcagaatggattttgttcacatccagtggcattgctagtgggctatatcatgcatgtgacgttggcacctggtgtgcattgaactttaatgttttacagttcatggacttctggctctctttcatggctgtggttagcacttttgtatatctagctaccgttgacgaagtatataagagggcaatccacacagctgttgctatcctcaccgcccttttggctgcaaccaaggcaactaggtcttccaatgttgttcttgtcattgtgattggggctcttggccttcttataggatggttgatagaaatctcaaaaaagtataggtccctctccttttcatttggattatcgctaagtttcattcaaagtttgcaaactataaagcaatggttctgtaatctagtcaagacacttttgagacggtttcgctggggttttctgttggctggtttcattgcattggctatggcaggattaagctggacgcttgaaaccagtgcaaactactggttttggcatagcttttggcatgttacaatatacacatcttctttcttcttcctttgctcaaaagcaaacattgttgatgctgaagattcatcatcaccttcaagtggaaactatgcactgactcgtcaggattcatttccaagaggtgattagaagaacatatatgggattggtgggtgcaaaaaggaaagaggtggatcttttggtatttaatttttgcattgatgagacacaattgcgtaggtaaaaagatatggctgctgagctgaactagaaatcaacataagagtgaattgtgaggcctaagatgttaacagggatcaacaaagcagtctcttgtaaattcttttttctcacaggatttgcttatttacattcattatagggtatatatactttccgt

SEQ ID NO: 6231 - DNA, 425 bp, Glycine max
  Clone ID: 700557608_FLI
agccagggttcttgatgtcctgccatcttcaagcaatacagcttgcccccacatgagtgtggataccctggtagtgtgttcaaccccttgaactttgcacctactttggaggccaaggagaaggaacttgccaatgggagattggctatgttggcattcttgggattcatagttcaacacaacgtgacaggcaaaggaccatttgagaacctcttgcagcacctctctgacccgtggcacaacaccatcatcaatacaattcgtggctactaagtttgtatccaatgacatggataagcctgtgtccttctcgtgtaatcctgaatggatgaattttgagagtgatttgggcgtgattgttgtgatccatctattttcatgtacagaggaactacgatggttttatattgttatttagactgtcc

SEQ ID NO: 6232 - DNA, 726 bp, Glycine max
  Clone ID: 700557644_FLI
aaaagtaggggactttggcctagcaagactgttgccaatgcttgatcgatacgttttgagcagcaaaattcagagcgcactcggctacatggcgccagagtttgcctgcaagacggtgaaaatcaccgagaaatgcgatgtatatgggtttggtgtcttggtcttggagatcgtcacagggaagaggccagtcgaatacatggaggatgatgtggtggtactatgcgacatggtgagaggggctttggaagaaggcagggtggaggagtgcattgatgagaggctccaagggaagttcccagcagaagaagctattcctgtcatgaaactaggcttaatatgtacttctcaagtgccatctaacaggcctgacatgggagaggtagttaacatattggagctgataagatgtccctcggaaggacaagaagaattggcatgaattaacttgcgattttcttaattaggaggatagacaatgggatgtccggggaagaagaatccggctttatttattagaaaagcgaggaattattttgttgcaaatgtttactttttcattgtaattttcttccttgttagttagtctctagttgttgtttgtttttaagatttctcttatgttatgctactacacctaggatgccggattccttttcaccgggtttcgttttggaccccccttgaaaattgttgctcaaatactgatctttcatgttctagttt

SEQ ID NO: 6233 - DNA, 1460 bp, Glycine max
  Clone ID: 700557659_FLI
ctgaaatccagaaatcagtaagaaaagcagcacatggcctgcgacttactagggaggttgctatgtctattgcaagcaaggcggtaaggaagatttttattaattacataaaacgtgcacgggcagctggaaatcgtaccgagtctgcgaaagaactgaagaagatgatagccttcaacaccttagttgtaactaatttggtggaggacattaaaggggagtcaactgatatttcctctgaagaacctgtgaaagaggacattacacaaactgacgatgaagaatgggaatcacttcagacactcaagaaaataagaccaaataaagaacttacggaaaagttgggaaaacctggtcagacagaaattactctgaaagatgatcttcctgaaagggataggactgatctttacaagacatacttactttattgtctaactggtgaagtgacaagggttccatttggtgctcagatcactactaagaaggatgattctgagtatcttcttctaaatcagcttggtgggatcctgggattgagtagtcaagaaatagtggaagtgcacaggggtctagctgagcaggcttttaggcaacaggctgaggtaattttagccgatggacagttgacaaaggccagggtggagcagcttaataacctccagaaacaagtaggcttacctcaagaatatgctcagaaaataatcaagagtataaccactacaaaaatggcagctgccattgaaactgctgtaactcaagggaggctcaatatgaagcagataagggaacttaaggaagctgatgttgatttagacagtatggtatctgagaacttgagagagaccctcttcaaaaaaactgttgatgacattttctcatccggtactggagagtttgacactgaggatgtatatgaaaaaatcccgtcagatctcaacattaacaaagagaaggcacgaggtgttgttcatgagcttgcaaagggtagactatccaactctctgattcaggctgtctctctactaagacagagaaatcagcagggagtggtttcttcactcaatgacttgctggcatgtgacaaagcagtaccctcacagccagtttcatgggaagtgccagaggagctttctgatctatacaccatatacttgaagagtaatccaactcctgagaatttgtctcgtttgcaatatctgttgggtataaatgattccacagctgctgctcttagggagattggagatagattactcaatactactgcggaggaagagaagtttgtattctagtcttgtgataaaatgtttggcattttaggcacactagagaggctgcaagtccccttaattttgccattttttattttccattttgtttaacggtagcagaaaaagaatatcacgatgtataaactttggaatagagatgagtgcagtgctgaaatcttagataat

SEQ ID NO: 6234 - DNA, 1420 bp, Glycine max
  Clone ID: 700557663_FLI
cacaagcattggtagctgttggatatgtagaaaaataaaccgattgcaaggaatattcattttgaacatgatcaacaggtaacgaggttgggtttctcactttgaaagttgcttcctgaaataaaatgatgtgttgtggcttattaaaaacagtgtgcaagattttgggggctatcgaggtttgttctttttctcctacgtttgatttttacagcaggaaatgctcctgaaaattttgggtgcattgatgcacaagcattgagctgttggattgtggatatgtagaagaataaatcaattgcaaggaatattcatcttgagcatgatcagcaggtgatgatgtcgggtttctcaatttgaaagtggttcccggaaagaaaatgatattgtgttgttggcttactaaaaaaaaaggctaaaatgcaattttcattttctcaaatctttgattttagtctccccactttttaattgaggcatttcatccctttaaaaagtttgtgattttagtttcattttttaatcaaagacatttcgtcctccactttaataaaaaatctgtaattcattttttttgggaataaaataatagttttggggggctatatagttttgttcctcttttgcctacgtttaatttttactccaggaaatgttcttaaaaatattgggtgcattgatgtgccaagtattggtagttgttggatatgtagaaaaatagatcaatcgcaacttgcaatattcgttttcaacaggtaaaaaggtttttcaatttgaaagttggtccctgaaataaaatgatgcatgcccctttaccgaaatacgggttttaaattaaacgaggtggaaatgagtttaggcagtgaattgcatgttgaactatggtgaaggcaggggcttagaatcttggtggagctgctgatgtcagagctaggtggtagtgagaaaagatggcaaagtccaccaagggtgctgaagtgatattagcgctcaatttgtgcccacactgcaattaagttcaagggaagtattgaaaatcctttggtgatggtaatttataccccttaattacagtggggtggtgggtcttgtagagactggtgatagacgtttatcatttgatttgtgtataattctaataattcagaatctaactgaaatctaccaccccttccaaggattcactatataatgtatataatgtttttttttattcactataaaatgtataagattttaagggattcattgcttacttttcagaagagtaaaatcttcaaattagtttagttcacgagattgtacaggatagatattatagtctgatattttaaactcgtatatttagtgtcttgtataacgtcatttgtaacggatgttcaacttgcaacattagtccgaaaacctgccagttgaactc

SEQ ID NO: 6235 - DNA, 1526 bp, Glycine max
  Clone ID: 700557682_FLI
gcaactttgaaaactcaatggctgcaacttattatttactgccaacaagtccgaaaactttctcacctttcctcagaaacccaccttccattccttcaggtcatcatgtttcactgttgggttcattattggactatccattccattgttccagcagaagaggaaacaatagtgttgaggccaattgcaatgcaaaaaagaagaacccttggttagacccttttgatgatggggaggatcctgagatggagtatggttccttgtttgcagatgggaagcaggaggaggatcctaggccacctgatgaccctgacaacccttatggattcttgaagttcccttctggatattctgtggagatagcatccttggcattgaaagtgagaggggatgtgaggagatgctgctgtgtgatatctggtggtgtttatgagaacctcttgttctttccggctattcagctgatcaaggataggtaccctggtgttcagattgatgtggtggcatccgagagggggaagcagacctatgagttgaataagaatgtgaggtgggctaatgcttatgaccctgatgatgagtttccagagcctgctgagtatactgatatggttggagttctaaagaataggtactatgacatggtcttaagcaccaaattggcaggccttggccatgcagcatttttgtttatgacaactgcccgagatagagttagctatatctacccaaatgtgaatgccgcaggagcaggattacttctatctgaaacattcgtcccagatagtcaaaatctctcagacggaggatataatatgtaccatcagatggttgactggctaggaaaaccatttcgagaagttccaagacaaccagtgccaccacttagggtatcaatctcaaagaagttgaaggaggttgttgaggcaaaatacgaaaaagcaggtgcaaaaaaaggaaaatatgttgtcattcacggtataaaatcagattcaaaggcctccatgcagtctaggggtgatcctgatagcttgctacccattgaagtgtgggctgaaattgctgacgttataagggatgttacgccactttttgtcattccgcatgaaaaagaaagggaaaatgtggaggaaatattttcagaagatgcatctattgtcttcatcaccacccctggacagctagctgctcttattaatgactcagctggagtgatagctacaaatacaactgctgttcagcttgcaaatgcacgcgagaaaccttgtattgcactattttgctctgaagagaagggaaacaagtttgttccgcgggctgaagagaagaaatgtattataatatcatccaagacaggaaagttaatagatattgatgttgaggctgtaaaaaacgcagttcaaacattcaatttgtctccagctttagtatagtggaagagggaaaagggaaagtgttctgaacttctggttaagtgattatattaactgtctttttttaattaataaagacaaatgtatatctac

SEQ ID NO: 6236 - DNA, 1267 bp, Glycine max
  Clone ID: 700557774_FLI
gatgtggatggctttcatcccttaaatattggaaatcttgcaataagaggaagaaagcccttctttgttccttgtgctcccaagggctgcattgagttgttacttaggcacggtgtggaaatcaaggggaaaagagcagtgataattggaagaagtaaaattgtggggttacccacttccttgctattgcagtagaggcaccacgcaacagtcagcgtgttacacgcgtatacaaagaacccagaacatataacttctgaagcagatattgtggtagtagatgttggagtccccaacatagttcgtggcaattggctaaagaaaggagctgtggtgattgacatgggaacaaatcaagttaaggatcccagcggccacggcttttgtgtctcgggagatgtttgctttgaagaggcggttaaggtggcatcagccattacccctgttcctggaggcgtgggaccggttacaatatcgatgctcctctccaacacccttgattctgcgaaacgtgcttttggaatggtttgattagatgatgtcttttctccaaagttctatagtggatcttccatctatatatgcacatgaaataggtttgccatttgtcatgctatttaagagaaagtgactctatttttaattttttatcggcaaatgttaattgctagtttgttagtttttgtaagcaagagggatcaaatccacgtcctttctctcctacccttatttcttaaccatccaaccaaccttatatctctgaaagtgactcaaaattattatcccaatgcttcatgagcatacaacattttctctgctggggcgactaactagagcatctgcatgttactttctatataaacagtatttgttgaggcgagcttgctatatgattgatttattgcattgcgaggatctaaatacaccacacaggatctgcaaattagtctttttcgcttcattgctttgcagtgcaaacacccctcttgcaaccaagaaagaaaaaggaagatgcattttctactgttttgctcattaagtagaaactgatgtagaattttgtgtacatggtttgtacagctatttgaaatgcactctttgcggcatctcttttatggatagttaattaacttttattaagattgagtgaggaggaatcaatggtgtgcatatgcacactcgtacacacactgatattacttcatttatttaattgatgcaattagatgcttcagaaaatgaacatataaagaatttcatttggtcc

SEQ ID NO: 6237 - DNA, 739 bp, Glycine max
  Clone ID: 700557821_FLI
gacttggaggcccatgttgctgattttggccttgccaagttcttgtacgaccctggcgcctctcagtccatgtcctccattgctggctcctacggctacattgctccagagtatgcatacactttgaaagtggacgagaaaagtgatgtgtacagctttggcgttgtgctgctggagctgataatagggaggaagccagtgggagagtttggagacggggtggacatcgttggatgggtcaacaaaacgagattggagctcgctcagccgtcggatgcagcgttggtgttggcagtggtggacccaaggttgagtgggtatccattgacaagtgtcatttacatgttcaacatagctatgatgtgtgttaaagaaatggggcccgctaggcctaccatgagggaagtcgttcatatgctctcagagcctcctcactctgctactcacactcacaacctaattaatctctagttaattaagttatttgctcatcgatccagaatcacttcttttcaaaataaattaacacagacgaaaactgtaggaataactttcatctgttgtttgtcggaagtgaaacaacgaatcaaatgtgaactatgtatcaaatgtaagataggttttaattaattttgtaatattggtgtcaactgtcaagtaattcgaaggattttccccattgtgcatgtatcaagaatttttgtagaaaagacttgttgtttataaaatatttgtgact

SEQ ID NO: 6238 - DNA, 1663 bp, Glycine max
  Clone ID: 700557833_FLI
ttggtgactactacttggatgagctggtggatcgcagcctggtgcaagtggcgagtaggaggagtgatggtggtgtcaagacatgtcggattcacgatcttcttcgtgacctctgcatatcagagagcaaatcctgtaagtttttggaggtttgcacggaggtaaacattgatactctatccttgagcaatcctcgtagattgtccttgcaatgcaaagcacggcctaatatctgtacaaaaaaatttaatcaatcatacactcgttccttgttcttcttttctgaaattatgcacacacgtggcattccaaagagcatcaagaatgctcgtgtgctgtattcaaaatccaaaggagcaatgaattactcactgcatagtacttttaagacgatgatccatctaaggtatttgagaatagacacaggtgtcagccacattccagcttctataggcaaccttaggaatttagaaacgctagatgtaagatacaaagagactgtctccagtgaaatttggaagttgaagcaactgaggcatctttatttgagagggggtgcaaaattgccagaagtagctagagaaagaaaggtgaatcttcaaactctgtggttaagggcttttgatcgacaaatggtgtccatgatgaacaaggacatgtatgtcaatgacatatttcccaggttgagaaaattagttttgcactatccatttcatcgtccttctcacgaacaattaccaactgtaaggttaccaagtctacaccacctatgcaatctccatagcctaaaaataattgactttctagaacttccacctgacaaaaatgcctttccatcacatctcaccaagataacctggaaacaaatacatgtcggcagtgacttctctttgatgagtactttaggatggctaaccaacctacaaattttgaaaatgggaaggcaatgctctgacgtgttgttcgaccttaatgttggtgcaggagagttcccacagcttcaagtatttcagatgaggggaatgaaactcagaagctggagattggacaaaagtgcaatgccacatcttcaacatctgctcattgaaggctgtgaatacttgaatgatcttcctgaagaagtatggtccttgactaccttacgaaaagtgcatgttttgtggccttctgaaagattggcaaacagacttcaaaatgtgaaattaaagaatggctgtaagctcataatctctaatgctcctccaaatggtcaatcagatcagaatgcactgacacattctgtatcagttgatgcctgaaacaggatcattcactaaagaatatcgttaggagccccacattggattgaataagaagctccatatggtacttaagccactaggctctcccatctaatagactagtcttttgggttggactttcctcttgtgcttagttttttattttatttcattctttgagagaccacagtggcttccctctactttaaggagttaatgtccatatttttatgaagatatgttctgtaacaactggtttcaagtatggtttaagtcttgttgaaacctaaactttctttgttttgttgtttttttatctgttacagtactttgatgactttttctctttcgttttatctaatatatttctttggttttctttt

SEQ ID NO: 6239 - DNA, 1452 bp, Glycine max
  Clone ID: 700557848_FLI
ctcttgggaatatgtggccttccagacaccatttttaggaatgctgtggaaatggctttagctgattctgagtgttatggacttgaaaatcctaacgcgcgattgtcttgttttgtcaacaaggctttcgcgaatatcggtagtgacatggcaaagcttgtccctggccgtgtttcgacagaagtggatgcgcggcttgcttatgacacacatgccattatcaggaaggtgcatgacctgttgaagttgtacaatgatagcaatgtacctccgcaacgtctgttgtttaaaattccttccacttggcaaggaatagaggctgcaaggttgctggaatccgaaggcatacagacacatttgacctttgtctacagttttgctcaagctgcagctgcagctcaagctggtgcttctgtcattcaaatttttgttggtcgcataagggattgggcacgtaatcattctggtgacacagagatagaatctgctcagctaagaggagaggatccagggttggcattggtgacaaaagcttacaattatattcacaaatatggacataagtcaaagttgatggcagcagcagttcgcaacaaacaggacctatttagtcttctgggggttgactatatcatagctcctttaaaggtattgcagtctctcaaagaatctgttgcttctcctgatgagaagtactcttttgttaggaggttatcccctcagtctgctgccaagtacacatttagtgatgaagagcttgttagatgggacgaagatagcctctcaaaggccatggggcctgcagctgtgcagcttctggctgctggactggatggccatgctgatcaagcaaagcgggtggaagagttatttgggaaaatttggccaccaccaaatgtatgattcgacgacttctttatgtcgcacgagagtcttttgcctgatggatcaataaacataatacacgactgatgaagggaatatttcgttggttttctttccctcttaaccatgaagtcttgaacaatttccttaatgtgaagcacgcggttcctaaatgcacattttgttatttttctctttcgtttgttgcagttgcatttgtcttattgactgtctatctatggttattctctaagtaaggtcggatactcgtacaaactaaggccgtaggtagggtcggtcaaaacccggcctttccagtgttacctattgaccaggcctggacagcagttaattgggtcacacttgggctggctttgtcgaagcacataaaatgattggcaattgcttcctgcacctccattttgcttcctgtgcctaatctctggaaatgtaaaatcaaacataaaaataattctaggtagtaaaataaaaagggagaagtttaggtaggaaaatcaaaatagacattattacatgtatgaaaaatatatttcaattttttttttt

SEQ ID NO: 6240 - DNA, 1642 bp, Glycine max
  Clone ID: 700557849_FLI
caatattgtaaaactcaaaatctagtttcatactttttttcttcttcttgaaatggctctccaggctgcttctcttgttcctgcttctttctcggttcttaaagagggaaagagtggtgtgtctctcaaggactccaccttgttcggtctttcattttcagaacctatcaaagctaacttcagctcttctgcattgaggtgcaagagggaattcgaacaaaagctctgtgctgtgagggccgaaacagtggctacagcctctccagcagttaccaagtctacaccagaagggaagaaaacattgaggaagggcagtgttgtgataactggggcttcatctggactaggcctggccactgctaaggctttggctgagacgggaaaatggcatgtaataatggcctgcagggattacctcaaagctgcaagagctgcaaaatccgctggcatggctaaggaaaactacaccatcatgcacttggaccttgcctcgctcgacagtgtccgccaatttgttgataacttcagaagatcggaaatgccgttagatgtgctggtttgcaatgctgctgtttacttgccaactgctaaggaacctaccttcactgctgagggctttgaacttagtgttgggacaaatcatctggggcatttcctcctctcgcgcctgttgcttgaggacttggaaaaatccgattacccttcaaagcgcttgatcatcgttggttcaataacagggaacacaaacacattggctggtaatgtacctcccaaggctaaccttggtgacttgaggggacttcagggtggtttgaatgggctaaacagctcagccatgattgatggtggagacttcgatggtgccaaggcgtacaaggacagcaaagtctgcaatatgctcacaatgcaagaattccacagacgattccatgaggaaactggaatcacatttgcttccctttaccccggttgcattgccacaacaggcctgttcagagagcacattcccttgttcagaactctgttccctccattccagaagtacataaccaaaggctatgtctcagaagatgaagcaggaaagagacttgctcaggttgtaagtgatccaagcctaacaaaatctggtgtttactggagctggaacaaagcatcagcttcgtttgaaaaccagttgtctcaggaggccagtgatacagagaaggctcgtaagatctgggagattagtgagaaacttgttggttttgcctaagtgggaggagcctccaacatcccatgttgttctagagaccttgcacttgcatggaggaagaaaatgatgtctcaaaagagtggatagataacatcctatcattttgaatgcattgatgttgttttgttagctaggagcttctttgctttgatgtaaggtgtcaatggctttttgtgaatcaagactcaataaaatcattcagccatgtgggtgtggtgaagttgctcataaactttctgaaacaacagtgcctagtaaactataaattgtagtgtggggctcttttttagtttttcgttaatagtcgtttttaagtgaacttcagatcaaatggttgaaccaaagatcttgcttcataaaagagcaattgcacatgcaatatgcagggag

SEQ ID NO: 6241 - DNA, 1898 bp, Glycine max
  Clone ID: 700557852_FLI
aacaaacacaaattttatgtgattagtcgcggtatttaaaataaaaaatgaaagtagacaaataaaaaagagaaggagaatgtttgaagttgattgtggctgataatgaagtgggaagtttaaaacaagccttggaaggtaaatatgtggagccagggcctggtggtgacccaataagaaatccaaaagtcttgccaacaggaaagaatattcatgccctggaccctcaatctattcctacaactgcagcgatgcagagtgccaaaatagtggtagataggttgattgagaggcagaaagctgagaatgggggaaaatatcctgagacaattgcacttgtattgtggggaactgataatattaaaacatatggtgaatccctggctcaagtcttgtggatgattggtgtggaaccagtggctgatacctttggcagggtaaaccgggtggaacctgtaagtcttgaagagcttggaaggcctaggattgatgttgttgttaattgctcaggagtgtttagagaccttttcatcaatcagatgaatcttctggatagagcagtgaagatggttgctgaattagatgaaccagcagagcaaaactatgtaaaaaaaacacatcgtttattcagcatatgtctcaaaggcccacgattcctcactcttcttccatagcctgcggccttcactctcatctcctggtctccagtgagatgaaccctagctccaattggtcccattagttacctctttcctgcatctcatatatcccattctttctcattcacacagcatcatgggcgtcaaaggttttgttgaaggaggcatcgcttccatcatcgcaggatgttccacacacccacttgatctcatcaaggtccgcatgcagctccagggtgaaaacaatttgcccaaaccggttcaaaatctccgacccgcactcgccttccaaaccggttcgaccctacacgtggcagctgcagttccgccgccccgcgtgggccccatctcggttggggttcgcctcgtccagcaagagggcctcgccgccttgttctccggcgtctccgccaccgtcctccgccagacgctctactccaccacccgcatgggcctctacgacgtgctcaagaccaagtggaccgactccgtcaccggcaccatgccactcggaaaaaagatcgaggccgggctcatcgccggcggcatcggcgccgccgtgggaaaccccgccgacgtggcgatggtccgaatgcaggccgacggccgcctccctccggcgcagcggcgcaactacaagtccgttgtggacgccatcacgcgaatggcgaagcaagagggcgtcactagcctgtggagaggctcatcgcttacggtgaaccgcgccatgctcgtgacggcgtcgcagctggcttcctacgaccagttcaaagaaatgattctcgagaacggcgtgatgcgcgacggcctcgggacccacgtcacggcgagcttcgcggcggggttcgtggcggcggtggcgtccaaccccatcgacgtgatcaagaccagggtgatgaacatgagggtggagcccggggaggcgccgccgtacgccggcgcgttggattgtgctctgaagacggtgcgcgcggagggtcccatggcgctttataagggttttattcctacgatctcaaggcagggaccgttcactgttgtgctgttcgtgactctggaacaggttcgcaagttgcttaaggatttctgatgatgacgaagatgtatgctactttcattttcaataagatgcgttttgtgtttgtcttgtgctctaatactagtgatgtagttctggaatggtaattttgttattctattaatcaatgagaagcacacattattctccgaattaaactt

SEQ ID NO: 6242 - DNA, 1558 bp, Glycine max
  Clone ID: 700558318_FLI
cgaattggtaatggatcaagtgggcctcaaaatgtgaatgttgcccttagtgttgacaaccagtgggtcaacggaggacaagttgaggttgctgatgacaggtggcatgaaattggtgggtcctttagaattgaaaagcagccatctaaggttatggtttatattcaaggtcctgcttctggtgttgacttaatgcttgctggacttcaaatttttgctgttgatagacatgcaaggtttaaatatttaaggagacagacagacaagatccgtaagcgggagatcatcctaaaattctctggtctggattcaattggaaatcttggaaccctggtgagagttaaacaagtacaaaacgatttccccattggatcgtgcattagtagaagcaacattgacaacgaagattttgttgacttctttgtgaaacattttaactgggctgttttcgggaatgagctgaagtggtattggactgagccacatcaagggaatctgaattacaaggatgccgatgaaatgttagacttatgtcagaagaacaagatagacactcggggtcattgcatcttctgggatgtggacaacaccgttcaacaatggatcaaatcactgaataaaactgatttgatgacagctgtccaaaaccgcttaaatggcttattaactcgctacaagggcaagttcaagcactatgatgttaacaatgaaatgttgcatggttcattttatcaagatagactaggcaaagatataagggcaaacatgttcaagaccgcacaccaaatagatccatctgctaccctttttgtgaatgattatcatgttgaagatggatgtgacacaagatcatcaccagaaaagtacattcaacacattcttgatttgaaagagcaaggtgccccagttagtggaataggaattcaaggtcacatagatagccctgtggggcccattgtttgttctgcccttgataaaatgggaactcttggcataccaatatggttcactgagcttgatgtgtcttccactaatgaatatgtgagagctgatgatcttgaagttatgctgcgggaatctttggcacaccctgctatagatggtgttatgctctggggattttgggagttgtttatgagtagggaaaattcacacttggtgaatgcagaaggggaactcaacgaagctgggaaaagataccttgctcttaaacaagagtggttgtctcacagccatggttatgttgatgagcaagggcaattcagcttcagaggcttcagtggaacatacaacgttgaagttgtgaccttagcaaagaaagttaccaagacattcgttgttgacaagggtgactcatctctcgtggtatcaatcgatttataagcgtccctgaagtcgcatttcttggttgtgttgccatgcattcgtgtttttaaacattttcttaattctttgtgtggtttgctgcatacaaacttggttatgtaatgttatgattgtttgctggacactgccatcctggaaaagaaatcaaataagatttactgattttgttctt

SEQ ID NO: 6243 - DNA, 588 bp, Glycine max
  Clone ID: 700558335_FLI
aaacagtttcctggtggatgagacgccaataagggtgcacacgaacctggaacacaagggcattcccttcccgaaggaccaagccatgggcgtgtacagctctatctggaacgcggacgattgggccacgcagggtggtcgtgtgaagacagattggagccacgcacccttcgttgccacctacaaggacttccaaatcgacgcgtgcgcgtgccccgtgccggtgacgtcagcagatagtgctaagaactgtagcagcagcgaggataagaagtattggtgggacgaaccaacgttgtccgaactgaacttgcaccagagccaccagctcatgtgggttagggctaaccatatggtttatgattattgcgccgacactgctaggttccccgttatacctgctgagtgtgttcaccaccgtcaccactgaaagggagaagagaagaggaagagaacgaactacttttgtttaacataacatgtgcttcatgtttcaccttgtaacatatttcgccttagctttatgtgaattcttttatttccttgtttaatcattagtaccatccaattttattctttttgtttttt

SEQ ID NO: 6244 - DNA, 1629 bp, Glycine max
  Clone ID: 700558352_FLI
aaaagccttagccttccctacaactccaaacacaaagacatcatcatccatggctgcctccgtctccactgtcggagctgtcaacagagctcttttgaacctgaatggttctggagctggagcttcagctcccagttcagccttctttgggaccagcttgaagaaggttattgcctcaagggtccccaacagcaaggtttccggtggaagcttcaagattgttgctgtagaagagaagaaagagattgaagagacccagcagaccgacaaggacagatggaagggtcttgcctatgatatctcagacgaccaacaagacatcacaagaggaaagggtttggttgactcccttttccaagctccacaggatgctggaactcactatgcagtcatgagctcctacgagtacctcagcactggacttcgccagtacttggacaacaaaatggatggattctacattgctccagcttttatggacaagcttgttgttcacatctccaagaacttcatgaccctgcccaacatcaaggttcctctcattcttggtatctggggaggcaagggacaaggaaaatctttccaatgtgagcttgtctttgccaagatgggaatcaaccccatcatgatgagtgctggagagttggaaagtggaaatgcaggagagccagcaaaactgatcaggcagagataccgtgaagctgcagacatgatcaagaagggaaagatgtgcgctctcttcatcaacgatcttgatgcaggagctggtcgtcttggtggaaccacacaatacactgtgaacaaccagatggtgaatgccactctcatgaacattgctgataaccccaccaatgtgcagcttccaggtatgtacaacaaggaagagaacccccgtgttcccatcattgtcaccggtaacgatttctcaacactctatgcacctctcatccgtgatgggcgtatggagaagttctactgggcaccaacaagggaagaccgcattggtgtttgcaccggaattttccgcactgatggtattcctgaacaggacattgtcaagcttgttgacaccttccctggccaatccattgatttctttggtgcactgagggccagagtatatgatgatgaagtgaggaagtggatttctggtgttggtgttgacagtgttgggaagaagcttgtgaactcaaaagatggacctccaacctttgagcagcccaagatgactctggagaagctcttgctgtatggtaacatgcttgtccaagaacaagagaatgtcaagagagtccaattggctgacaagtacttgaacgaggctgctcttggaaatgctaacgaggatgctattcagaggggaactttcttccagtcttgaattggaggcaaagcaaacttggcaagtaaatatttctgttcgtgaaggttgttgtactaatccaagtgctagaagttgtgatggaacttgcgtgtaacattcttagcattctcaatgtcttaggtgcaaagagaagatgctaagtttgagatgatcttactatatttttcatattggaccgtcttcctctataattttgagttacagtgtccacttaaattgaatttggtgccttttccttttgtcct

SEQ ID NO: 6245 - DNA, 731 bp, Glycine max
  Clone ID: 700558355_FLI
cagatatatgatatttacccagagaaaatatctccttgttatggttgaatccaattgggccaagttaaggagtctgattctgatattttccaggccccactgattgctttttattttttataggtactttcactctgtccaatctgggaatgtttggtgttgatcgctttgatgctattctgccacctggaactggagcaataatggctgttggagcatcggagcccactgttgtggctacaaaggatggtcgcattggaatgaagaaccaaatgcaggtcaatgttaccgctgatcatcgagtaatctatggtgctgatttggcttcattcttgcaaaccctgacccagattattgaggaccccaaagatcttactttctagtctcattttcctaacagtgaaaatgcgttccttttctgggtatgattcctctcatcatggttgtgggattattaattgttgacaagaagaaatcgaggactcaattgatattcactcgggattttgcgaagaacggaagagttttgaataggaaaagctgagctatagtttcttaaaatgatatttttagtcgaatatgtcatttacatttttctttaatgctgcctgattttttttattttgttttttgggatgttcattattgtctaataatgtccattatttatgtaagcttatttttggattctaaatcttgaaaagtgaaactcaatgaacgttgattctgtt

SEQ ID NO: 6246 - DNA, 933 bp, Glycine max
  Clone ID: 700558422_FLI
gaattgtaaaaaggaaaggggaaggaagcaaggcaaggaaggagagtggatcgattcctcagcagcaccagacatttataaaagctctttcccttccctcaaatcgctcatactcttccaatctttttttttttttttttttacctttctccctcgctcaataatacaaaacaaaaaagaagaagaagaaggttttcgcgatggcatcgaaacggatcttgaaggaactcaaggatctccagaaggatcctcctacctcttgcagcgccggtcctgttgctgaagacatgtttcactggcaagcaacaattatgggtcctccagacagtccttatgctggaggtgttttcctagtcactattcatttccctccagattatcccttcaagccacccaaggttgcattcagaacaaaggtatttcacccaaatataaatagcaatggaagcatttgccttgacatattgaaggagcagtggagccctgcgctaactatttcaaaggtgttgctctcgatttgttccctgttgacggaccctaatcctgatgatcctttggtccccgaaatagcccacatgtacaagacagacagaaacaagtacgagtcaactgccagaagctggacccagaaatatgccatgggttaagtgacctgtggtatgtgtgaggaagagcctttctactcccagtgtttaggcctctcagcccttgtatgaatatttgtcgtttttaataaggcccctccagttgaagattaatggagcaaaacgtttctcctgttgtttgtactgcaaatgttaatttagaacagtgaaatgttgcccccaatcaaatatgctcaaatttttaaccgttctattagtgccattatttcatgtttaatttttttccccgtttatgaacttgagccttaatgaattattgtttttcttt

SEQ ID NO: 6247 - DNA, 2141 bp, Glycine max
  Clone ID: 700558516_FLI
tggcggtacttgggtgcttggctatggtgtttgaatgaaaaaagggagggaattattcgttggtagttacagaagccttcaccaaacaccgatttcccccattcagttccagcaaacgatgtcgcattccgatccttcaaacagatactcctacacccccactctaaactggaaccctcaagttcaccactacttcctcaaagcctacggcgccgaccacttctctcgcatctccaccgcgctaacgcgcccttctcgctactcctgcatccgagtcaacacgctcaggtccaccggcgacgccgtcatccacaagctacgctcgctcgtgccgaatgctgacgtgccaccgccgcaatccgattccggagatgacgtggcgaatccgttgaaggagtgttcggctgctgctgctgctccaatttccaagtgtgagattcctggacttgattatgtggtgtttgtttggggttcgggaccgcgccgcatccattacggcgatgcgcctcccaaggaggtcattgttagtaggaagtgtgctgaggcagttcttcgaggtgctcaggtgtatgttcctggtgtgatggcttgcagtgctcatgttgagaaaggagatacagttgcggtttcggttgctgtggagaagcagggtgctgatgggggatggggtattgctatgacacgtggcactgttctccaaggatctgagacagatccttattattttgaacgaaatgggctttatattgggcaaggaacagcaatgttgtcaagggctgggatgttccgagtttctgaaggagttggtgtggatatgaaggatagagtatatgaactgcattcttttcataatgtgcttgagggagaaatatttcttcaaaacctgccaagtattattgctgctcatgctttagatccacaaaagggtgagcggatactagatatgtgtgctgccccaggagggaaaacaactgcaattgcaatacttatgaaggacgaaggagagatcattgcaacagatagatctcataataaggtgctggatattcagaaattggcagctgaaatgggcttgagttgtataaagacatttaaattagatgctcttaaatctgtttgtcgaagagatgatattgatacttttactgatccgtgctgtaataatgccaaaattgatgtgacaaatcaagtgttggattcaccaaatttgcaagtagaaagagtgtcaccccttgttacagaagataaaggcaaaaaaccaaatggaggagcttatgttagcaaagctgacatccggaagaacatgcgaagagcacgaaatggacctggaagaaatcagtgtgtgggtggtagggttgatcgttcaaaaggtttttctcctgacagttttgacagagttcttcttgatgctccctgctctgcccttggtttaaggcctcgattgtttgctggagaggaaacaattcaatctttaagaaaccatgcaaaatatcagagaaggatgtttgaccaggctgttcaattagttcgacctggaggaataattgtctattccacttgtacgattaatcctggtgagaatgaagcattagttcgatatgctttggataaatacaaatatctgtcattggcaccacagcacccaagaattggaggaccgggtctagttggtagctgtgaatttcctgatggatatatagaggagtggttacgaccaggggaggaagaccttgttcagaggtttgatccatcgtctccgcttgatacaattggattttttattgccaaatttctcgtggggtctaaagatacctgacaactattcatgagttggcgtggatatatgtttacttcataattgccactgaaggaagccatcaagtttttttatgattggcctctggcaacagtctgagagcttctcatatgtccatttggaaaatgaattaagaaaatttcaacaatctagatgcacggcgaataagttgacaactattcatgatgttatgtactgtagctcccattttgcatctgtgcatgtacccatatattgtcaacttattggattagttcgtttaaatttatttgttaaaaaatacttatttttgataaaataagcagtttgttgtttttttgtgttt

SEQ ID NO: 6248 - DNA, 1431 bp, Glycine max
  Clone ID: 700558525_FLI
ctcagagagtcttcccgtctcttcctcttcacttcttataccgtcgcccccaaacgacgccgttttctgttctcttatgtaaacgccgttcgagaacaaaccaaaaaaagaaaagaaaatcagttattgccgttgttgttttgtttccggttcggtttatttcaatggatcgggcggcgttgacggttggaccgggcatggacatgccgatcatgcacgacagcgaccgttacgatctggtacgcgacatcgggtccggaaatttcggcgtggcgaggctgatgcaggataaacaaaccaaggaactggtcgccgtcaagtacatcgaaaggggtgataagattgatgaaaatgtaaagagggaaatcattaatcacaggtctctgaggcatcctaacattgttagatttaaagaggtaattttaacacctactcatcttgctattgtaatggaatatgcatctgggggagagctctttgagaaaatctgcaatgctgggcgttttaccgaggatgaggctcgattcttctttcagcaactcatatctggggtcagctattgccatgctatgcaagtatgtcatcgggacttgaagcttgaaaacactttgctggatggaagcccggcacctcgtttaaagatatgcgattttgggtactccaagtcttcagtgcttcattcacaaccaaagtcaactgtgggaactcctgcatatattgctccagaagtattgctgaaacaagagtatgatggcaagcttgcagatgtctggtcatgtggagtaaccttatatgtgatgctagtgggagcatatccttttgaggatcctaatgaaccaaaggactttcggaagacaattcagagagttcttagtgtccagtattccattccggacggtgttcaaatatctccagagtgtcgccaccttatttcaaggatctttgtttttgacccggcagagagaatcaccatgtctgaaatctggaaccatgaatggtttctgaagaatctcccggcagacctgatggacgagaagataatgggcaatcaatttgaagagccagaccaacccatgcagagcatcgatacgatcatgcagataatttcagaagctaccgtaccagcagttgggacctattcttttgaccagtttatggaggaacaaatttatgacttggaatctgaatctgatgctgaatctgatcttgatatagatagcagtggggagatagtgtatgccatatagtttgatcttagttacacttgaaagacaacaacatattaaatggagagagcattttcagcatcaagagatatatacgtggtgcccgcattttctgtagattagcatggataatacaaacttcatgttaatatttatgtattcagtgttggttgctgagggaagaaatgattgttaccctttgctc

SEQ ID NO: 6249 - DNA, 1639 bp, Glycine max
  Clone ID: 700558526_FLI
ggggtacatcaaattctttatttatgagatgaagtacactggggaagctttgggaagagatcttgagaacgtgaggaagtactacgggagtggaaaaacaaaggaagcatcatggagagaatcacagcttaaagggttgcacaattttctcgttgaaaaagaggaagaaattttgagggccctcaagcatgatttggggaagcattacgtggaggcttttagagacgaggttggaacattaatgaagaccttaaacttggcaagcaagtctttgaaaaattggatggcaggcaaagaggcaaagctgccacgaatagcactgctttcaagtgcagagatagttcctgagccacttggtcttgttctcataatctcatcatggaactttccctttggactttccttggagccactgataggagcaatagctgctggaaacagtgtggttctaaagccttcagagttgtcccctacttgctcttctcttttagccactttcctcccaacttacttggacaataatgccattaaggtcatccaaggtggaccagaagtgggggagctactcttgcagcaaagatgggacaagattttcttcacaggaagtgcaagggtagggcggattgttatgtctgcagcagctgtgcatctgacgcctgtgactttggagttaggtggaaaatgcccagccataattgattctctttcttcttcttgggacaaagaggtggctgtgaagcgaattttggtggcaaaatttggggcttgtgggggacaggcatgcatagcaatcgattatgtccttgtggagaagagcttcagttctacattggtgacattaatgaaggaatggattaagaaactgtttggagaaaaccccaaggtgtccaacactattgcaaggatagttaataaaaatcatttcatgagactcaagaatcttctcactgagccaagggtcaaagaatcggtggtttatggtggttcaatggatgaaaatgacttatttattgaaccgacaatattgctggatccgccacttgattcagcaatcatggctgaagaaatctttggccctgtacttccaattatcaccgtggagaagattgaagagagtgttgagttcataagctcaaggcctaaagctttagctatttatgccttcacgaaaaaccagactctgcagagaagattggtatctgaaacatcatccggaagtcttgtattcaacgatgcaattctacaatacgtagcggataccctaccatttggaggagttggtgaatgtgggtttggcaagtaccatggaaagttctcctttgatgcgttcagtcaccataaggctgtggctagaagaagttacttgactgatttttggttcaggttccctccatggactcttaataagctccaactacttgaggtgtcttacaatttagactaccttggaatacttctagttctgctcggcttaaagaaatcaaaacggtcactatttcaggcttgtaattgagttgcattatgctgcttcacttatctatttcaagtgagtccctaataaggattggtgattccaagcttgtgtgaattcctaggtttatgatgcttaaataaatgcatatctggtttagcttttggc

SEQ ID NO: 6250 - DNA, 2123 bp, Glycine max
  Clone ID: 700558535_FLI
cttatgatgatcatgcagtatcaagtaagaaaaggaaatgccctcctagttctaaaagtggaaagaagggattggacagtgcgatgcttgaggctgttgctcgtcctcttgcaaaagtggcttggtttagagttgtcctggatgaggcccagagtataaagaatcacagaactcaagttgcaagggcctgttggggtcttcgagccaagcgtagatggtgcttgtcagggactcctatccagaatgcaattgatgatctctacagttactttagatttttaagatacgatccttatgctgtgtacacatcattctgttccacaattaagatccctatcagcagaagtccatcaaaaggatacagaaagctacaagctgttttaaagacaataatgttacgtcggacaaaagccacacttcttgatggggagcctatcatttccttgccacctaaatctgtggagttgaaaaaagtggaattttcaccggaggaacgagatttctattccagactagaggctgattcgcgagcacagtttcaggaatatgctgatgctggaactgtgaagcaaaactatgttaacattttgttgatgcttttgcgccttagacaagcatgtgatcatcctctccttgtcaagcgttacaattctaactctctctggaaatcctcagttgagatggcaaagaagcttcctcaggaaaaacgattatgtcttttaaaatgtttagaggcatcattggccctctgtggtatctgtaatgaccctcctgaagatgctgttgtttcagtttgtggtcatgttttttgtaaccagtgcatttgtgaatatcttactggtgatgacaatcagtgccctgctccaaactgcaaaactcgactaagcacgccttcagtgttttccaaagtcacactgaatagttctttttctgatcagccttgtgataatttgcctgattactctggttgtgaagtggaggaatctgagttttgttctcaggctcagccatatgattcttcaaaaattaaggctgcacttgaggtgttgcagtcgttgtctaaaccacaatgctttgcttcccaaaacaattctgtgcagagcacttctggggaaagtaccgatggccttggtagctcctctagtgctgacagaatgaaatccttgaatgaaattcctgagagtcaaaatgtgcttgaggagagaagctctaataattcagttggtgtaggggagaaagctatagtgttttctcagtggacaaggatgctagatatacttgaagcatgtcttaagaattcgtcgatccagtatagaagactggatggaacaatgtcagtcactgcaagagataaagctgttaaagattttaacactctccctgaggtttcagttatgattatgtctttaaaggctgctagtcttggtctgaatatggttgctgcctgccatgttcttatgctagatctatggtggaatcctacaactgaagatcaggcaatagaccgagcacatcgaattggacaaactcgtcctgtcacagttttacggttaactgttagagatacagttgaagaccgtattttagctctgcagcaaaaaaagcgaaaaatggttgcgtctgcctttggagaggatggaactggtggttgtcaaagtcgccttacagtggatgatctaaaatacttgtttatgatgtgattagacatatatccatacagatatataattttaattttttggattggtgattttttttttctgggagcaggtgtcagtgggttgttctttttggtggaagcagaagaaacagggtgctgaaaattttgtagcatggcctctgttgacactcgacatgaagattatatgaattgtcttttatagagagatgattcaattgtttaccttgaaattttggtttagttgttaacatttgtataggttgtagagagtagtagcatagacagaaacatagaaattgtgctcattgtaaatattatagatagataatatctcttttccttttccaatcttaatctatttcgtttcttttaattttcaggtggttttgacttttcattttaaagtgaaccttctgataataaagtgcacttgttgaatttc

SEQ ID NO: 6251 - DNA, 351 bp, Glycine max
  Clone ID: 700558609_FLI
acctattggccccaagagaggtgctaaggtgaagattcttaggaaggaatcttactggtacaaaggcactggttcagtggttgctgttgatcaggaccccaacactcgctaccctgttgtggttcgattcaacaaagtcaactatgccaatgtatcaacaaacaactatgctttggatgagattgtggaagtggaatgagtctaatttatttgtaattttgattctggtcatgctatcgcagttactagcctaaggtttttttatgtcaaaaacaaaaaagaatttgtatcatattctctctgttatctacccccttgatttctattttctatgaactacattctgtgtcc

SEQ ID NO: 6252 - DNA, 1055 bp, Glycine max
  Clone ID: 700558722_FLI
cgaaaaatatatttgggcaatgcaaagcctaacactggtcctctcatagtcatgaatctatcataactcttcctttccttttatcgtttcatccagaaaacatggatgccatgacactgtcactcccgctccctccggttccggtctgtacagtgcccgcgtctgcatcaacctcgtcctctgtttctctcactcactcctggtcggccacggccaggcagaggctctcctctcacagaacaagacccattttccggaattattcctctgcggttccaaaacttacagtggtgacatgcggtgcggctgtgacggagatcaacgagacccaattcaaagacacggttctgaaggctaaccgtccggttcttgttgagttcgtcgctacttggtgcggtccttgccgtctcatctccccctctatggaatccctcgctaaggaatatgaagacagattaacggttgtaaagattgatcatgatgccaacccacggctaattgaagagtataaagtttatggactaccaacattaatactcttcaagaacgggcaagaagttccagaaagcagaagggaaggtgcaattacaaaagtgaaacttaaagagtacgtggatgctctattggaatcgatatcagtttcatagtcatcatattcatatatgtttcaaagttctgacctgttctgggagacttgagatataggagcatatctgtttgtttccatatccttgtattgtatgaaacagtttaacaggcttatacagttgtataatctatataatttctgaagctgtaaatacagcataatgtggtgaaggaaggttgtgcttaagggtttctacacggggttggaactcattcattttaaatccaaaaataaaatttgatcgagtcaaatatgaagaaaaataaaataaaaattgaaaaaagataagtatttggcaggataattgggttccaaactgtggtggccttgttgattgcttaattgaggaggttggtagtatttctttggacataaaggtgttgaattcagtcagagactttattcc

SEQ ID NO: 6253 - DNA, 717 bp, Glycine max
  Clone ID: 700558793_FLI
cttttgagcttgttatagtacagaagaatcacgtataattgaacaatgaatgccacagcatccaaaccagacagactacactaaaggatggagtgcaagggtgacactttttaactggggtgacactaattttgcagactggtttgccgcagtacaaatggacaaagcagcttcgggttttgagaaaatgtattcattcaatgcaactcttctagatggtgtaaacaatacaataatcatgcaaggtttgccaggattgaactaccttgtagcagaagcagatggagctgaccctttgagagatcctagggtgcctggtaaacaacaatcagttatctcatttacaaagaaaactactcctggaatcaacgtagctcgtggagatgggtttcccactaaggtatttttcaatggcgaagaatgttctcttccttcagtgtatccaagcagtagtggtttcaggaatggtttttcattggctacttccttgcttctaacactgttgatgatcctcttgatgcggtaatagtggctactgagtcccgagacacgatttgattcatatattgacctcaccacagaaactcagtggacttaatcgtgctgttgtaacattcatgcgtgtgtctgtctggtttggatgctgtggcattcattgttcaattatacgtgattcttttgagcttgttatagtacagaagattgtagatttatgtt

SEQ ID NO: 6254 - DNA, 315 bp, Glycine max; identical to SEQ ID NO: 6207
  Clone ID: 700558803_FLI

SEQ ID NO: 6255 - DNA, 1471 bp, Glycine max
  Clone ID: 700558826_FLI
atcagattgatgcaaatgttcaacgggagatagttaatcatcgatctttaaggcatccaaatattatcaggttcaaagaggtatttctgacccctactcatttagctatcgtcctagagtatgctgctggtggtgaactcttcgagaggatatgcaatgctggtcgattgagtgaagatgaggcaagatttttctttcaacaactaatatctggagttagctattgtcattccatgcaaatatgtcatagagatctgaaattggaaaacactctactagacggaaatccagctcctagacttaaaatttgtgactttggtttctccaagtctgctttgctgcactctcaacctaaatcaactgttggaacacctgcatacattgctccagaagttttgtcacgaaaggaatatgatggaaaggttgccgatgtttggtcgtgtggtgtgactctttatgtcatgttagttggagcatacccatttgaagatccagaagatcctaaaaatttcagaaagagtattggggtgaattcttatttgacttaaaagagatcctttatgattaatatctttgatccatagcaccaagtttaaactctgattctctcgttggcagagaattatgagtgttcaatacgccatacccgactacgtgcgtgtctctaaggagtgtaggcatcttatctcttgtatttttgttgccaatcctgccaaggtaagtattatttattctgttcatccataggatttatataagtattgttaagatattcaaaactaaagatgttcgtggtataaaatggccccagcgaaattcatacttcaccttaaaaatatcataatgaaatgttaggaagtgtcttcaaggtgaaattatcacatagttgagtttttcaatttgcaataaaaaattaataacatttgattacatgttattcgataattaattggaacaataatagtcctactcttaaatcatgtaataatttctaggtttgtttcttctatattgagaatctccttgtattttaaaacttactatttctcatcattgttaaagaggatcagcatctcggagataaaacagcacctttggtttaggaagaacctgccaagggagataattgaggctgaaagaaggggttacgaggaaacacaaaaggaccaaccaagccaaagtgtggaagaaatcatgcggatcatacaagaagcaaggacaaaaatccacactggtgagcaagctggtacaggaacttcggatgctgtgcatggtgatgaggctaatgaggaagttgatattaatgaccactatgccaaatacctagcccttaattagtttgtggttgggtgtttaccaaagctagtgtgcattcttcgtgtgtaaggtatagagttgaatgagacataacacttcatcgaatttgagagttgtatcaattataatgagaatcaaactttgttgtttgggt

SEQ ID NO: 6256 - DNA, 1806 bp, Glycine max
  Clone ID: 700558834_FLI
ctttctcttccaccgccatcatctctccaccctccaccgccctcacacccttttaatatcctcactccccccaccacctcccactcttttcttttcacacccctcctcattcttcttcttcacactaattcagaatcaacatgaacccaaatgatgctaactctcctaagccgttggagattctgcagatgaaccctgttcctccgtttttgtccaagaccttcgacctcgtcgacgacccgactctcgaccccattatctcatggggctccaccggttttagcttcgtcgtgtgggaccctctcgagttcgcgagaatcgtccttcctcggcatttcaagcacaacaacttctccagtttcgttcgtcagctcaatacttatttaggattgagacttgagagactactactactgctggaagttgcaacaggagaaatattccccttcctgtagaagggatttcatattccacagggattccgcaagattgacacggacaagtgggagtttttcaacgaagctttccagcgagggaagaagcacttgctgaagaacatccaaaggcgcaggtcatctcaatcccagcaggttggtagctatattggaatcgaatgttctactgaggcaggaaggtctgatgttgagattgagatagaaaggcttaggaaagaaaggactatgttgatggaagaggttgttgatttgaaacaagagcagcgaagaatggctcaccgcgcaggagaagtgaatcaaaggctccaatccacagaacaaaggcagaaacaaatggtttctttcctggtcaagttaatccagaaccccgcctttttagcccgccttaggcatgaggagcaaaaagaaatagattctccaagagtggtaaggaagtttgtcaagcagcaccaacatgaaactggaacagcagaaactctccaagaagggcagatagtgaggtaccaacatgattggagaaatataggcatgtcttccgaaactccaaaactaagtccagtttccattgaacagtctcctcactacctttcacagggtttggcaggagaagtgagtgtaggcgcagaagatcttactgctcaaatagagaatattgtatcaaatgacttggctgcagtgcacgggatcacagtgtctcaggaaattatgattggagaaggattatctagctttggagctgaagacccccttttcaaagggaaaagtgtcatgagtccaattctagaagttcctccagagtattttgcttccttcccagagggtttgaccaaggggaaagactttcaagatttttctgctcttggaactgaaggcatgataaagctagaagatatatgggactctggccttaatgttagtggtgctgcttcaggtagtgggaatgagctgtggagcaatcatgtcaactatgaagagtttccagaatttggagtcacaagtggtatgtctgactcagacatctgggatattggcttaggaagtttgggaattgataagtggccaactgatgaaccttctcttggtgaaacaaatggtcaagctggtcaaccaaaagaagataggcctaagaattttggtccatagggtttcatttgctcctgcacttgttgccctttggttacttgctatatttatagttcctaggaggcatattattgaatcatttgatttataaatagtattcattcacctgcttttattcatcatttactttcaatttttttattcttttagatgaattctttaactgtccatgtttttcttcgtaaattctaattgtgtaattattgat

SEQ ID NO: 6257 - DNA, 2103 bp, Glycine max
  Clone ID: 700558855_FLI
gtctaatacataacaacacacaaacccaacaagaacaacattgaacggtgccggcttcatctttacgtaattattgcggcaacaatcgaatcccatcttgcgatttcgcctcctcaaaccccgcgagttaaattccctccccagatccatattgcttccacgtcgaatcggtgtggtacggtgtgttttattcattagacaagattggaatgcaagtttaattgattaatactaataatcaatcatcgtagcgagatggtgtcgtcgagccaggtggtgaaagtaaagagaaatacgctacgaccatgcatgacatgccctctctgccacaagttcttcaaagatgccaccaccatctctctctgccttcacaccttttgcaggaagtgcatatatgagaaactctcggatgaggagatggattgctgtcctgtgtgccatattgacttaggctgccttccggtggagaaactcaggccggaccataatttgcatgatataagggcaaaaatattcccttttaaaagaaaaaagatcaaagcccaagaagttttgtcttcaatatcattgcctgcaaaaaggaaggaaagatcactttcatcattggtagtcagtgctcccaaagtttcaatgcagcctggctttacaggaaagagaacaaaaaacagtacacgaaaggctgctgctttacgtggatgcagttttcttctcgacgaatcaataaagaaggaacaaacaaatggtgatgataatatggattctcccatgcctgagcattctaagaagcataagccccatgaagatacagagaacagtgtgcaacatacagaagggaaggttgatctttggacaccactgaactgtcttgttgaagctgccaacagaacaaagtcctccaggtcaaattcacaagcaactcctcttgccaaattagagtccccaactactcctcatggtggacaggatgcatctgaaactacaaccaaaacagacctacctgcttctgcccagagtgaattaaacattccaaaatccaaaaataaggatactggacttaaaccaatatttggagatgacaaggatgcaaacagcttgcctttaggaccagtgaagcgaagaagattgcgtcctgctggtcagaaaagggttgcagcatctgagatgtctgcctcatccccagccccactcgatgcaacagggggcaagtgcaacagaaaaaacagtcctatttggttttcattagttgcttcagaggaccagaaaggagattttcccttgccacagatctcagcatgttacttacgaataaaggatggtactgtgcctgtctcatttattcaaaagtaccttatgaagaaacttaatcttgccagtgaagcagaggaagtcaagcaacatattgcaagccttgtggacattgtctgggggctgaggctatcttgagaaattagtacaactttgtatgcttctacataatatattacaaatgcacaactacgaacaactgggtagaagagaaatagagtctccactggcatgatcccatgcacccacatgattagctatgtaatgaaaatgaaaatattggaaacaaaattctcgtgttgaagttttaacaagtcaccaagtaggcactcggtgctgaaataacattgaaggtggaaataatgtgccgaggtctgccagtgctcccatctttacaactgcataatttagtagatctatggttccggacagcatcaacctcaaaaaagataccagcatcagtggggtcctcagccaaagattttgtaatggttttatcatattgtcgaaaggccttgcctccttgacaaagtttcctattctatctatatatcattttccctccgctactttacatacatacacaatcaactgttttgatagcattctcaccgatattactgcttagagatttgttcatttagtagcatgcgaggaatctatgattttgttttgctcatgactgaatatgtgcagccagcaattttcagttttcttctgcttcatttgctgctgttctttggatcatgattactatttccttttgatccaatgatgcctttccccttagtaagaatc

SEQ ID NO: 6258 - DNA, 2160 bp, Glycine max
  Clone ID: 700558861_FLI
gatggcgtttctcgagaagaagctaaagaacttcgagatgaggttaaggatatgttttatcacgcctttaatggatacatggaccacgctttccccctcgatgaattgagacctctctcctgcgcaggacatgatacgcttggtggctatgcgttaaccttgattgactctttagacactttggctttacttggtgaccgccaacgattctctgcttccgttgaatggattggtaaaaatcttcgctttgatataaataaaacggtttctctctttgagactactatcagggtcctcggaggattactttcagctcatcttattgccactgattatgctacgggcatgagagttccgttgtatgataatcagttactaaacttagctgaagatcttgccaggaggttgttacctgcatttgatacccctacaggaattccatttggatctgtaaacttgttacatggagttgataaacatgaaagcaagataacttcaacagctggtggtgggaccttgactcttgaatttggagttctaagccgattgacaaatgatcctatttttgaacaagttaccaagaatgcagtgcgtggactttgggcacggcgttcaaagcttaacctggtcggtgctcatattaatgtttttacaggatgctgggataggaactagtattgactctttttatgagtatctattgaaggcttatttattatttggagatgaggagtacttgtatatattccaagaagcttatgctgctgccatgcattatctttaccatgacccttggtatgtggaagtgaatatggattctgctgctattgtctggccattatttaacagcctgcaggcattttggcctggccttcagctggagatatcaatcccgcaattcgcacccatgctgccttcttgagtgtctggagaagatatggttttactcctgagggctttaatcttgctagtctcagtgttcagcatgggcagaagagttacccgttgcggccagagctaatcgagagcacctattggctatacaaagctaccagagatcctagatatctcgatgctgggagggacatggttgctagtttacagtatggaactcgatgcccttgtggatattgtcacatttctgatgttgagaatcaccaacaagaagatcacatggagagcttcttcttagctgagacagtcaagtatctgtggcttctgtttgatttggctgtgggtcctgacaatcttgtggaaaatgggccttacaagtacatatttagcactgaaggtcatttactgcctgctactcctcaaatctccttagtgagggaacattgtttatactatggggcttattgtagaagtggtgatttgagacaaacatactttgtgccagagtctgacaaagataagaaagaatccaatgatactggattttatgagagttggactaaacctacttattcttcggactacactactgttgagccaagtgctgtttcaggtttgatcaagggtttctgcccaggattaaatcatggacagaagtttggtatattatatgcctatccaactgatgaacgtcatgattatgaaaccaaccaagtccaacagaaagaatcaactactgctgtgcaactgcaaagccattcagtattggttctccgtgaccagagttctgacaatttgctaccagaagacaatagcagtaatcataatgatagtcagacaaatgaatcaagcgatactccttgaagtaggaattataagatctcagttatgcaataggattggtggggaagaatatactcttcaacttcaaagggttgtacttctaaaactcgggcaggctcacccacctgaaatttaaattcaagttttgttagtctgtctaattgagaaagtatgcatttgataatttcggcaactgttgatacagagagcatggagctgaaagagttaaattatggatgaactgacccactaatatcctgcctcctaatcatcgggcacatgtataagaatgtaatgtaattatttttgttgtatcatttttcctaaggctcttgtaaacctattgtgagaggtttaatcagtgtacatgacataggtattatcagattattgaatttagatcataatttgaattgctgatag

SEQ ID NO: 6259 - DNA, 1253 bp, Glycine max
  Clone ID: 700558924_FLI
cctcgaatctcgtgcacgtgccgttgcagcaaaaaatgccagaaattcagttgggtatgcatactatcagatcacatggaactagagtggcaaggacacatatgcacgactggttgattcttttgcttcttgtgatcatcgatgctgtcttgaatttaatacagccatttcaccgttttgttggagaggggatgatgacagaccttagatacccattgaaagctaatacaattcccttttgggctgttccgataatagcaatattgttaccactggctgtttttctcgtttactatttcattcgtaaggatgtctatgacctccaccatgctataatgggccttctattttctgtactcattactgcggtgatgactgatgctatcaaggatgctgttggacggccaaggccagacttcttctggcgttgtttccctgatggaaaaggggtgtttgatccagtaacaagtaatgttctgtgtactggagataagggtgttattaaggaagggcacaaaagtttccccagtggacatacctcttggtcctttgctggtcttgtttatcttgcttggtatctatctggaaaacttagggcatttgaccgcagggggcatgttgcaaagctctgtcttgttttcttaccaatcctcgtggcagctatgattgctgtctctcgtgttgatgattactggcatcattggcaagatgtgtttgctggagctcttatagggatgataattgcttcattttgttacttacaattctttccacctccatatgacgtagatggttggggacctcatgcatatttccagatgttggctgaatctcgtaatggtgctcagccctctactgtcaataatgagattcatcatgtgcaatctgctgagcttcaggctgtatctttgtatatcccacctcaacatgatgcagatacacgaggcaatagctgggattcaagccccatgttaggtgcatcccaaaatgtaagaacacactgacgacataggaaagatcaccaacatgtccataatctgtaaaaattataggagggattcgttgcagataaaccactttagcattgttggtggtttaaaatgcggatatcaatcaatttctttgcttgttggattggaaatttgggatgccatgttagttgtctttaattttccggccagcttatatttgttagttgtcaaagcactgtttctatacagagaatgatttaatcggctcaacaggattcaagc

SEQ ID NO: 6260 - DNA, 1374 bp, Glycine max
  Clone ID: 700558953_FLI
ataattcttcattgctctcaattatcaatggctccccaaaccatttccattctcaacctcttaccagaacctgatgtcttcattcacacttcccatggaacacgcattccagcccacgcacccattctggcttctatgtccccggttctggagaacttgatagatcgcccacgtaagcatcggagctccgagagaataatccaaatccacggcgtcccctgcgacgctgtcaccgccttcgtccgattcctctactcctccaggtgtacggaggaagagattgaccagtacgggatgcacctccttgcattgtcccacgtgtacatggtgcagcaactgaaacagaggtgcatcaagggtttgacccaccgtttgacgacggagagcgtcgtcgacgtgctgcaactcgcgcgtctctgcgacgcgccggatctccacctccgctgcatgaagctcctcgccaagaatttcaaggcggtggaagcaaccgagggatggaagttcctcgtgaaacacgacccctggctcgaactcgacattctccgcttcatcgacgaacacgaaacaaggaaaaagaaatcgaggaggtataggatggaacaggggatatacgcggagctgagcgaggcgatggagtgtttggaacacatatgctatgaggggtgcacccacgttggaccgtacgatgcggaggtgaagagggagaggacgccgtgtgggagattcgccacgtgccagggtcttcaggttctgatccgccactttgccacgtgcgagaagaaggttcgcggtggctgcgtgcggtgcaagagaatgtggcagctctttcgactccattcctatgtttgtcacgacaccgattcctcctgcaaggttcccttttgcaggcaatttcaattgagaatgcagcaagagaaaaggaaagatgatgctaagtggaaactactagcgaggaaggtggcctcagccaaagtcatgtcttcattgtcactgccaaagaggaagcgagatgaagaaacaagagtgacgatggacaatcccgggattagaagttttaaattactatgaatattcttataaataatgatgtataggacagtgtgttccgtgttagatacttgatagagcagtttctatagggagagagtattctgcttgccggtttgttctgtgtaaaagcagggtttttgatggtgtgaacttcttgtacttggctcttttacttgagaaaatggcaaattgagtggtaccttgtaagttgtaacggtaaattttgtttgtttgaacctcattttgcgttgtctgagcatttgagaatattgtaaagctagtgttcaatttgatgaattatttgtgtagaatattcaaatattc

SEQ ID NO: 6261 - DNA, 1380 bp, Glycine max
  Clone ID: 700558959_FLI
aaagccactagttctatggttaaatggagggcctggttgttcttctgttggagctggagcttttgttgagcatggccctttcaaaccaagtgaaaatggtcttttgaagaatgaacatagttggaacaaagaggcaaatatgttgtacttggaatcaccagctggtgttggtttctcctactctgccaataaatctttctatgactttgtgaatgatgaaatgacagcaagggacaatcttgttttcctacagcgttggttcactaaattcccagagttaaaaaacaatgatttctttatcacaggggagagctatgcaggtcattatgtaccccaacttgcacaactcattgttcaaaccaagaccaagttcaatctcaaggggatagcaatagggaatcctcttgtcgaattcaacacggatttcaactccagagctgagtttttctggtcccatggactaatatcagattcaacttacgaaatcttcaccaaagtatgcaactattcccaaattaggagacaacatcagggtgggacgcttacccccatttgttccggagtaaataggctagtgtcaacggaagttagtaggtatattgatacatatgatgttacacttgatgtgtgtctttcatcagcagatcaacaggcttatgtgccgaatcaactgactcaactgcaagagggtgccaagatagatgtttgtgtggaagatgaaactatcgcatatttgaataggaaagatgtgcaggaagctctccatgctaagctcgtagggatcacgtcatggtcaacttgcagcgatgttcttaaatatgacatgcagaatctagagattccaaccatttctattctaggtgcacttgctaagtcaggtatcagggttctggtatacagtggagatcaagattcagtcatcccattaactgggacaagatccctggtaaatggattagccaaggactttggactcaacacaacagtgtcctatagagcatggtttgagggaagacaggtggccggttggacacaagtatatggagacatcttatcatttgccaccataagaggagctgctcatgaagctccattttcccaaccagagaggtcactggtgctgctaaaagcatttttggaaggaaagccacttccagaaccattcctttaaaaatggaaatagataacagaggggttgttcctagcacagtaaaaatacacccattcaaacccctcacataaactgattattcctaatggatcacttttcaattgttataagcattccttctatctttccctacattattttttttttttctttttgagcactgagtgaatgttacatgtactggcattgacattattatatagttcacc

SEQ ID NO: 6262 - DNA, 585 bp, Glycine max
  Clone ID: 700559082_FLI
agaaagcgcaaaattagagtcaatactatatctgctggtccactgagaagtagggctgcaaaggctattggattcattgatatgatgatcgattactcatcagccaatgcacctctacagaaagaactatcagcagaggaggtgggcaacacagctgccttcttagcatcacctttggcatctgctatcactggtactgttctatacgttgacaatggtctgaatgctatgggtgttggagttgacagtccaatatttaaagatcttgacattcccaaggaccagcattaagtggaagctaccccacaaaagctagtgtcaccagaattagcatagcaatggcaatatttttgtttcactgtagctagccatcttcaagttctgcgactcctaccttcttcccaacaagatagtgcaggatccactttgagcatttactttgctttttgtaggctatttttcagagttttccctcagacttttgaacatttcttttttgcaatgttctcagaagtgcaggccacatgattatgaatgtaagaggatctttacattgatcaatgcttatttgagatgtttcgtaat

SEQ ID NO: 6263 - DNA, 669 bp, Glycine max
  Clone ID: 700559088_FLI
gttgagaacaataaattttgtgtatctgtgcactaccggaatgtagatgaaaagtattggaattgggtggggcaacgtgttcatgatgttctgaagggctatccacgtttgcgcttaactcatgggcggaaggttttagagatccgacctgtgattaactgggataagggcaaagctgtcacgtttctacttgagtcacttgggctaaacaattgtgatgatgtgcttcctatatatattggagatgatcggacagacgaagatgcatttaaggttttgagagagggaaataaaggttatgggatcttggtgtcttcagcaccaaaagaaagcaacgcaatttactctcttcgtgatccatcagaggtcatggaatttctcaagtcacttgtgttgtggaaatcaagcaccttaaaaagccttatatagtgtatagagggagagaatatactctgctatactatactatatcataaaaaaaaaaaacagattttttcgattttggtttttctcggaaacattccaagaggtttcctggagccagatttacgcacagaagaacctcttttggtaacaacagcgctgtcgctacccagttgttttgctcaaagctcctgtggtagctgtaaattcgtcgctcataattataaatatctcaaagaattaaag

SEQ ID NO: 6264 - DNA, 1081 bp, Glycine max
  Clone ID: 700559125_FLI
ctagggttatcatatctccatttccatttcctctctctcagtttccaagaatcttaagctatgggaaagtcttacccaaccgtgagcgctgattaccagaaggccgttgagaaggcgaagaagaagctcagaggcttcatcgctgagaagagatgcgctcctctaatgctccgtttggcatggcactctgctggaacttacgacgtgagctcgaagaccggtggtcccttcggaaccataaagcacccctccgaactcgctcacggcgctaacaacggtcttgacatcgctgttaggcttttggagccactcaaagcggagtttcctattttgagctacgccgatttctaccagttggctggcgttgttgccgttgaggtcaccggtggacctgaagttcccttccatcctggaagagaggacaaacctgagccaccaccagagggtcgcttgcccgatgccactaagggttctgaccatttgagagatgtgtttggcaaagctatggggcttagtgaccgagatatcgttgctctgtctgggggtcacactattggagctgcgcacaaggagcgttctggattcgagggtccctggacctctaatcctcttattttcgacaactcatacttcaaggagttgttgagtggtgagaaagaaggcctccttcagctaccttctgacaaggcacttttgtctgaccctgtgttccgccctcttgttgagaaatatgcatcggacgaagatgccttcttcgctgattacgctgaggctcaccaaaagctttctgagcttgggtttgctgaagcctaagcaacgttttggggattgttggagaggcacggtgcccataatatttctctcataaattctatggtcatggtttctaatgcgccactgtgggttcctcaaatttttagatagcttttgaatgtattttgctggacgtggtgatgatgattggagttgggttgtttttatttgtggtcgatccttttgttaaataacattgttcagcgattgcgatattattaccctttgtagtatgtgaccatttaccgtaataactagtaatttgtct

SEQ ID NO: 6265 - DNA, 1353 bp, Glycine max
  Clone ID: 700559162_FLI
gacatattaaaatagccgattttgggagtgtgaagcctatgcaggatagccaaataactgtccttccaaatgcagcatcagatgacaaagcctgcacttttgtgggaacagctgcttatgttcctccagaggttcttaattcctctccagcaacttttggaaatgacctttgggcacttggctgcacattataccaaatgctttctggaacttccccttttaaagacgcaagtgaatggcttatttttcaaagaattatagcaagagaacttagatttccagattacttttctgacgaagcaagagaccttattgaccgcctgttggatttggaccccagcaggagaccaggtgctggacctgatggttatgctattttaaaaagtcacccatttttcaagggggttgactgggataacttgagggcacaaattcctccaaaacttgctccagaacctgggactcagtcgcctgcgtctgatgatgttcatgactcatcgtggagtccttctcacattggggatggttctgcagcttcggttagacaacctgacggtgctacatcttctgaggggactggtcacataactaggctagcttcaattgattccttcgattcaaaatggcagcaatttttggaacctggggaatctgttcttatgatctctatggtgaagaaattacaaaaactaacaagcaagaaggtgcaactcatccttaccaacaaaccaaagctgatctatgtagacccatcaaagctaattgtgaagggaaatataatatggtctgataatccaaatgatttaagcatccaagtggctagtccatcaaatttcaagatttgcacacctaaaaaggtaatgtcgtttgaggacgcaaagcaaagagcatggcagtggaaaaaggctattgaaggacttcaaaaccggtgaatttattctggttttgtgaacatattcttttagatatcctctttattgttcagcaagagggataaaacagttgactgcccaacaatcaattattcattaaaagaaaacaaattcgcagattttgctgaagctggttctagctaattcctcaacacagcttaattttgtgatgagttcttccatcctctttcatgcttcgaagggacgataaaatgtggaagttctaattgtagctatgtctgaggatggacccaatactttgtaagaaaaaaaatggttttttaattatatattaaatattatgagttggaagatgatatcattctagttgtcataatgtatgaatcattgaattgctcaactttattgtttcttcagcccgtggttaaacagtgaaaccatcttgaaatttcaaatggat

SEQ ID NO: 6266 - DNA, 1936 bp, Glycine max
  Clone ID: 700559193_FLI
ctccactttctgagaagagggccaaattagagttagattattagggtttaaccgttcctccccttccttttcaccataatcaacatcaacctcttccaaatcccaatggatccgaccaagaagcgcaagctcgacgagaacggcttcatcaacaacgactcctccgagcccctcaagctctccccctccgacgcccgcaagctcatcgagcgcttcaccactgaccagctcctcgacatcctccaggacacggtggcgcgccaccccgacgtcctcgctgccgtgcgcgctgtctcagaccccgacgtctcccagcgtaagctcttcatccgcggcctcggctgggacaccaccaccgacggcctccgctccctcttctccacctacggcgacctcgaggaggccgtcgtcatactcgacaaggccaccggcaagtctaagggctacggcttcgtcaccttccgccacgttgacggcgcgctcctcgccctccgcgagcccagcaagcgcatcgacggccgcgtcaccgtcacgcagctcgccgccgccggaaactctgcgttgaacgccaacgccgtcgacgtggctctccgtaagatctacgtcgccaacgtgccgccagacctccccgcggacaagcttcttgcacacttctccgtctacggtgaaatcgaagaaggaccgttagggtttgataaacagactggaaaatcgaaagggtttgctttgtttgtttacaagtctccagagggggcaaaggctgcgttgatagatccaatgaagactgtggaagggaggcagttgagttgtaagttggcgattactgatgggaagcaagggaagcggtccgggccggactcgggccaggcccatcatgggaatgttcagcacgggcatggggatggtgtgggagcaggaatggggatacctccgaattcggggtcggggtcggggcccgggcagtatggtgggcccgggcattacgggcctacggttgggatgggctcttatggtggttttggtgggcagccaccgatgggcaataataaccatcctctgaattcgtcgaatccggtaccaggttctatggcaggtgctggtggctatggtggtgggatgggtgggccatatggtggatacggtggtgggccgggatcaacgggctttgctggtgctggtgggatgggagcaggaggtggaggtgttgggggcggcgggcttggtggtgctggcggtggttctatgtatagattgccaggctcgggtggaatgcctgctggtggtggaggttatccggatagtggacactatggtttatcagcttcatctgggtaccagaatcagcaccaccctccttctggggcttcacctgtgcctagggttccgcccatgtatcccaacgtgcccccttactactgaagagggtttagtttgttttgctggttgatgacgaaggcctttgcatcatcttcagtgttttggcataagattgttgattgctaatgtggagactggatgagaaacatactgtgtctaacactctttacttgagcccagcattatgtttataacgataaagaaagcttgagagattgatgaacatcttcgcttccttccgcttattgtacacaaatccttttagtgtttagggtttgaaaataaatgcattcttaaatctaacgagatgatgaaattgaaagggcaacctggtgcttttaaactcttgccttgacatgatccaagtgttgcacccattatggatcaaatataggcagccttaacttgcatttgcaagagactgattctagagtcaaacttgtgacccttgatttcatactgaaacaaggctctcctaaatctgagattatatttactcaattttatagtagtttgatcttggatatggattattcagtgattcttttttgttttctct

SEQ ID NO: 6267 - DNA, 2282 bp, Glycine max
  Clone ID: 700559223_FLI
attttagtagaggaggaagtatgccaccccagtaccagcctttagatagtacaaattcatcatttggtaactatggtcttagtggctatgctggaaatccagcgttggcatccttgatgactaaccaacttggcactggtaatctgccacccttgtttgaaaatgttgctgcagcatcagcaatggcatcccctggaatgcgctcgagaattcttggaggtggtttggcttctggagctgctgctccatctgatgtgcataatattggtaggatgggaaatcaaattccaggcagtgctcttcaggctccttttgttgatccaatgtatcttcagtacctgaggacatctgagtttgctgcagcacaacttgctgctctcaatgacccctctgtggacaggaactacttaggcaattcatacatgaatttacttgagcttcagaaagcttatcttgggtctatcctctcgcctcagaaatcccaatacaatgtaccgctgggtggtaaatcaggcagctccactcctcatggttattatggaaatcctgcatatggtgttggaatgtcttacccaggaactccaattgcaaactctgttgtgtccacttcgccagttggatctggaagtcctgttaggcacaatgagctgaatatgcgttttgcttctggattgaggaatttagctggggtcatgggaccttggcatgtagatactgggaatattgatgaaagttttgcttcttctctgttggaagagtttaaaagcaataaaacaaagtgttttgagctttctgaaattgttggtcatgttgttgaattcagtgcggatcaatacgggagtcgatttattcaacaaaagcttgaaacagctactacagaagaaaaaaagatggtttatcaggaaatcatgccacatgcccttgctttgatgactgatgtctttggtaattatgtggttcaaaagttttttgagcatggacttgcatcccaaagaagagaattagccaacaaacttcttggccatgttctgacacttagccttcaaatgtatggttgccgtgtcatccagaaggccatcgaagttgttgatctggattagaagatagagatggttcaagagcttgatggtaacgtcatgcgctgtgtacgtgatcagaatggtaatcacgtcattcaaaagtgtattgaatgtgtccctgaagatgcaatcgactttattgtctcgacattttttgatcaagttgtgacactatcaacccatccatatggttgccgggtgatacagagagtgctggaacattgcgaagaccctacaacacagcagaaagttatggatgaaattttaggagcagttagcatgctagctcaggatcagtatggaaactacgttgttcagcatgtgctggaacatgggaagtctcatgagcgttcttctataataaaggaattagcaggcaagatagttcaaatgagtcaacagaagtttgcctccaatgtagtagagaaatgtttgacctttggaggtccttctgagcgccaattactagtgaatgagatgcttggcaccaccgatgaaaatgagcctcttcaggcgatgatgaaagatcaatttgcaaattacgttgtacaaaaggtgctggaaacttgtgatgatcaacaacgtgagctgattctttcccgaattaaggttcatttgaatgcattgaaaaagtacacctatggaaagcacatcgtcacgcgtgtagaaaaacttgttgctgctggagaaaggagaatagctgctcaggctcctcctcaacctgcttaggtggcttagaaaaataatcttgtacagctaactgaggctagtgtaagctgctgctgcttcctccgcccctcccaaatccaagaggtcatgtttgcctatctctcaagatgggttgtgtagccaattggaaataaagttgtcggttttactgcagaaactgtacattttgtagcttttaagtttatacaaagaatttaagcgagagatgaggcctcagatgttttaatgcgcctgatgccccctgctgcagaggagagagagataaaattaaatgaaatattatgactatacaagcccatttacggtgtaaagattgtaaaatggtgagttagtttataagttgacgcgactgtacaaaatgatgatgctcttgtttaggcgagggcagtttttttcttcattttcatttaatcatgtatggttgttgactttgtttcccctttcaagagtgtattttttgttgctagtttactt

SEQ ID NO: 6268 - DNA, 643 bp, Glycine max
  Clone ID: 700559264_FLI
gaaaagcagattaatacttttgcaaagaaggcaaatgatggatctttatcaattgatgagatggctggaggcactcttacaatatccaatggtggtgtttatggaagccttttgagtacccctattatcaaccctcctcagtctgcaatcttgggtatgcattccatagtgagccgtccaacggttgttggaggaaatattgtcccaagaccaatgatgtacgtggctctaacatatgaccacagaattattgatggaagagaggccgtgttctttctgcgacgcatcaaagatattgtggaggatcctcgcaggcttctgcttgacatatgaagtgaacctctaattttaaatggagtaaattaaacctcaaaattcaaataccataatgggtaccctttggtttggattttgaattgcggctgtccgtaatttataatctgtaatgagcaaactctttaggatcatatcccaatttccgttcgatattaattcagcatgtttgtgttttttctacccgctattcctctcatttaatatgaagagggtcacagtttttggctacaaaattgttgtatgaaacgactatgaactatactgtagggattgcccccgaagtaataatgcgatctcttttcatagc

SEQ ID NO: 6269 - DNA, 1478 bp, Glycine max
  Clone ID: 700559333_FLI
gatcgatttccctttgtgcttagatggaaaggaaaacaaagtggccctactgcaaatcgtgatgtagttttctatcggaaggctctggattccctaaaaccatgtgatgtggagtggctaccataccgaaacatggacagcatggtaattccagaacatatcaaaagcactttaattcttgggaggtcaaagacaatgctgatttgctttgacaaggcagaaagacatcttccaaatcgatgcttaaggcaatatggcatgcttcaatcaattccggatgatgtggagcgttgggagaggaagagtagaggagttgacggtggggttgatttgtcagggaaaatggaatctgagcttaatgactggatggaccgtcaggtgagtattgttgatggggatgagggtgtagatgaaagtgagtacatggagtggtatttgagaatcactcgtaagttcattggaaggcctatttctctgtcgtccgagtttcagagaacgaaaataaacaaatctttgcagaatgctggtctcagggatattgcacacatagcggataccttttcaacaaaagggctagatccacaacaaattgaatcaatatcaaggataagatatattgcacatgaatgtttgagagaccaatttggtggtccagtcatggcgtcagggagcacccaagttgaactagggaaaagggtcagaggtaaggagagggttagaagaaaaggaggaacaggtaaacgactgcgaaaggatggtgtggttcaatataatgccgttagtgaggatgaacaagcccagtactatggcactgctattgaggttggccaattacatctaagtcatattgaaagagagctgaatcatgcacaattatgtactgtagacaatgaagtcagtgttgtccagttgattcatgcaaatgctgatggtgagaatatgcagctctgtgatccacacattgaggttgatgaatcagatctaggctatgcagcaggtgaagaaaataatgaggacccagatgatgtggctgctgaatttagccatgaagaactaaagcacagagctggtgaagaaataaagcaagagcttaaccatttgactggagaggaaaacattgaggaactgaatgcagccaatgagattcattttgtgcaaccttcagagctttgtgatgttagtcacgatatcgattcaacgcttgcagatgctgctgctgaggtcaatcactcgcaacttggtgactcaagtgtgatcaatccacaacaaagcagtccaactgacaatcttgttaattctcagctttctcacattaaccctgaaagtgaacttccttctgctaaaggagcaatggaagtgtctcaacattcttctattgaaactcgcgaggatatttcacagaatggtgattgtactgttgctgtatagggtggataccttacaatattgtagagaagcaaaattttttaggctgactc

SEQ ID NO: 6270 - DNA, 1082 bp, Glycine max
  Clone ID: 700559335_FLI
cggcaacgtctctctccgctacctccccgtctcttttaaccaggccgtcggcgccaccactcccttcttcaccgccgttttcgcttacgtcatgaccttcaagcgcgaggcctggctcacctatctcaccctcgtccccgtcgtcaccggcgtcgtcattgccagcgggggtgagccgagcttccatttatttgggttcatagtatgcattgcagctactgccgcacgtgccttaaaatccgtgttacaaggaattttgctttcttctgaaggagagaagttgaattctatgaaccttcttctttacatggctccaattgctgttgttttccttcttcctgctacacttataatggaagaaaacgtggttggcattacattggctcttgccagagatgatgtgaagatcatttggtatctgctatttaattcagcacttgcttattttgtcaacctgaccaattttttggtcaccaaacataccagtgctcttacccttcaggtgcttgggaatgctaaaggggccgtagcagtagtagtttcaattctgatatttagaaacccagtgtcagtcactggaatgatgggttattcactcacagtcctcggagttgtactttatagtcaagccaaaaagcgaagcaagtgatactgatgctgtctgtcattcatgattctgtggaaatcagcagtgaattccctatatttgttttcattcctgtgcggacaaactcaagattccatgaggcaaatttgttagcatgattgtgatcagaatgtttcagactctacaattttttggccctacatggaaaaacgggtttcccattgtattagtacctgtgcagaaatagcccacagtacaaagtttcaataagtgactgatctctctactatacccatgttggcatataatcgaggaatgtctttttgtcatttattctttgaagaaagagttgtagaaggacctctactcatttgttgtttacattgcttacatttgtttattgatgataaaatttgtatctgggatgcgccaacaacatcatacacacgaattaatagattgatcttctccacct

SEQ ID NO: 6271 - DNA, 1318 bp, Glycine max
  Clone ID: 700559336_FLI
ctactccaaccgcacttctgctccgcaattatcatgggcaaggtcaagatcggaatcaacggatttggaagaattggccgtttggtagccagagtggctctgcagagagacgatgttgaactcgttgccgttaacgaccctttcatcaccaccgattacatgacatacatgtttaaatacgacagtgttcatggacactggaagcatcacgatgtcaccgttaaggacgagaagacccttctcttcggtgacaagccagtcactatttttggacacagaaaccctgaagagatcccatgggggtcaactggagctgacatcattgttgagtccaccggagttttcaccgataaggacaaggccgccgcacatttgaagggtggtgcaaagaaggttattatttctgcccccagtaaggatgcccccatgtttgttgttggtgtcaacgagcacgagtacaagccagagcttgatattatttccaatgctagctgcacaaccaactgccttgccccacttgccaaggttatcaatgacaggtttggcattgttgagggtttgatgaccactgttcattccatcaccgctacccagaagactgttgatggaccatcagccaaggactggagaggtggaagagctgcttcatttaacatcattcctagcagcactggagctgccaaggctgttgggaaagtcctccctgctttgaatggaaaattgactggtatggcattccgtgttcccaccgtggatgtctctgttgttgacctcacagtgaggctggagaaagaagcttcctacgatgaaattaaaaatgctatcaaggaggaatcagagggcaagttgaagggaattcttggttacactgaagatgatgtggtctccactgactttatcggcgatagcagatcaagtatttttgatgcaaaggctggaattgcattgaataagaactttgtgaagcttgtttcttggtacgacaacgagtggggatacagctcacgtgtcattgatcttcttgtattcgttgccaagaagtctctttaaggtgttacttcaaagtagcttgtcttcacattattaccgtatgtttatgtttagctgcgatttagtgtcttgctcgagcaaaaaatgagaggtctgaataaatcggtttctgaaaccagtggtgttacttgttggaggagcattagctcttttttggacttttgatgttttctcttgtggagggggatcgagtttttggatttttatatactcgctgatgtacttggcttgaatacttgctaatgtacttgttattgattgttatagt

SEQ ID NO: 6272 - DNA, 1153 bp, Glycine max
  Clone ID: 700559366_FLI
gtcttctgatgtttcttgtctaggcaaactgcgggacgggcgttctgttgcagtgaagaggttgtatgagaacaacttcaagagagttgcacagttcatgaatgaaattaaaatcctagcaaagttagttcatccaaatcttgtgaagttatatggatgcacctctcgccacagccgcgaacttctgcttgtatacgagtacattcctaatggaaccgttgctgatcatcttcatggtcaacgatccaaacctggaaaactcccttggcatattagaatgaaaattgctgtggagactgcaagtgcattgaattttcttcatcacaaagacgtcatccaccgagatgtgaaaaccaacaatattcttcttgacagtgacttttgtgtcaaagtggcagattttggactctcgcgtcttttcccagaccatgtcacccatgtttcaacagctccacaagggactccaggttatgtggatcccgagtaccaccagtgctaccagcttactaaacaaagcgacgtatatagctttggagtggttctggttgagctgatatcatccttgcctgctgtagatatcacaaggcatagacatgaaatcaatttgtccaacatggccatcaacaagattcataatcaggcactgcatgagcttgtcgaccctaccctcgggtttgaatccgatttcaaagtcaggaaaatgataaatgctgtggctgagttagcatttcagtgcttgcagagttctaaagagatgagaccttctatggaagaagtggtggagactctcaaggatatacagagtgatggcaaacataaaagccagcctgaggtaatggacatcacaagcacagctgatgatgttgtgttgctcaaggatgaccctcctccaccatcacctgattctaatgcggtgagcaagtcgacaacgccaaatgctagcggataagtggaccttctttctcacttccatcaaggcatcaagttaaccttatccaaatttatgtaaaagcagagttagcatcacacttgtagcagcatccacccagttacagcatgcattttgtcatcttatgatgaggataacttttatgattgagatgtatatatagatggtaaagctgctttggttatgaaatttcatcttttcaat

SEQ ID NO: 6273 - DNA, 1064 bp, Glycine max
  Clone ID: 700559413_FLI
ggatcacatgctggaaacaaacttgctatgcaggagtttatggttcttcctgtgggagcttcctcgttcaaggaagccatgaagatgggtgtagaagtgtatcacaatttgaagtctgtgattaagaagaaatatggtcaagatgcaataaatgttggtgacgaaggtggctttgcccctaacatccaggaaaacaaggaaggcttggaattgctgaaaactgccatcgccaaagctggttacacaggcaaagttgtcattggaatggatgttgcagcttctgaattctacaaggaagacaaaacatacgatttgaacttcaaggaagataacaatgatggctcccagaggatctctggagatgctttgaaagatctgtacaagtcatttgtgtcagagtacccaattgtttcaattgaggatccatttgaccaggatgactgggagcactatgctaagctaactgctgaggttggagccaatgtacaaattgttggtgatgatctcttggttaccaaccccaagagggttcagaaggcaattgatactaaagcatgcaatgctcttctcctcaaggtcaaccaaattggttctgtgactgagagtattgaagctgtcaggatgtccaaaaaagctggatggggtgtcatggccagtcacagaagtggagagactgaggataccttcattgctgacctttctgttggtttggctacgggtcaaattaagactggagctccatgcaggtctgagcgtcttgctaaatataaccagctcttgagaattgaggaggagcttggtgctgaagcagtgtacgccggagctaacttccgtacccccgttgaaccctactaaagttttcaagtggaaaaaacctggagatccacacgagtttgagcattgagatttgggtgcgcggtttttggtgtgatatataagttgatagttggaacattagtcttggtatgataaagaccttgccaataatttgagttctgattcacagagctaggacagttatgtcttaagactttgaaaggtgtttaatgatatttagctttaat

SEQ ID NO: 6274 - DNA, 1049 bp, Glycine max
  Clone ID: 700559428_FLI
attggagagaaacaaacaccaaataaaaatagcaatcatggcaaataagtaccatgttcgttctattagtttgccttctagatctcatcctagcaccattagagttgaggaggagcttagcaagatcaaaacttgggaaggaacattcacatccacatcagggtccattcacacaggcatatccttgattgaagatttgtacatttgcttggatgatcttctcaacatggcatctacccaaaaggtgatttctcaccatagaggtgaaaaatgtgtgcaagaggtgttggatggttcagtgagaattttggatatatgtggcatcacaagggacaccatgttgcaaattaaggaaaatgtccaagcccttcactcttctctaagaagaagaaagggagactcatgtgttgaagcaagtgtggctgagtacaagttgttcacaaaaaagatgaagaaggatgccattaagttgatcacatctttgaagcagatggatggcaaatttggggtgtccacacttttggatcttgatcaccacttcgctgctgtgattagagtgcttagggaagtcattctgatgaacttgtcactattccaattttttttgtcattcttcaccgtgtcttcatcgaactcaaagacatccaaatggttgctggtgacaaaattgatgcacagggggataaaaccttgtgaagacaaatcagagaatatcaatgaatttcagtgtgtggaagcatctttgagcacccttctaaatgaaggcactattaatgatgagaagatgcaggtagttcatgaaagattggaggctttggagaatgccattgaaagtgttgagaatggcttggagagtgtgtttaggcgcttgattaaaactagagcttcccttttgaacataatctcccaatagagtactttcaatagatatttttctccaaattctgcaatgcagccaaattttaggggtatgctgaggaatgaaatttttacctacaattatttgtagatatgtataattcaaaagaaatatattgaaatgtaaaaac

SEQ ID NO: 6275 - DNA, 1538 bp, Glycine max
  Clone ID: 700559512_FLI
cgcgaagccgttaggataaggcagagagagaaaaacaaacaaacaaagcggcttccaatggccactctgcaattcaccttcaccgactcaaccacattgttcaggccttctctaccttccacgcgaaccttctctcgaaaccgaagcctcattgtcaaagcctcttcttcttcttctgacgacttctccaaaagcaggcgacgcttcatcgccgaaaccgccgcactctcggtctcgctccctcagttagcggcgcgtgccgaagacgcgctttcggagtgggagagagtatacctccctatcgaccccggcgtcgtgcttctcgacatcgcttttgtccccgacgatcccaaccacggttttcttctcgggacgaggcaaaccattctggagacgaaagatggaggaaacacttgggctccgcgttcgattccttctgctgaagacgaagatttcaactatcgcttcaattccatcagcttcaaagggaaggaagggtggattgtcggaaaacctgcgattctgttgtacacttccgatgccggagacagttgggagaggatacctctcagtgctgaacttccaggggatatggtgtacataaaggcaaccggtgagaagagtgcggagatggtgaccgacgaaggtgccatatatgttactgcaaacagaggttacaactggagggctgctgtgcaggaaactgtctcagctactcttaacagaacagtttctagtggtattagtggtgcaagctactacactggaactttcaatactgtcaatcgctctccagatggaaggtatgttgcagtctcaagtcggggcaacttctacttaacctgggagcctggtcagccattctggcagccacataatagagcagttgccagaagaatccagaacatgggatggagagctgatggtggtctgtggcttcttgttcgtggaggtggtctttatctcagcaagggcacagggttaactgaagaatttgaggaggttcctgttcaaagccggggttttggcattcttgatgttggatatcgttcaacggatgaggcatgggcagcaggaggaagtggtattcttttgagaactactaatggtggcaagtcatggatccgtgacaaagctgctgacaacattgctgcaaatttatactcagtgaagttcattgatgagaagaagggatttgtattggggaatgatggagtcttgcttcgctaccttggatagagttgtaatgcaacatggtctgttgcctcaaatgcaattttgtagcagattacatatccatgcttaacattcattactatggagagagctatgggatcaaatcgactccttgctgttgtgctaaaaaaatgtgaggaagtatataaacaaacttcactattgtaaagagagctatattatgtcaatgtaaaattgtaattgccacgttactattatattaaaattcaattttatgctgcatgtgttgtactgcaaaagcgcttattcaatataagagttatcacacgagagtttatcac

SEQ ID NO: 6276 - DNA, 483 bp, Glycine max
  Clone ID: 700559517_FLI
gagagagagagaatggcagcacttggtggcaatcgtgatgtggcaggaagccagaacagccttgagatcgatggtttagctcgctttgctgttgaagaacacaacaaaaaacagaatgcccttttggagtttgaaaaggtagtaagtgcaaaacagcaagtggtttctggtaccttgtacaccatcactttggaggcaaaagatggtgggcaaaagaaggtttatgaagccaaagtttgggagaaggcatggttgaacttcaaggaggtgcaagagttcaagcttgttggagatgcacctgcatagtctagtgcttaattaggttgcagaagagtgaagagtgagacagcctggctcgaaggggaaagcctaaggatatatcaaagcatgctatatgtataaaataaatgtagcttttctaccttcggtattgatatttgaaatcgtgatttggcatcttatatatgatctctgtgtttgtct

SEQ ID NO: 6277 - DNA, 1106 bp, Glycine max
  Clone ID: 700559523_FLI
caacatcaaggttcctctcattcttggtatctggggaggcaagggacaaggaaaatctttccaatgtgagcttgtctttgccaagatgggaatcaaccccatcatgatgagtgctggagagttggaaagtggaaatgcaggagagccagcaaaactgatcaggcagagataccgtgaagctgcagacatgatcaagaagggaaagatgtgcgctctcttcatcaacgatcttgatgcaggagctggtcgtcttggtggaaccacacaatacactgtgaacaaccagatggtgaatgccactctcatgaacattgctgataaccccaccaatgtgcagcttccaggtatgtacaacaaggaagagaacccccgtgttcccatcattgtcaccggtaacgatttctcaacactctatgcacctctcatccgtgatgggcgtatggagaagttctactgggcaccaacaagggaagaccgcattggtgtttgcaccggaattttccgcactgatggtattcctgaacaggacattgtcaagcttgttgacaccttccctggccaatccattgatttctttggtgcactgagggccagagtatatgatgatgaagtgaggaagtggatttctggtgttggtgttgacagtgttgggaagaagcttgtgaactcaaaagatggacctccaacctttgagcagcccaagatgactctggagaagctcttgctgtatggtaacatgcttgtccaagaacaagagaatgtcaagagagtccaattggctgacaagtacttgaacgaggctgctcttggaaatgctaacgaggatgctattcagaggggaactttcttccagtcttgaattggaggcaaagcaaacttggcaagtaaatatttctgttcgtaaggttgttgtactaatccaagtgctagaagttgtgatggaacttgcgtgtaacattcttagcattctcaatgtcttaggtgcaaagagaagatgctaagtttgagatgatcttactatatttttcatattggaccgtcttcctctataattttgagttacagtgtccacttaaattgaatttggtgccttttccttttgtcct

SEQ ID NO: 6278 - DNA, 1591 bp, Glycine max
  Clone ID: 700559531_FLI
tgaaaccaaatatattgatatggtgaaacatgtgatcaacattagagtcctaggagtcctagaagagctaaggctgtctgagcgtagcatctacaaggttccttgcacactccgaaaggtgaaggaggaagcctatactcccctgtgcatctcaataggcccaattcacctcggcaaacaagaactcgagccaatgcaagagcacaagctaagatacttccaattcttcttgaaacgtgtctcatatgaagccatgaagacttataaacactaccttgagaccaatgaaaaacagattcgacaatgctatgcagagaaattccctggcatggcccaagagaaattcgtggacatgatgttgttggatgctgtgttcatcatggaacttttgttgagaaactgtgaattgaaatcacaaagtttcaagcacgagcaaaaacacaaggaatccaaatcgtttcgagggagaaacagtgaagatctcatcatgacacagtcctggctcagcaggaacatcaccagggacttgatccttatagaaaatcaaatccctttctttgtgctacagaaactctatgatgacgttgtcacttgtgtcaaagagaaggaagaacaacacaccagctttgttgatctcaccattgagtactttgcattctatgacagtcagatgtcttctcttaatgaaaatgaaaccaagaaacactatttctgtggcttactccgcaagtcaaagagcaaagatgagagtccaaaacccttcactgttgttcgtagaagcggttctgaggaaccttgtatatcaaagagcgaagataatggttccaaggaaacttgtaagtcagaaaacaaaaatagttgttgtaaaccagaacacttcactgatctgataaggtggttttaccttcccactgagtgcaatattggtcatgctgatcaggttctaagaactgcaacaaagttacaagactcaggagtgagctttgagaaagatgatatggatggaaggttactagacataacctttgacaagacgcctattctgagctcatttctttgctttggttgctctccactgttgaaccaattcaaagcacgtgtgaggatcccccaattgaaggtggaccacaacactgaatgcattttcagaaatctcattgcctttgagcagtgtcactatcctgagaagccctacatttgcaactacgtttctcttattgactctctcatacacactcagcttgatgtggagttgctggttgagaaggaagtgattgtgcatgaattggggagtcacaaggacgtggcgtctcttgttaatggtctatgcaaacatgttgtcacaaactcgacgtgttactctgacactataaataagctcaacgaccattacatgaacgattggaaccacaccgtagcagcgttgaggttggtgtacttccgagacctttggagggcaagtggcactgtggtgggcattgttgtgctggttttcgctgtcttccaattcctccgtgtttggcgttatctcttctagaatgtacaaaatgtaactcagtttcgattattgtatatatggctttcatgcttc

SEQ ID NO: 6279 - DNA, 618 bp, Glycine max
  Clone ID: 700559551_FLI
cgcttcttcttttgctcgaatcatggagggtggttatgctcgtcgactcttgcaggtcggtataagatcaataaacaaagaagggcgtgaacaagccaaaaagttcggggtagagcagtttgaaatgcgacatttttcgaaagatcgtccatttttggaaaacctgaatctaggagaaggtgctaaaggagtatacatttcaatcgatgtggattgtcttgatccagggtatgctgtaggagtgtcccactatgaatcaggaggtctttctttcagggatgttatgaacatgctgcaaaatctcaaaggtgacattgttggtggagacgtggttgaatacaacccacaacgtgacactcctgatcgtatgactgccatggtagctgctaagtttgtgagagaactcgctgcaaagatgtcaaaatgataactattaattctgcctcgtgtgtgtgacatttagtttacttcaatgcactcaacttttcaatttatagtgttgttgttatgaataaataatacatgcactattaccctgtttacactaacagtgtaaagatgatgtatgtgtataagactaagttttgttgtgttctattagaagtattaatcgtgttc

SEQ ID NO: 6280 - DNA, 1221 bp, Glycine max
  Clone ID: 700559567_FLI
gctacctcaacgtccccaacactgtgttcctgttcttcttcttcgatggcggcaacctcaacatcactggcttctcaactctacattggcctgcgccgcccatgcctcaagcttgattctttcaattctcaatctttctctgtcttcgaccccaatcttcgcctatccctctctcctcccagaccctcacgcgccatcgtcgccatggcaggcaccggcaagttctttgttggcggcaactggaagtgtaacggaacaaaagactccatcagtaagcttgttgctgacttgaacagtgcaaaattggagcctgatgttgatgttgttgtcgcacctccctttctgtacattgatcaagtgaaaaactcactcactgagaggattgaaatatctgcccagaattcttgggtgggaaaaggtggtgctttcacgggagaaatcagcgcggaacaactaaaagatcttggatgcaagtgggttgttcttggacattctgagcgaagacatattattggagaaaatgatgagtttataggaaagaaagctgcctatgctttgagccaaggtcttggagtgattgcatgcattggagaattgttagaagaaagggaagctggaaaaacttttgatgtttgttttcagcaattgaaggcttatgcagatgcagttcctagctgggacaacattgttattgcatatgaacctgtatgggctattggaacgggcaaagtggccactccccagcaagctcaggaagtacatgtagctgttcgagattggctaaaaaagaatgtccctgatgaagttgcatctaaaacgcgaattatttatggagggtctgtaaatggagggaacagtgctgagctagcaaagcaagaagatattgatggatttctcgttggaggtgcttcattaaagggtcctgagtttgctaccattgtcaattcagtcacatccaagaaagttgcggcttgaacttgattacatattgtgattttggcaataagagagcattaaggatataaagacgggctagtcttaaatgtggcaataatatgggtgtacaataacagattggtttttattatcaaaattactgcgtcaatttctttgcaatcagtaggaattgcatcctctgagttttccaaagagccagtgtttttacagcaattagagatgcagagatggtagaaagcaataaataataaatgtttctggatt

SEQ ID NO: 6281 - DNA, 713 bp, Glycine max
  Clone ID: 700559571_FLI
ggatgattggagcttggagagacaggatcataatgtgcacagggacatatgggcctactcctgcccttatcaaggcctttctggactccggtgccaaagctattgtttgttcttcaagtgaacctccagagtctcagtcgatcactgttgatggtcacatagagtggaatgtgatggaaaatgggaagtttgaaattggagaagatgaagcagatgatgagaacgtaccggctagtccggtaagcgactgggaagatagtgacgctgagagaaatgtgaaccgcaccttttctttttgggacgatgatgaagaggaactgtcacattttgtttgtcacttgtatgattcattattcagggaaggtgctagtattaatgttgctttgcaacatgcacttgcctcgtatcgaagaatgaggtatgtgtgccatctccccggcatacaataattttgttaacttaatcttacacaataaaaaaagaacgaaaataaaggatgagagggaggaaaagatgagtctgtgtgagagaacatgttcttataaaattatacagtcgataaccaatttgaggcttataaagatgtgcattcatagttgtttccgatgtcccttgtacttgttcagttgttcctatgtaactgtaatgacattcggaggattagggcttcggagtatttttattatagtagattgccatatacttttttgacg

SEQ ID NO: 6282 - DNA, 1069 bp, Glycine max
  Clone ID: 700559577_FLI
gaaacgtcacttcaggtttgaaaaaggttacgaatgatatgaagactaagaatcgcaccgatagaactggagttgttggggctattgaaaaagaaactcctgcaagttcacgtgtgttttctaaagctggacctccaaaatttgaacttcaaatgggccgcaaatgggttgttgagaatcaaattgagaagaaagacttggtcattgaagattgtgattcaaagcagtctgtatatatttatggatgcaaaaactctgttttgcaaattctaggcaaggtcaacaatataacaattgacaaatgcacaaagattggagttgtatttaaggatgttgttgcagcatgtgagattgtaaacagtaacggggttgaggttcaatgccagggtgcagctcctacaatttcagtggacaacacttctggctgccagctatatctgagtaaagactctttagaagcatccataagtacagcaaagtcaagcgagatcaatgtattggttcctggtgctgatcctgatggtgattgggtggagcattctttgccacaacaatacattcatttgttcaagaatgagcactttgaaacaactcctgctgctcattctggaggttaaattgattgccaatttggacttttggagtctctatttatatttaaatcgttttggaatactgtgggagtggcttcaatttgttgtttcgtcaattcatttacaaacacagtcatatatataggtttaccgtatacttgctgcttattctagtgatttttccatgggtttattgaaccattggaatcatccatacggtttttttttttagtagttttcttctgattgagcgtgtttttgtcgtaagttgcattatgcaattggtttttttagctttcagaggacatctacatttgtctgaacatgttggtttgattctggtgcttttgcatatttgaggatagagcaatgattatgtactcaggtgcattcggaaagatatttgtgtatctgtttttttgaatcgattagtcctcccaagtttgtattgagaaaatgaaacgagttgtgaactt

SEQ ID NO: 6283 - DNA, 1653 bp, Glycine max
  Clone ID: 700559592_FLI
gtccaggatcgcacattgttgtccttgcgttcgtgttgctcatttcatcaaaacttgcagaatgtcacaacatagttcgcttccttcctggcttccagggaccccttccttttctacttgaaactggttacgtggaagtgggtgaaactgaagcagaggagcacgcagaactcttctattattttatcgagtcagagaacgatcctaaagggaaccctctcctactttggctaaccgggggtcccggttgctctgctttctctggccttgtctttgaaataggtccactgacatttaaaaacgaggaatacaatgggagcctacctaatttgaccttgaagccacaatcatggacaaaggtaagtagcattatatttgtggatctgcctgcgggtactggcttctcttatcccaaaacagaacgtgctgttcaccaaagtagctctaagcttgttcgccatgctcatcaatttattaggaagtggctaattgatcatccggaatttctctcaaatgaagtctacattgctggtgactcatactgcggcattcctgtcccagttattgttcaagaaatttcaaatggaaacgaaggtggtatgcaaccatggatatacatccagggatacctgctgggaaatcccataacaacatcaactgaaaaaaactatgaaataccatttaatcatggcatggcattaatttcagatgaactctacgagtcactgcaaaagaattgtagaggagagtatcgcaacatagacccaagaaacgcgttatgtctaagagacatgcaatcgtacgaggagtctatttcaggaattgaaactggccatgttttggcacccctttgcgacgagtccgatctgcgtaatgatatggaagtcacttggagaagaagttctcttgctcataaaacctcagcgtttttcagtcctcgtctcacattgccacccttatactgtcgatctcatgcatatgtcctctgtagctattgggccaatgatgataatgttcgcaaagcattgcatgttcggaagggaagtataggaaaatggacgcggtgtaacgatgacttaaaatctaagtttaatgccgatatccctagcagcttccaatatcacgtaaatctcagcagaaaaggctatcgttcattaatatacagtggggatcatgacatggtagttccattcttggctactcaagcgtggataagatctttaaactattccatcgtatctgactggaggcagtggtattacgatggccaagtagcaggttatacaaggacttactcaaatcggatgacatttgcaactgtgaagggtggaggacatacagctcccgagtacaaacctgaagaatgtttagccatgttcagtagatggatatctaatatgccattgtaggaatacccgactgagtcaatgtgatacaatgctacggggcaattgctttatcctaatgtcatgtcaagaaaaactagcaagtttactggccattttgtcattcagtgaatcaatgtgtatttctctcattataacaggaaagctgttggtttttagggaataaaggcagtaaaaaaaacaaagaaataaaattctggagaatataaatattttgagaaacagattgtgggagttcaatttattc

SEQ ID NO: 6284 - DNA, 1565 bp, Glycine max
  Clone ID: 700559627_FLI
tgacacataagataagagagctggaaacggctatgctgggacctaatgcagatatgctagatatctatggtaccgtaaatccagaacctgattcatttttgttagaggctgagaagtggaagaaaatgatggaaatatcatctagaggggatttgaaagagatgctttatatgtgtgcaaaagcaatggctgtgaatgatatggagacaactgattggctggtgtctgagttgcgtaagatggtgtccatttcgggcaatccgattcagcgactgggagcatacatattggagtcctttgttgcaaggatcggtgcttcaggaagcacaatctacaaatccttgaaatgtagtgagcctactggtaatgaactactttcttacatgaatgtgctttatgaaatttgtccatacttcaagtttggttacatgtcggcaaatggagcaattgctgaagctctgagggaggaaagtgaagtccacatagttgactttcagattggccagggaacccagtgggtgagcctgattcaagctcttgctcgccgccctgtaggccccccgaagatccgaatatcaggtgttgatgactcctattcggcctatgccaggagaggagggcttgatattgttgggaaaaggttatccgcacttgcacagtcatgtcatgtaccctttgagttcaatgctgtaagagtacctgctactgaggtgcaacttgaagaccttgaacttcgcccttatgaagctgtggcagtgaactttgccattagtctgcaccatgtgccagatgaaagtgtgaacagtcacaatcatcgtgaccgattgttgagattagctaagcaactgtctcctaaggtggtgactctggttgagcaggaatttagcaccaacaatgcgccgttcttgcagcgcttcgttgagacaatgaactactacttggctgtttttgaatcaatcgatactgttcttccaagggagcacaaagagaggattaatgtggagcagcattgtttggctcgcgaagttgtcaacttaatagcatgtgaaggagaagaaagagttgaacgtcacgagcttctgaataagtggagaatgcgtttcacaaaggctggatttacaccttatccattgagctccgttattaattcttcaatcaaggatcttctgcagagctaccatggacactacactctagaagagagagatggtgcactatttcttggttggatgaatcaagttcttgttgcatcttgtgcttggagatgaaaatcctataacagttcatttttgttactccaggcttctagttaggttatgtatcatccttaacttcttcatacaatttctcctcacttcatagtcaaattactgttctgtaagagagcttccttagtctttatgtcagcaatgcaagtaatatcaagaaaaactatatatcctgcaattttctctgaggtgtattttagaacatgtaatgcttaccaaaggtcagagtgatgccaatctataactgcaaagcatgtaagatgaaatctatagcaaaacaatgagtatgaaacttct

SEQ ID NO: 6285 - DNA, 1365 bp, Glycine max
  Clone ID: 700559636_FLI
gtaaagtcaggcacaggcatttggtggctcttttagggtattgcattaacggcaacgaaagacttttggtgtactagtatatgcctcaagggacattaacgcaacacctgtttgattggggtgaaaatggttgtgctcctttgacttggaaacaaagggtagcaatagctttggatgtagctcggggagtggaatacttgcacagcttggctcagcaaagcttcattcacagggacttaaagccctcgaacatattgctgggtgatgacatgagagccaaggttgcagattttggcttggttaaaaatgcgccagatgggaaatattctgttgagacacgcttggctggaacatttggatatctagcaccggaatatgcagctaccggaagagtgacgaccaaagtagacgtgtacgcatttggagtagttttgatggaactgattactggtagaagggcattggatgatactgtgcctgatgaaagatctcacttggtttcctggttccgtagggtactaattaacaaggagaacatcccaaaggcaattgatcaaactctcgatcccgatgaggaaaccatggagagcatatataaagtggctgagctagctggccattgcactgctcgtgaaccataccaaaggcctgatatggggcatgcagtgaatgtcctgggtcctctggtagagcaatggaagcccaccacccatgaagaagaagaaggttatggcattgaccttcacatgagccttcctcaagctctgcgaagatggcaagccaatgaaggcacttccacaatgtttgacatgtccatctcacaaactcaatcaagcattcctgcaaaaccttcaggatttacagactcctttgattcaatggattgccgctgacaaaaaatgataaacaggacaacatcctatttcttctcagttggaaggacccagatgagaacgttgttaagtaaagctgttctgatctggcaacatcacctaattgtgtcacaatttatttatttttttaaatgatgatttttttatgttcttgcaatctctatttgtacaagtctgatgtcctttattgaggttttccaaagctaacggattggtgagaaagcacatgcggtgggctccatcgttacacatgccatgatttgacacaatctagattctactcacatgccatgccagccaaccccaagctttcggtggtggaagctccataagttatgacttctgcgcaaaaatgttgagcatatacataagttaacttaatagctatacatcttaatttactattttatacacaatttgttacatttcatgtataaaatctttatgcaattattttttctttgggtttctt

SEQ ID NO: 6286 - DNA, 1257 bp, Glycine max
  Clone ID: 700559641_FLI
gtgaggtgaaaaaactttttgaacgctctcatgatggtcaaatcactgagatagtttacaagggaacacatgatcatcctaaacctcaatcaagctgccgatactctactggtactgttatgtatattcaaggagagagatctgataaggcttctttggctggccgagatgacaaagcatccactatgtatggtcaggtgtctcatgctgctgagcccaacagtactccagagtcatcacctgtagccacaaatgatgatggtttagagggtgctgggtttgtgtcaaacaggaataatgaagaggttgatgatgacgatcccttctcaaagcgaagaaaaatggaacttggaaatgttgacatcactccagtagttaagcctatccgggaaccacgtgttgttgtacaaactttgagtgaggttgacatattggatgatgggtaccgctggcgtaagtatggccaaaaggtggtgagaggcaatcctaacccaaggagctattacaaatgcacaaatgctggttgccctgtccgaaaacatgtggagagagcatctcatgatccgaaagcagtgataaccacatacgagggtaaacacaatcatgatgtacctgctgcaaggaatagcagccatgacatggcagtaccagcagctacagcaggtggacagacaagaattaagttagaagaaagtgataccattagccttgaccttggaatgggaattagctcagctgctgaacatagatcaaatgggcaagggaaaatgctgcattcagagttgggggagacacaaactcacgccagcaattccaacttcaagtttgttcatactacctcagctccagtatactttggtgttctaaataacagctcaaatccctatggttctagagacaataggagtgatggtccatctttaaaccattcctcatatccatgcccacagagcatgggaagaatactattgggtccatgaagttgattacacaacagatattaaaataaaaactgagtaacaatttgcttttttcttcttatttttggcgggtatagcttcaaaggcgtaacatctcattttctgtaagaaaatgcagatagttcttttatgcttatagcactattcgagagctgctgtttagtagaattggtagcagctccatcttgacttttaaatctaattgccgtttgtaattgtataattatatccaaattcttctgtataaatatgaagccgatatcaaagttacctccac

SEQ ID NO: 6287 - DNA, 1641 bp, Glycine max
  Clone ID: 700559642_FLI
aatctcaaacagtgcaaaaacactgcgaaatattttcaaccgcaaaacaaataacattcaatttccaaaattgccataatcaaccatagctgaacagaagaagtcagtaaccatcgtcgtgagcgaagatccataataatacagttacaaattgcaataacacactcattgtggttatcgaaatttgatcgcagcgtcgagaagaatgggaagtttgggagcgattctgaaacatccagatgacttttaccctctgctgaagctgaaaatggcggcgaggaacgccgagaagcagatcccgccggagccgcactgggcgttctgctacacaatgctccacaaggtttctcgaagtttcgccctcgtcattcagcaactcggcaccgagcttcgcaacgccgtttgcatattttatttggttctgcgagctctcgacaccgttgaggatgatactagcatagaaacagatgtcaaggtgccaatactgatagcctttcaccgtcatatttatgatcgtgattggcacttttcatgtggcacaaaggagtacaaagttctaatggaccagtttcatcatgtttcaactgcttttctggaacttggaaagaactaccaggaagcaattgaggacattaccaaaagaatgggtgctggaatggccaaatttatttgcaaggaggtagaaacaattgatgactatgatgaatattgtcactatgtggcgggacttgttgggctgggtttatcaaagcttttccatgcgtctggttcagaagatctggctccagatgacctttccaattcaatgggcttgtttctacagaaaacaaacattattcgagattatctggaagacatcaatgagatccccaagtcacgcatgttttggccacgacagatttggagtgaatatgttaacaaacttgaggatttgaaatatgaggagaactctgttaaggcagtgcaatgcttaaatgacatggtcactaatgctctgatgcatgctgaagattgcttaaaatacatggctgctttacgtgacccgcctatatttcgcttttgtgctataccccagataatggcaattggaacacttgcattatgctacaacaacattgaggtcttcagaggtgtagttaaaatgaggcgaggtttaactgccaaagtgattgaccgaacaaagactatggctgatgtctacggtgctttttttgattttgcttctatgttggagcccaaggttgacaaaaacgatcccaatgcaacaaaaacattgagcaggctggaagctatacagaaaacttgcagagaatctggtctcttaagtaaaaggaaatcttacattgtgaatgatgaaagtggatatggctcaaccatgattgtcatattggtcatcatggtttccatcatttttgcttatctgtctgctaaccaccataatagctagttgaaacactgatagcacgcctcgttcatggaatgcgaatttgcatgcatgcaagcaatagtatgatggctgcagttgactatcgtgtattttaattgaaaaatagtcgaatatagcgtcaagagcttcttgtgttagtttggatttaactctatcctacgttcatcccgaaaattatcattattatgtgtgtt

SEQ ID NO: 6288 - DNA, 578 bp, Glycine max
  Clone ID: 700559734_FLI
ccggggttatggactagaaatttagatcgtccttcttcaccagggttatgggcgccaccaacagtggctgggataaattccagaggcattaatgattttagtttgggattgacatctcgaaaaggcggcttagaacttgtgagtggaagtaaatctgctatcgtgactaatacgattgtagaaattgtggttcctgatgatactattgactgtgtatacggggaaaatggtagcaatttggctcgtctaagacagatatcgggtgccaatgttgttgtccatgagcctcgtcccggaacaagtgacaggattattgtcatatccggtacaccagatgaaacccaagcagcgcagagcctcctccaagcatttattcttagtggctcatgacatatctcctttccaattgcccattatttagttttgttcactgtattgtttttctgttttcctttttctctccacccgaaatcatgtaacatctagccttgtattattcccaaacagtaggtgtagtaatttaaaatcaataacttgattctttagtgcataccaaagtaagtaagcttttcattatt

SEQ ID NO: 6289 - DNA, 822 bp, Glycine max
  Clone ID: 700559803_FLI
ttcacattcaaaatctagaacagcatcagaatcaatcagcatattctgtcttcttcttctgaaaacaaaaatgcctcgcggtggtggcggtagctccggtggcggaagatctgctcattcagctcgaagtcatgcttcacggccagttaaccatgctccacctccagctcctgctcagagtgacaatcgtggatctctctttgggactgtagctgaaggattggcttttggttctggaagtgctgtggcacacagggctgtggattctgtattcggtcctcgaactattcaacatgaagtagcagctactgggcctcctcctgcttctgctgctaataagctgggcggtgatgcatgcaatgttcacgcaaaggctttccaagattgcctgaacagctatgagagtgacattagcaagtgccagttttacataaacatgctagcagagtgcagaagaaattctggagccacattgagtgcatgaacatgcttgcttcatttgctttgccttgcaatggtatagctttggagtttgcattggagtccagatgtgtctcatggttagaactacgttttttatgttactaagtattccacattgctaattaataaatcggttttgtccgatatttgtcccaatataattactgtgaatctaatgactccgagtttgcattggagtccagatgtgtctcatggttagaactatgttttttttgttactaagtattccacattgttaattaatgaatcggttttgtccgatatttgtcccaatataattactgtgaatctaatgactccgagtttgcattggagctc

SEQ ID NO: 6290 - DNA, 1665 bp, Glycine max
  Clone ID: 700559804_FLI
caaatctcgctatgcttctcttctaacctctcaccctcgctctctttctctctagggtttcgttctcattctagattcccacatagaaactgtttctgcgttatttgattcttctcccaacctttccttgatccggattaagattcctggcacgtttttgaaccgatccacttcatatcggatccgaattcgaacattcaacatctgattccgcaattctctccgaattttgctttgaatttgcttttcgaatagatgattacagttccttagacagttcaattattaaaaaaaggtacatcatttagatggtatgccgcagttgtgtaaggtctttggttgttcaagctggaaccttcgccaacagagtgagaatcaacggatttgggaggagtttgcaggcagttcagagtttttctcattggccaattcgtgaatacaagacaaccacaaggatgatggttgatacgggttctatgtcaagggctggaccccttgttgatacgatgccagagaaagatgatgatggtcggtttgccagtggagggtggaaaagtgacgatggaagacttagctgtgggtattcaagttttaggggaaagagagtgacaatggaggatttttatgatattaagacattgaagattggtggccaatcaatatgcttatttggaatatttgatggtcacggtggttctcgtgctgctgagtatttaaaggagcatctttttgataatctcttgaagcatccaaaatttttgacagatgccaaattggctataagtgaaacatatcaacagactgatgctaattttctggattctgaaaaggacaccttcagggatgatggatctacagcttcgacagcagttttggttgataaccatctttatgtagcaaatgttggagattctaggactataatatcaaaagctggtaaagcaaatgctctctctgaggatcataaaccaaatagaagtgatgagcggaagagaatcgagaatgctggtggtgttgtcatgtgggcaggtacttggagggttggaggggtgctagcaatgtctcgtgcctttggtaaccgtatgctgaagcagtttgtagtagcagaacctgagatccaggaccaggagatagatgaacaaattgaactgattattcttgcaagtgatggactctgggatgtagtacagaatgatgatgctgtttctcttgcccgcacggaagaggagcctgaggcagctgcacgaaagttaacagaagcagcattttctcgtgggagtgcagataacattacatgcattgtggtgcaattccaccatgagaaagcagaactagctaatcctgacaaagcagaagcagctagtgctcagcatgagtagatgatgtgaaagcacaaaatgcatgtgttggttatattcgcgtcaaattgaatgaattgaggtcagcatatgcatgatggctcactctgcatgtcaaggcaatttgtttattcattagttttcttatgtaagtcactcttgttcttgtattgggatttttgcatcgtgttcttctgatgatttcagcgtgtgtccgtatatatttaaagttttcctgtttgtagagaaatcaagttggtatttttgttctgatctaataaatgcaatatgcatttttttttatcat

SEQ ID NO: 6291 - DNA, 2372 bp, Glycine max
  Clone ID: 700559825_FLI
gagagagagagaaaatcagaacacgctttgaaactgaaagagagagtaagtgaaggtgtgtgtgtgagagagagaatcaagagagaggagaaaacagagacaaacgctgtctgtgcgagttagagagagagagaaaccccagaaaatcagaaaatctaacccccattttttctctctctagtttccatttgatcggaggttctcattgtggttttccgattatcgtcgaatcagctccgttctccggttcggttcggtgcaatggagcagtacggccggtccagtgaaggttcgcggtctgatccgtcgccggaatgggccgagcccgaagcccaaaccgggctcgaagagcctgtgtggcaattgggaatgggtggtggtgctggggaggaatcgtatccgcaacgccccgatgaggttgattgcacttactatttgaggaccggcttctgtggcttcggttcccgctgtcggttcaaccatcctcgtgatcgtgccgtggttgccggagctgagaggactgcaggggagcatccggaacgagtaggccagcctgtgtgccagtatttcatgaggacaaggacatgcaaatttggttcatcttgcaagtaccaccaccccaggcaggcaggagcagggggcgctgctgctacccctgtgtcactaaattattatggatatccattgcgacagggtgagaaggagtgttcctattatgtgaaaacaggacaatgcaagtttggtgcaacttgtaaattccatcatccagttcctgctggcatccaaattccaccatcgccatttgccccagtttcacctttgcctgtaccagtaccttcgccgttatattcaaccatgcagcccccacctggtccttcgtcccagcaaattggtgtgctggttgcgaggcctcctatgctgcctggctcattagtccagagcccctatggacctgtggtactgtcccctgccatggtacctatttctggctggggtccttatcaagcttctgcatcaggtgctgttcttccttctggtactccatctaatgttggttcagcacagctttatgggataacccagctaccttcaccagcagctgcctatcctggaccttatccaccttctggttccccagttggtcctccaagcagtagtcagaaggagcaggcatttccagaaaggtctaaccaaccagaatatcagtattatctgaaaacaggggaggttaaatttggtccatcatataggtataaccctccaccggacatgagtgtgccggacatgagtacgccaaaagcaaatgtgattcttagtcctgcaggtcttcctttgcgcccgggactaaaactgaagtctgtggacgaatcaaattagggataaaccagccattgtctccttacattttctccagtagccaacatcagggggcaccagcttgcactcattatgcacaacatggagtatgtaagtttggttctgcatgtaaattcgatcatcctatgggatcaatgagttatagtccatctgcttcttccctggctgacatgccagttgcaccctatcctgtgggttcaacaattgctactcttgctccatcatcttcatcttcagagttgcggcctgaacctagctcaggatccagtaaagagtctgttccatccagaatgccttcatcaacattgactgggtcaatcggctcgactttgtcgactggtggacccatttctcaatcgagcactcaaccaccttcccaaagttcaggtcctttagccgctgtcactagcaccacaagtagcaatgtctctcacacctcaagctaagcaatgtgaatgcatacctcatcattactccttttttcaatctcaattcttccactggacataattattcaaggagatcctccaataggttttgttttcagttatcctagttccattctcaggtctagcacacttcacaccaattatctttgtgttcatataaactttttgtggccatccctttgatcttgaataaaccatggccatccttgagaattttagcaatccatacgatcaccttgcttttgaataactcagaatctgcaaggccattgtgcacatgccctttcacatctccaataggttgtgctgcttatttgtgctccaattttttttgatatgagaacattctgtccagactttcgtttatcatgtgtttatgtctcttcatctgaacccttttttaatttgggaacaattttccatttctgccttgtaagtcctgttcaacaattttcccaacttgtatctagggtttaatgtgaagagaagtaatcaggagactacaatgaggcttcacattgctatcttataatataaggtttagat

SEQ ID NO: 6292 - DNA, 1209 bp, Glycine max
  Clone ID: 700559868_FLI
gccgccatcactaaaaaggactccatcatcaccgcctaccgcgaccattgcatcttcgtcggccgcggtggcacgctcctggaggtcttcgccgagctcatgggccgcaaggaaggatgctcgaaggggaagggcgggtccatgcatttttataagaaggagagtgggttttatggtgggcatgggattgttggggcgcaggttccgttggggtgtgggttggcgtttgctcagaagtattctaaggacgagagtgtcacttttgctatgtatggagatggcgctgccaatcagggacagctctttgaggcgcttaatatcgccgcgctttgggatcttcctgctattttggtctgcgagaataatcactatgggatggggactgcggagtggagagctgccaagagtcctgcttattataagcgtggggattacgtgcctggcttgaaggttgatggtatggatgttcttgctgttaaacaagcttgcaaatttgcaaaggaacatgctttgaagaatggaccccttattcttgaaatggacacttatagataccatggacactctatgtctgatcctggcagcacataccgtacacgtgatgaaatttctggtgtgagacaggagcgtgatccaattgagagagtaagaaagctggtattgtctcatgatattgctgctgaaaaggagctaaaggacattgagaaagaagtcagaaaagaagttgacgaagccattgctaaagcaaaggagagtccaatgccagatccatctgatctatttaccaatgtctatgttaaaggttacggagttgagacatttggtgctgataggaaagaagtgagagctactttaccataattcagaactttgtcctttgaatatcttgccaccttgtcgtagcagactcttcaaaatagtgaagaataaaaggttctacagagggtcatctctctcccctattcgttgagtttctgcccgcgtgtatagtgtgaatttattcatatgcttggttagcaatggggcggggtttgttatttttttgtcatgtaatatttgcggatctaacagccaaagcatcattgtgattgatgcaactggggtgttctgcaaatttgaggaatacattgtgcactactgaagatatgtagttcagaatattttagacacgtcaaacagttcaaaaatctatatagatatatattaaag

SEQ ID NO: 6293 - DNA, 1765 bp, Glycine max
  Clone ID: 700559917_FLI
caaccaccacgcttccacaaccaaaaccaacggtttcctaattcatcccaagctgggtttcgaacctgccaggtctcgatcacgtcttgccatggcttcacctgccaacacctccgagcctaagatcgtcaccggcacagccggttacatcctcgaagacgttccgcatttcactgattacattcccaatctcccaacataccctaatcctttgcaagacaaccctgcttattcagttgttaagcagtattttgtgcatgttgatgacagcgttcctcaaaaggtcgttgttcacaaagatggtgcaagaggggtacattttaggcgtgctgggcctcgtcaaaaggtgtactttgaagcagatgaagttcaggctgctattgttacttgtgggggtctgtgtcctgggctcaacactgtcattagggaattagtgtgtggcttacaccatatgtatggggtgaagaaagttcttggaatcaatggaggatataggggtttctatgctcgcaatacaatcactttaacccctaaaagtgtgaatgatatacataagcgtgggggaactgtcctcggaacatcacgaggtggacatgacaccaaaaagatagttgacagtattcaagatcggggaatcaatcaggtttatataattggaggagatggaactcagaagggtgcatctgcaatttttgaggaagtcagaaagcgtggtctcaaagtttcagttgtaggtatccccaaaaccatagataatgatattccagttattgataagtcttttggctttgacactgctgttgaggaggctcaacgagctataaatgcagcacatgttgaagctgaaagtgtagaaaatggcataggtgttgtcaagttgatgggtagaaacagcggatttattgcaatgtatgctactcttgcgagtcgagacgtggattgttgcttaattccagagtcacccttttaccttgaaggtcctggtggactctatgaatatatagagaaaagactaaaagaaaatgggcacatggttattgttattgctgaaggagcaggacaggaacttgtttctgagagtgtgcagtccatgagcaaacaagatgcttctggaaacaagctttttcaagatgttggcctatggatatcccaaaagattagggatcattttgctgcacagaagacactgcccataactctcaaatacatagatccaacctatatgatccgagctattccaagcaatgcctctgacaacgtgtactgcacacttcttgctcaaagtgcagttcatggagcaatggcaggttacactggctatacaagtggacttgtgaatggaagacaaacttatatacccttctatagaatcactgagagacagaaccacgtagtgataactgatagaatgtgggctaggcttttatcttcaacaaatcaacccagctttttggatgccaagggtgacaatgaagagaaggaggaagaagaagcattgaatcagttaccggatggacattgtgccaaagacacttctttggctagcaaagaaatcaacagcagcatttatccaacagcttgctagttattattgttattatttgtcattacgtgagatcctctatcatgcgttacacgtaatagtacataagagctgtcttttttgcccttgtttgtcaatcaataatatggctgtggaacacagccttacacaatgaactttattagtttgaattattaattactaattattaattagttatcc

SEQ ID NO: 6294 - DNA, 846 bp, Glycine max
  Clone ID: 700559919_FLI
ggaggttcctcctctgcccaagaatcggaaggctgcttgtgggcaacacaaagaagagattcttagtcagcttcgggaattggccaagtctgagccattggaccttgaaccatatgtgtcatcggggaacttgtcctcgggttttgaacgtgaaccagaggctgatatctttccttctcatgagtggcatagagaaagcagcgagcctatgtatcaggttgttcctcctgacccattaatgagaacttatacagaagaaattccatttaaacattctacttctgctgttggggaaactcaaacctacggtgacaatggaggaaaaccatccatttctcttaaatctgaaaccctatcaactactcccaaagctgcagcatgtgagttaacaagccaagaaagagattctgcattattacggtacaagcagaagaagaaaactaggagatttgacaaacacataaggtatgaatcacgaaaagttcgggcagaaagcagggtaagagtcaagggtcgatttgccaagatggaacatgaacattgaaatcatggtaggctgctatgacatcataactataattcccagctcaaatcacatgcactatgtagcatatcccttgtatagtgaacttaacaaaattttccaagtgatgtattctaggattcagagctaggatataaggcagacatattcttgcagtacagtagtgtttttatcatcctttttgcttcataattgactgcacctgaggtagacaaatatgtgcagtattctgtaaatcagaatcaaatttactggggtctttggccttggattgtgtttggagagtatcttgtggacgactg

SEQ ID NO: 6295 - DNA, 369 bp, Glycine max
  Clone ID: 700559947_FLI
gagaaggatccatcaaagattgggagactttcaaatgaagcccttgctcctcttgtggaagttgcattgaaactttcgaagatggaagaattcactggtcgatccgctccaacagtcattacatgaacacatacaggtggaaggtggttagatcctgaagtttctcccagtcatttcttctttgttcagtttcttacggatggccgaacactagtgttggttgtttgcagcctttgctatgggcacttgagtggaatttgatcagttactttatcaaaattttgatgtgctgaataagttgcaactgccgagtgctaattctattatatagtcttaatatgatggctcctcttgtattggcgttttatt

SEQ ID NO: 6296 - DNA, 1431 bp, Glycine max
  Clone ID: 700559952_FLI
gttattgcctcaagggtccccaacagcaaggtttccggtggaagcttcaagattgttgctgtagaagagaagaaagagattgaagagacccagcagaccgacaaggacagatggaagggtcttgcctatgatatctcagacgaccaacaagacatcacaagaggaaagggtttggttgactcccttttccaagctccacaggatgctggaactcactatgcagtcatgagctcctacgagtacctcagcactggacttcgccagtacttggacaacaaaatggatggattctacattgctccagcttttatggacaagcttgttgttcacatctccaagaacttcatgaccctgcccaacatcaaggttcctctcattcttggtatctggggaggcaagggacaaggaaaatctttccaatgtgagcttgtctttgccaagatgggaatcaaccccatcatgatgagtgctggagagttggaaagtggaaatgcaggagagccagcaaaactgatcaggcagagataccgtgaagctgcagacatgatcaagaagggaaagatgtgcgctctcttcatcaacgatcttgatgcaggagctggtcgtcttggtggaaccacacaatacactgtgaacaaccagatggtgaatgccactctcatgaacattgctgataaccccaccaatgtgcagcttccaggtatgtacaacaaggaagagaacccccgtgttcccatcattgtcaccggtaacgatttctcaacactctatgcacctctcatccgtgatgggcgtatggagaagttctactgggcaccaacaagggaagaccgcattggtgtttgcaccggaattttccgcactgatggtattcctgaacaggacattgtcaagcttgttgacaccttccctggccaatccattgatttctttggtgcactgagggccagagtatatgatgatgaagtgaggaagtggatttctggtgttggtgttgacagtgttgggaagaagcttgtgaactcaaaagatggacctccaacctttgagcagcccaagatgactctggagaagctcttgctgtatggtaacatgcttgtccaagaacaagagaatgtcaagagagtccaattggctgacaagtacttgaacgaggctgctcttggaaatgctaacgaggatgctattcagaggggaactttcttccagtcttgaattggaggcaaagcaaacttggcaagtaaatatttctgttcgtgaaggttgttgtactaatccaagtgctagaagttgtgatggaacttgcgtgtaacattcttagcattctcaatgtcttaggtgcaaagagaagatgctaagtttgagatgatcttactatatttttcatattggaccgtcttcctctataattttgagttacagtgtccactt

SEQ ID NO: 6297 - DNA, 1006 bp, Glycine max
  Clone ID: 700560077_FLI
caaagttgatagagtgctgatgtgctggtgggccttcacaggtctcacacacattattcttgagggttattttgttttctctcctgagtttttcaaggataaaactggcttctacctggctgaagtttgtgagtttctttggcattgaacaatgatattgttcaaatttggagtacccttcaaggaatttgcagtttttttagttgatggaagttttttaatgaacaaataacagggaaggaatatagcaaaggggattcaaggtatgcaggaagggatgcaggggtagttactgttgaaggaataacagcggttttggagggtccagctagccttctagcagtgtaagttgaaaataaattaaacaaaggaccaagagaactaatgctatgatgctgctactaatgatttttatttttttgctcagtttgactctgtattgcatgttttatcttctcattttttcacataactgtttgtattaccaatatggatgacagatacgctatagctactgggaagtcatatagctacatacttcagtttgccatttctttgggccagctatacggaactgctgtttattatataacagcaatcttggaaggtgataatttttctacaaactcgttttactattatgcatactacattggagcaaatgcctcctggattgtaatacccttgatcattgccatccgctgctggaggaagatctgtgcagcatttcgagttcaaggtggccagacaaaaaagcctaaagttcgttgaaggaaacattttcaggttattggtcttagagatcctgagctaataatgatgttttggggtagttgagataggagagattgttgtaagaattgtgacattgattctcttaaactgcatatctcagggagaaaaaaaaatcccagtgtcatttgagaaggtgatgtttttaattttaagttttgaataagtattttcctatcattgatttgaaattgaatattgaatgttagctggc

SEQ ID NO: 6298 - DNA, 878 bp, Glycine max
  Clone ID: 700560085_FLI
gttgatgctattatcaagtgtcaaggtcttcctacaacatcaggatacatggttgtaaatatggaatggggaaacttttggtcatctcatttaccaagaacatcttatgatattgatttagactctgaaagccctaatccaaatgatcagggttttgagaaaatgatatctggaatgtatcttggtgacatcgtgaggagagtcattctaaggatgtcgctagagtcagatatgcttggacctatttcttccaaactttcaatgccctttatgctgaggactcctatgatggctgccatgcacgaggatgattctcccgacttgagagaagtagcaagaatccttaaaggcatccttgagattcctgatgttcctttaaagttaagaaaagttgtggtgaaggtgtgtgatgtggtgactcgcagagcggcacgattggcagctgccggcattgttggtatcttgaagaagattggtagggatgggagtggtggcatcgcaggtgggcgaagaagtgatatgaaaatgaaaagaacagttgtagcaattgaaggaggtttgtattctagctatacattgtttagggactacttgcatgaagctttgaacgatatattgggggaagatattgccaggcatgtaattcttaaggtcactgaagatggatcaggcgttggagctgcactgcttgctgcctcgcattcatcatatgatgtagatacagtatagctgctatatgtatgtatacatgtaatcatgtaaatcagaaagaaaattttccctctttttaattaatctctgtataaaggaaggttatgtctattctttgttaagatcattaatattaatattattcttgtcgattttttattagtagg

SEQ ID NO: 6299 - DNA, 1410 bp, Glycine max
  Clone ID: 700560148_FLI
cttcaaaacttgtttaccctttgttctctcctcttccagacaccaacatggcttcaatgaccatgatatacaccttactctttctttctttcactttgtcatatgctattaagacctccaccatcatcaactacaccgacaatgaggtcatggccatgtacgaggagtggttggtgaagcaccaaaaggtgtacaatgagttgggaaagaaggacaagagattccaagttttcaaggacaacttagggttcatacaagagcacaacaacaatctaaacaacacttacaaacttgggttgaacaagtttgctgacatgaccaatgaggaataccgtgccatgtatttgggcaccaagagtaatgccaagcgcagactcatgaaaaccaagagcaccggtcaccgctacgcgttcagcgcccgtgaccggttgccggtgcatgtggactggaggatgaaaggtgcagttgctcccatcaaagatcagggaagttgtggaagttgttgggcgttctcaacggtggccacagtggaagcgataaacaagatagtgacagggaagtttgtgtccttatctgaacaagaacttgtggactgtgacagagcctacaatgaaggatgcaatggtggccttatggactatgcattcgaattcatcattcaaaatggtggcattgatactgacaaagattacccataccggggctttgatggcatctgtgatccaactaagaaaaatgctaaggtagtgaatattgatgggtacgaggatgttccaccatatgatgagaatgccttaaagaaagctgtggctcatcaacctgtaagcgttgctattgaagcctctggcagggctttgcaactttatcaatcgggtgtgtttactggtaaatgtgggacaagtttagaccatggtgtagtggttgttggatatggctctgaaaatggtgtggattactggctggtgaggaattcatggggcactggatggggtgaggatggctatttcaagatgcagcgcaacgtgagaacctccacgggcaagtgtggaattacaatggaggcctcctaccctgtgaagaatggtctaaactctgcagttcctaattcagtttatgaaagcactgaggtgtatgttagcagtgcttgatataaccttcatcgttatttatgacctttgaatttggaaagaggaacaagtgctgaagttgcaagaaagtgatgtttctgttatatcttagatgcttctattgaatgtgtgctgggctattcttgtacataggtttcttcaggttaaaagtgaacctgattatcaatcaatttgtaccggttttcactcattgttattccatttgaatgttttatctgaaatccttaatgatatcaattcgctagttatatttctgatatgg

SEQ ID NO: 6300 - DNA, 1500 bp, Glycine max
  Clone ID: 700560157_FLI
aaattattacggaggtccacatggggaccatgttgtgaggatgcaacaaaatggaatgggtcctggtggcggagggtggggtgcaccaccaccacctcctccaatgatgatgagtagtgctgagtttagctccaattactcgacgggaccggccccgttgcctcctccctcaccaaaccttgctctgggcctcaaagggggcaccttcacttacgaggaattagcagctgccaccaacggattcaatgatgcaaatttgataggacaaggtggattcggctatgtccataagggtgtgttgcctagtggaaaggaagtggcagttaagagtcttaaagcaggtagtggccaaggagagcgagagttccaagctgagattgacatcattagccgcgtccatcatcgccatctcgtgtcacttgttggatactcaatttctggtggccagaggatgttggtctatgaatttattcccaataacacattggaatatcacctccatggaaagggtaggcctaccatggattggccaactagaatgcggattgcaataggatccgctaaagggcttgcttatcttcatgaggactgtcatcctcgtattatccatcgcgatatcaaagctgcaaatgtccttattgatgatagcttcgaagcaaaggttgctgattttggattggctaagttgactactgataataatactcatgtatcgactcgtgtcatgggaactttcgggtacctagcccctgaatatgcatcaagtggaaaattgacagagaagtctgacgttttctcatttggagtcatgctattggaactcataactgggaagcgacctgttgatcacacaaatgccatggacgacagcctagtagactgggctcgaccacttctgactcgtggactagaggaggatggcaactttggagagttggttgatgcatttttagagggaaactacgatcctcaagaactgtcaagaatggcagcttgtgctgccggtagcattcgtcattctgccaaaaaacgtccaaaaatgagccagattgtaagaatattggaaggagatgtctcactggatgacttgaaagatgggattaagccggggcaaaatgttgcttacaactcttcatctagctcagatcagtatgacacaatgcaatacaatgctgatatgcagaagttcagaaaggcagtgttttctaatagcgaggaatttggcaccagcagtggctccagtggtgaagtaagccagaagcagcaacggctctagattgcggaactagtgagattagcaattctagtattaattgctgataacacacgtgaaaggaaaaaatggaaaaaaaaaataaaaaaatcaagagtgttgctgttttttattgtttcattggcatgggaagtgaggtctcaatttgtagagaactgaacttgacgccttcgtttcagggtgtgtttgatgaggcatacaatcaatgttacttgtatcttttgttc

SEQ ID NO: 6301 - DNA, 1521 bp, Glycine max
  Clone ID: 700560163_FLI
gcgatccttcaacactcgctacacgcgccacgcgcgcgactcgctcgacgaattgcctgacagcttcaccatcaccgacccctccatccctggccaccccatcgtcttcgccagcccgggcttcctcaagctcacgggctacgcggcccgtgaagtcctgggccgacccgccgccatcttccagggcccgcgaacttcgagaaaatccgtcattgaaattcgcgaggccgttagagaggagcgaaacgcgcaggtcgttctgctcaactaccgcaaagacggcacgccgttttggatgctttttcgtgtttgccccgttttcagcagcgacggtggcgccgtcgtgcactttgttgccgtacaggtgccgcttcagaaaaaggaagggtctggagtgagggatttcgggttcgggtgctgtcggaaggaagtatgcgccgattcgttggcggagattggtcgcgtttgttcattagagcaagtgctggaacctgacgttagagctttgtgagatgcagaattggagagagaagagccgtgtgaggcaagtgatgaggagaagcgtagtgcagttaatgctatggacaatatattttctgtgctaacccattatagtgaggcgacgggcagattggtgtgtcaaaagagatgcagcattcctgatgtgggtcttttaagcacatccttgattatttctcttggtagaatcaaacaaagctttgtattaactaatccgcgtttatcagacatgcctattgtttatgctagtgatgccttcttgaaattgacaggttatgcaaaaaatgaagttttgggccgcaactgtagatttttaggtggaacagatactgatacctcgacattacatctgataagggagagcattaaaacagaacaaccctgcacagtacgtattttgaattacaggaaggacaaaagctcattttggaattttcttcatatctcacccgttcgtgatgcttctggcaagtccattgttgtgcctgattacaatttcacatgtgaagattcggtcttttgcttacctatttgataccaggatttttccacactctccttttcgttgtggctagaaggatgaaaattccaggttgcatactttgtgggagttcaaatagaagacagcaataaaaacgatgatagccattgtttgagtcctgagaagaggcagcttaatgtggttggtgtagtcaaggttgcagtgaggagtttatcaatgactgtgggatcttccaagtcgtagcaaaaggatcatgtgagtgtgagtttggaacatataatattgcctacttctcagaagtcagaaatattaatccattcggaaaaatgatcaatctcaaccagtgattgttgagatgatagaaaggtaaaagaattaatttgtcaagaaagaaaaagagagtccatattgtcaattgtaagaaagcattctctgttggaagtttataaataaaatgtattatattttccgtaatgtagcaataaaaattgacttgtact

SEQ ID NO: 6302 - DNA, 1760 bp, Glycine max
  Clone ID: 700560219_FLI
aattaagatggctcagcctgatacctctctttggattaaaagctctgatggcaggaatgaagtactgaaccatgatgagtatgcaagactgttttctccttatattggatcaaaacctgctgctggttatgtgactgaagctacaagaggaactggagtagtatcagccagcagtttgggccttgttgaaatattgatggatgcggatcaatggtcggagatgttttcatctatgattgctagtgctgccactgtggaagtactatctagtggcacgggtggaaccagaagtggagcgttgcaagtgatgcttgctgaggttcaattgctttctccactagtccctgctcgtcaagtgagtttcctcaggttttgcaagaagcacgctgaaggtttatgggctgtggttgatgtttcagttgacattggtcgtaatgttaccaattcacatccattaatgagctgcaggaggcttccctcgggctgtgttattcaggacatgcccaatggtttttccaatattacttgggttgaacattcccaatatgatgagagtgtcatccaccaactttatcgcccattggttagttctggcattggttttggtgctcagagatggattgccaccctcctaaggcagtgtgactgcttggcaatcctcaggtctcctcaaggcccatctgaggaccccacagcccaagcgggtaggacaaacatgatgaagctcgcacaacgcatgaccgagtgcttctgctcagggatctgtgcttcatctgcttgcaagtgggacatactgcacattggtaatctggctgatgacatgagaatcatggcccggaaaatcgatgacccaactgaggctcctggcattgtgctgagtgcttcaacttctgtttggatgccggtgtcacggaaaagggtgtttgattttctgcgtgatgaaaatttgagaggtgagtgggacctgctgtccaaagatggaccaatgaaggagatgctccatattgctaaaggacaagaccgtggaaattgtgtttccatccttcattctgctaatagcgagtgcaatgtgctatatctgcaagagtcatggagtgatgcctctggctcgatggtagtgtattccccgatcaacatgcaagccttgcagatggtgatgagctgtggagattcatcatttgtccctctccgtccatcaggctttgctattctgccagatggcacttcaaacaacggtgatggcagtgacggtggtggcagctgcttgcttacagttgggttacaaatgttgccaaatggcaaccaccaatcagccaagttcacaatggagtcagttgatgctgtcaataacctgatctcatttaccattcagaaggtcaaagatgcacttggagttgcatgatccatttctttaattttagacttaaatatgatcacaaacaaaaagactttttttttcttttttcttttgaaagaaaacataatagagtgttttatattttgggtgtatagagtattcaagagtagaggctgaggctgaggcagaaaagggtttgagtcaagaacgaaccaaccgtgaatgctttgtggtggttcgggtattgactcgttacctgttacaagtcttagcttttactttgtccaaaaggatatgctgtgtgttattcttacaccctttacttaatagtaaagtgaaactgctcaactttgctattagttgttaatcttcatttcttgaatgcattttcatattttagttc

SEQ ID NO: 6303 - DNA, 855 bp, Glycine max
  Clone ID: 700560231_FLI
gcaagggcaagtggacaaagacaatgcctttgtgaacgagctggaatcactctcaagactccaccacaagaacctggtccggttgttggggttctatgaagacagcaaagaacgcattttggtgtacgattacatggacaatgggagcctgagtgatcatctccacaagctccaaagttcagctctcatgtcatgggcagtgagaatcaaggtggctctagatgctgcaaggggcatagagtacttgcaccaatacgccactccaccaatcattcaccgtgacattaagtctgccaacatattattggatgccaagtggacagcaaaagtgtctgattttggactctctctcatgggccctgaccctgaagatgaggatgcccacctttcacttctggccgctggcactgttggctacatggaccctgaatactataggcttcaacatttgacccccaagagtgacgtctacagctttggggtggttttgcttgagttgctctccggctacaaggccatccataaaaacgagaatggggtgccacgaaatgttgttgattttgtggtgccattcattttccaagatgagattcacagagtgttggacagaagagtggccccacccacgccctttgagatagaggcagtggcctacgtcggttatttggctgctgattgtgttaggcttgaaggtcgagatagaccaactatgtctcaagttgtaaataacttggaaagagcattggctgcatgtttagccaagccaatactctctaggtccaccaccgattctatttcttcacaatagctcatctttcgctcccttgaatggattctcaaaagaaattgtcaact

SEQ ID NO: 6304 - DNA, 822 bp, Glycine max
  Clone ID: 700560316_FLI
gtttacatccctgcttctcctttttggtttatgagttcctagagggaggtagcttggataaattactaaacgatgatacgcatgcaacactgtttgattgggaaaggagggtgaaggttgttaaaggtgtggcaaatgctttgtaccatatgcatcatggttgctttcctcctattgttcatcgagacatatcaagcaagaatgttcttatagatttggattatgaagcccgagtctctgactttggaacagctaaaattctgaagcctgattcacaaaatttaagctcgtttgcaggcacctatgggtatgctgcaccagagcttgcttatactatggaagtgaatgagaaatgtgatgtcttcagtttcggagttctttgtttggaaataatgatggggaagcatccaggcgatctcatttcttcatttttttcatcccctggaatgtcatcggcgtctaatttgctgttaaaggatgtgttggaccaacgactacctcaaccagtgaatccagttgacaaggaggtgatcttgatagcaaaaataacatttgcttgcttaagtgaaagtccacgttttcgcccaagcatggaacaagtgtataacgagtttgtgatgccaacatcatcttcagtgaatttattctccatggtcacacttagtcaactcgttgataattgaaccttgtttccagcctgttgtatgcttttttattgctttaactagtgaagaatctcagcacggtttactggagactcaatgcagatcagtaatgatctaaacagaataacatctgtgtctcacatcctctttattcctc

SEQ ID NO: 6305 - DNA, 1083 bp, Glycine max
  Clone ID: 700560407_FLI
ggctgtacttacaagacgtaatagcatcactggagttgcttacaaagacgacccaactataatggcttgggaacttatgaatgagattaggtgcccttctgatcaatcaggaaggacagttcaggcttggatcactgagatggcatcttacctgaaatccatagatggaaaccacttgctggaagctggtctggagggtttctacggccagtcaaagcctcagtctaacccaaacttcaatgtaggaaccgatttcattgccaacaaccaaatcccaggcattgatttcgcaacagtgcactcctacccggaccaatggctatcaagttctagttatgaggaccaaatctcatttttaggccgttggctggatgagcacatccaagatgcacagaacacccttcacaagccacttctatttgcggagtttggtatttccacaaagagttatggtggcaactcaacaccaagggatcggttattcaacacagtatattctgcaatatactcatcagcaagcagtggcggggctgctgttggtggcttgttttggcaacttatggttcaaggaatggattcttatcgagacggttacgaagttgtcttagatgagagcccttcaacggctaatttgatcgctcaagagtctcaaaaactaaaccgaattcgcaagatgtacgccagacttagaaacattgagaagtggaatgaagctaagcaaattagaggtggaaactgaatatgatacgtcttaactaccatgatatatatatatagagagagagagagagagtgaagggagttagaaactttaattgataacttatttgcgtgtggattaatcttcagaatgaagtgtcccaataatcttagtggcaagaattgcctgttattttcgtcaaagtattccaagtgaagtgttctacaaatgcgatagacataactatttattattgagatatttcgagagaaactttgtaatgcacgaactagcatttcatctacactattatgtcggcaagtgaatgtactttgtctaaactgtttataaaatggactgctgacgataatttgaagtgcttc

SEQ ID NO: 6306 - DNA, 2022 bp, Glycine max
  Clone ID: 700560418_FLI
tgaagctccatcaccactagcgaacacttccattgtttttatctcacaggatcgatcgatatcaccagcatcaccatggcagaggtggcgccgccgaagaaggaaaacccgaaccttctcctggggcggttcgagctcgggaagctcctcgggcacggaaccttcgcgaaggtccaccacgcgcgcaacatcaaaaccggagaaggagtcgccatcaagatcatcaacaaggagaaaatcctaaaggggggtttggtctcccacataaagcgcgagatctccattctccggcgcgtgcgccaccccaacatcgtgcaactcttcgaagtgatggccaccaagaccaagatctacttcgtcatggagtacgtgcgtggcggcgaactcttcaacaaggtcgcaaagggaagattaaaagaagaagttgcgagaaattactttcagcagttagtttccgcggtggagttttgccacgcgcgcggcgtgttccacagggacctgaagcccgagaacctgttgctggacgaggatgggaaccttaaagtctccgactttggtctcagtgccgtgtcggatcagataaggcaggacgggctgttccacacgttttgtgggacacctgcgtatgttgctcctgaggtcttgtcgcggaaaggctacgatggtgcaaaggttgatatttggtcttgtggggttgttttgtttgttctgatggccggctatttgcccttcaatgaccgtaacgttatggctatgtataagaagatttacaagggtgagtttcggtgtcccaggtggttttcttctgaacttacaagacttctctctaggcttcttgatactaaccctcagacaaggatttctattcctgaagtcatggagaatcgctggttcaagaagggtttcaagcagattaagttttatgtggaggatgatagagtttgtagttttgacgagaaactgttacttcatcatgatgatgatttggcaacatcggattctgaggttgagattaggaggaagaatagtaatggttcgttgccgaggcctgcgagtttgaatgcgtttgacatcatatcgttttctcagggctttgatctatcagggttgtttgaggaaaagggtgatgaggcgaggtttgtgtcatctgctccggtgtcgaagattatatcaaaattggaggaggttgctcagttggttagtttcagtgtgaggaagaaagattgcagggtgagcttggaggggtgtagagaaggtgtgaaggggcctttgactattgctgctgaggtttttgagttgacaccttccttggtggtggtggaggtcaagaaaaagggaggggataaggccgagtatgagaagttttgtaactctgagttgagacccgcgttggagaatttagggatggaggaatctgcttcttcttcttcttcttgtcatcaatctacacacactcaatctgaattccaacaacatcgaacactttctgactctgcccttaacagacattcagataatgaatgtttgttcgaacgagagttaggtctagcagatgagactagtatctcacaacatggtgaatcaaagttcgaatgtcaacaggaaaatatggccatgtttactatctgaccatgtcttgagcactatgattgtttccaaagaatgaaaacaaaaaagataatgaatgcttgcattaattaaggtagcaggagaatgacagaagatgatagcatactatttctctcttgttgttttaggctgtgtgtaagttaaattttactttctttttccctcgagaattttccggcatttttaggtttgctccttgactggagcattagattctactgtatttgtatgtccaaatgttgtgtttctgtaaggctaatttaatttaaatatagtgaatgaagtgtacatgtcaacagttcacatgtcttggtaaattgctctgtaactgtatttatttccattctttattgcaagtaatgagaaaataataatgcaactttcttgtgattc

SEQ ID NO: 6307 - DNA, 979 bp, Glycine max
  Clone ID: 700560421_FLI
caacaaatgaatattctcggacaatcattcaacgaatcaaacaacggaagctactcttgttcgtcgccggagactggtagctcctctaacattccaaacacttttcactccgacgaggaagtgcacacactagcttcggcgcgtcctaagaaacgtgcggggcgtcgaatttttaaggagacaagacacccggtgtaccgaggagtacgaaggaggaacaacaacaagtgggtctgcgaggttcgtgttcccaacgacaagtccaccaggatttggcttggaacgtatccagtgcctgagatggccgcacgtgcgcacgacgtcgccgcgctcgcgcttcggggcaagtcggcttgcctcaacttcgccgactcggcgtggcggctgcccttgccggcgtcgacaaatgcgaaggagatacggcgagtggcggcggcggctgctgtagcgattgcggcggaagacagctgcggcgagcagttacagaatagtattgtgaatgatgccgttgctgatgattgtgaagttagcagaagtgacgtcagctttgatgaagattccaatagcaacaaaggtttgagagttttttgtgatttggatgaaattacaatggcagatgcaccggtttttgaggacatgcgtgagtggcttcagagtatggcggatgagcctttaagatcgcctacttttgtaacatatgttaatgttagggatgtctggaactttgtggaggatgatgctgaggtatccttgtggagcttcacaatttagtgcgtttagtttgttctttgtcttctttcgtttttggtttttgtacataattaggaacggaggagtacgaaaatgtaccaagaccgagacgatataaggagctagctatatagggaggatcataaaactgtaagacattgcaaattttctcattcagttgtttttgtaattctcataatcatatagataaaggaaaggtttgtaaaat

SEQ ID NO: 6308 - DNA, 265 bp, Glycine max
  Clone ID: 700560462_FLI
gaacattgatatcatgcctcgttcatggaatgcaaatttgcacgcaagcaatattatgatggctgcagttgactatcgtgtattttaatggaaaaatagtcgaatgtagtgtcaagagctccttgtgttagtttggatttaactctacccctacgttcgtcctgaaaattatcattattctgcgtgttattagttgtttgtattcacggataaagttggaataccagatgagttataccagtggtgccccctcccccttttttcc

SEQ ID NO: 6309 - DNA, 1219 bp, Glycine max
  Clone ID: 700560508_FLI
ctgaaatgaataggattcacagcagatatagcaaagctcacactaacatcaatttatgataacaacctcaaaatcaagttatcagtgtgtcaccctgacttttcaaaaacaattatttgttgcttcatatttcactgtgatttcataatagattttcactcatcttacttgactccaagcattctatatatctagtgcctccacgcatctctaccctcaaatcttcaccacacaacactacctcaattactcaactaaagcttcattcattcatcgtgtcgtgttgtgttctttgcaaccatgcttcttagaacagcgtcctctttctctctcttcaacgccaacggcgaccatatactactcccttcctctgttcgctactctcagggcaaacacttggttccatgcgctaccaagaactccaataaccggcccttaaccggcgtcgtatttgaaccctttgaagaggtcaagaaggagctcgaccttgttcccactgtcccacaagcttcccttgctcgccagaagtacaccgatgagtctgaggctactatcaacgaacagatcaatgtggagtacaatgtttcgtacgtttatcatgcgatgtttgcctacttcgatagggacaatgttgcgctcaagggtcttgccaagtttttcaaggagtcaagcgaggaggaaagggagcatgctgagaaattgatggaatatcagaacaagcgaggtggaaaggtgaagttacaatctatagtgatgcctcttactgagtttgaccatgaggaaaagggagatgcgctatatgcaatggaacttgccctgtcgttggagaagctgacaaatgaaaagctgcttaacttgcacagtgttgcctcaaagaacaatgatgtgcaattggcagattttattgaaagcgagtttttgggtgaacaggtggaagccataaaaaaaatctctgaatacgttgctcaactcagaagagttggcaaaggacatggtgtgtggcactttgatcagatgctactccatgaggaaggagttgctgcttgattaacattttttttctacctctcgttcgtgcatctagttagttattcggattagtattttcaggtcttttaatgctagagatgaacaaagtggatatggagtaatattggtcatttgtatgtcgtgttttttttagtaatattggagtaatatggaatttgcgtattggact

SEQ ID NO: 6310 - DNA, 733 bp, Glycine max
  Clone ID: 700560513_FLI
aaacaagtagttgagaactaagaagaaggaaatggcttcctcaatgatctcctccccagctgttaccaccgtcaaccgtgccggtgccggcatggttgctccattcaccggcctcaaatccatggctggcttccccacgaggaagaccaacaatgacattacctccattgctagcaacggtggaagagtacaatgcatgcaggtgtggccaccaattggcaagaagaagttcgagactctttcctacttgccagacctcgatgatgcccaattggcaaaggaagtcgaataccttctaaggaaaggatggattccttgcttggaattcgagttggagcacggtttcgtgtaccgtgagcacaacaggtcacctggatactatgatggacgctactggaccatgtggaagctgcctatgtttggctgcactgatgcttctcaggtgttgaaggagcttcaagaggctaagactgcataccccaatggcttcatccgtatcattggatttgacaacgttcgccaagtgcagtgcatcagcttcatcgcctacaagcccccaggcttctaagtcattgaaaaatttgcaaagcatctgtagccaccccactttgtttgttgtacttaaactacattcccatttgtttttgctttatgagatttcatcatcctgtatttttggtttctgttttcggacttcaatggaaattaatggatgagaactaatgaataagct

SEQ ID NO: 6311 - DNA, 1060 bp, Glycine max
  Clone ID: 700560522_FLI
ttggacatggctttcacacagcttatcccttcaccttcttcttcctccttaaaccctatcacactctccctaaaccctaaatccccaacctctccgccgcagcagcatttcaatctcgatattctccggcaccggcgccggaggcctaattccactcttcggtgctccgcctcctcgttctcggagaagcaccacacgaactcctcgaactccgacgacgtggtggagctccccctgttccctctccctctggtcctcttccctggcgccatcctccccttgcagatcttcgagttccgctaccgcatcatgatgcacacgctcctccacaccgacctacgcttcggcatcatctacaccgacgccgtctctggaaccgccgaggtcggctgcgtcggcgaagtcatcaagcacgagcgcctcgtcgacgaccggttcttcctcatctgcaaggggcaagagcggttccgcgtgaatggtgttgtccgcaccaaaccctacctcgtcgcgcaggtgacgtggctcgaggaccgcccttctccctccaccgacctcgatctcgacggtctcgccaccgaagtggagacctatatgaaagacgttatccggttatcgaaccggttgggagggaaaccggagaaggaggttggggatttgagacgaaacctctttcccacgccgttttcgtttttcgttgggagcacctttgagggcgcgcctagggagcaacaagcgctgcttgaattggaggacactgcggccagattgaagagggagaaggaaacgttgaagaacacgcttaattacctcactgctgcttctgctgttaaagacgtttttccctcttcttccaattcttcttgattggggcttatactttacctaaggtattgttgcttttaagtgtaacctcgtctcaatatattcagaaaatagatgtaaattatttttgtgcctaaacgctagttgttgtttttttttttcatttgtgatacattttatatactgtgctacttgataaataaaaaatccgacacatacaattttgcggatataatgc

SEQ ID NO: 6312 - DNA, 382 bp, Glycine max
  Clone ID: 700560587_FLI
gtaggtcctgtgctatcactcacttgccctcatgataaccaagtcatctcttccattaaatttgctagctatggaacaccccttggaacctgtggtaacttctaccacggacgctgcagcagcaacaaggctctttctattgtgcagaaggcctgcattggatcaagcagttgtagtgttggagtatcaagtgagacattcggaaacccttgtagaggagtggcaaaaagtttagcagttgaagctacttgtgcgtagacagacatgtttcttcaataacacttcccaattttctgaagatgattccttctaataagcaaaagtagatttgtaattttaggaacatccaagaaaatatagtcaactaaaacagtttagtctc

SEQ ID NO: 6313 - DNA, 496 bp, Glycine max
  Clone ID: 700560620_FLI
tgcatctacaagttgtgcagatagtccagctatatcttgtgtgcaactagaagttgaagatcagcctaagtcacctggaatcaacatgaattctgagccatctgtagttgctgttcctgatcttgatgcatcaaaagaacaaccagtgggaaaagcccctgtgactactggtgttaatgacatattctgggaacgattcttgacagagaatcctggttcatctgaaatgcaggaagcacagtctgaaagaaaggattctgatggcagaagtaatgccaaattttggtggaacattaggaatgtaaataaccctccagaacagatggggcattcttagtcaagcacagcaaacttagttgcaattgattattacttttagcttgtgatactcctcacttttcatgtaataaatgtaggtatgcatggttttggctctgctatatatacatataccatatttttggttaaatgattgcctcctctatagaatttagtc

SEQ ID NO: 6314 - DNA, 1438 bp, Glycine max
  Clone ID: 700560625_FLI
gttgaatcatgcgcaccaagttaactccaaagggcttgttggagttggtaaacgaattgtacatgtagaatcattgctgcaattagaagccgcggatgttcgtattattggaatctggggcataggtggtattggtaagacaaccattgcacaagaagtttataataaactctgttttgaatatgaaggttgctgttttttggctaacataagggaagagtcaggaagacatggaataatctcattaaagaaaaatcttttttcaacattattaggagaggaatatttgaaaattgacacacctaatggattgcctcaatatgttgagagaaggcttcatcgtatgaaggttcttatcattcttgatgatgtcaatgactcagagcaactagaaactttagctagaacagattggtttggaccgggtagtagaataatcgtgacaactagagatagacaggtgcttgctaatgagtttgctaatatatacgaggttgagccattaaactttgatgaatctttatggcttttcaatttgaacgtctttaagcaaaaacatcctgaaatagagtactatgagctatcaaagaaagttgtcgattatgccaaaggcattccgtttgttcttaaacttttgggtcaccgtcttcatggaaaagagaaagagatatgggaaagccaattagaaggacaaaatgtgcaaaccaaaaaggttcatgatattattaaattgagttataatgatcttgatcaggatgaaaagaagatacttatggatattgcatgttttttctatgggctgcgtctagaagttaagaggataaaacttttattgaaagatcatgattattcagtggcttcgggattagaaagattgaaggataaagctcttatcagtatttctaaagaaaatatggtatcaatgcatgacattataaaagaaactgcttggcagattgctccccaggaatctattgaagaccctagaagccaaattcgactatttgatcctgatgatgtctatcaagtactaaaatacaacaagggtaacgaggctatcagaagcatagtcgtcaacttgttgagaatgaagcaattgcgattaaaccctcaagtatttactaagatgaacaagctccattttctaaatttttatagtgtatggtccagcagtactttcctccaggatccatggggcttgtatctttctcaagggcttgaatctttgccaaatgaactaagatatcttaggtggacgcattaccccttggaatctttgccttcaaagttttctgcagaaaatcttgttgagttgcacttgccatatagccgtgtgaaaaaactttggctaaaagtaccggtaaatattatatctcttatataggatctttttaatctctataatttgaaaaaaataaaaataaaacctattttagtc

SEQ ID NO: 6315 - DNA, 895 bp, Glycine max
  Clone ID: 700560672_FLI
tgaaaattgctgtggagactgcaagtgcattgaattttcttcatcacaaagacgtcatccaccgagatgtgaaaaccaacaatattcttcttgacagtgacttttgtgtcaaagtggcagattttggactctcgcgtcttttcccagaccatgtcacccatgtttcaacagctccacaagggactccaggttatgtggatcccgagtaccaccagtgctaccagcttactaaacaaagcgacgtatatagctttggagtggttctggttgagctgatatcatccttgcctgctgtagatatcacaaggcatagacatgaaatcaatttgtccaacatggccatcaacaagattcataatcaggcactgcatgagcttgtcgaccctaccctcgggtttgaatccgatttcaaagtcaggaaaatgataaatgctgtggctgagttagcatttcagtgcttgcagagttctaaagagatgagaccttctatggaagaagtggtggagactctcaaggatatacagagtgatggcaaacataaaagccagcctgaggtaatggacatcacaagcacagctgatgatgttgtgttgctcaaggatgaccctcctccaccatcacctgattctaatgcggtgagcaagtcgacaacgccaaatgctagcggataagtggaccttctttctcacttccatcaaggcatcaagttaaccttatccaaatttatgtaaaagcagagttagcatcacacttgtagcagcatccacccagttacagcatgcattttgtcatcttatgatgaggataacttttatgattgagatgtatatatagatggtaaagctgctttggttatgaaatttcatcttttcaataattatagttacatattatt

SEQ ID NO: 6316 - DNA, 1732 bp, Glycine max
  Clone ID: 700560684_FLI
ctttctctctcccttagtcaaagggactcgttgttcttctcccaggttatttagaaaagcaaaatggtgaagatttgctgcattggtgctggatatgtggggggtcctactatggcagtcattgcacttaagtgcccatccattgaagttgctgttgttgatatctctaaatcccgcattgcagcctggaacagtgaccagcttcctatctatgaacctggccttgatggtgttgtgaagcaatgccgtggcaagaacctcttcttcagcactgatgttgaaaagcatgtctttgaggctgacatagtgtttgtctctgtcaacaccccaaccaaaactcagggtcttggagctggtaaagcagcagatttgacatattgggagagcgcagctcgcatgattgctgatgtttcgaagtctgacaagatcgttgtagagaaatccacagtcccggttaaaacagctgaggcaatagagaagattctgacccacaatagcaagggaatcagattccagattttatcaaaccctgaattccttgctgagggaactgcaatcaaagatctctttaacccagaccgtgttcttattggaggcagggaaaccccagagggccaaaaagctattcaagcattgaaggatgtttatgctcaatgggtccccgaagaaagaatactaaccacaaatctctggtcggcagaactatctaagcttgcagctaatgccttcttggcccaaaggatttcatctgtcaatgccatgtcagcactttgtgaggctaccggggcaaatgttcaacaggtgtcctattctgttggaacagactcaaggattggacccaagttcctcaacgccagtgttggttttggtggatcctgcttccagaaggatatcttgaaccttgtttacatctgcgagtgcaatggccttccagaggtggctgagtactggaaacaagttatcaagatcaatgattatcagaagagccgttttgtgaaccgtgtagttgcatcaatgttcaacacagtctcaaacaaaaagattgctattctgggatttgccttcaagaaagacactggtgacactagggagacccctgccattgatgtatgccaggggctacttggtgataaggccaacctgagcatatacgatccacaagtaactgaggaccaaattcagagggatctatcaatgaacaagtttgattgggatcatcctatccacttgcagcccacaagtcctactactgtgaagaaggtcagtgttgtttgggatgcctatgaagcaacaaaggatgcacatggcctttgcattctaaccgagtgggatgagttcaagactctcgactaccagaggatatttgacaacatgcaaaaaccagcatttgtttttgatggcagaaacattgtggatgctgataagttgcgtgagattggcttcatagtttactcaattggtaagccactggatccatggctcaaagacatgcctgctttggcgtaaaatagatcattgatcaagtacactgcaataccagtcaaatgttgaggcagtcagtttaattctttattattttttgtaagagtttttcttttcctgcttaactttctcataatagttggtgacataaatggggtataaattgtgggaaatgggagggtttatgttctatgttactttgtactccaatcttttatgaatgtactagggaaacttgttttgtttgatt

SEQ ID NO: 6317 - DNA, 1310 bp, Glycine max
  Clone ID: 700560716_FLI
ctttttttttcttctccttatttcaaacatggagtggcatagaggccacaccataggccaaggctcatcagccaccgtctccaccgccacgtgctgcggtggtgtcttggctgtcaagtcatcggagctgccacaatcagagcctctgaaaaaggagcagaaaattttgtcctctctaagtagtccttatgtggttgcatacaaagggtgtgacattaccatggagaacaacaagctcttgttcaacctcttcatggagtacatgcccttcggcacgcttgctcaggcgactcgccggtgcgatggtcggctccaggagccggccattgcatgctacacaaggcaaatcgtgcaggggctggagtacctgcattcaaaagggttggtgcattgtgacatcaagggtgccaacatcttaattggtgaaaatggggccaaaattggtgacttggggtgtgccaagagtgcggcggattccacgggggcgatcggcggcacaccgatgttcatggcgccggaggtggcgcgtggggaggagcaagggtgtgctagtgacatttggtcacttgggtgtactgtgattgaaatggtaaccggtggtgcaccatggcctaatgtggaagaccctttttcagtgctttatcacattgcatattctagtgaagtgcccgagattccttgttttctatccaaagaagcaaaggatttcttggggaagtgcttgaggaggaatccacaagagaggtggaaggctagtgaactattgaagcatccatttattgagaaattgtgtttcaataaggaggttttggagtctaatacaagttccccaacaagtgttcttgagcaaggctattggagttgtgtggaagagtcagagagtttaggcgatttgattcacaaaacaagaaagtttgaaactttggctgccgggagggtcagaatgttggctctgtcttctggggtgccctattgggcaagacatgatgatgagaattggatcacagcaagagggaatggggttgaaggttttgccaattgtggggcagagacagcttcttctgccagtcatgggttgtctcactaggtgttggtgaaagcaatgtcactggtagaattttagtggacatgctttttagtatcacaaatgttgtagattgttagtgttgtagttagtgatctcattttttgacggaggcattgcttggatgctattctcttaacatagattctttatgattcaattattcaatatttcattctcctctgttctatcaatctatagattctttatgattcaattattcaat

SEQ ID NO: 6318 - DNA, 1431 bp, Glycine max
  Clone ID: 700560728_FLI
gaaggttattgcctcaagggtccccaacagcaaggtttccggtggaagcttcaagattgttgctgtagaagagaagaaagagattgaagagacccagcagaccgacaaggacagatggaagggtcttgcctatgatatctcagacgaccaacaagacatcacaagaggaaagggtttggttgactcccttttccaagctccacaggatgctggaactcactatgcagtcatgagctcctacgagtacctcagcactggacttcgccagtacttggacaacaaaatggatggattctacattgctccagcttttatggacaagcttgttgttcacatctccaagaacttcatgaccctgcccaacatcaaggttcctctcattcttggtatctggggaggcaagggacaaggaaaatctttccaatgtgagcttgtctttgccaagatgggaatcaaccccatcatgatgagtgctggagagttggaaagtggaaatgcaggagagccagcaaaactgatcaggcagagataccgtgaagctgcagacatgatcaagaagggaaagatgtgcgctctcttcatcaacgatcttgatgcaggagctggtcgtcttggtggaaccacacaatacactgtgaacaaccagatggtgaatgccactctcatgaacattgctgataaccccaccaatgtgcagcttccaggtatgtacaacaaggaagagaacccccgtgttcccatcattgtcaccggtaacgatttctcaacactctatgcacctctcatccgtgatgggcgtatggagaagttctactgggcaccaacaagggaagaccgcattggtgtttgcaccggaattttccgcactgatggtattcctgaacaggacattgtcaagcttgttgacaccttccctggccaatccattgatttctttggtgcactgagggccagagtatatgatgatgaagtgaggaagtggatttctggtgttggtgttgacagtgttgggaagaagcttgtgaactcaaaagatggacctccaacctttgagcagcccaagatgactctggagaagctcttgctgtatggtaacatgcttgtccaagaacaagagaatgtcaagagagtccaattggctgacaagtacttgaacgaggctgctcttggaaatgctaacgaggatgctattcagaggggaactttcttccagtcttgaattggaggcaaagcaaacttggcaagtaaatatttctgttcgtgaaggttgttgtactaatccaagtgctagaagttgtgatggaacttgcgtgtaacattcttagcattctcaatgtcttaggtgcaaagagaagatgctaagtttgagatgatcttactatatttttcatattggaccgtcttcctctataattttgagttacagtgtcc

SEQ ID NO: 6319 - DNA, 1234 bp, Glycine max
  Clone ID: 700560821_FLI
ctgaattgagttcactgtccacaagtttcgccccaacactcaactcggctcgtcgctattgttgttgttcttcttctccatatcaaacaaagtatagataaaatatcattgcagcttcattttcatcctccaattaattagcaatggggcacacatcccttttcactccctcttcctctcttaggttcaactctcttcttgtttcctccaccccctcttcttcttcacgctccaacagcgtttctttccccgccctctccaggaacataaggaaatcggtagaagatagaaagattaataaaaattctgctgtgaaagcagtgtatggtgatgaattttggacacctgcgaggagttcacctcaggatatttggtccataaggagtgatttgcaagtcccatcttccccttatttccctacctatgcacaaggacaagggccaccccccatggttgcggagcgtttccagagtgttataagtcagcttttccaatacaggataatccgttgtggtggagcagttgatgacgatatggcaaacatcatagttgctcagctcctgtacctcgacgctgttgatcctaacaaggatattgtcatgtatgtaaattctccaggagggtcggttacagctggaatggctatatttgatacaatgaggcatatccgacctgatgtgtctactgtttgtgttggattagcagctagtatgggagcttttctgctgagcgcagggacaaaaggaaagagatacagcttgccaaattcaaggataatgattcatcaaccgcttggtggtgctcaaggagggcaaactgacatagatattcaggctaatgaaatgctgcatcataaggcaaatctgaatggatatctcgcctatcacactggccaaagtttagacaagatcaaccaggatacagaccgtgactttttcatgagtgcaaaagaagccaaggaatatggactcatagatggtgtcattatgaatcctctcaaagctctccagccattagaggctgcagcagaaggtaaagaccgggctagtgtttgaacatgagaatgttgcactttaatttccaaggtataaaaaatcatagtgttagactgtaagatgtttttggttgctgagtccaacttaatttttttttacggatgttgatacctgtgcccatgtaccaaaaatgaggcgaaattgatactatttatttaatattcactgcttcagagttt

SEQ ID NO: 6320 - DNA, 1508 bp, Glycine max
  Clone ID: 700560825_FLI
cccattgtttctcttgctttcttcatacatggattgcctaggcctctgttcacacgtcctaatgaaggcattttaatttctcctggattatatctgcactaggtaatcacaacaactcaaagaaaagaaggctggccaattcaaaatcagtttaggtgtatcagatccaaagattggttgtcagatatctgaactccctaaaattccttgccaaagtaacgagtttgacagtgagcttcttcgtggtgtgcgcctccattttgatagtccagggatttggaaaaggcacaacttggtctggggcatagttacagcagagcaaaggtgaaattcaatgttaaccgtgccgataatatcgtcattcaagcaattttccttcttgatacacttgataaggatattaattcattctccatgagagtcaggtggtttgtgttggacagtgaattctctgataagtatataattttcatattctaaatagttttcttcctttaggagaattattaaacttgaagagttgaattctctgctgttcatcaattgtgtgccgagaatggtattcttggcattttccagaactgctgaagattataaatgataattatctgtatgccaaagttgcaaaatttattgaggataaatcaaagctgtctgaagacaagattgcagccgtaactgacatagttcgtgatgaagataaagcgaaggagattgtggaagctgccaaggcctccatgggacaatatttgtccccagtggacttgattaatgtccaacaatttgcacagagagtaatggacctatccaagtacaggcggaagttgtatgattacctggttgctaaaatgaatgacatcgcactaaatttggcctctttaattggtgaagttgttggtgcacgattaatttcccatgcagaaaggggtactactacgtttggggagaaactccgtgagcaagttgaggagcgacttgatttttatgacaagggagttgcccctcgtaagaacatagatgtcatgaagttggctattgaaagtgttgaaaacaaagatacagcgatggaaatagaagcaccagttgaagtttcaggcaagaaagccaagaagaagcatacagctgtcgttacagatgacatggctgtagataagcccacagagactacaaatggtgatgcattggaggatcataagtcagaaaagaagaagagaaagaaagaaaagaggaaattggacacggagaacgatcaagccatggatgatggtgctaatggggttgaaagcgaacaagatggagcagttaaaaagaagaaaaaaaaggataaaaagggtgataatggagaagtactagtggctgctattgagactaagaagaagaagaataaatcaaaaaatagagatacttaataaaactatggagtgcaattttaattggtaaaaacggatttgtcatgtaactatttttggataatgtcatgtttattttttctgctatgtacttctgtc

SEQ ID NO: 6321 - DNA, 1020 bp, Glycine max
  Clone ID: 700560831_FLI
ggggaggtccttcccgggatgtcacccgttttttctccttactattgttggtgtcccccaggggtttctacctgtccttccattgcagcggttacgcaattccccaactcatctattgaaacattgccttttccctcaggtgcctctttattacccaatcctctatcggctaacttgttagatccagtacatcctcttagtacttccatggactttcctccttttttccctgatccactggtgagaatgtccttgccatctcagcagattcccactttcacaccattaatgtgtgatccaattgttcatgtcccagtgattgacgtgtgctcttcaggtcagggctatcttgtgagtgctggccctgcaatgtcacctagcattccaccattgcatccaaaccttgtgaagccattgattcctgaatctgatgctgtggtgaagggtgcaagagagactctacgattgctacttagtggttcaagccagggtaaccaacagatgatgagggacactctgccagcaattttaactaatccagacgaaaagcaaaacaacatccttgtggctggcagtcgtggtctttacaccggaaccagagatattaatgctattgcaaacagcattgctgctatgggattagtatcactgtctggggtatccaaggtagaaagtggaggctattcggagctatgtgaaaactatgggaatttggaagcagtgaaaaattctaatgattcaggtggtgccattttggatgatgagggcgggtcttttgattctaagcagtagtgtagtgatgagtgcaattatgttttttttttttttttttgatgtagatctcttttgtccagcaaatgtagatatgtgctgtggcacttttgaatggtttttaagttaaaatttcaccattcaaagccttgatgattctttcttgattagatatttggaatgtggctgaatcagattttggctagctgtatatccgttttcagtgtatgtagtggtaaattggtatgg

SEQ ID NO: 6322 - DNA, 688 bp, Glycine max
  Clone ID: 700560840_FLI
attttggcacgcctcaagttgcttctgaggccactttgacaggaaaaaaacctcgcaaaaattgttcttggggtattatatggcaaaagaaaaataatgaagatacagacaatgatttctggctcagaaacatacttttgaaagggggttcaaacatgccacagttaaaacctgtttgtcacttgtgtcggaagccatatatgtctgatctgacgtatatttgctgtgagacatgccgaaattggtatcacgctgaagctgttgaacttgaagaatccaaaatttctagtgtgttgggcttcaaatgttgcaagtgtcgaaggataaaatcacctgtttgtccatactctgatttgaagcctaagagacaagagggcaagaagtcacgcacaaggactaaaaagaaagagcattctggagcagactccgattctggagcaatctattatgatatgagagattgtgaagttgctactcctgtctttcatgtagaggatgatcccagtcatgtctttcctgtagagggtgatcctactcacgtctttcctgtagagatgatcctcttcttttctctctttcgagtgttgagctgctaacagaacctaagatggaaggggatgttgagtggaacagtgtccctgggccagggcttcggaaattgccagtgagaaggaatgttagcattgag

SEQ ID NO: 6323 - DNA, 849 bp, Glycine max
  Clone ID: 700560894_FLI
gtaaccatggcatccaccactctatcccctacaaccccttctcagctatgctcaggaaagagtgggattttcagtccctcacaggcacttcttgtgaagccagtgaagaggcagatgatggggaagagcaagggaatgagaattgcatgccaagccaccagcattcctgctgatagagtccctgacatgggcaaaagacagctcatgaatctgcttcttcttggtgccatttcactcccctctgctggaatgcttattccctacacctacttttttgtccctccaggttcaggttcttcagctggtggtactgttgccaaggatgctgttggaaatgatgtaattgcagagaattggctcaaggcacatggacctggtgaccgaacccttgcacaaggattgaagggagatcctacctatcttgttgtggagaaagacagaacccttgcaacatatgcaattaatgccgtgtgcactcaccttggatgtgtcgtgccatggaatcaagcagagaacaagttcatctgcccttgccatggatctcagtacaatgaccaaggaagagttgtgagaggacctgctcccttgtctctggcattagcacattgtgatatagatgatgggaaggtggtgtttgttccttgggttgaaacagatttcagaacaggtgatgctccatggtgggcttagactccttaaagccgtccctctgttgtcatgtatatttaaacatgaaattcaaacattctgttttgtattaatgcataaatatattttgtaatcaaattgatattttgtgaactgaagctaagatggaaaggaacctgaacgggtcacttttttccgtgt

SEQ ID NO: 6324 - DNA, 1154 bp, Glycine max
  Clone ID: 700560950_FLI
atggattctacattgctccagcttttatggacaagcttgttgttcacatctccaagaacttcatgaccctgcccaacatcaaggttcctctcattcttggtatctggggaggcaagggacaaggaaaatctttccaatgtgagcttgtctttgccaagatgggaatcaaccccatcatgatgagtgctggagagttggaaagtggaaatgcaggagagccagcaaaactgatcaggcagagataccgtgaagctgcagacatgatcaagaagggaaagatgtgcgctctcttcatcaacgatcttgatgcaggagctggtcgtcttggtggaaccacacaatacactgtgaacaaccagatggtgaatgccactctcatgaacattgctgataaccccaccaatgtgcagcttccaggtatgtacaacaaggaagagaacccccgtgttcccatcattgtcaccggtaacgatttctcaacactctatgcacctctcatccgtgatgggcgtatggagaagttctactgggcaccaacaagggaagaccgcattggtgtttgcaccggaattttccgcactgatggtattcctgaacaggacattgtcaagcttgttgacaccttccctggccaatccattgatttctttggtgcactgagggccagagtatatgatgatgaagtgaggaagtggatttctggtgttggtgttgacagtgttgggaagaagcttgtgaactcaaaagatggacctccaacctttgagcagcccaagatgactctggagaagctcttgctgtatggtaacatgcttgtccaagaacaagagaatgtcaagagagtccaattggctgacaagtacttgaacgaggctgctcttggaaatgctaacgaggatgctattcagaggggaactttcttccagtcttgaattggaggcaaagcaaacttggcaagtaaatatttctgttcgtgaaggttgttgtactaatccaagtgctagaagttgtgatggaacttgcgtgtaacattcttagcattctcaatgtcttaggtgcaaagagaagatgctaagtttgagatgatcttactatatttttcatattggaccgtcttcctctataattttgagttacagtgtccacttaaattg

SEQ ID NO: 6325 - DNA, 2283 bp, Glycine max
  Clone ID: 700560961_FLI
tataatacattgattgcagggcttatgcgatgcagtaggattgaagattcaaggcaattgttttatgatatgcaggaaaaggattctatttcctggacagcgatgattgcaggatttactcagaatggtttggaccgagaagcaattgatttattcagagagatgagattagaaaatctagagatggatcagtacacatttggaagcgtgttaactgcttgtggtggtgttatggctttgcaagaaggcaagcaagttcatgcttatataattaggacagattatcaggataatatatttgttggtagcgctcttgttgacatgtattgtaagtgtaagagtataaaatcagcagaaacagtttttaggaagatgaattgcaagaatgttgtatcttggactgcgatgttagtgggttatggacagaatggttacagtgaagaagctgttaaaatcttttgtgatatgcaaaacaatgggattgagcctgatgatttcacccttgggagtgtaattagctcatgtgcaaaccttgcaagcctagaagagggggctcagtttcattgtagagctctggtttctggcttaatttcttttattactgtttccaatgctctagttacattatatggtaagtgtggaagcattgaagactcccataggctttttagtgaaatgagctacgtggatgaagtctcatggactgcacttgtttctggatatgcacagtttggtaaagccaatgaaacattaaggttgtttgaaagcatgttagctcatggtttcaaacccgacaaggttacttttatcggggttctttcagcttgcagtagagccggactagtacagaaaggaaatcagatatttgaatcaatgattaaggaacataggattataccaattgaagatcattacacatgcatgattgatctcttcagtcgagctgggaggttagaagaggcaaggaaatttataaataagatgcctttcagccctgatgcaattggttgggcatccttattaagttcatgtaggttccatcgaaacatggaaattggcaagtgggcagctgagtctcttttaaaattagaaccacataacactgctagttacatcttactttcgagcatctatgctgctaaaggaaaatgggaagaagttgccaatttaagaaaagggatgagagataagggcctgagaaaggaaccaggatgtagctggatcaaatataagaaccaagtgcacattttctctgctgatgatcagtcaaacccattttcagatcagatatattctgaacttgaaaaattgaactataaaatggtacaagagggatatgtgcctgacatgaattctgttttgcatgatgttgacgattcagagaaaataaagatgcttaatcaccatagtgaaaagcttgcaattgcttttgggttgatatttattcctcctggtttgcccatacgagtagttaaaaatttaagggtttgtggggattgccacaatgcaactaagtatatatctaagatcacccagagggagattcttgtaagagatgctgcccgattccatttgtttaaagatggaaggtgttcgtgtggagacttttggtgacaggtcgagtttgaatattctctgaagtcttatagaaaactaagccaaaagtgactactaaatagagggttcttcagtaagaagagacatacaagaatagatccctttcttcaaaaagtcagtttaattaccacatgtgcaatgcagttgtattggctatcctgtaattttatatggacttgaagtcttgaaccactcctcctgattaccattatctgtggtcttaatttgaggggggaaaagaatcataagcaccaatgaattttttaccatgtattgaagaattttgacataggctcatcttccatcacatctgttaaaaattttcactatcccctgtaaataatttctgttgtaggatttgtggaacaattttatcatttaaaacagctattcgttttcttttttcagtacaccggaggtaactttacttttttattttttttggatacaaatttggtgtgacaccatctaccctaatatgtatataaatgggaaaaacatatataaaatacagaatctaatgaaataaattttattcaataaaatcttaagtaaatctacgtaggtaaaatgttcacattcgcctcattggttcacattcgcctcattgttatcaaaaaaacttttcagaaacatttttgatttaaaacaaggtcgttcaagttt

SEQ ID NO: 6326 - DNA, 814 bp, Glycine max
  Clone ID: 700561131_FLI
gtgaagggcatgatatgattatcttggctggtgctgagtatgggagtggaagctctcgtgattgggctgcaaaggggccaatgctactgggcgtgaaagctgtcatagcaaaaagttttgaaaggattcaccgaagtaatttggtgggaatgggtatcattcctttgtgttttaagcccggggaggatgctgattctcttggattaactggtcaagaacgttacaccattgatctaccaagcaatgtgaatgaaatacgacccggtcaagatgtcacagtggtgacagacaccgggaaatcatttgtatctacattgagatttgatactgaggttgaactagcttacttcaaccatggaggtatcttacaatatgtcatcagaaacttgatcaatgctaaacattgaatcagatataaaccaagtttgtaggttgaattgatagcacccactggcgctgattcttaactttggtcttaataatctagtatggctgctacaaagaaatccatgctattcagcaattgtattaataaaccaaggaactagatggctgctacgaggaagagttatgactggcgtttgttgaagaaatgtgattttctttttcaaaaattctattggtcattgaggatgaaaagtccttattacttcttttttactggttttgcagttgagtttttaggaaacatttaccttctatttctacctcccgattcttgagaattaagagaatcaggaacatctattgaaattatgagcaatgtgccgtaaatttcttaaggtataaagaaatgaacgaaggttggacattt

SEQ ID NO: 6327 - DNA, 1034 bp, Glycine max
  Clone ID: 700561141_FLI
caagatctctctgatttggatcctccgaatctcccctcttttcattttcacattcttcttattatttattcacccttttccccttccttcaccattcattttcttttataataccattcttttttctctttatctctttcatcaatacttcatcgttttcgttaagggatggcttctgccggcgatgttttcaggcagggtttgccggaagtttgtgctgccgggaagttacacgtgcttgctgttgatgacagccacgtggaccgcaaggtcattgaacggttgctcaaaatctcgtcttgcaaagtgacggtggtggagagtggaagcagggctctgcagtatctggggttggatggagaaaaaagttccattggtcttgatagtgtgaaggttaatttgataatgacggattattccatgcccgggatgacaggatatgaattgctcaagaagataaaggagtcatctgtttttagagaggttccagtggtggttatgtcgtctgagaatatcttgaccagaattgatagttgcttggaggaaggagcagaggagtttctgttgaaacctgtcaagttgtcagatgtaaaacgcgtaacagatttcataatgagaggtgaagggatgaaaggagtaaaaatatctaaaaaaagaagccgatcagatgattgcattccatctctatcaactgcattctcatcagtttctcatccctgtgatatatcatcacctccatcgccatgtgtattgcaaccgaagaaatctagattgagcatatagattgagcagtgatgtatgtctcctccatttttgccaaaccattgttcatattcaaaagcctcagatgtaatttgcgtttttacactaaacattgctgacaacgagtactaggattaggaatgaggaagaggatgacagaatcattttgttctttagttcggtggcttacatattttttttgttcattctgatgctgtacagagaaagttcattaaattaatgaaaccctctattttgaggggtcttacctc

SEQ ID NO: 6328 - DNA, 1888 bp, Glycine max
  Clone ID: 700561155_FLI
cttcatctttcttcttctcgtttttactttgacggtttctagagagagaaagtttgttatagagagagaaagcgcgctgctgcttcttctgctgctgcttcgacagtgagaagagagagagaagcgctcttctccgtaccgtttctagagagagaaactgatggccggagttaatccgaacggcgtcgccgattttccggcgactccaacgcacggcggacagttcattcagtacaacatattcggaaacctcttcgaggttacggcgaagtaccgtcctccgatcatgcctgtcggacgcggcgcgtatggaatcgtttggtactgctcgttcgttttcttcgatttattttgttttttgaaaacgcggtttatttattttattgagaaatgttagttgttagttagttgtccacaatctcacggagctgggagctgtatgcttagcgtccatgtgattttcgaagacgtgattgatataattaagaaattgtgcgtttctctgattctcgattttcgttctcgatgaatcggatttgattttgagtgaactgttaatctgttagctagtgctgagtgtttattgtttagcgttgacttttttttttatttgtaaaattgagaaatctgaatatgttgatgtaatttttgaagctcgctgttgaataccgagacgaatgagctggtggcggttaagaagatagcgaacgctttcgacaatcacatggacgctaagcgtacgcttcgtgagattaagcttcttaggcatttggatcatgaaaatgtaattggtttgagagatgtaattcctccacccttgcgtagagagtttaatgatgtctacatagccactgaactcatggatactgatcttcaccatatcattcgctccaatcaaaatctgtcagaggagcactctcaatacttcttgtaccagattcttcgtgggcttaagtatatacattctgcaaacgtaatccatagagatttaaaaccaagcaacctgctgctaaactcaaattgtgacttgaagattattgattttggtcttgcgagaccaactttggaaagtgacttcatgacagaatatgtagtcacaagatggtacagagctcccgaattgttgttgaattcctctgattacacctctgctatagatgtgtggtctgttggttgcatctttatggagcttatgaataaaaagcctctgtttccgggcaaagaccatgtgcatcagatgcgcttattgacagagcttcttggcaccccaactgaggctgaccttgggttagtgaaaaatgaagatgcaagaagatatatcagacaacttcctcaatatcctcgccaacctttagctcaagtcttcccccatgttcatccggcagccattgatcttgttgataaaatgttgacagttgatcccaccaaaagaattacagttgaagaagcactagcccatccataccttgaaaaactgcatgatgtagctgatgaaccaatctgcatggagccattttcatttgattttgagcaacaacaattggatgaagagcaaataaaagagatgatctacagggaagcattagcactcaatcctgagtatgcttaaagcagaaaaactcaaggacttgaagcaggcttagaaggaaaaataataattcgttttcaatttttttaatcactttaagttcagttcttacaatcacgaaaggatcaagttgaatgaaaattcaaccttgttgccgatcaaactccctaggtaatttattcaatctgtgtgactaggtaggtgcaattacggcttgatgagtgtccttctgctgtaaagtgccaagtaacgatattaatctccaattttttttaaccctgacgggttattattattttt

SEQ ID NO: 6329 - DNA, 1359 bp, Glycine max
  Clone ID: 700561167_FLI
ttctcattcttaaaaaaaaccctcattattccatcaaaactagctacaacaacatgtcgaacgtgttagcaggagaagaaagcgaaaaagttgttacctatgggtgggcagctagagacacctcgggaattctctccccattccactttatcagaagggcaaatggtgataatgatatcacactcgacgtactctattctgggatttgccacaccgatctccacatggtgaagaacgactttagaatatccatctatccaatggttcctgggcatgagattgtgggtaaggtgacaaaggttggtagaagagtcacaaaattcagtgttggtgacattgctggtgtgggtggctctgtgggttcgtgtggctcatgttcggactgcagcaacggcttctatgtatattgtccaaaaatgattttaacctacagtgcacactattatgatggaacaataacccaaggtggatactcaaataacatagtggttgatcagaactttgtcgtgctaatcccaaaatctcttccattagatggtgcagccccgttgctatgtgctggaatcacagtatacagcccaatgaaatattatgggcttgctcagcctgggttgcacttgggtgtggtgggcctgggaggcctaggtcatgtggctgtcaagtttgctaaggcttttggtatgcatgtcactgtgataagtacatctcccagcaagaaagaggaagcattggaaaagcttggtgctgatgaattcttggttagtctggaccagcaacaattgcaggatgccaggggcacaatggatgccattattgacacagtttcagctaatcactctatccaaccactaattgctttattgaaaacaagtggaaagttgattttggtaggtggaccaccctcgcctcttgaggtattagctatgcctttgcttttggggagaaagatgattgctggtagtgcaggaggtgggagagaagagattcaagagatgatggattttgcagcaaagcacaatatcacagcagatgtggaagtcattccaatggattacgtgaacactgcctttgagagactggaaaaaaatgatgttaaatatcgctttgtcattgatgtggcaaatacaataagctgcatgtccaattagagaaccacagatatgaaagtggtagccgaatattaattgaaggttgtggtaacttcaattctagttgtatcacctgatcactcgattcttctttttcacattccacatattccatattggctatccgacttgttttactggctatccgacttgttttacggtatttcaataaagtatgaataaattttgtgaatgtcatgttgaatctttc

SEQ ID NO: 6330 - DNA, 1743 bp, Glycine max
  Clone ID: 700561223_FLI
attgaaggtaccctctttttgttgcttgaccctcaatcaaagacccatcttttccgtttggcgtagggaacttcaccactgaagccctaatccaccgtatccatccaccgcagcacacactccttttgctgcttcttctccaacatgggtcgcgaaactatgtgcctttcaaccccaccaccaaccactgccaccaccacagtgaacccagtgccgccaccgccaccagcaccacctacctctcttgctccaggcttcaggttccacccaactgatgaggagcttgttatttattacctcaagcgcaaggtttctggcaaaagcttccgatttgatgccatatctgaggttgacatatacaggagcgaaccctgggacctagcagacaagtcaaggttgaagactagggaccaggagtggtattttttcagtgcattggacaagaaatatgggaatggtgggaggatgaacagggctaccagcaaagggtactggaaagccactgggaatgatcgaccggtgaggcatgaccaaaggaccgtggggctgaagaaaacgttggtgtttcatagtggcagagctcctgatgggaagaggactaactgggtcatgcatgagtacaggcttgttgaagaggagcttgagagggctgggactggatcctctcagcctcaggatgcgtatgttttgtgtagagtgtttcacaaaaataacataggacctccaaatgggcaacggtatgcgcccttcattgaagaagagtgggatgacgcatcaggaatggttccaggggcagaccatgtggataaccgctcttttgcccaccaaccacgtgttgaaggcaatggtggtgttttatgcgctgaagggagaaatggtgttgtacaggacactcaatctttcaacaaagctccatttgatgtgaacaagcttcctatagaaactcaaaatcttctagctgtgtgcaagagggaaagcatggctgagtatccatcacctgaaaaggatgataataattgtaagcacatggatgactacccttcacctcaaacagataatccaaagcctttctctcaaatatacaaacgaaggcgtcataacttgaactccaacaactctaatgtttctggagattcagtccgaaccagccaggatccgtgctcctctacaataactaccgctgcaactgcactcccaaccgcaactgttgctggcacggccaccaacactgcaccgaaaaaacattttctgtctgcactggtggagttttccctgctagaatcccttgaatcaaaggacaaccttgcttcaattaaggcaccggattttgacactgaaaatctcgagtcatccatgcctccaagttgcgcaaagttcatcaagcaaatgcagagtgagatgcagaagctttcagttgaaaaggagacgataaggtttgagatgatgagtgcacaagcgatgattaacattctccagtctcgcatcgacgttctcagcaaagaaaatgaggatttgaagaggatggtggcccaaaatccataggaattggcaatgccatgcccttgtatcagtgtaagttagttacaactgagtaatgaagctcggtcttccggatattttcttatttttctgagtaagaattgtagttcgtttctttggctaaacttattttaaacttgtcatcgtgtatcatatgactttcagtttcccattgttgtgaaaatatggccatgttagcatctc

SEQ ID NO: 6331 - DNA, 1775 bp, Glycine max
  Clone ID: 700561286_FLI
tgtgtttgctgggaggttttctagcagattccttccttggcagatacaagacaattggaatctttgcttcaatacaaacactgggtactgctacattagcaatctcaacaaaattgccagggctacgtccaccaccttgccatgctaacagtgacagctgcaaacaagccaacggattccaaatgggaatcttgtacttgtcactgtaccttattgcactaggaactggtggcctcaagtccagtgtttcaggatttggttctgaccaattcgatgagaaagatgagaaggagaaatcgcaaatggcctattttttcaacaggtttttcttcttcatcagttttggaactctggcagctgtcacagtacttgtctatctgcaagatgaagtgagtcgcagcttggcgtatggaatatgttctgtctctatgatcatagccattatcgtgttcttatcaggaactaaaagatacagatacaagaggagtttggggagccccattgtccacattttccaagttattgctgcatcaataaagaaaagaaagatgcaactcccatacaatgttggttctttgtatgaggacactcccgaggcttcaagaatagagcacaccgaacagttccgtttcttggagaaagcagccattgtggcagaagatgattttgagacaaatttatgtggttctggaccaaacccatggaaattatgctcactaacaagggtagaggaggtgaaaatgatggtgagacttctgccagtgtgggccacaaccatcatattttggaccatttacgcacagttgatcaccttttcagttgagcaagcctccaccatggaaaggaatattgggagtttccaaatccctgcaggctctgtcacagtctttttttgtggctgcaatactaatcactctggctgtctatgaccgactcatcatgcccctttggaaaaagtggaacggcaaaccaggtttcactgacctacaaaggatagcaattgggcttgtattttccatttttggaatggcggctgcttctgtatgcgagaggaaacggttatccgttgcaaaaagtgttagtggcggcaaccaagcaacaacaacacttcctataagcgttttccttctgatcccacagttcttcttggtgggttctggtgaagcattcatatacacaggccaacttgatttcttcataacacggtcaccaaaaggaatgaaaaccatgagcactggtctctttctcacaactttgtctctcggtttcttcttcagcagtttccttgtctcggttgttaagaaagttactgggacaagagatgggcaagggtggctagcagacagcataaacaagggcaggctcgatttgttctatgcactgcttaccatacttagtttcgttaactttgcagcatttgcggtatgtgcagtttggttcaaacctaagaaacctaaacaaccagctgctatgcaaatggggccagttaatgggtccacagcagaggaaaagtgctgaaggctgaatagtttttaggatttggggattatatatatagtctttatacccattattaatgctatcatatggttttgctgctttgtagataggctgttatgtgtatgtatccgaagaatggattgattttgtgtttctcttcctgatattatagaataatgtttgggttggcatctttgtacgcataattaagcgtgtaacatagtttctggtctgttacacttttctcaatcatcaggctttctttttaatttgtt

SEQ ID NO: 6332 - DNA, 1203 bp, Glycine max
  Clone ID: 700561334_FLI
cgtcatcctcggaagaacggtagaagtgaaaaaagcaattcccaggagtgaacaacatcaacaccaaaacccattacagagtagagggggtggttattattataataataataataataataatgatgataataataataatagtaatgactattgcagtgaccacaacgttaggactaaaaagatatttgtagggggtttacctggtatatccgaggaggagtttaagaactactttgagaggttcggtcggataaccgatgtcgtggtgatgcaggacagtgtaactcaccggccaagggggtttgggttcatcactttcgagtccgaggaatcggttcaaaacgttatggtgaagagttttcatgacttgaacggtagacaggtggaggtgaagagggctgttcccaaagaggggaaccatggctatgatgggtttagtaaattaagaaataagagtgaaagaggagttcctaagagttttcctccttttagtcatagggatatgctcccgctcccaggtttcacacctttgccgtggtatagtggtgatggagtatatgcatatgggtctaatgcgtatggttgctggtaccctgtgggtggttatggggggaatggatacgcagttccttctgatgctcctagtaacctctggtatgggccaatgatgactggtcctcaggcatgtcaggtgccttacgctagtgctgttccaaatgttgtgtatgtggggggtaggattggaatagtaggtagtggtgctggatcttgggggtacactggcattatgggatctgcaacaaattttaaatttgatcaagcttttaatgccaatgaatttgttcctggcaatgtgacatcacctcatggtgtaaagcaggatgttattgactcttcaagtttgaaaggaagcaatggtggaatttctagttgacagactaaaagggtccttcaaccttaattcatgtaggtaaatacttactgactgcttcagggttgtgaaaggttggcatattctttcgcaagatgttgtaagggctagtcactcttcttttttgttttaatttgtgaagatacttttttatgtgtcacaaacatgtagtttagcaactcgtcatgtttagttatggatatttattagtgtagaggtttcatgcatctgtaaaataatttcatgcaaatccttctctattgttcttt

SEQ ID NO: 6333 - DNA, 283 bp, Glycine max
  Clone ID: 700561374_FLI
ctgagattgcacacatgtacaagaccgacagggccaagtatgaggctacagcccgcagctggacccagaagtatgccatgggatgaccgtattgagtttttagctgttcaatgaagctgcaaaatcataatttatgtaaaagaacaaaagatattttgaacggaatttgaatgctttcttttattattagtgaaactccacaatggtaagaagagacccggttgccaatttgtgaatattttctttgctatggaagaatgtaatgttatgcaaacttttctgc

SEQ ID NO: 6334 - DNA, 2215 bp, Glycine max
  Clone ID: 700561392_FLI
gtcatcaacctcctcctcttcccactctctctctctttcttcccccctcttttttttattcttcttttttcccttgcaaatattttataaaattgatatgtgttgaaggcatatttgcttaagagctgaaccacatcatcgtcttgaacgtttgaatctatggaacagcttgtcaacttcatcatccggccaccaagagctgaatatgaccccaaaagtgatttattggatcaggagttcatgctgaaaggaaaatggtatcaacggaaggatgtagagataaaaaacagtcggggtgatgttcttcaatgcagccattacttgcctatagtcagccctgaaggaaagcctctgccgtgtgtaatatattgtcatggaaatagcggatgtagggctgatgctagtgaagctgctataattttacttccctcaaacattacagtttttactctggatttttctggctctggaatttctggaggggagcatgtcactctaggctggaatgaaaaggatgatctgaaggctgtcgtcaactatttgcgggatgatggaaatgtctctttaattggcttgtggggtcgctcaatgggagctgtaaccagccttatgtatggagctgaggatccttcaattgcagggatggttttagacagtcccttttctgatttggttgatttgatgatggaacttgtagatacatataaagttcgtctgccaaagtttactgtgaagtttgcaatccagtacatgcgaagagcgatccaaaagaaggcaaaatttgacataacggacctcaatacaattaaggtggcaaaatcttgttttgttccagctctactaggccatgccattgatgatgattttatacagccccatcactctgatcgaatatttgaggcttacatgggagacaaaaacataattaaatttgacggagatcacaattctcctcgtcctcagttttactttgattccataaacatcttttttcacaatgttttgcaacctccggaagatgaggttggggaatcattttttgaccccatgaatgattactttggtaaggatgtttggagatctgtgcacgaattaggctacagcaatgaatcatcatctaaaaacaaagatgcagaaccatcaacaagcagcacgataaatgccattgagcaggtccgttcaagacgaccaatgagtaggatggaggttccatctgatatttcttcgaaagatgaacatcgtgaacatgaggagaagtgcggcaatatttccccatcatcatcatcaatgataagctttgaattgtcaaatggtgatccctttgggtcccatgttccagccacattggaagatgatcagtatgtagaatatcaactagatgaccttgcaggttttccatctactgcagaggaggaagaaagaatgttcatggaagcagtgatggagtcactgaaggacctggaagtacgaaatccaaatgcagaacaaccaacaagtagtgttagttctgtgtatgtagatgctgtagagccgtctgataaagatgcttcttcaggagagatttcgagaccggtggagacagaatcttcctcactcaaacacaccacagagtcaaaattcaaaaccacttcctcgacatcagaagaatttgagccattgaacggtgagtcaaattccatttcagtgaaacattcccaaaatgtggtgtcggagccaagtccagtaccaagtgtttcattagaaggaccagcacatctgcagctgcagccaccaccatcggcacctactgacacatcatcagtaactgagtccagcaatacaagtggttctgctagtagcgatagttctgctagtttacaaagttcatcagagactgatgtatcacataacacgaaagccacagtaactgttgttaggaatcccgcaggccatgtcatggatggcttaatgcgtcgatgggatttcaattttttcaagaacaaatagtcacaaccgatgatcagatgagagattctcatgtatacattgtttttgtaactacaagaaaacaaaaatcatagtttgtaccaaagaaaataggttgctcgtgtgtaaattttgtatgtttagattctcaactaacaaatcatccaatattctttgactgtaagtgagaattgtcatattttgttgtttttatgaacgatgtctacaccattgtacgcatcatttgaac

SEQ ID NO: 6335 - DNA, 2196 bp, Glycine max
  Clone ID: 700561429_FLI
ctttggaggaagaagagaagagtgtttttcttgacattgcttgttgcttcaaaggatgtgaattggaagaggttgaagatatacttcatgctcattatggagactgcatgaaatatcatattggggtgctgattgataaatccctcttaaagcttagtgtgcatggtacaatggtgacattgcatgacttgatagaggacatgggtagagaaattgtacgacaggagtcaccaaaagatccagggaagcgcagtagattatggttccatgaggatataattcaagttttagaagataacacaggaacaagtgaaattgaaatcatatgtctgaatttccccttacttgacaaagaagatatagtagaatggaacagaaaggccttcaagaagatgaaaaacctcaaaactctgattattaaaagtggtcatttttgcaaaggtcccaggtatcttccaaatagtctaagagtattggaatggtggagatatccttcacatgatttaccatctgattttcgttcaaagaaacttggcatatgcaagttaccccattgttgttttacatcacttgagttggttggctttttaacgaaatttatgagtatgagagttttgaatttggacaaatgcaaatgtttaacacagatacctgatgtatctggtctcccaaatttagaaaaactttcatttcaacactgtcaaaatttaactacaattcacagttcaattggatttctatataaacttaaaatattgagtgcttttggttgcaccaagcttgtgagttttccacccatcaagttacctctcttgaaaaactcaatctctcgcgttgtcatagtcttgagagttttccagaaatattaggaaagatggaaaacataagggaacttcagtgtgaatacacttccataaaagaattgccatcttcaattcataatcttacccgacttcaagaattacaactggctaactgtggagttgttcagttaccaagtagcattgtaatgatgccagaacttactgaacttattggttggaaatggaaagggtggcaatggctaaaacaggaagagggtgaagaaaaatttggatcatcaatagtatcttcaaaggtagaattgctttgggcctcagattgcaacctgtatgatgatttcttttcaataggtttcacgcggtttgctcatgtgaaagatttaaacctatcaaagaataatttcacaatgcttcctgaatgcatcaaagaatttcagtttttaaggaagcttaatgtgaatgactgcaagcatcttcaggaaattagaggcattccacctagcttaaaacatttcttagcaacaaactgtaaatccttgacttcctcaagtacaagcatgttcctgaatcaggaactgcatgagactggaaaaactcagttttatttgccaggagaaaggattccagagtggtttgatcaccaaagtaggggaccttcaatttctttctggtttcgcaataagttccccggcaaagttctttgtcttgttattggacctatggatgatgactctggaatgttaatatctaaggtgatcatcaatggcaataaatatttccgtggtagtggttatttcatgatgggaatggatcatacatatctttttgatcttcaaataatggaatttgaagataatttgtatgtacctttagaaaatgaatggaaccatgcggaggttacatatgagggtttggaagagacctcaacccctaaagaatgcggaatccatgtattcaaacaggaaagtagcatgaaggatattcgatttgctgatccttatggcaagagaaaattaggcaatgatcgcaacagtttggaatcacaaaaccaacaattgctaaaaaaacataggtttgtggacatggaagtttcatagacataatatgtgcaacaacaacaatgtattgtttatggtcacatcatttgagttgggcatgtagctattttcatttattcctgctacaacaatgcaatcattgtatgataatgtgagctttgattcaaattcaatggaatcaaagcagataaggggcaccattagtgtcataggtaaattatctggcgtgctctatcacactaactgattttaatttgccttattattttgatctacataaatggaacaaaagaaaagaagtatatatgtaggaattc

SEQ ID NO: 6336 - DNA, 1908 bp, Glycine max
  Clone ID: 700561485_FLI
gagagagtgggccacatcattgaaagtaggtaaactgtttctggggttaccagcagatgaagctgcagctccggccggaggttatgttccggctgatgtattaatgtctaagatcttacctgaaataaacaagtcaacaaattatggaggtctcatgttgtggtcaaggtactacgataaaattagtggatacagtacccgcattcaaaatcctctaagaaatgggacagcaaaccctctatgcacacggaaaagtcaagcatgtaggagccatgagggcggtttcgcggagcttcttggttacatgtccacgctcggtatcaaagtttatgaagacgacaacaatggaacacagtgctgtgagatcatatgtaggaacaactgttcctgcgacgcgtttgctcccttaaatcacattaacaatactagtactggatgtcagatatggctcaaaggaaccaaatttgttagagcttctggaaatatagctctgccaatcaacgtttctgttgcattgctggaacacaaagtaaacagctggtggatttggctcatcgttggggtgggagcagcttttgtaatacctgtgatattctatttatcgcgtgccttcctgagaaaatacaaagcaaaagtggagagaaaaaagatgcagaagaagttattacatgacattggaggtaatgcaatgcttgcaatggtgtacggcaaaaccataaaaagtaataacaagggaaagactaacaatgaagttgaactatttgcttttgataccatcgttgttgccacaaacaatttctcagctgcaaataagttaggagagggtggttttggtcctgtttataagggaaatctaagtgatcagcaagaagtagcaataaagcgactttctaaaagttcgggacaggggctaatagagtttacgaatgaagccaaactcatggccaaactccagcacactaatctggtaaagcttttagggttctgcatccagagagatgaaagaatattggtctatgagtacatgtctaacaagagcttagacttctacctatttgattcggctaaaggatttgctagactgggaaaaacggttgaacatcattggaggaattgctcaaggacttctataccttcataagtattcaagactaaaggtgatacatcgggacctaaaggcaagcaatatattgcttgatcacgagatgaatgctaaaatatctgactttggcatggctcgaatatttggagtaagagtatcagaagaaaacacaaatagagttgttggtacatatggatatatggctccagagtatgcaatgaaaggtgttgtgtccatcaaaacagatgtgttcagctttggtgtgttgctactagagatacttagtagcaaaaagaataatagtcgctatcattcggatcacccactcaacctcataggatacgcgtggcagctctggaatgcaggcagagctctggagcttatagactcaacgttaaatggattgtgttctcagaatgaagttttcagatgtattcatattggcctcttgtgtgtacaagatcaagcaacggatagacctacaatggtagatattgtttcatttctatcaaatgatacaatccaacttccccaaccaatgcagccagcatacttcatcaatgaggttgtggaagagtcagagcttccttacaaccagcaagaatttcattccgaaaatgacgtaacaatttctagtacgcgtgcaagataattggacaattgtgtacaccaaatttcactttttaatactgcatcactctggcggtgggagttcttggtattattgtttgtgccaattttacttcttttagataactgaccattttagttagtaataataaatatatctggaacgttttattttc

SEQ ID NO: 6337 - DNA, 362 bp, Glycine max
  Clone ID: 700561657_FLI
gtgccaattgctattggtggtcccggattggcccctggtgtaagattccgaaatgatgttccaaccggcgggcttgccaacgttgctgcaactgtgatgaatcttcatggattcgaggctcccagcgactatgagacaactctcgtagaagtggttgataactaggaaccaatagatgaatttttataatttgaaaaacaaacagggaaagctgtagattgcagccctcaaaataattgaaagttttcatccttattccacatgtgtggtggttttgttcttatgagttaccaataccagtctgcagttgacagaaaagtatacctaattaatggcattttggcactctcttttaactttct

SEQ ID NO: 6338 - DNA, 2271 bp, Glycine max
  Clone ID: 700561685_FLI
actcaacacaccaaacagaaatagttacactcagagtagtgaacaacaacagcaacaacaacaacaacgttgcagtgtgttgtaatgtttcttagtgcacttttttttggcatcaaagaggttaaatccatggattctgattatggtattcccagggaactctcagatcttcaaaagattcggtcgttgtaccagccagagcttcctccttgtctccagggaaccactgtgagggttgaatttggtgatgcaaccaccactgctgaccccactgatgcactcaccattagcagggcgtttcctaacacctatggacaccctttggctcactttctcagggcaactgccaaagtccctgatgctcagatcataactgagttccctcctattagggtggggattgtcttttgtgggagacaatctcctggagggcataatgtcatttggggtctccacaatgctctcaaaattcacaatcccaacagtgttttgcttggatttcttggtggttcagaaggtctgtttgcccagaaaactctggagataactgaggatattctttcgacatacaaaaatcaaggtggttatgatttgcttgggcggacgaaagatcaaattaggaccacagaacaagttaatgctgcacttgctgcatgcaacaatttgaaacttgatggccttgtaatcatcggaggggtgacatcaaacacagatgctgcacagcttgctgaaacatttgctgtagcaaaatgccccacaaaggtggttggtgttcctgtcactctaaatggagatcttaaaaaccagtttgtagaaactaatgttgggtttgacacaatttgtaaggttaattctcagctcatcagcaatgtctgcaccgatgctctctctgcagagaagtattattatttcatccgtcttatgggacgcaaggcatcacatgttgctttggaatgcaccctccagtcccatccaaacatggtaattctgggtgaggaggttgctgcatcaaagcttaccctttctgaaattgcaaaacagattactgatgcagttcaggctagagcagagcaagataaataccatggagtaattctccttccagaagggctgatagagagtattcctgaagtgtatgcactcttgaaggaaattcatggtttactcagacaaggtgttgctgttgacaagatatcttctcagcttaccccatgggcatctgccctatttgaatttctgccaccctttattaggagacagttactcctttaccctgaatccgatgactcagcacagttatcgcagattgaaactgagaaattactggcatatcttgtggaagtagagataaacaagcgtctgaaagaaggcacatacaaggggaagaaattcaatgccatttgccacttttttggttatcaagctcgtggatctctgccatcaaaatttgactgtgattacgcatatgttcttggacacatctgctaccacatacttgccgctggtctaaatggatacatggcaactgtaactaacctgaagaatcctgtaaacaagtggcgatgtggggctgctccaatagcatctatgatgactgtgaagcgctggtctccaaatccaggagccacatcaattggaaaaccagctattcatccagctactgtggacttgagaggcaaagcatatgagctgttgagacaaaaggcacaaagctttcttatggatgatatctacagaaatccaggtccacttcagtttgatggtcctggtgcgggtgcgaaggttataactctttctgttgaagaccaggactacatgggccgcattaagaaacttcaggagtaccttgaacaggttcgaaccattgtgaagccaggatgcccccaggaggttttgaaagctgctctaagtgtcatggcgtcggttactgaagttctagctgcaatgtcaacatcttctactaacaccctgtcagccatgtgagagtaacaaatggatgttgtattctttccaaaattttctggcacgaggttttagtttctacattttattgccatggaagtagttgttgattggaaataagagttatagctgacatggtgcatgtcaacgtgagatgagatttactgtaatcaaagttttggctctctatgttccctactgggtcatttttttttttacaaaacatgagggttccgtgtgacactgataatttagcttggggcttgagattattattgttgttctatttttaggacatatctttttgtg

SEQ ID NO: 6339 - DNA, 1234 bp, Glycine max
  Clone ID: 700561696_FLI
ctgaggtttcaaagagttttgggagtggagtgcaaggggctgaaaagaacaagctctttttctttgaaggttcctctcatagctttgaccttgaggatttgctgaaggcttcagctgaagttcttggaaaaggaagctatggaacagcatacaaggctgttttggaggagggaacaacagtggtagttaaaaggttgaaggaagttgtggttggaaagaaggagtttgagcagcagttggagattgtggggagagttggaagccaccccaatgtgatgcccctaagggcttattactactccaaagatgagaaacttctggtttacaactacatgccaggtggcagcttgtttttcttgttgcatggaaacaggggagcaggaagaaccccactagactgggactccagagtgaagattttgctaggagctgccaagggaatagctttcatccactcagaggggggtccaaagttcgcacatggcaacatcaagtcaacaaacgtgctcataaaccaagaactcgacggctgcatctccgacgtgggattgcctcctttaatgaacactccagcaaccatgtcaagagccaatggctacagagctccagaagtcactgactcaaagaagatcactcacaagtccgatgtctacagcttcggggtgctgctgctagaaatgctgacagggaagacccctctgaggtatcctggctatgaggatgtggttgatcttccaaggtgggtgaggtctgttgtcagagaggaatggactgcagaagtgtttgatgaggagcttctgagagggcaatatgttgaagaggagatggttcagatgcttcagattgcattggcatgtgtggctaaggggcctgatcaaaggcctagaatggatcaagttgttagaatgttggaggagattaagcatcctgagttgaagaactaccacaggcaatcctctgagtctgagtctaatgtgcagacaccaacaccatgatcacgatgagatgcatttgatgggagactaataaaattttctctgcagaatggggtttgtcatcattaggctcatattgtgttttgcttgcatgccctcaaccaaataagcatgtttcattgtaaaatactactaatgatgatgtttttttatttgtgttggccataaaaggcttcttttcatgtttcacattattttgttgcgttatgacacttttagctattggctaattgctattc

SEQ ID NO: 6340 - DNA, 1343 bp, Glycine max
  Clone ID: 700561776_FLI
tgataatttgattggcagaggtggctgtagttatgtttacagaggatgtcttccagatggcgaggaattggcggtgaaaattttgaagccgtctgaaaacgtgataaaggagtttgttcaggaaattgagatcattacaactttgcgccacaagaacataatatctatatctggcttttgtttagagggcaaccatttgctactagtgtatgattttttatcaagaggaagcctggaagaaaaccttcatggcaacaaggtggactgtagtgcatttggttggcaagaaaggtacaaggtggccgtgggtgtagctgaggcactggattatctgcataatggctgtgctcaggctgtgatccatagggatgtgaaatcttctaatatccttctttcagatgattttgagcctcagctttcagattttggactggctagttggggttcatcttcttcccatattacttgtactgatgtggccggaacttttggatacctcgcacctgagtactttatgcacggtagagtgactgataaaattgacgtatatgcttttggtgttgtactccttgagcttctctcaaataggaagcccattaacaatgaatgcccaaagggccaggggagccttgttatgtgcgcaataccaattttggaaggtgggaagttttcccagttgcttgatccaagcctaggcagtgaatatgacgattgccagatcaggagaatgattttggccgctactctctgcattagacgggttcctaggttgcgacctcaaatcagccttatattgaaacttctgcacggtgatgaagaggtgataagatgggcagaacaagaagttattgcgccacaggaactcgatggatgtgatgaggaaccagttccaactaacattcagtcacacctaaaccttgctttactggacttggaggatgatacgatttctatcagtagcaccgagcagagtgtctctttggaggactatttgcatggaagatggagtcgatcttcaagttttgactaaccagttgttcatattgatgccacattggaatcaaatgtttgtttcataattattttttgtttttcttaggttagattttcaaattctgcagtatagcactgattgggtcttggaagagaggtccaacggcaaaaaaagttcagcccccctccttgactttgtagctatgtctcactcaatctgtattctggaaagcttttagcggtagaaaactcatgttggtgcgtttgggcttttgggatcagattctaacggggctaattgcgtaaaatttgaccaaacaatgaagagtacatatattccactttgagag

SEQ ID NO: 6341 - DNA, 1892 bp, Glycine max
  Clone ID: 700561808_FLI
ggccattcaagcaaccaaagtagtgtttaaccatctgtatgatccagtttcacttgtccgtgatcacaacatcaaagaaaagctagtggaacaaggcatatctgttcaaagctacaatggagatctgttgtatgagccatgggaagtaaatagtgagagtggacgtgcttttactaccttcaatgctttttggaagaaatgcttgcacatgcaaatggatattgtttcagttgttcctccatggcaattaattccagctgaaggaaaaattgaggaatgttcattggaggaacttggtcttgaaaatgaatcagaaaaaccaagtaatgcattgctaggacgggcatggtcaccgggttggagaaatgctgacaaggctttaagagaatttgtggagcttcatctacttcactactccaagaaaaggctgaaggttggtggagagtccacctcactcttgtccccatatcttcattttggagaattaagtgcaaggaaagtttttcaagtgacttgtatgaagcaaatattatggacaaatgaaggaaacagtgctggtgaagagagtgcaaatcttttcctcagggccattggacttagggagtactcacgctatctttgtttcaactttcccttcacccatgagagagcacttctggggcacttaaagttttttccttggaatcctgatcctgatatctttaagacttggagacaaggtaggactggctttcctttggttgatgcaggaatgagagaactttgggcaacaggatggatacacaacagaataagagtaatagtttccagttttgctgtgaaaatgttgcttctaccctggaaatggggaatgaaatatttctgggacacacttctggatgcagaccttgaaagtgatatcttgggttggcaatatatctcaggaggcttaccagatggccatgagcttgagcgcttggacaatcctgagattcaaggggctaaatttgatccagaaggtgaatatgtgaggcaatggctacctgagttggcaagaatgccaactgagtggatccatcatccttgggatgcaccacttactgtgcttcgagcagcaggagttgagctgggccagaattacccaaagccaatcattgatatagatttggccagagaaagactcactgaagctatattcaagatgtgggaatctgaagcagcagcaaaagctgctggctctgaaccaagggatgaagttgttgtagacaactctcacactgttgaaaatttggacactcaaaaagttgtcgtcctgggaaaggctccatgtgctactatttcagctaatgatcaaaaggtgcctgctcttcaggattccaagaatgaaccgcctacgcggaagaggccaaagcacatgatagaggaggggcagaaccaggatcactctcaaaatcataacaaagatactggcttgtcaagcattgaccaagacatttgctccacagctgattcttcatcatgtaagaagcagtgtgccagtacaagctcatattcattttcagttccacagcagtgttcctcatcttctaatctgaagtggccatggcaagagaagattgatatggagcagagttcaagcaaagatggagctatgtgaggttgatgttgttcttgttgacaaaaccagtagcagctgcattgttcatggaaggaaaatggtgccatatttaagttttgcagtttgtttatagcctatgctatcaatcagttgtgtaataggttatgaaatcctgcaagaggaacacggattacaacaatagtgagcattgtatattatgaacttgtgctgatgggctgttccatacacattctgacaatcccgtaattacaaaccatataaccaaatactctac

SEQ ID NO: 6342 - DNA, 549 bp, Glycine max
  Clone ID: 700561911_FLI
gcagattgcaaagcgcgaacaagaagcttgcggagaacatagaggccaaggaagaagcgtgcgtcgagaccgaagcggcgaacagcattctgagagcacagacaatggaactggccgatcgattgcgcttcttgaactccatccttgagatcgctgaagaggtcgaagggttatccgttgagattcccgagattccagatcctctcctcaagccctggcagattcctcatccgatacaaccgattatggccaccgcaaacatgtttctgcgttgatcattcctgaggattttactttaattagggttattcagtgcggtagtaactttctctgttatgtgtattatattactattagtgttatctgtctgcatcaaaagtatcgtgtggtcatcaatgcattgggttcctgagagagatgaatgtgaggtacagggtgttgatggctggtagtggcagtgtgtgtccctttgcgcgacttgtaatcattttttatggtggctgttttattttaattaaaagtaatctcatcttctatgtttgttgtttt

SEQ ID NO: 6343 - DNA, 1107 bp, Glycine max
  Clone ID: 700561928_FLI
aagaagttggagctgatgctgtctctcatgggtgtacagggaaaggaaatgatcaggcatgcgttactattaggttcacaacactaatcatgtcatttattatgctaacactttctatataaacttttaggttcgatttgagcttactttctttgctctgaaccccaagctaaatgttgtggctccatggagggagtgggatattacaggtagagaagatgctatcgagtatgctaaaaagcataatatacctgttcctgtgacaaagaaatccatttatagcagggataggaatctttggcacctaagccatgagggtgatattttggaagacccagctaatgagcctaaaaaggacatgtacatgatgtctgtagacgctgaggatgctcctgatgaagcagaatatgtggaaattgagatagagtctggccttcctgtttcagtcaatgggaagaggctttcgccagcaactttacttactgagctcaatgagattggtggaaggcatggaattggccggatcgacatggttgagaatcggcttgtaggtatgaagagccgtggagtttatgaaactccaggtggaaccatcctgtttgctgcagcacgcgagctggagtttttgacacttgatcgagaaacaatacaagtcaaagattcattagcccttaaatatgcagagttagtatatgctggcagatggtttgatccacttcgggagtcaatggatgcctttatgcagaagatcacagagacaacaacaggttctgtgactttgaaattgtacaaaggttctgttactgtaaccagtcgaaagagtccctttagcctgtataggcaagacatttcatcatttgagagtgggcagatatatgatcaagctgatgctgctgggttcatccggctttatggtcttccaatgagggtccgagcaatgcttgagcagggcatctaagtgttaatttcatttcaaaatgtccttgatttcattgtcatttgcttgtttagaaaaaagttggattgaagctggagtgtactgtggattgttagtagatccctggaatcctaataaaatgaataatatttaatattcatcttgaattc

SEQ ID NO: 6344 - DNA, 981 bp, Glycine max
  Clone ID: 700561972_FLI
gcaagaatggcacttcgttgcttggtgatgtccctttctgttctcttcactcttggtcttgcgagagaaagccatgccagagacgaagatttttggcatgctgtttggccaaacactcccattccaagttcattgcgagatcttctaaagcctggccctgcaagtgttgaaatcgatgatcaccctatgcaaattgaagaaacacagtacccgaaaaccttcttctataaagaagaccttcatccaggcaaaacaatgaaagtacaattcagcaagcctccctttcaacaaccatggggtgttggtacatggttaaaggaaattaaagacactactaaagaaggatatagttttgaagagctatgcatcaagaaagaagccattgagggagaagagaagttttgtgcaaaatccttgggaacagtaattggttttgccatttcaaagctgggaaagaacattcaagtactttcaagttcctttgtcaataagcaagaccaatacactgtggaaggagtgcagaatcttggagacaaagcagtgatgtgtcataggctaaatttcagaactgcagtattttactgccatgaagtccgtgaaacaacagctttcatggttccattggtggctggtgatggaaccaaaactcaggcacttgctatttgccactcaaatacttctggaatgaatcatcaaatgcttcatcaacttatgggagttgatcctggaactaaccctgtttgccatttccttggaagcaaggccattttatgggtacccaatttatctgtggacactgcctatcagaccaacattgttgcttaattagtccatgcatcttgagcaccatgagaatgagattgtgtataaaataaattatcatgtgctgtgtgttgtgcaagtactaccttctctagctagattgctagagctagaatttcaacctacctatgtgtactgataagatctgcttccctactt

SEQ ID NO: 6345 - DNA, 1291 bp, Glycine max
  Clone ID: 700561979_FLI
gcgagagagagagagaaagggtcgctttaaggcacagaagctttaaatgcgagttggttgattgtagcttcctttcaatcttctcctaatgcttatggactaagcatttgcccaagagcgcgttttttattctcaatatccttcttcttgttattattattattgttattgttctttgttgttaacatatattaataactctttcttaaacccaaatcttgtgacatcacaaaccgtaccctttttgtttatttcctttgtgggttttcaattcgtgcaaatttctgcgacacccagatggattttgcgctgaatccgtgtcctttgcgatcttctacgttcgtgaatttcgtcgagagggttaaacagcttggtaccctcgccttttctgcagtcattgggaacatcttctccgcgatcttgaccttctgcttcgcattagttggcactttgttgggggctttgactggagctttgataggacaagaaactgagagtggcttcattcgaggggctgctgttggtgccatatcaggagctgttttttccattgaagtgtttgaatcctctcttgttctctggcaatctgatgaatctgggattggctgtgtcttatacttgattgatgttattgccagcttactgagtgggagacttgtgcgtgagaggattggtccggccatgttgagtgctgttcaaagtcagatgggtgctgttgaagccagctttgatgaggttcaaaacatcttcgacaccgggggttccaaaggtttgtctggagatttggttgaaaaaatccccaaaataaaaattacaacagacaacaattttgatgcatccggtgatagagtctcttgttcagtttgcctgcaggactttatgcttggagagacagtaagaagcttacctcattgccatcacatgtttcacctaccttgcatagataagtggctcttcagacatggttcttgcccattatgcagaagggatctgtaattttgtatatgcttagtacagaccgctaataatgtccctattttatttttgtttttgtttataagcttatttaattctaggacttacatctagtgggagccattgcagtttgagtggtatcattgtactaaattagtgtaaagaaaattttgagatgaaacagcttccacttgtatatggaggagagtgattgacccattttctagcccgtctccactctttttctgctctttttttttttttttttgaataaagaacaagagacggtgatataactagtgttttgattcttgcc

SEQ ID NO: 6346 - DNA, 1417 bp, Glycine max
  Clone ID: 700562033_FLI
ttggaataaataattatggaatgccttgcttttttggctgcacgcttctacgggatgaaacagtgaggtcattttcctgggcactgaaggctttcttagggttcatgaatgggaaggctccacagactatattaaccgaccaaaatatatgtctcaaagaagcactatccacagaaatgccaacaacaaaacatgctttctgtatatggatgatagtagcaaagtttccatcttggtttaatgctgttttaggggaacgatacaatgattggaaggcagaattttatagactttataatcttgagtcagttgaggattttgaactaggctggagggaaatggcttgttcttttgggctgcattccaatcggcacatggttaatttatatagttcacgttctctttgggcgttgccatttttgagaagccattttcttgctgggatgactacaactggttagtcaaagtcaattaatgcttttattcaacgatttctgagtgcacagacacgccttgcgcactttgttgaacaggttgctgttgctgtggattttaaagatcaaactggagaacaacaaaccatgcagcagaatctccaaaatgtttgcctcaaaacaggggcccccatggaatcacacgccgccacaatcctcactccttttgccttctcaaagcttcaagaacaacttgtgttggctgcacattatgcgtctttttcaattgaagatggttttcttgtgaggcaccacacaaaagctgagggaggccggaaagtttattgggcccctcaagaaggaattataagttgtagctgccatcagtttgagttcactggtattctctgtcggcattctcttagagttctttcaacaggaaattgctttcagattccagatagatatcttcctattcgatggcgtcggatcaacatgccgtcttctaagcttcttcaaagtgcaccaaatgatcatgctgaaagagttaagttgttacaaaatatggtttcatctctgatgacagaatctgctaaatctaaggaacggttagatattgcaacagaacaagtaaccctccttctgtctcgcataagagaacaaccaatttcgttacaagttggccgagatatttcatccatcaataggaatctttgactccaggatacaagaaatggttgagttggtagtctctggttgaatgaatgggagttacaccaaactgtttatgagaaagcttagttattggatttctcatgctagattgagacaatttgaagggtgatagaagctgtttgttagcatcaacttcggcagtgaaatttctgtagattggttaatgccatgttaagtgaatgacaagaaatgtatagtaaatttgttcatacgcatttttgtatttgcaatatatctgctatttttat

SEQ ID NO: 6347 - DNA, 1752 bp, Glycine max
  Clone ID: 700562036_FLI
agaacatcagatattattggtagaaaatggacaatggccttggctgcagttgtcttccaaatgggtggactcacaatgactcttgccccttcgtatgcagtactaatggttggaagatttctagctggaattggaataggatttggagttatgatttcccctatatatattgctgagatatcaccaaatctaaatagaggctctctcaccgccttcccagagattttcataaatgtaggaattatgcttggttatgtgtcaaattacgcgttttctggcctttcagcacacataagttggagagtaatgctagcagtgggcattttgccctcagtgttcattggctttgcccttttcgttatccccgaatcaccaaggtggttggtaatgcagaaccgcatagacgaagcaagatctgtgctgttgaagacaaatgaagatgagaaagaagtggaggagaggcttgcagaaatacagcaagctgctggatttgccaattctgataagtatgatgataaaccagtgtggcgtgagctgctgtttcctcctcctcctcttcggcgaatgctgatcactggacttggaattcagtgtttccaacagatctcaggaatcgatgcaactgtgtattacagtcctgaaattttccaagcagctggtattgaggacaattcaaaacttctagctgctactgttgctgtaggcatatcaaagactatttttattttggtagcaatcattctcattgataaactaggtaggaagccacttctcatgataagcacaattgggatgacagtttgtttgttctgtatgggggctactcttgctttgcttggaaaagggtcatttgcgattgcattgtctattctgtttgtttgcgggaatgtagcattcttctcagttggattaggccctgtgtgctgggttttgacttctgaaatcttccctttgcgtgtgcgtgctcaagcatctgcacttggagctgtggctaatagggtctgcagcggccttgtggccatgtcttttctttctgtgtctgaggcaattagtgttgctggaacattctttgcgttttctgcaatttcggctcttgccattgcctttgtcgtcacactagttcctgaaaccaaagggaagtcactggagcagatagagatgatgtttcagaatgagtatgagattcaagggaaagaaacggagctaggagatgttgaacaacttgtgcagaaccaaactgatttaacaaattaattgattaattagcccctgcctttatgcgactcttatggatttgttattccatggttacacatctttcacttgttatgtctaaggctctatgcatgctacttgtgattcagtggaggatattcctggcaagaatatatgatcttctgcaccagaaaatttgagatatgtgagttggggacacaaggaaacatgaagataaaatgcactctaaacttttcctagttgaacaattattcttattttttttttttatctacattaaagtcaattatagcattgtatatggagggagatttttggtggagacgatcatgtctccatatggtcctttgggatgtcctgagactgattatagtgccattattacaatgtgttcatgaggaatgtctgtaattaagatggaaattctttaacagataatattctattattcaacttcggtatctgaattgtgataatcttgagatatcaaagcatatatataagttgcagttttat

SEQ ID NO: 6348 - DNA, 1408 bp, Glycine max
  Clone ID: 700562087_FLI
ataagaaccaaaatgaatgtcttaaactatagggactaaaacaaattatcacaactataaggactaaaaggataattaaatcaaaataaaataaactagagcaaaataatggtggtgtggttaggcacttttaatcctaaatgtctccttgtagacatatatacctctacatatgtgtgcattttgcaaccaccaccattagtggaataaaattttaaatgcaaacccttctatggtatatatcctatataggcattgttagtagtaaataccaaccgtgaaccagaaaattgtggattcaacctttttcgtcttccttcttcttcatggcagtgctatttgcaactcatgttcttctcttgatattgtccactgcaacaactctccacttcagtgcaagcaaggcagcaaggctcaatatgacttgcagcgagaaggaaaggaatgcactcctcagcttcaagcatggactagcagacccttcaaacaggctttcatcgtggtctgacaaatcggattgctgtacatggccaggggttcactgcaacaacacaggtaaagtcatggaaatcaatcttgacacacctgcgggctctccctatagggagttgagtggagagattagtccttctttgcttgaactaaaatatttgaatcgtttggacttgagttcaaattattttgttcttactccaataccaagcttcctaggctcattggagagtctgagatacttggaccttagcttaagtgggttcatgggattaatccctcatcaactaggaaacctctcaaacctgcagcaccttaatcttggatacaattatgctcttcagatagataaccttaattggatatcaaggctatcttccttggagtaccttgatttgagtggttcagaccttcataaacaaggtaactggcttcaagtactgagtgaacttccatctctttcagaactacacttggagagctgtcaaattgataacttaggaccaccaaaaggaaaaatcaacttcacacatctccaagtccttgatctttcaattaacaatctcaatcagcaaatcccttcatggctatttaatctcagcacagctcttgtccaacttgatttacacagtaaccttttacagggagaaattccacaaataatatcaagccttcagaacataaaaaatctagacctgcagaacaaccagctcagtgggccacttccagattcattaggccagcttaagcatcttgaagttctaaatctcagtaataatacctttacttgtccaattccctcaccatttgcaaacttgtcatccttgagaactttaaacctggctcacaaccgactgaatggaaccattcctaagagttttgagttcctcagaaacctgcaggtattaaatcttgg

SEQ ID NO: 6349 - DNA, 1963 bp, Glycine max
  Clone ID: 700562167_FLI
ggaagagtttaagggtaggaaggtgattcttggtgttgatgacatggatatctttaagggcatcagtctgaagcttctagctgttgagcagctactgcagcagaatcaagatttgaagggcaaagttgtcctagtacagattgtgaatcctgctaggagttcaggcaaggatgttcaggaagcaaagaaggaaacaaatttaattgcccagaggattaatgatacttttggttcaaacaattatcagccagttattctcattgaccgtcctgttcctcgttttgagaagagtgcctattatgctgtagcagaatgttgcattgtcaatgctgtgagggatggtatgaacttagtcccctacaaatacattgtctgtagacaaggaactgcactgatggacaaagctttgactagaaaaagtgattctcctcgtacaagcatgcttgttgtgtctgagttcattggttgttctccttctttaagtggagcaatcagggtcaatccctggaacatagatgctgtggctgatgctctgtattcagctgttactatgaatgattcagagaagcaattgaggcatgagaaacactaccggtacatcagttctcatgatgtggcatattgggcacgcagctttgtgcaggatttggagagagcatgcaaagatcattacaccaaaagatgctggggaatgggtttgggcctagggtttagagttgtttctctttctcctggtttcagaaaattgtctgttgatcacattgtttcagcttacaaaagaaccggtagaagagccatatttcttgattatgatggtactatcgtaccaaaatcttccataaataagacccccagccctgaagtcatatccgtgctaaatgatatgtgtaatgatcctaaaaatactgtgttcattgtgagtggaaggggaagagattctttaagtaagtggtttacttcatgcaaaatgattggacttgcagccgaacatggatactttctaaggtggagtaaagattctgaatgggaaaccagtcccttgtctcctgatcttgattggaagaagattgtggaacctgtcatgcagttgtatacagaggcaactgatggatctaatattgaaactaaggaaagtgctttggtctggcatcatcaatatgcagaccccgactttggctcatgccaagccaaagaattgttaaatcatctggaaagtgtcctcgctaatgaacctgcagttgttaccaggggccggcatattgttgaagtcaagccacaggggttaaacaagggctgggtagctgaaaaggttctttccaatatggttaatgatggtaatccaccagattttgtgatgtgtgtgggagatgacatttccgatgaagacatgtttgagagcatattaaggacagtttcatgcccttcattgccagtagttccagagatctttgcctgcactgtaggtcagaaacctagcaaggccaaatattatcttgatgaccctgctgatgtcatgaagttgcttcaaggccttggtgcttcatctaagccaaagccaaggcatctagcacaattccaagtttcttttgagagcacggtttgagttattggttccttgtgcttcttctctagttgggaggattaatattcttcacatgtgaatcagggaatgttaggttattaatggttcccctgacatatatggtgggaccttgctgttgcagataggattctttgcacctgaacgggtttttaatggcttgtttttttgtgttcagtagtgcggttcatgaatgagctttgacaaattcttctcacgtacatggttacatcaaattgttgtatttgctggtgcctagaactgtagaacatgtagttgtttgcattgaacatgaggcaccaaatagcttgtacagttacactatttttctttactatacataatggcgatctggtttgagat

SEQ ID NO: 6350 - DNA, 1525 bp, Glycine max
  Clone ID: 700562177_FLI
gaaaaacaagagaacactggattagatggctctaaagattctgatggaaaatctaccagtcaatctatgcaaatgtcttcaggccctaatggttccactgctaatgcttctagtgaactatcatccgcagagcggcagaacttgttggacaagaaaacaaagcttttgtccatgttggatgaggtagataaaagatacagacagtactgccatcagatgcagattgtggtgtcatcttttgacatggttgctggctgtggagcagcagaaccatataccacacttgccttaagaacaatttctcgccactttcggtgtttgcgtgatgccatcagtggccaaattcaggtgacccaaagaagccttggggagcaaggaataccccgtctccgctatgtggatcagcaacttagacaacaaaaggcacttcagcaacttggtgtaatgagacaagcttggaggcctcagaggggtcttcctgaaagctctgtttcaatactccgtgcttggctctttgaacattttcttcatccttaccccaaggattctgagaaaattatgctggctaggcaaacaggcttgaccagaaaccaggtggccaattggttcatcaatgcaagggtgcgtctctggaagccaatggttgaggaaatgtacaaagaggagtttggagactccgagatgaactgcaacctttcatctgagaacaacacggtcaaatgtaaaaaagatgatcttgttcaagagtctgataacattaacaacaataataaatgggaagagacacaggacaatttagtaactgttgacagtgtccaagtccaacctcaagcagaactggatagaggggtcaatgtagaaaatgtggtgatggattctggaactgggaaattgcagggtgatcaaaaccaacaaaggcttggcatgaacaacaacaacaacttttattctatctcaaccaaccagaatgatggaggcctaatgggttgttctactcatgccacatatgatttatcagagttgggtaactttactgtgggtagccacgtttcccttgcattggagttgaggaactgtgaaagtgatgggtttgccatgtctgatgatgccatacgcaaacgacgtaatcaagcattggcctcttccccggagactgatttgctagattatcatttcacggattcaggaaagcaacaacacaggtttggcaatccccatttgctgcatgagtttgtcgtatgaaatctagcaaaaaaatatttgatgattttaatggatctctggagaggtgtacctcaacaaagctgaaagagaaaaaagcctatgctgtgctgctgctgctgctgctgattttgctactttttttcttcctcattcttgttgcccattgttcgtaaaaaagtgatgtaaatcacaaaaccgtacaaaatatacaggtagatatgtgtagatatattcgcttgtaatattttacagatgattggttgtatgtatgtgcaggcaatttttgtaaggataaataaag

SEQ ID NO: 6351 - DNA, 1504 bp, Glycine max
  Clone ID: 700562219_FLI
gccacatgctatccctcctcctcctccttctctctccggtggtggtgactcgccggaaaacacccactgccacctctaacgccgccgccggcgaacacccttctcaaaatctcacccgacccaattcacctttctcctctctcttctcaattccccatctgggtatccctgtttccctcaaagttctcttctttttcgtgattcagaagtgctcagtgatacccttttcttagaacaatgagagcggggaaagggagtcaggaagaggatgagtacgaggaagaagagtttggttcttccaagaaacagggcacttcctctgcccctaacaccaataaagatggaaaagccatcgataaggctagtgcgataagatcgaaacattctgtgactgagcagcggagaaggagcaagataaatgagagattccagatattgagggatctcatacctcatagtgatcaaaagagggacacggcatcatttttattagaggtgatagagtatgttcagtacttacaggagaaggtacaaaagtatgaaggttcatatcaaggttggggtcaagaaccctcgaagttgatgccatggagaaatagtcattggcgtgtccagagctttgccggtcaacccacggctgtaaagaatggtttgggtccagtatcaccttttcctggaaagtttgatgaaagcaatgttagtatctctccaactatgcttaatggctcccagaatacaatagatcctgatcagagcagggatattgtcaacaaaacggctgagaggcaacctgatttagtaagcaagggaatacctcttccccttgctatgcatgcaaacatgtctgttcctgtcagaagtgatggcgtacttgcacatcctcttcagggaactgtttctaatgcacaatcaactgaatgcccaacaactagtgaaccacagaatcaacaggatgaactctcggttgaaggagggacaattagcatctcaagtgcatactcccaagggttgttgaataatctaactcaagcgctacaaagtgctggtttagatctgtctcaggctagtatatcagttcagattaatcttgggaaacgggcaaacaaaggactgaattgtgggacctcttctctcaagcatcatgacaacccttcttcaaacaatcaaacaattgcacattttagagatgcaggcagtggagaagactctgatcaagcacaaaaaagaatgaaaacatataagtgatatatatgtggcattttcatgagaatccacttgcatccagatttctcacttattcttggtgcagcatataacttgtggttactgtacatccttccccatttgtttgacttttaatggttattttaaaactatttaaaccttgaacacgataatttgtggagatattgaggcttctactgtagggagcatgtcatctatttcgcttgtataatacatattataattataattattcagtattattgagcttttggatggc

SEQ ID NO: 6352 - DNA, 519 bp, Glycine max
  Clone ID: 700562244_FLI
tgagatctttgcctgcactgtaggtcagaaacctagcaaggccaaatattatcttgatgatcctgctgatgtcttgaagttgcttcaaggccttggtgcttcatctaagccaaagtcaaggcatctagcacaattccaagtttcttttgagagcacggtttgagttattggttgcttgtgcttcttctcttgttgagaggattaatattcttcacatgtgaatcagggaatgttaggttattaatgttgcccctgacatatatggtgggaccttgctgttgcagataggattctttgcgttcagtagtgcggtaatgagcttgacaaattcttctcacgtaaatggttacatcaaattgttgtatttgctggtgccacctatagctgtagttgttcctagaactgtagaacatatagttgtttgcattgaacatgaggcaccaaatagcttgtacagttacactatttttcttcactatacataatgacgatctggtttgagatatcttgcttcagccc

SEQ ID NO: 6353 - DNA, 676 bp, Glycine max
  Clone ID: 700562266_FLI
tggcaagcttgcagatgtctggtcatgtggagtaaccttatatgtgatgctagtgggagcatatccttttgaggatcctaatgaaccaaaggactttcggaagacaattcagagagttcttagtgtccagtattccattccggacggtgttcaaatatctccagagtgtcgccaccttatttcaaggatctttgtttttgacccggcagagagaatcaccatgtctgaaatctggaaccatgaatggtttctgaagaatctcccggcagacctgatggacgagaagataatgggcaatcaatttgaagagccagaccaacccatgcagagcatcgatacgatcatgcagataatttcagaagctaccgtaccagcagttgggacctattcttttgaccagtttatggaggaacaaatttatgacttggaatctgaatctgatgctgaatctgatcttgatatagatagcagtggggagatagtgtatgccatatagtttgatcttagttacacttgaaagacaacaacatattaaatggagagagcattttcagcatcaagagatatatacgtggtgcccgcattttctgtagattagcatggataatacaaacttcatgttaatatttatgtattcagtgttggttgctgagggaagaaatgattgttacccttt

SEQ ID NO: 6354 - DNA, 1300 bp, Glycine max
  Clone ID: 700562302_FLI
ggtatataaatcgatgcctttgctcaggaactatgattacgttgcaggcctgcaacattgaggaagatggtttatttgtttttgatttgcatagtgatggcagtggccaaaggtttgtgcttcttgtattgtattactgaaaagagctgtaagctttgtaattaagcacgtacttactcttactgcatgtaggcacttgaatgctgccattagagaaaacgagtcaaataatccattggattcaaatggttctgtttttggctttcctcccaaccggtccccatattcatgcattcaaatgaatgggaaagaagtcttttgctttgctgtaagatgtgtaccacaatcaattgaatttgcccttggaaaggctggtctcccggcatctagcattgattggttacttctacaccagttacacaaaatgatctagtataaaataaaattctagcattttattgggatgcgcaaaattgtgttttttttacgttggcttatgatctgtgcaataaatattttcttcttttagttcattaaaccattatcctaaagggcactggttagcattacccttgtttttatcctttacttgctaaagtagctggcatcaggttaatttgtatgctcatttcctagtaaaaagaatgtgaaagtgaaatgtaaattaaaaaggtggaaaacctgatctatcctttatatcaagcaattcattagctgcacatgtgtgttatactattactttgctgagtggtaagatcaactttatgattgaaaacagaataccattttagttactatgggaattgcatgacatgcttgataatatattggagaaaggcaaaattaaggttgcatacttgcacttagggtgccttaattcatataagtgcaggcaaacaagaggattatcgatgcagttgccgctcggttagaactcccctcagaacgggtgatatcaaatttggctaataatagtaacacaagtgcagcttccattcctttgactttggatgaagcagttcgaagcggtaaagttaagccagggcaaactattgcaactgctggctttggcgcgggtcttacttggggttcggcaattgttcgttggggctaaatgcttttccttcactgcagaatcactactagagaagaatttcagttccaagtgtagctttcttacacatatgtgtagaaaatggggtttggggaatttgcaaaaggatggatatgaataacattcagcactgcctcaacttgtcatattctttttgtcttcaatttacattctccttgctcttct

SEQ ID NO: 6355 - DNA, 1516 bp, Glycine max
  Clone ID: 700562326_FLI
gacttaacaacagcacaaagcgggttactgtctgttcaagctaccatctctctctctctttcttagtgcctccttgccagaagttaaaatggcccaagaaactttcctattcacatctgaatcagtgaacgaggggcaccctgacaagctctgtgaccagatctccgatgctgtgctcgatgcatgcttggagcaggaccctgacagcaaggttgcctgtgaaacctgcaccaagaccaacatggtgatggttttcggagagatcacaaccaaggccaacgtggactatgagaagattgtgcgtgacacatgcaggaacattggttttgtctctgatgatgttggtcttgatgctgacaactgcaaggtcctcgtcaacattgagcaacagagtcctgatattgctcaaggtgtgcacggccacctcacaaagaggcctgaggagattggtgctggtgaccaaggtcatatgttcggctatgccactgacgagactcccgagctcatgcccttgagccatgtccttgccacgaagctcggtgccaagctcaccgaggttcggaagaacgggacatgcccttggctgagacctgatggcaagacccaagtcactgttgagtactacaatgacaagggtgccatggttccaatccgcgtccacactgtgctcatctccacacagcatgatgagactgtcacaaatgatgagattgcagctgatcttaaagaacacgtgattaagcctgtgattcctgagaagtaccttgatgagaagaccattttccatttgaacccttctggcaggtttgtcattggagggccgcatggcgatgctggtctcaccggccgcaagatcatcatcgacacctatggaggatggggtgcacatggtggtggtgccttctctgggaaggatcctaccaaggttgataggagtggtgcctacattgtgaggcaagctgcaaagagcattgttgcaaatggacttgctaggagggcaattgtgcaagtttcctatgccattggtgtgcctgagcccttgtctgtgtttgttgacacttatggcactgggaagatccctgacaaggaaatcctcagcattgtgaaggagagttttgacttcaggcctggcatgatctccatcaaccttgatctcaagaggggtggaaatggcaggttcttgaagactgctgcatatggacactttggcagagatgaccctgacttcacatgggaagtggtgaagccactcaagggggagaaggtacctgcttaactaaaaggggttccaacactcttggcaagggacttttgcactactactggcttcttattatctgattgctaaaattttctctatgtttccttccctcttactcaattctgtttttttttttctgtatttttttatgaatttcccccttttttttgtgtacttgtatgtgttctttcagaacatatatattttatatgatgaaacaaaaaaaaatgttctctcaagatttatgctagaaat

SEQ ID NO: 6356 - DNA, 717 bp, Glycine max
  Clone ID: 700562348_FLI
ggtgagggagcccaacaagaagaccaggatttggctggggactttccccacgccggagatggcggctcgggcgcacgacgtggcggcaatggccctgaggggccggtatgcctgtctaaactttgctgactcggcctggcggttacctgttcccgccacggccgaggcaaaggatatacagaaggcagcagcagaagctgcccaggctttcagaccagatcaaaccttaaaaaatgctaatacaaggcaggagtgtgtggaggcggtggcggtggcggtggcggagacaacaacggcgacggcacaaggggtgttttatatggaggaagaagagcaggtgttggatatgcctgagttgcttaggaatatggtgctcatgtccccaacacattgcttagggtatgagtatgaagatgctgacttggatgcccaagatgctgaggtgtcactatggaatttctcaatttaataatgtgttttggtttggtttttgttgttagttttttggagtgaacagtgtctgtactggttttttattagtagtacggatactagttataggtggaaagattgcgagggaccaaaaggaattttcttttgaacccttttttgtcaatgtaatcaatatcacgtatatcatgaagtgaatcccttcaagtttatgtataaattaaataaaagaaaaatctagttttggttatgaatctttgttaaagt

SEQ ID NO: 6357 - DNA, 720 bp, Glycine max
  Clone ID: 700562358_FLI
ctgttttgtgtttcgttgcgttgtgtttaggttctgatctgattttggattttggttaggttttcgcgatggcatcgaaacggatcttgaaggaactcaaggatctccagaaggatcctcctacctcttgcagcgccggtcctgttgctgaagacatgtttcactggcaagcaacaattatgggtcctccagacagtccttatgctggaggtgttttcctagtcactattcatttccctccagattatcccttcaagccacccaaggttgcattcagaacaaaggtatttcacccaaatataaatagcaatggaagcatttgccttgacatattgaaggagcagtggagccctgcgctaactatttcaaaggtgttgctctcgatttgttccctgttgacggaccctaatcctgatgatcctttggtccccgaaatagcccacatgtacaagacagacagaaacaagtacgagtcaactgccagaagctggacccagaaatatgccatgggttaagtgacctgtggtatgtgtgaggaagagcctttctactcccagtgtttaggcctctcagcccttgtatgaatatttgtcgtttttaataaggcccctccagttgaagattaatggagcaaaacgtttctcctgttgtttgtactgcaaatgttaatttagaacagtgaaatgttgcccccaatcaaatatgctcaaatttttaacc

SEQ ID NO: 6358 - DNA, 1674 bp, Glycine max
  Clone ID: 700562414_FLI
aatcaaacgaggcgctgaactgagccatggcaccgcatgatctccgccgtccgttcaagcgaccagcgatctccgatcaagagcggcgcagggaacagtctctgctccgccaggcacagagtcgccaagacgcccagcgccacgcgcgcttcttggcctccgccgcactctctctcccacccaaaacccccgaaccagaatccgaacccaaacccgaactcgcggaaaccgaagccagttcggattccggctacgagagcctcgacatcgttggagcgtcgacgctttcagctgcggaagctcgcaagtggttcgcgaagcagctcatgcacccggagtggatgatcgacatccccaacaacctcgcccaagactggttcgtcttcgctcgcccttccgggaaacggtgcttcgtcgtttcgtgcaacggaacgacgataagtcgtttgcggaacggtgccattctgcatcggtttccctccgccttgcctagcggggcaaggaagaaggacccctcctactctatactggactgcatctttcacgaggtggatcagacttattacgttattgacatggtttgttggcgggattaccctctgtctgattgcactgcggagtttaggttcttctggttgacctcgaagcttgcagagactggtgcctttgaccctccctcgtattatcacaagtataggttcagtttggttcccgtgtatagttgtgactcgagtggtctctatgctgcgtattcagcaccagtgccttatgtcaaagacggtcttcttttttataacaagcattctcactaccaagcaggaattacgccgttagcattagtttggaaggacgagaactgtagtcaatatgttttggacacagacagtaaaggacaggttccaaaccaacagcaggtggttttggagcttcaagaagatggaaaactgactacctcagatgatcctcctgtggtgtttggctgtttagatggaagctttatacaacagtcagggctgcattcaggatgtcttctacggttttcaattggagagggaggatttgttttgatggatgggaagcttgagaaagccgatctacattatcttggcaaggccaatcgagctcgtgcctctgctgatagtttctctaaggttatgttccaacacagtgttcgacactctcccctcagaattgaaggtctgctggaatctgtcggtttaccagttgatcaagaaagcaaagcttgtgatgttgagatggatggttgacaggaatgcattatgagttgcatctgtttttttatcctgagcgcaatgttaagatttttcaccttaaatttttggttcactaggatgcttatttctgtgaaggctttcataatttatattggggattcagaagattgataactaccacacttgctgaggcagagacttgaaatagtcatacctattgactattgtgatttgtaaacgaaatttcttcaacccagatgggagcaggtgcacatatgcatgttatccttctattgtctggttcatttgatgcctggtagtctaatcgttgtatttgattgagttttattatttcgagccatgtagtgtgtatggtgtagcatatcaattgtacagtctattaaaattttaaagttgaaatcactacatatatgaagtt

SEQ ID NO: 6359 - DNA, 1358 bp, Glycine max
  Clone ID: 700562437_FLI
ccgagggatccggatctgcgacgaacggggtgctggctccgccgcgcaaggtggcattgataaccggaattaccggacaagacggttcgtacctgacggaattcctcctggacaaggggtacgaggtgcacggcctgatccgccgctcgtcgaacttcaacacgcagcgcatcgaccacatatacgtggatccccacaacgcccacaaggcccgcatgaagctccactacgccgatctctccgacgcctcctccctccgccgctggctcgacaccatcctccccgacgaggtctacaacctcgccgcccagtcccacgtcgccgtctcattcgagatccccgactacaccgccgacgtcgtcgccaccggcgccctccgcctcctcgaggccgtccgctcccacatctccgcctccggccgctcccacatccgctactaccaagccggctcctccgagatgttcggcgccacccctccgccgcaatcggaaaccacccccttccacccccgctccccctacgccgcctccaaatgcgccgcccactggtacaccgtgaactaccgcgaggcctactccctcttcgcctgcaacggcatcctcttcaaccacgagtccccccgccgcggcgagaatttcgtgacccgcaagatcacgcgggccgtgggccgcatcaaggtcgggctccagagcaagctcttcttgggcaacctgcaggcctcgcgagactggggcttcgctggggactacgtggaagccatgtggctgatgctgcagcaggataagcccgatgactatgttgtggccaccgaagagtcccacaccgtcgaggagttcttggaagtcgcgttcggctatgtgggactcaattggagggaccatgtcgtcattgacaagaggtactttcgccccgccgaggtcgataacctcaaaggggacgcttccaaggccaagaaggtgcttggttggaagcccaaggttgggtttgagcagcttgtcaagatgatggttgaccaggacattgagatggctaagaaggagaaggttcttgttgatgctggctacattgatgctcagcaacaaccttgatctgatctgcaacttcccaaatttttagataaatgttttaattgaggatggaggaggggggtttttctgttttgatcttataatgccgctgttcttttaaatcattcttcatagttgacacagtttaatttatgagtaatttattttgttttcgtgttgcaactgttatttattagtcgtgcattttttcggactttattttattttttgtaagcctgctgattcattcaattaaatctatatgcatctacatccatagtcttgttgtag

SEQ ID NO: 6360 - DNA, 1228 bp, Glycine max
  Clone ID: 700562872_FLI
gaccaaccaactggaactggctttagttacagtactgataagcgtgacattcgtcatgatgaagaaggtgtgagcaatgacctctatgactttctacaggccttctttgctgaacatcctgagtatgtaaagaatgacttttttattacgggtgaatcatatgctggacattatattccagcttttgcagctcgtgtccataggggaaacaaagctaaagaaggaattcatataaacctaaagggatttgccattggtaatgggcttactgatcctgggatccagtataaagcttatacagattatgcactggacatgggcataattcagaaggctgactatgaacgcatcaacaaagtgatggttccagcctgcgaaatggcaataaaactatgtggcactgatggaaaaatcgcatgcacggcatcatattttgtttgtaatacaatattcaattccatcatgtcacatgctggtgatatcaattattatgacatcagaaagaagtgtgaggggagcctttgctatgatttttcgaacttggagaaatacttgaaccaaaaatctgttcgggacgcactaggggttggagatattgattttgtgtcttgtagttctacagtttatcaggctatgctggtggattggatgaggaatcttgaagttggtattcctgcccttcttgaggatggaatcaatatgcttgtgtatgctggggaatttgatctcatctgcaactggcttggtaattcaaaatgggttcatgccatggagtggtctggccagcaagaatttgtggtctcatccgaagttcctttcacagttgatgattctgaagctggattattgaagaagtatggacctttaagtttccttaaggtccatgatgcgggtcacatggttccgatggatcagccgaaggcttcgttagaaatgctgaagaggtggactcagggaaccctttcagaatctgcagctgatgcggagaaattggttgcggagttgtaatcactttcgttattgcaattagtccagaaaagggatacaaaagtattatgcaataaagagaagggaattaaagtgatcagcatgtgttattaattataaagtgagattgaatcaaggccatgcaggaaaaaaactattcatatatagaatttcgtgtgtgcatgtatactgttttaataaaatgctgagatgtaaattgcttacacctcatattgtgctt

SEQ ID NO: 6361 - DNA, 680 bp, Glycine max
  Clone ID: 700562893_FLI
gaaaataagaagaaataaagacaagtgtagtgtagggaaatcaagaggttgtttcggtgtttggtgtggaccgagacaacatgtcaaacttcaaggctggttatggccacttctcaacaaatgtcaaaggggtgtttgcagccggtgattgtcgccgtggtcagtccctggtggtgtgggcgatttcagagggacgacaagcagcagcacaggtcgacaactacctcgtcaaagaagacaaagaccaccggaatcaggatggccttgtcaagagacagcagggcctctacaagaagcagcatggaagcagcaaacacacggtgatgacttataggtggctcctctgatttttcatactcataaagttccaaaaggaattgcacagaataaaattgttccaagtttgagcaggagattcattggtttactttaaacgggaaaaataagaagaaataaagacaagtgtagtgtagggaaatcaagaggttgtttcggtgtttggtgtggtttcagggtataaagttgttgcagattcgagtgttcagttgttcaatgattgttttattcgggcttttattgttgggaaggttagcttttagttggtaatggtgatgacgattatatgtaatgaagtgtacagtttgataattattatttagaagtgacatcgtttcgattct

SEQ ID NO: 6362 - DNA, 2015 bp, Glycine max
  Clone ID: 700562909_FLI
gtcaaacagtgctttgactcaattggaatctcgtatatttggaatcatggataactcatatgattcatcctcatccttgagtttcgtatcatctcacctgtcacatggttctagtaatcacaacgtgtcttccaccaccagcaatgagcatggggaaaatattgaaattttgagtctgaataagctcagtggaagccttgagaagctattgattgaggttgagtatgattatagtgatgctgagattcttattgaggacatccctgtgggtattcatcgctgtatattggcatcgcgtagtccgttttttcatgagctttttaagaaagggactgatggatcagggaaggaaggaaagccaaggtatctcatgtcagatttgatgccttatggcacagttcgatatcaagctttccaagtgttcttgtactatctgtatactggaaggctaaaggcttcaccaacagaagagacaacatgtgttgatgaaacatgtatccatgtagcatgccgccctgctatcaatcatgccctagagctgatgtatgcttctgccacttttcagatgaaagagctagttttactttttcagcggcatctcctaaattttgttgagaaggctcttgtggaagatgtcattcctattcttatggctgctttcaactgccaactagaccagcttctctctcggtgcattcagagagtagcaaggtctgactttgacaacacatctttggaaaaagagctccctcatgaagttttgactgaaatcaaatcactccgactctcatttcagccagaatccacacctaatgcaatggaagcggagtccttgaatgaaaagagtatcaggagaatccacaaggcattggactctgatgatgttgagctactgaagcttcttctaaatgagtctagtgtcactctagatgatgcatatgccctgcactatgcttgtgcctatagcgattctaaggttattcaagaagttcttagtctaggcatggctgatattcttcgtagaaattcccgaggatacacagttctccatgtggctgcaaggcgaaaggatccatccattttggtagcactactgaataaaggggcacgtgcatcagataccactccagatggacaaaccgctcttgcaatttgtcagaggttgacaagatgcaaggattatcatgagaaaacagtgcagtgtaaggaatctaacaaggacaggctttgtgttgatgtcctggagagggagatgagaagaaattctatgactgtgaatatgtctgtttcatcacagttaacagctgatgatttgcacatgagactggattaccttgaagatagagttgcatttgctcggctgttgtttcctgcttaggctagggtagccattgagaatgctgaagcagattcatcatcactgtatgcaaattcatcggctttgaaggtcacaaatggcaacccgaaagaagtagatctaaatgaatctccctcggctcgaaccagaaaactccagttaagattgcatgcccttatgaaaacagttgagaatggtaggcgcttctttccccattgctctgaagtgcttgataagtttctggaagacgacgaaatgccagatgttttcttcctagagaagggcagtgaagaagagcagagaatcaaaaaaagcacgcttcatggagcttaaagatgatgtgcaaaaggcatttcacaaggatatggctgaaaataaccattctggtttttcatctacggtgtcttcctcttcttcctcaactcgtagggaaggtcttaaccatagagtaaggagaaaatgaagtccatgttcttctatgtagagtgttgcaacttgcaagtagaagccgtggaatatttagaaaaaataagatggaatgttaaattagggggttttgctaatgaacttgggagatttttactagcttgatttagtttcttatagttgttggaccaagagaagaagaaaaataaaagaagacgaattggcttatagt

SEQ ID NO: 6363 - DNA, 1018 bp, Glycine max
  Clone ID: 700562930_FLI
ctggtggagagctctttgagaggatttgcagtgctggaagattcagcgaagatgaggctcgatatttcttccagcagctcatctcaggagttagctactgtcattccatgcaaatctgccatcgagacttgaagctggagaacaccttattggatggcagccctgccccacggctcaaaatttgtgattttggttattctaagtcatctctgcttcattctaggcctaagtcaacggtgggaaccccagcctacattgcaccagaggttctttcacgtagagaatatgatggaaagttagcagatgtatggtcctgtggagtgactctttatgtaatgctggtgggagcatacccatttgaagaccaagacgatcccaaaaatttcaggaaaaccatcaatcgaattatggctgttcaatacaagatcccagactatgttcacatatctcaagactgtagacatcttctatctcgcatttttgtggcaaatccagctaggagaatcaccattaaggaaatcaagtcccatccatggtttttaaagaacttgcccagggaattaacagaagtagctcaagctgcctactacagaaaagaaaacccaaccttttctcttcagagtatagagggcatcatgaatattgttgaggaggccaagactccacctccagcatccaggtcaattggaggatttggctggggaggggaagaagaagaggatgaaacaaaagaagaggaggatgaaacaaaagaagaagcagtgaccgaggctgaagaagatgagtacgaaaagagagtcaaggaagcacaggcaagtggggaatttcatgtcagttaaaaagtgtttattcttagatagagcaatagattcttggtttcctttgcacttggctaagttctactaaggtgagtgtgttgtgctcgtatgtataaaatttaggttttccacatgggacatttagtttgataaatgactgtacatttttttaaggttgtgtttggttgttaattatgatc

SEQ ID NO: 6364 - DNA, 1583 bp, Glycine max
  Clone ID: 700563109_FLI
gttctctctcacgagagcacggtcgccgaagaagtaagaaaaccaatgccagaaaccgaaagcgcggcggcggcggcggtggaggaggagaacaacaccgccctgttcggaaaatacgaggttggaaggctcctaggatgcggcgcgttcgcgaaggtgtaccacgcgcgcaacaccgagactgggcagagcgtggcggttaaagtcataagcaaaaagaaactaaactcgtcagggttagcttccaacgtgaaacgcgagatttccatcatgagccgcctccaccacccaaacatcgtgaaactccacgaagtgctcgctacaaaaacgaagatctactttatcttggaattcgcgaagggcggcgagctcttcgcgagaatcgcgaagagccgattcagcgaagatctcgcgagacggtattttcagcagctcatctccgccgtcgggtactgccacgcgcgcggcgttttccaccgcgacctgaagccggagaatctcctgctggacgagcagggcaaccttaaagtctccgactttggactcagcgcggtgaaggaccagataggggtggacgggttgcttcacacgctgtgtgggacccctgcttacgtggcacccgagattctcgcgaagaagggttacgatggggcgaaggttgatgtttggtcatgtgggattatcctctttgttcttgtcgctgggtatcttccgtttaatgatcctaatttgatggttatgtataagaagatttacaaaggggagtttcggtgtccgaggtggttttcgatggagttaaggaggattctgacgaggttgttggatacgaatcctgatacgagaataaccgttgatgagatcatgaaggacacgtggtttaagaaggggtataaggaggtaaagtttggggatttgggtttggagtggaagagtgagggtgagggtgtcaaggatttgaatgcttttgatataatttcgttttctacggggttgaatctttctgggttgtttgattcgtcgtgtggggtggaggagggggagaggtttttgctcagggagtcgccggagaaggtggtggagatgctggtggcggcggcggagaaggagggggttgtggtgaggatgaggaaggagtgtggggtggagttggaggggtgtgggggtaatttcgctgctttggtggaggtgtaccggttaccgggagagctggttgtggtggaggttagaagaagggatggggatggtggggtttttagggatgtgtggaggaataagctgaggccgtgtttgtgtgctgcgagtagcagtacgacgtcggatcgggatggaacaactttggcgcagccggttgccggtgattcatgattaggggttattatttttttctctctctcttctttttaattcctaattttaaataaaattgaaaaaaaataggcaggtggaggtttgaaaattgaaatgtgttatggccgaaatgtaatattggctggccattgtgaagtgggggcacaaatggatttggaacacttgtgtgaccaagggtgcattgcaagttaatgatgtatatttttatgatgctt

SEQ ID NO: 6365 - DNA, 1955 bp, Glycine max
  Clone ID: 700563111_FLI
cgaagaacagacaacactgactagtcccagagcgacggctaagcctctttgttctctgtcccaagcttcgagcagaagaagaatcaaatatcactactttgattttgagctctattgcctttgccatcaaccggcagccatgtacagaaacgctgcttcacgtcttagggccatcaaggcccgttcgtgcagcagcagcagcagggtacctgccagtgccagatttgcaagttccgttgccacgcaacaatcctcttcttctggtttgggtggtttatttggatggctcactggagaccgaaccagttctttaccatctctgggttttccacttccaggcgttacacttccccctccattgcctgattatgttgcgccgggtaaaactattattactacactcccaaatggactcaaagtggcctctgaaacatcaccgagtcccactgcgtcaataggtttatatgtagattgtggttcaatatatgagagtccgataagttttggggctacgcatctgcttgaacgaatggctttcaagaccactagaaaccggagtcactttcgggtagttcgtgaggtagaggcaattggtggcaatgtgcaggcctcagcttctagagagcagatgggttacacttttgatgctttgaagacctatgttcctgaaatggtggaactgcttgttgattgtgtcaggaatcctgttttccttgattgggaggttaacgagcagcttctgaaagtgaaggctgagattggtgaagcttccaaaaatcctcaagatttacttttggaagcaattcattctgctggtttttctggtgccttggcaaatcctcttttagcttcagaatcagcagtaaatagactaaatagtacaattctggaggagtttgttgctgagaactatacggcacctcggatagtacttgcagcatctggtgttgaacatgaggaattgttatctattgcagaacctcttttgtctgatctacccagtgtcccgcgtccagaggagccaaaatcagtgtatactggtggtgattatagatgtcaaaaggaatcagggaggacccattttgctctagcatttgaacttcctggtggctggcataagttgaaggatgctatggttttgactgttcttcagatgctattgggaggcggtggatcattctcagctggtggacctggtaaagggatgtattcacggctatatcaaaatttctgaatgaatatccacaagttcatgaaatttcagcattcaacaatatttacaatgacactggcatttttggtatccaagttacaacaggctcagattttgtatcaaaagccattgatatagctgctaatgagattcttgctgttgctactcctggacaagttgaccaggtacagctggatcgagccaaacaggctaccaaatctgcaattttgatgaatttggaatcaagaatggttgtttcagaagatataggaagacaaattttgacatatggtgagaggaaacctgtggaggatttcttgaaggcagtggatgaagtaacctcgaaggatatcacttcaatttcgcgaaagctcatttgttctcctctcacaatggcatcatatggagatgttctctatgttccaagctatgaatcagtgagtctcaaattccgtgcctaatgagattgctttcatccacccatcatattgagtcttctttatatacaatcaagtcttgtacggatgaaaggtgtaaaattaagttaaacttcctaactatccttgttgtagtcaataaattagtgattttcacatctcattatttctgggtacataaacattgatctgagagttctcacatgactattttttggactgaacttaaaactactggattattttttggattgaatctctttgggaaaccaaatcataatcgaatatcgttgttatccattggt

SEQ ID NO: 6366 - DNA, 954 bp, Glycine max
  Clone ID: 700563377_FLI
tcgcgcgttacgctccaggtataaacctgaggttggtgacattgttatagggcgtgttgttgaggttgctcagaagcgttggagattggagataaattacaatcaggatgcagttttgctgctctcttctatgaacatgcctgatggtgttcagaggcggaggacagctgtggatgagctaaacatgcgctgcattttcgaggagaatgatgttgtttgtgctgaagttcgtggtttccagcatgatggcttacaccttcaagcaaggagtcggaaatatggaaagcttaatagaggtcaactgcttactgtcccaccttatttagtgaagagacaaaaacaacatttccatcatcttgaggagtttggtattgatttgatacttggctgtaatggattcatatgggttggggaacatgttgaagccaaagatgacatgatagaagatcaagtgagccaatctgattcacaagttttattccctaataaaaattgtgtcagtcttgaagaacaagagaaaaattatacaatattggagacaagaaaatacatatccagagctgctaatgctgttagagtattgtcaaccttaggcttcaatattacattggaaatcatcaagggaattattgatctaagcctatctatgaatcttgatatacacgatatgcttggttctgagttttgtgttctggttgccgaaaaagaggctgaaaggagaagctcaatgaaaaaaaggcggtagaaatggagggggctttttgactcaacaactataatttggttttcaattttactaaattagtgtgactcgtaaagataaaattcccaagatagtgtaagtcatatttcagactagcaaagtataaaagggacttgatatggatgaagtacggaatgaatgtttaaagacgttggatttttttgttatgacctttcttttcttttctaaat

SEQ ID NO: 6367 - DNA, 1622 bp, Glycine max
  Clone ID: 700563502_FLI
gaggcaatgaatgaagcatgaaacattggatgagcatgaggcgcatggcggtaggagcagtctcaaactccactctttttctaccttcctctcttctatcttcttctaaacctaatcccttaactatcccattctccttctatctcaccaaaacgtcaccgttttccatttctgttctcactcgccaacgccgcttcctttccgtttcttctttaaccgctgaccaccacaacctctctgatttcggagatggtgacagcgttgcaatttcaaacgaaggtttgaagatgcttctcaaagggatgacttatccagaacttgaaaaatgggttcaatcacatggatacaggcctgggcaggctatgatgttatggaagcgaatgtatggaaacaacatttgggcccatcatattgatgagttggaaggtttgaataaagatttcaagaaaatgttgaatgaaaatgccgagttcaaagcgcttactcagaaagaaattcgcacagcatctgatggaacaagaaagattttattcacattggaagatgggctggtcatagaaacagttgtcataccttgtgacagaggtaggactactgtgtgtgtttcaagtcaagttggatgtgctatgaattgtcaattttgctacactggaagaatgggtcttaggagacatcttactgctgcagaaatagtagagcaggctgtttttgccagacggctgctcactgatgaagttggttccattacaaatgttgtctttatgggcatgggggaaccacttcataacattgataatgtcattaaagctgcagatataatggtggatgagcaagggcttcagttcagtccccgcaaggtcaccatttcaaccagcgggcttgttccacagcttaaacgtttcctccatgaatcaaactgtgcattagctgttagtttgaatgcaactactgatgaggtaagaaactggatcatgcctataaatcgaaagtacaagctggagttgcttcttcagacacttcgagaggagctttgcttcaaaaagaactacaaagttctatttgagtatgtgatgcttgaaggagttaatgacagcgatggagatgcagagaggcttatcgagcttgtgaagggaattccttgcaagattaatcttatctcattcaatccacacagtggatcattcttcaaaccaaccaaagatgaaagaatgattgaattccggaatacattggctggtgcaggattggtagtcattttaagacttagtagaggtgatgatcaaatggctgcctgtggtcaattgggtaagcctggcaccattcaagctccattgcttcgtgtaccagagcaattccaaatggcaattggaagttcagcttgattctttgtggaggttctgttgcaaattgatctaggacacttgtggtggaggtagctagggatgacttcatgctgagaatgcaagacaaagagctatatttggaggatatctgtctgtttccatattgtacttttccattttacagttaatttatatttatttttataaatgtgaaggatcgagattccttgccggctaagaagtaagaaataaaaatagtttaaatgtttttattctctc

SEQ ID NO: 6368 - DNA, 975 bp, Zea mays
  Clone ID: 700570762_FLI
cttgtgatcgaggccgtcgtggagaacgaagctgtcaagaagaagctattcgtggagctggataaggtcacgaagccctcggccatcctcgcctccaacacgagctccatctccataacccgcctggcttcagctaccaaacgcccctctcaggtgataggcatgcacttcttcaaccctcctccggtaatgaaactgatcgagattatccgaggagccgatacgtcagatgaggtgtttgctgcggtcagatctttctccgaaagactcgggaagtccgttatatgctcgcaagattacccaggattcatcgtgaaccgcatcctcatgccgatgatcaacgaggccttctgggctctgtacaccggagtggcaaccaaagaggacatcgacgcagggatgaagctgggcacgaaccacccgatgggccctctgcagctcgccgacttcatcggcctggacgtctgcctctcagtacttcgggtactccacagcggcctgggagatagcaagtacagcccctgccctctcctcgttcagtacgtcgatgctggccggcttgggaagaagcgtggagtaggcgtgtattcgtatgggcacaggccttcgtccgtcaggccgaagtcgtctctgtaggcgtgagagcaaactgttgggcgaataaaaccaggtgcgtgttgcaattgcacgtcagagaaaaagggagcacagcctagttcagaggtactcagtcggacgcttcaggtcgcgtagattcgtaatggcagggtttgctgctctatgtagaaaagatggttcagtgtttttaatctgataagtggaagtcatgaaacatttccgcagtttgcgttctgctcgagagggtgggagaaacagaaaagctatacttcttttgtattgtaatcctctgtaaactacaaacagacagatctcactctctgaaccggtaaaggaaaccaatgagtttctattgtg

SEQ ID NO: 6369 - DNA, 534 bp, Zea mays
  Clone ID: 700570785_FLI
cccaagaacaaaaatggccaccgccaccactgaagccgaagtccgtgagtccctcggcacgaagttcggtcgcctcaaggaacaggcgaaagacatggcctccaggcaccccgtcgctggagccgcggccgtcatcgctgtcagcgccgtgggcgcctacttcttgtggcccgtggcggccccggccgtggccatgatgaaggcgcctggatccggcggtgtgctcgtctcccgcgcggcgtttctcgcgaagaaggagctgtacttcaagctcttgcgcaccgggggcgttgcggcggcggtcgccgctttggcgtagctgcgcatgcagtagtggtacatgctgttcgtgaacgagcggcgggccggacgtttcaggttgtatgttgaccaagtggttattagtactttcctttcgttggtgttgagtctcgactctcgagtttggattatctgtcaaaaacctatgtatgcgtgcatgatcagtttgatgaataatggaactcttttaagaaataaagcaagttaaagtcc

SEQ ID NO: 6370 - DNA, 1667 bp, Zea mays
  Clone ID: 700570814_FLI
ctccttttgctcggaacgcacacaccgcccgtccccgatctccgatcccctcgtcgatccaaagatgcagatcttcgtcaagaccctcactggaaagactatcaccctcgaggtggagtcttctgacaccattgacaacgtcaaggccaagatccaggacaaggagggcatccccccggaccagcagcggctcatctttgctggcaagcagctcgaggacgggcgcacacttgccgactacaacatccagaaggagagcaccctccaccttgttctccgcctcaggggaggcatgcagatcttcgtcaagaccctcactggaaagactatcaccctcgaggtggagtcttctgacaccatcgacaacgtcaaggccaagatccaggacaaggagggcatccctccagaccagcagcggctcatttttgccggcaagcagctcgaggacgggcgcacgctggccgactacaacattcagaaggagagcaccctccacttggtgctgcgtctcaggggcggcatgcagatcttcgtgaagactctgaccggcaagactatcacccttgaggtcgagtcttctgataccattgataatgtcaaggccaagatccaggacaaggagggcatccctccggaccagcagcggctcatttttgccggcaagcagctcgaggacgggcgcacgctggccgactacaacattcagaaggagagcaccctccacttggtgctgcgtctcagaggtggcatgcagatcttcgtgaagacacttactggcaagacgatcacccttgaggtggagtcctcagacaccattgacaacgtcaaggccaagatccaggacaaggagggcattccaccggaccagcagcggctgatcttcgccggcaagcagctggaggatggtcgcaccttggctgactacaacatccagaaggagagcaccctccacctggtgctccgcctcaggggtggtatgcagatttttgtgaagacattgactggcaagaccatcaccttggaggtggagtcgtctgacacaatcgataatgtcaaagtcaagatccaggacaaggagggcattccaccggaccagcagcgcctgatctttgctggcaagcagctggaggatggccgtaccctcgccgactacaacatccagaaggagagcaccctccacctggtgctccgcttgcgaggtggtatgcagatctttgtgaagaccttgactggcaagaccataaccctggaggttgagagctccgacaccatcgacaacgtgaaggcaaagatccaggacaaagagggcatccccccagaccagcagcgtctgatcttcgctggcaagcagctggaggatggccgcaccctagcagactacaacatccagaaggagagcactctccacctggtgctccgcctccgtggtggtcagtaagccatggttcatttaagctgctgctgtacctgggtatctgcgtcgtctggtgccctctggtgtacctctatatggatgtcgtcgtctaataaacatctgtggtttgtgtgtcatgaatcgtggttgtggcttcgttggtttaatggacctgttgtgtcctctgtgttgtacccaaaactcttctgcagcagtatggcttgaatccttatgaagtttgatgtttgaactt

SEQ ID NO: 6371 - DNA, 1193 bp, Zea mays
  Clone ID: 700572336_FLI
ctaagctaagccgagctaagaagcacagcaagtctcaccagactagcggctagcgcgagaatggccaaggacatcgaggccgcggcggcgcacgagggcaaggactactcggacccgcccccggcgccgctggtggacgcggaggagctgaccaagtggtcgctgtaccgcgcggtgatcgccgagttcgtggccacgctgctcttcctctacatcacggtggccacggtgatcgggtacaagcaccagacggacgcggcggcgtcgggccccgacgcggcgtgcggcggcgtcggcgtgctcggcatcgcctgggccttcggcggcatgatcttcatcctcgtctactgcaccgcgggggtgtcgggtgggcacatcaacccggccgtcaccttcggcctcttcctggcgcgcaaggtctcgctggtgcgcgcgctgctctacatcgtggcgcagtgcctcggcgccatctgcggcgtcgggctcgtcaagggcttccagagcgccttctacgtgcgctacggcggcggcgccaacgagctcagcgccggctactccaagggcaccggcctcgccgcggagatcatcggcaccttcgtgctcgtctacaccgtcttctccgccaccgaccccaagcgcaacgcccgtgactctcatgtccccgtgcttgcccctctccccatcgggtttgcggtgttcatggtccatctggccacgatccccatcaccggcaccggcatcaacccggccaggagcttgggcgctgctgtcatctacaacaacgacaaggcctgggatgaccactggatcttctgggtgggtccattcatcggcgccgccatcgccgcggcgtaccaccagtacgtgctgagggccagcgccgccaagctgggatcgtctgcctccttcagccgctagatcgatggcctcccgccggacaaggacagccggaggcgtgaactgtagatataccagaggctggacaaggacagcgtgtcgtcgttggttgcctctagccatgcgtcgttatatatgcatgccttatgatcagtttgtatttccactgcattttgcttgctttaattttccttccaagctagtgtgattgttgtgctgtacttatccgtgtacgacgagtcgacgactgggtaaaatgaaaaagaaaagaaaaaaatgcatatatttaagttttt

SEQ ID NO: 6372 - DNA, 890 bp, Zea mays
  Clone ID: 700572340_FLI
aggcaacaatcaacgcgtcagggcaaactttcaatgcgttggtgattgagaattttatcttgaggcagccgtcaagtgtgaaacaggtgagaatatttgatatgcatgcacatgcgattgcagtacgacgttgctacagcatatgcatgaacgaataatccagcaggagttgtggcaatgcgacgtggatgtggaagaagaacaggcggtgagggaggtttatgggctcaagacttcagaacccaacattctctttgcactctgctgcggcatcagatcatcgccagcagtaagtagtatgcatgtatgtattatattggcactcaattaatgcatacaacacaatgcagcttcgcatctacaaagcagatcgtgttcttgtggatctggacaaggcaaagcttgagtacctgcaggcatcgctggtggtgacatccaccaggaggctcatgatcccaagcctcctccactccaacatgcatgactttgcaaaggacacggagtcgctgcttcgatggatctgcgagcagctgcccacgtcctggtccatcaggaaatccatggtggattgcctcgccgccattaccaacaacaacaacaagctggaggaggtggtcgtggatgtcattcccttggactacgacttccaatacctgctgcccatgtgatcaactcatcatgcatcataaatattattaattgcccattccattaattccatgcatggattattattctgtaagttaactgatacagatggagttattgtgtagtcttgtctatctcattagctactaggatggactccaacaaggaaactattcaaatgttgcttgctggtgatcattatattgtagatttctagtgattacaaagtttcataactcttc

SEQ ID NO: 6373 - DNA, 799 bp, Zea mays
  Clone ID: 700572374_FLI
cacacggccgccggcctctccaagcattcagcgacgcatttgcctatatcagcactgtggtcataactctagtagagaaaggagaagatgcaggcatctagggcaaggcttttcaaggagtacaaggaggtacaacgagagaagtcagctgaccctgatatccagttaatatgtgatggttccaacatattcaagtggactgctcttatcaagggcccttctgaaacaccttatgaaggtggtgtgtttcaacttgcgttcgcaattccagagcagtatcctctactgcctcctcaagttcgatttttaaccaaaattttccacccaaatgtgcatttcaagacaggtgaaatttgtcttgatatattgaagaatgcatggagccctgcatggacccttcagtctgtttgtagagcgataattgctctgatggcccatcctgaaccagacagcccacttaactgtgattcaggcaatctcctgcggtcgggtgacatcagaggctatcaatcaatggcccgcatgtatacaaggctggctgccatgccaaagaaaggttagatgtagaacatgtgccaagccaagagcctatgtcagtccatatgttgtcaggtttgctgtgtgctgtctgtctgtgaacttggtggttcttgtttcctaataagtcctaaccattcatgtgtgtgtattctgtattctgtatcccggattcccgatgcttggtctgtgatgtaataaatcctggaattcaacagttgttacttctgatctatttatttagttgctcagtatttccgtc

SEQ ID NO: 6374 - DNA, 600 bp, Zea mays
  Clone ID: 700572887_FLI
cgagcagatctccgagttccgggaggcgttcgcgttcttcgacaaggacggcgacgggtgcatcacggtggaggagctggcgacggtgatggggtcgctgcaggggcagcggcccagcgcggaggagctgcgcgagatgatccgcgacgccgacgccgacggcaacggcgccatcgacttcgccgagttcctgggcctcatggcacgcaagaccgcggggggcggcgccggcggcggcgccgaccccgacgaggagctgcgcgaggcgttcaaggtgttcgacaaggaccagaacgggtacatctccgccaccgagctccgccacgtcatgatcaacctcggcgagaagctcacggacgaggaggtggagcagatgatccgcgaggccgacctcgacggcgacggccaggtcaactacgacgagttcgtcaggatgatgatgctctccgacggcgccggcgccggcgccgcagccacgggccaccaccaatgaacccatctccacctttcatcagcctagcgcttcccatcacgtcccttgccgatggagtggcggatcactccatccgtctctgcttcccttttctttttcaccccctc

SEQ ID NO: 6375 - DNA, 1073 bp, Zea mays
  Clone ID: 700577125_FLI
tgtacccagtcgtcccggggcacgagatcgtgggcgtggtgaccggcgtcggcggcggcgtcacgcggttcaaggccggcgacacggtcggcgtgggctacttcgtggggtcctgccgctcctgcgacagctgcggcaagggggacgacaactactgcgcggggatcgtgctcacctccaacggcgtcgaccacgcgcacggcggcgcgcccaccagggggggattctccgacgtcctggtcgcgagcgagcactacgtggtccgcgtccccgacggcctggcgctggaccgcaccgcgccgctgctctgcgccggcgtcaccgtgtacagccccatgatgcgccacggcctcaacgagcccggcaagcacctcggcgtcgtcggcctcggcggcctcggccacgtcgccgtcaagttcggcaaggccttcgggatgaaggtcaccgtcatcagcacgtccgccagcaagcgccaggaggccatcgagaacctcggcgcggacgagttcctcatcagccgggacgaggaccagatgaaggcggcgacggggaccatggacggcatcatcgacacggtgtcggcgtggcacccgatcacgccgctgctggcgctgctgaagccgctggggcagatggtggtcgtgggcgcgccgagcaagccgctcgagctgccggcctacgccatcgtgccgggcgggaagggcgtggctgggaacaatgtcggcagcgtcagggactgccaggccatgctcgagttcgcggggaagcacggcatcggggccgaggtcgaggtcatcaagatggactacgtcaacacggccatggagcggctcgagaagaacgacgtccgctaccgcttcgtcatcgacgtcgccggcagcctcggctctgccgcctaggcatggctgcaaaggtttcaatcagagcccagccgcaataatttgttagctaccgaatgaatgatggtctacgcttgttgatgagttggtgctttgtcgtggttttgtggatgtaataattcgatgtacaaataaaaaaaggggagacaaggtgcttgttcccttggtttggtg

SEQ ID NO: 6376 - DNA, 1465 bp, Glycine max
  Clone ID: 700562473_FLI
gggaagcttcttaggtccactgtttgtacacactgcacttcaaacagaccccgaagctgttgaatctgcaaggggtcgtcagctgcgctttcttgcaaatgttgatcctattgacgtggctagaaatatcacaggattaaatcctgaaacaacacttgttgtggttgtttcaaagacttttacaactgctgagactatgctgaatgctcgaactcttagagaatggatttcatcagcacttgggccctctgcagttgcaaagcatatggtggctgttagcacaaatctcacgcttgtggaaaagtttggtattgatcctaaaaatgcttttgcattttgggattgggtcggtggtcggtatagtgtttgcagtgctgttggaattttgccattatctctacaatacggtttctctgtgatagagaagttcttaaggggggcttcaagcattgatcaacatttctattcgcagccatttgaaagcaatatacctgtgcttctgggtttgttgagcatatggaatgttacatttcttggatatcctgccagagccatcttaccttatagtcaagctctggagaagtttgccccacacattcaacaggttagcatggagagtaatggaaagggtgtctcgattgatggcgtccctctaccatttgaggctggtgaaattgattttggtgaacctggaactaatgggcagcatagcttttatcagctcatacatcaggggcgtgtaattccttgtgattttattggagttgtgaaaagtcagcaacctgtctttctaaaaggtgaagtggtgagtaaccatgatgagctaatgtccaactattttgcacagtctgatgcccttgcatatgggaagacagctgagcagctacaaaaggagaatgtttccccacaccttattcctcacaagacattcagcggcaatcgaccttctctcagcctactgcttccatcattgaatgcttataatattgggcagttgttggcaatctatgaacacagaattgctgtagagggtttcatttggggaatcaattcttttgatcagtggggagtagagctggggaagtcgctggctactcaagtcagaaagcaacttaatgcatctcgtactaaaggagaaccagttcagggctttaatttcagtactacaacaatgttgacaagatatcttcaggcaagttcagatgtcccagcggatctgccaactgttttaccgaagatctaagcacctttttgcagattgttattttgatgattaagaagaaaataatctggtcttgtatagcatgaccacggacatgtttattaactggtttagcacgatacttggttatccttttctcttgccgttgagttatgttctgctgaaaagtggaaagcattttggattctaaattttgtttggagcttgtcctctgacatgtttcgatatcctcattattttttt

SEQ ID NO: 6377 - DNA, 2511 bp, Glycine max
  Clone ID: 700562474_FLI
aacgaaccaaacgcgtcaacgaaggcggcttctctctctcgtctcagcttttctcctttcgttcgctttcgcttttcgtgtcgccggtaaggcaattcgatacctctgaaccctaatcagacgcagccaccgtttagggtttccatcctcctctcatactttgcctgattgctttcgtgtttcgtttctctcttttcatttcaatttttgatacggtccgctgttgattgtattatatcctggaaaaagtaaagaacattataattggtttttgtcgtgtggatttttgaatgattgattagggttgtgtgaatcattgaaaaaaaattgaatcctccgttctgatttttccggagggttagggtttggaaatttggggatttttttagggtttgggtttgaaatacatttctcttcgattcttaattgcttattgagaagacttgtgcttgtgcttgtcaatcacatggaggcagggcgaaaaagtgtttctctgagaagagaattttgcaaatatggttccaccatcgggtttgatcaccatagcactcgttctttcgatgtggaagtgggtggttctcgcaaccaccacttgtctcgttcgggagtggagcggttccatgttgaaaaagaggaaggtgagatctatgttgaacacgagcttgcctctgtggtgccaccgcccgagaagaagaggaagttttctccaattatatgggacctagcagtgaaggaagaaagagtctcttcaaagagtaggatctcgcagattgctgctctgtctcctcctcgtccatctctacctagcagtcctggagcctatgttgttgattgtgggaatgttatggaggagtttttgccagattcacgaagctacaaacaagatgtggaggaagagaatgatgtgcaaggttggacaatcaaaaagtcaagatgggattgtgatgatgttccgtcaccaaggggggctgatgaaaaacagaagcacggtaaagtgagctccagtcctgaaattggtggtggatcgtcggagagcacaatcactagatcatcaggaagcaatggaagagatcattattcgggtgcttcgtctgatgacaccgattctgaaaaggacttccttttggattccatggtcgatgttgaggaacaaagtgatgatgattattctctgtcagattctgatgagactggtggactgatgcatgggcagagaaacataaacatgcttcagagttgcagaagtgtgtgcgagtttgagatgattaagaagataaacgaaggaacttatggtgttgtctacaaggctagggataagaagactggagaactagtggcattgaagaaggtaaagacgaacatagagagggatggctatccgatgtcatccttgagggaaataaacattctcttgtcttttaatcatccctccattgtgaatgttaaagaagtagttgttgatgattttgatggtacttttatggtaatggagcacatggagtatgaccttaaggggctgatggaggttaagaagcagccctttagcatgagtgaaattaaatcgttgatgcgacaacttcttgaaggtgtcaagtatctccatgataattgggttatccatagggacttgaagtcatcaaacatcctgcttaaccatgatggggagcttaaaatatgtgactttgggttgtcaaggcagtatggaagtccgctgaagccatatactcctcttgtggttacactatggtacagagcacctgaacttttgctgggtgctaaagaatactcaacatcaattgacatgtggtcagtgggttgcataatggctgaattaattgtcaaggagcctctgttcaggggtaaaagtgaacttgaacaactcgacaagatttttcgaaccctgggtacacccgacgagaaaatttggccaggattatccaaattacctggggctaaagcaaattttgttaagcaaccgattaatacactaagaaagaagtttccagccgcgtcatttactggtttgccagttttatctgagctgggatttgacttgttgaagcggctgctaacttatgaccctgaaaagaggataacagccgaagatgctctccttcatgattggttccatgaagcccctcttcccaaatctgatttcaagccaatttttccttcttggcagtgatgggacaggtactcttgctggatgcatgaaataccaagatcaatgctatttttactgtcattatttccaactttgtcttaccttgttaatgatcatatacaaagaatgatatgattgcaagggacagggtaatggacttcattaggctcttgtttgttataaattagattagaagcggcagattgatgtatagacctgagaaggtatggcattacctgatttttttcctttactgaaacaaaaatgtatcctctcttgtgctggtgaaaatgatgtacatacatttcaggacaatttagtaatagatgatggatatttgctctggt

SEQ ID NO: 6378 - DNA, 724 bp, Glycine max
  Clone ID: 700562506_FLI
gttggtcccaaaacaactggactgttccagaatgctctgaaggacgccatataatactggaacagtccagttggtcccaaaacaactcacttttggggacctattgccaactggggatttgtagcagctggattggctgacctgaacaaacctccagaaatgatctctggcaacatgacaggagcaatgtgtgtctattcagcattgttcatgagatttgcatggatggttcagccacgcaactatctactttttgcttgccatgcctcaaatgagactgttcaactctatcatttttcccgatgggcaaaggcacaggggcttctgtcggaaaagaaggaggaagcttcatcccagtgatttgatgatgctaacacattcttgagtggagcgattttaaagattttgcatttgaacttggtgatgtatgaataattgattactgattgtaagaaacggctcgtggaaactgtaaaagattgtggctgtaccagagtattcggattagaaaggatttctcagaagtctaaactatttgttgaaggcatatgggtggttttaatatgtctaacatctgactgacccaaaagtctttaaacttatagcacaggcaaaggatttgtctatatctcacactgaaattccgttcaattactctacatagttgggggttaagaattgttctgtgactatttattcattgaaacttggatgtcatgttaat

SEQ ID NO: 6379 - DNA, 1311 bp, Glycine max
  Clone ID: 700562557_FLI
ctagagttaagagaggagatgggagaaatagaaagagaggagatgtcgtcgacaaggtgggagaaggaggaggaagaagaagaagaagaggcccaaatggatatctggaagtacatatttgggtttgtggaactggcagtgataaaatgtgcgattgagcttggcatagctgaagccatagagaagcatggaagtcccatgacactatcggagatatcatcaagtttagggtgtgatacttcacatctgaagcgcatcatgaggttcctggtgcaaagaaagatattcaaaggcgacgggtgcagcaggggctattctcaatcagctctgtctcgtcgattgatgagaaacggcgaacacagcatggctagttttctcttgctggagagtagtcctgtaatgctggcaccttggcacagtctgagtgctcgcgtcatggccaatggcaacccctcatttgcaaaggctcacggtgaagacgtgtggcgctatgctgccgcaaatctcgatcacagcaacctcatcaacgaagcaatggcatgtgatgctaagcttgttatgcctatcatcattcaaagttgcagcgaggcatttcatggcctcaagtccttggtggatgtcggtgggggcaacggcaccgccatgcgcatcctggctaaggcttgcccttccattcgacccatcaattttgatcttcctcatgtcattgccctctgcgatggcgatggcgatggcgtccaacacgtgtcaggcgacatgtttctaagtgttcctaaagctgatgctgcttttcttatgtgggttttgcacgattggtcagacgaagagtgcatccaaatcttaaagaagtgtagggaagccatatcaaattcaaaggaaaacggaagggttattattgtggaggcggtgattgaaggagaaggagaaggagaaggagggaagcatgacggattgaaggatgtgggattgatgctggacatggtaatgatggcgcacactaacttcggcaaagagcgcacactcaaagagtgggaatatgtcatcaaaatggcaggatttagctcatacactgtcaaacccattcatgctgtgcagtccgtcattatggctttctactaaaatatatccaccaaaaattacccttgcaagtttgccactaaaatgcattaaataatttaataaaaaataaaacatattgtgtgatccatcttgcacgtgtaaaacagtgtatgttaatttgttgtaacaatatgaaagcatttcattttctgtatgtttgttcgagaggagaataaaacgtatctttaaatc

SEQ ID NO: 6380 - DNA, 559 bp, Glycine max
  Clone ID: 700562580_FLI
aagacttgcaaggttaagaaggaaactcatggtgtagtccagattaaagggtatgagcaagttccttcaaatagtgaaaaggctctcctaaaagctgtggcacatcaaccagtgtcagcttatgttgaagctggaggatatgctttccaattttactcaagtgggatttttacaggaaagtgtggaactgatatagatcattctgttaccgtagttggttatggaaaagctcgtggtggcaataaatattggctggtaaagaattcatggggcactgaatggggtgagaaagggtatataaggatgaagagagatatacgtgccaaggaaggtttatgtggaattgctacgggtgccttatatccaactgcttgattgctgctattaattcatatataaatcttaaagagtttaatttggtgtatgcacgttgtatctctaatcatcattttccttatattttcgggctagtatatatgcaacctattagtgttccaacaagagactcgacccttccagaccactggttctcggtcagattagtccggcttttaaaatt

SEQ ID NO: 6381 - DNA, 498 bp, Glycine max
  Clone ID: 700562593_FLI
cttattttatatatatatatatattcatctttctctttttagtttttcattcctctaaaagtgtgtccttcacttcacacatcatagcaatggcagcacgttcctacagtcccaccatggttgccctctctttgcttcttttggtcacattctctaacgtagcagaggcttatacacgcagtggaacacttcgtccttcagattgtaaaccaaggtgtacttaccgttgctctgcaacttcacacaagaagccatgcatgtttttctgccagaagtgttgtgcaaaatgcttatgcgttcctcctggtacatatggcaacaagcaagtttgcccttgctacaacagctggaagaccaaggaaggaggacccaaatgcccttaaaccccttaatttcctcatatataaataatttaataagcaatgtaatcctatgattcttcatcagcaattttctatctctacatatataaacaattcaatgctattttaattgttt

SEQ ID NO: 6382 - DNA, 770 bp, Glycine max
  Clone ID: 700562612_FLI
atttttcatacaacacattctttctagacacgcaacacctagaagatttccttattctttttggtgctaaaccgttgggatatagcaacaacatgttaggaatgaagagacatagagataatgaagggtcagagagcttagatttggcaaaatgtcttgtgctgttctcttgtccaatagaaagcaacaaggcacaacagaaaggttttggggctgtggaatttgagtgcaagacgtgcagccgcaagttctcttcttttcaagcactgggagggcacagggcaagccacaagaggcagaagctagagggggaagaactcaaagaacaagccaaaactcttagcttgtggaacaaaccaaaaatgcacgagtgctccatttgtggacttgaattctctctgggccaggctctgggtggccacatgagaaaacacagagctgctctcaacgaagggtttcctataattccttctatcgaccaagttattgcgaaaatcccggttctgaaaaggtcgaatagcaccagagttatgtgcttggacttggagttacacctgtagagaatgaatgactgaactaccaagtcacccaagctcctttttctttgttcttattaacttttctacattttttacctgtttctggacacatgtattctttcattttttgtgtgaaaattttattgacttttcccttatagatgattgattctttattctggacacatgtattattttgttaatacgattatcaaaagttcttagtgtttt

SEQ ID NO: 6383 - DNA, 491 bp, Glycine max
  Clone ID: 700562627_FLI
gatgactgcaagtatgttggggatccttccatcttcagttcttcagttgtgccttctttaactaacatggttatgtgtaggtgactccatgattcatatcttagtttccgggttctttacttctctcactcctttgcttttaagtacatgtatttagcccctaaaccttagtgcatcttttcgatgcctgtcttgtccagatcttcacgtccagtatctattctcttcgtccatttcctttgataacagagaaatttatcttaggttagtctttttctttcccacctttcattagttttgtggtttgtggcatcgaagccaaggaggcaaggatgatgccatacaagttttggcataggaaaaagtgtaacgtagtggaataaccaagggtggctttgacttataggatagattgtgttcttttcatataaaatgatccaatgtaatttgtgtaaaactttctataagagtagcaattttcttgttctttt

SEQ ID NO: 6384 - DNA, 1240 bp, Glycine max
  Clone ID: 700562631_FLI
tgcagagaaacacaaacactgaaacactcaagtgagttcgatagtatatttgtttttctttttcacaaagatggtgagaaccccgtcttgtgacaaaagtggaatgaggaaaggtacttggactccagaggaagatatgaagttaattgcttatgtcactaggtatggctgctggaattggcgccaactccccaagtttgcaggtcttgcaagatgtgggaaaagttgtagattgagatggatgaattatctaaggcctaatatcaaaagagggaacttcactcaacaggaagaagaatgcatcatcagaatgcacaaaaaacttggtaacagatggtctgctattgcggttgagttaccaggaagaacagataacgaaataaaaaatcattggcacaccgcactcaagaagaggtctcaacaaaacacactcataaatgaagaaaccaaagccatcaaatcaaagaataaagaatcagttcacaacaacggtgtatttgttactcttccagcaacttctcagatttcagataattcatcattatcgccagtttcatccacctgcagcgagttttcctccataacttctgatctttccactgctgccagctgtatggaaaatttggtgtttgaagatgatgacttgggttttctggatttatacaatattgatcctatgaatggaaatttgtggacagaactaaatctcgatggcatttccttcaatacaccatgtgaaatagtttcaggagatactaatagcactttccaaagctcaagttctagcaatagcaacacccttgattctccgcatcaatcaaccagcgaaagtattgttgtgaataatgactttggtcgctttctcgattcatacgaagaggcaacagtcgataacttttggacacagtcatatgtagctgacatgtcccacgttccaagcgaactatttgttccctccgtggcagaatctgaatattttactccattatatgatgatctgtggggtcaaactcatttgtaccatgaaaatcattgcttattctgatgaacaaaattactccatctctagagatcaatagttttgagagtgttattagagttggtgattccaattcttgatccaacctagatggatgaatctttttatatttttggcttaggggtttgtatagtattgtagcagttgctctcctatatttctcttgtaccaattttttataaagtgaattgcttctgcttt

SEQ ID NO: 6385 - DNA, 874 bp, Glycine max
  Clone ID: 700562665_FLI
cactttcctacaattttcttttcatcacaaaacaacccctcgcatatattatatttgttgattcattatttgtatccacaaacacttgttcttccttcacagctttgcaattgaaatggcttttacttctaatgacgtcatccaatgcacctcttcttcttcgtttgagtatgacgtgtttgtgagcttccgcggtgaagacacacgcaacagcttcaccggttttcttcttcaagctctgaaaaaagaaggcatcgaggccttcaaagatgataaagatatcaggaaaggcgaatccatagcaccagagctaatacgagccattgaagggtctcatgttttcctttgtcttttccaaggactatgcttcctcaacttggtgcctgcgtgaactagcacatatcaggaattgcattcaaacatcacccagacatcttctgcctattttttatgatgttgatccatcacaagtgcgaaaacagagtggagactatcagaaagcctttgcccaacaccaacaaagtttcaggttccaagagaaggaaattaacatatggagagaagttctggaactagtagccaatctctctggttgggatatcagatataagcaacaacatgcagtgattgaagaaattgtccagcagataaaaaatatcttgggttccaaattttcaactcttccatatgataatctagttgggatggaatctcattttgctaaattatcaaagctaatatgtctgggaccagctaatgatgttcgagttgttggaattactgggatgggtggaataggaaagtcaactcttggtcgagctttatatgaaagaatctctcatcaatttaattctctttgttatattgatgatgt

SEQ ID NO: 6386 - DNA, 1380 bp, Glycine max
  Clone ID: 700562679_FLI
ggtgttctcagtggacgatatctccgatcacttctggcagccgcctatccctgtctccgccgcccaaacttcctcccagatgagccgcagcgcctccgagtgggccttccaacgcttcctccaggaagcttccgcctccgcaccctctcctccgtcttcttcctccgccgccgacgtcgtattcgtcgagatcgaagatcaacctaaacccgcccctccccctccgtcaaacggcgccgttctccccaatgcccctggtcccgtcccccttgactccgacgaataccaggccttcctcaagagcaagctcaacctcgcatgcgccgccgtcgccatgactaggggatctttggctaaatctcaagacccgtcccctttttctgaaggatctattccttctgaaaatgatccatctaagttacaagataaagataccaatgtaccagttgggattccttccatacctgccatgcaaaagaaacctgctgttgcaattaggccatctacaagtggatcatcaagagaacagtcagatgatgaggacattgagggagagacatctatgaatgacaacacggaccctgctgatgtaaaacgagtaaggaggatgctatccaatagggagtcagcccgacgctctagaagaagaaagcaggctcatttaactgacctagaaacacaggtttctcaattaagaggtgaaaattctaccttgttaaagcgccttactgatgttagtcagaaatacagcgactctgctgttgacaacagagttttaaaagctgatgttgaaacattaagaacaaaggtgaagatggccgaagagaccgtcaaaagaattactggattgaacccattgcttcatgccatgtctgatatatcatcactgggcctgccatcatttgatggaagaagcccttcagacacttcagctgatgcagctgttcctgtgcaagatgatccacatcatcacttctatcaacccacatctactaatcctattcccagtcatgatccgatagtcaacaatggattggggggcatttcttcaattgaaaatgtgcagcagaatgctgcagtagtgctaggtgggaacaagatgggtcaaacagcatccctgcagcgggtggctagcttggaacatctacaggagcggattcgtggtggacctccatctaatggggagcagtgactaattagccaaatctcctggatgctttgccaggaaattattctaaaacagttatttctgttggttataactagaggcctattcttctggaatacattgtaattcaattgatggggcacatgatgttggattcaattagtgcaccccgtatttttttaaaaaataatataaaatgaactttactttct

SEQ ID NO: 6387 - DNA, 1085 bp, Glycine max
  Clone ID: 700562704_FLI
agaagagttgcgagagctgggttctggtacgtttgggactgtgtaccatggaaaatggagaggatcggatgttgcaattaaaagaataaagaaaagctgcttcgctggtcgatcttcagaacaagaaaggctgaccatagagttctggcgggaagctgacatactttccaagcttcaccatccaaatgtggtggcattttatggtgtagttcaggatggaccaggagcaacactagcgactgttgccgagtacatggtggatggttctcttaggaatgttttgcttcgtaaggataggtatcttgatcgccgcaagagactgataattgccatggatgctgcttttggaatggaatatttacactcgaaaaatattgtgcattttgacttgaaatgtgacaatttgctcgtgaacttgaaggatcctatgcggccaatatgcaaggttggtgattttggcctatcaaagattaagcgaaataccttggtgtctggtggtgttcgtggaactctaccttggatggcaccagagctactaaatggtagtagcaataaggtctcagaaaaggttgatgtgttctcttttggcattgtcttatgggagattcttactggtgatgagccatatgctaatatgcactatggtgcaatcataggaggcattgtgaataacacattaagaccaacaatccccagttattgtgatcttgactggaaaacactaatggagcagtgttgggcacccaatccagcagtcaggccatccttcaccgaaattgctcgccgcttgcgtgtgatgtctgcagccgctagtcagatcaaaggacagggccacaaggcatctaaatgaaaatcaacagatttgatctgattgccacacacggttcattcaattatgctccaaaaagatatatattattgttatacaagggccaacaataattgtttgtattgtagttttctggtccctgctctttttgtatttgattgtgaatatgtatgtgtgcatgtgaaaaaccacatatatagactgtgcaaattaacatttgacttaatgctatttccacagtgaattttggactgcc

SEQ ID NO: 6388 - DNA, 1316 bp, Glycine max
  Clone ID: 700562769_FLI
cttttttgtttaacaaaaatctaaaagaaacgaagaaacaaagaaaaaaagaaaaactatatcagcgattctcgtgatcttcggcctcgaatcgagaggtaaaagacccaactccgcctctgtttttgtgatcgaaaaccataaaaaagttgtttccgatcactgccttaatcggattcagctgttgttcctcctcctcaatttcgaatattgaaaggctttagttgttgattttggtcaagtctctagtcaacctgtgaattttttattcaagtttaaaaatatatagagcaatgagttttgtttttcgaggaacaagagcagatattgaaaatgggtttccaggatttatacctgagaggcgagcattgcgcgttcatgcaacacgtcctagtaattccaattcactcacttttctcgtgacagttcttctgttattcatgatactgaactctcaccagatgtccccaaactttctgctctggctggtgcttggtgttttcttgatggcaacaatgttgaggatgtatgcaacatgtcaacagcttcaagcacaggcccaagctcatgcagctgcagccagtggcattcttggccacacagaattgaggttgcatatgccaccatcaatagctcttgcaagccgagggcgtctgcagggtctcagacttcaacttgcacttcttgatcgggagtttgatgatctagattatgaaactttaagagctctggattctgataatgtttctactgcaccctctatgacggaggaagagattaatgctcttcctgtccacaaatacaaggtttctggtcctcaatgtggtggttcctcaatgcaacaagcatcatcttccactcctgctgagaagaagcaagataattcaaatgctgttgggagcatgaaagcctctgatgatgacctcacttgcagtgtatgcttggagcaagttaatgttggtgacgtactgcgaagcttaccttgcttgcatcagtttcacgcaaattgcatcgatccctggctgcgccaacaagggacatgccctgtatgtaaatttcgagctggatctggttggagtgacaatggacataatgatatcatcgcggacatggtctgaatacctcgtctaattttatttatggacgtgtgattataaccttgtacaactgtaacttactctcttcatgtatcaagattagtatctcatgactagcattcgtgtaattaccccgacgtgtatgtagggaacagaagaacggcctagtgccgtgtaacaaccatacaaattatacaatttgttgaccattaaacttac

SEQ ID NO: 6389 - DNA, 1638 bp, Glycine max
  Clone ID: 700562777_FLI
agtagcgccgcctttaaggtcggtgtgttggggagtggaatttcaggagccgtgcgtgcttcaactcttgccagaaatggggtttctgttactctctttgagtcagctagaggccctggtggacgcatgtcccaaagaagagagagaactgaagatgggacggagctgcattttgaccatggtgctccatttttctcggttagcaagtctgaagttttacatctggttcaagagtgggaatcaaggggtctcgtagctgaatggaaagagaagtttgcctcgtttgattttcacacacttaaatttaacaacatagagcaggaaggatcaagcaagagatatgtgggtgttccgggcatgaattctatatgcaaagcattatgcaatgagagtggtgtggaaagcaagttcggtgtgggtattggaagaattgaatggttgcatgatgagaaactgtggtcattgataggggtggatggacaaaatcttggtcaatttaaggggcttgttgcatcagacaagaatatagtttctcccagggttgcagaagtgacaggaaggacgccaccacttgatataaaattggtgccagagttgtcagaaaagttgcttgatcttcctgttaagccatgtttcattgtaatgctggcatttgcagagcctctatcaacggttccagtcaaagccttttcttttgaaaattctgaagttttaagccaggcttattgtgatagcagcaagccaaaccgttctactacaagtgaaagatgggttcttcattctacagcagaatacgcagaagatataattgctcaaactggactcaagaagccctcagacattacactcaacaaagtggccgaacagcttttgcaagaatttcaaagcacggggcttatcacatctcaaccatttttcaagaaagcccatagatgggggagtgcatttcctgctgctagtattgcccaagaggaaaaatgtctttgggacagaaacaagagactagctatctgtggagacttctgtgtcagtcccaatgttgaaggtgccatagacagtgccttcgcagcagcattaaggcttaaagatagtgtcagctctttatagttggagcattacaatctgtagttctccaaaccttgcatgcctttatttcagttttttctcctgggaaaacgtgttcaaaatttcttttaagacatttctgtattactaaacgcgaacaaatttcccttctacgacgaagccttgcacactacaaagtatgagaaagaggtacagggtggttgcactttgccgtgccaagtttgcaggaaaatggtgatgaaaccacctttgaaatcaaacagtgttgagtttagtcttaacaacaaaaaataaggtaaacatatgttaagtgcactagatgatggcctaatgtactgtaattctgaatttgtgatcatgttatttccttttagttataactaaaatacatttcagaaagcaccatggcttgacccaacaaatatcaaaatatcatcatcccacatgtaatggttattttcaaatacagatatgtgcgtgtgtgctaggtttatttatttcattggaataatgttatttgatttaattttatctaaaaacagcttaattttt

SEQ ID NO: 6390 - DNA, 685 bp, Glycine max
  Clone ID: 700562871_FLI
ctcttttcagcaaccatgaaatcttcaggagcattagctacccttgtgcttctgatcctacttctcgccacaacttcagaggctgcaatttcatgcagtgatgtgatcaaggacttgaggccatgtgtgagctacttggtgagtggcagtggacagccaccagctgcttgttgctcaggagctaaagctcttgcctctgctgcaacaacctcagaggacaagaaggctgcttgcaactgcatcaaatccacttccaagagtatcaacattaactcacaactggctcaggctcttccggggaactgtggaataacccttcctgtggctatctctcccaatgctgattgttccaaggttggttgaaacttggaattggagggtgttgcagagcatgctgaacatttttctgctacatatgtatggatgtataacatattctgtaataaacaggaatctacctacgtggatttctttactaagtccatctttttgtttataatatgttgcctgaatgttgtttccaatctaccttgattgtagagccacctgcggcgccttttaattaaaattcacaaatgttattttgctatctactatgtgaaggatagcgttcaagttatttgtatgccaataatagtattcaaactaaataaaaacataaggagttgggtgttattttttgttt

SEQ ID NO: 6391 - DNA, 549 bp, Glycine max
  Clone ID: 700562937_FLI
aaaggaattgctgagatgggaaccaaaggtcaagttgtatgatggccttcctctcatggaagaggatttccgtcagaggcttggagttcccaagagcaactaagctccttttactccttcatttcttatcatataatcataatgaatattttgatagtaacggggatgtggatgaacctgttaagtgttaagagatgttttatattgaaaattatggagaggaaggttaaacttgcagccggcaaagccaacttgaacttgctcttcaaattgatacaataagattgcttctccacccaacttctattggaaatgctgttgttgagatgagttgaaattattttttattgaaatttaggtgttacaagttctctttcgactttctttacccattgtatgtcagggtaggtgtgtcttaatgtgttctctgtaccgaaatacaattcagattgtgtttggtgggttcatatttggatttgaggaggtttgaatctccttaagaaataaagttacgatgttctgatatgaatgtgaaataggttctacttg

SEQ ID NO: 6392 - DNA, 2130 bp, Glycine max
  Clone ID: 700563001_FLI
aagagagagagtgagagatggcgtattgaatgggcgaagattttcacgctttgcttttgcctccaaattgatctctctctgtcacgagctttgatctgaagcgaagcacttcctctgcgaacatggaagcaagtgcgggaatggttgccggttcgcataaacggaacgagctcgttcggattcgccacgattcttctgacagcgggtctaaacccatgaagaatttgaatgggcaaatctgtcaaatatgcggtgatactgttggattaactgctactggtgatgtgtttgttgcttgcaacgagtgtgctttccctgtgtgtcgtccttgttatgaatatgagcggaaggatgggaaccagtcttgtccacagtgcaagactagatacaagaggcacagagggagtcctcgagttgagggtgatgaagatgaagatgattctgatgatatcgagaatgagttcaattatgcccaaggaaaagccaaggccaggcggcagtgggaagacgatcctgacctgtcgtcgtcttctagacgtgaatctcaacagccaattcccctcctcaccaatggccaaacgatgtctggtgagattccatgtgccacacctgatactcaatctgtgcgaactacttcaggtcctctgggcccatctgaaaaggttcactcacttccctatgttgatccaaggcaaccagttccagtaagaattgtggacccatcaaaggacttgaattcttatggtctgggaaatgttgactggaaagaaagggttgaaggttggaagcttaagcaggagaaaaatatggtgcaaatgactggtagatacgctgaagggaaaggtggagatgttgaagggactggttctaatggagaagaacttcaaatggtagatgatgctcgacaacctatgagtcgtgttgtgccaattccttcatctcagctgacgccttatcgtgttgttatcatcctccggctgattattcttggcttcttcttacaatatcgtgtaactcatcctgtgaaagatgcatacccactgtggttgacatcagttatttgtgagatttggtttgccttatcctggctcttggatcagtttccaaaatggtctcccattaatcgtgagacttatcttgaacggcttgctttaaggtatgatcgtgaaggagaaccatcacagttagatcctgttgatgtgtttgttagtacagtggatcccctcaaagagccacctcttgttactgcaaacaccgttttgtctatactttctgttgattaccctgtcgacaaagtttcctgctatgtatcagatgatggttcagctatgttgacctttgaagcactatctgaaacagctgagtttgcgaagaagtgggtgcccttttgcaaaaagcacaatattgaaccaagagccccagagttttattttgcccagaagattgattacttaaaggacaagattcagccctcgtttgtaaaagagcgacgggcaatgaagagagaatatgaagaattcaaagtacggatcaatgcccttgtagccaaagctcagaagatgccagaggaaggttggacaatgcaggatggaactccttggcctggaaataatcctagggatcatccgggaatgattcaggtgttttaggtcatagtggggggctggatacagatggaaatgagctgcctagacttgtttatgtttctcgtgagaagcgaccaggcttccaacatcacaagaaggctggagctatgaatgctttgattcgagtttctgctgtcttgaccaatggtgcatatcttctgaatgtggattgtgatcactatttcaataatagcaaagccctcaaagaagccatgtgtttcatgatggatcctgttcttggaaagaagacatgctatgttcaatttcctcagagatttgacggcattgacttgcacgatcgatatgccaatcgcaatattgtgttctttgatatcaacatgaaaggtcaggatggtgttcagggcccagtctatgtgggaactggttgttgtttcaataggcaagctttgtatggttatgatcctgttttgactgaggaagatttggaacctaacattattgtaaagagttgttgcggttctag

SEQ ID NO: 6393 - DNA, 1406 bp, Glycine max
  Clone ID: 700563012_FLI
ataagaagaagaggagagggaagatgatgatgatgacaatggaggggatgatggacaagggggtgttggatgatgtgataagaaggcttctggaagggaaaggagggaaacaggtgcaactctctgagtcggagatccgtcaactctgcgtcaacgccagacaaatcttcctctctcagccaattcttctcgacctccgtgctcccatccgcatctgcggtgatatacatggtcagtaccaggacttgctgaggctttttgaatatggtggctaccctcctgcggcaaactacttgtttctgggggattatgtggatagagggaagcaaagtttggagactatatgtttgcttttggcctacaaaataagatatccagacaaaatttatctcttgaggggaaaccatgaagaagcaaagataaaccgtatatatggtttttatgatgaatgtaaaaggaggttcaatgttaggctatggaagatatttacggactgctttaactgtttgccagtggctgcactcattgatgagaaaatactttgtatgcatgggggactctctccagaattagaaaatttagatcagataagagagattcaaaggcctactgaaattccagatagtggtctcctatgtgatctgctttggtctgatcctgatgctagcattgagggctgggcagagagtgaccgaggagtttcatgtacttttggagctgatgtagttgcagagtttttggataaaaatgacgttgatcttgtttgcagagggcatcaggttgtggaggatggatatgagttttttgctaaaagaagattagtcacgatattttctgctccaaattatggtggggaatttgacaatgctggtgcgttgttaagcgttgatgattctcttgtatgttcctttgagatactgaaacccgctgatagagcatcaggaagtggttcatcaaaaatgaattttaagaagccacccaaactcggaaagatatagtaattggcaaagattttcggttcaaataggaatccaatccagctaactcaacttgtacggagttgaaattgtcaagtaggagtttggcatgggagagccttccttccactttacgattgcagattgccaatgatactatattgtaaactgaactacccaggcattcttctgtgcaggagcagagattattgctttatacaccagttggttgcttgtgtttggcaaattaacatgtaatttgtgagtgcaaagagatttcatgttaccaaatgcgtaaatttctatgccatttatctgaatgatgagtgctctcaggtatgttgtttttggtagagaccggttcgtgtaccttaacttgttgctatgccacttataacgtaatcaattatatgactacttgtctttgcc

SEQ ID NO: 6394 - DNA, 457 bp, Glycine max
  Clone ID: 700563030_FLI
gaacaggttcgaaccattgtcaagccaggatgccctcaggaggttttgaaagctgctctaagcgtcatggcgtcggttaccgaagttctagctgcaatgtcaacatcttataccaacaccctggcatccctgtgagagtagcagatggaagttgtattcttccataaaaattctacattttatagccatggaagtagtttttgattggaaataagagttatagctgacatggtgcacgtcaacgtgagatgagatttactgtaatcaaagttttggctctctatgttcccaactgggtaatttttttgttttttgttttttgttttttgttttcaaagacatgtgggatccatgtgaaattgtttgataacttagcttgctgcttgaaattattattgttctttttaggacatctcttttgatattccaaacattatatttgaggtgttttcttcct

SEQ ID NO: 6395 - DNA, 1705 bp, Glycine max
  Clone ID: 700563071_FLI
cattgtgcacagttcacacctaacacaaacccacttcctctcttttccggcggcttttccggccaccatgctcctccgcctccaccacccaacctccctcgcctagatctactcagatcacaatcccaaatctctcaaatccggcgtcgtcgttttagctcaccttatataaaaaaagcagaaaggatgtcgtttcctctataattcgcttactcgcgctgtgtgctgtgtttctttctaacattcgtgttcgcgtgtgtgcgtttctttttttgttcctttgttcttttcggagcttctttgatttttccggcgagaagaggatgacgtccgtcgcgaggcagccaacgtggaaggagcgggagaacaacaagaggcgagagaggaggaggagagccatcgcggcgaagatcttctccggcctgcgaatgtacggcaactacaagctccccaaacactgcgacaacaacgaagttctcaaggctctctgcaacgaagccggctggaccgtagaagccgatggcaccacctatcgcaagggatgcaagcctcctgttgaacgcatggacatagtaggtggttctgcagcagcaagcccatgctcatcttaccatccaagtccctgtgcttcctacaaccctagtccaggctcttcttgcttaccgagccctcgcgcatccccctttcctccaaacccaaatgctgatggcaattctctcattccatggctcaaaaacctttcatcaggatcatcatcggcatcctcttccaagcttccgcagctgtacattccgaatggctccatcagtgctccagtcactcctccaatcagctctccatcatcccgaaagccccagatcagagctgattgggaggatcagtccaattgtccgacagcgtggggcggactggcatacacctttgtgccctcttcaactcctccaagccccggccgccaggttgccgaaacagattggttttccaagatcaggattcctcagggaggactagcaccaacttctccaaccttcagcctggtctcttccaacccatttggcctcaaggaagatgctatggttggcagcggttcccggatgtggacgacaccaggggcaagtggaacatgttctccagccgtagctgcaggctccgaaaacacttctgacattccaatggctgaagcagtttcagatgaatttgcctttggaagcagctcatcaggtttagtgaatgcctggaaaggagagaggatccatgaagcttcttttggaacagatgatcttgagctcactcttgggagctccaagaccaggttgctccataagtgaatagtcaatggtcccttcaacaacatgaactttgactctgtttattctgtagaaaggctagaggagggaattaagatgagcagcaagtagttgttcttattacataccagaaaaaaaaaatagcagtttattttattcttttattttctcttagtttttattggttcctaagttatatatacagctttagctaggtgtcgggtggttttcaaccctttcatttggtcaatgttgttaaaacctttattactctgggaaagatcatcatatacctgtatggattggcttggtttgatattgaaaggaaaaaattactcgatttcaactgtaactgaatgatcaagaaagttatgcaaattccaactgaatgggcctac

SEQ ID NO: 6396 - DNA, 692 bp, Glycine max
  Clone ID: 700563075_FLI
gctaaacctcagaaatgggaggatgtagcaccattgaagggagcattcatagtgaatcttggtgacatgctggagcgctggagcaactgcgtttttaagtccacactgcacagagttctaggaaacggtcaaggaagatattctattgcatacttcttggagcccagtcatgattgtctagtggagtgcttgcctacctgcaaatcagacagtaatccgcccaaatttcctcccatcttatgccatgactacctaactcagcgctacaacgacactcatgctgacttgaatgtttataagaaacaacaagcttgagtagtcaacctttggaactgaacagcctggagatttctcacaaggacactcacctaagctgatttggatgtttacaataaacaacatgcttaagaagttagtcttttggagctgagcagctggggaattttggactgcattatgtgttagagttaacagcatcatattgcattggcgatgttatgtagaatttgtttgaatggcaaattagttttgttttgtggaaggggggattcagctgtatggtttggtacttaatgttaaacctaaaagaaaaacatgtatgaaattagcagatgtattttttttattcagcactaaagttgggaaatgggaatgataggaagatgaaaaatgaaaattagtattttgctttc

SEQ ID NO: 6397 - DNA, 914 bp, Glycine max
  Clone ID: 700563087_FLI
gttttccaggatggtgtcattcttggggctgatactagggcaactgaaggacctatagtggctgataaaaactgtgagaaaattcattatatggcacccaacatatattgctgtggagcaggcacagctgctgatacagaggctgtaacagacatggttagctcacagctgcaactacatcgctaccatactggtcgggaatcaagagttgttacggcactgactcttcttaagaaacacctgttcaattatcaagggcatgtctcagctgctttagttcttggtggggttgatatcactggacctcatttgcatactatttatcctcatgggtcaactgacaccctcccatttgctacaatgggatcaggttcacttgctgcaatgtctgtatttgagtctaagtacaaggaaagtttgagtagggatgaaggcattaagctagttgttgaggcgatatgtgctggtatatttaatgacctaggaagtggaagtaatgttgatgtttgtgtgataaccaagggacataaggaatatctcaggaaccaccttctaccaaatcctcgtacctatgtcaatccaaaaggctttgatttccccaaaaagacagaggtcctcttaacaaagattacaccgttgaaggagaaggtggaagtgattgaaggagatgctatggaagagtaacaatcattccaaaaaaaattggtgtatgagtatgaaacttgattagtgcaatggctgtgatatttgattttgtactttcacaactttggcttttattaccaaaatttatttgaattcaattagatcattgcaaattgttcctcaaatttcttcatttggttggattttggctagaaaatgcttaacaaaacaccaaatatatacaatttgattgatgaaagatgttactt

SEQ ID NO: 6398 - DNA, 1308 bp, Glycine max
  Clone ID: 700563096_FLI
ctcagagtaacattagtggtgaaactcaaaactctcacataattgaggatggaaaccttgtcatttctatacaagtactacgcaaggttaccaatgattttgcttcagaaaatgaactaggccgtggagggtttgggactgtttacaagggagaactagaagatgggacaaaaatagcagtgaagagaatggagcatggggttattagcagtaaggcattggaggagtttcaagctgaaatagctgttctttccaaggtccggcaccggcatctggtatccttgttggggtattccattgatggcaatgaaagacttttggtttatgaatatatgtctcttggagctctaagccagcatctttttcattggaaaagcttgaagttggagcctttgtcttggtcacagaggcttgcaatagcactagatgttgctagagggatggagtaccttcacagtcttgcccgtcagacctttattcatcgagatcttaaatcttctaatatcttattgggtgatgattttcgggctaaaatttcagactttggtttggtgaagcatgccccagatagtgagaagtctgtagcaaccaagcttgctgggacatttggataccttgcccctgaatatgcagtgatggggaaaatcaccacaaaagttgatgtgttcagctacggtgtggtgttgatggaacttctgactggacttgtggcacttgacgagagtcggccagaggaaagccggtacttggccgaatggttttggcgaattaaatcaagcaaggagaagcttatggctgctattgatccagttctggaagcatctgaagaaacttttgagagcataaccattgtagctgaacttgctggacactgtactgcaagggaagcacatcataggccagatatgggtcatgcagtcaatgtcttggcagcattagtggaaaaatggaaaccagttgatgatgaattagattgctactctggcattgactacacaagaccacttcctcaaatgttgaagatttggaaggaagcagaaagtggagagtttagctatgcttcttgtctcgagaacagcagaagcagtattgcagccaggccttctggttttgcagactcttttacctctgctgatgcaagatgacttagaggtaacttcagtgaaatgttgctgtgtccttttaaaatttacttggatttaagtctgtgtctgcagccaagaggaaatttttttatgtatttgctctttgtactgattttggacactaaaatacttcaaaataccatacaaagatgtagataaattt

SEQ ID NO: 6399 - DNA, 918 bp, Glycine max
  Clone ID: 700563229_FLI
tctaggtgaaatctaaattgaagggtcatcaaaagcgaattactggtttagccttttcaacctgtcttaacatcctggtttcatctggtgctgatgctcaactttgtgtatggagtattgatacatgggagaaaagaaaatcagttcctatacaactacccgcaggaaaggctcctgttggtgacactcgtgtgcagttccatttagaccaaatccggttactggtggcccatgagactcagttggcaatatatgatgcctctaagatggatcgcattaggcagtgggttccacaagatgttctggctgctcccatatcatatgcagcttattcctgcaacagtcagttaatatatgctacattttgcgatggcaacactggggtttttgatgctgacagcttgagactaagatgtcgtattgcactatccacatacttttcacctccagcagctttaagcgggaatcaatctacgtatcctgttgccattgcggctcatccactggaacccaaccaatttgctgttggattgacagatgggtccgtgaaagtgatagagcctagtgaatcagaaggtaagtggggaaccagtccacctatggataatggaatattgaacggtagggcagcatcaacatctataacaagcaacctcacacccgaccaggcacaaagataagaacattcattgtaccataccagcatattctttccacctgtaatttgatcaccttagatttttagattttgattccccccaatttgtccctaaacaaggtcttgtcagggtcagctcggacataaaaatggcaaatgtaagctcttgtcttgtatacctgaatttgttctagtcaactcgattacattatttatactgcaatgtagtgtacaacaatgtgaatctgtccattctcgtg

SEQ ID NO: 6400 - DNA, 1731 bp, Glycine max
  Clone ID: 700563255_FLI
attggctcgagaaacaattggcttgcaaatgccaaacctccaaaagctttacctttatggcaacaatttaactggaccagtaccagaaagcattggtgacttgccaagactccaggaactggcactgcatgaaaataagatatctgggtcaatcccttctaccattggaagcttaaaaaagctcaaaagtttgctgctttactcaaaccaaatttcaggtacaatacccttctcacttgggaatttgaccaatttggtagaattggatgttcatgataatgccattatgggtcaagtacccaatagcataggtcagatgcaggctctggagaagcttgatctttcaagcaatatgcttagtggaagcataccttcttcactaaccaatttaactgccatttcagttttgtacatggacaccaactatcttgagggaaccatcccatttccctcaagatctggtgaaatgccttctctgggtttcttaagactccacaataaccacctgagtggaaatataccccccagttttggctacctagtttctcttaaaagagtttcattatcaaacaacaaaattgaaggagcattgccttcaagtttgggcaatttgcattctttgacagagctttacctaagtgacaactccttttctggccaaataccaaaatcaataggccaactctctcagctcataatgttgaacatttccagtaatttgattgaatggccattgcctcaagagatatcttcccttcaaaaccttcaaacccttgatctctctttcaaccctttgaacctctcttccattccaccctggctaacaagcatatcatcgctttcccgcatatcccttgctggctgtggcatcaagggccaaattccagactcattgcaaacaacacagagtccaatacaagaactggacttatcagggaaccttctcagtggatccataccatcatggataggatcactcagtcagctctacttgctaaacctctcaagcaattcacttgattcacacatacctgaatccctcacaaacttgcctgatcttggtgttcttgatcttcactcaaataagttaacaggctcgatagctggagtatttgacactgaacaaggtacactaacatacattgatctttctgataacaacttctcaagtggagttgaggcaattggtgtgggagagcagttaaacattcagtacctgaatttgtctcataaccttctgaagggtacattgccaagttctcttggaaaactgaattccattcacagcttggatttgagcttcaatgaattagcctccaacttgccagagatgctggcaaagttgaccttgttggagagactgaagctgcaaggcaatcacttcagtggtaaaataccaagtggatttctcaagttgaaaaagctgaaggaattggatttatcagataatgtgcttgaaggggaaattccagagggtaagcctctaactgactttcctgggagcacttattctggaaacaaaggtttgtgtgggaagcctcttaatccctgtaaagagtaaactttgagaattgtaagatatgattggaaacccgtgaaatcaattgagttttggctgcatatcattgtgaaatatttgcttctattttcgtggtgtaaaatcataaagtaggacattcactagtttcatttcactatggaaagtagagaatctcatgtgttccttaacct

SEQ ID NO: 6401 - DNA, 1344 bp, Glycine max
  Clone ID: 700563289_FLI
tgaaagagaatccgaggcgaagagaagagaaaaattaagatggaggggaaggagcaggatgtgtcgctgggagcgaacaagttcccggagagacagccgattgggacggcggcgcagagccaagacgacggcaaggactaccaggagccggcgccggcgccactggttgacccgacggagtttacgtcatggtccttttacagagcagggatagcagagtttgtggccacttttctgtttctatacatcactgtcttaaccgtcatgggagtcgccggggctaagtctaagtgcagtaccgttgggattcaaggaatcgcttgggccttcggtggcatgatcttcgccctcgtttactgcaccgctggcatctcagggggacacataaacccggcggtgacatttgggctgtttttggcgaggaagttgtcgttgcccagggcgattttctacattgtaatgcaatgcttgggtgctatttgtggcgctggcgtggtgaagggtttcgaggggaaaacaaaatacggtacgttgaatggtggtgccaactttgttgcccctggttacaccaagggtgatggtcttggtgctgagattgttggcactttcgtccttgtttacaccgttttctccgccaccgatgccaaacgtaacgccagagactctcacgtccccattttggcacctttgcctattgggttcgcggtgttcttggttcacttggcaaccatccctatcaccggcactggtatcaaccctgctcgtagtcttggtgctgctatcatcttcaacaaggaccttggttgggatgatcactggatcttctgggtgggacctttcattggtgctgcacttgcagcactctaccaccaggtcgtaatcagggccattcccttcaagtccaagtgattcaatcaaaccgttcatgcttaatcaagttgggaacaacaaaaaaaatcaaaacaatgtttctgggtttcggtttcatttcatcaagatgatctgtttatcttttttttttttaattttaatttaaagtctttgtattttgtatgtaaagatgtaaaattatgattattaggtggtgcatgtgttgcgtcatgggccaatgttatcctctgcttttaagttggaagaggcccagctcacgtgtgatgtacggctgtgattgtgtaatttgcaaaatcaaaaataacccccgagtcatatatgcatctttttattttattttattttatcttattattgacatatttagacaccttttaaaattatgatgatcatctctaaagcaaggtatgaccataatttttccaaattgctttttataactgattttggttc

SEQ ID NO: 6402 - DNA, 1369 bp, Glycine max
  Clone ID: 700563354_FLI
atgtggttgagctttatgaggtaatggccagtaaaaccaaaatttactttgtcatggaacatgcaaaaggtggtgagctcttcaacaaggtagtcaaaggaaggctcaaggtggatgttgctcggaaatattttcagcaactgattagtgcagttgactactgccatagcaggggtgtgtgtcatcgagatttaaaacccgaaaatctactattggatgaaaatgagaatttgaaggtttctgactttgggcttagtgcacttgctgaatctaagtgccaagatggattgctccatactacatgtggtacccctgcctatgttgctccggaagtgataaacagaaagggctatgatgggattaaagctgatatatggtcatgtggggtaatcttgtatgttctattggctggtcatcttccattccaggatacaaatctgatggagatgtacaggaagattggtagaggggaattcaaatttcctaaatggtttgcaccggatgttcgccggtttttgtccagaatattggatccaaacccaaaggccaggatatcaatggccaagattatggaaagttcttggtttaaaaaggggttggagaagcctgctattactgtgaccgaaaacgaagagctagctccccttgatgctgatggaatatttgaagcatgcgaaaatgatggtcctattgccgagcctaagcaagaacaggccaagccttgtaacttaaatgcttttgatattatctccttctcaactggttttgatttatctggtttgttcgaggacacttttctcaagaaagagacacggtttatgtcaaaaaagcctgcctcaatcatagtcttgaagttggaagaaatttgtaagcggctttgcttgaaagtaaagaagaaagatggaggcttgctcaaattggaaggttccaaggaaggcaggaaaggaactttgggtgttgatgctgagatttttgagattaccccacacttccatatggtggaacttagaaagtccaatggtgacaccatggagtaccagaagctttttaaacaggatataagaccagcgcttaaggacattgtttggacctggcaaggagaaaaaccacagcaagagcaagagcaacatgaagtagtccaggaagagcaccaaccttctcatactgcttagtttcatgatcaatatttcaccccttggtttttgtatgcactgtgcttcttttgtcattatcttagtcaagtgcttaattttaataggactcatagaataatgtggctggttcagcctcctcttgtctgatggatacttgaacaattgtgtacctaaattgcaaatttcaccaatttgggtgttttattccatccttc

SEQ ID NO: 6403 - DNA, 1348 bp, Glycine max
  Clone ID: 700563528_FLI
ggagcgcctaccacgtcttcctcgccccctccctccggatctccgtgcccttcgagaaatcgctcgtgattcagttcattcatatccatggcgggaatgataacaaggatttggccggtttagattggaaatcgatcgagaagagcttcaggttcgagagtaagagcagtggattgcttttaggggatcagagtttgagctttaggcagcacgagattaggtattccgagtgttcaatttgctcgttcgcaatctcgcggtcgattaattcgtatacctctaggtttttgtttgataattatactttgattgtgagtgagtatttggattcgaagcgattgcaccagattttgtctgattctggcgatgagttgaggaagctggctggtgtgctggaggaggactttggcagggttgttcctgtgtatgtttttgacttggattacacttcgttgttgttgcttgatcggtatcatcagtcggtcgcctttaaggacatggtgattgctgttaggacgaggaacacgcagaccgtgagtgattatagttgtaatggtaggcatgtgttcacacagacgagggagcttgagcgtcctattgtagggtcgattcttcagagtatgtggggggtgtcgccgactcatttgaattggagcccccagcacaatgagactttggtggattatacgtggagtatggggcagacaccctttgggccgttttctgagatgttgagtttgtcctttgtgcagaaggatgctgccaggaggaatgttctgttgacatcgctgaattacagcataacgagtgctatagatgttcttcagagtgttgagacgcatggcggggctaagaatctgctcaagcagaagcagcatgtggagtttgtgcagagatggaacctttttaagtacaagctgaacaaagccatgtctgcgttgtctcacttggattttgagatggctctgttttacttgcggtcttctgatcatgatctgtatgccattcactccattgtttatcatgcctcgcaggaaatagaggcgtcccttgtgtgctttagggaccctccgtttccctggggttcggtcttgctttctgcatcggctttcctttctgtctcttatatttatgcaagacgggacaaacttttcagaaacaaaaggaaacaattttgatgctttcactagaggacaggacagaagtttgtatgattttaagaaaacgcaaaacaaaacatgtatcattctacaagagaggtatgcttatggtgccatggtgaattaagtatttagattgcttgaactatttacttgagttcaactgtatacattttcctacttttttc

SEQ ID NO: 6404 - DNA, 1760 bp, Glycine max
  Clone ID: 700563530_FLI
ccgaacttctggtggacctttcattgctacaagttatgattatgatgcaccaattgatgagtatggaattattagacagcctaagtggggccaccttaaagaagttcataaggccataaagctttgtgaagaagcattgatagctactgatccaacaattacatcccttggtccaaacctagaggcggcagtttacaagacaggatctgtatgtgcggccttccttgctaacgtagacaccaaatctgatgtaacagtaaactttagtggcaattcatatcacttgcctgcatggtctgtgagcatcttaccagactgcaagaatgtagtgcttaatactgcaaagattaattctgcatctgcaatttcaagcttcacaactgaatctttaaaagaagatatcggttcttcagaagcttctagtacaggatggagttggataagtgaaccagtgggtatttcaaaggctgattcattcccacaaactggattactggagcaaataaatacaacagctgataaaagtgattacttgtggtactcattaagcattgattataagggtgatgctggttctcaaactgtccttcacattgaatcacttggtcatgcccttcatgcttttattaatgggaagcttgcagggagtcaaacaggcaatagtggcaaatataagttcactgtggacatccctgtcacactagtggccggaaagaacacaattgatctcttgagtttaaccgtgggacttcagaactatggagccttttttgacacatggggagcggggatcactggtccagtgatattgaaaggtttggcaaatggcaacacacttgatctctcctaccagaagtggacttatcaggttggcctcaaaggggaagacttaggtctgtctagtggaagttctggacagtggaattcacaatctaccttccctaagaaccaaccattgatttggtacaagacaacctttgctgctccatcctgcagtgatccagttgcaattgacttcacggggatgggaaaaggtgaggcttgggtgaatgggcaaagcatcggacgatactggcctacatatgtggcttcagatgctggttgcacggactcatgcaattatagaggaccttacagtgcatccaaatgtcgcaggaattgtggaaagccatcacagacactataccatgtaccgcgatcgtggttaaaaccaagtggcaacattcttgtattgtttgaggaaaagggaggtgatccaacacaaatatcttttgtcacaaaacagacagaaagtttgtgtgcacatgtatccgattctcacccaccacccgtagacttgtggaactcagatacagaatcaggaagaaaagtaggtcctgtgctatcactcacttgccctcatgataaccaagtcatctcttccattaaatttgctagctatggaacaccccttggaacctgtggtaacttctaccacggacgctgcagcagcaacaaggctctttctattgtgcagaaggcctgcattggatcaagcagttgtagtgttggagtatcaagtgagacattcggaaacccttgtagaggagtggcaaaaagtttagcagttgaagctacttgtgcgtagacagacatgtttcttcaataacacttcccaattttctgaagatgattccttctaataagcaaaagtagatttgtaattttaggaacatccaagaaaatatagtcaactaaaacagtttagtctcacatgcaat

SEQ ID NO: 6405 - DNA, 777 bp, Glycine max
  Clone ID: 700563604_FLI
gggatactacgacttattcaagaggagaaggagcacttcaaaaatggctatgaaagtcaacatgaatcgtcacaaacttgccagattttggaacaatgtgattgaaatgtgggagagaaatgagctgcctcatgatgtggcggtgcgggctaaatgggtcaatgcttcacatttctacaaactattggttgagccactagatattgcggaatattatgggaaggggatgcacacaaccaaggggcattacatacagcatggcagagagaagaggtatgagatttttgataggtggtggaaggatgcaatgggcaacaccgaagaaaataatgagaggaggagcaagtttgcaagtttgacccaagattcatgcttttgggcaagggtggaggaagcaagggactggctgaatagtgttagaagtgagagtgacacaacaaagttggctgtgctgtgggataacattgagaaatttgagaagtatgctatggaacttattgataataaggaggtgtctgaagatgttcttgctaagaactcaagttacagtatatggatggaagatttaagaggactgagggaactcaaagcaaaggtgaagacgttttcacaccactttaacccgtttctggatggagaagtaattccttagtaattttaaatgaaatcaataaataagcttgactctgtaatctgtaatatgcctatgaactacttgtttgcaaaataactagtgtgcttatggcttgatctaatcagtattttacttaaatgctt

SEQ ID NO: 6406 - DNA, 1751 bp, Glycine max
  Clone ID: 700563631_FLI
gtcaaggttcctcaaaatgtctctgtcttttgtgttgctcttcctcatctcaattccaccttctttctcctctccaattcaccccacaagcaacgaccttcgtttttcttcaacagcagaaaaactcataagagggcttaacctgttcccgaaagaccccattaacacactcgagaatgaccctctttttgtgtcaggaagcattgtggagaagagcttcactttccctagtcttgctgcttcttcagaatcttctgttgaagaacttggtcaccatgcaggctattatcgccttcctcgttccaaagctgcaaggatgttctacttcttctttgaatctcgaagcagtaagaatgatcctgttgtcatatggctgactggaggaccaggatgcagcagtgaactagctttgttttacgaaaatggtccttttcagcttaccaagaacttgtctcttgtgtggaatgactatggctgggacaaggcatcaaatattatatttgtagaccaacccactgggacgggtttcagctatacttctgatgagagtgacattcgccatgatgaagagggtgttagcaatgatttgtatgacttcttgcaggcatttttcaaggagcaccctcagctcactaagaatgacttttatattactggagagtcatatgctggacactacattccagctcttgcatccagggttcaccaaggaaacaaagcaaaagaaggaattcatataaatctaaagggttttgctattggcaatgggttaaccaatcctgaaattcagtaccaggcatatacagattacgcattagacaggggactaattaaaaaggctgattatgacagcatcaacaagttgatcccaccatgcaagcaggccatagaagcttgcggcactgaaggtggagaaacatgcgtatcttcattatatgtttgcaataagatattcaatcggatcatgaccatcgctgacgatgtaaattactatgacattagaaagaaatgtgtgggagatctgtgttatgacttctctgtgatggaggatttcttaaacaagaagacagtgagagatgctttaggtgttggggacttggacttcgtttcatgcagtagcacagtgtatagtgctatgatgcaagactggatgagaaatctggaagttggtattcccacactccttgaggaaggaatcaaggtgcttgtgtatgctggagaagaagatctcatatgcaactggctcgggaattcaaggtgggttaatgcaatggagtggtctggtcaaaaacaatttggggcgtctggtacagtcccatttttagttgatggtgcagaagcaggaacgctgaaaagccatggacctctctctttcctcaaggtatacgaggctggtcacatggtccctatggatcaaccaaaagctgcacttgagatgctaagaagctggatgcaagggaaactgacaatgacaaagagtggagataatgtctctcctaaatgatgcactcacagcacaaaaaccaaaaccatccctctattgctgcatagatattgatgtcatttccttgtgtatactgggagggtggaatgtaattctttttcttttttcttttttttttctttctctagtttctcttatccctgaccattgagggatttggaactaatcatctatcattgtcaccaaatcacgcacaactttacacttgtaacctgatttcaatcaaagcaaatttcaattcttgaac

SEQ ID NO: 6407 - DNA, 598 bp, Glycine max
  Clone ID: 700563687_FLI
gtttctttgtagcacattagttgataatttttattattataattgtgcgttgcagtttttctgtggatggcacccctataagagaattcaagaatttagaatcaattggagttccttttccgaagaggcaaccgatgaggatatactcaagcctatggaacgctgatgattgggccacaaggggtggacgcatcaaaaccgattggtccaaagctcctttcactgcatcctacagaaacttcaacgctaacgcttgtgtttggaacagaggaaaatccacatgcaaatcaaattcaccatcctctaatgcatggctatcacaagagctggattccactgctcagcaaaggctgagctgggtgcagaagaattacatgatttacaattattgctccgacaaaaacagatttgctcaaggccttccactcgaatgcacacattcgtagaggacttcatcttccactagcacaagtgttacattataatttcatttaccattcttttattttatttttttttaattcctgttcacagtttgtgctcttttacgatgtaaaatatatcgcatgtaaaataacggttctgttatttggatgtc

SEQ ID NO: 6408 - DNA, 1617 bp, Glycine max
  Clone ID: 700563707_FLI
gggaactgttattcactggcatggaatcagacaggttggaactccttgggcagatggtactgctgccatctcacagtgtgcaataaacccaggagagacttttcagtacaggtttacagttgacaggcctggtacatatttctatcatggacaccatggtatgcaaagatcagctgggttatatggttcattgatagtagatttgccaaagggacaaaacgaaccgtttccttacgatggtgaatttaacctccttcttagtgatttgtggcacaccagctcacatgaacaagaagttggcctctcttccaaaccattcaagtggattggtgaagctcagactctgctcatcaatggaagagggcaattcaattgttctcttgcatctaaattcatcaacacaaccctaccccagtgccaacttaaaggtggtgaagagtgtgcccctcagattcttcatgtggagccaaacaagacatacaggatcaggattgctagcaccactgccctagcttcactcaacttagccatttcgaatcacaaacttgtagttgtggaagctgatggaaattatgttacaccatttgcggttgatgatattgacatctactctggtgagagctactcagtgctccttcgcacggaccaagatccaaacaaaaattattggctttcaattggggtgagaggaagaaagcccaatacccctcaaggcctaacgattctaaactataagcctatatctgcttcagtttttccaacttttccaccacccatcacacctctttggaatgattttgagcgtagcaaagcattcaccaagaaaatcattgccaaaatggggaccccacaacctccaaaacggtccgaccgtacaattttcctccttaacacccaaaatcgggttgatgggttcaccaaatgggccattaacaatgtgtccctaacattgccaccaaccccttacttgggttctatcaagttcaaaataaagaatgcctttgacaaaacacccccaccagttaccttcccacaagattatgacatctttaaccctcccgtgaaccctaatgcatctattggcaatggggtgtacatgttcaaccttaatgaagttgttgatgtgatcttgcaaaatgcaaaccaattatctgggagtggtagtgagattcacccttggcacttgcatgggcatgacttttggattttggggtatggagaagggaaattcaaatcaggtgatgagaagaaattcaatttgacacatgcaccgctgagaaacactgcagtaatatttccatatggttggactgctttgaggtttaaggctgataacccaggagtttgggctttccattgccacattgaaccccatttgcacatgggaatgggtgtgatttttgctgaggctgttcaaaaagttgggaaaatcccaagagatgcactaacttgcgggcttacaggaaagatgctaggaaatagacactattgaaactagccacaatacacacatcaaaagaatgttgaatagtgtttatttgattaaaatttgaatgttgaattgatattatgttttaattttacatttttaaattttatatatatatatatatatat

SEQ ID NO: 6409 - DNA, 1031 bp, Glycine max
  Clone ID: 700563722_FLI
tatgttgagaacaatagccttgcacaaacccttctaggttcaggtcacagtaatatcgtttttgattggaaaacacgatctaggatttgcattgggattgcacgtggacttgcttatcttcatgaagaagtaataccacatattgttcacagagatataaaagcaagcaatattctccttgaccaaaaccttacacccaagatttctgattttggtcttgcaaagcttattccatcatacatgactcatgtcagcacacgtgtggcaggaacaataggttatttggcaccagagtatgcaataagggggcagctgacacgtaaagcagatatttacagctttggtgtccttctcgtggagatagttagtggaagatgccacacaaattcacgattaccaataggagagcaatatcttttggaaatgacatgggaactttatcagaaaagagaattggtagggcttgtagacatatcactagatggccatttcgatgccgaggaggcatgtaagtttctgaaaattggacttctttgcactcaggacacgtcgaagctccggccgaccatgtcatctgtggtcaagatgctcacaagagaaatggatattgatgaaagtaagataacaaagccaggcttgattccagattttaacgaccttaaaatcaaagaaaaaggcagtgatattgataccaaggcttcgtcatctttctataatgcatcctctgcctcagacagccagagcaataccatgtcatatgctgcaagcacaactacaaccttcactgcgaaatatgatcaaagtttgtaatcattagttgtcaatggttttctttgatttgaaattattttatttcatttttatgaggtctcccttgcccaatgtaaatttgctacggttccatagatttgtcatttgcgtgttaatattttttttaaaactttcgtacgatgtcccgtgactaggaagttttgccgaatttacactgtcttgtaaatatgaaccgtggttataatcaaatgctgaatctg

SEQ ID NO: 6410 - DNA, 924 bp, Glycine max
  Clone ID: 700563726_FLI
caaacattataatttctattacatacattttgtagctaggatgagcaagttactactcattcgtgttgctgggttcgtggcaacctttgtcaccatggtgatgatgatggtgcccaaaaacgtgagtgcccaaaacataggtgatgacatcgtcacacaagacttcttcaacagcataatcagtcaggctgatgatggttgtgcagggaagaacttctactcacgagatgctttccttaatgctcacaattcctacaatgagtttggtaggcttggtaatcaggatgactccaagcgtgaggttgcagctgctttcgcccatttcacccatgaaacaggacatttttgctacatagaagagattaacggtgcatcaggggactactgtgacgagagcaacaccgagtacccatgtgcccctaacaaagcgtactatgggcgtggaccaatccaactatcatggaacttcaactacggaccagcagggcagagcatcggatttgatggattgaacgctccagagacggtggccaatgaccctgttgtgtccttcaagacagccttgtggtactggatggaacatgtgcgtcctgtcatcaaccagggttttggtgcaaccattagagctatcaatggccgacttgaatgtgatggtgcaaaccctagtactgttcaggctcgtgttaattactacacccagtattgttcacaacttggtgtttcccctggtgacaatcttacttgctaatttatcagtatagatggttccatatgatgacatcatacattcatacggtatatcttaacatatatcagaaaataaaccattcaaggcttacagccttattttgattattaatgtaattactacttttgggaatattgtatctgattaccatcgatattgtgcatccaatattgaat

SEQ ID NO: 6411 - DNA, 791 bp, Glycine max
  Clone ID: 700563759_FLI
ctgagaaccaaaagaggttgaaacgacgtcagagaaacctcgtttcgggccttcagaaagcaggcattagcacccttaagaccaacaatgcaggcttgttttgctgggttgacatgaggcaccttctccattccaacacattcgaagctgagatggacctttggaagaagatactctacgaggttcggttgaacatttcaccaggctcgtcctgccactgtaccgaacctggctggttccgaatgtgtttcgctaacatgtccgaagatactttaaacatagccatgaaacggttgaagaccttcgtggaagcagagtcaaatgacaacgggtgcgacaagaaaagagttcagtcttcaggaaattcttcaagaagaaagtcactctccaattgggttttccggctatcgtctcgcgaccaccgtgagcaggaagaacgatagccaggtcgtgacgtgaactgtgaacgcatgcagaattaactttattcattttttttcctccccgaatatttttggtggagttacaagttaattacaaccacttgttgttgttattaatcattattactattttttttaatggtgaaatcgtagctagagagagaaagacaagcactctgtccgtttggatgtgaagtgtggtctttaattagtcagctaccatcgtttgtataacttccatctcaatcatcaatatattaccctatgcatgaaaaatcttattagtagtgtacgatatatggatgtataatttatcaattatcaattactttctccatggtcccacag

SEQ ID NO: 6412 - DNA, 529 bp, Glycine max
  Clone ID: 700563760_FLI
tctgatgcaaaaattgagattagtcctagttgatcatgcattacaaaatggtgacaaagaggtgaattcaagtacctcaattttccaaaagattggtgcctttgaggaagagctcaatgcccttttgccaaaagaggtggaaagttctaggattgaagttgagaatggaaatcctgccattcctaaccgaattaaggaatgcagatcttacccattatataagtttgttagagaaaatttgggtacaactttgctaacaggagagaaagtcaagtcacctggtgaggaatttgataaggtatttactgcattgtgtgaagggaagttaattgatcctttgttggactgtctaaaagagtggaagggtgctcctctaccaatatgctgagaggctgctaccttttttcgtaagaaaaccaaaatttacttttcattttcctatgatgtatgtttttataaagctattggacatgtatttgaaactgttataggaatttgtatttcaatttaatatatgttctttatctgt

SEQ ID NO: 6413 - DNA, 1026 bp, Glycine max
  Clone ID: 700563838_FLI
tatcaaactcccatggaatgcacgcattcaggtggcacttggagctgcaagagctttagagtatctgcatgagaactttcagccacctattgtgcatcgaaattttaggtctgctaatgttcttctgaacgacaatttggaagtgtgcatctctgattgtggattagggccattactctcttctggctctactggtcagttatcaggacgcctccttacagcgtatggttacagtgctccagaatttgagtctggaagttatacgcagcaaagtgatgtcttcagttttggtgtcgtaatgctagaacttctcactggacgaaaatcttatgaaaagtcactgcctcgtggagagcaagttttggtcagatgggcagtccctcaactccatgacattgatgcattgtcaaaaatggttgacccctgcttaaagggaacctatcctatgaagtccttgtcacgttttgcagatattgtttcttcatgtatacagcgggaacctgaattccggccggcaatgtcggaaattgttcaagatctcttgcgaataaagtaaatggatatgtagctatctgtgagaaaatgaactaccttagccatgaagtagagccgaagataagcttttgttcctagatcctcatatctattttttttctttattaaattttgtgagccaaagatattttccttgtgtgtggaaaatctgcttactaatgtaattatgagttaacagcaatggtgtaccatagtttatacttcattactcattttttttattaagataaattatatggggtcagattcatgaaaatgtcctaggtgttgctaggtgcagctagcatttttccattttttctaattttgcccttcactatggaaaaatttcttccataaactcttccgtaatccttccataagagtttttttttttttacggaaaaacttctttgtaagcattggtgtagactgtggatactatgattttgggctatgtaatatgtatcatgtgtaaagtatgaacctaac

SEQ ID NO: 6414 - DNA, 900 bp, Glycine max
  Clone ID: 700563871_FLI
ctgcctttctatctggaacttgtcagaccacacaaagcactaacgatgactgcatggaggtgaaacaagccaagaaagaagataagattgtagatataaacactttccgcaaccgggatatatctgctagtgaaaagtcttctaaggatgtcatttctgttaacaaggatacagattatgtgatagaaataaaagcagatgctgtttctagaagtaatgatgatgtagtttctcaaacagatcgaacaactagtacaaggaaaacatggagtccacctaattatggtgctttaaaaattgtaattgctgatgaagatgagcagagagataaacctacacggactgttgatgccacccctaaagaaaaaggattcagaaatctattttggaaactaaagtttgaagagtatcctcaggccatgcgagtagttcatatgttcaatcagcgttttgggcgcataggtatatgccagagccagaggcagtttcaaagtcccttgcacttgcgatatggctgttctgttcaagttacacttgctctaatgttgaccatttttctcattgttccctttgtactttattcaacttgagttaaacggctgcttcacgcaaagagggctttacttgtcttggtgtatcgacaaggtcactgatcatttgagatctcagccactgccttcaagtattggtgggaaaagttatagctaaaggcacagtgagtgccaccttctattttgtcgttgttgagattaagatgaatttacctatgtgagtgtggatacagataggataaccaacctcttcgtcctacagggacacctgtctattttagtttctcagctattaaaatgtacatacattcatccaatatttaatgcaagttccgctttatttggttgc

SEQ ID NO: 6415 - DNA, 1249 bp, Glycine max
  Clone ID: 700563918_FLI
ctgcagttctctatatggcccatggtgggacaaactttggattttataatggagcaaatactggtgtagatgaggctgactacaaacctgatctcacttcatacgattatgatgcaccaattagggaatctggtgacgttgacaattcaaaattcaatgctattcgaagggttatagccagatatagctcagtacctcttccatctattccctctaataatgaaaaggcaagatacggaccaattcacttacaaagagaggctttcgtatttgacatgtttgatttcaccaattccaccaatgtgtttaaatctgaaaccccaatgtcaatggagtatgtgggccagttgtttggtttcgtattgcatgtcactgaatacaaagcaaagagaggtggaagaattttgttcataccaaagttacatgacagagctcaagtatttatttcatgcccctctgaagaaagtggtgcaaggccaacttacattggaactattgaaaggtggttaaataacaaagtaactcttccggatattaaatgccattctaagatcaacttatttattctggttgaaaacatgggtcgtgtaaattacgggtctttcatctttgataggaagggcattctgtcttctgtttatctggacaaggaacaagtaaaagggtggaaaatgttccctattcctttgcacaacctgaatgaaatgtcaacctacaatcccatcacgcaagttgcatattctgcattcagtggcatatcatcattcagaaaaaagttgatttataagaatgggaatacttcaaaagaacctgctttttattcgggccacttcttaattgataaatcaagtcaggtcaaggatacatttatatcattcaacaattggggaaaaggcattgtgtttgttaatgacttcaatataggaagatattggccgttgagaggaccacagtgcaacctctacgttcctgctccactccttaaacaaggagataactttttggtaatactagagttggaatctccagaccccgaacttgtggtgcacacagtggatgagccagacttcacatgtggctctagtgggacgagtctccatcagctgtaataaattgtcataaaaatatgcttgacctttgaaaatacatgtaagaatttggaggttatcgaatgactatcaagtcattatgcttgtaaatattaactatggttattattgctctttaatttttagctacaattctgcac

SEQ ID NO: 6416 - DNA, 1867 bp, Glycine max
  Clone ID: 700563995_FLI
atttgggctgggcctcatttcgctcttgactggccacatggcctctgatctcgaatggtactctcaccgtcgctctctctactctacaatggatgggagctatcgtgcgccaatcgatgtttggaaatcccagtattctaaatattactacggatgcgctgaaaggggacgcggttatgctcctgctgtgcctgagaggatgtcaaatggctacttgcttattggtactagtggaggattgaaccaacaaagaactgggataacagatgctgttgttgttgcccgaattcttaatgccacactagtagtaccggagttggatcatcattcttattggaaggatgacagtgacttcatccatattttcgatgttgattggttcatttcttatctcgcaaaagatgttactattgttaaaagagttcctgataagttcatgcggtcaatggagaaaccaccatatacaatgcgtgtcccaaggaaatcagagcctgattattatcttgatcaagttttgcctatacttttgagacgacaggttgttcaattgacaaaatttgactacagacttgcaaataaccttgatgatgagctacaaaaactacgttgccgcgttaattttcatgctttgagatttacaaaacctatacaagaacttggtcaaagaattgttatgagaatgcaaaagatggcaccgcgtttcatagcagtccatttgaggtttgaaccagatatgctagcattttcaggttgttattttggtgggggagaaaaagagagacgtgagcttggtgaaatcagaaaaaggtggacaacattacctgatttgagcccagatggagaacggaagcgagggaaatgtcctcttagtcctcatgaagtgggtttgatgctgcgggcacttggcttttcaaatgacacatacctctatgttgcgtcaggagaagtatatggaggggaagaaactatgcagcctctcagagatctttttcccaacatctatacaaaggagatgctagctgaggaagagctgaaacctttccttccattctcttcccgccttgctgctattgactacattgtttgtgatgaaagtgatgtatttgttactaacaacaatggtaacatggcaaagattctcgcaggtcgaaggagatatatgggtcacaaaagaacaatcagaccaaatgcaaagaagcttagcacgctattggcgggaaggcatcaaatggactgggatacctttgccaaaaaggttaagtcatgccagagaggattcatgggagagccagatgagatgagacctggacgaggtgaatttcatgaatttccaagctcttgcgtgtgcaggagaccatatgtggatgaagaactcagcaaagaggtataccgttcccctaaactcgttgcaattaaccttactgcaaaagcttattcctcgtcgaatggaattagaagaggcaggacatgatgcagtagttaccttgaaccatggaggttatatctagcggggcgaaagaaaatcagtgttgtctctcgctctgttaatgccaactgaacgtcaattgaaaattgaatgctatggcaatgcgtccattttcacacaattgatctctgtaaatcatcaggggaggggttcttaggtgggtggctcagtttaggacctaaggacgtcaatgcgttgcaaagtgtagatatatataatataatattataatatatgcttagcttagattgctttcaatcttttttcgccacaatgtcatacaaatttgagttagacattttctcctattctatcagcttaatctatttttgtcaactaattaattcagatatattaaattcattgatcaggtgcaacttc

SEQ ID NO: 6417 - DNA, 1011 bp, Glycine max
  Clone ID: 700564011_FLI
aaaactcatacatacacaaataacacaaaaatgaaatacagtgagatatcccatttcagccacccacagcacaagctgagatttgagtactcagaattccccttcaaatgtgatggctgcaaggaagtaggcataggatcacgttacaagtgctccatctgtgacttcgaccttcacatgcactgtgccatgataacctcccccaccttgctccaccctttctacaccaaatgcaacttccagttcatgtcaaagcctccaggtgacacgcctcgttactgcaacgcgtgcgagaaggacgtaagaggcttcttgtaccactgcaaagcgtgcgggtttgacctccacccatgttgcgccaagctaccgatggtccttgatgatggtgaagtgaagctgtacttgtacagaaaagtgagttcaccctgtcaccgttgtggcagaaaagggcgtagctggagttataggtcaaagtgcaagaactataatctgcatgtggcgtgtgtgagggacatgttggtggagaattggcacgaggtgtatgttaaaggaaggagtgtgaatagcaacattccaagtctgaggaacacactttacactcctcataatagtagaaggagtaaagggaaggtgaagaaatgctgtgagattgctggtttggctgtgcaggttgtgatatcagctgtgttgggagatccaacggctctcattgcaggccttgtgggctcgttcatgtcacgggcttgatcatgggcacaacagaatctatcagtttaacttcaaagattgtaaacaacttcagttcactacttcattgtggttgtgactatgttaatctcacttaaatgtgtggttcaatctttcttctcacatctcaatctgacttgcatgtataacaatttataacaattttatttctacaagtaagagagttacaaggggtgagagatgtaagggtttgaatctttattattaatatttttataaaaccaactattaatatttattgat

SEQ ID NO: 6418 - DNA, 1395 bp, Glycine max
  Clone ID: 700564066_FLI
ccaattcaaatagtaccatataatactaccaatgtcccttgaatctccccacctttcttctttcttcctattaaaattttcaacaaaaacatcatcccagtaaggaacctctcttccctttccaagttatcattttttcaacccatccccatcttcctccccctttttcatttcctccaatcccaaacaaaacccccaaaaaatgcaatcattcccccccatccccactctcgcatgcctttaccttactttctttacgtcactactattcctactacctttttctcgtgccggtttactctccgaaccggtgagcgaccccaaccagcctctcgaaccgggctccaacactgtccccgcctttcctgtccagacccaggccctaacctgccgcctcgacctctccgacgagctcttcggcggcgtcaaggatgcctgcggcaaggacctcgaccggagccgctgctgccccgtcctcgccgcctggctcttcgccgctcacgcccgcaccgctcttgatgtctccgccgcccctcctccgtcctccgccgaccttccgatgatgcccgacgactcccaaaaatgcgtcaactcgctccaggattcgcttctctcccgcaacatccgaatccctcagcccaacgccacgtgcgacgctattctctgcttctgcggcatcagactccaccaaatcacgtcgcttacctgcaacgctgcgtttaacgtctcgctttctcacaggaacgccaccccaaccgctgcggttcgcaacctcgagaataattgccgtaactcctcttacgctggttgcaccaaatgcctcggtgccctacaaaaggtgaaggggtataaaaacgagacgaagggaagtgatagggtgaagaaaatgttcaaccgggactgtcaactgatggggttaacgtggcttctggcgaagaacaaaacggcgtacatacctaccgtttcggcagtgctgcgtgcgatgatgtacagtgcgcaccctcacgagtccaagtgtagtcctgaccaagagaacatgccgctggccgttgattcgcttcagttcgagagcggccacgcgccatctcggccgtccaagttttgcgtgacggttttgcccctcgtggttctcttattattttccgcttttgtgtagaaagggtgggtccacttgctggggtttagtgtctgtcctcttctctttctctctcgctatcacgtgaagctgagctactcgacaaaacatgcaaacaaaacatggtgggttgtttttgtttctgactagagggagggtttttctcgctgtaaattttcagagtccattgacatgtctgtgtgtacatgatgctagtgcggtagtgtcaccaacttacatagaaagaagaggtttttttt

SEQ ID NO: 6419 - DNA, 1625 bp, Glycine max
  Clone ID: 700564072_FLI
caatggaagaggaaattgaatatgaagaagtagaagaagaagaggaagtggaagagatagaagaggaagtggaagaggtggaagaagaggaggaggtagaggtggaagaagaggaggaggaggaggaggaggaggaggaggaggaagaagtggaggttgaagaggtggaagaagatgatgccatgcaaaatcatagcagtgatgaagcaaaggtggaagatgaggatgagaagagaaaacatgctgaactcctttctcttcctcctcatgggtctgaagtatacattggtggcattcctcatgcctcagatgaggatttgaaatctttatgtgagcgtattggtgaagttgcagaggttcgaataatgaagggaaaggattcttctgagaacaagggctttggttttgtgacttttacaagtgtggaattggcttctaaagccattgaggagctaaataatacagaattcatgggtaaaaaaataaaatgttcgaaatctcaagccaagcaccgtctttttattggcaatgttcctagaagctggggtgttgaagatctgaagaagattgtaactgagattggacctggagttactggtgtggaactagtcaaggatatgaagaacaccaacaataaccgtggctttgcttttattgactattataatcatgcatgtgctgagtattcaaggcaaaagatgatgagcccaacatttaagctaggtgagaatgctccaacagtgagctgggctgatcctaaaaatgccgagtcctctgctgcatctcaggtgaaggcggtttatgtgaagaacctgccaaagaatgtaactcaagagcagttgaagaagctttttgaacgccatggaaagatcacaaaggtggttcttccaccagcaaagtctggtcaggaaaagaacagaattggctttgtacattttgcagagaggtcaaatgctatgaaagcacttaaaaacactgaaagatatgaattagaaggtcaacttttagaatgctctctggcaaagccacaggctgatcaaaagtctggaggatcaaacacacagaagccaggaccaggattgcttcctagctatccaccacatgttggctatggtttggttgggggtgcctatggtgcacttggtgcaggatatgctgctccaggtcttgcacagcccttgttatatggaggaggtcaaactcccgctggaatggccatgatgcctatgcttttggctgatggacggattggatatgtcttgcaacaaccaggaatgcagccacaagccccaccctcacatcatagaggtggcaggggcggtggtggcagtgggagtggcaacaggaatgccggaagttcaagtaagggaaggcacaacaatgatggcggccatgggcgcagataccggccatattagctggtcttggtatagatagtagcacccccccttctctcaaatgtatttagggcttttcaagctcatttaattcatcaaaatgtgctacatatttttttcatcaaaaaactgttgtacaatcagtcttgattacatacatgatgtcagggcgtttgtaagttgaattcttcctatgttgataattaatcagttttatacttgaggacc

SEQ ID NO: 6420 - DNA, 632 bp, Glycine max
  Clone ID: 700564246_FLI
tgtgatattgttgtggagcctctcagggatcgcatagtgacaagtcttcttcaggcatcattggatggcttactccgtgttatcttagatgggggtccatcaagagttttctttcccggtgatgtaaaattattagaggaagatctggaggtcttaaaggaattctttatatctggaggtgacggcctccctcggggtgttgtcgaaaatcaggttgcacgtgttcggaatgtgatcaacttgcatggctatgagacccgagagttgattgaagacttgaaatctgctagtggcatggaaatgcaaggtggcaaaagcaaactgggaactgattccaaaactctattaagaatattatgccacaggagcgactcagaagcctctcaatttctgaagaaacaatacaaaatacccagttcttctgcttagaggaatgtttacaataaaagggaaccagcaaaattttcattttggtgttagctttctgtgaatattcattgcttagaggagtttttgcctttcctttgttttggttttaatctaactacaatgttgttgatcttcattgtaaaatttcgtccatgtgaatactgtaattgtaagttcaattaatgaagctgctattctttttt

SEQ ID NO: 6421 - DNA, 782 bp, Glycine max
  Clone ID: 700564276_FLI
agagaagcaggttctagctctagttctgttgatttaagtcactctagacaaccatcagataatttacaaggccaattctcagccaccaactatgattctggaattgatattgaaaatgggttgttagcatcagagttattcagctcatcggcgagatatggaaggcgagtgtccggatcgtttagaaggcattcttattcaggtcctctgaatactggaagaagcaagcggttgtggcagataattagaaagctttctggcggtagtatcagtgaacatggaactatgtttaagttatgaccaggtttcaattgagccaaattgcaagttttgaactttcttctgtgcatactgctctccctcacattgttaatgtgcagttcacaactctactagaggcattgcacctctctgcctgagccattggaagtttgacaagagaatacaagcaagttgtaaataggttttgacatgctttttctgctaacctgcaagatcatgtgtatgtaactggtactaactctttgaagaggggaaacaaatgcaaatctagtttgaaaatagaagatgactgaagatggcctttactaagacctccaattgcaaatacaacatacaagatatagtctatgcagttgcagcatcaaaataatataatgttcaaattgtcaaagccacatgtatcaagaggaggggatggaatggaatctagttaattagttgtgtagaacatgattatataacgaatacattgctgaatttacacaggccactcttttttt

SEQ ID NO: 6422 - DNA, 1883 bp, Glycine max
  Clone ID: 700564288_FLI
ataagatatggcattcgacgcttatttccttttgggcctcatagctcttgttcttgttagcacttccaaagttacatgcgaattagaagcagatacagtttcacctgttattgacatttcactcaaccggaacagtttcccagaagggttcatctttggggcgggatcttcctcgtaccagttcgaaggtgcagcaaatgatggtggtagaggaccaagcgtatgggataccttcacccataattatcctggtaagatcattgatagaagcaacggagacgtggcaattgactcatatcaccactacaaggaagatgttgggatgatgaaggatatgaatttggattcatatagattttccatttcttggtcaagaattctcccaaaaggaaagctaagtggaggtataaatcaagaaggaatcaactattacaacaaccttattaatgagctaatggctaatggtatacaaccacttgttactctttttcactgggatcttccccaagcattagaggatgagtacggtggcttcttaagtccacgcatagtgaaagattttcgagactatgcggatctttgtttcaaggaatttggtgatagggtgaagcattgggttactttgaacgagccatggagttacagccaaaatggctatgcaaatggacgaatggcaccgggtcgttgttctgcatggatgaatttgaattgtactggtggcgattcttcaacggagccttatttggttacacaccatcaacttcttgctcatgcaaccgctgttcgtgtgtataagaccaagtatcaggcatctcaaaaaggtttgattggtataaccttagtagctaattggtttttgccgttgagagataccaaatctgatcaaaaggctaccgaaagagcaattgacttcatgtatggatggtttatggatccgttaatatctggagactatccaaaaagcatgcgatctttagtcagaacaagattgccaaagtttactacagagcaatcgaaactacttatcagttcatttgattttattggtctaaactattactctacaacatatgcttctgattcacctcaactaagcaatgccaggcctagctacttaacagattctcttgtcactcctgcatatgaacgtgatgggaaacctataggaataaagattgcttctgattggctatatgtttatccaagaggaattcgtgaccttttattgtataccaaagaaaaatacaacaatcctttgatttacatcactgaaaatggtataaatgagtatgatgaaccaatattatcacttgaagaatctcttatggataccttcagaattgattatcattatcgtcatctcttttatcttcaatctgcaattaggaatggcgcaaatgttaaaggatattatgtatggtctttgttcgacaactttgagtggtcttcaggctatacatcgcgatttggaatgatttttgtggactacaaaaatgaattaaagagataccaaaaactctctgcattatggtttaagaattttctgaagagaaaaaccagactttatgcctctagtaaatagtattgtgaagttagtttatcaaatgattatattggtaaattgattattgatttttatttattattcttttattcaaaagaggtcctattggacttattggggaaatagagatttgttagatttttttttttctctaaagaggtcctatcggacttagaaggaaatagagatatatttgatcattctttcattctaaagaggtcctattagacttagaagggaaatagagatgtagatttgttgatagttgctgctaatgttacagtaataagaaggaaagaaacgttatgaatgttatgat

SEQ ID NO: 6423 - DNA, 1032 bp, Glycine max
  Clone ID: 700564406_FLI
gcaaacacctccaactacaaacaaacacacttcacaactttgctttttctctctttcaatgtcctcttcttccttctcccccgccactctcaccaccgagcaggagctttccgtcatcgttgccgcccttaccaacgtcgtcgccggctccacctccgcctccagctccttctccctccccgaattccgccttccacagacctctgatcctctcgccgccgcctgcctaatgccgccgccgccgccgccgagcatggacacttgtcgcgagtgcaacatcgcaggatgcctgggatgcaactttttcccggaggagaaaaagaagcagaagagggccaagaagaagtacagaggcgtgaggcagaggccctggggaaagtgggccgcggagattcgtgaccctcgtcgtgctgcccgggtctggctcggcacgttcggaaccgccgaggatgccgcccgggcctacgacaaggccgcgattgagttccgcggcccacgggccaagctcaatttccccttggtggacgagtcgctcactttgcagcagagcgagccagagagggttcaaacagaagaagagcaaataaagacagagaatctcaatcaaggtatggaaatggattcattcgggaacaaggataccgaattctgggacaggattaacgaagctgattttcatcagctcatgatgatgatggattttgctggagattcttccgactctgccactgggaacgctcttagttcttgaaatattcaatgaagcaaaataattagtttttgatagtgtgtgtgtttaaaaattgtacaactcgaccaaacgtatttgttaaattagcatttagctagctccactacactgcatttctgtaatatctttcttccgctaggttttttcgggaggaagctgctgcatagtacaaatcaagagttttaatgtttcatttcaccaccccaagagtaagctctgtataaagattggcgtattattattattatttttttatagcaataatagctagttttaagagc

SEQ ID NO: 6424 - DNA, 1260 bp, Glycine max
  Clone ID: 700564491_FLI
cttcatttcctggttttggtttttctatggtcctgcctttccacacaatccactatagtttcttctataccttccttgtggatctgtcactatgacttcctcactcgtgaagatccaaggcgaacaggtcctcaccaacgattttcaggacctttcaatcaaagatctgagtgagaaagggactgaggcagagattcacaaggtggggtcttatggaagccatgggggaatctgtgctatctgcttggataagatagtgctgcaggaaactgctcttgtaaaaggttgcgagcatgcttactggtttgtctgaacgatctcttgctgttcttttcagaattaagtttgacgaaaatgtgcttttttttattatgtgtaacatgcatccttcattgggctacataccgtgagaaagttacctgccctcagtgtaaacatccatttgagttcctcaatgtccatcgctcacttgatggcagcattcaagattacatgtttgaggagagtgtgtgcctgctacttcgggcctcatggttcacacctttatctgttgaagaacatgtggttcatgaagatgcatatgaagacctagaagattattatcagtacgaggatgatgatgatgatgatgatatggatgaagtttactatggtggttcgtccagtcttcgggttattggcaaccgtagatggggagataatggttatgtcagggctggtcgtcaagaagctcggccagtccatcgtccaaactttcaggattcaggagcaagttcttcttcgcatgagccgaagaagaaagaggctgggaaaattatcacaggcagaagggcaaagagggcacagaaaagggaagctgctgacaaggcggcggaagcaaagcatcagcagcatttagtaaggttgggtaggaagtgattctattttatttatgtcaggccatggccttgaactttccttcccataagttaaatattttctttttctttacattttttttttcttgtacattgtttctgtgctctttactctgaagcatgtaatagatcttggggaaggtgttttagaataatggcttggtggggtggttggattatggaaactccgaactcactatagcattcaacaatttaggttttagttgttattatgctctcaatgcaggtctaagttgtacataatttccatgtgatgttgatacctcaacaatgttgatatctatctcaaagttaaaatttcaaacacaagaatagttaaagg

SEQ ID NO: 6425 - DNA, 2103 bp, Glycine max
  Clone ID: 700564493_FLI
cacatacacacactcttcaatcaaattgaagcagaaagccaaaggccagagagagccctgttatctacggagagacccttacactccaaagcttggccacaattgaaggacgagcattatccctttggattaataaagccatctcaaatctcaattccaataatccgttagcacttttttcagtggctctggtgctgccattgcgttccaccaaccgccactgccacacatacacttcactacagacaaataaatttcacactcttttgtctgacacgtataacattctgaactaaaactacttggtttttcccacaccgaatactcttcttcaatcaagcgaaggtggtctcacttgactcgattgcaagtgatccacgacacactgttcgcttcacaaaagcttcgaatccaattcctcagtaacatctgcaagaagtcttctccttcaccatgccaccaaagcctttagactatgggtcaataaatgaaaacgtgaagaagagtcaatatgctgtcagaggtgaattataccttcgagcttctgagcttcagaaagagggcaaaaagattatatttactaatgttggcaacccacatgcattgggacagaaaccactgagcttccctcgtcaggttgttgctttgtgccaagctccattcctacttgatgatcctaatgttggactgctattccctgctgatgcaattgcaagagctaaacactatctttcattgacctcgggcggtttaggcgcttatagtgactcccgcggccttccaggagtgaggaaggaagtggctgagttcatactcaggcgtgatggttatccaactgatccagaactcatatatctcactgatggtgccagcaagggggtgatgcagatattaaatactatcatcagaggtcaagacgatgggattttggttccagtcccacaatacccactctactcagcaacaattgctctgcttggtggtacccttgttccatactaccttgaagagacagcaaattggggtcttgatgttaatgaacttcgtcaatcagttgagcaggctcgctttaaaggaataactgttaaagcaatggtgatcataaatcctggaaaccctactggtcaatgccttagtgaagctaatctaagagaggttttgcaattctgttatcaagaaaatttagccttgcttggagatgaggtttaccagacaaatatatatcaggatgaacgacccttcattagttctagaaaggttttgatggacttggggccacctataagcaaggaagtccagcttatttcttttcactccgtgtcaaaaggttattatggtgaatgtggacagcgaggtggatattttgaaatgaccaacattcctccagagacagttgatgagatctacaaggttgcatcaatatcacttagtccaaatgttccagcacaaatatttatgggagttatgctccatccacctcaacctggagatatttcttatgacaaatttgttagggagagcaccggaatacttgaatcactgagaagaagagcaaggctaatgactgatggattcaacagttgcagaaatgtggtttgtaattttactgaaggtgccatgtattcattccctcaaatacgtttgccgccaagagctttagaggctgctaaacaggctgcaaaggttccagatgttttctactgcctcaaacttttggaagccactggcatatccactgttcctggttcaggatttggacagagagaaggggtcttccatttgaggactactattttaccagacgaggaagacatgcccgctattatggatagtttcaaaaagttcaatgatgaattcatggagcaatacgaagacaatagaggttattcaaggttgtaagaaaattatcgtaaaagatgcattatactcttgtgcttttgtaagaaaaacataacctccctttctactatttgtccttggagataattcttaaaccttacactttcttctatatcatctctgaacttacaatatttcggctgcatatttaatctctcttgaacctttattatcttgtggcatagcaatcaaacaatcgtcttg

SEQ ID NO: 6426 - DNA, 1329 bp, Glycine max
  Clone ID: 700564722_FLI
gctgaaagaggtgaagctgcgtgatggatactatgtaatggaccctgaaaaagcagtggaaatggtggatgagaacaccatttgtgttgctgctatccttggttccactctgaatggagagtttgaagatgtcaaactcttaaatgatctcctggtggaaaagaataaggaaactggatgggacactccaattcatgtggatgctgccagtgggggattcattgcaccttttctttatccagagcttgaatgggactttcggttgccactagtgaagagcatcaatgttagtggacacaaatatggtttagtctatgctggaattggttgggtcatttggagaagcaaggaagaccttcctgaggaactcattttccacattaactatctaggagctgatcaacccaccttcaccctcaacttctccaaagataattgacacactcaattggttcaataacaactaactagatacttgacctgaattatgcttttccctttgtaccattaattagtttatgcatattgatcactactaggtagtaggtactaatttctttcatgaaatatgcaatgcaggttctagccaagttattgctcagtactaccaactaattcgactgggttatgagggatataaaatggtgatggaaaactgcaatgacaacatggcagtgcttaaggaaggactggagaaaacaggaaggtttgagattatatccaaagacattggtgttccattggtggccttcacattgaaggaccacacccacttcaatgaattccaaatctctgacatgctgaggcgctatggttggatagtgccagcatacacaatgcccccagatgcacaacatgtgacagtgcttcgtgttgtgattagggaggatttttctcgcaccctcgcggagcgtctagtgattgatgtcaccaaagttgtgcacgagctggatctccttcctgctagggtgatcagcaccaacaccataatggttacaggagaagcaggtgaagaaaatgacgaaaaagtgctgtttgccaagaagagtgaaatagaaacacaaagggaaatcactaaagcttggaagaagtttgtgatggacaggaagaagatgaatggtgtttgttagaaccttgtttttggatcattttttgagctacttatgcagaccagagaccagagcaattactattattattttaatataatatcgtgtggagagtaattcccttccccaataacatagcgtactttagatatgctgaaattgcaatgttgttggttgtatggaattgtgttggactgaaagttacttcatttctcaacgc

SEQ ID NO: 6427 - DNA, 854 bp, Glycine max
  Clone ID: 700564741_FLI
ctggaatatgcatggagccacgcggttatatcagaccagcaatacgacaaagcaaaacaattatgtgattttaaacaatttgaatggtctaatgaatgcaacaaggccatgaatgaagtgttccaagattacttagaaattgacatatacaacatttatgccccggcatgtcttctaaacagcacatcctcaatagctgatgatggcgacagtaacggccctgaatcattaactaaggagagaaatgattatagactaaagaggatgagaatttttgggggctatgatccttgttattccaattatgcagaagaatacttcaatagaaaagatgttcagtcatcttttcatgcagatactaaaagagacactaacgtagcatggaaggtgtgcaagtggccttaagatttggatttacagtggagatgcagatggaagaataccggtgatagggacacgatattgcgttgaggctctgggattacctctcaagtctaggtggcgaacttggtaccatgataatcaggttggaggaagaatagttgaatacgaaggtctgacatatgtgacagtgagaggagcaggtcacttggtgccactgaacaagcccagtgaggctctctctctaattcattctttcttaacagaagaacatcttcctactcgtggataatcagcgtaatatatatatatgtacttgtgccagtattttgggttggcaatttttctcacaagaatgaagacccttgtatgatcaatataaataaatgaacagcaatgatatgtagacatcccttaactacaaatattcatttgattcgtctcataaaattataatcatttattatacctgc

SEQ ID NO: 6428 - DNA, 2012 bp, Glycine max
  Clone ID: 700564796_FLI
tgactgtgtgctttgcttagaacaacactaccatcccaaaaaaaaatccctcttgtgtcactcaatggccatgccatgacttggcagcaactctcaaaaaatggaaacagatagagagagaccccatcgcagcacaagcgagttgtttgtttgcttcacttcccgtttgtcctcttcatccatgaagctctcatccaagtccattctcagcccaagccgcagcagagaccctcctcagatttccctctcttcctccctcagcaggaggctcaagagcaatggcagcatcaagggtggtggaggtggtcaagcctctccaatgttcccaaccggtggtggtggcaagagaagaggctgtggctttgagaatcctgaaccttcttctcccaaagtcacttgcattggccaggtgagggtgaaaaccaagaagcaagggaagaagcatgaggagttggttggagaggaggaagagcaggctagagttagcatatgtattcctcccaagaatgctcttttgttgatgaggtgcagatctgatccggtcaaaatggctgctttggctaaccggttttgggaatctcctgttcacaaagacaaatgtcaagaagaacaacaagatgatgaagaagaaagtggagatgaggaggaagagcaagaggatgacaaagagcaacaccacaaaatgaaagatgaacaacaagaagaagcactagagcaagttgaaagagaagccatagaagatagcatttgtgagagagaaacagaaactgctgttgtagccactgaaaatgatgaagaagaacaagatgggaaagaaagctatgaaattgtatgcagagaaaatctagaaagccaagtatttactgaagtagtaaaagaggaagaaaaggttgatgaagaagaagcagcaaatggaggaaatgccattgaagaaggtgaaactttaactcacccagaagcttattcagatctagagaaccttaaaaccgaagaaaaagaggctaatctcgaagagggtaaagaagagagagaaaacaacgatagctcggaactttcttccaccccagaaaccttcgcagcttcagaaaaagaaaacgacggagcagaggcagaaacagaaccagtaacggtggaaacttcagaagggtcaacggaggaggaagaagagaaagtgatcgaaccgaaggaacaacctcagcaaccaggcccgacccgagaaccaaactcggatccggagtcaatggagcgagaaaacgggtcaaagcgcgaagagagagacagagaagcgttgccggagtgtttgttgctgatgatgtgcgagccgaagctgtcgatggaggtgtctaaggaaacgtgggtgtgcagcaccgacttcatacggtggctgccggagagaaccgccgcaggcggcggcaacagggtcgccgcagaaacgcttgcaaagtccaagccaaaaccgaagccgatgatgcagccaccgcggtcgtcgtgctcgttcccggcggcgagaggcggcgccggggtgtcgatggcggcgatgattgagcagaagctgatggggtccaaatcgggtaacgggtacgagccgtttgtgctcacgcgctgcaagtcggagccgatgcggtcctcggctaagctcgcgccggaggcttgtttctggaacaacaggaagctcgagccgcacccacccgcggcacagcttggagtcggcgcgccggctggtattgggttctgattttgattttttttctttccttttctcgaaatctcaaattttccttattttctttaattaattgacagaataatcaattgttgttatgtattatgtgtagattattatcgctaaactttgggcagctttggtaagttaggattattgagtatactattttgctgtttttagaatgtaatcctttgtataaatagttttagtgatgctatttgttttgggctccattattactcgttagtgaatttataataagagtttaatttctgcattattagct

SEQ ID NO: 6429 - DNA, 754 bp, Glycine max
  Clone ID: 700564875_FLI
ggctgagccatgtgattcaaactcgtctggttcaaatcctttggacaacttacttaccaaggatggtgattttgatgtagagcaatcatggccagtggtaacctcgtcgcccccatttttctgcgggtcgccgccgagtagagcagctaaccctttgattcaggatgctcgatttggggatgagaatttttccccgctctccccaccgtcgtgggtggtggttccggctgctgcgtcgggtctgccaccgtctccctcttcctctgcaaggaagggagggtgtgtccgagccaattttggtaacaatcctgctgtgagaattgaggggttcgattgccttgacagggacaggcgaaattgcagcatcccggctctggcttagaacaccctcctcacacgccacacgtctctttgatattaggattcagttcaacatataaacataaccacagaagatgagccttcatacaatataataccctacggagaagagtaattttggatgcttgagagttgaatctagaggaagagataaaattttatcttgtgtctgtttgtaaatatgttcagttaatcggccagtgcatgtaaatgtcaatagtgtgtcttgtgtagagaaatattgtctagcctccaaataatgatagagggttgatttgggtgttaattagatttcgcccgtgccctatgttagtagtgtctaaggaaaaataccattctcttttttgtaagtagaagtcttttgaggatggag

SEQ ID NO: 6430 - DNA, 1861 bp, Glycine max
  Clone ID: 700564889_FLI
tgaagacgttagaccaaacggtggaatcaagaaattcagatctgctgcttactctaactgttctcgcaaaccatcctgatacacatccggattgatagttcgttgcatgcaaccatagttttattaggattttttcttctttgttttcaattaggtttttttgttgctctccttcaaactccatctttccaaatcctctctttgcgattgtgttttgatctgcttcctactgcgatagtttctctactgttacatggccatggcggtttccgcaattggttttgaaggtttcgagaaaaggttggaaatatcctttttccagccgggactttttgctgaccctgaaggaaggggtctaagggctcttacaaaatcccagttgggtgagattctaacaccagctgcttgcaccattgtttcttcgctcaaaaacgataatgtcgactcctatgttctatctgagtccagcctctttttttatgcctacaagatcatcatcaaaacctgtggtactactaagctattgcttgcaatcccacccatattgaagttcgctgaaatgctttcccttaatgttaagtctgtgaattacaccaggggaagtttcattttccccagtgctcagccatatccccatcgcaacttttctgaggaagttgctattcttgatggctactttggcaaacttggtgcaggaagcaatgcttatattttggtggccaagacaaagcacagaactggcatgtctactctgcttctgcagattctgtaactcaatgtgacaatgtttacactcttgagatgtgcatgactggcctggatagagagaaagcacaggttttctacaaagaacaatctgcttcagctgccatgatgactgttaattccggcattagaaaaattcttccagattccgagatttgtgactttgactttgaaccatgtggttattcaatgaactctgttgaaggcgctgctgtttctacgattcatgttaccccagaagatggtttcagttatgcaagcttcgaaactgttggttatgacttcaaagcggtgaatctgaacgaaatggttcagagggtattggcatgtttcctcccaactgagttttctgttgcagttcatgtggatggtgcaagcaagtcgtttgagcagacctgctttctggatgttaagggatactgtcgtgaagagaggagccacgaagggcttggaatgggtggttctgttgtctaccaaaaattcgggaagactagtgactgtggttcacctagatcaactctaaagtgctggaatgaggaagatgaggaagagtagtttccttaagtgtctttattattctgtccttgtgaaaataagtctggttttccagatacgttattgtttttctttgttgtcttttttagcttctgttagagaccatttgggcatttagacctttattgtttctattaccatttgaacatcgaatggattaataaatcactttgtttgcgtgcaaaaaaaacggctcgaggtcattctactgatggccagaacaccggcaacttcatcacggaccgaccctcaaccaaggtccatgctgcccctggtggtggttcttccctaggttatctctttggtgaacctggggaggggaaatgataccttgtttgcaaagcttttgctcgatgatgaatgatttattttgaaattcaggtcgtggaaacataatggaagatatggtgtattataggttatggttgctacgataagtgagtcaagagtgctatattttggatgtgctaaacatctattacagaactgtgtttgacagaaacaaatatctctattaagtattaagtgcacatttgcttcc

SEQ ID NO: 6431 - DNA, 1591 bp, Glycine max
  Clone ID: 700564895_FLI
cgctcgccctcgcattgatttctcttcggttttcgctctggtcaaccctatcgttgaccacgttcgcgaaagaggcgatgctgctgtcaaagaatacacattgagattcgacaaagctgaattggataacatcgttgaacttgtctccgaccttcctgatccacaactcgatgcgcatgttaaggaagcttttgatgtcgcctacaacaatatatatgcctttcatgctgctcagaagacacccgagagaaatgttgaaaatatgaaaggagtccaatgcaagcgagttgcaagaagtattaattctgttggtctttatgttccagggggaactgctgtattaccctcaacagctctgatgctttcagttcctgcacagattgctggatgtaaaactattgtccttgcaactcctccagctcaggatggtactatatgcaaggaggtagtgtattgtgcaaagaagggtggggtgactcacatccttagagctggaggagctcaggccatatctgccatggcttggggaacagaaacttgtcccaaggttgagaaaatttttggcccaggaaaccaatatgtcacagctgcaaaaatgatactacaaaacagtgaagccatggtttcaattgacatgccagctggtccatctgaagttttagtcattgccgacaagcatgcgattcctcgtcatgtagctgctgatttgctttcccaggctgagcatggtcctgatagtcaggttgtgcttgtgatttctggtgaaggtgtggatctgaatgttatagaagaggaactcaacaagcagtgccagagtctcccaagaggagagtttgctgctaaggccctaagccacagttttattgtttatgcacatgatatgcttgagtcaatcaagttctcaaacttatatgcacccgaacatctaattgtcaacacgaatgatgcagagaagtgggagggttttattgagaatgcaggttctgtatttttagggccgtggacaccagagagcgttggtgattatgcaagtgggacaaatcatgttcttcccacttatggttatgcaaggatgtatggtggtgtttcattggattctttcttgaagttcataactgtgcaatctctcacagaagaaggcctaagaaaactcgggccatatgtcgttaccatggcagaagttgaaggtcttgatgcccacaagctagcagttaccctaaggcttgaggacatagaagtcaggcaggtatcaacatgacatgataatctacggtaagcttactatcatttgatcgattacttgacttatgtaaaattagtacctaagcaactgctatttttaagtcatgtaactataaagggtattgaaattttaaattttgatgaaaatttggtttttttatagagtcaacgttaatcattgttgagtttttcgaagatcgtaagggagaaagtggtcagtgcaaagcaaagagctttgataccatatttgagatctagagttcagagaaactagaaagaaagtgagataaaattgagaaaaatgtatttctatattgaatcagttacaattgttgagttactcatattt

SEQ ID NO: 6432 - DNA, 1016 bp, Glycine max
  Clone ID: 700564904_FLI
ctcgacgtcgcaaacaacatgctacaaggcccctgccgcgccctcctggccgacctctgcgccggagaccaccggaaaacgcgaaacgccaacgccttcttctccttcttcatggccgtcggaaacgtcctgggctacgccgcgggctcttacagcggcctccacaacgtcttccctttcactaaaacaaaagcatgtgatgtttactgcgcgaatttgaagagttgtttcttcctctccatcgcgcttcttctcactctctccacaatcgccttgacctacgtgaaggagaaaacggtgtcgtcagagaaaacggtgaggagttcggtggaggaggatgggtcccacgggggcatgccgtgcttcgggcagttattcggtgcgttccgcgaactgaagcgtcccatgtggatccttctgttggtgacgtgtctgaactggatcgcctggttcccttttttgctattcgacaccgactggatggggcgtgaggtgtacggagggacagtaggggaagggaaggcgtacgataggggtgtccgtgcgggtgcgttggggctgatgttgaactctgttgtgcttggtgcgacgtcgttgggagtggaagtgctggcgcgtggggttgggggcgtcaagaggctgtgggggattgttaacttcttgctcgcggtttgtttggccatgacggttttggttactaagatggcccaacattctcgacaatacaccctactccccaacgcccaccaggaacccctgcctcctcccgccgccgtcaaagccggcgcgttggctctcttctctctcctcggaatcccactcgcgattacttacagcataccctttgctctagcatcaatattctccagcacctcaggggcaggccaaggtttgtctctgggagtgctcaatcttgcaattgtcataccacagatggtggtgtctgtgataagtggaccatgggatgctctatttggaggtggtaacttgccagcgttcgtggtgggtgcggtggc

SEQ ID NO: 6433 - DNA, 2154 bp, Glycine max
  Clone ID: 700565009_FLI
tttgttttaattttcttcgcttaagcgctgtagtaggtggtgttggttgtttggtgcatttgattttgatttggaattggaagaatgtggaaggttgtgcgattcgcggcggccagatcgcggcggttctcgacggcgattcccggtccatgcaaggttcacaagcgtggcactgatatcctccacgacccttggttcaacaaggatactgggtttcctttaactgaaagggatcgattggggcttcggggcctgcttcctcctcgtgtcatttcgtttgagcatcaatatgatcggtttatgaattcatatagatctttggagaagaatacacagggccaatcagatagatttgtttctttatccaaatggaggatcttaaatagattgcatgacaggaatgagactctatattacagagttcttattgataacatcaaagagtttgctccaataatctatactcctacagttgggttagtgtgtgaaaattattccgggttatttagacgcccgcgtggaatgtattttagtgcgaaagataaaggagagatgatgtcaatgatctataactggccatctgatcaggtagacatgattgtcttgacagatggtagtcgtattcttggcttgggtgaccttggagttcagggcattggaatacctataggaaaacttgacatgtatgttgctgctgctggtatcaaccctcaaaaaatacttccagttatgttagatgttggcacaaacaatcaaaagctacttgaggatcccctttatttaggagttcggcaacctaggttggaaggtgaagagtatctattgattgtggatgaattcatggaagctgtacacgctcgatggccaaaggctattgtgcagtttgaggatttccaaatgaagtgggcttttgaaaccctgaaacgatatcgagaaaggttttgcatgtttaatgatgatatacagggcacggctggtgttgcacttgctggactattgggaactgttagatctcaaggtcaaccattgtctgattttttgaaacaaaagatagtcgtggttggagctgggagtgcagggcttggtgttctcagcatggctgtccaggctgtttcaaggatgtcagggggcagtggaacagatgccaacagtcaattttttttaattgataaagatggacttgtcacgacagaaaggagcaatctagatccagctgcagttccatttgccaaaaatccaagagatcttgaagggctttcagagggtgctagtataattgaagtggttaagaaggttaagccacatgtgctccttggattgtctggagttggtggtgttttcaacactgaggtgcttaaggcaatgagagaatctgtttcaacaaaacctgctatctttgcaatgtctaatcccaccatgaatgctgagtgcactgctattgaagctttcagtcatgcaggagaaaatatagtgtttgcaagtggaagcccttttgaaaatgtagatcttggaaatggagaagttggccatgtaaatcaagccaacaacatgtacctgtttccagggattggtttggggacacttttatcaggtgctcgtcatataacagatggaatgttgcgagcagcagccgaatgccttgcttcatacatgacagaagatgatgtccggaaaggaatcttgtatccatccattgactgtatacgagatgttacagcagaggttggggctgctgttgtatgtgcagcagttgcagaaaagcaggctgaaggacatggtgatgtagggttcaaagagctagagaacatgtcaaaagaagaaactgtggagtatgtcagaggcaatatgtggtaccctgagtattgccctcttgttcatgaaaaatgaacttttatgaaggctttttgctattgatatctcagttccgcgcaaccaagccctttaatattttgatttctaatcttagcaatttatgactagcaaggttttgatagttgaaggtcaattggtgagaaggggagagagagatatcctcatttgttgcagccgtgaattgtatgtgtaatgccgccctccctttcttttagtgtgtgtttggattagcgtttgtagaattaattcgagatcaacatggttttaagtaaatgtgatttt

SEQ ID NO: 6434 - DNA, 919 bp, Glycine max
  Clone ID: 700565035_FLI
ggaaattgagattgttgataaactgatttctgttccatatgttgaaatgactctgaagttgatggagcgttttggagtttctgtggaacacagtggtaattgggataggttcttggtccatggaggtcaaaagtacaagtctcctggcaatgcttttgttgaaggtgatgcttcaagtgccagttatttactagctggtgcagcaattactggtgggactatcactgttaatggctgtggcacaagcagtttacagggagatgtaaaatttgctgaagttcttgaaaagatgggagctaaggttacatggtcagagaacagtgtcactgtttctggaccaccacgagatttttctggtcgaaaagtcttgcgaggcattgatgtcaatatgaacaagatgccagatgttgccatgacacttgctgttgttgcactatttgctaatggtcccactgctataagagatgtggcaagttggagagttaaagagactgagaggatgatagcaatctgcacagaactcagaaagctaggagcaacagttgaagaaggtcctgattactgtgtgattactccacctgagaaattgaatgtcacagctatagacacatatgatgaccacagaatggccatggcattctctcttgctgcttgtggggatgttccagtaaccatcaaggatcctggttgcaccaggaagacatttcctgactactttgaagtccttgagaggttaacaaagcactaagcattttgtacattgagtagggaagagagagagatatatataaatactcacaaagcagtgagtatatggcttgcttttgtttctaaacattcctttataaggacttgagataatttgtattgtttaaaagagccattggttctgttgtatcaaagtaatttaattttcagt

SEQ ID NO: 6435 - DNA, 883 bp, Glycine max
  Clone ID: 700565054_FLI
ctttcatcattcatcgctttccaccaggcacgcagattctctccttccttctctctatccaaattttgattctttcgatcaaacccgcaacacccacctcaccaaaaccctacgcaacccatccatgacgcttggcttaggaggatccagtgtcgtggttcctaggaacttcagattgctggaggagcttgaacgtggagaaaaaggaattggagatggcacagttagctatggaatggatgatggtgatgacatttacatgcgctcttggactggcaccattattggcccccataatactgtacatgaaggaagaatttatcaattgaagctgttttgtgataaagactacccagaaaagcccccaagtgttcggtttcattcacgagtcaacatgacttgtgttaatcatgaaactggagtggttgaaccaaagaaatttggtcttcttgcaaattggcaaagagagtacaccatggaggacatactgacccagctgaagaaggaaatggctgctcctcataaccggaagcttgtccagcctccggaaggtacctacttttagcatccaacaagatggtatagatgtcggatcgtattgcatatgctgcatgcaatatatagtgtgtaatgctttgtagatccttccttctgaattcaagaacataggggaatgccccgaaaagcttcatatttccatctccatggcttcagagttgttttgttgtctttgtcaacggtgctgaaggggactgtttgattgaaatattgtgtgtgtcaaaaatttcgaaagcaactctttcaagtagtattttcatgtgaatgtgtgcttttgtctatggtttggttcactctaattagtgggttctcacttctcaccttt

SEQ ID NO: 6436 - DNA, 1335 bp, Glycine max
  Clone ID: 700565101_FLI
cttgtcaacattctgtatgctgaaaatggacctgattttggagctgccagtgatggggatggtgatagaaatatgattttaggaagaagtttctttgtaactccttcagactctgtagcagttattgcagccaatgcaagagaagcgattccatacttcaagaacggtgttaagggtcttgctcgatcaatgccaacaagcggtgctctggaccgtgttgctaaaaaattgaacctccctttctttgaggtccccactggttggaaattttttgggaatcttatggatgctgggaatttgtccgtttgcggggaagagagttttggaacaggttctgatcacattcgtgagaaagatggcatctgggctgtcttagcttggctttctattattgcacatcgcaacaaagacaagaatcccggggagaaattgatctccgtatctgacgttgtgatggagcactgggcaacttatggaaggaatttcttctctagatatgactacgaggaatgtgaatctgaaggtgccaataagatgatagaatacctacgagatattttgtctaagagcaagcctggtgatcagtatggaagttatgttctccagtttgcagatgattttacatacaccgatcctgtagatggaagtgtggtatcaaaacaaggtgttcggtttgtttttacagacggttcaaggattatatatcgtttatcaggaactggttctgcaggggctacggttagagtgtacattgaacagtttgaaccagatgtctctaaacatgatgttgatgctcaaattgccttaaaaccattaatagatttggcaatatccgtgtcaaagctcaaagacttcacagggagggagaagcctacagtcatcacataatggacaattccacaaccacttgatcaagttgttatatgttccaaggtgtgctctaagttgagtgcatacgcaggttgtttattgcatgcctatccatatctgagctcgctcgagttcggtcacttttggttgttcaagaattttggagcgataggtcccctgtaaaatatgctacttatatatttatgtgcaaagtatgaagcaccgacgtgcaacaaaataataataaaaaagaatagtttgctgctctaaggagctaggcctttcaaagttttgtccaattttttctaagtttagaaactggagttacttctcatcaagcagaataccaatttcacgtatgttccaaaacttctttctctgttatgattagtagtcctctttgattcctgatgtctctaggatgccaaaagtatgaatgttattgtcaagaatctattttttagc

SEQ ID NO: 6437 - DNA, 2370 bp, Glycine max
  Clone ID: 700565119_FLI
atcatggtggaagaaataaccctgatggggagaggtggcagcgttctgctagcttccagcagaggggtttaattccttctcctacccaaactcctttacagatgatgcacaaagctgagaataagtatgaagtgggtaaagcatcagatgtggaagaggtaaagcagaggcagttgaaggctatcttgaacaaactaactccgcagaattttgatagactttttgaacaggtgaaagcagttaatattgacaatgcagtcaccctcactggtgtcatctcacaaatctttgagaaggctctgatggaacctaccttttgtgaaatgtatgccaacttctgtttgcatctggcttctgagttgcctgattttagtgaggacaatgaaaagataacttttaaaaggttattattaaacaagtgccaggaggaatttgagaggggtgaaagagaagaagaagcagcaaataaggctgacgagggtgaggttaagcagtctgctgaggaaagggaagaaagaagagttaaggcaagaagacgcatgttgggaaacatcagattgattggagaactatataagaagaaaatgttgacggagaggataatgcatgagtgtatcaagaagttactgggtcagtatcaggatccatatgaagaagacattgaagctttgtgcaagctaatgagtactattggggagatgattgatcatccaaaagccaaggaacatatggatgcatattttgaaaggatgaaattattatcaaacaacatgaatttatcttctagggtgaggttcatgttgaaagattccattgatttgagaaagaataaatggcaacaaaggaggaaagtagaaggtccaaagaagattgaggaggtacacagggatgccgctcaggagaggcaggcccaagctggtaggtcaggtcgtggtcttggcaacaatcaatcagctagacggaatcccatggattttggtccacgaggatcttctatgctgtcttctcccaattctcaaatgggtggactgcgtggtcttcctactcaagttcgtgggtatggtgcttttcaggatgctcgatttgaggaacgacaatcttatgaggctaggaccttggcagttccattgcctcaaagaccctcaggagatgattctataaacttggggccccaaggtggtcttgctaggggaatgtctacgagaggatcaacagcaatttccaatttaccaatatctgatgtgcttcctgtccatggagactctcatagaatgaatacaggtcttaatggtcacagcaatttatcagagcgcacaccatatagctcaagggaggatcatgtttcaagatatggtactgataggtcttcagggccatctgcttatgatcaatcaagtgctccagagcataatgtaaaccatggcaacagaggcttgaggagtgaagatcggaatcttgaacctcttgctcatttgcaagggtcaatagtctctcagaatgcttcttcagagaagatttggccagaagaacgactgagggacatgtccttgtcagcaataagggaatactacagtgctagagatgagaacgaacttgctttatgtgtcaaagatttgaactctccgagcttccatccttccatggtttctctatgggtcacggattcatttgagagaaaggacgcagaaagagatcttttggccaaactacttgtcaaccttgtgaaatctcagcatggcactttgaatcaagaccagctcatcaaagggtttgaatctgttctcagtacattggaggatgctgttaatgatgcccccagagcagcagagtttcttggccgaatttttgcgatagccataacagagagtgtagttactttgaaggacattgggcagttaatacatgatggtggagaggagccaggtagtctcttagaagttggacttgcagctgatgttctgggaagcacgttggaggtaattcaaagcgagaagggggatgcggttctaaacaagatctgttcaggctctaacttgaggttggaaactttccggccacctaatgctaaaacatcaaggaagttggaaaaatttatttagatggtagtgacgctcattgtattttttatttttttttgtagagggtaaaaattagttggctcgtgcttttttgggggtagtactcaattttgcagagaatggttttctctgtgagatgggtcggtagagttttatctatgggattttctttgttttaaattatttttcggacatcagaaattttaggcgtttttgctatgcctgcttgatgacctttacatatttctttgtagatataaaaggttcaatgagcgtcaagaatattattttc

SEQ ID NO: 6438 - DNA, 592 bp, Glycine max
  Clone ID: 700565171_FLI
tctggatgccattgaaggagaaagaagactcttcattcgtagtgatgaactggatgctgcttggtcactctttacacctgtactgaaggagcttgaagagaagaagataattccagagtactatccttatggtagtaggggtcctgttggtgctcactatcttgcagccagacacaacgtgcgatggggtgaccttgggacagacgtagaccattaaccctcgcattttgttgcacttctgatcggcctaagatgttagctattatgcatgctattttgtggtttcttcttggcatgcagtttcttttctcatcagcagcatggttacttctctggtggaagacaggtaccaggcacacacgaaaatcatacaaagcaataaaagcatcaaatttcaaagtccagtaataaagctcttagatcattgattttttttttttagtttttgttgctatttgggacagtttggacaagagcaaatatttcatttagttgccaatcgatctagttaggtgatgtattttgattttgcattttgcattttgtgaaacacaattaaagagaaaatgaagaaagttagcaagttggtatg

SEQ ID NO: 6439 - DNA, 3477 bp, Glycine max
  Clone ID: 700565227_FLI
gatgttggattgtcccttaaggatggttctgtttaccgcgcttggatcacctatgatggtcctcaaagaagaatggacattcgtcttggaaaggcaaaccaagaggattatccttccaagcccatgttctcagaatctatggatctctctccttatctaaatgagtacatgtttgtggggttctcagcttccacaggtaaccatacacaaatccacaacttactctcttggaacttcacttccacaagccaagcttttcttcacttgccttcatctgaatcctgccagggtaagatcttacttgagaatagcactgctgccacagaaccaacaaattcacagaagtcttctaagaatgaaccaccgcgaagctttttgatttttgtggcagctgtggcattggctctggctcttttccttggcttttacttcatcagcaagcacaggagaaatgctgccaagttgaacacttcagtggagacagagcttcacatgccaaggcctccaaacaaaccacggcgctttgccttttctcaactttcaactgcaactcggtcattcagtgagatagagttgctcggcagtgataatagaggagagtactacagagggaagctttctggtggcagtcaggtggccgtgaaaaggttctcagctcagtttctcagcacacatggatcagacaagaagcgtttgttgaaggaaatcaaaggcattagccatgttcgccacccgaatttgcttcctgttagagggtggtgtcaagacaaccatgaaatcatggtggcctatgactttgtccccaacggcagcctagataaatggctatttggggccggtgttcttccgtggactcggcggttcaaagttattaaggatgtggctgatggcttgagcttcctccataccaagcaactagcccacaagaacttgaaatgcagcagtgtgtttctagatgtcaatttcagagctgttttgggtgattttgggtttgtgttgatgggtgcagaatcaaaacactttgagtcacaagtgtgccaaggtgctgatgtgtttgaatttggtgtccttgtgttggaagtgatagctggaagggtaagggatgagaaagaggagggaaatccagaagagaggaacctactgggttatgcttggaacttgcatcagattgatgaaaaggtgaagctggtggacaaaaggatgggatcattgatcaacctggagcaggcaattcgcgctcttgaaattgggttgctttgcactctaaatgagaacaaaggaaggccctcaatggaacaagtggtggattttcttctcaacatggataagcctattcctgagctgccaagaactcgccctgttgccttgttcccctataatagcgccaacacgggactttgcaatgcatattcttgcactttttaagtggagccatgaggttgctgaatgattatgtgggagatgtatgaataaatgtgaaaaagaccatttttaggcctgcaacaacggattgattttccaaatgctgtaagtgcttaaaatgctgtgtgtctgtgaagatggttgataaatattgtattgtattagccttggggattcattttcagtatgctttagcatcacagcctcgatgtaggattatttgtaattctgtttaggatccacttgttatatggaaagtgaaagatggttgataatgctaaaaagggaaagtagagtcaatcttattattattgttattattatttatataggttaaattatatgaagcacagctcaattgttcccttctcggggcattttcttttatttttgcccccctcccctccccaaattttttcagccccaaagctattactccaattatttctgtttctggtttatgcatgaaattatatttgggatagaatcatgtgtaataaacaagactggttgatttggaatactctagtgatcattctatcatagtgatatagcatatgggttcgtgccaaatagcaggaataaaatataaataaatattgtttgttaacatgtcattataacattaaaagaatgcactgagagctatgctctctgagttagttcatctttctcctttgcattttagtgatttctttctttcatttttgtagaatgtgttggcaataaaagggtgtataatgcaaattgcaatatattatgcttatattgataacattccaaccagatggaaggaacttctgcaagggtgaacatatattatttttggtggttgactggtggtttcatctagcatttaaattgcatgtgttcaagttttagaatattgtgtaaatgaaatgcttgttgtgagatgctgttgcatgttttcggtttttgatttggctataatgattattttatttagttctgctgtggtcctataatattgtgttgattagggtgaagggattattgtatttatttgtttttgtcatttacatatcatttacattattattaatttttcttggttgtatatatgtgtaaattttgtgttgaagtgcaccatggtggatagtttgtgaagtcccctgtaatgtaccatggggggcaatgctgtgtatgggagtgtgattaagatttttggtcttactggtagtgtcttgctggaattaaggagttggcatatgcgacaattgacactatgtggtataacataggtgggaagaggttggatattggctatgaaaaggatagtgctgctaaaatcagttttggtgagactgaaaatgatgcaaatactgatttcgatattttttacaatgttaaccagaaagcagggttgggagggaaagaaaaagctaaaagtgaaagaggttttagaaggacaagagggaaaaggaagggaaattctacgagtatataaaagggaaagaagtgcaggaagatgagaacaaggggaagggaaaccagtgcaggaagaatagaaggggaaaggaaaaaataacaaaaaaaagagaaagacgtagagaagggaaaatcaaatgagaaggttaatgatgatgtcatgaagctgttcagaaacaatcaagggaaagggggaggcctacaaaacaaaacaaaaggttctatgtacaccatttgaagatagtgacatgagtcaaaagggatgatagtgactcagattagggaatgaacatgaatggaccatgtcgaatgggcacttctagagcttgaatctgactcctcttgcggaatgcactttagaaataaaaccgtgcacacacaatagtggattactaaagaagttattaataaaatataatgataaaagctttttggtggggtccattggaaaacaacaaaagagagttgttccattgtagagatttattacttagagttacttgtattgggaaaagtattgtaagttgctgtaatgtggatgctccaagaaaacaacggttgctagttatgataaaatcaaaatacatatacaacacaatttaagtt

SEQ ID NO: 6440 - DNA, 1220 bp, Glycine max
  Clone ID: 700565229_FLI
attgtgaaggtcatcccttagcaattgaagtattgggctcatctttgtttggtaaagatgtctcttattgggggagtgcattggtttccttaagagaaagtaaaagtattatggatgtgttgcgaataagttttgatcaattggaggatacacacaaggaaatatttctagatattgcatgtttcttgtacgatcatgatgtgatatatgtgaaggaaattctagattttcgtggatttaatcccgaatacggcctacaagttctcgttgataaatcacttataaccatgcgtaggatagttgaaatgcatgacgttttgcgcaatttgggcaagtatattgttagagaaaaatcaccttggaatccatggaagtggagtaggttgtgggatttcaaagatctcaacatagtttcgttggataataaggtaaaataatttttaaatataaagtcctactattattctagaatttgtaaatacttttaaatatctaatattttctttcctcttttcaatgttcaaggcaacagaaaatgttgaggccatagttcatgaagaagactatgacattgaaaagactctgacttagaagaagactctaacttagaagactctgacttagaagaagactctgacttagaagaagactctgacttagaagactatgacttagaagaagactctgacttagaagaagactctgacttagaagactatgacttagaagaagactctgacttagaagactctcactttcttccaacagtgagggtggatgctctatcaacaatgagtaaccttaaacttctcaaatttagatacgctggctacgaaatcaattattcaggaacacttactaagctttccaatgaattaggatatcttacttgggtaaagtatccttttgagtgtttgccaccaagttttgagccggacaaacttgttgagttgattctacctaaaagcaacatcaaacaactttgggaagatagaaaggtaatatcaattattattattattatttttctatattgttttcatttaaataaacaaataaaaaggcaaactttcttaagataatccttttttctctatttaattaaagaaacaaaagaaaggctgaatgtcattattaattttgtttcctactattggtcttgtattgtagcctctacccaatttgaggcatttggatctctctggctccaaaaatctaat

SEQ ID NO: 6441 - DNA, 1262 bp, Glycine max
  Clone ID: 700565235_FLI
gctctttgttgggcgattcgattgagtgcgtgttttttgtgtgtggagaatggatatacagagttcaatttgagaaagaggattcgccatttcaattctctctctctctctttcaattcgcagagaggttcagtttgtgtcatgtgcatacagcaatcggattgtttggatcagaagtcaattcgaggtgtagatggaacttgaagcaagtaatcaacccaagcaagagcgttcaaggacaagatggacagcatcccttgacaagatatttgcagacttggttgtcaagcagattcaactggggaacagaccaaacaatgtttttgacaagaaaacatggaatcacattcgtgatgagtttaataggcaaacagaccttaatttcaacaataatcaattgaggaagcatctagatgttcttcggactcgcttctataatttgaaatctgcttatgatcaaaataatgactttgtaatggatgattcctgttgcattggctttgaacagtgggaagatataggggtgcagcctaggaatgaaactgttaaagtgaaagattgtccaatatatgagcaactctgcacaatattcatagattcagctgctgatgggaaatatgcccaatctagtcattacgaagagttggacaaatctatcggagcagatgcaactggctttactccatgtccagaagctaaggtctcacattatgtaaacccatcaacatcaaagtttattccagggaatatctcaactgctgagaagctgaccaagaattctatagataggaaaaggaaacgatcatgtgagacgcaaactactagtctggatcaagacacctgcaatgctatggcagaagccttgttaggtatggttgctgtttcaaggttaagggcagttgtttcaagtgtaagtgatgataaattctccataacaaactgcattaaggctctagatgagatagaaggcattgatcaacagctctatttttctgccctggatctctttgagaaccctagcttaagggagacattcatttccttgaaaagtgtcaagatacggttgacatggttacaaggaaaatgcagcaaaactcccttccattagaacagacttaaagccattttgaaatcaactgtaattacttagttataaatacttcgtttagtatacccttctttttgtttgactgtaagtaatcgcatttgaagttttaactcttgcaacaagtggtagttgtttacaagtgttatttcatctg

SEQ ID NO: 6442 - DNA, 1103 bp, Glycine max
  Clone ID: 700565246_FLI
cggtttctgacgtagctgcctatataaaagccgggttctatgacattggtattggggctggactggagtctatgacagtagatcgtgtgaataggcttcccaacattaacccaaaggtagagacctttgcagaagcccgggattgtcttcttccaatgggaatcacttctgagaatgtagcacaacgttatggtgtgacaaggctagagcaagatcaggctgctgttgagtctcacaagcgagctgcagctgcaacagcagctggcaagttcaaagaagaaatcattccagtttctacaaagtttgtggaccctaaaactggagtggagaagaaaattattgtttctgtcgatgatggtatccggccaaacacaaatttagcagatttggcaaagctgaagcctgcattccagaaagatggaaccacgacagcagggaatgctagccaaattagtgatggtgcagcagctgtgctcctcatgaagagaagagtggctgtgcaaaaggggcttcctattcttggaatcttcaggagttttgctgctgttggagtagatcctgcagtcatgggtgttggccctgctgttgctatcccagctgcagtgaaatctgctggtcttgaacttggcaacattgacttatttgaaatcaatgaggcatttgcatcgcagtatgtttattgcctcaagaaattgggacttgatcccagaaaggtcaatgtcaatggtggtgccattgctcttggacatcctttgggcgttacaggtgcacgttgtgttgcaactttgttgaatgagatgaaacgcggtggcaaggattgtcgctttggtgtaatctcaatgtgcatagggtcaggtatgggagctgctgctgtatttgaaaggggggacttttaaagatttgtgcaagtttagaatagttcataaaaataacgatcttttgtcaccggatgcttgatattagacataatttgaagtgtttctattttgaattcagttttggttgaaatgttacaaaaaattggaagtgtaaacaagatttattttaaccatgattatgactcagatggagaatagaaactatagcactgagtttgcttactc

SEQ ID NO: 6443 - DNA, 1948 bp, Glycine max
  Clone ID: 700565345_FLI
ggcaaatacccaacatctccgccttggtcaacctcaaatcgattttcctcaacgaaaacaacttctccggcgattttcccgcctccgtcgccctcctccaccgcgtgaaagtcattgtactgtcgcaaaaccatatctccggcgaaattccggcgtcgctgctgaatctccggcgactgtacgttctctacttgcaagacaacgcgttgactggacgcattcccggtttcaaccagagcagcctcaggtatttaaacgtttcgaaaaaccgtctatccggcgagattccggtgacgtcggcattgatccggttcaatgagtcgtcgttttgggggaacccggggctctgcggggaacagatcgaagaagcatgcaaaaacggaagcggttcattgccgccatcgataagccctagctatccgttgaaaccgggaggaacaacgtcaacgacgatggggaaatcgaagcgcacgaaattgataaagataattggagggagcgttgggggagttgtttttgcattaggatgcgtggttttggtgtgggtgatttgcaggaagtggaaaagaaggaggaggaggaggaggaggaggaagggtggtgctgaagtggcagaaggggaagtgggtgcggcgggaagtgggggaggaggtgataatagtaaagaagaagaaggtggggggtttgcgtgggaaagtgagggtatagggaagctggtgttctgcggaggaggggatggggacatgagttatagtttggaggatttgctcaaggcttcggcggagacactggggaggggtataatgggaagtacgtataaggcagtgatggaatcggggttcatagttactgtgaagaggttgaaagatgcaaggtaccctggcttggaagagttcagtgctcacattcaagtccttgggaggctcacccaccctaacctcgtccctctcagggcttatttccaggctaaggaggaacgcctcctcgtttatgattactttcctaatggcagcctcttctcccttattcacggatcgaaaacatctggtgggggaaagcctcttcactggacatcctgccttaaaattgctgaggatctagcaacaggcatgctctatatccaccagaaccctggcttgacacatggaaacctgaaatcttctaatgtattgttgggttctgactttgagtcatgtcttactgattatggtctcactgtgttccttaatcctgacacaatggatgagcctagtgcaacttctttgttctatagagcacctgaatgccgcaactttcaaaggtcacaaactcaaccagctgatgtatacagtttcggggtccttcttcttgagcttttaactggcaaaacacccttccaagaccttgttcagacatatggttcagacatacctaggtgggttcggtcagtgcgcgaagaggagacggagtctggggatgatcctgcttcaggcaatgaagcatctgaagagaagcttcaggctcttttgaacattgcaatggcatgtgtttcactagtgccggagaacaggcctacaatgagagaagttttaaagatgataagagatgcaagaggggaggctcatgtctcatctaacagtagtgatcactcccctggtagatggtcagatactgttcaaagctttccaagggaagaacaccagagcatatgattggtaactttttgacagcttattagttgaaactatgcattctgatttttcctgaattggttattgatacgattcatgcataaactaggtgatacgtgaggacctacatttttaatctctagctgtgtgagtaaatgcattttaaagggtaattaaggattcttttatagagtcatcacaggttgcaaagagtgggagatcatcagttcctgctttgtcttgtattttctttttaaaataaaacacacattccaaat

SEQ ID NO: 6444 - DNA, 1123 bp, Glycine max
  Clone ID: 700565358_FLI
attctctttccctttccgccgcagcgattttcagagatttaaccttctttgttcgtagatatgcgcggttactgattagttgatgatagctgtcgacaaatttcacatggaaagagaacgaacacggaaacgccctcgtcttgcatgggacgttgcccctccctcagtgtccgaggcgcaacgggctctgccagtgcccggtgacgaagaattcgaaagaaagcacgtttcgcctccgaaaagggacgacgatcgagagggccattatgtcttcaatcttggcgaaaatctcactcctagatataaaatcctcagcaagatgggtgaaggttagcggtcaagtgtcctctgaatacgagattttaatttttttttttttgtcactgtgcttgtgtcattcagcatattgctagtgctgtaggcacatttggtcgggttttggaatgttgggaccgccaaaccagagaatatgtggctatcaaggtagttagaagcatacggaaataccgggatgcagcgatgcttgagattgatgtgcttcaacaactagccaagaataatagaggaagctcccgatgtgtgcagatcagaaattggtttgattaccgaagccacgtatgcattggggaagcattgtttcagactcatgaaaacttggagcacctggcaatgatggaaagagttttgggatctatcccagagctcatgattcgcaggtctaacaagggcgcagaaaaatatttcaagcgtggatcgcgtctaagatggcctgaaggagctgtttcaagggagagcattagtgcagtgaagaagcttggtcatcttaaggatattgtatcacgaaatgtggactcttcaaggtcctccttgactgacttgttacatggcttattaacatatgatccgaccaaacgccttacagcttgccaagccctcgatcatatcttctttaggaatcctacttaagaaaccagatttttggaatgacttccattttaaagattgtcggttgcacaggttacaactttgaatgtatccatttctttattatttatagcagtggctcagtcgcgttgaaaatatattttaattttatcattatttgttttcattttgttcattt

SEQ ID NO: 6445 - DNA, 639 bp, Glycine max
  Clone ID: 700565375_FLI
gctgctttcgcccatttcacccatgaaacaggacatttttgctacatagaagagattaacggtgcatcaggggactactgtgacgagagcaacaccgagtacccatgtgcccctaacaaagcgtactatgggcgtggaccaatccaactatcatggaacttcaactacggaccagcagggcagagcatcggatttgatggattgaacgctccagagacggtggccaatgaccctgttgtgtccttcaagacagccttgtggtactggatggaacatgtgcgtcctgtcatcaaccagggttttggtgcaaccattagagctatcaatggccgacttgaatgtgatggtgcaaaccctagtactgttcaggctcgtgttaattactacacccagtattgttcacaacttggtgtttcccctggtgacaatcttacttgctaatttatcagtatagatggttccatatgatgacatcatacattcatacggtatatcttaacatatatcagaaaataaaccattcaaggcttacagccttattttgattattaatgtaattactacttttgggaatattgtatctgattaccatcgatattgtgcatccaatattgaataaaaatacgttatttctgtgat

SEQ ID NO: 6446 - DNA, 662 bp, Glycine max
  Clone ID: 700565384_FLI
ggcgctgctcatcttctccagcaccggaaagctctacgagctctgcaacggtgacagtttggccgaggtcgtgcagcaatattgggatcatttaggagcgagcggtactgacacaaagtcgcaggaactatgctttgaaattgcagatatctggtctggttcagcgttttctcaaatgatcaaaaggcacttcggtgtttctgaacttgagcatctgagtgtgtctgaccttatggaactagagaaactgactcatgctgctctttcgcgaatcagatcagcaaagatgcgattgatgatggaatctgtagtgaatcttaagaaaaagattgaggcactagaaaaaactaatgacgtcaataacgtggtgacacggtctattgactgtgatcaaacagatggggtgacgcataatctgttcccaggtctctaatggagctgaaagccactactctgggtctaacttgcacactcaacccttgaatttccaagtgtgtgtttaatacatgcatagggaaccatgccatggtctagctacttgccttttattatttctattttggttgaaacatggagcatcttgaagataatgtagcctggggaactttgcttcagctactactttgtgcctaattaatttataataagtgacattagatgcc

SEQ ID NO: 6447 - DNA, 1949 bp, Glycine max
  Clone ID: 700565482_FLI
gtcttcctaaggagagggagggagagattcgaattccaattagggttttctcatcatcatcgactttttctcttatgcaaggaaggttctccttctccgatttcaatttgattgaacgagtagtgttaagattatgatattttttgagaagcttcgtttctctcctcacctaagccgcttcattgccggcatcatcttgttaattttctgcaattcattccagttagtctccaatttccccattcctatacagccttagattctacgtcgttaactctctccgatttgattctatattcgatattcgttgatttgattcactcctctctctctctctctctctctcgctttcgattcgacgcctgaacaagtgaacatggaccctaatcacctcttcttcacgcatttccgcgatggtgctattgcctcacgcattgagggccaacacagaggagctcttccttctgttattgtgattggtgctggaatatctggacttgcagcagcacgaagtctctatgatgcatcttttaaggtgactgtactggagtcacgagataggcttggtggtcgcattcatactgacttctcatttggctgtccagttgacatgggagcctcatggctacatggagtttgtaatgagaatccattggctccattgatacgtggcctggggctttcattatatcgtaccagtggtgacaactctgtcttatatgaccatgacttggaaagttatatgctttttaacatcgatggtaagcaagttccacaacagatggtcattgaagttggagacacctttaagaaaattctggaagagacagggaaagtgagggatgagcataccgaggacatttcagtttcccaagctatttcaattgtgctagataagcaccctgatctaaggcaacaaggacttgcccatgaagtgctacaatggtttatatgcagaatggaagcttggtttgctgctgatgcagatatgatttcactgaaaacctgggatcaggaacatgtcctggactcatggtgcaaggatatgatccagttataaaagttcttgcaaaagatattgacatacgcttgaaccacagggtgaaaaagatatctagtggttacaacaaggtaatggtgacggtcgaggatggcaggaactttgttgctgatgctgctatcataactgttcctattggaatcctaaaagcgaatttgattgaatttgaaccaaaacttcctgattggaaggtttcagcaatttcagatcttggtgtgggcaatgaaaataagattgccctaagatttgacaaagtattttggcctaatgtagaactcttgggcactgttgctccgacctcttatacctgtggctattttctcaatcttcacaaagcaacaggccatcctgttcttgtctacatggtagctggaaggttcgcttacgacattgagaaactatctgatgaagcagctgcaaattttgtgatgcaacagctcaagaagatgtttccaaatgcttctaagccagttcagtatcttgtgtctcgatggggaacagatccaaactctcttggatgttactcgtatgatttagttggaaaaccaactgatgtgtatgacaagcttcgtgcacccttgggtaatctattctttgggggagaagctgtaagcttggacaatcaggggtctgtgcatggagcttactctgctggggttatggctgctgaaaattgtgagagctatatgttagagaaactaggccacgcagaaaagctatctctagcttctgttaggcatgaaatgcttgaaactcttatacctcttcagatctcgaggatgtgatttgttggtgctcagtagcttttagacaatgattctgcataatgcaatggcaaaatatttgccattcgatataataaagaaataaatgttctttaaggatggtg

SEQ ID NO: 6448 - DNA, 998 bp, Glycine max
  Clone ID: 700565484_FLI
ctcaccttcaccttcaactgccaactgcaaatatctatcttctttcgggttcacttgaccgagagtaagagactaatccctcgagatactgatactgaaacctatcgttcttcacatcataaccatgcgttccagcaacggtgcatcaagcagcagagcctccaatgctaacactgggcgccaccctgtgtaccgtggagtgaggcgtaggagtagtggcaaatgggtttctgaaatccgtgaacccaaaaaacctaacaggatttggttagggacatttgccacccctgaaatggctgctattgcctatgacgtggcagcgcttgctcttaagggtaaggatgctgaactcaacttccctaactcggcttcctccctccccgtccccacatcatctgctgctcgcgacattcagatggctgcggctagcgccgcagccgctgtcggagctgcgaatgatgcacttgaaggaagccgaggagggaatgcttcggtttcattgacggaagagttttcagggggaaatttgaaccactttgtggatgaggacttgatctttgacatgccgaatattctggtcaatatggctgaaggaatgctactgagtcctcctcgttttgataattttgctgctaccgactatgaatacatggatgaagatcctaacctctgggggttccctaattactagttactacccatgggatgataaaaaaaaactttttatattactaatgcaaaaatcttaataaggaaaggtaagtaagttgtagtaataaattatgggagaactcttacatccagactttgcttagacaccaggaaaggtatagtgtgtgtgtggaaagtgcatctttcttttcatttggttttttttcaccttgtgtacagtactaccttctagctatagtgaggtttgctgctgtatgttgcacctcaaatatgtatgtaatgtctatataagttgttaattttaaataatctttttttggttgttt

SEQ ID NO: 6449 - DNA, 970 bp, Glycine max
  Clone ID: 700565486_FLI
attcaatttgcaacctaagtgaggatgcaaaaacaattcacatcatagactttggcatccgctatggcttcaaatggcctgcacttatcagccgtctatcaagacgccctggtgggccacccaaacttcggatcacggggatagatgtgccacaacctggtttaagaccacaagagagggtgctcgaaacagggcgcagacttgcaaattattgcaagcgtttcaatcttccatttgagttccatgctattgcacagagatgggacaccatcagagttgaggacctcaagatagaaacagacgaatttgtggctgtgaactgcttgtttcagtttgagcatctacttgacgagaccgtggtgttgaataatcccagggatgctgttctgaagttgattaagaaagctaatcctgacatatttgtgcatggcattgtcaatggatcatatgatgtaccgttctttgtttcacgtttccgtgaggctctctatcattactctgcattgtttaacatgcttgacaccaacgttggtcgtgaagaccccataaggttgatgtatgagaaggagttgtttggacgggagataatgaacatcatagcttgtgaaggttgtgagagggttgagaggcctcagacatacaagcaatggcagcttcggaacatgagaaatgggtttaggccgcttcctctggatcaacgaatcattgacaaattaaagggtaggttgagagatgatgcgtacaacaataatttcttgcttgaggtggatggcaactgggtgctacaaggttggaagggacgaattctatatgcttcctcttgttgggtaccggcatagcataggcctccaacattatttattccaaattacaaaaatcttgtcctacacacaactattagtacgtctccttcaatctcactagctcatgtttgttgttttatatgataaggaaaaacaaaagttatgtt

SEQ ID NO: 6450 - DNA, 1380 bp, Glycine max
  Clone ID: 700565502_FLI
ctttctctccgtctccacgccaaacacagcaacaacaacaacaacagtaacagcaccgaaggcgttaactccaatggcgtctcttccacttccttcactcgccgatcttggactcttcttccttcttcttctttcaaattcaggcctcttccttcttcacctcctcgcgccgccgaaaacgccgttcccgaaagcgcagcagcacccgtcgaaaacccgctcttcaaaactctcgaactcggcgccttgtttggcttatggtacctcttcaacatctacttcaacatctacaacaaacaggtgttgaaggcgtttcattatccggtaactgtgactgttgttcagtttgccgttgggactgtgctagtggcatttatgtggggtttgaatctctataagaggccgaaactcagtggtgctatgcttggagcgattttgccgctggctgcagtgcatactttggggaaccttttcactaatatgagtcttgggaaggtggccgtgtctttcactcacactatcaaagccatggagcctttcttttcagtcatcctttctgccatgttccttggagagtttcctacaccgtgggtggttggttcccttgtgcctattgttggtggagttgcactggcgtctgttaccgaggcctctttcaattgggctggattttggagtgcaatggcatctaatgtgacaaatcaatctcgtaatgttcttagcaaaaaggccatggttaagaaagaggattctatggacaacattactctcttctctataataactgtaatgtccttcttcttgttagcacctgtggctatcttcatggagggtgtcaaatttacccctgcttacttgcaatctgctggggtgaatgttagacaactttacatcagatctcttcttgctgctctctgtttccatgcgtatcaacaagtttcgtatatgatattgcaaagggtatcacctgttacccactctgtgggtaattgtgtgaagcgggttgtggtcattgtgagctctgtcatcttcttccaaacacctgtctcacctgtgaatgcttttgggactgctatagctcttgctggagttttcctctattcaagggtgaagcgtattaaggcaaagccaaaaacagcttaattttcaatggtaaaattttgttagttccattgaggaagccaaatagttgcaatctgcaattctgaatttctttgtaggtgagatagggaatgaggattatctttattgatcctcagtcctcacatttcctttttatttcttctccttaagttaccttgtggatttcattatttatgtttgagtaagtgcctaatggttctgctccatgaaaaaattatcctcttctgaattttgctt

SEQ ID NO: 6451 - DNA, 943 bp, Glycine max
  Clone ID: 700565513_FLI
aatcggctccaaacccaaaaaacaaaaaaacaccaccaccaccacctcgctctcttcttccctgcttcacaatttttattttaatgatactattttgttattgttaagacggcatcatcagggaaatggatcgggtgaagggtccatggagcccagaagaggacgaggctttgcggaggctggttcaggcccacgggcctcgaaactggtcggtgataagcaagtccgttccgggacgatccgggaaatcgtgccgcttacggtggtgcaaccagctctcgccgcaggtggcccaccgccccttctcgccggacgaggacgaggccatcgtcagggctcacgccaggttcggcaacaagtgggccaccatagctcgccttctcaacaacggccgcaccgataacgccgtcaaaaaccactggaactccactctcaagagaaaaaaatgttccgccgttagtgacgacgtcaccgatcgtccgcctcttaaaagatctgcaagcgtcggcccggcccatttgaaccctggcagcccatcgggctccgatttgagcgatccgagcctgcccgctctctcaaacccctccccctcggcccattacaggcccaatctcatggaaaccgcttcttctgcttgcgatccagccacgtcactgagtttgtctctccccgggttcgggtccgggtctaacccagtttgcgcacctcgaccggtatcggtgtctccgccgtcaccgcctccggcggagccggtggagcagcgggggaagcaaatgttcaacgcggagttcttgagagtgatgcaagagatgataagaaaggaagtgaggagttacatgtcagggatggaacagaagaatggcttcagaataccaaccgaagcgattgggaacgcggtggtgaagcgcatgggaattagcaacatcgagtgaaggaaagaaac

SEQ ID NO: 6452 - DNA, 1734 bp, Glycine max
  Clone ID: 700565535_FLI
aaggatatcctgggattgcccaaaaactcattcccaactctcgagaagaagtctcgtcctcccaaagagtctcaaagaaaaccagatggcatttcacgcgaggtgtatgcgcttacgggtggattggcccctctcatgcctgcaactgaagcctctcagttgaagaaaaagcctcctcctctggaaaagatcacttggcagtggcttcctttcaccagttctgctcgtaaagataatcttcatctttaccattgggtacgagtcgttaatggtgttcctcccacaggggactattcttttgccaagtataacaagtccgttgatgttatcaaatacacagatgaggagtatgacaagtatttgacagatcctatgtggaccaaagaggagacggatcaactatttgacttatgtgagagatttgatctccgatttattgtaatagctgataggtttccatcctctcggactgtagaggaattaaaggatagatattatagtgtttcccgggctatattgattgctagggctccatcttctggggatgtcgcagcacatcctattgttaaggaaacatataattttgcacaagaaatggaacgaaaacgagcactgtccatggtcctctctcaaacaaggcaacaagaacgaagagatgaagaggttcttgttgaagcaaaaaaaatagcggaaaaacgcctacctcccaaggttgctgaacagtctcagttggttgcttctaatgctggtgcagaagctacagagagggctgtccctggtgaaaccatatctccatcaaatgtgcaaattccaatggctgttccagataatgcatctactctagcttctcttcgtatgcttcgtgtatatttgagaacatatgcacttgagcaaatggtgcaagctgcgaacgcatctgctggacttcggactatcaaacgggttgaacaaactttgcaagatcttggggtcaatttgaagccaagggttccaacgaaagctgtttgtgcagagcatcttgaattaagaaaagaaatactaacttggcttaatctccagaagcaggtgcaatataaagaggctgaaggttcctcttttcgtgatgggtcatatggtgaaacacctggaacaccaaaggaccgaacatttgttccagattcaacgaatttcggagtggaaagggttggcaaaaaggaccaaaagcgcaaggcacctggagctccatcagctcataaaagacctagaaaactaaaggcctcagatctttagtttctcaggtggcaaccgggaaaggtgtttcaattcacagaattctttcaatcaaactgaaatttggtttacttcggtctgcaattttagattaatgccactcttgttattcgatgtaaaaagaaaagtgagatccctgagatgagtgagatctgccatcttaaccatgccctgagaagctggactttatttcttgtgctgttaatgctttgtagaattgtagggagaccaggtacaaaaaaggcatcttatttgaatatgcatgtatataagtttggacatgggaattccagatgcctttgacagcttatgtcgggatgtagaaattgggtgcggatggaacaagtgtcctgcttcataaatgtttctaatcgttcacacacccaatgaaaaaaaaaatgtttttattcaacatgatcattcaaactaaacgaagataatattattcaaatttgtcattgtagt

SEQ ID NO: 6453 - DNA, 1161 bp, Glycine max
  Clone ID: 700565536_FLI
gttccttgaagttagtttgctttcaattttatatgaataataacataacataagaatagtttatatgaacacgcaaggtaagttaattagaccaaaggaagaagaagaagtagtggagtgatcctggttgggtgtgaaaaatgtcgcacagcgataccataccccttcacccatcttcccaatccgacattgacgagatcgagaacctcatcaatgccagcgttcaccaatcagtcccttcggcgagacctcccagtcccccacgcgcctccatccccgtctccgtctccgccgccccttcccccttcatctcctccaacctccctccaccgccacccctccctaaatcctccgtctccgccgtccctccgccccctcccccgccgcgcgccgacatctcctcctccgggttcggctccgcccccaacacgctcactgagcccgtctgggacaccgtgaagcgcgatctctcgagaatcgtgagcaatctgaagctcgttgtgttccccaaccctttccgcgaggaccccggtaaggccctcagggattgggatctgtggggccctttcttcttcattgtcttcctcggcctcaccctctcttggtctgcctctgtcaaaaagtctgaggtttttgctgttgcatttgctttacttgctgctggcgctgtaattttgacattgaacgtacttcttctgggtggacacattattttctttcagagtctgagtctgttgggttattgcttgttccctctggacgtcggtgcattaatttgtatgttgaaggacaatgtcatagtgaaagtggttgttgtgtgtgtgacattggcttggagctcttgggctgcatatcctttcatgagttctgcagtcaaccccaggagaaaagctcttgcactctacccagtttttctcatgtatgtatctgttggttttctcatcattgccattgactaaatgcatcaatgcttctgatttctttattacgataaccacctggaatctgcttctaaataggaatttttgtttgatgatcaaccatttttttttaattcttttctgcccctccttttttctgtttaaaatttggttagatatatttgaagacaaacagttgtataatattacgtggaaagtatatggtgggatcaaacttgct

SEQ ID NO: 6454 - DNA, 1410 bp, Glycine max
  Clone ID: 700565636_FLI
gaagttttggcgctgaaagaaaaatggcggaagagtacgaggaaggtggtgaggttgaagaagagttctccgtttggaagaagaacactcctctattgtacgatttcttcatttctcaccctcttcaatggccttctctcaccgttcactggcttccctcctctccccaacctcactcccatccttccttcaatctccacaaacttcttctcgccactcacacttccgaaggcgaatcaaacttcctcatgctcgctgacgcatccctccccgtagacacctcacaacacatcgtcgccaccgatccgaacaaccccgttcttcccaaggtggagatttctcaaaggatttctgttgatggggaggtgaatcgagcgcggtgcatgccgcagaaccctagtattgttggtgccaagacttgtaattccgaggtttatgtgtttgatttcaccaaggaacgtgggagtgcgtgtgaccctgatttgaggttaaggggtcatgataaagagggttatggtttgtcttggagcccttttaagaacgggtatcttttgagtggttcgcatgaccataaggtttgcttgtgggatgtgcctggtgcctctcaagagaaggtgcttgatgcacttcatatttatgagggtcatgagaatgtggttgaagatgtgtcatggaatttgaaggatgagaatatgtttgggtccagtggagatgactgcaaattgatcatttgggacttgcggacaaacaaagcccaacaatcagtcaaaccacatgaaaaggaggtgaactttctttctttcaatccatataatgaatggattttggctacagcatcttcagatacagatgttggcctctttgatacacggaagctggcagtgccgctacatattttaagtagccacacagatgaagttttccaggtagagtgggatcctaatcatgagactgtgttggcatcttctggtgctgacagacggctgatggtttgggaccttaacagagttggtggtgagcagatagagggagatggtgaaggtggccctcctgaactactattctctcacgggggtcacaaagggaaaatatcagatttttcatggaacagaaatcagccatgggttatctcaagtgtagctgaggacaattctttccatgtctggcaatggctgagagcatttacaatgacggagatgatgacaacatgtggacggccgatgattaattaaccagacacatgatcaaaggcgatgatgctcttattaccattgctttattgttttaatggaatctttgaccatttggtgtcatgtgaatgtcttgtgatcattaacaactggaacagtgatggcaacatagtatctttgtcaaacatgaactcttttttatatgcagaattgatttctg

SEQ ID NO: 6455 - DNA, 1035 bp, Glycine max
  Clone ID: 700565645_FLI
atcacctcccaggtcccggaaggactcagcaagcatgttgtgtcttctaagaaggctcaggctaattggtatagaaagttagtagatgcttggaaagaggcaaaacctcctcctaagacacctgaagaagcagctagacttgtcattcagaccttgagaagacatcaaaaagcagatgttgagggattgttggctttctatggtcttcctctaccacacacactggttcaaggaactacccaacccctttcatccttgcctgatggagttcaatttgaaatgcacaccttgccggttgatgcaaaggcagtagcagatggagacactataactgtgtatgttagcacaacagaccccagggaatcagcatttgtccctggaaatgtgcatgcagcagccgtgcgaagatcagaagcgcgtgcacgaaggaactttacagaagcggatgcattgcacaaacagatcattgattcaggatatcgggtgattccggttcaaaacgaggaaattctagccaagaagtataggattcggttaaggggaattgatgcaccagaaagtgcaatgccatatggaaaggaagctaaaactgaactgaccaagattgttcaaggcaagcctttgaggatccttgtttatgaggaagatcgttatggtcgttctgtaggtgatatctattgtaatggcatttttgtacaggaaatgatgttaaagaaaggtttagcatggcactacgtagcatatgacaaacgaccggaactggaaacatgggaaaaacaagccagagcaaagcgtgttggattatgggcttcaaaaaatcctgagaagccatgggaatggagaaaggacagacgagaggctgcatgacaacacctaaaatcagactagcagcattattgccaaaagaaattgagtctagggcaaaacaaaagcccttcattcaatattagtgtatcattgttgtaacaaattgcatgtatataaaacaactgtcaaccaactagatctatttgtcaatggaatgcttggattatt

SEQ ID NO: 6456 - DNA, 1333 bp, Glycine max
  Clone ID: 700565660_FLI
ccgaacctcaaacccaaaacccgaacctccgcttcggatcctaatccagtaatccctgatgggaacggaaggctacacttacatggggcgcagtttgagcgaactccgcatcaacgacgattcctcttcctccgccttcagcgactgcaacagtgacagatctggcgaattcgccaccgcttcttcgcaaacgcggcggtttctcatcgcctgcgccaccgaaaattccgacgacttgatccgccaactcgtcgccgatctccactcctcctccatcgacgatcagaagcaagccgccatggaaatccgattactcgcgaagaacaagccggagaatcgcatcaaaatcgcgaaagccggcgcaatcaaaccgctaatttctctcatttcctcgccggaccttcagctccaggaatacggcgtcaccgcgattttgaacctctcgctctgcgacgagaacaaggaggtgatagcctcctcaggcgcgatcaagccgctggttcgcgcgctgaacagtggaaccgccacggcgaaggagaacgcggcgtgcgcgcttctaagactctcgcaggtggaggagaacaaggcggcgatcgggcggtccggcgcgattccgcttcttgtgagcctcctggagagcggcgggttccgcgcgaagaaggacgcgtcgacggcgctgtactcgctgtgcacggtgaaggagaataagatcagagcggtgaaggcggggatcatgaaggtgctggtggagttgatggcggacttcgagtcgaacatggtggacaagtcggcgtacgtggtgagcgtgctggttgcggtgccggaggcgagggtggcgctggtggaagaaggaggcgtgccggtgctggtggagatcgtcgaggttgggacgcagaggcagaaggaaatcgcggtggttattcttttacaggtttgcgaggacagcgtgacgtatcgcaccatggtcgctcgcgaaggtgcgattcctcctttggtcgctttgtctcagtccggcaccaatcgcgccaagcaaaaggcggagaaactaattgagcttctgcggcaaccaaggtccggcaacggcgctgctcgaagtacatcagaagtggtggcgtagacgccagcagtaataaatttattcaccttggtggtgtctcaccgtgcgtgagtgtgtacaaacaccacgtttaaaaattgtgaatttggttaaaaaaaacacaacgtgcgtccttcaagagagacggagagttaaactttgtaaatatcttcgtaacggagaagaagctttgtaaagtttgtggtacaaaatgatacgagtttgagtttggtttgc

SEQ ID NO: 6457 - DNA, 904 bp, Glycine max
  Clone ID: 700565722_FLI
gaccaataataataataataataaaagaccaactccttggcttggcgcatctttattccctctcttctataaatcgttcgatcgttaattcctcgcacgagcttgtgtccgtcgtcaaaccatggagaatattggtgaggatcagtacggctacttgccggagaccgacctgtttttcccaaacgaagaccttggcagctgggcaataatggatggggaagcggtctcttggtactatgattcaagctccccggacggcaccggtgcttcttcatcggtggcatctaagaacattgtctccgagaggaatagaaggaagaagctcaacgataggcttttggcacttacttcccaagctggtatagtagaaagcttggatgtcttggttaaggagtttgtagctgccagcgatgaagagaagaaattcgtgtttacccgaatggaagaggaagttgagaagctgaagggttctgcctcaaggcacgggaagatttacttgaaagctgccaagaattacttggaaaaaggttctgattatgctaagaacgaaatccagcgcctacagcgcatacttgacaagtccattagtcctgccaaggccgacgagttaactctaaagaaaaatatcttgtcgacatatgcggcttgactttttggtgcatcattaaccatctctcatggaagctcgtgatcaatcgcagctcctgatgattgtttgactttgatatcgaaaatgctgggagatattcaacgtggatacttgtagtgcttaatttgagtctgtactattgaccttatcttgcatggcgcttttggggttaaaaattccgaacttacgattcttctccccattgtagtctacctgagcggtttaaaattttgggagacgatagcttttgtcttt

SEQ ID NO: 6458 - DNA, 1795 bp, Glycine max
  Clone ID: 700565738_FLI
gaaaaacatatcacacaatatggcattcaagggctatttccttctcggcctcgttactcttgttcttgttaaatcttccaaagttacatgcgaagaagaatcagttaatacagtttcacccattattgacatttcactcaatcggaagagtttcccagaagggttcatatttggggcgggatcttcctcgtaccagttcgaaggggcagcaaaggaaggtggtagaggaccaagtgtatgggataccttcacccataattatccaggaaagatcatggatagaagcaacggagacatggcaattgactcatatcacaactacaagaaagatgttgggatgatgaaggatatgaatttagattcatatagattttccatatcttggtcaagaattctcccaaaaggaaagctaagtggaggtatcaatcaagaaggaatcaactattacaacaaccttatcaatgagctactagctaatggtatacaaccacttgtaactctctttcattgggatcttcctcaagctttagaagttgagtatggtggctttttaagtccgcgcatagtgaaagattttcgagactatgcagaactttgcttcagggaatttggcgatagggtgaagtattgggttacattgaatgagccatggagttacagccaaaatggctatgcaaatgggcgaatggcacctggccgttgttctgcatggatgaatctgaattgcactggtggtgattcttcaacggagccttacttggttacacatcaccaacttcttgctcatgcagctgctgttcgtgtgtacaagaccaagtaccaggcatctcaaaatggtgtgataggcataaccttggtagctaattggtttttgccgctcagagataccaaatctgatcaaaaggctacagaaagagcaattgacttcatgtatggatggtttatggatccattaacatctggagactatcccaacagcatgcgatcacttgtgaggacaagattaccaaagtttactgcagagcaatccaaactacttattggttcatttgattttattggcctaaactattactctacaacatatgcctctgacgcacctgatctaagcgaagcccgtcctagctacttaacagattctcttgtcactcctgcatatgaacgtgatgggaaacctattggaataaagattgcttctgattggttatatgtttatccaagaggaattcgtgaccttttattatataccaaagaaaagtacaataatcctttgatttacatcactgaaaatggtataaatgagtataatgaaccaacattatcacttgaggaatctcttatagataccttcagaattgattatcattaccgtcatctcttttatcttcaatccgcaattaggaatggcgcaaatgtgaagggatattatgtatggtctttgttcgacaattttgaatggtcttcaggttatacatcacgttttgggatgatcttcgtggattacaaaaatggtttgaagagataccaaaagctttcagcgcaatggttcaagaattttctcaagaaagaaagaagactttatagctctagtaaataatatgaaattcgtttattcattggttttgtaaataattatttggtttttctttgatattcttttattctaaagaggtcctaatttgacttagagggtattgattattcttttattctaaagaggtcccattggactgagaggtgaaacaaagatgtgtatcggttgattatagcttctatatattgttattgttatgat

SEQ ID NO: 6459 - DNA, 1257 bp, Glycine max
  Clone ID: 700565743_FLI
gattgagcatcagagaaggaaggtcaaactactatctatgcttgacgaggtggacaggagatacaaccactactgcgagcaaatgcaaatggtagtgaactcatttgacctgatgatgggatttggggcggcagtgccatacacagcactggcgcagaaagcaatgtctcggcatttccggtgtctgaaggaggcgataacagcgcagctgaagcaaagttgtgaagtacttggagacaaagatggggcgggaagctcaggaggtttgaccaagggtgagaccccaaggcttaagatgttagaacaaagcctaagacagcagagagccttccaccagatgggcatgatggaacaagaagcttggagaccccagagaggcttgcctgaacgttctgtcaacattttgagagcctggcttttcgagcattttctccacccgtatccaagcgatgcagataagcatctgttggcacgacagactggcctatcgcgaaatcaggtatcaaactggttcattaatgccagggttcggttgtggaaacccatggtggaagagatgtaccaacaagaacttaaagaagcagagagtgcagaagagagagaaaaggaccaaagcaacaacattagtggcaaccaagcacaaattccaacaacaccatcagcggccacaacatcaacagcaacagcaacagcgccaccaccaccaccatcaacaacgacaaaaacaacaaaaccgacaggcaaaagatccgataccatcaatgcccccgaaagcgacccttcacagcaccttgcaatgaataacagacaaggcttctcggaaaaccaagcaaagaagtccaccgcatccaccaccaccaccaccatcgcctctgaggtggcgccacccgtgtctcagtgcttcgacgactcagacctgcccgcacacagattaatggcctctgatgacacgtgtcatttggtcacagcagattttgggaccgcatctgcaagtgctgacattggatccacactcattaggtttgggaccacacccggtgacgtgtcactcaccctagggcttcgccacgccgggaacatgcccgagaaatctcctttctctgttagagactttggagccatttaaacttcaatatatattatatagtactacttcacataataataatcaaaataataataaatattatataggaagatgctttatcatattattatgtatatcatatcatcaaaagaaaacatttttcccccctt

SEQ ID NO: 6460 - DNA, 2772 bp, Glycine max
  Clone ID: 700565776_FLI
tgttttcataggcttcttttttctcttgttgcagtgacgaacttctgaagaaatggcaaatcatcctttgacacactctcactctttccgcgagaggtttgatgaaactctcactggtcacaggaacgaaattttggcccttctgtcaaggcttgaagccaagggcaagggaatcctgcaacatcaccaagtggttgcagagtttgaagaaatccctgaggagagcagaaagaaactccaagatggtgtctttggagaagttttgagatccacacaggaagccatagtgctgccaccatttgtagctcttgctgttcgaccaaggcctggtgtatgggaatatctgcgtgtgaatgtgcacatgcttgttgttgatgagcttcgtcctgctgagtatctgcgtttcaaggaggagcttgttgagggaagttcaaacggcaactttgtgcttgagttggactttgaaccgtttaatgcatccttccctcgcccaactctgaacaagtccattggaaatggcgtcgagttcctcaaccgccacctttcggccaagctcttccatgacaaggagagcatgcagccactgcttgagttcctcaggcttcacagttataagggaaagaccatgatgttgaatgacaaagttcaaagcctggattctctccaacatgttttgagaaaagcagaagagtatctgatttcagttgctcctgaaacaccctactcggaattcgagaacagattccgggagattggtctggagagggggtggggtgacactgccgagcgtgtcctcgagatgatccagcttctcctggaccttcttgaggcacctgacccttgcaccctcgagacattccttggaagagtccctatggtcttcaatgttgttatcctttctccccatggttactttgcccaagataatgtcttgggataccctgacactggtggacaggttgtttacatcttggatcaagttcgtgccttggagaatgagatgctcaaccgcatcaagaaacaaggccttgatatcacccctcgtattctcattatcactcgtcttctccctgatgcagtaggaactacctgtggccaacgtctagagagggtatatgatactgaatattgtgacattctcagagttcctttcagaacagaaaagggaattgttcgcaaatggatctcaagattcgaagtctggccatacctagagacttacactgaggatgtcgcccttgaacttgccaaggagttgcaagccaagccagatctgattgttggaaactacagtgatggaaacattgttgcctctttgttagcacataaattaggagtaactcagtgtaccattgctcatgctctagaaaagaccaagtaccctgagtctgacatttactggaaaaaatttgaagagaaatatcatttctcatgccaatttactgctgatctttttgcaatgaaccacacagactttatcatcaccagcaccttccaagagattgctggaagcaaggacactgttggacagtatgagagtcacactgccttcacccttccaggactttaccgtgttgttcacggtattgatccatttgatccaaagttcaacattgtctctcccggtgcagacatgggtatatacttcccatacactgaaactgagcgtaggttaacagaattccactctgacattgaagagcttctttacagctcagtggagaatgaggaacacatatgcgtattgaaggaccgcaacaaaccaataatcttcaccatggcaaggcttgaccgtgtgaagaacatcacggggcttgtcgagtggtacgggaagaacgcacgcctccgcgagttggtgaacctggtggtggtggctggagacaggaggaaggagtcgaaggacttggaagagaaggccgagatgaagaagatgtatggcctcatcgagacctacaagttgaacggccaattcagatggatatcctctcagatgaaccgtgtgaggaacggagagctctaccgtgtcatctgtgacacaaggggtgcctttgtgcagcctgcagtttatgaggcctttgggttgactgtggttgaggccatgacttgtgggttgccaacgtttgccacatgcaatggtggtcctgctgagatcattgtgcatggaaaatctggttaccacattgatccttaccatggtgaccatgctgctgagatccttgttgagttctttgagaagagcaaggctgatccatctcactgggacaaaatctcccagggtggactcaagcgtattcatgagaagtacacatggcaaatttactcggacaggctcttgacactcactggtgtgtatggcttctggaagcacgtgaccaatcttgaacgccgtgagagcaaacgttacctcgagatgttctatgctctcaagtaccgcaaattggctgagtctgtgccccttgctattgaagagtaaattcatgtttgaagagaacatcaatggagaaaccggcttttggtcgtttgaagtcttatggagctttcataaataacgccattgattttgattgtgatcagcttttggatttaaagagtctaaaaaaaagtgtcgtttgtttttatattttgcttaggttttgggtaaaaaaagtaaaaaaagaaagtctttttttttaaaattctttttgttgttgcaatattgtgtatgattggaaatctttaaattcgggttttccaccccatcaattcaatttaaagatatgccttcttccattc

SEQ ID NO: 6461 - DNA, 2038 bp, Glycine max
  Clone ID: 700565777_FLI
ggagtatctgggcacagtgcctcctgaaactccctactcagaatttgagcacaagttccaggagattggtttggagagagggtggggtgacaacgcggagcgtgtccttgagtcaattcaacttctcttggatcttcttgaggcccctgacccgtgcacccttgagactttccttggaagaatccctatggtgttcaatgttgttattctttctccccatggttactttgcccaagataatgtcttgggataccctgacactggtggccaggttgtttacatcttggatcaagttcgtgctttggagaatgagatgctccatcgcattaagcaacaaggattggacattgttcctcgtattctcattatcacccgtcttctccccgatgcagtaggaactacttgtggccaacgtcttgagaaggtgttcggaactgagcactcccacattcttcgagttccctttagaactgagaagggaattgttcgcaagtggatctcaagattcgaagtctggccctacttggaaacttacactgaggatgttgcccacgagcttgccaaagagttgcaaggcaagccagatctgattgttggaaactacagtgatggaaacattgtcgcttctttgttggcacataaattaggtgtcactcagtgtaccattgctcacgcacttgagaagaccaaataccccgaatccgacatttactggaaaaaattggaagagagataccacttctcttgccaattcacagctgatctatttgccatgaaccacacagatttcattatcaccagtaccttccaggagattgctggaagcaaggacactgttggacagtacgaatctcacacagccttcacccttcctggactctaccgcgttgtgcatggtattgatgtctttgatccaaaattcaacattgtctcccctggagctgatcaaaccatttacttcccccacactgaaaccagccgtaggttgacatccttccaccctgaaatcgaagaactcctttacagctcagtggagaatgaagaacacatatgtgtgctgaaggaccgcagcaagccaattatcttcaccatggcaaggttggatcgagtgaagaacatcacaggacttgtggagtggtacggtaagaacgcgaagctgagggagctggtgaaccttgtggttgttgctggagacaggaggaaggagtcaaaggacttggaagaaaaggccgagatgaagaagatgtacggcctgatcgagacctacaagttgaacggccaattcagatggatttcatcgcagatgaaccgtgtgaggaatggagagctctaccgcgtgatctgcgacaccaggggtgctttcgtgcagcctgctgtatacgaggcttttggtttgacagtggttgaggccatgacttgcggcttgccaacattcgccacatgcaatggtggtcctgctgagatcattgtgcacggcaagtctggcttccacattgacccttaccatggtgaccgtgctgctgatctccttgttgacttctttgagaagtgcaagcttgacccaactcactgggacaagatctcaaaggctggtctccagcgtattgaagagaagtacacatggcaaatttactctcagaggcttctcactctcaccggtgtctatggcttctggaagcatgtgtctaaccttgaccgccgtgagagccgccgctatctcgagatgttctatgctctcaagtaccgcaaattggctgagtctgtgccccttgctgctgagtaaactgaggataaagagttggataaagaaatggaggaaccggctttttctttctcatttggagtttgtcgcacttgagttttataaataatgtccgtgattttagttttgtgattaagctttcgataagaggagagaaagagaaggaaaaaaaaagttgcttttttttttgttgttgcatgatttggatcttgattggaaaagcttcgaattggggtagttttacccatcaattcaattttaagccgtgccttcttc

SEQ ID NO: 6462 - DNA, 434 bp, Glycine max
  Clone ID: 700565822_FLI
cgtgtttggacccacatgcgattctattgatacggttctgagggattaccagctcccggaactgcaagtgaacgattggcttgtgttcccgaacatgggtgcctatacgacgtcgtccgggactaacttcaatgggtttagctcctcagccaagtccatattccttgcatgttcgagcccggaacacaccatgttctaatcaatacaaatcccaaactatcccttgctcaatgtacttacttattttattatcaacttgtctctcttttggtttcggaaactcaataatggcggaatggctgctcgtggacgccgcgtggtttctctcttgattgtattactactatctttttcttttcatttatattttctaatttggagacacctacgtaccttttgatattcgaaataaaatttcgtttattgttgatact

SEQ ID NO: 6463 - DNA, 730 bp, Glycine max
  Clone ID: 700565832_FLI
gtaggatcatcatctctttgagttgccattgaagaagaagctcagatcggaaaaattcacctctccaatcccaatcccatcgttgcaaatgatccgattcattctgttgcagaacaggcagggcaagacccgtcttgccaaatactacgttcctctcgaggactccgagaagcacaaggtcgaatacgaggttcatcggctcgtcgtaaacagagaccctaaatacacaaatttcgtcgagtttcgtacgcacaagataatatacaggcgatatgctgggttatttttctcactctgtgttgatatcactgataatgagttggcgtatttagagtgcatccatttgtttgtggaaatattggatcacttcttcagcaatgtctgtgagctcgatttggtttttaacttccacaaggtctatcttatacttgatgaattcattctagcgggtgaactgcaagaaacaagcaagaaggctatcattgagagaatgggggaacttgaaaaactagaatgaaaaattacttttcagcagtcatatcaatttggagatttcgatgacttactcatgcccttggcttaattcttgtatttcaattgtgatacagaattttgaaaatcttttccgttgagccatgtattcaatgccctttaccttcgcttcttattcggcttatgtttatatttgtaagacatttataaaatcagggttttcagtagcctttctgtt

SEQ ID NO: 6464 - DNA, 1521 bp, Glycine max
  Clone ID: 700565837_FLI
atttttcattggctatggtcttgaactgtcccgaatagttccccttattatctaccatttgaagagaaaatatctttgcaagactgaagctgagttgaaagaagcttggcgtccaggagatcttggttatggaactagagttcctggtgacatgctgattgtcacaattgtcttctgttactctgttattgctcctgtgataatcccatttggtgctctatattttggtctaggatggcttgttctgcgaaatcaggtgaagttcttggaattttgtttaatgaacccagttttatgttttatgtggtaattttatatggctaaattttagttttcattccttatgtttatgaagtttaatgatcacacactaataatgtaatttcactctgtcaactaataaaaaatcactgttgatatgacttttaatgtatttattgtaaaagtcaataaacttaccatgaagatttgtaattaaatgactctgttaaactttttcacagggcatgacctattttctctatgcttattttaagtctcaatttagtccttttaaaaagttattttgaaatcaagtctgttagtaaatatattattttaagagtttgtgtatacttgtattaatcaacaggcactcaaagtctatgtaccaacatttgaaagttatggaagaatgtggccacacatacacaaccgtatactagcatctttgatattataccaaattacaatgtttgggtactttgggacgcagaaattctactatacaccacttgtgcttcctcttcccatattgtcattgatctttggttttgtctgtgcaaagaaattttaccccgcctttcaacatccagcacttgaggttgcagctaatacacttaaggaagttcccaatatggaattgattttcagagcttacattccaccaagcttgaggtctgagaagatagatgatgatcgggttgaagatgcattgtctcaatgttcgagaacagcacctgtttgatgtaattatctgaatttcaacttgtttttacgtgttagatgtagtcttgtagagatacttttagatattttattaattgttcagaatacgtcataggaaccagaggtgttgagtgttgatgttgtgaatgtgattgtgtaagaaaatgttgggtggtctcgtaatattttcttttagtgtgatgtttgttcgacttgtgatagttgcggatcagtgttctctatgtattcaacattttctttatttgttctgaatgagaattcatgacttttcattgtgtaaaattaacaatgttgattgatatgttctaaaaggagtttgtggtaggccttaccgcgttctgccatgtgctctgccagcagcctgttcccaaatgataagggaaattgtaaggaataaaagtgggaaagtagaatgtgactagaaatctagaatgaatgaaaaaagtttttttttttttttgtacaacatatatcaaattgaaagaaagcttgtaccacaatacgtacacaacc

SEQ ID NO: 6465 - DNA, 1528 bp, Glycine max
  Clone ID: 700565847_FLI
ggaaaaagaaaaggattaattattgatttgttattattgttgattcttaaagtttactcattcctcttgttttgactgtcttgtaaattacctccttaatctgttcgcgtaatgaagttaattattaccaagtcatatgcatggtcttgaaattttaatttttatctgtgtggattcttatcacgtacatgtgaacattacgtaattatagcctcttttggggttggattagctggtgagatccatggaagatataggtccgaattcatgcacaaggccagtgacagagaagaaagcaagaccccaagaacaattgaattgtccaaggtgcagttcaaccaacacaaagttctgttattacaacaactacagcctcacacagccaagatacttctgcaagacttgtagaaggtattggacagaaggagggtctctgagaaacgttcccgttggaggtggctctaggaaaaacaagagggtcacctcatcaaaggttcctgacttgaatccaccaattagcctctcatcagtctcagccatttcttcccaaaaccctaaaatgcaaggagtccatgaccttaatctggcttttcctgcagctatggacaagtatcatcatggcacgtctccgtatgttgagatgccaaaacttgaaattggtggtgatcacagtactagtcatcatagtcaccaccatagccatagcccttcttctgcagttgagctactacggtctggcatggattctaggggtttgaatccttatgctcctaattccttgatgtcaggctcagatcattccctttatacacctggctatcccatgcaggaaattaaaccaaaccttagcttttcagttgatgatggatttggaaatagatcatatggggttcaagagaatggtggagggaggcttttgttcccttttggagacatcaagcacctttctgcaggtcttgaagtggaacacaataaagaacaaggaaataattcaactggatattggactggttggtgaagggtcttcatggtaaggaaagaaaagaaatattgggagaacataaatatcaacctgcattgttttctttctcttcactgtttctatctatccgcttgaagttgttcagatcactaacaataggatacacatggttactctattttgtatacattattattattattacatttctattcgagcaatgtgaggattttacagctcatcttggttatttttaatatgtttagagagagagagatagaagaagaggtgaatatagggtctgcttttgtccaagtcatgcaatgcaatgacctgtattcatgaattcttctgtcaaggagtagatacatatctatcgatcacctttattgatgtatgcatgctttcaaagatttggtacaaaatgacttttgatgattaaggaaagagtcagatattcaagtttgtaaccataattatacatgtattggattggtttgtgtgttctttcctattacaaaaatttctatctatgtcgatctatgc

SEQ ID NO: 6466 - DNA, 2214 bp, Glycine max
  Clone ID: 700565874_FLI
ggctccgctctccagatccaaatccaactgctccaaggggacatgtgcaatttgcctgaactcaatgaaagcagggcaggggcatgccatttttactgcagagtgttctcactctttccattttcaatgcattacatctaatgtaaaacacgggaaccggatttgccccgtctgcagagcaaaatggaaagaggttccttttcagagtcgttcttctaaggtctcccatggcatcaaccgagtaaattcaccgcgaaatgattcctggacaactctactagggagggttcctacccaacaagctagtacagctccacaacttgcatctcctaataatgttgctgaaccagctatctatgatgatgatgatgaagtcttggatcaacaaacttcagttaccgaagatatggatgaagctgttcacaatctagtaaacacaatggagatcagaacatatcctgaagtttcagcaattgcaaagtcagcctctcatgataacttcgctgtattgattcatctcaaagctccccctcattcagggagactcagtaacaacactgaatcatcagctcaaaattctcgtgctccaatcgatcttgtcacggttcttgatgtgagtggcagcatgtcaggcacaaagattgcactactgaaacgagctatgggttttgtcatacagaatctgagttcatcagaccggctttctgtcattaccttctcttgcacagcccgccgcatctttcctcttcggaggatgactgatgctggaaaacaggaggcactgcaggctgttaattctttggttccaaatggtgttacaaacattgttgaaggcttgaggaaaggtgccaaagtgtttgttgaccgcaagtggaagaacccagttggcagtatcatattactatctgatggacaggattcatccataaacagtagcagaatcaatgttgtaaatgattaccggtcacttgtcccgtgctccattcatcggaacaatggaatgggtctgcatataccagtgcatgcatttggctttggtgttgatcatgatgctactgccatgcactcaatctctgagatatctgggggtactttttccttcattgaagatgaggatgtgattcaggatgcatttgcacagtgtattgggggactattgagtgtggtggttcagcaattacacgtagaagttcagtgtgttcaccgttgtctgcaacttggttcggtaaaagcaggaagttaccaaactagcttgattgacagtggaaaaatggcatctatcaaggtaggagatctgtatgctgaagaagaaaaagactttttggtgacagtcaatgttccggtggataagtctagtgatgagatgtcgttgatgattgttagaggtatttatagggaccccatcacaaaagaaatggtggggttgggagtaaatagtgaagtaaagattcaaagacctaatgtagctagagatgtagttatgtcaatagaagtagacaagcagagaaacaggcttcgagctactgaggcaatggccgaggctagagttaaggctgaacgtggtgatttgtctgctgcagtttctgttctagaaagatgtcagcaggcattgtctgaaactatctctgccaaagctggtgatgaactatgcatctctcttgctgctgaaatgaaggagatgcaggacaggatggtgaaccaacgtgtttatgagcagtctggaagggcttatgttctctcaggattgtgtgctcattcatggcaaagggcaactgcacgaggagattctacagacagcactagttttgtgaatgcatacagaaccccttccatggtagacatggtttcacgttcccaaaccatgcttttgaggcctccacaatctgcaaatgccgtcaaacctgctagatcctattctgaccggcagcgaagaaaatagtaatgcaaactgtttgaaaatttctcctcagaaaagtctaatgcatacacttttctgtggagacctttaagtttcttttcttttacttatctttcccttatggttttagaaagatgggggggtataatggaaagtggtaaggaatgagttctaagtgtctttcgttgaattgtacgtcttctggagaagagagtataaagtaacgtagtagtggagatatttgagagaatttcttcattgaattacatccatggtatattctacatacttctgat

SEQ ID NO: 6467 - DNA, 1114 bp, Glycine max
  Clone ID: 700565907_FLI
cgcccatcacgacacaaaaagacgagaaccatggttgtttggagaacgaaatacagaattgattaaggatgcaatacatgttcgttatgcacttctcccgtatttctacacattattcagggaggctaacactacaggtgttcctgtggtccgtccattgtggatggaattcccatctgatgaagctacttttagcaatgacgaaactttcatggttgggagcagtattttagttcaagggatctatacagagcgagctaagcatgcatcagtctatttgcctggaaaacaatcctggtatgacctaagaactggagctgtgtacaagggaggggtgacacacaagttggaggttacagaggagagcattcctgctttccagagagctggaaccattattgcaaggaaagaccggtttcggcgaagttccactcagatggcaaatgatccctacactctggttgtagctctgaatagttcccaagcagctgagggtgaactctacatagatgatggcagcagctttaattttctgcaagggggctatatccatagacgatttattttctcgaatgggaaacttacttctatagacctggcacctgcttccagtagcaaggggcgttatccatcagatgctttcattgagaggattatcctgctgggacatgctcctagctcaaaaaatgcactcattgagccatcaaatcaaaaggttgatattgaacttggccccctttgggttctaagggctcgtgcaccagctgttacaaccatacgtagacctaatgttcgtgttgcagaagattggactataacagttatataacatttccggttcgagggaggagtttaatgttcaaagttactgctagtgcacaacgagattttgtttctgtagttgagttgatatgaagttcagctgcaacgttggggtaagaagaaagaaaatcattaattttgaagaatgcatttgcaccaactcagtttgagcggcttatttaatgtaggactcgttgactggaaagatttaacatttggaagttgtgattccattgttgtctactattttgataaggataaatttgtatcgtctggaatggtctgtcttggg

SEQ ID NO: 6468 - DNA, 863 bp, Glycine max
  Clone ID: 700566008_FLI
gctgcatatcgaggtcttgcctttatgtatgactggttcatggaaccactttactctggaacatatcctgctgtaatggttaacagagttggaggtcgtttgccaaagtttaccaaaagggaatacttgatggttaaagggtcctatgatttcatagggttaaactattacacttcaacttatgcaactagttctccttgcccacgtgaaaggccaactgcctttacagacgcctgcgttagatttactactgtaagaaatgggcttctcattggtccaaaggcagcctcagactggctctacgtctatccaccaggaattcaaggtctactagaatacactaaggagaaatttaacaacccaattatctacataacagaaaatggaattgatgaggttaatgatgggaaaatgttacttaatgacagaacgaggattgattatatcagtcaccatcttttgtatcttcaaagggccataaggaatggagtgagggtgaaaggatactttgcatggtcattgttggacaattttgaatggaatgcagggtacagtcttcggtttgggctcgtgtatgtggattacaagaatggactgaaaagataccgcaaaagatcagctttgtggttcaaaatatttcttcaccaatgaaatgatccttggtagtgaaagacagaattgatgggggaagaaataagaatatgttgtttctttcttaatcctagtcattttcttttggccattgtaagatctaagcagagctactttgatgatttctgacagcctgccaatagtgaggcttcatggttatctgtataacttacttccattaataagtttctgtatttggttttcctgtccct

SEQ ID NO: 6469 - DNA, 1076 bp, Glycine max
  Clone ID: 700566031_FLI
acccaatcaccaacgtcacgaaaaacagtaaaaccacagttgtatagtattgtattgtgggcgctgactgagtcttagtcacggataagcatgaatgattgattggggttggcaactagggttccaaatccattaccatatatattacccactgtgactgaaactctgaaacagaaaaaaaaaggtagggttctgaatgtcgaattctcaacaaaatgagattgatttaaccggcgacggggaagagaggtcaaactctctcttagcgaacacgcgctgcagcttctgctttccctgctgctttggttcccggtgccactcggtcagcgtcgggttcgcgtggtgggagcgcgtgcgagccacgtcgtcatggtcggagacaagccctcactctgaggcgcaaccagcaaccgggagttccagtgggagttggtggtctggcggcgtgagggcctttatgaaggtgcgggagtggtcggagctcgcggcggggcctcggtggaagaccttcatccggcggttcagccggagccggagtggctgggcccggcacgcggcggggaagtaccagtacgaccccttgagttactccttgaacttcgacgaggggcataacgggtatttcgatggtgacggttacgacgggttacggaatttctccgcgcgttacgccgcgcctcctccgtttaagcccgtttcctcggattccattcaagacgccgccgttttgggataagaaatagggattgccatgtggtgtcgattttgggaattttgcttcgactagcttacaagtgcggttattgtgtattaattttattctatcatatcaatatcaatcaatagttacaggattttaatttttcttattgtatattccttaccttggcagtatttctttatttatttaattaatatattgtttagatgttggtaataatcagaagtgcgttgtgcgcatggattaccaatggatgaatcctgataatttcttatactatttactaattaggtttgtcaaataatgtacaaccataagtggatgcaaagttttcattttaaatgatgttcattag

SEQ ID NO: 6470 - DNA, 1408 bp, Glycine max
  Clone ID: 700566155_FLI
gtcaaatgttttttctttcaacttagtcagatcctgcggacattgtaagtaaatcttatgaagacggagatgatgactaatgttacagagtatgaggcaattgcaaaggaaaaattgccaaagatggtttatgactattatgcatcaggggcagaggatcagtggactttgaaagaaaatcgaaatgcattctcaaggattctgtttcggccgcgtattcttgttgatgtgagcaagatagacttgactgcaactgtattgggcttcaaaatatcaatgcctatcatgattgctccaacagccatgcaaaagatggctcaccctgaaggagaattagctactgctagagcagcatcagcagctggcacaatcatgacactatcctcatgggctacttccagtgttgaggaggttgcttcaacaggtcctgacattcgtttttttcaactttatgtgtttaaagacagaaatgtggttgctcagcttgtgagaagagctgaaagagctggtttcaaggcaattgcccttactgtcgactctccaattcttggtcgtagggaggctgacatcaaaaacagatttacattgccaccaaacctggttttgaagaatttggaaggattggatcttggaaagctggacaagactagtgactccagtcttgcctcatatgttgctgaacaaattgatcagtcactcaactggaaggatatcaaatggcttcaatcaatcacttcattgccaattgtagttaagggtgtacttactgctgaagatactaggatagccatacaagctggagctgctggaatcattgtttccaatcacggagctcgtcaacttgactatgtccctgcaactattatggccttggaagaggtagttaaagctgcacaaggaaaaattccagtttttctggatggtggaattcgccgagggacagatgtttttaaagcactagctcttggagcagctggtgtatttattggtagacctgtggtgttctcattggctgctgatggtgagactggtgtgagaaaagtacttcaaatgcttcgtgatgaatttgaactaacaatggcactaagtggttgccgttcgctcaaggagataactcgtgaccatgttatcacagagtgggatcacccaagattttctcccaagttataagatggcaggactccaccttgttcttctatattctaaaatagaaattttagaataacctttgttcttatttcatgcttctgtggaaaactttgttgttacagtgagtcaagcattagtcatccgttagtaattgctatttcattttgttgcatttggtgctgggatttggtaaactctagaaacatgattgccaataaaatgtactttttttcttagcaaaagattaagttttatggtc

SEQ ID NO: 6471 - DNA, 1848 bp, Glycine max
  Clone ID: 700566166_FLI
tattaatcccaacatttttaccccacccttaaccaaaacaaaaacctaccttgtctccaacatacataggcactgtctctgtttctatttctcactctctgaactctgaacaccgaaaatccgccatggattttcgcatctatggcgtcacgatccttctcttcctcttcccaaccctcacattctcaatctcacagggtcagataaactcaaactcaatccttgtcgctctgttggactcccattacaccgaactcgctgagcttgtggaaaaagccatgcttttgcagactctggagaacactgtcatgaacaacagcaacaacatcacaatcttcgctcccagaaacgaagccctcgaacgcgatctcgaccccgatttcaagcgtttcctcctcgaaccccgcaatctccattccctccaaaccctcctgttgtcccacatcgtccccaaaagaatcaccaaacccgaattcaaaaccgggtcgacccgacacagaactttagcgtctcaccaccacctcactctccaagccctgaatttgactcactggaatgttgagtcttcccgggttattaacccgaattcggtaacccgacccgacggagtgatccacggcatcgacactctcctcatccctcgctcagtccaagacgaattcaaccgtcgccggaatctgatctccatcgccgcggtaaaacccgaaccatccccggaggtcgacccgcgaacccaccggttaaagaaaccggcgccggcatcgccggcgggggccccgccggcgctcccgatctacgacgcgatggcgccggggccatcgcttgcaccggcgccagcgccgggtccgggtgggtctcacaagcacttcaatggggaaaagcaagtaaaagatttcatcgagacgttactccactacggcggctacaacgagatggcggatattctggtaaacctaacgtccctggcgacggagatgggaaggttggtttcggagggttacgttttgacggtgttagctcctaacgacgaggccatggcgaagttagcgacggagcaattaagtgaaccgggttcgcccgaacagattatgtactatcacttgatacccgagtatcagaccgaggagagcatgtacaatgccgtcagaaggttcgggaaggtccgttacgacacgttacggttgccgcacaaggtcacggcgcaggaggctgacggctccgttaagttcggccacggggacacgtctgcttacttgttcgaccccgatatttacacggatggacggatctccgttcagggaattgacggcgttctgtttccgcctcaggaggaagaagccgccgggcccgttacccgagcccagcccgctaaggtcgtcgtcaagcaaagaagaggaaaattgttggaaacagcatgttggatgcttggaagctttggacagaactctagattcatctcttgtcaatgaagagctcttatctggatgctagcaagactagttaagaacgaaaaccctgcacaggaaattccaaagatgtaaaaagtcaacggaatatgaaggccaggttacttgaaatgggttaatagcagcagctgctatggatttggttttcccacgtttttgtgatggtctttttttctttctccttctcgatttttcttcttgtggatttgggtcttggacttgagaacaaaagtttctcaagtctagtgaaaacaatatatagtgcaatttagattcagttaggaggttgtgttggtgggatgagaaggttttatgtaataagatggcagtgaaatctgtgcccgattcagtaagtaagagtatcttatgttatatgtttgcg

SEQ ID NO: 6472 - DNA, 899 bp, Glycine max
  Clone ID: 700566218_FLI
gtttctgtgaagagaattcagaaatgatacttgtctatgagtatgtcgaaaagggtccactgaagaagcatttatatggttcatcactacaaacacctctctcttggaagcagcgtcttgagatatgcattggtgcggctagaggccttcactatcttcacactggttttgctcaaggaatcatccaccgtgacatcaagtcaaccaacatattacttgatgaaaactatgttgccaaggttgctgactttggtctttcaaggtcagggccatgcatcaatgaaacacatgtgagtactaatgtgaaaggtagctttggctatcttgatcccgagtattaccggaggcagcagcttacggataagtcagatgtttattcatttggggttgtgctttttgaggttctttgtggaagacctgctgttgatccacaacttgcaagagaacaagtgaatttggcagaatggggacttgaatggctgcaaaagggcatggtggagcaaattgttgatcctcatcttgttggacagatccaacaaaactccttgaaaaaattttgtgagactgcagagaaatgtttggctgaatatggtgttgacaggcctgcaatgggtgatgtgttgtggaatttggaatatgcacttcagctccaagaaagtggtcaacaaagggagccacatgccaatagacatgctagtgaagaatttgtgagtgtgacaaatgcaattattcctggaaatccttctaccaacagaaggacagagagggatcattataactgttcttcagatgtaagtactagccaagtgttttcccagctaatgaacaatgaaggcagatagagataggtttatgccgcaaatataagcaagaaattaaagcagtacctaagctttcat

SEQ ID NO: 6473 - DNA, 884 bp, Glycine max
  Clone ID: 700566262_FLI
agagaatagctttaggtactgcaagagggttggtttacttgcatgagcaatgtgaccctaaaattattcaccgtgatgtcaaagcagccaacatattgctagatgaagactttgaagctgttgttggtgattttggtttagctaagcttttggatcatagagattcacatgtgaccactgctgtgcgtggcacggttggccacattgctccagagtacctatccacaggccaatcatcagaaaaaactgatgtgtttgggttcggaatcttgctgcttgaactgatcacaggccataaggctctagattttgggcgagcagcaaaccagaaaggtgtaatgcttgattgggttaagaagctccaccaggatggaagattgagtcaaatggtagacaaagatctaaagggcaactttgatctgattgaattagaagaaatggttcaggttgcactcttgtgtacacaattcaatccttcacaccgccccaagatgtcagaagtattaaagatgttggaaggggacggcttagctgagagatgggaggcctcacagaggattgaaacaccaaggtttcggtcttgtgagcctcaaagatattcagatttaatagaggaatcttcactcatagttgaagccatggagctttctggccctaggtgacaagcatcttggttttccactatagctccttgtttaaaaggtgtagtttacatgttaaaaatgacagtgtcattagtgtcaatagctatgtaatgctcgtattcatctgtaaaaagaaaaaaaaggaaagtcatgtataagtatcttctttgttggaatgttgatttagttgcttcagaaattttttgaatcaatgttagaaaattgtatgtagttgcactt

SEQ ID NO: 6474 - DNA, 563 bp, Glycine max
  Clone ID: 700566320_FLI
ctctctcagaactcaagcaaccaatttcaaatccaatcatggggagctcaaccttctgtgccttcttcctcctgtgtgcaatcttggccgtccacgtggcacaatcctcatcctccaccctcgacctggacgccttcttcctccctctcaagtccggctgtcgcggatccgtcgccgagtgcagcctcctcgccggcgacgacgccgagtttctgatggagtcggagagcaaccggcgcattctagcaggaaggagctacataagctacggtgcgctgaggaggaacactgtcccttgctcccgacgtggtgcttcctattacaattgccgccccggcgctcaggccaacccctacagccgcggatgcagtgctatcacccgatgcaggcgttgaatctattcttcttctcttttttttttatttcatttttttatttatatttttgtaattgatgaaaattgttatattattattgtcgtgctactaaatatatatacacaagtagagaagagaaagagaagtagagatgaataaaatctaattgccgccgtttgtatctgt

SEQ ID NO: 6475 - DNA, 1149 bp, Glycine max
  Clone ID: 700566412_FLI
agactattgaagcagaagcagcccacggcacagttacccgccattttagggttcatcagaagggaggcgaaaccagcacaaatagcatagcatccatctttgcctggacaagagggctagcccacagggcaaaactggatgacaatgctaaactcttggatttcactgaaaagctagaggcagcttgcattggagtagtagaggctgggaagatgaccaaggatttggcacttattcttcatgaattcctctgtgttcaaataatgctcccttctcgagccgaatcggctcgagcggctcgaggtgagcttgaactagaaaaccttgtaattcaacccggggaagctctagttgtgaacttcccttttgttttgcaccacatgccagatgagagtgtgagcacagagaaccatagggacaggctattgagactggtcaaaagcttgtcacccaaggttgtgacccttgttgagcaagaatccaacaccaacacttctccctttttccaaaggtttgttgagaccttgagttactacactgctatgtttgagtccatagatgtggccctccccagagatgataagcaaaggatcaatgcagaacaacactgcgtggctcgcgacatcgtcaacatggtagcttgtgagggggatgagaggctggaaaggcatgaactcttagggaagtggaggtcaagattttcaatggctggttttgcaccatgccctttgagttcctcagtcacagctgcagttaggaatatgttgaatgaattcaatgaaaattataggcttcaacatagagatggcgctctttatctaggatggaagagtagagctatgtgtacctcttctgcttggagatgttactgactcattgtcattgtcattggtatatgtatttttttttatccacaaatattatttgttagtaatatattagcttttattagcggggaatttgaacccatcacctctccccattcccatcattggtatatgcatattttcctccttgttaatttctttcctttttatgacattaagtcattatttagtggtatccgctgtttctcaataggattaattagagacttagctttcttccaacgtgtatcctttaccttttgtgggttcagcttagtctttt

SEQ ID NO: 6476 - DNA, 2172 bp, Glycine max
  Clone ID: 700566431_FLI
tcgtgtgtgtttgaagtggaagaaagagaacgcataacacagaacacagtgcagacagcaagtgatgacgtcgaaacagacatacagcgtgtgcttctgctggcggcggcggttcaagctggcgctggcggaggcgccgtcggaaatcaagaccctattcaatgagtactccgagaatgagctcatgacaccttcgcatcttaagagattcctggtcgatgtgcagaggcaagagaaggccactgaagaagacgcgcaagccatcatcgatagcttcaggcatttccatcgcagaggcgctggcctcaatctcgaaactttcttcaagtacctcttcagtgacgataatcctcctcttcttccttctcatggggtgcaccatgatatgactttacccttgtcacattatttcatatatactggccataattcctatttaactgggaatcagctgagcagcgactgcagtgacgtccccatcataaatgcactgaagaaaggtgtgcgggtgattgaattagacatatggcctaatgcatcaaaggatagtatagatgttcttcatggaaggacattgactactcctgtagagcttatcagatgtttgaggtctattaaggatcatgcctttgtggcatcagaatatccagttgtaataaccctagaagaccaccttacaccagatcttcaggctaaagtggctgagatggttacccaaacatttggagacatactatttactcctaactcagaaagtgtgaaggaattcccttctcctgaatcacttaagaagagaattattatatcaaccaaaccacctaaggagtaccttgaggcaaaagaaaaggaaaaaggggatgattcacagcacgaaaaggagaaaggggatgattcagagcatggaaaggcatcaggtgaagatgaagcttgggggaaggaagtcccaagcttgaaaggtggtactatagaggattacaaggacaacaacgtggatgaagatcttaatgatgaggaagaatttgatgaatcagacaagtcacatcataatgaagctccagaatatagacacctaattgccattcatgctgggaagcctaaaggtggattagtggaatgcctcaaagtggatcctgaaaaagtgagacgtctaagtttaagtgagcaacagcttgaaaaggctgctataaattatggacaacaaattgtcaggtttactcagcggaatatactgagggtgtatccaaaaggtactcgcattgactcatcaaattataacccattaattgggtggatgcatggagctcagatggttgcatttaatatgcaggggtatgggagatctctttggttgatgcatggaatgttcagagccaatggagggtgcggttatgttaaaaaaccaaattttctattggagactggtccagatgacgaggtcttcaatcctaaagctaagttacctgtgaagactactttgaaggtgactgtatatatgggggaaggatggtactatgatttcaagcatacacactttgatcaatattcacctccagacttctacacaagagtggggattgctggagtccctaatgatactataatgaagagaactaaggcaatagaggataattggttacctacatggaatgaggcatttgagttccctctcactgttccggagttggccttgcttcgcgtagaagttcacgagtatgacatgtctgagaaagatgactttggtggacaaacatgcctacctatctgggagcttagaagtggcattcgagcaattccactgcatagccaaaagggagataaatacaacactgtaaagcttctcatgcgctttgagtttattaataattgattctgtgcaatgtgcatccttctgctccccattattattattattattatgtacagtcattaagatgtgttagtagcaagagtttgtatgtagtagctggatgatatcgtgaattatgtgccccgttaaatgatgtaagaaacaaaatgtgttgtgtattttgttttcttgaggagacttgttggtcttgtaaggcttgtcaatatatactacttatatatatatatatatataaacataaggaaattgttcgtgttttgtatgagaatactttttaagtcatctgtactcaaatgttggttttg

SEQ ID NO: 6477 - DNA, 1064 bp, Glycine max
  Clone ID: 700566446_FLI
cgcttcttccttcatcacttatcttcatctgcttctgtcacatcatcaagcattctcacatcgcttctcagtttctcgttttcccaatcgcagctaaaaaatcctctgtacccttttacccttttctcaataagaagaaattaggaaacgcaacaatggctcaagcggttgaagaatggtataagcagatgcccgtcatcacgcgctcctatctcaccgctgctgttgtcaccactatcggatgctcccttgatataatttctccgtatcatttgtacttgaaccctatattggtggtgaagcaatatcagttttggcgcctggttactaatttcttgtactttcgtaaaatggacttggatttcctgtttcatatgttttttcttgctcgttactgcaagcttcttgaggagaactcgttcagggggaggactgctgatttcttttacatgctcttatttggtgccactgtattgactggaattgttcttcttgggggcatgataccttatttatcagagtcgttcgcaaaaataatattccttagcaactcattgacatttatgatggtttacgtgtggagcaaacaaaatcccttcattcacatgagcttcctgggtctctttactttcactgctgcctaccttccatgggttctcttggggttctctgtactcgttggtgctagtgcttgggtggatctactgggaatgattgctggccatgcatattattttcttgaagatgtttatcctcggatgacaggtcgtaggccactaaaaacaccatcattcatcaaagcactatttgcagatgacccagttgttgttgcacggcctgctaatgtcaggtttgctcccccacctgctgaagaacttcaccaagattgaatgaatgcccatcaaaatggttagaggattagcaaaggaacagcaaagcggttgaccgtgtaatatatagattttaaacatctttttttcgcgtgcatttgttaattaattaggatttaaggggcaactatgtcgaatgttcagggttttaactgaatgagatcctcttttctc

SEQ ID NO: 6478 - DNA, 420 bp, Glycine max
  Clone ID: 700566567_FLI
caagaacaaggtatatgatgttacctcatatgtggaagaacatccaggtggtgatgccattcttgcacatgcgggagatgattcaactgaaggattttttggacctcagcatgcaactcgagtctttgacatgattgaagacttctgcattggagatttggagcaatagctaagtcagttgctccaggattgtaatgttcaagagatgtatgatttgagaatttcaactttctagtgcttgttatctccataatttttcactccttgtctgatcatttatcttcattagatagtaattcaggtgtcactgatcgaattaatcccatgcatgatcttgatataattgtgcatgaaatcatttgtgctctcttgtggatgtgtgcagaaatagtaaaacaatgaggctcccctcttcatttc

SEQ ID NO: 6479 - DNA, 1546 bp, Glycine max
  Clone ID: 700566572_FLI
atcagattggaaagcccacaccaaaacctgtggcactagagaatacaaatgcgactgtggcaccctcttctccaggaaagacagcttcattactcatagagcattctgcgatgcattggctgaagagagtgctaggctcacatcagttacaacaacaaatctaaatttcaagagtgaagagggtggtaataatgtgatgaactcgcagcagcatggtttgggaggacatggactaattggagcacaaagtcttcaaaatgtttctggcattccacaatttggttcacatggttttcgtttggatttcaatggaatggaacaacaaattaggccaagtttgtcactatggttgaaccaggggaatcaccagatgaatagtaataataataacattaatagcaacaacaatagtgcttccgatgcgggacccaattacatgtcatcatcaggtttgcctgagattgtgcaaatggctcatgctaatgctttgatgggttgttcttcatcgatggtgtctaattttggaggagttcatgcgggttctaattcgagcagtgcaaatctttcactagggaaaagaggggaagcatgtggaagtactgtagtggacttggcttctatttataataactctgagggtcaaaacaagaattcaaagcctgcttcacccatgtcagcaactgcgcttcttcagaaagcagcgcaaatgggttccaccagaagcaccaacccttctattttcagtggtagttttggagtgattaactcaccttcctcacaaactaccagtctcaacaacaacaacaacggaggtgcagccatgatgctggcaagtaacacttctactgctgctgcaaatgcaaatgactttagctcattgaggcattcatcaaacagttttgaccagcttgtgatgcaaaccaatgcgcagttgcaaagtgagcctgtgaagttgaagcttcattcaaatggtatggagaacaatttgacaagggattttcttggtgtcagcggtggaggaggaggtggtggtggacctcagtttcttccccaagaacttggaaagtttgcttccatgggctcaccaatggggttgagccaattcacaagtaaccaatgaacgaactcgttttgtttctgagcttctaagataacctcaaacttcaaaggtttgatggaaggagaatgaatgagttggagtgtaccactatgagagattgctcgatcatgattatgttgtgagtgggggacccacacttgttgaacgaaaagagaatatcgaacaccacgagtcgtgcatgttctcccaatattgttattgttgtttttttcttctgtctttattaaaccatgttatcgttttttgcttctcgatcttttccttgagagaaatgaagggaggcataaaataatgaaaggaattcttagtgaatcgctgaaaactactagttgcgtactactgttgttgaccgtcaaattacggttactcgtgtaccatggatatatcgttaattacaaaataatataatataaaaatttagatatt

SEQ ID NO: 6480 - DNA, 1926 bp, Glycine max
  Clone ID: 700566676_FLI
ggaagtgggtgtggagagatcgaagagcaaggctttggagggtggttttgggttggatgtggtttcagaggcagagttaacggtgaagggttttgcggggttgaggaagaccaagctcgtgtgcactgttggtcctgcttgcagctctatggaggatcttgagaacttggctcttggaggcatgagtgttgccaggctcaacatgtgccatgggaccagggagtggcaccgtgatgtgattaggaagatcaagaagttgaatgaggagaaagggttctgtgtttctgtaatgattgacactgagggtagtcagattcatgttgttgatcatggagctccttcctccgttaaagttgaggaaggttcaaattgggtgtttactgctgaacattatgagggttctcgtccattcactgttcaaacgaactatagaggtttttctgaaggtaccgaagtgggtgatgaacttgtaattgatggtggaatggcatgctttgaagtcacagaaaagactggtaatgatttgcattgcaaatgcatagatgctggtcttttcctgcctggagccaaatttagtttttggagagatggaaagcttgtgagggggaataacaagctccccactctatcgacaaaggattgggctgacattgactttggtatagcagagggagttgatttttttgccttatcctttgtcaatcatgctgattctgttaaggatctaaagatgtacctctctacgaagtcaactaaatccattaaagttttggcaaagatagaaagcttagaatcccttcataaactggaggaaatagtgcaagcttctgatgggatcatggtggctcggggtgaccttggtgtcgaaataccacttgaacagattcctacagtccaagaggatataatttacgtatgcagacaattaaacaagccagtgattgtagcttctcagcttcttgagtcaatggtcgagtatccaacgccaacacgtgctgaggtagcagatgtttctgaagcagttcgacagtatgctgatgctttgatgttgtctggagagtcagctattggatcatatggacgaaaagctttggcagtcttggatatggctagcagtagaatggaatcatggagtcgggaggaaaatagacaaagtcttgttagccaccatcaacttggagaatcattgccagaatgcataactgagcaaatatgcaattgtgccgttgaaatggccaacaaccttggtgtggatgccatctttgtgtacacaaagtatggacacatggcatcgcttctatcgcgcaaccgcccgaatcctcccatctttgctttcaccaacgatgacagtacccgcatggctctgactttgcaatggggtgttgtgcccattctggttgatttgtccgatgatgctgaatctaacatctcaaagtctgtgcaacttatgaaatctagagggttgatcagccaaggagatgttgttctagtggtctcagatgttgctccgacacgtgcctctcctatggctttccagtctattcaggtgaagactattatctaaaacacaaggttgcaaaaatattgaagaacacgtgtctgtgtattttctaggcttgggataggatagtattgtattattgtttttttttcttcggtattgtattattggtttcttgtccttttttttatatattggtttcttgtccttattcaaaacaacaaaagtttataaattctaaattgtagagctctagcaagttttggaacctctttcaagagatgcttatgaattacactttgtgaattgcccatcgtaagtcactaatacagttgcactaatatatggcaattatatttgatttatcaactttgattgattgtgatgaaccaccagaatactacaatggcaaagcttttgagctt

SEQ ID NO: 6481 - DNA, 1287 bp, Glycine max
  Clone ID: 700566687_FLI
gggggatgctaagaaggaccatgcttgttgggagagaccagaggacatggatactccaagaagcgtgtttaaaatagatgcaaacacacctggttcagaagttgccgcagaaactgctgcagctcttgcagctgcttctctggtttttagaagaagtgaccccacatactccaaaattttagtcaggagagccatcagggttttccagtttgctgataagtacaggggatcctacagcaatgccttgaaaccttatgtgtgccccttctactgctcttactctggatatcaggatgagctgttgtggggtgctgcctggctgcacaaggctaccaagaatccaatgtacctaaactacatcaaagttaatggccagatccttggggctgcagagtttgacaacacctttgggtgggataacaagcatgctggagcaagaatacttctttccaaggaattcctggttcaaagggtacaatccctccatgactacaaggggcatgcggacaatttcgtctgttccctaatttctgggacctctttgtcttccacccaatataccccaggtggccttcttttcaagatgagtgatagcaacatgcagtatgtcacatccacctccttcctactgctaacatatgccaaatacttgacccaatcccatatgcttgttaactgtggcggaatcaccgtaaccccaaggagactccggacaatagctaagaaacaggtggattacttgcttggagacaacccattgaagatgtcatacatggtggggtatggtccacggtacccacgaaggatacaccataggggctcatctctaccgtcgattgctgtacacccgggaaagatccagtgttccgcagggttcagtgtgatgaattcgcaatcccccaacccaaacattctcgtgggggccattgttggtggaccagatcggcatgataggttcccagatcaacggtcagattatgagcaatcggagccagctacatacattaactcaccccttgtaggagcactggcctatcttgcacactcatttggtcaactctaggaaccccaattatttcgtgtatcccatgttttatttcactagtctcgctagttacttgtgtctcctagaattattatgcacacactcatttgagaccagtaccacaccactaaaccttataaacttatcacaagctgcttaacttaatactattatgtgtaactcttatgatttcggaaagtggtatatatgtatgtcacgtgatggtgtgtgttcaacttctc

SEQ ID NO: 6482 - DNA, 991 bp, Glycine max
  Clone ID: 700566749_FLI
gtttgttaggttttttgtcactccttcagattccgtggccattatcgctgcaaatgctgttgaagctataccatacttttctgctggtttaaagggtgttgccaggagcatgccaacctctgctgccctggatgttgttgccaaacatctgaatttgaaattttttgaggtccccacgggttggaagttctttggtaatttaatggatgctggattatgttcagtctgtggtgaagaaagttttgggactggttctgaccatattcgtgagaaagatggaatctgggcagttttggcctggctatctatacttgcatataaaaataaagataaacttgaagacaagcttgtcactgttgaagacatagttcgccagcattgggctacttatgggcgccattattatactcgatatgactatgaaaacgtggatgcaggtgcagcaaaggaactgatggcatatttggtcaagctgcagtcctcactttcagaagtcaatcagattgttaaggggataaggtcagatgtttcgaatgttgtccacggtgatgaatttgagtacaatgatcctgtggatggttccatctcatcacatcagggaatccgatatttgtttgaggatggatcacgattgattttccgcctatctggaactggatcagaaggtgcaacaattcgattatacattgagcaatatgagaaggatccatcaaagattgggagactttcaaacgaagcacttgctcctcttgtggaagttgcgttgaaactttcgaagatggaagaattcactggtcgatccgctccaacagtcattacatgaacacattcaagtggaaggtggttagatcctgaagcttctcccagtcatttcatttcttctttgtccagtatcttacggatagccgaacagtagatttggttgtttgcagcctttgctatgggaaattgagtggaatttgagtttctttatctaaattttgatatgctg

SEQ ID NO: 6483 - DNA, 1330 bp, Glycine max
  Clone ID: 700566764_FLI
gtgtttctttactatttggttctgagttcttagaacaatactactatatttcctttgatgaacaacaacaccatctaattaaaactcctactgagtaagtttctttgaagtgtgctatatatcatacattctatcaacacctatcgtttatctgtatctctcttttcctcgcatcatatcacctgtcatacatacactttttttcctttcccctctttataaggtgttgaatagagtttagtgtccgccaaagttttctcgtttctcttgtgttggcttaactaacaggcactatgttggagggacatcaacttttggggtttggcttctttgtaattggtttatggcacttgttcaaccacatcaagctccatgctcttagttccaagtcctacacatcaaccctatggtttcccaccacaatatccagatacttggagctccacttcatcatggcaagctgcacaatcttcattgccatggaactcttcatcgctcccattcatcaccaaccattagaccctgatggaaccattcccaccacccatctccacaactttgaacactcttccatggccatggctttcttggtctatgccatatttgccatagttcttgatagaattaaatgcaccaaagcacagcatgagctaactcacttgctaggagccatagcttttacacaacaatttcttctcatccaccttcactctagagatcacatgggtccagaaggccaataccacttcttgttgcaacttttgattattatttctttgagtacaaccctaatgggaattggcttccctaagagcttcttggtctgctttgtgcgttctgtcagcataatcttccaaggtgtgtggcttatggtcatggggttcttgctttggacaccagggtttcaagccaaaggttgctccatgcaccttgatgagtctgatgaatatgtggttagatgcagtgatcatgagtcccttcatcgtgccatctccttggtgaacattcagttcagcttcttgttgattctagtcaccattttcgccatgtctttctacttgattctggtcagaagatatggtggtgagaaagtggagtatgtttttctgacaaaggaggaacattaccgtgaagaagatggctttgtgaaacctaacaacgacgttgaatcccaatcccaagagaaaagcatgcaagagcagatttaaaataagcactttcttggtgtaaacggtgaattaatcagaaatattatcattcttatgattttcaaataattattgtaaaaaatcaacaaatttactgttatggttaatttattgagcctctg

SEQ ID NO: 6484 - DNA, 558 bp, Glycine max
  Clone ID: 700566884_FLI
caacatttgaggaggagttgaagacccttttgcctaaggaagtggaaggtgcaagagttgcatatgagaatgaccaatgtgctattcccaacaagatcaaggaatgcaggtcttaccccttgtacaagtttgtgagagaggagttggggacagcattgcttactggtgaaagggttgtctcaccgggtgaagagtgtgacaaagtttttactgctatgtgccaagggaagatcattgatccacttttggaatgccttggagagtggaatggtgctccacttccaatttgttagttttgttttcttctgttttcttcaagtggtttctttctgtatacgtgtttgtgttgatataagcatttggtttgtctataaaggctgtggcaaatcaatccacatacaacaacttccagttttccttgatatgccaatcaaggaacttgtaattcatattgtaatagaattccatttgtttgccgtagctttgagtgcaaatatcaatacatagccatggcatgtgaaggatgttttctcttgaataatacttatttgtttcttt

SEQ ID NO: 6485 - DNA, 1827 bp, Glycine max
  Clone ID: 700566893_FLI
ctcatcccattcttgcaaaacctaaattctgagcggctccatatccgtcacttatctcaccaaccataaaatatactcatggccgagcacggttttgatggacatgatgtaggatatctgcctgaggaccctaattttcctcagaatcattctgatgaacatgatgtagggactgtgattgatagctccggatttcctcacctgctacctgatgaagatgatgcaggcaatttgatggaggacgccaattttcctgaaaatgattttgttgggcatgaacatgatgttggaggtttggctggggacgcggattctccaccggaggagcatgttgaggaagttcatggtgctggagatgtgcctgaggattttgattctctgccgaaacagggatccgagattgattcgaagggaaatgaaataaaaaagtggccgggatggcctggagagaatgtcttcaggatgttggttccagtgcaaaaggttggcagtattattggccgaaagggcgagtttataaagaaaatcacagaagagactaaggcgcgaattaaaattcttgacggtccacctggaatctcagaaagagcagtaatggtttctgcaaaagaagagccagattgtcccataccacctgctgttgatggtttgttaagggttcataagcaagttatcaatgttgatcgtgaccttgcagatagtgcattggctgctgggcgatcagttgttaccaggcttctagtggcggatactcaagcaggaagcttgattgggaagcagggatcaaccataaaatccattcaagatggctctggttgcactatacgtgttcttggatcagaaaacctgccaatatttgctttgcgagatgatagtattgttgaaatacaaggggaatctgctggtgttcacaaggcagttgaacttattgcagttcatttacgcaagttcttggttgaccgcagcatagtaggagtttttgaaacgcagatgcaaatgtcagatgttagagttaaccagaatttgccaccgcatcaaaattggggtcctcctcctcaagggtttcctgctcctgctggtggtggtggtggaggaggacctgcttttgcacctaatcatcaatatatgccaccttcacatcactatgatagttattatccacctactgagttgcctcccatggacaaacaccttcatcaaggtccaccacctgcctatgcaagggatgcttctatgggaattcattcatcaagtgcacaaccacaacaatctgttgtaactaaggtcacacagcacatgcagattcctcttacatatgcagatgctgttataggagcatcgggcacaaatatcagctatatacgtcgtgctagtggagcaagtattacaattcaggaaacaaggggtgtgccaggggagatgactgttgagataagtgggacttcttctcaaatacaggcagcccagcagctggttcagaatttcatggctgaagctgcaagtgcgacacaggatcctatggggggatcagtcagccaaggttacagtgcctatccaacaactgctccagtttatgctcctccacccactagcgctggtggtcatacaggccatgcgccttctgcagattatggccccgtatatggtaccaattatgggtattaagatgcttcatttaattttggtcaaggagctttgtgtaaacaatatactgtaaactttacgttcttatagtatttcttttttcttttttatttttggctagtaggttatcatactgttggtcatcctgttttgacttcatttatcaaacgattcgatttttct

SEQ ID NO: 6486 - DNA, 874 bp, Glycine max
  Clone ID: 700566935_FLI
gtccggtacctcaatggcatgccctcatgtcagtggaattgctgctctcattcgctcggttcacccgagatggagccctgcagccatcaaatctgcaatcatgacaacggccgaggtgactgaccacaccggaaggccaatactcgatgaagaccaaccagcgggagttttcgacatgggagccggacatgtgaatccacaaagagcattgaaccctggattggtgtatgacattaggccagatgactacatcacccatctttgcagccttggatacacaaagtcagaaatattcagcatcacacatagaaatgtgagttgcaatgcaatcatgaagatgaatagaggcttcagccttaactatccctcattctcagtaatttttaagggtggggtgaggagaaagatgttcagcaggagactaacaaatgtgggaagtgctaactccatctactcaatggaggttaaggcacctgaaggagtaaaagtgatagtgaaaccaaagaggttggtatttaagcaagtgaatcaaagcttgagttatagggtgtggtttatatcaagaaaaagggttaaaagaggtgatgatttggtgaactatgcagaagggagtttgacatgggtgcactcacaaaatggttcctacagggttagaagcccggtagcagtgacttggaagtcaaagtagtgtggagaagggtagtagataattaagtttgtcttggggcgtttttttattatgattattggttcaatagctttatttatgattgcagaattcatactgaacgagttttagtagagaaaactcgattaggaatcttatgagtaagcccatttataaatgctaaataaattggttgtgccatggttt

SEQ ID NO: 6487 - DNA, 1261 bp, Glycine max
  Clone ID: 700566983_FLI
tttgaatcttgttctctctaatctctctcactacaatggagactccatcatccacagcaagaagaatcacaagatcccaaatcgcctccaacaacaacatccccgtttcaagaaaaaagaacgaggactgctcagaaaagagcgtttcaaaaacgcggcagagaagcagcgtgcaacagcaggaacggtgtgcgctggtcgacatatcgaacgattcaccgatcgcggggctggcgaacgggaaggacatcattgagacgccgttgtcgtcgatggcgaagaagaagagggtgaagaagacgatgaagactccggggtcgggagaggctctgctgaggggccaggtgaagaccctcttgcagagggtggaggaagaggctgtgatttcgaagctatcgatggaaattgttgcaccctttctgaaacttgcgaattcttctccaatgtcgcttcttgcgcccactcccgcaaacacaccacaagtccccaatctttctgaagtggctttggtgtctccaccttctagtgtggttgaagaacaattgatctctcgggtggtgaatgaaatatttgaagggaagaagaacgagaatgctgaatgtgagaagagtgtgataaccaggtccttgctgttggacttctcggacaaatccgaggtttcagaatgctcttctgaggtgacatatcaggaagtgacacaaggaagtgttggtagccgtgggtccaccgaggatgatggtgcttccatttggtccattcaggtgaatgcgagcacgcatgacgaagatgaggacgatgaggaaatgggtgaagaggaagaagaagaagaagaagattattgcgaggatgctgaagagtgttatgattatgttggagggttgtcacttgaagagctatgtgctgggatgaataacattagtgtgaatgagaacaagggttgtgggaagcacacgaggtttgtgtacgatagtgaggatgagattgtggagaaagtgatagaatgttgtgctgagtctgatgtgatgcgtttgaagggtttgccaacacccaaaggaaagcaccttcgctttcctcaggaggaagaaaattcctctgacttgtgatttttgataattggtgctgctgcggtttggtttggtattgtctttcttgacaccactgttttggttaatggtgtgattggggaagctaaattgctgctccaataaacacaaccattgttatttttctttatcaataataaataaaccattgcttgttt

SEQ ID NO: 6488 - DNA, 263 bp, Glycine max
  Clone ID: 700567010_FLI
tctagttgtgcttttccattttttatttttatttttcaaattctattcatcagtgtgtgattctgattaatttgtacgtgcatggagggttaacttccgatcgttattccttcctttttggtggtattttaattgtatggttaattggagtgttgcgataaataaagttcccgatgctggcttatgtaaatcgcaagggaaccaacaagatgatgaactattgtgttatttatttaatttgattgagaaattattattgtatt

SEQ ID NO: 6489 - DNA, 985 bp, Glycine max
  Clone ID: 700567131_FLI
ggaaagtgctacctctatttaggaacatacaccacagtccagacaacttcaaggagccagaaaaatttgatccctcaagatttgaggtaattattgtgctgaaaccatgttttacctaccaacctcagttttgttgctattcatgtgtgataccaagtccaagaccttgacagattctgtttaattatttgccaggctgctccaaagcccaacacttttatgccatttggcagtgggatccacatgtgtccagggaatgaattagccaagttggagattttggtcctcctacatcatctgaccacaaagtacaggttggtaaaccttaatcatcagtaacaacagtgtctctcattgcaacaacccttttttagccataggctttgaatagagacattttccaaattagggggtttagaatgttgtttctaacgtagtgttgcttcttttcttttttctttttttctggtgcaggtggtctgttgtgggtgcaaagaatgggattcaatatggcccttttgctcttccccaaaacggcttacccatcacattatttcccaagagcaagtagataatcaatcacacatccaatacaaccctggcttcatagtagctttctaaatatggaaagaattgcttcatagctctcaaaattggtttccacagataatgataaagacacagaccatattgcaattggataaccaaacaaagggagatcaacttttcccttcttttttgtccaagagaaacctaaaggggtaatcttgacaaatagcatacaaacaggaatgtcaagtgtatatagaggaggtttcacagcctgagcagatagtattaagttcttttcattttcttattttttttatctttcaaatatgaggaaaagtcctcataagattgtattgatgcattcaactaattagttctgtatccataagaatgccgcaaggccaaaataaagtgaaacattggttctgggatg

SEQ ID NO: 6490 - DNA, 812 bp, Glycine max
  Clone ID: 700567372_FLI
atccaggcaaaacaatgaaagtacaattcagcaagcctccctttcaacaaccatggggtgttggtacatggttaaaggaaattaaagacactactaaagaaggatatagttttgaagagctatgcatcaagaaagaagccattgagggagaagagaagttttgtgcaaaatccttgggaacagtaattggttttgccatttcaaagctgggaaagaacattcaagtactttcaagttcctttgtcaataagcaagaccaatacactgtggaaggagtgcagaatcttggagacaaagcagtgatgtgtcataggctaaatttcagaactgcagtattttactgccatgaagtccgtgaaacaacagctttcatggttccattggtggctggtgatggaaccaaaactcaggcacttgctatttgccactcaaatacttctggaatgaatcatcaaatgcttcatcaacttatgggagttgatcctggaactaaccctgtttgccatttccttggaagcaaggccattttatgggtacccaatttatctgtggacactgcctatcagaccaacattgttgcttaattagtccatgcatcttgagcaccatgagaatgagattgtgtataaaataaattatcatgtgctgtgtgttgtgcaagtactaccttctctagctagattgctagagctagaatttcaacctacctatgtgtactgataagatctgcttccctacttaaagagagcatcatcctgtgatcagtgtgcttcgtattctctctctctatatatatatggtaaaaagtggtt

SEQ ID NO: 6491 - DNA, 1707 bp, Glycine max
  Clone ID: 700567374_FLI
aattaagcaacattttactgggtatataagtggagagtgtaactgaaattatgtggaggtgcatcaatggaagaattgccagaagatttttatccacttcttctgccagtgcccgtggttggtgggaccatgtaaggccagcaccgaaggaccccattgttcgtgtgaacgaggcatttctagctgacccttttccccataagatcaatcttggaataggtacttataagggtgatgatggcaaagctttcattcctcaaagcgttcgtgaggcagaaacaaagattcagagatgtaaattggaggagtcaaacgcttccgcagtcagatcaaaatttgttcaggagtgtgtgagattagcatatgggaatgattcaaatgttgtaagagaaggattgtttgcaggagttccaactctgtctggaaccggtgcatgtcggctttttgctgaatttcaacggcatttctatcccgattctcaaatgtatctaccagatcctacttggtcaaatcaccacaatatatggagacaggctgaaattccagtcaaaaccttccactactaccatccagatacaaagggtttagattttgctgcactcctcaatgatgtcaagaatgcaccagattgttctttcttcttgcttcatccgtgtgcccacaacccaactggtgttgaccccactgaggagcaatggagagaaatatcataccagttccaggtaaaaaatcatttcccattctttgacatggcttatcaaggattttcaagtggggatcttgacaaggatgcaatagcacttcgaattttccttgaagatgggcatttgattggttgtgctcaatcttttgcaaagaacatgggattatcagaacataaagctggttgtcttagtgttttgtgccagagtataaagcaagtagctgcactaaaaagccaactgcagctgatgtcccatgcaatgtatagcagcattccttttcagggtatttcactagttactatgatattaagcgagccagatacagaagcactttggagaaaagagataaaggtcatggctaaacggattcaaactatgcgaactaccttgcggcattgtcttgagaacttgcattcatctttcaattgggagcacataactgatcaggttggcatgttctgtttttctggattaacccctgatcaggttcaacagatggagaagctgttccatatatacatgacccctgatggaagaatgagcatgtcaggtgtgacctctagcaatgtggattacttggcaaatgcaatacatcaggtgaccagaatcgatgaggaagccctaagatcatgttacgtatagcattattagtccttttctaccttattctgatcatagggtacataaccatttttttctcttttgtaattatctatgtacctgatatacatcataccaatttagtgaaaatattgaagtcaatatttttggaccatcgtggatattactctaaaaaaattatttgtaaacacagccacatattaagtgatgaatgaaataacagatttacgtatgcctcttgaaaaaatagttatgcatcttgacttgcaacagctatgaataagcttttcttgtccaagttggtctagttttctttctttgtctccaataaaatcttcagttggtgaggccaagataatatataaaacttaagttgtaagtg

SEQ ID NO: 6492 - DNA, 622 bp, Glycine max
  Clone ID: 700567431_FLI
cttcggcgctttctacgccgccaaacacgccgctgaaataatgattcctagaaagatagggagcattgtgttcacgtctagcgctgtttcggtgactcatccgggttcgccgcacccatacacggcgtcgaagtacgcagtggtgggtctgatgaagaacttgtgcgtggaactggggaagcatggaatcagagttaactgcatttcaccctatgctgtggccactcctctgctgacacgtggaatgggaatggagaaggagatggtagaggaactgtttgcggaggcagggaacttgaagggtgtggttctcaaggaagaggatttggcagaagcagctttgtttcttgctagtgatgagtcaaagtacgtgagtggggtcaacctagttgtggacggaggttacagtgttaacaatactgcttcggctgaagtagctttaggaaagttttctgctgattaagcccaaattgtaagctttcatatttgagttccttcgaccaaaagccaaaaggtgtgttttctagtttgaattaaaataaaataaaaaagtgaaagtgtgtgtaagacaataatacaatatttctgttatttagcaaaaagtgcagttacttttagctgg

SEQ ID NO: 6493 - DNA, 1905 bp, Glycine max
  Clone ID: 700567462_FLI
caatttggggggaacctcaacccaatcccagaaaccaaaatcggccttgcaattcgtcgaaaccgaggaagagaaatcgtgggcacctttcaaaatccgagatttccccgacaaaatgtcccaactgaagcaaatgtcgcacatagacagtgcccctccgaccccagggaagttcaagatggataaagcttcgtacttcaaccgcgtgcggtggcacacctcgctggcgaagctcgcagtgtggtccttcgtgttcctgggcgcgatcttgatctttttcctccgctcgccggcatcgtctccggtcccggcggacctctcccggcggtccctgcgaacctacaactggggcggacccgtttgggagaaacgggtccgggcatccgcccaggtccggtcccgaaacgggttcgccgtgttggtcaccggcgccgccggttttgtaggcacccacgtctccgcggcgcttaagcgccgcggtgacggggtgcttggacttgacaatttcaatgactattatgacccttcacttaagcgtgcacgccaggggctcctggagcgcaatggcgtgtacatagttgagggtgatatcaatgatgaggcactcttgaggaaacttttcgaggttgtgcctttcactcatgtgatgcacttggctgctcaggctggtgtgaggtatgccatggagaatcctggctcttatgttcatagcaacattgctggttttgtgaatttgcttgaggtttgtaagagtgtgaatccacaacctgctattgtgtgggcctctagtagctcagtttatggactcaacactaaggttccattctctgagagggataggactgatcagcctgctagtttgtatgctgcaaccaagaaggctggtgaggagattgctcacacttataaccatatctatggtctttcattgactggattgaggttcttcactgtttatggtccttggggtaggcctgatatggcttacttcttcttcactagggatcttttgaaggggaagcccatccctattttcgaggccgcgaatcatggaaccgttgctagggattttacttacattgatgatattgtgaggggttgtttgggggctttggatactgcggagaagagcacggggagtggggggaagaagagggggccagcacagttgagggtgttcaatttggggaacacttcgccggttcccgttagtgatctcgtgagcattttggagaggcttctgaaggttaaggcgaagaggaacataatgaaattgccgcggaatggggatgtgcagtttactcatgccaacattagctatgctcagagtgagcttgggtacaagccgaccacggatctgcagagtggtttgaagaaattcgtgcggtggtacctgaattactattctggcgggaagaaagctgttgagtgacctgattcttttaaccatgtgatattgtcttttgaattcttgttcattatgattcttgtgattgttccttagcgtttctctgttcgttgtacgatcaccgcgtttcatgtgtcaaggatgatgccatataaggaggaggaagtaggaaccttgcttcctgcactgaggaagttttgttgttgggggagattaatgcctaggcaccgatttgctgtgtccaagaaaaccagatacatcatattctcttttattctttttctttttcctgaatgtatttgttgtagttttagaaatgtagcattcatgactgatagagcatatgctgattggtggcagtgtataataattgttaagaaaaggtagtaaaatcacacaatagtttgatttccggtttttggactgaatgagtcaataagacatgtattttatttgcttatgtaatttttcacatataaatggactcctgtattaat

SEQ ID NO: 6494 - DNA, 1273 bp, Glycine max
  Clone ID: 700567610_FLI
ctcaaaccaccattgagattgattccttgtatgagggtattgacttctacacaaccatcacccgtgcccgtttcgaagagcttaacatggacctattcaggaagtgcatggagcccgtggagaagtgtttgcgggatgctaagatggacaagagcaccgtccatgatgttgttcttgtcggtggttctactaggattcccaaggttcaacagttgttgcaggacttcttcaacggaaaggagctttgcaagagcattaacccagatgaagctgttgcctatggtgcagcagtgcaggctgccattctcagtggcgagggtaatgagaaagtgcaggatcttctgttgttggatgttactcctctctcccttgggttggagaccgcgggaggagtcatgactgtgttgattcccagaaacacaaccattcccaccaagaaggagcaggtattttcgacctattccgacaaccagcctggtgtgttgattcaggtctatgaaggtgaacgtacgaggactcgtgataacaatttgcttggcaaatttgagttatctggaattcctcctgctccgagaggtgttcctcagatcaccgtttgctttgacattgacgccaacggtatattgaacgtgtctgcggaggacaaaaccactggacagaagaacaagattacaattaccaacgacaaaggaaggctttctaaggaggagattgagaagatggtgcaggaagctgagaagtacaaggctgaggatgaggagcataagaagaaagtggaggccaaaaatacattggagaattacgcctataacatgaggaacacaattaaagatgataagattgcttccaagctgtctgctgatgataagaagaaaattgaggatgcaattgagcaggctatccaatggctcgatggaaaccaacttgctgaagctgacgaattcgaggacaagatgaaggagttggagagcatttgtaaccccatcatagcaaagatgtaccaaggagctggtggtgatgcgggtggagccatggatgaggatggtcctgctgctggcagtggaagcggtgctggacccaaaattgaggaagtcgattaagcagaccaattgtcatgggttgttcttgattttgcgaagacccttttgaagtttagataataacctgtcttgtcattatgttttggatttggattttacttttctcgtttttttaatgtacttttccccgtttcaacttaacaatgatataagttgcatatggtctattgatt

SEQ ID NO: 6495 - DNA, 1855 bp, Glycine max
  Clone ID: 700567611_FLI
tgttcacccttcttccctttctcacttaccactctcccccttctttccaaaacactccctttccctttctattcacttcccctacccttccgtgatgatgtagatagagaataaaaagagaccagtgtgcagtgagaaagagattgctcacttcttgtgtgggtttgttttgttctttgtgttggaatttgttcatgggtgaagaaggagaagaggtgtcaagagagaaggaacaatacatgggagtttatggaaatgagtggttgtattgtggttgctctgcaaattggcgccgtttaagacaccagaattcctgttccatgccttttttcaagtgaaaaaaaaaaacaattacttgttatctctcagcttttcttcttgagatcttaatatacattgacttaaaaaaaaaaaaaaaaagggatcaaatttaagttccttgatcttaataaagttccgtgcttttgtttgtactcatgaagagacttggcagttctgattctctgggtgctctcatgacgatttgtccaccaacagacgaacacagtccgaggaacaaccacgcgtatgggagggagtttcagtccatgctggaaggactcgacgaagaagggtgcgtggaagaaccagggcaccactctgagaagaaacgacgactaagcgtggatcaggtgaaggctttggagaagaacttcgaagtagagaacaaactcgaacctgaccgaaagttgaagctggcacaagaacttggcttgcaaccaagacaagttgcggtttggttccaaaaccgtcgtgccagatggaagacaaagcaattggaaagagattacggcgtcctcaaagccaattatgaatcacttaaacttaactacgacaccctccaacaagaccacgaagccttactcaaagagataaaggaattgaaatcgaggctggtgcaagaagagaacaacaacaacactgaaagcgatgtttcggtgaaggaagagatgctgaccaccacgctctgtgaaaccgccattcctggatcggacacgaaggagttgagttacgagtgttttaacaagagtgatgaggtgggagggggttcttctgtgttccatgtggatttcaaagatggctcttctgatagtgactcaagcgcgatcttgaacgaggagaacaacaaccacagccccaacaataacgcggcgatttcgtcgtgtggggttctgcaaagtcacgggcttttgttgtcgccttcttcgtcgtcgatgaacaactgtttccagttccagaaacagtaccagacgacgacgacgcagtacgtaaagatggaggagcacaattttcttagcgccgacgaggcctgcaatttcttctcggatgaacaagcaccaactctgcagtggtactgttcagaggaatggagttaagaggaagaagcttaatgaggtttaattaattgagagcgagggagggcattttgcagggtgtatagtaatgggattgagagagaaactttgtaaaaatgaaatgctgaagattgaagaagagagggaatgaattgaagagcttgagagagagagaggggagggggttgaagcacacgcatggcttggggtcagagatgagaggttgatgacgataaaaaggggtaataataatactaataatcatcaatctctcggccgtgcgggggtaatttatgaataataatgatgattaggtcctaatgaaatctatctatctagtgagtaatgctgtaaaaatcagtccacaattcacctctgcttccactccttcctctcccaccacttttatcggcttttgtaattttatccagactttaactagattaatttgtcctttttta

SEQ ID NO: 6496 - DNA, 943 bp, Glycine max
  Clone ID: 700567612_FLI
aaagaaagctcctaatgtttccttaggagaaactgttagagcaaggctcaagcaattttctgtaatgaacaagcttaagaaaagagctttaagggtgattgctgagcatttgacagtagaagaagctgctgggctaaaagagggattccagcttatggatacaaacaacagaggcaagattaacattgatgaattacgagtagggttgcataaacttggtcatcaagttcccgaatcagatgtccaagctcttatggaagctggtgatgtagatggggatgggcacctagattatggagagtttgtagccatttctgttcatctaagaaagatgggaaatgatgagcatcttcgcaaagccttccaattttttgatcagaacaaaagtgagtatattgagattgaggagctgcgtagcgccttatctgatgatcttgacacaaacagtgaagaagttatcagtgcaattatgcatgatgtggacacagacaaggatggaaggataagttacgacgaatttgctacaatgatgaaggctggcacagattggagaaaagcatcaaggcagtattcgcgagagaggtttgccagtctgagcctaacgttgatgagggacgggtcattgcatttaaacaatgaaaaacaataacggtagatgactactttagaaatgccaatttttactttggaaaggaaaattcgataaagaagtctattttttaattttaactctcttcattgtaattcttttctctaataccccatttttgggtgaaaaaagataggatattggccccagcagtgttgtctgtgatttgaagtatgtctttttttggtttgttgaggttgtggtaggagataggagagagggttggagggactggacattgaacaagttttcatttgtggctgtaaatatgttaaattatcaagctttatgtgt

SEQ ID NO: 6497 - DNA, 1073 bp, Glycine max
  Clone ID: 700567730_FLI
gtttgatcctactgatcaggagattcttgaacatttggaagcgaaggtgcgctctgatattcataagcttcatcctttaattgatgagttcatccctactcttgaaggcgagaatggaatctgctgtacccatccagagaagttgccaggagttagcaaagatgggttgatccgacatttctttcacaggccttccaaagcatacacgaccggaacaaggaaaaggagaaaggtgcacacagatgcagatggcagtgagacacggtggcacaaaacaggtaaaactaggccagtcttcataagtggcaagttgaaagggtacaagaaaattcttgtgctttacactaactacagaaaacaaaggaagcccgagaaaacaaactgggtcatgcaccagtaccaccttggcaacaatgaagaggagaaggaaggggagttggtggtctccaaagttttctatcaaacacagcctagacaatgtggctcactcatgaaagactcatatcctgcaaaactaaagggtgaaggcgtgcatgaggtaactaatcataagaacactggctatgttgagtactacaataattcttttgtatcctttgatcaaggggaccagcataggtccagcactgcacaattagtctcccatttcccagtccatggtggtgctactttcattccttgaaagtagcggtggagggtatgaggaaaggtgatatatgtcatgcatggaattggaacattgcaattgtattctgcaatgaagaaataagttaataaccaactagaaatagttaggagggaaaaaggtggcacagaataaggagaaactgcttcatctgaaagctagtggtcagatacttcaactgaggaaaaaaaaggagggggtgaggggggcaacgtaaagaaaaaaacaaaatgatttggcttgtaactttgttttctttcttttattcttttgaaatttttgaatggtagctgttatcatgctttgtacagtgacacgaaaacatatctcaattgtccttacttgggtaaatactaaccatcaatctgtgccaacatgactttcatct

SEQ ID NO: 6498 - DNA, 865 bp, Glycine max
  Clone ID: 700567764_FLI
ggactaatctatcgcatgaagcaacccaagatagtcttgcttatatttgtctctggaaaaattgttctgacaggagccaaggttagagatgagacttacacagcttttgagaacatatatccagtgcttactgagttcaggaaaaaccaacaatggtatggaagtggctctttttcaattgctataggatatacatgttgtaatccctgggctaggaatataatgaatcaatatcattgtctctattatttttttttctttgttcagctatcagaatataattgtgtcagatgtagggctgaggttttcctaattgaaatgacgaaattctttacgcagtttcttttctgggtcatatatttgtataagttctgaaatctgaataatgtaaaatgcgatttaactacaaaagtaaactgaaactttagtttggaggcactcagtgtgactagtagtgtgtcatgaagtttatcttgttagttctgatgtctttggaatatttgctattaatggcacagattactactgtcaagagagcaggagcaaggcttgattgaactgtaaatatgaagaccagagatagaaatatctgtaatctggattgagttttaataagacacctgtgtttgttctgtctttttctctcttttaagaaaagggatcctgctttagtaaagtggaagaaaaaaaaaaaccgtgtattgaatttgactgtagaaaaagagatttataagaggcagaatgaaaagaaaaagtggaagcctgtgcaaatcatgaataactttcactgaagtggaaactatttgtggttcatttcaactatgagtaactttgttttttggctaatcaaacactacatttgata

SEQ ID NO: 6499 - DNA, 1132 bp, Glycine max
  Clone ID: 700567825_FLI
gttttgaagagctaaacatggatttattcaggaagtgcatggagcccgtggagaagtgtttgcgggatgccaagatggataagagtaccgtccatgatgttgttcttgttggtggttctactaggattcccaaggttcaacagttgttgcttatggtgctgcagtgcaggctgcgattctcagtggcgagggtaatgagaaagtgcaggatcttcttttgttggatgttactcctctatccactggtttggagactgcaggaggagtcatgactgtgttgattcccagaaacacaaccattcccaccaagaaggagcaggtgttctcaacctactctgacaaccagcccggtgtgttgattcaggtctatgaaggtgaacgaacgaggactcgtgacaacaatttgcttggcaaatttgagttatctggaattcctcctgctcccagaggtgttcctcagatcactgtttgcttcgacattgatgccaacggtatattgaacgtgtctgcggaggacaaaaccactggacagaagaacaagattacaattaccaacgacaagggcaggctttctaaggaggagattgagaagatggtgcaggaagctgagaaatacaagtctgaggacgaggagcataagaagaaagtggaggccaaaaatgcattggaaaattatgcctataacatgaggaacacaatcaaggatgacaagattgcttccaaactgtcttctgatgataagaagaaaattgaagatgcgattgagcaggctatccaatggctagatggaaaccaacttgctgaggctgacgaatttgaggataagatgaaggagttggagagcatttgtaatcccatcatagcaaagatgtaccagggtgctggtggtgatgcgggtggagccatggatgaggatggtcctgcagctggcagtggaagcggtgctggacccaaaattgaggaagtcgattaagcagaagattctcatgggttgttcttgattttgtcaaagacccttttgaagtttagataacagcgtgtcattatgtttttattgcgattttatttttctcttttttttttaatgtacttttccccgtttctacttgaacaatgatataagtttttgctc

SEQ ID NO: 6500 - DNA, 431 bp, Glycine max
  Clone ID: 700567840_FLI
gctcttctaacttctgggttcagccttgatgatcccaacactttcggtaacaggattcacaggatgctgaagcttggactgagcattgatgaagatgctggtgaagcagatgctgacatgcctcctctcgaggacgccgatgctgatgccgatgctgagggtagcaagatggaagaagttgattaaatctaacttaattattgatttgcctttgtgtttttagaaacaatgattggggaacagtcttttactatgtttatgttttgaattttcgaaattttggaatgttggctagttaggtgccgtttcctggattagtagtgtatttagtttctatatggaaaatttgtgtcagctttctggccaatgaatttgtgcttttcttcgtattatcgtgaatatggtgattgcagaagtttcagttcggaatg

SEQ ID NO: 6501 - DNA, 548 bp, Glycine max
  Clone ID: 700567892_FLI
gccagttatgagaacatctccaaaaagtggatacctgagctgagacattatgctccaaatgtgcctatagtgctggtgggaacaaaactagatttgcgagatgacaagcaatttctgattgatcatccgggatccgcacgaataacaactgctcagggtgaagaactgaagaaaatgattggtgcagtcacttatattgagtgcagctccaaaacacagcagaatgtgaagacagtttttgatgctgcaataaaggttgcattgaggccaccaaagccaaagaagaaaccacgcaagaaaaagacctgtcctttcctctgatatttcattattcagttatctttcaccccaaatcatttatagagcagaagtcaagtccaatgctttttagtttttgtgatctacatatataaagagcctgtgggtttttggataatatctgtgaagaactttagattcctcttgaattgtaaacgatggcaaatgagcttaagtgttacattgttcaattaattattttattttgcagtgtctagctgcggctctgt

SEQ ID NO: 6502 - DNA, 742 bp, Glycine max
  Clone ID: 700567896_FLI
gttgtaacacaagagtatattcaagagatggaaaagctgtcctttaagattttagagcttatagctttgagcttaggccttgaagcaaagaggtttgaagaatttttcatcaaagaccaaactagctttattcgactcaaccactatcctccatgcccttatcctgaccttgctcttggcgtcggtcgacacaaggaccctggtgccttaaccattcttgcacaggatgaggttggaggacttgaagtgagacgtaaagcagatcaagagtggataagagtgaaacccaccccagatgcttatatcatcaacattggtgacactgttcaggtttggagcaatgatgcatatgagagtgtggatcacagagtggtggtcaactctgagaaggaaaggttttccattcctttcttcttcttccctgcacacgacaccgaagttaagcctttggaggagctgataaatgagcaaaacccttcaaaatataggccatacaagtggggcaagtttcttgtccacagagggaacagcaattttaagaagcaaaatgaggagaacattcaaatttatcattacaagatagcttaaagggtaaattgtgtatgatattatcatgatatgaggcagcgttgatccaagacaacgttactgatatgaataagtccgatcaacttcactgctaaatttcctagtgtgccttatgtattgaacaatcactgaataaaagaactaaattattacc

SEQ ID NO: 6503 - DNA, 1464 bp, Glycine max
  Clone ID: 700568369_FLI
gatgctgccccagcaaaaaccgaagaggagcaagctgaaacaaaggaggaagaggaaaagaaggaggaagtgaaagaaacgaatgaagaagctgcggtggatgatgatggagcaaaaactgtggaggccattgaagagaccgttgttgctgtctcttctaccgttcagcctcaagctgaagagaaagcttcatcgccacttccacctgaagaggtttccatttgggggataccgctgcttgcagatgagaggagcgatgtgattctgctgaagtttctgcgcgcgagggagttcagggtgaaggaggcattcaccatgctgaagaacacgatccagtggaggaaggagtttgggatggaggagttgatggaggagaagctcggggatgagttggagaaggtggtgttcatgcatggctttgacaaggagggtcaccctgtgtgttacaacatctatggggagttccagaacaaggagttgtacaagaagactttttctgatgaggagaagagggagaagttcctgaggtggagaattcagttcctggagaagagtataaggaagctggatttcaaccctggtggcatatgcaccattgttcatgttaatgacctcaagaattcccctggacttgccaagtgggaacttagacaagccaccaaacatgccctacaattgcttcaagacaattaccctgaatttgttgccaaacaggtgtttattaatgtgccatggtggtacctggcagtgaataggatgataagcccttttcttactcagaggaccaaaagcaagtttgtctttgctgggccttccaaatcaacggaaacccttttgagatacatagctccggagcagcttcccgtgaagtacggtggactaagcaaagatggggagttcggaaatatcgatgctgtcacagaaatcacagtgaggccggcagcaaaacattcggtggaattttcagttactgagaactgcttactctcttgggagcttagagtaataggttgggaagtaacttatggggcagaatttgtgccaagctcagaaggaagctacacagtaattgtccagaaggctagaaaggttgcttcatcagaagaaccagtgctttgcaacagttttaaggttggtgaacctgggaaagttgttctcaccattgacaacacaagctctaagaagaagaagctcttgtatcgcttgaagaccaagccttccccttctgactaaaatcatcattgttatgtgtatgtgcaagtgggaaggggaagaacagtgccagaattgcttgcttacattcctgcatcaacttctaccaagacaccagtgcttcaaagattaactttccagctgttcatatatgaatataaagtttttgtttttaattttttggcctttttgttttgatgattattatgtgttcaaccatattatataattatatatacctctttctgtgtt

SEQ ID NO: 6504 - DNA, 484 bp, Glycine max
  Clone ID: 700568375_FLI
ggaaggggaacctgatgacagaatgccgtggtaacttccttcatagatctttagtgtcttatctttatgagaaagcttctagtaaagataagacactaaagatctatgaaggaagttaccacggcattttggaaggggaacctgatgacagaatttttgctgtgcacaatgacatcatctcatggcttgattttaggtgctcacttaaatgaggttcatggtattgtattgttgacctcgccaagatatttttgatcttatagtgaacaaagaacacccttcacaaaagttacctcacaggaatggcacctctattgcctcttatcatggtagttacatgtacatgtcaatttagctttctacttttattataggctcatttatgagtttaatattactattcgcttattggattttcaaaccagatgtaatccattggctccctttattgtgaggtctgaccagtaataaagtttcattatcc

SEQ ID NO: 6505 - DNA, 1269 bp, Glycine max
  Clone ID: 700568509_FLI
agcttatcaacttttctctctctctctggcgaatatgctttcttggaaagttctcctcgtctccgccgccgtcttgttcgcggcgttaggcctcagagtctctcttccagtcgccgccaccaacctccctcttctttggagtttcttcctcttgtgtttcaagcctccttacctcttcgttgttctcaacgccatcatcatctccatcgtcgcttcttcacggtttcatcactcatcaaaccctcaatctccggagccaactcctccacgtgttgaatccatgcccgctcccaccgttccagaaccaccgcttttccaagtaaaagccgttctcgaagtggagaagaaagtaatcgaagaagatgttgtggcactaaagagaaaagactcgacggagattccatcgccggaggagaagccactggtgtctgctaggttcactcaccggaaattccttaaatccagttcagaaggtaataattactaattattattattttgatgcgtgaatacgcgctagggttgtcgtttagcgaagtgcatggatggttgtaggtgggagagcgttgagagtggtggctaaggcaaaacgggacgagacgttggagagcacgtggaaggccataacggagggtcgatcaatgccattgagcaggcacatgaagaagtccgacatgtggcacaaccgcaacgtgaccccacaaccccaagagacattcaacgatgcactgagtgtgtcgtccgggaggctgcggaaagaaccctcgctgagtcaagacgagttgaatcgtcgcgtcgaagccttcatacaaaagttcaaccaagagatgaggctgcaaagacaacaatccttagaacagtacatgcagatgattaaccgcggtgccgcttaatctcaacctcaacataatcaatattttcattttacagaacaaaaaaacatatatagtgtaagtatttctgcaggtgtagacagtaggggtatttattttattgccatatattagtttatggttgggttaggctcatcatcattatttctttaatttgtttgttttgtgcctttatatgctccacataccaaaaatgtggttcatgttcaatatcaattagctagctagctagaaaacaaacacaccaaaaaaacacttcggggaacttaggattaatgttgttcctctttgtaatttttcggggtcattttttttagtcaaacctctttctctgtaattaataccatgaatgtaagcctgtaacgtttagtttgct

SEQ ID NO: 6506 - DNA, 908 bp, Glycine max
  Clone ID: 700568558_FLI
gtcaaaggcaccgcactgaagcgaatctggtaaagcagaaaagcgtagttggtgaaattcctgggatcccccactggacggagtttttgttgctttttctttcattcatctcttacactctacgactactcttccattcccaaacgaaactcagcgtttcttctgatcatggcaagcacgttgcggttatacttgacctgcattcggaacacgctcgaggccgcaatgtgcctccagaactttccctgccaagaagtcgaaaggcataacaagcccgaggttgaactcaaaaccagccctgaactcctgctcaatccggttttgatatgccgaaatgaggccgaaaaatgcttaatagaaacatctatcaattcattgcggataagtctcaaggtgaagcaggctgatgaacttgaaaacatactgaccaaaaaatttctaagatttctgtccatgagagccgaggctttccaagtcctgaggagaaagcctgttcagggatatgacattagcttccttataacaaattaccactgtgaggagatgcagaagcacaaacttattgactttattgtgcaatttatggaggacattgataaagagataagcgagctcaaaatgtcggtgaacacaagggggaggcttgtagctacagaatttctgaagcagtttatctgatgctttagactagttagaacttccatatccgtgtaaattgtactattgcaggtctagttttcacttcacttatgaagtgcttggtcctttgagccaatggtttgtgtttttattatatttaacagaagtgcagaataaattttgtagtttagtacagtatgtaaagaaagatatgacaaacctgcatgtgacgcggagaaaatgaagctacagaagctagcagttagcac

SEQ ID NO: 6507 - DNA, 1759 bp, Glycine max
  Clone ID: 700568583_FLI
cacaacactacactagcaagcacacacctttagcacaatcaccaatggcttcttccgacagcaagcttcccctgaaacccatccctggaagctacgggcttcctttctttggacccatgagtgacagacatgactatttctacaaccaaggacgcgacaagttctttgccgaacgaattaaaaagtacaactctacggttatacgaaccaacatgccaccgggtcctttcatttcctctaatcctagagtcatcgctctcctcgacggtgtctccttccccattctattcgacaactccaaggtcgataagcgcgatgttctcgacggcaccttcatgccttccacctccttcaccggcggttaccgcgcgtgtgccttccaggacaccaccgaaccctcccacgcgctcctcaagcgcttctaccttaacttcctcgcctccaagcacgaaaccttcctcccactcttccgcaacaacctctccgaccacttctctgatctggaagacaagctggccggcaaatccggcaaggccagcttcaactcctccgtcggctccgccaccttcaacttcctcttccgtctcctctccgacaaagacccctccgaaaccataatcggctccgacggccccagcctggtccaaacctggctggcagctcagctggctcctctggccactctaggcttacccaggatcttcaactacgtggaggatttcttaatcaggtcaatcccctttccagcatggactgtcaaatccagctacaagaaactctacgaaggtctctcgacagcaggtactgcgattctggacgaagcggagcgcgtggggataaagagggacgaagcgtgccacaatcttgtgttcatgttatcgttcaacgcgcagggtgggttagtgaaccagtttccgattttgatcaagtggctaggactggctggggagggtttacacaagcagctcgcggaggagatcaggaccgttgttaaggacgaaggaggggtgagtctccgggcgttggatcagatgactttgaccaaatcagtggtgtatgaggtcctgaggatagagcccgcggtgccgttccagtacgcgaaggccagggaggatctggtggtggagagccacgatgcggcgtacgagatcaagaagggagagatgatcttcggatatcagccgttcgctaccaaggatccgaagatcttcgagaacgccgaggactttgtggcccacaggttccttggccacgacggggaaaagctcttgagacacgtcttgtggtccaacggaccccagacggaggagcccacaccggatgataaacagtgtcccgccaagaatctggtggtgctcatgtgcaggctctacttggtggaattcttcctgcgttacgacacgtttacgttcgattttaaaccagttgttctgggtcccgatgttaccatcaagtcactcgccaaggcttcttccttctgatcctcctcatcacctactctacctcaaacttaaaatcaatcttctttttaatgtgtattagttaattaataattaaataaaacaaagtaaatatatatattaaaagtaggatgtgcactggacagcacagcagtactcatgaattgccgcttgttgcattttgtgagagaggtgtgtacattatttgctacctgtaacttttgcagagtgctctctatatatataatgttaaagttttacttgttttggttggctttggcaatcaacttgtctttttt

SEQ ID NO: 6508 - DNA, 1574 bp, Glycine max
  Clone ID: 700568585_FLI
gcagaccctgtatggagtggcgaatggcgctgtggtctcaaattttatgcatagtcactctgctgttatgcagcgattgtgcagcatcttttgccaaggagcagcaaaaggaccgggttggtaggctcccaggtcaaggcttcaacatcagcttcgcacactatgctgggtacatcaccgtcaatgagaaagctgggagaacactcttctactggttcattgaggcacttgaagatcctcattctaagccccttgttttgtggctcaatggagggcctggatgttcgtccattgctttcggacagtcagaagaagttgggccttttcatataaattcagatagcaagaccctccatttcaatccctattcttggaaccgagttgccaacattctttttcttgacactcctgttggggttggattttcatattcgaataacaaatccgacatgctgatcaatggcgatgagaggacagctgaggacaatttagtatttctattgaattggtttgagcgtttccctcaatataaaagaagcaactttttcatcagtggtgagagctatgcagggcattatgttcctcaacttagccaagttattgtaaagtacaactcggttacaaaagaaaatgctataaatctgaaaggtttcatggtaggaaatgctctaacagatgatttccatgatcaattgggaatgtttgagtttatgtggtcaagtggtttgatttcggatcaaacatacaagcttttgaacctactatgtgattttcagtcagttgagcacccgtcacattcatgcgaaaaaatctgggaaattgctaatgaagaacttggaaatatagacccatacagtctctttactcctccgtgccaacatgctaatgttagccagttaagtcggctggtgagaagaaagcatagaattggtagactcagtgcagagtatgatccatgcactgaaaagcactccattgtatacttcaatcgacctgatgtccaaacagttcttcatgttgatccagatcataagcctgctacatgggagacctgcagtgatgaggtatttacaaactggaaggattctccaagaacagtgctcaatatttatcatgaacttattcagatgggattgaggatatgggtgttcagtggtaatacagacgtggtaatacccgtgacatctactcgctatagcataaaagctctcgaccttcctactgtgagtccttggcgagcatggtatgatgatggggaggtgggaggatggactcaagaatatgctggccttacgtttgtggttgtaaggggtgcggggcacgaagttcctttgcattcaccaaaacttgctttgacactgttcaaagccttcctagcaggaacatcaatgcccaatcttgagctagtcggtgcctcctgaatttacgttaatattctccctttaaataagttctaattgactgtatttgactgtttcacatggggaatccgatgttgatttcttttacgcgttactcaatttgtgttttttttttatgtaccaaacaaaatattagatgtaccgatttatgtt

SEQ ID NO: 6509 - DNA, 590 bp, Zea mays
  Clone ID: 700569151_FLI
cgagtctccagccaaccgcatccaagtcctccggcaaggagggcggcgagaagaaggggaagaagaaggccaagaagagcgtggagacctacaaaatctacatcttcaaggtcctgaagcaggtgcaccccgacatcggcatctcctccaaggccatgtccatcatgaactccttcatcaacgacatattcgagaagctcgccggcgaggccgccaagctcgcgcggtacaacaagaagcccaccatcacctcccgcgagatccagacctccgtgcgcctcgtcctcccaggagagctcgccaaacatgccgtctccgagggaaccaaggccgtcaccaagttcaccagcaattgagcagcctgcagcgtccacggatttgttaggtctccccttcttacaagggttcttcgtcgtgtcctctacccctccccgcctatgtatgtgctgtgaaatcgttgatgttctcgtcgggtgaacaaaggccagtagctagcttgcctgcttcataaatcgtgccggattgtaatgggcctcttagatttgacgcccctattttggaatatagttgtatcggtgccttccctgctt

SEQ ID NO: 6510 - DNA, 799 bp, Zea mays
  Clone ID: 700569159_FLI
gcggtgggctcgccatcgagtccaccaacaagaacctcatcttcaacgttcaccctgttcttatgcttatcggttatgttattatcggcggtgaagctataatggtgtacagggtacttccaacatcgaatcatgacacaactaagctgatccatctaattctccacgggattgcactcgtccttggtgcggttggaatatactttgctttcaaaaatcacaatgagagtgggattgccaatctttacagcctgcactcttggattgggataggaacaattactttgtatggtattcagtggataattggattcgtcacgttcttcttccctggtgctgcgccaaacgtgaagaagggtgttcttccttggcacgtactctttgggctctttgtctacatcttagcactggctaatgcagaactcggctttcttgagaagctcactttcctcgagagctcaggtctcgacaaatatggcacagaggcattcttagtgaacttcacagcattggttgtcgtgttatttggtgcctctgttgtggtggctgctatagctccagttcgccttgaagaaccacagggttatgatccaattccagaaaactagcgcaaatgaaatgtacagcgtatgcagttgccaagattggctgttaccacatggagataagatattcatgtctctttattgacgaagaaggtgatggaattatcacaataaagatgtagacataaatgtgtgtatatacattctgtgacacttcaaagtttcagtatatgcaaaactgaatatgctgcttc

SEQ ID NO: 6511 - DNA, 1243 bp, Zea mays
  Clone ID: 700569167_FLI
gtgaagactctctcctaggcgagggttcgcttggtcgtgtttacaaggctggttttcctaatgggaaggtacttgccgtgaagaaggtagacgacagtgccagcttgctgtctctgtatggaggaggagaagaagacgccttccttgagctggtctcgaacgtctctcggctcaggcatccgaacatcgtgcccctcacaggctactgcgtcgagcacggacaaaggcttctcgtgtacgagtacgttgggaacagaacgctgcatgatgtgctgcagcacttgtctgacgacgatggggcgagcaagaagctcacgtggaacacccgcgtaaggatagcgctaggcaccgctcgcgccttagagtacctgcatgaggtgtgcctacccccagtggtgcatagtaggaccttcaaggcatctaacatcctgcttgatgaagagtacagcccgcatctatctgactgtgggcttgctgctgctctcactactgctgtggtctccgctgaagcggttggctcctttggatatagtgctcctgaggtcgccatgtcaggaacatacactgcaaagagcgacgtgtacagcttcggagtagtgatgctggagctgctgacaggccgcaagccactagacaggtaaaaaaacatgtcactgcccgccatttccgacctggtggcccattatttgttgtatagatcaagctcacgcggttcagtctctccctcgtcggcaattttggataccagctccagagagaggtcagaacagtctctcgtcagatgggcagccccgcagcttcacgacatcgatctcctcgccaggatggtcgatccggcgctggacgggctgtacccttccaagtccctctcccgtttcgccgacatcatcgccatctgcgtccagccggagccggagttccgcccgccgatgtccgaggttgtgcagcagctggtgcgcctgatgcagagggcgagcatcataaggcggcaatcggacgatctgggctactcgtacagggtccccgaccgcgacggcggcgcagcaggcgacgtcctctgactctgagtgaggctaggagacccaagttggttcacgttttgtttccgtccgtcacctactcacctgtaaatgacatttgacatgtactatagggttcggagtgtaccgggacttttcgtcagctgcgagtgtcatgtattgtgtgcgctcttgcaagtggtagatatatatatatagaaggg

SEQ ID NO: 6512 - DNA, 1688 bp, Zea mays
  Clone ID: 700569244_FLI
cgcagagataggcgtcttcgtactcgcctacctccgcggctcaaacctttcccccttctcccaattccctccgtcggccgccgctccatcccgtacgacgacaccatgagggagtgcatttcgatccacatcggccaggccggtatccaggtcggaaacgcgtgctgggagctgtactgctgggaagcacgtgccccgtgctgtttttgttgaccttgaacccactgtcatcgatgaggtgaggactggcacctaccgccagctcttccaccctgagcagctcatcagtgggaaggaggatgccgccaacaactttgcccgtggtcactacaccattggcaaggagattgttgacctgtgccttgatcgcatcaggaagcttgccgacaactgcactggtctccagggcttcctcgtcttcaacgctgttggtggaggaacgggctctggccttggttccctcctcctagagcgcctgtctgttgactacggcaagaagtccaagcttgggttcactgtgtacccttccccccaagtttctacttcggtagttgagccatacaacagtgtactgtccacccactccctcctcgagcacactgatgtggctatactgctggacaatgaggccatctacgacatttgccgccgatcccttgacattgagcgcccaacctacaccaacctcaacaggcttgtgtcccaggttatctcatcccttactgcctccctgaggttcgatggtgctctgaacgtggatgttaacgagttccagaccaacctggtaccctacccgaggatccacttcatgctttcttcgtacgctccagtcatctctgctgagaaggcctaccacgagcagctctctgtggctgagatcaccaacagcgccttcgagccatcttccatgatggccaagtgcgacccacgccatggcaagtacatggcctgctgcctcatgtaccgtggtgatgtggtccccaaggatgtgaatgctgctgtggccaccatcaagaccaaacgcaccatccagttcgtggattggtgcccgactggcttcaagtgcggcatcaactaccagcctcctagcgttgtgcctggtggcgacctggccaaggtgcagcgtgccgtgtgcatgatctccaactccaccagtgtcgtggaggtgttctcccgcatcgaccacaagttcgacctcatgtacgccaagcgtgccttcgtgcactggtacgtcggtgagggtatggaggaaggtgagttctctgaggcccgtgaggacctggcggcgctcgagaaggactacgaggaggtcggcgctgagttcgatgagggcgaggatggcgacgagggtgacgagtactagagaagtttgctgatgacgcagcatcaggccagtgtgctgcccttatcccgtgatctgccgtgagttgctcctgctatcgtgttatgtgtgtctgttatgaagtattgtgtggtttacaacacctgatgttgtaagagtcgttaattcccctgcattgctaccgggttattgagaataattatggctgtttacgttgttgcttcatctcggggatgctttacatttaccaccttgttcatcttttgtcatcagtaaaatcgagtcggcggatgtttttcttgcgtcttgtcatgagtattgagtagtatggattgtttgatgtttt

SEQ ID NO: 6513 - DNA, 550 bp, Zea mays
  Clone ID: 700569444_FLI
ctcttctcctccatatagcggcgggcctccgtcggcccccttccaccccgttttgccgccccacaggccacagcccaaaatcctcctcgtcgctggtgccctctccgcggcctcctccgccagccatggccgccgctgggcccgggctctactccgacatcgggaagaaggcaagaggtctcctgtacaaggactaccacactgaccggaagttcacgctcaccacttacgccgccaacggagctttcaaggcgcgtgtcaccatggacatgaagcaccgcgtcgtccgcgccatgatcgcgggtagcatgggagacggtgatggcgcacccgtgcatgtccaggataagaccgagtcggtacgtgacgcgacacggcgcgagcatcatcgtcttcctcttaccatcaaatatgatgattgtatgccgtcgtaatgcacgggcattgtactagtttcttatgtaccaccttactagcattctggtatgcttgatgtcagatgactgctaaatttttttatcttactggtgggtgcttcaggtggttgtgc

SEQ ID NO: 6514 - DNA, 821 bp, Zea mays
  Clone ID: 700569481_FLI
gcggctccccaccaacgagacgctgcctaaggagctccacccggtgttcttcctcttcgtggcggcgcccagcgttgcgagcatggcgtgggccaagatcacgggcgagttcggctacgggcccagggtggcctacttcatcgccatgttcctgtacgcgtcgctggcggtgcggatcaacttcttccgggggttccgcttctcgctggcgtggtgggcgtacacgttcccgatgaccggcgccgccatcgcctccatccgctactccaccgaggtggacaacaccttcaccaaggcgctctgcgtggcgctgtccgtgatcgccgtgctcacggtgacggcgctgttcgtcaccacgctggtgcacgcgttcgtgctccggaagctcttccccaacgacatctgcatcgccatcacggaccacaagatgaagcccatcatggagctgcacgagagccatggcgaggacagcagcaccaacagcaacgacatcgaggccggcgccggtggcaaacagtgagggacgcgacgcctagctaggaagcatgcataagcaatgcacgcgcgcgcacacacccaagtcgccgagcttcacgcacgccaagcgtggggggatgacgcgaccgagttcttgcttggattggattggatctttctataggattgcctacttggttcgatggcgcacgctgaggacctttgatggattgcatctattagttactctatctactactagtcagtagagaactacttgaatgtacagagtgggctacgttgtatgaaacgcggctgcttatttatcgtggaaaacattatgc

SEQ ID NO: 6515 - DNA, 1264 bp, Zea mays
  Clone ID: 700569596_FLI
tggacaccgtgacttcatcaagaatatgattactggcacttcccaagctgactgcgctgttcttatcattgactccaccactggtggttttgaggctggtatctccaaggatggacagacccgtgagcatgctctccttgctttcacgcttggagtgaagcagatgatttgctgttgcaacaagatggatgccaccacacccaagtactccaaggcccgttatgatgagattgtgaaggaagtctcttcctacctgaagaaggttggatacaaccctgacaagatccacttcgttcccatctctggtttcgaaggtgacaacatgattgagaggtccaccaaccttgactggtacaagggcccaaccctacttgaggctttggacttgatcaatgagccgaagaggccttcagacaagcccctgcgtctccccctacaggatgtgtacaagattggtggtattggaactgttcctgttgggcgtgttgagactggtatcatcaagcctggtatggttgttacctttggtcctagtggccttactactgaggtgaagtctgttgaaatgcaccatgaggctctccaggaggcccttcctggtgacaatgttggcttcaatgttaagaatgttgctgtgaaggatctgaagcgtgggtatgtggcctccaactctaaggatgaccctgccaaggaggctgctagcttcacatcccaggtcatcatcatgaaccaccctgggcagattggcaacggctatgccccagtgctggactgccacacctcgcacattgctgtcaagtttgcggagctcattaccaagattgataggcggtctggcaaggagcttgagaaggagcccaaatttctcaagaatggtgatgctggtatggtgaagatggttcccactaagcccatggtagtggagaccttttctgaatatcctcctcttggtcgctttgctgtccgtgacatgaggcaaacggtggctgtcggagtcatcaagagtgtggagaagaaggacccaactggagccaaggtgaccaaggctgccgcaaagaagaaatgatgtgtctggctggttctgtgtttgcttgagggatacctagtggaaacataaaatatctcgtcttgttcacgtcattgtctgaactatgctcgcaacgtttgcctggtcgatttagaactgttattttcgttaaaaccagagtgttatttaagacttaaccgaacatctggtgagccatatatggttactagttttgtt

SEQ ID NO: 6516 - DNA, 989 bp, Zea mays
  Clone ID: 700569707_FLI
tcaatgcgcacattttctgaaatggtcgcaacatcccaaagagagaggtggtcacttgatagcgaactcttgggatccatttctagtaaagtgacaagaactagtgcttcaaattctactacacttccccgtgagcaagaggtgtgcaagctgtgcttgaagctgttgaaggagagatcaacatggaatgctcaggagctggccgttgttgctgttctgttgtgtggacatgtgtaccatgctgactgtctggacagcataactatagaagctgacaaatacgatccgccatgccctgtatgcacgcatggtgagaaatgtacagtgaagctatttgggaagctggaatccaaggttaagaacaagataccaaaaaatgtggcagctgatatcaatccagatgggaacagtaataagcaccagaagaaaggtagaagagagcccaggttaggtacaagctcaagcatgaaggtcccattcagtcgcccgtttttgaggagacatttctccattgggtctcgaccgcctcggtcagtctcagaaaccgattcgacgagaaagaagggattctgggcaagacattggagggagtagaatagcctccaattgccattaggtgggctggtttccattagtgtgttttggaagggtcttcgagaggaggtgaactccccagcatgcaagctcacggagttcagactggcacaagggctgccgtcctggcgggcaaccaacatatttggaagtttctcccagccataatattcggatactggtgcagagcgcacgctagcgccggtcccagcagatccattatagtagaataacaaggttttttataccatgcgagatacggttgttgtaggccctggttgcagcttagtaatagtagcaatctaacagaaacggtgtggccttcatggatgtaaggcccaatgctgggttacacaaccagcttgctagattatttattgtactcgatgtttttt

SEQ ID NO: 6517 - DNA, 878 bp, Zea mays
  Clone ID: 700569726_FLI
gcggcggcgcgggcggacaaggagcaggcggaggaggagctgtgccaagccacaatgggtatctcacgcgactcgatgcacaagcgccgtgccaccggtggaaagcagaaggcctggaggaagaagcgaaagtatgagcttggtcgccagccggccaacaccaagttgtcaagcaataagacagtgaggagggtccgtgttcgtggaggtaacgtgaagtggagggctcttcgccttgatactggtaactactcatggggaagtgaagctgttacccgcaagacccgtatcctcgacgtggtctacaatgcatcaaacaatgagcttgtgaggacacaaacccttgtgaagagtgccattgtgcaagttgatgctgccccattcaagcagtggtacctcactcactatggagttgacattggtaggaagaagaaaacccctgctgcaaagaaggataatgctgagggacaagaggttgaggcagcagctgaggaaacgaaaaagagcaaccatgtcacgaggaagcttgagaagcgcaaggagggacgtacccttgacccacacattgaggagcaatttggcagtggacggttgctggcatgcatttcttcccgccctggacagtgtggccgagctgatgggtacatccttgagggtaaagagcttgagttctacatgaagaagctacagaggaagaagggcaagagcgctgtagcttagagcattctcatggattgtcttgcaccgaaatgtgtgtcctgatgagtacactttttttttggttagtcgtctcaagttcagagcgttatgccatgttttcagacctgattagtacactgttttctaaaagcgattgagctctagtccaatgtattgat

SEQ ID NO: 6518 - DNA, 1179 bp, Zea mays
  Clone ID: 700569771_FLI
ggcacccctggcaagggtatccttgctgctgatgagtcaactggcaccattggcaagcgcctttccagcatcaatgtcgagaacgtggaggagaaccggcgggctctccgtgagctcctgttctgctgccctggtgccctccagtacatcagcggtgtgatcctcttcgaggagaccctctaccagaagaccaaggatggcaagccttttgtcgatgtcctcaaggagggaggcgtcctccctggcatcaaggtcgacaggggcaccattgaggttgttggcaccgacaaggagaccaccacccagggccacgatgacctcggcaagcgctgcgctaagtactacgaggccggtgcccgctttgccaagtggcgtgctgttctcaagattggccccaacgagccgtcacagcttgccattgacctgaatgctcagggtctggctcgctacgccatcatctgccaggagaacggtctggtgccaattgttgagcctgagatccttgttgatggccctcatgacattgatcgctgcgcttacgtcactgagacagtccttgctgcctgctacaaggctctcaacgagcaccatgtcctcctggagggtaccctcctgaagcccaacatggtgactcctggctccgactctaagaaggtgacacctgaggtgatcgcccagtacaccgtccgtaccctccagaggaccgtccctgctgctgtgcctgctgttgtcttcctctccggtggacagagcgaggaggaggccaccctgaatctcaatgccatgaacaagctcagcaccaagaagccatgggccctgtccttctccttcggccgtgccctccaggcgagcaccctcaaggcctgggctggcaaggtggagaacgtggagaaggctagagcggccttcctcgccaggtgcaaggccaactccgaggctaccctcggcacctacaagggtgatgctgccgccgacaccgagagccttcacgtcaaggactacaagtactgagttgcttctctttgcgatcccgttgttttggaactcctgcctgcgagtaggttgctgagtgttgtttgcttgttagagcttttatattcggacatgaaaaaaacatgcttcctatgtggaggagggttttctttaaattcgtatattaacccccagtctctgttgttt

SEQ ID NO: 6519 - DNA, 802 bp, Zea mays
  Clone ID: 700569901_FLI
ctctgcttggagattccagcgccgagcgtcttcttcccagccccggcgccggtccctgctcgagctccctccctgtacgcgcgtgctcaggttccagctcgcgtacaattcacggcgagcagtacatggttttcatcctcctcgtcacatcgattcgtcgtcctgctgtgtcatgctccagaccgttagatcaccgtaaacatcttgtcgtgcacaataccgcctcgaacccgcgacatccgttgtcggttgtttaaatcatcgcgcccgtgctgagttccctggccatcgcgttttttcttatagatgctcagtcttaccgtgcgtcctgtttcctgctcgccagcgcgccctctcggctcgctcggctttaattcccaatcgtgtcgtcgattccacctgttagcgtcgttcgtcgtcgcgtcgcgtgtgcagctctatatacgtcaccctcctgtgtcgtcgtcgttccacgtgtcgccaagaaattccaagagtcgagtgaagatggagccagcagcatggtgttcaccaagtgcgcgacaaaaagctcggacatcctgcgcgactcaagttcaattcgtcgaaattattcaatcgaagaaaagatcttcagcaattaattaccgaagaaaagaaggctcctggatgacatcaaccggaacccgtagtcgtgcttgcgactatcgcgtcgaattagtcagggtaagttgatctgtattcccgttaactaggtctataaatagagtaaatagaattattagtctcaataaatgttattaatttagcatacatattttgt

SEQ ID NO: 6520 - DNA, 606 bp, Zea mays
  Clone ID: 700569943_FLI
cggacgccatcgtgcggccctcctcccggcgcgcctccgcctccgaccccgtcatcccctggtaccatgccaataggatgctcagcttttatgctccaggttggtgtggggaagttcgtgatgttatttacactgacagtggaaaggtgacggtcatataccgcgtgactgtgcgcggaacagatggagaggttcacagggaggctgctggaacagcatcgctgagcgatgatcggttcgacgaccccgtgtctgcggcagaagaggcagcgttctgcaaagcctgcgcgaggttcggttttggcctttacctgtaccatgaagacgagacaccatagaagaccaacaatttctccacatcgtctatgccggccctgttctgttcagatttgcgcttgaggggctgtgctctactgttgttgatcagtaagtctatcagatacctacccatcccattgctgctaggtccttgagctgttgtaacgctggtactatgttgtttgctcgttttggtagctttgtcttgcaaaaaaatgttgtcagctacaattggtatggattatggaactattagtatatatgcaatacttttttgttgcttacctc

SEQ ID NO: 6521 - DNA, 775 bp, Zea mays
  Clone ID: 700569965_FLI
ctttctgcggtctatgtagggctggtccagaaggactgccgctagcggttgtattcgtcggaacatcgctgagtcctccgacgcgctcctggcgctgctctgagaactggatatgctgggcctagcacccctccgctctgcgcctcttcctatccgcgcctccgccaccgcctgcggccgaaatacctcgcagctcgccaatggctgccaactctctcttctcgcgccagaggcggccgaaggtgacacggcgctgccggagaacatgcacaagtggaggatggtcatcgcctacgatggaacaaagttcaaagctattgctcctcatccaggagtggcccatttctctaaatggtcgtgcaaagcaatcaaggggtttgataaagatgagaaaggggctgaattctttgattatcctggacgcctggcaaatctggaagcatcacaatgtatgtgtttttgaaggatcttctcctaatgtccaagaggttttacatgcagtgacaactgacaattgaaggttttttattgtgtatggaactatggatggagcctctgctcttcaagaactgttccttcagttgttaatcacataagcctctgtgtgtttccttggccctggtcatgtagtcgttagtcatggtaattcttgtactgttggtgtttgtggtgtcttggagcctctctaccctgtactaggagtggactcttgtccctctgatgtaacttttttcttctcaatgaaatgacacacggttctcctgtattgttcaag

SEQ ID NO: 6522 - DNA, 949 bp, Zea mays
  Clone ID: 700570059_FLI
cggacacgtctgttgtgacgcgccggtttgatgcagtgttcaccaatcccagtggtggggcagggactctgaggatcacaagcatcttcaacggccactggaacatgagcatgaactatctcggcttgcattccctccggaacagaggtttccggcagctcatccggtcctacttcatgtccggtgatcgtgttccggacgtcgtggtcctgaactctggcctgcacgatggctgctactggaccagcgtccgcatctacgcgcaggctgcggatttcgcagcacagttctggtccggagtcatggacaaagtccgggctcgtgggcgtgcagtgcccagggtgttctaccggacgacgattgccactgggggctacgctagggacctggcattcaatccaaacaagatggaggcgttcaatggtgtgcttgttgagaagatgaggcggcacggggtgctaactggtggagtgattgacaattttgacatgacattcccatggcactatgacaaccgctgcaatgacggcgtgcactacgggcgtgcaccggcgaagctggtgtggcgggatggcaaggttgggcaccagtacttcgtcgacctgatgctggggcatgtgctcctcaatgccatctgcaatgaatgaggattgctggttccatgttctgtaagtttctggcgttcaattgtggaaactggaataggatggttagggaactgaatctggggtgatgagatatcaacaattgggtagtgcagtatgtgtgtaaatctgatggagacggcgagagcgaggtttagctggagcaatttgtatggtaaaacatttggtctctcagcatcgtgtattggcctgatcttgctctagcaaagaagatcgagtccggtcagagctagtgatgagtgaaaatcaggcacatgtaaatatatatagcatgactattcgag

SEQ ID NO: 6523 - DNA, 826 bp, Zea mays
  Clone ID: 700570064_FLI
gccgctccttccctccctctacccgtcgccgctgctgccatggacgaagtcgtcagccagattttggagaagcaagtgctgtctgccgcgaaggcggtggaggacaagctcgatgaggagatcgccgcgctcgatcgcctcgatccggacgacatcgaggcgctccgcgagcgccggatccagcagatgcgccgcgccgccgagcgccgcgccaagtggcgtgcgctggggcacggggagtacaccgaggtccccgagaaggagttcttctccatcgccaaggctagcgagcggctcgtctgccacttctaccgcgacaactggccctgcaaggtcgtggacaagcacttgtcggctctggcaaaacagcacgtggagacacggttcgtgaaggtccacgccgagaaggccccctttctgacagagaagctcaggatagtcgtcctcccgaccctcgccatagttaagaacgccaaggtcgaggactacgtggtcggcttcgacgagctcggcggcaaggacgacttcagcaccgaggacctggaagagcgcctggcgaggtcccaggtcgtcttcctggacggcgaagggtccgcgcacgcttcgaagcaggccgccgccgccaccaaacggagcgtccggcagtcgggcaccggcgactcgtccgactccgagtagctctcgtgtgttgttgttgttgttattattatatatatctaaatgggtacacagcacagacatgttttggttgctatgccaacaggcaacattagcattgcaaggatatgcgtcttattgggacctggaagcaaaagtggttgtggtt

SEQ ID NO: 6524 - DNA, 1319 bp, Zea mays
  Clone ID: 700570069_FLI
tccgtctcttgctcatcagcatcagctagccacccgaccaggcttcagaaaacaaaaaaatgaagctctcggcggcagtcctctgcgcgcttgtggctgttcaggcggcggtgcttctcgccaccgtgccgacggcgcaggccagcgagctggaggtcgggtactacagcaagaaatgcaagggcgtggagaacgtggtgaagtggcacgtcatcaaggcgatcaaggccaaccgccgcaccggcgccgctctcgtccgccttatcttccatgactgcttcgtcaggggttgcgacggttctgtccttctggacgcttcctacgacaaccctcacccggagaaggaggcgccggtgaacatcgggctcgcagccttcgacgtactggaggagatcaaggccgctgtcgagaagaggtgccccggcgtggtctcctgctccgacatcctcatctacgccgcccgcgacgccgccagcatcctcagcaacggccacgtccacttcgccgtccccgcaggccgcctggacggcttcgtctccaaggccgaggaggcccaggcggagctcccggactccacccacgacgtgcagcagctcatcgacaacttcgccaggaagaacttcaccgtggaggagctcgtcatcctcaccggggcgcactccatcggccagggccactgctcgtccttcactggccgcctctccgagccacccagccagatcaacccggcgtaccgcgacctgctcaactacaagtgcccccaggggtccaaccctcccgtggccaacaacgtccgcgacgaggactacggcgtggtggcgaggtacatgccggggttcaccagccgggtgcgcaagatccccgacttcctggacaactccttctaccacaacaacctcgccaagatcgtcaccttccactccgactggacgctgctcaccaacaaggaggcgttcggccacgtcgtggagtacgccgagaacgccacactgtgggacgaggacttctccgactcgctgctcaagctcagcaagctgcccatgccagcgggaagcacgggcgagatcaggaacaagtgcagcgtcgtcaaccaccgcctatactaagccagctcccgtacctgcaacaatggaaatcgaagaaagaggtcgatcgtgtccgcacaaccacatatcaaacattgtaaatcaaaatgagccataagatttttgttgtttttgtttcatccattcttttgattctcattcgttttactacacactcatcttttttttgtgtatctctcgtatctgtcaaactgcaataaaactttgttactg

SEQ ID NO: 6525 - DNA, 585 bp, Zea mays
  Clone ID: 700570105_FLI
ggcgacaacagcgacagtttctgcggtactgtcgttgaggcggcgcagcggatcttccagctggaggaggccgtgcggcggatggtgatggaagggctcggggtggccaagcaccacgacgcgctgagcgcgtccatgtggcacctgttccggatggcggagtacaaggcgcccaacgccgcggagaaggtggtcaggtacggggcgcatcaggacaccaactggctcagcgtcgtctgccagcacgaggtggccgggctggagatgcagagcagggacggcgagtggatcgtcgtcgaaccgtcgcccacgtcgctggttttcatggtcggcaacgagctccgggtaccaactcttgcggccgatgcctcctaatcttgtgatgaagcactgcactaagtgccatcaattggttgtgcaaactgaatgttcggttacacgaactgaatgtttgagcgaatacctagccggacattcagtttgagcagccattcagaacttagtttgcccctattcattttgaaaccacaggtcttgcctgaactgttcgacatcagataacatctcgatcctatgattaaagcc

SEQ ID NO: 6526 - DNA, 1058 bp, Zea mays
  Clone ID: 700570125_FLI
tataaacgctgttgtatattactctacatcggtgttccgtaatgcaggcattacatctgatgttgctgctagtgctcttgttggagcagccaatgtttttggcaccatggttgcatcttctctaatggacaagcaaggaaggaaaagccttctgatgacaagcttttctggaatggtaatgcccttgtgttcaacaaatcatgtgtttattttctctctcaatcagcaaatggagggttcatattcactttttttctcccttgaagggtgcttcaatgctactcctagcattgtccttcacctggaaagctctggcaccttattctggtattcttgctgttgttggcactgttctgtatgtgctgtcttttgctctaggagctggtcctgttcctgccctgcttcttcctgaaatatttgcctccagaataagggccaaggctgttgcattatctctaggcatgcactgggtatccaacttttttattggcctgtacttcttgagtgttgtcaacaagtttgggatcagcaatgtatatttgggatttgcatcagtgtgcgtccttgcagttctctacatagctgggaatgtggtcgagaccaaggggcgatcacttgaagagattgaacgggaactaagtgtagcagaatgatgtgcttttgctagtcatgctgcggcgccgttttggtgattttgagaatgcaaccaagcacacaaccgagcatccttggacctggagactttctagtttcatgtagcagttaccaatcagattcagaaacaatgaactcgtcaatgtttctggagataagttttcattttttgttctaaaatttcttgtttctcttgtataggagactttgagatagtttcagctctaaagacgtgaatatggagcagctccgctaacgaatctaggattcactagtaaaatgtttagctatacactagctctagatttacgaaacagaggtctcccttggaatgacttgttttgctcttgatgttggctgacatatccttcgaagcaatttggagtaaaaatacacaatgaaat

SEQ ID NO: 6527 - DNA, 610 bp, Zea mays
  Clone ID: 700570160_FLI
ctatgatttcgggaaaagcttataaagccgtcaaggataagtgcggctttaatgggacatacactgaagactgccaaaatgccatggacttagccacccaagaaaaaggaaatattgataattggaaagattcaccagagacaatgctgccatcaataaagaaactcatttcaagtggcacgagaatatggctgtacagtggtgatatggatgcagtgtgctcattcatttcaacacaatatgtgctggacaatcttgggcttcctatagaagcagcttggcgtccatggcgcgtcgacaatgaggttgctggctacgtcattgggtataaagggctggtcttcgtgacggtcagaggagctgggcacatggtgccatactaccagcctcgcagggcattggcattattctcgtcattcctcgaaggggagctccctccacgctgatcgattaagctagcagggtttgtgaatgccatttactcatttcccacagcctatggaatcatatgtttttactatacttgtagctggcctttattttttatataaatatataaaacaaaccaagcagggagctgacgattatattaataaaaaatgagattgag

SEQ ID NO: 6528 - DNA, 577 bp, Zea mays
  Clone ID: 700570172_FLI
aacaaaagctctcgatctcaccgacaccgaggaagaagagatcaatggcgtccgagcagggagtcgtgatcgcgtgccacagcaaggctgagtttgacgcccacatgaccaaggcccaggaagccggcaagctggtggtcatcgacttcactgccgcctggtgcggtccatgccgcgccatcgccccactgttcgtcgaacacgccaagaagttcactcaggtcgtcttcctgaaggtggacgtggacgaagtgaaggaagtcaccgcggcctacgaggtcgaggcgatgccgaccttccacttcgtcaagaacggcaagacggtcgcgaccatcgtgggtgccaggaaggacgagctcctggccctgatcgagaagcatgccgcgcctgcgcctgcgactgcgtctgcctaaatgagatcagatcagtcgtcgccgtcaataagggccagcacgtatggctgtaaatgttgtcgttatcagttctggctttgtcgtttgtgggcgatttgtgaactagtagtatgtttgtttctatccgagccggaggcgatacttaaccatggatacttgttgtg

SEQ ID NO: 6529 - DNA, 879 bp, Zea mays
  Clone ID: 700570181_FLI
gcgcgggcggacaaggagcaggcggaggaggagttgtgccaagccacaatgggtatctcgcgtgactcgatgcacaagcgccgagccaccggtggaaagcagaaggcctggaggaagaagcgaaagtatgagcttggtcgccagccagccaacaccaagttgtcaagcaataagacagtgaggagggtccgtgttcgtggaggtaatgtgaaatggagggctcttcgccttgatactggtaactactcatggggaagtgaagctgttacccgcaagacccgtatcctcgacgtggtctacaatgcatcaaacaatgagcttgtgaggacacaaacccttgtgaagagtgccattgtgcaagttgatgctgccccattcaagcagtggtacctcactcactatggagttgacattggtaggaagaagaaaacccctgctgcaaagaaggataatgctgagggacaagaggttgaggcagcagctgaggaaacgaaaaagagcaaccatgtcacgaggaagcttgagaagcgcaaggagggacgtacccttgacccacacattgaggagcaatttggcagtggacggttgctggcatgcatttcttcccgccctggacagtgtggccgagctgatgggtacatccttgagggtaaagagcttgagttctacatgaagaagctacagaggaagaagggcaagagcgctgtagcttagagcattctcatggattgtcttgcaccgaaatgtgtgtcctgatgagtacactttttttggttagtcgtctcaagttcagagcgttatgccatgttttcagtcctgattagtacactgttttctaaaagcgattgagctctagtccaatgtattgataatttctgc

SEQ ID NO: 6530 - DNA, 620 bp, Zea mays
  Clone ID: 700570238_FLI
ctacaaccaagaagccatctacgactgcagctacaacaaccaagagccttctgacttcggtttcaggcttggcagtggtgctcaacctgcttcggagaaccaagagttaccttccgaggagctgcctgaggacgagaagcagccattattcagcaacccccaagcggatctcgaggagccgccgaagcaggacgtcgtcgaggaaggggctgcacagggaggcgtgctggccgacccgacatcgacaaccgccgccgacgatcagctccaggatgcatatgcggagaagtacagcttccctcctggctggtgtgacgtttcgagcatcccggcgcaaggctggggcgactgatcgtcaaacctgcgacccccattggtaggggggggggggggtcattggcagaataattgaggccgatgaccttgtgaaccctcatcggtgtgtccctttcgttccgtcaagccttcgttcatctctcactgctggacagtttgttgcagcgagtgaactgtggcgtccatgtgtttaggacaggccatcgtgtgtgcctgatgtggcgtggttattttgcgggtgctcatggttttaatagatactccctctgttacgtttttagttc

SEQ ID NO: 6531 - DNA, 609 bp, Zea mays
  Clone ID: 700570251_FLI
ctggcatccgcagagagtttgttccgtccaggcaaccaaaaagcgttgccccgccgcgcagaggaagaagagagcagaggaggatggctcgtacgaagcagaccgcccgcaagtccacgggaggcaaggccccccgcaagcagctcgccaccaaggcggcgaggaagtcggcgccgacgaccggcggcgtgaagaagccccacaggtacaggcccggaaccgtggcgctgcgcgagatccgcaagtaccagaagagcacggagctgctgatccgcaagctgcccttccagcgcctggtgcgcgagatcgcgcaggacttcaagacagacctccggttccagagccacgccgtgctggcgctccaggaggccgccgaggcctacctcgtcggcctcttcgaggacaccaacctctgcgccatccacgccaagcgcgtcaccatcatgcccaaggacatccagctcgcccgccgcatccgtggcgagcgcgcgtagccatcatctccgaggatctgatgaatgtctagttaccaaacaaataggccgtattagcgtcgttgttctgtattcgttattttggattcggttgcagggaaaaacagctttactg

SEQ ID NO: 6532 - DNA, 454 bp, Zea mays
  Clone ID: 700570435_FLI
catgtgatctcgaagattacatttgcgagttacgggacccctacaggaggttgccagaacttctctgtagggaattgccatgcatcgactactctagacttggtggtagaggcctgcgaaggcaagaacagatgcgcgatcagtgttaccaacgaagtattcggagatccatgccgcaaagtcgtcaaggatttggcagttgaagccgagtgctccccgccatcggttaaccaagaacctcgatacgatatatgatcacggtactgtattgtggtgctcaggtcttggtggacgttgccgcagctttgcagggccgtgcacaatggtcctgcatcgttgtctcctatacctctgcacccatattatatgtaaacagtgacctacatgtaaatctaaagaagaggagggattgaaaagaaatgagatggaaaaggaataaagttgcttttattac

SEQ ID NO: 6533 - DNA, 334 bp, Zea mays
  Clone ID: 700570446_FLI
ccggacttcatcgccaagttcaacagcatcggactggacggtcgcgtgctcgaccacttccggttggaggacgacggccctactcgtcttgctgctcctgcacaccacgtctagtcttgttttcgttcgatcgaacaaacagttctcgtcgtcgtctcttttatttttcctgcaatctgaatttcgagttctccaaataaataagggtatccattcccttcatccgcagagcgcgcggatgccttcactagcagctctagttttgctatgtatatagctgtgtgtgtggtacctttgtgactcatatattatgcaataaagtatgctttctcct

SEQ ID NO: 6534 - DNA, 1203 bp, Zea mays
  Clone ID: 700570451_FLI
gtggagatgaagcctgctgaagaggcgaaggaagctcctactgaaactgatgacgctgagaaggctgcagacaaggcggacgatactcctgctccggcgccaatggaagaagatgagaaagaaactgagaaaccagctgaagctgttgtagctcctcttgcgcaatcggaggagaagaaagaagatgccaagccagatgagcctgaagctgtggctccagctccagtaagcaacccaactgagaactcagcccctgctcctgccgagcctgctgctgttcctgccccagtgcctgagaccgaatcagttgccgagcctgctgctgttctcgccccagcgcctgaaaccaaaccagatgccaagcctgctgctgttcctgccccagcgcctgaaaacaaaccagatgccgagcctgctgctgctgctgctccagtgcctgacaccaaatcagttgctgagcctgctgctgctccagcgcctgacaccaaatcagttgctgaacctgctgctgctgctccagtgcccgagaccaaactagttgctgaatctgctgctgatgctgttgctgctccggcgcctgaaaccaaatcagatgccgagcctgctgctgctccagtgcccgagaccaaaccagttgctgaatctgctgctgatgctgttgctgctccagcgcctgaaaccaaatcagatgccgagcctgctgctgccgctgatccagcacctgaaatcaaatcagatgctgccgccgctgatccagcacccgggaccaaggcagatgctgccgccactgatgccgcgcctggagccgagccagacgccgctccactagagaacaccgctgccgacaaaggcggaagcgaggagagcagccagcccgtgaacaacgtgaacaacgggcactcaacgtgaagtgcatctgaggccggaacggaacaccccttccagcaccgtgtatctcatgtaggaacaaacatttgcattcgcattgtaatctgatggatcggtaagcatgttgattagtcagtctgacgctgctgggtgacatgttggtaattaggctctgcatttgagctctttttttttgtatggctgctgtcgccgccgtacatgtatcctgtatccaccaccatcatcatccccttggactattggttgtgttgtacctaactgcgtaagcatattattatcaatgttaggccatgt

SEQ ID NO: 6535 - DNA, 352 bp, Zea mays
  Clone ID: 700570469_FLI
gtgtacagcccgctgaagcactttgggctgacgaccccgggcctccgtggcggcatcctggagcgcaacgacgtccgctaccgcttcgtcgtcgacgtcgccggtagcaacgtcgaggcggaggcggcggcggcggatgcggccagcaactgatggcaccgcgtcgtcgagtcgaaccacgtctgtgcgccgcgtgcaacgttcgttcgggtcgagtctgcgtgcaacgttctgcttcctttactagttgttgtctttccgccttcttgccgttctgttctgggctttgagatgagacgatggatggtcagtttttaatgtcagactgaataactacgtatagtactgtagt

SEQ ID NO: 6536 - DNA, 1173 bp, Zea mays
  Clone ID: 700570493_FLI
accattgttcctgtcgacgctgcgccgcacggctcacaccgccgacagtgcctcagtcctatcgagcctccctcttcccagatcaggccctagctgggctacagccgccgccgccgctgccgcatccgtcaccttcacaccgcgtgcgcgcgcgcgctctctctctctctctgcgacgactggacgggctaccgcagtcgcccccataggcaccacgcccttcgctgatctattcgctggcgaagaacgctctcaattagaagatcgatggagtgcgtggtgcagggaatcatcgagaaccagcatgtcgatgctcttgaggttcttctccagggactctctggtgtcccgaaagagcgttttagggtgcatgagctctgccttaaaagtgggcccaatctaggtgttgtcccatcggaggttcgtttgttgtgtgacttagctcagcccacaccatcctggaccataagacatgttggtggtgccatgagaggtgctggtgcggagcaaatctcagttctggttcgtacagttgtggagagcaaagctagcaagaacgtcttgcactacttctacaccctagggtacaagctagaccatgaactcttgaagagcggttttgcatttcgtttccaccgaggtgcccaaatcactgtcactgttacatctgctaacaagatgtcaaggctccatgcaaccgatgaagctacgtcagtcactcctgccatacagctagtggaaatcacagctcctgctgctgctgataattacaatgatgttgtttcagctgtcactgcgttctgtgaatatcttgccccgctgctgcatctgtcaaaaccaggacactcgacaggaatcgttccaacagcagccgctgctgctgcctcactcatgtcaagtggcggtggcaaaaccttgtaatgctgctaggacagccaaagtccgttctttgagatgagtgggcgtggctaatgaggtggccttcttcgtgccgagcatttgagcagtcagttttgcctgctagtgttgtccatgtctgacacatcgttgtgccaaccttgctcttggtttgactggttgcatgattgctgatgggtaatgccctgccttgtagttgcagggtgtaacactctagtattaccaatattaaaatttctcaaaaatccaaaccat

SEQ ID NO: 6537 - DNA, 1587 bp, Zea mays
  Clone ID: 700570587_FLI
tggcgctcacaagaatcggtcttgctggccttgcggtcatggggcagaaccttgccctcaacattgcagagaaagggttccccatctctgtgtacaacaggacaacctccaaggtggacgagaccgtgcagcgtgccaaggcagaaggaaaccttcccgtctacggcttccatgaccccgcgtcctttgtgaagtccattcagaagccacgggtggtgatcatgctcgtcaaggccggcgcgccagttgaccagaccatcgcgacgctcgcagctcacttggagcagggcgactgcatcatcgatggggggaacgagtggtacgagaacacggagaggagggagaaggccatggaggagcgcggcctcctgtatcttggcatgggtgtctctggaggagaggagggtgcccgcaacggcccgtccttgatgcccggaggctcgttcgaggcttacaagtacgtcgaagacattgtcctcaaggtggctgctcaggtccctgacagtggcccgtgtgtcacgtacattggcaaaggtggatcgggcaactttgtcaagatggttcacaacggaatcgagtatggcgatatgcagctgatttccgaggcatacgacgttctcaagtcggtcggtaagctcaccaacagtgagctgcaccaggtgttctccgagtggaacaagggcgagctcctgagcttcttgatcgagatcacggccgacatctttggcatcaaggacgagcatggcgatggctacctggtggacaaggtccttgacaagaccgggatgaaagggacagggaagtggacggtgcagcaggccgccgagctgtcggtggccgctcctacgatcgaggcgtccttggactcgaggttcctgagcgggctgaaggacgagcgggtggaggcctccaagatcttccagggtgactactactccaccggctcgccggtggacaaggcgcagctggtggaggacgtgaggcaggccctgtacgcgtccaagatctgcagctacgcgcagggcatgaacatcatcaaggccaagagcgcggagaaaggctgggggctcaacctcggcgagctggccaggatctggaagggcgggtgcatcatccgcgccatcttcctggaccgcatcaagaaggcctacgacaggaacccgggcctcgccagcctgctcgtagaccccgagttcgcgcaggagatcatggacaggcaggcggcgtggcgcagggtggtgtgcctcgccatcaacaacggcgtcagcaccccgggaatgtccgctagcctggcctacttcgactcctaccgcagggacaggctgcctgccaacctggtgcaggcccagagggactacttcggggctcacacctacgagagggtcgacatgcctggctctttccacaccgagtggttcaagattgcgcgcaacatctccaacaactgatgagctgctcaacggatggcatgcccggtgttgactactccagtcggtaatgagatttcctgcaggaacttgtctattgatctttgtaagttaattatttatatgaataaaataagagcagacatgcttgtgtttgggc

SEQ ID NO: 6538 - DNA, 634 bp, Zea mays
  Clone ID: 700570619_FLI
tatgaatcccatgcaggttgttggagctgttggttttcagcaacgacggcttgatattcctggtggtgtggatcctgctgtagcagagataataaggagatgctggcagactgatccaaggatgcggccatcattttcagagatcatggctactttgagaccattgttaaaaaacatgcctgccaaccaacctaccaggaagcgggcacaacaaacagatgattaagaatatattggtcagtatcagctgaagacacaggccaaagagagactgcattggtttgtcttgctcttgccttcccagcttcaagcaattggccatctgtaactattaccattgttttgtacagtacgccaaatgcgtatttgatgaagaacagatccatgaagccaaagaaaagaaagggaaaagaaaatttgcgaaagttcgtgcatactatttttgcagacacaatggttactggagtcagaagttgacatgtcatgttgtaacaggatcatcgtcttctgttcagttaggccttatttttgctagtcctcgaactaatggaaaactattccatctttaaggccccatcaaattgtaatgttttactatgaaaaggttggctcacccttgtgtatatcacgtctc

SEQ ID NO: 6539 - DNA, 665 bp, Zea mays
  Clone ID: 700570625_FLI
gccggcgctgagatgttggtttatcaagacctcctatctggcgacgagctcctgtcggattcattcacctacaaggagctcgagaacggcgtcctgtgggaggtcgagggaaagtgggtcacccaaggtcctgttgatgtagacattggtgccaatccatccgccgagggtggtgaggatgaaagcgttgatgacacagccgtgaaggtggttgatattgttgacacattccgtctacaggagcaacctccttttgacaagaaatcatttgtctcttacataaaaaaatacatcaagaatctcactgctgtgttggagccagagaaagcggatgagttcaaaaagggtgtcgagggtgcaaccaagtttctccttagcaagctgaaggaccttcaattttttgttggtgagagcatgaaggacgaagcgtccgtggtattcgcctattacaaggatggtgccactaatccgacattcctctatttctctcatggtcttaaggagatcaagtgctagattagttacccatgttgggtactatatatgttctattgttatagccacaactatagctgccctgcctgaactgaactcagtttttttttaagaaaaaactgtccaagattggattgcttgttaaagctaaatattgttattgacgtgtt

SEQ ID NO: 6540 - DNA, 1195 bp, Zea mays
  Clone ID: 700570679_FLI
gctttgaagtgtaaggagcccaggagctctgatctcctctcctacatgcacttcctgtatgaggcctgcccctacttcaagttcggctacatgtcagccaacggcgcgatcgcggaggccatcaagggagaggacaggatccatatcatcgacttccacatcgcgcaaggggctcagtgggtctctctcctccaagcccttgcagccaggcctggcgggccaccgttcgtgagggtcaccggcattgatgattcagtctcagcttacgctcgaggcggcggtctggagttggttggcaggaggttgacacatattgctggcctctacaaggtgccctttcagttcgacgcagtcgctatctcaggcagtgaggtggaggaggagcatctaggcgtcgtcccaggcgaagccgtcgccgtcaacttcacccttgagctgcaccacatccccgacgagaccgtgagcacggcgaaccaccgggaccggatcctgaggctggtgaagggcctgtcgcccaaggtgctcacgctggtggagcaggagtccaacaccaacacggcccccttcgcgcagcggttcgcagagacgctggactactacacggccatcttcgagtccatcgacctggcgctgccgagggacgacagggagcggatcaacatcgagcagcactgcctggcccgggagatcgtgaacctggtggcctgcgagggcgaggagcgggtggagcggcacgaggtgttcggcaagtggaaggcgcggctgatgatggccgggttcagcccgtccccgctcagcgcgctggtgaacgccaccatcaagacgctgctgcagagctactcgccggactacaagctcgccgagagggacggcgtgctctacctcggctggaagaacaggcccctgatcgtctcatcggcatggcactagtgttgacttcagagaatgttgacctgatggagaatgtttcttgtaaccttcgaagtacctcttagtggtttagatatgtttggctggtcactggaactatctataggaagcctatggtgatagatactgagttgtagtagaacacatatagcctaaatgcctaatgctgtgatggcagtcactaccagcctagcctagaacaggttgatgatgtgtagtagtaagtttgggtatatgtttcagttaatcagttttgcttgggtgc

SEQ ID NO: 6541 - DNA, 843 bp, Zea mays
  Clone ID: 700570694_FLI
cgccgcagaaatggcgctgccgaatcagcaggttgtggattaccccagcttcaagctcgtcatcgttggcgacggtggaactggcaaaaccacatttgtgaagaggcatcttactggcgagtttgagaagaaatatgagcccaccattggtgttgaagttcaccctctcgattttagcactaactgtggcaaaattcgtttctattgctgggacactgctgggcaagaaaagttcggtggcctcagggatggctactacattcatggtcagtgtgccatcattatgtttgatgtcacttcgaggctgacatacaagaatgttccaacatggcacagggacctgtgcagggtgtgtgagaacatccccatcgttctctgcggaaacaaggttgatgtaaagaacaggcaggtcaaagccaagcaagttacattccacaggaagaagaacttgcagtactatgagatttctgccaagagcaattacaactttgagaagcccttcctttacctcgcaaggaagctggcaggggatcagaaccttcactttgtcgaagccgttgctctgaagccaccggaagtgcagattgatatggccatgcagcagcagcatgaagctgagcttgcagctgccgctgcgcaacccctccctgatgacgatgatgacctgatcgaatagatgttccatggcccttgttgatgcgagggggagagcttttattacaaatccgtggtggttcagttcttgtcaggcctagccgtacgtgatttttctgttatgtaacctgctgttgacgagggtttttggtgatccttgattttggtaatacatcgctattgtcaggc

SEQ ID NO: 6542 - DNA, 507 bp, Zea mays
  Clone ID: 700570702_FLI
ccacaatgcaggaattcagcaaagagatgacaaaggctggtgtgatggaagaaatggtcaacgatgctttagattcaactctggacagcgaggacatggaggaggaaattgaagaggaggttgacaaggtcctcactgcaatcgctggggagaccgcctctgagctcccggatgctgtcaggaaggaaaaggagaagatgaagcagccttcaacaagtgtacctgcggagagaactgctatagcagaggctgttgatgacggtgagctagaccagataagggaaaggcttgccagagtgaggtcatagaagatagctgaacaaggtcagatcattgaggtgttacggcacatgacatctcacttgataatgtatacacgtatcacacacaatcactgtgattagcagaccgatttccccacatccagcaatatgtgattttgtccaggccctgttgtaacctgtatgggtcatgatttctaatatatatcacgtattatatgtttgg

SEQ ID NO: 6543 - DNA, 469 bp, Zea mays
  Clone ID: 700570704_FLI
cgcgcgctcgtcgccgccacccgcgcgatcggcctccccgagctcctccccgaggagcagccccccgaggaggagatcttcgccgagggcgccgccgacgtcgagggaagcgccatccgccgcatccaccacgcgctcctcgaggttcatgtccaggagggctccctcgtctgccccgacaccagccgctgcttccccatcaacaagggcatccccaacatgatgctccacgaggacgaggtctgattttgccgtgtcagtttcgccctggcctcttttgctcgcgcacctgctctacatggtctgtcgcgaagggtatcaggccttgtggacttcgtactcagattgtacctgtgaagtatggattgcagtcttgcagattgtgcccttataatatgatagatagccgtgtaatactcggaattgccgtttcgtgttgttaatttggtgcatgtcatgctttgttctt

SEQ ID NO: 6544 - DNA, 1430 bp, Zea mays
  Clone ID: 700570744_FLI
ctgctctcccccacctcccggtccggcagcagagagcgggggtgcagagagatcgagatccggaggccgcgagtgggagcgccaccaccagcgactgcggcaatggcgggcacggtgacggtcccggggtcgtcgaccccctccacgccgctgctcaaggacgagctcgacatcgtgatcccgacgatccgcaacctcgacttcctggagatgtggcggcccttcttccagccctaccacctcatcatcgtgcaggacggcgacccgaccaagaccatcaaggtgcccgagggcttcgactacgagctctacaaccgcaacgacatcaaccgcatcctcgggcccaaggcctcctgcatctccttcaaggactccgcctgccgctgcttcggctacatggtctccaagaagaagtacatctacaccatcgacgacgactgcttcgttgccaaggacccatctggcaaggatatcaatgctcttgagcagcacatcaagaacctcctcagcccatccaccccgttcttcttcaaccccctgtacgacccctaccgtgagggtgctgactttgtgcgtggataccccttcagcctcagggagggtgctcacaccgccgtctcccacggcctgtggctgaacatccctgactatgatgctcccacacagctggtcaagcccaaggagaggaatgagaggtatgttgatgctgtcatgacaatccccaagggaaccttgttccccatgtgtggcatgaaccttgccttcgacagggatctcattggccctgctatgtactttggtctcatgggtgatggccagcccatcggtcgctacgacgacatgtgggcaggatggtgtgtgaaggtcatctgcgaccacctgagcctgggagtcaagactggcctgccatacatctggcacagcaaggctagcaaccccttcgttaacttgaagaaggaatacaagggcatcttctggcaggaggacatcatccccttcttccagaacgtgaccatccccaaggactgcgacaccgtccaaaagtgctacatctacctctctggacaagtgaaggagaagctgggcacgattgacccctactttgtcaagctcggtgacgccatggtcacctggatcgaggcctgggatgagctgaacccgtcgacccctgccgccgcaaatggcaaggccaagtagatgtgccatcacttcggcactggagtgaaaaagaaagtatgattgggtcctgcctaggccccatagatatagctcttttttgagaaggaagagagattaattcagcagcagcttttataaattctttgttgtcatgaagcaggtggttcttttgtagttgatgaaagggatttgtcgtcgctatcgtttacataattcagacaataattttatattgtgtgattctgagagtc

SEQ ID NO: 6545 - DNA, 1536 bp, Zea mays
  Clone ID: 700570906_FLI
ctcttcccaaggagagacccaccgcccattatccaaccctactacttgcttttgtctccactctcagtctcctctccaaatctccaaccctacttgttccagaaaagaaaaagaactatccatcccgctgtgagccaagccagcccagctccggcgactggcagatgtttcagggtccccgtccgtttgccgcaggttccctgatatcggtggccagcagccgactttgtggttagtccattctcttccggcgggatacgttgcggaccacttcgctcagctgctcgcgacggcggcttgtaccctgatttgggtgtggttcttgtagagcggtcgtgtcgtccgagcgttgatctgaaccagcgcagtttatcagggacgtagcagtgagttggggaggatgcctgatatccagctgggatgccacactataaggtcccatggtaccaaagtggcaacattacacatgtatgactggattatacttttatgtcttgctgtacttgatggactgttaaacataatcgagccctttcaccgctttgttggacgcgacatgatgaccgacttgagttatcccctcaagggcaacacaatcccattttgggctgttccactgattgcgatcgtgctacccttggttatctttgctgtcatttacttcaaaaagaaaaatgtctatgatttacaccacggcatactagggatcttgtattcagtgcttataactgctgtgatcactgatgcaattaaggatggtgttggtcgccctcggccagatttcttttggcgttgctttcctgatggcaaacctaattttaataatataaccaccgatgtgatatgccatggagaaaagagtgtcatcaaggaaggtcataagagtttcccaagtgggcattcttcatggtctttcgctggtctaggttttcttgcatggtacttggctggaaaacttaaagcttttgatcgcaaaggtcacattgcaaaactgtgcttagtttttctgcctctacttgtcgcgtcacttgtggctgtttctcgagttgatgattactggcatcactggcaagatgtctttgccggcggcatcataggtcttacagttgcttcattctgttacctgcagttcttcccatatccctttgacaatgatgccctatggccacacgcatacttccaacagctagctgagacacacagtaatggtaatgcaaactcaatcaacataagacctacagagtttgaagatgaaccagatgaccatggtgacattgtcctgagggacaccagccctatcttggagtcaatggagtctggcaggagaccatgaagaagcatgccactgtgggtttgtccaaggtgcccttcaaattctggaagcgtgatgagttttgtggtttcatcatgtagccgtccaacgtaaaaacagtatggaggtatatctaccaccacctgatgatttgatgatccacagactgtcgtggttagctgtaaatgacagcgaatgtttatgtttctagtgacaatgtgaat

SEQ ID NO: 6546 - DNA, 675 bp, Zea mays
  Clone ID: 700570994_FLI
ggaagacgaagaaaccctcctcctccaccaacccgatccagctacatccgttgagggccaggagcagctagccgtcttcgatcgatccgttcgcatccccaacgcagttcggtttgtaaggtaggaaggagcgtgatggccaagacaagctcgttcaagctggagcaccccctcgagaagaggcaatctgaggctaaccgtatcagagagaagtaccctgacagaattccagtgattgttgagaaggctgagaggagtgatattcctgacatcgacaagaaaaagtacctcgtccctgcagatcttacagtcgggcagttcgtgtatgttgttaggaagagaatcaagctcagtgctgagaaggctatcttcatatttgtgaaaaacacccttccaccaacagctgctctgatgtcttcaatctatgaagagaacaaggacgaggatgggttcctctacatgacttacagtggtgagaacaccttcggactgctctagatggctcaccgcaatcgggtcgggtagccttgcccatgcctcctgtaaataagacctgccaagcaactgtgtatattctggtttcgtcgttgcaagtggttgcgctctactgctaaagcctacctatcagttgtggagttgtcgtcgatgttatggacacacttaatcaagtttatt

SEQ ID NO: 6547 - DNA, 787 bp, Zea mays
  Clone ID: 700571016_FLI
tgatctcaaggccagcaacattctcctggacgtggacatgaaacccaagatatcagattttggaatggcaaggatgtttggaggggaccaaaaccaattcaacacgaatcgggtcgtcggtacatttggctacatgtctcctgaatacgcaatggaaggcattttttcagtcaagtctgacgtctatggcttcggagtcctgatcttggagatcatcacaggaaagagggctgtgagcttccactgtcacgaggactccttgaacatcgctggatatgcgtggcggcaatggaacgaagacaatgctgcggagctgatcgatccagtgataagagcatcgtgctcagttcggcaggtgctgagatgcatccatattgcgttgctgtgcgtgcaagatcacgcagatgagcgacctgacatccccactgtcatccttatgctgagcaacgacagctcgagccttcctaatccgaggccgcctacgctgatgcttcgaggccgtgagatcgaatccagcaagtcaagcgagaaggaccggagccactccattggcactgtgacaatgacacagttgcatggaagatgaagtataacacgaaaaatatactgaatttgtgatatatttggtttttttgttctcccttcctgatgttgataatttgccatttgtcgcggattagtttcctctttttctccttttcatgacggcgaccgcgaagttgtatgaaaatcacattagcgtcatacattaagtgacaattaattttgcaaaggtgagatatttacc

SEQ ID NO: 6548 - DNA, 1217 bp, Zea mays
  Clone ID: 700571084_FLI
gtcggcaacgaggtgttcaagggcaacgacagcgcgctcaaggcgagcctcctgccggccatgcagtccgtgtaccaggcgctgaccgcggtgggcctgcagggccgggtgaacgtcagcacggcgcactcgctggacatcatgggcagcacctacccgccctccgccggcgcgttcgggcccgacgccgtgccctacctccagccgctcctggccttcttgtccgcggcgcggtccccgttcctcatcaactgctacccctacttcgcgtacaaggccgacccgggcaacgtgccgctcgagtacgtcctgttccagcccgacgccgccggggtcaccgacgccggcacggggctcaggtacgacaacatgctgtacgcgcaggtcgactcggtgtacgccgccatccagaagctgggccacaccgacgtcgacgtcaaggtctccgagaccgggtggccgtccaggggcgaccccgacgaggccggcgccacgccggagtacgccaggacgtacatcggcaacctgctgcagaggatcgagatggggcagggcacgccgatgaggccgtcggcgcccgtcgacgtctacgtcttcgcgctcttcaacgagaacctcaagcccggcccggcctccgaacggaactacggcttgctctaccccgacggcacgcccgtgtacgatgtcggcctgcggggataccttccacccatggattattcacaaggcaccagagaggcggtccgtttcttcgccttcatcagcttcgtagccattgcatcgatcactctcagcttatcctcctgagagcattgccgtaaagttgataaagaaagcgcggagactgaggacctcttgctgctaggatagcagatcgatcacaagccctcggagaagcaactaaagtcggcatgtaccatcaggcaagctttagaagcagaaatttgtctctgacttgttacacggccagccaaaacggtatcgaagtggtttttgatgacatccagcagccaaaactggctccgcgcgctgacagtaaagtagaactgactgaagattgcggccgacacgcacccaatgcacgcatagtagaattttccatttaatttgttctagagatgtcttctttatccaactccgcaactgtatatttgtatatcggccaaacagaaggacataaattcaggtcaaggctggccatttatacttagtttttt

SEQ ID NO: 6549 - DNA, 885 bp, Zea mays
  Clone ID: 700571086_FLI
gttggtgccatgctcccatactggttctcagcgatgacaatgaagagtgttggaagtgcagcactcaagatggttgaggaagtccgcaggcagttcaacaccatccctgggctcatggagggcattaccaagcctgactatgcgacgtgtgttaagatctctactgatgcatctatcaaggagatgatcccacctggtgcacttgtcatgcttacacctcttattgtggggatcttctttggtgttgaaaccctctctggagttcttgctggtgctcttgtttctggtgtccagattgccatctctgcatccaacactggaggtgcctgggacaacgcaaagaaatacattgaggctggtgcatctgagcatgcaagaaccttgggcccgaaaggttcagacccacacaaggctgctgtcatcggtgacaccatcggtgatcccctcaaggacacctcaggcccctcgctgaacatcctcatcaagctcatggctgtcgagtcccttgtctttgctcccttcttcgccacccatggaggcatcctcttcaaatggctttagaggaagaatggaagatggatgggtagtttatttttgccgggggagagcactagatatatgtcatagagaagtttcagtttacccatatggtgcacttcatccttttttgtttcgcttgtactgtgtcgcagtcttgttgaacttgtcagccgtggtatcacctagtttttgggtctagatgcagtagccgagtggagcaaaaacgtctagcattctacaggattggaatttggacatggatgtgttgggaagtttgatactgcatgtagatatttcgatgatgatgatcaaggaatgcacaagtcagatttacctgtgtttgtg

SEQ ID NO: 6550 - DNA, 674 bp, Zea mays
  Clone ID: 700571124_FLI
cgccaaccccctgccctgccgccgtctctctctaacccgcttctccacctccctcacatcggctactctccgcgcgcctaccgttccgcgccgcatcggattgggtggtcggggcctagtcgaggttgcgcgggacagcgtcagtccatggcggagcttgtgggaccgcgcgtctacagttgctgcacttgccggaaccacgtttgccttcacgacgacatcatctccaaggcctttcaggggaggaatggccgtgcgtttctgttctctcatgccatgaacgtagttgtgggggcgaaggaggatagacacctcatgacagggctacacacagttgctgatatctactgtaatgactgccgtgaggtgttaggctggaagtatgtgagagcatacgaagagacgcagaaatacaaggaaggaaaattcatattcgagaagtcaaagattgtgaaggaaaactggtagtgcccccaagttgccaatcaccaaatgttctggtgaagatgaaatggccatttagtgtgcttttggatgtttgtgtccttgtaaatagcttttcctccgtggattgcagtgctaaggtgccccatgttcacgcctcagtgacaattgtaaagcacacttgttcctgttcatttgtgtgaataaggtacttcatttggttatttggt

SEQ ID NO: 6551 - DNA, 270 bp, Zea mays
  Clone ID: 700571126_FLI
atggcaacgagatccttcaagctaccaaacccaatgtacttcatcagctgattttattgttagagcagtggacgaaggagcaggttttcatagggtgttcatatggtcccggtgtgaaactgcttttgttagacatccctcgggacataaatttagatttttatcttcaagcatgttgaaattcaactgaggcttgggtccgtcgaatctgccctatgatgatctgtaattacacacttcttttcccacactactggaagcatttgtggt

SEQ ID NO: 6552 - DNA, 1637 bp, Zea mays
  Clone ID: 700571256_FLI
gcagagacaggcgtcttcgtactcgcctatctccgcgactcaaagctttccccaattcccccccttctcccatttctcaccaccgccgccgctccccccgttcaacaacaccatgagggagtgcatctcgatccacatcggccaggctggtatccaggtcggaaacgcgtgctgggagctgtactgcctcgagcatggcattcaggctgatggccagatgcccggtgacaagaccattgggggaggtgatgatgctttcaacaccttcttcagtgagactggcgctgggaagcacgtcccccgtgctgtttttgttgaccttgagcccactgtcatcgatgaggtgaggactggcacctaccgccagctcttccatcctgagcagctcatcagtggcaaggaggatgcagccaacaacttcgctcgtggtcactacaccattggcaaggagattgttgacctgtgccttgaccgcatcaggaagcttgcagataattgcactggtctccagggcttcctcgtcttcaacgctgttggtggaggaacgggctctgggcttggttctctcctcctggagcgcctgtctgttgactatggcaagaagtccaagctcggtttcaccgtgtacccatccccccaggtgtccacatccgtggttgagccatacaacagtgtcctgtccacccactctctcctcgagcacactgatgttgctgtcctgctcgacaatgaggccatctatgacatctgccgccgctcccttgacattgagcgcccaacctacaccaacctcaacaggcttgtctcccaggtcatctcatccctgacggcttccctgaggttcgatggtgctctgaacgttgatgtgaacgagttccagaccaacctggtgccctacccgaggatccacttcatgctttcgtcctacgctccagtcatttctgctgagaaggcctaccacgagcagctgtccgtggccgaaatcaccaacagcgccttcgagccatcctccatgatggccaagtgcgacccccgccatggcaagtacatggcatgctgcctcatgtaccgtggtgatgtggttcccaaggacgtgaacgctgctgtggccacaatcaagaccaagcgcaccatccagttcgtggactggtgcccgactggcttcaagtgcggaatcaactaccagcctcccagcgtcgtccccggcggtgacctggccaaggtgcagcgtgccgtgtgcatgatctccaactccaccagtgttgtggaggtcttctcccgcattgaccacaagttcgacctcatgtacgccaagcgcgccttcgtgcactggtacgtcggtgagggtatggaggagggcgagttctccgaggctcgtgaggatctggctgcgctcgagaaggactacgaggaggtcggtgctgagtttgacgagggtgaggacggcgacgagggtgacgagtactagacgctctactggcgcggcgtcgtcgggcttgtgtgccactgctatcctgtgatctgccctgagtggctcctatcgtgttatgtttctgtcggttcttatctatctgtcgttgtgtggtttacaacttacgttgtaagactttattcccccgctttgctactgggttatt

SEQ ID NO: 6553 - DNA, 1943 bp, Zea mays
  Clone ID: 700571335_FLI
gaatttctgagattccagaggaggcaacttttactaacgttgaacagtttctggaacctcttgagctatgttatagatcattatgtgcttgtggtgacaaacctatagctgacggaagtcttcttgatttcttgcgtcaagtatcaacttttggtcttgcacttgtgaagcttgacatcaggcaggaatctgatcgacacacagatgtccttgattcgataacgacacatcttggaattggctcctatgctgaatggtctgaggagaaacgccaggattggttgttgtctgaactgaggggcaaacgtccattgtttggttctgatcttcctcagactgaagagactgctgatgttttaggcacatttcatgtccttgcagagcttccagcagattgctttggtgcatatatcatctcgatggcaactgccccatctgatgtgcttgcggtggagcttttgcagcgagagtgccatgtaaaacaaccactgagagttgttccactcttcgagaaacttgcagatcttgaagcagctccagcagctgtagcgcgactcttttcaattgactggtacatgaataggattaatggtaagcaggaggtcatgatcggatattcagattctggcaaagatgcagggcgtctctctgcagcatggcaaatgtataaagcacaagaagaactcatcaaggtggcaaagcattatggagtgaagctgacaatgtttcatggaagaggtggaacagttggcagaggtggtggtccaactcatctggccatattatctcagccaccagacacgatacatggatcgcttcgtgtaacagttcaaggcgaagttattgaacactcctttggagaggagcacttgtgctttagaactttgcaacgctacactgcagctactcttgagcatggcatgcatcctccaatttcccccaagccagaatggcgtgctctgatggatgaaatggctgttgtagcaactaaagaatatcgatcaattgtctttcaagagccacgcttcgttgaatacttcagatcggctacgcctgagactgaatatggcaggatgaatattggcagccgtccatcaaagaggaagcctagtgggggaatagaatcgctccgcgcaatcccatggatctttgcttggacacaaacaaggttccatctgcctgtttggcttggatttggcgcggcgatcaagcacatcatgcagaaggacatcaggaacatacatatactgaaagagatgtacaatgagtggccattcttcagggtcacccttgatctgctcgagatggttttcgccaagggtgacccgggaatcgcggctgtgtatgacaaattgcttgtggctgatgatttgcaatccttcggcgagcaactgaggaagaactatgaggagacaaaggaactactcctccaggttgccggtcacaaggacgtacttgaaggtgatccttacctgaagcagcggctgcggctgcgcgagtcctacatcaccaccctgaacgtgtgccaggcctacacgctgaagcggatacgtgacccgagcttccaggtgagcccgcagccgccactgtccaaggagttcaccgacgagagtcagccggcggagctggtgcagctgaacgagcagagcgagtacgccccgggcctggaggacacgctgatcctgaccatgaagggcatcgctgccggcatgcagaacaccggctaggccaatatacatactcggtttgcgaataacccgtctcccatgagatggtgggcgatatgtgtagcctgtaagcagacagttcgtcggcgtgttgcggaggaatttttatgtcagagcctttctctcgtgtgcttgatgtagatgccatggggagtttttactggctgttgaagcctgatgcaaaataaactatggaactaaggcattgtttgtttc

SEQ ID NO: 6554 - DNA, 1287 bp, Zea mays
  Clone ID: 700571337_FLI
ccaaagggagcagtggtgttcaatgggacaaatgaggatgacttcctatactgcctccctgataacaaagaattatctgtctgccgagagatggctagaagtatggggttcccgaagctcgaagctggattatgtgctatgacgaaggaggatctcgcggacagtcttgcgtataacagcctaaagggcttaatcctaagcaacgcattaagagcacaaaagagtgccgaagatgagagctatgaaattgcgttcaacaaccttcggtcagaagttattaaactgagaaacgaagctctggagaaggataaaattttgctcacattggtagacaaggtaaaaaaggacgaagttgcctcaaagatccaggccgaagcccaaaaacgtgagattaaagatcttcagaaacagctagctagagctaaagaggaacgtgtgtttgaagaaacaaaacgagagcttagtgatcagttggttaatcatttagagttaagtgttcaggagcttcgggcatcccagaggaaatgctatgttaaatctatagaatgcgtcaaaaagataaaatccagcttcgccagcgttggcgcattttctagtgaagaaagtttctccagaggcaatcccgaaggtccattggaatggattagtcatgaagcagaagccttcgaggaaatcctgagcagccgcggtgatatctgcgcattttcgggcgccagaggagttgctaccgttctagagaagaaaggttgtgatcatattaagctgcttgcacaatccgaagccactttatccgctgaagatattaaagacccctcgaccgaagctagccaagttggtggaaaattttttaccgacgtctgggataatggtggccgagaaatggcaggagaaattattcaaagaagtgaaaagggcattcacgatgctagagaagtggctaaggctgctgaaaagagcgcagagcccgaaggtcaattaggtattaattaatagtttgtatcgtgttgtaatttttatttcaaactttgttcgcggtttgtaatagtaatgcaaaaatattctcttccctcagaacctgctggatcgtttgttgaccttcacacaaaaggggatgacgaaattaaacaaatggccgaaactatcgtggataaagttgttgaacagcttctaaatgaggctgccgaagtaatattaagagaagactaggtgttattaggaaaaacagttgaagtgtgatttatgtaatatttggtacatttgaatgtaatatacaagtctctttttatt

SEQ ID NO: 6555 - DNA, 1167 bp, Zea mays
  Clone ID: 700571352_FLI
gtcgcctccctccggggcttggtggtcgagggagacggtggccgtggtgaccggcgcgaaccgcggcatcggccacgcgctcgccgcgcgcctggccgagcacggcctcaccgtggtgctcaccgcgcgggacggcgagcgcggggaggccgccgcggccccgctcctcgcgcgcgggctcgccgtcgtcttccgcaggctcgacgtctccgacgccgcctccgtcgccgagttcgccgcctggctccgcgacgccgtcgggggcctcgacatcctggtgaacaacgccgccgtgtcgttcaacgagatcgacaccaactcggtggagcacgccgagactgtcctcaggaccaacttctacggggccaagatgctcaccgaagcgctcctgccgctgttccggcagtcgtcggcgaccagcaggatcctcaacatcagctcgcagctgggccttctcaacaaggtgggcgacccgtcgctgaaggcactgctcctggacgaggagcggctgacggaggcggggatagaggcgatggtgtcgcggttcctggcgcaggtgaaggacgggacgtggggcgagcaggggtggcccaaggtgtggacggactactccgtctccaagctggccctgaacgcctactcccggctgctggcgcggcggctggaggcgcgcggcgtgagcgtgaactgcttctgccccgggttcacgcgcacggacatgaccaggggctgggggaagcgcaccgccggcgaggcggccgacgtcggggcgcggctcgcgctgctgccgcccaccgagctccccacggggaccttcttcaagtggcgcacgccgcagctatactctaagctgtgactggctctgggctctggctggctggctagctgagctgtcgtccgtcggccggggcgtacagcatttcggtccggcggtgtaggcgtgtagccgctcctcctattcctcctgctgaatagtactagcaagtatcaacaacgtgtgcagagaagtcggtaaccggagtgtcgatctgccaaggtgctttggttgaacactggctcagcccgtttgtgactctcagctatgtgtacaatgtgcgcttatatctgtcttaagatttaggccaacttctgagcactggttgaatggctgttccttacagttctgtc

SEQ ID NO: 6556 - DNA, 328 bp, Zea mays
  Clone ID: 700571450_FLI
gctgctccgcctggtgcgcgtcgggggtaccgtcgtgtacgacaacacgctgtgggccggtactgtggcgcttccccccgacgcgccgctcagcgacctcgaccgcaggttctccgccgccatcagggaactcaacgtccggctttctcaggatccccgcgtcgaggtctgccagctcgccatcgccgacggcgtcaccatctgccgccgcgtcgtctgatgtgatgatgatccgacgaccaagatcgtatatcattcgctcgtcgtctctgtcatctttcaactgcctgcccgctgccgtcgtcaactaataatgcatggttctgct

SEQ ID NO: 6557 - DNA, 823 bp, Zea mays
  Clone ID: 700571491_FLI
ccaaactacctgatgctgcccgtcaacgcgccgcgctgcgcgcaccacaacaaccactacgacggcgccatgaacttcatgcaccgcgacgaggaggtggactactacccgtccaggcacgcgccgctgcggcaggcggcgccgcccacgccactgccgcccaggccggtcgcggggaggagggagaaggcaaccatacgcaagcccaacgacttcaagcagccaggggagaggtaccgctcctgggacgccgaccgacaggaccgattcgtgaggcgattcgccgactcgctcggacacccaaaggtcagccaggagctcaggtccatctggatagacctcctcgccaagtgcgacgcgtcgctggggatgaagattgccacccggctcaacatgaagccaaacatgtgatgcatcatgcttgtgctgaataataatgaagacgcatgcatgtcgtcgccaggaacaaagatcgagaaataatacaagaccagcacgcatgcatgggcatactctatatatatatatgtatagcccgtgcccgtgcccgcctttgtaccaatacaagccaaaccaagtggatgtgtattattattattattgcgctatcacatacatgtacccctgcctgctacctgaagatggatgtgtatcgagttatcaaattaaggcacagcagcagaaactatatgtattgcataagaatactcgtctcgatatggacatgattccctcagctgctaatttgaagctatatgcttcggaatatctcgtgtatcctcgttgtcttcttctgaatacaactgtgggcaagaagttgatt

SEQ ID NO: 6558 - DNA, 1223 bp, Zea mays
  Clone ID: 700571512_FLI
gaaaaccctaaaccctcgctacccggcggcggctacaagctcttcgtcggttcagcaccatgaggccaccggctagaggaggacgtggtgggaggggtggcaggttcgatggcggcggccgtgggggcggcggcggcggccgtgggtttggcggtggtagaggcgggagaggggacaggggagggagaggtggcaggacccccagaggcggccgtggcggcggtggcaggggtggccgcggcggtggcatgaagggcgggagcaaggccgtcgtggtggcgcacaagcacgccggtgtcttcatctccaagtccaaggaggatgcgctctgcaccaagaacatggtcccgggagagtccgtgtacggagagaagcgtgtctccgttcagaatgaggatggaacaaaagtcgaatacagggtgtggaaccccttccgttccaagctggctgctgctgtgcttggtggtgttgacaacatctggattgctcctggtacccgtgtgctgtatcttggtgctgcttctggcacaactgtatctcatgtgtctgatattgtagggccggatggtctggtctacgctgttgagttctctcacaggagtggaagagaccttgtcaacatggcaaagaagaggaccaatgtgatccccattattgaggatgccaggcatccggcaaggtaccggatgttggttggcatggttgatgttatcttctctgatgttgcacagccagaccaggctaggatcttagcacttaatgcttcatacttcttgaagaacggtggccactttgtcatttcaatcaaggctaactgcatcgactccaccctgcctgctgaggccgtgtttgcagcggaagtggagaagctcaaggcggatcagttcaagcccgcggagcaggtgacgttggagccctacgagcgtgaccatgcatgtgttgtgggtgggtacagggtgcccaagaagcagaaggccacctcttaggatcggaatccgtgctcgtcttgcctaccaaagatgcttcgttgtattgtggtttattaagaaactttgaaggattagtcaaagtatgtgaaccttctgcagtgaaggctggtttagcagcgacagctgttagggtctgatgcagtgtttgctggtttaacagcattattattattattgttgatgaaacatgggtttggtttcgttgatctcactaaaagtgtcaatcttttggat

SEQ ID NO: 6559 - DNA, 374 bp, Zea mays
  Clone ID: 700571527_FLI
ggctccggcagtcccaagcccgggctcttccaagtcgtcgtcgtcgtcggcggcggcggcgatccgatccccgggctcagcgttcgccgttgtcgtcgccgcgactctgctctcgcactgcctcctctgaagatgcccgggtgtttggtggttttagttcatgatgatgagttgtgacgtgaacctgtgtatccgcactgtgccataattcgttgagttcaattgactaatcgaccatgttggctgttggcatactgcatgcagctattcatgtcgttctgcaaggaattgctgtgtccaggtacccaccttaacgttcacaaaactatgctgaaaacaacgcaatggaacacgtctcgttttagtttcaacac

SEQ ID NO: 6560 - DNA, 1256 bp, Zea mays
  Clone ID: 700571528_FLI
gcccgagcggcttaaaccctagctcgccgtcgtgctcggctcgccaccccgcgcctgctcctttcaggccctaaccgttcgccgccgcgcattcgagcacacgcggaagcgcacctagtgccatggcgaagaagcggaagcgcaccgacgcgcccgcagaggcggccggcgcagagaagcctgacgactccgcgccggcgcgcccggagcgcacgctcttcggcttcaaggacctggtccccgacgccgagcccgcctccgcgggcgccgaggccgcggtggcgccgttccggaacagggagaaggtactcatcacctgctcccgccgaatcacgtataggtatcggcacctgatgcaggacgtgctgtcgctgctcccgcatgcgaagaaggacagcaaggtcgagtcgaagcagagcaaggggaacgcgctgaacgagctccttgagctcaggagctgctccagctgccttttcttcgagtgcagaaaacagaaggatctttacctttggatggtgaagtctcctggaggaccatcagtaaaatttctagttaatgctgttcacaccatggaggagttgaagcttaccggtaaccatctgaaagggtcacgcccacttcttacattttctacaaattttgatgagcaacctcattggaagcttgtgaaggaaatgataactcagatatttgctactcctaaagatcaccgtaaagcaaaacctttccatgaccatgtgtttgtcttctccattgtggatggccatgtttggtttcgaaactaccagatttcggttccccacaatgagattgataaagttgataaaggtggtctggataaaatgacacttattgaggttggccccaggttctgtttgaatccaatcaaaatatttggtggtagttttggtggtcctacatggtatgagaacccatactacatttcccccaatcagatccgtgcactagagaagaggcagaaggcaggcaaatatgccaagaaggtgaaggccaaggtgaggcggaagatgcacgagatggagaacacgctggagcctgatgagtttgctgagctctggaaaggggagtaactggtctttgatcgaccctgtcaaagtcgtgaagcaccagcaactccttccacttccaccaagcgcaggtcttgtttaccattgtggcagtgccgactgtcgaggttgtggaagttttgtatcacaaagcatacttttatttatataaaatcggattttagtgat

SEQ ID NO: 6561 - DNA, 1874 bp, Zea mays
  Clone ID: 700571529_FLI
ggtatcccctcatggatactttggtcaagctaatgtattaggcttgccagacacaggaggacagatcgtctatatactggaccaagttcgtgcactagaaaatgagatggttcttcgtttaaagaaacaagggcttgatgtttccccaaagattctcattgttactcggctgataccagatgcaaaaggaacatcatgcaatcagcggcttgagagaattagtggaacacagcatacttacatattacgagttcccttcagaaatgaaaatgggatacttaagaaatggatatcaagatttgatgtgtggccatatctggaaacatttgctgaggatgctgctggtgaaattgctgctgaattacaaggtactccagacttcataattggaaactacagtgatggaaatcttgtggcatcgttgctatcttacaagatgggaattacccagtgcaacattgctcatgctctggaaaagactaaatatccagattcagacatattttggaagaacttcgatgagaagtaccatttctcctgtcagttcactgctgatataattgctatgaacaatgctgattttatcatcaccagcacataccaagaaattgctggaagcaaaaatactgttggacagtatgagagtcatactgcttttactctgcctggtctgtaccgagttgtccatgggatcgatgtcttcgatccaaagttcaatatagtctctcctggagctgacatgtccatatactttccacataccgagaaggccaagcgactcacctctcttcatggttcaatcgaaaatttgatttatgacccggagcaaaacgatgaacacattgggcatctggatgaccggtcaaagcccaccctcttctccatggcaagactcgacagggtgaagaacataacggggctggtcgaagcttttgctaagtgcgctaagctgagggagctggtaaaccttgtcgtcgttgccgggtacaatgatgtcaacaagtccaaggacagggaagagatcgcggagatagagaagatgcatgaactcatcaagacccacaacttgttcgggcagttccgctggatctctgcccagacaaacagggcccgtaacggcgagctctatcgctacatcgctgatacccatggtgctttcgtacagccggccttctatgaagcgttcggtctcaccgtcgttgaggccatgacctgtgggcttcctactttcgcgacgctccatggaggtccagctgagatcatagagcatggcgtctcgggcttccacattgacccgtaccaccccgaacaggctgctaatctgatggccgacttcttcgaccggtgcaagcaagacccagatcactgggtgaaaatatctggagcagggctgcagcgcatatacgagaagtacacatggaagatatactcagagaggttgatgacactggccggggtctacggtttctggaagtacgtgtcgaagctcgagaggcgggagacgaggcgctaccttgagatgttctacatactgaagttccgcgagctggcgaagaccgtgccgcttgcaattgaccaaccgcagtagcttgcgcaactgcgactgcgtagcacttggtacaagactgaaacctgaaggaccttcagtaatttaggcgcggcagacggtagccaataaaatgtgccggagctgaactggtttttattatgtacataatggcagtataacaaaattactgaaggcaggtgggttgcagttgtgtgttcgttactgtttactgtaacatgtcaagctgtcggctgcaatttctttgctggcaagccgcaggcactggtgaagtgctgataaatacatcatattctgttgacctgtg

SEQ ID NO: 6562 - DNA, 782 bp, Zea mays
  Clone ID: 700571573_FLI
ttctacttctacgagaagatgaagagccacgttcctgaagagcacagaaaaggtatcatagcaaagctcggttgcggatcagttgcaggtttgctaggtcagacaataacataccccctagatgttgttaggcgacaaatgcaggttcaagccctttcgtcatccagccttgtgggtagaggaacatttgaaagcctggttatgatagcgaaacagcaaggctggcgacaacttttctcaggattatctatcaactatttaaaggtggtgccatcagtagccataggatttactgtttacgactcaatgaaggtctggctaaaagttccgtcgagggaggaaactgctgttgctgtcttgacagaggagcgaagcaacacagctcctatcccctccagttaggcaggagtgtgtaggatagtattctttcttggatcttctccaacgcgttggagacaataattcgacgaccatcaataagcgcataagcaagcagtcgaaaagcaattcctggcggattagcatttctgtgtacaggctcttgtgtgtgtgtatatatatatatagctgattaataaataggttgcgcccctccctatcgtatcgcgacgagtacaaaagaatctatgcgccttgcattccccaccctgttggattgttgcgggctgcgcagcacacgacatctaggattttttggtcagatcctcgcatatctcagattccttgcctatagcctgtactggtcctatggattgttcttcccagatcgaattcaaattcac

SEQ ID NO: 6563 - DNA, 1770 bp, Zea mays
  Clone ID: 700571578_FLI
ggatttgaaagaccctctcctattcaagaggaaagcattcctattgctttaactggtagtgacattcttgcaagagcgaagaatggaactggcaagactgctgcattttgtattcctgcactggaaaagattgatcaagaaaaaaatgctattcaagttgttatattggttcccacaagggaattggctctacaaacatcacaagtttgtaaggagcttggtaaacatttgaagatccaagttatggtcaccactggtggaaccagcttgaaggatgatattgttcgtctgtaccaacccgtgcacttaattgttggaacacctggccgtattttggatcttacaaagaaaggtgtttgcattttgaaggactgttcaatgcttattatggatgaggcagacaagcttctctctcctgagtttcaaccttccatagaacagttgattcgctacctccctgctagtcgacagattttgatgttctcagcgacattccctgtgactgttaaggagttcaaggacaaatatcttcctaaaccttatgtgattaaccttatggatgaacttacactgaagggaattacgcagttctatgcttttgttgaagaacgacagaaagttcactgtctcaacaccctcttttccaagcttcaaatcaatcagtcaataatattctgtaactctgtaaatcgtgttgaactattggcgaagaagatcacagagcttggttattcttgcttctatattcatgcaaagatgctacaggaccaccgcaatagagttttccatgatttccgtaatggagcgtgcaggaatcttgtttgtactgatctttttacaaggggaatagatattcaagctgtgaatgttgttatcaattttgatttccccaagaactctgaaacatatctccacagggttggtagatctgggagatttggccaccttggtctggccgttaatttgatcacctatgaggatcgatttaacttgtataggattgaacaagagcttgggactgaaataaaaccaattcctcctcagatagaccaggctatatattgccaatgatcaggcagttttcatctttgttcatttctccgtgattaataaggagacaacttttgtaaataccagctcatcaggttttatggtgttgatctcatttggtgcatcggagacaattctaagttggtggattacgtgagacgaggcacccgacttttcctgatcaccttgtcatgctgacactattatggctatatgagggaaaatgtcctgccacactaggcacaaagtagtgtatattactaggtgcctattcctagaccctgtcctgctttgagttcgtttgtatttcccttgttttccgtacgccgtgtcgttaagcagtttcacacaggacattttaaccctgttgctggttctgggcgtgtggcctgtgggtgccgcgcacaagggtaaaagacattttagcccaagtggaacttggggatgtgcgcctcagattggttaatgggtgtgacaagtcggccatcacacttgaggtctggagtctgaacggtagtgaagtgattttaagtttgccaataatcagtggtaagctgcaccgtgctgtgctgtcttttacccttgcaaccatgtccctttgcttcttggcatggtcgccatttagattctgtccggcgaatgtaacgctgggataaaacgttcttgtcgtttgtgatggatttatgtgtttggcacaagcaacttggccaggttatgggt

SEQ ID NO: 6564 - DNA, 1369 bp, Zea mays
  Clone ID: 700571588_FLI
cgcgcacgccatccccctcccgtcgcgtgcggcgtgccgtcaatccaaaccaccaaaagcaatgccgccgccgtccgcaaacggcgccgccgccgccgccgccgcgagggacgacatgtccccggcggaggccaggctggcgatgatggagctggcgaacatggtgtcggtgccgatggcgctggcggccgtgatccggctgggcgtgccggccgcggtgtgggcgggcggcgccaacgcgcccatgtcagcggctgacctcctcccgccgggccacccggacccgtccgtcctggagcggctgctccgcctgctggcgtcccgcggcgtcttctccgagtccaccgagtccacgcccaccacgcggcggcggctattcgcgctcaccgcggtgggccgcaccctggtgccggggcccgcctcgggcgcgtcctacgccgactacgtgctgcagcaccaccaggacgcgctggtggcggcgtggccccgccttcacgaggccgtgcttgaccccgcggggcccgagccgttcgcgcgcgccaacgccggggtcaccgcctacgcctactacggcaaggaccaggacgccaaccgggtgatgctccgcgccatggcgggggtatccgagcccttcatgggtgccctcctcgacggctacggcgccgccggcgggttccgcggcgtcgcaacgctcgtagacgtcgggggaagctccggcgcctgcctcgagatgatcatgcgcagggtccccaccatcaccgagggcatcaacttcgacctccccgacgtcgtcgccgcagcgccgcccatcgccggagtgaggcatgttggcggagatatgttcaagtccatcccttccggtgatgccatcttcatgaagtgggttctgacgacgtggaccgacgacgagtgcacggccatcctgaggaactgccacgccgctctgccggacggcggcaagctcgtggcctgcgagccggtggtgccggaggagacggacagcagcaccaggacgagggcgctgctggagaacgacatcttcgtcatgaccacctaccggacgcaggggagggagcgctccgaggaggagttccgccacctcggcgtcgacgccgcaggcttcaccgccttccgagccatctatctcgaccccttctatgccgtcctcgagtataccaagtgatctccactccatccgcccaaatctccttgcgagttgaatagcagaataacgaacagataaataaagctattccattcacgttggaatccgaatctctgcctactgtactcaacgttagcttctgtaaccaggatatctctttcaagcatttccaagcttttgatgacaaaatcataattttgagct

SEQ ID NO: 6565 - DNA, 428 bp, Zea mays
  Clone ID: 700571607_FLI
cggcggcaaggagcggtacgagcgcgagttccgcgagctcgcaaagggcgccggcttctccgggttcaaggccacctacatctacgccaacgcctgggccatcgagttcatcaagtgaaccaccgtcgccgcgatgagatggcatggctgccacatgctttgcttgcttggtcctcgtatcgtacgtcgccgtcgtcgtcttcttctggttattgcgctgctacctcgctgctctcgcgtatgcatgtacttttgcttaattttctttcttcatatcatgcactctggctggcctagactgcccccgatccatggtggccggtacgtcttgtcgagctcttgcatgtcgtggattctaaattcttcttctgcgtcgaattgtctctgccatgtgcgagtaataacaatcaaggttatacttacgatac

SEQ ID NO: 6566 - DNA, 938 bp, Zea mays
  Clone ID: 700571617_FLI
gttggccgctgggagaaggagcagttccgctctctcgtttgggtggacgacgaggaagaggaggccaacgcccacagcaacaggcgaccagcccgcgaagacgtggcaccaggataggtgctcctgtcctgagcttcaaatccccaccccgcggccaagctgttacttgcgctgcggccttagcatgaggtggccgctggcgatctcgactcgccgccgccccctcctccttttcgtccttctcgtcgtcctctacacgattcctgggacattttcatcgaggcaagtcacactcgatactgttgagatattttctactcatgaatggtttggcaaaccaacagtcgttttcgggtgcaatggagagaataaaacagatttgccagatgtgagggaggtgcacacgctatatacctttaagggtgaagaatcatggcagcccttaacagagcttccagaaaagaaatgcaagcgatgtggtttgtatgaggaggacacaattacacctgatgatgtctttgatgaatgggagatgtgttcgagtgatttcaagggtgggaaatacacccggtttaaggaaggccagttcaatgcaacattcctatgtccaaactgcactgcctcaactggacatggaaaccgtgaacctagcgaagatttggaaactaagaagacatctgttgtggtcatcataatagttagtgttcttgcatcagtccttctcaccattgccttgttcgggggctacaagtactggcagaagaagaagcgggagcaagaccaggcgcgattcctcaaactctttgaagagggagatgaccttgaagatgaactgggccttaccaatgaactctaaaacagtgctacagtcttacttcctatgttttcagatgtagtttccacgtatgatgtataggatgtttggttttcactgattt

SEQ ID NO: 6567 - DNA, 1211 bp, Zea mays
  Clone ID: 700571645_FLI
gttagtttgttgttttctttttgtagttctttacaacaaagccttatgcctgtgatccatcaaatctacccaaatatcccccaagcaaggaatacgatgctaagcttcgagatgaagaagctaggaggcaaagagcagctgctaaaggacaggaagctgaagctggacggaggaagcaacttcctgcacccgatggtaatagtggattgcagcaccgccgagttcaggtgaattccaaaaacagcacttacaagttcactccaaaggaggatgtttctggatttccaattgatccgtcagcaagagctgcagataatggttacccacagcgtgttcctttgatgcaagctggccgttcttcgtccactctgggcagatcaagtggaatggatccaaaagcccaacgatttcacacctcccaaattgttactattactacagaaatgtccaaccaatctactgcatctgggcagagaggcaatgctccgaagatgtctaaccttggggaaagtgcccggaggcaatatttgagagagcaccggtccagttcaagatacagtcagctcaccgctgctgacccttctgacagacctgagtggaatcatcagttccaagaaagaccatcatcttcccatcggaaggatgatgctgcggtaaacaaagagactacagtggtgaatggcacaaagaagaacagaatccactattcgggaccactgatgcctcacggagcgaatatggatgagattcttagagagcacgagcgacagatccaacaggcggtacgaagagcccgccttgacaaggggaagggaaagcacaacggcgagagagaccagtcagaggcactgctgtacaccaccgggaatgtcagggctgatcgctgaaaagttcagtttggtgtggacccccgatttgagcaaccatcagaagcgtagaaaatagcattgagtcccttctatttttccacaccaagtggagaggtttttgctttgccagaaactccaactcctgatgcggtttggtgcccaggagatacagctgccaaaaagaaaacctgttcctgtagagatttaccacccagagtttagcattaggctgtctaaaatatttttttctcaagatttgttgctggttatccatagccatcaattgtatatctcaagtcaagagtactctccctgaaagttgatccacatacctgttttgac

SEQ ID NO: 6568 - DNA, 1021 bp, Zea mays
  Clone ID: 700571655_FLI
ccatcaccgacttcttcaaggtgtaccagttcgagaacctcttcgccaagcgcaacacccccgtcgcgcacgccgtcgggttctgggactaccaggccttcatcaccgccgcggccctcttcgagccccaggggttctgcaccaccggcggcaagcagatgcagatgatggagctctgcgccttcctcgggcacgtcggcgccaagacttcatgtgggtacggcgtggcgaccggcgggccgacggcgtgggggctgtgctacaaccacgagatgagccccgaccagacctactgcgacaagacctacacccagtacccctgcgtcgagggcgccgagtactacggccgaggcgcgattcctgtctactggaactacaactacggcgctgccggtgacgggatcaaggcggatctgctccaccacccagagtacctggagcagaacgcgacgctggcattcatggcggcgatgtggcggtggatgacgccgatcaagaagagccagccgtcggcgcacgacgccttcgtgggcaactggaagcccaccaagaacgacacgctcagcaaacgcctgcctgggttcggcgccaccatgaacatactctacggcgagtcgatctgcggcaagggatacgtcgacgccatgaacgttataatctcgcactaccagtattaccttgatctcatgggcgtcggccgtgagcactctggcgacaaccgtgattgcgccgagcaggcaccgttcaacccctccagcccgacggatgaccagaagcagcagcaatcaggaagctaagacggactcattgcgccattgccactgatcaagcttccacagcgctagattgagctacagattcttcaggatgcgtgaagctgcatgcatcgtgttgatgttgttttgaatagactgtatgtactgtctatgtgaattgcgagatttgtggttatttactaccatgttgtccatagatagtctgttttggtttctttggttctgtcagatacgttatacacatg

SEQ ID NO: 6569 - DNA, 1719 bp, Zea mays
  Clone ID: 700571675_FLI
atctagccgtcgccactcgccgcggctaacccagctcccagcccccgtctcgtcgccatgggaaccaggaatcttacgcggaaccgcgccgcttccatggcgacggcatccactacgctgctcctctcccttgccttcctcgccttcgcctgggcggcgtcgccgtcgccggatgcggaggcgatctcccggttccaggagtacctccgcatcgacacggcgcagccggcgccagattacgccgcggccgtggccttcctccggaaacaggccgccgaggctggactcgaggcgcgcacgcttgagctcgtcgccgggaagcccctgctgctgctgcggtggcccggtcggcggccgtcgctcccctccatactcctcaactcccacactgacgtggtgccgtcggagccgaacaagtgggaccacccgcccttttccgccgccctcgatgagccatccggtcgcatctacgcgcgaggctcccaggacatgaagtgtgtggggatgcagtaccttgaagccattcgccgtctccgttctgcaggatttgttccagatcgaaatatctatataacatttgttcctgacgaggagattggtgggcatggcggtgttgaaccatttgtttcatccaaggagttcaaagatatgaacgtggcattagtccttgatgaagggcttgcctctccaggggaggagtaccgtgtgttctatgcagagcgtagcccttggtggcttactataaaagcaacgggcgcaccagggcacggtgcgaagttgtatgatggtagtgcaatggagaatttgatgaagagcgtggaggctattaggagattcaggacatcacagtttgatctagtgaaatctggagagaaggctgaaggagatgttgtatcggtgaattttgcgtacctgaaggctggcacacctacaccaacgggttttgtcatgaatcttcaaccatctgaagcagaggtaggtcttgacatccggatccctcctagtgcccatgtggaagcactggagaggcgccttgttgaagaatgggcaccaccttcacgcaacctgaccttcgagtttaaacagaagatgtctgtcctggacaactttgggaagccagccatgacagcggcagacagcacaaacccatggtggacgttgcttgaagaagctgtgaagagcgctgacggcaaactcggcaagccggagatattcccagcctctactgacgctcgctacttccggaaaatcggattaccagcatttggcttttcacctatggcgaacaccccgatactgctccatgaccataacgagtttctgagcaaagacgagtacctcaagggaatcgggatatacgagtccatcatcagggcactagccactcatgaagatggcggcaaagatgacgaatccagggcagagctgtgagcctgtgactgaggagaaccttgaaccttacctcgcttttgccgcagaccaaatggagcactggaagtcatgtttcggcattatgcagctgcttgtgcttctgctgcggcgtcggagcgatagaaccacaaacatcatctttgtacattctcgcaagagggcttatgcgcttaataattgatgaaattgagatatgtagttcgtctgcgcagttcagggctcaccctgttgctacttgatgctgctttggcattggttgttgtatcaaaacttatatttacgttgctt

SEQ ID NO: 6570 - DNA, 1636 bp, Zea mays
  Clone ID: 700571676_FLI
cctccacctcgtcaagacgccgttccactcggcgctgggccgcctcgcggagcgccacggcccggtgttctccctgcgcatggggtgccgccgcgcggtggtcgtgtcctcgccggagtgcgccagggcgtgcttcacggagcacgacatgagcttcgccaaccgcccgcgcttcgagtccatgcgcctcgtgtccttcgacggcgccatgctctcggtgtccagctacgggccctactggcgcaccctccgccgcgtcgccgccgtgcagctcctctccgcgcaccgcgtcgcctgcatgtcccccgtcatctgcgccgaggtgcgcgccatggtgcgccggatggctcgcctagccgcgggcggcgccgcgcgcgtccagctcaggcggcgcctgttcgagctctccctcggcgtgctcatggagaccatcgcgcggaccaagacctcccgctccgaggcttgcgccgccgacactgacgtgtcgcccgaggcgagcgagttgacgcggatctccgaagagatcatgccgtacctcggcacggccaacctgtgggactacctgccgttcctgcggtggttcgacgtgttcggcgtgaggaacaagctcatggccgccgtgaggtggagggacgcgttcctgcggcggctcatcgacgcagagcgccggaggatggacggtgacggcgacggcgagaagaagagcatgatcgccgtgctgctctctttgcagaagtcggagccggagctgtacacggataccatgatcatggcgctgtgcggggacttgtttggcgccgggacggagaccacatcggtcacgacagaatgggccatgtcgcttcttctgagccacccggaggctctgaagaaggcacaggcagagatcgacgcggtggtgggcaactcccgccgcctgatcaccgccgacgacgtgccccgcctcggctacctgcactgcgtcatcaacgagaccctgcgcatgtacccggccgctccgctgctgctgccgcacgagtcggcggcggactgcaaggtcggcggctacgacgtgccccgcgggacgctgctgatcgtgaacgcgtacgccatccacagggaccccgcggtgtgggaggacccgggcagcttcttgccggagcggttcgaggacggcaaggccgaggggcggctgctgatgccgttcgggatggggcggcgcaagtgccccggcgagacgctcgcgctgcggaccgtcgggctggtgcttgccacgctgctccagtgcttcgactgggacacggttgatggagctgaggttgacatgacggagagcggcgggctgaccatgccccgggccgtcccgttggaggccatgtgcaagcctcgtgcagctatgtgcgatgttcttcgggagctctaatattctggcacatcctaggttctcgctctataggtgaaagtttcatatgtagtttcgtagaagtatgcatgtctgatggtctgcgctgaactaagtacattatcatctagtacaaaatatcgtacatatacccgcatatatgtaaacaactagtactcaattagtactagtcgttgtttcccagcgtgctttagcaaatttaatcttcggcgaacgagaaatttgctattatgg

SEQ ID NO: 6571 - DNA, 2129 bp, Zea mays
  Clone ID: 700571722_FLI
caccattagagcgcgcgcgccaagctcgtggtgaggttttcgagatgaaggttatcgagaagatcctggaggcggcgggggatggccggacggcgttctcgttcgagtacttccctccttctgcgacatcacctggggcgccgggggatccaccgctgaccttaccctcgaaatcgccaaccgtatgcagaacatggtgtgtgtggaaaccatgatgcacctgacatgtacaaacatgccagtagagaagattgaccatgccttggaaaccatcaaatccaatgggattcaaaatgttttggccctcagaggggatcctccacatgggcaagacaaatttgtgcaagttgaaggcggatttgcttgtgctcttgatttggtgcagcatattagagccaagtacggtgattattttggcataactgtagctggttatccagaggcacaccctgatgcgatacaaggtgagggaggtgctacattggaagcatatagcaatgatcttgcgtacttgaagagaaaggttgatgctggtgctgaccttattgttacacaacttttctatgataccgacatctttctcaagtttgtgaatgactgccgccaaattggtattacttgtcccattgttcctggcataatgccaataaataactacaaaggtttcctgcgcatgactgggttctgcaaaactaagataccttctgagatcactgctgcactagatcctatcaaagacaatgaggaggctgttagacaatatggaatccaccttggaactgagatgtgcaagaaaattcttgctactggcattaagactttgcacctttacacactaaacatggacaagtctgctataggaattttgatgaatcttggattaattgaggagtccaaggtttcaaggccattaccttggaggccagcgactaatgttttccgtgttaaagaggatgttcgacctatattctgggccaacagaccaaagagctatcttaaaaggacattaggttgggatcagtatccccatggacggtggggtgattctcggaacccatcatatggagcacttactgaccaccagttcacaagaccacgaggccgtggtaagaagctccaagaggaatgggctgttccactgaaatctgtggaggacattagtgagcgcttcacaaacttctgtcaagggaaactcacaagcagcccatggtcagaattggacggtcttcaaccagagacaaagattatcgatgaccagttggtgaatattaaccagaagggtttccttacaattaacagccaacctgctgtaaatggagagaaatccgactcgcctactgttggttggggtggtcctggaggctacgtttatcagaaggcctacctcgaattcttctgcgcaaaggagaagttggaccaactaattgagaagatcaaagcattcccttctctcacttacattgctgtgaacaaggatggagaaacattctccaatatttcaccgaacgccgtgaatgctgtcacgtggggtgttttccctggcaaggagattatccagcctacggttgtggatcatgcaagttttatggtttggaaggacgaagcatttgaaatctggactcgggggtggggttgcatgttccctgagggtgattcatcgagggagctactagagaaggttcagaagacctactacctggtcagcctcgttgacaacgactacgtccagggggacctgtttgctgccttcaagatctgattatgctctcatggtcggtattgttgtatggttggacccaacaatattcttgcatccccgactacaggtctgatcgccatgaaagcttctgttcatttgagctcgggggagtccgctagtcttatttttcttgatttctcttggctttctggaaccatacgaatcaataaggaatgagccgtgttcactttccagttcctccatgtgcaagtggcgcaacggccaggttctagatgtaaaattcgtcctctaatacagaggttggtattgtatgttagtgtaggatgcgctgctcgcattgcactgtattgtgcttctgtttggtggaaataaagattggtcgaaatctgagggccagtttggaagccat

SEQ ID NO: 6572 - DNA, 1066 bp, Zea mays
  Clone ID: 700571730_FLI
caaactatgttgcaccagaggtccttgaagatcaaggctacgatggagcaatggctgatctgtggtcatgtggagttatcctgtttgttctgctagcagggtatttgccgtttgaggattctaatctcatgactttgtataagaaaatatcaaatgcagaatttacatttccaccatggacatcttttcctgccaagaggttgttaacaagaatccttgatccaaatccaatgacgagaataacaatcccagaaatattagaggatgagtggttcaaaaagggctacaagcgcccagaatttgatgaacaatatgacaccacattggatgatgtggatgccgtcttcaatgattcagaagagcaccatgtgacagaaaagaaagaagaagaaccagtagctctgaacgcattcgaactgatttcgatgtcagcgggcctaaaccttggaaacttatttgactcagagcaggagttcaaaagagaaacaaggtttacatcaaaatgtccccccaaagaaattgtccgcaagatcgaggaagctgcaaaacctctaggatttgatgttcagaagaaaaattacaagttgaggctcgaaaaggtaaaggcagggaggaagggaaacctcaacgttgctactgagatactgcaagttgcgccctctctccacatggtagaagtccgaaaagcaaagggtgacactctggaatttcataagttctacaagaacctttccaagaccttgaaggacgtcgtctggaaatccgacgatcttcaaacgcaacatgcttcttagcagaacctcagagaggaggaatggcaaactattttgtgcaccatcctttcaagcaaactattctgcatgtaacggtgggtgcccaggaaattgcgctggtgctccaccatcgttgtatatgctgcgtcttgagttgcttgctgtagctgaagggaagttcattcagtaggttttgagtatgagttttgtatatccgtatatgcctatgactatgagccgtgctggaacactatgatcagaaactgcgaaatggagcccagaatgttcttgcc

SEQ ID NO: 6573 - DNA, 518 bp, Zea mays
  Clone ID: 700571736_FLI
ggacatgttgcaaaagtctgcattgtcctttcccctctgcttcttgcagccttagtggcagtttctcgagttgatgactattggcatcattggcaagacgtatgtactggcggattacttgggttcacggttgcttccatttgctacctgcagtttttttccactaccatctgatgaaaatggactgtggccgcacgcatatttccgacacattcttgagccagagggtgacagccaagcgcaacccacgtacatgagccgtcgcagctcggttcagaacggttcctttcagtacagccctgacgcagtggaaatgaggagcacgagccaagcaatggattccatggaagctggccagagagcccaataatgatggaattaataggaacatcaatttagccacggaccgttgtaatgtaatataacgtcgttgtagcgcttagtacagcaagatcttgttcagatcccttattgtgtagtataacagttcctgaatgatggtcacgtttctgctggtc

SEQ ID NO: 6574 - DNA, 1053 bp, Zea mays
  Clone ID: 700571779_FLI
cgctattgcccaaagtgcacattgtttagcacaagggaaaattggcagtggttttgatgttagtgctgctgtctatgggagtcaacgctatgtaaggttttctccagaaatactctcctcggctcaggctataggtgggactgtcttgccagatgtagtatcagatgttctaacacaaaggtgggatcatgagaataaacagttttcattacctcctctgatgacccttctccttggggaacctgggaccggaggatcatctactccatcaatggttggatctgtgaaacggtggctgaagtctgaccctgagaaatccagagatacatggagtaaactggccattgccaattcaacgctggagaaccaactgaggatcttaaaaggactttctgaaaatcaccatgaagcatatgagtccatggtgaggtcctgtagtcgtctcacatatgggaagtgggcagaggtggctactaaccaacatcaagaattaattataagatcattgttggctgcaagggatgcttgccttgagataaggcttcacatgcgagagatgggcatagcagctggtgttccaattgagccagattcacaaacacggctactagatgccactatgaatatggagggtgttttactggctggagttccgggagctggtggcttcgatgcagtgttctcagttgttttgggggatgcaagtaatgctgtagcacatgcttggagctctgttggcgttctgccacttcctgttcgagaagactgccgtggtgtttcattggaagacgctgacccgagaacaagggaggtgtcagcagctgtatggtccatccaaattaactgattctactgttaatagttctgtttatgcatggtgtaccaatatcatttattaacgatgttcgcattgctgcagttacaattcatagagacaacatagtataaatagtagaagccgttacggattaaagccaaactagcaggctctatcttttataagtacaaaattgtgccgaatgctctatcttttataagtacaaaattgtgccg

SEQ ID NO: 6575 - DNA, 666 bp, Zea mays
  Clone ID: 700571781_FLI
ctgctatttccctttccatgtattacaccattttgactattcaatgcattattttgtggtgaaggtgatgaaaaatagtttattttgttagggcctcacaacattggggtggcgatggctacaacacatggattagtcgtgccaaacatcaagaaagtgcagtcgctatcaatattggagatcacgaaggaattggcgcgattgcatgagatggcatcacaaaacaggctaagcgctgcagatattgaaggtggcactataacacttagtaacataggtgccattggtggcaagtttggctctccacttctgaacctacctgaagttgccatcattgcccttgggcggattcaaaagcttcctcgcttcgatgatgacgaaaacgtttacccttcatccataatcaatgttactgttggagccgatcaccgagttgttgacggggccacggttgcaagattctgtaatgaatggaagagcctcgtggagaagccagagctgctcttgttgcatatgcgatgacccagtaatgtaccggtacatactacgacctgaaacggaggcattttggcataaaaaaataaatccatgtattcaaacaaataaccaacgtggcttctctgcctggaaacagtggaaataaattgggagttattttcggagtcc

SEQ ID NO: 6576 - DNA, 974 bp, Zea mays
  Clone ID: 700571832_FLI
gtggccagaaggccctcctgctagtgggtcgattcagggtatactggactggcagaggaggaccatggagatgatgtacaatgacatctctgttgcgctcgatgcaaagaggatcgacagggacccgagggattaccttacattcttttgcttggggaacagggaggtgaagatggatggtgagtatgaaccttcaggtcgtccgcttgacgggacagactacgctcgggcgcagaatgcacgccgcttcatgatctacgttcactctaagatgatgatagtcgacgacgaatacatcatcgttggatctgccaacatcaaccagcgctcaatggatgggggcagggactcggagatcgccatgggcgcgtaccagccgtgccacctgaacaccaaaggccaggtcgcccggggtcaggtccacggcttccggatgtcgctgtggtacgagcacctcggcatgctacacgacgatttcctcaacccgggaagcctggagtgtgttcggagggtaaaccagatggcagacaggtattgggacctctacgctggcgacagcctcgacgccgacctccctgggcacctgctcaggtacccagtcaccgtcacgaaggagggcacggtgacagagctcccgggggccaagttcttccccgacacacaggcgcttgtgcttggggcgctatcgaagctgcctcctattctcactacatagagaaaccttctgtactgttgccatgttacgtttgcgggctgaattggttcaggtttttgctactccgtattatgctactactggtagtgttattgtatggtttcttcctaataatagtatttatagttttggacttatctaaaacagtatttatatgtgtctaaaatagtatttcagttttatttcattcatatatattttattttcttattttctaccacttatggctgatttaataaatagcaagaggatttctctc

SEQ ID NO: 6577 - DNA, 745 bp, Zea mays
  Clone ID: 700571838_FLI
gggaagagcaccaaggaccttcggcgcccgttcaggatccacatcttcccgagcgagttcttggttgacctcttcccccttcggaccacctccaaggctcttggtgtagcttgccactctcaccaatcaagttttcatgtctgatctcgacattcagatcccaactgccttcgatcccttcgctgaggccaatgctggggactctggtgcggcagcagggtcaaaggactacgttcacgtgcgcatccagcagcgtaatggtcgcaagagcctgactaccgtccagggattgaagaaggagttcagctacagcaagatcctcaaagatctcaagaaagagttctgctgcaatggtacagtggtccaggacccagaacttggacaggtcattcagctccagggtgatcagaggaagaacgtctcgaatttcctcgtccaggccggcattgtgaagaaggagcacatcaagattcatggtttctgagcaaccgccgggtccatagcaaaccaaccctgcatgcagggccagcttattatatataatatctgaggtggagcatatctatctggctgtgtactgcaagcaggcctagtacgccgcctgcgcgttcctcctattacacatataggcccctccctgcgtgtatgcttgttaccgtcgtgtcgaaccttgtactacgaggctccatcgaacatcgatggcttgcttctttatcagaacatgtttgaataaacgctatttggt

SEQ ID NO: 6578 - DNA, 713 bp, Zea mays
  Clone ID: 700571850_FLI
cttcgtctttctgctcattatttccatgttctcagtgtcattgtcttatggttgtagttttcttgttcaaatttcagatgtcaaaaattaatatgctaaggtcatgcaaaggaagtgtttactggatggcacctgaggttattaatcctaaaaagatgtatgggccttcagctgatatatggagccttggctgcaccgtgttggaaatgctaacccggcaaataccatttcctaatgtcgagtggacaaatgctttcttcatgattggaagaggggaacagcctactattcccaactacctgtctaaggaggcacaagattttattggccagtgcgtaagagttgatcctgagagccggccttctgcgtcacaacttctggagcacccatttgttaacagaccactgcgagcttcatttgaatcttcgtctccaccagccatctgattctagtattgatataatggggtgtttctcgttgaggccaatgctcaggtcacgtactcacgtgttgatcttcatgatctacactactggttccagaatggaattacgtgggcttgtttaggatgtagtttagtagctgtagtccgtagggttggtgggcagcattgctctgtggttttgtattctttggggtgttcttcattgggcaaagggttttcttcctggttattacgtagatttgtgtaaacttgtaggtaaaagggctgc

SEQ ID NO: 6579 - DNA, 272 bp, Zea mays
  Clone ID: 700571974_FLI
gcgacttcgtgctcgtcctcaacaaggcgctcgccgccgacgaccgcgtcgagatctgccagctccccgtcggcagacggcgacgttaggaagtccgcatcctcattccaatcataatagacgacccgcagcattaattatccaccggctttttttttggctctttcttgcccctgtaatctttctcctcctcttccttcttgggaattgtcgccgccgtttcgatacgtaaatcacgagatcggtaatacagtaatgctcctcaattttac

SEQ ID NO: 6580 - DNA, 605 bp, Zea mays
  Clone ID: 700571984_FLI
gttctgcctgtgccccttgggctgggctccatggagccccaggctggtggaagctgtggttttcggctgcatcccggtgatcatcgccgacgacattgtcctgccctttgcggacgccatcccgtgggaggagatcggtgtgtttgtggccgaggaggatgttccgaagctggacagcatcctgacgtccatcccaacagatgttatactgaggaagcagcgtctccttgcaaactcgtcgatgaaacaggccatgctgttcccccagcctgctcaggcgggagatgcattccaccagatcctaaatgggctcgcgcgcaagctcccacatggtgacaacgtcttcttgaagcccggggagagggttctgaactggaccgccggaccgccaggcgacctgaagccttggtagcatctgcctgcctagaacctttttgggaaaaaaagcaagaatgagaacatggtgatatacatacatgcgcctttaagttaccatggttgtatacttgtatagtgcttgctgaccacaagccaaatgtacattttggtttgttctttcttctttccctgtagctgttataccatatatcttcatttctccctct

SEQ ID NO: 6581 - DNA, 963 bp, Zea mays
  Clone ID: 700572081_FLI
gcgaagcaactccttgatgtgctatctattgcagacaatcatctagggagttctgtggcagctgcattggccagattcttgggttcacatgtacgggctttaaatgctacagatatcggcttgggaacagtaggcttccaaatacttgaggaaacattgccaacagaagtagctctttcccacatcaacatcagtaagaatcgtggtgggatcagagcagcatattttgtttccagattaatatgtcgagcaccagaccttgtctcagtcaatgcagcagggaaccttttaccacctgaatcattggaagtcatctgtaactccttgaagcaagggacttgtaatttggagcgagtggacctgactggcaacatgcatttatcaagcaatatttttcctgcattccttgaattcaagaagcatggaaagccaattctggtagtaccaccaaacttgagcacttctgctccatatgatgatgacccatgactactatgtaccgtataagccctagtgctgctcaagtcacttcagttggaactaaataaatagtgatagtatttttttggatcattcccaagaatcctaaccactagatcaaaacacaacacaaattgtacatctgtttagattcgacacggctttcgtcggtgaagctttgcgctagggcagcgacggtcgggaaagcgagcttgatgtcgacggtggactttctgttgctgacagacttccctctagatcggttaaggtttgaggtggagatcgaaaatgattgtgaatcttgtacctttaggtgtcggcctccacctctttatttatagggctacgcaacagatgctcaacaaccttgatgctctcgatcagggcgtgaggtcaggggtctagttttcggttgggtcaagttgggtcaactagtggagatcaattctaacattttcccctttaatctcattttataccttc

SEQ ID NO: 6582 - DNA, 723 bp, Zea mays
  Clone ID: 700572120_FLI
aaacctaatcagcaggatctactagctagctagctgttgagagcttgacacaaagaagcgaccgagcggtcgagctagcttccaccatgtcttggagccagagcgagaacgcgcggttcgagcgcgcgctggccacctacgaccgggacacgcccaggcggtgggagctcgtggccgccgcggtgggcggcgggaagaccgccgaggacgccaggcggcactacgccgacctcgtcgacgacgtcggcgacatcgagtccggcggctacggcgccaacgacccaaacgccaacggcggcgccaacggccgcaacgggaacaacaggggcggcagagccaaccggccccagacatgaggggcgcctgcctgccgcgggagaccgcaccagcacgccggacgacggcgcgcgcgtgcatgcaatgattgttcgtcgtgtacgtacgtgagtcctgagatatatgtatgtatgttcgtgtgcctgtgtgtaactatgtatatcggcatgcatgcatatgcgcaaagtgtgcacaagtatgcgctgttgtggcagaagccgtgtctgatcagtgtgaccgagtgcgaggagctagcacgggcgcatagctccctgatggatgcgcatgcagtagttgctccggcctcgatcgtctgttgcattgcatattgcagtattgcgctacttatatatgtgtaaattaaaggctgctcctgaatttgttctt

SEQ ID NO: 6583 - DNA, 694 bp, Zea mays
  Clone ID: 700572124_FLI
caacatatctcctcgcatttccttgcaaccgattgccttcccccctcccaacccaagaccgatggcgcccaaggccgagaagaagcccgcggcgaagaagccggcggaggaggagcccgcggcggagaagacgaccgccgggaagaagcccaaggcggagaagcggatccccgctggcaagtccgccggcaaggagggcggcgagggcaagcgtggcaagaagaagggcaagaagagcgtggagacgtacaagatctacatcttcaaggtgctgaagcaggtgcacccggacatcggcatctcctccaaggccatgtccatcatgaactccttcatcaacgacatcttcgagaagctggccggcgaggccgtcaagctcgcgcgctacaacaagaagcccaccatcacctcccgcgagatccagacctccgtgcgcctcgtgctccccggcgagctcgccaagcacgccgtctctgagggcaccaaggccgtcaccaagttcacctcctcctaggcttgcacgctcgccctttgtaggcttctcttgtgttgatgttcgccttgtgttgtagttagatgttgctggtttctctgtcggcgctgctctgcttctgtaggaactgcgtcatgtaacctagcaaggacttgtttatttgtgaatcatcaacactttgttgttgatcacttatgttcc

SEQ ID NO: 6584 - DNA, 218 bp, Zea mays
  Clone ID: 700572139_FLI
aagatggcatgcgagcattactaccataccacttgtatccaacagtggcttcagcaaaagaactggtgcccgatttgtaaatgtgacgcttctgccattagctcatagtgttcttgacagtaacagaagtatcagttcattgtaatcaaataggattacacaagtttttttggttctagaacaaattattcacttcaatcctatactgctcttcaatt

SEQ ID NO: 6585 - DNA, 638 bp, Zea mays
  Clone ID: 700572185_FLI
atcccggccaagacggctctcttcgtcaacgtgtgggccatcgggcgggaccctgctgtgtgggacgcaccggacgagttccgcccggagcggttcgtgggcggcagtccctcggtggacttcagaggtaccgactaccagctcatcccgttcggcgccggccggaggatctgccccggtatcaacttcgcgctgccggtcttggagctcgcgcttgtcagccttctgcaccacttcgaatgggagctccccgccggcgtgggaaaggcggacctcgacgtgggcgaggcgccggggatgacgacgccgcggcggattccgctcgtccttgtccccaagtgcaggacgctcgttcagccagcactgcagtagcgcgaggaatttcatgtgtctccatgcagtggcggaaccagaaatatttaagagcttgggtaaaaaataatacttatactgtaaatatgtagctttgtctaatttttacctgtgtttaactatattttactacttgttgtatgtgtataagttcactagcaataatggaggagcctatgctcttgagaaaaacgaaaaccagcagagaagaaaagggggccccgcatatgacccgtgccccggattaatcggacaggactgagggc

SEQ ID NO: 6586 - DNA, 577 bp, Zea mays
  Clone ID: 700572286_FLI
ggctggggtggacgttcgaccgcgcggaggcgaatcggatgatcgacgcgctctcgcactgcctcaacacgttccggaactacaaggagagctggcgcggcctggaggcgcgcggcatggcgcaggacctcagctgggaccacgccgccgtgctgtatgaggacgtgctcgtcaaggccaagtaccagtggtaagtgagttacgccgacgcccttcatgtcgcgggacagtcctggacgccctgggcactgcgtgctcttctcacgcggctttgctgcgtgcggcgcatttgctcaattggcgcggggcgatggtggttggcctacgtcggcttcggctaggtgccttcggattttcagcttcttaccaccaaaacaccaaaagctgctgcggactattaaacgctcagtttttcagttagcttctataaaaatcgatcgtaaaaatcatctataatcaacataaacacataatggacggagtacttttaataatagaaatctatcgctttgtagatcttaccctatggacaccttcatcttgaaaattgtttggttgaaataacagtgagttgtat

SEQ ID NO: 6587 - DNA, 403 bp, Zea mays
  Clone ID: 700572288_FLI
atcaactcagtggtggccagcctccaaatgtattcatgagggcgtttgagatggctgcaaaagatggagcttaatggcatttaaaaggagctcctccagtagtcttcgcatatgttaaaaaggaataggagccgaatttaacaataaagttccagcacagctcatcgctgatttgcgaaaaatatgtggaatcagttgtatttccgtagttctgatatggtgataattagtggtgaagatggtgtggatgttcacttttgaataaaattctaggcgatcggatatggcatatgggttagaatgccccataaacagagcccggtctgtatttacatttggttcgataggatgtgtgcaagatatcagaaaacagcaaagttcagatttgatattcgaaaggaat

SEQ ID NO: 6588 - DNA, 456 bp, Zea mays
  Clone ID: 700572303_FLI
gtgattgttgagaaggctgagaggagtgacattcctgacatcgacaagaaaaagtacctcgtccctgctgatcttacggttggacaattcgtgtatgttgttaggaagagaatcaagctcagtgctgagaaagctatcttcatctttgtgaagaacacccttccaccaacagctgctctgatgtcttcaatctatgaagagaacaaggatgaggatggattcctctacatgacctacagtggtgagaacaccttcgggctcctctagatggctcaccacaatcgggtctgccttgcccttgcttccctactgatgccctgcctcgtgtaaataagacctgccaagcaattgtgtatattctggtttcctcgctcaactgctggaagtctaaaacctaccttatcatggacaccgtttaaattaagtaattgactggacctgaatctggggggtcct

SEQ ID NO: 6589 - DNA, 1247 bp, Zea mays
  Clone ID: 700572310_FLI
gttgaggtcaaacgaatccataactgccgcaggttaagccatgaatgcttgacatttatttccgtgaagggcatatattatcaggctgaagttcaaggacaaaagatcacctggctaactccgcatgctcttcagcaagtattaactgatgatgttgatttcaatgtgatgctttcttttctagaattctatgagactcttctaggatttgtgaacttcaaaatctatcattcaataaatgtaaattatcctcctattctggatccacgtctggaagctttagctgttgagctctatgcattgtgccgatacatctctgctggttccagaagaatgattgggaattcacaaactgacgaagtaatggaagataaggatgagaaaagtaaagctgaggaagtaattgaggaagagaaggttgtgaagaataaagcaagctcaaaagcagatgaatctgagttcagattagcacagcttcaacatcagctcccaaccaatgaacctggtgcactgatgaatcttgtagaagaatcaactgccgatgatgcagatgatgatgatactaaagattgtaaaggtttatttaagaacttaaagttctacttgagtcgagaggtgcctagggagtccctgttatttataattccagcatttggagggactgtttcatgggaaggagaaggagctccatttaaagaaatagacgaagatatcactcaccagcggctgaaggatgtgtttcattctattggagccagctctgaaaaatttacactttcagctgaaaacttgcccaacacattagaatatattgaaggcgaggttgaagctcttgacgaagttattggtagccatgctgacttctgcgccctggtagcttctcggggcacagctaccgcttttctgaaagctggttgcacgcatggaaaaattgttaataggcccaactatagcttatcatcatcagatctgatagatattccaagcctagctcgaagtatcggaaatagatttatgacccagatttgggtaaatggcgggcggaaaatgacgggtgacgaagctcgaagtcatcttaagccggatgacgaagctgaagtataacaaatctgaagtatgacgaagctgaagcttgatagttgctacaatattctttcctgcaaaaattctggagagacttttgtaatattattatgtaaaaactcatgtaaatttgtacataccttgtaatatattttgtttccgct

SEQ ID NO: 6590 - DNA, 533 bp, Zea mays
  Clone ID: 700572330_FLI
gtcggcttttatccccagtagggataatagccgcctataccaaaatttgattgctgggatcgccatctcagtgtgcttgtatctctgctcgcttattcttctgaagattcctggtgtatagggatgaagatcttgatagaaggtttcttgtaaaatgtttgcttgataggatgtttcagctcgggcctcgatccccttttgctgttgtggagatagttgggatgcgcggagaagcggctaaagttggacatacagggaattgaattgccagaggctgcagatacagaagtccgaatcttgatctttttgttcattcaaaacacggatggatacaacaagtaggcaatccttccattcttttggaagttgtagcaactgttcgctagactatgttgatgcaacctcgttgtatgagttatcctgtagaactgcaccgtgttgtgccataggtattctgaagctgtaaaaaaaacgacgggcatttcttcttccttgaaaagaagaaatataaaggcagaggcgccctttcttct

SEQ ID NO: 6591 - DNA, 547 bp, Zea mays
  Clone ID: 700572379_FLI
tacggctggatttgatttgattggatccccaattgggtgtccgggtccgcgcgttcgggcgggcgggcggggggattgctttagggtttcagcgggtgcggtcgctgtgtaggcgggtagggttttgccatggcggagaagggctgcctgaagcggctccagaaggagtaccatgcgctctgtaaggaaccgccgccgcaggtcgtggctcgcccactgcccaacgacatattggagtggcgtaagtagcctcagctaaccctactactcgtagatacgatccgtcgccttttgattggctaatgtttggagtcaaacggggtttgattgcgcttggttttgtcggaagcaatggtgtaggcataatcataacgcgcaacgcacaagatcatgttggtttagcaatcacttcgttcggttttgggaatttctatatacatgtggttgctccgtgtaccgcgtgatgtgctcagctcgtctgctcactgcttacagtttctgagcagtgcgtgctgcctgcaatttattgtttaaagtttaaattgtc

SEQ ID NO: 6592 - DNA, 766 bp, Zea mays
  Clone ID: 700572388_FLI
caggaaatcccctctggtctccccgtcccccattccacccgccgccgccgacgcgccgcgcctgttcaagatgaatgtggagaagctcaagaagatggcgggtgctgtgcgcactggaggaaagggcagcatgcgcaggaagaagaaggcagtccacaagaccgcaaccaccgatgacaagcggcttcagagcacgttgaaaagaattggagtgaacactattcctggtattgaggaggtcaacatcttcaaggatgatattgttatccaattccagaaccctaaagtgcaagcatccattcctgcaaatacatgggtagtcagtggagtaccccagacaaaaagtctacaagaccttctgccaacaattatcaaccaactgggccctgataacctggagaacctcaagaggcttgctgagcatttccagaagcaggtacctggtgccgaagccagcgccagtgcagctgcccaggatgaggacgatgtccctgagcttgtcccaggagagacatttgaggaggctgccgaggtgaaggaggtgcctgaagcggaaccggaagagaagaaagactcgtaattttgttgcgtgtcatatccattgtttgtgaagggtcgttgtgtgtttaccatacaccatgggagagacctggtcatctatgaacccctgatgttcctcattcgtttacatgtgctccagtttttcagtttcttatttacctgggttttggtccaaacctgacaagtcagcatttggtttggcgtc

SEQ ID NO: 6593 - DNA, 553 bp, Zea mays
  Clone ID: 700572447_FLI
tgccagtctgctccgcagctatgaggtacagcctcatccaagtttgtctaaagaaatggacacaacagttgatagcagccaccttcatcttccaaaccctaagatcatcctcaccaaaagaaggatctgaagggagagtttggcaaacgaaaatctggcacgtttgctttcactgtattgtttttcactggtgttacaccagtatatgatctttagtttcctaccgtcgtttggaccatgctgaagtttggaaaggcgaccttgacgatgcggaagtgccttttttcctccggatttttgacagaccctgtgtgcttcgttggatctaagtttttgtcaggtttttggagcacctgcagggctgttagatcacaggagacgtatgctgatgtgtataaacagactcgttttttcagttgaggttttctcctatctgtggagaatgtaattaatgtccaacgcatgatgtcgctcgccacatatattttattgtatcttacttgcatataaacatgtgagcttattgtttggaccataatttgtgataaatctg

SEQ ID NO: 6594 - DNA, 891 bp, Zea mays
  Clone ID: 700572448_FLI
ctcttggcgcagggagggggctgctgtacctgcacgagcagtgtgaccccaagatcatacacagggacgtcaaagcagccaacgtcctgctagatgactgctgcgaggccatcgttggtgactttgggctcgcgaagctcctggaccaccgggactcgcatgtcaccactgcggtgcgaggcaccgtcggtcacatcgcgcccgagtacctctccactggccagtcgtctgacaagaccgacgtcttcgggtttggcatcctgctgctggagctggtcactggtcagaccgcgctggagttcgggaaggcagcaaaccagaagaagggagccatgcttgattgggtgaagaagatgcaccaggagaagaagctggacgttctggtggacaaggggctgaggagcaggtacgacgggatcgagatggaggagatggtgcaggtggcgttgctgtgcacgcagtacctccccggccaccggccgaagatgtcggaggtggtccggatgctggaaggtgacgggctcgcagagcggtggcaggcttcgcagcgcgcggactcgcacaagtccttcaaagtgcccgacttcactttcagccgctgctactccgaccttaccgacgactcgtcattgctggtgcaggccgtcgagctgtccggcccaagatgacaccaaccaccaccaccgtcagtttgcacttgtacagcataaggaccgagaatcatgtgtatattgccatattggagaataaaatgagccatgttagaataactatagtgtgtattagatagatgaactgtacaaaagaagagcgtaaggtttgtacaggtttggatatttacatatttctagcagttgagacagtaataccaagtagacgagctttttactg

SEQ ID NO: 6595 - DNA, 1240 bp, Zea mays
  Clone ID: 700572454_FLI
gggtagaccgtgtacagcacctggctgctgaggcatcgacctcacctcctttcctttctccaagctccttctcatcggattcaagcgccagctcgaagtataattcagattcaccctccttatcacctacaactagctccccgccatcatttggcctctcgcctgcttcatctaatctgcctcaagctcttgtgccatcgtccaggtctcctctttctcaatcatctaatgcaggggcttcaaagccttctggcctggaatcaatacgccatccttccaagacctcttctatagcagaaagaagaggaggcttcacacttctaaagctaccatctctccaaaaggaccttgtattgccaccaagggtaccgtctagtattcgcagaactgacgaggccttggataagagttgtacaaatggtgtcaaaaggccgactggtgattttcgctcagaaaaatgcactgataatagttcaagcttgcattccgaaaccagattaactgagcgtactgacagtaactcagaagcttgcagtaatgtgcaactgttggtttaccagtggcccagcatggaaaagctaactacgtttgcacgcaaggatcttgactcaaactcggttttgatttttgttacatcgaatgccatcagaagagaagcagttaaaatggtgtatgtgtgggtaggaggcgaaattgaaagcagcaagagtgttaatgctgttgattggcaacaggtcactggtgattttcttcatcgaaaaggcctcagcgatgctcttcctataaaggttttcaaggagcatgaaacagagaatcttttggaactactgaattttagttaacattaggcggtagctatcaggatattgtagttgcttaacaaactcacccaccccacaaattgtcattcaacgaaggcatgccctccagcatcagtcggtaccgatgattgtcagcgaggtataaagcctctaccatccccttcccttgaacataacaggccctacagacagattccattttagtagaagcggtggatcgacaactgcgcctcgttggtctatcttttgtccaaatggcaggatgctgccaatgggcgttgtaagcgcaatcagccaattgggtggtaatgtaagctttagctttagatactgggagatggtctgtcaacagttacttttagcctaaacattcttgtacatctttgaaagtgaacagatttgtaatccttgtggcatat

SEQ ID NO: 6596 - DNA, 306 bp, Zea mays
  Clone ID: 700572455_FLI
gagcaactacatgcgctacaactactgcgacgacggctggcggttcccccagggcctcccgcccgagtgcagccgcagctaagctagctgattccgccggttttcgtacgctcggcggcgtccgctgacgacacacgccttgttggtttgttcttgctggacatcatacatctctatatgcatgattcttgttctgttattgttaaatcgtgattacaatacttgtaattgtaaagaagtgtgtgggcacgggagtatatcactgtagttttaatttgcttgtaaagaaaagaagggttttttttt

SEQ ID NO: 6597 - DNA, 1525 bp, Zea mays
  Clone ID: 700572470_FLI
tcccaccgtcgcaagccagccacctccctgagaggcctgaccgtgatttcggcgtggcatccaaaggcggtcaagattcgagaggccggaggaaccaagcgtagggcctccgaccccacgtcgtcgtccgcgcgcgccgcccgccgccgcagggagatgggggccgattactacaaggtcctcggcgtcgaccgcggcgccagcgacgacgacctcaagaaggcctatcggaagctcgccatgcgatggcaccccgacaagaactccaccaataagaaggaggcagaaaccaagttcaaggagatctctgtggcatacgaggtccttagtgatcccaagaaacgtgcaatctatgatcaactaggggaagaagggctcaaggggcagccgcccccaggagcaggaggtcctggcacatctcccttcttccctggcggggttcattccaccgctcaccattttaatccgaggagcgcggacgatatatttaaagagttctttggatcccctggcatgggtggcatgagaacggaaccaggatttcaaaggtcagtgtttggcaacgatatcttctcttcgcgcttccgcgctgagggttccaccagtatgcagcaaccattgcgcaaggcagctgcaatcgagaatccacttccagtcggccttgcagatctctacaagggtgtgacaaaaaagatgaaaatctcaagagagactattgatgccagcgggagaatctcaaacacagaggatattctgacaatacaagtaaaggctggttggaagaagggaacaaggattacatttcctgacaagggaaatgaagctccaaatatgaaacctgctgatattgttttcatcattgatgagaagccccatgatgttttcacacgggaggggaatgatcttgtcgtgactgagaagatctcactggtggaagcactgactggctataccgcacgtgtcactacgcttgacgggcggagcctatcactgcacatcaactcaataatccatccaaagtacgaagaggtgatgcctggagagggcatgccaatgcccaaggaccccacaaagaagggaaatctgcggattaagttcaacataatgttcccctctaggctgacttctgatcagaaggccgggatcaagaggctattgggttcttaggccgccgcctcaaatgacatcttctttatgatgaaagttgtttgtaaatattgccagtgatttgtttgtaacgggatggtcacaatttagtttttttttaaggtggtgcccttggttttgctgttgttctcatttttaaccttagtcgtatttttttggctcaattttgcctttccagtgctatacagcagaatggtaaaactgatcaaaaaatacgactaagggtaaaaataaagaagatggtaaaactaagggtatgaatttaaataggttttctggtgggtgggtagttgatgaattgtaaatcccaaacaaaccggccggcccttagcaaccacaacaaggctgaaccttcacc

SEQ ID NO: 6598 - DNA, 631 bp, Zea mays
  Clone ID: 700572487_FLI
gaaattttgttgcaatctgagactaacgaaggcaaaaatggagccatacacttgctggcacttgatttgtcgtctctctcaggcggtgcgcctggacgaacaaggggccttaagataggctcagttaactccttttgacaagggcttatattggcgttttagatgacccaaagcattcttcaaaatgatacagcagaagcactgacttgaattttggatcaattcccatgagctgatatcttcaaaaacatcttagttaggaaaaagaaggaaacgaaaatggaatttatttccatttgttatttgtttgggtgccacaaggaggcaaaatcatagcaaggaattgtaccttatttttttagggattgtgtacttttctgctgttgagaggtatttggtggttggataatgtgatggagcctatctaaatgttctttcatagtggtctgaataacattgagctcattgctggattatgttgtgattctttcaactcttgggtcatgttgcacagaactaactcatagttctgaccaaagagaaatgtttttttatgttaagtacgccctgccgtaagcaagtgtaaactttggggacaaattgcttttcatgtatttgagtttgatatttg

SEQ ID NO: 6599 - DNA, 642 bp, Zea mays
  Clone ID: 700572489_FLI
ccagcccattaaccctcgttcctgtcgcgcagccacgacctccacttcacatctcccccggcggcggcgcggtcagttgaacaatggcggactccaaggccacctcggcggtcaccctccgcacccgcaagttcatgaccaaccgcctcctggcccgcaagcaattcgtgcttgaggtgatccaccccggccgcgccaacgtctccaaggcggagttgaaggagaggcttgccaaggcgtacgaggtgaaggacccaaacaccatctttgtcttcaagttccgcacccacttcggaggaggaaagtccactggtttcggcctcatctacgacaacctcgaggctgccaagaagttcgagccgaaataccgcctcatcaggaatggtcttgctactaaggttgagaagtcccgcaagcaaatgaaagagcggaagaacagggccaagaagatccgcggtgtcaagaagaccaaagctggtgacgccaagaagaagtaaacgttcgtttacatttgtattactgttctgggctctgggtggtctagctgcaatgtcataattatggtcgtgttaggttttgttccccccttggcactgaagtgattttttgtaattcctcggcactgaagtgaagttttgtcag

SEQ ID NO: 6600 - DNA, 664 bp, Zea mays
  Clone ID: 700572494_FLI
atcttaccagggaacaacatgaatgagggaaaactggttgatccggtcagcggtgctgatgtggtcactacttacgaagacaaggatggcgactggatgctcgttggcgacgtcccgtgggagatgtttgtcgagtcatgcaggcgtctgaggatcatgaagagctctgaagccataggtcttggttagtgtctccagataaaattatcttccatagttccattataagatttacatgtcaactctaaccgcctatgttttcttcatttaaaaaaaaatacagcaccaagaacgaaggacaagtgcaagaacaggagctgaagaagatacagcgttaaagacgctgcccgttgtgtcaaaagaatggtgcccttgcagtgtgctgcggtttttctagaaatataatgcgttttaattactagttggagggagacctgtcttgttcaatttgttcatggaccagaagcaataatctatctgtgtgtagctggattggtgttatgcgatgtcccctaccgtgtgtcccagaatctacttggtgattttatcccagtgttgttaatcaagcttgtgtgattgttaagtaaagggcatcaatgagactattattattatggtaccttgtaagttaacctgtttgttaattgtcattataatatttggc

SEQ ID NO: 6601 - DNA, 626 bp, Zea mays
  Clone ID: 700572502_FLI
gcagaagtggcacgtctactatgccaccactgagcacccctaaggagcttgttgttactcttgagatgtgcatgactaggctggacaagaagagagcttatgtcttcttcaagacctctattgatggttacacatcttgtgctaaggatatgaccaagccttcagtggcatcgtcaaggagtgcgtcgtgaccagtggtgctagcagcaaggccatggcactcagggtccatgggtcgtgggtgtggcttgttcagcgcctactattcgcgggagtcggcgaggtgcctgctgaacttggtggaagtggagtacaattatgatgctgacatcgacctcgtgttcatcgacctgcccgtgctagagcaggagcggtaccggtggacactggagattgtggtgtaggccatgacgcgtgggcgtcgacgtcagcgcttgtcttcgcgtctgagccactctgagttggagaccattgccatttgtgatgtgcatgagagatgtattgtggcgtcttgttgtataattggtatggagagagtatgttttgctatgtccgtatttgcatactctacatgctctgaatgttgtataacactggacaataaatgatgatgtcccttcaatagg

SEQ ID NO: 6602 - DNA, 1681 bp, Zea mays
  Clone ID: 700572550_FLI
gttttgaggggtgttcttctgatatgatgagctctgctggttgtgctcatttttattgccatgaatgttgggaaggctacattagcgctgcaattggtgatggtccaggatgtttgtcattgcgatgccctgatccatcttgtagtgctatggttcttcaagggatgattaatgaattagctaaagatgaggatagaaaaaaatatgcacgatttctcttacgcgcatatgttgaaggtagcaagaagactaaatggtgtccagctcctgactgcacatgtgctgtggagttccttggtgatgaaaactatgatgtttcatgcaattgcatgttcagcttttgttggaattgcactgaggaagctcatcgaccagtgaactgtgagactgtttctaagtggatattaaaaaacagtgcagaatctgaaaacatgaactggatactggctaattctaagccctgtccaaagtgcaaacggccaatagagaaaaaccagggatgcatgcatatgacatgcacccctccttgtaaattcgaattttgctggttatgtctgggtgcatggtcagatcatggagagagaacaggtggcttttatgcttgcaatcgttatgaatcagcaaagaaagagggagtttacgacgagactgatgcaaggagggaaagagctaaaaactctcttgagagatatatgcattactatgagcgctgggcatccaatcagacatcgaggcagaaggcccaagcagatctgctaaaagcggaaaaggaccagattgcaaatttaactgacattttcgggataccagagacccagcttaagttcataatcgaagcttggtcacagattatagaatgcaggcgagtgttgaaatggacatatgcttatggctactatctggatgataagatcaagagtgaattttttgagtatctgcaaggtgaggctgagtctggtttggaacgcctgcatcagtgcgctgagaaagacttgcaaaattttttgccgtctgtgaaatctgacagcactgaaacaacgacacctacagtggctgaatttggtgaattccgcgtgaagcttgctggacttacaagcgtgactcggaattactttgagaaccttgttcaagctttggaagctgggttggaggatgtccgtgccacaggccaggctgctggtacatccagcactgccaccagctccaagaaaggaggaactaaatccaagaagaagcagcacactgcaccatcatctgaccacactgatgatgggtggccctgcgagcgctgcacatttcttaaccctcctacagtggatgcatgcagcgtctgcgaaaagagtaggtactagatgatggaatagctcaaagggagccagggaggcatcccaagaaaacctcaaagctcgtgagaagcatgcatgcatcggatgctgagaagaagagcttccagctgccgcaatgttgtacagagagttattttagggcctcggttggaaacggtgtggaggctcaagtggtcacatgtttgtgggggtcatttggttttctagttcttttctgttgttccttgtaaatatatttgttgtgatgtggtgacctgtgtttatgtgatgagtttttgtttctgacaaactgtgaaattaaactttaacaaaactgatgagtggtagctctgttt

SEQ ID NO: 6603 - DNA, 504 bp, Zea mays
  Clone ID: 700572566_FLI
cccaactccctggtgaaccacctatattagatgatgctgatgtggatgactggcttcctcgctttgttgttctacaagggcagtgtttatactattatctgaaatgtacagatctgagcccacaggaatctacactcttatgtgatgttgttgaagtagggcagcttccagactttgtgccagaagatgaaaagacgagatatgcgttttacctgttgacccgtcaagggttgaggtttgaatgctccagtacctccgaaatacaggttgattcatgggtaagagcactgtcaagtgactgcaaattgcaggatggcgctggtgatgataagatgatgaatacgaggagtagccaagtagaagctgggtcatcatggtagacgatgtatggagtgctgtacagtacaatagtcaatgaaatgtacatacattacatgcatgtaaagggagcaacatatgtacgtagtagacgcattcaacacgagatgacatgttgctcttggt

SEQ ID NO: 6604 - DNA, 1009 bp, Zea mays
  Clone ID: 700572647_FLI
cccgttcataattgggggaatgccaaggcctgtaaaagctatccatgccaaggctgagatgtttcgtgatcgccctccttgccctggccttcgaaaagatttctgctgggtaaaacaaggagataaggactatgaagcgatgcagaaattgaaaaaccttgcaaagaggcaggaatctgagaacatggccctcatacagaaaatcttgaaagatgagaaggaactggcgactcggcagcaggaggtgcttgatggaaactgcaagaagtacgacatgctggaagctctagtgcagaagggagacatcactaaccttgctcaacaatacggagtgaacttgaacgactgatgagtcattcgtgtctttttcccccttccccttggagcgatggcgcaactggtgtgatgatgatggaataggatagcatgccatagttttggtccggtatctggaccctccctctggtgtaaagactatcccaacttaggcttgggcttttcagccttctttggctctccaaaaaaatctaaattagctggctctgagcctctgactttctgatcgatccaagctagctggctagctacaggttgtgtatatgaatcttgcaggggtgctgacgacgttgcaggaagggtgtagtggcccaaggaagaagagcagcggcagaggaggaggccgaccacgacgacaaggagcatgagtcggtggtggggtcggtgggattcttctccaacctggaagaactgctggtgttcaaccccagggccattctgtcctgctttgttgtcgtccacaaggcctagcttgagctgaactagtagtagtgtatggctacatgtaaggatgtaatatggtttgaaaaatattcgtccggatccggattcgaagatggtgaacaatgattcggatggaatttttggatatccgaatttttttggatattgaatcacacgagaaatcactttaagtatccaagtttcaacataagcaatattttattttatt

SEQ ID NO: 6605 - DNA, 972 bp, Zea mays
  Clone ID: 700572669_FLI
ggtcgccaaggtttccgacttcgggctgtccaagacgggtcccaacaacgtcgacaacacccacgtgagcacggtcgtgaagggcagcttcgggtacctcgacccggagtacttccggcggcagcagctgacggagaagtcggacgtctactcgttcggggtcgtgctgttggaggtcctgtgcgcgcggcccgccctgagcccctcgctccccaaggagcaggtgagcctggccgactgggcgctgcactgccagaggaagggcgtgctcgggcagatcatcgacccgcacctgcaggggcaggtctccccgcagtgcttcctcaagttcgcggagaccgcggagaagtgcgtggcggaccgcagcgtcgacaggccgtccatggccgacgtgctctggaacctcgagttcgcgctgcagctgcaggggagcgcggaggacagcggcagcgtcgtcgtcgtcaccgacggaacgacggcgtcgtcctcgaacaggtcgtcgccgcttatcgtctccaggcttcactcggacgagccgcccacggacagtacgaccacgaccaccaccgcgtcgtcgacgacgactttgagcatgatgggacggagcctcgccagcgtggagtcggacgagctgaccccgagcagcgtcttctcgcagctcatgcatccaggtggcagatgaaaacggaaagtacaactggagtagatatcgtctgatcgatgtgctatatatatgtttctagtccatgctatatatatgtgggcaactagtatagttatgctctatacatattcatcatatagttcatcctatatacttgtagtatgtattgtgctagagccctgcagagttacttcccttttccctttgaattatatatcttgaacatgtaactgagctatgttctcacttattcaaggccgatttgtaatgtttgcgtctacaagcaatgagaatgaggtgtcagtgtc

SEQ ID NO: 6606 - DNA, 588 bp, Zea mays
  Clone ID: 700572675_FLI
gcagttggtcctcaggtacttgattttagtaaaagagtagcaagagatgctgttcaaacgtcaagaaatgaaagcaacaatccaagggccagttccggtccagttctgcctattgaaacatggtctaggcctggcgtggttgcaggggctaataacatgttgaagccaggtcaaaacctgaacgatcattccaaactgctatactccacgaatttcctgttgatagtgctatcaattcagttgtattatagcggaaagcaagaataataataataaggcgtccttgttgaagatagatctggagtttttcaggattcaaacagtcaggcacaggacacttgtaagaggtctacgtttctgaacatgttagtttagcaattgatagattgctttattcttgtaatttccccggtcaaatgtgcaaggttatttgattgtttgattacatgtcatgccatatctgacaaaagctggaggacagatcaactgtacagattgtaactagttgagtgcttttttggggcacttgatttctaagactaagcagcatttgctacgaacccacttgatgggcagcagttcaatttc

SEQ ID NO: 6607 - DNA, 508 bp, Zea mays
  Clone ID: 700572681_FLI
gtggacaaggggctgaggagcaggtacgacgggatcgagatggaggagatggtgcaggtggcgttgctgtgcacgcagtacctccccggccaccggccgaagatgtcggaggtggtccggatgctggaaggtgacgggctcgcagagcggtggcaggcttcgcagcgcgcggactcgcacaagtccttcaaagtgcccgacttcactttcagccgctgctactccgaccttaccgacgactcgtcattgctggtgcaggccgtcgagctgtccggcccaagatgacaccaaccaccaccaccgtcagtttgcacttgtacagcataaggaccgagaatcatgtgtatattgccatattggagaataaaatgagccatgttagaataactatagtgtgtattagatagatgaactgtacaaaagaagagcgtaaggtttgtacaggtttggatatttacatatttctagcagttgagacagtaataccaagtagacgagctttttactg

SEQ ID NO: 6608 - DNA, 1206 bp, Zea mays
  Clone ID: 700572689_FLI
gtccagccagcagcaacagcgaccggtcacgacgagcggagctgacctggccgcggcggcacgaggttgtggtcggcgtggcgcgtggcctgctctacctccacgaggatgcgcacacgcccatcatccaccgtgacatcaaggccagcaacatcctcctcgacgaccggtgggtgcccaagatcgccgacttcggcatggcccgtctcttcccggaggccggcgatggccactcccgtgttcatacccgtgttgccggcactaacgggtacatggcgcctgagtacctcatgcacggcgacctctccaccaaggccgacgtcttcagcttcggcgtggttgttctcgagatcgtctcaggccgcaagaactccgcctttatcccgcccccggacgccgaggccgacagcctcctggaatacgtacgtactctctgcttgtttcctcgtactcttcatcgttagctagctttagcttaccttgttttaataataatgcatacgttggcccatatgtacaaatgcaggcatggaggctgtacaagaaaggtcggagcttggagttgcttgaccacgcggtcaagtcgtcggcggtgccggagcaggtcgagctgtgcgttcgcatcgggctgctgtgcgtgcaggctgacccgcggctgcggccggacatgaagcgcgtggtaatcatcctgtccaagaagcagagcacgctcgaggagccgacgcgtccgggggtgcccgggtcgcggtaccggcggaggccccacggcctgcgcggcacgcactactctgctgggtcatcgtccggcaccagcttgccgtctacgtccgcaacatcggacgcgtcagcgtcagcgtcagcgtcggtctccaacgccatgacgacgtcgagcacccacaccatgaggagccaaggcttgccctcgcaccgagaagaacacgagtaggagtaacagggcgagccccaactgtgtacatttgtcaattctttcctgttttcttcagtttggtgttaattccgatcagggtggtgaatgggattgcagagtaggtatagatgtcatgattgttttgctagcttaggatggtgctgaaaattaagctattgacgggtccatcaccgaatctgtggtagactgcaggcaaaaactgtgtatatataaaaacgagaaaaagcaattttttttaacgagaaagaacaaattct

SEQ ID NO: 6609 - DNA, 902 bp, Zea mays
  Clone ID: 700572706_FLI
caagcacctcccgggcgcgctgaaggcggcgtcggcgcatgtctacgcggtggttcggggcgtgccggaggtggcgcgcgagctggcggccgaggcgcagcggtcgggcgtgaggggcgcagcccgtgcggcgctcgcgatgacggagccggtggcgcgggacgtgtacggccgcgtggagcccgtggccaaggacctctacgtgcggtacgagcccgcggcggaacacctggccgtctccgcctggcgctcgctgaacggcctgccggtgttcccgcacgtcgcggagatcgtcgtgcccaccgccgcgcactgggccgacaagtacaacagggtggtcgcagccgcagcggagcacggctacgcgggggccaagtacctccccgccatccccaccgaacgcatcgccaaggtgttttcgtcggcgccggaggccgagccgctggcagagggccagtagtgtgtgtgtgcgcgcgcgcgagctcgtctttgccggtggtgactctggatttggaccaccttccgaactgaactgaaaataaggaagcgtgaatccgggggccagctaaagatggtggtatggtatggtagcggcgttgtactagatgcgtgatgggacgatggttacggaccatgacgatgacgttgtgttccatttagctccgtgctgcgtgcttttgtataaaagaagtggttcgatgtcgcaatcccttagtttatctgacgatgcggtttttggctgttttagtttttgtttggtcaggttcaggttagggcgaaaacgataaccttgcgtcattgggcagcttttagagtcttttttttgtttcctggtagaaatctgtgtgcttagcttagcctgttgtattagcccccagtgcaggttatgtcgtcgtcggtgg

SEQ ID NO: 6610 - DNA, 536 bp, Zea mays
  Clone ID: 700572756_FLI
gaagggcctatccgtttggttagatgtgcccttggatgctcttgctaggcgcattgctaaagtgggaaccgcttctcgtcctcttctggaccaaccgtccggtgatccatacacaatggccttttctaagctcagcatgcttgcagagcaaaggggtgatgcttatgcaaatgcggatgtaagggtttctctggaagagattgcatctaaacaaggtcatggcgatgtctctaagctgatgccgactgatatcgcaattgagtcacttcataagatcgagagtttcgtcatcgagcacgctgctgataatccagctagcgactcgcaagctgagtcacagatccaaaggatacagaccttgtaatatcttaatccttctgttttgtaccgaagcgtaccccctagagcatcgttggtttatttgttcgttgaagtgtcacgagggagagaaaaaaaaaaaccctgaagtatttcttcttgtaagttgtaaaggaatggaataaaggagctaataatccgaagtgtaccgttggctg

SEQ ID NO: 6611 - DNA, 1891 bp, Zea mays
  Clone ID: 700572778_FLI
gttttgtgacattaggacagcgtgttcttgctaacccgctgaaagtgagaatgcactatggtcatccagatgtttttgatagaatttttcatataacaaggggtggaattagtaaggcctctcgcagcatcaatatcagtgaggatatatatgcaggattcaactcaactctgcgtcaaggatgcataactcatcatgaatatattcaggttggcaaaggtagggatgttggacttaatcagattgcactatttgaaggaaaagttgctggtggaaatggtgaacaagttcttagccgagacatatatagactcggacaactttttgactttttcaggatgttatctttctacgtgacaactgttggattctacttctgtactatgctaaccgtgctgaccgtgtacatatttctctatgggaaaatgtatctggccttatctggtgttggagaatcaattcaaaatagagcggatatactgcagaacgcagccttgaatgctgctctgaacactcaatttcttttccagattggtgtatttactgctgttcccatgattcttggtttcatccttgaatcaggtgttttaacggcttttgttcagtttattacaatgcagttccaaatgtgctctgtatttttcactttctcacttggaacaagaacccactactttggccgtgcaatattacatggaggtgcaaagtatagagcaaccggtagaggttttgtggtacgacatatcaagtttgctgagaactaccgtatttattctcgaagccattttgtgaaagggatggaggttgcacttttgttggtgatcttcctagcgtatgggtttaacaatggtggagcagttggctatattttactctctataagcagttggattatggcattgtcttggctttttgctccctatttatttaacccatctggatttgaatggcagaagattgttgaggatttcagagactggacaaattggctgttttatcgaggtggtattggtgttaaaggagaagaaagctgggaagcttggtgggaagaagaactgcaacatatttacagcattcgagggaggatactggaaaccatattaagcctgaggtttttcattttccaattcggagttgtttaccacatgaatgctagcggaggaagtacagctttattggtgtattggatttcttgggctgtgcttggtggccttttcatcctcctcttggtctttggtttaaaccccaaggccatggtacatttccaattgttcctgcgtttggtcaaaagtgtagcgttattgatggttttggctgctctggtcctggcaattttgtttacgaaactcagtgtgagagatgtttttgcttccattctagcatttgtgccaactgggtggggaatcatttcgattgccatggcatggaaacctgtcgtgaagaaattgggtttgtggaaaactgttcgtgccctagctcgcctctatgatgctggaatggggatggtcattttcatacccatagccatttgctcgtggtttccattcatatccactttccagacgcgacttctgttcaaccaggcgttcagcagaggtttggagatatctctgatccttgctggcaacaatccaaatgctgggatctgatggtggcagttccggccttgcttcattaatctgtggacctttcgtacttgaattaatcctcacttctcagttaacagtagcgatgtacatatctgatatctctatgttcaccggagttgtttgccgtgggtataaatatcaacggctatatttctagagtttactggcttgtacctgtatttttgaacgggtgaactttgtatggccttcttttgacattgacatatgtgctgattacgtgg

SEQ ID NO: 6612 - DNA, 961 bp, Zea mays
  Clone ID: 700572856_FLI
gcttactacacactcgaaacacatactagatggtacagtacagagtacacacatatttaaacgacacaggagctcaacggcccagccccaccgatgtgctgtaaaagtaggccacatcagcaccgacactgggcccactaacccgacacgggatcggcacacagacacattatttattcgaccacaacacaaaacgacgcacctttactatgcggggcccgccgcgccacgtaggacacgacgtgaacccgaagtcccgaacacaaaagcaggtttttcctagcgacctatgccggcgccatgccgtgctgttgccgtggcagtggcaccagagcggcgcacgccaggtgacaggctgacgcagcgagctagatcggccgccgtccggcgctggactcactcgacggacttctcgacggcagcgacggcggcctcgggagcagggaccgccgcttcctcctcggtcgctgcgacctcaggagtggcagcaaccgcaggcgatgcctccccctcctcctcgttagcctccacagccgccgcctccttggtctcggcggctatctccggctcagcagcctcgaccggggcagcagcagcctccgtctctgctgccggcgcggcggcctcgggctctgcttccttgggctctgcctcggtcggctcagcctcagctacggcctcggcctcgacctcgacctccttggactcagtctcggcctcggccgacaccggctccttagcggcgacgacctcggtctccgccgccggagcagcggtctcctcgttcggggtctagacggcggccagctgggcagcctccactcccgctgcagcagcagcagcagcctcctcgacgggagcggcagtcgggacctggacctcgacggcggccattggtgcagtgcagctggacgtgtgtgtggaactgtggactgtggagctaacagctaacaacgaaggc

SEQ ID NO: 6613 - DNA, 1417 bp, Zea mays
  Clone ID: 700572857_FLI
attcctcccaacaccacctcgcctgcgatcttcgtagcctccgtcgcgtcgagcatcgatcatgtcggcctactgcggaaagtacaaggatgagctcatcaagaatgctgcctacattggcacccccggcaagggtatccttgctgctgatgagtccactggcaccattggcaagcgcctttccagcatcaatgtcgagaacgttgaggagaaccgccgtgccctccgtgagctcctattctgctgccctggtgctctccagtacatcagcggtgtgatcctcttcgaggagaccctgtaccagaagaccaaggatggcaagccttttgttgatgtcctcaaggagggaggcgtcctccctggcatcaaggttgacaagggcaccattgaggttgttggcactgataaggagaccaccacccaaggccatgacgaccttggcaagcgttgcgccaagtactacgaggcaggtgcccgctttgccaagtggcgcgctgttctcaagattggccctaatgagccatcacagcttgccatcgacctgaacgctcagggtctggctcgctatgccatcatctgccaggagaatggtctggtgccaattgttgagcctgagatccttgttgatggccctcatgacattgatcgctgcgcttacgtcactgagaccgtccttgctgcctgctacaaggcgctcaacgagcaccatgtcctcctggagggtaccctcctgaagcccaacatggtgactccaggctccgactccaagaaggtgacccctgaggtgattgctgagtacaccgtccgtaccctccagaggaccgtccctgctgctgtgcctgctgttgtcttcctctctggtggacagagcgaggaggaggccacccgcaacctcaatgccatgaacaagctcagcaccaagaagccgtggtccctgtctttctccttcggccgtgccctccaggcgagcaccctcaaggcctgggctggcaaggtggagaacctggagaaggctagagctgccttcctcgccaggtgcaaggccaactctgaggctaccctcggcacctacaagggtgatgctgccgccgacaccgagagcctccacgtcaaggactacaagtactgagttgcttctctttgcgtgcccgttttggaactcctgcctacgagctaggttgcggagtgtggtttgctcgttagagcttattttcggacatccaaaaaacatgcttcctatgtgggatgatggttatctttatatttgtatgttaattagtctctttgctgttaaatttcgtgtaagttggtcctgccgatggagaatcgagcagctcccttttttgttctatcaactatgctgtaattctggctatgtatcggcaaaaacaattctatatgctgagttggagtcggc

SEQ ID NO: 6614 - DNA, 483 bp, Zea mays
  Clone ID: 700572891_FLI
gcatttcttacactagcttgttgccgacctgctcccgggacacgcacgaacactgctcttcagtcttcaccatggagtgcacctcaagccgccgccgccgtagccggctctcgcgctgcctcctcctggtgtgcgcagtggcatccctgctgtgccactcccccggcccggcggcggcggcggccgcgccccgccggctgctgcagacgtgcccggggcaggacttcgacgtgccccacgcgcacctgcgcgcgcgggacaacgtgaagccgctcaagtacacggaggagctctccgcgcgggccgcgcagtgggcgcagcagtacaggagcgactgcgaggccgccgcgcccgcgccgggaatcaacgtgttcctcggcgccgcgggcgccacctggctgcccagcgacgccgtcgccgcgtgggccgaggaggagcagcactacgactacggctccaactcctgctccaccggcaaggcgt

SEQ ID NO: 6615 - DNA, 165 bp, Zea mays
  Clone ID: 700572908_FLI
cgggactaatttttagtccctatattttattctattttagttccaaaattgtaaaatatagaaactaaaactttttttttgtcacttagtgggtgtttggtttctagggactaatgtatagtaccatataaattcaagctatacacattatctctattacttatt

SEQ ID NO: 6616 - DNA, 1718 bp, Zea mays
  Clone ID: 700572930_FLI
gaaaggatgaagcagacagagggcagtcacaaggtggtaacagcagcaggtggcaagatggcggtcggagtgaggagcatcgtgacctccctggtggctttcttcatcctagccagctccgtggtgttcctcctcctcgacagagaagccgggctccaagaagaatcggcgataagagccggcggcggcggcggcggcgacgaggagtgcagctggtctcgggggcgctgggtgtacgacaacgtgtcccggccgctgtacgacgggctcaagtgcgccttcatcttccccgaggtggcctgtgacaagtatggcaggaaggatgtcatgtaccagcactggagatggcagcctcatggtcatggatgcgacctcccaagattcgatggcatgaagctgcttgaagagctgaggaacaagagactggtgtttgtgggtgactcggtgaacaggaaccaatgggtctctctcgtttgcatggtggaggcctcgatacctgacgacaggctcaagatgcgcatcttcaatggctcgctcatctccttcaaggcactggagtacaacgcgacgatagatttctactggtcgccgctgctggtggagtctaacagcgacaaccccatcatccaccgggtggagtacaggatcataagggcagacaggatcgagaagcacgccagcgtgtggagggacgccgacgtcatcgtcttcaactcttacctgtggtggaggaagcagaaggatgacatgaggatgaaggtcatgtacggttcatttgaagatggtgatgcaaagctagacgagatggaaatggtggatggtttcgagatagctatcaagaaactgacggaatggcttgcagagaacattgacaagaacaagactaggatatttttcgcaggatcatcaccaacacattcctgggctagcaactggggcggacaagacaagaacaagtgcctgaacgaaacggagccgatcagctacagacccggcggcgggtacaaggctgcaaccacggactacagcctgatggccatggccaggtcctacttccggcggacgctggagccgagaggcatacgcgtccagatactcaacatcacggagctgtccgactaccgcaaggacgggcatcccacggtgttcaggaggcagttcgttcccctgaccaaggagcagatcgcggacccggccagctacgcggactgcacgcactggtgcctcccaggcgtccccgacgtctggaacgagttcctgtatggctacctcacgcagcagcgcaaatgatgcattattacaagaagctagaccgacgtcaggttcgttttgcttacacatggacatggccttgttatatgtagtgtacagtgcagtacagattgccagctgctccgtttagattattagggatgtacctgctgttacatgtagagagagacagacaggagatctgtcttgcccaacattctagtatctgtaaatcttgttctttttgtccaacattaattctaggatctgctgctaaccattttttttggatttatgtaaagaatgatctgagtttgctgttccagtattgagcaagtaaaaaaaaaacaaattatctgcaaatcgcttgttgtccaacattaattctaggatctgctgctaaccattttttggatttatgtaaactgagtgattatctgaaatagaatgatctgagtttgctgttc

SEQ ID NO: 6617 - DNA, 934 bp, Zea mays
  Clone ID: 700572957_FLI
tgactgggctggtgtcaagccacccttggtagaggaggatagggagttcctggagaagaaagagaagctgcaggagtgggagcagcagctcaccagtgcgtcacaacaggcagaagcacttgtcaaggctcaacaagatatggttgaaacaatgggagcgcttgggttggcattcgttagactaacaaagtttgaaaccgaggaggcaatgtatgactctcagaggatgagagcagctgacagcaggcgtgtagccactgcagctgttaaagctagcagggcatgtcgagatttgaatgcgcaaactgttaaatatctggatacgctgcatgaacatttaagcataatgttgtctgtccgcactgcattttctgatcgggcaagtgcattattgactgtgcaaacacttatgtcggatttggcatcattagagtccaggatcgagaaactcgaggctgcatccttgaagatatttggtggtgataaagctaggactcgcaaagttgaagagctaagggaaacaattagggctactgaggatgctaagttctgtgctttaagagagtacgagagaattaaggaaaataacaggagcgaactccagcgactagacagcgaaaggaaagaagaattcatgaggatgctaaaaggatttgttgcaagtcaggcggcctacgcggacaaaatcgtggatggatgggagacggtagcggaggagacgagcggttatgttggtgtgcgtggatctgatagcatgacttcgtagcttcgtttggttggatgtcaagtgtttgtacaatgtaatctaggttatggatttgggaatagaagaaaggtgcgccaggttcgatttgtttgtataatcaaataaaggtactgccatggagccacgatttcacgtcctggatgtcaagtatacgttgttcttctgtgg

SEQ ID NO: 6618 - DNA, 1074 bp, Zea mays
  Clone ID: 700572963_FLI
gtcaatggtcattgcttcattggtcaaaccttgagagccccggttcagcaatcgcagtcccacaaggcggcgatggacggcggcggggtcgatacggccacaacggcggcctggatggagaagcaccggcagatgtacgagcgggccacccggcacccgttcaccgtctccatccgcgacggtaccgtcgacatgtctgccttcaagcgttggctgagccaggactatctgtttgtaagggaatttgttgcattcatagcaagtgtactgctcaaatgctgcaagcaagaagacagctcggacatggaaatcatcctgggtggagtagcgtctatcagcgacgagatctcttggttcaagaacgaagctaccgtatggggcgtcgatctagcaagtgtttcccccttaaaagccaatctagagtaccacaggtttctccggagccttactgagccagaggttagctatgctgttgctgtaactaccttctggacgatcgaaaccgtgtaccaggacagctttggtttctgcatacaagacggcaacaagacgccgccggagctcctgggcacctgccagagatggggcagcgccgggttcagacagtactgccagtctctgcagagcatcgtggatcgttgcttggctaacgcaccggctgatgctgtccagagtgctgaagaggccttcgtccgggtactcgagctggaaattggtttctgggatatgagctcttctcggtcctaattaccagcgtgttctctgagtccaaacatctacgcaaataatcgaacgaaataaatggtgcttcgggctcagacccaggttttcccatgtcaccttattcctatctttggttttcgcgtgacagtactttccgctgccggttcagaaaagactgatatgatgctgccatgtgggatccgatcagatttgctgtatcatgcacaggtgaaactccatcttacactcaatttttgtaagcatgctataacaaaaaaaaactagacgttgtagagagattctacaagtagattaaggtaatgtttggtactggagtattgtgggagtatt

SEQ ID NO: 6619 - DNA, 879 bp, Zea mays
  Clone ID: 700573003_FLI
ctaaatcctccctcgaaaccctagcatagccactgccttcccgcacgctaggaaggggaagatatgggcgccgaggaggacgccgctgcacgccgcgagcgtctccgcgccctccgtgccgccaaggacctcctctccacccccgacggcgccccaaccccttccaccgacggagaacaccaaaatggcaaccatgagatggcagaagagccagaattaccaggtcatcaggatgcacctggtgaggctgctaaagaggatggtagccccactgaggaggccgaagaggttgaagatgatggtgagcttccagccatgaagttcagaaactaccttccccatgatgaacaacttcgaggaggcaagctggctccagtgtctcttcccaagtttgaagacccaattagtgccgaaactgcagagccaaaggaagtggagaacctttttggaaacatagcaccaaagaatccaaattgggatctgaaacgtgatgtgcagaagagaattgataaactggaaaggcgcacgcagaaagcgttggctgagattgcattggaacagcagagggagaaggaagccttggaggaatctcaagattgaccgacctgtataagtgaccagtgactcatgctggttggtccctcgagcagacgtcattatcttatttagataatgtaatgtactttgggatgctctgtgtatctaccatcttgggatgtactgaattgagtttgggacgtgtatctacctaccatcttgtattgtcagctcaaggatgtagcaaactagtagcaacttcaaaaaatgagatgtagcagtcctgttctgttagacggacctggtcaaactaccgtactaaatacaaacaaagcacacctt

SEQ ID NO: 6620 - DNA, 519 bp, Zea mays
  Clone ID: 700573051_FLI
gtccttccaggtcaccgccagcgacggccgcaccgtcaccagcaacggcgtcgctccggcgggctggcagttcggccagaccttcgagggcgcccagttctagctactactactccatcgacgagtgtgactgtgagcaagagagaaggagaaaccttcttcgctgtagtaaagaagaggctcccgccattccgaggctgcttattattagcacccgcttaggcatttccttctcttattattaccataggattgagctgtttattttctgcaccagtgattgtagcaatgggttaagcaaaacaaaaacctgcaaggctatttattgtagggctgcaggggagtggtgtcgtgcaacttattgtgttgttacgctgtactagtagcaacccccgaatctggccacatggtggtgggagatgtttgtggggattgcaccttttgggaccgtgaacatcaatgcttgtttatggtctattacatgcagtatatatgatatatatatatgctcgtggtttg

SEQ ID NO: 6621 - DNA, 159 bp, Zea mays
  Clone ID: 700573076_FLI
ggaaattggattaaacagtgctctggcgaggggacatgaactgggagttcttgtttccttgccttatgtcgattaaggccccgtttcaatctcacgggataaactttagcttcctgctaaactttagctatatgaattgaagtgctaaagtttagtttc

SEQ ID NO: 6622 - DNA, 628 bp, Zea mays
  Clone ID: 700573078_FLI
cacaacttggccaacaaagactgctggaatgaaattaattgctgcaatgtttcaggagatgttaactggcgaagaaattaatttcattccagcagtctttgatgtcacaacttggccaacaacaagctggacaggagcggacacaatcaggctctggtgcaggcaatgtcaacctcaacaccttgatgaacatgttcagcgggcttggtgctggtggtggcctaggtgttccaaatgctcctaatgtgccgccagaagaactgtacgccacacaattagctcagctccaagaaatgggtttctttgacacacaagagaacatccgagccttggccgctaccgctggaaatgttcatgctgcagtggagcgacttcttggaaatatgggctaatagaatatgatgatcataactgtactcagatattgtgatttttagttggcattgtgagatcatgtctggctcattggttttacacccgagggtgagaggcggcgtctagattttgtgttcaaggatgaataaagagtgtaccgggggaacctttcatatacatatggtctggtgtcatggttaaattgttgttgttggtacatttggttgctgtacatacatattgatcttttgct

SEQ ID NO: 6623 - DNA, 453 bp, Zea mays
  Clone ID: 700573080_FLI
gccgaggaagttctaaaactggccaagaatggattggaaagaagaggatacaaggaggtcggtttccttagagaggttgacgaagtggtgaggacaggagtgacacctgccgagagacttctgcatctgtacgagacgaagtggcaacgcaacgtagaccatgttttcgagcacttgctatactgatgttgtagatgtaccctagtacaaaaatctcatctttgattcattcaacgccttgagtgggagggcacaggaacacagcttttggttaagttgctgaccgggggaacagctacccggtgctgcgtgcggtgcctacaaataacttcgctcgggacggatcactactctctagggagatggaacaaatcactgtttgtaccggccctttttgtttctgttttccttcagagatggagatgccgtattgaaaataagtccatcttctgt

SEQ ID NO: 6624 - DNA, 659 bp, Zea mays
  Clone ID: 700573083_FLI
gtcaaagacaaggacaacgtgaccttggaggatgtgctgcagcctggaacaaacatgcttgctgctggctactgcatgtacgggagttcatgcacgcttgtgctgagcactgggaacggagtcaatggcttcactctcgatccttcccttggagagttcattttgactcatccaaatatcaaggttaatgataaaaaaaactccacacttcttttctttcctggctgatcgatacccctggttagcactataaaacaaaatggtactacttgagtttgggtatcacgttttgtgcgtgcttcgttcttttcttgtgcagataccaaggaaagggaagatctattcagtcaacgaagggaacgccaaaaactgggatgggcctacagccaagtacgacgagctagggggctcgtttctgtccaaaaactactactgtgatttcgtaacaagccaggctgaattttatgccgtttcagattcgtggagaaatgcaagtatcctgaggatggttcaccgcctagatccttgagatatatcggaaggtgatccattgctcgttctcgactgtgtataccggtgtctcacagtttgctttcttctgcggtcatgaattgaatgtgtctgaagttttattaagaataatagtgcttgctcaagct

SEQ ID NO: 6625 - DNA, 536 bp, Zea mays
  Clone ID: 700573129_FLI
cgccgccgcagccaaagtcgggcctcttcgttggcatcaacaagggtcatgtcgtcaccaagcgcgagctgcctccccgcccgtgccaccgcaaggggaaatcaacgaagagggtgtctatggtcaggggcctgatcagagaggttgctgggtttgctccttatgagaagcgtatcactgagcttctgaaggttggcaaggacaagcgtgccctgaagcttgctaagagaaagcttggaactcacaagagggcaaagaagaagagagaggagatggcgggcgtcctcaggaagatgaggtcggctggtacgcacactgacaaaaagaaatagagagcatttcaagttcatggagctggctgccagagattatgttccagtgtctgattttccatacatgtagaacctaatagacatgtcaaagtattatgtatcgaaccagctcatgggattttgctccttccaatgcatccagggtttatgtatcgaaccaatttatgggatcttgctcttattctaatgcatccatggtttgtg

SEQ ID NO: 6626 - DNA, 496 bp, Zea mays
  Clone ID: 700573143_FLI
agagtttagaacaccagatgaagctgatgacatcgactccaacctacatgcctcatccgaccttgatgctggcgcctttccctcaggcacccctagcgtcgttccatgcccaggggcaagctgcagggcagaagctgatgatgccctttgtcagctatccggggtacccaatgtggcagttccatgccgccttcagaggtcgacacctcgaagaacagtgaagcgtgccctcctgttgcataattgcttcgactagcggctggtcctgctcacaccatgcgaattagtcgcaactgaagcccccctagctgttgatccattgattggctataactgatgttgttatatttgtagttcgttggtgaccaagtaagctgctgatatctgtggcggggcgctctactatagaggctactgataccccttcaatggctgtacattttttttactgttattctttttgcggagaaaagaagaatgttcgttcttgttctcc

SEQ ID NO: 6627 - DNA, 996 bp, Zea mays
  Clone ID: 700573194_FLI
gtgtgacttcagatggattgactgtatttattgaaaataaacttggagggaagcatcaccgtttcaaacgagggtacaagaatgtaatagacgaggctattcgtctgaactctattggtgaggagtcacatttggccatggaaacaagtgggcatggagcgctgaaagagaaccactggcttgatgatggagcataccttatggtcaaacttttgaataaacttgctgctgctagaacactgggttcaagtattggtagtaaagttttgactgatttggttgagggccttgaagaagctgatgtgacagttgaaataaggttaaagattgatcagaatcatgcagatttgaaaggagggtccttccgtgactatggagaatccgtcttgagacatttagagaatgcaatcagcaaagacccaaatctccataaagccccggtgaaccatgagggcgtaagggtttcaggatatggtgggtggttcttgctgaggctctctctgcatgatcctgttcttcccctaaacattgaggcacagagtaacgatgatgcgattaagctggggcttgcggttcttgctgctgtgaatgaatttccagcactggatgtgacggcactgaacaaattcgtgcaccagtgaatataagggacggacattggcatcataatgtgatcagcttcgcatggtgccgtgttcgccccggtcgaacatgttctacatgtgtggcacgagtatcgtacagaaatataccagtttattacttgcacaggcttgttagtctggaaggacaagggagattccagtgttgagatgattcttgtgtgtgtttataccagctatcaaagtaagaatatgcgtgcgtactgttgaggctgatctttacttgagaataaggtttgagttacccgaatattttttgtaaaaggatcaggaggcttgctgtgatgtgaggccacgaatttgccaataagtacctctcgatttttcttcagcg

SEQ ID NO: 6628 - DNA, 1484 bp, Zea mays
  Clone ID: 700573209_FLI
cagcagcaatgcttcctgccttctgaagagcaaagacgctttcgtacgtctttgcattatcatcaacagcgcattagctggtgaagaggcagagaaggctccaatcggtttctttgaccgcgatggcaaatatattgagtgccttctgtcagtgaacagaaaagtgaatgcagatggcgtcgtcaccggagtgttctgtttcattcatgttcctagtgatgacctccagcatgcgctacatgtgcagcaagcctctgagcagacagcactgagaaggctgaaggctttctcgtacatgcgacatgccatcgacaaacctctctcaggtatgctctattctagggaaacactcaagggcacaggcctggatgaagagcagatgaggcaggttcgcgtcgcggataattgccatcgccagctaaacaagatactcgccgacttagatcaagataacattactgacaagtcgagttgcttggatttggacatggctgagtttgtgctgcaggacgtggtggtgtctgctgtaagtcaagtactgataggttgccaggggaaaggcatcagagttgcttgcaacctgccggagagatccatgaagcaaaaggtttacggggatggtatacggctccagcagatcctctccgacttcttattcgtttcggtgaaattctctcctgctggtggctctgttgatatctcttccaaactgaccaagaacagcattggcgaaaaccttcatctcatagacttcgaacttaggatcaagcaccaaggagcaggagtcccagcagaaatactgtcacagatgtatggggaggacaatagagaacagtcggaggagggcttgagcctccttgtttctagaaaccttctgaggctcatgaatggcgacattcgtcacctcagggaagctggcatgtcaaccttcatcctcactgctgaactcgctgctgctccttcagcagctggacattgaagccgtcactgcaaacaagtgccaaatgctgcccagctccctcagagttcattcggaaagccacggtggttcgcggagaatgggaaatgctgcagcctgtaggatcaccgaatgcataagaaataagattgacttgtatggttgtttgttaggcggggaagttgtgcaggcatagtaagactccatacttctgctcttttctgcctgtaaccaactgttttctatcagttattaggctatctcatcagtttaattatacttatccctcatatttaaatttcactttgcaaacaatacaaaacagtgttttgatgaccatatggatgaactgcgaagacaatttttttaggctgtctctaatatttcatccatatggtcacccaaaatactattttgtacggtagactacactgttagtagtgtggagtttaaatatagggatgaataacctgttggagataaccttacctatcttcagcaaatcttctatcatatctcttatttt

SEQ ID NO: 6629 - DNA, 717 bp, Zea mays
  Clone ID: 700573213_FLI
ctctacgcgctgcggcagcggctgtcggaccccaacggcgtgctgcagagctgggatcccacgctcgtcaccccctgcacctggttccacatctcctgcgaccaggtcggccgcgtcgtccgcctggacttgggcaactccaacgtctccggctccatcggccctgagctcggccgccttgtcaacctcaaatacctggagctgtacaggaacaaccttgacggcgagatccccaaggaattgggcaacctcaagaacctgatcagcttggatctgtacgccaacaagctcacgggaggaatccccaagtcactctccaagctcgactcactcagattcatgcgcttgaacaacaacaagcttacaggatcaattccaagggagtttgccaagctctccaacctgaaagtcatcgatttgtctaacaatgatctctgtggaactattcctgttgatgggcctttctcaacctttcctctccgaagcttcgagaacaacagcaggctcaacggtccagagctacaaggattggttccttatgattttggatgttagatgccgatcaacaatgtaccaccttccccagttgaaagggggaaagccaagatagtattatcaatagaaacctagcttcaagaatgtcgtgactatatatatgtatgatattaagacgagatttgataagggtggcatagcaagtcctgatattctgtgtgc

SEQ ID NO: 6630 - DNA, 1490 bp, Zea mays
  Clone ID: 700573216_FLI
attagcttggctagatgagtcactatgacaatgaccgggtccagtgatgtgtctggtctaatcgggatcgtccggcaagaaaagaaatgaaatcaggtgcattgaacctgagcttgtcatatacccaccacatctcaaaatataaacatatattcatcaatcaatctacgaatgcaatttgtatgaacgtttatatttagtgggtgtttgtttgggattataatttacccagattagagttagttcaaaagttgttggattatataatctgggtagattataatcccaaacaaacacccccttattatcattcattctaatatggacggaaaaaaaatgccacaaacaactatattttagcggaatgattaataatctaatggtatacatgacgtatgggcttctaagcaagccatgtgcagaaatgcagaatcggcccatagccggcatcgacggacctgggcatgttgggctggagtcctaagatgacctttttgcgagatatttgactcaaacaatctaaccaactcaactaaactagatacttttggctcttttatttcttttcacgaaactttttgtcaacgtaggtttttagtttggtatacttattaaacaaggaaaatattgaaaacataacatctggtgaaagtaactaaacttttcatgatccacgcttataaaagatatacgcaagctgggaccgtagcctgaataatggaactggttgcgctgtgtgttattttttatgaaataaaaatctagatggttgtgtttatgatagatgttactatacggtcgcacttgccgtcaattcaatttttatttgtgcaggaatcggggatgttgataccaaggagacacctctacccatggaggatgccttaaatgactacaaaaggctagattacatccagcgccacatcgctactcttaaggaatcaatagagtatgaatctacactagaacttatctctagtatatatttcgcctccgttttttattgctctttgttctgttgcaatcatttatatgtggcgcatgcatggttcaatcaagataatgcttgaattaatggatctgttcatgcagcttgggatcaaatgtgcaaggctacttcgcttggtctctgctggacaactttgaatggttcgccggcttcaccgaacgttatggcattgtctacgtcgaccgcaacaataactgcacgcgctacatgaaggagtctgccaagtggttgaaacagttcaacgccgcgaagaagcccagcaagaagattcttacgccagcttagaaatcgggggcctcatgatgtgggtgcagcccataaaaaactggtgtgtggtttcgaaccgaaaattttctgtttttttccgccacgagaggttctggaggcatactctccagcaccgtggctaataacgcattgttccaattcagtctggccttgtcatgcatgcaataaataaagtgatgggtttccctgtttc

SEQ ID NO: 6631 - DNA, 274 bp, Zea mays
  Clone ID: 700573350_FLI
ccgcgacttcgtgctcgtcctcaacaaggcgctcgccgccgacgaccgcgtcgagatctgccagctccccgtcggcagacggcgacgttaggaagtccgcatcctcattccaatcataatagacgacccgcagcattaattatccaccggctttttttttggctctttcttgcccctgtaatctttctcctcctcttccttcttgggaattgtcgccgccgtttcgatacgtaaatcacgagatcggtaatacagtaatgctcctcaattttac

SEQ ID NO: 6632 - DNA, 425 bp, Zea mays
  Clone ID: 700573369_FLI
tgtggggatgctaatgaggtggaatgctcagtttcagattccaaagttaaagacaatatggatgcacatatgtgatatgtagagttagaaataaggtaaatggagaacagtcgagttgggttccagcggtttaatgaatgtgtttgtttagttcataagtaggcaaaatgccgtctcctccggtggtttcagcattattctttttgtaaatggctagtgcaggatacttaggatgctaccctgcaggttctcttgtgcattccgaccagcgtgtgtgttgaattcttaccctcggatccttcagaagacgtttgtgtatagtgtcttggttgagaaatcccaagatggtgtatgaattcagattggtagttctaaacttgttgtctttcagttccacacaggcagaagtcattgcttttcagctc

SEQ ID NO: 6633 - DNA, 735 bp, Zea mays
  Clone ID: 700573370_FLI
agagaatgaagtcagtgtttctgaaaaggaattgcttgatgagattactgaattggaaaagcaaagagatgagcttgaggcacagctgaagaaggttaatatatcactaaatgctgctgctggacggctcaaacaaactagggaagagagggaccaatttgacgaagcaaacaatcaaatcatatttagcttgaaaaaaaaggaggatgacctctcaaaatccattgccttatgtaatgtggaatccaatgttgtcaagatctggatcggtttccttgaggactcgtggaagctgcagtcctcatacaatgaacagaaggataataaaacgtgtgatgagctggagaaatgtgtgagtgattttctaaagttgacaaaacatcatctttcagcattcaaggaagtcctaagccaattgattgagaatatcgaaacatatgtcggtaacttggctgtcttaacctcaagggaagaggaaaaagaacatggggatgatgaggcatctgagaggacagatccacgtaaatcccttgaagaggaatatctagaaacagaaaagaaggttatactcagtcaccttactttaacttggtctcatacatggttcttaaagcggtaaggcgaggtaaggcattgaaccaccgctggacgcctaggcgccgccaaaggcgagcaaggcgacaccttatcaacatgagaaccagcaaaacagcagcatggaggaggaacaaaaag

SEQ ID NO: 6634 - DNA, 692 bp, Zea mays
  Clone ID: 700573373_FLI
cgcggctcaacttccccgacaacgcggagtccagggcgccgctcgaccccgccgtggacgccaagctgcaggccatctgcgccaccatcgccgccgcgtcgtcgtcatccaagaattccaaggccaagagcaaggcgatgccaatcaacgcgtccgttctggaagcggcagcggcgtctccgagcaacagctcctccgacgaaggttccggctccgggttcgggtcggacgacgagatgtcctcgtcctccccgacgccggtggtggcgccgccggtggcggacatgggacagctggatttcagcgaggttccgtgggacgaggacgagagcttcgtgctccgcaagtacccgtcctacgagatcgactgggacgcgctgctctccaactagtcgcccttcgccgacagatgtgctgttgtagttcagtagtggcagtatctctggccgccgcagatgaggttttaggcaatctgcaggccgccggcccatgtgtattaagtaggttttgctcagttgttggccccggacttcgccggcgtttttgtgaccggcgtccccgagtgcactgcattggtgtactggtctgtctgtaaaaaaaaatggatctgtgtacttctatagtgtgtattcaaccattgttcttagttgtgatgttactcgtgctgaaaaattgcctgtgcggatttcgtc

SEQ ID NO: 6635 - DNA, 1011 bp, Zea mays
  Clone ID: 700573379_FLI
ctccccactccctctcgtcgccgtcctctcccgttcgcaacgccacgctccccaccgccgaaatggccccgaagcgaggtggcagggcaccggtgccggccaagaagaagacggataaagtgacgaaccctctgttcgagaaaaggccgaagcagttcggcatcggcggcgcgttgcctcccaagaaggacctgcaccgattcgtcaagtggcccaaggtcgtgcgcatccagcgccagcgtcgcatcctcaagcagcgcctcaaggtgcctccggcgctcaaccagttcacccgcaccctcgacaagaacctcgctaccaacctgttcaagatgcttcttaagtaccggcccgaagacaaggctgccaagaaggagaggcttctgaagagggcccaggctgagaatgaaggaaaaactgttgaatccaagaaaccaattgttgtgaagtatggccttaaccatgtgacttacctcattgagcagaacaaggctcagctcgttgtcatcgctcatgatgtggatccgattgaactggttgtttggcttccagccctgtgcaggaagatggaggtcccatactgcattgttaaaggaaaggctcgccttggatcgatcgttcacaagaagactgcatcagtcttgtgtctgaccactgtcaagaacgaggacaagcttgagttcagcaagatcttggaggctattaaggcgaacttcaatgacaagtttgatgaagtcaggaagaagtggggaggtggcatcatgggctccaagtcgcaggccaagaccaaggccagggaaaagttgctggccaaggaggccgcccagcggatgacgtagattatccactgttgagcttgcccctgtagtttgacgtggaagaaccgatgagcattgtgcactcgtattgtgtttttttgaatctactttcatatgtttctgtccatcagaccgtgtttagaaactttgaaagacagttctacagtgtttatgcaatgtcttatatcgaagt

SEQ ID NO: 6636 - DNA, 1962 bp, Zea mays
  Clone ID: 700573388_FLI
cttataattgggggtataaccctgtggtttggggcgttccaaaaggaagctatgcaagtaacccagatggtccaagtcgtatcattgagtaccggctgatggtgcaggccttgaatcgcttaggtcttcgagttgtcatggatgttgtatacaatcatctatactcaagtggcccttttgccatcacttccgtgcttgacaagattgtacctggatactacctcagaagggactctaatggtcagactgagaacagcgcggctgtgaacaatacagcaagtgagcatttcatggttgatagattaatcgtggatgaccttctgaattgggcagtaaattacaaagttgacgggttcagatttgatctaatgggacatatcatgaaaaagacaatgattagagcaaaatcggctcttcaaagccttacaattgatgaacatggagtagatggttcaaagatatacttgtatggtgaaggatggaacttcggtgaagttgcggaaaatcaacgtgggataaatggatcccagctaaatatgagtggcactgggattggtagtttcaacgatagaatccgtgatgctataaatggtggcagtccgtttgggaatccactgcaacaaggtttctctactggattgttcttagagccaaatggattttatcagggcaatgaaacagagacaaggctcacgcttgctacatacgctgaccatatacagattggattagctggcaatttgaaggactatgtagttatatctcatactggagaagctagaaaaggatctgaaattcgcaccttcgatggctcaccagttggctatgcttcatcccctatagaaacaataaactacgcctctgctcatgacaatgaaacactatttgatattattagtctaaagactccgatggacctctcaattgacgagcgatgcaggataaatcatttgtccacaagcatgattgcattatcccagggaataccattttttcatgctggtgatgagatactacgatctaagtcgcttgatcgagattcatatgactctggtgattggtttaacaagattgattttacctatgaaacaaacaattggggtgttgggcttccaccaagagaaaagaacgaagggagctggcctttgatgaagccaagattggagaacccgtcgttcaaacctgcaaaacatgacattattgctgccttagacaaatttattgatatcctcaagatcagatactcatcacctctctttcgcctaactacagcaagtgatattgtgcaaagggttcactttcacaacacagggccctccttggttccaggagttattgtcatgagcatcgaagatgcacgaaatgataggcatgatatggcccagatagatgaaacattctcttgtgtcgttacagtcttcaatgtatgtccgtacgaagtgtctatagaaatccctgatcttgcatcactgcggcttcagttgcatccagtgcaggtgaattcatcggatgcgttagccaggcagtctgcgtacgacaccgccacaggtcgattcaccgtgccgaaaaggacagcagcagtgttcgtggaacccaggtgctgatggatgcctttcgctagcgagcaagtgcattcggcatccaagtcgaagcaaacgaatgaaataagagaaggccatcgaataaaacgaagtatataaatagattgaataagacgttgcccaagttgccaaggcacgctttgccatatgtatgcgttgaaaaataaataaataaataaataaatgatgttatagaggtacaaaagcattggaacatttctttatagaggtgaaccaccctattttccagtttccatgtgtgaattgtgattagcacatgtatggaataataatataaattaaattttatgcaaaaaaatatatttattataacatactcctattttaacccatatctcgg

SEQ ID NO: 6637 - DNA, 768 bp, Zea mays
  Clone ID: 700573394_FLI
gcaagtgcttcatcagttgatcgccgtggcaccagtgacaacacagtatcttttcgtgactgccactcttcctcttgacatctataacaaggtcgttgaaacctttcctgactgcgaggtgatcatgggacccggtgtccaccgaacaagctctcgccttgaagagatccttgtggactgcagcggagatgacaacgaagaaaagaatccagaaaccgccttttcgaacaagaaaacagcgcttttgaagattatcgaggagtctcctgtccgcaaaacaattgttttctgcaacaagattgagacatgtagaaaagttgagaatgcgctgaggcgggtggacaggaaggcctcgcagatcaaagttctccccttccatgctgcgctggatcaggcccagcgcatcgcaaacatcaaggagttcctgaacaagcaaacggctgactccatgttccttgtgtgcacagatagggcgtcgcggggcatcgactttgcgaacgtgaaccacgtggtgctcttcgactacccccgcgacccgagcgagtacgtgcggcgcgtcgggcggactgcccgcggcgcgtccggcaacggcaaggcgttcgtgttcgcggtgggcaagcaggtgtccctggccaggagggtgatggagaggaacatgaaggggcacccgctgcacgacgtgccgtgcgtctagagaccctggagggggaggtgtctgatgcgtgcaattgctgcctaaactctaagcatgttttttgtttcggaacg

SEQ ID NO: 6638 - DNA, 679 bp, Zea mays
  Clone ID: 700573405_FLI
ggcatcaaccactacacttctttctacatgaaggaccctgggacatggaacctgacaccagtcagctaccaggatgattggcatgttggttttgtctacgaacgaaatggagttcctattggcgctcacgcaaactcctactggctgtacattgtgccgtggggcatcaacaaggctgtcagctatgtcaaggaaacttacaaaaatcctacaatgatccttgctgaaaacggaatggaccaacctggtgatgtcagtattactcagggtgtgcatgacacagtaagaatccgttattacagagactacataactgagctcaagaaggcaatagatgatggtgccagagtcattgggtactttgcgtggtcgctgcttgacaacttcgagtggaggcttgggtacacttcgcggtttggcttggtgtacgtggactacaagactctgaagaggtaccccaaggattcagctttctggttcaagcatatgctgtccaagaaaaggagctagagaattgcagacaagaggaccactggcttcacgtgtcatacaaaagttcactctgcaaatcctcttagtatgtcagatttagcttaaggaaccgtgcagacaattgagtctcaaggctcgacatctctagcttcgttaattgttgcaaggcaataaattggtatcttcg

SEQ ID NO: 6639 - DNA, 1276 bp, Zea mays
  Clone ID: 700573489_FLI
gcaaggtgctggtgaacatcgagcagcagtcccccgacatcgcgcagggcgtgcacgggcacttcacgaagcggcccgaggagatcggcgcgggcgaccagggccacatgttcgggtacgccaccgacgagacccccgagctgatgccgctgagccacgtgctggccaccaagctgggcgcgcgcctcaccgaggtgcgcaagaacggcacctgcgcctggctgaggcccgacggcaagacccaggtgacggtggagtacgtgaacgagggcggcgccatggtgcccgtccgcgtgcacaccgtgctcatctccacccagcacgacgagaccgtcaccaacgacgagatcgccgccgacctcaaggagcacgtcatcaagcccgtgatccctgagaagtacctcgacgagaagaccatcttccacctcaacccgtccgggcgcttcgtcatcggcgggccccacggtgacgccggcctcaccggccgcaagatcatcatcgacacgtacggcggctggggagcccacggcggtggcgccttctccggcaaggaccccaccaaggtggaccgcagcggcgcctacgtggccaggcaggccgccaagagcatcgtggccagcggcctcgcccgccgctgcctcgtgcaggtgtcgtacgccatcggcgtgccggagcccctgtccgtgttcgtcaactcgtacggcaccggcacgatccccgacaaggagatcctcaagatcgtgaaggagaacttcgacttcaggcccgggatgatcagcatcaacctcgacctgaagaagggcggcaacaggttcatcaagaccgccgcctacggccacttcggccgtgacgacgccgacttcacctgggaggtggtgaagcccctcaagttcgacaaggcatcggcttaaggttgggagtgtcactgtggacatgaggactaccttcctctggctctgctgttacctgcaagcattgctgctgctggatgtgtgtgtttgatcagtgactggctgctgctccatagaagatgaacggagagaaggatgatgaagggctttggcaatcgccgctgcaactgcaacccatgccatgccggcttagtgattgggtataatttggcttggcagcagccagcattattatgtgctgatctgttatcttttactagtttggtcgtccgatatctttctttctttttccccccttttcgactctgtactgaaactgctgagagattcgcagtattgttgtatcgtattcatatgctactgtt

SEQ ID NO: 6640 - DNA, 915 bp, Zea mays
  Clone ID: 700573585_FLI
gtactgctcgtctgctccccgttcacccctctccctctctctctctctctctctccactttcctttcctggcagcgacgagtgacgacagtggcaggcgggcgggcgggcgagcgtcgacggcgttctctaggtcttcgttgtccccttcaccggcggctgccaacgccctttgccaggtcttcgttgtcaccttcgccggcgactgtcacggccccttcgccagctcttcgtctgccccttccccggtaccgggactgaagataagatggctgccttgccattggccaccgcagaagcatgtgatgctaatgctgctttaattatgaatggtgatcttcgttctctccaacctatcttccgaatctatggaggccggcagatttttgctggccctgttgtgacactgaagatctttgaggataacgttctgctccgcgagttccttgaggagaaaggtcacggcagggtcctggtggttgatgccggtgggagcatgcgttgtgcagttttgggtggcaaccttgcccagctgatgcagaataatgggtgggctggaatcgttgtcaatggctgcatcagggacgtcgacgagataaatggctgcgacgttggtgtccgggctctgaactcacaccctatgaagtcaaacaagaagggcgtcggtgagaagcatgtccctgtgacctttgcagggacaagaatctgcgatggagaatggctctatgccgattccgatggcattctcatctcaagatcagaattgagtgtgtaggcctgttcttatgttatgtgtgaacttgtaataatgtatagctgaattacatgactagcgggaatactttggacgtttcgtcagtatcgtttgggagatatacatttgaaaatcattgcatcagtcatgtgaattgtgaat

SEQ ID NO: 6641 - DNA, 947 bp, Zea mays
  Clone ID: 700573623_FLI
gcctaccccacggtgaacgaggactacctcaaggcggtcgacaaggccaagcgcaagctccgcggcctcatcgccgagaagaattgcgccccgctcatgctccgcctcgcatggcactccgcgggcaccttcgatgtggccaccaaaaccgggggccccttcggcaccatgaagaaccccgccgagcaggcgcacggagccaacgccggactggaaattgccatcaggctgctagagcccatcaaggagcagttccccatcctatcctacgctgacttctaccagcttgctggagtcgtggcagtcgaggtaaccggcggacctgatgtccccttccaccccgggaggcaggacaagcctgaggctccaccggaaggccgccttcctgatgccacccaaggttctgatcacctcaggcaggttttctccacacagatgggtttgagcgaccaggacattgttgcgctttctggtggtcacaccctgggaagatgccacaaggacaggtctggatttgagggagcctggacgtccaaccctttgatctttgacaactcttacttcaaggagcttctgagcggagagaaggaaggccttctgcagctaccaagtgacaaagccctcctctctgatccatccttccgcccacttgttgacaaatacgcagcggacgaggacgctttctttgctgactacgccgaggcccacctgaagctttcagaattgggatttgctgaggcgtaacgaaccagaagagtgtggtggctgtcgtcggccggccggccttgtgtttttgttgtctgcttttctcttgaatgaagatgtgatgaactcagctgaagatgtagtgtgtatgttgtcatggtttatttttctattttatttatctatctataatatctatcggagaaggtttgatatgaagcggaacactgattaacgatgcc

SEQ ID NO: 6642 - DNA, 944 bp, Zea mays
  Clone ID: 700573631_FLI
cgaattctagggttttgctgctctccgaccccgagctccgaaggccgcagcatcaggcgcccccccctcgcgtgtgaccgagatggcgctgccgaatcaggggaccgttgattaccccagcttcaagctcgtcatcgtcggcgatggtggaactggtaaaactacatttgtgaagaggcatctcactggagagtttgagaagaaatatgaaccaaccattggtgtggaagttcatccgttggatttcaccactaactgtggtaagatcaggttctactgctgggataccgcagggcaagagaagtttggtggcctcagggatggatactatatccatggccagtgtgcgatcatcatgtttgatgtaacctcaaggcttacttacaagaatgttcctacgtggcatagggacctgtgcagggtctgtgaaaacatccccattgtcctctgcggtaataaggttgatgtgaagaacaggcaggtcaaagccaagcaggttactttccacaggaagaagaatctgcagtactatgaaatttctgccaagagcaactacaactttgagaaacctttcctgtaccttgcaaggaagctggctggtgatccgaaccttcactttgttgaagctgttgctcttaagcctccggaagttaccatcgacatggctatgcagcagcagcatgaagctgagcttgctgcagcagctgcacaacctcttcctgatgacgatgatgatctgattgagtagaaaggatcatgagtcttggacttgagcaggagttgtgccttgcacgatttaagttgttctagggtggactctctcttgagttatcattgtctggatcatctttttctccttggacttgttgcaacttttgagtgtggaaatggattggaatagtcgccatgaatttgctggctactttatacatgtctttgttcat

SEQ ID NO: 6643 - DNA, 821 bp, Zea mays
  Clone ID: 700573702_FLI
gccaccgccacctacgcaacaccagacgctccagcagtccagcactcggagctcgcgcgcccgacggcccaccatgatcatccccaagaagaaccgcaatgagatctgcaagtacctcttcaaggagggcgtgctgtatgccaagaaggactacaacctggcgaagcacccacagattgatgtgcccaacctccaggtgatcaagctcatgcagagcttcaagtccaaggagtatgtcagagagaccttctcctggcagtactactactggtacctcaccaacgatggcattgagcacctacgcaactacctgaacctcccgtctgagatcgtgcctgccacgctcaagaagtctgccaggccactgggccgtccatttggctctggccctcctggtgaccgcccaaggggccctggtcgttttgaagacagaccaaggtttggagacagggatgagtaccgtggtggccctcgtggtgctcccggtgactttggtggcgataagagtggagctcctgctgagttccagccatctttcaggagttctggcgcaaggcctggctttggccgtggtggtggcagcggctttggcgctggcccgacctcttccatggagtgaacagtgaagctgcccttagtttggacatgatgtttcccctcccgtgaggcgtttaattttgaaggacggttattatgtactagtaatgttttccggatcggctagtgctgacatgcaaaaaaaatgttccatatttatacattggttccagtatagtagtctttgcaaaacgtttggattttcaagtaagtacgttttcgct

SEQ ID NO: 6644 - DNA, 685 bp, Zea mays
  Clone ID: 700573734_FLI
gaaacagaacacggcgcggcattggcccggtggttcatggtattggaggaaggcaagaaggtgtctgccaagaagctgcagggccaaaaaccggaacagagccaccaggaggaggacagggaggaagacgcggccccgccggcgaacgcgctgatgctgatgcggtgccggtcggcaccggcgaagggattagcgaggaggctagagacagaggaggagcgcaatgatgtgaagggcgccgccaagaagactccagatcaggaagagaaggagaacgagggcctggtgctcatgacatactcgccggacttcttcaaggtgtcccttgacattgccaaggagacttggatcgtcggcggtgatgacgcggtcctgcgctgccggagctggaagagatgatcgcagtgactgttcaacaaggaatgtatgtgccttttgtttaccttttactcctccgcttgctttttttcttctttttttccgacactcttgatgattactactactcttgcataaggctcgtgtgaagggtacgatcagcacacagcagaattggtttagccaaggccactgtatgtctgtattggcctcaccctgcaaaacattcctgctctgtaaatagtgctgtaaagtcccttgttaaatgttgcccaggtatacttgctcggtgagggctgatttggtt

SEQ ID NO: 6645 - DNA, 1134 bp, Zea mays
  Clone ID: 700573814_FLI
cggcattagtcaatgatacagtgggcacattggctggtgggagatatatggataccgatgtagttgcagctgtaatattgggcactggtacaaatgcagcatatgtggagcatgcaaatgcaattcctaaatggactgggttactgcctaaatctggaaagatggtaattaatacagagtgggggagcttcaaatccaacaaacttcctctttcagaatatgacaaagccatggactttgaaagtttgaaccctggagagcagatatacgagaaaatgatttctggtatgtatctcggagagattgttcgaagaattttactgaagttggcacatgaagcttctctatttggggatgttgttccacctaagctggagctgccatttatattgaggacgccagatatgtcagccatgcatcatgactcctcacatgacctcaaaactcttggagctaaactgaaggacatagtcggggtcgcggacacttccctggaagtaaggtacatcactcgtcacatctgtgaccttgtcgcagagcgtgcagcacgcctggccgccgcaggcgtgtacagcatcctgaagaagataggccgggacaaagtaccaagcggtggcggtaaaatgccgaggaccgtagttgccttggacggtgggctctacgaacactacaagaagttcagcagttgcgtagaagcgactctcacagacttgctcggcgaggaggcttcttcctccgtggtcgccaagctggccaacgacggctctggcattggagctgcgcttctcgcagcctcacactcccagtatcagtatggcgcgagtgactagtagtcctgaaatgggcgcggatcgagattttgagtgtagctctcatttatcttttcttttttcccttttcaaaacatctttttggggatttttttcggcttccttttgttggctattccgtggatgcacttacggctctgcattgggatgtagctagtatagagccaatgagtttggaggttatctaatggcacaaggcaggagcatggaaatggaagcagagcaatgacattcatgctctgcccattcttttttccccttgtatggtgttgtaaaccaataaaaaaatgttaacccttttttt

SEQ ID NO: 6646 - DNA, 1497 bp, Zea mays
  Clone ID: 700573894_FLI
ccacatgaacgctttcaagaaatgtgcaaaatgttgagagttctaaatgctgttcgtgatcctgagattgggatgccactgaccattcatcagtacaagctgcttactacatcggtgctcattggacgtctcattaatgctaatcagcaccttttggcccttcgcatctctgagtaccttaacctgaacccggaggttgtgataatgcattgggcatgtgagaagataacagcatcaacaactcttccagatacagtccttcttgatggtctgcttgataagctcaggctatgtaaagggatatcatatgctgcagtggcagctcatgcagataacagtggtcgacgaaggttggctgcaatgctcgttgatcatgagtcacagtcctctaagcagatccccttgttgctcagcatcgatgaacaagacaaagcattatcaaaggcaattgaaagtggcgataccgatcttgtgtaccttgtgctattccatatttggcagaaggtagctgtagagaagaaagctcctttggatttttttggtgttataaatgcaaggcctgtggctagagatttgtttatggcatatgcaagacattctaagcatgaagaattgaaggacttctttttatcgactgggagacttcaagatgccgcctttcttttgttgaaggaatcatgggaattggagaagaaccccatggcaagcaaggggtctcctctccatggtccacaagtgaggctcattgagcaggcccatagactttttgctgaaaccaaggaacatgtttttgagtccaaagcttctgaagagcatgccaaattgctaagatcacagcatgaacttgaagtttccacaaagcagccaatatttgtgggttctagtgttagtgatacaataaaaacctgtattgcaatgggaaacgagcgtgctgcactcagagtgaagtccgaattcaaggttcctgataagaggtggtactggcttaaaacgtgcgctttagccacagttggaaactgggatggtttggaaaaattttcaagggagaaaaggccaccgggaggctataaaccttttgtggaagcatgcattgatgctggtcaaaaaaatgaagctgtcaaatatattccaaagttaacagatcctcgtgaaagatctgaggcatatgctcggatgggcatggcgaaggaggcccaagatgcagcctcacaagctaaagatagtgatgagctatttggccgcctaaagattacacttgcacagagcagtgctgccgcctccattttcgatacattgcgggatcggctatcctttcaaggagcatattgatcaacgtgattttgtcgtaggcccggatgtgcacctcgatgttttgaacagaccggcaatttatttatttatttgttttctgctctgttgtatgtatgaagaattaacctcagtgtgaatacatgtccatggaaatttacggtcacagaactgtgcagccaaaaaaac

SEQ ID NO: 6647 - DNA, 895 bp, Zea mays
  Clone ID: 700573896_FLI
ggacaaggagcaggcggaggaggagctgtgccaagccacaatgggtatctcgcgtgactcgatgcacaagcgccgggccaccggtggaaagcagaaggcctggaggaagaagcgaaagtatgagcttggtcgccagccagccaacaccaagttgtcaagcaataagacagtgaggagggtccgtgttcgtggaggtaatgtgaaatggagggctcttcgccttgatactggtaactactcatggggaagtgaagctgttacccgcaagacccgtatcctcgacgtggtctacaatgcatcaaacaatgagcttgtgaggacacaaacccttgtgaagagtgccattgtgcaagttgatgctgccccattcaagcagtggtacctcactcactatggagttgacattggtaggaagaagaaaacccctgctgcaaagaaggataatgctgagggacaagaggttgaggcagcagctgaggaaacgaaaaagagcaaccatgtcacgaggaagcttgagaagcgcaaggagggacgtacccttgacccacacattgaggagcaatttggcagtggacggttgctggcatgcatttcttcccgccctggacagtgtggccgagctgatgggtacatccttgagggtaaagagcttgagttctacatgaagaagctacagaggaagaagggcaagagcgctgtagcttagagcattctcatggattgtcttgcaccgaaatgtgtgtcctgatgagtacactttttttggttaatcgtctcaagttcagagcgttatgccatgttttcagacctgattagtacactgttttctaaaagcgattgagctctagtccaatgtattgataatatctgctgttgtcctattgcggtgatgttg

SEQ ID NO: 6648 - DNA, 1492 bp, Zea mays
  Clone ID: 700573910_FLI
ctcgagttagcccatgcttcacaccatgaagctgaagagcacagacttggggcagctatggccaaagagcaggatttcctggcttgggagaaagagctagaagaggcacaagcagagctaaaccagctcaacgaacaaattgcatccaaaaggaatgtggagtccaaagctcatgaaaacgagtgcaaactacttggcctgaaaagtgagctagctgcctatgtggaaaacaaattgaatgaagaggctggaatggttcaggagcaaggttccgacgaagcaaaagaaattagtaggtcaatcaagcaggctctagcttcaaagaggaaggagcttgctgaatttaaagggaaattagaaaacgcaagaattgaagccaatttagtaagagttgttgtagaatcactcagctcagagcttgatagggagaaagcttcacttgctacattgcagcagactgagggtatggcatgcatcacagttgcttctctagaagctgagctcgacaggacagagcaagagatagaattggtacataagaaagaagcagaaactcgggaaatgatggcggagcttccaaggatgttgcagcaagcagcccaggaggcagacgatgccaagatggcagctcatttggcacaagaagaactgagaaaggccaaggaagaagctgagcgaactaaggcttctgcgacaactgcagataccaggttgcgtgcagttctgaaagaaatagaggcgtctaaagcatccaaggggctagccatagcggcagttcaagcgatgcaagagagcaatgacgcaggaagcgctggtgcttctcctcgaggagtaacgcttcctataagcgagtaccatgctcttagcaagagggttcacgaagccgaggaacttgcgagcgagagggtggcagccgcgtttgcacaaatagagttggcaaaagagtccgaatcaaggaacctagagaggctgcaagaagcatccaaggagatggatgaaaagaagagtgatctccaaatcgcgctggagagggctgagagtgcaaacgaggggaagctcggtgctgagcaggagctgagaagatggagagctgaacatgtgcagcgccggaaagcccacgaggctacacaacatccagtcagtcctgtgagaactccaccgaggatgcttgtcgagcagaagggctcttaccgggaagaaaatgaacttcccacagatccgaagttgcacaagtcaaatggtagtatggatcagtttgtttccagcgagaaatcgcggaaaaagaagtcgttcttcccccagatgtccacacttttgtctagaaaggcacagacacaaacataagactataagagtgattgttctgaagaaaagagttcgttcatgtatctttgtaaaatgtaaatggtgtaaattttaatttttgcccatgctcttgtaaattgtctatttgtctcatacttgaagaagactgagtgtatgtctttgtatg

SEQ ID NO: 6649 - DNA, 947 bp, Zea mays
  Clone ID: 700573954_FLI
aacaagctcaagaagatggcattgagggtgattgctgaaagtctatctgaggaggagattgggggtttgaaggagttgttcaaaatgatcgatactgacaacagcgggacgataacttatgatgaactgaaggatggtctgaaaagggttggctcggacctgatggaacctgaaatccaggctttaatggatgcagctgatatcgacaacagcggaaccattgactatggagagttcttggcggctacgttgcacatgaataaactggagagggaggaaagcttggtgtcggcgtttgcgttcttcgataaggacgggagtggcttcataacgatcgacgagctctcacaagcatgcgaacagttcggtctttctgatgtccatctcgaggatatgatcaaagatgtggaccaaaacaatgacggtcagattgattatagtgagtttgccgcgatgatgagaaagggcaatgctggcggagcaggacggcggaccatgaggaacagcttgcatgtgaatcttggcgagctcctgaagcccaccgagacctagttttttttaaccagaggatcctgcttcccagatgcgccccatctgaaacttaccgtgtgcctcatccgctttcacagatcgattagttgatctctagtagcagcgccaaaagcagtttaagattttctcagtggtactagtagtgaggggaaaatagcatcctgtggtgccagtgagagattttaggcgctgaagacgacgtgctatgctactccggagtcctgttgtcttcttcttcttcttgttgttgttgatttcaggtttgtactattactgatctttgttgtaaaatgcgctgttgtcccatgaggtaggcacctaggtctcctccatttgaattatatcaaacggatttgtaaacacgttctcatgcatgaaaccatttcttaatgatg

SEQ ID NO: 6650 - DNA, 755 bp, Zea mays
  Clone ID: 700573963_FLI
atcccattcccctccttcaaagccctgcggcgatttcgattcttcccctctatctccaggtatacccatcggagcagcactgacaaaaattctccaggaactccaagaattcatctgatatggcaagcaaaaggattcagaaggaactcatggatctgcaaaaggacccaccgacatcatgcagtgcagggcctgctggagaggatctattccactggcaggccacaatcatgggtcctagtgacagcccctatgcaggcggggttttctttattaatatccattttcctcctgactacccctttaagcctccaaaagtgaacttccaaacaaaagtttatcacccaaacatcaactctaatgggagcatttgccttgatatcctgaaggagcaatggagccctgcactgaccatatcaaaggtcctcctctccatcagctcgctcctcaccgaccccaacccggacgacccccttgtccctgagatcgcccacatgtacaaaaaccagaggcagcgctacgaggaaactgcacgggcctggacccagaagtacgcaatgggctgattctgtcccactggacagtacttcccctgcaaagatcgtcacggtgttgtaagaatcaagttgcaccgttttcctgtcgtgtgatggtattaagagcccagatggctgtgtgaattgtactcgcttctcagaacaatgtctctctgtgtgtacagtgcttttgaagctggatgatctgagttctgtggt

SEQ ID NO: 6651 - DNA, 940 bp, Zea mays
  Clone ID: 700573985_FLI
tccatgttcgcctacaagaaggagcgtgacggttacgccaagtggatggccggtaacttggcctccggtggtgctgccggtgccacttccctcctcttcgtctactccctcgactacgcccgtacccgtcttgccaacgacgccaagtccgccaagaagggtggtgagcgccagttcaacggtctcgtagacgtctacaagaagaccctcgcttccgacggtatcggtggtctctaccgtggtttcatgccctccgttgctggtatcgttgtctaccgtggtctgtacttcggtatgtacgactcgatcaagcctgtcctcctcaccggttccctcgagggtaacttcttggcctctttcgctcttggttgggccgtcaccaccggtgccggtatcgcctcttacccccttgacaccatccgtcgccgcatgatgatgacctccggtgaggccgtcaagtacaagggtaccatggatgccgcccgccagatcgtcgccgctgagggtgtcaagtctctcttcaagggtgctggtgccaacattctccgtggtgttgccggtgccggtgtcctgtccatctacgaccaggcccagctcatcctcttcggcaagaagttcaagggtggatctggttaagcgcctttcttccctcttcgatacccccaacctgcgtttatgtggtggaagcagctaatcgcgacgtgagagatggggatggggtgtacgtgtatgagaacgacaagaagccctgcgggcggaaggttgttcttggtaacgaaaagcacgatcccggggtggtaaaacactcttgtactttatacattcacacgtcatatccggcttgcaatgcttttgtctcttgcctgtacttcctcttttcatcgcttggtgcaatggggaaaatagtggtctatagaaagtcatgggtttctttgtacgc

SEQ ID NO: 6652 - DNA, 716 bp, Zea mays
  Clone ID: 700574042_FLI
gtaaaggtttatttaagaacttaaagttctacttgagtcgagaggtgcctagggagtccctgttatttataattccagcgtttggagggactgtttcatgggaaggagaaggagctccatttaaagaaatagacgaagatatcactcaccagattgttgataggccgacacaaagccatgttttcctctccagggagtatgttcaaccacagtgggtctttgattgtgtaaatgctcgtatcatattgccaacagaaggttatcttgttggaagagtacctccaccacatttgtctccttttgtggacaatgatgccgagggctacatgcctgagtatgcagagacaataaagaggctccaagctgctgctcgcaatgaggtgttgcctcttccaggtattggtgatgaagatctagacaattcactggtagcagcaatgatggatcgaacagcttctaacgaagctgctgaaaagaagaggaagctggagatgctagagaagcaatacatcgatgaactgaagaaggaaattgatggcgttgctttctctagtttgtcaaacaaggaagcagataaatcaccgaatgcaaaagatgatactcagtcagatcgtgaggaggatgccagtaaacaagaggaggatgatgatgatgatattggtactgctctcatgtctcgcaagcagagaggcctttataaggctatgaagatgggc

SEQ ID NO: 6653 - DNA, 1072 bp, Zea mays
  Clone ID: 700574061_FLI
gccagatctgcacaagaacatgaggaacttgaagaagccgagattgaattggagcttattgaaaaagagaagtcagttcctaactttgttgagcataccaatgatacgatggtgcttgccatgccatcatatgaccgtgatggtagtgaggttaataaacggctccagcaaatccgggaaaatattcggtccctggaaaggtctaggctgaaagaggaaattacagcgcgcagacaaaagaagctgcttctaagacatgcccgtgaaaagtacctagaagagacatgctccagggaaacggagcttatgcaagagctcgacagggaaagagctctcgagatggaacgtgaagtagaaaggcagcgtcaactggatattgagcgtgcaaagtctagggaactgcaattcaacattgatttggaaaaagagaaacaaactcagagagagcttcaacgcgaactggagcaagtcgagttggggcggtcatcaaggcgtgagttctctgccaatcccaacagccgctccagggagaggtaccgcgaaagggatggtggcggcagagcacagcaggaggcggggagcctgaggtcttcgagcagccgaggccaggaggggggctctgcccaggcgcccgcaccggccgggccgggccctaccgtcatgctcgccgggtcaaggacgttctcgggggccaaccttccaacgattctgcagcctcgcgagcgcgctgccgacgaggacagcgcttgggccgaggacgctagcagcaacggagatcctgaactggacggcgtgaggccgcatgggccgcgaggcagcaggtcatcctcctctaggcaggttgcggagaggagggagcgggatggcactgctgctggcacgggcaggagagaagggaaatgggagaggaagcagcacccgtgactattccctgcttgtgttgtgcctaagcctaacggaggcttcctcaatcgttgtaattgtactcgtatgggcattggatcacgtggctgcttagtcaacggtaccgtgcattgataaaaaggttggatcatcgtatgggaacactacc

SEQ ID NO: 6654 - DNA, 863 bp, Zea mays
  Clone ID: 700574081_FLI
gagttggtaagtataagatctctatgtgcttttgctagaagagctcgccataaatacaagtctgaagagtcacttccatcttattcagtggtgggttcatcttctgcatttggtatttcaagccaaaggttatcaaatggacatttgaaactaccttcttattttggggcaattgcggtgttagtctgcttcgtgtctgctggtttctctcttgcatttgctttcgctatcattccacggcaggttatgccatggacaggtttgctactgatgcttgagtggacctttgtggcattcttcttattgtttgggagttatctccgttttgtctaccggtggggaagtatcagtgcaaaccatgtgggatttagcaattctgactcatcggagaatcatatgggtccaggccatcagcgaaatatgtctgactgcgacatggatgcaacattttactggatagggatggcatctatagctactattactgtactgttaccgactatcttgggcataactgcattgttcacaaagctaggattaatggtcgctggtggtattgtgctggcatcttttatgacatacgcagcggagcatcttgcaatctcagtcttcaacaagggtcaaaaatacaggaatgcgtcaagaactcgaagcttttgtttttaacgtttaagtaaaaaatccttgttgtattgtaggtagttttgtacacaaaaagaatgatgattcatttttaacacgtggcttcctgcccatggcccctttttttgtagcgctgatgtcacgccaacttgtggtaaataggtttccgacattgtttctgtagcacagttggcatgaagattacagacatgttttgggat

SEQ ID NO: 6655 - DNA, 839 bp, Zea mays
  Clone ID: 700574093_FLI
cgacgacgccgccaggagttccatggagcgaggaggagcacaggcagttccttgccggcctggagaagctgggcaagggcgactggcgaggcatcgccaggagctacgtgccgacgaggaccccgacgcaggtcgccagccacgcgcagaagttcttcctccggcagagcagcatggccgggaagaagaagcgccgctccagcctcttcgacatggtgccgatctgcgagaacagtgcgagcatctccgatcctctggacgtggcacgccatggcgtcgcctcggcagactccgagagggcggccgtggacctgatgaattcgacgacggagggtgacgacggcaggagcagggacgtcgtgtcgtcggcgtcaggtgcagggaccactctgcggttcccggcagcggcagctcagacggagccgctgcatccttcgtcgtcgcatggccatgggcgcggccaccactgctctccgttggacctggagctgggcatgtccctgcccgccccatccgtcggaacgtgatggagatgagtcgaggccgtggccatggccgtgcgtgactgctgtctccctcagctgtgtcagccagatggagatgatgcgctagccaatacagtactgttcgtgatcgtgaaaacggtgtgcaaacactagcacagcggcactaaactaggatgtcgctcctcgcaccgattgtgtactgtaaccacgttgatccacatcatctctatctcttcaccaccgttggatcataggctgtcagtttcatctatccgttcatgtgtcatactcattcacgatacggtggcttaatgatccagcagtaatttttct

SEQ ID NO: 6656 - DNA, 656 bp, Zea mays
  Clone ID: 700574163_FLI
gatgatgacctgattgccagactgttgaagctcgggtgttgcaaaaataaggaaatagctgttaagacagtcaaaaccatcaagttcttgggactacatgaagagactcaaatacctaagggttgttcgagcccatttgatgtgatttgccagcgaatggaacagaggatggcctatggccacaatgagcaagacatggtactgctccaccacgaagtcgaggtggaatacccggacgggcaacccgccgaaaagcaccaagcgacgctactggagttcgggaaggttgaaaatggcaggtccaccactgccatggcgctgaccgtcggcattccagcagcaataggggccctgctattgctaaagaataaggtccagacgaaaggagtgatcaggcctctgcaaccggaaatctacgttccagcattggagatcttggagtcgtcgggcatcaagctggttgagaaagtggagacttgaaagttccctgatacacagataaagatagtatgatatagcagggcacatgtatcttttgtattaactccgttctggaatatatatttgtgaactaaaatgtgacaaataaaaagaacgggtggagtatattgtaagagacggcaaagaaacctctgtatatatgacctgtcgatatc

SEQ ID NO: 6657 - DNA, 918 bp, Zea mays
  Clone ID: 700574177_FLI
gtcaccattacaccgcccgaaaggccgctagaaatccgatcccgagccgccgcgtcttgctcgcgtcttttcccctctgctcgagcacgcgcgggcgcgcggctgctcccggcggcggcgatgagcgcggtgaacatcaccaacgtggcggtgctggacaaccccaccgccttcatcaaccccttccagttcgagatatcctacgagtgcctcgtgcccctcgacgacgatctggagtggaagcttatatatgttggatcagctgaagatgaaaactacgaccaacagcttgagagtgtgcttgttggccctgtcaatgttgggacctaccgttttgtcctccaggctgatccaccggatccctcaaagatccgtgaggaagacataattggtgtgactgtgctgctattgacttgctcttacatgggccaggagttcatgagagtaggctactacgtgaacaatgattacggcgatgagcagttgagagaggagcctccagcaaaggtgctaatcgatcgggtgcagagaaatatcctggccgacaagccccgggttactaagttccctatcaacttccatcctgaaccaagtacaggcacggggcggcagcagcagcagcaggagcctcagacggcctcaccagagaagcacgcaggcagcggtgagggcaatggaagcaagcctgaggctgaccaatgaacacagtcgacttcaagtatttttgaagcgcgtccctacaggttgtgctgtaaggttacgaacgggattagcggttatacattgccctgggatcctgtttctagcacatggtggctgtttagaactctttgttctgtacacattgagatgcaaatgctgggtagtgggtagctgggtgtttccttggcaaagagtattttaagcctgttctcctgc

SEQ ID NO: 6658 - DNA, 1097 bp, Zea mays
  Clone ID: 700574201_FLI
aagtgatctcttattagatatgtgcccaataaaacaggaaaacttgatccatgacgaccagaaactgatattgttggcttctcttagtgactcattggaatatttagcagattcagttgaaaggcttggggaatcattcataagtccaccaaccacttcagagagcataaatcatagccatggtcgacatgcccgcttctagtgcaattccaaaaagtctcgcgtctctggctaatgagtacagaaggttagctgttgattgtgtcagagtattgagattggaaatgcagctagaggcgatataccacatgcaggaaatgaccaaaagagaatacgtcgaagatcaagatgctgaagatcctgatgactttattatctcccttacaactcagattgcacgacgggatgaagaaatggctccttatatcacggaatcagaaaggaattacatatttggtgggatttccagtgttgctgctaatgcatcaataaaggcacttgctcaaatgaagtcaataaacttgttaggagtccagcaaatatgcaggaattcgatagctctggaacaggctcttgcagccataccttcaatagatagtgaagcagtccaacagcgattggatcgcgttcgaacgttctatgagttgttaaatttgccttttgagtctttgcttggattcatcgcagaacatgaatatttgttttctgctaaagaatacctgagtgttctaaaggtcaatgtgccgggtagagaaatacctgcggatgctgaacgacgcatctcacagattttgggtcactagatctaatcagacacaatggtgctatttttgactggttatgccttatgtgggctttggctaccaaatggttctccacctgtttccatggcggtgtttgtgtagatttagctggtttttgctatttagtaattttgtttccttttgtatttcacgtgatatattcttttgtatgtcttatcagttatcattgattgtaaatttgtagtgttccggataaaattttcattattgattattgtaaatgtgttatctgtctggatgcgatatttaataagctcatcagattcagtgtcc

SEQ ID NO: 6659 - DNA, 876 bp, Zea mays
  Clone ID: 700574245_FLI
ggctgcagaaggagggctcgctagctttccctctcacctccgagatataggcgccgtcatgtttgacatattcggaggtgccaccacaaccctagggtccacgatggagtgggctatgtcagagctaataaagaaatcagagacgatgagaaagacacaagaggacattcgtcgcgtgctaggtgggtcacgacgaggtgtcatcacgaacactgacctcgttggcctcacctacctaccaatggttatcaaggaggttcttcggctgcatcctccaaaccctctgttggtcccgcgtgagtcgagagaggattgccaagtcatgggctaccacattcccaaaggcaccaaggtgctcgtgaacgcatttgcgatctccagggattcaaggtactggaacaaccctgaagattttagcccagagaggtttcagaataacaatgtcgactacaaagggaccgattttgagttcacccccttcggtgctggtcgtcgacgctgccctgcaatcatgtttgccacttctactctagagattgcattggcaaaccttctctaccacttcgactgggctcttccggatggagtgagcccaaagatggtggaaatgtctgagcaatacgggatgggtgtcaccaaaaagttagacctgcatttgagagccatcccatatgtatactctactatggcataggtatggggggtggttaaagctacctgcaccttaacttgaggtcctttgatgatcgatcattgcatcttcctatttctgaataagggtgaacttttctatgcccatcttgtaggccactagtttgttttacatagagcaacttcaggagcttcctaaatgaaacttctactttgttttttgcc

SEQ ID NO: 6660 - DNA, 570 bp, Zea mays
  Clone ID: 700574324_FLI
gtcgactaataaaagaaaaggacaccgattctctgatggatatgctgacattcaaggctgtggaagagaaggtcaagaagagagtagagaagaaggccaggacgttcgggcagaacgtcaccttggaggacaatgccactgctggtgacagcgagtgcaaggtcgatcccaaagtgctctccaagctgtatgatcagtgggtgatgccactgaccaaggatgtcgaagtcgagtatctcctgcgccgcctcgattgatcacccgattagttgtagctgcgaactttatgtacgcgtggttttcagtttgctttgcacatgtcctttatggctttatcgttcaaactcaactacgagagaatgttaccaggatctggccttcgtctttgtcagcctgtctggccgtcatctgcatgagtagtccaactgtaagtgacgcttggtatggaatgtaagaaaagtaatacaactgcttccacatgttatctttaacctcctgttgttcgtctgtaacacagtaaggtaccaattctctggttcagaaacgtattatgtttcttgcttacgtgac

SEQ ID NO: 6661 - DNA, 822 bp, Zea mays
  Clone ID: 700574379_FLI
ggcactacggcagccggtcccacgcccccgagctcaccgcgggctactacaacacgcggcgccacgacgggtacctcaccatcgcgcgcctcctggcgcgccacggcgccgtgctcaacttcacctgcgtggagatgcgggaccacgagcagccgcaggaggcgcggtgcatgccggaggcgctggtccggcaggtgggcgccgcggcgcgcgccgccggggtgggcctcgcgggcgagaacgcgctgccgcggtacgacggcacggcgcacgaccaggtggtcaccacggccgccgagcgcgccgccgaggaccggatggtggccttcacgtacctgcgcatgggccccgacctcttccacccggacaactggcggcgcttcgccgccttcgtgcgccgcatgaacggcgccgggtcgtgccgggaggccgcggagcgggaggcgcacggcgtcgcgcaggccaccgggtcgctggtgcacgaggccgccgtcgcgctgcggagctgaccggccgggacgggacgggacggaacggaagcctacgatcgactgtacatacaggggttgggacttgggagggagctcgggttcttgttgggttttcctttgggtggagagcgagggagcgcagtcgagagccagcgagcagtctctcgtgcagtgcagtgcagtgcagtgcagtgcagctccggcgtagatgagattgtattgtgaccaagccgggagggaaagcagggaggggaggacaaagatgttttgtcacgtttcaggctccggccatcgccggagtttgtccggggaatatatcgatttcctacag

SEQ ID NO: 6662 - DNA, 985 bp, Zea mays
  Clone ID: 700574406_FLI
caacaagcctctgccctgagctgaggatggggcacattgctgagcctaccggcactgttgtgattggctgcaaagtgctgccgatcttcaccgagcatggcattgttgacagtgcaatgaagaagatgatggcgcataggattgacggcaagaaggcagttgctcgggttaaggagcttctgaagcgggctgcccaggccaagcctcacagcgtcactgtcagtggaaagaaatggaagaaggttctgagcttccacgcaagggatagcgctgcggccacaaagggagggcggcaacagaagcagcaggaagaggcgataagctgcagctcgggcaagctgagcttcaagtgggacgtgggcagctgctcctcggcatcgtcggttgcgtattcgccgctgtcgttgatgtcggcaccggcaaagtcctcggagcagacgctgctgacgccactgaggaaagactattgcatgtcaaggctgtcgtccataagccagcagagtatgttgaagaacatggaaggagacgaggaggaggaggaagcctgctgctgcaggacggcgcagtggatcaccaccgattcagactttgtggtgttggaactgtaaactaatggtcatcaagacatcaattacactagtgtatctatggtaaggtctgtgtctgtatcagatcagataccccgacggacttcgctgcattacacttacagttgccccggcattgcttcctatgtactcgtatatgtattatatgtgtcttgaatacaatcctaaggataggaaaggtattcatataaattctagtacatcaaatgtgacaccagggtacctaaggttccggtgattgattgatcaggagagcagtgccgtagagtttgtctaccaaggcatgacacactaactcaatagataactctagagaggttcggactgcgtaaaagcagtgtacgggtttacaagcctaggagagaagagatcctcct

SEQ ID NO: 6663 - DNA, 575 bp, Zea mays
  Clone ID: 700574409_FLI
tggtgttcgagatcgtcatcaccttcgcgctcgtctacaccgtctacgccaccgccgccgaccccaagaagggctccctcggcaccatcgcgcccatcgccatcggcttcatcgtcggcgccaacatcctcgccgcggggcccttcagcggcggctccatgaaccccgcccgctccttcggccccgccgtcgccgcggccgacttcgccggcaactgggtctactgggtcggcccgctcatcggcggcggcctcgctggcctcgtctacggcgacgtcttcatcggcggctcctaccagcaggtcgccgaccaggactacgcctaagtagtgtgctccgttcgtctggattgagctcatccaacgcagccgcgcgtttcgatcggcgtcgtcatttgctttgctcttcatttcatcacgttatgtaacgtgccaatgatgtgtgtcgtcctggtctgttccgtcgtccttgtattcatttcccttcttttttcggggtaaaatcgatgtaaagatctcatccgatctgccgttttcgatcgccttggagtggaaaaaaacaggtgattttcgttt

SEQ ID NO: 6664 - DNA, 479 bp, Zea mays
  Clone ID: 700574426_FLI
cgcactcgctccccaccacgcacaagcagcagtccctgccgtcgtcgtcggcctcggcggcgcacagcgtccagtgcaagccggcggcgtcgttcgcctacgcgcagcggcagagcttccaccacaccggccacgccatggcgcactaggcagcgtctcgcggttgccggtgccgtctgcggccggtctcctccagatccagagatggagggcgatgagaggcgcgggaagaagaagattcaggttacaggtgcgtgagatcgacggtgaagatgtcgttgaattgatgatgaatgaaatggaatgtaggattaccattctgttgtctgtgtagatctagtgcccctgtagaggtgaacaagtgttatactacatgctcgttctttatattattcttttgggttcgttcgttggacgatgtaaatgtaaaatgtttggttgatcttgtactgttcaataaaactgatgcaaattgtgcc

SEQ ID NO: 6665 - DNA, 657 bp, Zea mays
  Clone ID: 700574433_FLI
attttaaaccacattccataaaaagtgtagtctataatgaaaaacagtatcttgaacagctatataggaaatgctttgaggagagagagagagtacagttctttgtccacagttggtaacgtgtacttatttatgtatatggatggatacacagaaagagaagagaacatcagagctcagagaacattgttcagtcatgtttatttgccacatgcccagaaccagagccgtagccgtagccgtgtccctcgccgtagcctgagcctgaaccttctccgtatcctcttcctgaaccctcaccgtatccagatccttggccatgaccggagccgtaaccttcaccgtagccggatcctgatccttggccagagccggaaccggagccttcgccgtagccggatcctgatccttggccagagccggaaccggagccttcgccgtagccagatcctcgaccggatccacttccctgaccgtatcccgagccagacccagaaccctgtccctggcccgacccatgcccttcgccatatccagacccttgcccttgcccgtaccctgaacccgaacccgctccggacccagctcctgaacccgcaccagagccagagccagagccggcgccggcgccagatccagcatacgatcctgcaccag

SEQ ID NO: 6666 - DNA, 581 bp, Zea mays
  Clone ID: 700574444_FLI
aagagatcgagcttcttttgcaccacaaggtcgaggatgtcttgcaactgcggatcaagctgcggctgcggctcaagctgcaagtgcggcaagaagtaccctgacctggaggagacgagcaccgccgcgcaggccaccgtcgtcctcggcgtggccccggagaagaaggccgcgcccgagttcgtcgaggccgcggcggagtccggcgaggccgcccacggctgcagctgcggtggcaactgcaagtgcgacccctgcaactgctgatcacatcgatcgacgaccatggatatgattattatctatctagcttgtggtggtggttgaacaataataagcgaggccgagctggctgccatacataggtattgtgtggtgtgtgtgagagagagagaaacagagttcttcagtttgctatctctctctgcatgtttggcgtcagtctttgtgctcatgtacgtacgtgtgtctacctgcatgttggttgatccgattgcatctgctgtaaccatatattaattggtccacgatgatatgatttgatactatatatatactaaaaccggacttcttattataat

SEQ ID NO: 6667 - DNA, 612 bp, Zea mays
  Clone ID: 700574448_FLI
caagaacgcggaggcaacacaatcaacattgacacctgatggatggctcaagactggggatctctgctacatagatgaggatggttatctcttcgttgtggatcgtctgaaggagttgatcaaatacaaagggtaccaggtgcctccggcggagttggaagctcttttgctaacacatccagaaatcgaagatgtcgccgttataccgtttcccgaccgtgaggtcggccagttcccaatggcctacgtagtgaggaagaaagggagcaatttgtcagagcgcgaggtgatggagttcgtggcgaaacaggtagcgccttacaagaaggttagaaaggtggcgtttgtggcggagattcccaagaacgcgtccggcaagattctgaggaaggatctcatcaagctcgccacatccaaatccaaactatgaaaattgtttttcgtgtttacagtgctggaatacgcctgtcgtccacgagcggcgagccattctctacgctgccccggtagtttggttgtagaatgcttgtataactgaagatcccgtcggctatgtgcttgcttgtgtacagtgctctgttctcgtacaatacaatattgggagggaatact

SEQ ID NO: 6668 - DNA, 936 bp, Zea mays
  Clone ID: 700574469_FLI
ccataagaagactgaacatgcttgatatacccgtacccaaactgccatacatgagagtagatagacagagaacatgaagcaaaacagagacacaagctgcagcggcacacatggggcaccgcgccccactaccaccaccagaccagacgacgcacactttatttagcccatgtcactcgcagtccgcaccgggcactgctatagctacgacacacacactgtcacacacagagagatggagagaaaccgtcgcgttcgcgttgtactgaacagtaggcgccagcgcgcgcgacgcgactggcacgccacgcgcgcacgctgagacatcgatctcccgacccgctgtccgccgccgcagtgcgcgtacggcgcacggcctcactcgctggccttctcggccacctcagcggccggctcggccttctcgggctcctcagcggccggctcagccgccgcgggctcctcagcagcagcagcagcctcgggctcagcggctgccggttctgcttctgtctcggcagcgggcgctgccgcttcctccttcacctcttcagccgccgccggctccggctccggctccgcctcctttgccgtctcttcctcctttggcgtctcttcctccgccgccacgggggccgcctcgggctcagcggcggcagctggctcggtctccgccggggcagctggctcctccaccttggcctcggcggcgggagcagcctcctcgggcacggcggcggccggagccggggtctccaccaccggcgcttcctcggtcgccacgacggtcggggtctggacctcggcagtggccatgggtgacgatcagaaggctgatgactacacgaccgagtggctagctactagctagggctagagctagagcagctaaagaatgatcgagctgcaagagtgagcgatcagctgctgatcggg

SEQ ID NO: 6669 - DNA, 702 bp, Zea mays
  Clone ID: 700574484_FLI
caaaggggttttcaggaccatggtgtgttgagaatttcattcaggtaaactcactaaggagggcacaggacgtgcggaaacagcttcttgagattatggacaagttcaagctcaatgtcatctctgccgggaacaattccaccaagatagggaaagccctcactgctggattcttcttccatgctgcaaggaaggaccccagtgacgggtaccggaccctagctgatcatcagcaagtttacatccacccgagcagtgccctctttcaccagcagccacagtgggtgatctaccatgaaattgtgatgacaacaaaagagtatatgagggatgtcacagcggtggacccaagatggctactagagttggcaccgaggtcgtacaagtcggtggacccaacgaagatcagtaagcggaagcgccaagaaaggattgaacctctctatgatagatacaatgaacccaactcgtggcgcctgagtaagcgccgctggtgatttttcatcatgtcttgcaggtctttgatgtaatgttactgtagtgtatatattaaggtgttctttcaatgcaaagactgggataatggcagcgcagtgatacatgtatagttttctcttaaatttggaagacttataaggaatatcttttcccttttaaactggatgccaactgatgatgaatttatcagcgatttgcttgatt

SEQ ID NO: 6670 - DNA, 1243 bp, Zea mays
  Clone ID: 700574493_FLI
gaacgcggtcatccggcacctcctctccattgggatggccaatgctgaccaggtgctgctcgccggctgctcctcgggcggtctggcggtgatactgcactgcgaccagctccgcgccttcttcccgtccggctccaccgtcgtcaagtgcatctccgacggcggcctctacctcgacgcgtgcgtacccctgtgcgctgtgctttgaaccttccttccttccgtgctcgctccgcgtgggcatgcaatgcaactgaactgacaacaggatctttgccaccatgacggacggcactgtcgcatcgcatgcagcgtggacgtctccgggggccgcagcctgagatcctacttccaagacatcgtggccatgcaaggaatagcacagaacctgccgccggcttgcaccgcccgcctcgacgccacctcggtgatctcctatttcacttcacacacagtcgttgtcaattaattgggctagtcggtgatcttctgatgaagtggtgattgtgggcgtgcagtgcttcttcccgcagaacataatcgacggcgttaaaactccactgttcctgctaaatgccgcatacgacttcattcagattgtgctcagcctggcgccagacagagctgacccaagcggcgcttggcgagcctgcaagtccaaccgcacggcctgcagcgcttcccagatgagtttcctgcaaggttaaattaactgcgtatccatatgtttaagttcatttttcatcaggaaatgatctgaatggccgaagcgctgtgatgcgtattgatatatacaagtgcagatttcagggaccagatggtggcgtccgtcaaaggcttctccggctccaggagcaacggggtcttcctaagctcctgcttcgcgcactgccagtccgagcagctgggcacctggaacaccaaaccaggtggctcccccaccattcaaaacaaggtaaaaacaatccacaacacacctgggacatcaaattgttggatactcatgtgttatgatgttcgtgcacaggggatttcaaaatccgttggcgactggtactttgatcgagctgaggtgaaggcggtcgactgccgctatccctgcgacaacacttgccaccacattatatgagaggatccacgtttttttattagtttatgcatagggaagaacattcgctctctcaacgaagtgtacatcgtatttgattttgggaatgcaattggatacagccatcaaaggaac

SEQ ID NO: 6671 - DNA, 252 bp, Zea mays
  Clone ID: 700574530_FLI
gtgtcgatttgcttctgagtttttttctttttatatcgttgcgatctcgtggttgtcgtttggttagcagccaagccaggctattagtacgaagaatgtcgtctataaacatgtgttcctacgttgccacatgctgagtcaatctgtatacagctagctctaggtggtcagctgcgtctaccacaatgagcatacatgtatggataaatcttctgtgaaagcattcgatgaataagggttgttttcgtgatt

SEQ ID NO: 6672 - DNA, 618 bp, Zea mays
  Clone ID: 700574535_FLI
agcgcgtgggcatcatcggcctgggcaacatcggcacgctgatcgcgaagaggctggcagccttcggctgcgtcatctgctacagctccagaaagcccaaggaatccgtctcctacaggtacttccctagcgtccacgacctcgcgtcggaatcggacgtgctcgtcgtcgcgtgcgcgctgaccagggagacgcgccacatcgtgaacaaggacgtgctggcggcgctcgggaaggacggggtcgtggtaaacatcggccggggcccgaacatcgacgaggcggagctggtcgcggcgctcaaggaggggaggatcgccggagccggcctggatgtctttgataaggagcctaaggtgccggcagagctcttctccatggacaatgtggtgctgacgcatcacgtcgcggtcttcacgacagagtccaggtccgacctccgtgacgtcaccatctaaccttgaagctttcttcgccggtaggccgctgcttaacccggtgcttcactcttgatggtttgttcgtgttattgcagcaggtcgatccatgtacgtgtaggaatgtgatttgttgaatacattttattttcgacccaatataattaaagtttgtttgggg

SEQ ID NO: 6673 - DNA, 554 bp, Zea mays
  Clone ID: 700574660_FLI
cttcctccgcatacgcctcatggtccaagcggtggatccgtcccgaggtgtacccgctgttcgtgccgatggccgtggccttgggcatctgctcgtaccagcttgtgcgcaacatcacgggcaaccccgaggtgcgggtgaccaaggagaagagggcggccggcgtcctggacaaccacgacgagggcgagaggtacgctatgcacggcctcaggaagttcgtccgcgggaagaagcccgagatcatggcctccatcaactccttcttcgccgaccctcccaaggacgattaagctagattccgtcatggatggatggatggatggattcccgattcccgatcgtccatagtatgttttaccattcattagctgccggcggcgcgccttgattcgtagccgtcgtcggtacatttttttttgtttctaaaattctaattctcccatataaatggaacatcatgcatttgtcgtgtttgcttgcatggctgcgaacgaattcagcacgccttgtgattttcatcacatatttgattgataacggatgactgtatg

SEQ ID NO: 6674 - DNA, 739 bp, Zea mays
  Clone ID: 700574756_FLI
attcatttcgccgagaggcgagagaactgcttcgcacctacgttactgctgaagatccagccggcacaccatcggcgaagaagaggccggagagaggatgatactggccgtgctcttcgccaactccgatggaaacatccttgtcgagcgattccatggggttcccgcggaggagaggctccactggcgctccttcctggtgaagctcggatccgagaacctcaaagggtccaagaacgaggagctccacgttgcctcccacaagtctgtgtctattgtttataccacggtcggggatgtctgcctctacattgttggcaaggatgaatatgatgagcttgctttggctgaggtgatctttgcaattacatcagcagtcaaggatgtttgtgcgaaacctcctaccgagcgcctcttccttgacaaatacgggaggatctgcttgtgccttgatgagattgtttggaaggggttgcttgaaaacacggagaaagacagagtgaggaggttgattagactaaagccccctgtggagccataatttgcatgtaaagcttatgttggcgttgctgtaatccaaatccaatcccatttgcatttgtaggcaaattttcagagttttcatctgcactttgtatctacagaattatcatcacttattggaggattgcgtgtgtgacatcaaaaacaatgtatcatctgtgtatttgctatgttgataagtgtgttactgcgttgt

SEQ ID NO: 6675 - DNA, 640 bp, Zea mays
  Clone ID: 700574772_FLI
tacaagtatttagaggagctttacaagaagaaacaatccgatgttcttcgattcttatccagagtaagatgctgggaatacagacaattaccagctattgtccgagttcaacacccaacccgtgtcgataaagcacgaagacttggatacaaagccaaacaaggattcgttgtctatagagttcgagtacgccgaggaggacgaaagagacccgttcccaagggtattatctatggtaaacccaaatctcaaggtattacccaacttaaattccaaagaagcattcgttctgttgccgaagaaagaattggtcgaaaagctggtaatctcagagttttgaattcatactgggttgctcaagatgccacttataaatactatgaagttatccttatcgatactttccacaaagctgttcgaaaagatccacgaattaactggattaccaaccctgtccataaacacagagaattaagaggtctcactgctgccggtaaatcaaatagaggtttagtcggtaaaggacatggatacaagaagaacactccatcacgaagagctgtttggaagagacaaaataccctctctttacgaagatatcgttaaaattttttgtgaaaataaacaaacccattctatc

SEQ ID NO: 6676 - DNA, 746 bp, Zea mays
  Clone ID: 700574787_FLI
ttcaaaactgaggaagaagcagtccatatggccaacgatacaaacgcaggcttagctgcatacatatttaccaagagcatacctcgttcatggcgtgtatccgaatctcttgaatacggcttagttggggtaaacgaggggattatttcaacagaggtggcaccatttggcggagtaaagcagtctggtcttgggagagaaggatcgaagtacggcgtcgacgaatacttggagctcaagtacatctgcatgggcaacttgggttgagttctgaaatctggcctgaggctagaaacgcttggcagatgatgaaccgagagaccaagaaggcaagcgttttgctgcaagaccggaggaacatggctgaaaggggccggccactggttgtgggggagcagttttcgaataaagcgaataagccgcggaacatgaacaaaagaaagccgaaatgagttgtaaatgacgtgaactataaagtatggcttcgcctccggacttttgtatacgtaatcatggcactacttgtctatagtgtctccaaagacgtccatgttacagaataaaagcgtatagggtggatgctacgttacaggctgtcggtggtatgtacacctcgcctgattcctgacgaaataaagctggatactgcattcttgcggctcttgcctgcaggggtaacatggtggttttagtagcttcgccgatctttcaatcaggctgctggtatattgaatgttaccatgcat

SEQ ID NO: 6677 - DNA, 954 bp, Zea mays
  Clone ID: 700574788_FLI
aagaattgctccccaaacatcgaaacgtactccaagatgattaaagcctttttgagaggtcgcagggtagctgatgcgctccaaatgtttgatgacatgttgattcaaggagttctgccaaatactgggatgataacatcatttatcaatccactgtgtacatttggaccgcctcatgctgctttgatgatctacaaaaagagtaggaaggctggttgtgtaatatccttgaaagcttataagcttttgctggaaagactcgctaaatttgggaagagtggaatcgttttggacatttgggaagagatgcaggagtgtggatatcaacctgataaagagatttacgaatttattgtaaatgggctttgcaatgtgggtaaggtcgatgctgctgtgtctgtggtggaggaatcacttcggaatggcttctgtcttgggagagttgtttacagcaaactgaacaacaagctgttggaaatggacaaagttgagaccgcatataatttgttcaagaaagtcaaacatgcacgtgcacttacgaattcacgcaattattgccgtgctaatggttggcatttttgagcataaccagtttgtctgcagaagagccatggagtccattccgcatcggggaacgctgtttacgtgcacccaggtcgtcctccaaccaacatctagcaattcaagtgggcagaacggcgatagaggatgtgagctacaacacttgaaggtcaaagtgacatctggtgatgatgctcaatgtaatcttctatatggacactttgtacgcatgaggaaaaattatgctgcactaatattcaagagagaaagctcgtggatgccagtaggtcttttgtacatactgcttgctcaacacatgtcatgtcgaggctgcccttttgtgtattgcttggtaaatgctgcgaaacgttcctgaatatatggggtaattgc

SEQ ID NO: 6678 - DNA, 774 bp, Zea mays
  Clone ID: 700574789_FLI
ctttatcacatgatgctcctcagctttattggctgtcaattgtttttctggcgtttgatgttttctttgtggtcttctgtgttgccttggcttgtgtgattggaatcgctgtttgttgctgccttccctgcattattgctatcttatatgctgtaactgatcaggagggagcatctgaagatgacataaacaacctatccaaattcaaatttcagacaatgagtgatgcagacaagctagctgctggcattgcagctcctgtgggtggagtgatgacagagtgtggtaccaatcctcctgtcgaacatattctctcagctgaggatgcagagtgctgtatctgcctatgcccgtatgaagatggcgtagaactacgtgagcttccttgcaaccaccattttcactgcagctgcattgacaagtggcttcacataaatgctacatgcccattgtgcaagttcgacatcatcaagagcaaccgtgacatagaagaggtctaggtcactaaggaaaaaacgccgcaaaacttttcgtcatgtctctgctgtgttcttcagtactaccgctaccacatttgcgatcctgagttgtgattaccggtcctttaggtgatgcacaaatggtactcgtgaatattccttttattagcagttttctgcagggcctgtacattctctttctgctcgatccgattgcattgcagattgatttgtaaatgagtacatggtcacgttgaaccttgaaagcagtcaatcatttcaaaaatggtttatg

SEQ ID NO: 6679 - DNA, 1524 bp, Zea mays
  Clone ID: 700574804_FLI
gcctcgtgtttaccgttcccgtctctctgctagtctgtctctatcgcagcagccatggcggctagggtttacgccgccggcttccatccgtaggaaaaacctcctcatccagtcgttgccctccatccccacatgcccacgctgctcgtcgcccctctccaccaccaggaatcattcagttcacctaatccagcgcatcgcatctgcaaccttgcgtccagttcctgctttgctcagctgacgcggtctctgcagtagatcaggcctgagataatggcccctagtgacaagattatggaacatcgaaaggaaaaaattaggaaattcatgcaattacaacaaaaagaagacgatgaattattttttgtaatagttcctgccatacttcagtgccttaatgatgagaaaagaccagttcatacttctgaatatactggtgctaaaaagatgaaggaaattctagaggggcatgagagttggtgtaagtcagagtttcgtatggagccagagatttttaaggcaacgtgcaactatctaaggcgggaggggttgttgcgtgacacgcggagagttaccattgaggagcagctaggaatgtttctattcatgatttcacacaatgctagcaatgaaaggctgaagaaaacatttcaacatagtggggaaacagtccataggcacataaaggcgattttcaatataattccaactctcacccacaaatttttgaagcttcctagttccaaccaaactcaccccaagattgcaacagatcctcgattctggcctttttttaaggaagcattgctacaggtgatttaaacttcacatcaactgaaccaacaccccaaccaactgaacatgttagcactattgatattgatgctcatgattctcaccttaaccctttccttgcaaatgtggatgatcacatgccatctagtggacccatagacatagatgagatagaaacaccatcttcatcttgctctaaaaatcttgaaagtaggactgggaagaaaagaaagctcagtattgctggagttttacaaaactatgtggacattagggcaaatgaaacaaaaatatttatgaatgaactcaatgagacaactaaggaaacaggtgactattctatcaagcggtgtctggatcttctagaatcaattgaagaactttcatatgaggaaaaggcgcaagcaacaaatgtgctgaagtgtgaggtcaatagagaaattttcatgaacttcaagattccaaaggttcgtttgttatgggtcaaaggcgaaattgctcccaaggtctaatctacattgtatcgtggttgctggtggtgtttacaagctgatggctgcagatggtgcttacatttttggcttctttgtatctggttttgagacattgtagtgaaggttgacatgagaaactcttgtatgaactttggaatggttatctttggagtgccttgtgacaatttacctttttatgtacttcggatctgtatggaatatttttctttgatgc

SEQ ID NO: 6680 - DNA, 1677 bp, Zea mays
  Clone ID: 700574807_FLI
tgtgcctcgtcctccccctttcccctccgagtccagcccggcgccacccactcagccgcggatccgaggcgcagatccgatccggcgatggcgtccacggcggcgaggcggctgcgggagctgcaggcgcagacggggaacaagacctgcgtggactgcgcgcagcggaacccgcagtgggcgagcgtctcctatggggtgttcatgtgcctcgagtgctcgggcaagcaccggggcctcggcgtgcacatcagcttcgtgcgctcggtcaccatggactcctggaccgaggcgcagctccgcaagatggaggccggtggcaacgaccgactcaacgccttcctcacagctcgcggcgttcctaaggagacgccccacgtcgccaagtacaactccaacgccgcagccgcctaccgcgaccgcatcgccgcgctcgctgagggaaagccgtggactgacccgcccgtggtcaaggagacgcccggatctggcgcccccgcccccgctaggaagccgcccgtgcacacatctgccgcctccggcggcggcgggtgggacgactgggacgacgattttcggccggacatgaggcggaatcagtcggttggatcgttcgccgccgcgggtgcgcagtcagggaggcagccgccgaggtccaaatcaacacaggacatgtacacgaggcagcaactggaggcgtcggcggctaataaggaggactttttcgccaggaggatggcggagaacgagtccaagcctgacgggatcccgccatcccagggcggcaagtacgttgggttcggatccagcccaccgccgtcggctaacaggaacggcggtgctgcccagggcgatgtcatgcaggttgtctctcagggatttggacgcctttcattagttgcagcatctgctgcccagtctgctgccagtgctgtccaagttggcacaaaagaaatccaatcaaagatgagggatgggggctatgaccagaaggtgaatgaaactgtcagtgttgttgccaataaaactgcagagattggaagcaggacttgggggatcatgagaggagttatggcgctggcctcacaaaaggtagaggaatatgccaaggaaggaggagtgggtggctggggagaggattggcaacacagcgagcagaaaagtgagccttaccaaaggtttgagcatgagaccaacggcaacagttggaattcctcccaaaattcttcatcgaagaacaattccagttcttgggacgactgggacgacccaggcaagaaagatgagcctgcgaaaccgcaccagagcagtgactcctgggctggctgggatgatgggaaggatgatggttttgatagccctagttacaacaatcacagcacctccaacaaggggagcaaccaaaacgggacatccggtggcacattttggacagaaggcggcttccgctgaaaccagtctcttttccatagagctatactttcagagttgttacatgccaggaaacgtgagggtccagtggttggtattatttgggatacttaaacagtcgggtgaaagggtttgtgtgttttgtaccatgtctacaactgttattatatctagtgagatatatttctgtggtcagatgccattcaacactgcccaaatgactaagaaatgtcgatttgaaactgt

SEQ ID NO: 6681 - DNA, 1410 bp, Zea mays
  Clone ID: 700574820_FLI
cgagagggcgagatcgtcgattcgcgtaatacgtcccgtcgccggccatgacatggtgcaacagcttcaacgacgtgcgcgccgtggagaacaacctggccaccgccgccgccgtggccgccgccgccgccaagaaacagcagcagcagcaggcatcctcgcacgtcaacctcatcaggacctgcccctcctgcggccaccgcgcacagtatgaacaggtgcaggcggcggcgacgatccaggacctgccggggctgccggccggcgtgaagttcgatccgacggaccaggagctgctggagcacctggaggggaaggccaggccggacgcccgcaagctgcaccacccgctcatcgacgagttcatccccaccatcgagggcgagaacggcatctgctacacgcatccggagaggcttcctggtgtcggtaaggacggcctcatccgacacttcttccaccgtccgtctaaggcttacacgaccgggacgaggaaacgacgaaaggtccataccgacgagcagggcggcgagacgcgatggcacaagacgggcaagacccgcccggtgttcaccggtggaaaactcaagggctacaagaagatcctggtactctacaccaactacgggaagcagcggaagccggagaagacaaactgggtgatgcatcagtaccacctagggtccgatgaggaggagaaggacggcgagctcgtcgtctccaaggtgttctaccagacgcagccgaggcagtgcggcagcggttcggcgacggctaaggacgccatcccgctcgctgccaacgcagcgactgaccaccaccaccaccaccaccatgacggtggcaatggcggcggcaacaacatgttgaaggaggcaggcattgtagatttctacagcccagcagcactaattagctacaaccaggcagcttctaacagcagggttgccgcttctgctcacctggtgcctaactttgaggtgcacactacatcgggggctgctggctttggtccctgaccaagacgcgcaagaggaactattcgactgatataggttagaggggagggaaatgcaggcagataatggcaacttcatgaatgcaataacttactacaaatggtcgacgagtttactgaaccgtaatggtggacaataagaggatgagtacgtgttgagtgagtggttggacatacaaatactgaagtgtaggaatccatacaactatacattgttcattaattgttacacatatatgtaacttgatgctatcaattttttgtttaatgatctttgttccataataagaatggagtttaatattgtacatcagttctttattacctaaaggacttgtatatgtatacaaatcattgtacacctttttttggaagaacatatctgttgtatc

SEQ ID NO: 6682 - DNA, 1391 bp, Zea mays
  Clone ID: 700574835_FLI
gttgcaaatgccgtgcaacaaggcttctcaaacgttgtcagttcgttaccctcacaaccttacgcccctccagtctcggtcttgccggcacagattcaagctaacgcacccccatctcttcctctgctggcggtctctgtaaacccgccagtccaacatgtttcccctgtgaataaccttctgaacagagcttcagtgcatcagcatggacagcagcaatacgctttgttgtctgaccctgttgccacgcccttgcatcaacaagcagcggggagcaaaccagctgtagcacatccgtcgttgcctgagcctaatgcatcatctcacgcagcattcccttggcaatctaatgctgctgacatgacccacgctggacggaatgcgacggctgatccatgggccgccgcccgcgcagctaactcgtatagtacagcatcagcaggcacagtgccgtctgttaaccagaatgcttacggcgatcaaggcaagcagggtgcgtacagctcttatggatcttcggcagcctcgtcccgtcctgttgttctaccagggcacgggcatgacagaaatggctacagccggtctgccctggtggagtacccatgggacgggcaccaccagcggcactcgaggtcaccagatcctggcgtggtccgggactacgacaccgactatggcggtgcgcagggctacagtcagcagcctctgacgcagtggagtgcagggaaagtgcagcagcagagctacaatcctgagccgtcaaggcagtggagttcttcccaggcgcaccagggcggctacgcacccgccgagccgtcgaggcagtggagttcttcccaggcgcatcagagctacgctcccgagctaccgaggcagtggagctccgaacgccgtggctacgatgatgcggagccctcgaggacatggagctccggccagcagaacccggaggcgtccaggcagtggagccgcgggaagcaggatccttactacagtccgagccatggccgaagatcgtacgatcagcaccggaggagatagcaaaagcttgctgtattactactaccacattagctagatcctggatggaggcggtcggtcggtcggttcttgggagggtttgtttcatttgattcgatgtgaggccgggtattcgttgcatttgggctttgtgattgcccccccaagggccattgagaaaagctataggttattatgtatcgatgtagtttttgtcttgaaattaaaaaaaaatgtatctatctaggtagctggagagggaaaagaagaagaaaaaaaatgaatgaatgaatgatataactcaggaagggtcaagaggcctcccggctcgaattgattgcagtcttgaatgctgagtcgaacggttggcc

SEQ ID NO: 6683 - DNA, 659 bp, Zea mays
  Clone ID: 700574888_FLI
agaaaacggaccctcttggcaccatttctgctgctccatggggatctgctttgattctgccaatttcctacacatatatagccatgatgggctcacaggggctcactgatgcttcgaagatcgcgatcttgaatgcaaactacatggcaaaacgtctagagaaacactacccagttctgttccgtggagtcaacggaactgttgcccatgaattcatcattgatctaagggcatttaagacgactgctggtatagagccggaggatgtggcaaagcgcttgatggactacgggttccacgcaccgaccatgtcatggcctgttcctggcacacttatgattgaaccaactgaaagtgagagcaaggccgaactggacaggttctgcgacgctcttatctccatcagggaagagattgcagagatagaaagcggcaaagcagatgtgcttaacaatgtcctgaagggcgctcctcacccaccgcaactcttgatgggtgacacatggagcaagccgtattccagggagtacgctgcgttccccgcggcatggctccggggcgccaagttctggccaacaactggtcgtgtggacaacgtctacggggaccgcaacctcatctgcacgctgcagcaggcgacccaggtggccgaggaagcc

SEQ ID NO: 6684 - DNA, 1350 bp, Zea mays
  Clone ID: 700574919_FLI
gtgatccagccggtcggacgagggctgaacccaggccagttcagagacccgacgaccggctggatcggcccggacgggctgtggaggatagccgtcggggccgaggtcgacggccacagcgcggcgcttctgtacgagagcgaggacttcgtgcgctgggacagagtggaccacccgctctactcctccaacgcctccgccatgtgggagtgcccggacttcttcgcggcgatgccgggcgagaactccgggctggacatgtcggctgcggtcccggatggcgccaagcacgtcctcaagatgagccttgacggctctgacaagtacatggtcggcgtctatgatctgaaaggtgacgcctttgtgccggataccgtgatcgaggaccggaggctgtggtcaaggattgactacggcaactactacgcttccaagtcgttcttcgactcgaagaaagggaggagggtcatatggggctggacgaatgagacggacagttcgtcagacgacgtcgccaaaggatgggctggaatccatgcaattcccaggactatatggttggataaagacagcaagcagctgctgcaatggccggtcgaagagatcgagtcgctccgaggaaaacaagtcagacaccaaggcctggagctcaggaagggggatctgtttgagattaaggaaattgacactctgcaggcagatgtggagatagatttcgagctcacatccataggcagtgccgacccttttgacccttcctggctcttggacatcgagaagcagtgccgggaagcgggcgcgtcggctcatggcccgttcgggctcgtggttcttgcttctgagagcatggaagagcacacctccgtacacttcagagtgtactacagatcacaggagaagcacatggttcttatgtgcgccgatctgaggaaatcgtccttgagaccggagctgtacacgccagcctacggaggcttctttgagctggacctggagaaggaaaagacggtggtatctctgagaactttgatcgatcgctctgcggtggagagcttcggtggaggcggcagggtgtgcatcatggccagggtctatccggcggcgctcgtcgacgacggcggcactcgcatgtacgcgttcaacaatggcactagcaccgtcagagtgccccggctagaagcgtggagcatgaggagggcacaggttaacaagggatgaggaggaacacaaggccatttgatagctagaggagaggaacagagcatgggcacatgaattaaacacacactgctggtttaatttgctggaattaatcaatcaatcaatcaacaaacacacgaagattaaatc

SEQ ID NO: 6685 - DNA, 768 bp, Zea mays
  Clone ID: 700575083_FLI
ggcaaggatatcaatgctcttgagcagcacatcaagaacctccccagccctaccacctcatcatcgtgcaggacggcgacccgaccaagaccatcaaggtgcccgagggcttcgactacgagctctacaaccgcaacgacatcaaccgcatcctcgggcccaaggcctcctgcatctccttcaaggactccgcctgccgctgcttcggctacatggtctccaagaagaagtacatctggcacagcaaggctagcaaccccttcgttaacttgaagaaggaatacaagggcatcttctggcaggaggacatcatccccttcttccagaacgtgaccatccccaaggactgcgacaccgtccaaaagtgctacatctacctctctggacaagtgaaggagaagctgggcacgattgacccctactttgtcaagctcggtgacgccatggtcacctggatcgaggcctgggatgagctgaacccgtcgacccctgccgccgcaaatggcaaggccaagtagatgtgccatcacttcggcactggagtgaaaaagaaagtatgattgggtcctgcctaggccccatagatatagctcttttttgagaaggaagagagattaattcagcagcagcttttataaattctttgttgtcatgaagcaggtggttcttttgtagttgatgaaagggatttgtcgtcgctatcgtttacataattcagacaataattttatattgtgtaattctgagaatcaaagcactgtttgtgtt

SEQ ID NO: 6686 - DNA, 1052 bp, Zea mays
  Clone ID: 700575113_FLI
atcgaccatggctacccgtatccagtttgagaacaactgtgaaattggtgttttctccaagctgacaaatgcttactgtctggtagcgattggagggtcagagaacttctacagtgcctttgaggctgagcttgcagatgccatccctgtggtcaagacctctattggtggcactagaataataggccgactttgtgttggttaatatctgaaatttggttttgctatttggcttattctctacttgttttcaccttccttttcactttgtttgcccaggaaacaagaatggacttctattgccacatactacaaccgaccaagagcttcagcatctgaggaattgcttgcctgatcaagtggtggttcagcgcattgatgagaggttatctgcccttggcaattgcatagcctgcaatgaccatgttgcacttacgcaccctgaccttgacaaggagactgaggagttcattgcagatgtgcttggggtcgaggtgtttaggcagactattgctggaaatatccttgtggggagttactgcgccttctctaacaggggtggtttggttcatccccatacatccgttgaagaccttgacgagctctccacgctcctccaagttcctcttgtcgcaggaactgtgaacagaggaagcgaggtcattgctgcaggcatgacagtgaacgactggactgccttttgtggctcggacacgacagccaccgagctctcagtcatcgaaagcgtcttcaagctgagagaagggcagcccactgcgattgtggaggacatgaggaagtctctgatagacagttacgtgtaactggggggccagcagatgtgggtcagagtttgcctttgctaaaagatgtattgcaagctatagtcgaattatcagtagcacaacataaccctctgatatgttcgtggtttatccgtggtttctgaattgtagacttctgcgttgaagctcgtgctactgtttgttttccattgtttgttcacaccaacagctatatgcagatacatggcttctcagtgttacgccggc

SEQ ID NO: 6687 - DNA, 990 bp, Zea mays
  Clone ID: 700575127_FLI
cgttgggctaccccaactcacaagcttcagatgcttcgcaattgatttctcaagcttcctttgatggtgacatagatggggcaagcctagttacaaactctaatgtcatagaagatgatgattttcaaggcaagccaaccaacagtggcacatcaaaggaactgtcagacgatgatggtgaccttgaagagaatactgaccccgctaacgccaagaagatgaggagaatggtgtcaaaccgggaatcggctaggcgatcaagaaagaggaagcaagcacacttgaccgatcttgaatcacaggtttccaggttaacgtctgagaatgcatctttgctgaagcgactggctgatatgactcagaaatacaaggacgcttccgttgacaataaaaatctaacagttgatgttgagactatgaggagaaaggtgaacatagccgaggaagctgtcaggaggctaactgggatcaccctcatgctaccgaccgcttttgagaagcccacgagcagcgcgcccctgtcatcatgtccatctgatgcagcttctgcttctgcttctgccgccattgaagacagcgtgaagcatttcctccaggcgccacttgaaaacagtgggatcatcccaaacgcagcagtttttcagaccaagccagcttctctgcaccgtgttgctagcctggagaacctgcagaagaggatcgtcggggatgcaatgtattccgagaccgcgtcaacgacattctcagatcctgaagctcttgccgataggtaaaggttgctcctgtcctgtgatgaacagccgtgtgatgctctagcggcctaagtgcttctggtaatggaagttgtagcacccatgcgcctgggtggggtctacacagtgatttgtacactattttgaaggttaataataattgttgagaaatgatctcatccctttgtacctatataagtaaagtattccattaataaagagaatagagttttcactc

SEQ ID NO: 6688 - DNA, 794 bp, Zea mays
  Clone ID: 700575158_FLI
cgaaccactcctcctacagaaatcacctgccggcctggcctttccgtagctacaaccgaagccaccaccagcagtccagcacgactagcggaataatatccaccggcgacgggaacgggaggcggcgcggccggagattcgaagcgatggcgttcacgatgcgggcagtgaaggtgcctccgaactcggcctcgctggaggaggcccggcaccgcgtcttcgatttcttcaagcaggcatgccgctctatccccaccgtcatggagatctacaacctcgacgacgttgtcacgccctctcagctccgctcgaccatcgctaaggagatccgtaaaaaccagaacgtcaccaaccccaaggtgattgatatgcttctgttcaacgcgacggaggagctgaacaacatagtcgaacatgcaaagcagcgccatcatgtgattgggcagtatgtgatcggccaagagggcctggtgcacgagctggggtcgaaggatctagggaactctgactttctgaagaaattctacacaagcaattacttctgatctgtgttgcagatttacaacatctggtatactccgggtggtgctctgaataagacgacactgaggacctatcaggaccgattgtttcgcactggaggttttgatctatttggctcttgaatcctctgttcaatgtgatactgctgtcagctgtttgtcttgtttactgttgtacttatcaaattgatgttgatgttttagtcgattcgagtaatcgagtctacaagattgaactttgttgctacagcg

SEQ ID NO: 6689 - DNA, 740 bp, Zea mays
  Clone ID: 700575162_FLI
gctggcttctcctccccctcttatcaagtcctcctcgggttagggttccttagggttttgtggaggggcgatggcggcggctgatgtggagtaccgttgcttcgtcggcggacttgcctgggccaccagcaacgagtcgctggagaatgccttcgcctcctacggcgagatcctcgactccaaggtcatcaccgaccgggagacggggaggtcccgcggcttcggcttcgttaccttctcctccgagaactccatgctcgacgctatcgagaacatgaacggcaaggagctcgacggccgtaacatcaccgttaaccaggcccagtcccgtggcggcggcggcggcggcggcggcggtggctacggcggcggtcgcggcggcggcggctatggtggcgggcgccgtgacggcggttatggcggcggtggcggctacggcggtcggcgcgagggtggtggcggcggctacggaggcggtggcggctacggcggtcggcgcgagggtggtggtggcggctacggcggcggcggcggcggctggagggactgatgtgtggccccatcctggcttcggccgagttatcttatctatctatagtatcgtgttaccgttcgcttctgtcaccgtgttagtgtccgttctacctttggattaggtgttggtaccccttttgttcgctttggttgctcccgctatgaaacgagacgagagaagaatgagcaaggtttttgttcgcatc

SEQ ID NO: 6690 - DNA, 1780 bp, Zea mays
  Clone ID: 700575182_FLI
cttttttgaatccttttgacgctgcacttctttctgctgtgaaagctggggtatttgttgcccaagctgcaggaaatggcggaccatttccaaaaacactggtgtctttcagcccatggataaccactgttgctgctggagttgatgaccgcagatacaagaatcatttaacactaggaaatggaaaacttatttctggacttggagtatctcctgcaacacatgggaatatgtcgtttagcctgatttctgcagctgatgctcttctgggctcatctgcaagcaagtacagtgcattagactgtcagaggccagaactattgaataagaggaaagttcagggaaaaattcttttgtgtggctattcattcaattacatttctgggacagcctcaataaagaaagtgtctcagacggccaggagtctcggcgcagctggctttgttgttgctgtggagaatagttacccaggaacaaaatttgaccctgtaccagtcagcatccctggaattctcatcacagatgtcagcaaaaccgaggatcttatagactactacaattcttccaccgtaagagattgggctggaagggctacagcctttaaagcaacagccggtattgcagatggtttggcaccaacactatacaattcagctccccaggttgcgctgttctcttctcgaggacctgatgtgaaagattttagctttcaagatgctgatgtccttaaaccagacatacttgctcctggcaatctcatatgggctgcatgggcgcctaatggaacagatgaatcaaattatgctggtgaaggatttgcaatggtttctggaactagcatggctgcgccgcatattgctggcattgcagcactgataaagcagaagaacccaaagtggagcccctcagcaataaaatctgccctgatgacaacggccaatacactggacaaagggagccatcctcttagagcgcagcagtacaccgcatcagaaatgatgacactttcacgggccacaccgttcgattgtggcagtggcgctgttaacccaaaaggcgccctcgatcctggccttgttctagacgcaagccatgaagactacatcacgtttctgtgctcgatccccgacgtcaaccagagcgaagtatcaaacatagccggctcggcttgcaactccaactccaagggacaacgccccttcgacctcaacatcccctcgatcgccgtctctcagcttcgaggcacggtggtagtgaagcggaccgtcacgagcgtgtccgacgaaaccgagacctacaccatcatgacaaggatgccgccagaggtcgccctggaggtgacgcctccggcggtgaccgtggtccccggagcatcacgagagataactgtgaccctgacggcgaggtccgtgaccggcacctacagtttcggtgagattgccatgaaaggtgaccgcggtcacctcgtcagaatcccagtcgtagccatgggattcaagtaggtagaagacgactgtgacatctcctagggagtagaggataggaagagcgagttgtgcctctgtaatctgaggtcttgagctgcagaggaacgttgtataattttttcataggttgtagagaataagagttggcacaatgctgtaagtgttatgcatgccccctccaggttgtaaaatatatttgggtgccctaaatcctctgacatggtgactagaggacctcttgtattgtagtccagccttgttctgattctctaatgcatgaaggtttgaatctc

SEQ ID NO: 6691 - DNA, 626 bp, Zea mays
  Clone ID: 700575223_FLI
gctacgcatcttgttttatttgttctaaaccatatattttacgtggcagcacaaatgctacatagttgctacttgtgatagagatttgaaaaggaggataagaaaggtatgtttggtgtttagtgctcatagctcaggacatgcttctaatatcgcaaaagctttttcatgcatgcttgtaccatgggcatttccccaatcttgcaggttcctggtgttccaatcatgtacatcacaagacataggtattcgatagaacggctccctgaggccacaattggtggaggtatgtgatatcttcatctgacaaactttgttactgtgttctctctgtccctagcttatatcctacaatcacataagattgcagtactctgatgcttttttggcattcttgcagcaccaagaatctgatcggtgcagacatgagatgttctgggatgtaatactatggcggtacttgtccatctgaccaagtcactatttcatgtttgagtccacgacaaggactaggataagaacgctgctttctaggttgagcttactgtaactactaagaaatttttattatgtaccaaccttatcatttctacaatgttgcgggatgtctgaagtaattctttgtt

SEQ ID NO: 6692 - DNA, 433 bp, Zea mays
  Clone ID: 700575229_FLI
gcaggactgtggccacgtttctatagtttaacataggttagtgtccgggaagaaaaaagatatattaacgttgatctaggagtttgatcattttttgtattgtaaggcagaaatatagggttttggttactctggtccatgttgctgtgttgtaaagcagtgatgtagtttagattcccccaagccatgccttagagagatttgtttagtagtatcgtcttgggaaaacttctgccgggtattgacaacatcctgctgagttctgactgctgagtactatgactggaaaccacctaagccttcagaattaatccaaatatacttggacttgcactttcctacatacatgtgtaatattgtttgctttgaaacctatgttttaatttgttgtataacattatttttgcaatgctcgtagtacaaatgttgtctc

SEQ ID NO: 6693 - DNA, 1062 bp, Zea mays
  Clone ID: 700575242_FLI
agctcctgggcggctacctctacttccacttcgcccccaacaaggaggagctccacagggagacctgccgcaaggtgaaagccctgcaccagtacgactgcctgcgcgccaacaaggccacgtcggcgtggggcctggaggtccgcgtgccgttcctcgacaaggagttcatcaacgtcgccatgggcatggaccccgaatggaaaatgtacgacaagaacctgggccgcatcgagaagtgggtcatgaggaaggcgttcgacgacgacgagcacccttacctgcccaagcatattctctaccggcagaaagaacagttcagtgacggcgttggctacaactggatcgatggtctcaaatccttcactgaacagcaggtgacggatgagatgatgaacaacgccgcccagatgttcccctacaacacgcccgtcaacaaggaggcctactactaccggatgatattcgagaggctcttccctcaggactcggcgagggagacggtgccgtggggcccgagcatcgcctgcagcacgcccgcggccatcgagtgggtggagcagtggaaggcctccaacgacccctccggccgcttcatctcctcccacgactccgccgccaccgaccacaccggcggtaagccggcggtggccaacggcggcggccacggcgccgcgaacggcacggtcaacggcaaggacgtcgcagtcgcgatcgcggtctgacgagagtacgtgctcgcgcacctccctgctagcttctaccgggctgcagcctgcagcatgcactgtgcgagcacagccgatcagcgccaataaactggaggataagaacgactggtaggtgtgtgtgtgtgtcgtgcgtgcccaccggccatatcccggtgcggcagcacgtgctattgttacgtgttgtactgccgccagcgtacgtgtctgtgtgtctcgatcatatctgtacgtttttagatttagaagaaaaaaaaaaggcatgtccgtgtctgtatgtctggatcatatctgtacgttcttagatttagaagaaagaagaaaaacattatat

SEQ ID NO: 6694 - DNA, 1371 bp, Zea mays
  Clone ID: 700575259_FLI
tcgaggactagatataaagaatgtggattgggtggtgcaggttgattgcccagaaaacattgataattacatccacagagttggccgtacagctcgttacaataagaaaggaaaatcacttatattcctttgtcctgaagaagaagcaatgcttgaaaaattgaaggcaaccgaaagtaaaatacctatacatattcgaaagccaaaggcagaacaactggagcagatatcgcagagtatagcctcagtgctggttaaatttcccaatcttcaggaattgggtaaaagggcttttgttacctatcttaaggcagtatacctccagaaagacaaaaaagtgttcaacctgagcaggttctctgcagagcagtttgctgcatatgctgcttcgcttggtctgcctgttacccccaagatccgcttcataagccacaagaagaatgtgtcgaagaaggatatggaggacattgatatgaaacagatgaaatccagtttggaacatgaagttaccatcactccaaagatcaacattgatttaactttgtgtgatggagatgatgatatcctttatcccaagaagcccactgcagatgctaatatggatgacagacttgatgatgtccttcatcccaaggagtctgccacagatacaaatgtgactggacttgaaagacccttcaaaaagaagaaactgaagataaacgtgaacaggccatcaggaacaagggtcaagtatgatgatgagggcaacgccatcccacctcttgcatctgtcgctgaagaagtatctttagaacctgtggttcacaaggataaaatttcccagcggtatgcagagatgttgagagaaatgcagaaacacgacaaggaggacaagcttgaacacaagaagaccttgcgggagaagaagctgcagaagaagatgaagcttaagcgcaagaggcaggaagacactggagcagggtcagaggaggatagtggatctgaatcagacagaggccaagacacagccaacaaaggtaaaaagaggtacttcaatagcgacgatgaagacaatgacgcagcaaaggacggtgatgttctcgcccagcaggaggcgttggcactgaagctcctgagtaatatgcacagttagctttgggatctgatggtataggttacccttgaatgggggtttgcctattagcgctccagccaggaaggggctgaaattttgaacgtgtcgcggttttttttttctgataaccgggagttaattcccactttcaggcatacgttcatggatgtatgagaaatcagtgtggccgtattaccccaagaaatcggacttagatgaggttttaagtaaaatgcctttgattttaaaattct

SEQ ID NO: 6695 - DNA, 576 bp, Zea mays
  Clone ID: 700575270_FLI
ggccgcgctacgcccgcgctgcccgcggtcggggggtgaccagaacctcttcttcctcgaccccgtcacgcccttcaagttcgacaaccagtactacaaaaacatcctcgcctaccgtggcctcctcagctccgacgaggtgctcctcaccggcagcggagccaccgctgaccttgtcaagctctacgccgccaaccaggatatcttcttccagcacttcgcgcgctccattgtcaagatgggcaacatctcgccgctcaccggggccaatggcgagatcaggaagaactgcaggagggtcaaccacgcctgatcgattattatgtgacccctctactgtttggttgcttggtttgttgattcagtggccccagcttcctgaggtttattatttgtttccttcaaactctatggatttcccttgtccatctgttgttttctttcaaaattgttgaccttgttagaggaatccatttcaattgcagcacggattggaggtgcattataattaatgtttgttatgtatcagtttccggtcaagaaaatttggtgaataaactagaatttttagccagt

SEQ ID NO: 6696 - DNA, 1671 bp, Zea mays
  Clone ID: 700575289_FLI
gttcttgcgcgtacgcgtacacagccccgatccgaatcgtcctcctcgcgagcctcgccgatcccccactcccctcccctcgcttcaagatgcagatctttgtgaagaccctcaccggcaagactatcaccctcgaggtggagtcttctgacaccattgacaatgtcaaggctaagatccaggacaaggagggcatccctcctgaccagcagcgccttatcttcgccggcaagcagcttgaggacggccgcacacttgctgactacaacatccagaaggagtcaacccttcatttggtgctgcgccttaggggaggcatgcagatctttgtcaagaccttgactggcaagacaatcacccttgaggtggagtcctcagacaccattgacaatgtcaaggctaagatccaggacaaggagggcatccctcctgaccagcagcggcttatcttcgccggcaagcagcttgaggacggacgcacacttgctgactacaacatccagaaggagtcaaccctccacttggtgctgcgccttaggggaggcatgcagatctttgtcaagaccttgactggcaagacaatcacccttgaggtggagtcctcagacaccattgacaatgtcaaggcaaagatccaggacaaggaaggcatcccaccggaccagcaacgtctcatctttgccggcaagcagttggaggatgggaggacccttgctgactacaacatccagaaggagagcaccctccacttggtgctgcgtcttaggggtggcatgcagatctttgtgaaaacccttactggcaagaccatcactcttgaggtggagtcttcagataccattgacaatgtcaaggccaagatccaggacaaggagggcatcccgccggaccagcagcgtcttatctttgccggcaagcagctggaggatggacgcacccttgcggattacaacattcagaaggagagcaccctccacctggtgctgcgcctcaggggaggaatgcagatcttcgtgaagacattgacaggcaagaccatcaccttggaggttgagagctccgacaccattgataatgtgaaggccaaaatccaggacaaggagggtatccccccggaccagcagcggctgatcttcgccggcaagcagctggaggatggtcgcaccttggctgactacaacatccagaaggagagcaccctccatctggtgctccgcctgaggggtggtatgcagatctttgtgaagaccttgactggcaagaccataaccctggaggttgagagctctgacaccatcgacaacgtgaaggctaagatccaggacaaggaggggattcccccagaccagcagcgtctgatcttcgccggcaagcagctggaggatggtcgcacccttgcagactacaatatccagaaggagagcaccctccacctggtgctccgtcttcgcggtggttattaagccatcagtcgttgaagctgctgctgtatctgggttatccagtgtctctgccattgcccatggatggtactgtctttcaaagtatttgtatggtttgtgtcgtgagtcgtgactgagctggtttcatggaccagttgtgttctcgttacccaaaactatcgtgcggcagcatatggcttaatcatgaataaatgtggtgtttgaattt

SEQ ID NO: 6697 - DNA, 682 bp, Zea mays
  Clone ID: 700575293_FLI
cactcctaccccacacagaagcggcggcggcggagcaaacgcaggcgaaggcgagggtgtgagggaaggagcaccagccatggtgcacgtcaacttctaccgcaactatggtaagacgttcaagaaaccaaggcgtccttatgagaaggagcgtcttgatgctgaactgaagctggtcggtgagtatgggctgaggtgcaagcgtgagctttggagggtccagtatgcactgagcaggatccgtaatgctgcaaggcacttgctcacccttgacgagaagaacccccgtcgtatctttgagggtgaggcgcttcttcgccgcatgaaccgctatgggctgcttgctgagggtggagtctgagaagcacattgacttttcactgtcaagcccattcggtggaggccccgcaggaagggtgaagagaaagaatcagaagaaggcaagcggtggcggcgatgctggcgatgaggatgaggagtgaggatggacaagtagcgttacccaatataataatattatctagttttcttgaacttgttcgaatgatgagtgcttagctgtgtgatctgacgcagagttccctgtgctgactctgtgtcatggatggtccattttatcttgtggtattatcagcctttacataactgctatgtttggatatgttcaattctgttgcaattt

SEQ ID NO: 6698 - DNA, 879 bp, Zea mays
  Clone ID: 700575315_FLI
caggcattgctgaaaatgctggaaggcacgatagtcaacgttcctgagaaaggagcaaggaagcatcctcgtggtgataatatacagatagataccaaagatattctttttatatgtggtggtgctttcgtggatttggaaaaaactatatcagagagacggcaggattcatctattggtttcggcgccccagttcgtgcaaacatgagggctggtggcatttcaagtgctcaagtgacatcatccttgttggaatctgttgagagtggtgatctaatagcttatggacttatccttgtgagcctggccgctctaaatgaggaccagcttgttcaggttctgattgagccaaagaatgccctgggcaaacaattcaagaaattgtttagcatgaataatgttaagcttcactttacagatggtgcacttagaataattgccaaaaaggcaatgtcaaaaaatacaggtgcacggggtttaagaactatccttgagaatattctcatggattctatgtatgagatcccagatgcaaaatctggggagagccattggcatgtgattcctggttctgaccgcaccagtgtaacctgtaaaaatctaatcccagttatatcaatgtaagtagtagtagccttgtaaatgaaacgatatgtgcagcgtccattgttcttctgaagccctggcacacgttgccccgcccgcgctcacgcattgcatgatttgcagcaggattttaatgagtgtagtcgagcaggttcgtgtagataccagtcgcttataaatggcgcaatgccatgaattgtaatagctgccggatctatgttaaaacttgaaacaaagaaatggatcaagagggcatggagttgcaaatttgtg

SEQ ID NO: 6699 - DNA, 783 bp, Zea mays
  Clone ID: 700575367_FLI
tcagttccgctcttcgtctttggggggcattgcccgtgcgtcacccgagcccgtgcccggaatccttgtagaagcgtctggaggactcccaccgacccacccggctgccagccatggctgagaatctggcgcccgagaagcgccactccttcgtgcacaacgggcagaaggtgttcgagtgggaccagacgctggaggaggtcaacatgtacatcgagctcccgaagggtgtgccaaccaagctatttcactgcaacatccaggctagccacgtcgaggtcggcatccgcggcaacccgccatacctcaaccatgacctgacacacccagtgaagactgactcgtcgttctggacaatagaagacggtgagatgcatataacactgcaaaaaagagagaaggggaaaacatggtcatctccaatacaagggcaagggattttggatccatatgctgcagatcaagagcaaaagcggcttatgctccaaaggtttcaggaagagaaccctgggttcgacttttcacaggctcagttcagtggaacctgccctgacccaagaaccttcatgggagggatacgctccgagtgaagcaccatacctgcctatgtacgtttctactatatccttggcatcttgatagatgcagcaggcgtgcttattatgtctgtaaatcggttggtgtctgttatagagataattgtcatggaaataattgtgatgtgtgaccatttgtgtgcaagcacattttgcgtgcttaattctagttttagttgtgatcttc

SEQ ID NO: 6700 - DNA, 299 bp, Zea mays
  Clone ID: 700575401_FLI
tttatttcccgcttggctgttataggaaggatttgaagaagccacttatgatataccgatgtggttgtactcgtggttgcttccattctttgaagcaaccacctcttgctgttgacgtagctattgctattgctgggagctattgcactcttgcattgggatccgttggaaaaactctcccctccctacagtgtgtaatgaatgaaatccatatcgttgggtttgcatggaataacgtgtcgctcttgtgtgtgtgttttaagtgtcgccgttccttgataatcgaatttgttgggacc

SEQ ID NO: 6701 - DNA, 971 bp, Zea mays
  Clone ID: 700575451_FLI
ctgagatggctggaatgagccacagaatccgtgagagaactgatgctcttgatgctgctggcaacacaactgctgctattggaaaggggtttgccattggttcagctgctcttgtgtccctggcgctttttggtgcctttgtcagcagagctggagtgaaggtcgtcgacgtcctctcccccaaggttttcattggtttgattgttggagccatgcttccgtactggttctctgccatgaccatgaagagtgttggaagcgctgccctgaagatggtggaggaggtccgcaggcagttcaacaccattcctgggttgatggagggaacagccaagcccgactacgcaacctgtgtgaagatctccactgatgcttccatcaaggagatgattcctccgggcgctctggtcatgctgactcccctcatcgttggaaccctctttggcgtcgagactctctccggcgttcttgctggtgccctggtttctggagtgcagatcgccatctctgcttccaacaccggcggtgcatgggacaatcccaagaagtacatcgaggctggtgccagcgagcacgcgaggaccctcggtcccaagggatccgactgccacaaggccgctgtgatcggtgacaccattggtgaccccctgaaggacacctccggcccgtccctcaacatcctcatcaagctcatggccgtggagtccctcgtgtttgcccccttctttgccacccagggtggcctgctcttcaagtacctgtaaaagggacaacaccaagcacacagcagaagtatacgatctcccgaccgaccgtggacaatatcgaataactcctgccaaatcgccagttccttttgtgtactgtgcgctagccgccgcctagctgcactgctgtatttttgtttcaggattgctgctgctgttcgcattcaatctttgggcctcccggagccgccggaggcgcgtttt

SEQ ID NO: 6702 - DNA, 1200 bp, Zea mays
  Clone ID: 700575557_FLI
ttttcatattctgcatgaacaggggattcctgtagctcctctctgggactcattcagaggtcaatttgtcggccttctgagcccattggatttcatacttatattgcgggagctagaaactcatggctcgaacttgacagaagatcagcttgaaacacacactatatctgcatggaaagaggctaagcggcaaacttgtggaagaaatgatggtcagtggcgagcacatcagcatctagtgcatgccaccccttatgagtccttgagggacattgcagtaaagcttttgctaaatgacatttctacagtgccagttatttattcatcatcatcagatggatcattccctcagttattgcaccttgcatccctttctggaattttgaaatgtatttttaggtattttaaaaactcaactggtaatttgcctattctgaaccaaccggtgtgctccattccgctgggttcctgggttccgaaaatcggtgatccaaacagtcgtccattggctatgttgcgacctaatgcatcacttagctctgcccttaacatgttggttcaagctggagtgagctcaataccaattgtggatgaaaacgactccctgcttgacacttactctagaagtgacatcacagccctagctaaagacaaggtctacacacatgttcgcctggatgagatgaccattcatcaggctttacagcttggacaagatgccaatacgccttttggattttttaacggtcagagatgccagatgtgcctccggtctgatcctttgctgaaggtgatggagcgactggctaatccgggggtgcggcgggtgttcatagtagaagctgggagcaaacgtgtggagggtattatatcactgagtgatattttcaagttcttgctgagcttgtgataagagaagaggagcatgacggacatttgtttgtgatcaatagtaagaaaacagcagggtatgtgaagcaagctgccatggatctcgcatttcccctccccctccggcctttggtcaagtaaggcaggattgaaggtggcgggctttgtctttgctgataatggctgttggaattcatggtctgtaaagttctttttttcccctttgtttttcgttttaaccattttgtgcctcccgttgttaccaaaaatatctggtgattattattattatttttggattgtttctcc

SEQ ID NO: 6703 - DNA, 1178 bp, Zea mays
  Clone ID: 700575684_FLI
gaaaagaatcgattgaaaacgagcataaacctgtccctcactcctatcctgaaccagtataatttaacttgcttcgagtggcagcattataaatttctgcatgacctatgtggtcagttctgcattattatttgtccatttgagatccaccagtgtatattatcagatcagtggagtatttgttttcataatgcaggggttatggtgccacttacgtggtcgatcagaatgaaaattgcgctcggtgctgcgaaaggacttgcttttctgcatgaagctgagaagcccgtcatctatcgggacttcaagacatcaaatatattactagatgaggaatataatgcaaaactatctgactttgggcttgcaaaagatggaccagttggcgataagtcccatgtttcaactcgtattatgggtacctacggttatgctgcaccagagtacattatgacagggcatctaacggcgatgagtgatgtctacagctatggtgttgtactactggagctcctcacgggccggaagtcactggacaagtcccggccagtcagggagcagatgctggcagactgggcactcccattgttggcacagaagaagaaggtgcttggcatagtagacccaaggcttgccgaggactacccagtgaaggcagtgcagaagacggcgatgctggcgtaccattgcctcagccgcaacccaaaggctaggccgctgatgcgcgacatcgtcgcgactttggagcctcttcaacagctggaggagacccctggagacagcgtggcagtgacacttgaagggacttgaagcagtgttccattcacagctcacatcacagtcacacacagctctggaaaactcgggtgccacgtacttaactatgcatgataatagtagctagctagtgttcttgatatgcaggatgatttcttgattgtttaattaatccatggagacagtagctttgttcagcagaaagttagtgtgtatctcagtaggacggttcatgtgtgtgtatccaggtgttcagtcctggcgtagcgaactccctggcatttcggatgcgggcaagtctgtgcaatctgtatttgcaatgcttgttgcccgcagaggaagcttgcttaccagtgtttgtaacctagtattgtgcagttcatgatctatgcatgttgaat

SEQ ID NO: 6704 - DNA, 950 bp, Zea mays
  Clone ID: 700575728_FLI
gaaggcggagcccgagccgccgaagccggaggagaagaaggagccgccggtgatcgccgtggtgctgaaggtgcacatgcactgcgaggcgtgcgccgaggggatcaagaagaggatcctcaagatgaaaggcgtgcagtccgtagaaccggacctcaaggcgtcggaggtgacggtgaagggcgtgttcgaggagtccaagctggcggagtacgtgtacaagcgcacgggcaagcacgcggccgtcgtcaagtccgagccggccccggcgccggagggcggcggcggcgacaaggcggccaaggaggaggagaagaaggatgcaggcggagccggaagcgaggagaagaaggacggcaaggaggaggaagagaagaaggacggcggcgagaagaatgaggagaagaaggacggcggcgacggagacggcgacaagaaggacgaggccggcgacaaggacaaggacccggccgccagcctgtacatgcactacccgcggttcccgttcgctggagggtactaccagccgccggcctacccgccgcctccggggtacccgtacgcctaccagccggcctacccgccgccgttctacgcgccgccgcaccaccacctgcaccagcagcagcccatggcgccgcagatcttcagcgacgagaaccccaacgcctgctccgtcatgtagttgtcactcaaatgtcatgtaaaaaaaaaagaaccgtaggaccctgtctttgcgcggggtcctggcgtcctgcccctgccagagcgaaggaccctgtctttgccagaaatgcccctgggcaaccaagctaatggcgactttgtttgaacaaaaagtagcagacttttttgcggggttcgatttctctctctctcttttttcttttgtaattgtaacccttttttttacctttctggactggtataaaagtaagcctggactcgtc

SEQ ID NO: 6705 - DNA, 940 bp, Zea mays
  Clone ID: 700575731_FLI
gcatcgtcaggagttggggctgtatggaacacagccaacgtttccgcgggctccaccgttgcgattttcggccttggcgctgtcgggctcgcggttgctgagggtgccaggctacgaggggcagctcggatcatcggtgttgacataaaccctgaaaagttcaccaaagggagagagatgggcgtcactgactttgtcgactccagggcctctgacaaaccggtgcacgaggtgatcagggagatgacccatggaggtgtcgactacagctttgagtgtaccgggatcaacggcgtgctgcgagaggccttcgtgtccacgcatgacgtactacgctcgatctgcttactagctagctagctagctagtcccttgaattttagtaacgtattacgttgtgcaacgcatatgcagggttggggcctgacggtggtgctggggatccatgcgacgcccaagatgctgccgctgcacccgatggagctcttcgacggccgtcggatcaccgcctgcgtcttcggtgacgtcaaggggaagtcccagctgccggccatcgtcgacaagtgcgtcaacggggacctggatataaaccttgacgggttcataacacacaggatgcccttctcggacatcaacaaagccatccagttgctggaggaaggcaagtcccttagatgcgtgctcaacctctgatggacatggaccgaccaccacacatgcatgcgtgggagattattgtccttggttagtttggttactacagaaataatcaaataaatatagaatccgcagtgtgtgtcgagttgtacaattcacgtgtgcaccagtgctactttattgtaaaggagggtgtgattgaagccaactagtagcagcagggcacaagtgttgtttctatcgtacatgtgctgtgatgtctcaaagttatctcggttctcac

SEQ ID NO: 6706 - DNA, 365 bp, Zea mays
  Clone ID: 700575753_FLI
gtccatccatgaggatgtgagaaatctccacattgaacttttaagacagtttcacatgcacgagatggaaatgtcaggcgtgctgaacttggtcctggaaaaggtggaaggcctgacaaaagaagtgcagcaactaagaagggagaaccaacagctcaggcagcagcttctctaatatgtgcctttgggcgcctctctggcaatcttatgctgtggaagagtgcaatttgctcaggagtcctaggtaggcccaaacctatgtagaggcctggcgatggttgattctcatattggttggaagctcgtgtttgactttgacacggttgtacatataatcctcttaatttagaagcatattttgatcg

SEQ ID NO: 6707 - DNA, 287 bp, Zea mays
  Clone ID: 700575784_FLI
ggaacgacgacgagaagagcaagggactccatagcgccagcctcaagttcgccgagaacagccgctcagagcgcggcaagcgaaacgtcatccaggccgacgccgccgccacgccggagcatgtctaagtctactactaagatggatcgatcgacgatcacctatacctctttgtatgtacgaatatgccttgttattactgcgcgcgcgcatatacaatacacgtgtgctccgttgacatgagttatatagctaaaaactcttttgaattcgcgtctattcagctt

SEQ ID NO: 6708 - DNA, 710 bp, Zea mays
  Clone ID: 700575815_FLI
caaggttcagagtggatcaaagttaccggagcagagctgccgatttcgcaagcgcatggcgacccatgaatgcaggctggggtgtttatcaggatgcactggtggttatccttggtagcaaccagctgatgccagttcctccttgtttggtacctccctcatcctcaaaccaggtatttatacactagccgtaaccttacagacacaatgccaccaccaaccacgttcagcaatgaaacatacaccgtacattcattggattatagagaattggacactcttaacattcagcaaagctaatgagaagggtggttattactggcctacgggtttacatatggttttgttaattgttgctagcttctgattgggcaactaaaatgatggttttgagcctctgattggactcctctggacaaaacaccgccggaactgattctcccaaaaatctgaagacaattttgccgaggagtgcagtcttggattgcaatgttttgctactttgtggaatcatgcgactcaccaccaatgctgtagctagcattattagtaaagtggaaccttggccttttgaacaaaagatggaagcaggacacaatcattagaaaactgcacagtaatacacaaattccactatgaagggttgatagctgcaaattgttttgttataaactcattcctcacgcatatttcaagatacatatatctcc

SEQ ID NO: 6709 - DNA, 991 bp, Zea mays
  Clone ID: 700575886_FLI
cgtgttcgcgcgccgggtgttttctgccgcggtgcccgccgtggtgccgacgaagaagacggcgacggtccccgccccatcttcagccaaagcccccgtgtacgctggcctggcgttttctaccgcagcgcctgagcccagctccctcccgatgccctccttcgtactccttcccgcggagtccgaggccactcgtggccttcggtgcctcctccgcatcggcgacctcgcctgacacggctgccgtctctcagtcggcctctcttcaccattcggcctggtctctgctcccctctcttttctggttgttccctatggatggttggcgcctgaagggcggatggatccgatggaaagctagcttctccggatccggtcagatcatatctcccggtaacccgttccgatcaacctcttccggtattttttcagaggaaaggttgtccaacggcgttccggtggttggatttgtatttggtggcggtggactccggttatgtccactgattgcttgctgttcggttcgcttaagtggtaaagctgatgtctttaggttagaagaataactaagattgggtaggaaggatggaaggatggtggattgggtagctagctgctggctgcttggttcaggagttcgggttaaattagcgtctgaaatacttgtttggtttaggtattcctatgtagacgacctgattatgattcagggtggtttatcgtagcagtaatctgaagtttggtgtggtgtttgatctgtgtgagtcttgtgttaggtgagtcatgaacaaatttatatggtctttattagttggtcaaggtgaagttcttctctttatgtatcgtcatgaacaaagttatgtggtctttattagtaggtcaaggtgaagttcttctctttatgtatctatatcagcttagctgtgatatgcgtgtgagtcgtaaatttcgatatatgaaagtctgttcttgcatctgatcaggaattgtg

SEQ ID NO: 6710 - DNA, 1060 bp, Zea mays
  Clone ID: 700575924_FLI
ccatcgccgctagcctccaccaccaacttcccatcgcctccccctcatctccccacactcctgacctcacctctccgaactgcagcacctcccctcccgccacccacacgtgctcccatggccgccaccgcgatctcagtccgcctccacccaaccgccgcgcgccatgtggcctccgcccgccgcgcccgcctcggggccgtccgcgcgcagtccgcgccggcggcggcggcggcggcgctgacgcaggacgacctcaagcggctggcggcggtgcgcgccgtcgagcaggtgaagagcgggatggtgctcgggctcgggacgggctccacggccgccttcgccgtcgccgagatcggcgcgctcctggccgcgggcaagctcgagaagatcgtcggcgtgcccacatccaagcgcaccttcgagcaggcgcagtcgctcggcatcccgctctccacgctcgacgacaacccgctcatcgacctcgccatcgacggtgccgacgaggttgaccctgacctcaaccttgtgaaagggcggggtggtgctcttcttcgtgagaagatggttgaggcagcatcggacaagtttattgttattgttgacgagacaaaactagttgatgggttaggaggtagtggtctagccatgccagtggaagttgtgcagttctgctggaagtacaaccttgtaagattgcaggaactgtttaaggaggaaggagtcgaggcaaagctaaggtttgaaggcgacaagccctatgttactgacaactcaaactacatcgtcgatttatacttcaagacgccaatcaaggatgcgttggcagcaggacaggaaattgcagctctggaaggagttgttgaccatgggttgttcttgaacatggcgagttcagtgatcattgctggaacggacggtgtcagtgtcaaaacgaagtgagtttttgagttgctttgttgtttgtgttgagttttacaatttaatgtacaagctattggtgtaaaagcagctgataagatgcttcaataaaggtgttcccccaatgtggggattgact

SEQ ID NO: 6711 - DNA, 949 bp, Zea mays
  Clone ID: 700576010_FLI
aaatcggcctacgcccacggttccacctcctcgtccacgaggtgaggaaaccctagcgaccgaccatggcgttgctcccgcgcaccgcgcggctggccctcctttccaccccgcgggcgtactccgctgccgctgctgcgggcgcctccccgacgtccccagcgccatacgggggcgcccccccaccggcgatgtcgaagacggccgagttcgtggtctctaaggtggacgacctgatgaactgggcgcgtaagggctcgatctggcccatgaccttcgggctcgcctgctgcgcggtggagatgatgcacgccggcgcgtcccgctacgacttcgaccggttcggcgtcatcttccgtccgtcgccgcgccagtccgattgcatgatcgtcgccggcacgctcaccaacaagatggctccggccctccgcaaggtttatgaccaaatgcctgagcctaggtgggttatttcaatgggcagctgtgccaacggtggtggatactaccattactcctactctgttgtacgtggatgtgaccgtatagtccctgtggacatctacgtccctgggtgcccaccaactgctgaggcactgctgtacggcgttcttcagctccaaaagaagatcaacaggcgtaaggatttccttcactggtggaccaagtgaagcatgctcctgctatttctcggtcgctatgttttctttgcatttgacctgcttgtcacatctgaaataaggacacactttgctcggatttgcaagttctcttttttttttcttggtgtgtctggaaggatgtatgtccaggttgtttgatgaacgtataactcgtgtaccagcagacttgctgtgaatctatatttttcgagcttccagtcttccactgtaatacagcaaatacaccatctccttgtctactaagatacaggcttacacgtcttgtcttt

SEQ ID NO: 6712 - DNA, 662 bp, Zea mays
  Clone ID: 700576063_FLI
acaaattgcagctcagcgtgcagccaatcctaaccttgataaactatatattacaaaaaagcagtgatcgacgtcctagaaaccctagctccggaagaagggtaggagctcgacctcctagaaatagaaccttcgtgtcatgagaacttcgaagaagggtcaagagaaaatcgaagggagcgaaaaccgactaggccacccttcgagagcgccccgacccagggaactaagcgaacgcgaagagttcactttccggttagttgagggtcataccgatggtgctcttttaagttatgcagttgctgcctcaagctttctgcctccctttgccagagctagtaagattggaaaagctttcaattaattaacataaatgagagtgactggacaaccatatgatctctactttagagtagggactacaactacaacgaaaagaacaaaacctttcgcttcaaaggaagctggtaaagttactttgagtttgttaaaccgcccatatatgtaacttttgggaacctgagtacagtcctgctagcttgtgtcttttttttttttgccatgctggagattttctaagacaaataagttatgagtttgttactgtattctcatcttcgtttacttatcaaaatatgtttactcgcaagataacttgatct

SEQ ID NO: 6713 - DNA, 1646 bp, Zea mays
  Clone ID: 700576064_FLI
cattggcgtcgtgctatggaggaggagtacgcggccctcttggccaaccacacctgggacctggtgccgtgtccaccaggcaccaacgtggtcaccggcaagtggctatttcgccacaagctgacctcggatggctccctcgaccgctacaaggcccgttgggtccttcggggtttcacccagcgccccggagtggactacgacgagaccttcagccccgtcgtcaagttcgccactgttcgcgccgtcctctccctcgccctctcccgcgactgggcgatccatcagctcgatgtcaagaatgccttcctgcatggcactctgacggagactgtctacttcagccagcccaccggcttcgtcgacgctgaccgtccggatctggtctgccggctgaaccggtccctgtacggcctcaagcaggcgccacgggcatggtacagtcgcttcgcctcctacctggcctccatcggcttcgtcgaggccaagtcggacacgtccctgttcatctaccggcgcggcgacgacaccgtctacctcctgctctacgtcgacgacattgtgctcacggcatccaccgccgatcttctacaccgcacgatcgtcgcccttcagcgggagttcgcgatgaaggacctggggcccctacaccacttcctcggcatcaccgccgagcgccggccccagggccttttcctccaccagcgccagtacgccatcgacatcctggagcgggctggcatgtctgactgcaagccctgctccacgcctgtcgacactcaggccaagctctctgaggacgatgggcctccggtcgccgacgcgacgtcctaccggagcctgaccggcgcgctccagtacctcaccttctccaggcccgacatcgcatacgccgtccagcaggtgtgcctgcatatgcacactccgcgggagccccacctcactgcgctcaagcggattctgcgctacctccgcggctccctcgactacggcctacttctccgaccatcaccaacgtcagagctcgtggtctacaccgacgctgactgggctggctgtcccgacacgcgccggtccacctccggttacgccgtgttcctgggcgccaacctcgtctcttgggccgccaagcgtcagcccgtcgtctctcgctccagcgctgaggccgagtaccgtgccgtggccaacggcgtggcagaggcctcctggctgcgccagctcctccacgagctccacagtcccctccagcgcgccaccctcgtctactgcgacaacgtcagcgcggtctacctctccaccaaccccgtgcagcatcagcgcacaaagcatgtggagatcgacctgcacttcgtccgcgagcgtgtcgctgccggtgacgttcgggttctcagcgtccccaccacgctgcagttcgccgacatcttcaccaagggactaccgtcgagtgtattcttagactttcgttccagtctcaacatctgtacaggatagagttgtgactgcgggggggtgttagactacccgtctagggtttgtgttattccccttgtaatgaccgttataccccctgtgtaatgggcctggcccagttactcactctattaatatcactcccaacccctgtttagggtatgggttcctattct

SEQ ID NO: 6714 - DNA, 705 bp, Zea mays
  Clone ID: 700576109_FLI
ggcttctctccggtggcgttcagcgaggacgttgccgacgatgtgcggtcgttgctccgtcggtatcgggaaggctggtcgatgcgggacaccggtttagacgactcggcagccggagcaggcatcttcctggcgtggaaggaacagcctctcgtgtgggcaagcgcgtggaggccatgatagagatccatgagctcgtcgacgcgcaaatgcaagctcggtgagtgcactacatggaccgcaggcccgcagcccataggagaagccggcgtggatgcgtcgatccgtgcattggatcgcgcgcacgtgcatgtatgtatggcgagttctctcctcctctgctcgtcttgaaagctgaatggctcacgcgtgtagggttttggagcagcgtaaccggccagggtagagattggtagctcacgcaggggccggcagaccgagtacccagccacctcaggcctagtttggatactcgtattgaggtgggttagatgtaacttaaactaatttataacacaatccacctcaacacatatggattaaagtcaatactagagtatccacacagccttatacggtggtctgggctgtctcgccagttctaatagatatatagaagcaagtatgatacgtagaagtaaacaatcagcgtagcatgtatagagcgaatacatagacatggaggatcgtaatgtaatcttggct

SEQ ID NO: 6715 - DNA, 468 bp, Zea mays
  Clone ID: 700576117_FLI
acttggttgagtggctcaagaccatggttgccgagaggaaagcggaggaagttctggacccaaagatggctgaaaagccttctcccaaaacgctgaaacgggcgctcctggtcgcgcttcgctgtgtcgaccctgatgcgaacaagaggcctaaaatggggcatgtgattcacatgctcgagatggacgatctcctcttccgagatgataagaagcccgggagagacgttcatcctcacggttcagacagatacagctccaaggaggaagggagcatcagcaagcgcgagcatatgaggattgccattagagagtagcgacattaaccatgttccccacttctttcccctcccgttcaatctcactggtctttgattgtattatatgtgagcatccatcattctgtgacgatacttgatacttgaatcgcacacacagacacaatgacacgcgagtgtaggggaaaag

SEQ ID NO: 6716 - DNA, 224 bp, Zea mays
  Clone ID: 700576162_FLI
gttagttagcatagttttggcttgtctcgtgtacactacacagtcggaaagagaaaccatggatcattttgtactatttgggattttttttaaatgttatttgagaaatattgtacgcttatattgtaaaattagaagaaggaaaaaaaaagaaaacagctacgaagtgtatattgtgtggctgctagttctatttccagtatccaacagtgtttagtttgtat

SEQ ID NO: 6717 - DNA, 1092 bp, Zea mays
  Clone ID: 700576329_FLI
gcagcttctgcttgctctggggggaaggagagagagagagcgagagagatctagtagagaggctagctaggtggtcctcgaacgaagatgttggcggtgttcagcgggcaggtggtggaggtgccggcggagctggtggcggcgggcagccggacgccgtcgcccaagacgaaggcgtcgcagctggtggggcgcttcctggccgcctccgagccggccgtgtccgtgcagctcggcgaccacggccacctcgcctactcccacaccaaccaggcgctcctccgccccaggtcgttcgcggcgaaggacgaggtgttctgcctgttcgagggggtgctggacaacctgggtcgtctgagccagcagcacgggctgtcaagcaagggcgccaacgaggtgctcctcgtcatcgaggcctacaagacgctgcgcgaccgcgcgccctacccggccagcttcatgctcgcccagctcaccggctcctacgccttcgtcctcttcgacaagtccaccaactccctgctcgtcgcatccgaccccgagggcagggtgccgctcttctgggggatcaccgccgacggctgcgtcgccttctccgacgacatcgacatgctcaaaggctcatgcggcaagtcgctcgcgccgttcccgcaaggctgcttctactccaacgccctcggagggctcaagtgctacgagaaccccaagcacaaggtcaccgctgtccccgccgacgaagaagagatctgcggtgccactttcaaggtggtggaagggtctactgtcctgacggcgctgcactgatctatcatcatcaggcggaggcgatgcgatgatgatgcagaactttgtacatgcgttggtggatggtggtgtaacatagtggctgccaacaagtcatgctcatgcaaaccgatgaatctatctctgtatcatcgatctcggttgcttgctagtccagactccagacatggctatatatatatagctggtgctaataaataggagtataatcgtcatatcgatcggttgcgtgtggaatgccaatcatgtgtgtaatctgttggcaaataacaaacctctgttcctccc

SEQ ID NO: 6718 - DNA, 598 bp, Zea mays
  Clone ID: 700576342_FLI
atgatctgcgtgacagacagcatggcgcaataccagcacaaccaaatctcgcaaggcatgatcctagctctagcagccaacgtgatgaacctttctcatactggaacatggggaggttccgaagaaatactgcaacttcgtcggtcacacctttgggtgccgctcctgccaatttcggcacgaagaggaacgctgactcgaacgatttcctccctctgaagctcaggaaactaagcggggctatttagtggctgatttatgaaaaatatctggccgaccgttttttgatatgcataagaagcacaagtatgctgttacctgaaacagcatgcagtaatacttaaccacgttagggcttcagaaggctggagatggacgcatttggtggtggcaaccattgtaaattgtacgtttgctcccaaatcgttgcatttggcatcctctgacccactggcctgcatgtttgtatattttttgtgtgatatacggggagatgtcttgtgccacgtttcctccgtggcgtgtacattcaaacaaattggcatcaaacatgtagtaattttcgttctatggaattgtacgttttctgtttgccccc

SEQ ID NO: 6719 - DNA, 798 bp, Zea mays
  Clone ID: 700576383_FLI
gagaaaatggaacatgcctgtgcataaatggattgttcgtcatatatattttccttgcatgcgaaatggtatatcaaaggaagttgctgtttttatatcgttctttgtttctgctgtacttcatgagttatgtgttgctgttccctgccacatactcaagttctgggctttttttaggaatcatgcttcagattcccctcatcatattgacatcatacctcaaaaataaattcagtgacacaatggttggcaatatgatcttttggttttttttctgcatatacgggcagccaatgtgtgttctattatattaccatgatgtgatgaaccggactgagaaggcaaaataaccatctgtagatcgtttttggtgtttcatttcttccatcatggaaactgaaagcaataatccgtgcacactcagtaaaacagcatcgtgtcttccagtttttttgttggaatctatcctagatctttattatgtgtatggtggataacctcatgtcaccatcgtatctgtatataataagcctaaatcagctgacgttctgtatgtaaattagtaaatgtaatgactaattggtgcccccctttctgcactaccagatctacttcttttctcgtaatatttagtattaaaacaatcacaccacacattctacttctgcctggtgatgatgttatataacatttggtagctatcacgagcggaatctaagcatgtctgtaatctgatatgtagatctgtgatgccctctcacttcgtttgattttgaatataaggattcgtttggatgc

SEQ ID NO: 6720 - DNA, 911 bp, Zea mays
  Clone ID: 700576436_FLI
ggaagttgagcttgatgatgtctggtttgcatatccttctcgcccatctcatatgattcttaagggaataactctgaagctagcaccaggttcaaaggttgcacttgttgggccaagtggtggtggtaaaaccacaatagcaaatttgattgagcggttttatgaccctctaaagggaaggatcttgcttaatggagtaccgctggcagaaatttcacatcaatatcttcacagcaaggtaagcattgtcagccaggagcctacgctcttcaactgcaccatcgaagagaatattgcttatggactagagggcacaacgaactttgctgacgttgagagtgcagctgaaatggcgaatgcacacaacttcatatgcggctttcccgaccaatataagactgtcgtcggcgagcgggggatcaggttatccggcgggcagaagcagaggatcgccattgcgagagctttgcttatgaacccacgagtgcttctcctggacgaagctaccagtgccctggatgctgaaagcgaatatcttgtacaggatgcaatggactccttgatgaaagggaggactgtccttgtgatagcccacaggctctcgaccgtcaagagcgccgacaccgtcgccgtcatctccgacggcctaatcgtggagagcggcacgcacgacgaactcctggaccgcgacggcatatacacggccttggtgaagaggcagctgcaggggccgaagtttgaggccaccagcagcatcagcgaggcctccgaaattgaagcggaacccagcagtaatgggcaatagcggccccgattattaggaagaccacagttgatttgaatccacacaagtgtatgtaaccctgatgttgacgtatgccactgcaaatcacgcgaaaccattggatatc

SEQ ID NO: 6721 - DNA, 908 bp, Zea mays
  Clone ID: 700576453_FLI
ccaacttccaagcaggagcaaacgctagccatctccacctcaagttagctctctagctatactaagctatagcagcggtgctgatcatcgctcgctaccacaccatcaccaccgaccaacccatcagctagctagctatagcatgtcgggcgtgtgggtgttcaagaacggcgtggtgcgcctggtggagaacggcgcggcggtgggcggcgaggcggcggtgcggcggcggaaggcgctggtgcacacgccgagcgggcaggtggtgcggtcgtacgcggagctggaggcggagctgcgcgcgctgggctgggagcgctactacgaggacccggcgctgtaccagttccacaagcgcggctccctcgacctcatctccctccccgccgacttcgccaggttctcctccgtccacatgtacgacatcgtcatcaagaaccgcgactccttcagggtcgtcgacgtctgatcgatgtcggtcgtcatcgatctgcgtgctgcccgtgtacatacgcgtgcagtgcatgcatgcatggtcgactcctactccgatccttaactatatacatatatatacatgcatcttaatttgttactttgtgagttgttcatcagtacgtgcatatcagctagctagctagtgtttgacaacagtcgtcgttacgttgtattgtgtcagtgaagttgctagctctagctagctacttgctgtgtgtgagtgtgtgcagctgatctgaatcagtagcgtgtgcagcatgcatatcctagcagtgtgtgcgtccaggtgtgtacacgtacgtctcggagtgacgatcgatgtgtgccctagttgctcaagatccatcacgcatgtgcgtgtgcgtgactgtacatttatttatcgtttgtgccagtgaccaccattattg

SEQ ID NO: 6722 - DNA, 931 bp, Zea mays
  Clone ID: 700576485_FLI
tttagccgccgccgctgctcatctcacatccctcgagaagacgcctgctcctcgccgatcgatacgatggccgtcttctccgacctccacaccgccgacggcctcaagtccctcgaggctcacctcgccggcaaaacctatgtgtctggtgactccattactaaggatgacattaaggtcttcgccgcggtgccgtcgaagcctggcgctgagtttcctaatgccgcccgctggtacgagaccgtctctgcggctgtagcctcaagattccctggtaaggctgttggtgtaaatctgcctgcgggatcagctcctgcggcagctgctcctgcggatgaggctgaggatgatgatgaccttgatctttttggtgatgaaactgaggaggacaagaaggcagctgatgagcgtgctgccgctgccaaggcctcttctaaaaagaaagaaagtggtaaatcctccgtccttatggatgtaaaaccatgggacgatgagactgatatgaagaagctggaggaggctgtccgcagtgtccagatggagggtctgacttggggagcatcaaagcttgtgcctgttggatacggcatcaagaagatgactatcatgttgacaattgtcgacgatcttgtgtccatcgacactctaattgaggaccaccttacgcaagagcccatcaatgagtacgtccagagttgcgacattgtggctttcaacaagatctagagttcagtttctgagtttgggcaacggcagcggctcagctcgtcaagtttgtgctgggatgccagtttatcccttctagtctattacagaaacgttgttcggagctgagtctattataaacatcttggtctgagtttattgttgagtggtgccagtttttttcaatatacatttatcttaaaaacagcggtactgatgttttttt

SEQ ID NO: 6723 - DNA, 1216 bp, Zea mays
  Clone ID: 700576578_FLI
gtgcagtttggacaggcgacaactccgcagactgggatcacttgaaatcttctatcccaatggtcttaactcttggtcttactggcttgcctttctctggcgcggatattggtggattctttggaaacccagaaccagacctattggtgcgttggtaccaagtaggagcattttatcctttctttaggggtcatgctcatcatgacaccaagagacgtgagccatggttatttggagagcgaagaactgccatcataagggaggcgatacatatgcggtattcattgttgccctacttctacacgctgttcagagaggctagtgtaaatggcattcctgtcatgcgtcctttatggttagaatttcctgacgataaagaaacttataacaatggcgaggcatttatggtggggcccagccttttagctcaaggaatatacgaagagggccagaaatcagtgtcggtctaccttcctgggaaggagtcatggtatgacttgagaaatggatctccatacaagggaagcgcgacacacaagctacaggttttagaagatagcattcccagcttccaaagggctggtacaattgtgccaagaaaggacagattcagacgcagttctactcagatggtgaatgatccatacactctggtgatagcactcaatagctcaggtgctggagaaggcgaactttatgtggatgacgggaaaagttatgagtaccagcaaggggcattcatccatcgccgatttgtctttgcagacaataagctaacttcattcaatattgggcctgacgatttgggcaagaaatttagaagtgattgcgtgattgaaagaattataatcctcggtttacgatccggagtgaagaaggctattattgagcctggaaatcaagaactagaaattgaatcagggccaattagtttaaggagtggttccagcccagtcgcgccaacaatccggaggcccaatgtttgcattgcagacagttggactataaggatagcataaaaggtaggccattcacatctggatcctgatgtctgatgtcttcttttgtctgctgtcaggttgcaaaattaggccagcctttagaagtttagttgtggccttgaaatatttgcatgtaactggtacttaagctgttccaactgccaattttgacataaatacttatatacattgctgatgtatattgtagctttgat

SEQ ID NO: 6724 - DNA, 433 bp, Zea mays
  Clone ID: 700576635_FLI
gtctggataacaacaggaagctggaagcagcgaagcggaggctccaggagcggtaccaggaagcggagaatgcgaaaaggcaacgcacgattcaggtaatggagctgggtgacataccgaagcccaagaatcaaaacagacaaccggtggtgaagtccaggaatagccttaggaattgggcgaacgggcggcgctaactcctctgtgaccttttttttttgtttacctcacctgatgaattgttgccatgcctggccttgtcggatcatgcgtttattatgctcaacgaggagcagatgaacaatcttttttttctttttgcacagaaccttcaatggagggttcttttgaagtggcaagagttgcacttgatgccatgagtggagacgagagtttagccatgtctggataatggacatgtagctggatttgt

SEQ ID NO: 6725 - DNA, 526 bp, Zea mays
  Clone ID: 700576742_FLI
tccgggaatggatacagtcgatcaacaaagaagccgagagagtgagggacagcgtaaaaggagaggatgggaaccaggacatgtacctgccagctcttctcccaaaagtgcctggccgattctactacctgttcgggcagccgattgagatgaaagggatgggcaaccttgtcagagataggaagagcgcgaacgaggtgtatctacgcatcaaatcgcaggtggaggagatcatgtcgtatctcaagaggaagagggaggaagacccttacaggagcctaccgcagcgtgcactgtaccaggcaacatggggcgcctccgctcaggtccccacttttgagccatgaagattgggagtagggaagggcgtctgcgagcggactgcaattctttgacaagatgcaatgcgttctcatttctgaggagatctccctccctcatacgctgattacatatacggactacggagtagtataccgcaaatattgtacatttttaggaaaaatatgaaatgatgtttttaaac

SEQ ID NO: 6726 - DNA, 1304 bp, Zea mays
  Clone ID: 700576833_FLI
gtttcatttgaggcgggattcttcttgcttggtgggcatgctatttatttgggtccagatgatatccagatgggcaagcgtgaggagactcgtgatgttgctcgagtactttctggctataatgatatcattatggccagggtctttgctcatcaggatattctggacttggcaaaatatgcagctgtacctgtcataaatggtctcaccgactataaccatccatgccagataatggctgatgcacttactatgcttgagcacgttggtcgcattgagaacactaaggttgtctatgttggagatgggaacaacattgtgcactcgtggcttctattggctgctgtacttccttttcactttgtatgtgcttgtcccaagggatttgagcccgatgcaaagacagtggaggtcgccaggagtgctggaatcagtaagattgaaataacaaacgatcccagggaagcagttaagggagcagatgttgtgtatacagatgtttgggccagcatgggccagaaggaagaagctgattatagaaaacagaagttccagggattcacggtttgtctgttttcacactttctagaatttctgtgtcttgctggacaccaactacatatactttgaataagcccgtgaggcgactgagttaaaactagataaataatcatttgtgttccgaccttcatatggttcaagatattagggtctttatctcaatcataattctggtgttcaagtgagagtgaaactgtacaagcaactgttctgcaatgtcttgtttcagtgtttctcagttattggtctccttagcaactgttgcaatgtcttgttccgaccttcatagcttacgttgttggccttcagctaacacttctgttttttaccctatactatattgcaggtggatgaagccctgatggagattgctggcccacaggcctaccttatgcactgtttgcccgcagagagaggagtggaggtgacagacggtgccatcgaggctccaaattcaatcgtgttcccccaggctgagaacagaatgcacgctcagaacgccatcatgcttcatgttctcggtgcttaactctcctattgcacaccagtgtttaacttttcttgaatttgcttagggattgaggcagttttggctttagggcatatatgagagcttaattcagcgaactgttcagtaagcgtactgttcagtaacgtggtaactgttcttcagggtgggagtttgttgtactggaaaagtttggcaacctgaataaaaaaaataatcttttgtgctggttttt

SEQ ID NO: 6727 - DNA, 601 bp, Zea mays
  Clone ID: 700576978_FLI
cgccgccgccgctgcagactcctccttttcgatcccttcacaaagcgccgccgtcgccccatcgaacatggctccgaagaaggataaggccccgcccccgtcgtcgaagcccgccaagtccggcggtggcaagcagaagaagaagaagtggagcaagggaaagctaaaggagaaggtgaacaacgcggtgctgttcgaccaggctacctacgacaagctgctctctgaggtgcccaagtacaagcagatcaccccctccatcctatccgagcgcctcaggatcaatggctccctggctcggagggctatcaaggacctgatggcgcgtggcctcatccggttggtctcggttcactcaagccagcagatctacaccagggcaacaaatacctaaggatgggattcccttgtttgccctctctgtaggagctcgtcttctttagaacagttgccatctctgtcaagagtttgctaatgctatgttagatgagtttctcacgtggctgaaacgtttcagagagtttgcgttagtttggcttgcctattataccttatctggcctcaatagcttttttctatggaaatctgccttgaaacgtct

SEQ ID NO: 6728 - DNA, 782 bp, Zea mays
  Clone ID: 700577036_FLI
gaacctttgcacagcaagtttcgtcttcaggaaacttttaggagaccacttcttagttctgatccagcaattactgtccaccaaatacagccaactgataagttcatcatttttgcatctgatggactctgggaacatcttagtaatcaggaagtggttgacatggtccaaagtagcccgcgtaatggaatcgcacgaaagttagtaaagtctgcagtgcaggaagcagcgaagaagagggagatgcggtattcagacctcaagaaagttgatcggggggtgaggcggcacttccacgacgatataactgtcattgtggtatttttcgattcaaacgccatgacaactgctgcctggagcagaccctcggtctctctccgagggggtgggtttccaatccattcaaacacccttgctccattctcggttcctacagagctaaacaactcctactgaaaccacgcggtatgtgaaggagccaggcaagaggataaaaaaaaaagtaaaggaaaacggagaaggaaaaacagctgttgtgatcagttgtagtgtatttcaccgttcatgttcatttaaaacattttttagattctcaagtctcaacctggtgaccagtgcactgatagcaaggtataagattagattattcttagcttttttatcctcttttttttttctcgtccttaccctttagattcactcatgggatatccgatatcaggtgcttgtacattctttggttcaacttgtgataatagttcatcgcccccctcttttcgccc

SEQ ID NO: 6729 - DNA, 1307 bp, Zea mays
  Clone ID: 700577207_FLI
cgacgcgggcgcacgcagcagcaagctctgaccctgaaagctgaaaccgctccacgccctccccctccgcgcagagccagccaagccaaccagccagtcagaagaggaaccggggagcggcagctgcagcggccgagggcggagcacgcgaggcatggatagataccaaagggtagagaagcctcggaatgacacgccaatcagccagaatgagatcagaatcactactcaggggaggatgaggaactatatcagctatgggatgtcgctgcttgaggaaaatggacatgatgagattagtatcaaggccatgggacgggccataaataagacagttatggttgttgaattgatcaagagaagggttggaggtcttcatcagaacactgctactgaatctgttgatatcacagacacatgggaacctttggaagaaggccttctcccactagagacaactcgccatgtgtcgatgatcactgtgacactgtcaaagaaccctctggatacatcatctccaggataccagccacctatcccagctgaagaggtgaaacctgcttttgactatgatcatgaagaatcgtatcccactggtcgtggaagaggacgtggtggtggcagaagaggcaggggaagaggcatgagcaatggcccccctccacctgcttatggttacaacgaagagtgggaggaggaaggagattattataacagagggcgcgggagagggcggctacgtggacgaggtgggagagggcgtggtggctactacggaggtgggaggcgtggtggctacggttatgattatggctatgcccccagaggcgggtactatgaagagcaagacgaatactatgatgagcccgaggaatatgctcctccccctggccgcggacgtggcagagggagaaggggcggcatgccttggcgtgggcgtggaggccgcgggccaccgcgcggtggccgagggagctactactaggcgcgagaaatgcgacgtgccgaatgcgtgtgcttattagttatctgttagcgtttgctgcagtgctcttctatggagctccgaccccggactggaattatctcgtaggcccttccaggtgctactctacttcagctgctgtccctgtgcaactcgtccgggcaagttttgtggctcgctcgtggttttgtagctaggttaagcgagtgaagttacactcggtagcgcagtatttcctgcgagattgtttattcttctgttaatgtacctaccttactatttcgtttggattatggatactgggtgcatccgtttcatgttt

SEQ ID NO: 6730 - DNA, 571 bp, Zea mays
  Clone ID: 700577209_FLI
ctggtttatttttgtgtatggtgaggaagagaattctaggaaaaatcgatgaagaaaacatgtttcagttcggtgcgctctaggtgtttgacgaaatgggagcaccagggaacaatcgtcgttcttgcataaaccaagtcgatttgactgtggtacgctacatgatcacgtgatacggaattcaagaactgagttgatctcaagatgatgaaatgatgagctactccgacaaatgatgtctgtgaatcaacctaatgagaggtggaccgatcaagtgccaagatgaatatggtcgtcaaatgatcgtcatctaaccaacactaacctagtgttatcccagacaagccccggtgcatttgccacctcattctgttttaaaaagttttatcaccttgaatgatgcattaggtgataggagttgtgatcaaacagttgatgcatttccttccttgattagacaaccctaatacccgttttatgaaaatttagtgatgcttagcccttcttattaatttaggatttgtttttttaaaagatgatatgtaacacgggataagggagtttgtgaaat

SEQ ID NO: 6731 - DNA, 341 bp, Zea mays
  Clone ID: 700577210_FLI
gtggattgttccaagaagtaatcatcacaaacaccatccctctgaaggaggagaagagttttccgcagctgactattctttcggttgctaacctcttgggggaaacaatctggcgcgttcacgatgattgctcggttggtcatgagccatactccagcttggatattgactgatgcttaaggaatagttgtggcagctcgcaaccttctctttcttttcttttggcctcggtttttgtctgtgcgtgtaataagcaatgtttttgtggaattctgttagcgcagaacctcagccttgtatttgagtgacagcacataagatgacattccagattgtagtgc

SEQ ID NO: 6732 - DNA, 1106 bp, Zea mays
  Clone ID: 700577217_FLI
gaaggatgccaaagttatccatgaattaaaggactacctaaaaggtgttaatgcggatatacatgtcattccaaaaattgaaagtgcagactcaataccaaatctgcagtccattattgctgcttcagatggggcaatggtggcacgtggagaccttggtgctgaacttccgattgaggatgttcctttgctacaggcagagattgttcaaacatgtcgaaacatggagaaaccagttattgtcgccacaaatatgttggaaagcatgattgaccatcctactccaactagggcagaagtttctgacatagctattgcagtcagggaaggtgctgatgccatcatgttatctggtgaaactgctcatggaaagtacccactaaaggcagtcaaggtgatgcacactgtggccctcagaacagaatccagcatttataacccaactacttcccctagtgttatagcatctgcacagggtctacagaacgaggagttttccccaagccagctaagtaaaatgtttggatcccatgcaactatgatggccaacacccttcggacaccaatcattgtatttacgcagacaggctccatggctgtcctcctgagccactatcgtccctcgtctacaatatttgcgtttacaaacgaggaacgagtgaagctacggctagcactctaccagggggtcatccctattcacatggagttctctgacgacgcagaagaaactttctccagagcaattagcagcttgctgaaagcacaatatgtgaagaagggagactacgtcactcttgttcagagcggagtgacttcaatctggagagaggaatccactcacaacatccaagtgaggagagctcaggtctgatgtgctggtaggaatcagtcgccggagaagttttgatagcgccgctagaagtgttatcatcatcatcaccatcatatgcgagtaattttaatgttttaccaggagattgctacgtcgagttgtatgttgtgtcgaattcacgtgtagactctggatctttaactctgtattcgttcattttcacttgtttcacactggagtgctataagttcacgcttactgcctttgcttt

SEQ ID NO: 6733 - DNA, 440 bp, Zea mays
  Clone ID: 700577234_FLI
gaggccgtggccgccgaccccgagctgagggcgttctgggacgaggtgcgcaacgtggggcacggcgacaagaaggacgagccgtggtggcccgtgctggacacccgcgacagcctggtggagacgctgaccaccatcatgtgggtcacctccggccaccactcggccgtcaacttcggccagtaccacttcgccggctacttccccaaccggccgaccaccatccggaagaacatgccggtggaggagggcgggccgggcgaggagatggagaagttcctcaagcagcatctccatctgatccatcctcagcatgcattagtccaattaaatcggggggtgtactattattgcatgcagaggctgcttgtcgaataaaacgtactatatgtacgattgtattgtacatgtgtgtcaatgcaacaagaggcacgtttgag

SEQ ID NO: 6734 - DNA, 386 bp, Zea mays
  Clone ID: 700577275_FLI
tgccaggtgtctcgatcgctatcatgggctgtattgtcaatggaccaggagagatggctgatgccgattttgggtacgttggaggcgctcccggaaagatcgacctttacgtcggcaagaccgttgtgcagcgcggcatcgccatggaaggtgccactgacgccttgatccagctgatcaaggaccatggccgatgggtggatcctcctgccgaggagtagggctgtaggctgtagccaagtctgtagtttatatattctgtaaagcgaaacacgcaatgcagtaactgagcatacgatgtacatcatccctacacattttgtacatttattgagatctgagaaataaactagaaaccgtcggtgacggcatgtctgcagcacccc

SEQ ID NO: 6735 - DNA, 533 bp, Zea mays
  Clone ID: 700577290_FLI
acctttgctggcccacgagcttggacaactcaagaggtgattactttgtgtgagaggttagctgggcaagatgccaatgtaaccactgtacctgttgcagtcttgagatttactcgtcagttgacacggtgcttccaatggacaaatgatgtggctgacagactggcattttcagaggtgctctcaagtgacacagttttctctgctccaatgaatgagacctaccagcttctcggggtggatgggaatgacatcctcagcttagagaagtatttacaagattattttaccaacattttgaagaagttaaaggatctcaaggcacaatccaagcaaactgatatattcttttgatataggaaggatttctgtgacctagggacataattacaaatctgtgtctcaaatgacagatgagtgagcacaatttttcctgtatatttgcatttttgcatgtgcaagaatgctctgtgctattagtgatgtgtatataatcttaacattttgagctatcaaagttccgaaatttgtgc

SEQ ID NO: 6736 - DNA, 1084 bp, Zea mays
  Clone ID: 700577321_FLI
cttacaccagttcaaccacagaaacctgtagactccagaggcagtcactgtaatgcaggatctgattctggagaggccccatttgatatatgcatgagtggtaacaagtgcgctgtaaagttaaaaccatccatattcgagaccaacagagaaagaaagcagcgagacagagaatgttccaaggatgtacgtccattgcagttgagacctgggatggttctgttgaaaagattcataaagcctaatgatcaggttaaaattgtcaaactttgttcgcaacttggtgttggtcctgggggattttatagacctggctaccgaaatggtgctttgctaaaactgtggatgatgtgcttagggaagaactgggatccagattcatcctcgtatggagatagacgtctgtttgatggtgctcaaccaccgaccataccagaagaatttcagaagttcgttcaagatggcatccaagcttcccatgaattcttgaaacaacaaaaaggagctaccaatgttgtgcaagaaatccctgcaatgtctccggatatctgcattgttaatttctacaatagtagtgggaggttgggtcttcatcaggacaaagatgaatcacagagcagccttgacaagggattgcctgtcgtttccttttcgataggcgagactgcagaattcatgtttggcgatgttagagacgaagagaagatttcaaaggttgatcttgaatccggcgacgtcctaatatttggtggcgagtcaaggcttatattccacggggttaacaacaccaaacctaaaacggcaccaaagtggcttacggacgagacaagtcttcgacctgggcgtctgaatctcacattcaggcagtactaggcaggtttcccccaccttgagcatttgcattggaacagcaaagaacttgctcatgatattctagtactagggtcagttgggttagttaccagtagagatcacctgtcatttcttatatatattccctcatgggctactcacaaggagatctatctagtcactgaaaaccaccacttaatccattgctactcgcttaaatgtttgtttccat

SEQ ID NO: 6737 - DNA, 901 bp, Zea mays
  Clone ID: 700577328_FLI
gaactacaacttaggcctcaacaggacaggaaagagctgccgcctgcgctgggtgaactatcttcaccctggcctcaagcatggccgcatgtcaccacaagaagagcgcattatcattgagctccatgctcggtgggggaacaggtggtctaggatagcaaggaggctgccagggcgcacagacaatgagatcaagaactactggagaacacacatgagaaagaaggcacaggagaggaagatgggcatgccatcaccttcatcctcatcctcctcactgacataccaaacctgccttcttgacaccattccagtcattgggatgggcagtggtgacactcacaatggtagctgtgtcaccagcaccctcgagaacacacagagtgtcatggatggatatcccatggatcagatatggaaggagattgaggcaccacatgcacctaacttgctgagtattgctgaagggaaagagaagacgtgcagcagtatcccctgtcatctaccatcacctgtaatgtgggactacaaatgccctgagatattctggaagatgggagatcaagaaatcatgatgtgatggaagatgaaatcaagatgttggctgcacgatttggttatgggcttatggtaaataaggccatcgctattgaaggctgaaggaatacatttatattggtcaggccactcagctatctgcctagcagatttgcagtatttgtacttcctaactatgcttgcattagtatgcagtatttttaaatctagtgtaacactggtggtatgctcataatgtatgtatctatgtagtgtgaaaaatagtttgtatcagtttgtgcaatagtgtggacgctctatatgcatgatatatctatttatctctgttcttgttgtgctgaac

SEQ ID NO: 6738 - DNA, 631 bp, Zea mays
  Clone ID: 700577343_FLI
aacgccagagggttgtggcagtagatcacctctctcccgattggggagcagggtccagcttgcagccaaatggcgtacaaaccggcaaagagcctgctaaggaggttcccaaggaaccatcttttacctgcccaatatgttggaataagatggaggagccatccacaacgacttgtggccatatcttctgcgacacgtgcatcaaacaggccatcaaggttcagaagaaatgccctacttgcaggaaggggctgaaaatgaatagtgttcatcgtattttccttccgaacgcttctagttaaggtcgattggctttgtcaaaggaacttctggtaacacaaggctgtgcaatgtacagtgaggatcagaagttcttgggtgaacagcagatagatgtttcatcctagtctgtatcatttaacagcatcactaggagctcatcatgaaaacttcctgactagggaagtggatatcagcctcagttttactggcctcttattgcatccgtggttcataatgttatttcgctgttgtatgtattaggttattaccgtggtggattagtgtaactgggatttgcttcattgtaaaatgataatggcgagttgaaacgtttagcatttttggatgc

SEQ ID NO: 6739 - DNA, 753 bp, Zea mays
  Clone ID: 700577367_FLI
gttcctgttctgctttatggagtaagtagtggttttttttttttgctgtaggcacttgacacgttcaacacggcaattgtatctccaatatattatgtaatgttcacaactcttacaatacttgccagcgtcataatgttcaaggattggtctggtcaaagccctggaagcgtcatttctgaaatttgtggcttggttgtggtgttgtctggtaccattttgttgcatgtgacgaaggattatgaaaggatcccacaatcaagaagtgtttatgcaccattatctccctctttgacaactagattaaatggagaattgttgaagcatgtcgtggatgagaggacttcggacgaagaaaaggccttgagaagacaggagatgtattagcgtgcgtcagaatatcaaaggaaatataggttactctgatggattctccggcaggggcttgtacatggcgtagtgataaccttcccatagcgattgttgattcctccattacagtttgttggtttgtgtatataactgcagcaatttgtggctaccgagtgattgcaaatctgccgaggtggtggaaggctgcagagttccaccaaaaagaatctaagtcgggtgcatagattcttatcgaattcccttcttcctttcgtaacttcctcagttttgtccacggcatttgttccatgtgagttttagagtgaatcacggaccctatgcaactgatgtacattattattgtcatagtgaagttcgtgc

SEQ ID NO: 6740 - DNA, 469 bp, Zea mays
  Clone ID: 700577438_FLI
ccaacgtcgcctacgacatcgtcaacggcaagtccacgcccgtccggaacgccgacgcgccggtctacgtcaccatcggcgacggcggcaacatcgagggcatcgccgacaacttcacgcgcccgcagccgggctactccgccttccgggaggccagcttcggccacgccacgctggacatcaagaaccggacgcacgcctactactcgtggcaccgcaaccacgacggcgccaaggtcgtcgccgacggcgtctggttcaccaacaggtactggatgcccaccgacgacgacacaaactgacgatcaccgccccagagggaacaaattactgatagatcagcgtagcacgttcctgagctagccccgcccccttttatgttctccaattcagtaatgcaatgcgtttttataattactgatgaatgaataagaaaaatggctacgactgcccgccggtcatcccaacc

SEQ ID NO: 6741 - DNA, 1055 bp, Zea mays
  Clone ID: 700577440_FLI
ggagtttgcttctggtgctccgtatgatccattagttgacagtattgaaccatcaagcagttcaatcaacaaggtagatcttcgtaaagagaagaactggagtgctgctgataggcgtgatgcatcgaaatttatgaacctagaagtggacagtgaaaatatgcatggactgggggttgttgctgagtcagaagttgagggacttggagaggtggcagcagatactgagacaggtgtggtggagaatgcaagtcctgagttcttgggtggtaaagattggaactcagatatccctgttgattttgacaatgaccaaacattggacaaaaataagaagggtaaagattccagatcaatgaagctttttaagagtgctattgcagattttgttaaggaagttcttaaaccatcatggaggcagggtaacatgagcaaagaggctttcaaaactattgtcaggaaaacagttgataaggtttccggttcagttcctagcagtcatattccaaaaacacctgccaagattaaacattatgtacaatcctcccaaaggaaggtgaccaaattagtaatggggtatgtcgacaagtatgtgaagccatagagtaatgtggcattgtgctgaatcagaactgtcatggttccagagtctgtgctgcattctactaaatgaggctgcaaatttggtaatctttctgatgaaacggttgttccacagtaaggtagtttgctctagttctgcaggaaatgctgtattttattggagtgacatgtctagatgtgcttccagtattgataatttgctgcctgatttcttgtaccctgtaagggtgcgatatttgtgcgaacatgctgctgaaagaactttgtttcttaatggtgattatgcatactgagagctgtaaggcttactgctgaacgaactttgtttctgaatggtgaatatgcatactgagagctgtaaggcttaacaaacttttgacttctcacattgttcaacgtggctcttttagactggttatagtttgatgcctgtacttttccgacagaataat

SEQ ID NO: 6742 - DNA, 1696 bp, Zea mays
  Clone ID: 700577465_FLI
agaatctgggccgacatcgcaggtggcgggggaccggaaagaagaagatcctttccacccgtggcgtgcttgagtccagaaacggcgcacatcctggtggccttatgaagagaaggaaggtcgtggagcacatcatcctgctcagagccaagcccaacatctcagacgctgaagagaaagacatgctggactacctatacacatcgcagtaccagatgcgagggatactcgcggtctcgctaggccgcatcgaggaccccaacagcgacaacttcacgcacgctgtgttcatgcgtttccagcagaagcaagacatcgcggagttccagagtaacgcgtactactccaaagttgtcgacgagcacgtaaagcccgtttcctatggctcggtttctgtagatttcgagtccgaggtggaagacgacattatacctctctttcgcaggggagaggattttaactacggcgtcgagtttatgctgctggtgtctttcttgaagactgcgtctagagaggcaacggaggacgcattagcgtctcttgacaagttgatcagccaatgcagcgcttctattgtgcaggcaacatgtggtaagccaaacatgatatcgatccttgttgctcttcttcttcttttttttcccaaagaaaatctcaaggaaaggaactgcttctatgtgctgttattctgtaccaggctgctgtttggatcgtccggataacgagtacagtcatgctgcagtaatccgtttcccatcatctgatgagttgaagctgttcagggagagcgaggagtacaaggatatgtgggcgtccaagttccgcccgatcgtggagagatccctgcacctgcacttcaccgttgaccccgtggggaacccacgttctttaaccagtttcttgtagtgcgagtggtcatccctatacatgggaccaagagcatctgtactgtacagtgtaaaacagagaggtggggtaatatagaggataccgctagggtcaacaagtgccagtgctcggttacattacatcacggcaaaaaacataaaaaaacaagagaaaatagcctctcttgttgctcaggaactcagatagatagatgctgagcaccgaccgagttgaggtccctcttgagagttcagttgtgcagcgggtttgacccctgcggcacccttctcttagcctcggacagatcctgcacctgcacgactcgcctccagccaagtttctgccggccgtgctgcctgaaagacgacgtcccctcggcgtcggattccggaacccgtcggccgtggcagaagaggcctctctgctctgctcccaggagcgagactgtgagcactactactaccatgagcctgaccaagctttgttgcggcaatcccatgctttttcaggcagatgttggagatggcaagggacggtagtttgtaatacatcacgcacaagcaacggaataaagattttatatacgcagacaacaagggcggcacagaaagtaaatccagctcggccatctggagacaccggggcaggcgtgcgcttacctcaccaattttggtttggtgcggcggacaccgatgcatgcgttttcatcaggttttggtttcgtagaaagaacaaggatacatcatcaaagtcacaacatgaatgaattcttgctactctggagaagaatgagtggtttctttgcatt

SEQ ID NO: 6743 - DNA, 543 bp, Zea mays
  Clone ID: 700577467_FLI
ctcctgctggaattttaacatttaacagaaatagcatgagcggtgttctcaactgatgctgacaatcagacccaagtgggtatctgtgtgttgcaaagtgagcatgaaatggccacatacaataaatgcctgggtgaatttgacctcatggacattccacccgccccaagaggcttgcctcagattgaggttacattcgacatcgatgccaatggaatcgtgactgtctcaaccaaagataaggctacgaggaaggatcagaccgatcttcgggtgggctgtctgaggctgacatctagaagatggtgcaagaagctgaactgcgtgcctagaagaatcaggaacggaaaagccctcatcaactaatctaattcttttgtccattattttgctgagaagtccatccctcgataagtgttcccttcatgagtttataacaccaactccaacatgctcactcacctcttttcagtctgttcaaagcattgcttgccaattaacagagtaacgatttattatctgcaaatttaaatcatgttagat

SEQ ID NO: 6744 - DNA, 1110 bp, Zea mays
  Clone ID: 700577493_FLI
ccatggcacgcacactcctgttgagatcatcaacaggttcccagtcggaagtcacgtcgtcggcgccttcataatgccatgtgggaactgcttctactgcgttaagggccaagaagatctgtgtgagtctttcttcgcgtataatcgtgccaaggggacactctatgatggcgagacacggctgtttctaaggggcaatgggaaaccggtgtacatgtatagtatgggagggcttgcagagtattgtgttgtcccagccaatgcgctagcagttctccctgactcactgccatacacagaatcagcaattttaggatgtgcagtgtttaccgcgtatggtgccctgaggcatgctgctgaaatgcggcctggtgattcagtagctgtgatcggagttggaggggttgggtcaagctgtttacagatagcaaaagcctttggagcttcccaagtcattgcagtggatgtccttgatgagaagcttcagaacgctacaacacttggagcaacccacactgtaaatgcagcaaaagatgatgcagttgaaaggataaaggaaattactgatggtaggggtgtagatgtggctatagaggcacttggtaaggcgttaacattttcccagtgcgccaagagcgtgcgtgatggaggcaaagctgttatgatcgggcttgctgcaacgaacgtaatgggagaggttgatataacccgtcttgtccgacgacaggtgaaaatcattggctcatatggcgcaagggctaggcaagaccttcctcagatagtgaagctcgcggagagtggtgccttcaatctccaaaacaccatatcaaggaaatgcaaatttgaggaggcgaatggcgcctatgaggatctcaatcagggcaagatcgtaggacgagctgtggttgagatcatggagtgatgacggacaaggtaatcaatcctgtggttccaagtctgggtcacacaacaataaagttttgcgtgctctttcacagcattgtcaaaatctgtagatgaccaaactgcattgtgtgtgtgtgtgtgtgtgtgtgtgacagtgtgttgttggaattaacatttgcccttaaattatgtctgtacacgccc

SEQ ID NO: 6745 - DNA, 729 bp, Zea mays
  Clone ID: 700577561_FLI
attttcagtaaatttggtatcgaacacacactgaacatccctgcaacttttgttgttaagaggttgtttgtttaggactataatctgtctagattatataatccaacaaataatgtgttatttgctggattatataatctggacagattatattctcaaacaaacacccgctaattcttccaggggacaatcggagcgtggaaacgatgcaaccaggacatactttacaaccagaacgtccaaagtgtagtgccgtaccattcgaggctagccgcgaaagggtacagggcgctgatatacagcggcgatcacgatcgtatcgtacccttcgttggcacacaagcatggattaggtatctcaacttgaccgttgtagatgactggcgaccatggtatgttggtggccaagttgccggattcacaaggaactcaggcaacctaacatatgcaactgtgaagggcgctgggcatactgcaccggagtacaagcccacggagtgccaaacgatgtttaggaaatgggtttcacgggatcctctctgatattacgtcgtctgagagaattacgtacgtgtcgctcctatgagtgtaggccggacgtacgtggtatgccctactgcaggccggagatcaaaataaaggagattttccattttcatgtagaaaaaatgagtgtccatggtgtctacttgttccctgtattaaaaataaatgcaatttttatactgc

SEQ ID NO: 6746 - DNA, 727 bp, Zea mays
  Clone ID: 700577676_FLI
cagggtttaaacgaacttctcatgtgttgcattgtacaaggccttgtatccgtaaactgcttgtaccagtcttcgttttctgaacttgatgcagatatcagaaaggcatgctactatcacgtgcaagaataaggctttctatctgactgatctcgggagtgaacatggtacctggattaccgacaatgaaggtagacgttaccgcgtgccaccaaacttcccggttcgtttccatccttccgatgtcattgagtttggttccgataagaaggctatgttccgggtgaaggtgctgaacacgctcccatacgaatcagcaagaagtgggaagcagcaggggctgcagcaagagcaagtcctccaggcagcatgaatggagacaccagtcaccatcccatcatcagcgacactgtactgtatagcaatcgggagatacacgatactccaacgcgtaaaaaagcgtaaaagatacgtcaaaacagatgtgatttttgcatccatgcagatgcgaaacaggattttgaatcctagcacctaacggatttaaatgatgaagtttcagttctacgagaggaactgagttgtacgatagggataacttagctgttgtcggactgtgtacattgttggtatcatcacccaaaatattgtacatctagaagccatattgtaattacggcacgtatacagtaacactttgatcatgtaatacagtatatagttgttt

SEQ ID NO: 6747 - DNA, 891 bp, Zea mays
  Clone ID: 700577692_FLI
atgagttccctttcaagcctgaggacttcagccgcttcgacgaatcatcagatactctgttctactcggttccacgttttgtcactcacattgatgaccaagcaatccaagctctcacagagtactattctgaagttcttcctccaagtaatactcctggggtggccattctggacatgtgcagcagctgggtcagccattatcctcccggttacagacaagagaagatcgtggggatgggtatgaatgaagatgaactgaaaaagaactcggtactgactcagtatgtcgtgcaagacctcaatgtgaacccaaagcttcctttcgaagataacacttttgatgttatcaccaatgtggttagtgtagattaccttacaaagccaatagatgtttttaaggagatgcgacgaatactcaagccaagcggccttgccataatgagcttttcaaaccggtgcttttggacaaaagctatatctatatggacctcaactggtgatgctgatcatgcatggatagttggtgcttacttccattatgttggaggttttgaacctccccaggcacttgatatatctcctaatccaggacgaactgacccaatgtatgttgtatgctcgagaaagaaaatagggtaactaaacaatatatttggcaagtgctatcaagaaacaaatagaaggaaaaatacaagaagcaagttgtttggccctgatcgcaggacctattggtgagctgatgtttccgtgagtaatgtaacgacagaaaaaagaagcaactactacataaactatttatagaagcggcagattcacttcataggttgtagcaactgtctttactaaaagtgtgtttggtttgaggaatgaagtgatccatcttcttctc

SEQ ID NO: 6748 - DNA, 609 bp, Zea mays
  Clone ID: 700577710_FLI
agctagtgttgtagagcttgaaactgttgttgctgctttgtgaggcggttcatgatggaccagttggtcttttacgaatcaagagcagcagccgctgacccccacagggacatgagactggacatcgacaacatgagctacgaggacctgttggctttgggagaatctatgggcaatgtcaacacaggcttggccgatgagaaaatttcgaagtgcgtgaaagaagtggtctgctgcagttccgaccagacgcaaaccgatcaagatgaccaggatgacggaagctgcgtcatctgcctggagggttacagagacaaggatatgctggggatactgaaatgcaggcacgacttccacgccggctgcatcaagaagtggctgcagacgaagaactcgtgcccggtgtgcaaagccgccgccgcctaggacgacaccagaggagcgagcaactattttgtgctcctcctcgatctattcatttttttaggctcaggtcgaattatatatgtcgttccattcttttgattccagccagtcgtgtaaataaatgccgtgtgttggttattttagttatcacttgggttacattagcccaaattctcctgttgc

SEQ ID NO: 6749 - DNA, 967 bp, Zea mays
  Clone ID: 700577718_FLI
ggagtatgatggagttagtgaagtaaaatccactttgcaatcagcttttgctaagctaatgacagcaagtaaagacatggtttctgaagcagttgcaaaactgatcagtcgcctgaatactgagagcaagattaggaccttaacagacaaagaacagctgcttttgtccttggagagacaatatcaagacgatgttggtgttctagcagcacttttttttaactatgtcaagctcagtcctggcgaagcgctttatattggtgcaaatgaaccgcatgcatacctctcgggggaatgcattgaatgtatggccacctcagacaacgttgtacgcgctggtttgacacctaaatacagagacgtgcaaactctctgctcaatgctaacatacaaacaggctttcccagaaattttgcgcggagttcctgtgcagccacacgtaaggcgctacacccctccatttaacgagttcgaggtcgatcgctgcttggtgcctccaggtggatcgctggttgtcgtacccccggtaccaggtccatccatctttctcgtaatgaccggggcaggcgagattcagttggattctgcgtcagatggagaaaaggcagacgaaggtgatgttttcttcgtcccagcatacaccgaggttaagatatctgcgtgtggccccgagtctctgcagctgtacagggccggagtaaacagcaggttcttcagctaacaggcgcgtcgatctttggggctgtcgtaaagtgaccacactgtagttgtagggaagttgtcatatacgagaaatgaaacggttagttagcaaaaaggtctcatatatactaatgtatagggctgtaggctgatgaaagaataatctggttcctttcgtatcttcttgataattcactgtaaagatgccttgcagtgcaatccacgttggatgcgctagaaagaaataaagatgatgattagtatc

SEQ ID NO: 6750 - DNA, 1286 bp, Zea mays
  Clone ID: 700577752_FLI
cgcgctgccgctcatcgacttcgtcgccctcctggcggcgcgcggcctccgcctcaccgtggtcacgaccccggcaaaccttcagcttctctcctctctcctcgccgcacaccccaccgccgtccgcgccgctaccttcccgttcccctcccacccatccctgcccccggggctcgagaataccaagggttgcagcccggtgcagttccccgccttcgtccacgccttggccgagctgcgtgggcccatcctcgcgtgggttaaagcgcagcccgatcccgtcggtgaggcagaacttcatgtggaacctgcacgacagctgggggttcgtgttcaactcgttcagagcgctggaggggaggtacctggagcagcctctcgaggacctgggcttcaagcgcgcctgggcagtgggccccgtggctccggaggcggacgccgcggttgcccgcggcgggcaggcaaccgtcgagctcgccgatctcagcgcgtggctggacgcgttcccggaaggttcggttgtatacgtgtgcttcgggagccaggccgtgctgagccccgccgtggcggcggcgctggccgaggcgcttgagcgcagcgccgtgccgttcatgtgggccgtgggcgacgccgtggtcccggacgggttcgaggcgcgcgccgcggcgtcggggcgcggctcggtggtgcgcgggtgggcgccgcaggtggcgctgctgcggcatccggcggtggggtggttcgtgacgcactgcggctggaactcgactttggaggcggtggccgcgggggtgcccatgctggcgtggcccctgacgggcgaccagttctttgacgctcggctgctcgtggacgaggcccgcgtcgcggtccgcgcatgcaagggcggcctcggctttgtccccgacgcaggtgagctggcgtccgtgttggccgacgccaccggggagaagggccacgacgtgaggacccgcgccaaggcactcgcggcagaggccgcccgcgccatgaagcctggcgggacatcgtacgcggatctagagctgttggtgcaggaaattcggaatcggaagcttagctagctccctctccaggaatacatcagctcgattcccatgcgatctaacttgatcgcactgaaagatgatgcaagatgatacaatactgaaagatgatacaagactttaagttatgtaattttagttgttttgtatgaattgtataattttatctatttaattgtgtatttggatgtatttattcaataaaataacatattttatgtc

SEQ ID NO: 6751 - DNA, 641 bp, Zea mays
  Clone ID: 700577790_FLI
gcaggaagctttatacattctatcctacgcttgggggaatgatgatacagttcaggagagcctcggtatccgcaaggggacaattggagcatggaaacgatacagccatgcattgccttacaattatgatatccagagtgtagtggattaccattcaaggctagccacaaaaggatacagggcgctgatatacagagcggcgaccacgatgctgttgtaccccatgttggcacacaagcatggattagatacctcaacttgacaatcgttgatgattggcgaccatggtacgttggaggccaagttgctggattcacaaggagttatgcgagcggcctaacatttgccaccgtgaagggtgctggacatgttgcgccgttgtataagaccttggaatgccaaaaaatgtttataacatggatttcagggaatcctctttgatgcaagtctgatagaatgacccatcggttatctgagtgggcgtcagccgtcaggaatcctctttgaagggtcagttgcttgggtttctttggtgtcaactggttcaaatccttgatcgatatggttgatcgtaatatttttggaacttatttcaagatttattaacggtattgtttttttaagacctgcctgttgattcc

SEQ ID NO: 6752 - DNA, 760 bp, Zea mays
  Clone ID: 700577816_FLI
attggggctgggtgctggtgttgtatgagggcatgtgagccacgtaggctagctgatatgttgctggcaccatgggaggacaccttagctgcatgtcaaacatgtcaggaactccttgccccatattcaagtatttatagggcatggtccagtaaagaatactccttgccctcgagctctaaccaataaccactgcaagggtgaagttgttctggtgttccagccagtgttaatcctctcccttactgcagagttaagttgttcctgagctgagtgtcaacctcctgtgtggtgaccagggtcatccaagtgcccacctcgccgcggtcaagcaatcacaagcgattccccagctgtacagtgcatgtttcgtgttctccttaggtcattgaagctcacaccatttactgcttgaactctaccactattggttgcctggaactaggtgtgaaatttgctcaaacataggctgtcaggtttctggatcccagacttagtgcataaggctgaaactaggttttagtgtgttcagctccattttggtgcttcataaaaattgttctgaatgttttcaacctaggggtactataccaaagtagtagagctatatctaaggaataactttggttatgtgagcttggtctgttgctttgtaaaaattggagaaaagggttggctaaagtttgtctgtcaggctggacacataactgaatttttattcagttctgaaaactgaattgcagcaggatgcctagtttgg

SEQ ID NO: 6753 - DNA, 802 bp, Zea mays
  Clone ID: 700577847_FLI
cggcgacgtggggcgcgacctacggcaacagctggaggaccaccaacgacatcgccgacacctgggacagcatgatcgccacggcggaccagaacgaggtgtggtcggagtacgcgcgtcccggcggatggaacgatccggacatgctggaggtgggcaacgggggcatgaccaacagcgagtacgtcgtgcacttcagcctctgggcgatctccaaggcgcctctcatcatcggctgcgacgtcaggcatatgtcgcgggagacgtacgccatcctggccaacaaggaggtgatcgccgtcaaccaagatccgctcggcgtgcaggggaagaaggtgcggatggagggcagcagcgagatctgggccgcgccgctctccgagtaccggacggcggtgctgctcctgaaccggcacgccaaggacgaggccaccatcaccgcgcactgggacgacatcggcctccccgccggcacgcccgtcgaggccagggacctgtggctgcacgagacgttggacgccacgttcacggacaagatgagcttcgacgtcgcgccgcactcgtgcaggatgctcgtcctcaagcccaggatccagatccagtgaactacgccaccgctgccgcatgggcgcgcgtacgtgcggccctcacgacgtcaccacgggtccattcatttgtactgcaggctaattgaagacacgtggaatcaaaatcaccaaggcctgttcgtttctgctggaacagaccaggattaattccaaatctccaaaacttatagtaattattgaaggaatccaagcct

SEQ ID NO: 6754 - DNA, 759 bp, Zea mays
  Clone ID: 700577857_FLI
atcgtatcctcatcgctccgtctatggcgactctcaccatgcagccgatcggtcccacccctgctccggctgcgcagcaaggccagagcaagggagagaatcctcctaccgtggatggtagcgatctgggtgacatcgactcgggaactcggatgtcgtttccgcggatttggcagccgccgccgtctgtggcggtcagcgtctaggctcttctacgattcctagctgggcacggtgggttctcggaggtgtggtttacacgctcgtgccgttctacaacagagttaggcatctcgaagacgagacggtgggattcgtggagaatgctgtggaggttgtggagcatttagctgaagtaacagagaagctagctgcgaatgtggctaagcaacttcctgaagatgggtctctgcagaaagcagtggaagaggttgaacacattgctgaggtagtggatgatgatgcggagaaggttgaagcagtcactgaaaagatcgacaaggtcagtgatgagattgatgctgctgtggagccggtcatcgcggagcttgaaaaggaactcgatcagagcacagcctcagacgatggagttgacacaaagaattgatcaacttcatgttaggtgtgctcttcattgtacatagcgtgtgtactgttgttttttctctctctctctcctctttggagaaactgcttgtacatatgtatgtatggaccatgaagattattggtactcttatcaagtcacttttcataaat

SEQ ID NO: 6755 - DNA, 331 bp, Zea mays
  Clone ID: 700577872_FLI
ctggtcacgcatgagcttggactgcaggacatcaacaaggccttcgacctgctcctgcaggggaaaagtctgcgctgcatcctctggatggacaaggacaagtaacggaaggagaggggcggccggaccaatccttcctgtctctgaataaatttgccctgttttttcagcgaggcgttgctgaaagctggtgttagcggcgaccaagactatctgttcctgaaaccctgtgtatcagtatcgtttcgttgtctgaactgattaaatcctaatatcgatagattagactctccccagcaaccgctttgtcccctgaataaagtgattcatc

SEQ ID NO: 6756 - DNA, 1788 bp, Zea mays
  Clone ID: 700577916_FLI
cacacggcgtgcccaaggtgcattataaaggtcgtcagggtgactactatgtcatgattatggatatgctggggcctagtttgtgggattcatggaattcattaggccaatccatgccatcggaaatggtggcttgcattgccatggagtccatttccatcttggaaagcatgcattctaaaggatatgtgcatggagacgtcaaacctgagaactttcttctggggcagccttcaacgcctcatgaaaagaaactttatcttgtggatcttggattagcaacaaagtggagagatactgctaatgggcagcatgttagttatgatcaacgtcctgatgcctttagaggaacagtcagatatgctagtgtccatgcacatttaggaagaaccgctagcaggagagatgatttggagtcacttgcctatacactagtattccttcaccggggcaggttgccatggcagggatatcagggtgataataaatcatttttggtgtgcaagagaaagatgagtacctcacctgaggccctctgcggcatatgtcctcaacctttcaaggagtttcttgaggccgttgtcaacatgaagtttgatgaagagccaaactattccaagttgatttcattgtttgacagtttaattggaccaatcccttccattagaccaatcaatactgatggagcccaaaaggtagggcagaagcgtgccaggttgcttaatgatgacgacgaccatgtaaaaaagaagattcggctgggtgctcctgcaacacagtggatttcagtatacaattcaaggcaacctatgaagcagaggtaccactataatgtggctgatgcaaggttagcgcaacatgtggagaaaggaaatgaggatggtttgttgataagttcaatatcatcatgcgcaaatctttgggcaatcattatggatgcaggaactggcttctcagctcaagtttatgagctatcttcacactttcttcataaggagtggatcatggaacaatgggataaaagtttctacatcagttctgttgctggctccaacaatggaagttctattgtagtgatgtcaaaaggcacaccatatacacagcaatcttataaagtcagtgattcctttccatttaagtggataaacaagaaatggaaagaaggttttcatgtgactgcaatggcaacatcaggcaatcgatgggctatagtcatgtcccgcagtgctggattttctgagcaggttgtggagttggacttcttgtacccgagcgagggcatccatagacgctgggacaatggcttccgtattactgcaatggctgccacgatggatcagtctgcgctgatcctaagcaagccaaggcgtcgcccaagagacgagacacaagagactctgcggactacacagtttcccagtcaacatgtcaaggacaagtgggccaagaatctctaccttgctgggatatgctatgggcgaaccgtggcctaacatcgtccgttgctgacctagctgttgtttgatgtatattttgagttttttatcagctgctaccagcatgagccacaaggcatttgccttgtcgtaacccatggaaattggaaaggggatgaattccgatgtatgtgcccgaacttgattctagggttggtctcgtaagttaatcgggaaaggcgggtgcagacactactgatgagccgtaacgtacccgtcagatcccccagatacaataaaacgagtctgtaatgtggcttttgcatcgtattttctgcatcgtgttaaggag

SEQ ID NO: 6757 - DNA, 671 bp, Zea mays
  Clone ID: 700578004_FLI
ctgcctgccgtttccatctccatccagttctccgcacccacccacccacccactccagtcctttccccaacccacggcggccgtggacgccagggtcttctacctcaagatgaagggggactaccaccgctacctcgccgagttcaagaccggcgccgagcgcaaggacgccgcggactccacgctcgccgcctaccaggccgcgcaggacatcgccgtcaaggagctgccgcccacgcatcccatcaggctcggcctcgccctcaacttctccgtcttctactacgagatcctcagctcgccggaccgcgcctgctcgctggccaagcaggccttcgacgaagctatttcagagctggatagtcttggggaagagtcgtacaaggatagcaccctcatcatgcagcttcttcgtgacaacctcaccttgtggacttctgacatgcaggaggatggtggcgatgaaatgcgggatgcaaacaagcctgacgaggagcagtagtagtcgtcatgccatgccatgccatgcttgtacaaggaccattttcgtgtgtcctttccttcaatcgtcgacctttcgttttgttgttatactgctattgtggaaccctgttactgttactgttagtgtatcctattggcaataatcaaatgtggtatggttgactact

SEQ ID NO: 6758 - DNA, 756 bp, Zea mays
  Clone ID: 700578102_FLI
caggaagttgagatcagaaaaatgcaggctgccgctactgccgccgggttctcggccgtgctgcccgccaagggcaggccggcggcgaggagcagggtggtggcccgtgtccccgccacaaggaggagcgtccgtgtagctgccgtcgtcgcgaccgaggccgcgcagatcgactacagctcaagcgtctcggtgttcccgatggaggcctgcgacctgcttggtggcgacgcgtgcaacgggcccatgttcccggaggccaagcccgcctcggcggcggcggcggcgagcaggagtgtggtcggggtggacagggactacctgtcctacgacgagccaaagacggtgttcccgggcgaggcgtgcgatgaccttggcggcgagttctgcgaggcgccgtaccaggacggcgtctccaaggagctggcgcacgcctgaagaccctgatccatccatttctgtccaccacgctatgtacgtatgtgtagcagatggtttacatctacgtgttagagcccggagagctggagaagctagctagcgtgcttacagaataacagcagccaagcaaagccaagggtgtgtatataataggcatgccttgggttgtgtcagctgcgactgtatgtatagtttaaaccaagatgaaatggtactgatggtgatattccgtgttttacgatacaaaggctagaaaatagattttgcctggatatcagatagctttcaactaccacaaaatattatttctacctg

SEQ ID NO: 6759 - DNA, 1080 bp, Zea mays
  Clone ID: 700578131_FLI
ccgacccccgcgcctacgtcttcggagaggacgtcgggttcggcggcgtcttccgctgcacgacaggcctcgccgatcggttcggcaagagcagagtgttcaacacgccgctgtgtgagcagggtattgctggatttgccatcggcctagcagcgatgggcaatcgagctatcgcagaaatccagtttgcggactacatctttccagcctttgatcagattgtcaatgaagcagctaagttcagatatcggagtggaaatgaatttaactgtggaggcttaacgattcgaactccctatggtgctgttgggcatggtggtcattaccattcacagtcaccagaggctttcttctgtcacgttcctggactcaaggttgtcataccacggagtccgcgcgaggctaaggggttgctgttggccagcatccgagatccaaacccagttgtattttttgagccaaagtggctgtatcgcttggctgttgaagaagttcctgaggaggattacatgctgccgttatccgaggcagaagtgattagggaaggaagtgatataacgcttgttggatggggagctcagcttgcggtgctgaaagaagcctgtgaagatgctgcaaaggatggggtgtcttgcgagctcatcgatctgaaaacactcgtaccatgggataaggaaacagtagaggcctcggtgaagaagaccgggaagctcctcgttagccacgaggctccagtcaccgggggcttcggcgcggagatcgccgcgtccattgccgagcgctgcttccagaggttagaagcacccgtggcgagagtctgcggtctcgacacccctttccctctcgtgtacgagccattttacatgcccaccaagaacaaggtcctggatgcgataaaagccaccatagatttctgaaacatgttgcttgatcgatacagagtactctagttacatgtgcacggtttgtgctggtctgggtctgtagcctgcctgaggatgagcgatccacaaaccggcttatttgtattcaacaatacagcgataaataaagccgcaaggtgcaaaattgtaggatgtc

SEQ ID NO: 6760 - DNA, 829 bp, Zea mays
  Clone ID: 700579794_FLI
gtccgattcattggttcatgcacaaagccacctcagttttacataattacagagtgcatgtctagaggaagtctgtttgatttcttgcacaatgagcataatgtgttggacctcccaacgcttctgaagtttgcactagatgtatgccaagggatgtcctacttgcatcagaaaggcattatccacagagatttaaagtctggcaaccttttattggataaaaatgatgttgttaaagtagccgattttggtctagctcgttttcaggatggagggggtgatatgactgctgaaactgggacctatagatggatggcacctgaggttataaatcatcagccctatgacagcaaagcagatgtatacagttttgctcttgtactttgggagctcatgacatccaagattccatataataccatgacccccctccaagcagctgttggtgtgaggcagggattgcgaccacaaattccagaaaatacgcatccgaggctcataaacttgatgcagagatgttgggaagctactccgactgatcgcccttcatttgaggagatcattcctgaactagaggatatccaggcacaagcacagagaacatcaggggaaacgagccagacagaggaggaccactcatgcagtaaagattgattgaccccctctgtacatacatgttgacaattctctcatctgatcactaaaatgctgagaaagtagcatatcatcagttttgatgccatagaaaaaaagtagcgaatcattttgtcaagttttgtcagaaccttttggggccgacggccaaagctcttggtattatccttgcttc

SEQ ID NO: 6761 - DNA, 726 bp, Zea mays
  Clone ID: 700581760_FLI
cttggcgttccctgggtcattcttggacactctgaaaggagagctctgctgggagaatcaaatgagtttgttggagacaaggttgcttttgctctgtctcagggactaaaggtcattgcatgtgttggtgagacccttgaggagagggaggctggttcaaccatggatgttgttgctgcacaaacaaaagcaattgctgagaagatcaaggactggagcaacgttgttcttgcctatgaaccagtctgggctattggaactggcaaagtcgccaccccagctcaggctcaggaagtgcacgcctccctgagggattgggtaaagatcaatgtcagccctgaggtctctgaatctacaaggatcatctatggaggttcagtaactgctgcgaactgcaaagagctggcagcacagcctgatgtcgatggtttccttgtgggcggtgcttctttgaagcccgagttcatcgacatcatcaacgccgccgccgtgtgaagtccgctgaagatgttccaacccttcaccctgttgcggtgatgtgctgaagacagatcagactatttttttgtttaaccgtgcagtgctatgtaagctactaactttgcgctggtgcggatgctgatttccctccccctagctttttgtgaggctactctacagcttgattcagcttgctaataatgtttgcctctggacatagcgatagtggtgtttgtgtagcctttt

SEQ ID NO: 6762 - DNA, 1082 bp, Zea mays
  Clone ID: 700581771_FLI
cagaaaaagaattcagagtggaagttgaggctattggccatgtccgacataagaatttggttcggctgttgggatattgtgttgagggcgtaaacaggatgctagtatatgagttcgtgaacaatggtaatttagagcagtggcttcatgaagctattgagccaaaagttgtacatcgagatataaaatcaagcaacatattgattgatgatgaatttaatggcaaagtatctgactttggattggctaaacttttgggatcagacaaaagccacattactactagagtgatgggaacatttggatatgttgcacctgaatatgctaatactggaatgttaaatgaaaagagtgacgtttacagttttggcgttctcttgttagaaactgtgacaggaaggaatcctgttgactacagccgatcttccaatgaggtcaatcttgttgaatggcttaaaacaatggtggccaatcggagggcagaggaagtggctgatccaagcttagaggctagacccagtatccgggctctcaagcgggctcttttggtggcactgaggtgtgttgatcctgactctgaaaagagacctaagatgggccaggttgttaggatgcttgagtcagaagaagtaccataccgggaggatcggagaaatcgtagaagtcgcactggaagcatggatattgagtccattgcagagggttccaactctgcggagtttggaaagaaggtagaaaggactggaagctctatatctgacagatctcaaccatgaggcctggaaatctaagctatatcaggaactgtctcagaaacgatgttaatcaccaaggtgattgctgtcctgataggggatgctggtaggtgacagaggcaaggcaggcccaggtattactgcctaagtattaggctttagttttcaggtgcagtagaagcattcttggatgaggaacctcctggtctcctcttatttgtataggtatatgttggtgcctgaggaattcctcttggtttgggtgtttaacatttgttcggttcttttatttcttgcattgttgccttcttaaatcagtttcacttc

SEQ ID NO: 6763 - DNA, 1413 bp, Zea mays
  Clone ID: 700581855_FLI
gactggtctgatggaggcttatggaagagggaagcagtaccgtaaggctgaagcagtattccgtaggatgcaaacatcaggccctcaaccatcacctgtgacatatcaaattattttgaaatctttagttgagggtgacaaatataaggaagctgaagctatatttgaagaccttcttaatgaaaaaagaacttcttttaaaccagaccagaagatgtttcacatgatgatttatatgtacaagaaagctggtgactatgcccaggctcgtaagctatttgcacagatgtcggagagaggaattccactatctacagtcacttttaatagtttgatgtcatttgagacagaatacaaggaagtttcaaatatttatgatcagatgcaaagagctggtctgaaaccagatgttgtgagctattccctgctcatcaaagcttatgggaaagccagaagggaagaagaggcattggcggtttttgaagagatgcttgatgctggagtcaggccgacacgcaaatcatataacattttgcttgatgcatttgcaatatctggattagtagaggaggctaatacagttttcaaggcaatgagaagacacagggttgagcctgacctttgctcttatacaactatggtcttagcttatgtaaatgcatctgaaatgaatggagctgagaaattctttcgtaggattaaagaggatggtctgaagcccaacgttgtggtttatggcactctgatgaaaggctattcaaagttaaataatcttgagaaagttatgcgtgtgtatgagagaatgcggatccagggtgttgaacccaaccagactatatataccactatcatggacgcacaaggcaggaactcggattttggaaatgctgtcatttggttcaaagaaatggaagctcgtggatacccaccagaccagaaagcaaaaaatatcctactttcgcttgccaagacaccagaagaggaacaagaagcgaatgatttggtagggaatggtccagttcagctggaagtgaaacctgatgatggagaggtggatggtgacgatgggcatgaagttatacaaactgatgtcgaaaatcaccgtttgctagacgatactgtaaatggtaggatcagagctggtgactataattttgatgaggaggatgacgatgatgattatgaggaagaggaggatgaagaattcgatcttgtttctttcaaagataagagaaaactgaattttgcaagttgatatcataaatcttggtgtatattttttccaacaaacacatcatcacatgatggcctttcctatacagagactaacttgaaatgttagtagagtttggctcgaaccttgaaagatgtttctgttagccttgtcttttgaaggaaagtaatttaaggcag

SEQ ID NO: 6764 - DNA, 711 bp, Zea mays
  Clone ID: 700581970_FLI
ctttatgtatgatggaatggagcactactgcttagaagatgctcatattgtcaacctcttctcgttctcaaaggcttatggaatgatggggtggcgtgtaggatacattgcatttccaaatgaagctgatggcttccatgatcagctcctcaaggtgcaagacaacataccgatctgcgcctccatcatcgggcagcgcctggcgctctactcgctggaggccggccccgagtggatcaaagaacgggtgaaagacctggtgaaaaaccgggcgctgctggtggaggcactgtccccgctcggcgaggacaacgtcaagggcggggagggcgccatctacctctgggcaaagctaccggacagctgctcggacgacttcgaggctgtcaggtggctcgcgaacaagcacggagtcgccgtgatccccgggagcgccagcggaggacccgggtacatccgcgtctccttcggagggctcaaggaagaggacaccaggctggccgctgagaggctcaggcgcggcctgcaggagctggtgaccgatggaatggtacagtgacggctccatgggtgtaagtaaaagctccaattttccaacggtgtgtaattccgccgtgattaattcgggagaagaaaaggaacttgttttcaagaatgcactgcgttgctcggacgagagacgggacggaataaaatgcgtctggtctgctg

SEQ ID NO: 6765 - DNA, 1386 bp, Glycine max
  Clone ID: 700605169_FLI
caaactgggagtggcactcaaagtaacatgaatgctaacgaggttattgcaaaccgagcagcagagattcttggccataagcgtggtgagaagtttgtgcacccaaatgaccatgtcaatagatcacagtcttctaatgatacattcccaactgtaatgcacattgcagccgcaacggaaataaactcaagactgatccccagccttaaaacgttacacgatactctaaactcaaagtcagttgaatttaaagatattgtcaagattggacgcactcatactcaagatgcaacacctttgactcttggacaagagtttagtggatatactacacaagtgaagtacggtattgatagagtaattgacactttgccacgcatgtatcagcttgcccagggtggtacagctgtagggactggattgaataccaagaaggggtttgatgccaagatagcagcagcagtagctgaggaaacaaatctgccttttgtcacggcagaaaataagtttgaggccttggctgcccatgatgcttttgttgaaactagtggagcccttaacactgttgtggcttcattgatgaagattgctaatgatatacggttattgggaagtggtccacgctgcggtcttggggagctcattcttcctgaaaacgaaccaagaagcagtattatgcctgggaaggttaacccgacccagtgtgaggctttgacgatggtgtgtgcacaggtcatgggaaaccatgttgcaatcacagtgggtggatcaaatggtcattttgagctcaatgtgttcaagccaatgattgccaattgtctcctgcattcgctgagactgcttggagattcgtctgcttcctttgaaaagaattgtttgagaggtattcaagctaatagggaaagaatttcaaaattactgcatgagtcacttatgcttgtcacatccttaaacccaaaaatcggttatgacaaggcagcaacagttgccaagacagctcacaaagaggggactactcttaaggaagctgcattgaaactcggagtgctctgctctgaagattttgacaagcttgtggtacctgagaaaatgcttggaccatctgattgattggctcgaatgttttgttcttataattccttgtttcatcatcggctccattgaagtattaagtattatttatacgaaagcaaaaagcttatatacatatatcctagaacaatgcaccaaagaccttagggtcaaggtttataaaattgtggttatgattgcagatgcgattatcgcgattgtggttattgcagcagctacagcgggaaataatcttatgtttgtacctgatactaaaaacatgtaattctttatgtaccttttatttagaatgtt

SEQ ID NO: 6766 - DNA, 1454 bp, Glycine max
  Clone ID: 700605238_FLI
tgcattttctgcttcctcccctctttccctgccttgtataattcttttctttgaccctttacacactctcttggccatttctagggttcttttcttcttcttcttctctttcaccataaaactcttctccatcacacacacacacaccactgtgctgctaaccatggcaaatttcacttctttttcttcatctctgacacacattccacccatttcagctccttcttcttctgcagctttcgacgattcttccgaagactcctgcagtatatgcttagagcccttcagcgttcatgacccatctactgtcacctgttgcaaacatgaatatcatctgcattgcattattgaatggtcacaaagaagcaaagagtgcccaatctgttggcaatcacttgctttgaaagatcctgccagccaagagcttctagctgcagtggaagatgagaaatgcatgagatcaagaaacattgctaattctcgtgccccccttggacaacttaatgaaagccacgatgattcttgctcagatgactctgattttgatgatcagattatgaagcgcctagtttctgctgcaagaagagctcattttgttcagagacaggaaaggaagagatcacctagtgctggtccatcagaggctcttggtgttaactcttccatgcatgtttctgaggtgcaaacaactcttacaacttcatcatctgggggtagtttgccagcttctggtgtaccatctactgttagcattcaacctccagcactaaatactactcctgagagtgcaaggagaccaaacacttctgagatttccttccctgagtccttcaaatcaaagttttctgctgcttcagccagatataaggaatcaatttcaaaaagtacgcttggtcttaaagagaagttacttgctcataatgtctcggttaaagagctgagtaaaggtgttcagcgcgagatgaatgcaggcattgctggagttgcacggatgattgaacgccttgatcttagctcaaaacggtccagtgctcctctcattgctgtccatagtgtggctacttcagacttcccttcttcagggaagtctgttgaagagaatggcattgggggttctcctagtaaagagaatggaggtgcagttcatgatgttagttcagatgttcccccacttgttactaacatgcaatcttttcgaacaaaaactcctccatttcttcagagtggacatggaatggtatgaagacttagcttgtggtcatcatcaacttgactatgctgtctcaattgtcctagaagagtgcaagagacgccctctgataaccaatgtactcattggtatgcgtcctgcattgttatcaatggtaaattacgcgtaggaattaaaattatgtacaatcaattgataagagccagcggtttcatccgttggacgattattcaatgcatctctg

SEQ ID NO: 6767 - DNA, 660 bp, Glycine max
  Clone ID: 700605255_FLI
acaggccaatcatcagaaaaaactgatgtgtttgggttcggaatcttgctgcttgaactgatcacaggccataaggctctagattttgggcgagcagcaaaccagaaaggtgtaatgcttgattgggttaagaagctccaccaggatggaagattgagtcaaatggtagacaaagatctaaagggcaactttgatctgattgaattagaagaaatggttcaggttgcactcttgtgtacacaattcaatccttcacaccgccccaagatgtcagaagtattaaagatgttggaaggggacggcttagctgagagatgggaggcctcacagaggattgaaacaccaaggtttcggtcttgtgagcctcaaagatattcagatttaatagaggaatcttcactcatagttgaagccatggagctttctggccctaggtgacaagcatcttggttttccactatagctccttgtttaaaaggtgtagtttacatgttaaaaatgacagtgtcattagtgtcaatagctatgtaatgctcgtattcatctgtaaaaagaaaaaaaaggaaagtcatgtataagtatcttctttgttggaatgttgatttagttgcttcagaaattttttgaatcaatgttagaaaattgtatgtagttgcactt

SEQ ID NO: 6768 - DNA, 1592 bp, Glycine max
  Clone ID: 700605267_FLI
agagaaaacagggtttgtattatttgcggggcaaatgtcatgattgagataactggccttgctgacataagtcatcattgaacttacacaccactcccacccattctctctcctttctatataacctcacacccacacggcccctcctatcactccaaaacctaaactccccttgcttttcttaccatctccttcaattctctctcactctcttttttctctcaccaaaacctttcacccaatatcctcaaactactacttctgataaattgctaatttttataaagctagctagagatgatggttcaaaaggaagatttgggtttgagtttaagcctcaacttccctcatcacaataccccaaatcctcaacatccgagtctcatgtcatcctctactcattcctcttctccttctggttgcaaccctcaaaaaccctcttggaacgaggctttcacttcttcggatcgaaactccgacacatgcagaggcgaaacgcgatcgttcctgcgcggaatcgacgtgaaccggttaccttccgccgtggacaccgaggaggaaacgggagtttcgtctccgaacagcaccgtctctagcgtgagtggaaaacgtagcgagagagaagaaccgaacggcgaagaacgacatggacagagcctgttcccgcggaatcagcgacgaggaagacgctgaaaccgcaaggaaaaaacttagactctccaaagaccaatccgctatactcgaagaaagcttcaaagaacacaacaccctcaaccccaagcaaaaattggcactggcgaaacagctaggacttcgacctagacaagtggaggtgtggttccagaacagaagagcaaggactaagctgaagcaaaccgaggtggactgcgaagtattgaaaaggtgctgcgagaatctgacggaggaaaatagaaggttgcagaaggaggttcaggagcttagagcactgaaactttccccacagttttacatgcaaatgaccccacccacgacgctcaccatgtgcccctcttgcgagcgtgtggctgttccgtcctccgccgtcgatgctgccacgcgtcatcatcccatggcccaggcccaggcccaggcccagattcggcacaggcccattggcccgtgggcttccgcctctcccattacgcaccggccgtttgatgtcttccaccactgatcttgagggtgttttggtcattgtgaaattattattatttactattctgggcctacttgtaccaccgtgtaggtgtgtaaccccaaaaggagagaaaaattgggggaaacagaaagagtgagggagcggtcgaaacagcgtgctgtggaattgtgcggtctaaggatatggtcattagaagaagggatttggtgggtctccaatgttttgtaccagtttgacctatcatcttttgttttgttgggtatgacctatatattagttactagttaggtgttttttttttattcagtttatagtattacttaacttttccccctctaaacagagactttgtgtaaagtgcaattatctagttaaattatatagggtttggttcccgtggcctatttcactt

SEQ ID NO: 6769 - DNA, 1129 bp, Glycine max
  Clone ID: 700605377_FLI
gttttgcttaaggagcagggattcaggggcttttttcgtggctgggtgcctaccttgcttggttatagtgctcagggtgcttgcaaatttggattttacgagttctttaagaagtactattctgatattgctggcccagagtatgcaagcaagtacaagaccttgatctaccttgctggttcagcatctgctgaggttattgctgatattgctctttgcccatttgaggctgtgaaggtccgtgtccaaactcagcctggttttgcaaggggtttgtctgatgggctcccaaaatttgtcagatctgaaggaaccttagggctgtacaaggggttagtgcctctctggggacgacaaattccatacacaatgatgaagtttgcttcttttgagaccattgttgagctgatctataagcatgccatcccaacaccaaagaatgagtgcaccaaaagcctgcaacttggtgtcagttttgctggtggatatgttgctggtgtactttgtgcaattgtgtctcatcctgctgataatcttgtctcttttctgaacaatgcaaaaggagcaacagttggtgatgcggtgaagaagcttggtttgtggggtctctttacgcgtggtctccccctccgaattgttatgattggaactcttactggagcccaatggggaatatatgatgcattcaaagtcttcgtcggattgccaaccactggtggtcctgctcctgcagctgctccagctcctggttctgagctagcaaaggcatagaatgtccaatgatgacaagcaacaatgttgtacgaaacttagaaagccagtgaatagggaccataaataaatagaggactgctgaatgaagttgcttgagtggaactcaagcttggttggataatattcttttaaagttcagacattgtttccatttttcttatatttaagtattttgaatttttgggaggatggttttgctctcatccttccacttgctgaaaactttgtaggtaggaatgatataattttgcatgttaggttctctacatgccaattgtcaaacgggaacacatttgttttcttgtctgtgcataagcaccgacacatatgcaatgcctagattgagatcatttat

SEQ ID NO: 6770 - DNA, 766 bp, Zea mays
  Clone ID: 700612208_FLI
acgactgcatctctggtctcccacgcctataatcccattcccctccttcaaagccctgcggcgatttcgattcttcccttctatctccaggtatacccatcggagcagcactgacaaaaattctccagatatggcaagcaaaaggattcagaaggaactcatggatctccaaaaggacccaccgacatcatgcagtgcagggcctgctggagaggatctattccactggcaggccacaatcatgggtcctagtgacagcccctatgcaggcggggttttctttattaatatccattttcctcctgactacccctttaagcctccaaaagtgaacttccaaacaaaagtttatcacccaaacatcaactctaatgggagcatttgccttgatatcctcaaggagcaatggagccctgcactgaccatatcaaaggtcctcctctccatcagctcgctcctcaccgaccccaacccggacgacccccttgtccctgagatcgcccacatgtacaaaaaccagaggcagcgctacgaggaaactgcacgggcctggacccagaagtacgcaatgggctgattctgtcccactggacagtacttcccctgcaaagatcgtcacggtgttgtaagaatcaagttgcaccgttttcctgtcgtgtgatggtattaagagcccagatggctgtgtcaattgtactcgcttctcagaacaaagtctctctgtgtgtacagtgcttttgaagctggatgatctgagttctgtgct

SEQ ID NO: 6771 - DNA, 618 bp, Zea mays
  Clone ID: 700615454_FLI
cgcgccgccaccgccaccgcgaggatgccgttcaagaggttcgtggagatcgggcgcgtggccctggtgaactacggggaggactatggccgtctcgttgtcatcgtcgatgtggtcgaccagaacagggcacttgtggatgcccctgatatggtcaggtgccaggtgaacttcaagcggctctcacttactgacatcaagattgacatcaaacgtgtccccaagaagacagccctgatcaaggcgatggaggaagctgatgtgaagaccaagtgggagaacagctcatggggcaagaagctgattgtccagaagaggagagcatcgctcaatgactttgataggttcaaagtcatgctggcgaagattaagaggggcggtgctatcaggcaagagctcgccaagctgaagaaggcgtccacggcttaaggagtctctttccgtgaatgtcatgttagagtttttggttatgagttggatcagcaattcgattgagcgttgtcaaagccagaattaccaatatgttccctgtaaacccatttcaaactttatcaagcacgggcgtgctcaggatacttttgccatgaatgatatggaatatctatggtagcttgtggc

SEQ ID NO: 6772 - DNA, 683 bp, Zea mays
  Clone ID: 700615518_FLI
ctccctcccccccgcctccactaccccactcccaggcgccgcacaggtacgtcgccggcggcgatgacgacgcgcttcaagaagaaccgcaagaagcgcggccacgtgtccgccgggcacggccgcatcggcaagcacaggaagcatcccggaggtcgcggtaacgccggtggcatgcaccaccaccgcatcctcttcgacaagtaccatcccggctacttcggtaaggtcggcatgcgctacttccacaagctccgcaacaagttctactgccccgcggtcaacatcgagcgcctctggtcgatggtgcccgccgaaaaggcggcggaagccggcggcgacaaggccccgcagatcgacgtcacgcagttcggctacttcaaggtgctcgggaagggggtgctgccgcccaagcccatcgtcgtcaaggccaagctcatctccaaggtcgccgagaagaagatcaaggccgccggcggcgccgtcgtgctcaccgcctagttttcagtccttattcgcctcttggttttgagatctatatctgaactagcagtgctttcttgtctcacctatttgtgttaagaagacgtagtttttaaatccattgctccttcctgtttggacagtgctttcatatcaaatatttcaggtatattagagctaactgcgctatcaactgtgct

SEQ ID NO: 6773 - DNA, 652 bp, Zea mays
  Clone ID: 700618063_FLI
ggcacctgtgtggatagccttggatgagattatggatcctcagaatttaggagccattattaggtccgcctactactttggtgctcagggtgttgtgttgtgtgctaagaactctgctccattaagtggagtagtgagcaaagctagtgcaggttcactcgagttgattgagctactctcctgcagaaacatgatgcagttcttgtcttcgtcagctgaaaatggttggcgagtccttggtggtaccattgctaacaaagctgtacctctctctcaagtggaattaggggtgccaactattcttgtgatgggtagtgaaggcactggattgagacccctggttgagcgatcctgcacacatcttgtcagaatacctggaaatgttgatgtatctgttgaaggagcagatgcagatgcaggggaagaaggtgacagttctagtaatcgagatttgagatcattccttgcggtcgagagtttgaatgttagtgttgcagcaggagtgttgctttatcatctggctgcaaaagatgcctgccccataagcgataagcctagtgttattctaatgtaaggatactttgtgattcgtgcatgtcatagttattacaattgcctaatttaatttctgctaatgaattatttatttctc

SEQ ID NO: 6774 - DNA, 457 bp, Zea mays
  Clone ID: 700618088_FLI
gaccaaacgatccgggttccagcggcggcggcggcggcgaagatgatcataccggtgcgctgcttcacctgcggcaaggtgattgggaacaagtgggacctctacctcgacctcctccaggccgactactcggaaggggatgctctggatgctttggaattgttccgctactgctgcaggcgaatgctcatgacccatgttgacctcattgagaagttgctcaactacaacacactggagaagaccgagacaagttaagtgagcaagcatatcatgctctgaaagcactactgtttcgcagtatcatatatattgtaggcggtatgttgtctcttctctatcaggagaggattgttgtcagtgtgaacttgcttttgctcacgagcattcaaggactgacagtgcatgttgcatctatgccacgatgttggagattttaatcgatataataactgct

SEQ ID NO: 6775 - DNA, 281 bp, Zea mays
  Clone ID: 700620311_FLI
gctcgctctccccgtctcccgcacgcccacccgccgccgccgttcgccggtgcctttgcgggcgagcgggttgtagactacggagttcacaagatctgggagatgaacaacctcgggaaaaggtacgaagacataccagttttggggcagaggccagccgaagaatgatatactttggtcgccatttagctccggtttaaccgtttcattttcgcacaataataagctgtgtaaacttcttactctgctgctgagagctgcttcccattcattttactctg

SEQ ID NO: 6776 - DNA, 774 bp, Zea mays
  Clone ID: 700620408_FLI
cctagctcccgcaactgccgccgccactcccacgcccgcagccatgccgcccaagctcgacccgtcgcaggtggtggaggtgttcgtccgtgtgaccggcggcgaggtcggcgcagcgtcttcgctggcccccaagatcggcccgctcggtctttcccccaagaagatcggagaggacatcgccaaggagacggccaaggactggaagggcctccgcgtcaccgtcaagctcaccgtccagaaccggcaggccaaggtctccgtcgtcccctccgccgcggcgctcgtcatcaaggcgctcaaggagccagagagggaccgcaagaaggtcaagaacatcaagcacagcggcaacatcagcctcgacgacgtcatcgagatcgccaggaccatgaggcacaggtccatggccaaggaattggccggcaccgtcaaggagatcctcggtacctgcgtcagcgtcgggtgcaccgtcgacggcaaggaccccaaggacctgcagcaggagattgacgacggcgaggtggagatcccgtccgcttaagaaggattggtgtccaggactgtgttatctttgctgctgaagccattctctgcctagattttctcatatttatttgaggtgggggtggacgtggacgtggaactatggaagttatcacagcggagttttgcttagaaactttgtcatgctttaagtctgagacaatttctgtcaaattttatgaacattcctaggtacaatcgaagttaccagtgcctgagttttgttgg

SEQ ID NO: 6777 - DNA, 1246 bp, Zea mays
  Clone ID: 700578147_FLI
gctgattatgattcagatccgaatgtcattgctgaacatctctaatgagactaacgctgaagaagagaaagaagaattatcaggaatacattgtgagaagctagcaattgcttttgcaatttcaaattcccctcctttcagaagcatacggataataaagaccttaaggatgtgtagccattgtcacatctttgccaagctagtttcagaaaaatacgagcggcagatactaatcaaggattcaaattgtttgcacaagtttgaggatggaaagtgctcttgtgaaggttattggtgaatacaactaatataagtgcaccaatggtttctgttcatttatgcgtcgtccatactggctttttcatttggaagtagtagatatctttatcttctttggctgaggcttactatactttagttaagttctcgcaagcttgaatttactggtgttcaaatgctatctgctacggacagaggaagagctccccctacggtttctagcaactctaataagggaatgacaacgttcagcggtttatggaatctagatcaaccattagacaagtatgttgcaacaatataagggaatgacaacgttcagcggtttatggaatctagatcaaccattagacagcaagcacaaggtcagctgttgatgacatccacatcccggactttacccaatcagctgagcaacttggcaaaacagtcggaagtgacttggcaaagggaaacctgacggctccagtcatctttgctttgcaagatgaaccagagctaagagagatcatcgactccgagtttagtgagactgattcgtttgctgctgcgatagatcttgttcacaagagctgtggaataagaagggcacgcgagcttgcgagagagaagggtgacttggctatccaaaacctgcagtgccttccgagaagtgatttcagaagtaccgttgagagtatggtaaaatataatcttgaaaggattgagtagatagattcagttgattcctctaccagtccactagatacaggcctccagtatgggatccatgtagctccaaaacccatctttcagcctcttcgtggaaggtgaatctttggcttggagttcaaggatcagatattacctcatctacaacaccagaatttataagcacccggttctgcagaaatataaactatggatttttctttttactttcagttggcaaaagaaattgcaatggttgaagtattttaccatttat

SEQ ID NO: 6778 - DNA, 317 bp, Zea mays
  Clone ID: 700578164_FLI
ctgcagatgagaaggcattctttgatgactacaaagaggcccacctcaagctctccgaactggggtatgctgatgcttaaatggcccatatcctggagcgggatacaaactgctgcctgtatggactcgtgcgatcttttgcatttggattcagggtgaaccaccagattgtctagtgtcttctctgtaataaatttatctgttcttggtactttgtctatggttgaatcggaacccattttccgtttgcctagattcttaatttctggtgctgtatccaactgaaactagtagatctatgatcttgtggctgcagc

SEQ ID NO: 6779 - DNA, 890 bp, Zea mays
  Clone ID: 700578174_FLI
catatatcttgggctattcgacagcgaagtagaggctgcaagggcgtacgacaaggccgcgatcaaatgcaacggtagagaggccgtgacgaacttcgagcccagcacgtacgacggggagctgctgctgactgctgaagctagcgcagaagttgctgacgacgttgatctgaacttgagcatctcgcaaccggcatcgtcccagagccccaaaagagacaagaactgccttggtccgcagctccaccaccaccatgggcggccgtttgacggctccgccgttctgaagaaaaccaagatcgatgctccgtctgagctgtcgtcggcgggccgccctcaccggtcgttcctccctcatctcgtggctgccgagcatctaccgcctcggtctcaccccttcttcatcacacaccatgagagtgatgcatcaagaagagatcctagctgggcagcagcagcagcatggaaggtgaccgcagctgcacctcctcctcctaccaccaccctgttgccgttgccgctgccgtcgacgtcgtccgctgcagcatcatcaggattctccaataccgccacgacagctgccgccgccccatcggccgcctcctcccgccggttcgacccgccgccaccgtcgtcgtcctcctcctcgagccatcaccaccaccaccaccgccgctgagaatcgaagaagccacactgtaaatctgccgggaagcggctggtggcatccggcccgctcctccctccggggcgccgcaacttttttcgatcggttttgcgccgcctgggacgggttgtagttgatcgattggattcttcataactgtatttgcgtactgcttacactacgacccaagtgaaatcgaaaatggtgccttctctcgttgaat

SEQ ID NO: 6780 - DNA, 336 bp, Zea mays
  Clone ID: 700578212_FLI
gctggtctgaatgtaaaccaagtccttacaaggtgtcttttcgctggactgtgtttccatgcataccaacaggtgtcttacatgattttggcgatggtgtctcctgtcactcattctgtgggcaactgtgttaaacgtgttgtggtcattgtaacatcagtgctgttcttcaggacacctgtttctcctatcaactctctcggtactgcgattgcacttgccggagttttcctgtactcacagctcaagcgacttaagcccaagccgaagacggcttaaatagggattgtattttccatctctttgtgttaatggagttaaacacttctatgtttc

SEQ ID NO: 6781 - DNA, 872 bp, Zea mays
  Clone ID: 700578238_FLI
aggaaatcctgaatatagaggcctaccgagctttctgtttggccaatctatgggtggagcagttgcattgaaggttcacttcaagcaaccaaatgaatggaatggtgcaatactggtggcaccgatgtgcaagatagcagacgatgtggttccaccttggcccattcagcaagttctaatttttatggccaaacttctgccaaaagaaaagcttgttcctcaaaaggatttagctgagttggcattcaaagagaagaagaaacaagagcagtgttctttcaatgtgattgcctacaaggataaaccacgtttgcgaacagctctggagatgctgagaacgacacaagagatagaaaggcgtctagaagaggtttctttgcccttgatcattttgcacggtgaggctgatatggttactgacccggcggttagtaaggctctttatgagaaagccaagagccaagacaagaagctgtgcctctacaaaggtgcgtatcacgctatcttggaaggtgaaccggaccagacaatattccaagttctcgatgatatcatatcctggctcgatcagcattccacaaaagaagaaggtatatcgttgtgaatcaggcagcgctgttcgccaggattgggtgaattcctttggcaatgctgtatcgcttccggttggggatcccagattcaacggtggggattccattttttatatgaccctgtaaaattcttagttcagattattgatgtctccgtcacgtacctgaacgatgtagacgtacatatatgtaactgattaatgtgtatcaattgaccacgaattatttgggaaaacctcagttgcaaaacgccttttatttaatcacaatttctatcct

SEQ ID NO: 6782 - DNA, 619 bp, Zea mays
  Clone ID: 700578255_FLI
tttacaagtaactggaaagacaaaataaggtgcagccacaagggtggctcaagatatgaggctgaagttcgacttcgacatggaaagtactattacaaatttatagttgggggccaatggaggcattcgacttcgttgcctacagaaacagatgaacatgggaatgtcaacaatgtgatcagagttggcgacattgctcggattcgtcctgctccaagccagctacatataaaagacccatctgttgttaaggtcatagaaagggcgctaactgaggacgagcggtttttattggcgtttgcagcacgccgcatggcatttgcaatctgcccaatcagactgtccccaaagcagtagacgtgtcggtcgtccttctccgagcggaaccaggcgtcatcgaggatcagcgattttcgaagctacagaaaactcatgtatgtaacaacagaggggcttcttactgtatgtacccgttcacacaaaacctggaacgtggctaagtgtctcagcaatgggcacaatgtacacctctttgtaattccatggactgtatacctgaaatgaactccattttagactgacactcttgatataatcggaggccggctcgcaaatggcc

SEQ ID NO: 6783 - DNA, 971 bp, Zea mays
  Clone ID: 700578273_FLI
gttttttatttgaacctatccaaggtgaagctggggtagtaatcccaccagatggctatttgaaaggtgtcagagacttgtgttccaaacacaacgttttgatgattgctgatgagatccaaactggcatagctagaactggtaaaatgctggcatgtgactgggaaaacatacggcctgacatggtgattctaggcaaagcactcggtgctggagttgttccagtcagtgcagttcttgcagacagggatgtcatgctgtgtatcagaccaggggaacatggaagtacattcggtgggaatccgttagctagcgctgtggcagttgcatcactgaaagtggtcagagacgaaggtcttgttgaaagggctgcaaagttaggacaggagtttagggaccagttacagaaggtccagcagaaattccctcaaatcctaagagaagtgcgcgggaggggtttgctgaacgcagtggatctaaacaacgacgcgctatctcctgcttctgcatatgacatctgcatcaagttgaaggagagaggcattttagcgaaacccacacatgacactataatccgacttgctcctcccctcacaatcagtcctgaggagcttgcagaagcatccaaggcgcttagtgacgtgctggaacatgacttgccacagctgcagctgcagaagcagataaaaaagccagaatctgaggcagagaagccagtctgtgacagatgcggccgggacttgtacggatgaatgaagcctccgaacagagataacttcattttcgtacgcacccatctcgccccagaagaaataataacagagcagaggatgccagctgcctagctacttgggttacggtaatgttatgcgacttgttgcatcgtataccaagtatatgagctattgcaaccttggtgaatatgtcaaataaatgggcagcattcacatgctcaaatatgggcagcattc

SEQ ID NO: 6784 - DNA, 872 bp, Zea mays
  Clone ID: 700578409_FLI
gattgttctcagaaaaatctctttacctctttaatttctttccaacaatttatgcattcatttcgacgaacaaaccaactgattggcttctttatctcccacaaaagtaccggaaattggcagacagctcacctgagaaaaatgaagctcggagggagttgcttgaagtgatggcccacaggtctcatgttgacagcagcgttgagctcattggaagccttctctttggctctgaggacggtccaagggttctgaaagccgtccgtgcagctggtgagcctctggtcgatgattggagctgtctcaagtccacggtaagcctctgctgactatgcctgcagctaaagcatgaaaaagctctggttccgctttcgttctttgcatacctaataaccaacctctgcatctgcttcaggttcgtacttttgaggcgcaatgtgggtcgttggcgcagtatgggatgaagcacatgcggtccttcgcaaacatctgcaacgctggcatccttcctgaagcagtgtcgaaggtcgctgctcaggcttgcaccagcattccttccaacccctggagttctatccacaagggttttagcgcctaagaatcataaggtgaggcgaaatatttcagccgctccaccgcaacgaactggtttacattaccagtcctcaggggggtcctagttcttgaaccactattatagctgttccaccgttccagattacatagctatgcccaatttccggtgtacatattatagtcggaaagttatttggcaattgtattggtcgttgctgtatatattccctatagtttgttagcagatgtgtagtttgtaattccataaaaatgaagaacgcgttactgctatttct

SEQ ID NO: 6785 - DNA, 515 bp, Zea mays
  Clone ID: 700578414_FLI
cggaccccggcgtgctcaccgtgctcgcgcaggacggcgtcgggggcctgcaggtgaagcaccaggatgaggacggcaaaatctcctgggtggatgtgaagcccgtgcccggagcgctcgtcatcaacgtcggggacctcttgcagataatgtctaatgacgagtacacgagcgtcgagcatcgggtggtcatgaacacgcgtgaagaacccagggtttccatcggcatcttcttcagtcctgggaagagaggggactcggtgttctatgggccgctgccagagctggtctcttcagcgaacccgcccaagtacaggaacttcaccatgtccgagttttacgggaccttcttctcacgagaccttgccagcaaggctctactcgataacttcaagctgtcaccttaaagtgtcgactccagctcgaagagtttagatagactcgtgtatactatagtcatgcgtgaattgtgattgccggctggcaatgtatagaaaaatagaaattgttctgtc

SEQ ID NO: 6786 - DNA, 1364 bp, Zea mays
  Clone ID: 700578467_FLI
gccttcctctgctccaactgcgacttcgggaggcaccgggatggcggtgacccgccgctccacgaccgctgcgccgtgcagccctattccgggtgccctccggcgagcgacctcgccgcgctcctcgcggtgcccctcttcgacaagccggccgccgaagatggtgcctggtggaacatctgggaggagccccaggtgctgagtttggaggatctcatcgtgcctaccaccccttgccatggattcgaacccctcctaacgccaccctcgcccaagaaccggagcatctcgccggaccggaaggtgaacgaggagatccttcggcagctgggggagctcgcagagtctgatggcggtatgcaggcatcagcaggtcgtgaggaggcagagcaagctggtggagatcagttcccttcctgggcgtcaccacagtatgccactggacatggcaattttggaacagaggacaaccatgagaatggcagatggaacaacagtgaatatcatgatctaaatgatgcatgtaagctcgaggtcacatatgatcaggctccagtcaactcggctgaaccgtgcttgtcatcatttgctccactgtcggaaatctgccccagcatgagcaatggtagcagtaaggaagataaccaccaggctaatcctggcattggcatgccaatgcaaggtctacccaaaaggagtggatttgatgttgtcccatgccctgaccgtgactcggtcatttcgcgctataaagcgaagaggaagacaagaaggtttgacaggcaggtccggtatgagtcgcgcaaagttcgtgctgatggcaggctcaggatcaaggggcgttttgcaaaggcaaaccagacatgaacctaaatctgaagttatgcactatcctaagcatctttcctcaagaaatatgctaaggccctgtttcaatctcgcgagataaactttagcagcttttttttaagctacttttagccgtttataatctaaacaggagagctaatggtggtaattgaagctaaactttagcacttcaattcatatagctaaagtttagcaggaagctaaagtttatcccgtgagattgaaacggggcctaagtatcttccaacacgaagaagaaaactgatcaggggcgatgataatgcaaaaatgtgccagaattttgtttgccttcagttcaatagctgataaccatagctccatatacagttgaattgaatgacgtgtgtatatattgctgtcatgtgactagtagctacattgctttgagagatcaaaacctgtatatgcacctacacactatgtgattttgccatgacggacataataatagaaccactgcgtttgattgatgt

SEQ ID NO: 6787 - DNA, 1062 bp, Zea mays
  Clone ID: 700578546_FLI
cccggggcacgagatcgtgggcgtggtgaccggcgtcggcggcggcgtcacgcggttcaaggccggcgacacggtcggcgtgggctacttcgtggggtcctgccgctcctgcgacagctgcggcaagggggacgacaactactgcgcggggatcgtgctcacctccaacggcgtcgaccacgcgcacggcggcgcgcccaccagggggggattctccgacgtcctggtcgcgagcgagcactacgtggtccgcgtccccgacggcctggcgctggaccgcaccgcgccgctgctctgcgccggcgtcaccgtgtacagccccatgatgcgccacggcctcaacgagcccggcaagcacctcggcgtcgtcggcctcggcggcctcggccacgtcgccgtcaagttcggcaaggccttcgggatgaaggtcaccgtcatcagcacgtccgccagcaagcgccaggaggccatcgagaacctcggcgcggacgagttcctcatcagccgggacgaggaccagatgaaggcggcgacggggaccatggacggcatcatcgacacggtgtcggcgtggcacccgatcacgccgctgctggcgctgctgaagccgctggggcagatggtggtcgtgggcgcgccgagcaagccgctcgagctgccggcctacgccatcgtgccgggcgggaagggcgtggctgggaacaatgtcggcagcgtcagggactgccaggccatgctcgagttcgcggggaagcacggcatcggggccgaggtcgaggtcatcaagatggactacgtcaacacggccatggagcggctcgagaagaacgacgtccgctaccgcttcgtcatcgacgtcgccggcagcctcggctctgccgcctaggcatggctgcaaaggtttcaatcagagcccagccgcaataatttgttagctaccgaatgaatgatggtctacgcttgttgatgagttggtgctttgtcgtggttttgtggatgtaataattcgatgtacaaataaaaaaaggggagacaaggtgcttgttcccttggtttggtgac

SEQ ID NO: 6788 - DNA, 680 bp, Zea mays
  Clone ID: 700578555_FLI
ggcgctggccagcgacgacgtgctcaggacgctgagggagatgcaggcgcgctcggccatgggcggcttcgagttcatggcgcctcccacatccgactactacgacggcgtgaggcggcgcgccggggacgtgctcacggaagcacagattaaggagtgccaggagctaggggtgctggtggacagggatgaccagggcgtgctgctccaaatcttcaccaagccagtgggggacaggccaacgctgttcttggaaatcatccaaaggatcgggtgcatggagaaggatgagaaggggcaagaataccagaagggtggctgcggcgggttcggcaagggaaacttctcgcagctgttcaagtccatcgaggattatgagaagtcccttgaagccaagcaagctgctgcagcagctgcagctcagggatcctaggacagagcttggagacgagcaactgctgtggcactttgtatcatggaacagaaataatgaagcgtgttctttgtgacacttgacatgcaaatgtttgtgttctgtaaccgttgaatatatgggacgatgctatctatgatggtgtaatagatggtagagagggtacaaccctgatactaatgatgcactattgcatctctgttgtacaagtttgcatgaaaataacgacgagggtcagtatgaggcc

SEQ ID NO: 6789 - DNA, 289 bp, Zea mays
  Clone ID: 700578570_FLI
ggcggggaaagcggatcgcattctgttgattctaatcactagctgtccatgttctattatgtaataaggcctagctgcatactcagttatttaaattccaagcttagttagctgtagaaagaagaacacctggtgtaaaggtctgaaccgtgctgctgtcacggcgtggcctagcgacattctcgccacgctccgcatgtaacgttctcgcgcaaaaggcgggcacgacgcagcgtgagcgggtgtggcggggaaagcggatcgcattctgttgtgaacatcaaaaaag

SEQ ID NO: 6790 - DNA, 950 bp, Zea mays
  Clone ID: 700578571_FLI
gatatcgtgatgcactcggctaccaaatttatagcgggacatagtgatcttatggctggaattcttgcagtgaagggtgagagtttggctaaagaggtagggtttctgcaaaatgctgaagggtcgggtctggcaccttttgactgctggctttgcttgaggggaatcaaaaccatggctctgcgggtggagaaacaacaggctaatgcccagaagattgctgaattcctggcgtctcacccgagggtcaagcaagtaaactacgctgggcttcctgaccatcctgggcgagctttacactattcccaggcaaagggagcgggctctgttctcagttttctcaccggctcactggccctctcaaagcacgtcgtggagaccaccaagtacttcagcgtaacagtcagcttcgggagcgtgaagtccctcatcagcctgccgtgcttcatgtcccacgcatcaatccctgcctcggtccgcgaggagcgtggcctaaccgacgacctcgtccggatatcggtcggcatcgaggatgtcgaggacctcatcgccgatctggaccgcgcgctcagaactggcccggtgtagacatcgccgatccttaggtcatgtcaagctatcttttgatgattcattggttgactgcttgcgtgatgataataatgggaatgttgcttggatacgccgctgctacgccttctcgtactagtccgctaggatttgttcaccttgggtgaaaggctgcccgctgtcgagctgtcggcttgtgggatgtggccaccggcggcagcagtgccgcggtgagcaaacatgcctgtggtttcttccgtgcatgccctgaattctctatcgttagcacttgtacatcccaatttgtgtgtaggaaaacgcgaacgccacgcattttaacatatctatcactttttactaacagtgattattatcactag

SEQ ID NO: 6791 - DNA, 1128 bp, Zea mays
  Clone ID: 700578607_FLI
gttctgtccatgatcaagatctatagctggaggaagtgggaaaccttagcaggtccaattgctgctgaggaattgaaagctaggagaaccaaggtgatgagaaggcagtcaacctttgtttttaacaatgcttctcatccatggagcaaaaataaaatacttatttggatgctttgctttttgcgccaattcaagggctccataataaggtcagactatttggcactgaggttgggctttgtcacatatcacaagctaccacattcatatgacttccataaatacatggtacggagcatggaagattattacaatgggactattggtatcagttggccactttgggcatatgtgattgtctgcgtattaatcaatgttcatggtatctctactacttattaaggctcagcacaagcagcacgccgtgccgctccaaccgtcttgcttccccgcttagcttcccgccgcgccatggcgtcgaccaaggctcccggcgagaagcaccactccatcgacacgcagctccatcagctggtcccaggcaaggtctccgaggacgacaagctcatcgagtacgatgcgctgctcattgatcgcttcctcaacatcctccaggacctccatgggcccagccttcgcgaatttgtccaggagtgctacgaggtctcggccgactacgagggcaaaggagacacgacgaagctgggcgagctcagcgccaagctcatggggctggcccccgtcgacgccatcctcgtggcgagctccatcctgcacatgctcaacctcgccaacctctccgaggaggtgcagatcacgcaccgctgccgcaacagcaagctcaagaaaggtggcttcgccgacgagggctcagccaccaccgagtccgacatcgaggagacgctcaagcgcctcgtgtccgaggtcggcaagtccctcgaggaggtgttcgaggcgctcaagaaccagatagatccacatttatgcttatgtttattttatattttttgatttgaatatctaaactatgatgttctatgaaagatcattcttgaatttttgcctttaaattttcttgttaaatcttgtatactacactattaaatgagtgctcgtgcgtcacagtcc

SEQ ID NO: 6792 - DNA, 1306 bp, Zea mays
  Clone ID: 700578627_FLI
tcggctcccaattattgtggtgaatttgataatgctggcgcaatgatgagcgttgacgaaactttgatgtgttccttccaaattctgaaacctgctgagagaaaacaaatttatggggccaaacaaaatgtgagatagtgaacccattttgcttccagcagctctgaggtcagttaatcctgtttcaatattttgtcctgctgatttacttgctccacacaattgttgaatcacatcgtttatgcatttgtgggttgtgctacatatatttatgagagaattctacgtgtttaaagaaaaaatgctctcccatctctaccacagaagtgtctttccctctggtaccccaattcatttttttacatctactaccactgttgtctgtttttgctaacttgggcattaactgtgacaggaaaagaccaatttaacccgtgtgctctagtttcctgctagatttgtttccctttgacgccacacactggcaaagcatcgctgctatttttctctgtagtacagtccaacatggttgaaagcaactgctacaaatcaagagtactagagattagcgctcctactttaccagaagctcacaatgtcataaagtttcttggaacaacattagcaggacaagcttaattttctttgatccttcaccccgattcccaaagaccaccataatttgcagactactactcctttagtttactgattacatctttaatgtactgattacaactcctctgtatcaaaacaacacacaagatcttataagaaaccgcagtggtgcagtctgcagctaatctagtggcatccaaaacaaacctaaaaagcagtacttgttgtagcactgatgatcagaaatcaagcagatgccagtgccaccttgctgctgtcgggcctgtagaccacaggtaaacagataccaggcgcggtcggggtggcgcctggtggcatcacagtgctgggggggggggagcagttttggtgcagctccatcggactctatgctgagtggtgtccgagggaagcgaaatctaacagcacatgggcaacttggactttgaattatggtaccagagcacatgggcaacttggtctttgaattatggtaccagagaaaaacactactgtagtagagatgggagagcaaccttttttatgctacacatggaattctctctatgttgtattgtttgccaaatttgcagtttgtaatatcatagatttatgatttacttgctctagtgcaatgttgtagcgacaagtcaatttattctgcaaggaatgacaagtacatatgcac

SEQ ID NO: 6793 - DNA, 1076 bp, Zea mays
  Clone ID: 700578633_FLI
caaacagtgtccatgaacaaatgcagcgagtccaacctgctaacggtgcacaatcttcaaatgttggcaagatcaatcagatggaacagtctttcattctaagcggtgaaaatgaaaaaccatttacatacatatacagcatgcttattgactggggtaggcaacaggacacaaaagcctacattcaaggaaaaatcaagggtctgatcacttctgtaaaaaaatttcaatataaacaacgcaccaagtacgagctttatgtatatatagatgatgggagtttcatttcagaggccttcattgacagtgatattgtgaataacatgcttggcctttctcctggagaggttactgctgcacttgctggtgaattagagtttgcatcacccagtgaagtgaaagaaactttgaaaggatttcagaagtttttggtgaagtttgagggtatgatgcttatcgagttaaacaagaactctcctgttcctgttgttcgtgagttaaatgaaggttgctcaagttctactgcatggcttctgctcggaaggctgaaaacaatttcttctcagaagaagaccatccaaactcaggatattatggacaccactccatgattgtttcgatcctctaaaccccagcgggtacgcagatccgcaatgattttttgttgagccaggccattggccaaatgcatttgagaagtatggttaattaaattagctttacgatacatatatctgttggcttgtaaatcttagggctagtttggaagccacaaaaccggagaggattggagaggttaaaatccctttcttatttaaattgaataaggcctagtttggaaggctaaaacccggagaggattgaagggttaaaatccctttcttattcaattttgaataaggaggggattttagcccctctatccccttccgggtttaaggttcccaaactagcactaaaaaggggattttagcccctctaatcccctccgatttttgaatcccaaactaacccaactaacccttaatgtaattatcgttcatgtgtcctcatgccttattatggtctggaagtgc

SEQ ID NO: 6794 - DNA, 1298 bp, Zea mays
  Clone ID: 700578643_FLI
acccaatccaaaccagacaagcaaggaatcccccgatggctcatcgcgttctcctcctcctctctctcgcgtcggccgccgcggttgccgccgccgtcgacgcggaggacccgctgatccggcaggtggttcccggtggatatgacaacgatctggagctgaacgcggagtcccacttcctgagcttcgtgcagcggttcggcaagtcctacaaggacgccgacgagcacggcgtcactaagttctccgacctcggcctccgcaagtcccggcgcgctctcctcagagaactcggggagtcggcgcacgaggcgcccgtgctccccaccgatggtctccccgacgatttcgactggagggaccacggcgccgtcggccccgtcaagaaccagggttcgtgcgggtcgtgctggtcgttcagcgcgtctggagcgctggagggtgcgcactacctcgcaactggcaagctggaggtgctttcggagcagcagttcgtcgactgtgaccacgagtgtgattcatcggagcctgattcatgtgattcgggttgcaatggtgggctaatgacgacggcattcagttatctccagaaggccggtggccttgagagtgagaaggattacccttacactgggagtgatggcaaatgcaagtttgacaagtccaagattgttgcttcagttcagaacttcagtgttgtgtctgtggacgaggctcaaatttctgctaacctcatcaaacatgggccattggcaatcggcatcaatgctgcctacatgcagacatacatcggaggcgtgtcatgcccatacatctgtggcaggcaccttgaccatggtgttctccttgttggatatggtgcttctggtttcgcccccattcgcctgaaggacaagccttactggatcatcaagaactcgtggggcgagaactggggggagaacggatactacaagatatgcaggggttccaacgttcgcaacaagtgcggcgtcgattccatggtctctaccgtgtccgcagtccacgcctcgaaggagtagactctggtcagcggtgataatcgtgattccatatattgtagaactataatccctgctagtaatccatttgtgctgtttatgtatcgaaggcagcaaagatgtgtgaagcggcaatgggatgcttgctgtaaggtaatatgtttggcttgctaggcatgctacacgctatttggatgtagcaacgttatcaccagctgtatacgctttttaatcgacaacatttgaataatatgtacataacattatgttgtgctc

SEQ ID NO: 6795 - DNA, 854 bp, Zea mays
  Clone ID: 700578660_FLI
ctttccagcccccagttacgaacaaacccctcatggtcatggcgaagagcgaaggcccgtccgctgccgtgggcagcgaaggcccgtccgccgccgcggggctccgcccacggcagcggggcgccttccttctgggggagccaacctgggaggacaccggcagcgggcggtggcggtgcgcggagacggggcacgagctgccagagcgggagaaggaggcctacgcgcggtcccgcgcctgccgcctcgcgctcattgaccacgccgtcgcgcacaagaagccgccgctcaacgccttcaagccccaccccgagcacaaatcgaagctggtatgcaagattacaggggacatggttcacaagtcggaggatcacatatggaagcacatcaaggggaagaaatttcttaacaagctagaaaaactagaggaccagatgacttctggtgagatggctgatggagaatctgtgaagtcaaatgaagaagtggcgaagaagagatggatggttcagatgatcgtaatttctgggtgcctcctgtcgagggtcaaatgaagaagtggcaaagaagagcaagccaagcaagaagtacaagaagaaaactaatgtttccagtccattgccaggagaacctaaaccagagatggatggttcagatgatcgcaatttctgggtgcctcctgtcgagggtcgctgggatgatgatgacgggaaaaaaagatgggagttgtcaccgggaaagcacacattagcaaagaatgaaggtggttctagtatgcgtgaatttgtcagactaaactgcatacgccatccctgatgctagtaataatcaatagttcatatcacatttgctat

SEQ ID NO: 6796 - DNA, 1073 bp, Zea mays
  Clone ID: 700578759_FLI
cgccgctgcttccaacttccgttgcgcacgagcgaaacatccggagctagcaagggaggaggaggaggaggcgatggcggggggcggggataaggtggactacgtcttcaaggtggtgctcatcggcgactccgctgtcggcaagtcgcagatccttgcgcgcttcgcccgcaacgagtttagcctcgactcgaaggccaccattggggtcgagttccagactcggacgctcgtcatcgaacacaagtccgtcaaggcgcagatctgggacaccgccgggcaggagaggtatagagctgtcacaagtgcctactacagaggtgctttgggagctctgctagtctatgatatcacaaaacgccagagcttcgaccacatacctcgctggctggaagagcttcggggccatgctgacaaaaacattgtgatcatgctggttggcaacaagagcgacctcgaagacgagcgtgccgtaagcaccgaggacgccaaggagtttgccgagaaggagaacctcttcttccttgagacctccgcgctgcaggcgaccaatgtagaaaatgccttccagaccgtcttgacagagatctttaagatccacagcaagaagaacatggcagcggacccaagggccaatggggccgcaccatcgctggcagggaagaaggtcatcgtcccaggcccagctcaggagatccctaagagcaagtgctgcagttccatgtgacatgttgcctgaattttttttgggtttgttcgtgtccgagggaccgatatcgtagtttagatttgtcacccgtcttcaagatgacgaggatagggagcgagaagaaaacatatgtttgcatagactttgttggattttacaaaaatagcagtgtaagcacattattttttccccgatgccttgaaacccttgtgtacagtagagatggatcctaaacatcttaattacaggataaatttaatatttgaaatagatatgtataaaatatgatgttaatatttagttatgctgttaaacatattatggaaaaacaagactaaatttttgtattttttttgcattaatc

SEQ ID NO: 6797 - DNA, 262 bp, Zea mays
  Clone ID: 700578768_FLI
ccctgagcaagatagacgggaatgaacttccccacatcatccctgctgtacccaaaggtcatctgcgtcaggtcgtggtgatcaacagtattattacagagccatgctatgtgaacattactagtagcagtgctcataaaagctacaatcccatgtcctttttttccccagtcatgtaaaacttccaaactgctccatggttcaaaactctgttcttcaatacatcatcaattatcgattatatacgtggcaagtttttttc

SEQ ID NO: 6798 - DNA, 993 bp, Zea mays
  Clone ID: 700578788_FLI
ggatgaatgggttgcaaatgaccgcttgttggaattgacggaggaaaacgtgcgcaaacaacaagagcttgataagaatcaggtagttgacaaaacaatgaagtctggacggtcaacacagcataaaccaaaagtctccaatgcggatgcaaagctgataaagatgacactaagagtctcatttcagtgaaggggaagaaacgtaaaagtcagcttgggactgagtttcctttgccactgaagaagcaacttgtggatgattgggagtttgttacgcagatgggtaagcttgtgaagctaccacgatcacctactgttgatgatattctaaagaagtacttggaacaccgggcaaagaaggatggcaagataaatgactcctatgctgagattctgaaaggattacgctgctactttgataaagcattgcctgcaatgcttttatataagaaagagcgagatcagtatgctgaagaagttaaaggtgatgtctcaccatcaactgtatatggagctgagcatctattgcgcctttttgtaaaattgccagagctacttgcttctgtcaatatggaggaagatgcgttgaacaagctacagctgaaactgctggacgttctcaagtttcttcagaagaatcagatcaccttctttacctctgcgtacgatggttcttgtaaaggtgcagatgaggataaaaccaaatgattgcatgtgaacgttttatatcatgtaacatctttcgatggacttgtctggcactattgttgatatgaatgtcgcttaggacaacaatcggtttatgtaggatagatgctgcagattcctgaaagacggtacttgaactgcccggagcatgttgtattttcttaagatgctggaactaagacggcttagttgaattttcactatcaagtgagtctcggtcttgccccaaaaagaatgttttgtacctcctctgtcccaatttatacgacaatttataattcgtat

SEQ ID NO: 6799 - DNA, 863 bp, Zea mays
  Clone ID: 700578877_FLI
gacaactctactgaaacagcgactcatgacgatcctcagacgatgatgatgctgagcaagtcgtgctcgctcaccgacctcctcgacagcatcgactacgcggcgctctcctcgcagatgctcctcctcgacgcgccccacccccacgccgctgacccgccgccacacatggtctacccaccggcggcggcggcgacgcaccagcaagcaataatagctaataacaccaacagtaatgacgactactatgacgacgacaacttgttgccgactgctgctgatactgcggtagacgcggcggcggcggcggcggtgctactcagctcgtcgcctgcagacaccaacggtgtgaacaagaggaagcgagtgacggccgtggactactacggcgccgctgaaccgccgaccttcttccaccacctcgatgatggcggcaacagcttcttcagtaccaagaagctcaagccgccgccgccaagtgattcgaggcatggcggccatttcggcaccgccacagcgaccagctaccgcgacagccagcaggagctcgtgcacagcccgagtagcagtaacagtaacagtagcggcggcttcttccatcagtacgggtacgggtacggctacagcagcaacaacccgttcttgaacttgaaccagcagcagcagctgctgctcaacagccacatcgggatgcagtagagatcgagagagagacagatgatatatcattggaaggatctgcagcacgcgtgcagattaattggagcgagttctgtcttgtttgcttccattatatatgttcatgtaaaattagtttaaattgtaaattagtgttctgaaattcatgtgcctgctcatcgatc

SEQ ID NO: 6800 - DNA, 491 bp, Zea mays
  Clone ID: 700578906_FLI
tcgagaagtttgcagctggcactgaggcgattgccaagaagctagctgagcttacaaccacgaagggtgtcactaccatcatcggcggcggcgactctgttgctgctgtcgagaaggctgggctggccgacaagatgagccacatttcgaccggcggcggtgcgagcttggaactcttggaaggcaagactctacctggtgtccttgccctcgatgacgcctagatccgctgctgctgctgctactcaggttctgccagctttgcgtgtcatcttgtttcggaccttggtgtagcactgcaaggctaaggtttactcctccgcacatggacttttggggataggcttgccaccgtgttttgctagatgagtcgtggaataagcttttacttcctcgctgctgtgggtgaagtgactggaattcggaaatttggaactaacaaaaccccccgtggatttgtatgatatgttttgttcgacagtttgcgtccc

SEQ ID NO: 6801 - DNA, 726 bp, Zea mays
  Clone ID: 700578908_FLI
ggcaggactcgcttcaagctcctcatctcgcgcaggggggtcgcctgagatcacagagacaatggtgaaggcagttgctgtcctcgccggcactgatgtcaagggcaccatcttcttttcacaggagggggatggtccgaccaccgtgactggaagtatctctggcctcaagccagggctccatgggttccatgtgcacgcgcttggcgacaccaccaacggctgcatgtcgactgggccacacttcaatcctgttggcaaggagcatggcgcaccggaagatgaggaccgccatgccggtgatcttgggaatgtgacagcgggagaagatggtgttgttaatgtcaatattactgacagccagatacctcttgctggaccccactcgatcattggccgagctgttgttgtccatgctgatccggatgatcttggcaaaggtggacatgagcttagcaagagcacgggaaatgctggcggacgtgttgcctgtggtatcattgggctccaaggctaaagcagttaacctccgaggcaaacaccatagaaggtcgaagcgagcacctcaggatgttgctgttccatttcccctgtattggcaacacaatttgagtactccaaataagcgcctgatccatgatcagagagcactattcatgccattttgtatatgaacaatgttgcgcacctgcttaagtgtctgttccaacaaatgcttaagaagac

SEQ ID NO: 6802 - DNA, 759 bp, Zea mays
  Clone ID: 700578922_FLI
ctgctgcctgcctgcctgcctgcctgcaaaaaggagtttgtcatggcgtctaagcgcatcctcaaggagctgaaggacctgcagaaggacccccccacatcatgcagtgcaggtcctgctggtgaggacatgtttcattggcaagcaacaattatgggaccacctgacagtccctatgctggtggtgtttttttagtgaacattcatttcccgccagattaccccttcaaacctccaaaggtttctttcaagacaaaggtcttccatcctaatatcaacagcaatggaagtatatgccttgacattctcaaagagcagtggagccctgctttgacaatttctaaggtcctgctctccatctgctccctgctgaccgaccccaacccggacgaccctcttgtcccggagattgcccacatgtacaagacggaccggccgaagtacgagtcgacggcccgcagctggacgcagaagtacgcgatgggctgacgaacgctttcctgctcgtccacccgactggcgtctcaagaaagtcgttcctgggcgccattgttcccttggatttgttgttggtcgtcgtgtgtatccctgatccatctaggatcatcgtattgtattgtagtgtatgtatatcgtcggcctaccatcgttgccattcaccatagtgaggtggttggacatgcttcgcctatatgcacctgtgcttgccgtccttcgggtcggtgctctttggttaatgttcatcgaagacgttgattt

SEQ ID NO: 6803 - DNA, 610 bp, Zea mays
  Clone ID: 700578933_FLI
ctggcatccgcagagagcttgttccgtccaggcaaccaaaaagcaagttgccccgccgcgcagaggaagaagagagcagaggaggatggctcgtacgaagcagaccgcccgcaagtccacgggaggcaaggccccccgcaagcagctcgccaccaaggcggcgaggaagtcggcgccgacgaccggcggcgtgaagaagccccacaggtacaggcccggaaccgtggcgctgcgcgagatccgcaagtaccagaagagcacggagctgctgatccgcaagctgcccttccagcgcctggtgcgcgagatcgcgcaggacttcaagacagacctccggttccagagccacgccgtgctggcgctccaggaggccgccgaggcctacctcgtcggtctcttcgaggacaccaacctctgcgccatccacgctaagcgcgtcaccatcatgcccaaggacatccagctcgcccgccgcatccgtggcgagcgcgcgtagccatcatctccggggatctgatgaatgtctagttaccaaacaaataggctgtattagcgtcgttgttctgtattcgttattttggattcggttgcagtgaaaaacagctttact

SEQ ID NO: 6804 - DNA, 660 bp, Zea mays
  Clone ID: 700578946_FLI
gtcacgaacaaagcgaattctgaagcccacttcagattgaccgggcctgagatctggaaggacacggcaggcaaggtggatgtattcgtagccggttcaggcacaggaggcactgtttctggcgtcgggaagtatctgaagatgcaaaagccaggcgtcaagatcatctgcgttgagcctgcagaaagcccagtgatttcaggtggcgcgcctggcaagcataaaatccagggagtaggcccagggtttctacctgaagttctggacacctcggtcatcgacgagaccgtcaccgtgagcaccgaggaggccatggcgaatgcgaggaggctggccagggaagagggcctgctcgtgggcatttcttccggagcaaacctggcagcttgtttgaaggtcgcttcgagacaggagaacaagggcaagatgatcgtcactgtgttcccaagtggcggcgagagatacatcaactccgacctctttgcagatgtgcgagaggagtgcattgccatgacattttgatcttccttttttcttttggacactttggtctgaatggtgtcagcattctccacaccacacagacatatttccaggacatggtgttgtaaatttagagaaataagtgacatgctttctacatatttaaatagattaaat

SEQ ID NO: 6805 - DNA, 862 bp, Zea mays
  Clone ID: 700578953_FLI
tgcttgctccaagatttacccctccctcggtgcctgatacctctatcctccgcatccgtctctaaagacaaggcagtcgtcaagaaagggagtttgaccaagagcctgtggtgtccgtcggctgccatccatggcaggggaggccaagaagctcttcttcgcatccgaggttactctccacgcctccaggaaggactgctgggtcgtcatcggcggcaaggtgtatgatgtgaccaagttcttggaggaccaccctgggggagaggatgtgcttctccatgcatcagcctctggggatgccacggaagcattcgaagaggtgggacacagcacttcagccgtcagcatgatggacagctacttgattggaagcatcaaggactatgttcgtccgagtgcatcgaaggccacagatccttggagcgctgatgttctaccaaattccaggacgatgcaagggaacaaagtcactcctaatccaaataccttcctggactttcttctcccattgtttgtgcttggcctggcatttgcagcttggtattacctaaccttcatctccaagaaccattaaatacagtgaagctgggaattatttctcactattatactgttagggttatatcagagaaaacattaaaagaaggcaaaccttgtattatggtattttgcacttgaaggttgctagctagggtttccttggatgtcctttcttacatgtaacaggcatttcagtacgcagatgtatgaatgaaacaatttatccttatttttccaatttgtgcttcagattcattttcttatatttttttattttttagtaaagatcccaatgatttagtacaatttgattgtacatatc

SEQ ID NO: 6806 - DNA, 674 bp, Zea mays
  Clone ID: 700578967_FLI
ggggtttgattcccaacgtacgactccagcccgacgtggtacctcgaccctgcctgagatgtggtgaaggatggattcaacggggtagttctgaattcgtttgatctcaagctatttcgttcgcctgtttgttttatttcgttcgatctcaagctattcggacggtgctcgatctgaattcccaagtacaggagcgtcaaacgattcactcccaccgaatttgttttgtgtcctcgtagacctgtgcataaattgtagtaccccatttcgacggcagtcaccattctccacaccttgtcgtctgcataagccggacgattgttgggtggtgggaatggaaccgcgagaagcatagaagacatttgatcgtcggcgcgtctatgcgatagtcctgccattgcaaacatactacagatgattaactgacaaggtgatgatgaacgagcagcggccatggaggcaacataggacagggctcggcgacagcgactttctcttctggcatggttccgctgagatgaagtggttcaatggcttggtgttcatctacatttattataccattttttgcaagctatgtggagagccaaattgtacagcaaatgtgaagaaatatatgatcggtccttcaaaacctatgagtattacaatgaagagaatttgtgactgcgaac

SEQ ID NO: 6807 - DNA, 398 bp, Zea mays
  Clone ID: 700578987_FLI
gttggcctcaaggaggacgacctcgagcggatcgtccagcgagcgataataagctagggcgtgttcggctggctacaagccgacactgttgcagctgtttggattgctgcagctgcaatccatagagagaaaaatactgtagaagccgcagccgcagccggattgcagccgcagcaagccgcagcgaacaagctgctagctaggagtagtcgtcaactcgtcatgtagtaccacacagactcagttttcgtacgtgtgccaagacaaaactacaaaaggacatgactatgcgtacgcatcgatcggcacagtggcggatctacaccctctgtggctggggcttgatccatgtatctttatataagtctctatttaatacgatataaaatagttaagat

SEQ ID NO: 6808 - DNA, 770 bp, Zea mays
  Clone ID: 700579004_FLI
aagaaattcatctcgactgcaagaagtgaaggtgccacaattctgtatggaggtggccgaccacagcatctcagaagagggttctttcttgaacctacaattataacagatgttagtacgtcaatgcaaatttggcaagaggaagtctttggaccagttatctgtgttaaggagtttaggacagagagtgaagctgtggaacttgcaaatgatactcactatggtttagctggtgccgtgatctccaatgatcaagagaggtgtgagcgcatttcaaaggctcttcactctggtattatttggataaattgctcgcaaccatgcttcgtccaagctccttggggagggaacaagcggagcggttttggtcgggagctcggagaatggggtcttgataactacctgacagttaagcaagtcaccaagtattgctcggatgaaccgtggggatggtaccagcctccatctaagctgtgaaggggcattcactccagggaatgtaatgcatcattaactgacagcatcagtcctgttaatggacaggagctcgtgtacagtacagagctcgtaaaaaaagctctttgatggtaaagttgcttgctgctatcactactccagaccagaattcaggactggagagtacgatgtcatgagttgtactacttgttagtctgcactctttatcattcgaagtttggcagtggtgtgtagttgcacttggaagattgcaataataataaagataattggataattgatccattttaatc

SEQ ID NO: 6809 - DNA, 860 bp, Zea mays
  Clone ID: 700579015_FLI
atcacactccaccacgattgccaagtgtcaatctcgacacggcagcaggagcctttgggccgtcgttacacgcacctatccatctcatctccgcggcacacgacacgatcgtggttggtgttggttacacgcgcctatatcgccgccagccatgtcgtactacggcgaccggcgcgcggagtcgtcgatcgtggaggcgttcacgctgtcgccgctgccgtacccggtgatcctggtgctgctgatggtgacgctgctgctgggcgcctcgtggttcttcacgtacgacgacttcatcgaggaggcgtcgcagcagctgagctgggcgctgctgggcgtgcccatcgcgctcgtcctcctcatccgctggatctcctccgtcgactccttcgagggctacctgggcttctacccgacggagagccgctggaagggccgctacgagcggggccccgccgagggcagctcgccctggggcgtcgccttgctcgtcctcctcctcctcgtgctcgccagcttccactccaccatccacgacatgtggggcccgtgaacggatgtagtgattgtagtcctgctcctgttcggttccacgcgcgcacgtatgcgcttgtgctactggttgctgcttgatcgatcgatggatcgatgattccatgtacatatttgttagggggatgctgcggctaggctattagctgcaggctatagagtttgagggtgatatacttatcagtttgctgcctgtaagactggttttggttttgctataatcgtgatatattccgatgtacagtatacagtaccctctttgctttggtttccctgtcttggaattgactggtggaatggaaccgtct

SEQ ID NO: 6810 - DNA, 1168 bp, Zea mays
  Clone ID: 700579019_FLI
ctctggtcccatactacttggaagaagaggctaactggaaccttgactttgcaaacatccgacaagcagtggccgaggcacgttcgaagggaatcactgttcgagcgacggtgattataaatccaggaaatcccactggccagtgccttagtgaagcaaatataagggaacttgtgcgatattgctaccatgaaaacttagttctgcttgcagacgaagtgtatcagcagaacgtttatcaagatgagcgcccatttataagcgcaagaaaggttatgttcgacatgggtccgccaataagcagggaggttcagcttgtttctttccacactgtgtccaaagggtactggggagagtgtggacaacgtggtggatacttcgaaatgacaaatcttcctccaaagacagtagatgagatctacaaggttgcatcaatagtactgagtccgaatgttcccgggcaaatctttatgggagtgatggttaaccctcctaaacctggagatatctcatacccgaagttcactgccgaaagcaagtccatcctcgaatctttgaggaggagagcgcgcatgatgacagacggtttcaacagctgccgaaatgtggtgtgcaatttcacagaaggagctatgtactctttcccccaaatacagctgccagcaagagccatcgaggcggcaaagagagccggcaaagcagcagacgttttctactgcctcaagctcctggaggcaacggggatttccactgttccgggatctggttttgggcagaaggaaggggtgttccaccttcggacaactatccttccagccgaggaagacttccctaccatcatgtcgagcttcaagaagttcaacgactcattcatggagcaatacgagggctactccaggatgtgatgtcaacatgaaaagaagcgaccgcgccaccattttgcttctactgcccatactagtagaacagtgatcggtgcactatgtgatatttgctgctgcaactgcaactgcaactgcggccttagtctgctatgtatgtgttgcctgttctgaaagagtaaagaagcgaccgataatattgtatcctgagccgcgcggcagtccaaaacagttatcaagagaaagggaagcatcagcagcgccgccgccgctagagcccttgacag

SEQ ID NO: 6811 - DNA, 687 bp, Zea mays
  Clone ID: 700579124_FLI
atagtttcttctactacacgacgacaaacatggggaagcctgcgaagatcggagagtggggtggatacgccggcgatcgtcgggatctgagggctactccggaccggctgatcgaggtgaaggtcacggcggacaacagcagctgcatccgctccatctccttcatctacatcggagccgatggcaaaccgtacgaggaggggccatggggtttcggccatgctggcacggagtacaagattgatctgtgcaggttcgacgagagcttgacggagatctccgggaccacgggcccagcctacaacattgacaatctggtcaagtctctcaaattcgtcaccaacaaacgcgcttacggaccgtacggcagggacgagggcaccccgttccgtgtcaaggtgatgaacaacggccacgtcgctggcttctttggccgctctggagattgcctggacgcgatcgggctctacgtgaaccccaactaataactaaaacgatggatcggatcatctgcatgcatgcatatgcagtatgcatgctgcttgcctgcctgtaacgaatatgaatgcataaaataacgcccctgctgctcccatgcatcagcagtgtgtaccactatgttatatatatatatactgtatttcgctaccgaataaaaacataaataaaagatccagtgtcgtctgc

SEQ ID NO: 6812 - DNA, 1085 bp, Zea mays
  Clone ID: 700579166_FLI
gaaaaatatagcaagagccatcttgttttcaatgatgatatccagggcacagcatcagtggtccttgcaggtttgttagcagcactcaagatggttggtgggaccctggcagagcagacttatttgttccttggtgctggggaggctggaactggtattgcagaacttattgctcttgagatttcgaaacagacgaatgctccaattgaagagtgccgcaagaaggtttggctggtggactcaaagggtttgattgttgactctcgtaaaggctcccttcagccattcaagaaaccttgggcgcatgagcacgagcccttgaaaaccttgtatgatgctgttcagtccatcaaacctacagttctgatcgggacatctggagttggaagaacattcacaaaagaaatcattgaggccatgtcttccttcaacgagaggcctatcatcttttcactgtcaaacccaacctcgcattctgaatgcactgctgaacaagcatatacctggagtcagggccgttcaatctttgccagtggcagtccatttgcccccgtggagtacgaaggaaagacttttgtgcctgggcagtcgaacaatgcctacattttccctggactcggcctcggtcttgtgatctctggagccgtccgtgtccacgaggacatgcttctcgccgcctcgaaagcgctagctgatcaggccacacaggacaacttcgagaagggctccatcttcccacccttcaccagcatcagaaagatctctgcgcacatcgctgcagccgtggctgcaaaagcctacgagctcggtctggcgacccgtctgcctccccccagcgacctggtgaaatatgcagagaactgcatgtacactcccgtctaccgcaactaccggtagtgctgcggggatcaattttgcagtaataaaaatctatcaacgcggatggtactctgttgtttatagtccctgctgctaaccacccttgttgctggtgctgctggagaggcattgtacctgtccatgcatatatgatatatatgttgtaacgttgtgaaagcaaacaatcttgggtaccaatgtttgtt

SEQ ID NO: 6813 - DNA, 1836 bp, Zea mays
  Clone ID: 700579192_FLI
cacctacaggggcacacaaattagccaatcccgaaggggaggtggccacagcaagagctgccgcagcatgtaacaccataatggtaactttctgatttttatgtgtgtgttgagggggtgtcttctggtgagtggtgatgtactcaactttaggccctctgtagattgttacacgtgttcatatatgtcatgcagatgctttccttctcatcaagctgcaggatcgaggaggttgcctccagttgcgacgctattcgcttttatcagttatatgtatgatgccttgccattgattttttttagtaaattccactttctggtgttacctgatttctggaagttttcatcgtgtaccttaggtgtacaagagaagggatgtttcggcaacattggtacggcgggctgaaagtttaggattcagggcaattgttttgacagttgacacgcctgtgcttggcaggcgtgaagctgatatcagaaataagtacagcgcttgtatcgttaatgaaatctcctaaaattgagggaaattatgttcatttacaaaattcataattccagtttcctaacccgttgctactgaaggttaaaattttaagctactatcttataccatattgtagatcgttgatacatttatgcggagcattgcagtagcttcaacatcagaatgttgcaaaaaaacaatcccattttcttttatcttgagatgttctgtaactgagctgattgttcatgcaggatgattgctccacctctgtcaaaccttgaaggtttaatgtcattagacgactttgacgatgctgaaggcggctccaagctggaacgattctcacgggagacgctggatccatcattgtcatggaaggacgtggagtggctcaagtccatcaccagcctgccgattctgctcaagggcatcgtcaccgcggaagacggtaatgaataactagcacaaaatgtactctaccagcggttggatcactggcatgcttggtgctgaaccggagaactggttacctgtatggtcactgtcttgtctcactgaactgtgacgactctgtggcggcgtcgagcagcgaggaaggccgtggaggcgggggcggccggcttgatcgtgtccaaccacggcgcccggcagctggactatgcgccggccaccatctcggcgctcgaagaggtaaggtaactgaccgccggccgggcggcggcaggccagccacatttattctcctggcctgcagggccacacatgcaaaacgcaacggacgggctggacctggacccggacccgatcgctccctgtgcgggacgcatgcagtcggcccggccgtgctgctgttattgcgacgtgcggcggccgtgaactgactaggaccgccggggtgtcggggtgtcgtgtgcgttgcattgcaggtggtcaaggcggtggcgggggctgtgccggtgctggtggacggcggcgtccggcgcggcaccgacgtgttgaaggcgctggcgctcggcgccaaggcagtcatggtgggcaggccggtgttcttcgggctggcggcgcgcggggaagccggcgcgaggcacgtgatcgagatgctgaacaaggagctggagttggccatggcgctctgcggctgccgtagcgtcgcggaggtcaccagggcgcacgtccagaccgagggcgaccggatcagggccctgctgtgacttgtaaataaacggtcatatccgagtccgaccatcgtgctgtcagggttgcgatatgatttatttatatgaacgtgagggcatgtaatgtgacatcgattgttgcctccacacagataagcttactattgccag

SEQ ID NO: 6814 - DNA, 941 bp, Zea mays
  Clone ID: 700579213_FLI
cattgccaaggtataatctacagagacttaaagccagagaacattttacttcatagagatgggcacatttcattgacagactttgatttgtcttgcttgacatcctgccgaccacaagtgtttcttccacacgatattgataagaagaaaaagaggaggaagagcaggagtaatcccatattttttgctgaaccaatgcgagcatcaaattcttttgttggagattattaccggagctggccatacgagtgctgtagattggtgggcgctaggaattcttctatatgagatgttatatggttatacacccttcagagggaaaacaagacaaaggacatttgctaatattctgcacaaggatatcagatttcctgcgagcatacaggtgagcctggcggcaaggcagctgatataccggttgctacaccgagaccctgcaaataggctaggttcctatgagggcgctatggagatcaaacaacaccccttctttcgtggcataaactgggctctagttcgtgccgccacgcccccagagctggaggctcccctccaggatacattggaggccacactgcctcctcctgcagctgatgcggctcacaccgatatgttctgatcatacattgatccatgatgctacatgttaatttgcttaaaggaagaaaaaatattagatgatgaagatgcatgactttggcatagatgagaacaataatgtatgttaaggactaattatcttgatccatctatgcatgctcacaattagaataagattggatgtgtatattgtttctgtggttgcaatatacgcacgagtctatgaaaggatctatggatagcttgaggggatgacagacactaggcatgttgattagtactccgtttcgttttacaagtcgtttccaacagcttcgtgctgattaaggaatctatgaatc

SEQ ID NO: 6815 - DNA, 693 bp, Zea mays
  Clone ID: 700579256_FLI
cagaaatactctgagcagcagtggctgtgatagcacttccaaccggatcaccgcctctactgaaccatcatccaatgtatacaggggcgttcctgaaaccgcaagagccgaaggtttacgacacctgagccagcgtgaggctgcactgaacaagttccggctaaagaggaaggacaggtgctttgagaagaaggttcggtaccagagccggaaattactcgcagagcagcgtccacgggtcaagggccagtttgtccgtcaagatcatagcatccaaggaagctagggtccagttactgagctggaactcttccccattatctaaaaaaaagtcactgtaagtgactccactgcggggtatcctgatgtcaggttttttcgaagagttggaagcaatcacaccgagttacggtttgctgtgtatgtttgctaaagcttgtaatataagtatgtataggctgactcttctttccttaggttaggcacaggacctggcacgttctagacggtttgtcgttagacgttagaaaatacaggcatacttgtgtcctccagtagcacgtcctccagtagcacgtgtgctttaagccttgtattatgtaattagccaaggtgctgtttggttcacgaaatgtaacgtaaagggtaatggtaatggtttacacttgattacaggcggtaacaagtttgaat

SEQ ID NO: 6816 - DNA, 683 bp, Zea mays
  Clone ID: 700579266_FLI
gtcactattgacagctacgaagatataccagcgaacgatgagaagagtctgcagaaggcagttgcaaaccagcctgtcagtgtcgcaattgaggctgctggcacagcatttcagctctacagctcgggtatcttcactggaagctgtggaacagcgctggaccatggtgtcacggccgtcggctacggcacagagaacggcaaggactactggatcgtgaagaactcatggcgccaacccgccgaaccctggccccagcccgccgtccccgaccccggcgcccgccgtgtgcgacaactactactcgtgccctgacagcaccacctgctgctgcatctacgagtacggcaagtactgcttcgcctggggctgctgcccgctcgagggcgccacctgctgcgacgatcactacagctgctgcccccatgactaccccatctgcaacgtcaggcagggaacctgcctcatgggcaaggacagcccactgctttcagtgaaggctacgaagcgaaccctggccaagccgcactgggctttctccggcaacacagctgacggaatgaagagcagcgcatgagaaaacgcagcgtggcattaggtcgtcagcagcctgggtgatcgattagagcccctgcgtgggaaatggtcacctggccccctgattgacgacggaagcatggctc

SEQ ID NO: 6817 - DNA, 356 bp, Zea mays
  Clone ID: 700579355_FLI
gcagaagcaggacccaaagagttgtgattttggtgggcttgggatgataacataccttgacccatctatgggcgaatgccgctttcttgttggtgttgatgatagcaagagctctgcagtcgcctcttgtggcggtggatgctgcggggtctgctgtggactctgggttttagctttgtgggtgctcacgtaccttagaatgatgggttccgcttgattctcaaattgatatacctttgtgccaatgtttagaaagattgtacaattgacttctaggtctaggaaggaatggactgcactgtcgccacatgagattaggaaaccaggatttatatatataatttaatttattgttg

SEQ ID NO: 6818 - DNA, 806 bp, Zea mays
  Clone ID: 700579377_FLI
ctcctcgcgattccaatccacgcacgcctcctccgcttccgcctcgctcaggcttatagtcagtgatggaacacaaggaggcgggctgccagcagccggagggcccaatcctatgcatcaataactgcggcttcttcggcagtgctgcgacgatgaacatgtgctccaagtgccacaaggagatgataacgaagcaggagcaggcccagctggctgcctcctccatcgatagcattgtcaatggcggtgacggcgggaaaggacctgtaattgctgcatctgtaaatgcggcagttcctcaagttgagcagaagactattgttgtgcagcccatgcttgtagctgaaaccagcgaggctgctgctgtaatccccaaggccaaggaaggcccagaccggtgcgcggcctgcaggaagcgtgttgggctgacgggatttagctgccgatgcgggaacatgtactgttcggtgcaccgctactccgacaaacatgactgtcagttcgactatcggactgcagcaagggacgcgattgccaaggccaatcctgtggtgagggcggagaagctcgacaagatctgaggcgggcattgggggagcgaaatggttgcaatctgcaagaattcaacatgctgtctttgctgcgttatcattgaaacttgccattcttgtctgctgctgcgtcccgtgaggttcaatactgtgatgcacacagcatccaggcagccgcaagaatttcatcaaaatggtttcccgtgttggctatgtcgtgtaagcttaattcagttattcatggtggtttcggtc

SEQ ID NO: 6819 - DNA, 413 bp, Zea mays
  Clone ID: 700579513_FLI
cgatgcggccacgccggccgaggagctcgccgtgctcaaggacgaggtgcgcaggctcatgcaggggctgcccgaggggatcagggtggcgctcgtcactttcgctgcgtcggtgtgggtgcacgatcttggatttgagggttgcgctcgggtggttgtgcttaatggcgagcgtgagctcgagtctgacaaggtttgtgaatttgtaatatgatccttaggacaccgaatttgtaatttggttctgcgccaatctatgtgacatgatcagcattctagtttcacgagtatccacaatctgttcctgccgcagtcagccttgaaatttgaatgtaagtatcttgttataatgctagttcaggggcatgtattaactttttgccattattagcatgactcatctaatccctctc

SEQ ID NO: 6820 - DNA, 403 bp, Zea mays
  Clone ID: 700579561_FLI
tggtctccttcaagacggccatctggttctggatgacggcgcagtcgcccaagccgtcgtgccacgacgtgatcctcggcaactggacgccgtcgagcgccgacgcggcggcggggcgggttcccggctacggcgccatcaccaacatcatcaacggcgccaaagactgcggcgtggggcaaaacgccgccaacgtcgaccgcatcggctactacaagcgctactgcgacatgctcggcgtcggctacggcgacaacctcgactgctactcccagcagcacttctgatgaactgctgttcgacttgactgctagcactgttgctacagtataagatctgtgtccggacgtgttccatacatattttattattttaatacaataaaggctgatgatccggttat

SEQ ID NO: 6821 - DNA, 411 bp, Zea mays
  Clone ID: 700579569_FLI
cttctctccccagattcactcaccgtccgtccgtccagggagccatggcagcagcctgcatctgtctgcagctctctctcccaagcaaccattcttcctctgcatgtcctccagcatacaggaagcgtgtcgcgctagccccagggagaggaaaccgtcttctctgcactgcatctggcgcctcttcttctgtggtggtgaccaaggagcaggaggaaggatctcctgagcccgaaatctttagctacaaagacgaccccaacttcaggggctgcaagggctgcggcagggacgagcttcagaggggctgcaatggacaaggccggatccagggcggcatagccgccgtcccgggcttcggctggtggcccatcaaggcgtaccggccgtgccccggcttcgtcgcgtccg

SEQ ID NO: 6822 - DNA, 463 bp, Zea mays
  Clone ID: 700579572_FLI
caatccgaaccgtggaggtcagggtggtggctatggcagtggcccatatccccagcaagggcgagggcctccttatcctggaggtggaatgggtggaacagctggtccacggggcagcggtggcagtggctatggagctggaggtccaaactaccaacagggtggtccatatggcgcgtccggtccaggccgaggatcaaactactcccagggtggtggttcccgcaatcagcagcagtatgggaactggcaataacgtggcattgagatgtatgtatatgcagaatgcatttgcagcatctttgcagtttaatcatgttgtgattagtactgtaatacagtccagatatcgtaatagggctgtttgtggcaagcccgagcgttgccaaagggacccttagcatagtctcatttttacctcatcacaaaaccaacttaaacacaataatagtaaactttccgt

SEQ ID NO: 6823 - DNA, 978 bp, Zea mays
  Clone ID: 700579611_FLI
gcgacgctgaagaggccgatggtgcggaggaggaggagagggacctgcgggaggcgttcgacgtgttcgacggcaacagggacgggctcatctccgccgaggagctcggcaccgtgctgcgctcgctcgcctgcaccggcagggccgccgccgattgccacgacatgatacgcctcgttacaagggcccattctttggtggaatccgtctgtctctctcttctccatccgtgacacgtccagcagctctatcgaggtcgaggactagccgccgccgccgcacctgcacgcacgccaagggatgggagagcgagagagggatccgaggaggtcaaagatgatctaccgcaagtggtcactgctctcatcgacggtcgtcatctggtgcggcgtcgccaccgccggcctggccggtatcttcctcttgggcggcaaggagaaattcagtcagtagagaggcttaggcagcaggacagagccacgatcggcatgcaaaactagagaggaagcatatctgctaatatatctactttgccatctaagctcggaggtgagaaggtagtttatgatgctaccaagaaaatcttctcaagctccagtggtctagctgaagatattctattcttattcacagattggttgtcactacttagagagattgtcaatattgaaacaagggtacacacctaattctttgtattcctcttgcaatcatccactttcctcacaacttgcttgagactaaattgctttgttgttgctgttgaatcctctgctactccaagcttctttgatgtcgagtgtaatgttgtaactggctatcgtttgttggccgaacatttggctagcgtggatgatatatattgcaatgtgaatccaataagcaggagagtgatcaatgtatgtaatcattgtacactaacatttgtcgaatattttgtatatcatttcaaggcacctaaatattttctgaagaatt

SEQ ID NO: 6824 - DNA, 941 bp, Zea mays
  Clone ID: 700579620_FLI
tatgcacagccacctcagcctgcaaatgttaacccttcaactccccatgtgccccatgcaccccagcaaccagaggaaactatgccttatgcaccagcacagagctatccacctaatgcaatcccaccaccttatatgcaaccacctagtggacctgctcctctttactatgggcagcaaaaccctagcatgtatgaacctcctgcaggccgggctaaccctgggccaccatcatcctacggttctgctgggtacgggccacagggtggaggtagtttctctgaatcttatggctatactggatctccttcccaccgtggcaatgctggaatgaagcagtcttcaccttttgctcaatcctctggaggaagcggcagctatggcagtggcaagctccccactgcccagatgcttccacaagcagtgccgatcagctcctccagcaccagcggttcttctggcaatagagtgccacttgacgatgtagtggagaaggttgctacgatgggattctcaagagagcaggtgagagcaaccgtgcggaggctgactgaaaacgggcagaacgtggacctgaatgtggtgctcgacaagctgatgaacggatgataagttgagcaatactgtcatttcacagtcccgcacagtactatggaaacttggaaagtgtcagctcatcagctgaaacgatttttctgtctgcaacgttgcatacctgattgtgcctggagaacaataatggccgaacagccgctcatcctgattgccggtcacggttgcttcatctggaatggaaacagctcagtgtgccttcagtgaattacagtatcacaatctgaatacgttgtccattttatgtatatgtggcgatgagacattctaaaacatatactgtggtttcttgtgatatgttaataagcagctttactctgtttttaggc

SEQ ID NO: 6825 - DNA, 612 bp, Zea mays
  Clone ID: 700579624_FLI
cagaagaatcaaggaaattgcagatgactgatacaagatgtcaaagatgcagcgaaaagaaagttggcatatctgatattatccatgcaggtcatggagaccgctatcagttggaatgcacttcctgtggctacacatggttttcgtccagagatgccatcacaacacttacagaggatgccccaagcactgctgggaatgtgggcactgcccccttggcaacagcaaagttcgaggtcgttgagaagaagctcacgagcccacgggaccaatccggcaagcctgcttctgatgctctgcagaagagcactgcagcttacatgccaactatggagaggcagaagtcgtttgctaagaccaagctgttggatgaaccctcccccgcaccaaaacaggggtagagccgtattcatgctgcagattggtctttgcaggatttcgagatacatacttgtacataggggtgatccaccccccgcaccaaaacaggggatgaaccctcccctgcaccaaaacaggggcccttttcttgacatgctaccacctcgtactggttgtcttcgtttcggtagtttgttttgcagtcatgcatagccagttacctctcgtttt

SEQ ID NO: 6826 - DNA, 926 bp, Zea mays
  Clone ID: 700579636_FLI
gcttccctttcgttcctcctcgccccagcgacgcggcctcccgtagaccgagcaaggcaacccaccactgagaggcacgcagaggagcaggaagccggagaccaagatgtcgtcggtgttcagcggcgatgagacggcccccttcttcggtttcctcggcgccgccgccgccctcgtcttctcatgcatgggcgcagcgtacgggaccgcgaagagcggcgtcggcgtggcgtcgatgggtgtgatgcggccggagctcgtcatgaagtccatcgtgcccgtggtcatggctggtgtgctcggtatctacgggctcatcatcgccgtcatcatcagcactgggatcaaccccaaggccaagccctactacctttttgatggctacgctcacctttcgtccgggcttgcctgtggccttgctgggcttgcagctggcatggccatcggcattgttggtgatgctggagtcagggcgaatgcacaacagccgaagctttttgtgggcatgatcctcatcctcattttcgcagaagcgcttgctctgtacggtctcattgttggaattatcctttcatcccgtgctggtcaatcccgagcagattaagtgcactaccattctgcgattaccgtactgtttttatgctattctaagagaattgaaactctatgcccttgtctagtttattcttgttaccatgtattaatgaaacaatttgtagctgaaggaaggtgacacttccagccatgttggttttggcggtgttaagcagaggttatttattgggttaaggttggagggatgtgggttaagattggatggatgctcctgggctaagtggatttaatttttatccttggtgaataatgaacacggaggtgtagccaaataataacgtgatatatatatttctttgcccctttactgg

SEQ ID NO: 6827 - DNA, 710 bp, Zea mays
  Clone ID: 700579657_FLI
aggactcctaaggtcacagttgacgagacatggttttctgatccacaaatttgtgaaacaaatcagcaatggtatattttgtccaagacgctggcagaggaggctgcttggaagttctcaagggataatggacttgaaatcgttactataaacccagcgatggttattggtcccctgctgcagcctacactaaataccagtgctgaagcaatcctgaagttaatcaatgggtcatcgtctacatatcccaatttttgctttggatgggttaatgtcaaggatgttgccctggcccatatccttgcatacgaggttccctcatcaaatggaaggtactgcatggtggaaagagttgttcactactcagaactggtgaacattatccgcaacatgtatcctacccttcctcttccggacaagtgtgcagatgacaagccgtttgtcccaccctaccaagtatcaaaggagaagataaaaagcataggcatcgagttgattccactggagacgagcgtcaaggagaccatcgaaagcttgaaagagaaggggttcgctagtttttgactcgagcaagctgtgaaacataagtgttactgtactacgtgatgttgcattgtatacatgcatcggacttcgcagttcccaagctattttggtagctttggtctgtaagattacctaaaataaactgagccacgttgccacgctgt

SEQ ID NO: 6828 - DNA, 664 bp, Zea mays
  Clone ID: 700579668_FLI
gagaagggagctggatggcccgaccatattcacttggctggccgtaacgatcgggatgctggccgtgttttctgctgcctgcctcccggcagtcggcccgttgaaatgggtgctcgacgtgcacctgtttgttttccgctcgatgctcgtgatccggctggtcttggtggtagcgatcgcactgcatgctggcgaagccgtgtacgcctggttcttggcgagaagggttgacccgaggaacgctgccgggtggttctggcagaccttcgctctggggtacttctccctccggtaccttctcaagagaggcagagcgtgaattcgtgtttggttcacgtgtacgtacactgcggatcctgtaacagtggttccaacttccaagcttcatgcttggtttttattgaggaggcgtcaggcgtatgagcatccccagatcgtatccctcctgacatgcaacggagaggcctgtggtcggatgtactttgtggtgatgctgtgaactggtgaaagtttaacaggtcgctttcttggatgagctgtaatgtaactagccattgttagatccaaatgcaacggatgctccagcagaaatttggtggctgtcgcacatctaacgccgtatatgaaccgtatgatattattgatattgatacgtcgaaggtgg

SEQ ID NO: 6829 - DNA, 825 bp, Zea mays
  Clone ID: 700579686_FLI
ggcagattgggcccttgctggtgtcgatggtagcgacgacgacaacaactgcagtgctcgaggaacggcgttcaagatgacgcacggcgaggacgtctgggatgtcctcgcgcgcgacgcctttctgggcgacttcttcaacggcgcgctcgcgtcagagactcggttcctcatggacatagccatccgcggatccccccaggtgttcgagggaatagcatcgctagtggacgccggcggtggcaccggcgcagcagcccaagcggtggctgcagcattcccggacacccggtgcacggtgctggagcttccgcaggtggtagacgctgctccgattgatgggccggttcgctttgtcggaggtgacatgacgaagttcatccctcctgctgatgccgttcttctaaagaatgtgctgcatgactggagtgacaaggattgcgtgatcatcctaaagcgatgcaaggaggcgattgccgccagtggaaaagtgatcgtcatagatattgtacttgggtcatcttcccttgcaatttgcaacgagacccagctctggcttgatcttttcatgtccacggtaacgacgggcaaggagcggagggaggaagaatggtatcggctattcaaggaagctggattcagtgcgtacaagatctgcccagttctagggcttctctcggtcattgaggtttttctgtagccaccctgttcatctgggagactgggactggggctgctcatcacattttacggcattgtacgtctgttttgtaccaaaccttcttctgatttactattccctcgcgcgtagcgctcctacggact

SEQ ID NO: 6830 - DNA, 553 bp, Zea mays
  Clone ID: 700579741_FLI
gcaaaacctctaggatttgatgttcagaagaaaaattacaagttgaggctcgaaaaggtaaaggcagggaggaagggaaacctcaacgttgctactgagatactgcaagttgcaccctctctccacatggtagaagtccgaaaagcaaagggtgacactctggaatttcataagttctacaagaacctttccaagaccttgaaggacgtcgtctggaaatccgacgatcttcaaacgcaacatgcttcttagcagaacctcagagaggaggaatggcaaactattttgtgcaccatcctttcaagcaaactattctgcatgtaacggtgggtgcccaggaaattgcgctggtgctccaccatcgttgtatatgctgcgtcttgagttgcttgctgtagctgaagggaagttcattcagtaggttttgagtatgagttttgtatatccgtatatgcctatgactatgagccgtgctggaacactatgatcagaaactgcgaaatggagcccagaatgttcttgccatcttgctccagttctcagcaccgggctt

SEQ ID NO: 6831 - DNA, 831 bp, Zea mays
  Clone ID: 700579822_FLI
gttttatatgaagacaggcagctgcaaatatggttctatttgtcgcttcaatcatcctgatcggtcagttgtggatatagcttttatggctccagttcaagctactcttccttttccagcacccattgtccctgcagtggcgttaaatccggctgcaaattttctgcaaacctttgatttccatgcaactcacgtgccggttgagcctatgccaatgatctatcctcaaagacctggagaaattgtttgtgatttttacatgaagacaggatcttgcaagtatgctcagaattgcaagtttcaccaccctattgaccggtctgcacctcattccaaagaaaacgaggatacacagcagcctgtggcacttactcttgctggccttccaaggagagaggatgctgacgcctgtgccttctacatgaggtctggcacgtgcgggttcggtgcgcgctgcaagttcgaccaccctcctcgccaggacgatgtcctgcccgaccctgatgtctaatacggtactccctccgtttcgttttagttgtcgctggatagtacaaaattgaactatccagcgacaactaaaaaaacggaggaagtatcctgtatcaggatgtggtaccatgcgaatcgcactgttaatgcttgatgctgtcactgccatggtgggagcctgacttgtaaagttcagtatcaccggaagtgtttgtcggcgcgtgctggtactaacggtgtaccttcggcggttggatggtgtcaagagtaaaaatacaccgcttgttctcaaactttgactggatgctaatctccaaaatgtgagaaccaagttaccgt

SEQ ID NO: 6832 - DNA, 766 bp, Zea mays
  Clone ID: 700579823_FLI
agaagatgctccatgcctgtctgcaggccacaaatgagtttataaacgacttgccagaccacacagtgtcaccttgccctgctccatatgcccctgaattgaaatgagattgcatgttttcttttcccagatggtcataccattaagaatgtcaaaatttgatcaatttgcatatctatatgaagaccatatatgctgcaaggtggatatactatttgaaagaatctgctgcttgtttcctttagagattacagatcttaattgcatgctagaaggaaatcgcatttcttgctgttcgttcaagttaataaggatatgattggtctccagcgggatatggctatggtctcgaaagggatgtggtcatgttgtagttagttgcgatgcacagaagaactggattcaatcggccatgctgctatgccagttttcattctagattgggcactactccttctgaggcattgtatggctacagctatttcgggttggaacttggaagcgaatacaaagtagcgtagagaagtttcttagcattgatttacccgatctgttagaggcttttgaggtgtctaaataggtatttgtaaaaaaattgtggagtcgtcttgtcgtaaagagacatctctagctcgtaactcaagtagtcaagtagtaacagatcacagatgtcttcacttctcttactaatacatcgtctgctatattgattcgatgctttatagacacatttacttctatatttattagtagactatatttatat

SEQ ID NO: 6833 - DNA, 802 bp, Zea mays
  Clone ID: 700579836_FLI
gggctatatacttatttatacatgagatgcaagaaagaactgagttgatattgagagtcctggtctcaaattgcagttacgttctttgagttctgtgatcttttgtgcagtgcgacctgacgttgatattgcgtctctttttccttaacctgacaacgtagtacatgaccatcgtatttgtgcttattatgctggaaggcgcaatcactatggatgtatttctgaatagcaactgggaagaggatttccccgctgacccatcaggcaagtttgaggatttcaagcacttcgttagatcaaatttcgagatatgtgaatgggtaggcctctcagtggtggctgctcaggtgttatcgatcattcttgggatggtactcaggacccttgggcctgaccgtgagaccgactatgacagtgatgatgaagtgaccgtgcctgcaaggctgcctcttttgataaatcagtcccagcatggttcatactatgctgaacctaacacgtctggaaggagtgattcatggaaactgcggattttagacaaggtcaacaactaagatcttaaggatctcatacaacagaccctccagtaaagactctctctccaaggggttcgggagaatgataagagtatacctttttcttcctctcatggagagatgattagcagcagcagcagtagaatagtttacacacatttgaatgcaatccaacatgcacaagtatttgagtagcatgtgacttgaccccccctacaaaacccccacaatgtaggggaaggatgtttattgtaccaaaatgtttc

SEQ ID NO: 6834 - DNA, 860 bp, Zea mays
  Clone ID: 700579892_FLI
tcgcgagatgtgtggtggaaagtacagtgatgcagccagtgttgcgtgcgcggaggtcacccgagctatagccaacatcacgtcggctgtcaaccgggaacacgtcctggagcctgcttgcccggacgacgacgacgacgagctgttcggccccaaaactaccatggcggagacagatggcggcacgagtcgtaggctgatgctgcagtcggcagactatttcctgccagctgggttcaaatgtagaagagcttcgtacgtcctatcccgcgtctgggcaaacgacgaaacggttcaggagagcctcggtgtccgcaaggggacaatcggagcgtggaaacgatgcaaccaggacatactttacaaccagaacgtccaaagtgtagtgccgtaccattcgaggctagccgcgaaagggtacagggcgctgatatacagcggcgatcacgatcgtatcgtacccttcgttggcacacaagcatggattaggtatctcaacttgaccgttgtagatgactggcgaccatggtatgttggtggccaagttgccggattcacaaggaactcaggcaacctaatatatgcaactgtgaagggcgctgggcatactgcaccggagtacaagcccacggagtgccaaacgatgtttaggaaatgggtttcacgggatcctctctgatattacgtcgtctgagagaattacgtacgtgtcgctcctatgagtgtaggccggacgtacgtggtatgccctactgcaggccggagatcaaaataaaggagattttccattttcatgtagaaaaaatgagtgtccatggtgtctacttgttccctgtattaaaaataaatgcaatttttat

SEQ ID NO: 6835 - DNA, 349 bp, Zea mays
  Clone ID: 700580159_FLI
atttgtcctcaaaattttcacatcttttggagggagctgcatgattagtttattccaagatttagttcatatagccttttatatcttgtgtatatgcagggagtacgaaaaaacagcctttcacatttaggccttgttcggttagcttccaatccacatggattgagtgggattgggtgggtttaaatcccaactaagtcaaactctttcttaattttttccaatctcatccaattcatgggtaacgggattaaccgaacaaggccttaagtgataaatatatgtacctgaagtctgaacatttttgttgactacgaactgaacagctctaaatggttcttgatttctc

SEQ ID NO: 6836 - DNA, 1113 bp, Zea mays
  Clone ID: 700580207_FLI
gcagaaacctttgtctttgagagatattcagagagaacaagaaaggagaaccgtatctatccagcaacaagcaccctcaccaactccagcaaaggtggccccgaaccaaagaagtcatgtgaatgcttcttcctggcaagcttctggaccacctccatcacaggcagttgcccctgtccaaatgagttccaatgctcccagtcattccaggtcaagtgctgaagatgatttgttttggggcccttctgagcactccaaacaagatacaaagcagtctgagtttccaagtctgttgagccaaagcagaagttccatgatgaaggatcattctgcactgaatcgtcaaaagtctcaggcaggcagattaccagttccttctgctgctactgcaaaccaatctggcaaagggaaagcagaggctacaaacaagcagactgaggcaatggacttcagagattggttggagagtgaatgggccaagcttactggaacaaatgatgtaagcttccttgagttctgcataaagcaatcaactaccgaagcggaaatactcctccatgagaacattggttcccttgaccgcaaccacgagttcatcgacaagttcctcaactacaaggccttcctgtcagcagatgtgatccacatggccttccaagctcccagcagccgtggtgacggtgcagggcgggcaaaccctgctgctgcagctagaggaggcacggtcatagacgcggatctggatggcggcgggaagaaaaaggggaagaaggggaagaaggtgagtgccgcagtgttggggttcaacgtggccagcaaccgtataatgatgggcgagatccagaacgtggattaggaggatggcggcacaccaccgtgtatataacatagtttggcctttggttacatgccaccgaagtctcagggctcgagggaagctgggggtgctcggaatggcggtctggtctacctgtttttgccgagggtgggaaactgagcttagatgcagggtcttgtgctggtgattttgggttcctgtaacaattggttaggatcctgtaacggacagaaatattttcttctcaatagaaactcaccagatggattcagttc

SEQ ID NO: 6837 - DNA, 1635 bp, Zea mays
  Clone ID: 700580254_FLI
ttctgattgaatagcaccagcgtgctgattatcatcatattagtgctcaagctagaagggttttatcggcagcatttaattcacaggtggagcgggaaacttttcccatggacctttaagcaataatgcaatgcatagggttttttacatatttagaaatggcacctgttgaaccttacttcgaatatggtacaggtgttctaaagtgcagtgtttcaatatggttgcttgcatgattgggcccctttataaatctgatcatggtactgtactaattcctatcctcttccagatatctctctgagaaagcaacatctctggcaactggtgttattagtgagctggttaaggaactgagagtaaaacctgtgccaactgttcttgcttccttttctggtggctcaaaagggtgcatgtacaaggttattcagttactagctggaatatgtgaaggagatgcaaccatgaaggattatcggttagtgagaaactgtatctgcgggcaaatttatgactctagccctgtagattttgtcagtgatgtgggcacccagtttctccaaaagcctgctgttggaaatttatctcagtcaactatattacgttcatggatggcaaaggttctagcttctggcatggatactctcttcccaagcaggattgaagctcagcgtgcagagtactggcacacactatactcagcagcaggattgggtcctgttcttatattttgctcagaagatgataatcttgctccatgccatattatctgtggctttgcaaggcgattgattgaactaggcacagatgttaaacttatgaaatggagcgactcccaacatgtcggccattacaattcacatgaaattgaatacaggaaagctgtagatgatacgttgaagaaggctcttgttaccttctgccaccgaagccaactatatgactcaaatatggctggtgaccaggagtataagatagcgcactcagtgtgcagtctacacaatgctgcagccaattcaaatgagagcttaagaagggttgctaacagtcctagtgatcacttcttcttgccaagttcgaaggaccatgatgaatctcgggaacccagttctctaattgaggatcagaggcgccacatctcacatccaccctgcatggagcctaaaggagtccttggccaaatcctgtttgatgtttgtgttccaaataatgttgaaggatgggacattaagccgacagtgtccccgaatggacggccaacgtttgcttctgcccggcaacttggtccattcaatcccataaggtacttccggcgctcaagactgtagttttctgcaggagttgaggtttttgtatatatataaccgaggcaaggtggctagtagcaactctgagcaagattttacctatgtaagttccctgtaattgtttctgtttctgcttttgcaccgcttggcgagagaatgcacatatgctttgtatatcatatgagtgtgtgtactagaagggagatcctggacatatagtttctaggcgggttgcaaggtgcacgctaacattgtagccaaggggaatggattattatgttcctgtagtttcctctatatttcatgtttgtgaaatataattattggg

SEQ ID NO: 6838 - DNA, 594 bp, Zea mays
  Clone ID: 700580362_FLI
gggctacatcgacgagcactacacgccgtcttacagcagcagtagcaacaactactactcctccaaccggtcgccggcgtacgagccgtactactacagcgctccgcagccggcgccgtatagctaccagtaccagtaccagccggcttcttcgtccgaggattactactacagcgcgccgccgcagaggagcgccttctcgccgccgcgggagggctacggcgacatgttcaacgacgagaacgccaattcttgcaccgtcatgtgaagggaggatgcatgcaaacatggaagtagctagtttacttacagttccttattaatcaagcgactctctctatatatatatatatatatttgtgtgtgttagtatattttagaaccagtaattaagtacgagtaaggagatgtattaaaagcactgttcagtcttgatggcgctgaataagttgagagctctgagcttgaatgcttgatgcatgtaccaaccgtgatagatagaggagaatgtgaggatctgaatgaacagctctggtgttcatcacagcaaattttgtaatgtatgacatggtcaaaatggggacttccaatctc

SEQ ID NO: 6839 - DNA, 1455 bp, Zea mays
  Clone ID: 700580525_FLI
tcgttgtcttcatgtacgatgacatcgcgcatagcccggaaaatccgaggcctggtgtcatcataaatcatccccagggtggcgacgtctatgctggggtgccaaaggattacactgggcgagaggtcaacgtcgacaatttcttcgctgttctgcttggcaacaaaactgctctcaggggtgggagcggcaaggttgtggacagtggccccaatgaccatatatttgttttctacagtgaccatgggggtcctggcgtccttggaatgcctacgtatccatatctctatggtgatgacctcgtagatgtcctgaagaagaagcatgctgccgggacctacaaaagcctggtcttttaccttgaagcatgcgaatctgggagcatctttgagggcctcctgccgaatgacataaatgtgtatgcgaccaccgcgtcaaatgcagaggagagtagctgggggacgtactgccctggcgagttcccgagccctccaccggagtatgacacttgcttgggagacctgtatagtgttgcttggatggaagacagtgatttccacaatctgcgaactgaatctctcaagcagcaatacaacttggtcaaggataggacagcggttcaggatacattcagctatggctcccatgtgatgcaatatggttcattggagttgaatgttaagcatctgttttcgtacattggcacaaaccctgctaacgatgacaacacgttcatagaagacaactcgttgccatcattctcaaaggctgttaatcagcgcgacgctgaccttgtctacttctggcagaagtaccggaaattggcagacagctcacatgagaaaaatgaagctcggagggagttgcttgaagtgatggcccacaggtctcatgttgacagcagtgttgagctcattggaagccttctctttggctctgaggacggtccaagggttctgaaagccgtccgtgcagctggtgagcctctcgtcgatgattggagctgtctcaagtccacggttcgtacttttgaggcgcaatgtgggtcgttggcgcagtatgggatgaagcacatgcggtccttcgcaaacatctgcaacgctggcatccttcctgaagcagtgtcgaaggtcgctgctcaggcttgcaccagcattccttccaacccctggagttctatccacaagggttttagcgcctaagaatcgtaaggtgaggcgaaatatttcagccgctccaccgcaacgaactggtttacattaccagtcctcaggggggtcctagtttttgaaccactattatagctgttccaccgttccagattacatagctatgcccaatttccggtgtacatattatagtcggaaagttatttggcaattgtattggtcgttgctgtatatattccctatagtttgttagcagatgtgtagtttgtgattccataaaaatgaa

SEQ ID NO: 6840 - DNA, 1398 bp, Zea mays
  Clone ID: 700580618_FLI
acactcgcttcaatattgacaccaccaacgcacgcacgacccttcttcctcctcccggcggcggctaggctaccgctattgatttctccttgcatcgcctttattgcgctcacctgctctgccaagtgccaacgtcgtacacttccagcagtggagggagccggagcacgagctgcccgctggacgagccgtcgccgccacagaaatctacatataattgcagccccaaccacctcgttcctcttccccttccccctccccagccaaatccgctttcctagctctaatcgccgccgatctcgccggaggaactgctagctcgctgctcccttcacttctcagattaaaagttgcctcaagaagaagatccctctgcgccgctgcatgttgagcgagcctaccgtagcgacgagcgcggatatgaattggtgttgtgttcctagggccaagagagaagagaacccttactccaacagcatcggcggtaaggaaaaatatgtattatttgcctacaagttttgtatttgcaattgcatgctacaagatggcagcactatgcaatattgcattatttcaggcatctactccgagaagaacataaggctcttctcctatgccgagttaagatctgctaccgacaacttcaaccgcaccaacaaagtgggacgaggcggattcgggacagtctataagggaaccatccgaagcgggcgagaggtcgcggtgaaggtcctctccgccgagtccaggcagggcatcagggagttcctgacggagatcgacgtcatcagcaacgtcaagcaccccaacctcgtcgaactcatcggctgctgcgtcgagggaagcaaccggattctggtgtatgagtacctcaagaacagcagccttgaccgtgcgctgctggcttctaacagtgagcctgccgacttcacctggagcgtcaggtctgctatatgcctcggagtcgctcggggccttgcgtacctgcacgaggagatcgcggcgccgatcgtgcacagagacatcaaggccagcaacatactgctcgacaggaactacgtccccaagatcggggatttcggtctggccaagctgtttcctgacaatgtcacccacatcagcacccgcgtcgcgggaacaacaggctaccttgcgcctgagtacgcctggcatggccagctcaccaagaaagcggacatctacagctttggtgtccttgtcctggagatagtgagcggcactagtagctccaggagcatactcatggatgacaagattctcctagagaaggcatgggagctgtacgaagcgaagaggctcaaggaactggtggatccagcccttgtagactgccctgaggaagaagccatcaggtacatcatggtggccctcttctgc

SEQ ID NO: 6841 - DNA, 654 bp, Zea mays
  Clone ID: 700580620_FLI
tattaattgaatcttgctgggccaatgaaccatggcgaagaccctcgtttgcaaatattatggacactttgaaaccattaataaataaggttccggcacagttgatccgttcagattcgtagcctgttctatacgggtacgggaagatgtattttactgagtggtcctgataacatcaacatgagtgtcctaatactgatctgctataattgaataatccttggatggtattactcattatgataatacaattctcataatctttcaaatgaagtgtgcctggcaatttctttccatggcttaaggtcggcatggacatcaccaggaaatgtgtatgggttttgattgattactaattcagactttcgtttgggttcttatacgaacaggaattgtcctgtgtgatgtcgggcattgtattaaggctatttttgggttcaaactcatctagaggtccttttgtgtttgtacagtatattactgtaggcaaccatgaaaaccaaaggtttaggctgacctacgtttaggcctcatttctgatacggctccggagcgagcaaatgcagtgccgtagaaggtgatatcagtcgtatgcatgcctgtttcttcgtctcttgtactgtaacatgtcttaaatttacctagtgatggcgc

SEQ ID NO: 6842 - DNA, 557 bp, Zea mays
  Clone ID: 700580634_FLI
ctcgcctgcgctccctcgccgccccagttccccaccccctgctcacccacccgtcccctcctgctcgcccatggctcccatcgctgtcggcgacgccctccccgacggccagctcgggtggttcgacgagaagacctaccccgagaacaagcacgtgaagttcctcgccgacggatctggagcgtacaccaaggcgctcgacctcgagctcgatctcacggacaaagggctgggcgtgcgctcgaagaggttcgctctcctggccgacgacctcacggtcaccgtcgcaaacatcgaggaaggcgggcagttcacgatctccggcgctgaggagatcctgaaggcgctttagaagctccgtctcctctagaagccgcagcaacgatcggtctatagtttgaactcgcctttgaataacttgtcgttgggcaaggtctagttcggtgttgtgtatggaacggtcgtcactgagtcatgcacgatttggtatccgtgttgtttatgttcaccggtttgaggaactctctgatccgccgtgacacaaagttgatcctgag

SEQ ID NO: 6843 - DNA, 784 bp, Zea mays
  Clone ID: 700580638_FLI
tttggctatagcgccccagagtttgcaatgtctggcatttatactgtaaagagcgatgtatacagttttggagtggtaatgttagagctattgacagggcggaagccactagacagttccagagagaggtcagaacagtctcttgttagatgggctacccctcaacttcatgatattgatgcacttgctaggatggttgatccagcattaaacggaatgtacccagctaaatcactctctcgttttgcagacgtaattgcactctgcgttcagcctgagccagagttccgcccacccatgtcagaggttgtccagcaacttgtgcgcttgatgcagagggctagcatcgtgaggtggcaatcaggagaagagctagggttttcatacagagtcccagaacgagaaggagacctgagagacatttccttatgagcaagtgcgtccacgatagaagcgcaaaacagtttggaggcttaatgtgcaaagaaaatatctagagcactcgtatagtcatatcgattggagaactcgagctgaccgcaacaattcaggatcggatgagttttgagaacataatttcgttgcctattgttcaactttgttcattcttctacattcgtctcattttcagtcagtatacttgttgcagctgtatttaaaacgagactcaaattgatggtggtgtatagctgattattggtagagaagaaggaaaagaaatgtaaaattgatgctccgttatgttttaatgatagaaacctcaagactttacagccattcgccc

SEQ ID NO: 6844 - DNA, 839 bp, Zea mays
  Clone ID: 700580674_FLI
ctctccatcatccagtgctctctcctcttgcgattcgctcgctcgatcctagcttcccttccaagaagcgcagcgcccatggccatggccacgcaagcctccgccgccacgcgccacctgctggccgccgcctgggcgccggcggcgaagccgcggcagctgagctcgcagctcgcgctgccgtcgtcgtcctcccgcgggccggccccgctccgcgcgtccaccgaggaggcggtggaggcgcccaaggggttcgtggccccgcagctggaccccagcacgccgtccccgatcttcggcggcagcacgggcgggctgctccgcaaggcgcaggtggaggagttctacgtcatcacgtggacgtcccccaaggagcaggtgttcgagatgcccaccggcggcgccgccatcatgcgggagggccccaacctcttgaagctggcgcgcaaggagcagtgcctggcgctcggcaccaggttgcgctccaagtacaagatcacctaccagttctaccgcgtcttccccaacggcgaggtgcagtacctccaccccaaggacggcgtctacccggagaaggtcaaccccggcagggagggcgtcggccagaacttccgcagcatcggcaagaacgtcaaccccatcgacgtcaagttcaccggcaaggccaccttcgactaatcacacttcacgtacgccgcacgccccagccgggatccaaattaaagaacttcttcttctattaattacagtatattgtaatttggctgctggtacggtggtggcatgatttgagatgtgcatgatgatccttgtgtaattttattaccaagtctcttctt

SEQ ID NO: 6845 - DNA, 966 bp, Zea mays
  Clone ID: 700580708_FLI
cgcaaacatttcaatgttaaatcatccaaaccttgctgagctcgctggttactgctcagagcatggacaatgcttgctggcatatgaattctaccgaaacggttctcttcatgatttccttcatctgaaagatgaacacagcaagccattgtcttggaacaaccgtgtcaagattgcgcttggatctgcaagagcattagagtacctacatgagacttgttcaccctctgtggtccacaagaatttcaagtcatccaacattttattggatggtgagctgaccccccacctctctgattctgggtttgcaggccttcttgcaaaccaggaattccaggaatcagatgagaactcaggatacagggcacctgaggtgatcttggctggtcagtactccctgaagagcgacgtgtacagcttcggagtcgtcatgctagagcttctgactggccggaaaccgtttgacaggacccgaccgcggcctgagcagtcactggtccgatgggctactccgcagctgcacgacatcgacgcgctggaccagatggtcgaccccgcgctgcaagggctgtacccgtccaaatccctctcccgcttcgccgatgccatcgccctttgtgttcagcctgagccggagtttcggccgccgatgtcggaggtcgtgcagtcgctggtgcgcctggtgcagagggcgaacatgacgaggatgcacgagagccagtcgcggcgccacggcgaatccggcggggactacgagttttgagcgagacaaaactgtgcctttgcctagatttttttcttctaaaagtataaaaatagttataaactctccttgagagttttgaacttcaaatattcacatatagtttcaaactatattagataggtagtagttcagaataagtatttatctgaaataagtattggttcacatttgcctttgcgttgcaggcattttgttttgct

SEQ ID NO: 6846 - DNA, 1163 bp, Zea mays
  Clone ID: 700580760_FLI
caatcatgggcagaagcttactacaactatggccttgaatactatccaaagctccagtcttgtgtgccttttactccagtaactggtcaaagaatattacttcgaaatacatcataccgtgatcaagtttttgacgcactagtcaaaggtttgatgagcctcactaccaagatgaatgtgtcatcattacatattacgtttccgtccgaaggtgaattcagcaaactgaaggatagtgggttgttacaaagaatcgggttgcaatatcactggagaaatcggaattacaagagttttgatgagtttctgatggatttgaagcagcctaaacggaagaatatcagacaagaacgtaaaaagattcctgcccaaaatttgcaaatgaagcgacttcgtggagacgaaataaagagcagacactgggacaccttctataaattctaccgtaacacaactgataatcattggggcagaccatacttgacaagggatttctttcacctcttgggagaaaagatgggggataatgtgatgcttatagttgctgaaaaagatgataaactagttgctggcgctcttaaccttattggaggtgatacactatttggccggttatggggatgcctgccagatgcttactttcccaatttgcattttgaagcttgctattatcaggcaattgaagcagccatagagttaaacctgagtaaggtggaggcaggtgctcagggagagcacaagatccagcgtggttacctcccagtgacaacttacagctgccactacttttcaaatcctggttttgcggcagctattggaaattatcttactcatgagacggctcaggttaagcatgctattaaggtccttcgtgattccggaccatacaaggaagacatactgaaagagttcgctgctcaacaagacgacgacctgtagaatacagaagggacttaaactatttgcatactgttttatagaactaacatcttctatgtagcaacagggatacaggtcatccaattaagtattaccaaactacgaatcccacattttggacactgctaggactgtaaatatttaacattgtaaatctaaacccaagcattctgcgatattatgcatctccgcgccggaaatgatttctggggcgatattacatc

SEQ ID NO: 6847 - DNA, 571 bp, Zea mays
  Clone ID: 700580769_FLI
gttagagctgcgattcatgccaaaccaaaaagctcaattggatcatgggaactgtacactgcaagaatagacttcacccatgatacagggacgatggtgagctatcacaagaagtttacagctttgggatatcgcgtgctaatctacagcggagaccatgacctgtgtattccttaccctggtaccgaagcgtgggtgaaatcaataggctaccaagttactgatagatggcggccatggtacttcggagaccaagttgccggatatacagaaggatacggtcacaatcttaccttcctcactataaagggagccggacatgctgtgcccgagtacaagcccaaggaggctctcgcgttctacagtcgctggctggcaggagagaagttctaagaagaccaggaccattacagatttcacaagccttcagttattcgtcgctcatcggacaattactgtgtgcatggactcagagtagatgtatgcagatcagatccgttcactcggctgtgtaagcctctgtatacagctgaagagatttttaacgtgggatcttcacctctactcaatt

SEQ ID NO: 6848 - DNA, 429 bp, Zea mays
  Clone ID: 700580787_FLI
gatcctggaatatgcaccgagtttgtccactctttgaaggaggaagtcagcgtaatgtgtggtttctcttgctcaagacatccctcagcattcacagctctctctcttgggcgatccaaatggaatggccaggtcggcagttcgggactagtaatcaccttggagacaccccttgacaacatggcaaggccttctttatccgttcaattgaacgggggtttcgagttctgacatttcccccgtgggctctagaatacaactgtatatactgtatctcatagcgagaagatgatatgccactgtatatattgcacacatgtagctgtgattaagtagatatcttcccaaccggtgaagtgtatagtcctaaaaacagacaaatggcttactgttttggttcactgaataaatttgaaggcttgtatgtcg

SEQ ID NO: 6849 - DNA, 843 bp, Zea mays
  Clone ID: 700580838_FLI
agcatctgttgcgaacacaaagagaaaggagaagggattgcttcctcgtccggttcgagctggaatagttggatatccaaatgttggcaaatcttccttgattaatcgcttgctaaaacgaagaatgtgcccagcagcacctaggccaggtgtcacaagagagctgaagtgggttcgttttggaacagacctagagttgttagattcacctggaattttacctatgcgaattagtgaccagacatctgcaatcaagcttgctatatgtgatgatattggagaaaggtcatacgattttgctgatgtggcggcgattcttgtgcagatgttgataagacatcctgcagtaggttctgaagcatttcgaagacgatataagattgatgtagatagtgagtgcggtaaaacgtttgtcacaaagctctctgttcacttgttcaatggagacacaagccaggcagctttccgcatattgtctgactacaggaaaggcaaatttggatgggtagcgctggagagacctccaacatgaacaagcgggatatcatagatccttagataaaagacatgtgcttgttcatgtagtatcacacaatttagtgtcgttcattggaccactctcgacagttttcactggacctgcacctatacgaggaattaattcagaatagctgtccatctgatgatctaaagacaaaacttaagaaatgctcctgctgttatcagacagtccagagcaaacgagctgatttgtatgatctattgaatgagctcaactatgtttctatgtaacggaattaggtttgagaaatgaaagattgtatgtctcctaatttagttgct

SEQ ID NO: 6850 - DNA, 756 bp, Zea mays
  Clone ID: 700580846_FLI
gagacatttggacctattataccaatcatgaaattcagttctgatgaagaggctatcaaacttgcaaacgactcaaaatatggtcttggctgtgctgttttttctggcaaccagaagcgtgccatcagaatagcgtcccagttacactgtggggtagcagcaatcaatgattttgcttcaagttacatgtgccagtctttgccattcggtggtgttaaagacagcggattcgggagatttgctggcgtagaaggcttgcgagcttgctgccttgtgaagtctgttgtagaagatagattgtggccatatattagaacagtgatcccgaagcctatccagtatcccgtctcagagcatggatttgagttccagcagttgcttgtggagactctgtatggctatagcgtgtgggacaggttgcggtcccttgtgaatcttataaagatggttaccgagcagaattctgccccggcttcaaatgcgaccacgaagaaaaggcgatgagacgaatgcccggggggttcattgaatctgtttatggtaagtctgatctctggacgctgtaaacctccccaagctgctgtaatcggccttgtttgctctctgaaacaatctcgagcctgggagcttgtgtattcaagcgctttagctttcatttcagaaccttcttttttttttctctctctccctctctccctttcttattaacacccacatgcgtgggcaatggaaatgaaattccactgtggatgtgct

SEQ ID NO: 6851 - DNA, 969 bp, Zea mays
  Clone ID: 700580909_FLI
aaatctagagggttaactaccagtagcgtgatgaagtcatgtaggctatccgagctcagcaatgctgaggttagcagcctcaaggctcgtcctcgcatcgattcctcgtccatgtccatatttggcacggtgaatccaattgttgagggtgtctgtgtcagaggtgatgcagcagataagcagtaccaggtgaaaaactgcagatggaggccaacttttgccttggagactgatgggccatctaacactgatggccaagactttgatgaggacagtggttttcttggtaggactagactgggaagactcatccaagctgctgcaagggagctacttgacaagctgaactctgcgagaaccaattcgccaacaaagatattccttgtcctccttggtttttacacagccaatgccttggcaacaatactagggcagaccggtgactgggatgttcttgttgctggtgttgtagtggctgccattgagggaattggcatgctcatgtacagaaaaccaattgccaggcctcctggtaggttccaatctttgatttcaatggtgaactactggaaagccggtgtatgcctgggcctttttgtggatgccttcaagctgggtagctgagtttatacaatcatctgctgctatctgcctatggtaattttttgggtatattgggatcacaataacgccatgatatggttccatgatggccattgctcgttgctcgaattctaatagctgcatttggctctaattctgggagcattggctgctgaggtatcagatttcttcaaagttaatgaagatgtttggagcagatattattctgaggtgactattcatttttccataatcgaaggccatgtttgtcaaccattgtttggcccgtaaactgtagatatgctgtagtttttccacctccatgtcatttagccctaatatgcatttatgcgtactgagagaagt

SEQ ID NO: 6852 - DNA, 633 bp, Zea mays
  Clone ID: 700580914_FLI
aatacttcagtctagacactagatacagtaagccttagcgcaccaacagaggatacttcaaatatgtctgcctcgcggagctcctctcccaactccatgtcacagtggagccagaaagagaacaagatgtttgaagaggcactcgcctactatggcgagggcacacccaaccggtgggacaaggtgtccagcgccatgggaggcatcaagtctgccgaggaggtgcgctgccactatgaaaatcttgattacgacgtcaagatgattgagtcaggcaatgtgccgtaccccaagtacaagacacagggattctggacccgaggttaaaaaaatgttggaggctcaaagaggcagaaaacaaagctctacggatccaagaaggaaccaaaggaaatccagctctggttggagaataaaatgatgaaccagtgtgtatatgtcaatatgtgtatagtatagtttatgatcaagtttatgtctgtctacctgtggttgtaggatcctagtgtacataagattgataaccacatgtattcattgtccccttgaactaaagttatggagggtgtaaagtctaaaagtcatgtatttatgcaaactaaaaaaacaatgcctcgtagcattcgttgcctc

SEQ ID NO: 6853 - DNA, 546 bp, Zea mays
  Clone ID: 700580916_FLI
ataaaaaggtcaggtatcatagcaggaagaagcttgcggagcagaggccaagagttaaggggcagtttgtaagccagaagctgaaagcagctatggcaacggaagccgaaactgactcgtgacgggcgctagtccagaactgtaattttggttcttcccttcgcgccaggtgtgggcgattggactggtaagtctgaaggctggcaaaagtttttttttcttccttccatggttagcctttctgtacaaaggtgaactccacgtcgggtgtttgttggcatccaagccttattttttgcgaggtacatcaagttgacaaaatgttcggagggatagggtgaaaacggtgcaagcgccatatttcgtccatacgcttaggtgtttgtggagtgtgaaagcagagcctgtacagcatattcaccacccatttttgttgccattacaattgtagtaacttgtaattactactatgacaaaagtagacactgttgtagaacttacagccagcaggtcttttccatatgggacagtagcattttatttatt

SEQ ID NO: 6854 - DNA, 999 bp, Zea mays
  Clone ID: 700580934_FLI
gacgagaccaagatcgagaacctgggcaatctgctgtacaagaactacggcaccacgatggctggactcagggccatcggctacagcttcgattacgatgagtaccacgccttcgtccatggaaggctgccgtacgacaacatcaagcctgaccccattctcaagcacattctcaagaacctgcgcatccgcaaactcatattcaccaacggtgacatggtccacgccgtgagagccctcaagaggctgggcctggaggactgcttcgaggggatcatctgcttcgagaccctgaacccgccctgcccgccgcagggagaccaggagcccgagatcttcgacatcgccgaccacttcgcccgctccggcaccgccgacgagctgcccaagacccccgtgctgtgcaagcccaacgtggacgccatggaggaggcgctcaggatcgccaacgtcaacccgcacaaggcgatcttcttcgacgacagcgtacgcaacatccaggccgggaagcagattggcctccacacggtgctggtgggcaaatcgcagcgggtgaaaggcgcggaccacgcgctggagagcatccacaacatcagggaagcgctgccggagctgtgggaggaggccgagaaggcggaggacgtgctctaccccgaacgcgttgcgatggagacctcggtcaccgcgtaaaacccctgaatgcctccggtgcaccgtcagccgaactttctcgacatctccaggaccgcatcaacgatcacatgtcactcgctccccgagccagggccggtgatgatctcgcgctggaactgaatccaccagcaatggccgggccgaggatcgatttccgacagcaggaggggtgcagcatgtaaagggggaacagatgagatcatgtttgggttggtcccccgttgtatatgtagttatgtatcagccagtcctttgtttgtaaattaccagtatttagaagtaataagaaaatgggggtttacgtgt

SEQ ID NO: 6855 - DNA, 1112 bp, Zea mays
  Clone ID: 700580946_FLI
cctcctcagtctcggtgccaagtatgagcctacaccggcccaagtcgcttcatcttgtgacgtgacattcgcgatgctcgctgatccacaaagcgcggctgaggttgcatgtgggtccagcggagctgctgaagggttggcccctgggaaaggctatgtcgatgtgtcgacggttgatggtgctacatccaagctgattggtgaacgcattacaagtactggagcatctttccttgaggctccagtttcaggctcgaaaaaaccagcagaagatgggcttctcatctttcttactgcaggtgatgagtccttgtacaagagagtggcgcccctccttgatgtcatggggaagtcaaggttttatcttggcgatgtaggcaatggtgcagcaatgaagctcgtggttaacatggtcatggggagcatgatggtttccttctcagaagggttgctcctgagtgaaaaagtcggtttagacccgaatactctcgtcgaggttatttcccagggtgctatcagtgcccccatgttctctctcaagggcccatccatggttaaagctgcatatcctcctgcatttcctctgaagcatcaacagaaggacctgaggctcgcattggccctggcggaatcggtgtcccagtccattcctacagttgcagctgcgaacgagctgtacaaggctgcaaaatcgctcggccttagtgaccacgacttctcggcggttattgaagcgctgaaagccaaagtgcagagccagagctcacaatagtagttgcctgttcagcagagctcacagtagttgttgcctcttcagcagctaccattgaggcagcattttgtctcgatggatgaagttgacacttagggcttgtttggttctaccccaatccatatggattgagggggattgagcgggtttcaatcctcagtaagtcaaaatcctctccaatccgtatcaatcccctccaatccatatggattaaaaataaccgaacaagcccttaagggaaatttctcaaggtcgctacagaaaagtcttagaacaatacaatttctgtattcgtaaatattttctcaaacatcacaacgacgacatttccttaaggaag

SEQ ID NO: 6856 - DNA, 781 bp, Zea mays
  Clone ID: 700580977_FLI
gcagcccccaactacccccagcctcggaaggaaccttccagaagcgcaagactctaaaggccgtcgccttcccattcttcctcgccgcgggggtcgcctgagatcacataaacaatggtgaaggctgttgctgtgcttggtagcagcgatggtgtcaagggcaccatctttttcacccaagagggagatggccctaccgctgtcaccggaagtgtctctggcctcaagcctggcctccatgggttccatgtacatgcacttggtgacaccaccaatggatgcatgtcaactggaccacactacaatcctgcgagcaaggagcatggggcaccagaagatgagaaccgccatgctggtgatcttggaaacgtgacagctggagcagatggtgttgctaatatcaatgtcaccgacagccagatcccactgactgggccaaactcaatcattggcagagctgttgttgttcacgctgatcctgatgatcttggaaagggtgggcacgagctcagcaagagcactggaaacgccggtggccgtgttgcttgtgggatcattggactccagggctgaaaacgatcgccggacttgggggtgcctgagaggtccgtctcctgccgtccccagcagacgagcctgaacattcggagacatcgtgaaataagagcgtcgctgatctgtgatcatcgtatttgtcattatgcacctgtagcaaccgatggactgaactgtgctggattatgctgttggatcacctgagtatgtgttacatgtcggtttt

SEQ ID NO: 6857 - DNA, 580 bp, Zea mays
  Clone ID: 700581034_FLI
cttcacgctagtagtgtatcataatacggtcagcgccgactagcaagtgacaagtcaaggaggttgaaggcgaactagagagaagaggaagatgttggcggcgacggatccgatgctgtggcacaaggtggccgccgtctccggggttgccgctttggggctcggcacctacggcgcgcacatgttccgccccaagaaccccgtgtacaaagaggtttggcacacggcgtccctgtaccatcttgtccacaccgcggcgctgctcggggcgcccatcaccaagcgccccaacgttttcggagggctcctcactgctggaatcgtgctcttctctggaacgtgctacaccgtggcttatcttgaagacaggaagttttcttcaccggcaccattggggggctttgcgtttattgctgcttgggccagcctcctcttctgattaaattgtgcttttccaagaaaaaaaaaatcataaacctctctatctggtgttttatcaggttgtgaaaaatatacttgtaaagtgtatacagtggacagtatgcgcctctggttaataattcaatctgtgattcctgtg

SEQ ID NO: 6858 - DNA, 631 bp, Zea mays
  Clone ID: 700581127_FLI
gttgctgatggagaagaggatgttactatcaagatattttttaaattttcttttgaaaatgccacggcttgaagctattctcattgtgatatgcatggtatcttcacattattcaatgagctaaagaaagaaaaactaaagaatgttgttgccaataaaagaactgcaagaacaaaaactgaacaaaagctgcaggatgagctgcagaggaagggctcaactgcttagagtgatggagacttgcagaacagtcttacgtaaatagcaggctatggcctttgcacgtgctgtagcagcagggtttgttatcgacaaattgttgtatttggtcacttttgcagagcgttttggttcttctcgcttgattgacagtgacagttaacgaaggagccatggtgtaggcaattaccaaacgagttgttgagaatccacatattggtagtttttgcaatatgcaagtagcttcagctatttatcttttttccagtaccatatgtatcatgtcgaatcacattatagatggttcttgttgaaaatcctaatcctcaatcaggatggattgtgttgcatatattataaaaggagctacatggttgtatgttgtcgcagcgcatgggcattgtactatcat

SEQ ID NO: 6859 - DNA, 475 bp, Zea mays
  Clone ID: 700581250_FLI
ggaactcttagagaatgccagaaagttctagcttcacatggcgcttcaaaagtaagtgcttatgtgacccatgctgtgttccctaagcagtcatacgaaaatttcatggcgtctaactctgctgggccaggcgaccagctcgcttacttctggatcacggactcatgcccgcacacaataaaagccatcgggcaaagacctccgtttgaggttctgagccttgctggctcgattgctgacgctcttcagatatgagcgcgtacactgactggtagacggggggcttgaaccgtgggatgcccgtcagatcgagaacttgtaccgtgagatgagctgctcctgctttttttccctaaatgtaggagtttgttccggttccttgaaaaaagcaaataatgtggagcaagttttaagtacctgaaggttccacaaacagcgctgtgaattgatgataaaatcaggcattgggatactc

SEQ ID NO: 6860 - DNA, 972 bp, Zea mays
  Clone ID: 700581401_FLI
gtggccggaaggagtccctactgcagcatctgtgcaagaaatccttttctttcaggcccagacaatggagatgatgtataaaataattgcagatgagctcaaggcaacggacaataaggatatgcaccctgaagattacttgaacttcttttgtcttggaaatcgggaagaaccaccatctaatggtagtccagaatcagagaaatctacagataaaagtgcagcggccttagcttcgaaatatcgacggttcatgatctatgttcacgcaaaagggatgattgtggatgatgaatatgtcattctgggttcagcaaacatcaaccagagatccctggctggttctagagatactgagatcgcaatgggtgcataccagcctcattatgcatggtctacaaagaatggacatcctcacggccaggtatatgggtacagaacgtctctgtgggcagagcaccttggaacggttgatgatcgcttcaaggatccttcgagtttggagtgtgtaaggtttgtgaatcaaatagctgtagagaactggcaaaggtttacagcagaagaaatgagtacgttacaagggcacctcctcaagtacccagttaaggttgaggctgatggtaagatcagcccactgtcagaccaggagtgctttcctgatgttgggggcaagattctgggagctccaacttcacttcctgattcactgactatgtagtgttattacataaaaaaacttctttcagagttgaactttgtaattgtctaaaattggtgggtttatcgcagaacttgtactatatctgtaatcatcgatagttggcgcagggaaagttcaagatgttagtggtgttttttgagttatgctcctgtaagttttcccagcgtttgtaaatgaatcatatgataggatccttgacaatgcttccatttccattatgattttaacaacagttttcaacatttttgctc

SEQ ID NO: 6861 - DNA, 607 bp, Zea mays
  Clone ID: 700581471_FLI
aacctacgatggttcctcgacgttgctggaaagaaaaattccaaagcatacattgccaacggggttgcaatgtttgttacttggctgatggtccggatagttctgttcgtctacttgttttatcacatccttacaaattatgatcaggttaagcagatggacacttttgcttgtgttctgatatctgtcgcccccaccatactgttcactatgaatataatatggttttccaagatcgtaaaaggtctcaagaagacgcttgccaaaaggcacactgaataggggaatgcgcgtacatgtacatccatcccatctgtacattcacttacagctatgcacatagtagctaacgcagacatgctgttaattcagctttttcgttgtgactgctcagcttgttttctggatgttatatggttttgtgtgtatgttaggtctaactgcgtgtgcttaatgtaatagttcatcgatttgtaaaatttaggtctatgcgatagcttcagaaatttcacattcggtttctgagactgggtttacccttgttccagtcccgcttttgccctttgccattaattttgaccatggtggacaaagaagctaattaagg

SEQ ID NO: 6862 - DNA, 1459 bp, Zea mays
  Clone ID: 700581504_FLI
gaagtacagggatgctgcaatgatcgaaattggcatgcttgagaagcttggtaaatatggtgaaagcagatccaggtgagtttgctggttcagttagcacctatatgcgtgcttacgttcataagattgcttgtatataagctggtctattttgcagttgtgttcaaattcggaactggtttgactatcgtaaccatatctgtattgtaagtacattgttagattatgacaattatgcactgacccaaaaatataaccatatggtgcttaaacgttggtgaatttggattaatggtgagcaggtctttgagaggcttggaccaagcttatatgattttctgaggaaaaacaattaccgctcattcccaattgccctagttcgggagtttgccaaacaactgttggaatgtatagcatgtgtgtgcacagttctttctattacccctcctgcactataatgcatatacattagttttgtgcattatctgtgctgcattgcagcctgtcattaatccattactcatgcttgtactccagggagtatctaacatcatgtgatgtttttgtatttaccctctctctgtaatgtgttgcagttatgcatgaattgcgcctcatacacactgatttaaagcctgagaacattctccttgtttctccggagtacattaaagtgcctgattacaaagtctcatcccaatccccaaaggaggggtcctattacaagcagttgcccaagtctagtgctatcaaggtgattgatttcggtagcactacttatgatcaacatgatcagagttatgtggtatcgacgaggcactatcgggctccagaagttatattgggacatggatggagttacccatgtgatatctggagtgttggttgtattcttgttgagctttgcacgggtgaggcgttattccagactcacgaaaacttggaacatctggctatgatggagagagttcttggacctttgccgtaccatatgcttaagagggcagatcggcactctgacaaatacatcagaaaaggacgcctgaattggcctgagggttgcacctcgcgggagagcatgaaagctgtgatgaaattgtccaggcttcagaatctggtgatgcaaaatgtggaccaggctgcgggagatttcattggtcttttgcaagggctcctgaagtatgacccagcaagccgtttaacagcacgagaagcactgaggcatcctttcttcaccgaagggtttgggcgaagaagatgatacgtccttgaagcagaccttgtttgtcctctgtctctgaccaaactgtatataaagctgaaatggagctgtttcaatcttgtttgaaacgtcgtgtaactatagctgtatcacaagggaagtcagacggatactttttactaatcctgacttgtttgagttttgcaagccaattcaatgaaagtttgggttgaacag

SEQ ID NO: 6863 - DNA, 995 bp, Zea mays
  Clone ID: 700581559_FLI
cgatgatgatgtaagcgtactcgaatcccagacgatgaacaaagaaactgaactcgatgcgttgtttactgcgtttcttttttcccccttcttcttcacgtacatactgtactgctcttggtccaggtctcaaagggccagtaccactgtgacggatgtggaatatgtagaaccggcggcgtggagaactttttccactgtgataaatgtgggtgttgctacagcaatgtcttgaaggattcccaccactgcgtcgaaagagcaatgcatcacaactgccccgtctgctttgagtatctgttcgactccacgaaggacatcagcgtgctgcaatgtgggcataccatccatttggagtgcatgaacgagatgagagcacaccatcacttctcatgcccagtgtgctcgaggtccgcctgcgacatgtcggccacatggcggaactcgacgaggaggtcgcggccacgccgatgcctgacatctaccagaagcacatggtgtggatcctgtgcaacgactgcagcgcgacctcgagcgtgcggttccacgtgctggggcacaagtgccccgcgtgcagctcgtacaacacccgggagacgagggctgcgtgccccaggatctgaggcgaaccagaggccatgtcacaaaatgccagggagatgccgtccaacgatcatctgtctgcaggacgttgctgcgcttaaggttaaaggctagcgcgagaccaggcctggtagtccagtcttgagtttggtgctggagcatttgtaatgttccggtaaaatgtaatgcgtccatgagtgctgtccaggcagtaagcacacctgtggatcggggccggcgcaaggtccctaggcaagctgcaggattagtggggctattcatgtttagggcgcgaatgcaacgaaattacccgtgggcccgtgggctcggtatgtaacagaaccgattatttctattacaataataacatgcagttctattgggccgagcct

SEQ ID NO: 6864 - DNA, 856 bp, Zea mays
  Clone ID: 700581639_FLI
gtgctggtaaccttaagatttctaccaactttgtcttctgcacatgaagtctctgccatcaagaagttaatgcgattctgcagctgcaatccatagagacaaaatactgtagaagccgcagcgcagccggattaaagccgcagcaaaccgcagcgaacaattatcttgcttctgatgaaaagtgtggtgataacagtagcatcgtgtaacattattgtgaccacgcatttcagaaatgatgaagtgatagcttcacttccatttcttctgaaaagcgccaatggtaggtaatctcacgtgtcgcacctattttcaggcttgatattaaaggacgatggggaaggaaggcaaacatgtaaaaatctgaagacccaaccgcaaaagcatatccacagttccacaccccacttgattcagatttgaaaggagaaggacagaggaaagtggcaggccttttccacggatcatcaggttgcttgtaaggttcatgtttgtgacagcaaccagaaacactggagcgtggacagcagtctcagaactaagcagtaagctatagtatccaaacttacaagtgcgatgatagtttgtttatcggtttcgcttgctgtgtggtgtagtttgtctgtttttgtttgttttttttttggtgaaaaaaacactgatggtgcaagtgcaacagaggcccacgtggctcgtcaaccttttgcaaggcctggcaggcccgcgttgatttagcccttttcccttgtaccttatgtttatgatctgggggttgagcctattatgatcaagatgttgttgaggtatatattaagattattctctcacacaaatagcctgaggtgccgtttgaatc

SEQ ID NO: 6865 - DNA, 902 bp, Zea mays
  Clone ID: 700581676_FLI
cctcttcaacttcatcagcggtaagcatttgaaaattctgaatcttggagatggacaaggtagaactagtggtgttactgctgttcttcagagcactgatgatgattctgttgatccacatctggagcggataaaaaatcaggccggtaatgaggaaagtgatgaagaggatgaagattttgtggcagacaaggatgatagtggatctccaaccgatgattctgatgcagaaggctctgatgctagtatgagtggaggagaaaaggagaaaccttccaagaaggaagctagtagctcaaagccgcctgtgaagaagaagcagaagagtgggccagatgaaggttctcaaaaaaagaagccaaagaagaagaaagatcccaatgcccctaagagagctatagctccattcatgtacttctcaaaggctgagcgagctaatatcaagagcagcaatcctgaactggcgaccacagagattgcaaagaagctcggagaaaggtggcaaaagatgacagcggaggagaggcagccatatgtggagcagtctcaggtcgacaagcaacgctatgcagaagagtctgcagcctaccgtggtgcagccgctcagcagggctctggtgctggatcggaatgaaggtttaatcgtctcgacagttaacttgcaaggctggatgattgagtcgtcagaataaagctggaatacccaaaaacctaagctgaatgtcatcgtttgacctgttgggttgttccggaattcaaccaggattcattctagttcatcaatgcttatattaattaggcaagcaatctggtctggaatcgatcgaggccgttccctggaaccgaacatacccctaagcaaatcctgccaggtaggacaaaatgtagcagcaggtttaaac

SEQ ID NO: 6866 - DNA, 741 bp, Zea mays
  Clone ID: 700581684_FLI
aagttctgtagctgaattactaagtatttaagtaacctaccataacatggagttactgaattgcttagtcagtaactagcatttgtagctcttgttttttaatacagcaatctcaaatacaatttcctttgtagaaatattttagttgagcaatctgctggaaatttaatattttcgattcatccaggatgaagctgttcaaaaggtggtagagtttatggatacatactctttaagccaggaagacttcgatacaattgttgaagtatccaaatttaagggtcatccaagtcctatggatgggattcaacctgctgttaaaagtgccttgacaaaggcatacaaacaaggaagtagttcccgtgttgttcgagcagcagatctaataaacattccaggcatgaaaaagcctttaaagaaacgagtggcggcgatcttggagccggtagaagagagcctacctgaagaaaatggactagcatcagctgaagatgatgaagatggttcttctgatgctgaaaataatggtgcatgttctcctttcccacgtaacaaacataaaaaatctggtagatgcctgtttgtttggctaatgtgtcaggcattaggataaaatggatctgttttgaggcaactttgtggtgccacactgactgacttcatttaacgcaattgtgaaagtacccatttttatggagatttgtagcatcattcaggcaaatgcaaatcgagatcatatag

SEQ ID NO: 6867 - DNA, 831 bp, Zea mays
  Clone ID: 700581727_FLI
agaagacatactacaaaacggcatcattgatatcaaatagttgcaaggctgttgctattcttgcagggcacacagctgaggtctcggtgcttgcatatgaatatggtcgaaacctgggtctagccttccagttaattgatgatgttcttgatttcaccggcacctctgcatcccttgggaagggttcattgtctgatattcgccacggaattattactgccccgatgctatatgcgatggaggaattcccacaactgcaagaagttgttgaccggggttttgataatcctgcaaatgttgaaattgcccttgactatctccagaagagccgtgggattgaaaagacaaaagagcttgcacgagaacatgctgatcgtgcagtcaaggctatagaatctctacctgatagcgacgacgaggatgttctgacttcaaggcgtgctcttattgatatcacagaaagagtcatcacacggacaaaataggaaggtgttcggcgtccataaggtgaatggagagctgaacctcgcctttggcctagtgtttcacttggattttcttttttgtatacttcggttcattgcattcttttcgcagccaaaaccccaagttttgtgtatcattgctgaaatttaggattaagaaatggccctgcatttctgggaagcttctagaggttttggctgcatgtggcaacaaaatatatgtcaccgattgcaatggcaccagatatcgtgtagccatataagtgtgggagcattgtacccaatatacactcccgtaaagactaagatagtactaccataaaatatctgttaaccgttcctcttc

SEQ ID NO: 6868 - DNA, 596 bp, Zea mays
  Clone ID: 700582008_FLI
gcttcatgttgtcgatagacttaaagaactgattaagtacaaaggcttccagattgctcctgctgagcttgaaggactgcttttgtctcatccagaaatccttgatgccgctgttatcccgtatcctgatgctgaagcgggggaagttcctatcgcctacgttgtactatcaccgaagagttcactggccgaagctgatgtccagaaatttatcgagaaacaggtcgcgcactacaagaggctgaggaaggtaacgttcgtgggcagcgtaccgaaatctgctgcggggaagattttgaggagagagctcatcgcccaagtcagactgtccaagctgtagcagatttaatctcgatttcactgcagcccttgtcgtctgggttctgctggacacagaagtgcagaatctctgctgagcactgtacaagatttgtctatcaagtcactgtcaggaaccacacatttcagtctagacatgccagacactgatttcttttttttttgttaaggaataaagcattctggcctctagtatccacggatgaatgatgtatcctatattgcttggattcttcaagaaagttaaagtaatatat

SEQ ID NO: 6869 - DNA, 1055 bp, Zea mays
  Clone ID: 700582027_FLI
cagtccgggtctaccagaagcttcgtggccgaatgcgaggccctgcggagggtccgtcaccgctgcctcataaagatcgtcacctgctgctcgagcatcgaccaccgaggtgaagaattcaaggcgctggttttcgagttcatgcccaacggcagcctggacgactggctgcatccggcatctggagcacacccgctgaacaagacgctcagcctggctcagagactggacatcgctgtggacgtcttggatgctctggaataccttcacaaccagtgtcagccaccgatcatccattgcgatctcaagccgagcaacatcctgcttgcggaagacatgagcgctcgggttggagatttcggcatatcgaagatcctttccgacgacactagtaaagttctgctaaactcaatcagcttcactggactaaggggctcgatcggttatgttcctccagagtatggcgagggtcggtctgtctcggctcttggggacgtctacagcctcgggatactgctgctcgagatgttcaccgggaggaggcctaccgacgacgtgttccaaggctcgttggacctccatcgcttcgccgaggctgccctcccagacagagcctcggagatagccgacccgtccatctggcagcacgacgaagcgaccgcaaaagatcctgcagacgctgccgcgttgaggagccggagcgaggagtgcttggcttcagcgatccggctcggcgtctcctgctccaagcagcagccgagagagcgggtggcgatgcgggatgccgctgtggagatgcgtgccattagagacgcgtacctcagggttgccagctagctggatgaatgggggtgtgggcacacaagcatcttgctctgatcgatttccggtgttcaaaatcagaagcagcaaagctggatgcccagctctgaagtaaatcttttcgtacggtttagaaaattcattcattcatagttatgagaaatgtaaaatcgacacatttgtatttgttgttatgtcctctgtcctaaattatatatggttctagttttttt

SEQ ID NO: 6870 - DNA, 1638 bp, Zea mays
  Clone ID: 700582055_FLI
ccaatttccttccacttccagtaataatgctgaagtactaaaaagaaaaggggatgtggaatttgagttgcaactggaaatggctctttcagctactgctgctgaaactcaaaataataaactagctactcacatgaatcaattgactgttagcttacaagattctagttcaccattgaagaaattgcgtcaaaatgtggaagctttatccagctcaagtgcagtttggtcaagaagtgctggagctccattatattgggctgaggtatactgtggtgggcaagcatcaacaggaagatgggtacatgttgatgttgtgaataatctcattgatgctgaacagaatgtagaagcttcttctgccgtttgcaagaagcctttaagatatgttattgcttttgctggaaatggagccaaggatgtaaccagaaggtattgcttgcagtggcacagaattgcacaaggcagagtgaattcagagtggtgggataatgttttggcgccactaaaacagatggaactggcagcaacaaacaactatgaagacatggaacttcaaaccagagccctaacagagcctcttcctaccagtcaacaggcctataaggaccatcacctttatgctctcgagaagtggcttcacaagaaccaaatttttcatcccaaaggtccagttctcggtttctgtaaaggacatcctgtttatccaagatcctgtgttcaaacactgcagtcaagacatggatggttgcgggagggcctgcaagtccgagaaaacgagttgcctgcaaaggtggttacacgtccaaagaggactttcaatgcccagtcagttcaatcaagtggcaacgaagatggtctaaaaccaaccttggaactatatggtgaatggcaactggaaccactgcaacttcctcatgctgtgaatggcgttgtgccaaagaatgaacgaggccaagttgatttatggtcagataagtgccttccgcctggtactgtacacttgaggttaccaagattattccaggttgcaaagagacttggcatcgactacgctcctgctatggtcggatttgattatcgcagtggtcggtgccttccagtctttgatgggattgttgtctgtaccgagttcagaagtgctatcctggaggcatatgcagaagaagaggagcagagacgagctgtggagaagaagcaggaggaggctcaagcactctccagatggtatcagctgctctgctccattgtaacaaggcagaggttgaaggactcctacaaaacaccttcacacgggattggtaacgaaggcctgcccgaaaatgataatgtccatagaagcactctcagcagccgatcctcagaaagggaacctagttcaagcaaactgcagacagatcatgaccatgaccatgaatttccaaaggaagaccagagctttgatgaggagaccttcgtgaggacgaaacgctgcccgtgtggtttttctatccaagtagaggagttgtaactttgataccaggaatgcacaagtgcacatgtttaactgtgttaacatatggcccctttcgtccatttgaaagtcggaatccaaaacgtagttttgaatctacttacccatttggatccttgcaattg

SEQ ID NO: 6871 - DNA, 1135 bp, Zea mays
  Clone ID: 700582077_FLI
ggcacattctttagaacttccactgcattggagagcttcaagactagaaacaagatggttcattgattactatgctagagacagaaacatgtgccccttgctactccaatttgctgaaattgacttcaaccaggttcaatatgaacatcaaaaagatcttgcagtagtgacacggtggtggaagaaaattgggcttggtgaaaagttgccatttgcaagggatcgtctgatggagtgtttccattatgctaatggaattgtttgggatccaaagcttggaacgtgtcgtcaaatgcttgctaaagtttccaatctaattgtttacttggatgatgtttatgatgtatatggaaccatagaagaacttgtactcttcacaaatgcaattgcaaggtgggatgcgataccaaatgagacactcccagagtacatgaaagcactttattctattatatatgacacatcaaatgaagttgctgaacacgctttgaagaaacatggttgtagtatgcattatcttctacaaaaatcgtggtatgacatatgcctggcatttttggtggaggcgaaatggcaccatggaaactatagaccaagcattcaaaagtatctagagaatggatgggtatcatcttcagcaccattgttgttgttacatgccttctcaatgcttgattcagttgtcaacatgagtacgatatcccctttgcaaaccaaactgagattagttcaacatgtttccttaatttgcgtctctgcaatgattctgcaacacacttagatgagttgggaagaggagatgctccatctttcatagctttacacatgatcgagaatggtggtaatgagaatgattctcgtaaggccatgcaagagcatatcttgaagtcatggaaagtaattaatgaggaggcatttgatagttgccagtattctatgccctttaataaagcttgtattgacttggctcgcatttcacattgtgtttatcaaggtggagatggttttggtacaccaaatggtctaaagaagaaacaaattagagatttgttcttggatcccattgatatatgtaataaacaataaaatataaagatttattgagaatacgaagataatagtttgttagtgaaat

SEQ ID NO: 6872 - DNA, 830 bp, Zea mays
  Clone ID: 700582092_FLI
tcggcacgcaggctagcagcacagcagcagccagagccatcccctctcctcgctacgcttcgcttcctcggcgccgattcctcctcctcctcctccaccctcgtccgtccccttccggcgcacgagctcgcccgagatggcgaacgcgagatcgggtgtcgctgtgaacgatgagtgcatgctgaagtttggcgagctgcagtcgaagaggctgcaccgcttcataactttcaagatggacgacaagttcaaggagatagttgtggaccaggtcggggatcgcgctaccagctacgatgacttcacaaacagcctccctgagaatgactgccgatacgcgatctatgatttcgactttgttactgcagaggatgtccagaagagcaggatcttctatatcctatggtccccatcctccgccaaggtgaagagcaagatgctttacgcaagctcaaaccagaaattcaagagtggcctcaatggcattcaggttgaactccaggccacagatgcgagtgaaatcagcctcgatgagatcaaggatcgggcacgctaggcgcaccgccatcgcgagtttcatgatcacgcatcatggactcgcctactactgtggatttgtatgccattatagacttggtgctgcgaaagactgctttggtgatttgtgggtttgttgctgtgtaaaaagatcctcatggcttccagaagaccatgaaggtttggatctatcatgtaattccttgttatctgccaattatgtatggactatggacatgtgttgcgctgttcaactcactacaaataagtaatcgatatattccctacccatg

SEQ ID NO: 6873 - DNA, 1527 bp, Zea mays
  Clone ID: 700582095_FLI
ctgccaacttgacgcaaggtgttcaagaaatttaaaccatgcactcttcatcgggaataaagatccaaataagtttttgacattgatctgtagccagtactgcaatggctacgaagcttgtggttctcggtatcccctgggatgttgacactgaagggttacgagagtacatggccaagtttggacccctagacgattgtgtcgtcatgaaggagcggtcttctgggcgatctcgcgggtttggctatgtaacattcgcctcagctgacgatgcaaagaatgttcttgattgcgagcatgttcttgggagccgtacattagaagtgaaggtagctactccaaaggaagaaatgaaatcacaaggatcaaagaaagctacaaggatattcgttgctcgaattccgcaatcggtggatgagtcgatgtttcgtagacattttgaagcttttggggaaattcttgatctttacatgccaaaggaacatggttcaaaagggcatcgtggaattgggtttatcacgtttcagagtgcagagtctgtggacaacatcatgcaagagtcacatgagcttgatggtacaacagtagttgttgatcgtgcgactcctaaggatgaagatgtcagataccccccgagtaggccatctcagggtggctatggtgcatataacgcatacatttcagctgctaccaggtatgcaactctgggtgcaccaacgctgtatgaccatcctggatcagcttatggaagagggtattatggaccctctcaagcagtgggcaagaagatatttgttggtagacttccacaagaagcaaacacagatgatctaaggcagtactttggcagatttggtcgaatcgtagatgcatatattccaaaggaccccaaaagaagcggccaccgaggttttgggtttgtcaccttcgctgatgatggtgtggcagaacgagtagctcgtagaagccatgaaattctaggccatgaggttgcaatagacacagcggcaccacttgagaatgattcagctgctggtgggtacattgatccaatggatctttacggagcttatggttcaatgagatctttcggcaggttctgtggcggtctagattacaattatggctatggccccagcagcggaagcagccgatcaagatcggattggcgataccgaccttactgaacgtgtccattgtcagtgatgttctagtttacctccagggaaggaaactgaaatggcgaaaagaaacattttaagaatgttaagtgttacgttaagtggcatgttaatcgtaagagggccgtgcggaatctgtcgatttgttcatgttgtaattttggacatggaaatgcttttatgcaatttctttgccgtgattcacattattgacacacgatgaaggcagcagcctttgtgtagttattgtgtgggagtgctggatgtgtgataaaaaaaaagatcattttcaaaagaagttataagcgatcgacgggcgcccggaaccgtctgatcgttagtctct

SEQ ID NO: 6874 - DNA, 1317 bp, Zea mays
  Clone ID: 700582146_FLI
ctgctctctctcgcctctggttggcagagctctcttgaagcctcgagactcgtctcgccgctgctccctcagctctgccgctgcgtgcctccgttagctgttgcattgcagcgcagccccgcgagccttgagctgctagctcgcccttcaccacagtcctcagacatggagttcgaagaccgctgccacaaggtccaggagcccaagttcgactgcctgctcttcgacctcgacgacaccctgtatccgctgagcgccgggatcgcaggccatgtcaagaagaacattgaagattacatggttgagaagctgggtattgacgagaccaagatcgagaacctgggcaatctgctgtacaagaactacggcaccacgatggctggactcagggccatcggctacagcttcgattacgatgagtaccacgccttcgtccatggaaggctgccgtacgacaacatcaagcctgaccccattctcaagcacattctcaagaacctgcgcatccgcaaactcatattcaccaacggtgacatggtccacgccgtgagagccctcaagaggctgggcctggaggactgcttcgaggggatcatctgcttcgagaccctgaacccgccctgcccgccgcagggagaccaggagcccgagatcttcgacatcgccgaccacttcgcccgctccggcaccgccgacgagctgcccaagacccccgtgctgtgcaagcccaacgtggacgccatggaggaggcgctcaggatcgccaacgtcaacccgcacaaggcgatcttcttcgacgacagcgtacgcaacatccaggccgggaagcagattggcctccacacggtgctggtgggcaaatcgcagcgggtgaaaggcgcggaccacgcgctggagagcatccacaacatcagggaagcgctgccggagctgtgggaggaggccgagaaggcggaggacgtgctctaccccgaacgcgttgcgatggagacctcggtcaccgcgtaaaacccctgaatgcctccggtgcaccgtcagccgaactttctcgacatctccaggaccgcatcaacgatcacatgtcactcgctccccgagccagggccggtgatgatctcgcgctggaactgaatccaccagcaatggccgggccgaggatcgatttccgacagcaggaggggtgcagcatgtaaagggggaacagatgagatcatgtttgggttggtcccccgttgtatatgtagttatgtatcagccagtcctttgtttgtaaattaccagtatttagaagtaataagaaaatgggggtttacgtgt

SEQ ID NO: 6875 - DNA, 557 bp, Zea mays
  Clone ID: 700582151_FLI
gcccgtgattgatttgggttacttgtttgcggggtcgcaggaacgcggcgagctcggacgaaatccagctgcggatcgacccggtgcacggggacctcgacgaggagatcgacgggctgcactccagggtccgcatgctcaaaggggtggcccaggagataaattctgaagccaagttccagaatgattttcttcatgaactgcaaatgacccttgcaaaagctcaggctggagtgaagaacaacatgcggagattgaacaagagcatcatccagcagggctcaaaccatgttctctatgttgtcctctttgcactgttttgcttctttattgtctacctcttgtcaaagttctctagaagatagttccgtctttggtgggcaaatctaggataccatgacttgtatgtagtctaaagaaagaaaaaaactattgtacttctgcctggccttgtatcctcagtcttttcgtcgaaaatcgaatcaaactagaaatacccttcaaagatttatgctaacgtcatccactgatccctatgattggaactgttgggattg

SEQ ID NO: 6876 - DNA, 519 bp, Zea mays
  Clone ID: 700582179_FLI
ctcctcctcgcgacgatcccagtcctaatagtcgcgctactcgtcctggtggtgtccaacatcatcgtgacgtacactctccccgtgatgctgaacgtcgtcgggctcgccggcgtctttggggtgtacgccgtcgtgtgcgtcctagccctcgcgttcgtgttcatcaaggtgcccgagacgaagggcatgcctctcgaggtcatcaccgagttcttctccgttggggcaaagcaagccaaggaagaggaggaggaggaggaggccagggaaggttgatcacccggacggccggacccagttaccggcaccgcctgtggggatttttgtggtctgcacacttcaccgtggttggtcctgtgatgatgtatttgtgaaaaaaaaactttgggtagggggcagagatgatttggctgtacaatgtgaggcttgattctgccaaaggctggccttcagaactaggaagggtgtctgttatcttcttttgttgcttggagaccttgtgcttgtgttggttgg

SEQ ID NO: 6877 - DNA, 748 bp, Zea mays
  Clone ID: 700582207_FLI
tgcaaacattaggatcgtgaacaagtttttgaacggagaagttggacccaagaccattcatgttcctactggggagaagctttctgtttttgatgcggccatgagatacaaatctgagggccatgctactataatcctcgctggcgctgagtatggaagcggcagttctcgtgattgggctgctaagggtccgatgctcctgggagttaaagctgtaattgccaagagctttgagcgtatccacagaagcaacttggtggggatgggaatcattcctctgtgcttcaaagctggtgaggatgctgattcacttggcctcactggacatgagcggtacagcatcgatctccctaccaacctcagtgagatccgtcccggccaggatgtgactgttactaccgacaatgggaaatctttcacttgcatcgttcgctttgacactgaggtggagctggcgtacttcaaccatggaggcatcctcccttatgtcatccgcaacttggcagctgcgcataactgaggcaagatcacacaccgtttgacccacaatggcagtggcaggctccatgttcccagggctagcgacctggttctcaatgtagtgacatttgtgatggatctaggggtctctttgtcgattcagcccataaataaagtgtgaaataaaagccgcaggtggaggcaggaacctgctgattgagggaacagttttgcctgtgtttggttacatgaaatatctgtttcacag

SEQ ID NO: 6878 - DNA, 667 bp, Zea mays
  Clone ID: 700582230_FLI
gcccaaccccggcgtggtcgaccccaacaccaacctcacctacgacaacatgctctacgcccagatcgacgccgtgtacgcggccatggaggccatggggcacaccgacctcaccgtcaggatctccgagaccgggtggccgtccagaggggacgaggacgaggtgggcgccaccgtggccaacgccgccgcgtacaacgggaacctcatgaagaggatcgccatgggccagggcacgccgctcaagccgcacgtgcccgtcgacgtcttcgtgttcgcgctcttcaacgaggacatgaagcccggggcaacgtcggagaggaactacggcttgttttaccccaacggcacgccggtgtacagcctcggctttttcaacggagcgtccttcagcccgtcgccgacgtactcctcttcttccaagctggcgattacatttcagatggcggttgttgtcctgctcgccagcttctccatcctacacagtgccgtgccgtgccgtgcgtgaagattattgctatttttttgactaacccatctgtgccttcattgtacacattaggctagctaccataacccatattagtctgacttgatgtaaagcatgtgcgacagtagtgctgtccagctcaattgataatgcgtatatagtatctgtttggcgtcc

SEQ ID NO: 6879 - DNA, 722 bp, Zea mays
  Clone ID: 700582283_FLI
tcaacataaaaatgttgtgcgattcattggtgcatgcacaaaaccaccccaattttgcataattacagaatacatgtctggaggaagcctatatgactttgtgcacaagcagcataatgttctaaacctcaggactttattaaagtttgcagttgatgtatgccgagggatgtgctacttgcatgaaaggggtatcatccatagagacttgaagactgcaaaccttctaatggacaaagatcatgttgtgaaagtggctgattttggtgtagctcggttccaggatcaaggaggtgtcatgacagctgaaactggaacatacagatggatggcacctgaggttataaaccatcaaccctatgataacaaagcatgacttccaaagaagacgcatccaaaggtattggacttgatgcagagatgctgggaagcagacccatctgcccggcctgctttcccagacattttagccgaactggaggatcttttggcacaggttcagggaacaccgggaaagacggcccatgctccatcaaataactcgaacacgaaagattaacccccatgcacacatacctgacgtttttctgaattcagtgatctgccatgtttaggattcgagtcgctaattacgaggaatgtagcatatcgattttttttcactggatggttttgcttgtgtacatttgaacaatcttcttggggcctattttttatggtcc

SEQ ID NO: 6880 - DNA, 709 bp, Zea mays
  Clone ID: 700582355_FLI
ccggtctgcgagttgaatcatggcggagcacttggcttcgatcttcggcactgagaaggacagggtcaactgccctttttacttcaagattggggcctgtcgtcatggggatcgctgctctcgtctgcacaacaggccaactatatcaccaactcttgtgcttgctaacatgtatcagcgccctgatataacccctggagttgatgctcaaggccaacctattgaccctgagaagccgaagccgaagcccgccaccacaaaggaggggccaccgtgaccgtgatgactaccaccaccgtgaccgtgatgactaccgtggtggcggcggtggtggaaggggaagaggtagcaggtatgacaggtacgatgacggagccggcagaggtggcaggcatgccaggtatgatgatggagcaggcagaggcggcagacatgacaggtatgatgatggaggaaggcgcaggcatggtagcccctcaaggcgtgcaaggagcccagtcagggaaagcagcgaggagcgaagggccaagattgagcagtggaaccgtgaacgggagggaaaacagtgagctctcggtggctactgttcgccggacttgttgcttagctcggctctcatcgctatattctaagtatgcttgtgtggatgacattctgcctgtctaagtaaaaccttttaagatcaggattcctcggttcattttatggt

SEQ ID NO: 6881 - DNA, 499 bp, Zea mays
  Clone ID: 700582420_FLI
gaagattcttgtgtgcgctacgtcaaacaaagttgtaggagtgcacatgtgtggtgatgatgcacctgagataattcagggaattgcaattgctgttaaagctggattgacgaagcaagattttgatgccaccattggcattcaccccacatccgctgaggaattcgtcacaatgaggagcccgactagaaaaattcgaaaaagttctacagatcaggtagaatctaaagatgaggttgtaagtaagcagtagataccattttttcctaggaggtgttctcgggggagggagtattcctgctgcaggacgacagctggacggaattttggaatacaccggcagagtagctgaaataactgctaggaatttctgagaaatttcatgttagggaaccaacgatgctgtttaatagaattggctgtacatacctgtccgccgagctattttcctgtgtcttgtacgttgaaataaaatactgcaaatgtttgccttacggtc

SEQ ID NO: 6882 - DNA, 700 bp, Zea mays
  Clone ID: 700582449_FLI
ctgtgtgtaatttggagataatagtgttacaaaactccctgtcagattgggtgcagagctgtttcagacctctgaaactgaattttcagtgtttttactaaattttggatcaccacaacccttgttctatatgatttcagccatgagtttatattcaaaataggtagagatatccatggagaataacttttgtgaagggatagtggtctgttactaaaagaaattgggtgatcaatgcagctaaacaatgaaatgtgcaagggggcagtgttggctgattcagtaaattcagaggactgaaactgtgttttagtgatgtgtggccaacttcagagccacataacttgtgatctacatattttgggtcgtggatttttatagtaaacctgaagagccatggttggggaacaaatctgttcaggaatgcttgagctatccttgtttggaatagagagaaaaaggtgttcgaactatgtctatcaggcatgggaatgcaaacctgaataagtcactgtggatttggttcagtatttttctcctgactttggagctgtttagtatctgatctaaggattataaggcttaagtctgtatggaagattgatagtgggttagttggtcaacaaggttccttaaggtcggttcccctgttgttgcttggagctgggaaaaataaaaaggtgaagctgtgaactcagtc

SEQ ID NO: 6883 - DNA, 714 bp, Zea mays
  Clone ID: 700582460_FLI
gcaatatcgatgcgtacagcatctacacgccgacttgcaagaagacttcactccacaagcgcaggctaatcagaggaagaacgccctggttgcccagagggtacgatccctgcacggagaagtactccacgaagtactacaacctacctgaggtgcagagagctctacacgccaatgtcaccggaataccgtatccctgggtaacctgcagtgacccagtgtatgatttttggaaagattcaccgaggtccatgcttcctatctaccgtgaactcatcgccgcgggcataaggatatgggttttcagtggcgacgctgattccgttgtcccgctcaccgcgacaaggtactccattgacgccctctttctaccgactatcacgaactggtatccttggtacgacgacgaagaggtcggtgggtggtgccaggtgtacgaggggctgacactggtgacggtccgaggcgcagggcacgaggttcccctgcaccggccgcggcagggcctgaagctgttcgagcacttcctgcggggtgagcccatgcccaggcctgtagatagcgtccagtcgttttagaactggttgctgtctccccgcttggtgaaggaggagacctggctgcgctgcgcattcttgttgctgtaaactcatccgtcacactccgttgttaggatggatttgctgaaaatcagaacataatgttgctcgtttc

SEQ ID NO: 6884 - DNA, 778 bp, Zea mays
  Clone ID: 700582462_FLI
aacggagcccccaagccaaaggagccagaacaagaaccgccacagctaccacaagcacaaccccaacttcagctgcatactgaaccacagcaacccatgcaatctcaagttcagttgcattcgcaaacacaacactacctccaacctcaactgcagctccactctcagccgcagctgcaacccctcagccgcagttgcccccacaattgcaggtccatcagcagctgcagcaacccccacaagtgcaggtccaccagcagcccgaagtgcagccccaagaagcgcagttgcaatcatcagcccagcaaacctcccaaccgcaacctcaggcacaactacaatcacaggggcactcacaagcgcagctgcaagccggactgctgggtcagttgcagacacaggcgcaaaccggacctgacatggatagttagagactattgtgtagcctgagtataagcaaaaaagggaaaaaaaaccaggcacttttgctgcatctactagaaacctgtatgcctgcttgtgactcattagatcctgatttaggtttccgtgcttcctgtagaatgtaaatgcagtgtgattgcagttgccttgttgctaataatgcgaagccgttagttactgatgatgtcattattgtgtggaatactgaattcgtgacaagtgtcatggcatggttttatgtgacgtgctgaaagatattccgttgccattgtaatagccgaacttcgacatttgtccatggtgatagcgactgatttgaatgagttcttgctgc

SEQ ID NO: 6885 - DNA, 609 bp, Zea mays
  Clone ID: 700582463_FLI
gttagcaaaaatcaatagcttcgattattcatgatctggtatgaagtatgaactgtttgactaaaccatacttttgcagattactgatgaaggtggtggaataccaaggagtggtctctcaagaatttttacgtatctctatagtacagcagaaaaccctcctgatcttgatgtacataatgaaggagtaactatggctggatatggttatgggattcctattagtcgtctttatgctcgatatttcggcggggacttgcagatcatctctatggaaggatatggaactgatgcatacctccacttatcacggctgggagattcggaggaacccttgacttaatcgattcataagaagccattcctcattcctgtagttaggactctattgctttctcaattaccgtgctggtatgcaaatattgttctgaaggccagtcacctattagttcagctgtccatgccctatttgttatctttgttgttcattcatcatctcgatggaatgtgatcataattcagaatagttttgcttctggtttgtactgtcattataattgttcaacctccaataatggtatctgtcgagcacccgaggcattgaatttg

SEQ ID NO: 6886 - DNA, 972 bp, Zea mays
  Clone ID: 700582513_FLI
cggcgattctacggggcatgcacaaagcagagaaaatatgtcatcgtgacagagtatatgcctggaggcaatctgtatgattttcttcacacgctaaaaaatactttggatctcccaacggttctcaggattgctatcggcatctccaaggggatggattatttgcaccaaaataacatcatccatcgggacttgaagactgccaatttgcttatgggctctgattatgttgtgaagattgcagactttggagtctcaaggaatccatctcaaggtggagacatgactgctgaaactggtacctacagatggatggcacctgaggtaataaaccataagccgtacgatcacagggcagatatcttcagctttgctgtggttctgtgggagctggtcacttcaaagataccatacagaaatctgacacccttgcaagctgcactgggagtaaggcagggaatgcggttggagatcccgtcatgggtcaatccacaactgtctaaactgattcagcgttgctgggacgaaaatcctaacctgcgcccctctttctcagagatcactgcagagctggaaggcatgttaagggatcatcaggcctccaagggaagcaacaaacattcgaaggcaaaggcacacaaaaaatcgcagagagaggcagaataacgaggttgtcagttaccaccttgtgaaaagcttagtggagcttggctatcatcgtccaagattctgaggctactacaaagatgctgctagtgtacaattgtcaaatattgtatatgattggtgtgtgtgtgtgtttctattactcccaaaaacactatatacgggagaagcgtcgacaatacagcgggacaagcaaagacacggaatccttgtacaaaatggcttgcaagcagcataaaatgccctctagtttttgtatacaaaacatgaaaaatatatgtgcatgaaccgtgcgtgcttcctgtg

SEQ ID NO: 6887 - DNA, 642 bp, Zea mays
  Clone ID: 700582606_FLI
gaaaagtgtgtgtgattcattgggcattcgcatcatcgcatatagcccgcttggattaggaatgctcactgggaagtatggtgcttctaacctcccaaaaggaccaaggtcagtgctgttccgacaaatccttcctgggctggagcctctgctgtcttgcctgagaaggattgccgaaaagaaggggaagaccatgcctcaggtaagtgcttaccgagcgcagaacggcttgctgaaacgattctatgatcgcaccagcctaccagcacgtcgcaactacgatgcgcgatcgtcgaagtgttcctcgtgattcaaagatgatgccccgtactaccaacgcaggtggccatcaactggtgcatgtgcaagggcacagttcctatcccaggcgtcaaaacggtgaggcatgtccaggagaacctgggcgcgctcggctggaggctgagttctgccgagatctcggagctcgagtccgcagcgatggcggctccgaggaagatgatccagaatgtcttccagactgcctgaccgtgctgaatacatgtgtgtgtatgcatgtttctgcaatcgtctttactgaaaaatctgaaaccgggcagccgtgaaccttttcttctcgtaagattcataatatagatagtc

SEQ ID NO: 6888 - DNA, 703 bp, Zea mays
  Clone ID: 700582617_FLI
aaacaacttgtcgggagctgttccggagagcatggggaaccttattgccttaaatacgttagatctagaacaaaacaatttgaacggtctgattggatcatgggttggaaagttgaacaacttggtaagattatctctttcagacaataacttcagtgggcccattccatagtccattagttggtaatagagatcgagtgagctaggcctaccgatgcttgttttctagtacactgcaagtagcactttcttgcacacgtgcgtgaaattcctggtgaatgaacgaccatggaagaagcagctatctagcagtagaattggttcaaatcaagaccccgtatagcagaggattggaattgaaaacacaagcaaacattgaattgaaaccatctctgtgttagcacaagcaccggtctatgtttgcctcaccaagcggacatggggatgaacaacatgtcagcacagctacaccaggtgaagacggaggccaagccgaggaagatgcagcaagtgcgatggagcaaggcgccagggcacgaccacgtcgacaccgtgcgtgtgtgtgggccggagtgggccgtgtaagagccattgggctgggctgtaataggtgaggtataagtagcctcatcaccagagaacgaaccgtcgatgaacaaaacagtaaaactacgagcggcagcgccgtcgctgttttttcccg

SEQ ID NO: 6889 - DNA, 590 bp, Zea mays
  Clone ID: 700582674_FLI
ccctgactatgcacgaggttacaaaaccatgttttctgatggcttcccttatctgatagtctctcagggctcattggatgcattaaatgagatactcaaagagcctataccaattaaccgcttcagaccaaatattttagtggaggggtgccacccatatgcagaggatatgtggaaatcagtaaagataaacaagttaacatttcaaggtgtgaagttatgtggccgttgcaaggtgtactttgggcaaaatgcagtctgcaaggaatctctgtcagcaaatggggaaggaaggatcgtcaaggtcggggatccagtttaggccttgttcgtttacatcggattgtacccggaatcattccggctaatcaaagtttatataaattagagaagcaatccggctcggaatcgttccgacccaccaatccgacacaaacgaacaaggccttatgtgacacagtcgttctcttcatctgttgaagtgccagcctgagtgaccgaatcaggacggctatgtaacaaccacttgtataatttttagcactattttagatttatatttgctgaggaaagttaaattaatatttacg

SEQ ID NO: 6890 - DNA, 545 bp, Zea mays
  Clone ID: 700582682_FLI
ataaaaggtcaggtatcatagcaggaagaagcttgcggagcagaggccaagagttaaggggcagtttgtaagccagaagctgaaagcagctatggcaacggaagccgaaactgactcgtgacgggcgctagtccagaactgtaattttggttcttcccttcgcgccaggtgtgggcgattggactggtaagtctgaaggctggcaaaagtttttttttcttccttccatggttagcctttctgtacaaaggtgaactccacgtcgggtgtttgttggcatccaagccttattttttgcgaggtacatcaagttgacaaaatgttcggagggatagggtgaaaacggtgcaagcgccatatttcgtccatacgcttaggtgtttgtggagtgtgaaagcagagcctgtacagcatattcaccacccatttttgttgccattacaattgtagtaacttgtaattactactatgacaaaagtagacactgttgtagaacttacagccagcaggtcttttccatatgggacagtagcattttatttatt

SEQ ID NO: 6891 - DNA, 949 bp, Zea mays
  Clone ID: 700582716_FLI
tggaactgctggcgcatttgatgttaccactaaaggaatacttcatgcggcgcttgaaagatcagagtattggcgcctgtccgatgaaaaagggaaaccccctggagtattgggttggtggccttcaagagcagtcacatttatagagaatcatgatactggttctactcagggccattggaggttcccctatggtatggaactgcaaggatacgcctacatcctgacacaccctggcactcccgcagtcttctatgaccacatattttcacacttacaaccagagatcgctaaatttatttccattcgacaccgtcaaaagattcattgccgcagcaagatcaagatactaaaggcagagaggagtttatatgcggctgaaattgatgagaaggtaacaatgaaaatcggatcagaacattttgagccaagcggtccccagaactggattgttgctgctgagggtcaagattacaaaatctgggaagcgtcttcatagacttggcgggctgcgagtgccatataactgctcaaagactaaaaaggtacccagtatagctcttaaagaaacgtgtttgtattgtgcaggttgagatccagatcccttcacatttgattaaatctgaaattccttgagcaaactgccttttccaaaggaagctacaagaaagcataatgctaggagatggcgcctcagaatggtcagctggcgggagctgctgccgctgccgccatggagcagcaaaattcaacaacataagctatggaagcacttgccacggcgataggattatctaataggactactgttgaacattcgatatatccagaaccacccatcatttgcaggcacattggccattaaaatttagcttcgtcctctattttggagctatgtaaaagcatgcacaactctatttatgtgtgaaataaaatttgaatcttcatc

SEQ ID NO: 6892 - DNA, 1023 bp, Zea mays
  Clone ID: 700582736_FLI
cactcagtcactgatcacctgagcattgaactgacatataggaggaaattgtgtttatgacaacaccaacacgtacgcgcccaatacaactaggtgaagtttatagagcaaaaaagggggagaaggatatagatgccctagttgtcaatacctaatggccttatgatgctaaagtagtttcaggttttctatacagaacacatcatctaaagttctagatgagagaatcagttgagcaaactacgtcgatatcaacagaaactgacaggaacgcaaggttcgataagctggtttactcacttgcacctgcctgcttgtacatctgatgcctcaaccgaggtatcctctatagtcttctccactgctagagcatcctcatctagtgctttaactgtggcacccagagcagtttcttcggcgttggtggtatttgtacctggtggcgcaaccattgcatccttcagagtattctcaactgttgttgaatcctcatttgtcgcgactgtggcattctctacaggtttcccatctgctgtagacttatcatctagcaccttaacatcctctaccgtttcctcagttgttgtagcttcttcatctggttctccagctgcagtttgatcttcagttatctccctgattattggttcaacaatacctttgtttgctattttctcatctggtgcctctactgtaatttcacattctttggtctcaccagctggtgtgtcagcatctgctttaatttctgttttctcatctggtgcctcaactgtaatttcacctgccctggtctctccagctaatttgtcagcatcttcattattttctattttccccttctcgtctggtgcttcctccttagtttcaccttcagctgtctcctcaactactcctatggtagcagcattattctctgtactctcctcgagtggtactacttttgcctccacagtttcatcaaccatgaccatagagtgctcaatatttgcatcagccatagattcatcttctgaaattcgt

SEQ ID NO: 6893 - DNA, 456 bp, Zea mays
  Clone ID: 700582759_FLI
atttacgtatatgcccttgtcccggttcctttccccatccccaactccattatttgcttgatccttgagaagagagaggaagacgagagctagaagcgaaggagaaaagcagttcttcagctaggcaggagggcacaggaaggaggagatggcgtcaaagaggattcagaaggagctcaaggatctgcagaaggaccctcccacctcgtgcagtgcaggtcctgttggtgaagacatgttccactggcaggcaacaataatgggtccatctgatagcccatattcgttctatccttcctgtataatgatgaaccgaattgggtttgcagtacagtgccgcgtgtggtgctgaatgctgctgtattgtgtcacttggaagctgtaattctcagtgtcaaaaaaaactggtacttggaaccattttgcgtcggatggcgctgcaggccagtcaaaaac

SEQ ID NO: 6894 - DNA, 914 bp, Zea mays
  Clone ID: 700582851_FLI
ctctagaagaacttcatcagaagtccattatctatagaggtgtttcggcagacattcttatgctcgacagatcaggacatctgcagctggtggattttaggtttgcaaagaagttggaaggtcaaaggacatacacaatatgtgggatcgctgactctctggcaccagagattgttcttggtaggggtcatggatttcctgctgactggtgggcacttggagttttgatctatttcatgcttcagtcagacatgccattcgggtcctggagggagagcgagctggaacctattacaaaaattgccaaaggccaccttgttatgccagtgtctttcagtgcagaagttgttgaccttataaccaagctactcgtggtcgacgaaaacgcgcgccttggaaccagtggtgctgaagctgtgaagaaacacccctggtttgatggcactgattgggagcgaatagcatctgggacttgtgcagcacctgaagaaatcactgagcgcatcaactactgtatagaaactcttaatgaggacttgtccgcatctccttccgtgccgattgaagacccagatgatctcactgctccagagtggatccaggattggtgatctcaatagttgcatgactgtccaatgatgaattgttctagttgaggaaaacgtctctagtttttcaccgagcattctcatatcaaatggaagaaggtatacataagagttgatcgaactgacaagttgtacataccaaagattattccttctgtgatcatagatcagaatttgagatgccaagcaacagagactttggtctatgtttgctgcatagttcctggtaagaaggatctggatagtttgttggtgatccatgtacatgaactttggatcttctgtaattatatatccaatttgtgc

SEQ ID NO: 6895 - DNA, 950 bp, Zea mays
  Clone ID: 700582856_FLI
gccagccccgtgcactacaagtacaaccccatcaagaccatcaagacaaatgttgttgggacactgaacatgcttggattggccaagaggattggggcaaggtttctacttacaagcaccagtgagatctatggtgatcccctccagcaccctcaggtggaaacctattggggcaatgtcaaccctataggtgtcaggagctgctatgatgagggcaaacgtacagctgaaacattaaccatggactaccatcgtggtgccaaccttgaggtaaggattgcccggatctttaacacatatggtcctcgcatgtgcattgatgacggccgtgttgtcagtaatttcgttgctcaggcgctgaggaaggagcctttgacagtctatggtgatggcaagcagactaggagctttcaatatgtctcagatttggtggaagggctgatgaagctcatggaaggggagcacattgggccgttcaacctcggcaaccctggagaattcagcatgctggagctggctaaggtggtccaggacaccatcgacccagaggcgcacatcgagttccgtccgaacaccgcagatgatccgcacaagcgcaagcctgacatcagccgcgcgaaagagctcctcggctgggagcccaaggttcccctccgtgagggccttccccgcatggtcactgacttccgcaaacgtatcttcggggaccaggaagggtccaccgaggcagctggtggcctttcttaagtgctcaaaaacttgttgaagtgacacgtttgtatggtatatgacttgatacagttttggcgctgtgctctatacgtagttgttatatagggatataaatgtttgttaaagtatggaaatagcttggcacgctatactatgtaacgacgtaccattttgtaatgtcattgttaacgggttatccagaatgctaatagcgttat

SEQ ID NO: 6896 - DNA, 728 bp, Zea mays
  Clone ID: 700582861_FLI
ctgcacggcacaatatgctcctctcagacccagcaggcaccaattgctacctggacaaggagaatcagacacacattggaatgtctttctcctagagttggaggagcactcaagtcgcaccttgacgtcgccaccatactgtccaagtacttcgcagtggaggccgcgcagtttctgcggggagtggaagacgggtatgaagccttgagaagcttgcctgaatcaacagaaacagaattatccatcctccggaggggggtgaagctggcgaggcagctcgaggagatggagtgtgacaggtgttggaaggtgctcgcggatttctggtcagagatgttgctctacatcgcgccatcggagaatgtgaaggagcacatcgaggcactggcaaatggaggggagttcataacacactggtgggcgttgctcacccacgctggcattctagataggaatgtccacagtgcgtgacatagaaaatccatctacaaactcaggccacaaatcaacagccaatgggaatatctgaggtatcatatatagatcgatacattatttgtgtgttctcatgtatttatatatactccctccatcttgaagtatatatatggtatccaagtaattttatgacatattatattggaaacacaaatgctccatacaactgtcttgttatcatatttaggttggtgatatacattatattaatggtagtaatgcttgtgatt

SEQ ID NO: 6897 - DNA, 607 bp, Zea mays
  Clone ID: 700582864_FLI
ctgtgacggagctcctaaagaaagcctcgacgctctacgcgagcagacgacaactcaacggacacgccgtgggcacaagcgagcacaccgacgcgcccgcgcctgcatccacctccaagtccaacccacacagagatgccgcgagctctgtcggtcgtagcaggctgattcaagcaccggccgatccagccggccagtttccttccataccgagctccatggagtgtcacgagagcagcagccaaggtccgccgcagccggagctgttgagcatgccgggcgtggagagctcgggcctgcgttgtggggtgctggggcaggcgctgtacggtgtctgtgttccgaaggacgtagaagaaggctgggacctcgcgccgccttccgcgtcgtcggatgggatggggaggcgcgtccgtgctgctgccgcgccgcctcgccgtggtagcttccgtccgatgagatgtgtacggcgctcgagattgtgatattgtgcgtgcgttttagtttaaaaattaaggtgagcaacaaatattgagaacggagggagtagtacgtattctctatacaaatcaatataaatatggtgatcgtaatggtctattcctct

SEQ ID NO: 6898 - DNA, 920 bp, Zea mays
  Clone ID: 700582970_FLI
ctctatcagtacccattcaatgtaccagcatactatgcattgatactgcgatcgctcaccgtactggaaggtttagcactctatgctgaccctgattttaaggtgcttgctgcatcatacccttactttgcgaaaaggctactgactgatcccaacccatatctcagagatgctttaattgagcttgtattcaaggatggaaaattcagatggaataggcttgaaaatcttcttgttcaagggcgccaagatagggagtttgcagccaaagatgcactgcagcctgttctaaagcttctccttggtcctggtggggaggaattgcgtgcgttagttgtgaaagaggcagttcgtgtgacagaagccatcgccattggaacactggtcgattcatacaatgcagctccatcatttttgaagccattaatttccagcggcaatctagctgaaccctttaagtttagtgagactgaacaagaacagatgatggagctccgagaccaggttttcagagtatggggtcttttgagatcctcaaataactttgatccgagccttttgcagccaatcgttcaggttctacaagaaccagaggcccgtgtcttgggttctcgtgtcgcaggtggtgtaacacagcgccttgcggcacgtctgctgcaacagcttctcaggacccctcctgctcctggatcttcttagcagatatatagatataggctcgtatgattgtatgaagcatgtaaattgacacgatatttttcacaggaaatgagaaggaagcacaacccagaattcgagtatatagctagtttcttggttctaagtggataaagacattgtgcatcgagctttgtccagcagaccgtgtatatagttgtgtaaaaaacattgttttgtgctgtagattacactgtttacgg

SEQ ID NO: 6899 - DNA, 737 bp, Zea mays
  Clone ID: 700583066_FLI
agaaaacattgaaagaaattaccaacgatctgtgccctgtccttagcatacaacagctatatcgaatcagtacaatgtactgggatgataagtacggtacccacactgtttcatcagatgtcatctcaagtatgagagtaatgatgacagaagattctaataacgcggtcagcagttcgttcctgttggatgatgattccagcattccgttttcggtggacgacatctcgaagtcgatgacagaaatcgaggtaacagatgtcgacatgccacctctgatccgggagaattctggcttcaccttcctacaccaaagaaaggactaacagggtggtccttccagctgcatgtccctttttgcacattctttttctccgctcaacctgtgcataactcatgtacatacgctcgtgccttttgctctctggtcagggcttgttagatgtattgtctttggtttgattggttggttggttctttcctcgatcctctcccaattttgttgggcgaagggtccacaatctatgtttctccatactgtagtgaaaaggggccggatgcccctggtctccccgagctgcttttggaaaagctcgtggtcattaagcagttaagcttgtggaaaaggttctccacatctaccgagtcgttcgttgtgtcgccttcttcatatggatcatcgccatattgtaaattgcaaatacgattatagttgaaaaaagagatattacagtgat

SEQ ID NO: 6900 - DNA, 1246 bp, Zea mays
  Clone ID: 700583073_FLI
agctagcgcttatagcttgtcagccatggccaccgccgccgcgtctagcctcctcaagtcctccttcgcgggctcccggctcccggccgccacgcggaccacaccggcgtccctcgtggtggccaccggcccgcgcggcgccggcgcggggcccatctgcgcgtccatgtccatgtcctcctccaacccgccctacgacctgacgtccttccggttcagccccatcaaggagtccatcgtgtcccgcgagatgacccgtcgctacatgacggacatgatcacctacgccgacaccgacgtcgtcatcgtgggcgccggctccgcggggctgtcctgcgcgtacgagctctccaaggaccccgccgtgagcatcgccatcgtggagcagtcggtgtcgccgggcggcggcgcgtggctgggcgggcagctgttctcggccatggtggtgcgcaagccggcgcacctgttcctggacgagctgggcgtggcgtacgacgaggccgaggactacgtggtcatcaagcacgccgcgctcttcacgtccacggtcatgagcctgctcctggcgcgccccaacgtgaagctgttcaacgccgtggccgtggaggacctcatcgtcaggggagggcgcgtcggcggcgtcgtcaccaactgggcgctcgtgtccatgaaccacgacacgcagtcctgcatggaccccaacgtcatggaggccaaggtcgtggtcagctcctgcggccacgacgggcccttcggcgccaccggcgtcaagaggctccaggacatcggcatgatcagcgccgtgccggggatgaaggcgctcgacatgaacaccgccgaggacgagatcgtgcgcctcacgcgcgaggtcgttcccggcatgatcgtcaccggaatggaggtcgccgagattgacggcgcccccaggatgggcccgacgtttggcgccatgatgatctccggccagaaggcggcgcacctggcgctcaaggccctgggcaggcccaacgccgtggacgggaccatgtcgccgccgttgcgcgaggagttgatgattgcgtacaaggacgacgaggtcgtggacgcctgagtgcggcaagcagagaggaggatcgacgccagcagcgtcttatcttaattgccttgttgttcaatgatgaatcgatcgaattcccttgggttagctttattattgttgttgttattattaatttgactcgctatagtgtgtcgtgttcatagcacc

SEQ ID NO: 6901 - DNA, 739 bp, Zea mays
  Clone ID: 700583118_FLI
gctcaagggccgctacccatggatgagggggtcttcttatgacccgtgcaccgaaaggcactccaccgtgtactacaaccgcccggaggtgcagcgggctctccacgccaacgtcaccgccggcgccggcgccatgaactacacgtgggcgacctgcagtgacaccatcaacaacaactggggagattcacccaagtccgtgctccacatctacaaggaactcattgcagccggcctcagaatatgggtcttcagtggagatacggacgcggtagtccccttgacagcgacaaggtactccatcgacgccttgaaccttccaaccgtcgtcagctggtacccttggtacgacgccaaggagcagaagcagcagcaggaggttggtggatggagccaggtgtacgaggggctgaccctggtgacggtccgaggggcggggcacgaggttcctctccaccgcccgaggcaggcgctcatcctgtttcgccacttcttgcgtgggaaacctatgccgcctaagaacggaactgttgtgtagtagtatttgttttctcggcataattaatgatgcaaaaataatttatcgcgcgccttcagtctaaggccatgtttggattcggtactactaaagtttagttggactaaactttagtgactaaattttagtcactaaaatctaccgtttggttccggtgactaaaactttacacacaactattattactggacataaagactg

SEQ ID NO: 6902 - DNA, 592 bp, Zea mays
  Clone ID: 700583144_FLI
tgccatcggtatttgaaagaaagaaagcaatttggagctccactggcagcttttcagctcaatcaagaaaagcttgtccgcatgcttggcaacattcaggctatgcttctcgttggatggcgactgtgcaagctgtatgagtcaggcaaaatgacaccaggccggtctagtttaggcaaggcatggacgtccaagaaggccagggaggtggtttctcttgggcgagagctactgggtggcaatggcattttggttgattttcttgtcgccaaggcattttgtgacgtggagcccattttctcgtacgagggcacctatgacattaatagcctggtggctggcagagagatcaccgggatcgcgagcttcaagcctgctgtgtcagcaaaatcacgcctgtgaaagttgtttttttctttgttccccaatgaagacagtagaaatcaaccttatacattcagatgattgggaataagaacggtaggaaagctgtaaaactcgacgtgcttcctcgtatgtactgttctgtttcaaattattcgacgttttgtcggaacggaacggaagacctgtatggctgtatatgatactc

SEQ ID NO: 6903 - DNA, 313 bp, Zea mays
  Clone ID: 700583268_FLI
catttaccgcatggaacgagtaccgttattattttatttgtgtcgtgtatactgctagtagtgaaccctcaatcaaagaccgaaatcccctggggagtcggagtcggtagtaggtgaagctagtaacaaggttggcgaaatattattttctggcctgactgcctatatatgttgtacgtgattggtatcgtaatattcattcgcttttgtgatacataattcgttattggatcttcaattgtgttctgctctcggaacacggtggcgatgtgcctcgtagaaaaatgcaaaggcctcagcgttcttgtttgtt

SEQ ID NO: 6904 - DNA, 478 bp, Zea mays
  Clone ID: 700583429_FLI
actaattggtgccacagacccacagaaatctgaaccaggaaccatcaggggtgatcttgccattgttgttggaagaaacatcattcatggaagtgatggcccagagacagcgaaggatgagatcgctttatggtttgaacccaaggagctggtctcttacaccagcaatgcggagaagtggatctatggggtgaattaacgagagagtcaatctgttttttttccttcttttgatctcggttttcacataattgccgacagacctaggcacaaggatgtaataaagtcgctaccgtcacttctgagttggattgtgaccttcaggtgtagtaaggcacaaggaaggatggaaaggaaaggaatataccgtgaaatatagagcgtgcactgagtagtcgcgatgttcaaatcaaactatatatcaccgtcactggagtcatgtaatccaagatggtgatgcagatgtttctttggatct

SEQ ID NO: 6905 - DNA, 518 bp, Zea mays
  Clone ID: 700583452_FLI
caacaccaaaggggagaagaacatgtgcgtggtcggagccatcaacaactacacagcgacgccgtcatggagccggttgttgctggcgatctccaaaggggggaaggtagggccgaaccggtgcagcgcctgcaggaagagggttggacttacgggattcaactgccggtgtgggaacttgtactgcgcactccaccgctactccgacaagcacgactgcaagttcgactaccggactgctgccagggacgccattgccaaggctaatccggtggtgaaggcagacaagctcgacaagatctagggggggttccctacggttgggtatcaggaagattgtaaaccgcggtaactcgtcatgcggaactgctgccttgccccccgcgcctttctcttccatgtttgctgctacaatcttgttgttgggcattgcagtgcacggtgcacacttgtgtagcccgcctcgagaattcctgcctctgcatctggtcagttctaaaatgatttgcatgttggct

SEQ ID NO: 6906 - DNA, 1079 bp, Zea mays
  Clone ID: 700583520_FLI
tgggagcatctttgagggcctcctgccgaatgacataaatgtgtatgcgaccaccgcgtcaaatgcagaggagagtagctgggggacgtactgccctggcgagttcccgagccctccaccggagtatgacacttgcttgggagacctgtatagtgttgcttggatggaagacagtgatttccacaatctgcgaactgaatctctcaagcagcaatacaacttggtcaaggataggacagcggttcaggatacattcagctatggctcccatgtgatgcaatatggttcattggagttgaatgttaagcatctgttttcgtacattggcacaaaccctgctaacgatgacaacacgttcatagaagacaactcgttgccatcattctcaaaggctgttaatcagcgcgacgctgaccttgtctacttctggcagaagtaccggaaattggcagacagctcacatgagaaaaatgaagctcggagggagttgcttgaagtgatggcccacaggtctcatgttgacagcagtgttgagctcattggaagccttctctttggctctgaggacggtccaagggttctgaaagccgtccgtgcagctggtgagcctctcgtcgatgattggagctgtctcaagtccacggttcgtacttttgaggcgcaatgtgggtcgttggcgcagtatgggatgaagcacatgcggtccttcgcaaacatctgcaacgctggcatccttcctgaagcagtgtcgaaggtcgctgctcaggcttgcaccagcattccttccaacccctggagttctatccacaagggttttagcgcctaagaatcgtaaggtgaggcgaaatatttcagccgctccaccgcaacgaactggtttacattaccagtcctcaggggggtcctagttcttgaaccactattatagctgttccaccgttccagattacatagctatgcccaatttccggtgtacatattatagtcggaaagttatttggcaattgtattggtcgttgctgtatatattccctatagtttgttagcagatgtgtagtttgtgattccataaaaatgaa

SEQ ID NO: 6907 - DNA, 817 bp, Zea mays
  Clone ID: 700583620_FLI
ctgaagcagatccacctatattccaccgtgatgttaaggccagcaacattctgttggactccaaattcgttgcaaaggtagccgattttggtctctcgaggcttgctccagtgccagatgtcgaagggacattgccagctcatgtatccactgttgtcaagggcaccccaggctatcttgatccggaatacttcctaactcacaaactgaccgacaagagtgatgtttacagcctgggtgtcgtgttccttgaaatgttaactggtatgaaaccaattgagcatggtaaaaacatagtgagagaggtaaactcagcttgccagtcgggcgcagtttctggaataatcgatggccggatgggcttataccccccagaatgcatcaagaggttcttatcactagcaaccaagtgttgccaggatgaaactgatgacaggccttccatgtgggagattgtcagagaacttgagctcatcttgaggatgatgcctgaagaggacctgattctgctggaaacctcagaaacagactcgaccgatgtcagtaagtcgttgtcatcttcagcgaccaggaccctcttcgtctcgtcacaggcctctgggagtcttgatgcgagcagcggcatgatctctggaagagtaactccccggtaggcatggtgtaatacttgtgaatatgcaagtttgttctgtaacattataggcttaccactcctaggacctgtcttttatgaattattcatattcagccgaacgtacagtagataatagcttatgatacactggaacatagctggcattgcattctttacctttct

SEQ ID NO: 6908 - DNA, 523 bp, Zea mays
  Clone ID: 700583718_FLI
cagcaatccacacaagcacttcgacgtcacacgggcgctgcacacagacacaccaagcgtcggcaccaatggcttactaccaggaggtggactactgctcggaggaggtgaggtcggtggccccggccggcttcggccgccacggcggcggcgtccagcagcacgtcgtcaaggagaagttcgaggaggtcgacacggtcgcacgcgccggcgccaaccaccaccaccaccatggtcaccacggcggccacggcttcgtggtgcgcgagaccagggtcgaggaggacatcaacacctgcaccggcgaggtccacgagcgcagggagagcttcctcgccagggctaactgagcagcccgggcggccggcatccacgcccgttcgtgcctgcctgcgtgccttatgtatgtctgtgattgtgcagggtcatcgtacttggctagcgtacgtacgtgcacgcactcagctcctgtacgaattacgacaataagctcgtgacctgaataaaacttcttcgtaatact

SEQ ID NO: 6909 - DNA, 932 bp, Zea mays
  Clone ID: 700583807_FLI
cgtcaacttgtttcttggatcggtgcctttccttcgtgatttactcactcaactcatgccaccctctcaaagtttcaaccgtgtgcccatcgcaataaaaatacaatcaataatagagaggggaggtagcaacaccggctgcttaatctcttccttttcttcttcctatctccagcgcatcccaagaggcggaaagggaggagcgtggagcggcgaattattgtttgtttccccaagatgtcttctccaagcaagcgccgggagatggacctcatgaagctgatgatgagcgactacaaggtggagatggtgaacgatgggatgcaggagttctttgttgaatttcgtgggcctaacgaaagcatttatcaaggaggtgtatggaaggttagagtagaattgccagacgcatatccttacaaatccccatcgatcggtttcatcaataagatatatcacccaaatgtcgatgaaatgtctggttcagtctgtttggatgtcatcaaccagacttggagcccaatgtttgatcttgtcaatgtgttcgaggtcttccttccacaacttctgttatatcctaatccttctgatccattaaatggagatgcagctgcgttgatgatgcgtgatcgccctgcttacgaacaaaaagtgaaagagtactgtgaaaaatacgccaaaccaggggatgctggtgtcaccccagaagagcagtccagtgacgaagagctgagtgaagatgaagacgactcgggtgatgaggagataatgggcaaaccagacccatagtcaagttggcacctactatatttgtaatctgcaaacgatgtttactgcagcaactgcaattaaacaccccatgaacatccgcgtgcagtctgagtgccatgtaaataaactgcaatttcaccaattggatttccagcataact

SEQ ID NO: 6910 - DNA, 584 bp, Zea mays
  Clone ID: 700583813_FLI
cgtggccatcggcctcttcttccccacatgctctccatgcttgagctcgccccttgtcagcttcagctcgtgcccagggcctctgctcgccggacgctgtagcacatgctccctgctcggcctccctggcgtgctgctccctcaccttggcgtccctgcgagctccttctccctcgcccggtttccagctcgggcctcgccggatgccgacgccgcttctctgaccttgccttgacactaaatcgctgcagcacgccatgccgtgtgttggggtcgtgcttcggtacgccgaaggtctcacacgaagaagcagcttcggccaaagtcgtttctaagagatggccgaaggtcccttttcatggagcttcggcgttttaaaccgacatagaggcagaatgacctttttatacatgtatgtccgagtcaatgttgtaaacttccgcaaggggcatagttgtaattcgtcacaggctgcgacctgtgtctataaatagatgaacagtacctctgtactgttcacgcgaacttgcttttggccttcgcatcacattcgtactttttgccttccgcaagaccgaaggtac

SEQ ID NO: 6911 - DNA, 569 bp, Zea mays
  Clone ID: 700583818_FLI
tttttcgacaaggatggcaacggtttcatcgagcccgaggagcttcaggaagccctgatggaggacgggggagctgataccatggacgtggtcaatgacatattgcaagaagttgacacagacaaggatgggaaaattagctacgacgaatttgtagcgatgatgaaaactggcacggactggaggaaggcatcgcggcactattcgagagggcgcttcaatagccttagcataaagctgataaaagacgggtctgtaaagctgggtagcgagtgaggttgcacctctgcagccgatgttcttctcttctgatcttcttttatcttctccaggcattgcccctcgggcccactaatgattatttgtggtccgggatttagatagccggagcctccctgattggtttactcgtgtaattagcagccttttccagtgtcgctggggagcatctgctgaaggattgcacacctgcatgcctggtcgtctcctccggtgtagtacctgacgctcaaaatgttgtaaaaatgttttggtgttgacctcaaatataatgcaatttgctcgctggt

SEQ ID NO: 6912 - DNA, 700 bp, Zea mays
  Clone ID: 700583872_FLI
acgaactcccgttctccatttccagccatggcggtgtcgatcgagctcaccaaggagtacggctacgtcgtgctggtgctggtggcctatgtcttcctcaacctttggatgggcttccaggtcggcaaggcccgcagaaactacaaggtgttctaccccaccatgtacgccatcgagtcggagaacaaggacgccaagctcttcaactgcgtgcagagggggcaccagaactctctagagtggatgcccgttttcttcgtcatactgctgctgggcggtctgcagcacccgaccatcgccgccggtctgggcggcatctacatcgtcgcgaggttcttctacttcaagggatacgccaccggcgttccggacaaccgtctcaagattggggggctcaactacttggcgttgcttgggctgatcatttgcacagcatctttcggcatcaacctgctcatcagggagatgctctaaactttgggtttatatgtgagctccaggctgggttaaccgcacaagttactcatggtctgagcataaaaactttgtgatactagtcgtttggggttttatagtggagttatcgtttctttctttgtctgtgtgttgattagcaaaagaagtgtgcgtctgcgtcttatagctgtgatggaataagaggagacagatgggttgaagcgtgaatcgtacagttcttgct

SEQ ID NO: 6913 - DNA, 628 bp, Glycine max
  Clone ID: 700605109_FLI
gttccgaaatggacgctggcggaaagatcaagaagggcgccggagaagaaagggcggcggcataagaagaagccggtttcaaggtccgtcaaggccggtctccaattccccgtcggaagaattggccgttatttgaagaaaggaaggtacgcccagcgtgtcggtaccggtgctcccgtttacttggccgcagttctcgagtacctagctgctgaggtgcttgagttggctgggaatgctgcacgtgacaacaagaagaacaggattattccgagacatgtgctattggctgtgaggaacgatgaggagttggggaaattgcttgctggtgtcaccattgcacatggtggtgtgcttccaaacattaaccctgttttgttgcctaagaagacggagagggctgccaaggagcctaagtctccatccaaggctactaaatctcctaagaaggcctagattatcctttttttttttttttttttaaatctagtgttgtatatcggtgcttagatgcttttggtgtaacaggaaatttgatgtgtttcttaaacattgtaattcttgtcccattgtgttgcttgtaggagtgagtttgctttattaatgaaaagtggaaacctttgttttc

SEQ ID NO: 6914 - DNA, 487 bp, Glycine max
  Clone ID: 700605139_FLI
gtaagttaacaattacaaaagatgaatggaagaaggaccagacacagcagcagctctctgtgcccgatgtgcttcacatttataaagctctttcattcatcttttgtaagttaacaattacaagtactggtttgtcactcgtgtttgtgtgtctgctattctgcctctgtgacaagcttgtgaggttctatgataatgccttcgtacatcattacaaagttttgccacttaaaacattgtgcatggcagttgtgagtctttttgcctaagcaagaatgtgcttagagagtttttttggtactggaaggaaagcttttgttgtttttcttacccataaggtttaccaaaaatctttattttgttattgctgaagttattgttttagttgcttttgatttgtagaacaaggtccggcaaccatatacttttagttttggcctaaattatacaggaggacacgcaaatagtttttaattgttcttccttg

SEQ ID NO: 6915 - DNA, 1909 bp, Glycine max
  Clone ID: 700605413_FLI
ggcgactcagctgctttgtatgtgttgcggtgctcagcctcagcctcagcctcaggcagcaccgtttatgaggttcccattttggaattcagttcatccaaagaatccaacaagtgtagtaagggtgcaagcagaagcagcagatatgaatatgaattcaatcccacacgtgctgagtgttgctgggtctgattctgggggtggtgctggaatccaagctgatcttaagacttgtgcggctcgccgtgtctactgttccactgtcattactgctgttactgctcagaacactgctggggttcaaggactcaacattctacctgaggattttgtggcagaccagttgcactctgtgctctctgatatgcatgttcatgtcgtcaaaacaggcatgctgccctctcttaatatagtcaaggtcctttgtcagacccttaggaaatttcccatcaaagctcttgtggttgatcctgtcatgatatctaccagtggggatgtacttgttggtccttccgttcttgctggatttctggaggagctgcttcccatgactgacattgtaaccccaaatataaaagaggcatcagttttacttggtggtgtgccgctgaaatcagtttctgacatgcgcactgctgccaaattgatacatgatttgggtcctaggaatgtacttgtcaagggtggtgacctccctaattcgttagatgctattgatgtattctttgatggtgaggagttctacgagctgtgttcaccgcgtgtaaatactcgcaatagtcatggtactggttgtaccttggcatcatgcatagcagcagagctggcaaagggttcatcaatgctttctgcagttaagacagctaaacattttattgaggctgccttggattatagtagagatatgacaattggaaatggagctcaaggcccttttgaccattttttggcacttaatatcaatcagagttcttgtaggctgaataggttcaatccaaatgacttgctgttatatgctgtaacggattcggctatgaataggaagtggggccgttctattgctgaagctgttaaggctgctgtagaaggaggtgctaccattgttcaattaagggagaaggatgctgagacacgagattttcttgaagctgccaaagtgtgcctcgaaatatgccattcctatggagtacctttacttataaatgatcgtatagatgtggcccttgcttgtgatgctgatggtgttcatgttggtcagtctgacatgcctgcacgtcttgctagaactctccttggtcctgaaaagataattggtgtatcgtgcaagacgcctgagcaagcccaccaagcatggattgatggtgccgattacattggttgtggtggtgtttatccaactaatacaaaggcaaataatcgtactataggcttagaaggcttgaaggaagtatgcctggcctctacacttcctgtggttgcaattggtggcattggtctgtcaaatgcacgtgaagtcatgaaacttggtgcaccaaatctcaatggggttgctgttgtttctgctctatttgacagggaatgcattttgactgagacaagaaacttgcacgcattagtaagttaggcagcattgttgatacaatgaatatattagaatgtgggagcaattttgcttggttctttctagtcaaggaagtgattactaaagttgtagttgcttttgcctctaggatggaaatatataactgcatattcttttcggcaccgtgctaaacttacaaaacataccaattaagtagtttatgattgctcgatactggggcagaacaaaacatttggaggctcattcatttgcctatgttggatgttcgtacctgttgatttacaaataatggtttgattgttcgcg

SEQ ID NO: 6916 - DNA, 1222 bp, Glycine max
  Clone ID: 700605438_FLI
ggtgaatgcaacacttggatggaataccgaactactacagcaagcatttccagcgttttctagaaacaacttcattcttctctttctctctatctattcattcacgtttgggagatagaaaaggtaagggaaaatccaaagaaagaaaggaaacggaataattcgatacccctctcgtctcgtaactaaccatggcagcgttccgatggaagagcttcgaggagaatgaggatcgcccagccaagcctcgtcattttggcgtcaccgagattcaaagcccccactgcactctcttctcccacaaccttcttcaggatatttttgaatctatgggagactatgtagatgggttaaagttttctggaggttctcacagcatgatgccaaaggctactatcaagcaaatcattgacatggcccatcagcatgacgtgtatgttagcacgggtgattgggctgagcacatgattagcaaaagtccatcaggtttcaaggaatatgtagaggaatgcaagcagttggggtttgacacaattgagctcaatgtgggatcgcttgagattcctgaagaaacctttttgagatttgtccgcttggtcaaaagtggtggtctcaaagctaagcctcattttcaagtgaagtttaatgagtctgatattcccaaaggtggtgacagggcttatggggcttatattccccctgtacctagatcatttgaattggtagaagatgtgaatctcttgatcagaagggctgagagatgtctggaagcaggtgcagacatgataatgattgatgctgatgatgtcagcaaacatgctgataacatgcgtgcagacatcattgccaaaatcatagggcgccttggtattgagaagactatgtttgaagcatcaaatcagagaatatcggagtggttcatcaaacaatatggtccaaaggtgaacctctttattgatcattcgaacgtggtggatgtggagtgcctcagggggcgcaacttgggtagaaatcttgcttctttccttggtgcttcagatttcctgttctgaagtgagggaattttcgtatagcaccaagtggggttgatttgtttgtgcataatgcaaagacttgaggtttgccatgtgtgttacagttagtgtgttacatatttcctttagtgattgaagattggaaaattttaaatggagagactgaaataaatgaaacatatttcatg

SEQ ID NO: 6917 - DNA, 1722 bp, Glycine max
  Clone ID: 700605475_FLI
gaagaaagagatgataccttgaggatccaaaggctcaggaagaaattttacttccactttcaagattatgttgatttgattatctggaaggtgcaattcttggaccgacaccatttactaatcaagtttggtagtgtagatggaggggtgtcccgaaatgctgatcaccacccagcttttgttgctgtatataacatggatacaactgaaattgtatcattttatcagaattcaccagacgagctttatctgttgtttgagcagttctgtgaccacttccatgcaacatcaaggaattcaatgtatatgaatttcatatcttctcattcaaataatatccacgcactggaacagctccggagcattaaagataaggcaagcagctctgcacagtttgtgaagaagatgcttgcctctttgcccttcagctgtcagtcacagagtccttctccttacttcgaccaatctcttttccggtttgatgataaggtttactattgatgtttgtttgcttgtctagtttccatgcagtgaccagagttttttaattgaattatatatatttgggacaaagttggggatataccggtgaaagtggaattccagctgttagatgagcattaataaataagttagctggaatgtggaatcaaattggggtcctccctttggagacaggtcataatatcagtttgacttattacttaaggcctgtctttttatcctgttgggagggtatcatgtcgatctgaatgtccattttatgacttttatatatctggaaagaaatttgaagctgagtttctttgctggtggtggcaacctttccaacactaatattgacaactggtgtattagaaaggatatggtaattggaatatagattctagaggctgattactgtttgagattccaattttattgaaaaaagaggggtgattggaggcatagaattttacgttgaattactttgggaagaaagattttctatggttattcatgtgaaaaaaagggattggagggggtggagggggaaaaaattggcatgcaagttgatgtgccatgtaaaaagcgtttgtcttatatacatacattaaacatacacgcacatgcacaaatatctgcaagatttactaaacaatgaatgaaagttctcagtcgtttaatttacttttgtctcctttataatccacaaaaattgtgattcttcactttagtactttttaattctcccccgtcgttgcagctgatttctgcaactgatcgacataggcaatcaactgaccatccaatcaagtttattttaaggaggcatccgtattctctcaaatttaagatcaaaccaggtcctgaagctggtagtatggatggtcgtgcaaaaaagatctcgtcgtttctttttcatccaattttgccccttgctctctctgttcaacagactttgttcttgcagccttcagttgtaaatattcactttcgaagatgagcgtagatttatagattacaaatgagagtagatttacatttacttgtcttccactgttaccgtctttactgaatcaagaggatgtatattcagtcggtacttgcaagccaaaatgtatgtcaatcagattctaacgattgctgtgacaatcgacgctcttctaaattttggtcattttattttattttaaaattttaaactaattaccgaaatttttatcatttaaaaaatattgg

SEQ ID NO: 6918 - DNA, 470 bp, Glycine max
  Clone ID: 700605481_FLI
gtttcccatccgttacattgcagcccagagggcgtcggtttcagcttagatgtgcggcaaaaccagagacagtgaagaaggtgtgtgacatagtcaagaagcaattggcactgccagatgaatcagctgttactggagagtctaaatttgctgcgcttggagctgattctcttgacacggttgagattgtgatgggacttgaggaggaatttggtattaccgtggaagaagaaagtgcccagagtatcaccaccgttcaagacgctgctgatatgatcgataagcttcttgaaaccaaggcttaaactagtaaaaaggacaagcatgtccattttagagttttttgctatgtcgacggaaggggtttttaatctttatctttggtattacaacttgattgtctaagtaactgctagttcttttctggattgtattgcgattactataataatagttttaagaactcagtc

SEQ ID NO: 6919 - DNA, 592 bp, Glycine max
  Clone ID: 700605511_FLI
tgtagatatgtgagaatcatcctcagggagttgttttggtaagattcaaggataggaaggatgcccaaaagtgcatagaattgatgaatggaagatggtttggtggtagacagatacatgccagtgaagatgatggttcagttaaccatgccttagtccgggatctggaagaagatgccattcggctggagcagtttggtgccgaacttgaaggtgactgagttaatgaggatagcattgcaccagattcacagttccatataagtccggacctaggaatatttcacaatggctgaagcttgtggaactaggccatcacttttctcggttttgcaaagatattaattttccttatgtaattgggaaaagcaaaaaagaaatagaagagaaaagaagttactgatttggctagctcatcttatttggaaaattgtattacaccctgcgtgtagtgtagcattccgttattctaggtcacagattttgagttatgacatgtgacaatgcagttaaatttgaactgttagattaatttaagttatcttaaccgttggagtaagacacttgaggatgtaaagaagtgtttcatcat

SEQ ID NO: 6920 - DNA, 1271 bp, Glycine max
  Clone ID: 700605581_FLI
cagttacaagaaatagatcatacgagaggaaagaacgcagtgatggttctatcttctgaagatgaagaagaagaagaagaagaagacagcgattgcgaagaaagcgattgcgatgaagcgtccgaatccgatgacggtgacgttgatgattcctccctctccaacaaagtcgtcgccctccttcgagaaggaaaagatatcgaatctttgaaattaaacgaatgcaaagcgtatctacggaatcacggcttgaggatcgcaggaaatagagatgtttgtgttgccaggataaaggagcattggaggttaaaacatggaagtggctacacgctatacccgagatcgtcctttaccattaattgtactggtgatgtctgcatgggagatgttgttctgttcagacagaaagtttatgaaaagtttgataaagtgactcggcatggaaaaactctaggaaacagaactgttgctgggagggttgtgaaggagagctatggtgcagctaaacaacagcatacctttactgttgaggtgttgtggagtagtggggttaggaaattgcctccactatctcctttgcttgtaaagggccggaatctctataaacagaaaacttacagacagagatggaaaaatgaagctgatagaatcgaggtgcttcgtgagaagcacggacgtggtgcagcagcgagatctataagatcattgaagcgaaaaaataaaagctgttatgcaaatgaatctaaaggttcaaaacggcagcatgaaatccatactaaaaaacaatcaaaaataggaagatccaatgtagtagacaaggttaggcaccaagatggctccaaaagagcaaacaactttcaacctcgagaggtcacttcatcaagtcaagcaacacagaaggagaaagcatcttcaagagcctccagatacacaaggggaaggcacaattcggctgaatttgaccgctaccaagttccagtttatccattacacaattatccacagtacacaccaagcaggaatgagccaagtgagttcttttatcacatcagagacctaattccaaatatgacagaattcccaccttccaggcctcgtgttggtgaattcgcatctagatcccaacttccagtatccaacgatatttgtcatgctcgtacaaacctatacgactttgaaatgaggaattatggatggaggaaatacgatatatgatgtgaattgtgatctatttttcattaagaagactcaagagtactgagttttgtttc

SEQ ID NO: 6921 - DNA, 837 bp, Glycine max
  Clone ID: 700605616_FLI
gcttcttcagccactccgcacctcgcagcctctgtgccctcaacaaccatggctgaaatcgaaactaccgttccagatcccacccaaatcgacgtcaaactcttcaatcgctggagcttcgaggatgttgaggttaatgatatgtctctggctgattacattggagtgtccccatcaaagcatgctacatatgttcctcacactgctggtaggtactcagtgaagaggttcaggaaagcgcagtgccccattgttgagaggctcaccaactctctgatgatgcacgggaggaacaatggaaagaagctcatggctgtcaggattatcaagcatgccatggagatcatccacttgctcactgacctgaacccaattcaggtcattgttgatgccgtcatcaatagtggtccccgtgaagatgcaactagaattggttctgctggagtggtgaggagacaggctgttgatatctcaccccttcgacgtgttaatcaggctatatatcttctaacaacaggtgctcgggaagctgctttcagaaacatcaagacaattgctgaatgcttggccgatgaacttattaatgcagccaaaggttcatccaatagttatgctatcaagaaaaaggatgaaattgagagagttgccaaggctaatcgttaagccaacccaacaaccagtattgtggccagaaagatttcgacctttgtacttcatttatttaaattttgaatattgtgtattacttttgatgaatttagttaatttttagttcgcgtaaggattttacatgaacgatttatttagttaatttagtttgcgtaaggattttacatg

SEQ ID NO: 6922 - DNA, 1473 bp, Glycine max
  Clone ID: 700605662_FLI
gaaagctgatgatgactcgtggagccatattatagaggctcttctagttggcagtggaacgtcgactggtactgttgattggcttcttgaagagcttctaaaggataagcttcaacagtggctttcttgcagatctcaggaaaaagatgaagagacaggctgctctttgtccaagaaagagcaagggattattcacatggttgctgggttaggttttgagtgggccttgaaccctattctcacttgtggagtcaatataaatttccgtgacatcaatgggtggactgcccttcattgggctgcacgttttggaagggaaaaaatggttgcttcacttatagcttctggagcatctgctggagctgtgacagatccaaatgcacaagatccaaccggtaaaactgctgcatctattgcagccggcaatgggcacaagggactggcagggtatctttcagagatagctgtaacaagccatctgtcatctcttacactggaagagagtgaattatctaaaagttctgctgagcttcaggcagatatgactgttaacagtgtctccaaggaaaatcttactgccagtgaggatcaggcatcactcaaagataccttggctgctatcagaaatgtaactcaggcagctgcgcggatacaatctgcttttcgttcacattcttttagaaaacgaagagcaagagaagtagctgctagtgcaggtggcattggtaccatttcagagatttctgctatgtcaaaacttgcctttcggaactcacgtgaatataattcagctgcttcagctgctttatcgattcagaagaaatatcgaggttggaaaggtcgcaaagatttcttagcgttgcgcaaaaaagtagtgaagatacaggctcatgtgaggggctaccaggttaggaagcattacaaggtaatatgggcagttggaatcttggacaaggttgtcttacgatggaggagaaaaggagctggtttacgaggtttccgacaagagatggacatcaccgaaaatgaaaatgaagatgaagatattctcaaggtgttccgaaaacagaaagttgatgtagaaattgaagaggctgtttcaagggtgctgtccatggtcgactcaccagatgctcgtgagcaatatcatcgcatgcttgagaaatatcgtcaagctaaggctgaacttgcgggtacgagtgacgaggcatcattatcaacttctgtaggagatgacttatttattgatgatttttatccatttccctaggagcaacgctagccttggtaatcttcattattttgaatgatcaatttgtggcacaaccatttcgatggtctttgtatctagatgcctagaacaagctgacttattagtttgagacagtctagattgtatagtgaaaataacaatgaacattgttactttgtaaaatatgaaatggtcttgaatgcaggtggggtggggtttcg

SEQ ID NO: 6923 - DNA, 1037 bp, Glycine max
  Clone ID: 700605704_FLI
gcgagaatttcttggcaccaagttcttctcggtggccaaaagtggaggttcaggcattgataaagcttcggacgagcatggatgagaagtatcaagagaatggaccaaagggtcctctctgggaggagatctcagcctcaatgaagaagctcgggtacaaccgaaacgcgaaaaggtgcaaagagaaatgggagaacatcaacaagtacttcaagaaagtgaaggaaagcaacaagcggagaccggaagattccaagacgtgcccttatttccaccagctggacgcgctgtacaggcagaagcacaggggcgaagagagccccgcggcggtggaggcgaagccggagagcgcggtggcgccgttgatggtgcagccggagcagcaatggccacctcagcagcagcagcaggatagggacatcacaatggaagacatggagaacgaagatgatgaatatgaagaagagagggaaggagaggaagaattagaggatgatgaagatgaagaggatgaagaaggtggtggtggtggtgggaactatgagatagtggcaaacaaaacaagtggtggtggtggtgcttctgctgcttcagtgggggcttcaacggagtagtagtgtgaagaaaccaggtttagcgtgggggtgggtcagagagagtgcaggggttgtcggaggtggccattgtggtggagaaattaagaatttgaatattcacgtacggtgaagttacacatggcaatggttatggtatcgacctgtggtggaaggaggatgatgaggtttggttggtactttgttgtagcatataatcagtaagattagatttttttttttcttttctgttttataacagtttgtttattttttgggagaataaataaagtccgatgagagagggaatttaagatacagaccaataaagaagagagggaccttaattaaggttgtattttttcttttcttttatcttcatcttatttttttttaatgttcgttcttggtgctgtaaatgggaggagagattaattcgggttt

SEQ ID NO: 6924 - DNA, 981 bp, Glycine max
  Clone ID: 700605926_FLI
gacgttcgttcgtgtctcaaaaaaaggggtactaccactctgtagtgtatatggatgctggaaatcaatgtgttttgtatttgttcacttccttcgtcgtcccccccggagcccgtttcgaaccgccgcgttatgaagccggcgtcaaagcgccctccatttaccattccgagagaggtccaacgacttcccaggtcctcgccgtcctcgccggcctcccggtcggtggcatcctgctcctcctggcgggattgaccctggcaggaaccctcaccggactggcagttgccacgccgctcttcgtcctcttcagcccggtgctggttccagccacggtcgccatcggcctggccgtggccgggttcctgacgtcgggggccttcgggctcacggcgctgtcttccttctcctggatcctgaactacatccgggagacccagccagcctcggagaacctcgccgccgccgcgaagcatcacctcgccgaggcggcggagtacgtggggcagaagacgaaggaagtggggcagaagaccaaggaggttgggcaggatattcagagcaaggcacaggatacaagggaggcagctgcaagggatgcaagggaggcagctgcaagggatgcaagggaagctgctgcaagggatgcaaaggtggaggcaagggatgtaaagagaacaacagtgacagcaacaaccgcaaccgcatgatgagtaattctgatattagagggagcattaatgtgttgttgtgatgtggtttatatggggaaattaaataaatgatgtatgtacctcttgcctatgtaggtttgtgtgttttgttttgttgtctagctttggttattaagtagtagggacgttcgttcgtgtctcaaaaaaaggggtactaccactctgtagtgtatatggatgctggaaatcaatgtgttttgtatttgttcacttccattgttgaattcaatgtcaaatgtgttttgcg

SEQ ID NO: 6925 - DNA, 650 bp, Glycine max
  Clone ID: 700605972_FLI
gaaactgagaaaccgttgtggaccagttcaaatgccttatactctgcttttgccttctagggattcttcctcagctcctcatgcctgagaaaggttctgctgagtatgaggagctgaggaagaatccagaaggcttacttgaagactattacaccaaagtttcagacccttattgacctttctgttatagaaatcttgtcaaggcatgcatctgatgaggtgtaccttggggagagggacaatccaaattggacatctgatacaagagcattagaggcttttaaaaggtttggaaataaactggcacaaattgagaataaactctcagagagaaacaacgatgagaaactgagaaaccgttgtggaccagttcaaatgccttatactctgcttttgccttctagtaaggaaggattaactttcagaggaattcccaacagtatctctatctgaagaggtttgtggttccttaagttttgtggctttgaataaaagatagaagagaaggaatctgaatttcttcatccaacctgcacatggtaatctagtgtgtttgagtgctttcatgtttggctttaataaaataaaagcagttgttttgtaaaatgttcagaatcaataaaagcatttactgctttgctttgtgcgct

SEQ ID NO: 6926 - DNA, 2868 bp, Glycine max
  Clone ID: 700605994_FLI
tttagaaggaaatattgaatgaaaagaaaaaagagaaagtaattatgatctgtttgtttgaaaaaaaaaaaaaaaaagatcatacatagtagtgttggtgggttgcaaagatgcttgggggtcttctccataggggtcataagataaaagggacagtggtgttgatgcgcaagaatgtgttggacgtgaatagcgtaaccagcgttgggggaattattggtcaaggtctcgacttagttggctcaacactcgatactcttactgccttcttgggccgatccgtgtctctccagcttattagtgctaccaaagctgatgccaacggaaaagggaaacttggaaaggctacctttttggaaggtatcattacttcattgccaactttgggagcaggccaatctgcattcaaaattaattttgaatgggatgatgggagtggaattcctggagcattttatatcaagaattttatgcaaactgagtttttccttgtgagtttgactcttgaagacattccaaaccatggaagcatccactttgtttgcaattcgtggatttacaatgccaaactcttcaaaagtgaccgcattttctttgccaaccagacatatcttccaagtgagacaccagctccactagtcaaatatagagaagaagagttgcataatttaagaggagatggaactggagaacgcaaagagtgggaaaggatctatgattatgatgtctacaatgatttaggtgatccggataaaggtgaaaatcatgcccgtcctgttcttggaggaaatgacacctttccttatcctcgtagggggagaactggtagaaaaccaacaaggaaagatcctaatagtgagagtaggagcaatgatgtttatcttccaagagatgaggcttttggacacttgaagtcatctgactttcttacttatggactaaaatccgtatctcaaaatgttcttccattattgcaatctgcttttgatttgaatttcacaccccgtgagtttgatagctttgatgaagttcatggactctattcaggcggaattaagctgccaacagatataatcagcaagattagtccactacccgtgcttaaggaaatcttccgaactgatggtgaacaggcccttaagtttcctcctcctaaagtaattcaagtgagtaagtctgcatggatgactgatgaagaatttgcaagagaaatgcttgctggtgtaaatccaaacttgattcgttgtcttaaggatttccctccacgaagcaagctagatagccaagtctatggtgatcatactagtcaaataaccaaagaacacctagagcccaacttagaagggctcactgtagatgaggcaattcaaaacaagagattgttcctactagatcatcatgacccaatcatgccatatttgaggcgaataaatgcaacctccacaaaggcttatgctaccagaaccatccttttcctgaaaaatgacggaactttaaggccacttgccatagagttgagtttgccacatcctcagggagatcaatctggtgcttttagtcaagtttttctgcctgcagatgaaggtgttgaaagttctatttggctgctagcaaaggcttatgtagttgtgaatgactcgtgctatcatcaacttgtcagccattggttaaacactcatgcagttgttgagccattcatcatagcaacaaacaggcatctcagtgttgttcaccctatttataaactccttcaccctcactatcgtgacaccatgaacataaatggccttgctcggttatcactggtcaacgacggtggcgttatagaacaaacatttttgtggggaaggtattctgtggaaatgtctgctgtagtttacaaggattgggtttttacagatcaagcattgcctgctgatcttataaaaagaggaatggcaattgaggatccatcgtgccctcatggcattcgccttgtgatagaggactacccttatgctgttgatggacttgagatatgggatgctatcaagacatgggtccatgaatacgttttcttgtactacaaatcagatgacacacttagagaagatcctgaactccaagcctgctggaaagaactcgtagaggtgggtcatggagacaagaaaaatgagccatggtggcctaagatgcaaactcgtgaagagctagttgaagcttgcgctatcatcatatggactgcttcagcacttcatgcagctgttaattttggacagtatccctatggaggtttaatcttaaaccgtccaactcttagtaggcgattcatgcctgagaaaggttctgctgagtatgaggagctgaggaagaatccccagaaggcttacttgaagactattacaccaaagtttcagacccttattgacctttctgttatagaaatcttgtcaaggcatgcatctgatgaggtgtaccttggggagagggacaatccaaattggacatctgatacaagagcattagaggcttttaaaaggtttggaaataaactggcacaaattgagaataaactctcagagagaaacaacgatgagaaactgagaaaccgttgtggaccagttcaaatgccttatactctgcttttgccttctagtaaggaaggattaactttcagaggaattcccaacagtatctctatctgaagaggtttgtggttccttaagttttgtggctttgaataaaagatagaagagaaggaatctgaatttcttcatccaacctgcacatggtaatctagtgtgtttgagtgctttcatgtttggctttaataaaataaaagcagttgttttgtaaaatgttcagaatcaataaaagcatttactgctt

SEQ ID NO: 6927 - DNA, 1197 bp, Glycine max
  Clone ID: 700606004_FLI
attgacaccaacagcttggagaaccagctcgaccagatgcctaggagattctatcttgctgggaaccaagagcaagagtttctaaaatatcagcaagagcaaggaggtcatcaaagccagaaaggaaagcatcagcaagaagaagaaaacgaaggaggcagcatattgagtggcttcaccctggaattcttggaacatgcattcagcgtggacaagcagatagcgaaaaacctacaaggagagaacgaaggggaagacaagggagccattgtgacagtgaaaggaggtctgagcgtgataaaaccacccacggacgagcagcaacaaagaccccaggaagaggaagaagaagaagaggatgagaagccacagtgcaagggtaaagacaaacactgccaacgcccccgaggaagccaaagcaaaagcagaagaaatggcattgacgagaccatatgcaccatgagacttcgccacaacattggccagacttcatcacctgacatctacaaccctcaagccggtagcgtcacaaccgccaccagccttgacttcccagccctctcgtggctcagactcagtgctgagtttggatctctccgcaagaatgcaatgttcgtgccacactacaacctgaacgcgaacagcataatatacgcattgaatggacgggcattgatacaagtggtgaattgcaacggtgagagagtgtttgatggagagctgcaagagggacgggtgctgatcgtgccacaaaactttgtggtggctgcaagatcacagagtgacaacttcgagtatgtgtcattcaagaccaatgatacacccatgatcggcactcttgcaggggcaaactcattgttgaacgcattaccagaggaagtgattcagcacactttcaacctaaaaagccagcaggccaggcagataaagaacaacaaccctttcaagttcctggttccacctcaggagtctcagaagagagctgtggcttagagccctttttgtatgtgctaccccacttttgtctttttggcaatagtgctagcaaccaataaataataataataataatgaataagaaaacaaaggctttagcttgccttttgttcactgtaaaataataatgtaagtactctctataatgagtcccgaaacttttgcgggaataaaaggagaaattccaatgagttttctgtc

SEQ ID NO: 6928 - DNA, 1243 bp, Glycine max
  Clone ID: 700606027_FLI
gtggatgtacaacaatgaagacactcctgttgttgccgtttctattattgacaccaacagcttggagaaccagctcgaccagatgcctaggagattctatcttgctgggaaccaagagcaagagtttctaaaatatcagcaagagcaaggaggtcatcaaagccagaaaggaaagcatcagcaagaagaagaaaacgaaggaggcagcatattgagtggcttcaccctggaattcttggaacatgcattcagcgtggacaagcagatagcgaaaaacctacaaggagagaacgaaggggaagacaagggagccattgtgacagtgaaaggaggtctgagcgtgataaaaccacccacggacgagcagcaacaaagaccccaggaagaggaagaagaagaagaggatgagaagccacagtgcaagggtaaagacaaacactgccaacgcccccgaggaagccaaagcaaaagcagaagaaatggcattgacgagaccatatgcaccatgagacttcgccacaacattggccagacttcatcacctgacatctacaaccctcaagccggtagcgtcacaaccgccaccagccttgacttcccagccctctcgtggctcagactcagtgctgagtttggatctctccgcaagaatgcaatgttcgtgccacactacaacctgaacgcgaacagcataatatacgcattgaatggacgggcattgatacaagtggtgaattgcaacggtgagagagtgtttgatggagagctgcaagagggacgggtgctgatcgtgccacaaaactttgtggtggctgcaagatcacagagtgacaacttcgagtatgtgtcattcaagaccaatgatacacccatgatcggcactcttgcaggggcaaactcattgttgaacgcattaccagaggaagtgattcagcacactttcaacctaaaaagccagcaggccaggcagataaagaacaacaaccctttcaagttcctggttccacctcaggagtctcagaagagagctgtggcttagagccctttttgtatgtgctaccccacttttgtctttttggcaatagtgctagcaaccaataaataataataataataatgaataagaaaacaaaggctttagcttgccttttgttcactgtaaaataataatgtaagtactctctataatgagtcacgaaacttttgcgggaataaaaggagaaattccaatgagttttctgtc

SEQ ID NO: 6929 - DNA, 934 bp, Glycine max
  Clone ID: 700606044_FLI
ggaacattttagaggcctcctacgataccaaattcgaggagataaacaaggttctgtttagtagagaggaagggcagcagcaaggggagcagaggctgcaagagagcgtgattgtggaaatctcgaaggaacagattcgggcactgagcaaacgtgccaaatctagttcaaggaaaaccatttcttctgaagataaaccttttaacttgagaagccgcgaccccatctactccaacaagcttggcaagttctttgagatcaccccagagaaaaacccccagcttcgggacttggatatcttcctcagtattgtggatatgaacgagggagctcttcttctaccacacttcaattcaaaggcgatagtgatactggtaattaatgaaggagatgcaaacattgaacttgttggcctaaaagaacaacaacaggagcagcaacaggaagagcaacctttggaagtgcggaaatatagagccgaattgtctgaacaagatatatttgtaatcccagcaggttatccagttgtggtcaacgctacctcaaatctgaatttctttgctattggtattaatgccgagaacaaccagaggaacttcctcgcaggttcgcaagacaatgtgataagccagatacctagtcaagtgcaggagcttgcattccctgggtctgcacaagctgttgagaagctattaaagaaccaaagagaatcctactttgtggatgctcagcctaagaagaaagaggaggggaataagggaagaaagggtcctttgtcttcaattttgagggctttttactgaataagtatgtactaaaatgtatgctgtaatagctcatagtgagcgaggaaagtatcgggctatgtaactatgactagagcttcaactatgaataaataaatcgacagcatatgatgcttttgttttgtgtc

SEQ ID NO: 6930 - DNA, 751 bp, Glycine max
  Clone ID: 700606076_FLI
aagaagcaagcatgtgtggcggagcaatcatcgcagatttcatacctcggcagcgtccccgcaccctcacagcctccgaactctggcccaagcgcagcgaacctcaacctcaacctcctcctcctccagttaagaggcagaggaaaaacctctacagagggatcaggcagcggccctggggcaaatgggccgcggagattcgcgatccacgtaaaggagttcgtgtctggcttggcaccttcaacaccgccgaagaagccgccagagcctacgacaaagaagcccgaaaaatccgcggcaagaaagccaaagtcaatttccccaacgaggacgaccctctgccgcaatacggatcttgcaagagcctcaacttggagttcggttacgatctcaaccaaacagggcttttcccttcttctaacgctgatgagaattgcgggtcccacgtggcttactccgttacggaagccaacaacaaagtagagaagctttccgaggagcttatggcgtacgagaatttaatgaggttttatcagattccggaaaacgtcgttggggatttgtgggcctttcctgacacctctccacctctctgatttctgtcacatcgtttcttctatcattaattctccaattctgttcttaaaatatgatatgtacaatcagcaatttcaatttgcatgtatttaactttcagactcttaggagatgtttggttcggttgttttctgttttcattttcactgaaaat

SEQ ID NO: 6931 - DNA, 1795 bp, Glycine max
  Clone ID: 700606260_FLI
gaaaaacttcattgtgcccatatgtcccatcaaccttgtgaaaccctaattctaaagagcagtgagctccctcctatgaattgaaacgaagttcagcgtggcagggaggaagaaggtagtagagttgtccggcgacggcgcaattctttccggtgacggcacggtggtcgcgttttattagccaattgcgtccactttttcccgcaacggtgaaattggaagcacaaaccatgtctgtttctgcgtcacaaaccgaagaacaagtctcaactaggaaaccaacaacactgtgtgaagaatgcaaatcaaacccatcgaaatacacgtgccctggttgctccttacactcgtgcagtcttccatgcgtgaagtctcacaaagaccgaactgggtgtagtggcaagaggaaccagacccagtttcttcctctttccaagttcgatgacaatgtcctattatctgactataagttgctggaggaggtgaagagggtggctgaatctgctcagagaatgagaaataaattgggcatttatgcatattttaggttacctcgttaccttagaagcctaaagaatgctgctgggagcaggagaaccaaactgttgtttctccctaacggaatgtcgagaagagagaagaatcggtctcaatatgaccagcggaagaagtttatatcttggacaattgaattacattttcactcaacagatattgttttactcgaccatgaagttgatgaaaatacaagcttttactccattctagagaagcacctcaagcctggtccttggaagaatcagctaaggcaattttgtgaagtccagctggattgtctaaagcttttcattcgtaaatacccgaaaggtcccaagtcatctttcaaggagttagatataaaagcgccaatcagacagcaattagcaaatatagtcattttggagtttcctgttgtttttgttttcttgccatctcacagaatcaattttgaagttattaaggatgtcaataccagcaaacataaatcactgcagaaagattgtgaagacaaccaattccctcaaggtttatcttttagggaggaagtgatagaagatgacaacaactctgcagatcctcaggtttttgatctcatgaagcaagtggaatcaagtttatcacatgaagtgatgacccaaaatatgagttctgagaaagcaccaaatgattccccagagaagtctctgtttgaaggagcttctgggggtaatctttcacattctttgacggaaaccaatgaactaaaattctctgaagatatgacatttgactttgatcaggatttgatggatttctatactgatatcttggatcaaacaaatcctggtgatctttttgactttgatggtgaattttcaaagaaaacagaaaatgaaatagatttaattggtactagtgatttattccctatgccagaggaattggaggaaggggaaattttagaataattggtagctataattcacttctgttgaatagttggagagaaaatgagaaaacattgacaacatcaatactattatatgttttgaggttgaggtccattgattcccataatgggtttgaagccgagtttccagttgtgtggacatgatttaaaagttcatattttcctttatattgagcatgacagagatttaagattgttatctttttgtgccatgacagaacttacaaaaagagttaagaatctcctgatgttcagtgtcaaagatgttcttggtctagtttatttaaatatctttgaagatcgctt

SEQ ID NO: 6932 - DNA, 1256 bp, Glycine max
  Clone ID: 700606274_FLI
gggggttgagcttaacctgaaacatgttcatgcttctggcatctatggttgggccagtgtttgtgaaactactgtaggggagtggttggaagatatatctcaaaatcagattcataaaatactgcgggggcttcctactgtacggtcattgattgcagttggggctggtgctgctaagctggtttcatcaccagtacagagctacaaaaaggagcggagagtgctcaagggcgtgcagagaggtacaatggcatttcttcgaagcatttctctggaagctgttggacttggagttcatctagctgctggagcccatgatattcttctccaagcagaaggtattcttgcaagcataccttctccagttcctctgcctgtaaaagacaaatcgaaaacagatgttcgatctaatcaacctaaagatgctcaagaaggaattcaacaggcttatgagagtcttagtgatggcttgggaaaatctgctgccgtgttagttcagaaccccttgaaaaagttccagcgaggttcaggtgcaggacctgccttggctgccgctgttcgagcagttcctgctgctgccatagcccctgcttcggcttgtgcaagtgctgtacactatgctcttcttggattcagaaatagccttgatcccgaacgtaaaaaggagtctatggagaaatattgtccaacacaaccactctgggaagaagactgattaatgattattatgaggattgaatagttgatactcttgcttccctgaccaagcagattcagaagagctgttcttttaatttgtcggacagtcttcccatgtatcatatgtacagtaacaaaaccagtcggctgattcttttctaccagattcagagtaaactgtatatactgtaaatattggatggtgcttgataatcatattcttattcaaacggatgccattgtaggtatagtgaccccattggtgtagttagatgtacataataatgtaatatcattctttgaaaaccttgatatttatgtatattgcctttatttattgtaaatagtgtatcatgtttaatactcagcagtgtccaatcttttaattttactttgtggttagtaccagaactgttgataatacagtctctcaatgtggtaactatatgttgccaatgattgctgggaatgtttttccatgtaataacagtgaagaaatacttgtttattgttaattgctgattattgtaaattaattgattttttttaccgtgaat

SEQ ID NO: 6933 - DNA, 1271 bp, Zea mays
  Clone ID: 700610719_FLI
gcagcgacggcgatgcggttgccatctgccgcctcggcgtcccgccttccctcttcccttttcttacaaccccgcgcaaggacaagatgcatcccatcctcctccctcgcctgtcgggcatcttcttcatcagccgctggcgctggtgacggcggctcgcggaagccgtggctcttcgtagggctgggtaaccccggaaaggtgtaccagggaactcgccacaacgttggattcgagatgatcgatgttatagcagaagctgagggtatatctctgagcagtatgcaattcaaggcaatggttggaaaaggccgcatcggcgatgcacctattatgcttgccaagccacaaacctttatgaatgcaagcggtgagtctgtcgggcagctggtttcatatttcaagataccacttagtcaagtcgttgtgatgtatgatgatctggatttaccctttgcaaaactgcgtctgctgccaaagggtgggcatggcgggcataatgggatgagaagcatcgtcaaccatttgaaacagagccgtgattttccacgcctaagaattggcattggacgaccgcccgggaagatggatcctgccaatttcgttctccggccttttaacaagaaagagcagcaagagcttgattttgcgttgcataggggcttggaggcggtgcggataatggtgctggaaggattcaacaagagcgcgacttacgtgaacactgcacaatcatctgaaatgctgaataggtgatgggccaataaactgccatatgcgatttaaatcccataccaaagggatttaatcgaggaagcagtcgcagcttcgcttgatgcatcgtttgttcggtgccccccccccccctggcaagaaagttctgacagctgaattgcttgttagagcatactgtatgatctgagcaacttaaatactgtgaatccatcatcccataacaacattcttctgtagcatcccataacaccattctacgcaccccacaccttacaaatccggcacgctgcttagtgccttagtttcagcttccacgtacttttttgtttttatccatgcttgcatattgtctgctctcatagttcagcagtactactatcttgctcctgttgggtttgcaacagttggtggcagccatcccgtttagagcacgggatatttcggtccagactccagatagagaaagccgatcagaatacgcttcatcacatgtatttccattcatcagataaaggatgccgatcatatttccatcc

SEQ ID NO: 6934 - DNA, 571 bp, Zea mays
  Clone ID: 700610759_FLI
ctcccggccttgggcttcttcccgccggggggcgcttctcggccttgggcttcttccccgccggggccgagaagcgcctcccggcggccaagtcgtccggcaaagaaggcggcgacaagaagggtaagaagaaggcgaagaagtcggtggagacctacaagatctacatcttcaaggtgctgaagcaggtccaccccgacatcggcatctcttccaaggccatgtccatcatgaactccttcatcaacgacatcttcgagaagctcgccggcgaggctgccaagcttgcgcgctacaacaagaagcccaccatcacctctcgggagattcaaacctctgtccgccttgtccttcccggcgagctcgccaagcacgcggtctccgagggcaccaaggccgtcactaagttcacatcatcttagatttgaggtagtagctattgggtggcgttggtagttgtgtctcaatttgtctgctactaatagtggtaggagtatccatgtgtagttgggttgtggtaagaattgtgttaaactggtaatacgtttgaaattgctttttatggatgtgg

SEQ ID NO: 6935 - DNA, 739 bp, Zea mays
  Clone ID: 700610795_FLI
gaagtgttcgacagcaggctggacctgagctcgaggagagtcgtggaagagatgtccctggtgctaaaaatcgcgctgttctgcaccaacgagtcaccgttcgataggcctagcatgagagaagtcatttccatgctgatcgacgctagagcgtcctcctacgactcattctcttcgccagcatctgaggcacctatagaatatgattcgtccccaaaaaattagaggccagtgtcgtcaatctattttaccagtcatgcatcgagggagcatccatagatcaacttcgctcgtagctgaagaccatcctagtctgaaatattgtgttccaagaagttgttggctatagcctgactccaaatggaaaagagacccgtctttctgaccaagactaaccaccagttgaaggctagaagcatgtgaagtgaagttattcactcctactacacctcagctagctagtgctctttcagtggaggcagacacctttgagtgttccttttctgaaacactcagctaggcaaggctgatacgttcacttcagcagaacatacagattcaactatcgctagctttaacactgtacatactacatagaccatagtgcggctactattaaataatgatgatgacagattattaatctctggattgattttgtgcttctttttaacttgttactaactgtaatgacatggtaaaaaaagtgaataattaccgtgttcgtcggagtcgaacc

SEQ ID NO: 6936 - DNA, 868 bp, Zea mays
  Clone ID: 700610806_FLI
gtgggacacacgagtacacgaccacgagagactggtcggtctgcgactgtctctgaccgctgaccgcactgtcctctgcttctgtctttctctctctcccctgtcccccttccagatttcctccattcgcggtttgcctctctgccttcctgcctgcttccctccctccgtcagatccccgctcgggttgccatggcggaccagctcaccgacgaacagatcgccgagttcaaggaggccttcagcctcttcgacaaggacggcgacggctgcatcaccaccaaggaacttggcactgtgatgcgctcattggggcagaaccctactgaggctgagcttcaggacatgatcaatgaggttgatgctgatggcaatggaaccatcgactttcctgagtttctcaacctgatggcacgcaagatgaaggacaccgactctgaggaggagctcaaggaggccttccgtgtgttcgacaaggaccagaacggcttcatctccgctgctgagcttcgccatgtcatgaccaacctaggcgagaagctgacggacgaggaggtggacgagatgatccgtgaagccgacgtggacggtgatggccagatcaactacgacgagttcgtgaaggtgatgatggccaagtgagatatgcccgccgtttttaagctagttcctctcctgatggtagtaactagtctagttttggagactgactgcttttggttgtgtcttacgcctatccttgcgtcaatggacatatccgtttgttttcaaccaagggattttaccatgtctgtaatttcgctcaaatttggttcttgttgtattacatttgtgttatcttggtacaatgatcatgtctttctctttc

SEQ ID NO: 6937 - DNA, 1087 bp, Zea mays
  Clone ID: 700610879_FLI
accagttcaggggtatccgccggcgcccgtggggcaaatgggctgctgagatcagagatcctcgcaagggcgtgcgcgtctggctcggtacattcaactctcccgaagaagctgccagagcttacgacgccgaggcacgcaggatccgcggcaagaaggctaaagtcaacttcccggatgaggttcctacggcggtttctcagaagcgccgtgctgctgggcttgcctctctgaaagcgcctaagatggacgttgaggaggagaagccgatcatcaagctcgcagtgaacaatatgaccaactcaaacgcatatcactaccctgccgtcgtcggccaccacaacatcatacccgagccattcatgcagactcagaacatgccattcgctcctctggtgaattatgctgccctcgtgaacctgtcttcagaccaaggcagcaactcgttcggttgctcggacttcagcctcgagaacgactccaggacccctgacataacttcggtgcctgcgcccgttgccaccttggccgccgttggagagtctgcgttcgtccagaacacggccggccatgctgtggcgcctcctgcgacggggaacactggtgttgatctcgctgagttggagccgtatatggatttcctgatggacggtggttcagacgactcgatcagcactctcttgagctgtgatggatcccaggacgtggtcagcaacatggacctttggagcttcgacgacatgcccatgtctgctggtttctactgaggctgaggcccagcgactggtgcttgactgcttgtgtacatagggggggacaaagggaataatgttctggagatgaagaatcgcttgcgtgggcgtgcctgcaggcacgcgtgtagtagctgcggtattagtatatatgcttagatgttcagtcactttctttaagtacaatttggcgctggacatgtaccttattttactatgtatccgtgacaacagctatgtgtctgctccttttattttcttgtctttgcttcaaaaaaatggctctgaacattgcgagtttgtactttgtagacaatatatatatatgtgtgtgt

SEQ ID NO: 6938 - DNA, 761 bp, Zea mays
  Clone ID: 700610923_FLI
aagctttgccactaaaagaagatcatgaagaatcaatgactgtctatggttgcgtctgcggtttattattatcatcacatccccagatcctccctctggtgcctgacgtcatacatgtctttgcccaagtggtggtatccccagatgagagcgatgaagtgaaaacaaatattggcaaggctatttctcacttgatatctgtctatggccagcaaatgcagccaatactgagtgcccttccaccagcccatgcaaacgcgctggcttcatttgcgagtagaagatgacctcggaggaccagcttttctttggttccttgttctgcttgagtttgttttggttttgtcgacgattgccattttctgaggatctggtcacatggatcaggccagatggagtgcttgcattgcacattggcaagggcgagcggagttgtcaggttggcgcatgattgattatatggtgagcttggtttctctttgagatacacagttgtgcttgctttggagccctgtacggttaaaggcagaccttagtcgacagcgcatctgtgagtgcctgcctgtattcaggttccggatttggttatttatgctcttgtttttttatttttttgcctgtatttgcaattcattgattgctgttgtatatagaagagagttttaaatagagagaatgtacgactctgcaactggcaaattttgtatacatactgctcataccacttgctaatgtttatccggattgcgtaccttgtgccc

SEQ ID NO: 6939 - DNA, 450 bp, Zea mays
  Clone ID: 700611004_FLI
gcatttgggaagttgaaacagacaggagaagcatgtaatgtgttccagcatgtattaactcttggtgttaagccaaatgcaacaacatactccctgcttgtcgatgcccatcttgcaaacaaagatccaaaagctgctcttgccataattgatgagatggttgatgctggcttcactccttccaaggataccctcaggaaggttcgaagacggtgctctcgtgagtcagactttgacagtgacgagaaagtccaatccctggctaagcagttcaactaccgaatgggtggtgagaatcgaagagagatgctttatagcatggaatacaatcctgtgtactgaagcggcagtttctactgagtttgctggtcgttgggagagcacggacattgtagcttgtaaattacttgaacgcaccaggattcttaagcaatattcagtttctcaatc

SEQ ID NO: 6940 - DNA, 1301 bp, Zea mays
  Clone ID: 700611044_FLI
aaattccaggagacgacgaggcgccgatccgtagcggcgccgagggcgatatcgaggagccgctggtctcacgccgcaccgagacaatggcagaccagttagggtcttacacaattagatcccatggaatgatattggcaagattacacatgtatgactggataatacttctcctccttgctgtcatagacgggctgttgaatataattgaaccatttcaccgttttgttggaaaagacatgatgaccgacttgagatatcctatgaagggcaatacagtgccattttgggctgttccagtatgtcctgctgattggaattatactgccttgggccatctttgttggaatttacttcaagaagaacaatttttatgatctgcaccatggcatactggggattctatactcagtgctcataactgcagtgattactgatgcaattaaggatggtgttggacggcctcgtccagattttttctggcgctgtttccctgatggaaatgatgtttatgataacatcactactggtgttatatgcaatggagtgaagagcgtaatcaaggaaggccacaagagctttcccagtggacacacttcatggtcttttgctggtctaggcttccttgcatggtacttagctgggaaactcacggcttttgatcgcaaaggacatattcggaagctatgcattgtgtttctgcctcttcttactgctgcgcttgtggctgtttctcgagtggatgactactggcatcattggcaagatgtatttgcagggggtcttataggtcttacagttgcttcattttgctatctacagttttttccatatccttttgatggcgatgctttgtggcctcacgcatacactgtccagttagccgaggaagggagcagcagaaatacaaactcctacagcgtgagaccagccgagatcgaaacagtcaatattcctggtcacggtgggatcaccctaagagatactctaaatgatatggagtctggtagcggcaggagattgtgaatgagtctggaagttttgaaccatataccatgagagctgcttgcaatatatacacaagtagatctattgtagagctgttgagtgctgccaccgtgataggagagggttgtttagatgggtctgtcactaaattacttggtaggggtgttgtatcttctgacaacctttggcctttctttatactccacctgtggttaaagtttgtttgcttacgaactctttgatgtcagcttggtcgttgcattcagcaaccatgatctaaccatcgtgaattg

SEQ ID NO: 6941 - DNA, 1123 bp, Zea mays
  Clone ID: 700611145_FLI
tcctcaggaaccgttgacgtggcgctcctcctccgacgattcgctccctccctcgagtttcaccactccctcctctcgcggccacgcactcccccgcctccgcaacctctcaccgccggtccccgccctccgaccctccacgcgcaaacagcccgcctccatccaccaggatccccgatgagctaggagaagtgttgatttggatattcgtggagtgtgcaatggtggactttgttcgacggctcgcctctgccctgctcaagtgctgcgaccttgacatacccaatcggccaaagggcctcgaggaccccgaacgcctggctagagaaactgtttttaatgtgaatgaaatcgaggctctgtatgagctgttcaagaagattagcagtgctgtggttgatgatggcttgattaacaaggatgaattccaattagccttgtttaagaccaacagaaaggatagcatgtttgctgaccgggtatttgacttgtttgacacgaaacacaatggaattctcgagtttgaggaatttgctcgagccctttctgtgttccatccgagtgcaccaatcgatgacaaaattgattttgctttcaaattgtatgatctcaagcaacaaggtttcattgaaaagcaggaggtcaagcaaatggtggtcgcaacacttgctgaatcaggaatgaatctttcagatgatattattgaaggcattattgataaaacatttgaggaagcagatacaaagcacgacggcaaaattgataaggaggaatggcgcagccttgtcttgaggcatccatctctgttaaaaaatatgaccctcccatatctccgggatatcaccacaacatttccaagctttgtgttcaactctcaagtagaggatgcgtgaggtcccagcgtctacggcaccattgaagcccctggggcacagcagatcaggttctgtgggggcacttagttgtttttgtttccttgaaaatgtaaattttatgtggtggcatgtcctcctgtatagtgagtattgctattgtgcacagaattggggcatgaagcgtttcttgtcgctgtttataaaatattcttcaaacatattgctcataaaaaactactcaaagtaag

SEQ ID NO: 6942 - DNA, 721 bp, Zea mays
  Clone ID: 700611202_FLI
ggggcattgcaagttgcggtatggagatggtggagatgatgaagatgctgacctcgaggaattctatgattacagcagcagttatgttgattcagaaggcaagcagttgattgctgttgatgacttgaacaacaacattgagctgggaatcggtgggtctgagctagtaataacaaacaagagcgagaaaggcactcgggtcagaacccttggctctagggaatttatgcgctactatcgccagaaaccacggccttctgttgcaccagaccgtgcgcttgcactttcactagcttccagctacaagagcatgggtttggtgacagtgcagtctaaggagcagatggtgaggctgaaagttctccgtgctatgaacaggaccggggtcgagactatgcggaacaagatcggaatgaagagcaatgtgatccggaacctccctaagaattgcccgcactagacaacactgccttctcctgcaccctatctggagcttctcctggcatttatatggtgtcttatggtttcttgtctgtcgctgacaacgttggcgcttaagatatttggaataggactacaccttccatagtttttgttgaactctgtggtgcggaagcagctgttgccattatggcggaaattgctgacgcctcattgaacatgtttagtttttattttgttaaaaaattgggcaaaaaagtttgatgctcatattcatcac

SEQ ID NO: 6943 - DNA, 729 bp, Zea mays
  Clone ID: 700611275_FLI
gaggtggccatacgcaacaagcaaagcatacccccaaatccccaatccccaatccccaatccccaaaccctaggttatctcggcgcggcagcgatggcggcggcgggcctgaggaaggggaatgcgcgcctcccgccggaggtgaaccgggtgctctacgtgcggaacctgccgttcaacatctcgagcgaggagatgtacgacatcttcggcaagtacggcgcgatccggcagatccgtctgggcaacgccaaggacacgcgcgggaccgcttacgttgtctacgaggacatctacgacgccaagaacgccgtcgaccacctctccggcttcaacgtcgccaaccgctaccttatcgtgctctactaccagcccgccaagatgtccaagaagtcggatatcaagaagaaggaggacgagatcaccaggctccaggagaagtacggaatcgggtccaagacgcccggcccgggctccagcgactgagcggccagggtattgcctctgcagcctcttgtatgatgaagagcaatcaaaaggaacaaattggttgcgctgtgctgtgttacatccagcgtcgctaattactctgttgttattcaggctccataacaattgaatagatatgtgcttgtctaatcgccagcgataatgtttagtttctaccaaaaacaagaggaatgagtagtgtacacctcacacctgtggctatgcttgaattgttgatct

SEQ ID NO: 6944 - DNA, 886 bp, Zea mays
  Clone ID: 700611374_FLI
gcgattcctctcccctcgcctcctcgtctccccctaggggatcgtcggagaggaatcgcaaagagggccgtctcatccgagttaaggaagccatggagcacaaggaggctgggtgccaggcccccgagggacccatcctctgcatcaataactgtggcttcttcggcagcgcggcgaccatgaacatgtgctccaagtgccacaaggagatgataacgaagcaggatcaggccaagctggctgcctcctctatcgacagcatcgtgaacggcagcgacgccgtcatggagccggttgttgctggcagcaacacggtagtagctgttgcccaagttgagttgcaaacaatgaacgtgcagcagcccgctgatgttgccggacccagcgagggggtggcggcgatctccaaaggggggaaggtagggccgaaccggtgcagcgcctgcaggaagagggttggacttacgggattcaactgccggtgtgggaacttgtactgcgcactccaccgctactccgacaagcacgactgcaagttcgactaccggactgctgccagggacgccattgccaaggctaatccggtggtgaaggcagacaagctcgacaagatctagggggggttccctacggttgggtatcaggaagattgtaaaccgcggtaactcgtcatgcggaactgctgccttgccccccgcgcctttctcttccatgtttgctgctacaatcttgttgttgggcattgcagtgcacggtgcacacttgtgtagcccgcctcgagaattcctgcctctgcatctggtcagttctaaaatgatttgcatgttggctatgttgtgtaagctctatttatggtggtctcgctgagacgggtatttggcttcgc

SEQ ID NO: 6945 - DNA, 1940 bp, Zea mays
  Clone ID: 700611403_FLI
agattctattggcacggtgctcaagtgtatgcagaagggtgcggtggacttccttgtgaaaccagtaagaaagaatgagctgggtaacctgtggcaacatgtgtggaggaggcatgcaatgaattgccagacaaatggatcagaaaataatgcagccagcaatcatgtaagtaccaatgttgctaatgggtcaaagacaggagaaaacaatgatgaggaaagtgatgcccaagtgctccaagtgaaagtgagaagaatgtgcgttccaaatgccttaatggtattacttctgcaaaggtggctgagcaaataatggataatgccttgaggatcacggatgcaagttcacgtcgtccaaccaatcttggcaaagatttggctatgactgaaccagcagctgatagaaaatgccaatctttagtgatggaaaataatgctgtcaaagaaaagaaccctggtgaaaagtcgaagagtgctgtaataggtcatgctgattcttacccctcccaatttctcgagaccaacttgggaaaacaacagtatcgtaatggttacaagaatcaagaattcagggaaaaagatatctttaatcactcgaattcttctgccttctcgagatatggcaatagaaggatagaatcatcaggtgagatacagtttcttccttctcgttgcattgttgggcaagagcagcatgttcatggcaaggacccagttttccaacccaatggggtcttgctgcctcccaatgaccataatacaggtgagagtacaaggcaagctcgaattactctggacagtagcatggagggtgctgacatcatttgctccagtagtgctagggaagatgctggtgcaagtagttcttcccatagaaaggacagtatgagccatccctcatatgggtttgtacctgttccaattcctgtcggtgccatgatgccctatcattgtggtgcaattctgcagccagtatactacccacagggtccacttatgcactgtaattcatctgcaatcaacaaggcaacaattcatcaaacctctggccaatctaactaccgtgaagattgtggtagtggtagaccatctcaggttgatgaacacaaacagtcagaggaaaagcaccagttgcatcattcaagacaaattcatcgggaatcaggacaaccagttgacatggttagagctcacatggatcatgctaaccagagtgcaagctgcagccgggatatctgtaaaggaagcggatgcacgggtagcggtgaagccgataccaatgcgaacacgacggttgccctagagagtggcaacgagagtggcatccaaaatagtgacaggtctcaccgagaagctgctttgatgaagttccgcatgaaaaggaaagacagatgcttcgataaaaaggtcaggtatcatagcaggaagaagcttgcggagcagaggccaagagttaaggggcagtttgtaagccagaagctgaaagcagctatggcaacggaagccgaaactgactcgtgacgggcgctagtccagaactgtaattttggttcttcccttcgcgccaggtgtgggcgattggactggtaagtctgaaggctggcaaaagtttttttttcttccttccatggttagcctttctgtacaaaggtgaactccacgtcgggtgtttgttggcatccaagccttattttttgcgaggtacatcaagttgacaaaatgttcggagggatagggtgaaaacggtgcaagcgccatatttcgtccatacgcttaggtgtttgtggagtgtgaaagcagagcctgtacagcatattcaccacccattctgttgccattacaattgtagtaacttgtaattactactatgacaaaagtagacactgttgtagaacttacagccagcaggtcttttccatatgggacagtagcattttatt

SEQ ID NO: 6946 - DNA, 1774 bp, Zea mays
  Clone ID: 700611462_FLI
caagccacgcaaccttccgccgtcgagactcgtgaggcgtcgtcgcccctgccctctctgccgacaggggacagggtggagagttgcccgggctcgggttgactcgtgtgggcgcctctttcacgcgttcgtttcgttgtttcagaaagttgtgtgctattcattgattgccatgtcaacacgtagggaggttgtcttgtatcacccattgcctgcaccaggagtgacaaacaacctcaaggatgggatccagtcaaaagttatggaaacggttggcaatgcaatcaactcattcgatccaaatgcgttgcctcggcatatagaaggggcattgggaacagctggaaacctcattaactcatttgagccaaaatggtctgggaaaaatgagtttgatttaaatggggaagctgatttccttgatggatatgaatgccctgatgaatattggggctctgcacctgtgaaggcgcacaaaccagttaacattaagaacctgctgggtggcgttattgcgataatcggtcgcaatttgggaaatactgaagctgaacagccaaaggacactaagaccagtgtctcattccttgggtcggctgatgatggtaacacattcttgcattcctcagtctacatgccaagtgctccaccagtacttgatgaagaagccttaaattacaacatttatagggctgtactggaagcagagccaccagaatggcttcctgacagttatgctagtgcgtgtatgcagtgcgctgctctttttactgcccttacacgtggaaggcatcattgtcgattctgtggagggatattttgcagggcatgctcaaagggacgatcgctgttgcctgccaagttccgtgagcggaatccgcaaagagtctgtgatgcttgttatgataggcttgatccattgcagaacttattgattaattctgtcagcaatgcctcacaaactgcaaagcatgatgtcatggattggacttgtgcaagagggtggttaaattttcccattggattaacaatggagcatgagatatacaaggcagcgaataccttgacaagttacagccaggtggcaagaataaaccctgagaagtctattccccatgcagttcttagtggagcaagtgggcttgccatattgacagttgtaaaagctggtgctattcttacttacaaacttggaactggcctagtagttgctcgaagatctgatggatcatggtctgcaccatctgctatactttctgctggttttggatggggagcacaggttggtggtgagcttatggatttcatcatagtgcttcgtggcccagaagctgtccaaactttctgcagtcgaatgcatttttcacttggggcaggtgtaagtgctgcagcaggacctgtgggcagagtagcagaagcagacctgagagctggtgataaaggatcaggagtttgctatacatacagctgcagcaaaggtgcatttattggtgtctcattagaagggaatctagttgccacacggatggatgctaatctgcggttttatggtgacccatatctaacaaccagcgacattctcacggggaatgtggaacagccaaatgctgccaaatttctttacactgcactggataatctatactcagggctggattggtagtgtacatatgtactttgaattttttttcgattgtaaaagttgtatatatccacaaaatgctttcgtttgttcggcgtggcaaaataattaatgaaatgctctgtattaatg

SEQ ID NO: 6947 - DNA, 674 bp, Zea mays
  Clone ID: 700611479_FLI
tagggatccaaataagcaaatttgccctccctacgcacccactgaaatcccttcaccaagttgaggacctcctccgaatccgagggttcaagcgaccgacggcgaacatggcggcggacggcggcccagcgacgtcggcgctggaagaggccctcaagcccttccaggaaagagcctccgaggctgagatacgcatagcgaagctggaagccttgctgtacaacaaagatggtccgagcggtggatccgaggcaacttcctctgccgtgaaggatctccagtcgaagctagatgtggttactgcagaatgcttgactgaaaaggagaagaacaagaagctgaccatggagaacgagaagctccagtaccgcatgacccatctgatccgtgcgataaaagaggcggaatcgagataggagcagcccggcgaggccgattcaaagcctgatgtcgaagtgttcccacccgccttgctgatccttcacgttgttcctgcatctacctcaagctaccattgtgatcttgagttagagcttggtcacaagtcaagactgtattatcaaactgtcgattgaagtgatgatgtgtgcacagctttctgtcttcatctgaccccatctcgaagggcacattggaacacaaaatgttatctgaaatgacagttcatatttttg

SEQ ID NO: 6948 - DNA, 871 bp, Zea mays
  Clone ID: 700611547_FLI
atccttctaagactgtgaagccacttgatggtcctcagtcagattctattacagagaataatcagccttctccagaagctacccttaatatccagaacaaagtgcaaagtagttccaccagaagctgcaagaaggttcataagcaaggtagtgccctcggcaggtcgattgatctaacaaagttcgcttgctatgatgagctgattgctgaactggatcagatgtttgacttcgatggtgagctgaagagtccatgcaaaagttggttagttgtctacactgacaatgaaggcgatataatgctggttggtgatgacccctggaatgaattctgcgatatggtccacaagatcttcatctacacgagagaggaagtcgaaaggatgaacccaggtgccctgaactcaaggtctgaagatagtctatctgactcgctgggaagaggggtagcttccagagatccccgaggaggcgggtctacttcggctctcgattccgagaactgctagtttgttcagtcagtgaggcctttggaagtgaagcagacaaaaggcgtgaatcttgcggtgtagagtgtagttggtacattgtgtgtatgcctccgggtaagccctgcggtacccagtttgtgtcctggcgccagtttaccatttaagctaagtttttgggtgtgccctgtgctggggtctgggctctagttattgtagcagagcaggcaatgcatgcaagaaactgatgatgcgcctgtttggccctctttcccttcccaagccatgtaaatagccttggctctgaagcgtagtattgtattgtcgacagccgtacttgagatagtactccaagaggcgcgcttgctcctgtcagttgggtg

SEQ ID NO: 6949 - DNA, 1465 bp, Zea mays
  Clone ID: 700611548_FLI
tcatgatgcagcaggctcaggcgcacacctcggcacttgcgggagcgccgtcggcgtcggcggtggcaccgacggtggctcacccgcacgatccggtgggcggggatgcgccgccgaagcaggtggctcaggcgatggagcggctgggccgtgctggccggttcatcgcggacatccggctcggcgcggaccgcctcctcgaggctcttttcgtctccggcgacgcgcccccgtacagcgtgcgccagcacgtcgacaggatggagcgtattatcgtcaaggaggatgccgccatgcgcctccactttcaggacctacgcgccctcggcaggcaattagaggagtctggagttcttaacggggcccttaaagctcaaggcaattcatggggcttgcacatgccactcgtttgtccagatggtgctgttgtagcttatgcttggaagcgtcaactagcaggtcaggctggtgcatctgctgtggacaggactaggttagctctcaaggctttcactgaccagaaaagaagattctttcctcatctagaagatgaagttgttagccatctccatgatggtcaacctggtgacaccaaaaagtcaaagttgtttaccagcaatggatatctagaggaaaaatctttgtctgaaatactgaaaaatttagaacatgaagtacctaacataaaaatattcacatactggcatctggattggtcaaaaagagcttcatcattagcatctctgttggatgatgactttgtggatccatctaaagagctgaacctgcaaaatatggacaaatcgagatctgatgctctgacaactaccatagaccaagttgctgttattgaattgctggttccttcaatatttagagctgtagtgtcattgcatcctgctggatctactgatcctgatgcagtggcattcttctctcccactgagggaggaagctatcttcatgcaaggggcacatcggtacatcatgtgtttaagcatgtaaaagaacatgctgacaaggcattgcagtacttcatcaatgcggagccgagtaaagcactacctcttcttttgcgttggattgccagctatcagactctgtttacgaaggtttgcagcaaatgcagacggcttctgatgatggacaagtctttggctttgctgttgcctcctgtccaccgcccctatcaccagacttcaaatgttggaccagatcttcaagaggcctaccacattggatgttcctcctacgatggctagctgatgcttctaagatgttcctgacattgtcattgacatagtacgtgtacaacagtcctgtgtgaaacaatgttcttttttttttggaatgtatccaacccattaggtgacatatgtatagaaacgttactggttgcttaggtacttgaagttctacgctcttgctcaaattaacctacagattaattcagattaacaaaatc

SEQ ID NO: 6950 - DNA, 1670 bp, Zea mays
  Clone ID: 700611553_FLI
gccaaggatttgcatggcatgaaatggaggttccgtcatatctatagaggtcaacctcgaaggcatcttctgacaactggatggagttcatttatcaataagaagaaactagtctcaggggatgcagtcttgtttcttagaggtaatgatggtgagctaagattgggtgtgaggagagcagttcaactgaaaaatgaagctctacttgaagctgtcaactgtactgattcgaagctacttatgctgtctgctgtcgccaattctttggacaacagaagtatatttcacatctgtttcaacccaagggttggtgcatcagaatttattgtgccgtattgcaagttcttgaagagcttgaactatcccttttcagttggaaccagatttaaagttggctgcgagaatgaagatgctaacgagaggtcctttggattgatcataggtattagtgaagttgatcccatacactggcctggatcaaaatggaaatctctcctgataaagtgggatggtgctactaagtacagccaccagaatagagtatctccatgggacatcgagggagttggcagctcagttttagttactcaccgtctttcctcttctgtttcgaagcgaacaaaactgtgcttccctccaagcgatttggacacaccaattctagatggaaatggtcgtccagactccgtggaaactgaacgtttccacagggtcttgcaaggtcaagaattggtgcaccctagtattcatggtgctgcatgctctcattcatcagatagccccagatgtcaaggctcttatggcaggagattctctgctgatgtgtggaactgcaagatgaatgatgtaatgagtgggcctcgacacctaaatgccactgggtttgcttaccagcccctaggcttcagtgaatctgtcaaattctcagaggtcttgcaaggtcaagaaatgtctcaggcggttccttccttcatgagatctgctttcaactctggcacgcagaatggcagggttcgaccatttgattatgtgcagagatcagatgcaactcaaggatacgctctccagcagtttaatctgccagcaacagaagtgcattcgccctcttctgttcttatgtttaaccaaaccatggtaccacatgctgagctagatggtgcgaccaaccgtgaagaagtacatggcagcaggtacttgtcatccaatgcaatagggagagaagctgaaccatggccatccatgcagcagcaaagagcgagtgtaaatggaagcgagcctctcgacacaactgaagcctcagctcctgcaaggaacgctgaatctggatcggtcggcaggggcgcggggcgaagcaactgtaagctttttggtttctccctgactgagaagatccttggaacggatggtggtggtgtgaaagaagggaactacgaagtggaccgtcaaactccccgggtgctagacttgtttgggcacggttctacgcctggagctctgcatgctctctgtgctgctcccttgggaatatgatgctgttctgcctagttttacaacagttagatttatgtaatccttcagccattttcatcgcgttgtacttgaccaatatgtccagcgtatgatttccagttttaattgtatgctgatgctacatatcctctcttgagatc

SEQ ID NO: 6951 - DNA, 1536 bp, Zea mays
  Clone ID: 700611587_FLI
ccgcggtctgctcgttcgatctgtgcagcagatctgaggtcccgggcgaccgtgaagcagcttcaatcgtcggcatggcgctcgtattgcatagtggggctggaaacaagaatgccttcaaagcacttattgctgcagaatacagtgggatcaaggttgagttgaccaaggattttgagatgggtgtctccaacaagacccctgagtttcttaagatgaacccccttgggaaggttcctgttctggagactcctgatggccctgtttttgagagtaatgctatcgcacgctatgttgctcgcttgaaggatgacaaccctctttttgggtcttcccgtattgaacaagcccacgttgagcaatggatggattttgccgcaacagaagttgatcctggtgttgcatggtacttgtatccaaggcttgggtacctcccttatgttagcacaactgaggaaacagctatttcttcattgaagaggtcgcttggtgctctgaacacacaccttgcttcaaacacataccttgttgggcatgctgttactctagctgacattgtaatgacatgcaacctctaccatggaattgcacggatcttgaccaagaccttcacgtctgatttccctcatgtcgagaggtatttctggaccatggttaaccagcctaacttcaagaaggtcattggtgaggtcaagcaggcagagtctgcacctcctattccgaaaaaggctgctccttctaaggagccaaaggcaaaggatgtcaagaaggaggctccaaaggaggcccccaagccaaaggtggttgaggcaccagcagaagaggaagcaccaaagccaaagccaaagaatcctcttgacttgctgccaccaagcaagatggtccttgatgactggaagaggctatactcaaacacaaagactaacttccgggaggttgccatcaaaggtttctgggacatgtacgacccagagggctactctttgtggttctgtgactacaagtacaatgatgagaacaccgtctcctttgtgaccctgaacaaggttggtggattcctgcagcggatggacctgtgccgcaagtacgcctttgggaagatgctcgtgataggctctgagccacccttcaagctgaagggcctttggctcttccgtggccaggatgttcccaagtttgtaatggacgaggtctatgacatggagctctacgagtggaccaaggtggacatctctgatgaggcccagaaggagcgtgtcaatgcgatgattgaggaccaggagccctttgagggcgaggccttgcttgacgcgaaatgcttcaagtgagtgtgcttgcctggagacagaactgtttagcccttgaatttgcctatggaagagtttgcccttttactagtgtcgatgttgatctggtataccttgctatgaactggttaaagtttgtgctggtttgggattttttgtgcatcttgtgatacctcaagtcttcatcatttaaatgtttagccgtaataatctggttattttttcttct

SEQ ID NO: 6952 - DNA, 2165 bp, Zea mays
  Clone ID: 700611645_FLI
ggcaagcaaacgagcggcgggacggctagcccgcaatacaaaatccggaggaactcccaggaggcgaaaagcagatccgtctcccccgagccccgaccggcgatcgctatcgacttgtagcggaagccatggcgtcggcagcgctaatctgcggcacggagcagtggaaggccctccaggcgcacgtcggcgcgattcagaagacgcacctgcgcgacctgatggccgacgccgaccgatgcaaggcaatgacggctgagtatgaagggatctttctggattactcgagacagcaggcgactggtgaaaccatggagaagctccttaaattggctgacgctgcgaagctcaaggagaagattgagaagatgtttaaaggtgaaaagataaatagcacagagaacaggtcagtgcttcatgtagctctgagggctccaagagatgcagtcataaacagtgatggggtgaatgtggtccctgaggtttggagtgttaaagataaaatcaagcagttttcagagacttttagaagtggatcatgggttggagcaactggaaaaccgttgacaaatgttgtgtcggttggaataggtggtagctttcttggccctctatttgtgcatactgcactccagaccgatccagaagcagcagaatgtgcaaaaggccggcaactgagattccttgcaaatgttgatccagttgacgttgcacgaagcattaaagatttggatccagaaaccactctggtggtggttgtatcaaagacattcacaacagcggaaacaatgttaaatgctcgaactcttaaggagtggatcgtttcttctcttgggccacaggctgttgccaaacatatgattgctgtcagcactaatcttaagcttgtgaaggagtttggaattgacccaaacaatgcttttgccttttgggactgggttggcggccgttatagtgtttgcagtgctgttggcgttctgccattatctcttcagtatggctttccaattgtccagaaatttttggagggagcttccagcattgacaaccacttctactcatcttcatttgagaaaaatatacctgtacttcttggtttgctgagtgtgtggaatgtttcatttcttggttatccagctagggcaatattgccatattctcaggcacttgagaagttggcaccacatatacagcagcttagcatggagagtaacgggaagggtgtttccattgatggcgcccaactttcctttgagacaggtgaaattgattttggtgaacctggaactaatggccagcacagcttctatcaattaatccatcagggaagggttatcccttgcgactttattggtgttgttaaaagtcagcagcctgtttacttgaaaggggaaactgtgagtaatcatgatgagcttatgtccaatttctttgcccaacctgatgctcttgcttatggaaagactcctgaacagttgcacagtgagaaagttccagaaaatcttatccctcataagacttttaagggcaaccggccatcactaagtttgcttctgcctacactatccgcatatgaggttggacagcttttatccatctatgagcaccggattgcagttcagggcttcatatggggaattaactcatttgaccagtggggagtggagctagggaagtcactcgcttctcaagtgaggaaacagctgcatggaacccggatggaaggaaagcctgttgagggttttaaccacagcacttcaagtttgcttgcacgatatcttgctgtcaagccatccaccccgtatgatactaccgtgctgccgaaggtgtaattactcagttgtttttgacatgccaattgctgagttctgacttggcaaggttgagcataagtctttcttcatttgggagttatcacagagccagtttggcagtgctgtagttttggttttacctactctttgtagaagaaaagtgaagagtggatattatggaacaaaatatatacctacggcagcacgcagcatgatgaaacatatttaaaaaatttgggtgctctaccacatgcccgtggaataaaacggatgtaaactcagtgcacttataacaccctaattgtggttttgtttgtggttcaaacttctataccgaggcatcgatcgtgt

SEQ ID NO: 6953 - DNA, 1210 bp, Zea mays
  Clone ID: 700611881_FLI
gccagttcggctgtcgaaccggaactgaagcaacatttgttctgtggaaattgggatggctctggctagggtttcaccgtcttccttagcgaaccttataccgcccctgctccaatccttcttccgccctttctcctcggactttcccatccgcaattcccgccgaagaagctcccccgttgctgccgccttctctcttacttcacaatctgcccacgctgcgagggaggggctggtcatggaggcgcccaggccgagctccaggtatccttggaagcccacgtgtttgtactacacccagggcaaatgcacaatgatgaatgatgcaatgcatctggagaagttcagtcacaatttgaagatggaccttccagtgaatgcatcagccacagataaatccaagcctcagaaactggaatatttattgattcttgatttggagggtagggttgaaatccttgagttcccagtcatgatgattgatgctcaaaacagagaatttgttgattcatttcataggtttgtgcgtccaactgcaatgagtgagcaaagaacaacagaatacatagaagggaaatatggaaaatttggggttgaccgtgtttggcatgacactgctacccctttcaagcaagtgctgcaagagtttgaggactggcttggaaatcacaacctgtggaaaaaggagcaaggtggatcactcaaccgtggagcatttgttacttgtggaaactgggatttgaagacaaaggtccctgagcagtgcaaggtttcaaaaataaatttacctacctattttatggaatggattaacttgaaggatatctacctcaacttctataacagaagggcaactggaatgatgacaatgatgagagaacttcaactgccaattgttggaaaccaccatctcgggatagacgattcaaaaaatatcgcaagagtggttcagcgcatgcttgctgatggtgctgtgattcaaatcactgctaagagacagtcagctactggcgatgtgagatttcttttcaaggaccgaattaggtgattgaaaagtgacacccccaattcatagtggtgctgatattagttgcctgaaaggcatttcaggattttggagcaaagatagagcgactgaacgctcaatcaacatacaaatatgtctagaaattgtgatgctttaaccaaacaagatcaaattactgtcccc

SEQ ID NO: 6954 - DNA, 761 bp, Zea mays
  Clone ID: 700611907_FLI
gccgcaaagagggctgaaggagaagcgaggaaaggtgaggccgatagatagaggagctgcggcgccgccggcgagcgaagagtggaggatccgatccgaagcgagaggactgaatcctgcggccgggagggacgcgggaccacgacgagcgtcgtcgtcggtgccaagcaacggcagttgtccctgtccagagcacaggcaagatggttaacgcgatcaaggggctgttcatctcctgcgacgtacctatggcacagttcatcgtcaacctgaacgcgtcgatgccgccgtcggagaggttcatcgtgcacatgctcgaccctaccaacatgttcgtgcagcctcacgtggcgcacatgatcaggagcaagatcggggagttcagggaccagaacagctacgagaagccgcagtagtggaggatctaccgcgtcctacactccttccttgggacttgctttcgttgcctgtattatttctgctgtgagctgagcacctcagcggaaacgagtacgccaaatagatcccacctgtggccttgaaatcatactgctatgtgctataaacgtgcagagggcactgctactgtgctgcacttgtggtattctgggattctttttgtcaggtccttaaaatccgttgagaatttgagatccagatggggcttagaccccgtttcaatctcacggaataaactttagcttcctgctaaactttagctatatgaattgaagtgctaaagtttagtttcaattcccccc

SEQ ID NO: 6955 - DNA, 1275 bp, Zea mays
  Clone ID: 700611966_FLI
acggtgtacggcgaccactggcgcaagatgcggcgcatcatgaccgtccccttcttcaccaacaaggtggtggcccagaaccgcgccgggtgggaggaggaggcccggctggtggtggaggacgtgaggaaggaccccgaggccgcggccggcggcgtcgtgctccgccgccgcctccagctgatgatgtacaacgacatgttccgcatcatgttcgaccgccggttcgacagcgagcacgacccgctcttcaacaagctcaaggcgctcaacgcggagcgcagccgcctgtcgcagagcttcgagtacaactacggcgacttcatccccgtgctccgccccttcctccgcggctacctcaaccgctgccacgacctcaagacgcgccgcatgaaggtcttcgaggacaacttcgtacaggagcgcaagaaggtgatggctcagactggtgagatccggtgcgccatggatcacatcctcgaggccgagaggaagggcgagatcaaccacgacaacgtcctctacatcgtcgagaacatcaacgtcgcagcgatcgagacgacgctgtggtcgatcgagtggggcatcgccgagctggtgaaccacccggccatccagcacaagctccgggaggagctcgcctcggtgctgggcgccggcgtgcctgtgacggagccggacctcgagcgcctcccctaccttcaggccatcgtcaaggagacgctccgcctgcgcatggccatcccgctgctggtcccccacatgaacctcaacgacggcaagctcgccggcttcgacatccccgccgagtccaagatcctcgtcaatgcctggttcctcgccaacgaccccaagaggtgggtgcgccccgacgagttccggcccgagcgcttcctggaggaggagaagtccgtggaggcccacggcaacgacttccgattcgtgccctttggggtcggccgccggagctgccctgggatcatcctcgcgctgcctatcatcggcatcaccctgggccggctggtgcagaacttccagctgctgccgccgccggggctggacaagatcgacaccacggagaagcccggccagttcagcaaccagatcgccaagcatgccaccatcgtctgcaagcccctcgaggcctagaaatcaatgcgtgtttcctgcacgcgcccccgcagatgaagcactatgtattttctcttttttttgtgtgttgtgttttttttactaagaggagatgtattttttgttcgtaaaatgcacttagtc

SEQ ID NO: 6956 - DNA, 523 bp, Zea mays
  Clone ID: 700611992_FLI
ggaaagtgttcgtcctcatggcgccgccgcagccgaagtcgggcctcttcgtgggcatcaacaagggccatgtcgtcaccaagcgcgagctgcctctgcgcccgtcccaccgcaaggggaaagcaacgaagagggtgtccatggtcaggggcctgatcagagaggttgctggctttgctccttatgagaagcgtatcaccgagcttctgaaggttggcaaggacaagcgcgctctgaagcttgccaagagaaagcttggaactcacaagagggcaaagaagaagagagaggagatgatgggcgtcctcaggaagatgagatcggctggtacgcacactgacaagaagaaataaagcatttcaagttcatgaatgtggcagccagagattatcaactgtgttttttccctacctctagaaactagacatggcaaagtatttttgaccgaaacattgtttgttagtaatgtattgaaccacctcgtggtattttgccccaacttccaatgcatcaatggtttgtt

SEQ ID NO: 6957 - DNA, 632 bp, Zea mays
  Clone ID: 700612028_FLI
gggtaaagttcttcaatttcacccttctgaagagcatggatgaggatctggcagaagaagctgatgatggcatgcatcctggaaacgagcagtggctgtggccattgactggtcaggtgttctggcctggtattgctgatcgggaaagggaggagaaatacattaaaaagctggataaaaagctcaagaacaaggtgaagttacttgaaaggcagaagtctggttacaagcagaagcccctgggacaatgaccatgactgaagagctaacaattcaagatttttttccttgccacgtccggtgcatgcacgtggaagaagagttggagcacaaaaggcaccgctgttgtgaatacgcattctttctacacctcattgatctccctctccaaagatgtttggtgagtctggaggatattgtcaggatggaaaagcaccattttttttcctgttcgtataaacagattagataggatttgtttggttcgctgtctaatttaccacactttgtctaacttttttgtctaagtttagtttttcgatttaaacgactaaccttatgtaaagtgtgacacagttagccacgaactaaacagacctgtaatgcgccatatagttgaactgattcttttc

SEQ ID NO: 6958 - DNA, 880 bp, Zea mays
  Clone ID: 700612046_FLI
cttcgactgcggatacaatgccatcatcggtaggcctggattggcgaagttcatggccattccacattatacgtacatgatattgaagatgccaggaccacaaggaatcataaatgtacgcgctgacttccaaggcgccgcagagtgtttccgagtggtcattcaggcggccctcaccaccaaaccatcagcgacttcttctacgcaggcgaattcaaagcctgaggaagacctcgtggtatccgcgaatgaagctcaagtcgtgacctctatgcggccgactaaagaaaccaagagaatcaacctcgggttcaccgatgaacgcaagactgccatcatcagttccagcctggatgacaaataggaaggcgcgctcgtccggtttctgcaagataaccgagacgtatttgcatggcaacctgcggatatgctgggagtcccgagagaactggcgaagcacaaactgaaggtctacccccaggcgaggccgatccgacagaaattacgtcgttgcacgcccgacaagagagaagccatccgtgcagagctggctcgcttggtcgcggccagattcattagagaagtgttacatcccgagtggttagcaaatcatgttcttgtactcaaaaataataaagtgggttggcgcatgtgcgtcgactatccggatctcaacaaacattgtccgaaggatcccttcggacttcctagaatagaccaggtggtagactcaaccgccgggtgttctatgttgtctttcttagattgctattccagatatcatcagatcagcttggcaaaagaagacgaggaaaaaacagcattcatcaccccgttcggagccttctgctatacctccatgccattttcattgttgttc

SEQ ID NO: 6959 - DNA, 1072 bp, Zea mays
  Clone ID: 700612065_FLI
agaaactggagattgcagaggcaaactcgaaaatactgaaagaaaacgctgagatgattaatgagtacttctctattcacgttgatcacgatgggaacttgaccaggcttccagttgtacttgatcagtacacccctgatatggaccgtctcccaaattttgttttgactatggggaatgatgttacctgggatgatgagaaagagtgcttcagaacggcagcagctgctattgggaacttctacgcactccatcctcccatccttccaaatccatcggggagtggtgttcaggtgtacaagaaaaataaagcttgcatggcgagtggtgaacatgttgatagtacagatatcagcagacgggagggagcattagctttagcctatcagctattcagaatctgcagataggagggagcatcaactattctataattgcttgatatatttttatgtagtgctgcttgagttttataacatgaccgtcgaaactagattggcagtcagctagatataaccgaccgtcgaaactggcttcttatcatggtacgcagtgcgctgcaagcctgcaagtgacatcaaattggattggcagtcagcgggtgtcacagtgtcagtgtcgatggaatggttctgcagcgcatgtgcttctgtaatttccacaataagtagtcaagtgctccctgacattgtagtgatccctgcacgttggtggaactcgacaacttgccaaagcgccagagtccatcttatgaatagagaaaataacaggagcaaataagtaaccgagcacgggattcttcgcaatttgatttgcgagatcactatggcaatagacaaaccagactgaaaggagaacaactcaacatcaatcttgattatcaaccaagagcctaaactcctttgtcatgtgttattgttttaatcctaaactatacatcgttgtggatattgaagatctggttacaagcctacaacttaactgatatatatatatatcacatgatgataatatgtatattcatggtgacacctttgctccttgaacatgttgtagtctattgtgtagttgc

SEQ ID NO: 6960 - DNA, 677 bp, Zea mays
  Clone ID: 700612082_FLI
agcagaagaagcgaagtcgtcgccggagcaggaggaagagcgagcagcaagatgtcgtggcaggcgtacgtcgatgaccacctgctgtgcgacatcgaaggccagcacctcagcgccgccgccatcgtcggccacgacggcagcgtctgggcacagtccgagaacttccccgagttaaagcctgaggaggttgctgggatgataaaggactttgatgaacctggaactcttgcaccaactggtctttttgttggaggtacgaagtacatggtgatccaaggtgaacctggagttgtcatccgaggaaagaagggcactggaggcattactatcaagaaaactggcatgtccttgattatcggtatctatgatgagccaatgactccagggcaatgcaatatggtggtggagaggctcggcgattacctgatcgaacagggcttctaagtttgtcataatgctattttggtcattgggcacttaagtttgcacctcatttggttctgtaatatgtgggcttgtgcatgtgcttggcgtattgcatgcagtgaataatttatcttcgcgttgggttggtgacaatgttgggaacggatttgaattggggtttatgcttgccatctcctcatatctcgaactcagctgctgtttcactgagtaatgtacatttccctggt

SEQ ID NO: 6961 - DNA, 729 bp, Zea mays
  Clone ID: 700612141_FLI
gcgagaacagggctctcaagataatttccggtcttcagaactttgacaggagcagtgttgcatctgttgtcacagctgcagataagatgagactagcagagctactcgaagaggaaggagctgatataatccaaactgagggtgggaaatgttctagcccgacaaaacctggagtgcttggattgattgaaaaggcaacaccaacactcgccgcagcatactccatctctcgggctgttagtattccagtgatgtgctcgtcagggttaagctcggtgactgcaccaatggcagtaactgcaggagctgctggagttggagtcggttctgctattaacaaactcaacgacgttgtggcaatgatcgctgaggtgagaagcattgcgcaagcaatggagcttgcgccaagaatcgtgtccgaaaccctgagaacaattagttactagtggctaggaatacccttgccatttctgagcaaacttgagcagtcaataagaaagcaaaagagaggcatcgactctgcattttattctctctacgctgtcttttgcctgtggcagtgaatagcgcattagcatcatagaagtattagcttgatcaatggaagttgttcatgcgcttcttcatcgctgcaagtgttgtcatcttgtcgaactcacaataagcttagataagtgctgggtttgtgggaacatcgtttgtgcaatataaatgagatcttgcacctac

SEQ ID NO: 6962 - DNA, 698 bp, Zea mays
  Clone ID: 700612157_FLI
agttgatcttgggcctttcaaacatgttgtagatgatggtcttgaactcaggaaagctgcctttgaatgtgtggatactttattggacagttgtcttgatcaagtgaatccatcgtccttcattgtacctttcctcttgtctggtttaggtgaccattacgacgtgaaaatgccttgccatttgattctatcaaagctagcagacaagtgcccttccgccgtccttgctgtcctggactccatagttgaaccaatcgagaaaactataagccacaaacccaagggggatgcagtgaagcaggaggttgatcggaacgaggacatgatccgcagcgctctcagggcaatatcttctctaagccgcataagcggcagcgactacagcatacggttcaagaatctgatgaacaagataacggccacccccgcgctcgccgagaagtacaactcggtgcgcggcgaatgagacctgggttcttgtacatggtagaggaataggttaaacacccagagttgtcgcgcgctcgtcaatcctgttgccgcttccccgcatggttgctgaggcaaaagtctgtactctgatgatgacggtggttgatttttgactgctggacatagttgtcttgtacaaaatctggtggtaaattcagtagaattgccgccgatacatttacctggtggttctcttgtcgcagttc

SEQ ID NO: 6963 - DNA, 1570 bp, Zea mays
  Clone ID: 700612163_FLI
atcttgtgctgctgctgttggacaagatatgataaattcactggctgctgatgatgataaggaaaagtatgggcgatatcttcgcagatcttacattgaggataatagaaagacaaaatggtgtcctgcgcctggatgtgaatacgcagtggaattcgtcatgggcagtggcagctatgatgttaattgcaactgttcatatgggttttgttggaattgcaccgaggaagctcatcgtccagtagactgtgccactgtttcgaagtggatcctcaagaacagtgcagagtcagagaatatgaattggatactggctaattcaaagccttgtcccaaatgcaaacggcctattgaaaaaaatcagggatgcatgcacatcacatgcactccaccatgcaaatttgagttctgctggctatgtcttggtccatggtcagagcatggagagaggactggtggattttatgcttgtaaccgctatgagtcagcaaggcaagaaggagcgtatgatgaatctgaaaggagaagagaaatggcaaagaactcccttgagagatacacacattattatgaacgatgggcagccaatcagtcgtcgaggcaaaaggcactgggggaccttcaaagcctacagaatgacaagcttgaaaggttaagtgacatacaaagtcaacctgagtcacagctgaagttcattgtagaggcatggttacagattgttgaatgcagaagggtattgaagtggacttatgcctatggattttacctgccagagcatgagcatgccaaaagacagttctttgaatatctgcaaggtgaggcagaatctggtttggagcggctacatcaatgtgcagagaaagaacttcaaatataccttgacgcagaatctccctcgaaagacttcaatgatttccgtacaaagttggctggattaactagtgtgactcgcaattattttgaaaatctcgtccgggctctggaaactggattaaatgatgtaggcccttccactagccatggcacatgcagcaaaaagcgcaacttccaagagcctcggtggtaaaagtaagagtggcaagaacagggcatcaagcagcagttccaaatctggcggctcaacccgaggtgtggatgatagtaacatctggacatgcgatcagtgcacatatgcaaaccccaaatctgccagagcctgccaggcttgtgatcgccagcatcgatagcggtgtcagtcattgctagagatttggaccccatttgtcgagaattttctggtgttgcgccgtgcgatacacaacatacatgaaaattgaatattagctgatctctgggggtaggttttcgtgtatcatggattgtttgtcgactgactgcgcatgtgaagcctcaactcagcatccactcccatttgtgtatataagtatatccatatctgtaacaatgttttgttcaatggaagtagcggagctaggaggcgtctgctgccaaaggaactcaactgttgtagtgctgttgtaatgtaagatgcattggtcaaatttaaagaaagttagtcaccctgttacag

SEQ ID NO: 6964 - DNA, 2575 bp, Zea mays
  Clone ID: 700612170_FLI
cagggcgtcggagcgagctcattctcaactcgactcaagagctctgcctcctccatcttcccttctctggcctccggagccacgctgatcagagatggaggcgaatccgaagaacaccttcacgatcaaagtggaggacgggaagcccgggaaggacggccggctggcggtcggaccggtgttccggagcgttctggccaaggatgggttcccgcagcttgagcctgacatgaagacatcatgggacgtgttcaggtaacagtaagacacgcacggcggctggctgaaacaacagccaagaactcgctcgcacgtctagctactctctctgtttttctttattgctctttggatttttcagttacagaatctgtaaaatatcagacacacgtagattatctatacagtgctcagaaaaatcttggtgatggttggtgtgtttataattttatattatatgcacttgtgcagggtagcagcagtcaagtatgccgacaaccggatgctcggatggcgtccgttcaaagatggagtggtatgcaaacttgggttaaacgacagcaccatgagtagtgttctacatcagttcaggtcttccttagctttacaatttccatctgtatggctggtaaaaaccgctacgtttccgccttctagccagggccctacttgtggaaatcatacaaggagatctacgacgaggtgctgcaagcaggctctgcgttgcagaagctgggagtgcagccaggttcccgggtggggatctacggagcgaactgtcctcagtggatagtggcaatgcaggcttgcaatggctatagtctagtctgtgtcccactgtacgatactttaggtgcgggagctgtcgactacatcatcgatcatgccgagatcgatgttgtcttcatacaggacaagaaaataaaagagatactgtccccaaactgcaagtctgccaagagactgaaagcattggtggcgttcacttcggcgacaactgaacagaacaaagaagcggatcaaattgggatcaaaatgtatgcctgggacgatttcttgaaagtggggaaggataatcctcgtcaaccttgccctccgcaagcaagtgacatctgcactgtcatgtacacgagtgggacaagcggacagcccaaaggtgtgatgctgacccatgaaagccacgccatgtatgtgaaaggggtggacctcttcatggaccagtttgatgataagatgacaacagatgatgtcttcctgtcgtttctcccgcttgctcacatccttgaccgcatgatcgaagagtatttctttcacaaaggggcctcaattggctactaccacggagatctgaatgccttgagggacgacattgtggagctgaagccgactctactggttggggtgccccgagtgtacgaaaggatttatgaaggtatcttgaaggccattgcggaactcagacctctaagaagggtcatctttaatgctttgtacaaccgcaaactggcaagcatgaaagcaggctactcgcacaaaaccgcttcacctttcgcggacatgctggcttttcgcaaggtcaaggcaaggcttggaggtcgtcttcgcttactgatttcaggaggggctccgttgagtaatgagatcgaggagttcatgagagtgaccacctgtgcatacttcatccaaggctatggtttaacagaaacactgggacctagcactgtctgctacatcgacgacatggccctggtcggaagcgctggtgtgcctgccacctacaccgaaattcggctggaagaagtgcccgagatgggttataatccactcggcgttccttcgcgtggtgaaatctgcatccggggaaaatccctcttcgctgggtactacaaaagtccagaactcacaaacgaagccatcgttgatgggtggtttcatacaggtgacattggagagatgaccccagacgggatcttgaaggtgattgacagaaaaaagaacatatttaagctgtcgcaaggggagtatgttgcggttgagtacctggagaaagtttatggcttccctccactcgttgaagatatctgggtatacggggacagtttcagatcaagtttagttgcagtagtcaatccacaccaagaaaacacaatgaagtgggcagagtccaatggctacaagggttcttttgatgaaatctgcaaacttgaaggactcaaagagtacatcctgaaagagctggcagccgttgcgcagaagaacaagctacgaggcttcgagtacatcaaaggcgtagtgttggatcctgtgccttttgacatcgagagggatttggtgactgcaacaatgaagaagaagagaaagaatatgctgaactattaccagtctgagattgacacaatatacaaaaagctggaggcgcagaagagtgctgccagagctaagtgaagagatgtgccctattcgaccatcagctgaaaacaagggaaacgacaccgttgtaaatttcacattaatattgcgaagtaacaactcagggctatgagtaaggaataaaatgtatattgtgcctttgtct

SEQ ID NO: 6965 - DNA, 1384 bp, Zea mays
  Clone ID: 700612174_FLI
aatagcgacacctcctttcctctccctcgaggtgtctctcccagaacgcacagcacagtcgcagaacaggaaggcagagagcagcgccgcgatgagaggaggaggagcggggcccactgcggcgttcatgtccgacgagccgcctccagccgacgcggaagaggtggaggagaactccggcgccgaggaggaggacgaggagacggtggtggagcaggacgacgacgagctggagctggggctctgcctcggctccaagcaacagcagcagcagcatccgccgccgtgccggatcctcacggcccgggacctgcagccgaggtccctgtcaccggattcctccgtgtcctcttcctcccccgcggcaggtgcaggtaccgcggcgccaagcaagagggccaaggcggatgcggcgcccaactcgccagggacggtcgcgtctggccacccacagagcagctttggagtggtgggatggccacccataagaactttcaggatgaacagcctatttaaccaggccaaagagaatgcatcggaggctggcgccaagaagcccatcgtcgaacctgacatgcaggaagacaaggaggagagcaagaaaggccggaccgtcggttgggtgaaggtgaacatggaaggagatatcattggaaggaaggtcgatctcaatgcccatcgctcttacaagacccttgcctcagcacttgagctcatgttcatgaagccgtccattggtctttgcacttctagcagttcaaagactctaaagctattagacagctcatcggagtatcagctcacctatgaggacagggacggggactggatgcttgttggagatgttccctgggagatgtttgtaggttcagtgaagaggctcaagatcatgagaacctcagacgccaaaggtctcggtccacgattccaagggtctcacagacccacagcagcttgcacgagaggcaggacgtgaaaccaccgatgtgcgtttggtgctaacaccgctggtgaagcttgaactgtatttgatatcacgtaacagtaacagcagcccatatcgctggcatagttgtgagattacggggctgtttggtttactgtctaaggcgccacaacatggctaacttttatgtctaagtttagttcttcaattcgaacgactaaacttaggcaacttcattgtgtctagtggaaatagtagaagtttttttttttgcttcttccctgtggtgccctcgttgagcttttcttatgggctatacgagcatcatcgcccccagctcttctgtccacgctgtttacctgtgaggaatggtcgcccaaagtgttggtttttatccttgtgtttgatatggcagaagtatctgctctgctgtttcat

SEQ ID NO: 6966 - DNA, 761 bp, Zea mays
  Clone ID: 700612180_FLI
gccgcaaagagggctgaaggagaagcgaggaaaggtgaggccgatagatagaggagctgcggcgccgccggcgagcgaagagtggaggatccgatccgaagcgagaggactgaatcctgcggccgggagggacgcgggaccacgacgagcgtcgtcgtcggtgccaagcaacggcagttgtccctgtccagagcacaggcaagatggttaacgcgatcaaggggctgttcatctcctgcgacgtacctatggcacagttcatcgtcaacctgaacgcgtcgatgccgccgtcggagaggttcatcgtgcacatgctcgaccctaccaacatgttcgtgcagcctcacgtggcgcacatgatcaggagcaagatcggggagttcagggaccagaacagctacgagaagccgcagtagtggaggatctaccgcgtcctacactccttccttgggacttgctttcgttgcctgtattatttctgctgtgagctgagcacctcagcggaaacgagtacgccaaatagatcccacctgtggccttgaaatcatactgctatgtgctataaacgtgcagagggcactgctactgtgctgcacttgtggtattctgggattctttttgtcaggtccttaaaatccgttgagaatttgagatccagatggggcttagaccccgtttcaatctcacggaataaactttagcttcctgctaaactttagctatatgaattgaagtgctaaagtttagtttcaattaccacc

SEQ ID NO: 6967 - DNA, 1014 bp, Zea mays
  Clone ID: 700612202_FLI
cgcgcttcgcccccgacgagctcacgctctgctacaagacgctcaatgacgcctgcccctactccaagttcgcgcacctcaccgccaaccaggccatcctggaggctacgggcgcggcgaccaagattcacatcgttgacttcgggatcgtgcagggtatccaatgggcggcgctgctgcaggcactcgccactcgcccgggggagaagccatcccgggtacgtatctccggcgtgccttcgccgtacctggggccaaagcctgcggcgtccctcgccgcaaccagtgcccgtctccgcgacttcgccaagcttctcggagtggacttcgagttcgtcccgttgctgcggccggtgcacgagctggatcggtcggatttcttggttgagcctgacgagaccgtagccgtcaatttcatgctccagttgtaccacctccttggcgactccgatgagcccgtgcgacgtgtcctccggctggttaagtcactcgatccatcggtggttacccttggggaatacgaggtcagcctgaaccgagctgggttcgtcgatcgttttgccaatgcactgctgtattacaagccagcgttcgagtcgctggacgtggcgatgccacgggactcaccggagagggtgagggtggagcgatgcatgtttggggagcgcattcgaagggccattgggccagaggaaggcgcagagaggactgataggatggcggctagtagggagtggcagacgctgatggagtggtgtggctttgagcctgtcaagctcagcaactacgccatgagccaggccgatcttttgctctggaattacgattccaagtacaagtattcacttgttgagctgccaccggcgttcttgtctctggcttgggagaagcagccgctgctcaccgtgtccgcttggcggtgagtccctttttgtgtgtgtgtattggtgctgttgtatgtagcattgtcataggaccagggaagaaatgaatagactggttttgcattgtctt

SEQ ID NO: 6968 - DNA, 906 bp, Zea mays
  Clone ID: 700612205_FLI
gactagttctagtattccttctcaatccactcccgagcctgaacaggcaaagggcattgacgaggtatccttgcagcaagatgttcagactgaggattctgaggatcatgctgatggcaaggaggatcagccagcgcagcatggtcaaaagttgggatcagatatgtggtcaagttacttggacaaagtatcggatcctgctgccattggtgctgctcttgctgccattattgttgcagctgttgtggcattcctttacatgaggcagaagcaaactcgtgttgcctccaatgaaccagctgagcaggtggagcaagttgagcaggttgaacgggttgagcaggttgaacaagttgatcaggttgaaactctttctgactcaggaagtagccaggggcatgttgttgccaagggttcactgtttcacagtcctggcgtagaagcctctggcccctcacagtatagcagcagcttgtcatctgggcttggcaggaggaggaataccaagggtgaaggccttgagccagtagtgtcgaggagagactcgacagctcaatccacatcatcttatggtagtttcaccacataccagaagatccctgccaagaaaggaaacaaggaggacgaagcgatgaccccagtccggcgctccagcaggctgaggaatgtgaaaactcctgaatcttaagattggcgcaagctggcatctgaactgccttttagattattagataattgctattgccactttgtttgctgcttagtgaagcatcatgtgtctaggcaatcaacaggtttgcatgatgtgataaacagctctctgctgtttttacttcaaaagatgattaggacttgtgtgttcagtataactgcttaagatttaattgatgttgacttgctcgttgt

SEQ ID NO: 6969 - DNA, 1483 bp, Zea mays
  Clone ID: 700612258_FLI
aatcatcagaaggcacaggtgatggtttctagttggcctctaaactattggagaacagcacccgtcttcagaacacctctcataaaccagcatgcaagcatgcaagaggcaaaggtgaatgatgctggaccttcatcaaacttaaacatgcctgctatgtatggacacaccgaagatagtttgctttctgctgatcttgaaagggattggattatagaagagaatccaagaactgaaactacattgtttggagatagttcatcggaaatccttgatgagcctcagatggtgatgtctgctgaacctttccatgcacctgcttatttgaacttggaggctggaaattcaagcccaacggttcatgtcgagctaacaaattccgatgagaaactggccaatcttgcagaagacaagaatcggcgactttcagatgcaagccagttaagaacaggttcaaacccaatggttgatgttgagctaacaaatttcgatgagaaactggccaatcttgcagaaggcaagaatcagcgactttcagatgcaagccagttaagaacaggttcaaacccaatggttgatgttgagctaacaaatttcgatgagaaactggccaatcttgcagaagacaagaatcagcgactttcagatgcaaaccagttaagaacagggaggcttggtgaagaactggtcgagaaatatttggccaaacagctaggttccaacaatgttaggtgggtgaacaacagaattgaaaccggactgccttatgatattgttataacacacccagagggtttcacagagtatgtggaggttaaaacaactgtatcttcaagaaaagattggtttgacgtctcagcaagggaatggcagtttgccttggagaaaggggattcatttagcattgctcgtgtcatcttaggtacaaagaaagcaagtatagaaatgttgaaaaacccacacaagctttgtaagcagaaagcattgcggcttgctctcctgatatccagatcggcagcaacctagactaaaatgtcggttttgttgaggctagcaccgatcatccttctgcagattgttatgattactctgactaataatcaacatgaactggagtgagcatctgcatcttgataggtatttgctgatccaagttagcagattcttctttttggagagagatggggtaccgggtacggcatgagtgcaagacaacatacagttgagccgctctatagtaggctcctctttctattattctaactcgggtaatcttctccaatggcggctctctaccatgtctcttgttacatacaacttacgctctgcctttgtaacccattctggtattttgttgcataatgtatgtgattttgtcattagatttgtttttcaatttctgccctagacatcgtcccataggttgattgtgtaactaaacatgaaactgtacataaatggatggaatttgattttaccatgt

SEQ ID NO: 6970 - DNA, 564 bp, Zea mays
  Clone ID: 700612325_FLI
cgcagctgcacgtgatgctggccatctgctacagcgggcgatgggacatggtccaggcgtgccgggagctggcccgggaggcgcaggcgaaccggctcagtccggacgacatcgacgagtcgatcatcgccggcaagctcgcgacgagcgccgccggcgagttctcctgtcccgacctggtcatcagaaccagcggcgagatgaggctcagcaacttcttgctatggcagtcggcgtactcggagttgttcttcaccgccaagatgtggcctgactttggggaggctgagtacctggaagcgttgcgctccttccagggcagagaccgccgcttcggccaatcaaaattactctaaggcctcgtttggtttaagagtccctctattttagttttatttagttcctaaattgtcaaacagtaggattaaaacagagactaaactgatttagtctctagtctctcaagatatggttaaaaagactaaatcatattaattctacatttgcccttcatttagttcaattgtactaatagcaggagaatattaaaggctattttagtct

SEQ ID NO: 6971 - DNA, 536 bp, Zea mays
  Clone ID: 700612382_FLI
gccgccatggggtacctggcgccggagtacaccaccgtgggccgcttctcggagaagagcgacgtgtacgcgttcggggtcatcgtgctccaggtgctcaccggcaagagcaaggtgacgacgacgcatgcgcagctgccggacaaggacgtcgatgagctcgtcgacggcaacctgcagggggataattactcggcggccgaggccgcccagctggcgaagatcggctcggcttgcaccagcgagaaccccgaccagaggccgacgatggcggagctgctccaagaactgagcaccatctgaaatctaatggaggttcgacaatcatccactgtaactgtttcatgcaagagtcacatgccttttgtaacctagctacgtaccctgtctaggatcaccagtcagtaatcgctgatcttagaaagaatctgagctaggctctactagttagctagtaatcgctgatcttaggaagcacatgtgcccatgatcatgagatcttgtatgctaatgatgtgtcgttaccaccgcttttg

SEQ ID NO: 6972 - DNA, 1076 bp, Zea mays
  Clone ID: 700612414_FLI
accggtacgaacactgagcacgcacgcacgcaaactcaaaggagtgtgaccacggaactgaagccatggcggttacagttgagaagggcgctatgggcgagccggcgctgctgctggagcgcagccgggcgatcaccctgcacggccgtgaccggaagggccgtgccgtcgtcaggatcgtcggcaactattttccagcgcgcgcgctcggcggccgggcggaggaggcgctgcggtcgtacctgcgggagcgcgtcctcccggagatcggggaccgcgagttcgtggtcgtgtacatgcactcccgcgtggatcgcggccacaacttccccggcgtcggtgcgatccgcggcgcgtacgagacgctgccggccgcggccaaggagaggctgcgcgccgtctacttcgtgcacccggccctccagtccaggatcttcttcgccaccttcgggcgcttcctcttcagctcagggttgtatgagaagctgcgatacatgagccggcttgagtacgtttgggcccacatagacaaggagcagctggaggtccccgactgcgtgcgcgagcacgacgacgagctggagcgccgcccgctgatggactacggcatcgaggcgacggagacccgctgcatgtatgacgccgcgtccatggacacctcggcgtccctgcactcgctccgctgcgtctcctagtcgcctggacacttggacagtggcatcccgattcccgccgccggtacggcgtgctttctgtgttctggttggtaggaggtagctgcatggcttcatagcgcttcggtactgtagtttagctgtgtatttataatggataaagtttggagtaccgagatggcttctgcaagtgtgcaagagtagcatggaaaagctgatcaaagaacgcgaacataggtagcagaacaagtgaacaccaatagaatcgctaatccaccaaacaggaaccatagtgtgatcactgatcggtctttgcctcctatcgaagacgttacttgacatcaaagaggttacttggaacaaaggtgacacaaaaatatatagagaagatacttggttggc

SEQ ID NO: 6973 - DNA, 1588 bp, Zea mays
  Clone ID: 700612428_FLI
gtagctagctagtggcgtactgcgctcgctaccactcaacacgtctcgaccccgaccaaaaatgccgagtcttgcggcgttcttggtcctcctgctcccgccgctgctgctttccgcggctggtgccgcagaggcagaggagcttatcggcttcaaggccacgctgaggcacgtggacgcggacgccgggtacacggaggagcagctgctctcgcgagcgctacgccgcagcagtgctcgcgtggccacgctgcagtcgctcgcggcgttggcgccgggcgacgcgatcaccgcggcgcgcatcctggtgctcgccagcgacggcgagtacctgatggagatggggatcggcacgccgacgcggtactactcggccatcctcgacaccggcagcgacctcatctggacgcagtgcgcgccgtgcctgctctgcgtcgaccagcccacgccctacttcgacccggcgcggtccgccacgtacaggtcgctcggctgcgcgtccccggcgtgcaacgcgctctactacccgctctgctaccagaaggtgtgcgtctaccagtacttctacggcgacagcgccagcaccgccggcgtcctcgccaacgagacgttcacgttcggcaccaacgagacccgggtcagcctgccgggcatctcgttcgggtgcgggaacctgaacgccggctcgctcgccaacggctccggcatggtcggcttcgggcgggggtccctgtcgctagtcagccagctgggctcccccaggttctcctactgcctcacctccttcctgtctccggtgcccagccggctctacttcggtgtgtacgccacgctgaacagcaccaacgccagcagcgagccggtgcagtccacgccgttcgtcgtcaacccggcgcttcccacgatgtacttcctgaacatgacgggcatcagcgtcggcggctacctgctgcccatcgacccggcggtgttcgccatcaacgacacggacggcacgggcgggaccatcatcgactccggcaccaccatcacgtacctcgcggagccagcgtatgacgctgtccgcgcggccttcgcgtcgcagatcacgctgcccttgctcaacgttacggatgcctcggttctggacacgtgcttccagtggccgccgccgccgcgccattcggtgacgctgccgcagcttgtgctccacttcgacggggcggactgggagctccctctgcagaactacatgctggtggatcccagcacagggggcggcttgtgcctggccatggcgtcgtcttccgacggctccatcatcggcagctaccagcaccagaacttcaacgtgctctacgacctcgagaacagcctcatgtccttcgtcccagcaccgtgccatctaatgtagctgtaacttgagtttccgtgtacctttatttcgtttccgatccgttgctatttatgcatagatgtgttctatggattggtgattggtgcttggtactttggtagtactttgttgtctcttctcaacatctgatgattataatgactcttctcaacatctgatgatatcagtaggtgttggaggactctattgccg

SEQ ID NO: 6974 - DNA, 1043 bp, Zea mays
  Clone ID: 700612442_FLI
tgatgccgtaacacaaggctgaatttttgttcggtctagccgacccgacgatggcgtccagcgacgggaaaccactgccaaccccggcctctgtgggcggcggcggcggcagcagcaccgcgccgcccgggcagccgaccacggtagcgtccaaggtgctggacatgggcgcggcggcgatgcagtcgttgcgccccgtgaagcaggcgaagcagcacatgtgcacgttcgcgctgtacgcgcacgacccgaagcggcaggtggagacgcaccactacgtctcccgcctcaaccaggacttcctccagtgcgccgtctatgactccgacaaagccgacgcgcgtctcatcggtgcgtgcaccgtgcaccccatcttactgtcatcttcaattgattctttggcatgtgctcacgcccaagaaggacactgcatctacatggatcttttcttttaactgcatgcaggcgtggagtacatcgtgtcgaggaagatcttcgactcgctgccggcggaggagcagcggctgtggcactcgcacgcgcacgagatcaagtcaggcctgtggacgagcccgcacgtggcggggctgctggagaaggcggagctggaccacatggccgccacgttcggcaagttctggtgcacctggcaggtggaccgcggcgaccgcctgccgctgggcgcccccgcgctcatggtgtccccgcaggccgaccccgccgcagccgtgcgccccgacctggtccggaagcgagacgacaggtacggcctctccacggaggagctccgcgccgctagggccgacgtcgaggcgcccgccgaggagcacccgggccaggccgactactggctccgccaccgcaagggcttcgcggtggacgtcgtgccgcacgagatgaagcgtcacgcgccgtttccgtgagccgtgaccaaccggtgttttacagtggcgcatgtgtaataaaaccaaacgatccagcaggcgtctccgtccgaactcgtgaatggcacgcgtttatttgtttttcagttcatgatgttc

SEQ ID NO: 6975 - DNA, 1236 bp, Zea mays
  Clone ID: 700612470_FLI
cagcaggcgaagcatcgccagattggtatatcgatcgattgatcggtggcggagggaggggaggagggcggcagatggcggcgtgccggggcttcttcgagtgcctgctcaggctgctcaacttcatcctcaccgtcgccggcctcgccatggtcggctacgggatctacctgctcgtcgagtggatgaagatatctgaggacggcagcagcggggggttgacggcggaggtgctggtctccggccggccgttgttgggggctgtcgctctcggtgacagcttcctcgacatgctacccaaagcatggtttatttatttgttcattggtgttggtgctactgttttcctcgtgtctctgtttggctgcattggagcagggacaagaaacacctgctgtttgtgtttctatgccttcttggtcatattgttgatccttgctgaagctggagctgctgcattcattttctttgaccatagctggaaagatgtaattccagtggacaagacacataactttgatgttatgtatggctttctgaagaaaaactgggagattgcaagatgggttgctcttggcgttgttgtttttgaggcagtgctctttctattagctctggttgtcagggcaatgaacaaacctgcggagtatgacagtgatgatgaaattattgcaattggccgaagccctaccatgcggcagccattgatccatgcccaaaatgtgccggccaccggtgttcctgtcccaacactcgatcagcgttcaagtagaaatgatgcctggagccaaaggatgcgagagaagtatggtctggacacgagccagttcacgtacaacccctcagacccaagcaggtaccagcagaatggcgctccacaggctgaagaaaggagtcgatgcactataatgtgaagaattcttcatgacgtcctacgtcataatggttttcttgaacgggctacctcagcttgtgtagtttggtgttgttcagacttcatagctgtgtgtgtggaatacaaaaatcccgaccatattgtttgtcacgcttgatgtcttctctgcaaatgttctatgcacttgtaattttaccgtgaatgacgaactgttagccattgacatcatctattttgtattttaggggggttgtttcttcttgccagtcctaccattttcatgtagctctgtttaatcatgatgctttactcaaatatatgtaagatttggttgtgccgtt

SEQ ID NO: 6976 - DNA, 579 bp, Zea mays
  Clone ID: 700612479_FLI
aagagcttgcgctcgtcttccaggaaatcatgagctgactgacgacatactagacacacagaattagatgggacgttcttccctctgctggcaccgagattggatatcagctgcccatggagcgctaagagctactcagtcttagcgccgtcatcaagctccaaggccacagcagcggtgaagggcattttgctgctgctattcccgcagtctgtacacatgctaacacataatccgtgtcatttgtgaagagaagctgctgccatggacaatggacttcagccacaatattatgtggatgtcgtttcatgggctgccggcgatgctacaggtcccgatcgaatgatgatcagcagatgggaactcgtagttccttgctgtctgcagcacctttctcatgtaccgttagcatgtgcgtgtttgtggttgggttgggttgtttggccgatttactgatcattggcgaatgaagtgagccatgtacatcattttgaagaattaatatcttttcttcttctgagtacctccctttgtcatgcactgcattgagtgaaaatgatatcatgtggtgttgccttg

SEQ ID NO: 6977 - DNA, 930 bp, Zea mays
  Clone ID: 700612536_FLI
gtcaggtcatgtcaggccaggcatcttgggcaacagcaactggcaacagccgggccttttgagcgtgctctctctctctctctctctcccctatccatgctttgtgcctgtttggtgcgcgtccacctttcggggtcaccggcttctgctttcttgctacgccaccgcgcctctcgtctatttatggagtcccccgatccatgaagccggtgcaggccgagagttctcaacgacgtctgccggcagtgctcctgctcctcctcctccttcccggccgccgcgcgagcttgggttagtgtctcttctaagcggagacctgtgagaggagccatcatcatggccgctgttgagactgttgtcctcaaggttgctatgtcatgcgagggttgcgccggggcggtcagaagagtgctctccaagatggaaggagttgaaaccttcgacatagacctcaaggagcagaaggtgacagtcaaaggcaatgtcaagcctgaggacgtcttccagacggtttccaagtcggggaagaggacctcctactgggagggcgaagccacggccccggacgctgcggcggctccagaagccgaagcagctcccagcaccgcggcagaagcgcctcctcctgctgctccggcggcgccagagatcaccccagccaaagctgacgcctgatcgtcacgctattattcactcacatgtgatgctgtgcggctgcgactcctaaaccttaaatctagaaatagctggggattgggtttgcatcgtgttcttgccggtctagcaagtgactataagaataatggaataaacgatgacccagtgtgtgtatgatttccgttctgaagaacaaacacatcccttgcaggattgttgttcagtagattttacttgtaccgcggctttggagttccccaaaggactttgttc

SEQ ID NO: 6978 - DNA, 880 bp, Zea mays
  Clone ID: 700612584_FLI
ggcgaaatcaggggtggtcacgccgagcgactacgcgaagacgcagtcggcgggggcgaagatctcccaacccacattgcgcgcgcgtctacgcccgaggatcgatggttggcggcggggcgcgccgcgcggcgctggggcgctggtgcctggtgatcctggccgtggcctccgcgctaggggtctctggccccgccttctactggcgctacaagaagggcttctcctcctcctccccctcgtccaccgcggcggcggtggcttcttccccgtcgtgccctccctgcagctgcgactgcccggcgcccctttccctcaagtccatcgccccagggcttgccaacttctcaataacagattgtgggaaaaacaaccctgagcttgccaaagagatggagaagcaatttgtcgatcttcttaatgaggaactcaagctgcagcaggttgtagctgaggagcatagtcaccacatgaacgccactcttgtcgaagcaaaaagacaagctactcaataccagcgagaagccgaaaagtgtaatgcagctacagagacctgcgaggaagctcgggagcagtctgaagtagcaatttcaaaggagaagaaactcacagcaatgtgggaacagcgagctcggcaactgggttggcatgattctcgagccacgagcatgtgacagctttagttctgaaatttcaggtgaaattatttctggtagctgcatgggttatgccttgcagccaaaccaaccggcgacgtttgtctatgtaatatcagtttccacgacaacattgttaattttgagtctcaacattatagttccagcttccttacaaatgtgactagcttgctgccgcctagatatctgaattttgtcatagt

SEQ ID NO: 6979 - DNA, 1740 bp, Zea mays
  Clone ID: 700612732_FLI
ctgcgagtcggggtaaggaggctcatgagacaactaaataacatgccgtcttcggttatctcaagccacagcatgcatcttggagtcctagcaactgcatctcatgccatctccactggaactctcttttctgttttctacaaacccagaacaagtagatctgaatttgtcgttagtgtaaacaagtacctcgaagctaagaatcacaagatgtctgttggtatgaggtttaaaatgagatttgagggtgatgaatcccctgaaagaagattcagtgggacaattattggtatgggatgcatgccagctaactccacatctccatgggctaactctgaatggagatcattgaaggtccaatgggacgagccttctgctattctgcgtccagatagagtttcaccatgggaagtagaaccccttgatcgaactaatccacagccacctcaacctcctttacggaataagcgagcacggcctcctgcttcaccttcgattgctccagaacttgctccagtttttggtttttggaagtccccagctgagcctgcccaagctttctcattctcaggactgcagcgaactcaggagctataccattcaagccccagttcaatgttctcatcgtcgttgaatgtgggattcaatccaaagtacgagggtcccactccaaacaccaaccatttgtactggacaatgagagagacaagaactgaatcctactccgctagcatcaacaaagctccaactgaaaagaagcaagaatccactacttctggctgcagattgttcggtatcgagataggttcttctgcagtgtcacccgtggttactgttgctagcgtcgggcatgatcctccgccacctgctctctcagtagacgctgaatcagaccagctgtcacagccgtcccatgccaacaaagcaatggatgccccagcggcaagcagcgatcgctctcctaacgagacagagagccggcaagccaggagctgcaccaaggtaatcatgcaaggggtggcggttggcagggcggtggacttgacgaggctagatgggtacgatgacctccgccgcaagttggaggagatgttcgatatcccgggagagctttgcgccagcatcaagaaatggaaggtgatctacacagatgacgaggacgatatgatgctggtcggggacgatccatggagtgaattttgcaggatggtaaaaaggatatacatttattcctacgaggaggccaagtctttgactcccaaggcgaagctgccggccatcggtggtgacaccggcgtcaagccggacccaagcaaactgccaccagaatctgacgtgccacagagcgactccgacaacagtgctcccgttgctgctgataaggactgatggacgctagctcggccgtaccttctctttggatgttggccatgggaggcaagtgcagtgcccatgctccttgagactgctaagagttgatcatctggttccatctgcctcggcttggaccagcgaggatggccgggagggagtgcatgccgttccgtgcgtgtttcgtttgccgtgtttggtaggagcccatggcttgttgccggctacttgggttctgtagactgttacactgactgctgccgtctcacctggccgccccctctcacctctctagtaatatatactagggcttatgtacacagctgttttggtagtggcatatgtatatcgtcggtcatgttgcttgcg

SEQ ID NO: 6980 - DNA, 537 bp, Zea mays
  Clone ID: 700612741_FLI
ccgcacaacggcacgattctcctcctccgtccgcgtagctctcggtttcggcgatgtcggggcgcggcaagggcggcaaggggctgggcaagggcggcgccaagcgccaccgcaaggtgctgcgcgacaacatccagggcatcacgaagccggcgatccgtaggctggccaggaggggcggcgtcaagcgcatttctgggctcatctacgaggagacccgcggcgtgctcaagatcttcctcgagaacgtcatccgcgacgccgtcacctacaccgagcacgctcgccgcaagaccgtcaccgccatggatgtcgtctacgcgctcaagcgccagggccgcacgctctacggcttcggcggctaggccgcctccccttctgatgctttgatatgacggccgtggtcggttgtgtgtctagttggccggtctactgtagtttgttctgtatcttcgtttcgaggtgttccagtttctagcccatttggtgtaatattttcacagctattatcaatggaaagccctcggttctatcctc

SEQ ID NO: 6981 - DNA, 676 bp, Zea mays
  Clone ID: 700612744_FLI
attaaccctcgttcctgtcgcgcagccacgacctccacttccacatctcccccggcgtcggcgcggtcagttgaaccatggcggactccaaggccacctcggcggtcaccctccgcacccgcaagttcatgaccaaccgcctcctggcccgcaagcaattcgtgcttgaggtgatccaccccggccgcgccaacgtctccaaggcggagttgaaggagaggcttgccaaggcgtacgaggtgaaggaccccaacaccatctttgtcttcaagttccgcacccacttcggaggaggaaagtccactggtttcggcctcatctacgacaacctcgaggctgccaagaagttcgagccgaaataccgcctcatcaggaatggtcttgctactaaggttgagaagtcccgcaagcaaatgaaggagcggaagaacagggccaagaagatccgtggtgtcaagaagaccaaagctggtgacgccaagaagaagtaaacgttcgtttacatttgtattactgttctgggctctgggtggtctagctgcaatgtcataattatggtcgtgttaggttttgttccacccttggcactgaagtgattttttttgtaattcctcggcactgaagtgaagttttgtctgaatattgcctcgtaacataattgcccggtccctgttct

SEQ ID NO: 6982 - DNA, 921 bp, Zea mays
  Clone ID: 700612749_FLI
cgcgttctacgccgtcatggcgccctacaccaaggtggaggagagcttcaacgtgcaggccatgcatgatattctttatcacacttatcacatcgagatgtatgtcatttagaatttcctggagttgttcttcgaacattcataggtaaaattcatgttgtcatgaaacccacccttaatttgtgcagcatgaaacagtattttctcaatggtaaatttttggactaatgattcttatagccttccatctatgcttttagctctaagacaaaacatgatttcttatgtgttttttttaaattttgcagaccttgtagtcttgatgtgaaattatggcagtaacatgatgtaccgactactgtttgcatttttcaggagcatttgttatctctattctctcatcaccggtagtctttttttgcatgtacttcatgttccaaggttctatagtcttcttagaggcgatcgttaaagctctgtatataatcttccatggatgtatattctatctgatctgatgtttaatttctcattgatgcagttttggtaaactgatttttttctgtttccttttgtagctagactaacattgagttgtgttactttgacgagtttgagacttctcagagctcagatactctaaggaggagcaaattcccgttgaagaatttgagagaaggaatttcacctatctactgaactagactaacattgagttgtgttactttgacgagtttgagacttctcagagctcagatactctaaggaggagcaaattcccgttgaagaatttgagagaaggaatttcacctatctactgaagtgagttttattagtttgttcaaatggaccgtgctgtcatttcggatgcggataccaaacaagttttttaatgcttggagcaacttttgttcattcgat

SEQ ID NO: 6983 - DNA, 1785 bp, Zea mays
  Clone ID: 700612792_FLI
cttccctcctacctctctctctctctccctccgttcgtttcttgactcttctcttctccccatcagccagcagtctctctctctcacacacacacaagcagcgacttgctcacagtagtgctccccggacagaatgaccaaagacgaggagttcaagctggtcaagatccagaaccatgcgctgaaggtgaacatacactgcgacgggtgcaagcacaaggtcaagaagcttcttcagaagatcgaaggcgtgtactcggtggccattgatgtggacaaccacaaggtctcggtgacgggcgatgtggactcggagaccctgatcaggaagctcaccaggggcggcaagcacgcggagctgtggtcgcagcccaagggcggcggcaaccagggccacaagggcaataatggccagcagcagaaacagcagcagccgcagaaccagaaccagaaccaccagcagaagcagaagcaaggtgccaatctcagcaaggatgggcacaacaagaacagcaacggcggccagaaggaccaggggaagcaaggaggaggaggaggggctgggggcctcatgcagggcctcaaggcgttcaagaaccagcacggcaacaagcaccagctccctgagctcagctcggacgacgatgacctgtatgacgacgacgacgaggaggagtttgacgacgactacgaggaggagctccgcttcctcggggacaagatgagccagctcgggttccacggcaacaaccagaacaagaacgggaacaacgctgctgtcaacagtaaccacagcaacggaaatggcaagaagggtaacggaggtggtggagccaacaatcatcaccagaacaacaaccaccaccaccaccagaaccagaagaacgtaaacgtgatcaacatggcagcagcaaatgccaagatgggcggcggcggcggaggaggagtccagaaccaccagaagaacgctgctgcgatcaacatggccgcggcggcggcggcaaacgccaagatggctaacggcgcccagaggaacgctggtgccatgggcggcatgctgggcctgagccatggcctgggagccgccgccggtgctgctcctcctgggttccaaggctacgctgcaggcttcaaccacccgtcctcctacgctgctgccggctacggaggaggtctccagcaacagcatctccagcatcagcagcagcagcagcagagcaacaacctcatggcgagcatgcaggggtaccatcatcaccaccctgcggcgacggcagcgatgatgagcaatctgaggggtctgaacggcaacgtgatgatgatgcaccagcagccccagcagcatcagcagccgcagatgatgtaccactcctccccgcagatcagcccttacactggctactacaacccttacaactactactaccacccccaccctggcagcgctggctacccgcccagcaatggggatgtggagaccatgttcagtgacgagaacaccaagggctgtgttgtcatgtaaggggatgcagctacaatcctatgatctagaggttgtaatggtggcgtggtgatgcaatcctgctggtaccttattttccttttctttctttctttctttctttttttttcctttcattattttactgctattttatggttttttttcgcatgtatcaagaagagtgaatcatggtgttgactttagatgtgttgttgaaagtagggggggcaacttgagagaaggtgatcagacagttgtaatgtaataccttttaggctttt

SEQ ID NO: 6984 - DNA, 744 bp, Zea mays
  Clone ID: 700612833_FLI
gcaagccaaaaccctagcaagcaaaccaccggagcagcggcgcttgcgcgggcggagtcatggcggacgacgattacaacgaaatcgacatgggctatgaggatgagcctccagaacctgagattgaggaaggggccgaagaagagcctgagaacaacgaagatgcccctgatgatgtcataggtggagagggtgatgataaggaacaggaaaagaccaagcgtgagcgcaaaacaacaaaatatatgacgaagtatgaacgtgcacgcattcttggtacacgagccttgcagataagcatgaatgctccagtcatggttgagcttgagggagaaactgaccctcttgagattgcgatgaaggagcttagagcgcgcaagatacccttcacgatcagacggtacctacctgatggaagttatgaagactggggagtagacgagctcattgtggaggactcctggaaacgccaggttggtggagactgaagatgctgatctacttggcatggaaaggatgtgtagttacaggtcttcgttgcctcttgagtggatgctgaacagtgaatgaaccaagacgaaacgatgctatgctagatgttaccttgacgtctgtggttgccttggaactctggaaccgtgatggctggtggttgagttatgcttgttcgtttcagtttcagacatgctgtgcagatgattcgtaaactgattcgtctttcattcatttggaagggtttatcgt

SEQ ID NO: 6985 - DNA, 755 bp, Zea mays
  Clone ID: 700612942_FLI
ggatgttcgtgcctatatcacagcatcagaaattcagaatcgatccgatctccgcttgcgctgagctccatcagattcaattctctgcaggtgcaggaccgcgaacacgaggaggcaggggagcagcatccacaaccacaagccatggcggggaggactaacatccccactaacaactccgccctcatcgcaatcatcgccgacgaggacaccgtcactggcttcttgatggccggcgttggcaatgttgatctgcgcaagaaaaccaattacctcctcgtcgacaacaagacgacagttaaacaaatcgaggacgcgttcaaagaatttactgcaagggaggatattgctattgtgctcatcagtcagtatattgccaacatgataagatttctggtggatagctacaacaagccagtccctgctattctggagatcccatccaaggaccatccatatgatccagcgcacgactcggtgctgtctcgagtgaagtatctcttctctgcggaatcggtggcgtctgataggcgatgaaggcatccttgtgtagtagtaccctttggtgtatctgttttgttatgtattgaaaagaagtggcatgcgtccgagcgagacagcaaacaataataatggttgtggaaccaaaccaacacctttttttctttcataaaaggttggaatgctattttgttgctttgtactgtatttggttggttaatagagagtaataaaatgcgattgtcatgttgcac

SEQ ID NO: 6986 - DNA, 1264 bp, Zea mays
  Clone ID: 700612989_FLI
ggaaaactgggctatcctgaattcagtgcaaagcattcatggcatatgattttcactcctgggtattgctagggaaacctgtgggcatccacacagtaattttgaagagcattggtctcttagatttcaacttctcttaaaaactagacccctacgggaaaggcctcccacggtgcattgctttaagaagaggatctcaacacagggccgagataagggactgaaggctggaccgtccaggaacatgacattgcatgacgaggctcttttttgtgcgactacaggtttgaaccctggttgtctgttggtggcatcaccactgggcatacctctgttatcagtgtgttgtcaatttctcatttcctggtcccttcatttgtcaacctcttcctttggtgtccttaactaataagcttatatctttacaagcaaagacatcaattgtctgtattatgcttagccagaccaacctagagtttaaccatgaaatgtattatgcttgaactttcgatgacctctattttaatgattaagagccttcttatggcatattgttgcgatgttcttccgactagattccttacatgtgaagtttctgattcggaatattttctgacctcttgctaaaataagaacttggctggtatttttcaacctactgctcgtccagggttggtgcagaccagtggtctttacagcataaatcaattccagaaaaattgcaaagactgtacgatgatggttacaagctggtcatattcaccaatgagtcaacattgagcgctggaagaacaagcgacaacaagctgttgactccaaagttggccgccttgataactttattgaatgtgttaaagcccctattcaggttttcattgcttgtggtttagggaaaggaaaaggtattccagatgatccataccgcaaaccaaatcctggaatgtggtggttgatggctcagcatttcaattctggaatcaaaattgacatggatcaatctttctatgtcggtgatgctgctgggagagagaacgatcatagtgacgcagatatagaatttgctaaggccatcggtctcaagttccatgttcccgaggagtacttcggtttctaattacctgtgaccagctagtaagatggttacactacgtcgtttagtgtttggatattatcaatactgtggctattctggtatggtgatctacatgtctgtttaaaccgtcaaataatatcccagttattcacttaggtcctgtttgtttcc

SEQ ID NO: 6987 - DNA, 1231 bp, Zea mays
  Clone ID: 700613016_FLI
cttttgtcaaacttatatgctacaaatgcaagatgggtagatgttgacaaattaagaagtcacatgaagactattaagttaaacaaaagacctgcctgcagctggcttaagttgaagaatgaggtgagcacctttggtataggtgaccggagtcatatgcacgcagaaaagatctatgtgaagttggatgaaatcttgctaaagctcagagaagtaggttacgtcgctgatacctcatctgcactacatgatacggatgaagagcaaaaagagcataacctttggaaccacagcgagaagcttgcgttggcatacgggcttcttgtcgtgccagaaggatctacaataaggatattcaagaatctcagggtctgtgcagactgccatttggtatttaagctggttagcatggtttttcatagggagattgttctgagagatccttacaggttccaccaattcaaacacgggtcatgctcgtgttcagatttttggtgagatagtcataaaaccaaatatgaatcggtccctgcctgtcaatttctctacttgttcttctgatgtatcatgtgcgacctgtcgctggccaagcaaggcaaactcttggacgttgtccaggcgagcactggagcagcagcacctcacccaacggtgagggaggtggttgccaactactactcccccaaccgtcatcgccgatggctcccatcatcggtcagaggaagaggagttgctgctgcaaggcagattgtacttcggtcttacgatcatgatgaagcgcactgcgtggcagcggtagctggtgcacggcaatggtagcatggggctcatgcttgacaccgactgtccatgatgcaaagggacgactaatcgaccttccttgacatggctttggctccgcagcctcatgacaggtggagggcatgctcgttatcacttaaacggctacacaacatggtcacctgcttatgcaggatactaaacgggtggcaactctccgttttgtttggtttaaggttaaagtaggatgatacggggtgacactgtccccttgaatttttagaatatgctgtcacaaaatttacttcggtatttatctcgttttcacgtgactgtctcaacactatacaaactgtttatgttccctttcatcttttttgtacatccaatcaaacagatgacagatcggagaaatatggttctcaaagtatatgttattgcatcttacaag

SEQ ID NO: 6988 - DNA, 1105 bp, Zea mays
  Clone ID: 700613032_FLI
gcccgaagcatgttacacgaggtgatggaacagcagacagtatccattgcgaaggctggaataattgcatctttaaacgctaggacatctgtcctggcatgtgccaatcctactgaatcacgttacaatccaaggctctctgtaattgacaacatccacttagcgccaacgctactttcaagattcgacctgatttaccttatcttggacaaggcggatgagcaaactgataggcgcctggcaaagcatattgtttcgttgcattttgagaatccaaacttagaggagctcgaggtcttggacttgcagacactagtttcctacataagctatgcaaggaagtatattcagccacagttatctgatgaagctgcagaggagttaactcgtggctatgtcgagatgagaaaaagagggaatagccctgggagcagaaagaaggtcataacagcaaccgctagacaaatagagagtttgatccgtctcagcgaagcattagcccgaatgcggttctctgaagtggtcgaggtgcgggatgttgtggaggcattcaggcttcttgaagtcgccatgcagcagtctgcgacggatcatgcaactggtacgattgatatggatctgatcatgacggggatatccgcaagcgaaaggcagaggcgggagaacctcgttgccgcaacccgtaacctgattgcggagaaaatgcagcttggaggcccctcgatgcgcatgattgagttgctggaggaactgaggaagcagagctcaatggaaattcatatgcacgaactccgcggtgctcttggcaccctgatgactgaaggcgcggtggttatccatggagacaacgtgaggagagtttgatgtcttgacggccatctgcggtgatgcttctataaggctccaacccgccacttccttgaacagacaaggttccgaagataactgtagcacttagccgtaacttgtggtccgaggtctaaactggtccagatttgtagcagtattgctagttgtagattttttttaaaaaaaattgttatcagaattttgttctcttgctattgtccgagtttactgcaacaaggcaactatcatctcgttc

SEQ ID NO: 6989 - DNA, 1726 bp, Zea mays
  Clone ID: 700613051_FLI
gcgagatcgtgcgcacctccgagatctccacgaagttgtggtaacatggggctcaccttcacgaagctcttcagccggctcttctccaagaaagagatgaggatccttatggttggtctcgatgcagctggtaagaccaccatcctctacaagctcaagctcggagaaatcgtgaccaccatccctacaatcgggtttaatgtggagactgttgaatacaagaacattagcttcactgtctgggatgttggaggtcaggacaagatcaggccattgtggaggcactatttccagaacacccaaggccttatctttgttgttgatagcaatgacagagatcgtgttgttgaagcaaaggatgagctccacaggatgctgaacgaggtatatcaactatgttcatgtttttttgttatatatttattgcatgtcaatatgtgctgtcatttttaattttcttgggacttctgaatttcagacccttctcttccaactatgttcagaatgatgctttgatctattaaatgcttctagagtagctatatgcatcaccacttcaccggtgactttgaacatgccaaatcctgtgtataatgaattaagttaaagtttgcgatgcgagaattcctaagagtctagataattgcatggtatctataccacagcatggaatcaagttttctcagactgacttatgggaaacaatgaaggacaggcatagtacagtggtgaggagcctttgcactgagccaaaagatcctgggttagatgcaacctctctgcaaaatggagggggttaaagtttgcctcggttattccatccccagagctcacttatgtgggagccgccagcactgggtttgtcatttttgacttatgggaaacaataatacattttgatgccagaattacatctgaagttttattataaaaaaaagtttgtcacagttggctggttaatatctaagtttgcaatgacatataacatgagtatacatatggacttgttggtacctctgcaatatttaggcacctgggttatcttgagcttgagttatggccgtcatgggcagctgtaggttagtaggtacactcaacctgaaatggctagttatactggaagtatgtatgaaggcagcaaatacatgtcttcagtttttttttggaggggggggggaccactgttttagtacaacctgttgatcattcatccacatgacactggcaggatgaattgagggatgctgtcttgctcgttttcgcaaacaagcaagatctaccaaatgcaatgaacgctgctgagatcaccgataagcttggtctccattccctgcgccaacgccactggtatatccagagcacttgtgctaccacaggagaaggtttgtacgagggtcttgattggctctccaacaacattgcaaacaaggcctgaatggacaattctgctgtttcacgaagcacatctgcacatggcgaggcatggtcattttgaccctcagacgattattgtttcattggaaagtatcgtatttctttgctaggcttttcagagagatctctctaagaaactgatccgaaattaagacactataattggcagtggcactagtagatcgtttactgagtaatgcagtttattttaatgtatcccaattgtgttgtaagatacaaatatctgtcggaattatccattcaatttgaatctagatacgtagtttttgtt

SEQ ID NO: 6990 - DNA, 1556 bp, Zea mays
  Clone ID: 700613077_FLI
ctcccgatctacgagcccggcctcgatgatgttgtgaagcagtgcaggggcaggaacctcttcttcagcactgatgttgagaagcacgtcgctgaggctgacatcatcttcgtctcggtgaacacccccaccaagacccgtgggcttggagctggcaaggctgccgacctcacctactgggagagcgctgctcgtatgatcgccgatgtctccaagtctgacaagatcgttgtcgagaagtccaccgtccctgtcaagaccgctgaggctattgagaagatcttgacccacaacagcaagggcatcaactaccagatcctttccaacccggagttccttgcagagggcactgctattgaggacctgttcaagcctgacagagtgctcatcggtggccgggagacccccgagggcaggaaagccgtccaggctctcaaggatgtgtatgctcactgggttcccgaggacaggatcctcaccaccaacctgtggtccgctgagctctccaagcttgccgccaatgcgttcttggcacagaggatctcctctgtcaatgccatctccgctctctgcgaggcaaccggagccaatgtctctgaggtggcttacgccgtgggcaaggacacgagaattggccccaagttcctgaacgccagtgttgggttcggtggctcatgcttccagaaggacatcctgaacctggtgtacatctgcgagtgcaacggcctgcccgaggtggccaactactggaagcaggtgatcaagatcaacgactaccagaagagccggttcgtgaaccgcgtcgtggcctccatgttcaacaccgtcgccggcaagaagatcgccgtcctcggcttcgccttcaagaaagacaccggtgacaccagggagaccccggccattgacgtctgcaagggcctgctgggcgacaaggcccagatcagcatctacgacccccaggtgacggaggaccagatccagcgggacctggccatgaacaagttcgactgggaccacccgatgcacctgcaaccgacgagccccacggccattaagcaggtgagctgcgtgtgggacgcgtacgaggccaccaagggcgcccacggggtgtgcatcctgaccgagtgggacgagttcaagaccctggactaccagaagatcttcgacaacatgcagaagcccgccttcgtcttcgacggccgcaacatcgtcgacccggagaagctgagggagatcggcttcatcgtctactccatcggcaagccgctcgacgcctggcttaaggacatgcccgcggtcgcttaattcgtctgaggattcttaaaagttggacggcgctgctagtattccatgtttcgtgttttcatattggaggacgtctgtagatgtaaaaaatcctcgggcgcttgtgctcggcttgaggaaatatgcttgtacggttgtaccctggacccgctatagctggttggttcttcaagttgtgttcctatagaagccaaagttactacacgatcgatatgttctttttgcataataacaatacttgtctcacgttt

SEQ ID NO: 6991 - DNA, 341 bp, Zea mays
  Clone ID: 700613088_FLI
gaagaaaatggtgacaacacgatgaaaaattgacgtccaaacatattaacttctgcttgaaaagaggttgccgtccttacaggactctgctagctacacatcaacacatcattggtaatccttctgcatacatgtaataatataatataactagattgtctgatgtccaacgtgtattgactctacttagggctgaacataatacttatggctacttatggctcgttagttcgcttggctcgacttagtttattttaattttgttacgagccgagttagtattttagctcggtttgttaacgagccatctcgttagctcgaacgagctatcatttatcaac

SEQ ID NO: 6992 - DNA, 377 bp, Zea mays
  Clone ID: 700613139_FLI
ttcagctcccgcagccgcctcagcaccatgagctggaacggccgccttctcctcagtgacaccatccctctgctggttctccctccttttcctgctagtgtcaccatggactctatctctctgtgtctgtctgtctgtctggctctctctctctctagttttagcaagtgttgagctgtattaggcttgtggtggtgtgtgtggtgcgcagggggagtgcatatttatagtgtgagaacctgagctgagaggaggaggggcgcgtgcgatttcacttggccatgtgggagaggaggaactaggttctaagctgtatgtagactgagctgtaaggaggtatgcttggaggagctatcactgaccatcagtttttgttt

SEQ ID NO: 6993 - DNA, 1264 bp, Zea mays
  Clone ID: 700613140_FLI
ggtcgacatagcacagtcctttttgctgcctcctaatgtgcagaacgagataaatgaaattcaaggaaagctgaactcatcagctactgatcttgctattaaaacaacagataatgccgcgaagataaaaaaggtgctaaacagagtgcggcttgctttagttgtcattgcagctgtgatgcttcttctggcatttgttggcttcttgttatccatctttggtctggaattccttgtctctgtcttggttattattggatggatattggttactggaacgtttatcctgtgtggtgtatttcttcttctgcacaatgttgtttcagatacttgcgttgcaatggaagagtgggttgctcatccgacagaacacacagccctggacgaggttatcccctgcgtggagcctgccacggcgaacgaatccctgtacagaagcaggcaggtgacgttcgagctggtgaacgtggtgaaccaggtgatcaccaacgtgtcgaacaggaacttccccccgcagctgacgcctttctactacaaccagtcggggccactgatgcctctgctctgcaaccccttcacgcctgatctgagagaccgcaactgcagcagaggagaggttaccttggacaacgcaacccaggtgtggaagaagtacgagtgccagagcaccagcgtctcaggaggagccgagatctgcgcgacggtggggcgcgtcacccccagcatctacgggcagatgaccgcgggcgtgacggtgagccaggggctgtaccagtacgggcctttcctcatccagctgcaggactgcaccttcgtgcgcgacaccttcacgaccatcaaccagggctactgcccggggctggagcgctacagcaagtgggtgtacgtgggcctggtgatggtctcgtcggcggtgatgctgtcgctcatcttctgggtgatctacgccagggagcggcggcaccgcgtgtacagcaagcagcaccagccgtacccggtggaggacaagccggcggcgacggtcccgggcgcttgaattgatggggccgttccagtgctccggcctactcccgtgccgctgtgcatactctactccgcgctagttgggttttacgtggtggtgtatgtaggtggatgtaccctggatttgttgtttcgtttgcttggtgttgctgtacgtttgctgattttccgtagacgaagttgctgtgcattctcgtactgacggtagctggatgaattgattatgttgggattggttatt

SEQ ID NO: 6994 - DNA, 751 bp, Zea mays
  Clone ID: 700613146_FLI
attgtcgcggttttctccctcaccatcgtcgtcgcggcgccgctactcgacgcgcagtccgtcctcccgcataccctctacccggcgccgctcctggaactcaagcgctggtacgccgccgagtttggcgactacctcgtggcccagtcccccggcttcttccgtggccttgtttgcctcgagctcgccttccaatggccgctcgccgtcgccacactctacggcatcctcacccgccgccgctgggctgccaccacctccctcatggccggcgttggcaccctcacctccatgtctgcaattcttggtgagatgttaggttcaggcaaatcaacaccaaagttgcttcagatgtatgttccttatgctgtttttgctgtcattgctattctacgtggactttgctcatgctctggacgtactactgctggttcatcacttgggccttctgcccggaagaagagggtctagatcagcagtgacacttggagaattttcggtttgagacagtggcgccagagcactaatgctggtcagaagacgattatctggatcaggtttctatccctggtatttagcacggatgttgaaaaatccagatagtgttagtggctgtttctctaggatttggtgttcgttttccctgaaatgtgatattcatcttgcctttatttccattttaccctttgattatatgtcttgctaactaagacattgttttgtttactggatgagctgattcaactctggc

SEQ ID NO: 6995 - DNA, 1048 bp, Zea mays
  Clone ID: 700613188_FLI
gaaagctttcgtgctcctccatttctaggctatagctagcctagctggggttggacgacctttcaggcacacgcatgcaagtacctgcagtcggttcataagaggaggaggaggccatatggacgacgaaggagccaagtagaaaaggcaggcaccgcaaccaacggtaaagctggtgatcgagcaagttttgtcaagagcgagctcatggaggatggcagcagtgctccaagacgggctactccccccacccgcaggagcagatctgccgacttccacaacttttcagaaaggaggagaagggacaggatcaacgagaagctgagagcgttgcaggagcttcttccaaactgcaccaagaccgacaaagtttccatgctagatgaagcgatcgactacctaaaatccctccagctacagcttcagatgctggtcatggggaaggggggaggaatggcaccggtggttcctcctgagctgcagcagtacatgcactacatcacggccgaccccgcccaccagatgatgcctccgccgctgcggccctccgccgggcagctgcagcccgccgccggccggcagtttcagataacccaagcagcagcagcagcagccaacaacgacaacgacccccagcgacgacgacagtccaacgtcgagtcggacttcttgagccagatgcagaacctgcacccctccgatcagccgcctcatcatcacaacttcctcaggccgccgagattgcagctctttacgccggaacagaggggcggcggcggcggcctgcctaccacgagccacaacgccggctggatttccgggaggagttcctcgtataattttatggagtgacgtgtgtgctccctgatgctgccaaaattaatttgaaacaaccgttctcatcttgaactcagaagacggcgtcagcgcactctgggaccttcagctagcgtgtggtggtgtccatgcatgaatgaatgcagtagtagttatatatatattagcaagctagttgtgtcattaaataaaggaacgctgtgtgactgtg

SEQ ID NO: 6996 - DNA, 1554 bp, Zea mays
  Clone ID: 700613228_FLI
gagagagggagcacccttccgaagccacgccaccgacatcgcctcgtgacccgacgcacgggatagaatcccattccccccgaaccctgcgccggggacccagccagctagctacatccactgatccacgcgcattccccgtaccaccgccaccgcgccgcgtcacggaaggaggaggatgtcgtcgtctccctcgccggcggccacccgcctggatctggatggcaaccccatcgcgcccctcaccatctgcatgatcggcgccggcggcttcatcggctcccacctctgcgagaagctaatggccgagacgcaccacaccgtcctcgctgttgacgtctactgcgacaagatccgccacctcgtcgaccccgcgccgccgcacctcgccgggcgcatctcattccaccgccttaacatcaaaaacgactccaggctagaggggctcatcaagatggccgatctgaccataaacctggccgcgatctgcacgccggccgactacaacactcgcccactcgacaccatctacagcaacttcatcgacgcactcccagtggtcaagtactgctccgagaacagcaagcgtctcatccacttctccacctgcgaggtctacggcaagaccatcggcagcttcctccccaaagaccacccgctccgcaaggagcctgaattttatgttcttaaagaagatgagtcgccctgtatttttggtccaatcgtgaaacaaagatggtcctatgcatgcgcaaaacaacttattgagaggcttgtatttgctgaaggtgcagaaaatggccttgatttcacaatcgtgagacctttcaattggattggaccaaggatggacttcattcctggtgttgatggtcctagtgaaggtgtgcctcgggttttggcttgcttcagtaacaatctgctccggagagagcccttgaagcttgttgatgggggtcagtctcagagaacctttgtctacatcaaggatgccatcgaagctgtagtgctgatgattgaaaatcctgctcgagccaatggccacatcttcaatgttgggaatccgaacaatgaagttaccgttagggagttggcccaaatgatgacagaggtctacgcaaatgtctcaggagaggcaccgctggatgagcccatgattgacgtgagctcgagtcagttctacggcgaaggatacgatgatagcgacaagaggatccccgacatgactataatcaacaagcagctaggttggaacccaaagacgcctctcaaggatctgctggagacaacgctgacgtatcagcacaagacatacaaagaagctgtgaaaaggcaaatgtcgcaggcttcagcgtcgacttagatagcgtgcccctggctctcgtctagagcctagttgcagctgttaagatgtttcggaagcgcaggtcacacatacgctagtgatctttttttttgaggccctagatgtccgtgttgttagataatcaagggatgctgtatcagtatgatatatttgtggcagagttgatgtattccatcgttcgtcgtact

SEQ ID NO: 6997 - DNA, 720 bp, Zea mays
  Clone ID: 700613245_FLI
cgccctcaaattcgttccgtccaggcaaggaagaaatcgagcagccaaggagaggagaagatggctcgtacgaagcagaccgcccgcaagtccaccggaggcaaggccccgcgcaagcagctcgccaccaaggcggcgaggaagtctgcgccgacgaccggcggcgtgaagaagccccacaggtacaggcccgggacggtggctctgcgcgagatccgcaagtaccagaagagcacggagctgctgatccggaagttgcccttccagcgcctggtccgtgagatcgctcaggacttcaagacggatctgcggttccagagccacgccgtcctggccctccaggaagccgccgaggcctacctcgtcggcctgttcgaggacaccaacctctgcgccatccacgccaagcgcgtcaccatcatgcccaaagacatccagctcgcccgccgcatccgcggcgagcgcgcgtaggcgtatctcgcgcccggccccagtggcggcggagggatggaggagggcaatttgtaaccttatgctgtttgttcgcttttagacggcgtggtgaagaactagtgtaaaaacggctttaaagtctattttgtgcggtagttcgtgtaggccgcttcgtcccgaagcgatcttggtaaaagacttattcgtgttgccaaacgacacaattcgtattttttttgtgtgccgtgtagaacacggtttgttgtt

SEQ ID NO: 6998 - DNA, 727 bp, Zea mays
  Clone ID: 700613283_FLI
tgcactcaaaaagtacggtgctaatgttagctgtgttgagagtggcaaagatgctatcagtctacttcaacccccacattgctttgacgcatgttttatggatgttcagatgccagagatggatgggtttgaggcaacaagacaaataaggcaaacagagatgagagttaacgaggaaaggaagaataagttggtgttgattgaaggctcaacatttgttgagtaccatttgcctgttttggcgatgacagccgatgttatccaggcaacttacgagaagtgtataaaatcgggaatggatggatacgtgtctaaacccttcgacgaggagcagctataccaagcagtctccagattaatagtgggaacgacagattcgactgtttaatatttagatggctatgaatctgatttctaattcatcgaattgaagcacaccaccatgttgcttctgtccaagcttgactctaacccttgacaattgtctgacctggcctctcgcagcactagatgaaaaggatgaaagtgccacgagttggctatgtatcagcaccacagatgaagttgcctcaccccggagtgtaggttggtagatcactctcttctttgatgtttataggttgttgtatatcttctgacaattcattggaaaccacatctcgttgcgacattggaggacatcttcaatgctggtaaatttgttataggaatatcctttaatgctggt

SEQ ID NO: 6999 - DNA, 483 bp, Zea mays
  Clone ID: 700613322_FLI
ctgccatgctgacccaggtgctgaatggcggtggtgcaaatgacaacctccatggagttagcaccgttaatcagcaagctgttaatgaccaagtgaataacgaattcttcatgggaacaaatgaggcacataatgcggagagtgatgatttggatgatttccttgcgtacttagttaatcaagatttcatcaacaatggtgattctttcattgacagggactgagaatctgccccttgactctggaagagagatgctgctgaccaattcatggttcttgcatgttgtatgaacaaatttgcactgtttgtagtaggctagctaggagcaggccatcttggatggaatccccatgtttctctagtgtagtcatgctggttctcttatgtatcagttgtagcttttaacctgtggtgttcagtttggtgggaggtgtgggtgccacccctgccaaactcagaactatgtgttcctctttggcttg

SEQ ID NO: 7000 - DNA, 870 bp, Zea mays
  Clone ID: 700613360_FLI
cgctaaatcaaggctgcctagcgcctgtgaagatcctcattcctaaaggctctttcctctcgccaagtgacaaggctgctgttgttggtggcaatgtgctaacgtctcagagagtgaccgatgtaatcctaatggcgttccaagcctgtgcctgctctcagggctgcatgaacaatttgaccttcggggacgacaccttcggttactacgagaccatcggaggtggatgtggagctgggccgacatgggacggcactagcggtgttcagtgtcacatgacaaacacaaggatgactgaccctgagatctttgagcagcggtaccctgtccttctgcacacatttagcatcagggagaacagtggaggttctggtttacacagaggtggtgatggccttgtaagggagattgagttccggcggcctattgttgtgagcgttctatctgagagacgggtgcatgctcccaggggactcaaaggaggacgagatggagctcgtggtgcaaactatttagtcagagaagatggtagaaagatttaccttggaggaaagaacactgtaacggtcagtgctggtgatatccttcagattttcacgcccggtggcggtggctttggctgtccttgatggcacttcttgcagacgcggaccttcctccatttgtttcctacctttgtacaccagtagctctatttagatcgcgattaaaataaaacgtaataagaccgccaacaactggagattccttatgctattgttgctccccgaggcattggatccgaatgcagcatgaatggtgctattgtttatcagatatcatttatgtgaaaccagcaatcccaaaattggtgatgaatgatgcttgctc

SEQ ID NO: 7001 - DNA, 568 bp, Zea mays
  Clone ID: 700613363_FLI
gccctatctcccttacataatcctgccccctcgccagtcgcgaaaaccctagccgccgccagaccattcgtttctcgcgagccatcgcttctgtaattctcaggcaccccgctcgatctcatcctaatcggtgtgattttcgtcttcaccgtcaacccacccctccacttactctgattcgcactttgttggcaggcatccggaagaaatggccaagtcgaagaaccacacggcgcacaaccagtcgttcaaggcgcacaagaacggcattaagaaacccaagcgccaccgccagacctccaccaaggggatggaccccaagttcctgaggaacctgaggtattctaggaagggcaacaaaaagagtggtgaggctgaagctgaggagtaggaaggaaagcatggctttgtttcctctgtttttagctcagttccacctttaggacctggggttttgctaaagatggaacttaagtggtgttactgtatgatggcaaggaccttttgctgccgaaggttatgttttgaagttcatgctaccttttaaagtacggattaccttgtgcct

SEQ ID NO: 7002 - DNA, 1104 bp, Zea mays
  Clone ID: 700613365_FLI
tcactatgccctaagggttttctcctgccaattgctaatgctgtactccacaactgtgtggctaggaaaatggaatctgctggtatcgatgccgctttgatgggtaaaccaaatcgtgagcctcgtgttgttgtacaaactgttagtgaagttgatatcttggacgatgggtatcgttggcgcaaatatgggcagaaagtagtgaaaggaaatcccaacccacggagttactacaagtgcacaaatacaggatgcccggtcaggaagcatgttgagagagcatcacatgacccgaagtcggtgatcacaacatatgaaggaaaacataaccatgaagtccctgtttccaggaatgcaagccatgagatgtccacagctcccatgaagcctgctgtgcatcctattaacagcaacatgccaggccttggtggcatgatgagagcatgtgatgccagggccttcaccaatcaatattctcaggcagctgaaagtgacaccatcagtcttgaccttggtgtaggcatcagccctacccacagcgatgcaacaaaccaaatgcagccttcagttccagaatctatgcagtatcaaatgcaacacatggctcctgtatatggtagcatgggacttccaggaatgcctgtgacagcagtacctggaaattcggctagcagcatatacggttctagagaagaaaacggaaatgaagggtttactttcaaagccgcaccattggaccgatcaactaacttatgttacagtagtgctggtaacttagtgatgggtccatgagtgtctctgctgatggtcatacctccatgaagcacatattaccgtaatcatgaagattgcttcagaaggtgctctactgtgtatcgtcatccacacataattgaatcggaggtggtcaaggtatacctgggagctgcagcgttgacacatgagccttttgctgtttggatgtacacttgctgtatgtgacgctgcagctcaacattcgttgtacagcaaaccagttatgattaattagattctgataatttggttatgtaaacttctttctgtactggaatatgggatagaaccaaagatccgtctggtggc

SEQ ID NO: 7003 - DNA, 1785 bp, Zea mays
  Clone ID: 700613433_FLI
cggagagctgagagttggggtaaggaggctcatgaggcaactaaataacatgccatcttcggttatctcaagccacaacatgcatcttggagtcctagcaactgcatctcatgccatctccacaggaactctcttttctgttttctacaaacctagaacaagtcgatcggaatttgtcgttagtgtaaataagtaccttgaagctaagaatcacaaggtgtctgttggcatgaggtttaaaatgagatttgagggtgatgaatctcctgaaagaagattaagtgggacaattattggtctgggaagcatgccagctaactcaacttctccatgggctaactctgattggagatctttgagggtccaatgggacgagccttctgctattctgcgtccagatagagtttcaccatgggaactagaaccccttgatgcaactaatccacaaccacctcaacctcatttacggaataagcgtgcacgaccccctgctttactttctattgctccagaacttcctcaagtttttggttttttgaaatccccagctgagcctgcccaagctttctcattttcaagaccgcagcaaactcaggaattataccattcaaatcccagttcaatcttctcatcatcgttgaatgtaggattcagttcaaagaatgaccgttctactccaatcaacagtcatttgtactggacaatgaggcagacaagaactgaatcctactctgctagcattaacaaagctcctactgaaaagaagcaagaatctgctacttctggctgcagattgtttggcattgagataggttctgcagtatcaccagtggctactgttgctagtgttggccaggatcagccacctgctctctcagtagacgttgaatctgattagctgtcacagccatccaatgccaacaaaacggatgccccagtggcaagcagcgagcgctctcttaacgagtcagagagccggcaagtcaggagctgcaccaaggtaatcatgcaaggaatggcggttggcagggcagtggacttgacaaggttagatgggtatgctgatctccaccgcaagttggaggagatgtttgatatccagggagagctttctgccaacctcaagaaatggaaggtcatttacacagatgacgaggatgatacgatgctggtcggggacgatccatggaatgaattcctcaggatggtaaaaaggatatacatttactcttacgaggaggccaagtctttgactcgcaaggcgaagccgccggttgttggtgacaccatcaagccagacccaaacaaattgccaccggaatctgacgtgccacatgactcaaacaacaatgctcccgttgctgctgattatcaggactgatggatgctaacttggctcctaccttttctttcccctcttggatgtcggtcatgggaggcaatgcacgctccttgggacttgtaagagttatctgttttgttgcttcgcgggcccaaaggacgcttccctgcaccatctgcctttgtttggaacggcttggaccgccgtggtccttttacctgcagcaaggaaaggaatggctgggagggaatggatactggtatcgttccgtgtgtggcaccccgtgatctgtttgccgtgctttgtaggaggcatggcgtattgccgggtactttggttttggagactgctactgactgctgccgtcgtcgggccgctcctctcacctctggtaaataggactttgtacacaattattttgttagtagcagtatatgtacatc

SEQ ID NO: 7004 - DNA, 780 bp, Zea mays
  Clone ID: 700613476_FLI
tgcacaacggagatggcggcgatggcggggtacgccaaggagttcgagaagcgtggcgtgaagctgctgggcatctcgtgcgacgacgtggagtcgcacaggcagtggaccaaggacgtggaggcgtacggcgggaagcagcagcagcagcaggcgacgacgacgaaggtgacgttcccgatcctggcggacccggcgcgggacgccatccggcagctgaacatggtggaccccgacgagaaggacgcggcggggcggagcatgccgtcccgcgcgctccacgtcgtcgggcccgacaaggccgtcaagctgagcttcctgtacccggccaccacggggcggaacatggacgaggtgctgcgcgctgtcgactcgctgctcaccgccgccaagcatggcgggaaggtggccacgcccgccaactggaagcccggggagtgcgccgtcatcgcgcccggcgtctccgacgaggaggccaggaagatgttcccgcaggggttcgagaccgccgacctgccctccaagaagggctacctccgtttcaccaaggtttagctagccgacgtacggcacggacatctagctcgtctgtcagtccgcgtcgaccggggtgcgcggatcttttgtgcctgctggtggtttctctgactagtactagtatatatataggctctatgtatgtgcgtactatgccgtgccgtgttgtctcgtgtagtggtggcaaccggttcgtggcactaccgcgctagtattgtccacccatatcaatgtcctcttctg

SEQ ID NO: 7005 - DNA, 1662 bp, Zea mays
  Clone ID: 700613490_FLI
caaacgccggcgcaaactctcgcccgagcccgacagatcttcaattccccattccgcccaccgatcgaccttcacgccagtctcggtctcttccgaaggcgtcgcgcgcggttgtttgagaggagaggaggaagatgagggagtgcatctccgtccacatcgggcaggccggcatccaagtcggcaacgcgtgctgggaactttactgcctcgagcacggcatccagcctgatggccaagtgcctggagataagaccgcgggacatcacgatgatgccttcagcaccttcttcagccagactggtgctgggaagcacgttccccgtgcaatcttcgttgatctagaacccactgtgatcgatgaggtgcgcactggcacgtaccgccagctcttccaccctgagcagctcatcagtggcaaggaggatgccgctaacaatttcgcccgtggccactacacaattggcaaggagattgttgatctgtgccttgaccgtatccgcaagcttgctgacaactgcaccggcctccagggcttcctggtcttcaatgccgttggtggtggcactggctctggccttggttctctcctccttgagcgcctgtctgtggagtacggcaagaaatccaagctgggcttcactgtgtacccatctccccaggtgtcaacctctgttgtggagccttacaacagcgtgctctccactcactcactcctggagcacactgatgtctccatcctgctcgacaacgaggccatctatgacatctgcaggcgctccctcgacattgagaggcccaactactccaacttgaatcgccttgtgtctcaggtgatctcatcgctgactgcttctctgaggttcgatggtgccctcaatgtggatgtgaacgagttccagaccaacctggttccttacccgaggatccacttcatgctctcctcctacgcaccggtgatctcttctgcgaaggccttccacgagcagctgtctgtggcggagatcaccagcagcgcgttcgagccggcttccatgatggtcaagtgcgacccacggcacggcaagtacatggcttgctgcctgatgtaccgcggcgacgtggtgcccaaggacgtgaacgccgcggtggccaccatcaagacgaagcgcaccatccagttcgtggactggtgcccgacggggttcaagtgcggcatcaactaccaggcgccgacagtggtgccgggtgccgacctcgccaaggtgcagcgcgcggtgtgcatgatctccaactccaccagcgtcgtcgaggtgttctcccgcatcaacagcaagttcgacctcatgtacgccaagcgcgcgttcgtgcactggtacgtcggcgagggcatggaggagggggagttctccgaggcacgcgaggacctggccgccctggagaaggactacgaggaggtcgccgcagagggcggcagtgatgacggtgacgaggaggaggaatactgatctgcttgcatgaatctgtttggctgtcgagccaggttgtggtgttgaaaaacctttgtttgtgtcctggcccccctgggtaatgtttgggtgtttccttccatcatcacttgctgaactgctctagtatttgcatttgtaattgaagtctgtcgctttaagcactcttggttct

SEQ ID NO: 7006 - DNA, 435 bp, Zea mays
  Clone ID: 700613548_FLI
ccggcggcctcctccacggggggcttcctcaccgaggacacgagcaggagctacgtgagcgaagcgaccagcgagtacgggctgcacccgtcgtcgtccagctccagcgacgacggcgccacgagcgaggcggccagcgcagggagggacgggcagaggtccggcgagatcggcgtcgccgacgggatgacacgccgcacgcggtcgggacgcgccgacgagtgacgcttgcaacggagttactttttttttttttttttgccggcgggttgccgtaaagttccttgttgggttctttaatttattaacgtttgttacaccatacaggtaattaggaattcaggttagtagtagggatggaacttttctagcttcctcataccattttggtcgaaaggtttgctcgataaaactacttccagtcaagttttggag

SEQ ID NO: 7007 - DNA, 1073 bp, Zea mays
  Clone ID: 700613563_FLI
cttgcgcagaagatgatgatctacaagtgcaacattgctggcaaacctgttgttactgctacccagatgctcgagtcgatgatcaaatctcctcggccgacacgtgctgaggccactgacgttgcaaatgccgttcttgatggaactgactgtgtcatgctcagcggagagagtgccgctggagcctaccccgaggtggctgtgaagatcatggctcgtatttgcatcgaggcagaatcttccctggaccacgaggcagttttcaaggccatgatcaggtccgcgcctcttccaatgagccctctggagtcccttgcatcatctgctgtgaggactgccaacaaggccaaggctgcactgattgtcgtcctgactcgcggtggcaccacggccaaactggtcgccaagtaccgccccagggtccccatcctctccgttgtcgtacccgtgcttacgaccgactctttcgactggaccatcagctccgagggcccagctaggcacagcctgatctacagaggcctcattcccctcctcgccgagggctccgcgaaggctacggattcagagtcgacggaggtgatccttgaggccgcgttgaagtcggccgtgcagaagcagctctgcaagcctggtgatgccatcgtggctcttcatcgtattggcgtcgcctccgtcatcaagatctgcatcgtgaagtgatcaccacgacctggttctcactgctgggattccatgaaacagcttttctgcctcctttttactgcatttttttccggagacagatatttatgttgtaagcctgcgtctgttgtttgcagttgcggaatgttttttgttcacgtagttatttagctggtaaatggggagggagaggactccattgatgttagtggtaataagatttgtgtctatggagttgagttgaaagggttttttcatgctaagccccgagacactaggagatggagatcgaggttgagatgagataagcaataagtgaaaaaaatgttgatttgctttctttgtatgcacacgcttttgaggggtaagattagtctccattggagttg

SEQ ID NO: 7008 - DNA, 534 bp, Zea mays
  Clone ID: 700613570_FLI
caagcgcgcccgcctccgcaaggaggtgctcctcgccggcgaggactggagctacgatcctccccgcggggagatgcgtaccaagcgcaagggccacaagtgcgaccgcatctccgccgagaagcgagcaaatactgttgagctgatgaagaagatgccccagatgctgctcgactacaagaaacgtaggtgggagaagaagatgaaagcggaggagagcggcaagaattgataccacgcggctcgtccagggtgcttctcttcctaaataaggtccaaactttatccaggaggtttgcaggacggctagattctgacgcgtcatttccttgtggattccttctctcctgtgatgcgactttggacgcactatcctgattgtgatgctttccaacacttgtgccactggatcgtgatttcagtgagccccaacttctgcagcactagtattttgttgagacaaatcagctataagcatgccatctgcccaataaacttgttcatcatgtaagatcaatgctgttagtttttgtc

SEQ ID NO: 7009 - DNA, 274 bp, Zea mays
  Clone ID: 700613605_FLI
ccgcaggctgtgaagggcatgaaggaggccctgggcattgcgctgcggtgcatcaggccggtctccgagaggccggggatcaaatctgtgtacgaggatctttcgtcgatctagtcggtacctagcctcgtcgcgtagcttttagattaacactgcgtgttaaaattgtgtgcgtgttcgtcttgaactcgtagaactgcgtagcgaatccaagtgttattatggcctcaccttgatgccagaaatttgaaatgaagaatgtgttgcattgttc

SEQ ID NO: 7010 - DNA, 443 bp, Zea mays
  Clone ID: 700613614_FLI
gcccactcaagggtattatgggctacgtggaggaggatctggtttccaccgacttcaccggtgacagcaggtcgagcatcttcgacgccaaggccgggattgccctgaacgaccacttcatcaagctcgtctcttggtacgacaacgagtggggctacagcaaccgcgtcgtcgacctgatccgccacatgttcaagacccagtagagagagatatttctgcctccctatcgagggtcgtccccgatggcctttggtcgcagaccatctttgctgcttgtctatgctgagaataaatgtgaacggtgcccctggacgctggatccatgctggttttggacacggttgtctttttgtgtttaacttatctgctgccgtcctgtaacgaattcgctaagttttagttcttttgtgctttgttaagaatataaacaatgaggtttc

SEQ ID NO: 7011 - DNA, 369 bp, Zea mays
  Clone ID: 700613648_FLI
gagtaattccttcaattggtacaatttcacattttcatactttatctgtaccaaggttcaaattgtagaacttaatcccctgacctcacaagttcaagtgcataagctaaacaagtattcaacacttgtatgcacacatttagggggagaatggtctataatttgaatctttgagactaacttcatttccaagtctattatgtgtgtagtctcaaattagaaaggaatcttcgggcaaagacaatcgcttccactgcaaattttgatgggtatcaaaaattctttgctccaataaatgtatcttttatacatttcataagataatgagtttctcttgtatatgctactccaaaatcatctaaaactggt

SEQ ID NO: 7012 - DNA, 521 bp, Zea mays
  Clone ID: 700613809_FLI
aaagaaacaagttgacattgatgaaaaggagaaaacacttaaacttgctggaagaattggtcaagcagttggctctctcctgaggcgattaggaatttcataccagggggaggaatctcatgggaggatgaggatcaatggcctcacgataaggaggtggttcaatccaaaactgaatagcaaatcctctgctgccggcccagctgacttgcttccactaccttcgcggttagccaaagggattgctggtcagcaacgcgatattagaaacctttcactcgagtagtagactagtactacacggctatcctggaagcgatctcagtaacccgtgtgataagaagcgtagtatagtaagatgtgcaaacgtgtgaagagtttgttcggtagaaggaaatacataatccatcaatctgtaatgacagtagtcgaaggaaagatatgcacgatgcatcaaacttttgtaatcatgtcaggtaaagggattttcccctgaacataatatacatatagagttacat

SEQ ID NO: 7013 - DNA, 798 bp, Zea mays
  Clone ID: 700613831_FLI
atcacatcgcgcactaccttccagcgaatccatcacggaagaaattgttccccacccaccctagactcgccgccgtcgcaactcccacccgatccccaaattctccggcggtgatggccagcctgtggcgcgccgtgatggatagcgtcagcggctcctccccctcggcgctggacgcggccccaggtagcggcgtcgagttctggcacggcgcagagcgcgctgggtggctaaataagcagggcgagtacatcaagacgtggaggcggcggtggttcgtgctgaagcaggggaggcttttctggttcaaggaccctgcggtgacacgggcctcggtgccccgcggcgtcatccccgtcgccacctgcctcacagtcaagggcgccgaggacgtgctcaaccgccagttcgccttcgagctctccacgcctgccgagaccatgtatttcattgcggactccgagaaggacaaggaggagtggattaactccatcggtcgctccatcgtccagcactcccgctccgtcaccgacgcagaggtcgttgactacgacagccgcccccagcccccgccgcagcttatgaccagcgaagagagtgcaccagcagcttaatggcgtggtgattcctgtgaactctctcgatatggatctgacttgtagcatatgtatttccaattccatgtgattgtggccttgtgccgacgttcctcactcttgattatgtagcagtatattaactatcaacgacatggtctggtatggtaataagcgagttaataagctgtgctttcgttag

SEQ ID NO: 7014 - DNA, 952 bp, Zea mays
  Clone ID: 700613916_FLI
gcaagccagcgcacgtcggtaggcacgccaccatgccggggctcaccatcggcgacaccgtccccaacctggagctggactccacccacggcaagatccgcatccacgactacgtcggcgacggctacgccatcatcttctcccacccagccgacttcacgcccgtgtgcacaacggagatggcggcgatggcggggtacgccaaggagttcgagaagcgtggcgtgaagctgctgggcatctcgtgcgacgacgtggagtcgcacaggcagtggaccaaggacgtggaggcgtacggcgggaagcagcagcagcagcaggcgacgacgacgaaggtgacgttcccgatcctggcggacccggcgcgggacgccatccggcagctgaacatggtggaccccgacgagaaggacgcggcggggcggagcatgccgtcccgcgcgctccacgtcgtcgggcccgacaaggccgtcaagctgagcttcctgtacccggccaccacggggcggaacatggacgaggtgctgcgcgctgtcgactcgctgctcaccgccgccaagcatggcgggaaggtggccacgcccgccaactggaagcccggggagtgcgccgtcatcgcgcccggcgtctccgacgaggaggccaggaagatgttcccgcaggggttcgagaccgccgacctgccctccaagaagggctacctccgtttcaccaaggtttagctagccgacgtacggcacggacatctagctcgtctgtcagtccgcgtcgaccggggtgcgcggatcttttgtgcctgctggtggtttctctgactagtactagtatatatataggctctatgtatgtgcgtactatgccgtgccgtgttgtctcgtgtagtggtggcaaccggttcgtggcactaccgcgctagtattgtccacccatatcaatgtcctcttctgaactt

SEQ ID NO: 7015 - DNA, 1033 bp, Zea mays
  Clone ID: 700613962_FLI
gaagaactacccaaccgtgagcgccgagtacagcgaggccgtcgagaaggccaggcgcaagctccgcgccctcatcgccgagaagagctgcgcacccctcatgctccgcctcgcgtggcactccgcggggacgttcgacgtgtcgtcgaggaccggcggtcccttcggtaccatgaagtgcccggcggaactggctcacggcgccaacgcggggctggacatcgcggtgcggctgctcgagcccatcaaggaggagttccccaccctctcctatgccgacttctaccagcttgccggagttgtggccgtcgaggtcaccggtgggcctgagatccccttccaccccggcagggaggacaagcctcagccgccacctgagggccgtcttcctgatgccaccaagggttctgaccacctgaggcaagtctttggcaagcagatgggtttgagtgatcaggacattgttgccctctctggtggccacaccttgggaaggtgccacaaagagcggtctggttttgagggggcctggactacgaaccctttggtctttgacaactcttacttcaaggaacttctgagtggcgacaaggagggccttcttcagctcccaagtgacaaagccctgctgagcgaccctgtcttccgccctcttgtggagaaatatgctgcagatgagaaggcattctttgatgactacaaagaggcccacctcaagctctccgaactggggtatgctgatgcttaaatggcccatatcctggagcgggatacaaactgctgcctgtatggactcgtgcgatcttttgcatttggattcagggtgaaccaccagattgtctagtgtcttctctgtaataaatttatctgttcttggtactttgtctatggttgaatcggaacccattttccgtttgcctagattcttaatttctggtgctgtatccaactgaaactagtagatctatgatcttgtggctgcagcatgttcttgtcacttagcttttatctggtctccgttggttcggttcac

SEQ ID NO: 7016 - DNA, 937 bp, Zea mays
  Clone ID: 700613974_FLI
cctcgccaagcgcagcagccgccgcagcacatcgctctcttgatctcagccatggcggaggtggagcagcaacaggacacgccgaagctcttcaaccgctggaccttcgatgatgtccaggtgaacgacatctcgctgaacgactacctcgctgtgaacgcgacgaagcacgcgatgtacctgccgcacaccgcggggcgctactccaagaagcggttccgcaaggcgcagtgcccgatcgttgagcgccttacaaactccctcatgatgcacgggcgcaacaacggcaagaaggtcatggctgtccgcatcatcaagcataccctggagatcattcacctgctcaccgatgccaaccccatccaggtcgtcgtcgacgcgatcatcaacagtggcccccgtgaggatgccacccgtattggttccgctggtgttgtgagaaggcaggccgtggatatctcacccctgaggagggtgaaccaggccatctacctcctcaccactggtgccagggagagtgctttccggaacatcaaaaccattgccgagtgccttgcagatgagctgatcaacgctgccaagggctcatccaacagttacgccatcaagaagaaggacgagattgagcgtgttgccaaggccaaccgttgaacggagcttgtatcctggtgcactctgcgctggaaacttttatgttgctggcagtcgtatcggttcctgttttaccaatgtttagagttttttgagacctatatgcggttttggttttcagtgcacaattaaaattactgagtaatgtagttgattgggaacagaaagtgcctggtttaccgaactccatttctcttgtcatttttctttattctgtagtctgtattatgtatgcgtatgagtattgagatgattctgcatttgaattgtctgctttgttgctgtc

SEQ ID NO: 7017 - DNA, 1613 bp, Zea mays
  Clone ID: 700613975_FLI
ctgtccacctctctcgctctgggccgccgccgccgccctaagccacgtgctgaggctttcgttggtctcttcgccggcgacgagcacccagcagttctgtagaaatggctgatggtgaggacatccagcctcttgtctgcgacaatggcactggaatggtcaaggctggttttgctggcgatgatgcaccaagggcggttttccctagcattgttggccgtcctcgccacactggtgtcatggtagggatgggacagaaggacgcatatgttggcgatgaggcacagtccaagagaggtattcttacgctcaagtacccgattgagcacggtattgtgagcaactgggatgacatggagaaaatctggcatcatactttctacaacgagcttcgtgttgccccagaggagcaccctgtgttgctcaccgaggctcctttgaacccaaaggccaacagggagaagatgacccaaattatgtttgagactttcaatgttcctgccatgtatgttgcaatccaagcggtgctctcactctatgctagtgggcgtactactggtattgtactcgactctggtgatggtgtgagccacactgtgcccatttacgaaggatatgcccttcctcatgccattcttcgtttggatcttgctggtcgggacctcacagactccctcatgaaaattctcactgagaggggttactccttcacaacctcagccgagcgagaaattgtaagggacatcaaggagaagctagcatatatagcccttgactatgagcaagagttggaaactgccaagaacagctcttcagttgaaaagagctatgagctacctgatggacaagtaatcaccattggtgcagagagattcaggtgccctgaggtcctcttccagccgtcgatgattggtatggaggctgctggaatccatgagacaacatacaattcaatcatgaagtgtgacgtggatatcaggaaggacctctatggtaacattgtgctcagtggtggttcgactatgttcccgggtatcgctgatcgtatgagcaaggagatcacttcccttgcaccaagcagcatgaagatcaaggtcgttgcaccgcctgagaggaagtacagtgtctggataggagggtcgatcctagcctcgctcagcactttccaacagatgtggatatcgaaggaggagtacgacgagtctggcccggcaattgttcaccggaagtgcttctagggtttcacaagttcctcgtcgttacctagtctcaaattatgtcccctccatttctcgagatatgtgtggcagatttgcatgatacgtttgtttgtttccatcggacctgaagtcttcttggggataggctcccccctttgtatgttgtggctccaatccatgtgcgagcacgctgtgtctgtcgtgacacctggttcgtgagatgggttgtcaaacttgattggtttgttgtgcgtggctggaagagctgatagttatatatttggcttggactgtgccgcttgtatgtatctgaattctgaaagcgttgtaatctgagcatccgtgcaaagtatgaatggcccttttatatgggctggattttccggtttctat

SEQ ID NO: 7018 - DNA, 958 bp, Zea mays
  Clone ID: 700614050_FLI
cggaggaccaagaccaccaccggagatgtcgtacgcctacctcttcaagtacatcatcatcggcgacacaggcgtcggtaagtcgtgcctgctgctgcagttcaccgacaagcgcttccagcccgtccacgacctcaccatcggcgtcgagttcggggcccggatgatcaacatcgacaacaagcccatcaagctccagatttgggatacggctggtcaagagtcattcagatccataactagatcatactacagaggagctgctggtgctcttttggtctatgatatcactaggagggagactttcaatcaccttgcaagctggctggaggatgcaaggcagcacgcgaatgctaacatgacgataatgcttgttgggaataagtgtgatctgtctcacaggcgtgcagtgagctatgaggaaggcgagcagttcgcaaaggaacatggtcttatcttcatggaggcctctgcaaagaccgcgcagaatgtcgaggaggcatttgttaagactgctggagcaatctacaagaaaatccaagatggcgttttcgatgtatctaatgagtcttatgggatcaaagttggatatgtagtccctggccaatctggaggtgctggtagctcttctcaaggtggtggctgctgcagctaatctgctaacgcccttatgtacaaaggcatatctgcggtgtagctgcgttatctctatgttgctgagcgtaaaatagttactgctccagggtgctttgttatttgatgcaccaacgggtggcagtgcctgaacgatttgagacattcagttttatttatgtcaggtgttcataaacattctgtaaatcactagattcttcaccgtcattcgtcattaagcgctcacaaattctgtccgtttgcgcgtgtaaataagatacctcgatgcatcgtttggtgcgatgttagtttgtcttttttgaat

SEQ ID NO: 7019 - DNA, 487 bp, Zea mays
  Clone ID: 700614154_FLI
aaggacccggagcacccgtactccctggagcagctcagcgtgctgtcggaggagtccgtctccgttgacgagacgctcggacgcatccagataaccttcactccaactgtgcagcactgcagtatggccacagtcattggcctgtgcctccgacttaagttgatgcagaacttccctccacatttcaaggttgacatcaaagttgctccaggatctcttgctaatgaagaatcagtaaacaagcaactgaacgacaaggagagggttgcagcagccttggagaaccccaacctacgccagctggtcgatgaatgcttatgcttcaatgatccatactcacgttaacttgttccatgctgcttcacaagtcgcaaccctgcctgctgtacagtagtaaccatgcatgctgtagtctgccctatatgttgacgctgtcgttgtacctggcaacgtgtaattaactgccccggagacatctgtttttgcc

SEQ ID NO: 7020 - DNA, 160 bp, Zea mays
  Clone ID: 700614231_FLI
ctctcttcctcttctcccgccgcccagcttctctcttctctcggcggcgccaccacggcgatcaagcgcgatacgggcgtaaccgaagaatcgacaatgggcggcgagaaggaaacctttgatacgtccgacctcaacgcctccctccccgcggccgccg

SEQ ID NO: 7021 - DNA, 728 bp, Zea mays
  Clone ID: 700614245_FLI
agcacccgctcgctgatgatgctgatgaggatgactttctgttcgaagaccggttcagcattgcctacaaccttgaccgtgaattcggcccgaggttgaaggaccatatgcagtattgtgttaatcatccagaggaaattaacaagctctccaaggtgaaagcccacctatcggatgtcaaagggatcatgatggacaacattgagaagatattggatcgcggggagaagattgagcttttggtgggtaagacagagaccctacagtcacaggcggacagcttccacaggcatggcagagagttgaggcgaaagatgtggcttcagaacctgaggtttaagctgatggtgggtggcggcattgcggctctgatcctcatcatttggctgatggtctgcaggggattcaaatgttagagcacaccaagttgctcgccttttttcttttcaggcgtttgatatgcacagactttcaaccaaattgtgttttcagtgtcacggtatcgcaatgtagtggacttcaatccccgcagtctttcccatgttccattacttccatatgataatggtaaaaggtaggaagctggagtacgcggtcagaactgtctggaggagatatgacatcacgacttaaatatctgtacattccaaaaatgcaagctcctattatttcggtaccttctgtactggtgccaacgatcattgtaaatgcattacgcactttggtgt

SEQ ID NO: 7022 - DNA, 1376 bp, Zea mays
  Clone ID: 700614326_FLI
gctggactccaactcgactgctctgcgtagcggagtaggctgatcagaggcgagatatgaggagcggccggcggatggcggcagctctggtagcgctggcgtgggcgctcgcggctgtggctgtggcggcggcgcagaagtacaatgccatcttcaacttcggcgactccatcaccgacacggggaacctctgcagcagcgggaggccgtcgcagatcaccttcacgcagccgccctacggcgagacctacttcggcacgccgacgtgccgctgctgcgacggccgcgtgatcccggacttcctctgctccaagttcgggctgccgttcctgccgccgtccaagtcgacgacggccgacttcaaggagggcgccaacatggccatcaccggcgcgacggccatggacgcgcccttcttccgctcgctcgggctctccgacaagatctggaacaacgggcccatcagcttccagctggagtggttccagcaggtcgcgtccgccgtgtgcggcgtggggcaggcgcagcaggccgactgcaagagctacctggccaactccctgttcgtgttcggcgagttcggcggcaacgactacaacgccatgctgttcggcaactacagcgcggaccaggccagcacgtacacgccgcaggtcgtggccgccgtcgccagcggcgtcgagaagctggtggccatgggcgccaccgacgtcgtggtgcccggcgtcctccccatcggctgcttccccatctacctcaccttctacggcacctccagcagcgccgactacgacagcctcggctgcctcaggaagttcaacgacctgtccaccaaccacaacaaccagctgcaggcccagatctccggcctccaggccaagtacaagtcggcgcgcatcatgtacgccgacttctactccgccgtctacgacatggtcaagaatccaggcagctacgggttcagcacggcgttccagacgtgctgcgggtccggaggcggcaagtacaactaccagaacagcgcgcggtgcggcatgccgggcgcctccgcgtgctccaacccggcggcgcacctcagctgggacggcatccacctcaccgaggccgcgtacaagcagatcaccgacggctggctcaacgggccctactgccgcccggccattctccacagctaaagcgacagggggggccggttaattattaattattattatttgttgtttacgttgccggggaagaaagaaaaaagaaagtgtctcagcaactgcatgcatgtgttcctggtccctcactgctgtgacttacagagtattatatatatattagtactatgtatactggtcctcatttacaaattaaatggtatagggttttct

SEQ ID NO: 7023 - DNA, 983 bp, Zea mays
  Clone ID: 700614347_FLI
tgccgccctgagcgccactgcacagacgcgcagagacagacattgcgactttgcgagagacaaaacctcccagataacgcccgcgcgctccccgatggcgtcgtcgtgccagaacgtggagattcccggcaagccgacggagacggggacggcgctgctggagacggcgacgggcaccatccaggggttcgcgccgctgagccagatccaccagcacctgtgcgcgttccacttctacgcggacgacatggggcggcaggtggaggcgcaccacttctgcgcgcacctgaacgaggacgtgcggcagtgcctcatcttcgacgggcccggcgccggcgcgcgcctcatcggcgtggagtacatcgtctccgagacggtgttcctgacgctgcccgacgccgagaagccgctgtggcacacgcacgagttcgaggtgaagggcggggtgctgttcatgccgggggtgcccggcgtggtggagcgccgggacctggagaaggtgtgcaagacctacggcaagaccatccacttctggcaggtggaccgcggcgacgcgctcccgctcggcctcccgcagatcatgatggtgctcacccgcgagggccagcttcggcaggacctcgctgactgtgtggagaagaagttcggtgtctccttccagaaggagagggagaaccgggcgtacatgagcggaccggagcatggtatccacccgctagcgaacgctaccggcaagggcctgaggaccgagatccgtgaggtcgatttgccggcgagtactaccgccggcgccgggagggtcttcacttgatcgccgtatcgtgtgttgccgcggcgggtctgcgtaatgtagactatatagacggtgcttggtttggtctgtagttcgtgagtacgtgctcaatcgtttgtgttctcttaagacacgaactactgttcatatgaactttgaattttcgcataataagagatggcgctctact

SEQ ID NO: 7024 - DNA, 346 bp, Zea mays
  Clone ID: 700614444_FLI
tgacatcatacctcaaaaataaattcagtgacacaatgccaatgtgtgttctattatattaccatgatgtgatgaaccggactgagaaggcaaaataaccatctgtagatcttttttggtgtttcatttcttccatcatggaaactgaaagcaataatccgtgcacactcagtaaaacagcatcgtgtcttccagtttttttgttggaatctatcctagatctttattatgtgtatggtggataacctcatgtcaccatcgtatctgtatataataagcctaaatcagctgacgttctgtatgtaaattagtaaatgtaatgactaattggtgcccccctttctgc

SEQ ID NO: 7025 - DNA, 1121 bp, Zea mays
  Clone ID: 700614469_FLI
ttttaactttcacggaaatttcccctctcttggtctcttctcttgcgcgttcctcttcttcctagtcctaggctactttcttcgatcccaactccgagtcgcctgtcatctctctctaccagattagattggggatctcatctcatccgaatccttcatagtattacacaaccagcaaggccgcccgcttgccggcaacatgaagaagatcttcggcgccaagaagaacaaggatccgccgcccacaatccaggacgcaaccgacagaatcaccaagcgcggcgacaccgtcgatgaaaagatcaagaagctcgacgccgagctcgcgcgctacaaggagcagatcaagaagacgcgcccaggccccgctcaggaggccgtcaaggcacgagccatgagggtcctcaagcagcgcaggatgtacgaagggcagcgtgacatgctctacaaccaaacatataaccttgaccaagttgcttttgcggcagagggacttaaagatgctcagcaaactatgactgcgatgaaggctgccaataaagagctcaaagggatgatgaaaactgtcaagctcgaagatattgatagtatgcaagatgagatgatggatcttatggatgtgagcactgaaatacaagaaactcttggcagaagctacaacgtcccagatgacatcgatgaggaagaacttatgggggagctcgatgctttggaagccgacatggacttcgaatcagagtcagtcccatcttacctccaaccagaccaagaacctgaactcagcttacctgctgcaccaactggccatgcagcagtcccggcaaaccagcagcaggaggatgagctaggattgcctacagtgccacaagcatccattcgtacataatcaagcagaatcacgtttcttgcagtcaacgatataaaggaagtcgtattatatatctacagctgggtgtaaaaatgctgttatgtaccgcaccacttcgattttttttgtcactccacttgtggatggtgtaaatctgattgaattgaattagttgggagttgggacattttaagatcctcttgtatttgctgtatggttgtacagaaagcagcaaggccagagcagcacgttt

SEQ ID NO: 7026 - DNA, 778 bp, Zea mays
  Clone ID: 700614483_FLI
aaaccatgcggagatggggctcacgttcacgaagctgttcaggcggctattcgccaagaaggagatgaggattctcatggtcggtctcgatgcagctggtaagaccactatcctctacaagctcaagctcggcgagatcgtcaccaccatccccaccattggatttaacgttgaaactgtcgagtacaagaacattagtttcactgtttgggatgtcggtggtcaggacaagatccggcccctgtggaggcactacttccagaacacccagggcctcatttttgttgtagacagcaacgacagagagcgtgttgttgaggccagagatgagctccaccggatgctgaatgaggacgagctccgtgatgctgtgcttttggtgtttgcaaacaagcaagatctgcctaatgccatgaacgctgctgaaatcaccgataagcttggcctgcactccctgcgccagcggcactggtacatccagagcacatgtgctacctctggtgagggtttgtatgaggggcttgactggctttcgaacaacatcgctaacaaggctcgaagcatctaggcaaggcttcaatcagtggaagcaaactgcctctaccattacagctatgaagtatatagtcgtgactgtgtcagacgtggtgtgttttgggaggataaaaggctcttttggtcgaggagctaggtatcagatgttttttatggtacctgtaattttccgtgcttctgttttggttttgtgcaaggtataccatgtctgactgtgctcgcc

SEQ ID NO: 7027 - DNA, 1464 bp, Zea mays
  Clone ID: 700614504_FLI
cagaaacacaaagaagtgaatttgggtactccaggagcatcgtcttcaactctgactaacaggtctactatacctggaaattctaccatgggtgtgaggccagcttatggtcatgttaatggagggcagatacatggtcttaaaaaccttggttgttcttcggtacctgatgctcagccatcaggttgcccatctgagtctgttattagtaggaggaggtttgagttcatgagaaagagggcctttgaccaggaaagctcttccagatcagtgaacttaagcttaggtcattcaactcctacagatattcgcagaatcagaatgaatgaacaatcactttgtcaacaaataccacgaagcagcagcagaagccatcaggaatcggcaggttcagttaggacaagacgaccttctcctcatgccactaggatgagtgttcctgatggaagagcagatggcgtgctttctctgcacgagtcatccacaaaggatgtacagccagctcaggaacatctttcattggaagaagtctccactgagagttcaataaggccattctttgtggaatttgataataacattttctcgtctagtcatcttcgtcgctcgagtactcgagctgaaaggggaagaccaagctccctttttgaagaaagtcctcgacaaatgttccatagtctcatgggggagagggacagacatagacacataaccatggaaggaattacagaggttttggctgcattggagaggattgaacagcaagcagagctgacctatgatcaattgctaatgctggaggctaatctattttttggcgcctttgcctcctatgatcggcatagagacatgcggatggatattgatgatatgtcctatgaggaattattggccctggaggagagaataggctctgtgagcacagctctttcagaggagcagttcacaaaatgcctcaaaagaagcatatatagtcaggtcgctctagaagtgaacaaatcaaccgttgatgacatgaaatgcagcatctgtcaggaagagtacgcggagggcgaagaggttgggaggctgccatgcgagcaccggtaccatgtgtgctgcataggccagtggcttgggcagaagaactggtgtccagtatgcaaagcgtctgccgtgccttccaagggctgaagcattggggatgctggaaaccccgttccggattacaaaccatccttgcttttgtctacgtacattgttcttttccctatatgcattagatatagatcatgtctagatgtatgacgctagaacagcttgcgatttgggaggaagctaagagagtaatagttagctggttaataatagttcatagctaatatttgctagataactattacttggctacctattagctgtgcctttcacattgtggtacaggacaaatgcttgtcagatcgtgaacaaccttataacttgatg

SEQ ID NO: 7028 - DNA, 1405 bp, Zea mays
  Clone ID: 700614530_FLI
cccaccagcagttctgtagaaatggctgatggtgaggacatccagcctcttgtctgcgacaatggaaccggaatggtcaaggctggttttgccggcgatgatgcaccaagggctgtattccctagcatcgttgggcgtcctcgtcacaccggtgtcatggtagggatggggcagaaggatgcatatgttggtgatgaggcacagtccaagagaggtattctcacgctcaagtacccgattgagcacggtattgtaagcaactgggatgacatggagaaaatctggcatcacactttctacaatgagctccgtgttgccccggaggagcaccctgtgttgcttactgaggctcctttgaacccaaaggccaacagggagaagatgacccagattatgttcgagactttcaatgttcctgccatgtacgttgcaattcaagcagtcctgtcactctatgctagtggccgtactactggtattgttctcgattctggtgatggtgtgagccatactgtgcccatttatgaaggatatgcccttcctcatgctattctacgtctggatcttgctggtcgggacctcaccgactcgctcatgaaaattctcactgagaggggttattccttcacaacctccgccgagcgagaaattgtaagggacatcaaggagaagcttgcgtatatagctcttgactacgagcaagagttggagactgccaagaacagctcctcagttgaaaagagctatgagctacctgatggccaagtaatcaccatcggtgcagagagattcaggtgccccgaggtcctcttccagccatccatgattggtatggaggctgctggaatccatgagacaacatacaattcaatcatgaagtgtgatgtggatatcaggaaggacctctacggcaacattgtgctcagtggaggttcgactatgttccccggtatcgctgatcgtatgagcaaggagatcacttcccttgcaccaagcagcatgaagatcaaggtcgtcgcaccacctgagaggaagtacagtgtctggataggaggttcgatcctagcttcgctcagcactttccaacagatgtggatatccaaggaggagtatgatgagtctggcccggcaatcgtccacaggaagtgcttctaggtttcgcaagttcctcattgttatctagtctcaagttatgcccccgtcatttctcgagatatgtgtggcagatttgcctgcgacgtttattttcatcggacctgagtcttctcggggttagcagctacctttgtatgttgtggctccctgtgcgagcgtgctgtgtcgtatcacctggtttgtgagattagttgttgtcaaacttgcttggtttgattggttgtgcgtttaagagctgatagttatatac

SEQ ID NO: 7029 - DNA, 661 bp, Zea mays
  Clone ID: 700614540_FLI
accaccccaagagatagcaaccagaggatgctgatcgaggagaacctcttcgggagggctgccctgaatgtcattgcgtgtgagggcacagaccgagtggagcgccccgagacgtacaagcaatggcaggtgcggaaccaacgagcaggcttgaagcagcagccattgaaccctgatgtcgtgcaggtagtgcggaacaaggtcaaggattgctaccacaaggactttgtgatcgacgtcgatcaccgctggctcttgcagggatggaaaggccgcatcctctatgccgtctcaacatgggtggcaaatgatgccccctcttacatctagctgttctgttgactcacttgtctacaaattttaggtttagatatgtcatctggatatatctagtgacaagtgtgttcagtgggttacatggactcacttgtgattgatggtaatgcgaactagatgcttatcactcaaccatgttgttgcatagtgctaaacatgattagatctaggtcctggtctgggcaatgtcctctgcagcatctgccgtgtttgatcaatccagtcagttgatcaggttgtaattgacacttggtcctctctgtttccggtgtgattactgcgctgtttcagacttcagaatcgttatcatgaagtgatgggtttt

SEQ ID NO: 7030 - DNA, 1829 bp, Zea mays
  Clone ID: 700614592_FLI
gcgcgtcgctgcttccattaccgcctccgcaaccagcccgccgcgcccccgagcgtttcgttccgggagcggcaagactgggacacgccagccctttatttcgagctttctgcgtgcgggaggggggttgacaggcgatggcggccgagggcgaggcggcggcgctggagttcacaccgacgtggatcgtcgcggcggtctgctctctcatcgtgctcctctcgctcgtcgccgagcgatgcctccactacctcggcaagacgctcaagaggaagaaccagaagccgctcttcgaggcgctgctcaaggtcaaagaagagttgatgcttctggggttcatctccctgctgctgacggtgttccaggggatgatccggaggacgtgcatccctgaacgctggacattccacatgctgccatgcgagaagccagatgagaaggccggtgaggccgccaccatggagcattttgtagggacgcttggcaggatcggtaggcgtctgttgcaggaaggcactgctggggctgagcaatgccagaagaagggaaaagttccacttttgtcccttgaagccatacatcagctgcacattttcatatttgttctggcaatcacacatgttattttcagcgtcacaactatgcttttaggaggtgcacagatacaccaatggaaacagtgggagaatggaattaaaaaagatgctcctggaaatgggcctaaggtaaccaatgtacatcatcatgaatttatcaagaaacgttttaagggtattggcaaagattctataatattgagttggctgcattcttttggtaagcagttttatagatcagtatctaaatcagattacaccacaatgcgtcttggttttatcatgactcactgccctggaaatccaaaatttgatttccatagatacatggtaagggttttagaggcggattttaagaaagtggtaggcataagctggtacttgtgggtcttcgtggtgatatttctgttgctgaatgttaatggctggcacacatacttttggattgctttccttccccttattcttctgttagccattggcactaagctggagcatgtcatagctcagctagcccatgatgtagctgagaagcacacagcggtcgagggcgatgtgatcgtaaaaccatcagatgaacacttctggttcggcaagcctagggttatcctttacctgatccacttcatcctctttcagaatgcgtttgagattgcgtttttcttctggatactgagcacttatggattcgactcgtgcatcatgggacaagttcgttttattgtgccaaggcttgtcatcggggtggttattcagcttctctgcagctacagcaccttgcctctgtatgcaattgtaacccagatggggagctgctacaagaaggagatcttcaacgagcatgtgcagcagggcgtcctgggctgggctcagaaggtcaagatgaaaaagggactgaagggagctgcatctgctagcaaggacgaatcgattaccaatgccgattcggcaggaccttccgttaagattgaaatggcgaaggctggggaggatgttgagatcgttggaaacacaggttgattgggacaatagggtgcccgtgttgtaatgatgtaacaggctaatatgccatcatcttttttttgtagatactagatagcttgctgtggcaataccgcaatagcggtgaactagagaaggtttgggcccgggagcctcatctgttatcggtccagtaggaagcaaattcttatatacgggatatcgataaaaaatgaactaagttcctggatt

SEQ ID NO: 7031 - DNA, 691 bp, Zea mays
  Clone ID: 700614602_FLI
gacccattgtccttgctctatcgaacccgacgtcacagtctgaatgtactgctgaacaagcatatacatggagtcaggggcgtgccatatttggcagtggaagcccatttgatccggtgaaatataatgacaagctgtttgtgcctgcccaggcaaacaatgcatacattttccctgggtttggtctaggggtggtgatctcaggagccgtccgggtgtcagacgatatggttcttgctgctgctgaagcactagcggaacaggtaaccccggagcatattgagaaaggcctgatctacccgcccttctccatcatcaggaagatttcagctaacatagctgcccatgtcgccgcaaaagcttatgatctcggaatggctacccagctccctcggccaaaagacctggtgaagtacgctgagagctgcatgtacagccccgtctaccgatcgtacaggtgatgtgagcggacagtgctggatgcacctgaggatatatatgcatacctgctatgcttgttgttcatgtcgtcactgtgacgagtccgctgctgatactgcacgtgcgtactctatgtatgtagctgtgtaataaagttcaggggatgtaaattgacactcctaccaagtatgctgatgtatgttctcatgcgtgtcggggtttcttatacatggtttgtgttagatttagt

SEQ ID NO: 7032 - DNA, 1541 bp, Zea mays
  Clone ID: 700614611_FLI
cgggtggctagggttttgactcctagtcctaaaccagctcccacgccgccatgatgcagccgccgccgccacatcagcagcagcaatgggcaatggcgcccccgcccccgccgcagtactaccaggcggggcaccctccgccgccgcccccgcagttctaccaggcgggccctccgcctcccgctatgtggggccaaccgccaccgcaggcggcggcggcgccggcgccggccggcggcggggcgggggacgaggcgaggaccctctggatcggggacctgcagtactggatggatgagaactacctctatagctgcttctcccaggctggcgaggttatttccgtgaagataattcggaacaagcagactgggcaacctgagggttatggttttattgaattcagcaaccatgctgtagccgaacaagttctgcagaactataatggtcaaatgatgcccaatgttaatcaacctttcaaattgaattgggctaccagtggggctggtgagaaacgtggagacgatggttcagattatactatatttgttggggacttggcctcggatgttacagatttcattctacaagatacgttcaagagtcgttatccatcagttaagggtgcaaaagttgtctttgacagaactactggccgttcgaaaggctatggttttgtaaagtttgcagattcggatgaacagacacgggcaatgactgaaatgaatggacaatactgttctagcagggccatgcgccttggaccagcatccaacaagaagaatactggtggaccacaaccatcgagtgctatttaccagaacacccaaggaactgattctgatagcgatccgaacaatactactgtatttgttggcggccttgacccgagtgtgactgacgagcttctgaagcaaactttcagtccatatggagagcttctctatgtcaaaatacctgtaggaaagcgctgcggatttgtccaatattctaacagggcatcagctgaggaggccataagggtgctaaatggaagccagttgggaggtcagagcataaggctctcatggggccgtagccctgcaaacaagcagcctcagcaagagcagagccaatggagcggtggtggctattatgggtatccccaaggatacgatccatatggctatgctcggccccctcaagatcctgccatgtacgcctacgcagcatatccagggtatggaaattaccagcaacagccaccacagcagcccccgccacaacagtaatgatgtcccgagagtgatcatttgcaagctggtcgcaaagtagctggggggttggggcgcagcaactttggtgcgttggcatgagaaattttgcggcggttgcttgtgttgtgttgtattgttccgacgcccttgtacacgtagcctgtgttgtaactgaatttttgccgaggccttatgagtgactagtgtttcaactgtaactggattgcacatttttgtcgcaaggaatgtactattattgtgtggctcgtgccgctttgaacgctg

SEQ ID NO: 7033 - DNA, 1421 bp, Zea mays
  Clone ID: 700614637_FLI
ctcgcactcgcacgtacaccacactagttaccacagacgacgggcgccatgaaagtcccggtgcttctcctcctggtctccctgtgcttctcgctcgcgctcgcgtggcaaacggacacggaatcgggctcaggcaggccgtaccactacggcgaggagagtttccggcactggacgcgctcccggcagggccggttcagggtgctggaacggttcacccacgagctgctggaggacgccgtcggcaactaccgcgtcgccgagctggaagccgcgccgcgcacgttcctgcagcccagccactacgacgccgacgaggtgatgttcgtgaaggaaggcgagggcgtcatcgtgctgctccgcggcgggaagagggagtcgttctgcgtcagggagggcgacgtcatggtcatccccgcgggcgccgtcgtgtactcggccaacacgcaccagtcggaatggttccgcgtcgtcatgctcctcagccccgtcgtctccacgtctggacgcttcgaggagttcttccccatcggaggcgagagccccgagtccttcctcagcgtcttcagcgacgacgttatccaggcgttgttcaacactcgccgggaggagtgggagaaagtgttcgagaagcagagcaagggggagatcacgacggcgtccgaggaacagatccgggagctgagcaggtcctgctcacgtggtggccgcggcagccgcggcgagggtggcgactcgggttcttcttcttcttccaagtgggagatcaaaccgtccagcctcacggacaagaagccgacccattccaacagccacggcaggcactacgagatcaccggcgacgagtgcccgcacctccggctgctcgacatggacgtcggcctggcaaacatcgcccgcggttctatgatggcgccgagctacaacacccgtgccaacaagatagctatcgtcctcaagggccagggctacttcgagatggcgtgtccgcacgtctccggcggccggtcgtcgccgcgccgtgagcgcgggcacggccgagaggaagaggaggagcgggaagaggagcaaggcggtggcggtgggcaaaaggcgaggagctacaggcaggtgaaatcccgcatcagagagggctccgtcatcgtgatcccggcggggcacccgaccgcgctggtcgccggcgaagacaagaacctcgccgtcctctgcttcgaagtgaacgccagcttcgacgataaggtgttcctcgcgggcacgaacagcgcgcttcagaagatggataggccggcgaagctgctggcgttcggggcggacgaggagcagcaggtggaccgtgtcatcggagcacagaaggacgccgtcttccttcgcgggccccagagccacagggtctcgtcggtgtaagtgcatgcttgagatgt

SEQ ID NO: 7034 - DNA, 1031 bp, Zea mays
  Clone ID: 700614656_FLI
ccttgccacgagtcgccgacactccatcccggaagagctaacgaggtgacaccccaccgcgcccatgggtgacagccagtactccttctccctcaccaccttcagtccgtcggggaagctcgtgcagattgagcacgcgctcacggctgtcggatccgggcagacctcgctcgggatcaaagctgccaatggtgtagtcattgccactgagaagaagctgccttctattttagtggatgaaacatctgtgcaaaagattcaggcactaacacctaatattggagttgtctatagtgggatgggtccagatttccgtgttctggtgagaaaaagtcgaaagcaggcacaacaatattatcggttgtacaaggaacatatacctgtaacacagcttgtacgagagactgctgctgtcatgcaggagttcacacagtcaggtggtgtgagaccatttggagtatcactgttgattgctgggtatgatgacaatggcccgcagttgtatcaggttgatccctcaggatcatacttctcctggaaggcatcagccatgggaaaaaatgtgtccaatgcaaagacgtttcttgaaaagagatacacagaagatatggagcttgatgatgccatccacactgcaattttgactttgaaagaaggatatgaggggcaaatttcctccaacaacattgaaatcggaattattcgagctgatcgtgagttcaaagttttaagcccagcagagatcaaggatttcttggaagaggtggagtaagctgtctgttgatgatactagttcagacaacaatagcagtgtcacttatgagcagccagcctgaagattgtcttggttttattactctgtaaactgatttgctccagcgccatgtggtggttacatttgaaccctcctcaacgcatactgtagacaatgagataacgtaggatgaatgctgtatttgacatactttgcagcttgtttatgtgatgcacgttcttgcggacagtatcgatacccagtgtttattgtcgtc

SEQ ID NO: 7035 - DNA, 579 bp, Zea mays
  Clone ID: 700614662_FLI
ccaaaccttcccaaaacccttttcccgttctggtctctctttcccgtctccgagcgctgccgccgcccgccgccagcgccggcgcgcgagaaacaagaggaagaagaagccaaccgatccagcagcgatggtggtcggtggcctgttggggggcgctttctgggcgacgcgggcgctggaggtggtcaagcggaacgattccccgggcctgctgtggaagcgcatcaagctcaccaccacccgcaagaacaacgccaagaagcgccttaagcggctctggcagaatgaggcggttataagggcttgtggtgaatcagaatccagatcagcgtctaacgtggcttccaccactgagaaacaacagtagcctttgactatttcccccagtttgctgtcatcagattgaaagccaagtgcgtgtataaatcttactttcttcaacatcattcgttgctaccatatgcaaccttgccccctcccgaactccggcgttatttttatttcactgtttccatgttacttctgaaaaaactacttgggattgttttctttcctcaattattctgcatatgctgattg

SEQ ID NO: 7036 - DNA, 580 bp, Zea mays
  Clone ID: 700614675_FLI
cgtcggttcacttctccaggtaaggaaagggttcgtactcatggcgccgccgcagccaaagtcgggccttttcgttggcatcaacaagggtcatgtcgtcaccaagcgcgagctgcctccccgcccgtgccaccgcaaggggaaatcaacgaagagggtgtctatggtcaggggcctgatcagagaggttgctgggtttgctccttatgagaagcgtatcactgagcttctgaaggttggcaaggacaagcgtgccctgaagcttgctaagagaaagcttggaactcacaagagggcaaagaagaagagagaggagatggcgggcgtcctcaggaagatgaggtcggctggtacgcacactgacaaaaagaaatagagagcatttcaagttcatggagctggctgccagagattatgttccagtgtctgattttccatacatgtagaacctaatagacatgtcaaagtattatgtatcgaaccagctcatgggattttgctccttccaatgcatccagggtttatgtatcgaaccaatttatgggatcttgctcttattctaatgcatccatggtttgtg

SEQ ID NO: 7037 - DNA, 762 bp, Zea mays
  Clone ID: 700614713_FLI
caccggcgcaggcgaaccgcagtccgcgcctccgcactccgccccatccgaagctccgagcagagcaggagcagcaaagcaagcgagcgtcaggttagcactctgcagcccaccaggcacaaggccacggctaccgggcgggcactggcgaccgctacctggccgccagcagcgctgtcctccaaccgctattgcgtatctactgtcttccggcttctgcgtctgagcatctcttgtgacggactggctgaatcgagaggtggaggcagcaaccaacaaggtagcactatgaaggtcaagattcttcagtggcatgcagtggcttcttggacgtgggatgcacaggatgagacatgtggcatatgcaggatggcttttgatggctgctgtcctgactgtaagttccctggtgatgattgcccactcatttggggtgtctgcaaccatgcttatcatcttcactgcatactgaagtgggtcaattctcaaacatccacacccctttgccccatgtgccgtagagagtggcagtttaagggctaaggtactatggacatctagaactgcaccaagcgactctcagttctcagagaagactgatgtttttatggtacttctgtgatgctttattttaactactgcatattgttttccgtagtataaatcctgatgtcagtgactgatcctgtgtatgcttccgagcttgtagtggaacaaatgaaattattgcttttcttagtgctgacttcctaatcttatccc

SEQ ID NO: 7038 - DNA, 434 bp, Zea mays
  Clone ID: 700614766_FLI
gctatggtccggtgcacactggcgccagatggttcaatgacatgatcaacgtgccattcacgtcgaagccgttcgtcgctgggttggtagcctatatcctggacaacaccctccaggtaaaggagagcgcggtgcggaaggacaggggcaaccactggtgggagaagttcaggagcttcaagaaagacgcgaggagccaagagttctactcgctgccgttcaatctgaacaagttcttcccgtcggtctgatctcaaatggcgccgccgctgaatcaattctggaagcaacccttgttcatatgggcgttaatgaggaacataattctgctggtctggccagtggaagcttctgtgtctccattgttggtcaattttgtgtgttttcggacgagatgggagtaattgaactgtagaaattattacgattgaagt

SEQ ID NO: 7039 - DNA, 731 bp, Zea mays
  Clone ID: 700614786_FLI
cggcgctccgtggcggcgaagctggagcgcgggctcggcaagggggttcccaccaccaactacgtggtgccgctcgacaaggccaccgggatgacgcgcccgctcgtcgagatcctgcgggacctcaacaagcgcgtccccgacaagatcatcgaccccgacactaacaccgtcaactggtaccatgccaacagaatgcttagcttttacgcaccaggttggtgtggagaagttcgtgatgttatctattctgagaatggaactgtaaccgtggtatatcgagtgatacttaaaggaactgatggagaggcatacagagatgccacgggcacagcacagttacatgaggggcgcagggaagatgctgttgcagccgcagaggaagctgcattctgcaaagcctgcgcacggttcggttttggcctgtacctgtaccaccaggatgattctcattacgacgaccacttccattgaggctcagtctgcaaaagagctgttcataagctgcaacatgcgttggatatgcctctcgaaaaacttcgcatctagaatcaatttttgctctttgcgtagtatcatactcataacacaaagaagtgaacctatgtagatgctattcgaaaccttctttttattaatattagaattcttattaatattattgtataattatttttttaatgtatatgtgtcggacacaatctattgattgatctatattctggcagtct

SEQ ID NO: 7040 - DNA, 877 bp, Zea mays
  Clone ID: 700614788_FLI
gcggcaactcgacggccaaccgcgccaccctgccgcggcagccatggtgcatgttaacttctaccgcaactatgggaagactttcaagaagccaaggcggccgtatgagaaggagcgcctagatgctgagctgaagctggttggtgagtatggcctgcggtgcaagcgcgagctgtggcgcgtgcagtatgccctgagccgtatcaggaatgcagccagggagctgctcaccctggatgagaagaacccacgccgtatctttgagggcgaggcgctcctccgccgcatgaacagatatggtcttcttggtgagggacagaacaagcttgattacgtgcttgctctcactgttgagaacttcctccagcgccgcctccagaccatcgtcttcaagaatggcatggccaagtccatccaccatgctcgtgtcctgatcaggcagcgccacatcagggtgggaaggcagctcgtcaacatcccctcgttcatggtcagggtcgaatcagagaagcacatcgacttctccctcaccagccctctgggtggtggtcctgccggaagggtgaagcggaagaaccagaagaaggcctcagggggcggcgacgctgaggaggacgaggagtaaagggggggggggcacgtaggattctgggacggcaattggtttaaatgtgaggtggacactttagttgttgtgcctgagtgtgtttgtgttgtaatgaattcagaaattctactgtggtagacaattttgcacccccactactgacactcgtgtttaaatttaaacattggcatcgtgtctggacacgatgaattgtattctggtttgggtggctatttgctagtttggtctttaggccaatgtttaagactg

SEQ ID NO: 7041 - DNA, 1159 bp, Zea mays
  Clone ID: 700614836_FLI
gaaggttccggattctacctatgatatgattggaggccttgaccagcaaattaaagagatcaaagaggtcattgagcttccaatcaaacatccggaactgtttgagagccttggaattgcacaaccaaaggtttgttttcttttttgaagaccatcttaactttttgaactttacatgtaggtggaaaagacggatcttgtttgtttttcagggtgtccttctttatggacctccgggcacaggaaagacattgttggcacgtgcggttgctcatcacactgactgcaccttcatcagggtgtctggttctgagttggttcagaagtatattggtgagggctcccggatggttagggaactctttgttatggccagggaacatgcaccatccattatatttatggatgaaattgactctatcggatctgctagaatggagtctggaactggcaacggtgacagtgaagttcagcgtactatgcttgaacttctaaaccagcttgatggttttgaagcatcaaacaaaattaaggttttgatggcaacgaacagaatagacattttggatcaagcccttctgaggcctggccgcatagacaggaagattgaatttccaaatcctaacgaggattcacgtttcgatatcttgaagatccattcaagaaaaatgaacttgatgcgtggcattgatctgaaaaagatcgcggaaaagatgaatggggcctcaggagctgagctcaaggccgtctgcacagaggctggaatgtttgctcttcgtgagagaagggtgcacgttacccaggaggacttcgagatggcagtggccaaggtgatgaagaaagacacggagaagaacatgtccctgcgcaagctctggaagtgaggctcgtgcctacctttcacagccttcccgaagctagtggcagtgccttcatatccatatcttttaccaaagcagtggaatggcgtaacggcatgctctggacaatgttatctcaagttgcgccgcgcatgcttatgtttaaagttttccttataacgtctgtagtgtgttgttgcaaagttgattggctttatcagatcagctagattacggtactaatacattgctagctcgcgatgtggacactgcataatggttacttgctcggattatcc

SEQ ID NO: 7042 - DNA, 612 bp, Zea mays
  Clone ID: 700614850_FLI
gacaagcctcatctcagccgtgcaggaccaagtagttttgcttcactccggcattccatccatatccatccatcagaattctcagtctccacagcagcaaggcgcacgaccagcaccagcagccggcaacaaaagacacagcagcgatggcgttcgtgccggtgtgcgtgcagtgcgggacgcggagcaacccgtgccggtgcaaggtggtcgggccgacgctggggttcgtcgcgttcgtggtggccggggtcatcgagtggccgctgggggccgccgtgtacctgttccgccaccgcaagggacgacgcatcatggcgcacccggccaccgtcgtgtacccgcgcgttaccagggccatcccgatctaatcggccgaccgatcagccaggtcgcggtttcatgtccgggtttgtgtcgccaacgtactgagatgtcgtcagtccaaatttgtgaatccttttacacccgcctgcctttctttctcaataagagtcgcaaatgtgtgtggtttcagtttgcgtacatttgtactccgattgtaagcatcgccgtcaatgtacgtaatactatgtatgtcatctcagtctatccgagtaacttcctattact

SEQ ID NO: 7043 - DNA, 2025 bp, Zea mays
  Clone ID: 700614946_FLI
gggaaaacaagagcgaagcagtactattctaatgaccgtgacaggaccaagaatttgggagtgttgctgcatggtgatggtagtttctcagggcagggcgttgtgtatgagacgctgcatctcagtgcccttgaaaactacaccactggtgggacaatacatatcgtggtcaataatcaggttgctttcactactgatccaaggtcagggagatcctcacaatattgcacagatgtagcaaaagcattggatgctcctattttccatgttaacggtgatgatttggaggctgttgttcatgtctgtgagctcgccgcagaatggcgtcagacatttcattcagatgtagtggtggacattgtatgctaccggcgatttggccataatgaaattgatgagccgtccttcacccaacctaagatgtacaaggtgattaggaaccatccaagtgcgctagagatttatcaaaggaagttgttagagtctgggaagatctcaaaggaagatattgataggttaaacaaaaaggtcagcactatacttaatgaggaatttcagaacagcaaagactatgttcccaacaagagggactggctttcagcttactggactgggttcaagtcaccagagcagatttcgcgtatccgaaacaccggtgtcaagccagagattctaaaacgtgttggagaagccatgactactctgccagaaaatttcaagcctcacagggctgtgaagaagatttttgatctacggcgtcagatgatcgagactggagaaggcattgattgggcagttggtgaagcacttgcttttgctactcttataattgaggggaaccatgtcaggttaagtggtcaggatgttgagaggggtacatttagccatcgacactctgtcatccatgaccaagaaactggagagcagtactgcccgctggatcatcttgttatgaaccaagatgcggagctttttactgtgagcaacagttccctgtcagaatttgctgttttgggctttgaattgggttactccatggagaacccaaactcattggtcttatgggaagctcagtttggtgatttttcaaatggagctcaagtgatatttgatcagttcctgagtagtggggagtcaaaatggctccgccagactggccttgtcgtttgccttcctcatggatatgatggtcaggggcctgaacattctagtgcaagattggaacgctttcttcagatgagtgatgacaacccttatgttatacccgagatggatccaacactgcggaagcaaatccagcagtgcaattggcaggtcgttaatgtaacaactcctgcaaattatttccatgttctgcgtcgccagatacaccgggacttcaggaagcctttgattgtgatgtccccaaagaacctccttcgccacaaggactgcaagtcgaacctatctgaatttgatgatcttgcgggccaccctggattcgacaaacaggggacacgcttcaagcgtctcattaaggaccagaataatcacaaggacctcgaggagggaatcaaccgcctagttctttgctctggaaaggtgtactatgaactggatgaagaaagaaggaagtcggagcgcactgatgttgctatatgtagagttgagcagctctgcccgttcccctatgacctcatccagcgcgagttgaagagatatccaaatgccgagatcgtgtggtgccaagaggagccgatgaacatgggagcatacagctacatcaacccgcggttgctgacggcgatgaaggttctgggccggggtggcatcgaggacatcaagtacgtcggcagggccccgtcggctgctaccgcgacgggcttctactcggtgcacgtgcaggagcagacggagctggtgcagaaggcgctgcagcgcgaccccctcaactaccctttctgaaagaaacgaggcccctgtagattcttggaattggggaccttttgaatttgatataataccaatatagagagaacatgcctt

SEQ ID NO: 7044 - DNA, 653 bp, Zea mays
  Clone ID: 700614970_FLI
cgagccgcgagtggaactgtggaagcgtcgagcttttttcttctttgtcttgctgcgcaagaagaagggaaacgagaggagggcggcgatggcgaagaggctgctcccgtcgctgaaccgggtgctggtggagaagctggtgcagcccaagaagaccgccggcggcatcctcctcccggaaacatccaagcagctgaatgctgctaaagtggtggctgttggccctggtgagcgcgacaaggcaggcaatctgatcccagttgctctgaaggaaggcgacactgttcttctgcccgagtatggtggatctgaagtcaagcttgcggctgataaagagtacctcctcttcagagaggatgacattttgggcacacttgtggactgattcagatcgcgggcaagcgggtggtggtgatatgcgtaggatttgaagctgggaacaaactccagaaagaactgtgccctgtcgtgatgtcataaatttgtggtgaaacatcatatcatgaggataaaacttgttgcttttttgtgatgcaatttagaaaactttcgaatttgaactggttcccaatattttgttctcctccctgtcccctgttgaagtgctctctgttttaagttagcaattaacgggatcggatttacttgtgaac

SEQ ID NO: 7045 - DNA, 404 bp, Zea mays
  Clone ID: 700615014_FLI
catgacttctacaactacgatatggagaaggcagaatttgcaggcctctttgcgaagttcacccaggatttggcgctgatcggagctctgctcttctttctgggcatgaagaactccatcccgaagcggcagggcggcaagaagaaggcccccaaggcgaagacgaactagggctgcttagatagctgcacgcctcaggcggggtgtatcaggagacaggtctatttcgaagcaggcccagcgcgatgcagcgaatgccatcgagctgcgcttttacatgtttatcatcagattccattttgcggcctgaacaaaggtgtgaccggggtgggttaggcgactagattgcacgattatgtacttgcgatttgtttgttgaactgggttgccgacggttaatcttc

SEQ ID NO: 7046 - DNA, 463 bp, Zea mays
  Clone ID: 700615037_FLI
catacccttgtcaatgacatgtttccaccaacgactctggttgagcaggaagactacaacaactggaattactggaaggtgccattaccagatgttgatttgtagtgtagttttgacagaaacagccgtagataccagtagatcctgcaaaagcctagcagtagagcttcctgtaccctaattttcagccaccacgacggttttaggtccaatttgtgaaggtctcaagaattcccggatgtatggttttctgaaagccaatggcccaaggaaacgttgccactttatttccttcgacggagctttcacgtgatcatacggcttttgggtagtcatctgattgtcttcgtcgaacttgttgtacccagaggtctgagccctagaccctcgattcattagagaacccgtgatctggtcattgtccaagctactttgttctgattgcaggaaatctttaggtgcc

SEQ ID NO: 7047 - DNA, 773 bp, Zea mays
  Clone ID: 700615075_FLI
cgagctcctccggatttcgcagtcagcggtggtgaaggtagcgggcgcggaggaagatggggctcgcgttcgggaagctcttcagccggctcttcgccaagaaggagatgcggattcttatggtcggtctcgacgccgccggtaaaaccaccatcctctacaagctcaagctcggcgagatcgtcacaaccatccccaccatcggtttcaatgttgaaactgttgagtacaagaacattagcttcacggtctgggatgtcgggggtcaggacaagatcagacctctctggaggcattacttccagaacacacagggtcttatctttgttgtggatagcaatgaccgtgaccgtgttgttgaagccagagatgagctgcacaggatgctgaacgaggatgagctacgtgatgctgtgctgcttgttttcgccaacaagcaagatcttcctaatgccatgaatgctgctgagatcactgacaagcttggattacactccctgcggcagcgacactggtacatccagagcacttgtgccacaactggcgagggtctgtacgagggcctggactggctgtccagcaacattgcgagcaaggcttgaatatcaaatgcgaactgactaggagctccggatgtatcatggaaacttaggacagaatcgcctctacaacctgttaggtgtcttctaccggcacaatatattttttgtttggaatatgtaatgatgttacggttcaacgtttattctaccctactatactgttggatgttc

SEQ ID NO: 7048 - DNA, 1786 bp, Zea mays
  Clone ID: 700615084_FLI
cgcagcagaaggccagtgctaatggtgggtgccatgaggatgatgatgattgtgtagttctagatggtgaccctgataaggcgattacagttgctgaagaggggagcttgggagatggcagttcggatgaattgcagatagtggcggagaaaggcccggtagcatgcagggacttccctcattcacggcattcatgctcaaacttgcctttcagcactacttctcacgtaaagcactgttccatgtgccactgttttgtatgtgacgcaccagctccttgcaaatattggggtaacagtacatcagctgatgatcattgccatgctacagacaaggattcaaaatggacatgcatgaggcaaatattcaagcaaaaattgttgccagcatcttttctagaaaaacaccagaacggcgtttactcaacaatgacaccacctagacagcaacatatgcagtgtcatgtttcagtcccacaatcgccttcggtgtcacatgggagtcacccttctcttaccatccaaagtcctcttcttaatgaagggagccaaaaccaacaaagacatccctcagtgagagtctcactgagtgtaggggcaacagtcagttctccaagagctggaagaggtactggcaatgctcacattgctcaaagtactcattcacatgcaatattcaagagagcaggggctgttgctccagtctttgcaacaagaaatgctagccaattctgtccttctgctccagatgatctccttttgcagcaggcattgtctcacgcttctcagcctgttcaagttgcgcctacaaccaatgctttcactggcgcttctcaaaataaccattttcagagatctttcagtgcgccgatagcacctcaggtgcaacaaggtcaacctgcggcacgttaccaggtcgccataaatggaatgcacgccgtagggccgcaacttgcacggtccacctcacttacaactcagagaacacaatgcctcccagaaccagcaataatagatgtcagcacaacaagctggcaagacatacttgctactgtggcatctaatctgggggtagcagattacaacacgagcacccctgagtctcagcatgtaacggttgactctctagccatgcatcccactgcaaaccatgggttggatcttcagcatgagcccattgcagaatcagagaacctgacatattcgcttctgcatgattcatccaatggcgcagcaggtggcagtgttcaggcagatggtcctatgcaaacaccagagaatttggaccatctgattggccagagcaatcctgttccaaatgaagctcacctggatgactttgcgggtgcccccgctaatcaattaccaatagaagaagaagaagctcatcagcctgagatgtcaaggctggagcctacaaacattctgttcgagttcgattgggtttaagcggtgacctgcctggctgcctcatcagcatatccctaacccatgaataataaatcagtgccattgacgtgcccctttctaggtctcctgcataggagacatgtctggtgtccccttgtacagtaattaggctatgtactagaagagtttcgccgtcatgttgtttgttatcatagtggtcagatgttgtggctcttcgggctttagatgttaacaggtctgaagtagaagggtgttgggtgggtgccaagatgcttgtctaaccactggtctacaatttgacaatgtaaggtattgagatacagatgcttgggttggataccaaatttctttactgc

SEQ ID NO: 7049 - DNA, 2211 bp, Zea mays
  Clone ID: 700615106_FLI
gtcctctgttacttctccctccgccgccactcccctcccattcaccgccaccgccaattccataccgtcctccgccacctctgctgagagcgagaagagatggcaggcaagggtgatgggccggcaatcggcatcgatctcggcacgacgtactcttgcgtcggcgtctggcagcacgaccgtgtcgagatcatcgccaacgaccagggtaaccgcaccacaccctcgtacgtcgccttcaccgactccgagcgcctcatcggagatgcggccaagaaccaggtcgccatgaaccccatcaacaccgtctttgatgccaagcgtctcattggcaggaggtttagtgatgcctctgtccagagtgatattaagctgtggcccttcaaggtcattccagggcccggtgagaagccaatgatagttgttcagcacaagggggaggagaaacagtttgcagccgaagagatctcctctatggttctcatcaagatgcgtgagatcgctgaagcttaccttggcagcacgatcaagaatgctgttgtcacggtccctgcctatttcaacgactcgcagaggcaggccacaaaggatgctggggtgattgctggcctcaatgtgctgcgtatcatcaatgagccaaccgctgctgctattgcctatggtcttgacaagaaggcaaccagtgtcggtgagaagaatgtcctcatctttgaccttggaggtggtaccttcgatgtctccctccttacaattgaggaaggtatctttgaagtcaaggccacagctggcgacacccatcttggtggtgaggactttgacaacaggatggttaaccactttgtccaggagttcaagagaaagaacaagaaggatatcactggcaacccgagggctctccggaggctgaggacctcttgtgagagggccaagagaactctgtcttccactgcccagaccaccattgagattgactcgctgtacgagggcattgacttctactccaccatcacccgtgccaggtttgaggagctcaacatggacctgttcaggaagtgcatggagcctgttgagaagtgcctgagggatgccaagatggacaagagcagcgtccatgatgttgtccttgttggtggctccactaggatccccagggtgcagcagctgctccaggacttcttcaacggcaaggagctgtgcaagaacatcaatcctgatgaggccgttgcctatggtgctgccgtccaggccgctatcctcagtggtgagggcaacgagaaggtgcaggacctgcttctgcttgacgtcactcctctctctctgggtctggagactgccggaggagtgatgaccgtccttatcccgaggaacaccaccatccccaccaagaaggagcaggtgttctccacctactcggacaaccagcctggtgtgttgatccaggtgtacgagggtgagaggacccggacccgcgacaacaacctgcttgggaagttcgagctctccggcatcccaccggctcctcgtggtgtcccccagatcacggtctgcttcgacatcgacgccaacggcatcctgaacgtgtctgccgaggacaagacgacggggcagaagaacaagatcacaatcaccaacgacaagggccgtctgtccaaggaggagatcgagaagatggtgcaggacgcggagaagtacaagtcggaggacgaggagcacaagaagaaggtggagtccaagaactcgctggagaactacgcctacaacatgcgcaacacgatcaaggacgagaagatcgcgtccaagctggctgccgacgacaagaagaagatcgaggacgccatcgacgcggccatcagctggctggacgccaaccagctcgccgaggcggacgagttcgatgacaagatgaaggagctggagagcctttgcaaccccatcatcgccaagatgtaccagggcgcgggtgccgacatgggaggctccggcggcatggacgaggacgctccggctggaagcggtggccctggccccaagatcgaggaggtggactaagcggtttgtgtcaggtctcgtgtgtctgctgcagtggctggctggcccagtcgctgctcgatttatcgtcgtcgtcgcggtgtatccgcgttagaaccttttgttggtgaacaatattatcgtggcacgcgttttaagtaatacggtattctggttcggttt

SEQ ID NO: 7050 - DNA, 651 bp, Zea mays
  Clone ID: 700615179_FLI
ggaggcataggtcaccgatgcgtccttcacctaggaggggacgtggcagtccttcaccacgcaggcgctcccctgggcctcttaggcggcgctcgccacctccaaggcgtttgaggagcccaccaagaaggccaccacctccacgtcgctatagtcgatctcctcctcgccgaccccttcgctccagatcgatttctccaagaaggggacgagggcctctcttgaggcgtggtaggtcaggctcatcatattctcgatcacctactccaccgccaagaaaggggccaagaagggtatcaaggagtcgcagccctagaaggcctcccagaggaagaagcatctctagtgacagccgaagcagcagttctccttcccctagacgtggcaggtagaaggaacccgttgcattgtgtatccggcaggtaaagcctacggcaatgcttccagtggatctgcttaacatgcctggtgggctcactggcttgtgatttgtacccgagacagaattatctgccatgtgacatctggctcatgtacttgattgtaccccaagtatcttgaacttgtttccgcacaggagtctggatctttttttttttgcattaaaccattgtgctacttggtctaaagcgttactgggtctttcgtttc

SEQ ID NO: 7051 - DNA, 1767 bp, Zea mays
  Clone ID: 700615191_FLI
aaatattattgcttttggactcctggcaagaggcatttggaggacctggaagtaaatacccacaatatcattgggcataccttgaagtaaagacgacaggtgtggtgttcccaaaacgtcctatggatgccccaccaatatttactcctccagctacacataattctgagacctatggttcacccagatattctgcgggaagtctaagtgacagaatgtcctcagatgttgagactctgagtttaggagatttgaataagattcgaaatgtgacagacctactgaatgatatggtgtatgctttaaacccatctgatcgaatggctattaacgatgaaattatcacagatcttgtgacccagtgtcgctcaaatcaacaaaagcttctgcagtttgtcagttcatcagggaacgaacagttactaaagcaaggactggagacaaatgatctcttacaaagcgtactttcaaagtatgatgctgtggcctctggtgctcctttggcggttgaagcatctgtgagagaggcaatcgaggctcctgcagtaaagtcatatgcaccccctgaacataatgataatgttaacgaagaggaagatgagtttgcccagctagctcaaaggaaaaacaaatccgtcgtaagtagtagcgacgatgcatcatccagcactttgggggaccttgcccttgtacccattgatcaagcagtttcagaatcgccatcttctgttgcaagcaatgcgctggttcttcttgatcctgctcccagtactagcactgaatcaaaagagctggacatgatcgaccttctaagcctcaccttgtgcagccctactcctgaaacttcaacagattcttcagcacaggatcaaaatggaccccagcaacctgcagttacacataatcaaaaagggcttcaggaacctacagttacaaatgggcaacaatatccttctagtgtgccacagtatccttcaaactaccagcctcacactgcaaaccaggcatatgctccacagaccagcaactatgtggcaccttgggcccagaccggagcatatccacctcagcctccggcatatgcatctggctatgcctaccctgcaccgccatgggtggcgcctacacatcctgttgattctaacccttttctttcggtcaattaccaagatccacgccctgctgccacttctgttgctcaaacagcaacatatgcacctcccccagcttcatatcccccttcaatatcttatgcacagtttgcaaccccccagtcaattcagcatagcaattctgtggcttcaccgagcaatggtcagattgcaaatcaagcacaaatgaatgtgaatcaacaaccaaaagattcttcggcagcatctagcagaccatactacatacctgataatctattcagtgatttgatcgatgcaaaaagttttggcggtggaaacaagatgggcgggcccactacaatgggtagctcaaatggtggccagcctatgattggtggaaagaaatagggttatttgtctatatatatacagctgatggtgatcggtagctgccttgttatttattatgattactttgtctggtgtacatttgtacttgtatatcgccattcccccttttgacagatttggctgcattggttgattcgtgggtgcaactgttaagtttaacagagatatggacaattgctcatgtacataaatgattagcatttgctccactgaggtggatggttgtgatgaaatctgttggtat

SEQ ID NO: 7052 - DNA, 1273 bp, Zea mays
  Clone ID: 700615193_FLI
cgtgcagtcccagagcaccccgtcttcccgctactcccgcaagggcgctcgtcgcttccttctccggggcgtggcaggcaccttctggtagagcgagagcgagagcagcgccgccggcagttcgcgctatggcgtcccagcaggtgttccgggctcagcagcagcagcagcagcagttcccggctcagcagcaggagtcccagccggggaaggagcacgcgatggacccccggcccgaggccatcgtccaggactacaaggccgccaacaagctcaaggacaaggtggcgctcgtgaccggcggcgactccggcatcgggcgcgccgtgtgcctgtgcttcgcgaaggagggcgcgacggtggccttcaccttcgtgagggggcaggaggagaaggacgcggaggagacgctgcgtgcgctgcgcgacatcgggtccgagacgggcgcgcgcgagccgatggccctgcccgccgacctcgggtacgaggccaactgccgggaggtggtggagcgggtggcgtcggcgtacggcgggcgcatcgacgtggtggtgaacaacgcggcggagcagtacgagcgggagagcatcggggacgtgacggaggcggacctggagcgcgtgttccgcaccaacatcttctcctacttcctggtgtccaagcacgcggtgccgcgcatggagcccggcgcctgcatcatcaacacctcctccgtcaacgcgtacaagggcaacaagacgctgctggactacacggccaccaagggcgccatcgtggccttcacgcgcgcgctctcgctgcagctggccgacaggggcatccgcgtcaacggcgtcgcgccgggccccgtctggacgccgctcatcccggcgtccttcggcaaggagaaggtggagcagttcgggtcccaggtgcccatgaagcgcgccgcgcagccggccgagatcgcgcccagcttcgtcttcctcgccagcaaccaggattcgtcctacatgtctggccagatcctccacgtcaacggaggcgtcatcgtcaatagctagatacggaagctgttttgctgtcgtgtgatcgtgtccaagtccaagggaacaaagcgagtgtccgtgtgtaccagtcagtaccaggtagcagtgtcagtacgcgcacgcaggaaggcaaggcagggttcagttgtagcggtgtgtaatgctgtcagcacagcacttgtaaagaaggaacgtgtctgaataaatatgcgtccaagcatgaagacttcgtacgtggtttgcac

SEQ ID NO: 7053 - DNA, 877 bp, Zea mays; identical to SEQ ID NO: 7040
  Clone ID: 700615204_FLI

SEQ ID NO: 7054 - DNA, 550 bp, Zea mays
  Clone ID: 700615246_FLI
gagcagaggaggatggctcgtacgaagcagaccgcccgcaagtccacgggaggcaaggccccccgcaagcagctcgccaccaaggcggcgaggaagtcggcgccgacgaccggcggcgtgaagaagccccacaggtacaggcccggaaccgtggcgctgcgcgagatccgcaagtaccagaagagcacggagctgctgatccgcaagctgcccttccagcgcctggtgcgcgagatcgcgcaggacttcaagacagacctccggttccagagccacgccgtgctggcgctccaggaggccgccgaggcctacctcgtcggtctcttcgaggacaccaacctctgcgccatccacgctaagcgcgtcaccatcatgcccaaggacatccagctcgcccgccgcatccgtggcgagcgcgcgtagccatcatctccggggatctgatgaatgtctagttaccaaacaaataggctgtattagcgtcgttgttctgtattcgttattttggattcggttgcagtgaaaaacagctttactaatcttatttgtg

SEQ ID NO: 7055 - DNA, 963 bp, Zea mays
  Clone ID: 700615347_FLI
ggcggcgaccttgcggcctccgctgcgctctgactggtgcgcgtttagacgaggagctgcggcggccaagaccaatcgaccatggctacccgtatccagtttgagaacaactgtgaaattggtgttttctccaagctgacaaatgcttactgtctggtagcgattggagggtcagagaacttctacagtgcctttgaggctgagcttgcagatgccatccctgtggtcaagacctctattggtggcactagaataataggccgactttgtgttggaaacaagaatggacttctattgccacatactacaaccgaccaagagcttcagcatctgaggaattgcttgcctgatcaagtggtggttcagcgcattgatgagaggttatctgcccttggcaattgcatagcctgcaatgaccatgttgcacttacgcaccctgaccttgacaaggagactgaggagttcattgcagatgtgcttggggtcgaggtgtttaggcagactattgctggaaatatccttgtggggagttactgcgccttctctaacaggggtggtttggttcatccccatacatccgttgaagaccttgacgagctctccacgctcctccaagttcctcttgtcgcaggaactgtgaacagaggaagcgaggtcattgctgcaggcatgacagtgaacgactggactgccttttgtggctcggacacgacagccaccgagctctcagtcatcgaaagcgtcttcaagctgagagaagggcagcccactgcgattgtggaggacatgaggaagtctctgatagacagttacgtgtaactggggggccagcagatgtgggtcagagtttgcctttgctaaaagatgtattgcaagctatagtcgaattatcagtagcacaacataaccctctgatatgttcgtggtttatccgtggtttctgaattgtagacttctgcgttg

SEQ ID NO: 7056 - DNA, 1033 bp, Zea mays
  Clone ID: 700615349_FLI
caacataccagactatgcttaacaccctcgacggtgtcagagatgagacaggtgcaagccccactgcttgggctgtttggacgagggcatggactgctgaggagaacaggcatggtgatcttctcaacaagtacatgtacctcactgggagggtggatatgaggcaaattgagaagacaattcagtatcttattggctctggaatggatcctaggactgaaaataatccttatcttggtttcatctacacctccttccaagagcgggcgaccttcatctcgcatgggaacactgctcgtcatgccaaggactttggcgacttaaagctcgcacaaatctgtggcatcatcgcctcagatgagaagcgacatgaaactgcgtacaccaagatcgtggagaagttgtttgagatcgaccctgatggtaccgtggttgctctggctgacatgatgaagaagaagatctcaatgcctgcccacctgatgtttgacggtcaggacgacaagctgtttgagcacttctccatggtcgcgcagaggcttggcgtttacactgccagggactacgccgacattcttgagttccttgttgacaggtggaaggtggcggacctgactggtctgtcgggtgaggggaacaaggcgcaggactacctctgcacccttgcttcaaggatccggaggctagacgagagggcccagagcagagccaagaaagcaggcacgctgcctttcagctgggtatatggtagggaagtccaactgtgaaatcggaaacccattgcgactgcttgagttggagcatagtctatcatgcaccctaagacgcatcgcgacgacaagacctggtgtgtcgcgtgacatagttgttcaggttttgaccaaatggtctgggagcatttgttttgccttgtgccgtctcatagagcgttaggatagtgtacgtctgtgttctagctttgttttgtctgctgctttgatgtacaacttgtggccatgaggctggacatggagtgaacatgttgtacattgtc

SEQ ID NO: 7057 - DNA, 528 bp, Zea mays
  Clone ID: 700615353_FLI
gccatctgattcacgtctgataaatagttacaattgtgacttggaagacctcccaatgatgcttctgcagcaggtcgccagtcaagtaatccactggctccatgatgaagcgatgattcttgggatgaacgtgactagagattttctgtgcctgtactttgaccttggccaaggcgaaacacttggtctattggcacatgtcgacccggatgacacctatggctgcatctcatggtacctcactgttgatcacccaatggaggaggggaagatgtcagctggcagtccagagtcagagaagcgaaggtttttggggtacctttccctggaagtgctttactctaccctgatggacctgataaaattgtgcagcacaagtgatcaaattcgtgcctcttgatcgacataagtggatgaaatgatgtatgtccgtgcagtgtttaagagtatgtaaattgaggcattatgtgcacctgttgtttgctaataggatgtttggcttgaaaaacggagtccatcctctcactc

SEQ ID NO: 7058 - DNA, 631 bp, Zea mays
  Clone ID: 700615357_FLI
caatctccctagcagcagatcctcgtgcaacgcaaagcgctagccttcctactgtcccgatggcccgcacgaagcagacggcgaggaagtccactggcggcaaggcgccaaggaagcagctggccaccaaggcggcgcgcaagtctgccccggcgaccggcggagtgaagaagccccaccgtttccgccccggcaccgtcgcgctccgggagatccgcaagtaccagaagagcacggagctgctgatccgcaagctgccgttccagcgcctggtgcgtgagatcgcccaggacttcaagaccgaccttcgcttccagagctccgccgtcgccgcgctgcaggaggcgtccgaggcctacctcgtcggtctcttcgaggacaccaacctctgcgccattcacgccaagcgcgtcaccatcatgcccaaggacatccagctcgcccgccgtatccgtgtggagagggcctaggcgtcgtggcggtggaggtcgaagtagtagtcgcagtttctgtcatcaccgtctggctagaaggtgtagagatgtgccgggttctggagtttgggttatcggtcgaatcatgatgtagttggttcttcacagctgtaatttaactatgacgatgccatggc

SEQ ID NO: 7059 - DNA, 493 bp, Zea mays
  Clone ID: 700615370_FLI
gggaaaacaatcctgaaaccaagccatgggtctgcaggaggaatttgaggagcatgctgagaaggcaaagaccttgcctgagaacacgagcaatgagaacaagctgatcctatacgggctctacaagcaagccacggttggagatgtgaataccgatcgtccgggcatattctaccaaaaggacagggccaagtgggatgcctggaaggctgttgaaggcaaatcgaaggatgaggcgatgaatgactacatcaccaaggtgaagcagctccaggaggaggctgccgcctcttaaaagtctcttaatagtgttgccaaacagctatttgtcagatgagctttgtgccatttcctcattagaagtatatcattcgatccattggggatctgtgaaccatgtacctgtttatgtaactggttaccagtgttatccatctatctatctatctgtgaagacttgagtcttctaaattatgatatctgtctgtgtgat

SEQ ID NO: 7060 - DNA, 578 bp, Zea mays
  Clone ID: 700615383_FLI
cccaaagcctccgacccccttcctctctccctccgccgccgctgcgcacgcagggaacaagcgacatgggcgtctacacctttgtgtgccgcaacaacggcggcgagtggaccgccaagcagcactccggcgagatcgaggcttccgccgctaccccatacgagctgcagcgccgcctcgtcgctgccgcctccgcggccgactctgcctacggcgtccagtcgtccttctccatggtcacccccagctccgccgtgttccaggtgatcgtcggtgctgtcggtggtggtgcaatgatggtgagcggaggtggcggcggcggtgctgctgcatctggtggtgctgctgccgaggctcccaaggaggagaagaaggaagaggagaaggaagagagcgacgacgacatgggattctccctgttcgactagagttgtgtgtgtcatctggatctcagaagtggtggtttggtcctgttgccgtagttaattttgctgtcctgtctgtgaacctgaagaactcttggtaattgttacaagcgacctgttccagtttatgtgagaatttgatatgttgtttgg

SEQ ID NO: 7061 - DNA, 868 bp, Zea mays
  Clone ID: 700615385_FLI
atctcccctcccttccctcttctggtctccgccccgctccttgcctccgatccccaattcctccttcggatctcgcattcagcgcagcgcaggtgtgaaggaagggggacgcggaggaagatggggctcgcgttcgggaagctcttcagccggctcttcgccaagaaggagatgcggatcctcatggtcggcctcgacgccgccggtaaaaccaccatcctctacaagctcaagctcggcgagatcgtcaccaccatccccaccatcggtttcaatgttgaaactgttgagtacaagaacattagcttcactgtctgggatgtcgggggtcaggacaagatcagacctctttggaggcattacttccagaacacccagggtcttatctttgttgtggacagcaatgaccgtgaccgtgttgttgaagccagagatgagctccacaggatgctgaacgaggatgagctacgtgatgctgtgctgcttgtttttgccaacaagcaagatcttcccaatgccatgaatgctgctgagattactgacaagcttggattacactccctgcgccagcgacactggtacatccagagcacttgtgccacaactggcgagggtctgtatgaaggcctggactggctgtccagcaacattgcgagcaaggcttgaggcctaccttgaatgtcaaccgcgaactgactaggagctccggatgtatcatggaaactcaggacagaatcgcagttgcaacctgttagatgtcttctaccggcactatatatattttttgtttgatgtgtaatgatgttactgttcaacgtttattaccctactatactgttggatgttctttggacctgtttcatttcgc

SEQ ID NO: 7062 - DNA, 298 bp, Zea mays
  Clone ID: 700615386_FLI
cggatttcatgaggaagacactgcagaaggaggcttccagggatgcctgacctgagtagcaaatgtattagcacgactgagaagctgcctgcctgtgataggcgatggcgatggcaatggtgtgtagacagcagctgggtctctagttttgacggcatgtagtcgtgttagaatgaaggaggcaagggtgcggtggagtggatgtcaatcggcgtgtgatgccatgtctcaattgtgcggtggagtggtttggtggacttttgatgaacagataatgaggttgtatttggtggtaccc

SEQ ID NO: 7063 - DNA, 714 bp, Zea mays
  Clone ID: 700615429_FLI
gtgtgcaccttgtctcttgggagaaggagaatgtctccagtgaggctcttgaggctgcccgtattgcctgcaacaagtacatgaccaagtctgcaggaaaggatgccttccaccttcgggtccgggttcaccccttccatgtccttcgtatcaacaagatgctttcgtgtgctggggctgataggctccagactggaatgaggggtgcctttggcaagcctcagggcacctgtgctagggtggacattggtcaggtactcctttctgttcgatgcaaggacaacaatgctgcacatgccagtgaagctctgcgacgcgccaagttcaagttccctggccgccaaaagattattgagagcagaaagtggggcttcaccaagttcagccgtgccgactacctgaagtacaagagtgagggtagaattgttcctgatggtgtcaacgcaaagctgctcggtaaccatggaagacttgagaagcgtgctcctgggaaggctttcctcgaggccgttgcttaagtccaatctacagttggaatgcgaatccagacgttttgctttagcctatcttattttgctttgtgcaacatgaattttaagtgtatggggtattacagtgccttgtcttgtgtgaacctgcttatctcgtgctgaacatcgttatgcatggaagtacttatcttttgttctgctaaaaattaagtgttctgcgtct

SEQ ID NO: 7064 - DNA, 690 bp, Zea mays
  Clone ID: 700615432_FLI
gcagctgaccgagaagtcggatgtctactctttcggtgttgttttgcttgaggttctttgtgcaaggccagtgatcgaccccacgctgccgagggagatggtgaacctggccgagtgggggatgaagtggcagaagagaggagagctgcaccagatcatcgatcagaggatctcgggcacaatcaggccggactctctgaggaagtttggcgagaccgtggagaagtgcctggcagactacggcgtggagcggccgtcgatgggagacgtcctctggaacctggagtacgttctgcagcttcaggacgccgattcgacggtctcggatgtgaacagcatgaaccgtatcgtggaactcccgtcacaggtccagaacgtcggggccctcgagagcatcagcgtgacgatggcagaagccggagcgtcaaacgagcctgaccacgacctctccgatgtgtccatgagccgcgtcttctctcagctgatcaaggccgaggggaggtaaatgtgcgtgacgcagcctgtagggtgtgggtggtggggaggaagccttcaaagtcatctcttgctgaagtttacgtgagagagatcatgtgtgattttttttcttcttttcgtctacaaatgtactactgaagtgaactatggtttcgagttacagttttagccattgtgagcctgtgcggctac

SEQ ID NO: 7065 - DNA, 1088 bp, Zea mays
  Clone ID: 700615448_FLI
agaagaacgaacctgagtttgctaagaagctagcatctgttgctgacctttatgtcaatgatgcttttggcacggcacacagagctcatgcttcaaccgaaggagttaccaagtatttgaagcctgctgttgctggcttcctcatgcagaaggaacttgactaccttgttggagctgttgccaacccaaagaagccatttgccgctattgttggtggatccaaggtctcaagtaagattggtgtcattgagtcgttgctggcgaaggtcgatatcctcatccttggtggtggtatgatctacacattttacaaggcacaaggatattctgttggaaaatctctcgtggaagaggataaacttgagctcgcaacttctcttattgagaaggcgaaggcaaagggggtttctcttttgcttcccactgatattgtagtagcggacaagtttgcagccgatgctgagagcaagattgtccctgccactgctatccctgatgactggatgggtcttgatgttggccctgatgccacgaaaaccttcaacgaagcattggacaccaccaagactgttatttggaacggccccatgggagtgtttgagttcgagaagtttgcagctggaactgaggcgattgccaagaagctagctgagcttacaaccacgaagggtgtcactaccatcatcggcggcggcgactctgtcgctgctgtcgagaaggctgggctggcggacaagatgagccacatttcgaccggcggcggtgcgagcttggaactcttggaaggcaagactctacctggtgtccttgccctcgatgacgcctagatccgctgctgctgctgctgctgctactcaggttctgccagctttgcgtgtcatcttgtttcggaccttggtgtaacgctgcaaggttaaggtttactcctccacacatggacttttggggataggcttgccatcgtgttttgctagatgagtcgtgaaataagcttttacttcctcgctgctgtgggtgaagtaactggaattcggaaatttggaactaacaaaaccccccgtggatttgtatgatatgttttgttcgac

SEQ ID NO: 7066 - DNA, 823 bp, Zea mays
  Clone ID: 700615611_FLI
gaaaattttcatcacttcatccccacaagctttgtcaaggtctcccctgatcggatcattttcacggtcactgtcatgggaggatcccccgctggaagtcatgtcgccgaattcgttgagactctcaaggcttttctcgaaggctgatgaagatctagattcactgacgtttatccagaagctggtccactctcgaggcacgggtcgagaaagttgcatattagctgaccctttggacccgagtttgctcgagaagatttcggattacgaagaagatggaattaagtttgggaaaaggcggcccaaacagaggctccttttcgacgccgtaaacgaagcgctcatcgagcttgcttcgatggcggaactggctgcgtacccctggggtagatcatgctcttcggagcacggggattgcaagaacggttccagcagtaattctgcggctgaggaaatctggcgggtcattaggaactggtcgatacttgagaagtaccctcccggtgaagctattgaaagaaatctcttgctggagatgatactaaagagggaggtggcggaggcagccagcgctgacacgactcggttagagacgtttgatctcaacaccacggtctgcgccatggtcttggatggcctggttgaagagacagttgtagatctgactaactactgctagtgaggtacctctgccctctaactaataatctcgcgctctgctccctagtgttggtgtttggtgtgatacttgctgccgtaacactgctccatgctattactcgctcaaatgtgatgccaaataaatgggtcttctacgttgttt

SEQ ID NO: 7067 - DNA, 946 bp, Zea mays
  Clone ID: 700615616_FLI
gcagtgtggaaaccgtgtgattcagcgtggtataacatgcaaactacaggtgttctttacacgtgagggtaaaggctggggagtacgcacagtggaagatctcccaagaggtgcctttgtctgtgaatatgttggagagatactaacaagtgctgaattgcacgaaagagcaattgagaatgcaagaaatggtaagcatatgcatcaagtgctcctggacgctggttggggttcaggtgtagtattgagggatgaggacgcttgtagccttgatggttcattttatgggaacgtcgggcggtttatcaaccaccggtatgtaggatacttgctcgtttttttttgctgtaaatatcttgccatagtttgtgtattacagtcttttgtctgctactccgctatgtttttggtaacgaacatatgctatgactagatgctacaatgcaaatttagttcagatccctgtagaagttgagacgcccgatcatcattatcaccatctggcatttttcacgaacaagaaagtggaggcatttgaagagttaacttgggattatggcatcgattttgatgacatggaagggcccagtaaaccgttcagatgcatgtgtggaagtagatactgccgcgatccgaacaatccaaggaggatgggtagagcagctgctaagcggaagtaggcagggagcgcggacttggttggagttgagcacaccaacttttgctgtggggtctggtttcgtgtttgatgtggagtaatgcagtaccatcaccttagctagtattaagtgtagataggtgtggatgattttggtgaatggtgttatggagggaaatgctgcaggctgagcgacctagtaacctatgccatgtagtggcatctaaattagcctgggattgtgtatgcgtaaaaagaacgcctaagacttaaccatgttattatgtc

SEQ ID NO: 7068 - DNA, 1095 bp, Zea mays
  Clone ID: 700615675_FLI
gccgcttcttcctctcccttcccctcccgctaccacacgagcagcttcctgccgccgcagcgtacgcatggcctcgtcggacggctctgccgcggccctgcccagcgctaccgtcgatgtgcccggcgccggggcccctgtcctcgtcgtgggcgcgccggggctccccgaggctgacttcaggaacgcggtggagtcgtcgctgttcaagcagtggctgcggaacctgcagtcggagaagggcgtcctcacctacgggaggctgagcctcacgcgggttctcatccagggcgttgacatgttcgggaaacgggtgggctttctcaagttcaaggctgatatcgtggacgaggaaaccaaaaccaaggttccaggaattgtctttgcaagagggcccgcggttgctgtgttgattcttttggagtcgaatggagaaacatatgctgtgcttaccgaacaggttagaagttcctattggaaaattcctgttggagctgcctgctgggatgctagatgacgaaaaaaggtgattttgttggcaccgccagtccgtgaggtggaagaagaagactggtataaagctgaatatagaagacatggttgatcttacggcactggytggaccctgctactggaggtcgaatgctaccatcaccgggttggctgcgacgaagagattggcctgttcctgtacaggggccgcgttgacgaggagaccataagatcgctccaggggaaggaaaccgggctgcgcgaccacggtgagctgatcaagctgcgcgtggttccgtacagcgagctctggcggtcgaccggcgacgcgaaagcactctccgcgatagccctgtacgagatggccaagagggaaggcctgctgccgcagccgacgccgtcggccaacttgtgaagacctgctagcactttaaaacagtggtggccgtcatgcctgtaaaatggaaggaggaacgtcactcgcgaaaccaaatcatatatatctctatctcttcgtttggtataacgcgcttaagcttgtctgtttgtgttatgtatacatatactaataatttaaaaataaaagtataatcgtgtttaaat

SEQ ID NO: 7069 - DNA, 542 bp, Zea mays
  Clone ID: 700615701_FLI
ctttgtacacaggctgcaacaaaagtaatgatgaaaaagagaaagggaaaaattatcaacattgcatctgtagttggtcttactggcaatgttggccaagctaattatagcgcagccaaggctggagtgattggtttcacaaaaacagttgccagggagtatgcaagcagaaatatcaatgtgaatgctattgcaccagggttcattgcatctgatatgactgccgaacttggagaagagcttgagaagaaaatcttgtcaaccattccgttagggagatatggccaaccagaggaagttgcagggttggtcgagttcctggcccttaaccccgcagctagctatatgactggacaggtgcttacaattgacggagggatggtaatgtaagatttgagttagcttgatgcacttctacttttgctgagcatttaatgttgaacacccttgttgtgcacgggcgattttggacaacaaattagtgttgtctctttctttgtaatactctctggtaataaatctagcatgtggaatggaagttg

SEQ ID NO: 7070 - DNA, 112 bp, Zea mays
  Clone ID: 700615708_FLI
cgctcgagtgccacattgtgcgcagttgtctttgatgtggagaaactggagacggcgattcgtcgtcatgctcacgttccttcggcaataaaaatgcacgtgcacgtgtgcc

SEQ ID NO: 7071 - DNA, 1348 bp, Zea mays
  Clone ID: 700615854_FLI
gataaatgtggggatactgatgattgtgtttcaacttctgaagctgctgaacaagcagcaaaacttccagaagtgaacattaataatcttccagtccctggcgaagttgaattcataaatggtggtcctccgtgtcagggattctctgggatgaatagattcaaccaaagcccatggagtaaagttcagtgtgagatgattctagcattcctctcattcgctgagtatttccgtcccagattctttctgttagaaaatgttcggaactttgtttccttcaacaaagggcagaccttccgtttggcagttgcatctcttctggagatgggataccaggtccggtttggaattctagaagcaggggcttttggtgttgcccagtccaggaaaagggcgtttatttgggctgctgcacctggagagatgcttcctgattggccagagccgatgcatgtgtttgctagccctgagctgaagataacactgcctgatggccaatactatgcagctgcaagaagcactgctggtggagcgcctttccgagcgattactgttagagatacagttggggatctgcctaaagtgggaaatggtgccagcaaactcacgcttgagtatggaggtgagcctgtgtcttggttccagaagaagataagagggaatatgatggtactgaatgatcacatatctaaggagatgaatgagctgaacctaataaggtgtcaacacattccgaaacggccgggttgtgattggcatgacctaccggacgagaaggttaagctgtcaaatgggcagatggctgacctgataccttggtgcctgcccaacacagccaagaggcacaatcagtggaaaggactgtacgggaggctggactgggaaggcaacttccccacatccgtcactgatccccagccaatgggcaaggtcggcatgtgcttccaccctgatcaagacaggatcatcacagtccgggaatgtgctcggtcacagggctttcctgacagctatgaatttgcgggcaacatccagaacaagcaccggcagattggcaatgccgtgcccccgcctcttgcctatgcacttgggaggaagctgaaggaagccgttgacaagcgtcaggaagccagcgcaggcgtgcctgcaccatgagaagttttccttccatcaaaccatgacccatgaagctaagcgctgaggtcgtccttgaggaccagttaattttggttttatcagtcttaatggactcctgaatgtatatgttagagaagtgtcgattgctgattgttaccctgattcagggtagcggttatatctaaaaacttgagaaaatctagtgtactct

SEQ ID NO: 7072 - DNA, 687 bp, Zea mays
  Clone ID: 700615859_FLI
ctttctcactcatcgctcgtggagttgcagccatggctgctccggtcgccgcatactccccggcgctgcgggtccaagtgaaagcagccatggatgcagcgtcgtcgttccgagtattggcatctctcagtttccccgggcaaagagcaagctttccatcgattcggatgcagaagcgctctcaagtgtcctgttcgctggcaaaacaagaaacagttgagaaggtcagcgagatcgtgaagaatcagttagctctacccgaagacaccggagtaacaggagagacaaagtttgtagacattggagccgactcactggacacggttgaaatcgtgatggggcttgaggaagcgttccaaatcagcgtggacgaatcgagcgctcaagagatccagacggtggaggacgctgctgctctcatcgacaagcttatcgcggagaaggacgcttgaaacgctgtccggaggagggatgacgatgggtggttttgatttgagaccatagtgctccttattgcaattattagtcagaaaaaaaattacccagtttcttttctttcttcttcttcttctatcataatatgaaatatgtatgcatatgcatgccttttggtggtttgggattattataataaataaaactgccgccgagagatgagagacggtacccaattctcttcgattcggg

SEQ ID NO: 7073 - DNA, 1098 bp, Zea mays
  Clone ID: 700615917_FLI
ctactggtgatgggacctagtggaagtgggaagacgtcgctgttacgtgctttggccggcctctggactagtggaactggggagatcatataccacgtgagaggttctacgcagcttcaaaaaccaaatccaagttctgataaaccatccagcatgaatttaaagggcgaagaagaatcgttgcaaagttccaagcaaagaagagataatggcatattcttcgtcccacaaaggccgtatatggttctggggacacttcgtcaacagttgctctatcctacgtggactgaagaggttcaacactcaccagataatgatgataaaaactcagatcctcttccttttctgtccgaagtctccacatcagatctggtcggtgccaaatccgaggtgccctcgacagctgaactgatcgaagtccttgaggacgtcaagctgggttacatattgcctcgtttcaacggcttggactctacccatgactgggccagtgttctttcgctgggggagcagcagcgtctcgcgttcgcccggctattacttgctacacccactttggtcctgctggacgagtcgacaagcgcactcgatgaagcaaacgaggctcatctatacagtcagattgaagctgccggcattacctacgtaagcatcggccaccggaaaacacttcacaagttccacaacaaggcgctgtacatttccatgtctgattcgacggacaccaatccacgcaactgggagctaaagcccgcggacaagcttccagctgaggagccatcgcagttcccttcatgataatctcagcatttgtacccctggttgctgcttcctcatttttcgtccgttatttggcccccaatcagaagtatggctcaactgtaatgtaccgccatagtgctgcaagctgaagttggactgtttcaggatgatcgtcaaggttgctgccatgcatgctacgacgacccgggccgccggacatgatagctctcatgtgcactcagaccttagagaacagaacagtatagaatgtacataactcggatgcaagtacttatggtcttggtgttggtaatcgttgatctgtactacgctctt

SEQ ID NO: 7074 - DNA, 1407 bp, Zea mays
  Clone ID: 700615924_FLI
gcttgttgagaactacgctgaattgctggctagtcaaggtcttcttaaaactgcaatggagtatttaaaactgttgggatcagatgaacattcaaatgagctggcaattttgagagatcgaattgcatgttctatggaagagaatgataatgctaggagttatgtttctgaaagcaccgccactccttccctttatggcacaaatcaatcttatacagccccagaccattctcagaatgtttaccagcaggtacctcagccatacaatgtaccaagtaatgcatattcagaagcttacccacaacaacctactggcgcctatggatacaacaacacatatcaacctcaacaaccaacccatatgtttgttccacctagcgcccctgccagctctcagcaacagccaggcccttcgcctgtaccagtgcctcagcaaacagtgaaggcatttactcctgcgaacccagctggtctaaaaaatccgggacaatatcagcaacctaataccctaggttcccagctttatacgggcactgcaaatcaacagtatccttctggaccatctgcttcttatccaagcggacctccaacaacatttcatcagcctgtatcacctgttcaatatcagcctgttgctccaccagtatcttcttttggtccgagcgctcctgtaccagcaacagtccctacccagatgtttccccattctgctgctgctaactcaacttcaaggttcatgccatcgaacaatcaaagctttgctccgaggccaggtctaagtcccgcacagccctcaagtccaacacaggtgcaggcacagccagctcctcctgcaccgcccccgactgtgcagacagctgatacgacaaaagtgtctgctgagttgagacctgttattggtacactaactagactattcgatgagacgtccaaagctctgggaggatcacaagctactcaagcaaaaaagcgtgaaattgaggacaattcaaggaaaataggggcattgttttcaaaactaaatagtgatgacatatctccaaacgtttcatcaaaactcaggcagttgtgcagtgcaattgatgctagcgattttgccactgcgatgcacctccaggtactcttgacaacaagtgactgggacgagtgcaacttctggctcgcggcattgaagcggatgatcaagacaaggcagaatttcagaatgtaaaccttgtggcctttttctgcagccagttctgtacacacctttttctgctgcttgccagaaatgatagctgtagcagttcagagagtttgcctgcacaggggtcttatcatgctgctttgttctcggctcttgattctgcctaagcgctttggtacctcagtgctgttatacattttgataatagttttttgttttcg

SEQ ID NO: 7075 - DNA, 974 bp, Zea mays
  Clone ID: 700615955_FLI
ctctcaccggtggaaggaagtggaagtagaaggctggaagcggaagcattcgatttccatcgtggggcatggcggcggaggggaagaggaagggcgtcccggcgctagggtggtggctgatgctagtcggctccctccgcctcgcctccgtctggttcggcttcttcgacatctgggcgctccgcgtcgccgtcttctcgcagacggagatgactgatgttcatggccgtacatttggtgtctggactcttttgacctgcaccctgtgcttcctttgcgcactgaacctggaaaataggcctttgtacctggccaccttcctatcattcatctacgctcttggtcatttcctcacggaatacttgatataccacaccatgcctgcagcaaatctgagcacagttggcttctttgcaggaacgtcgataatatggatgcttctgcagtggaattctcatgggaacccccggggttcctatgctgggaagcagtcatgactgatgcttgggttgttcgcttcacttgatgtggtctgggcccgctaggggaagaaggatggttgaagaaagctcgctggaaagccgcctgatgatggctctgcaccatttgtacttcagttttcaacttttcatcatgttatttcattgcatgagacgttcgtgtccgactgagcagggagatttccgaacagttatgccactggttgggaatgagaatttttgaacactgaactccggctgaatcatgtagtcaggagctgtaatagctttcaggcgtacctgagaaacagattgccattcagatagtcaccggttgggggctgagatgccaataaggcgggtatagaaaagaggtgggcgtatcatgtgctttcgttgcatctgtacgagccaaagggtgtatgtacttactctgaaacttttgttgtactgatgctgcatcttttgtccttgaaataaaccgtacgttagtac

SEQ ID NO: 7076 - DNA, 1375 bp, Zea mays
  Clone ID: 700615986_FLI
acgaaatttacttcttgagaaagccaaggcaactgtctgtgaaaaattgcatgaattaaacatcacaccatcttcacgagctgcagatagaagaggatctgaaggaaagctgtatccttgtgacaacaacataaaggtcaacggtgtcctctctgacaaacctggcaagggagtcaagctatgcaactcaagaagcatggaaatccaagtgcctgctaccgatgacaaaaatccagagcaacgccgtgtgcctgtgtccatcgatgtcccagaccctgacttccatgatttcgataaagaccgaacggagaaggcttttgatactgatcaagtatgggctacctatgactgcgaggacggcatgccccgcctatatgtaatggttcagaaagttctttcaacgaggcccttccggatccgcatgagctttctcaactcgaagtcaaatatcgaactggcgcctataaactgggtcgcctctggtttccaaaagacatgtggtgacttcagggttgggagatatcaggtgagcgaaacggtgaacatattttcacatagagtgaggtggactaaaggtccccgtggcatcatcaggatcgttccccagaaaggggacacgtgggccttgtaccgtaactggtcccccgactggaacgagctgacgcctgatgacgtgatatacaagtacgagatagtggaagtcgctgatgatttcactgaggagcgagggctgactgtcatcccgttgctgaaggttgccggattcaaagccgtcttccacagacacgtggatcccgaggaggtgaggaggataccaaaggaagagctgttccggttctcgcaccgggttccttctcgtctcctgacgggcgaagagggcagcaatgccccgaaaggctgccatgagctggaccctgctgccactccagtggaccttctcaaggttatcacggagcacaaggaagacgcggtggcgcagagtcctaaataggagtgagcgactccgataacagcgaagataaggtagctggatgtctgagtgaccagatccccacttggttaatgacagcgtgccagcacatgatggtgtctaaagctctactacgccatcttattttcggctgatggcttggacaacacttccagggcaagcagcctgtgtgtgtgtgtgacggacttctgaccttgttaattcttaggcattcctaacatttgattctatcactacacaagccaaccgccacgtagattaaatggccattgggaggaggccggccgcgcacggcaccgagatgagatgaggaggttagtcacggaggtagggagggtgaagatgttacttgtttgtgttgctcactctgtaatgtaggaggca

SEQ ID NO: 7077 - DNA, 1512 bp, Zea mays
  Clone ID: 700615993_FLI
ctaggccatggccatgtccgcttcctcctcctcgcgcgccctcctccgccggatcggcggcgcgctcctccgccgctccttctcctcctcatccgccgccgccgccgcagggtaccacgtcgcgggcgggcccagctacatgcgcggcgccgtcttctgggagcccggccgcccgctcacgctcgaggagttccgcatgccgcgccccaaggccggcgagctcctcatcaagaccaaagcctgcggggtctgccactccgatctccatgtcctcaaaggcgagctccctttctccacgccctgtgtcgtgggccatgagatcactggagaggtggttgaccatggcacgcacactcctgctgagatcatcaacaggttcccagtcggaagtcacgtcgtcggcgccttcataatgccatgtgggaactgcttctactgcgttaagggccaagaagatctgtgcgagtctttcttcgcgtataatcgtgccaaggggacactctatgatggcgagacacggctgtttctaagaggcaatgggaaaccggtgtacatgtatagtatgggagggcttgcagagtattgtgttgtcccagccaatgcgctagcagttctccctgactcactgccatacacagaatcagcaattttaggatgtgcagtgtttaccgcgtatggtgccctgaggcatgctgctgaaatgcggcctggtgattcggtagctgtgatcggagttggaggggttgggtcaagctgtttacagatagcaaaagcctttggagcttcccaagtcattgcagtggatgtccttgatgagaagctccagaacgctacaacacttggagcaacccacactgtaaatgcagcaaaagctgatgcagttgaaaggataaaggaaattactgatggtaggggtgtagatgtggctatagaggcacttggtaaggcgttaacattttcccagtgcgccaagagtgtgcgtgatggaggcaaagctgttatgatcgggcttgctgcaacgaacgtaatgggagaggttgatataacccgtcttgtccgacgacaggtgaaaatcattggctcatatggcgcaagggccaggcaagaccttcctcagatagtgaagctcgcggagagtggtgccttcaatctccagaacaccatatcaaggaaatgcaaattcgaggaggcgaatggcgcctatgaggatctcaatcagggcaagatcgtaggacgagctgtggttgagatcatgtagtgatgacggacaaggtaatcaatcctgtggttccaagtctgggtcacacaacaataaagttttgcgtgctctttcacagcattgtcaaaatctgtagatgaccaaactgcattgtgtgtgtgtgtgacagtgtgttgctggaattaacatttgcccttaaattatgtctgtacacgcccaagggctgacctaacaggattggactcctatagacaccagcccttgggtgtgtacaaagaaggcacaagttgtct

SEQ ID NO: 7078 - DNA, 741 bp, Zea mays
  Clone ID: 700616114_FLI
gttctacgtccgagtcgtcgcatcaggtcccctcgattcgccggcggcgccaccaaccaagctcatacatctgaattgactagtcaaactcagtgatctctttggggactaatcaaactcaagaactaagtttcatgtctgatctcgacgtccagcttccatctgcttttgatccgtttgcagaggcaaatgctgaggactccagtgctggtgctggatcaaaggactatgtgcacgtgcgtattcagcagcgcaacggaaggaagagtctgacaactgttcagggcttgaagaaagagtacagctacaacaagatcctcaaggatctcaaaaaagagttctgctgcaatggtactgtagtccaggatccagagctaggccaggtcattcaactgcaaggtgatcagcgtaaaaatgtcgctacttttctagtccaggccggaatcgtgaaaaaagatagcatcaagattcacggattttagactgcaaattttgagtgcttgtgtgtgcctatcatatggtaccatatgataccaggtattgaagcttcggaagcttgttggccttcgtaacatcagtagtcgttattcatctgaatatgtgtcattatttgatttgataagactggtattgatgcaagttgtccttgcagtatgttttgtaagtgttacctgcatgaaagtatcgtttgtctggggaactgtctactactgatattgaataacaagagagattgctgtt

SEQ ID NO: 7079 - DNA, 845 bp, Zea mays
  Clone ID: 700616222_FLI
cgaccccgcgccacccccgcctgcctcccccggcaccgatcgggtttgatcgatggcgtcgaagaggatcctgaaggagttgaaggacctgcagaaggacccgcccacctcctgcagcgcaggtcctgttggtgaggacatgttccattggcaagcgaccatcatggggccttcggacagcccatttgcaggtggggtattcttggtgaacattcacttcccaccggattaccctttcaagccaccaaaggtgtctttccgcaccaaggttttccacccgaacatcaacagcaacggcagcatttgccttgacattcttaaggaacagtggagtcctgctttaactatctcaaaggttctcctgtcaatctgctcactgctcacggacccaaaccctgatgatcctcttgtccctgagattgctcacatgtacaagaccgacagggccaagtatgagtccaccgcacgctcctggacacagaagtatgccatgggctagaagcaaggctaaaagctggccaaactggtgaatgtgccggaccccaaatcgttatcacctaaataaccagtcaagtcgcaagtatgaatggacttttgaggaccattgtgccctgttgaactcatgtattaccttgtgaagtccgttgtgtctggtttctacctgaccgtttcgttatctgatgctgtttctttaatatctgatgctgcttcattaaccatacttctatatggtttgtggtgttgctgtttgtttaatctgtcagctgcttgacgtttcactgaaagaaagacgttccagtgagcgcagaaaaagttggtgattcggtgagaaacgttacaacctt

SEQ ID NO: 7080 - DNA, 794 bp, Zea mays
  Clone ID: 700616247_FLI
cggaactttgccgcttcagcggccagaagatttatcctgggaaaggcattagatttatccgtgctgattctcaggtcttcctttttgccaactcgaaatgcaagcgctacttccacaaccgcctgaaacctgcaaagcttacctggacagcaatgtacaggaagcagcacaagaaggatatccatgctgaagcagtaaagaagaggcgccgcgccaccaagaagccatactccaggtcaattgtgggtgcttccttggaagtaatccagaagaagagagctgagaagccagaggtccgcgatgctgctagagaagctgctcttcgtgagatcaaggagcgcatcaagaagaccaaggatgagaagaaagcgaagaaggcggaggtgagcaagtcccagaagacgcagacaaagggtgcggtccagaagggttccaagggccccaagttgggcggcggtggtgggaagcgctgaaagaacttaaggcctgtttggaggctgacgtcgagcgccacaccccgcctaagatgcggcggccaatttggccgccacaactgcggcgcgtggcgtgtggcgcggcgtggtgtttgcggcagcgatccaaacacgcccttagtgtcgtttctcgacattgcagtcgttccttagccaaagccactttcgtagaacctgtgttgaatttgcaagacttattcaagcgttgcttgtgcgtgctaaataccatggcaagagaacggatttatatttatgcctgaaaaaaatgaccgttcatattcttaataactcatcttggat

SEQ ID NO: 7081 - DNA, 1898 bp, Zea mays
  Clone ID: 700616266_FLI
gcagccacagcagcctccttcctcctctcactctcgctcgcgctgcgctcgctacctcgcttcgcattccattcgaaaagaggggaggaaaggcaagatgttcatcgagagcttccgcgtcgagagcccccacgtgcggtacggcccgatggagatcgagtcggagtaccggtacgacacgacggagctggtacacgagggcaaggacggcgcctcacgctgggtcgtccgccccaagtccgtcaagtacaacttccggaccagaaccgccgtccccaagctcggggtgatgcttgtggggtggggaggcaacaacgggtccacgctgacggctggggtcattgccaacagggaggggatctcatgggcgaccaaggacaaggtgcagcaagccaactactacggctccctcacccaggcctccaccatcagagtcggcagctacaacggggaggagatctatgcgccgttcaagagcctccttcccatagtgaacccagacgacattgtgttcggaggctgggacattagcaacatgaacctggccgactccatgaccagggccaaggtgctggatattgacctgcagaagcagctcaggccctacatggagtccatggtgccacttcccggtatctatgatccggacttcatcgcggctaaccagggctctcgcgccaacagtgtcatcaagggcaccaagaaagaacaggtggagcagatcatcaaggatatcagggagtttaaggagaagaacaaagtggacaagatagttgtgttgtggactgcaaacactgaaaggtatagcaatgtgtgcgctggtctcaacgacacgatggagaatctactggcatctgtggacaagaacgaggcggaggtatcaccatcaacactatatgccattgcctgtgtcatggagggggtgccgttcatcaatgggagcccccagaacacctttgtgcctgggctgattgatcttgctataaaaaacaactgcttgattggtggtgacgacttcaagagtggacagaccaagatgaaatctgtcttggtcgatttccttgttggtgctggaataaagcccacctcaatcgtgagctacaaccacttgggaaacaacgatggcatgaacctgtctgcccctcaaacattcaggtccaaggagatctccaagagcaacgtggtggatgacatggtctcgagcaatgccatcctctatgagcccggcgagcatcccgatcatgtcgttgtcatcaagtatgtgccgtacgtgggagacagcaagagggctatggacgagtacacctcagagatcttcatgggcggcaagaacaccatcgtgctgcacaacacctgtgaggactcgctcctcgccgcacctatcatccttgatctggtgctcttggctgagctcagcaccaggatccagctgaaagctgagggagaggacaaattccactccttccacccggtggccaccatcctgagctacctcaccaaggcacccctggttccccctggcacaccggtggtgaacgctctggccaagcagagggcgatgctggagaacatcatgagggcctgcgttgggctggccccagagaacaacatgatcctggagtacaagtgagccaagtggcgtgccctgcagcgcgaggttagctgctggaagggaactagaaaggcgagattagctgtgggattgtgttgggcttgtcgtgttttcttttgcgttctttcctagtcattgctgttgcgcttttgtatttgtcggacccgtaactaccagggctctgctattagcggcacggagcctgtaattgtattgtatgataatgtgatcgagggtgctacttcccctcggcattcctagtgttggttaaaagtcgttcgacagc

SEQ ID NO: 7082 - DNA, 1619 bp, Zea mays
  Clone ID: 700616410_FLI
gtggaaaccctactcgtccccttccgcagccgtcgccgcccaattcccccacccaattcccactctccgctcgacagatccatacatgatgggagaggccaaggagaacgacgtttatgaggaggagctcctggactacgaggaggacgacgacaagacggtcgatggctccgctgctaagcccaccggagaggtcgcaaagaagggctacgtcgggatccacagttccggtttcagagacttcctgctcaagccagagctgctccgtgctatccaggattgtggttttgagcatccttccgaagtgcaacacgagtgtatccctcaagccattcttggaatggatgtcatctgtcaagctaaatctgggatggggaaaactgctgtttttgtcctttcatccctccaacaaattgaccctgttgcgggtcaggtagcagcacttgtactgtgccacacaagggaactggcttatcagatatgccacgaatttgagaggttcagcaaatatcttactgaagttaaagttgctgtcttctatggaggtgttcacatcaggaagcataaagatttgttgaagaatgaatgccctcatattgtggttggcacgcctggtaggatacttgctcttgccagggataaggatctctccttgaagaatgtgaggcacttcattcttgatgaatgtgacaaaatgctggaatcacttgacatgcggagagatgttcaggagatcttcaaaatgactcctcatgataagcaagtcatgatgttttcagcaacgctcagcaaggagatccgtcctgtatgcaagaaatttatgcaagatccgatggaaatatatgttgatgatgaggcaaagttgaccctccatggtcttgtacagcactatataaaacttagcgaggcagagaagaaccggaaactgaatgatctcttggacgctcttgatttcaaccaagttgtgatattcgtgaagagtgttagcagagctgccgaactgaataagttactttgtgaatgcaacttcccatcaatctgcattcattctggaatgactcaggaagaaaggctaacaagatataagaacttcaaggaaggccacaagagaattcttgtggctacagatttagttggcaggggcattgacattgagcgtgtcaacattgtgataaactatgacatgccagactcagctgatacttatttgcacagggttggaagggctggacgttttggcacgaagggacttgcaatcacctttgtttcctctgcttcggattctgatgttcttaaccaggtgcaagaaaggtttgaggtagacataaaggaactgcctgagcaaattgacacctcgacctacatgccatcataaatgggaaggacaactgagaagagaggaggataggggagtgagcagccgtctggagatggttacctttgaactatccgatctggaggatttgatttgcctcctttgtgtactttaaaaagggcagccaggatgatgatctgtattttaagacaatgctgtctgtttgggtttaggattttgctttgtcgaaaactagcacacttattgtactactgagcagcatatttgttttcatccctgggtt

SEQ ID NO: 7083 - DNA, 785 bp, Zea mays
  Clone ID: 700616432_FLI
gctattgcaaattctagaaggaagacaaagatagtatgcaccataggtccctcaaccaacactcgtgagatgatttggaagcttgcagagactggaatgaatgtagcacgccttaatatgtcccatggtgaccaccagtcacaccagaaggttattgatttggtcaaggagtacaatgcacagaacactgatggaaatgttattgccatcatgctggacactaagggtcctgaagttagaagtggggatgttcctgagccactatcgtccgtcgtctacactatttgcgtttacaaacgaggaacgagtgaagcaacggctggcactctaccagggggtcatccctattcacatgcagttctctgacgacgcagaagaaactttctccagagcaattagcagcttgctgaaagcacaatatgtgaagaagggagactacgtcactcttgttcagagcggagtgacttcaatctggagagaggaatccactcacaacatccaagtgaggagagctcaggtctgatgtgaatcggtcgccggagaagttttgatagcgccgctagaagtgttatcatcatcatcaccattatatgcgagtaattttaatgtttttaccaggagattgctacgtcgagttgtatgttgtgtcgaattcacgtgtagactctggacctttaactctgtattcgttcattttcacttgtttcacactggagtgctataagttcacgcttactgcctttgcttttgctttcttgtgaaacttgattttagtttgttgttac

SEQ ID NO: 7084 - DNA, 1604 bp, Zea mays
  Clone ID: 700616516_FLI
gaagcataagcatataattaacattaaactggagagcaactggagacaggagtgtacaagtacaactggtactacatgccaaagcactacgtgttgagcgaatctagcttcggaacgttacagtcaactagccagccaaccttaaacctctggcacattataagctgcatctgcagctttggcggctatgatacacatgatacatgagaatctctaaagagttaagatgaacctacaactgtcctgctatcctacttatccactctgaaagctataagggcagagctagtcttgattgtcataatacccattctctccaatctgtatttttttttacaaagcaaactggacagggcccatctccatattgttcatgtcaggcagttcccaagcacccagaaagtgcaacagatggtcccgcagtggctgcaacggaactagtcgctggatcgactgggcttggggtggcactgtaatctcatcttcttcatcagttggatctaaattcaagtcaatgttcctgagcaaaccccttggagtgggttcagttgcatctaagacctcatcaaatggactatgccatcaaatgagtggttgaactgctccttgatgtagtagcctcttttgcttcagttgcatcttaagacctcatcggctatctccacttttaggctactagcttgctagattggttctccacgaattgtttatgaactatgacaacacccgctaagttccacacgtccgcggcagcctctcacacaagtacacaacccctcgcacaacctgtcattgcctgtatggttttctgctttctgcacacaagaaacttaatcagcaaaaagagctcaaaagtcatagggcctgtttggttcctttagtctatggactaaagtttagtcccaaccctgtttagttttagggactaaaaatattcaaaacgcattaaatgacttataagaagaccaaaatgcctcttaacattgttcaaaagggacctcaaaccaaaagggaccttaggctcaatagaaaacgggattatcatagccataaggagattgataaaattgttcaaaacatgccttttgacaaagctccagtctttaatggatttaatggaaagtttctgagacacatcatcaaaattgatttttataaactttgtcatgatttttatgatggtaacattaatctggatggaattaacacctctttcatcgctctcatcccaaaggtgaacaaccctgttagggtgaatgattttaggccaatctctcttctcagtatagccatcaaattaatcacaaagctattggtgaataggctgaagcctgtgattcaacgaattgtgcacaaaaatcaatatgattttattaaaaacagaaccatacaggattgtgtcttgcttggtgctatgaatacttacatcagtgccatctttctagaaaggaagtggttgttctcaaattttgataaagcttttaatacagtggagcatagtgtcattattgctatactcaatcagttgggttttcccgtcaggtggattcgttgggtcagttcaaccttaaattctgaatcctctactgttcttttaaatggtg

SEQ ID NO: 7085 - DNA, 1262 bp, Zea mays
  Clone ID: 700616601_FLI
caccacctcgcctgcgatcttcgtagcctccgtcgcgtcgagcatcgatcatgtcggcctactgcggaaagtacaaggatgagctcatcaagaatgctgcctacattggcacccccggcaagggtatccttgctgctgatgagtccactggcaccattggcaagcgcctttccagcatcaatgtcgagaacgttgaggagaaccgccgtgccctccgtgagctcctattctgctgccctggtgctctccagtacatcagcggtgtgatcctcttcgaggagaccctgtaccagaagaccaaggatggcaagccttttgttgatgtcctcaaggagggaggcgtcctccctggcatcaaggttgacaagggcaccattgaggttgttggcactgataaggagaccaccacccaaggccatgacgaccttggcaagcgttgcgccaagtactacgaggcaggtgcccgctttgccaagtggcgcgctgttctcaagattggccctaatgagccatcacagcttgccatcgacctgaacgctcagggtctggctcgctatgccatcatctgccaggagaatggtctggtgccaattgttgagcctgagatccttgttgatggccctcatgacattgatcgctgcgcttacgtcactgagaccgtccttgctgcctgctacaaggcgctcaacgagcaccatgtcctcctggagggtaccctcctgaagcccaacatggtgactccaggctccgactccaagaaggtgacccctgaggtgattgctgagtacaccgtccgtaccctccagaggaccgtccctgctgctgtgcctgctgttgtcttcctctctggtggacagagcgaggaggaggccacccgcaacctcaatgccatgaacaagctcagcaccaagaagccgtggtccctgtctttctccttcggccgtgccctccaggcgagcaccctcaaggcctgggctggcaaggtggagaacctggagaaggctagagctgccttcctcgccaggtgcaaggccaactctgaggctaccctcggcacctacaagggtgatgctgccgccgacaccgagagcctccacgtcaaggactacaagtactgagttgcttctctttgcgtgcccgttttggaactcctgcctacgagctaggttgcggagtgtggtttgctcgttagagcttattttcggacatccaaaaaacatgcttcctatgtgggatgatggttatctttatatttgtatgtt

SEQ ID NO: 7086 - DNA, 1059 bp, Zea mays
  Clone ID: 700616639_FLI
gagcctccgagggaagaaaggcccacacaggacactcctccttcgtctttctccttcctcgccgctctctgctgcattcgcgaacacgcatcgaccctacgactacgagtagcgagagaggattgatggcggcgcagctgcggtacatgataagccattattttggtaccccacctagcaaggaggtgatccaagatctgtactacgccttgaggacaaagggaggtttgacccccaaggaggaggagacgctcctggcttgcaatttacttcctggtgtttacttcatcgtgggttcagtactgggcactttcgcgatgttgttgggttcccacaaaggactcaaattgcttgggcgtccaactaattctccattaagatctttgactgtttatggctacggttttattgtcggaaaggcctgtgctaatgaaacctggcatcaattgcctgaactgcttttagacagggaagaaggacgcatgaagacagagctagctaaaataatactcaataagcatagtgatgacatatacctggttgaagttgtgagaagacacttttttgtcgagcatctgttcgatgatctgcatcaaggtcaaccacttttcaggtggcgcctacgacatacgtatgttgacagcacctttgtagaaagaacgaaggaagttgaagccagcaactctgatgatgtggctagatcaatttcaagagagacaattacaaacactacaccatttggagaaatgatggaggattcactggcttgtatactgggttctcccggatgcaacatggaaagcaacaatcccccagaaaagacagctaatgtcctgacgcgaagtgatctgcgagctcgcagaagaggtcgcaggcatcatcggcatgctgatgactagtttcctattgtgaatgttgggtagaagtgctgtggaataccctagacattaccattttatttgggcctcatgccccacagttaatctgctgtgcctggtcaaaatttctaggctggacaagagctgcttttgtaagctgggcaatcctgtatcgtgatgt

SEQ ID NO: 7087 - DNA, 1133 bp, Zea mays
  Clone ID: 700616651_FLI
aagctttgcaacagtagcaacctgcctcatccatggcatatgtggaagcttgatagtgtccatgagttgttgaaacgtgattaccagctccgccctgttgcaattgaaattttcagcatggatggttgcaatgagcttctagttttccacaaaaaggagagagaggaagttttcaaaaatttgattgccatgaatctcccacggaatagcatgttggacacaaccatatcagcatcctctaaacaggagagtggtgaggggagccgtctttttaaagtcatggcaaaatcattttctaaaagatggcaaagtggagaaattacgaacttccaatatctcatgcatctaaatacacttgctggtcgagggtatagtgatctcacacagtacccagtatttccatgggttctcgcagattatgagagcgatgttttagatctgaggagtccacagacatttcgcaggcttgataaacccatgggatgccaaacggaggaaggtgaagaggaattctgcaagagatatgatagctgggatgaccctgatgtaccaaagttccattatggctctcattattcaagtgctggaattgtccttttctatctcttaaggttgcctccttttagcacagaaaatcagaaattgcagggtggacaatttgaccatgcagaccggttattcaacagtgtgaaggatacatgggtaagtgctgcaggcaaaagtaacacatcagatgtgaaagaactaattcctgagttctattatttgcctgaatttttggagaaccgttttaatctggatctgggcgagaaacaatcaggagagaaggttggtgatgttgttttaccaccttgggctaaaggcagcgccagagagttcatcaggaagcatcgggaagcactggaatcggattatgtatctgagaatctgcatcattggattgatcttatttttggatataagcagagaggaaaggtattaagcatctctccgttgcattttatctctagtagtgttgttgtaaggatcatagcacaaatatgtttcggcttgaaataaggatagtgtctacttttcactcgtgaacatgcaggatttgtgagcacaaagtaagctattattgtttttttatt

SEQ ID NO: 7088 - DNA, 555 bp, Zea mays
  Clone ID: 700616676_FLI
caaggtcacagcggcgaacctctcggctatcatgtctggccgcggcaagggcgggaagggtctgggcaagggcggcgccaagcgccaccgcaaggtgctgcgcgacaacatccagggcatcaccaagccggcgattcgcaggttggcgaggaggggcggcgtcaagcgcatctccgggctcatctacgaggagacccgcggcgtgctcaagatcttcctcgagaacgtcatccgcgacgccgtcacctacaccgagcacgcccgccgcaagactgtcaccgccatggacgttgtctacgcgctcaagcgtcagggccgcaccctctacggtttcggcggctaggtcgccctctctcccggtggcgaattacgtggtggcgatggcggtcgtgttgtgttcttggtctagtgttgtctgtgttgtctttatcggtgctgttttctgtggtggttgtgctgcatcgttctagtttctagttcatgtgctgtaatatctcgctgctgtaatcaatggaatggcctcgtttccaggctcaagatatatcgtccttttgt

SEQ ID NO: 7089 - DNA, 486 bp, Zea mays
  Clone ID: 700616705_FLI
cttccatcgcgccagtgttttgagaagctggtcggcgctcctagatcccttcgcctctctcgcgttcgaggctaggtagccgccaccatgagccgctcggggcagcctccggatctcaagaagtacatggacaagaagcttcagattaagctgaatgcaaaccgtgttgttattggcacacttcggggattcgaccagttcatgaatctggtgatcgacaacattgtggaggtcaatggaaatgacaagacagatattggaatggtggttatcaggggaaacagtgttgtcatgatcgaggcactggagccagttgccaagtcgcagtgaatccttatttttcagctgatatagtcgcagcatgaaaactgatgtaaatgctatgagtgaaccctgttgtacttcggactcgtgcttttgcacagcaacataactcggctaccagcacccctgtttcaatggtgacttcattactgccttggcgct

SEQ ID NO: 7090 - DNA, 832 bp, Zea mays
  Clone ID: 700616764_FLI
cactgacctttttggctacagtagagcttaatatgcaagatggcatggaagggaatcatatgttaaaaccaatgaaaaagttctcccggttttttggagttttgtttgttccatttacaataggctttccaaaggcaattttcttttactgggtcacatcaaactttttctcacttgtttacggcgctgttctccggaatccggctgtaagactcttcttaaatcttcctcgcttggaatctcagcccacaactgcagaagtccagcccttaaacctatcgggcggaccagagccaagtcctggagtcgattctcctatcacagataaggaaactgagcagtcgagttctgtgctaagtcctggagtcgattctcctatagcagacaaggaatgtgagcagtcgagtcctgcggtgagtcctgaagtcaattctcctatggtggacaaggaaagtgagcagtcgagttctgtgttatgtgaccgtatcagagatcttgagatcagggctaaagcaacgggtgaatctcgagagtaaattcgtgatttgtccacatggaagtaagcaagcacatctcctttgggggtttctggtacttttttttttttgttgggagcaaaggatacccagtagcgaggtataattttgaagagtccgcggtttttcgaaatataacggcccaccatgtttccgtgaataaattggtgtagtatattggcttgtaaaatcgttgcacggtatgatataaccttgtactactagctaacattagccatgatgttccttggattaagcatattgttgctattgagcggcacacgacatgtttgtct

SEQ ID NO: 7091 - DNA, 759 bp, Zea mays
  Clone ID: 700616768_FLI
cctccgcccgcccgcgacccaaaagccgaaagcccgaaaccagaggcgggtagggttctagctgcaggcgacggccatggccgcctccgccgccgccccggcgctgcttcgacgcctcttctgcagctctattccagcctcctcctccgtactgcgcgctaccttttgctcctccgccggcttcggctcgtcttctccgtcctccatattcggcgacgccaccgaggtcgccaacgtgccaccgctcaccacgcccaacctcttcgtcagtggcctttcaaggttaacgacagatgagaagctccagggtgcctttgctcctttcgggaggctccttgaagcaaaagtggtgacggatagagtttctgggaggtcaaagggtttcggtttcgtgagatatgccaccatagaagaggccgagagagcgcggcaggagatgaacgccaagttcctggatggatgggtcatcttcgttgaccctgccaagccaaggcagccaaagcccgctcctcagcaggacactggttcatcgcatgctggcttcacgacgaacaagactgtaggatggtgcggctaggctcattgatctgtcgcgatatttcacggcacaaaacttggattgcaggggtggatctaggggtgttcgtcacccggataaaatttataaattctttagaaaaacagttaaagttcaagaaaatttgtatcatgtagcaaacctgaccttggtacccgataatattttgggttagattcgcc

SEQ ID NO: 7092 - DNA, 681 bp, Zea mays
  Clone ID: 700616890_FLI
agccccttaaccctcgttcctctagccgtctcgcgcagccacagcctccatttctcctccgacggcggtgcggctagctcaaccatggcggactccaaggccacctcggcggtcaccctccgcactcgcaagttcatgaccaaccgcctgctggcccgcaaacaatttgtgcttgaggttatccaccccggccgcgccaacgtctccaaggcggagttgaaggagaggcttgccaagatgtacgaggtgaaggaccccaacaccatcttcgtcttcaagttccgcacccacttcggtggaggcaagtccactggcttcggcctcatctacgataacctcgagtctgccaagaagttcgagcccaaataccgcctcatcaggaatggtcttgctactaaggttgagaagtcccgcaagcaaatgaaagagcggaagaacagggccaagaagatccgtggtgtcaagaagaccaaggctggtgacgccaagaagaagtaaacagtcatttatatttctgtattactgtcctgaactctgggtggtcgtctagttgcaatgtcataattatggtcgtgttaggttttgttccgcactcagcagtaagtgaagttttgtaattcctggatgtgaacctacccggattggctgtagcatgttgtgagatgagaaggctattttgtc

SEQ ID NO: 7093 - DNA, 1253 bp, Zea mays
  Clone ID: 700616895_FLI
attagatgaagaaatgtcggcagacccttctgttttcttgatgggagaagaggttggcgagtaccaaggtgcatacaagatatccaagggtttgcttgacaagtatggccccgatagggttctcgatactccgatcactgaggcgggcttcactggcattggtgttggtgccgcttaccatggtcttcgacctattgtagagttcatgacatttaacttttcgatgcaggcaattgatcacataattaattcagctgccaagtcgaactacatgtctgctgggcagatatctgttcctattgtctttaggggtccaaatggtgctgctgctggagttggtgcccaacactcacagtgctatgcagcttggtatgcacatgttcccggattgaaagttctagctccatattctgcagaagatgctcgaggtttgctgaaagcagcaatcagggatccagatcctgttgtgttccttgaaaatgaacttctttatggtgaatcatttcctgtatctgctgaggtacttgattctagcttctgccttccgattggaaaggctaagatagagcgacaagggaaagatgtcactatcactgcattctccaaaatggtgggatatgcccttcaggccgctgatatactggccaaggaaggtatcagtgccgaggtaatcaatcttcgctcaattagaccgctggatagagctactattaatgcatctgtgaggaaaaccaatagattggtaaccgtagaagaaggcttccctcaacatgggattggtgcggaaatatgcatgtctgttgtagaggacagctttgagtatcttgatgcaccagtcgagaggattgctggagctgatgtgcccatgccgtacgctgccaaccttgagaggatggctgttccacaggtcgatgacatcgtccgggcagccaagcgtgcttgctacagggcagcagtaccgatggcagcaaccgcctagtccagcagaaccctgcatgttgcatttctttgtctaattttaatgtccgtgctgcagaaagacgtgtcacataatggtgtgacgagtacccactgccgctgcaactcaactatagcatgagctgagtttttgtagagccaccgagaggtgttcagtactccagttccagttccgcttatcttcgccgccgcagccggaaggctgcgcatgactctgcgtctgttttatggttcacgaatgattgcagatttgcagcagagcctctggagatgag

SEQ ID NO: 7094 - DNA, 1105 bp, Zea mays
  Clone ID: 700617007_FLI
cctccatcggcctccgatctctccacgagcctccgctccaatccgaggatccgcggcggcgggcagtggtcggccggcgatggcgcaccgagtggacaacgagtacgactacctcttcaagatcgtgctcatcggcgactccggcgtcggcaagtccaacatcctttcccggttcacccgcaacgagttctgcctcgagtccaagtccaccatcggcgtcgagttcgccacccgcaccctccagattgaagggaaaaccatcaaagctcaaatatgggatactgcggggcaagagaggtaccgtgcaatcacaagtgcttactacagaggagccgtgggtgcacttctagtctacgacatcacgaagaagcagacatttgaaaacatacagaggtggctccgcgagctccgtgaccacgcggactccaacatcgtgatcatgatggtcggcaacaagtccgacctgaaccacctgaggtcggttccagaggaagatgggcaggcgttagcggagaaggaaggcctatccttcctcgagacatccgccctcgaagcccttaacgtcgagaaggcgtttcagaccgtcctctccgacatccatcagatcataagcaagaaggcgcttgcagcccaggaggcagcaggcagtggacctccaggtcaaggaaccaccatcaacgttgcggattcgtctgccaacacgaagggagggtgctgctcttcctaggtgcagacaaagacatgctgctgctgctgctgctgctgctgctgctgctgcaaagaagagagagagagaaacctcatggatcgtacgatactttaggtgttatgtaggtgacgactccttttggcctgtaactccggtgggttgtaatcacagttcatacttgtgcaaagaaatcctcctctcaggtagatatggcgtgtagtttttgaaattttggtagagagcgatggttggcagacttgcgtggagcccagcttggtgttttccttcagtgttctatcttaagtagccctctgctggaaaaaaaggacccagatatttcttgtatttgtactcgagtttgcggtgttaccagatatactttgattcctgtgctag

SEQ ID NO: 7095 - DNA, 1587 bp, Zea mays
  Clone ID: 700617015_FLI
cgacgaggtgtccaggctcctccgcggcatccgggactaccgcgtggcggtcctggaggcgaacccgcgctcgttcgtggtgcccagccacaccgacgcgcactgcatctgctacgtggcggaaggcgagggagtggtgacgacgatcgagaacggcgagaggcggtcatacaccatcaagcaaggccacgtcttcgtggcgccggccggggcggtcacctacctggccaacaccgacggccggaagaaactggtcatcgccaagatcctccataccatctccgtgcctggcgagttccagttcttcttcggccccggcgggaggaacccggaatcgttcctgtcgagcttcagcaagagcatccagagagctgcatacaagacctcgagcgaccgtctggagaggctgttcgggaggcatgggcaggacaaggggatcatcgtgcgcgccacggaggagcagacccgcgagctgcggcgccacgcctcggagggcggccacggcccgcactggcccctgccgccgttcggcgagtcgcgcggcccctacagcctcctggaccagcggcccagcatcgccaaccagcacgggcagctctacgaggccgacgcgcgcagcttccacgacctcgccgagcacgacgtcagcgtctccttcgccaacatcaccgcggggtccatgagcgcgccattgttcaacacccgttcgttcaagatcgcctacgtgccgaacggcaagggctacgccgagatcgtgtgcccgcaccgccagtcgcagggcggcgagagcgagcgcgagcgcgacaagggcaggaggagcgaagaagaagaagaagaatcgtctgaggagcaggaggaggccgggcaggggtaccacaccatccgggcgcggctgtcaccgggcacggcgttcgtggtgcccgcgggccacccgttcgtcgcggtggcgtcccgggacagcaacctccagatcgtgtgcttcgaggtccacgccgacaggaacgagaaggtgttcctggccggcgccgacaacgtgctgcagaagctcgaccgggtcgccaaggcgctgtcattcgcctccaaggcggaggaggtggacgaggtgctcggctcgcggcgcgagaaggggttccttcctggccccaaggagagcggcggccacgaggagcgggagcaagaggaggaggaggaacgcgaagaacgccacggcggccgtggggagagggaacgccacggacgtgaggagcgggagaaagaggaggaggaacgcgaaggacgccacggccgcgggcgccgcgaggaggtggcggagacgctcatgaggatggttaccgccaggatgtgaggccgccgcgctcgccaaaacgagcaagaagcaacaagagggtggcgcgcgaccgacgtgcgtacgtagcatgagcctgagtggagacgttggacgtgtatgtatatacctctctgcgtgttaactatgtacgtaagcggcaggcagtgcaataagtgtggctctgtagtatgtacgtgcggatacgatgctgtatgctactgaggcaagtcccataaataaataatgacacgtgcgtgttc

SEQ ID NO: 7096 - DNA, 1301 bp, Zea mays
  Clone ID: 700617054_FLI
atgtctcaaaaggatctcttagaattgccaacaagcagttcaagacagtcaaaaatgactatgagttgtcactaaacgagaatgctattgttgaagaagcagagggggagactttccttccaccagtgcaatacaaccttgtcaagattgatcagctaggaccatacgtcggtggcagggagcttgtagatattgttggtgtggttcagagcgtatctcccacactcagtgttaggagaaagattgacaacgagacaataccgaagcgtgatattgttgtagcagatgactctggcaaaactgttactatttctctctggaatgatcttgctactacgactggccaagagcttttggacatggttgacagtttgcctgttgttgcgataaagagcctaaaagtatctgacttccaaggcgtgtctctttcaactattggcagaagtactctcgagattaatcctgacctgcctgaggctaagaatctgaagtcctggtatgactctgaaggcaaagatacttcactggcaccaatcagtgcagaagcgggtgccacacgcgctggtggtttcaagtccatgtattctgatagagtttttctgtctcacatcaccagtgatcctgctatgggccaggaaaagcctgttttcttcagtctgtatgccatcataagccacatcaagcctgatcagaatatgtggtaccgtgcttgcacgacctgtaacaagaaggtgactgaagcttttgggtctggatactggtgcgaggggtgccaaaagaattactctgagtgctcgctgagatacatcatggtgatcaagctctccgatcccactggcgaggcttgggtgtctgtgttcaatgagcatgcagagaagatcattggctgcagcgccgacgagcttgatcggatcaggaaagaggagggggacgacagctacgttctcaagctcaaggaagccacctgggttcctcacctgttccgcgtcagtgtcacacagcatgaatacatgaacgagaagaggcagagaatcaccgtgaggggtgaagcaccggtcgacttcgcagctgagtccaagtacttgcttgatgagatcgcgaagctcaccgcttgctagaagacagtctttctggtggctcttgaaggactggccacggatatgtttctctcgcagtttttctcactgggttttagcacttctgtaaggtatatgtagatgctagttacctttgtatgagcaatctgatgtacgatagattgcgcgttctacattattgtgccatgcatccagtctttctgc

SEQ ID NO: 7097 - DNA, 1082 bp, Zea mays
  Clone ID: 700617074_FLI
gtcatgggcgagcgaggctgcctcgtgtcgccgcagcagtgtgaggataagttcaatgacctaaataagaggtataaaaggcttacagatatccttggtcggggtactacttgcagagttgtggcgaacccggaacttctggatggcatggctaatctctcagataagatgaaagatgccgcgaggaagatattgagctctaagcacttgttctatgaagagatgtgctcctaccacaacaataattggttcagtttacctgaagatcctgcacttcagcgatcgttgcagcttgctcttaagtgtaaggatgagcatgatgcaaggaagcgagcaagtggagatgctgatgaagatgatcaaagtgcagacactgattatgaagaagagaatgatgatgagcatcccatcacgcatgccaataaggggaccctactcacgcgtaaaagattgcggtacatgccggcggatatggaggatgtaggtttcggcaactcttccagctcacatgactgtagctggagatctgatccccatagcattgcagtggacatcaacaaagcttctccagatggaactaacttggcttcggttcaaaaagacttggctacacagtctgcggagattgagaaacagcgtatggaaattgaagttgaggcattggagcttgcaaaacaacgtctcaagtgggaggcatttagtaagaagaaggacagagagctagagaagatgaggttggaaaatgaacaaatgaagattgagaataaacgtttggagctagaggtaagatataaggagttggagcttgaacacaaaccacaaggccatggcagtcatgcaacatgataatatctttaaaatcgcgaagactgaaatgcaagatagtaagcattgtctcctgttatcactacccagagaaataattatgagtaactcatttctaattctgtcaccaaatccttgatattcataggctgctggagtaggtgctatttggtaccagacagttcagtcatgtttatatttattttgttctctgtagatgtttcagagaaacgataagttccgatgcatgctttggg

SEQ ID NO: 7098 - DNA, 848 bp, Zea mays
  Clone ID: 700617093_FLI
ggcgccacagacaaagcccgcgcctgctggtgctcggcaggacgacattcaccaccgcctcgcagcggcttcagataagcggcagggcgccaaggcggacaagaacctgcggttcctgctgcagaaggtgctgaagcagagcgacgtcgggagcctcggccgcatcgtgctccccaaaaaggaagcggaggttcacctgccggagctgaagacgagggatggcatctccatccccatggaggacatcggaacgtcgcgcgtgtggaacatgcggtacaggttttggcccaacaacaagagcagaatgtatctgctggagaacacaggggaatttgttcgttccaacgagcttcaggagggggatttcatagtgatctactccgatgtcaagtcgggcaaatatctgatacggggcgtgaaggtaaggcccccgccggcgcaagagcaaggcagtggttccagcgggggaggcaagcacaggcccctctgtccagcaggtccagggagagccgcagccgccggtgctcctgaagacgccgtcgtcgacggggtcagcggcgcctgcaaggggaggtctccggaaggcgtgcggcgggttcggcagcagggagccggcgccatgagccagatggcggtgagcatctgaaagagcagcagactccgccatatattgatcgatcgaccaatcgatcgttagttctccaagttactattagctagctatagctcgaaacagctgaactgatgatgacgatggtaacctccgtcgtgtgtgctaagcatgtagcgtgctaggagatgatatattaaatataatcgagtagtagagccacccgctgtgtgacgct

SEQ ID NO: 7099 - DNA, 1262 bp, Zea mays
  Clone ID: 700617119_FLI
aaactaatccagatagctagcctttgatttctcacttcaatctgacgaagtgcacacctaggcaacaaactcgaacgcgcgcggtagtggagccgagatgcagggaggggcgacggccaagcagcaggcgcgagacggtgaccgcggcgcggcgaagacgccgacgacggaggggaagggcgacgccgccggcgccaaggctagcgccgacgtggcgaagggcgacgccgccgtcgccaaggctgctggggacgacgtcgtcgtagggaagggcgacgcaggcaacaaggccggcgccggggccatgcaccacggcctgtcggccgtggaggcgaaggactcccagaccatcgtcgcgctgcagtcgccggtgaccgtcatgcgccccgtccgcggcgacctcgaggagcacctccccaagccatatctggcgcgagccctggtggcgccggacatctaccaccccgacggcaccgcggccgacgagcacggccaccaccacatgagcgtgttgcagcagcacgtcgccttcttcgaccgcgacgacaacggcatcatctacccttgggagacgtactccggatgccgtgcgcttgggttcaacatgatcctgtctctcttgatcgctcttgtcgtgaacgggaccatgagctatgccacgctgcctgggtggctgccgtcccctctgttcccgatctacgtccacaacatccacaagagcaagcatggcagtgactctgggacctacgacaacgagggcaggttcatgccagtgaacttcgagaacctgttcagcaagtacgcgcgcacttccccggacaggctcacctacagggagctctggtcgatgacggaggggttccgcgacgccttcgacctctacggctggattgcggcgaagctggagtggacgatcctgtacgtgctggcgcgggacgacgaggggtacctgtcgcgggaggccatgcggcgcgtgtacgacggcagcctcttcgagtacgtggagaggcagcgcgcgcagcacgccaagatgtcctagctagagggaagaggatgcgacgtgggcacgtggcctcgatcgcgcgtgaatgaaatggaagccaagtgaacctgtctcggctggtatgtagatagtgagaagggtgtcggccggaaaacaagcagccgtgtgtactactccctcagctcccatcaataacgcagagttcgccggaccggcacctccccatctttgctacttcaacctggtttttcgcgcggtt

SEQ ID NO: 7100 - DNA, 780 bp, Zea mays
  Clone ID: 700617241_FLI
ctgcaagggccccgagagaaacctagctcagtggctcagtcagcatccgaagcttcggatcccacaccgaggaaattaaaggagaagagagggtcggaataatggcggccgaggagggtgcggtgatcgcgtgccacaccaaggacgagttcgacgcccgcatggccaaggccaaggaggagggcaagctggtggtcatcgacttcatggccccctggtgcagtgggtgccagatgatggccccggtgtacgcggactgcgccagcaagtacccttccgcggtcttcctcgaggtcgacgtcgacgaactgctggaagtcgcgaagatctacggcgtccatgtgatgccgaccttctgcttcatcaggaacggcgagacgctcgagagctttgctaccgtcgacgaggacgagctccggaacgccgtcaggaagtacgccgccgccgccgccggcactacgacggctcctgcctcggcgtccgcctaatccagagacgtgatcatgtgtagcaaacagcgcgcgcgtcaccagtcgtcaataaattaaataaataaataaataaataaaggccaacttacgacgacaaattagtgacgcgcgcggtagtagctagcagagtatgcgccgccactactgtgtcgatctgcagtttggtcgttcaagtgattgtattgtgtactatgttcagctcgatgatctgggagtcgctatatacgctcgctcccgtgctggacgggttatcgatctcatgaacgagaatacaataatatgtatggat

SEQ ID NO: 7101 - DNA, 531 bp, Zea mays
  Clone ID: 700617289_FLI
cccaaaaggggctctcaaagggccttgcgtctccagcgttggcgtccgcgacgccggggaccagtggccatgagtcctctctcctgttgcgctctcgtccgtctccacaatttgtgcagtggatctagaaagaagcatttaacgaccggccgcaccagaccaaaccgtagcagaactcaactgaaggcaaccgcgggcccgcggccacaatgagtcagcaggaatgtagtctatcagatgatgaaaagcagaaggaatcccttctcagagagtgaaatccgaaactggtgctttcaaatatttcaagatctgatttacatgcattagcatggatatttccaatgcgaccttaatcctgatatgtggttttgcattttttttacaaacaatgttgcaatggttgatctatgattcctgtttgttgtgaaacaagtttctagccccaaccattttcacatgacattttagataagaaaatagttctccatgtagctcaatcttcatgtttaaaatatcatgtgtatttgactg

SEQ ID NO: 7102 - DNA, 578 bp, Zea mays
  Clone ID: 700617311_FLI
ctcgccaagggcatatgccaccacttcgtccgcacggggacttgcaagtatggggattcatgtagatacttccatccgaagccagatggtgccaatccagcagtctgattttattgcgaaccaacccaatttcgttggataccagggagtagacataaattcttcctcagaaagaattgtgatgtatgacaagctagatgcttatcatattctcacttcagtcagctgtcatgccatgatgtgagcccttgccacacaatcatcctatttggacattccaatttactccatcatgtgccagcgggtccattggttagtgacttggcgcctaccagagactgatcgtgtgctgtttggatgtttcgaggctatttgattgcaagcggtcctgtcggttggtgcctcaggatgactaggaaggagggcctacagattaaagaccttaaatttgtttggtttggagctgttgtcagcttcatggcctgcaggaaccatgctcctgatgctttctctgaattttgaaatgtcgtgatgctttcaagtgcttaagcttccagggcagcatagggttcaccgat

SEQ ID NO: 7103 - DNA, 1307 bp, Zea mays
  Clone ID: 700617436_FLI
cagcggacgatatctttctgacagatggagccacctcagcgatcaacttgatgatgcagatactcatcaggtctcacgaagacggcatcttgagccctctacccgaataccccttgtactcggcctccatcatactgcacggtggaacgatggtgccgtacaatctcactgaagataacggttggggcctagagatctttgaagtcaagaggtgcttggaagaggctcgttcggctggcctcactgttagagctatggtggtaataaatcccggcaaccctactggacaggtgctatccgtcacaaaccaggaggagatagtagagttttgtcggaaggaaggtctggttatacttgctgatgaggtataccaggaaaatatctacgcagagaacaagaagttccattccttcaagaaagtggccagatcacttgcttacgacgaaaatgacctcaccctagtatcacttcattccgtttcaatgagctatggggagagtggcagaagaggaggctacatggaggtgtctggtgttgcagctaatgtgaaggatcagatttacaaggtggcttctttaacactctgccccaacattgctggccagattctcgtcagccttgcaatggatccaccgaagaacttcccttgtgacctgtacgcagctaggagatgaatctttcgagtcatttgataaggagaaggaacagatccgttcatccttctgcaagcgagccaagaccctggagaaagctttcagcggcctggagggcgtgacttgcaacaagttagagggtgcgctgtacttgttcccacggctccacctcccctccgctgcgatcagggccgccgatttcgagggagtttcacctgacatattctacgctcaccgcctgcttgatgccaccgggattgccgttgtgccgggctctgggttccaccaggcctctgggacgatccatatccgatgcacgatccttcctgacgaaagaaaaatcgaggcgatggtcgcacgcttgagggcgttccataaggcgttcatgaacgagttccggggctctcagcaggtcatgaacgatctccgtcgctgatggtgtcgatgcatggcacggttaggcctgtgcgtgtgcccatgggcaatcaagacaacttctgagctctggagttgttgtttgttgttctgtgttcttgcttcctcgttgagctgtgcccgtttgtcctcacttatgcagtcagtggtctgtctgtagtctgtactgcttaaagataagctgtgctttcaggaataaaaagtctgcagcttgtgcat

SEQ ID NO: 7104 - DNA, 794 bp, Zea mays
  Clone ID: 700617459_FLI
cgaactcagacttgtgcggtccgccgtcggagagcgagtgcggcgtgtaccggcgacggcggaggcggcagagggtgcagcgcctggctctgcttatcggtgtggtggctgctgcggcgctgctcgttgcgctgttctgctgttgctgcgtggtcagcttgatgggatggaggcgtcggttcgttgagagccgtgacggtgtcaagaagagaagacgcagcccaggacgcggcagtgggtcgagcggcacgagcacggagaacggcgtcagccagccgaagctgatcatgttcaattcgaggatcacttacgctgacacggttgaggcgacccgccagttcgacgaggagaacgtgctcagccgaggccgccacggcctcgtgttcaaggcttgttacagtgacggcaccgtgctggcgattctgcggctcccgtccaggtctgccgatggcgccgtggtgatcgacgagggatcgttcaggaaggaggccgagtctctcgggaaggtgaagcacaggaacctcacggtgctccgtggctactacgccgggcctccgccggacgtccggctgctggtctatgactacatgcccaacggcaacctcgccacgctgctgcaggaagcgtcacaccgggacggccacatcctcaactggccgatgaggcacctcatcgcgctcggcgtctcgcgcggccttgcgttcctgcaccagtccggggtggtgcacggcgacgtcaagccgcagaacattctcttcgacgccgacttcgagccgcacctgtctgatttcggc

SEQ ID NO: 7105 - DNA, 457 bp, Zea mays
  Clone ID: 700617488_FLI
ggcggcctttacaacgcgagcgagttctggatcggctgcgacatctgcgagcggtggttccacggcaagtgcgtgcggatcacccctgcgaaagcggatcacataaagcactacaagtgcccggactgcagctcgaagaagatgaggcagtaggtgtaggtccccgcgtgatctgactgacccgtgtgatctgatccaaaccataactccctccgtttgtttgtctcaaggtcgcagctagcagatgtgaattccttcatttgtggggcttgtttatgtggtggtaggaagaggcaaaggactgatagatagagatacatgaccgttttcttttatatatattcgttgttcaccgttttgcctggttcgtcgcagtcctatcgctgtgtgaaggcatgaactgatgagtgggttgttctcaatagttgataaagaatttcatcggtttcatgtcatc

SEQ ID NO: 7106 - DNA, 1047 bp, Zea mays
  Clone ID: 700617492_FLI
gtacgcggacacgctccatcagcgtcaggccacagccaccatggtgaagctggcgacggcgcgcgagtgccgcgcatacagcctcggcgccggcgcggggtccggcacggggttgcgcaaccggtgggagtacatcaacgccggggtgtacatcttcgcggcggtcctcctggtcggcgggttcctggcgcagctcctgccgtggggcgggcccagcagcccggggctcgtggtcgccgcgatcgggctcgccggcttgctggccgtcaacacgcacgacctcctcgcgcacgccgccggcgtcgattaccgcctcgggatggtggtcgggcttgacgcgcagatggggctcgtcgagctcggcgtccccgccgtgcagatcgttggcaccgcgctcatgctcgtcgctgtcgtcttctttgtgattcagatggagagaggctaccggcacagcctagccatgcacggcctgaacctgctcatagccgggccggcactgtggtgcctggggtctgtgcaaaacatctgccagttctacgagcgtgcgagcgggcacgtccagctcctgcagaagagcgtgcagatcccgctgctgctggggagcaccctcttcctcatcgccggcatcgtcaaccggcacgaccgccgcagccgccactccggcttcgtgctactggggaggaactgggcgtggttctgcctgttcgggagcctcctcttccttgccggcggcctgctgaacctactcaaggtgttcaagacgcagcagatgggcggccggggcctggagaagctgcgcggtggctcgcaggagcggctggccttggagcgggagggcaaggtgccgctcatcctggagcacggacacggcggccggaggggccctgcgataccgccgccgccgcccgggtcttacaaggacgcgctcgtcagtagcgccagctaggaacagaaatggccttgtagatgctcagcattttacgttgaactgcatcctctgtttttaatcatcaatcacgttcacgcctgcttgaataagcttttact

SEQ ID NO: 7107 - DNA, 729 bp, Zea mays
  Clone ID: 700617495_FLI
cttcgcctgcacctgcacgcgcccccgacctcaccctctgctgacctcgctcccctcccgtagccgccggagccctcatcggtttatcctcccgctgccacctgcaacagccccgggcggagatccatcctaactctacgtgcaggtgaccccaagtcctcaagtgggtggcgcaaccatgcccaaggttaagaatccccacgttttcatggacatatcaatcggtggaggtagcgccgagaggatcacattcgagctatttgcaaatgtagttccaaagaccgcggagaacttcagagcactatgtactggtgaaagaggccttggagcgtctacacagaaaccactctattataagggaacatatattcatcgcatagttaaagggtttgttgctcagggtggtgatttttcaagcggagatggaaaaggtggagagagcatttatggtggaaaatttccagatgaaaacttcaagctactgcacaatcagcctggtgtcctgtccatggcaaattctggaccaggcaccaatgggtcacagttttttattacattcaaggctctacctcatcttgatggcaaacatgtggtctttgggaaggtggtcagtggaatagctttgcttaaaaatcttgaagcagctggcagtgaaactggaaatccttcttgtcaagtgaaaattgtagactgtggtgaagtttccaacacaaattctcaagatctgct

SEQ ID NO: 7108 - DNA, 758 bp, Zea mays
  Clone ID: 700617511_FLI
gcgccaacgtcgcctggcggccgtctgcagctccgcgcctctgctcggaagttggtgaaggtttcttgaagctgagaagatggtgctgaagacagaactctgccgcttcagcggccagaagatttatcctgggaaaggcatccgatttatccgtgctgattctcaggttttcctttttgccaactcaaaatgcaagcgctacttccacaaccgcctgaagcctgcaaagcttacctggacagcaatgtacaggaagcagcacaagaaggatatccatgctgaggctgtcaagaagaggcgccgcgccaccaagaagccatactcgaggtccattgtgggtgcttccctagaggtgatccagaagaagagggctgagaagcccgaggtccgcgatgctgctagagaagctgctcttcgcgagatcaaggagcgcatcaagaagaccaaggatgagaagaaggcgaaaaaggctgaggtgaccaagtcccagaaggcacagacgaagggagcggtccagaagggttccaagggccccaagttgggtggtggcggtggcaagcgctgaaagaacctaagtgtcgttccttgaccttgcaattgctcctccatagcccaccttgttgcaccaacgccacttttgtagtacctcggttaattttgcattttctttcagagttgtttgtgggttttgagttccatctcaagagagttgagtttatttatctttatattgggtgaaatgttcatatgctttcctc

SEQ ID NO: 7109 - DNA, 1040 bp, Zea mays
  Clone ID: 700617521_FLI
cctcgccgcagcacacacgaggccggcggcgccatggccatgaagctggacatgtccgcgctcgagaccaacttcgccaacctgaccgcctccgccggcgacgacacgtacttctccgccgaggcccccgacgtgccgtccatggtgctccccatctgcgacgacttcgacggcttccaggcggccaccaaggatatggtgaagaataagaaggggacgaccacgcttgccttcatcttcgacaagggcgtcatcgtcgccgctgattccagggccagcatgggcggttatatatcctcacaaaccgtgaggaaaattattgaaataaatccttacatgctggggacaatggctggaggtgctgctgattgccaattttggcataggaacctaggaaccaagtgtcgtctccatgagctttcaaacaagcgaaggatctctattgctggtgcttccaaactgttggctaacatcctttattcatatcgtgggatgggactgtcgattggtacaatgatcgctggatgggatgagaagggtcctggcttgtactatgttgacagtgagggtgcgcggctcgtggggaacaggttctctgttggctctggttcactgtatgcttatggtatcttggatgatggttaccgcttcagcatgtcagttgaggaagcagccgaattagcgcgacgggctatttatggggcaacattccgtgatgcagcaagtggtggttgtgttagtgtttaccacgttggccctgatggttggacgaagctttctggggatgatgtcggggagctgcactaccactactacccggttcagaaaactccggttgaacaggagatggccgatgcgcctactgcttctgcttaaacctgttgctgagaaaaccttgagcggagccgcatgtatccatgaaccatgaattgtagaagcgccatgtttatgaacgaacttggacatgtttgtctcacaacgttagatcactctttgtgttctgttgattgatatcttaaatttgcgcaactgttgagtcc

SEQ ID NO: 7110 - DNA, 519 bp, Zea mays
  Clone ID: 700617546_FLI
cgtctctccagcgacggcagcgggcgagggttacgcgaaggcgaagcggagtagtggaagcagaggcggcagccatggccgtgatggagaagctcaagatctttgtcgttaaggagcccgtagtcgcggcctcctgcctcatcgctggattcggtctctttcttccagcagttgtccggccaatcctggattcatggcagaccgcggaacaagttcctccacctcttctaaatgatgtggttgcaggtgtcaccggcaagaaaaagtagtgaacttgcattgttttctcatgccaatgttgccccacattttcttccccgtgttttttctggcgaccagattggaaggcttttcccaagagtcacggtcttgaactctagatggtatccgcggaataatcattgtacctgaatcatatactgcaatgtggcagttttgaaaatgtttcccctcctacaaaggttgatagaatgccataccctttgaactgtgttcgagatgtcatcgtttatgatttct

SEQ ID NO: 7111 - DNA, 541 bp, Zea mays
  Clone ID: 700617885_FLI
ccaccccgcagccgccctagcacccgcgacgagcaggatctgcccagttgctcttgcggtagttcccccaactgtcaccatgcagaacgaggagggtaagactgtggacctctatgtccccaggaagtgctcggccacaaacaggatcatcactgccaaggaccatgcctctgtccagatcaacattggccacttggatgcgaatggcctgtatgatggtcacttcacaacgtttgctctctctgggtttgtccgtgctcagggtgacgcagacagctccttggacaggctgtggcaaaagaagaaggctgatatcaagcagtagattttacatctagtttaccaagaattggacaccgccttagctatgttttgaattcatgtcactatatgcaatgttgtgatttcagctggtaccttaaatctgaagatttagtatctttgttgggttccttctgagtttgatgtgtggtgttcgtttaattcccttgtacaaccccatttagtatcattgtgatgattttggattcaattttgctcg

SEQ ID NO: 7112 - DNA, 1303 bp, Zea mays
  Clone ID: 700617991_FLI
gtccacagggaatttcctaactctggaagatgccataaaaaagtactcttctgatgccactaggtttgcccttgctgatgctggcgatggtatggatgatgcaaattttgtcactgaaactgcaaattctgctgttatgaggcttacaaaagaaatttcatggatggaggaggttacagctgctgaacctaaattaagaactgggctgcccactacatatgctgaccgtgtgttttcaaacgagatgaacattgcaatcaaagaaactgagaagagctacaatgctttcatgttcagagacgccctgaagtctgggttctatgacctccaattggctagagatgagtacaggctctcttgtggtgcagcaggcatgaaccgtgatctgttgtggcgatttatggatgtccagaccaggcttatcacccccatttgcccacactatgccgagcacgtgtggcagaagatcatgaagaaagaaggctttgcaataaaagctggctggccagtcgcggacaccccggatcctacactgagaattgcaaataaatacctgcaggattccatagttttgatgaggaaactgcttcagaagcaagagtctggttctaagaagcctaagaagggagctgcaccggcacctccgtccgaggaaaagaagatgagcattggtctcatatatgtgaacgagcactactctggatggaaagagcagtgcttgagggtgctgcagtccaagttcgacagccaaagccgctccttctcacccgatcaggaaatagcagaagctctgaaggagtgccccatcgggcaggaaatgaacctgaagcaggttcagaagctgtgcatgcccttcatcaagctgaagaaggacgaggcaaaggaggttggtcctcaggcgctggacttgaagcttccgttcggtgagatggatgttctccgggagaacttggagctgatcaagaggcagctgggccttgagcaagtcgaggtgctctccgcgtccgacgaagctgctcgcgctaaggctggtgaacatgcttcgctgctggagaagaacccaccatcacccggcgaccccatcgccatcttcctcagcaaacagagctgaaaactgaacttgcatatggcccttttgttatttacttcgccgcacatttgcctcttttttgtttttgtggaaccagtttcgtgtctgtcaacagagtatgttgtcttttggtttggtgaaaccagttttttctgtcaacagaatatgttatccattgtctgggtaaaccagttcggctattgtcgacaaagt

SEQ ID NO: 7113 - DNA, 955 bp, Zea mays
  Clone ID: 700618126_FLI
cgggaacggcggaagcaaacaactagaaattccccagcccggttctttgcgtgcggttgatctcgtcggaggcccggccgcggttccccaatccgccatcgaattcgatggcggccaacgccgggaataagatccgcaacgccaagctggttcttcttggagatgtgggcgctggcaaatctagcttggttcttcggtttgttaagggacagtttgttgaattccaggaatcaacaattggagcagccttcttttcccagaccttagcggtcaatgatgagactgttaagtttgaaatctgggatactgccgggcaggagaggtatcatagcttggctcccatgtactataggggtgcagctgctgccattgttgtctatgacatcacaaatccggcctccttcacccgtgccaagaaatgggttcaagaacttcaagctcaaggaaatcagaataccatagtggctcttgctggaaacaaggctgatatgctagatgcgaggcaggtgccagcagaggaagcaaaggcgtatgctcaggagaatgggctcttcttcatggagacatctgctaaaactgcaatcaatgtgaatgacatattttatgagattgcaaagaaattgcttcaagggcaacaagctccaagcccacaggctggaatggttctgaatcagagaccaaatgagaggacggtcagcagttcttcatgctgctcttgagctgtgtttcaacctcgtagtgccgttatcaaatgtatcagaggaggtttatggaaaatatcccatgtcgcctgtgtggctgcctttcaggctgacgtgctcccattctgctcctcatttcctttcacatgttcgtcatgtaaatgccaatactaaagtgtcactgcatgggcagaagtgttaccaaagtgttgattgtgctcttatcatttgattaagcccctgcttaagttctc

SEQ ID NO: 7114 - DNA, 633 bp, Zea mays
  Clone ID: 700618137_FLI
ctaatctcgccttccgaggaaactcaccagcccaccacagacccgagcggaagaagccatgtccgggcgcggtaagggtggcaaggggctcggcaagggcggcgcgaagcgtcaccggaaggtgctgcgcgacaacatccagggcatcaccaagccggcgatccggcggctggcgaggaggggcggcgtcaagcgcatctcggggctcatctacgaggagacccgcggcgtgctcaagatcttcctcgagaacgtcatccgcgacgccgtcacctacactgagcacgcccgccgcaagaccgtcaccgccatggacgtcgtctacgcgctcaagcgccagggccgcaccctctacggcttcggcggctaggctgatgggctcctcgcgatgttctccccttctgcagatgcgacgttttctggccgtgcccacaagtcttgcggtcaagaaagtttcaggaactcttgttagttcatctctggctgtggtaggtttatctgaatcgtgagactagtaggtttatctgaatcgcgaggctagcaggtttacctgaatcatgaagcagtgatgaaattatgtgtgcatcggatgttggaaatcgagcttgtaatgcaatttgttactcttgatgc

SEQ ID NO: 7115 - DNA, 832 bp, Zea mays
  Clone ID: 700618154_FLI
gcagcgtgcgcacgtggggtacctagctcgctctgctagcctaccatggctgatcaccaccggggtgcgacgggaggtggcgggggctacggcgacctccagcgcgggggcggcatgcacggcgaggcgcagcagcagcagaagcagggcgccatgatgacggcgctcaaggccgcgacggccgcgaccttcggcgggtcgatgctggtgctgtccgggctgatcctggccggcaccgtgatcgcgctcacggtggccacccccgtgctggtgatcttcagcccggtgctggtgccggccgccatcgcgctggcgctcatggcggccgggttcgtcacctccggcggcctcggcgtcgctgcgctgtccgtgttctcctggatgtacaagtacctgacgggcaagcacccgccgggcgccgaccagctggaccacgccaaggcgaggctggcgtccaaggcccgcgacatcaaggatgcagcacagcaccgcatcgaccaggcgcaggggtcttgagagaagaaccacactcgagcggaccgcgcgcgcgacctccttgaaccactgccggcgcggcggcatatggcccttaaaggcggtggctgctgctacgtacgctgccgtagagtctcggtcgccgcgatagctctagctagtcgtttatgtgttgtgctttgtgtgtgcatgcttgtgtctgggggcatgcagtgcagtgcagtactatatgctgtatgcgtctctctttgatcggagaggcggatgtacagcatgctcgatatgtctagtttggatgtcatgtttatgatgaggaataaaatgcagtgttcaggtg

SEQ ID NO: 7116 - DNA, 603 bp, Zea mays
  Clone ID: 700618155_FLI
ggcggcacctctccccttcgatccaccaagggtttaggatcggcggcgatggcggcgaggctggcacagctgcgcgctcaggcggtgcaggcggcggagttcgcctcgaagcacggcggctcctactacaaggagctcatggagaagaacaagcagtacgtcgtgcagccccccaccatcgagaaatgccaggagctctccaagcagctcttctacacccgcctcgcaagcctaccaggtcggtatgagtcattctggaaggagcttgatggtgtcaagcaggtatggaagaacaggaaggacctcaaggttgaggaccttgggattgcgactttatttggagttgagctttatgcatggttctgcgtaggcgagattgttggcagaggtttcaccttaaccggctataaggtctagttgatttccagtgatttaagacctgctttataaatcgacactttagctgatgcttgtcgaaacgacgatgatacctgccttccttcacaattttgtttcttgtaagagtctacctagtgctgaatgccagcaaagacgggcacatggttgcaacattgcctcaataatttgcccgcgcaattcttg

SEQ ID NO: 7117 - DNA, 534 bp, Zea mays
  Clone ID: 700618213_FLI
gctttcgaatgtgttcatgatggctggggtgttgctgtgctggtgggtgtgccacataaggacgctgagttcaagacccacccgatgaacttcctgaacgaaaggaccctgaaggggaccttctttggcaactacaagccacgcactgatctgccaaatgtggtggagctgtacatgaaaaaggagctggaggtggagaagttcatcacgcacagcgtcccgttcgccgagatcaacaaggcgttcgacctgatggccaagggggagggcatccgctgcatcatccgcatggagaactagatttcgctgtctagtttgtgatctggcctgggcttggggttaataaaagaggcaatgctagcctgccctttcgatgaggaggtacatacacgctggcgatggaccgcgcttgtgtgtcgcgttcagtttggcttttgccaagcagtagggtagcttcccgtgtcggtaattatatggtatgaaccatcaccttttggctctacatggtatgaacgtaagatacaaattccaact

SEQ ID NO: 7118 - DNA, 754 bp, Zea mays
  Clone ID: 700618222_FLI
aggaagatggggctcgcgttcgggaagctcttcagccggctcttcgccaagaaggagatgcggatcctcatggtcggcctcgacgccgccggtaaaaccaccatcctctacaagctcaagctcggcgagatcgtcaccaccatccccaccatcggtttcaatgttgaaactgttgagtacaagaacattagcttcactgtctgggatgtcgggggtcaggacaagatcagacctctttggaggcattacttccagaacacccagggtcttatctttgttgtggacagcaatgaccgtgaccgtgttgttgaagccagagatgagctccacaggatgctgaacgaggatgagctacgtgatgctgtgctgcttgtttttgccaacaagcaagatcttcccaatgccatgaatgctgctgagattactgacaagcttggattacactccctgcgccagcgacactggtacatccagagcacttgtgccacaactggcgagggtctgtatgaaggcctggactggctgtccagcaacattgcgagcaaggcttgaggcctaccttgaatgtcaaccgcgaactgactaggagctccggatgtatcatggaaactcaggacagaatcgcagttgcaacctgttagatgtcttctaccggcactatatatattttttgtttgatgtgtaatgatgttactgttcaacgtttattaccctactatactgttggatgttctttggacctgtttcatttcgc

SEQ ID NO: 7119 - DNA, 567 bp, Zea mays
  Clone ID: 700618472_FLI
gcagaacctgaacgtggtgtgccagtactacccgccgtgcccggagccgcaccgcaccgtgggcgtcaagaggcacacggaccctggcttcttcaccatcctcctgcaggacggcatgggcggcctgcaggtgcgcctcggcgacgggcagaacggcggctgctgggtggacatcgctccccggcctggggcgctcatggtcaacatcggtgaccttctgcagctcgtgaccaatgaccggttcaggagcgtggagcaccgggtgccggccaacaagagcagcgacacggcgagggtctccgtggcgtccttcttcaacacggacgtgaggaggtccgagaggctgtacggccccattccagaccccagcaagcccccgctgtacaggagcgtcagggcccgagacttcatcgcaaagttcaacaccataggactcgatggccgcgcgctcgaccacttcaggctctagctacctggctacgtttcagattcgtcctttcatttgctttggtctctaattaataattccaaataataagcccgcggatggacctctgtctgtctgtc

SEQ ID NO: 7120 - DNA, 1118 bp, Zea mays
  Clone ID: 700618603_FLI
gagaacgtgccaaggaaatccctgatgattattttgtttgtttggtgggagacatgattaccgaggaagctctaccaacataccagactatgcttaacaccctcgacggtgtcagagatgagacaggtgcaagccccactgcctgggctgtttggacgagggcatggactgctgaggagaacaggcatggtgatctgctcaacaagtatatgtacctcactgggagggtggatatgaggcagattgagaagacaattcagtatcttattggctctggaatggatcctaggactgagaataatccttatcttggtttcatctacacctccttccaagagcgggcgaccttcatctcacacgggaacactgctcgtcacgccaaggactttggcgacttaaagcttgcacaaatctgcggcatcatcgcctcagatgagaagcgacatgaaactgcgtacaccaagatcgtggagaagctgtttgagatcgaccctgatggtaccgtggtcgctctggctgacatgatgaggaagaagatctcaatgcctgcccacctgatgtttgacgggcaggacgacaagctgttcgagcacttctccatggtcgcgcagaggcttggcgtttacaccgccagggactacgccgacatcctcgagttcctcgtcgacaggtggaaggtggcgagcctgactggtctgtcgggtgaagggaacaaggcgcaggactacctttgcacccttgcttcaagaatcaggaggctggaggagagggcccagagcagagccaagaaagccggcacgctgcctttcagctgggtatacggtagggacgtccaactgtgagatcggaaacctgctgcggactgcttagacaagacctgctgtgtctgcgttacataggtctccaggttttgatcaaatggtcccgtgtcgtcttatagagcgataggagaacgtgttggtctgtggtgtagctttgtttttattttgtatttttctgctttgatgtacaacctgtggccgcatgaactggggcgtggagatgggagcgaccatgccgtactttgtctgtcgctggcggtgtgtttcggtatgttatttgagttgctcagatctgtt

SEQ ID NO: 7121 - DNA, 763 bp, Zea mays
  Clone ID: 700618619_FLI
atgctacctaccaaaaccctcacggatccctggcatttcgatcgcctcactctgtaccccggacgagttgcagttggatctcagatcggtgatcacataaacaatggtgaaggctgttgctgtgcttggtagcagcgatggtgtcaagggcaccatcttcttcacccaagagggagatggccctaccactgtcaccggaagtgtctctggcctcaagcctggcctccatgggttccatgtgcatgcacttggtgacaccaccaatggctgcatgtcaactggaccacactacaatcctgcgagcaaggaacatggagcaccagaagatgagaaccgccatgccggtgatcttggaaatgtgacagctggagcagatggtgttgcaaacattaatgttaccgacagccagatcccactgactgggccaaactcaatcattggcagagctgttgttgttcacgctgaccccgatgatcttggaaagggtggacacgagctcagcaagagcaccggaaacgctggcggccgtgttgcttgtgggatcatcggactccagggctgaactgaaacaaatggtcgctggacttcgggggcgcctgagagtgccgtcaccagcaggctagaataacatcccgaagacatcgtgaaataataataagagcgcctgatatgtgatcagtggtgtacttgccattaagcacctgtggcaaccgatgagctgaactgtgttggactgttggctaaaatgctggttcgcctgagc

SEQ ID NO: 7122 - DNA, 719 bp, Zea mays
  Clone ID: 700618704_FLI
acatcgagtacagtcggctaggtaatctggtggtacgacgacatggcggccaccagcagcaagtcgtcgtcgtcctcgagctcggcgcagcgggcagctgccgcactgctcgtggccgccgccgtggcggtgtccgtcctggtggtgggcgcggcggcggtgtgcgacatgagcaacgagcagttcatgtcgtgccagcccgcggcggccaagacgacggacccgccggccgcgccgtcgcaggcgtgctgcgacgcgctggcgggggcggacctcaagtgcctgtgcggctacaagaactcgccgtggatgggcgtctacaacatcgaccccaagcgcgccatggagcttccggccaagtgcggcctcgccacgccgcccgactgctagcagtgtgctagccaagccaagccaagcaggaaggcccccggcattgctagctgtacgtgtctgtgtgtgcatctgcagcagggtgcaggcaggggcccgtacgtacgtgtctctttctctctctcatcttgtcaccgtacctatctagagtgtgtgtgttcgtactaattaaaatgttcttgtcgtcgtcgtctgtgcatgcatgtaccatgtcgtcgtgcatgtctattatgtgtgtgtcgtcgtgtcgatcggtacgtatagatgcctgttgttagcatgtgtgtcattacctagtcgtgtgtagtgtatgtatgtgcttgccgggc

SEQ ID NO: 7123 - DNA, 572 bp, Zea mays
  Clone ID: 700618732_FLI
ctctgtgaacctctaatgcagataccttctatgtgggaaggacttcagaatatgcctcagatgaacttcaaccctggcgtggtagccgatagcggcaccaacaactctggctccatgaagatcgagcagtgagcttctgtatagctccggaactgttctgtgaatcatgaatcgtcgtaaagcgctcgcagggtggagtcttttttgtatagttggaggcctaaccattcatgccggtttccttctgttgcttccatactgtgcgacacattgtttatggtacggcaaatgaggatcatgtacagctggagctggaaaactgatgccactgtaaatttctgctgtgttttggcctgtggaaattgggatggaaacctattaccatccatgaaatccaagggcagaagcttgttggaactagggaccaggtgctgaatgctgatgggccaacatactagaatggaatagtaggtacaaaaatgcagagtttgaagcctctttgtcaggaaattccatggaacatgcaatgtaaggtttcatcatgcaatggaaggaaactcattattattaat

SEQ ID NO: 7124 - DNA, 361 bp, Zea mays
  Clone ID: 700618759_FLI
agcggctatacttcgttttccccttcctgaactagaggacatggagctgtgatgaaaccaacctttttgcttctcgataacattctttttggttgtgatctgttagcatactacctgtatcatgtgtaacgttatggagctatttgatattgtataggcaaccctggaaaggaattctggtattttttaaggtatatcctattcgttgtaaatggttcatcgtgcgttgtttgccggttctttttctcattaagtctggttattttttaagtctggttatttttcacatcctaaactatctgcatgtaaagtgaccactgagcgttggagctccagacatcagaactaattttcgtgggcc

SEQ ID NO: 7125 - DNA, 1445 bp, Zea mays
  Clone ID: 700618821_FLI
tcttgcctgtgctgcttccaatattgctgtggataatattgttgagcgacttgcacgatacagaacaaaattggtgaggttagggcaccctgctcgtttactgcctcaagtgctcgacagcgctcttgatgcacaggttttacgagctgataatagtagcttggcaggagacattcgcaaggaaatgaaggtgctcaatagcaaattgctgaaggctaaagataggaacactaaacgggacatcaggaaagagctcaaaacgcttgcaaaagaggagagaaaacgacagcagcttgcagtcactgatgtactgaaaaatgcagatgttgtgctgaccactctgactggtgcatcttcgaaaaagttaaacggaattacatttgatttggttgttattgatgaagctgcccaggcacttgaggtggcatgctggatagccttgttgaaagggccgagatgtattcttgctggagaccatcttcaacttcctccaacaattcaaagtgttgaggctgaaaagaaggggatgggaaagacactctttgaacgccttactgaagcttatggagaggaaatcacatccatgctcactgtgcagtacagaatgcacgagcacattatgagctggtcatctaaagaactttacaataataagatcaaagcacattctagtgttgctgggcatatgctctatgatctagaagaagtcactagatcttcttcaacagaaccaactattgtactcattgacactacagggtgtgatatggaagaagtaaaagatgaagaggagagcaccatgaatgagggcgaggcagcagtatccattgctcatgccaagttgcttgttgagagtggcgttaatgcttctgatattggaataattacgccttacgctgcacaggtaacctgcttgaagatgatgagaaacaaagatgccaagttgaaagatttagagatatctacagttgatgggtttcaaggccgggagaaagaagccatcatcatttctatggtccggtctaactcaaagaaagaggtggggttcttgagcgatcacaggcggatgaacgtggcggtgacgcgagccaggaggcagtgctgcctggtgtgcgacgtggagaccgtgagcagcgacaggttcctgaaacgcttggtcgaatacttcgaggagaacggggagtacttgagtgcttcagaataccagagcagctgactggcgtcgatcagatccattcagctcttcttctagtggctcgtggtggcatctggctggcatgtccgtggagcaagtggataggatccgcatggagtcttggagaacacaatatcaagctttggttcctagatatctcagcttttcttttcttttcttttctcttggtgaacgcataaatgatgtattgttgtgacgttgccaatgccatgggaatgagatatttaac

SEQ ID NO: 7126 - DNA, 580 bp, Zea mays
  Clone ID: 700618858_FLI
gctgagtcttctctaccaaagaaacaattaactggcgtctatgatttggttgctgtcttgacacacaagggaagaagtgcagactctggccactatgttggctgggttaagcaagatgatggtcagtcaactagtattacagctcatttactataacaactgtttcattttatacaggttagttactgaaattccatattaaccatcaggaaaatggatcgagtttgatgatgacaatccgaacattcgcaaggatgaagacattttgaaactttctggtggaggtgattggcacatggcttatatctgcttgtacaaagcccgcatggcagaatcaaagagttaggtcgaattggttctacatttctgtattgcgaatgcaacactagtttttgtgcccatgagcgagcgtggtaattatttttccagttcgtaaagtggttactggtgaatttgcttcaattatgttcgccattattcacccggatatgtatctttaggatttctagtacattttgtgttgtcaaaatataggacaaaaaattcaggggaaagcttttgccttcagtggatctgattt

SEQ ID NO: 7127 - DNA, 603 bp, Zea mays
  Clone ID: 700618938_FLI
cagagagtttgttccgtccaggcaaccaaaaagcgttgccccgccgcgcagaggaagaagagagcagaggaggatggctcgtacgaagcagaccgcccgcaagtccacgggaggcaaggccccccgcaagcagctcgccaccaaggcggcgaggaagtcggcgccgacgaccggcggcgtgaagaagccccacaggtacaggcccggaaccgtggcgctgcgcgagatccgcaagtaccagaagagcacggagctgctgatccgcaagctgcccttccagcgcctggtgcgcgagatcgcgcaggacttcaagacagacctccggttccagagccacgccgtgctggcgctccaggaggccgccgaggcctacctcgtcggcctcttcgaggacaccaacctctgcgccatccacgccaagcgcgtcaccatcatgcccaaggacatccagctcgcccgccgcatccgtggcgagcgcgcgtagccatcatctccgaggatctgatgaatgtctagttaccaaacaaataggccgtattagcgtcgttgttctgtattcgttattttggattcggttgcagggaaaaacagctttactgatct

SEQ ID NO: 7128 - DNA, 767 bp, Zea mays
  Clone ID: 700618951_FLI
gggccggtcgcggagcggaacttcggcatcttcaacacggatctcacacccaaatacgacctggggctgctccgccaaggaccgcagtctggatctccaaccccatctccggagccctcgccgtcggtcggcggaggcaagtggtgcgtggccaagtccggcgcgagcgcaaccgacctgcagaacaacattaactacgcctgtgcctacgtcgactgtaggccgatccagagcggcggcgcgtgcttggaccccaacaacatccactcacatgcctcgtacgtcatgaacgcgtactaccaggccaatggcatgcacgactatgactgcgacttcaagggcaccggcgtggtcacctccagtgaccccagttacgggagctgcaaatacaacgcctcctcctgacggcgcgcagcaagtccagctggcactactgcaccagcctccagtccacatcgtcctccagctccaggctccagccatggccacgctggggacgggaggaggtccgtactgccgccgggcttgcgccacatacttgtatactcatgtctcacacccatgcttcttgttgctctcaaccactactagcactactatttgtctagttccataattacaagtccctctcccctcatgttaacttgatcattgtccgtgtgtagtggactagtggtggtgaataaaatagcttccattccatgtagacaaacaaacaaattgtaacatctgttatccttgggttatttgatatatttatttttcat

SEQ ID NO: 7129 - DNA, 579 bp, Zea mays
  Clone ID: 700618989_FLI
agcaacaaggcagcagcacaagcaagaaccacacctcctcccttcgcctgtgatcatgtcgtcttgctgcggcggcaagtgcgggtgcggctccagctgctcctgcggcagcggatgcaacggctgcggtatgtaccctgacgtggagaccgccgccaccagcagcgtcaagaccacggtcctcgccgcgccgaccaccaaggccagcgccggcggcttcgaggcggccaccgagggcggcggctgcgactgcaacacctgcaagtgcggcaccagctgcggctgctcctgctgcagctgcaactgagctggcccggcccggcgatggcgcacgagagtcgagaggaggaggacgacgacgaggcgtataaatataatagcggcgtccagtaaataagatcctgtcaactgcacccgccattatccatggtcgctcgctcctcgcctgcgtctcctggtcctggggttcgtctgaacgtcctcgcggcttcacgacggcgatgccgcctccgtcgatcctgtccgtctcgtgccggatttaatattagatctatatgcgtgtttttctgcgttattact

SEQ ID NO: 7130 - DNA, 424 bp, Zea mays
  Clone ID: 700619018_FLI
gttctgccttaacttctccatcttctacgtcatccattcaacaacagcagtgacgttcaacgttgcaggcaaccttaaagtcgcggtggcagtgttagtgtcgtggtcgatcttccggaatccaatctctgcaatgaatgcaatcgggtgtggaatcaccctggttggttgcactttctatggctacgtgaggcatctgatctcgcagcggcaggctgcagccccagggagtctaggaacagcgcaagcaaggaatcagacggagatgcttccccttgttgtggacgagaagcaagaaaaggtttagcaatggtgctaggccttctcttcacttgttgaagagagaattatatatgtactcgtgcgtgcgtgtgtggtgagggtagtaaactggaacttcgtacaagcatcgtttcctccttcc

SEQ ID NO: 7131 - DNA, 2658 bp, Zea mays
  Clone ID: 700619151_FLI
cgccattgctcacctttttccgtccagcgcaaagacaccgcgcgccagagagggtgagggattgccgtgaccgattcgaaagccgcttcgggcgcgggtgggatcggcccgtggccggcggagatgtccggattcgtcggtgtcgtcgtgtccgacccctcgctgcaggggcagttcacgcaggtcgagctccgatcgctcaaggccaagttcgtgtctctgaagagagattccggccatgtcaccactaagaatctcccggtgatgatgaagaagctgagggggctcaatgaggtggtctctgtggaggagatcgcggccttcctgtccgagtcgtaccccgacagcgatcaggagattgaattcgaatccttcctccgggagtatctgaatctgcaggcgcgggtgagtgccaaggagggtggtgccggcggtggccggggtggcaagtcgtcgttcctcaagtccagcaccactacgctgctgcacaacctcaatcaggcagagaaatcttcgtatgtggcgcacatcaatacttacctccgtgaagacccattcctgaagaagtacttgcccatggacccgtctggaaaccagctgttcgatctcatccgggatggtgttctgctctgcaaactgatcaatgtagctgtacctgggaccattgatgagagggcaataaataagaaaagagttcttaacccatgggagagaaatgaaaatcacacgctctgcctcaattccgccaaggccattggatgcactgttgtcaacattggcacacaggatttggtggagggaaggcctcatttagttcttggattgatatcacaaatcataaagattcaacttttagctgatcttaacctcaagaagacaccacagctggtggagctatttgatgacagcaaggatatagacgaggttttgagtttgtcgccagaaaagatgctacttcggtggatgaaccatcatctgaaaaaagctggctacaagaaaactgttaacaatttctcttcagatgtgaaggatggtgaagcgtatgcttaccttctgaaagctcttgctccagagcattcccctgaaactacattggacaccaaggatccgaatgagagggcaaaactagtacttgaacaagcggcgaagttggactgtaagagatacttgaccccgaaggatatcactgagggatctgccaatttaaatcttgcatttgttgcacaaatattccagcataggaatggtctcaccagtgacaccaaacaagttactctcacacagaccgcaacacctgatgatgttctagtatctagagaagaaagagcctttcggatgtggatcaacagccttggggttgaatcatatgtaaacaatgtctttgaagatgttcgcaatggatgggtacttcttgaagtgcttgacaaggtgtctcctggatctgtcaattggaagctggcaacaaaacctccaattaaattgccatttagaaaactggagaattgcaatcaagttgtaaaaattgggaagcagttgaagttttctttagtaaatctggctggaaacgatattgttcagggaaataagaaattgattgttgcacttctgtggcaattgatgagattcaatatcctccagctgttaaacaaactgagattccactcccaaggagggtcccaaggaaaagaaatttctgatgctgatattctagactgggccaacagcaaagtgaaagcgtccggaagaacatctcgaatggaaagtttcaaggacaagagcttatcaaatggattgttcttcctcgagcttcttagcacagtacagccaagggttgtgaactggaaagttgttactaaaggggaaactgatgaggacaagaagctgaatgctacgtacatcattagtgttgcaaggaagattggatgctctgtgttcctgttgccagaggacatcgtcgaggtgaatcagaagatgattctaacacttaccgctagcattatgtattggagcctacagaatcagcatcagtcacagtctgaaatgccagagcaatcagaaccatctagcatggcttcagacgcagcctctgacattgcctcggaggacggtgcttcaacgacagcaccatctgagttggatgaggtgaactcgctgtctgatagcgtatccaatttgacaacggatgatgctacttcaaacgccccatccactgaaaacggaaatggtgtggcagggtcctgatggttatagttatgcagacccagttctttttcccacacacagtgctgttttttttatacagggaacagtgcttttcatggtgctcaaagtcgtcgctaccagaagtggtttttttaatacttctgcttcatgagtatggtagcttgatagatacagcaagtgcagatagatatagatgccctttgttcatggaatctgcttagactatagggggcggggcgggaaagatagtatatgtcgctggccgggtagtttctgtatttgtggcacacgcacccatgcaaggttttacctctttatgtatcttgtcggtcaattcgttcatatgtttattggactggtcatcgcttgtaatgctgttgctgctctgaaccgtgcctgtacataacatacactcaaaagtgtttttgccttgtc

SEQ ID NO: 7132 - DNA, 910 bp, Zea mays
  Clone ID: 700619152_FLI
gagagaggaagacaggaagagagagagagagcgcgcgcttccaggtttttagctgcaggggaggccgatagttctgttctactggaggaggagcagagagcaagatggggtccggatctttcctcaaggtgctggccaagaacttcgatgtccttgccgggccactcatatcacttgcttatcctctatatgcttctgttagagcaatagagacaaaaaatcctgtagatgatcagcagtggctcacttactgggtgttgtactcatttgtcactttgtttgagctaacttttgctccaattatcgagtggcttccattttggtcatatgcaaaactgttctttaactgctggttggtcttaccttggttcaatggtgctgcttatgtttacgaccattttgtgcggccaatgtttgtgaaccgccgaatagtgaacatatggtatgttccaagaaatgagaagctaggtaaatctgatgatgtgctgtcagctgcagagagatatattgaacaaaatggacctgaagcatttgagaagctcatcagcaagtctaccaagtcttcaaaatcaagaagcacaaagcggtcgatcttggaggaggcagaggctgaaagagaatcatggggtgaaaatcccttctacgacaaaaattacagacactaaacctcttcaaaatccacctagcagcttgaagacaacctttgcccacgagcctcatgcaagctttttagttgcatcagactgaagacgaccttcccaaatttctgactctcagtatactataccttgttacattcactgccagtctgtcgctggacaatgatgagttctagagcaattgtggactgtgtttgtaaatggaggcagatgctagcgttgatcatttttcactgtacgtttcttccttc

SEQ ID NO: 7133 - DNA, 1090 bp, Zea mays
  Clone ID: 700619165_FLI
cgcggctagacgcctagactagccccacgacctccacctcgaccagtctcgatcccgtggactcccgattgcctcctcagcaacttccatacccccagcgcggcggtgccggagcgagcagagcagccggagggcctgtcggatccgccgccgtcaagatgaatgacgccgatgtatccaagcagatccagcagatggtgcggttcatccgccaggaggccgacgagaaggccaacgagatctccgtctccgccgaggaggaattcaacattgagaagttgcagcttgttgaagctgagaaaaagaagatcaggcaagagtatgaacgcaaagagaagcaggttgaagtacgcaagaaaattgagtactctatgcagttgaatgcttctcgcatcaaagttcttcaagctcaggatgatctagttaacaaaatgaaagacgatgccatgaaggaacttctccttgtcagccacaaccaccatgaatacaagaaccttttgaaagacctaatcattcagggtttgctccgtttgaaagagccagcagtattgctccgttgccgcaaggatgatcaccatcatgtggaatcagtgctgcattcagcaaagcatgagtatgcatcaaaagcagatgtccatgaaccagagatatttgttgatcatgatgtatacctgccacctgccccaagccatcatgatgctcatggccagttttgctctggaggtattgtattggcttctcgagatggaaagattgtgtttgagagtacacttgacgcaagactagaagttgttttccgcaagaaattgccagagatccggaagcttctttttggccagactgcagcctaatcgactcatctgccgatggtacggctgcttctatgtaatggttgccggctgcacgcctgcactgcagccataaggaactccgcctgtttttgtcaaattgattgtttaaggtattcatcccctatgtacaaactacctattggttcattattgtcgccgagagcaccgactgtttgtactctgtttgctccgaggaataagaataaagcaccgccagactttccatcgcgaagctgaat

SEQ ID NO: 7134 - DNA, 899 bp, Zea mays
  Clone ID: 700619187_FLI
gccaagtagaaagctagcaggcaccgcaaccaacggtaaagctggtggtcgagcaagttttaatttgtcaagagcgagctcatggaggatggcagtgctccaagacgggctactccggcccccacccgcaggagcagatctgccgacttccacaatttttcagaaaggaggaggagggacaggatcaacgagaaactgagggcgttgcaggagcttcttccaaactgcaccaagaccgacaaagcttccatgctagatgaagcgatcgactacctaaaatccctccagctacagcttcagatgctggtcatggggaagggaggaggaatggcaccggtggttccacctgagctgcagcagtacatgcactacatcacggctgaccccgcccaccagatgatgcctccgccgctgcggccctccgccgggcagctgcagccggccgccggccggcagtttcagataacccaccaagcagcagcagccaacaacgacaacgacccccagcgacgacgacagtccaacgtcgagtcggacttcttgagccagatgcagaacctgcacccctccgatcagccgcctcatcatcacaacttcctcaggccgccgagattgcagctctttacgccggaacagaggggcggcggcggcggcctgcctaacacgagccacaacgccggctggatttccgggaggagttcctcgtataattttatggagtgacgtgtgtgctcctgatgatgatgccaaaattaatttgaaacaaccgttctcatcttgaactcagaagacggcgtcagcgcactctgggaccttcagctagcgtgtggtggtgtccatgcatgaatgaatgcagtagtagttatatatatattagcaagctagttgtgtcattaaat

SEQ ID NO: 7135 - DNA, 1248 bp, Zea mays
  Clone ID: 700619188_FLI
cctactgtccccaagggccaccaaacctctgttcctcgctcgcgacggcctcggcctcccgccggcgagcgatggagcggcggtcctccgtccgctttgtgccatccgagattgcaaggatggagaaattggctgcagatagaaaagaccaagtctttgataacaagttctgccagaagcttgcagaagaatttaatcgttctgttggccgtgctggaagtaaagcgttacaagctacacaggttcaaggatggtttcttaataagtttccagcatcagccactaaacctacttgtgtgcccactgcttcccaagaaaagacttcagcctcagaaataaatgtatcagtttctgaaaaaagatctgcagcttccgaagagaaacttttccctcttgatacaggtgtttcaaataatgaggatgaggtttctcctgtttttccattagaaactaaagatatgattcctgaacttgaagacctggagtttgaggccaagtctacaaaggattttgcctggtatgacattgccctattcttggcacacaggaggaacagggcgggtgaagtagaagtccgggtgagattcgagggttttggggcggatgaggatgagtgggtgaatgtcaagaagttcatccgccagcgttccattcctctggagtcctcacagtgcaaaagcgttgttgaaggtgaccttgttctctgcttcagggagggaaacgaggaggcattgcatttcgatgcacatgttcttgaggttcagcggaagcagcatgatattagggggtgcagatgtgtattccttgttgaatacgatcatgaccaaagccaggagagggttagcctgagaagattgtcccggcggccaaagtacttttgaaggctgctcctgttagcctgatgggcatatctattctggaactggaactaaccggagcgtgaaacttaggtgaagttagtttgtggcgtccttggtcatgtgtgtattagcaaccggcggcagcaagcatgggcttgcatctcaacccctttggcacaggactggctgactgaattttatagactcgttatcgtgcagaagagggaagagtacgcggcttgagcacttagggtgtcacttagggtgtgtttggttcgtgaagtcaccttatgcttcatgaggtcatgaggtgtatcatgagttcatcctataattttttgtggcatcaacctattcctcgtttatatattaattattagtttataac

SEQ ID NO: 7136 - DNA, 990 bp, Zea mays
  Clone ID: 700619204_FLI
ctgcctccggccaccgtcagcgggggcggagatgcccaaggcggcttccgccgcctcctcctcttcattggccccgccgcccgacaccaagagagtcggccgaagagactttgtgctcaggagcagtgagattgccacgctcgccgccatcttccacttcagtggcagcaaaccaagctaccttggcgttcagaagagtcctccgtcccttgctctctgccctgcaaccaataactgtgtttccacatcagaggaaataagcgactcaaatcactatgctcccccatggaactacaatcccaaggatgggcggagcggtaaacccataaccaaagaggaggccatgaaagaactaattgaagtcgtcacgaagacaaagccggacaacttcactcctcgcatagtagagaaaaaagatgattatatccgagttgaatatgagagtcctatatttgggtttgtagatgatgtggagttctggttccctcctggcaacaagaccatggttcagtatcggtcggcgtctcgatcaggatttatcgatttcaatgccaacaagaagagagtaaaggagctgagattggctttggaaaagaagggctgggcttcagaaagcaacttctgaattgaagtgagaagggtggaagaggtgcaggtgcatgctactcagacgagccagcacaactgggaactgggattgggtactgcccacgcaaaggcaaaaaagtctctttgtgatggtccctcgttctcattcaggtcagcgattacctagtttgtgtactaggcagcgtaagctagctgctggtgggtggtggtggccatcatgaggattcaggatgcatgatgatcttccatgggtggtgccgggggcgcactaagggaaaaaaaaaaaggatattacatggacagcaaccaccctggctagctaataccaagaaatcattcatatactcctagtctcctaccaagaaaaaagatatatttatt

SEQ ID NO: 7137 - DNA, 739 bp, Zea mays
  Clone ID: 700619237_FLI
accagccctgactccctgaggtttgacggaggttgggttggatgggtggcccttcctctccccgtcgggagaacgacggcgaggggagtggcgggagatctccggctccggcgacatggaaggagcgcccgaggtccttcgacgagaagaccaggacggcgtgttggcgtaaggcagcggtgctggcgggacggcacccggaacgctggcggcaggacgccgtgggcaacgtggtctgccgccgtttctggggctgccacggatgcctctgctacgagtacgaccacatcgtccctttctccaaaggaggagaatccactgttgagaactgccagatcctccagactagggtgaaccgttccaaatctgataaagcatgggtagcgcaagcagagatgcagggtttttcctgcgatattatgtttactgataaggagctagatataattgagatggctgtgtacggggacgtcattcgtccagggaagcaatgtcgctgcagaacagtagccgaggtgctcgggcaggtgaagccaacgaatcgcatggctgcatgtgagttaccagacaaaggtgcctcttaaaatgtataattcgaataaattggtttcgaccctcacctgtcagaatacaaccttttgtagcgcagttgattccattcaacagaggaacttgagttctttctcacaagtcataatcttgggaaatggatgcagttgatctgcagcctgtgctcatt

SEQ ID NO: 7138 - DNA, 738 bp, Zea mays
  Clone ID: 700619294_FLI
gccaaccgcatccagtccacccccatccccctcgaccccgacaaacccgacccgatggcgcccaaggccgagaagaagccagcggagaagaagccggcggccgaggagaaggcggagaagacgaccgcaggtaagaagcccaagtccgagaagcgcctgccggcctcgaagtcctccggcaaggagggcggcgagaagaaggggaagaagaaggccaagaagagcgtggagacctacaaaatctacatcttcaaggtcctgaagcaggtgcaccccgacatcggcatctcctccaaggccatgtccatcatgaactccttcatcaacgacatattcgagaagctcgccggcgaggccgccaagctcgcgcggtacaacaagaagcccaccatcacctcccgcgagatccagacctccgtgcgcctcgtcctcccaggagagctcgccaaacatgccgtctccgagggaaccaaggccgtcaccaagttcaccagcaattgagcagcctgcagcgtccacggatttgttaggtctccccttcttacaagggttcttcgtcgtgtcctctacccctccccgcctatgtatgtgctgtgaaatcgttgatgttctcgtcgggtgaacaaaggccagtagctagcttgcctgcttcataaatcgtgccggattgtaatgggcctcttagatttgacgcccctattttggaatatagttgtatcggtgccttccctgcttgct

SEQ ID NO: 7139 - DNA, 661 bp, Zea mays
  Clone ID: 700619327_FLI
gtggcgatccatccctcaccatgtcgtcggagaaggaggcggcgctcgccgccgtgctcgatgacagcccaaccgtatttgacaagatcatcaaaaaggaaataccttctactgtggtttatgaggacgagaaggtactggctttcagggacataaaccctcaagctccaacacacattctcatcatccccaaagtcaaggatggactaactggcctggcaaaggctgaagagaggcacatagaaatacttggctatctcctctatgttgccaaggttgttgcgaagcaggaaggacttgaagatggctatcgcgtcgtcatcaatgacggcccaagtggatgtcaatctgtttaccacatccacgttcatctcctcggaggcaggcaaatgaactggcccccaggctaagaatatcttgtgattgatcagtgctaatgccaaggactgctactccatttctctagaataatccctgtaatttccataaaagctagtgcgcagtgcgctgaccttgtgctatatttgtggaattaccggaagcatgctgctgtgatctatgattggacacaagaaacttgtaactggtactcctatcatcgattgacttgtccttattgatcagctgatgggggttgcccactggccttgctgatctgcag

SEQ ID NO: 7140 - DNA, 1125 bp, Zea mays
  Clone ID: 700619353_FLI
gctaaacaggtacaagaatctctgaaggttggccaatcaattatacagaaattttgggcaagagtcctgggtgtgggccctgctcttcgtgctgttgcttcaatgagcagggctgattgggcagcaaaacttaagcattggaaggatgaattcgtttgtacactgcagcattactggttagggacaaaactactctgggcagatgttaggatctcatcaagattgctggtgaaacttgctggggggaagagcctttcaagaagagagaggcaacagctgacacgcacaacagcagatatcttcaggctggttccgtttgctgtgttcatcattgttccattcatggaattcttactgccagtcttcctcaagttatttccaaacatgcttccatcaactttccaggacaaaatgaaggaagaggaagcattaaaaaggaaattgaaagcaaggatggagtatgcaaaatttttgcaagataccgcaaaagaaatggcaaaggaagttcaaacatctcgtagcggagaaacaaaacaaacagctgaagatctggacgaatttttgaataaggttaggagaggtggacgtgtctctaatgatgaaatcttgaattttgcaaagctattcaatgatgaacttactctggataacatgaacagaccacgcttggtaaatatgtgcaaatatatgggtatccggccttttggtacagatcactacatgaggttcatgcttcgcaaaaaacttcaggacattaagaatgatgataaactgattcaagctgagggagttgaatctctctctgaagaagagctccggcaagcctgccgggaacgtggtcatctaggcctgctgtcaactgaagagatgtgccagcagctccgagactggttggacctatcacttaatcatgctgtgccatcttcacttctcatactttcaagagcctttactgtgtctgggagaatgaagccagaggaggctgttgtagcaacactatcttctttaccagacgaagttgtggatacaattgggacagtattgccatctgaagattcagtttctgaaaggaggagaaaattagaattccttgagatgcaggaagaacttatcaaggaggaagag

SEQ ID NO: 7141 - DNA, 750 bp, Zea mays
  Clone ID: 700619361_FLI
gttctacgtccgagtcgtcgcatcaggtcccctcgattcgccggcggcgccaccaaccaagctcatacatctgaattgactagtcaaactcagtgatctctttggggactaatcaaactcaagaactaagtttcatgtctgatctcgacgtccagcttccatctgcttttgatccgtttgcagaggcaaatgctgaggattccagtgctggtgctggatcaaaggactatgtgcacgtgcgtattcagcagcgcaacggaaggaagagtctgacaactgttcagggcttgaagaaagagtacagctacaacaagatcctcaaggatctcaaaaaagagttctgctgcaatggtactgtagtccaggatccagagctaggccaggtcattcaactgcaaggtgatcagcgtaaaaatgttgctactttcctagtccaggccggaatcgtgaaaaaagatagcatcaagattcacggattttagactgcaaattttaagtgcttgtgtgtgcctatcataagataccatatgataccaggtattgaagcttcggaagcttgttagccttcgtaacatcagtagtcgttattcatctgaataatgcgtcattatttgatttgataagactggtattgatgcaagttgtccttgcagtatgttttgtaagtgttacctgcatgaaagtatcgtttgtctggggaactgtctactactgatattgaataacgagagattgctgttcgggttcgtc

SEQ ID NO: 7142 - DNA, 497 bp, Zea mays
  Clone ID: 700619423_FLI
cacgcctagccggtgtgcttgtggtcgtcgtggagtgtcgccctggtgataacgaggaatggcgccggaggctggagagccgtgggtcggctgttgccaatggtggcggtggtgatggatggcataagccaaagacatgggctgagctggagaggcttctggaagggtaccaaggttgcacagactatgaaattggagatgtaccgaggattgtagtggatacaactgatccgacagttgatgaacaggtggtagctgaaaaggttgtggttttcattagatcccatcttgcttgtagccaaccatcttgtgggagacaggattcacctgtttgccattagaaaccaaaatgtacactagcttaagcattaggtaaagtttcgttgcaaaaggttgatctgttgtactgcaatgctcaaagttcttttttttatgggtgtaacctaaaggttctgttactgttgagacttcaaagggattttgttgttgttgttgtg

SEQ ID NO: 7143 - DNA, 1588 bp, Zea mays
  Clone ID: 700619436_FLI
ccaagacccaaaaccctaacccctacgacccccgtgaccgccgccgccgtcgatgcctgcgctctccgacgtcgcgcttcaggctgccatcgccggcaacctccgcctcctgaagctggtggcgagcaagatgaatctgcgcgaagcgaaggacgccgctgggcggaacgcgctccacctggccgcggagatgggccgtcttgaggtttgcaggttcctggtggaggaatcgggcttcgaggtgaacttcgcctgcgccgaaggcgggtcgccggtccactgcgccgcggccgggggcagcgagagcgtcttgggctaccttctcgaccacggtggcgaccctgtgatgccggactccatgggctccactccactgcatgatgcggcagaggaagggcattgtgcggctgtgaggatgctgctgtccaagggtgtcgatgtggatccacacggctgtcgtgggacgccgctgcacttggcctgctccaatgaccgggatcaggttgttaggatcctgctggaacatggcgcagatcccaacaaagttgtcggtcatgtcctcccaccactcatgatggcatactgtggcggttctttgagatgcatgaagctactgattgaggctggtgcggatgtgaacttgattgctccttctggagtaattttggctcaggcagtttgtgatgggtcaactgagattgtcaagtttttgctagaggttggagctgatcctaacattcctgatgaggatgggaaaatcccgatcatgtacccagcatttaatgggcatcgggagcttgttgaaattctatttcctaagacaagaccagtttcatctttgccagactggagcgttgatgggattattagaagtatgaaagatctgtttttcaagcctcaggatgcagctgtggtggaaaaaaagatagctgatgcgaagtcacaagggaaggaagctttcgcaaggggagagtaccctgcagcagtatacttctataccatggtactagagaacgaccttgatgctactgcgtttgccaaccggagcctgtgctggttgcggctgagggagggggccaaggctctgttagatgctcaacagtgcaaaatgatacggcctcgttggtcgaaggcatggtatcgcgagggcgcggctctcagcttgctgaaggactaccaaggggcagtcaacgcgttcacggaagcattgaaactggatcctgcaagtttagagatcaagaaagccttaagggaggccaccgattccctggcgaacgttggccgctccggagaacagaacccatgagctgctgctgcatccatgtgctttatctcacgttaagaatcctctaacactatgtggctcagcctcatattatatgttgatatatgtcgccttaacgcactgctggagatactagtttcgatctcagcctatatgttttgctccttcgggatgcagcctaagatacatgtggcaaccaagtgaggttgggcagggtagcatatctatggactggttgaactattatatgtatctggatatctaagtgcacctgttgctcctagtaaagttgcagttctaatg

SEQ ID NO: 7144 - DNA, 238 bp, Zea mays
  Clone ID: 700619481_FLI
cttgtttgggtaagaagggattgaagtggattaaagtgtattttagggattgaaagggaaattagttcatattacacttcaatacaccttataccacctcaatccactccaatccaagattacccaaacatgccctgagcgggattcggatctgcagagccgaattagtactaaagtttcaaaatttcacagagttgtagggtcgagaattaaatgtgtcgaaaacacgttagcgacc

SEQ ID NO: 7145 - DNA, 1567 bp, Zea mays
  Clone ID: 700619560_FLI
gcttagattcgtgtcttaaaccatctctccaatcctgattctagtgtttttgacccacacattacatgatctcatgtaatttgatacttttggcagttctgactggacctggtgtcctacacctcttgtaaattatagaagcatccaccaacactcactgcatttcttctcctctttgactctggactcatacacaggctttgcaaatctgtcaagtgtgttgacaataagattggacacatcagcctcaccagtgaaagtgaaacgatcttccttggtagcctcctgatgtgcaaccggtgccttgtctgaagcatctgctgtattgggcttggacacgatgccaaggattggtgagtcctccagttttggcaaggaagcaaactgccgaacgttgttgatttgctctcgttcttcttcattgtgctttgttgtcccttcctctatcacctccaccacttgctcttccttaggatcatcacttactgtaggcccgttgactgcatcagaaggatcagccgcacattctttctgacccttccgtgctgccgcccccaccttggatcttgctgacctcctcctccttctctttgtcgtggccacttcttctgccgtagcttccggtgccgctgtcacctggcctgtctgcacctcctcgtgtgccttgtaaatataagctgtagccctcttagtgacattcttgccttcctgtggttttgtggcctcctccaccttgggaacaacttcatcatatttaggatcaatttcaggtccaacggttgtgtcagaagaatcagctttctgccccttctgtgctgccgctgctaccttggatcttgtggaccttctcgtccttttctttgccatggacaactcttccgccgtcctctgatccggctgcaaatcctcatgtgtcttatatggcgcggctctcctcgtcacgttttgaccttcctgtggctttctgacctcttcttcctccaccacacctactactattgcatgctcttctgaatcctcgcagctcttatctttctgctccttccgggctgccgccgcttgtacgtcctcctctttctgatccagcgcgaccttcaccttggatctcgctgaccttctcgtcctaattcctacggccgcctcttccgcatcatccacaggtgccgcagcagcctcccgtgccaccgtcatcttgggtcccggcaaggtctgtgggcccggcaccatcacctcctcctcatccccctccgtcttactcttccgtgccccggccttccttctcttcccccgtgcacggccgccgcgagggagcgggcacccgtgctcctgctcccctccgaccgcctcttccgcatccggcgtctgttccttcatcgccgataccggcggtggcgccgtgctcccgatctcgtcgatcctgtccaccgcggggaggcacctaagcgcttccgccatggccgcgttggacatgttggcacggatgccgctgctcttgcagagcgcctgaagttctcgccgggagagggagtggaaatccatggccgccgccgtctgcctcttctctcgc

SEQ ID NO: 7146 - DNA, 740 bp, Zea mays
  Clone ID: 700619633_FLI
cctcgctggcctacggcggcgacggcaagcccttctacgaccagaacgcgcaccggcaggagctggtgagctggctggaccgcgtcggcggcaaggccagcccggccaccacgttcgacttcaccaccaagggcatcctcaacgtggccgtcgacggcgagctgtggcggctgcgcggcgctgacggcaaggcacccggtttgatcgggtggtggccggccaaggccgtcaccttcgtcgacaaccacgacactggctccacgcagcacatgtggccgttccccgccgacaaggtcatgcagggctacgcctacatcctcacgcaccccgggaacccatccatcttctacgatcacttcttcgactggggcctcaagaacgagatcgcgcacctggtgtccatcagggaccgccacgggatccaggcggacagtgagctgcgcatcatcgaggccgacgccgacctctacctcgctgagatcgacggcaaggtcatcgtgaagattggatcaagatacgactgcgggcacctcatcccagaaggcttccaggtcgtggcgcacggagatggctatgccgtctgggagaaaaactgagccaaatctgtgcctgatccgtccgtccggtccggcacgacgagttttagcggatttgacctgcattttccttagcttattattactccaaatacgggatatatatagcgacaacctgtattcgagatacatgcgtgcccccag

SEQ ID NO: 7147 - DNA, 451 bp, Zea mays
  Clone ID: 700619743_FLI
atcggactgtgcaagcacgagagggggatacagcggattcataaaccgtcagagtgttaggacaagatggtggccaatggtgatgtacctgctagagggagcgcggcggcagccgcaagcctgcgtaggcgtaggaccacaagtggtgctgctgctggtggaggcggtaccagctcaatgctccaattctacactgatgaggctgccggccgcaaaatgtcaccaaacactgttctgatcatgagtattgggttcgtagccgtcgttgctgtgctccatgtattcgggaagctgtaccgcacctccaactaggttggcattgccatatccaagaaagctgagtccaccaagagaggattcctgtagaacaatttaaatggatagcaagtgactatcagactctgttgtagaagtttatttatacaacttgcaatgctgcgaggctattcat

SEQ ID NO: 7148 - DNA, 612 bp, Zea mays
  Clone ID: 700619788_FLI
ctggcttctcctccccctcttaccaagtcctcctcgggttagggttccttagggttttgtggaggggcgatggcggcggctgatgtggagtaccgttgcttcgtcggcgggcttgcctgggccaccagcaacgagtcgctggagaatgccttcgcctcctacggcgagatcctcgactccaaggtcatcaccgaccgggagacggggaggtctcgcggcttcggcttcgttaccttctcctccgagaactccatgctcgacgctatcgagaacatgaacggcaaggagctcgacggccgtaacatcaccgttaaccaggcccagtcccgtggcggtggcggtggcggcggtggctacggcggcggtcgcggcggcggcggctatggtggcgggcgccgtgacggcggttatggcggcggtggcggctacggcggtcggcgcgagggtggtggcggcggctacggaggcggtggcggctacggcggtcggcgcgagggtggtggtggcggctacggcggcggcggcggcggctggagggactgatgtgtgggcccatcctggcttcggccgagttatcttatctatctatagtatcgtgttaccgttcgcttc

SEQ ID NO: 7149 - DNA, 784 bp, Zea mays
  Clone ID: 700619889_FLI
gggactgttcatattttctccctgagagtcagagttgctggagtggattcaagcaatgagcaacgcactcttgaaggtccacggatggatcaccagaactcttccagttctattgatcctcttattcaagcgaacactggatccaacgctagttcatcactgtcttttatgagagggatcctgccgaagtatttcagttcagagtggtcatttgctcagttccatttaccagaagtcactcgttacatagtagcctttggtgcccagaatactgtgatgatggttggcctggatggcagcttctacaggtgcagctttgaccaagcgaatggagggcagatgttgcagagggaacatttccggtttctcaagtccgacagcccacctttcaggactgcagccgcttgacctgcagcgcgaggatcatccatcccaccatgtaaatgtcgaaggtccactgtacatatcgccttctcttaccggcgaagttataggcagccggaataaggagagctggctgttggatcgaagcctacaggattccaacgttcggatcggcgccccgtccaaattgcaggcatttctttgccgttccctcttctttcttcaaacgagaacacgcacccattgctggtacagaacatgacataaaagattcagtaacatgatttgaccgtgtggcattgtggcgcctgcaaggccgtgtagcgaatctcagacctgttcttgccagtggcttgttgatgctgatgactgttacgcactacctcaatgttctttctgc

SEQ ID NO: 7150 - DNA, 580 bp, Zea mays
  Clone ID: 700619965_FLI
gctgagtcttctctaccaaagaaacaattaactggcgtctatgatttggttgctgtcttgacacacaagggaagaagtgcagactctggccactatgttggctgggttaagcaagatgatggtcagtcaactagtattacagctcatttactataacaactgtttcattttatacaggttagttactgaaattccatattaaccatcaggaaaatggatcgagtttgatgatgacaatccgaacattcgcaaggatgaagacattttgaaactttctggtggaggtgattggcacatggcttatatctgcttgtacaaagcccgcatggcagaatcaaagagttaggtcgaattggttctacatttctgtattgcgaatgcaacactagtttttgtgcccatgagcgagcgtggtaattatttttccagttcgtaaagtggttactggtgaatttgcttcaattatgttcgccattattcacccggatatgtatctttaggatttctagtacattttgtgttgtcaaaatataggacaaaaaattcaggggaaagcttttgccttcagcggatctgattt

SEQ ID NO: 7151 - DNA, 468 bp, Zea mays
  Clone ID: 700620026_FLI
cctatctggtataggacggagctgagcttctagcaacgtacagtgtatccgccatgagtcctttcggggcggtgatcacgccagaaaccctcaagtacatcccgtgggacaacataccgacacgagcttacactgaaattggcagtgaaaactacttcaagactcggtggagtagtgtcaaaacgagtctaggacattcaaggagagtgacccgtgccaaggacgagaactgtgcgtcaactgtcagcatcggtggctacactacagccttctgcatcgcagtcctacaacaccagttccagccgctgccggaagagcgcgaataatcaatcaatcgatcgatcgagtttgcgatcgtgttacctcctaaataaaagttgtacacgcgaagtactactccagtatttacatgtatgtttctagcaggtgtacgtacgctactcctgaataaattgtggtgcacgcaat

SEQ ID NO: 7152 - DNA, 642 bp, Zea mays
  Clone ID: 700620035_FLI
gtcgtgcgctcgctacccctctccctcgaggcctttgccggcgaagagcgcccagtcgcccaccaggatgaagtttgttgctgcctacctgcttgctgtcctcgctgggaactccagcccctctgccgaggacttgacagccattctggagtcagttggctgtgaagttgacaatgaaaagatggaactccttctgtcccaactgagcggtaaggacattaccgagctcattgctgctggcagggagaagtttgcttcagtcccatgtggcggtggcggtgtggctgttgcggcagctgcccctgctgctggcggcgctcctgcagctgaggcgaagaaagaagagaaggtggaggagaaggaagaaagtgatgacgacatgggcttcagcctcttcgactaagcctgtgcaatagtcaagagtattgtttttgagtcgcggaagcagagggaagaaaaatcgtagtcatgtttggactttaactttgttttatgttggaaagtacttgaaagacttttcctgtggtaattctaggcgtaggttgctgtgctggttggggtttactggtgaaccagagtttttctatctcccactatgaatttgttacctcaagttacctggatgttcactattttgttggt

SEQ ID NO: 7153 - DNA, 679 bp, Zea mays
  Clone ID: 700620068_FLI
gcagcatatgtcaaaagtgtagttgacccaacagaaaggctaaagcaaatagctgagatgcttgctatacattactacctcttgtttaatggacctgatgggatttggcatcatatgaagacattctacatggaacaatctactttcagtttctcagagaacgtgtatgttggccagaatgaaatttttgatattttgtcaaatataaggaaaaagctaaaaggtgataggcctcgagagaaaattgttcatgttgtcgagaagctacattgtcgtgcaaatggtgaaactggggttgcaattcgtgtgtctggatctttcattgtgggaaaccaatttcttgtatgtggcgaggggataaaagctgaagggatgcctagcttggatgagctctctattgacattccaagcaaacgcgtaggccagttcagagagcagtttatcatgcaaccgggaaacttaatgtcatgctattacatatcaaagcaagatctgtacattatccaatcctgattgaacatattatttgtaagattattctctgaagcacatgtatagaggatttagaagaattcctttcggacctggttttgaatcttatttactttgtggaactgaaattttgggccaaacctctgacaagaattgaaaagtttaagtcttcaactatattcatgtt

SEQ ID NO: 7154 - DNA, 1237 bp, Zea mays
  Clone ID: 700620119_FLI
gccgccacagcagaagccgccaatgccgcaacagcaaagcatggacattgtcatggtgccggccgagacgacgccgcacgccgacatcccggtgcacgaggggtccagtggcggcgcggcgtcctcccggtggcccaaggcggaggttcacgcgctgatacagctgcggagcaaccttgacacccggtaccaggaggttgggcccaaggggcccctctgggaggagatctccgccggcatgaggcggatgggttacaaccggaacgcgaagcggtgcaaggaaaagtgggagaacatcaacaagtacttcaagaaggtgaaggagagcaacaacagccggatcgtctttcctgggcatggtccagtgatcgatccgtctgcgcgcacccaggcattatcccccggtgactctcatcctcctccacttctccatggcttcttttctttctctcgctcgcatgtgacatttgtgtctacccacctgtcgcctccatgcatgctcgtccatatctctagttctctacacctctaaaccaaaaatcacaagaactatctccctcagctcctccatgctccggcaattctccattcctcatatatgcacctagcaacacctcgatccatgtcgtgtcgtcgtcgctgctgcatgcctacccccctttttttgattcgttgctgtgttaattatagtggtcgcctctttagatgttacagtaaaaaaatattggcggtgatgcggttatttattgatttgttctggtaattaataagaaccctcaagctttggggtgttcacggagaggttgagttgatgcggtgaaaacagcacgtgaaagggtaatgagagatcgatcgcgcggttaaggagacaaggtgacaagaaaggcagatgacgcagtgggtgtttgcactgttactgcggtaaattttgtgcatgcggctactactctacagtgggctagtttgttgcaagggagctgcggaaaaaaatggaaaagaagagcttgctcgtcatgtgccatgaagaacagtcagtttgatgcatgcgggatttttatatttatccttgttttcccctctttttcatttttcaccatttcttttatgttctgcaacaagtaaactgtccattaagtattacctaagttttttctttctttctttctttctcaaactgctgttaccgaaatttacagtgtatacttgagaaatgttatatgttaaaattcttgctgtt

SEQ ID NO: 7155 - DNA, 2201 bp, Zea mays
  Clone ID: 700620156_FLI
gctgaaggttcctagttcaatgttggtttcggagatgaatgacagtgctgtcgaagctgcgcctatagaagaggatcatgctcaagacatgtctgaaggtgaggacggtgagtttgcagaagagatttctgaagacgaggatggtgagtttgcagcctctgatttgaatgatgaagatggtgatgaaatggataacacccaaagacaaccgtctcacatgcatgttcatgcatctgaatctatcgaggaacctgtccatagacagtcccagctcagcaatgctgaagagggaatggaaactggcattgcacacgtggatgcatatatggtagagccattggcagagaacaatgttttctctgaaacaaggtatgaaatggaggctccacaaaatggagctgaaactcctgttgttgatctttacagagatgcagaagagcaaccattggcagagaataatgattgctccgaagcagagaatgagatgaacaagagtgagtttgaaactggtgttggcaatcttgatagagatgaacaagagcaactattggcagagaataataatggctctgaagtaaggtatgacatggaggctccacaaagtgaggttgaaactggtgttggcagtcttaatagagatggcgaagagcagctgttgacagtgactgatggttactctgaattaagacatgaaacagggactccacaaactgaagttgaaactgttattgatgatatcagtagggatgagcaagagctgccagcttggtacaaaatttttgatctcaacgtcattgaaactccactgggctgtgaggtttctgagatttcttgtggtcatccagcagatggtctttgtgattctgtgcctgatttagttggtctggtgaaccaacaagcaaacaatgatacctctgaaattcaaggtcaagatggtcatgcaggggccaatcaagtgttagaagatgagtctgatttgaatagctatgatctgaacaatgaagctgatgaagatgcacaggatgatactttagaaaatcaagttcaagacgagaatgtagaggataatcacttactggaggatgggcatgatttgacgaggtatgttgtgaacaatgaggctggtgagcatgcacatgataatcacctgatgaaaaatgcggaaatacttctaaatcatagtatggttgcacgtatttcagaaaattgccatatgaacaatgagaaaatgcttctaaagcaaaatgtggatgagcaacagatggagaacgagcagatgcttatagatcaggtcactagtgttcaagttttggatattcaccatgtgcacgatgaacagttactggtaggtcatgctgcagatgatcatcaccaaatggaaccaaatcccatggctttttctttgggtgttcatgatctggataactactatctgagcagcaagcaaatacttctgtataatgatgtaggaggtatacaccatttgaaggatgtgcaaattattttagatgaggctgcagatggacaagctagagttcacaatatgggccatgggcgaacgattcctggaattgatctggaagatgattatgcacaggtgtctgccatcagaaatacaggagaatgtctagaatctgcaagtgatacctcgcacgaatacacggataatgttctacaagaacatatgtgttctcaagactagcaaacctcaagttttggtgacaatcctaagactaacacacaagcagcttcttcttcaactgtcaccagattttcaaaactggtgtactggaaatgatgctgtgaaggcacaggtgattcccatttctcagtgatgatgtgttgtatattggattcaacaatatgccattagaacttgtgaatgtctgggacctgccatcctctgagcttgggaaatccttgtgagctctggcaccctgttgtccgtgcattcagatactaacacaccggaccatgggaggtctgcaccggaccggtcgctggagctagttagtcgactggtcgttgttatgtacggagtatgttgtgcaatagtagtttcttttggattcctagtgctcactttttttttccagagcttttcattgacaagtcggtttagtgacacttctgccttcccgagatatagctgcgatgtcagtatgtctcagtagctgaatatatcatatttttttaactag

SEQ ID NO: 7156 - DNA, 875 bp, Zea mays
  Clone ID: 700620166_FLI
cgagctccgaaggccgcagcatcaggcgcggcccccctcgcgtgtgaccgagatggcgctgccgaatcaggggaccgttgattaccccagcttcaagctcgtcatcgtcggcgatggtggaactggtaaaactacatttgtgaagaggcatctcactggagagtttgagaagaaatatgaaccaaccattggtgtggaagttcatccgttggatttcaccactaactgtggtaagatcaggttctactgctgggataccgcagggcaagagaagtttggtggcctcagggatggatactatatccatggccagtgtgcgatcatcatgtttgatgtaacttcaaggcttacttacaagaatgttcctacgtggcatagggacctgtgcagggtctgtgaaaacatccccattgtcctctgcggtaataaggttgatgtgaagaacaggcaggtcaaagccaagcaggttactttccacaggaagaagaatctgcagtactatgaaatttctgccaagagcaactacaactttgagaaacctttcctgtaccttgcaaggaagctggctggtgatccgaaccttcactttgttgaagctgttgctcttaagcctccggaagttaccatcgacatggctatgcagcagcagcatgaagctgagcttgctgcagcagctgcacaacctcttcctgatgacgatgatgatctgattgagtagaaaggatcatgagtcttgaacttgagcaggagttgtgccttgcgtgttttaagttgttctagggtgaactcttgagttctcattgtctggatcatctttttctccttggatgtgttgcatcttttgagtgtggaaatggatggtactcctcgccatg

SEQ ID NO: 7157 - DNA, 1657 bp, Zea mays
  Clone ID: 700620227_FLI
tagccggcgcgccgtcaccgtatcctcagatcagcggcgagcagaaaccacaccactctactgacgcccgacgagccatgggtaaggagaagactcacatcaacattgtggtcattggccatgtcgactctggcaagtcgaccaccactggccacctgatctacaagcttggaggtattgacaagcgagtgattgagaggttcgagaaagaggctgccgagatgaacaagcggtcattcaagtatgcgtgggtgcttgacaagctcaaggctgagcgtgagagaggtattacaattgatattgccctgtggaagttcgagaccaccaagtactactgcactgttattgatgccccgggacaccgtgacttcatcaagaatatgatcactggcacttcccaagctgactgtgctgttcttatcattgactcaaccactggtggttttgaggctggtatctccaaggatggccagacccgtgagcatgctctccttgctttcacacttggtgtgaagcagatgatttgctgctgcaacaagatggatgctactacacccaagtattcaaaggcccgttatgatgagattgtgaaggaagtctcttcctacctgaagaaggttggatacaaccctgataagatccacttcgttccaatctctggttttgaaggtgacaacatgattgagaggtccaccaaccttgactggtacaagggcccaaccctacttgaggctctggacttgatcaatgagccaaagaggccttcagacaagcccctgcgtctcccccttcaggatgtgtacaagattggtggtattggaactgtccctgttggacgtgttgagactggtgtcattaagcctggtatggttgttacttttgggcctactggtcttactactgaggttaagtccgttgagatgcaccatgaggctctccaggaggcccttcccggtgacaatgttggcttcaacgtgaagaatgttgctgtgaaggatctgaagcgtgggtatgtggcctccaactccaaggatgaccctgccaaggaggctgctagcttcacctcccaggtcatcatcatgaaccaccctggccagattggcaatggctatgccccagttctggactgccacacctcacacattgctgtcaagtttgctgagctcgttaccaagattgataggcgatccggcaaggagctggagaaggagcccaaatttctcaagaacggtgatgctggtatggtgaagatggttcccactaagcccatggtggtggagaccttttctcagtatcctcctcttggtcgatttgctgtccgtgacatgaggcaaacggtggctgtcggagtcatcaagagtgtggagaagaaggacccaactggagccaaggtgacgaaggctgctgccaagaagaaatgatctatctggctggtgctgtgcttgcttgttggttacctcgtggaagcttaaaatatctcgtcttgttgacatccttgcagttgtcgcgtgaacaagtaatctatgatggcaatgtttgcctggtcatgaagtattattactttcgttgaaaccgtgatgctattaagacttaatttttttatggaacatcgaatgtaaggcatacatggttatgagttttgtactacccttgttgc

SEQ ID NO: 7158 - DNA, 886 bp, Zea mays
  Clone ID: 700620278_FLI
cagaagagcggcggcgcggacggacaaggagcaggcggaagaggagttgtgccaaggcacaatgggtatctcgcgtgactcgatgcacaagcgccgagccaccggtggaaagcagaaggcctggaggaagaagcgaaagtatgagcttggtcgccagccagccaacaccaagttgtcaagcaataagacagttaggagggtccgtgttcgtggaggtaatgtgaaatggagggctcttcgccttgatactggtaactactcatggggaagtgaagctgttacccgcaagacccgtatcctcgacgtggtctacaatgcgtcaaacaatgagcttgtgaggacacaaacccttgtgaagagtgccattgtgcaagttgatgctgccccattcaagcagtggtacctcactcactatggagttgacattggtaggaagaagaaaacccctgctgcaaagaaggataatgctgagggacaagaggttgaggcagcagctgaggaaacgaaaaagagcaaccatgtcacgaggaagcttgagaagcgcaaggagggacgtacccttgacccacacattgaggagcaatttggcagtggacggttgctggcatgcatttcttcccgccctggacagtgtggccgtgctgatgggtacatccttgagggtaaagagcttgagttctacatgaagaagctacagaggaagaagggcaagagcgctgtagcttagagcattctcatggattgtcttgcaccgaaatgtgtgtcctgatgagtacactttttttggttagtcgtctcaagttcagagcgttatgccatgttttcagacctgattagtacactcttttctaaaagcgattgagctctagtccaatgtattgataat

SEQ ID NO: 7159 - DNA, 893 bp, Zea mays
  Clone ID: 700620440_FLI
caccaccgcacgcctcccactcgccgtctccgctcgcctcccaaacccaagcagagaacactagcgttccctcaccagggcgtccatcccagcagccatggcgatggcgtacaagatggcgacggaggggatgaacgtgaaggaggagtgccagcgctggttcatggagatgaagtggaagaaggtgcaccgcttcgtggtgtacaagatcgacgagcggtcgcgcgccgtgctggtggacaaggtgggcggccccggggaagggtacgaggagctcgtggccgcgctgcccggcgacgactgccgctacgccgtcttcgacttcgacttcgtcaccgtcgacaactgccagaagagcaagatcttcttcatcgcctggtcaccggcggcgtcgaggatcagggccaagatcctgtacgcgacatcgaagcaaggcctgcggcggctgctggacggggtccactacgaggtgcaggccaccgacccctccgagatgggcttcgacgtcatcagaggccgcgcgcaatgaggcccccgctgcgctctgctcctatttacgtacttacctgtgcgtgggcgtgttctcctactactcactgctcagtagtcagtagtcatctgcgttcgtgtgtgtgtgtgtgtgatcggccggatgctaattggcgttggtgtgctcccgtagcgatcgatgctgccaatctgacgaggcttcgcgtgtgtttgctttgctattttcggttctcgggagagatggtgcaggcgtggtgtgttgatgttgatgggtggagtagaagctcaggggagtggcagcggactaatgaaacgtccacctctgcgacgtagaattccactgaaaaaaaatgctccagtgtaccataagctgcttcagattt

SEQ ID NO: 7160 - DNA, 408 bp, Zea mays
  Clone ID: 700620480_FLI
tattgcttcagttaccaatgatgacccagcgtaagttcaatcctacgaaggatccttgttcagtaatatgggatgtattatgggatgatttggtaacagtggagatgacccatgggaaaaaagatcctccagattcctggccttctaagcttattttatacttgaaagctaaaccttcaaattcgaaggaaattgttcgtttggtcaagtgtaatcgaggttcagatcaagcatctatcatttactcggcaattgacaaagcttataaagcttacggtccaaactcgttgaaggaattcttgagatggaaggtaccaaggccatatgcccctcgcaatagtagtggccgaagtatcctaagattctactgtgtttaacactaaagtgtgcatttgtgttctagatcgc

SEQ ID NO: 7161 - DNA, 1266 bp, Zea mays
  Clone ID: 700620543_FLI
gctcctctccccatcctgcacgctcctccgcctgattcccagcgcgtcgcacttcaagagattcgatcgggttcgccggttcgcgcccgccgccatggcgacttcctcaggaccaaaggaggcgccagcgaataaccctgggctccagaccgaggtcgaccccgccaccaaaggctacttcttgcaacaaacgatgttacgtgtgaaggacccaaaagtgagccttgacttctactcacgtgtgatgggcatgtcgttgctgaaaaggttggattttgaagagatgaaattcagtttgtattttctaggttacgaggatgtgaccttagcccctgatgatcatatcaagcggactgaatggacttttaggcaaaaagctactcttgagctcacccacaactggggcacggaaaatgaccctgaattcaaaggttaccataatgggaactcagaccctcgtggttttggtcatataggagtaactgtggatgatgtccacaaggcatgtgaacgctttgaacgtcttggggttgagtttgtgaagaaacctgatgatggaaaaatcaaaggcatcgctttcatcaaagatcctgatggttactggatcgaaatatttgaccagacgattgggacggtaacttcttcagcatcatgatgaacagtagtggttccttatatggtgcgcaagatcatacaactctggcataagagcttttcatatgtgtgtctggggtctggactcggattaagggctggaatctgtttacttctagcatcttcttgctttaataatatgcgaactatgttgaggaatgaaataaaataagttcgggtaaaaattcaagtttctgttgtcctgaccggtggtcccgcctgcatgcacactccccagcgcgggcacgtcctgtgccactgccttgtgggcccggccgcatgcaagcgcatgccttggagttacggttggagttggaggttcccccacctggcgacgcgaattagggctgggcaaaaaaaatccgaaatccgaattttgttcgggaattttgggtagtaacttgcaaaacccgaatttattttgggcatcataatcgggtacctgaattacccgaactttcatgtgtcatgtactcacgtcgtgtttaattattaatttgtacatctataattatgtgtacgtgtgcataacttgtgattgtagattgtttgtgttttatatgtccatgtatattaaaattcaaactatatttttatgctaatttaataggt

SEQ ID NO: 7162 - DNA, 1653 bp, Zea mays
  Clone ID: 700620565_FLI
ggcgtcttcgtactcgcctatctccgcgacccaaagcgttcccccttctcccattcttctctcatttctcaccaccgccgccgctaccccctttcgacaacaccatgagggagtgcatctcgatccacatcggccaggccggtatccaggtcggaaacgcgtgctgggagctgtactgcctcgagcatggcattcaggctgatggtcagatgcccggtgacaagaccattgggggaggtgatgatgctttcaacaccttcttcagtgagactggcgctgggaagcacgtcccccgtgctgtttttgttgaccttgagcccactgtcatcgatgaggtgaggactggcacctatcgccagctcttccatcctgagcagctcatcagtggcaaggaggatgcagccaacaacttcgctcgtggtcactacaccattggcaaggagattgttgacctgtgccttgaccgcatcaggaagcttgcagataattgcactggtctccagggcttcctcgtcttcaacgctgttggtggaggaacgggctctgggcttggttctctcctcctggagcgcctgtctgttgactatggcaagaagtccaagctcggtttcaccgtgtacccatccccccaggtgtccacatccgtggttgagccatacaacagtgtcctgtccacccactctctcctcgagcacactgatgttgctgtcctgctcgacaatgaggccatctatgacatctgccgccgctcccttgacattgagcgcccaacctacaccaacctcaacaggcttgtgtcccaggtcatctcatccctgactgcttccctgaggttcgatggtgctctgaacgttgatgtgaacgagttccagaccaacctggtgccctaccctaggatccacttcatgctttcgtcctacgctccagtcatttctgctgagaaggcctaccacgagcagctgtccgtggccgaaatcaccaacagcgccttcgagccatcctccatgatggccaagtgcgacccccgccatggcaagtacatggcatgctgcctcatgtaccgtggtgatgtggttcccaaggacgtgaacgctgctgtggccacaatcaagaccaagcgcaccatccagttcgtggactggtgcccgactggcttcaagtgcggaatcaactaccagcctcccagcgtcgtccccggcggtgacctggccaaggtgcagcgtgccgtgtgcatgatctccaactccaccagtgttgtggaggtcttctcccgcattgaccacaagttcgacctcatgtacgccaagcgcgccttcgtgcactggtacgtcggtgagggtatggaggagggcgagttctccgaggctcgtgaggatctggctgcgctcgagaaggactacgaggaggtcggtgctgagtttgacgagggtgaggacggcgacgagggtgacgagtactagacgctctactggcgcggcgtcgtcgggcttgtgtgccactgctatcctgtgatctgccctgagtggctcctatcgtgttatgtttctgtcggttcttatctatctgtcgttgtgtggtttacaacttacgttgtaagactttattcccccgctttgctactgggttattaagtttggcgttattgttttcttg

SEQ ID NO: 7163 - DNA, 683 bp, Zea mays
  Clone ID: 700620571_FLI
ctcgcttcaagctcctcatctcgcgcagggggggtcgcctgagatcacagcgacaatggtgaaggcagttgctgtcctcgccggcactgatgtcaagggcaccatcttcttttcacaggagggggatggtccgaccaccgtgactggaagtatctctggcctcaagccagggctccatgggttccatgtgcacgcgcttggcgacaccaccaacggctgcatgtcgactgggccacacttcaatcctgttggcaaggagcatggcgcaccggaagatgaggaccgccatgccggtgatcttgggaatgtgacagcgggagaagatggtgttgttaatgtcaatattactgacagccagatacctcttgctggaccccactcgatcattggccgagctgttgttgtccatgctgatccggatgaccttggcaaaggtggacatgagcttagcaagagcaccggaaatgctggcggacgtgttgcctgtggtatcattgggctccaaggctaaagcggttaacctccgaggcaaacaccatagaaggtcgaagcgagcacctcaggaagttgctgttccatttcccctgtattggcaacacaatttgagtactccaaataagcgcctgatccatgatcagagagcactattcatgtcattttgtatatgaacaatgttgcgcacc

SEQ ID NO: 7164 - DNA, 1068 bp, Zea mays
  Clone ID: 700620654_FLI
tgtgaccctccctcagccgcgtcgcgtcgcatcctacgatccaaagctctctctgctcgcagccatggcgaagaactacccgaccgtgagcgccgagtacagcgaggctgtggagaaggccaggcgcaagctccgagccctcatcgccgagaagagctgcgccccgctcatgctccgcctcgcgtggcactccgcggggacgttcgacgtgtcgtcgaggaccggcggtccattcggcacgatgaagcatcagtcggaattggctcacggcgctaacgcggggctggacatcgcggtgcggctgctcgagcccatcaaggaggagttcccaatcctctcttacgccgatttctaccagctcgcgggagttgtggccgtggaggtcaccggtgggcctgagattcccttccaccccggtagggaggacaagcctcagcccccacctgagggccgccttcctgatgccactaagggttctgaccacctgaggcaagtttttggcaagcagatgggcttgagcgatcaggacattgttgccctctctggtggccacaccttgggaaggtgccacaaagagcggtctggtttcgagggggcctggactacaaaccctttggtctttgacaactcttacttcaaggaacttctgagtggtgataaggagggccttcttcagctcccaagtgacaaagccctgctgagcgaccctgttttccgccctcttgtcgagaaatatgctgtggatgagaaggctttctttgatgactacaaagaggcccacctcaagctctccgaactggggtttgctgatgcttaaatagaccctatcttggagtgatacattctgctgcctgtatggaatcatgtggtcttttgcatctggagtcaatgtgaacaagcagattgtcgtattgtctttctcgtaataaatttgtcgatgttgagcccttaggctgttgttggtacattggtacttcgtcgatgcttgaattgggacccttagtccgttttcctagactctgatgctgtatgcaactgaaacaagtaaatctatgatcttaaggctgc

SEQ ID NO: 7165 - DNA, 686 bp, Zea mays
  Clone ID: 700620701_FLI
ggcagcgtggaaaggctacgaagagcggagaggcgctccattgaagcggacggcgacgagctctgcatgctgcgctgcgcccttctcaccgccgccagcccgccagaacgtctcctccccgtctctagagtggctctttctttctccgtcaaatggctctcgcgtgcgcctctcacgcgtgccgctttctcctcgccggccaggcgagatctttccacgcccagccctaccatgccaaggtcggcgtggtggagttcctgaacggcgtcgggaaaggggtggaggcgcacgccgcgaagctggaggaggctgtgggcggcgacctccagaggctccttgaggcccgcacgctgcggctcaagaagctcggcatcccctgcaagcatagaaaattgattttgagttttgcacacaagtaccgtcttggtctctggaagccccaagcagaacccaggaaagtttaaagttggttcgttcttgaaagatagtctactgttggactgaggcatgtttgggacattgaatatttgctttgtaatttagaaacctcaaacctttgttctctgtctctagccatacttatttgcaaccattacgcaaaaaaaaaagattctagaaagattccaacttattgtgtgtgggtttgttccttttgtaataacaaatcataaggctttgttggtttc

SEQ ID NO: 7166 - DNA, 565 bp, Zea mays
  Clone ID: 700620710_FLI
ccgcctttccatcgccgcggcgacagccgccggcgaggaccctaagctgtctcgaatcgcggatgagctcctcgccctatcccccgccgagctggacgactacgcggcgctcctgcgcctcaagctccgcctgtcgctcacctccagcgcagctgctggagcctctccggccggggccggggacgccgcggctgcagccgtggaggccgccgcggcggtgaagacggcgttcgacttgaagatcgagaagtacgaggccgcggcgaagattaagatcatcaaggaggtgcgcgcgatgacggacctgggtctgaaggaggcaaaggagctcgtggagaaggcgcccatagtggtgcgcgcggggttgcctaaagaggaggccgaggcgctcgccgctaagctcaaggccgccggtgccgctgttgcactcgagtgatcccacgaaggtgtcgcctcttttttttttgttcctagtgttcttagacgatgcaacgtatctttgcgccttaatttgtttgtaatggaattcaatagattggatatgggtataaagaggatgcaacgt

SEQ ID NO: 7167 - DNA, 680 bp, Zea mays
  Clone ID: 700620711_FLI
ctatcccacggcggccaagctgtggaaacgagggagacgaggaggacaagggaaagaaagcctaccggctcggcggctccggctcacctcccacacccccaaaaaaaatctcgcgtgccgccggcggccaccaccatcactgccatgatcagcatcctcgcgcaggagcgcctcctcgggttcgccctgggttccgtctccatcggcggcttcgtcctccaccagcgccgggccatctaccgttcaatcgctgaagccgacgggtcgccctacttttaccagcctggtgaaattgccagtcgaagaagctcaactgaactggctcatgtatggaacaaggcagtggacgagacccttgggcgacttgttgtgtaccttagttcgcgtgggtggtgattcgagctccatgttgagcatggtaaccgaggaagactctttttcaagccactgatgtgctcatacctccctgtacccggattgaacatgtatttttttttaaaaaagagatacttccaatgaccgatttatctgaaattctgaaccgagctgattgattctaccgatgcttccctgagcaggtggatgttacttcgaggtcattgttgtagccctgtgaaaggcaggactcgtctaactatttttacatatatgtattggtaataaagaatgtatgttacttt

SEQ ID NO: 7168 - DNA, 398 bp, Zea mays
  Clone ID: 700620719_FLI
gatcactctactccaaccactccgcgggatcgtaccttacccagccttcttcctcgtcgccggctcgccatgtcggcggcgttcaaggcgttcctgaatagcccagtgggccccaagacgacccacttctggggacccgtctcgaactggggcatcatcctcgcgagcgtggctgacacgaaaaagcctcctgagatgatatccggccctaaaccatagtctgaccgaacaagcatgctcctgcttcggccgtacaatactacaatgtactcggttgtaccacaaaggcaatatttgatgcatgtacgtaacgtgaaaaaagcctcggttatacatgttgtaggttcatctgcggatactgaactatgaatttccgagcataaagcatcaatttccac

SEQ ID NO: 7169 - DNA, 1354 bp, Zea mays
  Clone ID: 700620721_FLI
gtttaccattcctccccaaaacacatcctgcgatcctcgaagcctccgccgagcatcgatcatgtcggcctactgcggcaagtacgcggatgagctcatcaagaatgctgcctacatcggcacccctggcaagggtatccttgctgctgatgagtcaactggcaccattggcaagcgcctttccagcatcaatgtcgagaacgtggaggagaaccggcgggctctccgtgagctcctgttctgctgccctggtgccctccagtacatcagcggtgtgatcctcttcgaggagaccctctaccagaagaccaaggatggcaagccttttgtcgatgtcctcaaggagggaggcgtcctccctggcatcaaggtcgacaagggcaccattgaggttgttggcaccgacaaggagaccaccacccagggccacgatgacctcggcaagcgctgcgctaagtactacgaggccggtgcccgctttgccaagtggcgtgctgttctcaagattggccccaacgagccgtcacagcttgccattgacctgaatgctcagggtctggctcgctacgccatcatctgccaggagaacggtctggtgccaattgttgagcctgagatccttgttgatggccctcatgacattgatcgctgcgcttacgtcactgagacagtccttgctgcctgctacaaggctctcaacgagcaccatgtcctcctggagggtaccctcctgaagcccaacatggtgactcctggctccgactctaagaaggtgacacctgaggtgatcgcccagtacaccgtccgtaccctccagaggaccgtccctgctgctgtgcctgctgttgtcttcctctccggtggacagagcgaggaggaggccaccctgaatctcaatgccatgaacaagctcagcaccaagaagccatgggccctgtccttctccttcggccgtgccctccaggcgagcaccctcaaggcctgggctggcaaggtggagaacgtggagaaggctagagcggccttcctcgccaggtgcaaggccaactccgaggctaccctcggcacctacaagggtgatgctgccgccgacaccgagagccttcacgtcaaggactacaagtactgagttgcttctctttgcgatcccgttgttttggaactcctgcctgcgagtaggttgctgagtgttgtttgcttgttagagcttttatattcggacatgaaaaaaacatgcttcctatgtggatgatggttatctttatattcgtatattaactactagtctctgttgttaatttccgtgtaatttgctcctcccagatgggagaatcgaacgccgcttttttgttcc

SEQ ID NO: 7170 - DNA, 1233 bp, Zea mays
  Clone ID: 700620740_FLI
ataagattcactttgtccctggtgacatagtgaaggttggtgaaactttactgaaaatggttgtgggtgacagccaaattgtttccccagataatatagttccatccgctggtaagtcccttggagtagagtctgcagttttctcaagtgaaggcaatgttcctggtggaaatctctctacaccagctgttaggcatctagcaaagcagtatgggatcagcataaatgaaattgttgggacagggaaagatggtagggttttgaaagaagatgtgttgaattatgctgtcagcaaaggtgtttgcaaacaacaatcgttagcttcggaagggaacattggtcaagttgagttactagaggaagggaaagcattactcgatgaggacttctatgaagataagaaaatccttctcaggggataccagagatcaatggtcaaatcaatgagcctggcagcaaaagttccacattttcattatctagaggagataaattgtgattctcttgtgcaactaaaaaccacatttcaaaatgagaacaaggatcaaactatcaagcacactttccttccgttcctcataaagtcactttctatggcactgagtaaataccctatgttgaacagttctttcattgaggaaactaacgaagttgtgttcaaggggcctcacaacattggggtggcgatggctacaacacatggattagtcgtgccaaacatcaagaaagtgcagtcgctatcaatattggagatcacgaaggaattggcgcgattgcatgagatggcatcacaaaacaggctaagcgctgcagatattgaaggtggcactataacacttagtaacataggtgccattggtggcaagtttggctctccacttctgaacctacctgaagttgccatcattgcccttgggcggattcaaaagcttcctcgcttcgatgatgacgaaaacgtttacccttcatccataatcaatgttactgttggagccgatcaccgagttgttgacggggccacggttgcaagattctgtaatgaatggaagagcctcgtggagaagccagagctgctcttgttgcatatgcgatgacccagtaatgtaccggtacatactacgacctgaaacggaggcattttggcataaaaaaataaatccatgtattcaaataaataaccaacgtggcttctctgcctggaaacagtggaaataaattgggagttattttcgg

SEQ ID NO: 7171 - DNA, 693 bp, Zea mays
  Clone ID: 700620760_FLI
gagagctgagacgtcgtggacgacaatccacatcgtcgtcttcacagtcgtcccgttcacgatcagcagcccatgagatagagcttgcggtgttgcgtcaacaggcagagtaccatcaatcagtcttgagggaacaattggagtaccagaggcaacaatctgaataccagagacaacaagccgagtaccagaagaagagggacgagtattatccaagcctccaggcccaaaatcaagctcttctctcgcaactatcccaacaagcgggcgtcccgatgccgacatatgggatgccgcctccggactttgcactgccaatgccaatgttggcgcctccgcctccgcctccgtcacaattccctatgggatttcagacaccatccgcttcagttgccgcacctagagatgggtctggtcaagacgacacaacacattcgtgggtgaacaatcttttcagcacgcatagtccagccggaggaggtggcgatggatatgagtgataatgatgtaaaacacttgttgcaacctttcatgtgaaagcctatccgtcgaataatgttcattttggatttcggacaactatgtttatgtaaacacttgttgcaaccatttggaactatgtcgttatgttaaatttgtgaatgtgaatgcttatgtgattatatttgtgaatgtgtatacttatgtgagtat

SEQ ID NO: 7172 - DNA, 520 bp, Zea mays
  Clone ID: 700620769_FLI
aggcaccacacctcttcttcttcttcctcctcctcctagcacagctagcgcctgctccccttcgcctgtgatcatgtcttgcagcagcggcaagtgcgactgtggctccagctgctcctgcggcagctcatgcaactgcatgtcccctaacgtggagaccgccgccgccagcagcatcaagaccacggtcctcgccgcgccgaccaccaaggccagcgccggcggcttcgaggcggccaccgagggcggcggctgcgactgcaacacctgcaactgcggcaccagctgcggctgctcctgctgcagctgcaactgagccggtcaggcgatggcgcacgagagtcgagaggacgacgacgagtcgtataaatataatagcggcgtctaaataagatcctgtcaactgcacccgccattatcgatccatggtcgctcctggggttcatgttcatctgtaacgtgctcgcggtcatgtccgtctcgtgccggatttaatatttatatgcatgtatttgtgttt

SEQ ID NO: 7173 - DNA, 705 bp, Zea mays
  Clone ID: 700620774_FLI
gcgtcgagcgattacaactgctgactatcagattcagctcacacacctccgttcgtaatagcatagtagccacgctctactcatcttaggtctcgaagtgccactgcagtcttcgccggccagctcgatcgccgcacgatggcgtcacagcagcaaaccaggaagcagcaggccaccaagggccaccaggagaccgaccaaggccaggcgatgaacctggaagagatcggcaagtaccgcgccgaggcgcagcagcggtcggcggacgccatccgcgccgccgaggaccggttccacaaggccaataaccagcaggcgcgcggcgccggggcgcgcgggactgtcaccgtggcccaggcgcccgtcgccactgtggtcccgtatcaggagagcgtgaagcaggcggagacggagagccacggccgcggtagccacggctctgaggcgcagcagtggctagcggacgccgcggccgatgccagggagaggtgcaacaaggccctggggacgagcccggccgcccacgcgacggctggcgcggctccacaccagcaaaccaagaacgagcgggagggtggtcaagtccacggccatctaacaaggcaggacgagatggggaagcacggcagcgaggcgcagaagaactcgaccgcggaggccgcacgtgccgcggtggagaagcacgacaaaggtagggagaccggc

SEQ ID NO: 7174 - DNA, 607 bp, Zea mays
  Clone ID: 700620782_FLI
cagctttactgaacctaagatggtgtgccacaatgggtgccaccgtatcttggtcaccggaggaaagtctttgggcaatgaggctggcagcctcgtatgatgctaacaagagaccacatataaacccctcggatgttcccaaatctaggggaaggaatccacttaaccgcccatattgggaggctaacaggtgattggttgattggttggctacgctccggcccgcggcgttccgttgatcacgcttggcacgtgtttggatggctgcagagcatctctatcgcctgctcccacgcatgcagcgttgttttttttcttcactgggtagcctgcatgcgcggaaacgcaactccccttgtttccagcggcccaggctggcacgatgctggtgcgagatgcccccacaaccaatcatgcgttaactgaggcagacctggagtctagcgtttcacagaatgaaggcaaatctctctgttgagtatgatgacaatgtcgtgttctgttttgctggaagccagtcgatgttttgtttacctaactaacatgattgcagtacgatcgggtggcctccctacctgtcgtgaagcttgttccgcatgattgctcc

SEQ ID NO: 7175 - DNA, 699 bp, Zea mays
  Clone ID: 700620810_FLI
ccaaccgcgtgcgctccacgcctcctccaggaaagcgagagcttctgcataagaacaacaaatcaaaagcgtgatcagctcggtgccaacaaaacctcaacaaccaagtttcatgtctgatctcgacgtccagcttccatctgcctttgatccgtttgctgaggcaaatgctgaggactctggtgctggtcctggaacgaaggattatgtgcatgtgcgcatccagcagcgcaacggcagaaagagtctgactacagtccagggtctgaagaaggagttcagctataacaagatcctcaaggatctgaagaaggaattctgctgcaatggtactgtagttcaggacccagagctaggccaggtcattcagctccaaggtgaccagcgcaagaatgttgctactttcctagttcaggctgggattgcgaagaaagagaacatcaagattcacgggttctaagggacctgtaaatgcttgtgccctatattgtgtgcctcaacatattggggagcttgaagcatcgacagttgctagtcattgcttacttatataagaacataagtagtatttgctattgtcaagtgtgccttgcttgatgcaagttgtgttttcgtctcattattattatgcacggccatcgtacgtgtatggcttgtatgggttattgccaacttaataaaagcacactctgtttgcct

SEQ ID NO: 7176 - DNA, 531 bp, Zea mays
  Clone ID: 700620849_FLI
aaggagggccttcggctccacccacccttgccgctcctgctcccacgggagtgccggagctcgtgccaggtccaggggttcgacgtgccggcgggcacgatcgtgttcgtgaacgcgtgggcgatcgctagggaccccagccactgggacaggcctgaggagttcgtgcctgagagatttgaaagcagcagcgtcgacttcaaggggacggacttcgactacctaccgttcggggcaggacgaaggatgtgcccgggcatggcgtttgggctcgtgagcatggagcttgcgctcgctagcctcctctaccattttgactgggagctgccgcctgggatgacggccgcggatgtagacatgaccgagaagatgggggtcacggctcgacggctccaccacctcctgcttgtcccctccgcccgagtgcccgtgacctagctaggtctggtccacgagcagaacctggaaacttcgcatacttggataacgctgaatatcaatacttgcttaataaattcagctattttggat

SEQ ID NO: 7177 - DNA, 1132 bp, Zea mays
  Clone ID: 700620909_FLI
gacgagcactgctggagcgagaatggcgtgtccaacatcgagggcggctgctatgccaagtgcatagacctgtcgcaggagaaagagcccaagcgcggcatcctctcgctgcactccggctgcaatatgggcaaggacggcgacgtcgccctcttctttggcctctcaggtaccgggaagacgacgctgtcgacggatcacaacaggcttctgatcggcgacgacgagcactgctggagaacgttgtcttcgatgagcatactcgtgaagttgactacgccgacaaatctgtcaccgagaacactcgggctgcctacccgatcgagtacatccccaacgccaagataccatgcgtcggcccacaccccaagaacgtgatcctgctggcgtgcgacgccttcggcgtgctcccgccggtgagcaagctggacctggcgcagaccatgtaccacttcatcagcggatacaccgccctggtcgccggcacggaggacggcatcaaggagccacaggccaccttctccgcctgcttcggcgcggccttcatcatgctccacccgaccaagtacgccgccatgctcgccgagaagatgcagaagtacggcgccacagggtggctcgtcaacaccggctggtctggcggcaggtacggtgtgggcaagaggatccggcttccctacaccaggaagatcatcgacgccatccactccggcgagcttctcaccgccaactaccagaagaccgaggtctttggcctggagatcccgactgagatcaagggcgtgccgtcggaaatcctcgacccaatcaacacctggacggacaaggccgcgtacaaggagacgctcctgaggcttgccgggctcttcaagaagaacttcgaggtgttcgccagctacaagatcggggacgacagcaacctgaccgacgagatcctcgccgcaggccccaacttctgaactaaagcagtgggtccgtccggatgaataaaacggtggtatgcgtgtgaagaagaagatgatgacgacgaaaaaagtgtgttggatcgatgggccagcacagtgtagactagcttttgtatattatctcgggttggaaatctggtgttgttacctaaaatgttggtctgttc

SEQ ID NO: 7178 - DNA, 520 bp, Zea mays; identical to SEQ ID NO: 7172
  Clone ID: 700620915_FLI

SEQ ID NO: 7179 - DNA, 303 bp, Zea mays
  Clone ID: 700620948_FLI
ggcgcgggcgcggaggtgactgcgggtggcgtcttctgcgacatcctgcggctggcgtcttaccttggcgctccttcttagagcttccacttacagttgtcaatttgaagaggcagatggacagtgccctgcatgatgcctccgtgtttaggcttattatggacttgctcaaagttgttctgaataagtgccaggaaataaggcctctatcttatttaggcctctatcttcggggtagctgactaagtgttgttattgctacggaatccagaattctgtgaattgaaatgaattgtaccgatg

SEQ ID NO: 7180 - DNA, 564 bp, Zea mays
  Clone ID: 700620952_FLI
cgtcgatctctatctcggcggcgactgggcgaccgctgcctcctgttgccctggtctccattgggccctttgccagattttctttcgcctctccgccggcgacgaacaccactaccaggaatgggcctgtggacgttgctggagggttttttgcttcttgcaaatgcgttggctatattgaatgaagaccgctttctcgctccgagggggtggagcatgtctgaagtatcaggaaatgggcaaacgaagtcgttgaagggccagatcgtggggctaatctatgctacacaatttctgaggatgcccttaatagcactcaatgttctgatcattgttgtgaaactggtgtctggctgaggctcattatctagttttcactgttgtgttggattgatatctgttccagcatgatgtaaaagttagtaatactcaaagctgctggaaatatgttcattttttactctaatgtgaatttctgttatttcttctggtaaattaatttggtcagaaaatggctctaaacatttatactatcaaagcattgtgcaatggtgttatcaattt

SEQ ID NO: 7181 - DNA, 567 bp, Zea mays
  Clone ID: 700620982_FLI
gaggccaccaagcaaataagggcaatggaggcgaaggcaaatgagcaggcagtcgcctgtgacgattcagaaacagatggcgcgacaagggcggcgagatggcacctgcctgtccttgcaatgaccgccgatgtcatccaggccacccatgaggagtgcacgaagtacgggatggacgggtacgtcacgaagcccttcgaggagaagcagctcttccaggcgctgcagaagttcttggaccctggcatgtccagctaacacccaagtgctgcgtttgttgcaagtgaggcaccattctcctccgttctgtagttcgctaaccatggacgcaatctgaccccgaagaaagatcgtatatcgcgggctgctcgtcgaccatgccagcggggggaacagcaggcagcacgcagcaggggggctttgctgcctgcctgtgcagtgcaggcgtcttgtaaatgtattgtattagcagggatcctgtttatagcgctagtatgggcctgcgcgacaatgttggagctgcctgcggctgatgcacgtcgagcataattttgttgtacagcttcc

SEQ ID NO: 7182 - DNA, 208 bp, Zea mays
  Clone ID: 700621043_FLI
acttttttttccctataaaccaaacacccccttaaacaaaacgatgaataatccatgccagtttggtatttggaagaggatgaaacgcctgtctgattgtagctgttgatgttaagacatactgatagcatcagtttgtattgttctacttcagctactgtcacacatgtactgtttgatcggaaatatatgtttttttaggaaggtt

SEQ ID NO: 7183 - DNA, 567 bp, Zea mays; identical to SEQ ID NO: 7181
  Clone ID: 700621069_FLI

SEQ ID NO: 7184 - DNA, 575 bp, Zea mays
  Clone ID: 700621109_FLI
cgaaaaggtgtgaagcttccttcggagatcccagtagcagaagcaacgcaggcatcggcttgcgacaggagaggacggagatgacgcagaagcagaccctgttcaaggggcagagcaagaagaagactatccctcccaaccgccacggcaaggcgcctcatgttcgtaaagggaagagagccgtcaagcccaccaagttcacaaaggacatggacgccgagaaggaactcaccaagttcatcaaccagtgcaacgaaataaaagctgcgaatcttgctagcaaagagggcggtgacctcaacatagtgaaggcggatggtgaggaatctaaatcaaagaaataggaagccagaaactgaaaacgagtgtgtgaaacgtgatgcgtggtaaactgttaatgcgatgtattctgctgaagaaaattcagttccgtatggctgggtagatgaacatgtttagcgcaaagtgacggtgtaactgcaaccggggtaatggcttgcaagttttgttctgtgccatctctatttctccaattattatattgatgaagtttgtgtgcaatatcttatccgttg

SEQ ID NO: 7185 - DNA, 848 bp, Zea mays
  Clone ID: 700621162_FLI
cagccacaagggcgctggatcgctcggcgccgtcgcggggttcgccatcgccgtggtgttcgcgtggaagttcctgcgccccagcagacgtgctcccaagcggcccccacctacccctgcagcggctcccgctgcgactgtgcctgatgcggccgagcctatcggtgactcaggcaaggtagtaacacgggaaattgtggtgaagcgactgaaaggctgcagaaaggttacatgccaacttctcggtgttgtttttgaggagaaaattcctgaggagcttcagaaacatgccaccgttagaccctccgtggtagagctgctactggaaatatccagatattgtgatctctacctaatggagactgtaattgacgataagagcgaggaaaatgctctcatggccctggagacctctggacttttcagaactggtggcctgatgaaagagaaggtgctcttttgcagctctgaagttggtcgaacttcatttgttcgacagttggaatcagattttcacatagacacgagccttgacatagtttctcaactatctcggttcattcgatgccaactatttatttccacggtggaaggagaacagcttgcaggcaacgtattcaattctccaagtcttgagcagttcttctcttgatggcgggacgcaaagaaaggccttctgcactccaaacaaatgtgctgatttcacaattgtgacttgtgagttgtaggcttctagcgccccccggcctggacgcaacagacaccctacaactgttggagttcagttgtgatcatgcaagatgtatattaaacagacaataataagttggtaaaaaatattcatattt

SEQ ID NO: 7186 - DNA, 1581 bp, Zea mays
  Clone ID: 700621324_FLI
ctcctccagttcataggcacagcagcagaaagcgccaggagcttaagaacatggcgaacaggggcttgcatctggctctgttcctcgtccttctcgggctgtcgtccaatttggcagccgggcagatcctgttccagggcttcaactgggagtcgtggaagcagaacgggggatggtacaacttcctgatgggcaaggtggacgacatcgccgaggccggcatcacgcacgtctggctccctccggcgtcacactctctcgccgagcaaggctacctgccggggcgcctgtacgaccttgacgcgtccaagtacggcaacgaggcgcagctcaagtccctgatcgaggcgttccacagcaagggcgtgaaggtcatcgccgacatcgtcatcaaccaccgcacggcggagcaccaggacggccgcggcatctactgcatcttcgagggcggcacgccggactcccgcctcgactggggcccccacatgatctgcagcgacgacagggcgtactccgacggcacggggaaccccgacaccggcgccgacttcggcggcgcgccggacatcgaccacctgaacccgcgcgtccagcaggagctcaccggctggctcaactggctcaagacggacgtcggcttcgacgcgtggcgcctcgacttcgccaagggctactccgccgacgtcgccaaggtctacatcgacggcacccagccctgcttcgccgtcgccgagatatggacctcgctggcctacggcggcgacggcaagcccttctacgaccagaacgcgcaccggcaggagctggtgagctggctggaccgcgtcggcggcaaggccagcccggccaccacgttcgacttcaccaccaagggcatcctcaacgtggccgtcgacggcgagctgtggcggctgcgcggcgctgacggcaaggcgcccggcttgatcgggtggtggccggccaaggccgtcaccttcgtcgacaaccacgacactggctccacgcagcacatgtggccgttccccgccgacaaggtcatgcagggctacgcctacatcctcacgcaccccgggaacccatccatcttctacgatcacttcttcgactggggcctcaagaacgagatcgcgcaccttgtgtccatcagggaccgccacgggatccaggcggacagtgagctgcgcatcatcgaggccgacgccgacctctacctcgctgagatcgacggcaaggtcatcgtgaagattggatcaagatacgactgcgggcacctcatcccagaaggcttccaggtcgtggcgcacggagatggctatgccgtctgggagaaaaactgagccaaatctgtgcctgatccgtccgtccggtccggcacgacgagttttagcggatttgacctgcattttccttagcttattattactccaaatacgggatatatatagcgacaacctgtattcgagattcatccgtaaacaggtgaggtgaggatgaggggtatagtatcaagtatacaactatctgtttttcaggaataataagaatcactggatatggtgggtgtatggttctttgtactgc

SEQ ID NO: 7187 - DNA, 509 bp, Zea mays
  Clone ID: 700621379_FLI
ctaagatcaagtgtagtatctgttcttatcagtttaatatctgatatgtggaccatgtgttcactttgatattaaatttattttttgtgggggagggctcgctacagtggcttgctactggggccctcaagcgtcgctcggccgttgcactataggctgagcctggcgcgccccaaccaatgcaatttcagctttaagtatgtctttagactatacgaaatgtatggttccatatcaataaatttggtcgtaagtaatgaagaagctaatatcgcccatatttagtcatcaagcagcatgccggtctagcagcatgtccctgtgctgcccggacctggtggaggccgctctcgccacgagcaggagagacccgccggttcaggtacaggcaaacgacaacaccatggacgcctatgacgggtcgggcagagaaccataacatctgagagctttcgtctactgtataaataaaccattatcagctaaaactccattgaatcgtcttagat

SEQ ID NO: 7188 - DNA, 1660 bp, Zea mays
  Clone ID: 700621517_FLI
ggtcgttaaatcgcctatgggctcaccggccgatgacaagctccggcggcggcggccggccggccggttattaatgcactgtgcgaaagcaacgcctcgaggccaagcacatccggcgtgcatgctcgactataaatacccggccggttgcaccggccagtttcatccagccatcgattctcctccagttcataggcacagcagcagaaagcgccaggagcttaagaacatggcgaacaggggcttgcatctggctctgttcctcgtccttctcgggctgtcgtccaatttggcagccgggcagatcctgttccagggcttcaactgggagtcgtggaagcagaacgggggatggtacaacttcctgatgggcaaggtggacgacatcgccgaggccggcatcacgcacgtctggctccctccggcgtcacactctctcgccgagcaaggctacctgccggggcgcctgtacgaccttgacgcgtccaagtacggcaacgaggcgcagctcaagtccctgatcgaggcgttccacagcaagggcgtgaaggtcatcgccgacatcgtcatcaaccaccgcacggcggagcaccaggacggccgcggcatctactgcatcttcgagggcggcacgccggactcccgcctcgactggggcccccacatgatctgcagcgacgacagggcgtactccgacggcacggggaaccccgacaccggcgccgacttcggcggcgcgccggacatcgaccacctgaacccgcgcgtccagcaggagctcaccggctggctcaactggctcaagacggacgtcggcttcgacgcgtggcgcctcgacttcgccaagggctactccgccgacgtcgccaaggtctacatcgacggcacccagccctgcttcgccgtcgccgagatatggacctcgctggcctacggcggcgacggcaagcccttctacgaccagaacgcgcaccggcaggagctggtgagctggctggaccgcgtcggcggcaaggccagcccggccaccacgttcgacttcaccaccaagggcatcctcaacgtggccgtcgacggcgagctgtggcggctgcgcggcgctgacggcaaggcacccggtttgatcgggtggtggccggccaaggccgtcaccttcgtcgacaaccacgacactggctccacgcagcacatgtggccgttccccgccgacaaggtcatgcagggctacgcctacatcctcacgcaccccgggaacccatccatcttctacgatcacttcttcgactggggcctcaagaacgagatcgcgcacctggtgtccatcagggaccgccacgggatccaggcggacagtgagctgcgcatcatcgaggccgacgccgacctctacctcgctgagatcgacggcaaggtcatcgtgaagattggatcaagatacgactgcgggcacctcatcccagaaggcttccaggtcgtggcgcacggagatggctatgccgtctgggagaaaaactgagccaaatctgtgcctgatccgtccgtccggtccggcacgacgagttttagcggatttgacctgcattttccttagcttattattactccaaatacgggatatatatagcgacaacctgtattcgagatacatgcgtgcccccag

SEQ ID NO: 7189 - DNA, 624 bp, Zea mays
  Clone ID: 700621532_FLI
agctgagagacgatagaagcacgcagcagctgaaagggaggggaactaggaatgaaggggagcaaggtccacgagcacgaggcagacgtccccgcctccgacctctgggcgatctacggctccctccgcgccgcggaactcctgccggagctgctcccgcacgtgcttgccaaggtggagctcgtcagcggcgacggcggtgttggtaccatcttgcagctaatatttcctcccgggattcctgggctacagagttacaaggagaagttcatcaaagttgacaacgagaactatatcaaggaggcagaagccattgatggcgacattttgaagctggggttcgaggcatacatgatacggtttgagatcattccaaaaggggccaattcgtctgtcatcaggtcgactatcgagtatgtgattgctgatgcgcacccggagctcgaagctatggtgagcacagcaactttggctgaaactgctcagaaattttccgagtttgctaaggcgaagtaggtcccataaggaatgtcttgaaatatatatatatatatctcgagagcggagtttatgtttatcatgaaacaagtgaaatacagtttcagcgctttcgtgttgcgcctc

SEQ ID NO: 7190 - DNA, 878 bp, Zea mays
  Clone ID: 700621536_FLI
tgcggccatggaggacgaggagcacgaggtgtacggccaggagattcccgttgacggcgaggacgtcgacatggctgccggcgacgatgccaccaagctgcaggaacttgacgatatgaagcgccggctcaaggaaatggaggaggaggccgccgcgctccgcgagatgcaggccaaggttgccaaggagatgcaaggtgtagatcccaatgcaaccacatctgaaaacaaagaggagatggattctcggtcagtattcattggaaatgttgactatgcgtgcactccagaagaagtgcagcagcacttcaattcttgtggaactgtcaacagagttacaatcctgactgacaagtttgggcaaccaaaaggttttgcttacgtggaatttgttgaagttgaagctgttcaggaagctatcaagttgaacgagtcagagttgcacggtcgccaactcaaggtggcaccgaagaggactaacgttcctgggatgaagcaaccccgcggtcgaggtttcaatccgtaccatggccacccctacatgaggccgtatggttatagtccttatggttatgggagattccccagattccgccgcccgcgaagaccttatttttgaagctcggttcccatttagcagaacatgggcgataatcggccgcgttctgttatttcatagcttattcaggacgttcccatgcatgtttctgtattgacgatgcttaagctttgtactgtattgtatcagttatgcaagacgattatgatttagttacacgaaatgcactgttgtgatgctacttggggtgcgccacttttgggcctcgaatatgattgtataagctgatgcattatttattcacttctatgtcacattt

SEQ ID NO: 7191 - DNA, 644 bp, Zea mays
  Clone ID: 700621540_FLI
gcagcagccaaaacctacctagccgccgccgcaggcggccccccatcgccgccaagatgcagatctttgtgaagactctgacggggaagaccatcactttggaggtggagtcctcggacaccattgacaatgtgaaggccaagatccaggacaaggagggcatccccccggaccagcagcggctcatcttcgccggcaagcagctcgaggacggtcgcaccctcgccgactacaacattcagaaggagtccaccctccacctggtgctccgcctccgcggtggcgccaagaagcgtaagaagaagacgtacaccaagcccaagaagatcaagcacaagcacaagaaggtgaagctctccgtgctgcagttctataaggtggacgacgccacaggcaaggtgacccgcctccgcaaggagtgccccaacacagagtgcggcgcgggcgtcttcatggccaaccacttcgaccgccactactgcggcaagtgcggcctcacctatgtctacaaccagaaggcgtaattgcttgccccgatttgctttatccgccaacctatcaagcattcagatgttggttactcaaattgtatctcatttagatctgtctgaggttgaaacttaaatggagcagtagtatctatc

SEQ ID NO: 7192 - DNA, 731 bp, Zea mays
  Clone ID: 700621563_FLI
ggccggtcagctatgacgccgggaagctcggccgccggatccggcgtcgtcgttcctcggaacttcaggctcctagaagagcttgaacgtggagagaagggcattggagatgggacagtgagctatggaatggatgacgcagatgacatctacatgcgatcatggactggcactattattggccctcataataccgtccatgagggtcgcatctaccagctgaagttgttctgcgacaaggactaccctgagaagccaccatcagttcgatttcattcaagaataaacttaacatgcgttaatcatgaaactggagtggttgacccgaagaagttcagcgttctgggtaactggcagcgtgattactcaatggaatacatcctaacccatctcaagaaagagatgacatcgccacagaaccgcaagctagttcagcctccggaagggacattcttctaaagatggcagcaactcatgtccatccatggtgactcggaaacagcttccgcacctggttcctatattttatatatttagtctgatctcccagttatctgtaaaccaccgagatcgagtgcaagcagacttggttgatttacaatttgcccggtggttgctaatgatatgggatgaaacggttgccggtttggctgctattaaggttgtgtaatctgatgggcaatttcagcattctaatgccctaatgatgaatctttggccatttgctgttc

SEQ ID NO: 7193 - DNA, 961 bp, Zea mays
  Clone ID: 700621758_FLI
gaagcgaggtggcagggcaccggtgccggccaagaagaagacggataaagtgacgaaccctctgttcgagaaaaggccgaagcagttcggcatcggcggcgcgttgcctcccaagaaggacctgcaccgattcgtcaagtggcccaaggtcgtgcgcatccagcgccagcgtcgcatcctcaagcagcgcctcaaggtgcctccggcgctcaaccagttcacccgcaccctcgacaagaacctcgctaccaacctgttcaagatgcttcttaagtaccggcccgaagacaaggctgccaagaaggagaggcttctgaagagggcccaggctgagaatgaaggaaaaactgttgaatccaagaaaccaattgttgtgaagtatggccttaaccatgtgacttacctcattgagcagaacaaggctcagctcgttgtcatcgctcatgatgtggatccgattgaactggttgtttggcttccagccctgtgcaggaagatggaggtcccatactgcattgttaaaggaaaggctcgccttggatcgatcgttcacaagaagactgcatcagtcttgtgtctgaccactgtcaagaacgaggacaagcttgagttcagcaagatcttggaggctattaaggcgaacttcaatgacaagtttgatgaagtcaggaagaagtggggaggtggcatcatgggctccaagtcgcaggccaagaccaaggccagggaaaagttgctggccaaggaggccgcccagcggatgacgtagattatccactgttgagcttgcccctgtagtttgacgtggaagaaccgatgagcattgtgcactcgtattgtgtttttttgaatctactttcatatgtttctgtccatcagaccgtgtttagaaactttgaaagacagttctacagtgtttatgcaatgtcttatatcgaagtatatcatttgcgcctcaggc

SEQ ID NO: 7194 - DNA, 704 bp, Zea mays
  Clone ID: 700621760_FLI
cgcattcgatccaactcctgagcactttctcctcgtccccgacaagccaatcgaagccgagatacggccatggactccaccggcaccggagcagggggtaaggggaagaagggagcggccgggcgcaaggtcggcgggccaaggaagaagtcggtgtcgaggtccgtgaaggccgggctccagttccccgtcggccgcatcgggcgctacttgaagaagggccgctacgcgcagcgtgtcggcaccggcgcccccgtctacctcgccgctgtcctcgaatacctcgccgctgaggttctggagctcgctggtaatgctgccagggacaacaagaagactcgcattattccgcgccacgtgcttctggcgatccggaacgacgaggagcttgggaagctgttgggcggcgtgaccatcgctcacggcggtgtgctccccaatatcaaccctgttctgctgcccaagaagacggcggagaaggcgtccagtggcgggagcaaggaggcaaagtcgcccaagaaggccgctaagtcccccaagaaggcatagactgactgtccggtgtgatctgatgtttagcagtaccttgttaccagtatgcggtgatgcgtaggctgtagatgggacgaatgtgctggtgtgtgtatgtgtcctgctgcaagttgccctttgctatttaaaatggaagaagaaatgcctggttt

SEQ ID NO: 7195 - DNA, 1092 bp, Zea mays
  Clone ID: 700621762_FLI
ctcgcttgcattgacattgacatggaggagacacagaggtttgctgattccgttgctggtttggccctcgagagggagacaaaaacaaatttcagccgatttcaggagtggttggaagcaaataaagactaccaagctatagtcgatggtgcgaatattgcactatatcaacaaaattttgcggagggcggtttcagtttgacccagctggatggcgttataacagagcttcgggatagatatcatggaaaatggccacttgtcatactacacaataagcgaatttccaagcttatggaaaattcgtctaataggcatttgattgagacctggagaacaaatggggctttgtatacttcaccaagtgggtcaaatgatgactggtattggctatatgcagcgatcaaactaaattgtttgcttgtgactaatgatgaaatgagagatcacatattcgagcttctagggccgtctttttttccaaagtggaagcaacgccatcgggtaaagtacacctttaataaaggaaaagcggtgcttgtgatgccacccccttactcttcagaacttcaagagtcggagatgggatcttggcacattccaattgaagagaagtctgggaatgagagaggcaggatttggctttgtattggcaggggaggttcctgcaaagaacatggcgaagttccttcgactaatggagctgtccacaaagttcctcaaactgaggcatctaacgtggtgcagcaggggctgacagaaaataaggatgaatcgataactggtaaaagaaaggatagagattgatcaccttcacctatccaggagcaccatctgctcttgagtctgccatcttgtgagcgattgtggccacttgttgttgattcagctgaggcatttcaagaatagggatgcagcgataatgccatcccagatatgtagggtgtgataattattaatcactttcgctgggttgcagactttcattcttcacaaattgggtgtgatcttagacgatttctgtgctatgtatctgactgcatccatgatcatctagtgttaactccagaataccagctaatgaactttttt

SEQ ID NO: 7196 - DNA, 687 bp, Zea mays
  Clone ID: 700621924_FLI
aaggacctcgccttcgacgaggccgcctgctccgggcattgccacgcctacgccgcggcgggcgcgtctaaggtgaagaaggtggactcgatccggcagtcgctgcgcatgcgcgggttccggtgcaacctcgtgtacacgcgcgcgtgcacgcgcctcaacgtcatcccgctctcggcgtcgcggccacgtgcgctaaggtacctgtcgatacaatggggcatcgacctgtccaaggtgtccgtgctcgtgggcgacaagggcgacaccgaccgcgaacggctgctccctggcctgcacagaacgctggtcctgccggagctagtttgccacggcagcgaggaattgtgccgcgaccaagacgggtttctggcagaggacgttgtctccatggactccccgaatatcctcaccctcgccgagtaccaggcggcggtcgacatcctcaaggctatttgagagtccgggattatgatacatgatctgctccgacattccagctgttggttccacactctgctggggttattttggacggacagttaaaatttcacagcgaatgactgcaaactttatataaaaaagatacatgtttttgttttcggttacttttatttttttggaaggggcttatggtataagtgtacatgaatcttttggtgcacatagtatacatattaaattata

SEQ ID NO: 7197 - DNA, 571 bp, Zea mays
  Clone ID: 700621982_FLI
caacaaggcagcagcacaagcaagaaccacacctcctcccttcgcctgtgatcatgtcgtcttgctgcggcggcaagtgcgggtgcggctccagctgctcctgcggcagcggatgcaacggctgcggtatgtaccctgacgtggagaccgccgccaccagcagcgtcaagaccacggtcctcgccgcgccgaccaccaaggccagcgccggcggcttcgaggcggccaccgagggcggcggctgcgactgcaacacctgcaagtgcggcaccagctgcggctgctcctgctgcagctgcaactgagctggcccggcccggcgatggcgcacgagagtcgagaggaggaggacgacgacgaggcgtataaatataatagcggcgtccagtaaataagatcctgtcaactgcacccgccattatccatggtcgctcgctcctcgcctgcgtctcctggtcctggggttcgtctgaacgtcctcgcggcttcacgacggcgatgccgcctccgtcgatcctgtccgtctcgtgccggatttaatattagatctatatgcgtgtttttctgcgtt

SEQ ID NO: 7198 - DNA, 1373 bp, Zea mays
  Clone ID: 700621992_FLI
cagaaacctcatcaacttgttgctagaaaacggcatagagccatatgtaacaattttccactgggatgtacctcaagcactagaagagaagtacggcggcttcctagataagagtcataagagcattgtagaagattacacatactttgctaaggtgtgctttgataacttcggcgacaaggtgaagaattggttgacctttaatgagccccagacatttacttccttttcctacggaactggggtctttgccccaggtcggtgctcacctggactagactgtgcctacccaactgggaattcactcgtcgagccttacactgctggccataacattctcctagcccacgctgaggctgttgatctttacaacaagcattacaagcgcgacgacacccgcatagggcttgcgtttgacgtaatgggtcgtgtgccatacggaacatcgtttctggataaacaggccgaagaaaggtcctgggacatcaacctaggatggttcttagagccagtggttcgtggtgactaccccttctccatgagatcattggctagggaacgactacccttcttcaaggacgagcagaaggagaagctcgccggttcctataacatgttggggttaaactactacacctcacggttctccaaaaacatcgatatctcaccaaactactcacctgtgctcaacactgacgacgcctacgccagtcaagaagttaacgggcctgacgggaagcccattggtcctcctatgggaaatccatggatctacatgtaccctgagggcttgaaggatctccttatgatcatgaagaacaaatacggaaacccacctatctacatcacggagaacggaatcggggatgttgataccaaggagacacctctacccatggaggatgccttaaatgactacaaaaggctagattacatccagcgccacatcgctactcttaaggaatcaatagacttgggatcaaatgtgcaaggctacttcgcttggtctctgctggacaactttgaatggttcgccggcttcaccgaacgttatggcattgtctacgtcgaccgcaacaataactgcacgcgctacatgaaggagtctgccaagtggttgaaacagttcaacgccgcgaagaagcccagcaagaagattcttacgccagcttagaaatcgggggcctcatgatgtgggtgcagcccataaaaaactggtgtgtggtttcgaaccgaaaattttctgtttttttccgccacgagaggttctggaggcatactctccagcaccgtggctaataacgcattgttccaattcagtctggccttgtcatgcatgcaataaataaagtgatgggtttccctgtttcaat

SEQ ID NO: 7199 - DNA, 424 bp, Zea mays
  Clone ID: 700622028_FLI
ttggccttttagatacacagtttagggagagcatggacattacatggcataaaaaatcaacaattagtctatgcacgatctcctccccactatcaagaattccgagtccctttgcatcttcctattagagaaagcacaggttgcccttgtccctggtgacgcatttggggatgacaagtgcattcgtatttcatatgctgcatccctaactacacttcagactgcgatgtcaaaattaaaggaagctgttgctctgctcaagccctgtgttgctgcgtagcaagatcactaaattgcaataaggagtgaccaaggcacctttaactaacctttcacattattttaaacacaatgttcgaattgttgggcagacttggtctgttgtttttatatgtaacattatggatttatgatgtgtacatgc

SEQ ID NO: 7200 - DNA, 962 bp, Zea mays
  Clone ID: 700622043_FLI
atcggcaaggccaatcccgagcagtggtgcgaaacctcgagcgctcgcgccggtgaccataacaaagaggaagccgcggtagcactggtagcggcagcagtaagggggagatgtcgtcggcgttcagcggcgatgagaccgcccctttcttcggcttccttggcgcctccgctgcgctcgtcttctcatgcatgggggcggcgtacgggacagccaagagtggcgtcggcgtggcgtccatgggtgtcatgcgcccagagctcgtcatgaagtccatcgtgcccgtggtcatggctggtgtgctcggtatctacggcctcatcatcgccgtcatcatcagcactgggatcaaccccaaggccaagccatactacctctttgacggctatgcccacctgtcgtctggccttgcctgtggtcttgctgggcttgctgcaggcatggccattggcatcgttggtgatgctggtgtcagggcgaacgctcagcagccgaagttgtttgttggcatgatcctcatccttatttttgctgaagcacttgccctctatggtctcatcgtcggcattatcctctcgtctcgtgccggccagtcccgcgcagattagaggcacgtttcagatgtcaacaccgtgccgccgacagttgcctggtcgtagctgggtcatgttctatatccatgagacaagaagctggagcactttgactctttgagaggcttacttttatgctgtctagttttccatcttctgttgagtcgagaaaacaagaaaggctgtgtagccaagggatgacttttacccttgtgccattcttttccctgtcgtggtggggggtgggttgcggttgatgcttatttatgcacagtttttgcttgggtcggggctggggctgggacgttggtgtaatgtggtgaataagcgagtgcatgcaacgcaattggaacttaagacatttttggt

SEQ ID NO: 7201 - DNA, 485 bp, Zea mays
  Clone ID: 700623125_FLI
gccatggaggtggtgaaggatacggctctgggtctggctttggtggtgctgctggcggcggcggtggacatggtggcggtggtggcggcggccaaggtgggtctggctatggctctggctctggctctggctcgggatatggatcaggtgaaggatacggacaaggtggtgctcatggaggaggctatggaagcggtggtggcggtggaggtggtggtggtcaaggtggtggtggctctggctatgggtctggatccggctccggttatggaggtggcaacgacaacggacattactaggctctttttcagagctaggaacatgttatacaaatatgtcaccagacatgagtaggtcttgctgcatgggatgctagttgtgtccatcgtgtgtgtaacaccgcaaggcttgtaatttgtcctgtaaactgcttgctgctttacattactggcaacaactaagtgataaataaaaatcatctatgg

SEQ ID NO: 7202 - DNA, 1488 bp, Glycine max
  Clone ID: 700649684_FLI
cacctctcctcgttcacgctacccctttctgctcttcttctacctttcaagttttaaaagtataaagatggcagagacattcctatttacctcagagtcggtgaacgagggacaccctgacaagctctgcgaccaaatctccgatgctgtcctcgacgcttgcctcgagcaggacccagacagcaaagttgcctgcgaaacatgcaccaaaaccaacttggtcatggtcttcggagaaatcacgaccaaggccaacgttgactacgagaagatagtgcgtgacacctgcaggaacatcggcttcgtctcaaatgatgtgggactggatgccgacaactgcaaggtcctcgtcaacattgagcagcagagccctgatattgctcagggtgtacacggccaccttaccaaaaaacctgaagaaattggtgctggtgaccagggtcacatgtttggctatgccactgatgaaacccctgaattgatgccattgagccatgttcttgcaacaaaactcggtgctcgtctcaccgaggttcgcaagaacggtacctgcccttggctgaggcctgatgggaagacccaagtgaccgttgagtattacaatgacaatggtgccagggttcctattcgtgtacacaccgtgctaatctccacccaacacgacgagactgtcaccaatgacgaaattgctgctgacctcaaagagcatgtgatcaagcctgtgatcccagagaagtaccttgatgagaagaccattttccacttgaacccttcaggccgttttgtcattggtggccctcatggcgatgctggtctcaccggccgcaagatcattatcgatacttatggaggatggggtgctcatggtggtggtgctttctccgggaaggaccctaccaaggttgataggagtggtgcttacattgtgagacaggctgctaagagcattgtggcaagtggacttgccagaaggtgcattgtgcaagtgtcttatgccattggtgtgcctgagcctttgtctgtgtttgttgacacctatggcactgggaagatccatgataaggagattctcaacattgtgaaggaaaactttgatttcaggcctggtatgatctccatcaaccttgatctcaagaggggtggaaataacaggtttttgaagactgctgcctatggacactttggaagagaagaccctgacttcacatgggaagtggtcaaacccctcaagtgggagaaggcctaagtaattcattccactgctctatgctggaagttttttgagcgttgcccttataatatgtctaatatccataactttccacgtctcttactctgtgtgtttctctcctcttcctcctattttgttatttgtatgttcttttgtaattttttacgtgatcaactaaaaacatgtactctctgtttgtatgtatgccctaccaatgtgtctcttaatatcaatatcaaaaagagagtgttcaagtt

SEQ ID NO: 7203 - DNA, 1095 bp, Glycine max
  Clone ID: 700649704_FLI
gcaagtgttaatactcatttgggagttgaacaaagcagaagagatgatctagaatctctcggatatttgctcatgtattttttgagaggaagtctcccatggcaaggcttgagagctggcactaaaaagcaaaaatatgacaagataagtgagaagaagatgcttactccaatagaggtcttatgcaagtcatatccattggagtttacatcatacttccactactgccgaacgttgcggtttgaagataagcctgattattcttatcttaagagactatttcgggacctattcatccgagaaggttatcagtttgattatgtatttgattggactatgctgaagtatcctcaaattggatccagttctagagcccgaccaagtgggaaaccagtcataaaccccggacaatcaggagacagaatagaacggccttcaggtgctgttgaggcatttgcaaggaggaatggctctggacttgttctgcaaagtgagcattctaggcataggtcttcagatgatgtgccatcttccaaagacgtgcaagctgattctgagaggcctcgcagctcttctcgtaatggcagttcttcaaaaaagcctgtcttgtcaagcagccggccaagctcttctggtgagccaagtgaaagccgtactagccgactggtcttaagcagtggccgactatcaacaactcagagacttcaacctggttttgaatccaaaacatctttatctcgggcttcggcaacaagaggtggtcgtgatgatacactcaggagctttgaactcctgtcacttggttcaggaaaaaggaaatgaagaactgtgtggtcagcagatttcttgtgtcaagggtcttagttctgccctgatactttcctttgagatgtctacacatgttgattactcttgtatatttctatccaatgttgggtccttcaaggctaaaaagctcattgaaacttcttgatgaagatttggcagactcttcttatacttcttctgatgttcttccatgattatttcagcagggactcattcatgaagagatactatgttacttaaggaatttgttaatatatggctacttgt

SEQ ID NO: 7204 - DNA, 1354 bp, Glycine max
  Clone ID: 700665591_FLI
gcgttgtggaagcttgccattctcttggtgtgatgcacagagaccttaaacctgagaattttctctttgtcaatcagcacgaggattcccttctcaaaaccattgactttggattatctgtcttctttaagccagctttgttcaagttgaagaagtaatttgattccatggagaaaaaccgatgatctttcacttccaggtgatatatttaatgatgtggtgggcagcccatactatgttgccccggatgttttgcgaaagcgttatggtcctgaggcagatgtttggagtgctggtgttatcctttacattcttttgagtggagtacctccattttgggctgaaaacgaacaaggaatatttgaacaagttctgcgtggtgatcttgacttttcttctgatccctggccttcaatttctgaaagtgcaaaagatttagtaagaaaaatgcttgttcgcgaccctagaaggcggttgactgcacatcaagtattatgtcatccttggattcaagttgatggtgtagctcctgacaagccacttgattctgccgtattaagtcgcttgaagcaattttctgctatgaacaagctcaaaaaaatggcccttataattattgcagagagcttatctgaagaagaaatagctggcttaaaagaaatgttcaagatgatagatgcagataacagtggtcaaatcacttttgaagaacttaaagctggtttgaaaagagtcggcgctaatcttaaggagtctgaaatttatgatttaatgcaagcagctgatgttgataacagtgggacaattgattacggcgagttccttgctgcaacgttgcaccgcaacaaaattgaaagagaagataatctatttgcagccttttcttactttgataaagatggaagtggctatattactcaggaagaacttcaacaggcttgtgatgagtttggcataaaagatgtccgtttggaagagataatcaaggaaattgatgaagataatgatggacgcatagattacaatgagtttgtggctatgatgcagaaaggaaatcttccagcggttggtaagaagggcctagaaaatagcttcagcgttaagttcagggaagcattaaaattgtagttttcattgtcatcattgagttttttttttttttggtgctctttattaccacacatccctccttttcactttgaaggttcaagattttattcatagtgcaaagtgtttgcatggggatatttaggtgggccttttcatctctgcagttattttgtttgcgtccaatttaaaatggatttttgtaattacgagaatatattaaaaagagatatctttttttattatt

SEQ ID NO: 7205 - DNA, 1739 bp, Glycine max
  Clone ID: 700669227_FLI
aaacatgccctcccttcatcctcttctcatcttctttcctttgcaacaactagttagggttttgagtttgtgttgttgcttttatccctgaaaatcaaatcagactcagaaagagaaagagaaagaaaatggcgctgaagtttctgaacaagaagggatggcacacggggagtttgaggaacatagagaacgtgtggaaggcggagcagaagcacgaagcggagcagaagaagttggaagagcttcgcaagcagatccaggaggagcgagagcgcaccgaatttcgtcttcttcaggagaaagctggcctcgttccgcaccaggagaggttggagtttctgtacgattcggggttgtcggttgggaaatctgcgaattctgaaggattcaaggccctcgaacagttaccgaaatccgatgcaacggatgcagcaggcgcaggctcctctgcttctgcttctaaggagggggcgagtgtgctcggggcgctgttcgaggagaagcctcagtctgccaatgatgcttggaggaagctccattctgaccccttgctcatgatccgccagcgcgagcaggaagcgcttgccaagataaaaaacaaccctgtccagatggctattatcaagaaatcgattgaaggaactgaaaataaggagaaagtttataaaaaggaaaagcggaagaagcactggtctagtaaatcaaagcataaaaaacagtctgattcagaagatgacactactgagaggagaaaacgaaagactggtaatgaagtttctgacaagaagcatcataaggctcaatcagattcagagtatcagtcaagtgaaggagaaatgagaagaaggaaggatcgctatgaggacaaaaaatacagggaaagatcacccagtcaccaacagagacaaagaaatggcaaagactacaaagaagatgctggtgacagaaattataacaggtccaggtcagaaaggagtgtccaaaagggtcaattggattcagggtatgaatcaagtgaaggagaaaagagaaggaagaattactatgaaggcaaaaaatgcagggaaagatcacccaatcaccaacagagacaaagaaatggcagagactacaaagaagacactggtgacagaaattataacacttctaagtcagaaagatatgcttcagaaggttggtccaatatagatgcccctaaaagcgggggtggacgaatttctgaagcaagctccaatagatattctgcttcttcacctgaacatggatcacactataagtgcaggaacgtggctcctaagctttcagaagaagagcgggctgttaaacttaagcagatgcaattagctgctgagttgcatgaagagcagagatggaaacgtataaagaaggctgaggagtcggatacaaaggaagcaattcagaatgataatgtttgtggcaagaattttttggatactgttcagaaaagtgtatatggtgcagctgaaggagggagcacatcaatagctgagagtgtccgtcgtcggacatattattctcaaggcaggtctggcggtgaaggcaatgcatttcggcgatgaacactcggtggttttatcgctaattgtagctctcttagttgtcgccagacccctcttgcatgtgctttcttccttggaccaaaaaatgattccttccatgtataatatgcgaaaagttgtttaatttcaagtagataatatattaagaattcatagttc

SEQ ID NO: 7206 - DNA, 403 bp, Glycine max
  Clone ID: 700669288_FLI
caagatcattgatcctcgtctcaagaaccaatattcacttggtgctgctcgaaaagtagccaaattggcagataactgcttgaagaagaatcctgaagatagaccatccatgagtcagatagtggaaagcttgaagcaagcattgcaggattcagaaaccaatacacttagctcaatatgacttctaaatccactgaatctaaattggtcccgagtggtaaataggtgcagcttgagaataatttttgtaattagtttgattcatcaccacaaagccaagtcctatactgtcttcagtatggttttgtttggagaaacttttctataagcacttatagaagactataagaataaaatagattgagtttctcacaattgataaagtaaggtgtaagatgatttt

SEQ ID NO: 7207 - DNA, 1049 bp, Glycine max
  Clone ID: 700669423_FLI
attacactcacactctttgtgaaaaaggggagtttcttattctttctagacgcttccattgatcggcgatttcttagacatggcggagcatcacgaacacgaggaagtgaagggtgagtccttgttggagaagatttctgggaagatccacgaccacgattcgtcatcttcgtcggattccgacaacgagaaaaccagcgcttctgactccttgaagtcaaaggttttcaggcttttcggcagagaaaagcccattcaccatgttcttggtggcggaaaaccggccgacgtttttctctggagaaacaagaagatatctgcatcgacactcggagttgcgaccgctatatgggttctgtttgaattgcttgagtaccacctcctcaccttggtttgccacttcctgatccttggtcttgcggtgttgttcttgtggtccaatgcatccactttcatcaacaagagtccaccaaagatcccacaagtgcacattccagagaaacctgttttagaatttgcctctgctcttagagttgagatcaaccgggcttttgcgttgttaagggatattgcatctggaagggatctcaagaagttcttatcagtgattgctggattatgggttttctctattttgggtagctgggccaacttcttgaccctgttctacatagcttttgttttgctgcacactgtgcctgtgctttatgagaaatatgaagatcatgtagactcttttggtgggaaggcaattgccgagattaagaagcaatatgcagtgtttgatgcgaaggtgttgagcaagatacccagaggacctttgaaagataaaaagaaagattgaagtggcactagattctgacaaatatgttttagtggggtttcatgaatgtcctgttaaatttagattcatcatcagttaaaaccctatcatgtcatattttatttttttagggtccttttactagacattgtggatgaagagtatcttgtatatttttcttctggctttacatgtacctctcagaaatcctatatgcttatggatg

SEQ ID NO: 7208 - DNA, 966 bp, Glycine max
  Clone ID: 700669443_FLI
ctgactccacattctcccccgcttactctctcgccgagatttggcccggaatgccccatttcccccctcccttcccccacccctcctccgccgatcactccaccctcaccgacctcaccgccaccccccgcaagagaaaggactgctcctcctcctcctcctccgcctccgccgccgccgccgacgaggacgactgctccaaggtcctctcctccaccaccaccgccactgccaacctcttcaataatgattctggtagcaataaacagatgaagttaggagggtccagtgttgaaaacgatggtttcaaagctgaggcagaagcgagttctgcgggtggtaacaagtcaagtgagcaaagcaataaaccttgtgaggcacctaagcaagactatattcatgtgagagcaagaaggggccaagcaaccgatagccacagtctggcagagagagcaagaagagaaaagatcagtgagaggatgaaaattcttcaggatttggtgccagggtgtaacaaggtaattggtaaagcacttgttctagatgagataatcaattacatccagtcactgcagcgtcaggttgagttcctttcaatgaagcttgaagcagttaattcaagaatgaacatgaaccctactattgatgggtttccttcaaaagatgttggtactcagccatttgacattgctggaatggtatttggatcacaagcagcaagggggtatgctcagggatcatcacctcctggatggctgcatatgcagataggaggtggtttcgagagaacaacataattcagagaagcctcattgggaatgacagatgaatcgataggattgattttctattaaaaaaacaaaaaaatagtgggttgattacagtgtgcttttttaacaacctagtcaactgttgtcgaatgttgtaggtttgcgtttcccattgttatagtatgaaattatttat

SEQ ID NO: 7209 - DNA, 1621 bp, Glycine max
  Clone ID: 700674513_FLI
ctgtctctctgtgacaaacacaaacacaatcaatggcgaagcctcacagcggcacccccgcggtcgcaccgaagcccgcgtgggtcctcccgtaccgaaccgagaatctgcgcgaggtctacactctgtcccgaaaactagggcagggtcaattcggaaccacgttcctctgcacgcacaagggcacggggcgcacctacgcctgcaagtcaatcccgaagcggaagctgctctgcaaggaggactacgacgacgtgtggagggagattcagataatgcaccacctctccgagcagcccaacgtggtgcgcatccacggcacctacgaggacgccgcctccgtccacctcgtcatggagctctgcgagggcggcgagctcttcgacaggattgtgcggaagggacactacagcgagcgacaggccgccaagctcatcaagaccattgttgaggttgtggaggcctgtcactcgcttggtgtgatgcatagggacctcaagcctgagaactttctgtttgatactgtcgaggaggatgctaagctcaaaaccaccgattttggcctctccgtgttttataagccaggtgaaaccttttgtgacgttgttggaagcccgtactatgttgcaccagaggtcttgcgtaagcattatggtcctgaagcagacgtgtggagtgctggtgttattttgtacatcttattaagtggggtgccaccattttgggctgaaacagagcaggggattttccgacagattttgctaggaagactagatttccagtctgagccatggcctagcatttcagacagtgccaaagatctaattcgaaaaatgcttgatcggaatccaaaaacaagggttacagctcaccaagtactctgtcacccttggattgttgatgacaacattgcaccagataaacctcttgattctgctgttttatcacgcctgaagcagttctctgcaatgaataaacttaaaaagatggctttgcgtgttattgcagagaggctctctgaggaagaaattggtggtctgaaggaattattccggatgattgatgcagataacagtggtactataacatttgatgagctaaaagaaggcttaaagcgagtaggatctgaactaatggagtctgaaatcaaggatcttatggatgctgcagatattgataatagtgggacaatagactatggtgaattcattgctgctacggtccacttaaataagctggagagagaggaaaatttggtgtcagctttctcctattttgataaagatggaagtggttatataaccattgatgagatacaacaggcttgtaaggagttcggtttggatgatgtccatatcgatgaaattgtcaaggaaattgatcaagacgatgatggacagattgattatggggaatttgctgccatgatgagaaagggtaatggaggaattggcaggcgaaccatgaggagcacgctcaatttcagagatactctgggaattaaaggccatgggtccgattaagtcattgtaccttaaataattattacttggtgataaaattttgaacaatgaaaactacaactatttattcatgaatggactcaaaacgtcctttaggg

SEQ ID NO: 7210 - DNA, 1137 bp, Glycine max
  Clone ID: 700676878_FLI
ggctggctataaaatcctcttaaccagttgttgctgctgcgttgcacttcagtttacagctcccgaaaatggctcctccaagaggtcgtggtggttttggtggtggcggtgggttcaggggtggtggtaggggtgacagaggcagaggaaggggcggtggaggaagaggaggagacaggggcactcccttcaaagctagaggaggtggcagaggtggtggtggccgtggcggaggcaagggtggtggccgtggtggtggcagaggtggaatgaagggaggtagcaaggttgtggttcagccccatagacatgatggtattttcattgccaagggtaaagaagacgctcttgttactaagaatcttgttcctggtgaagctgtttacaatgagaaaaggattactgttcagaacgaagatggttccaaagatgagtacagagtttggaatccttttcgatccaagttggctgctgccatccttggtggagttgacaacatatggattaaacctggagccagagtcctttacctaggagctgcttctggaaccactgtttctcatgtatcagacgttgttggccctactggagttgtctatgcagtagaattttcccatagaagtggacgtgacctggttaatatggcaaagaagcgaactaatgttattcccattattgaagatgctagacatccagctaagtataggatgctggtcggaatggttgatgtcatattttctgatgttgctcagcccgatcaggcaaggattttggggctgaatgcttcatattatctgaaagcaggaggtcattttgttatttcaatcaaggctaactgcatagactccacagtccctgccgaggcagtgtttgaaagcgaagtgaacaagttgaaggcagatcaattcaaaccattcgagcaagtcacccttgaaccatttgagagggaccatgcctgtgtggttggtggatacagaatgcccaagaagaaaaaagatgctgctgagtagattgctttccggtagccagtaggcttaatgtcatttcaggagattgtgttaattttgttttgaaacctcggttatcaaacatactttgtaccttttctatagtagtaatgtagtcaagtttgccttc

SEQ ID NO: 7211 - DNA, 1711 bp, Glycine max
  Clone ID: 700677773_FLI
gcagacttaacaacagcacaaagcgggttactgtctgttcaagctaccatctctctctctctttcttagtgcctccttgccaggtgctgccactctctctttctctctcttcatccttctgttgggttggttgtggagtgttgttttctgttgtgcacgtgttgtcattttttaccctcgccacagatctgaagtgttcaagtttggattttgtgcttctggaagttaaaatggcccaagaaactttcctattcacatctgaatcagtgaacgaggggcaccctgacaagctctgtgaccagatctccgatgctgtgctcgatgcatgcttggagcaggaccctgacagcaaggttgcctgtgaaacctgcaccaagaccaacatggtgatggttttcggagagatcacaaccaaggccaacgtggactatgagaagattgtgcgtgacacatgcaggaacattggttttgtctctgatgatgttggtcttgatgctgacaactgcaaggtcctcgtcaacattgagcaacagagtcctgatattgctcaaggtgtgcacggccacctcacaaagaggcctgaggagattggtgctggtgaccaaggtcatatgttcggctatgccactgacgagactcccgagctcatgcccttgagccatgtccttgccacgaagctcggtgccaagctcaccgaggttcggaagaacgggacatgcccttggctgagacctgatggcaagacccaagtcactgttgagtactacaatgacaagggtgccatggttccaatccgcgtccacactgtgctcatctccacacagcatgatgagactgtcacaaatgatgagattgcagctgatcttaaagaacacgtgattaagcctgtgattcctgagaagtaccttgatgagaagaccattttccatttgaacccttctggcaggtttgtcattggagggccgcatggcgatgctggtctcaccggccgcaagatcatcatcgacacctatggaggatggggtgcacatggtggtggtgccttctctgggaaggatcctaccaaggttgataggagtggtgcctacattgtgaggcaagctgcaaagagcattgttgcaaatggacttgctaggagggcaattgtgcaagtttcctatgccattggtgtgcctgagcccttgtctgtgtttgttgacacttatggcactgggaagatccctgacaaggaaatcctcagcattgtgaaggagagttttgacttcaggcctggcatgatctccatcaaccttgatctcaagaggggtggaaatggcaggttcttgaagactgctgcatatggacactttggcagagatgaccctgacttcacatgggaagtggtgaagccactcaagggggagaaggtacctgcttaactaaaaggggttccaacactcttggcaagggacttttgcactactactggcttcttattatctgattgctaaaattttctctatgtttccttccctcttactcaattctgtttttttttttctgtatttttttatgaatttcccccttttttttgtgtacttgtatgtgttctttcagaacatatatattttatatgatgaaacaaaaaaaatgttctctcaagatttatgctagaaatatgtaataatctcaaattatagagagtatacaattttactatgtgaattgcagt

SEQ ID NO: 7212 - DNA, 542 bp, Zea mays
  Clone ID: 700622136_FLI
gacgctgattccgttgtcccgctcaccgcgacaaggtactccattgacgccctctttctaccgactatcacgaactggtatccttggtacgacgacgaagaggttagtcagtgcagtggcaccgctacatccatccatccatcttgacatttttttcttcactcccttcgtgctggaacctaactctgtgaaccttgattaggtcggtgggtggtgccaggtgtacgaggggctgacactggtgacggtccgaggcgcagggcacgaggttcccctgcaccggccgcggcagggcctgaagctgttcgagcacttcctgcggggtgagcccatgcccaggcctgtagatagcgtccagtcgttttagaactggttgctgtctccccgcttggtgaaggaggagacctggctgcgctgcgcattcttgttgctgtaaactcatccgtcacactccgttgttaggatggatttgctgaaaatcagaacataatgttgctcgtttcagtgagcagattgggtatttagcaatgtctcgttttgac

SEQ ID NO: 7213 - DNA, 1303 bp, Zea mays
  Clone ID: 700622209_FLI
ctggatttctcccccgaattcgcacctcccccctcacttcgctgtgtctcatcaacgccggcatcaccgcgaggactgggccagctctccctccctttctcctccctccgccttcattgctgacggcgacgactgggcgagctctaccgccgctctgcgctaggtgcccaggtcttcctcgggcacttcaccggcgacgagcacccatcagattgagaactacaatgaaccctatctcaatgccttgaatgaatatgacgatgggagagacttgacctcatatgattttgaggctgactgttttagttcaccatatgatgatgcgaacaaaaagaagcttgcttacaggcatcgtgctattggagagaaatatgcaaagggtttggaaaaggttctggacggacacatggtcaaagtctgcaatgatcagtacagtttgactgacaaatatactgatggctggctgtcttcagctcataagttactggaagaagcattgggcaaatcagcatcagcaccttcagccaactcttcaagcatcaactgcatagttacatcagggtcactgattccaagccttgccaaatgtttgctgtatcacctggatgatgtggtctcatctgagaacgtctacagctcatgggaagtgggtaagctgcagtgcttcaaatggatcaaggagcgcttcgacggtccaaacgtccgcttctgtgcaatcggtgatggccacgaggagtgcagtgctgcgcaggtcatgaaatggccattcatcaagatcgagttccgccctgaagcccatcacaggttccctggcctagacttgcccacagtgcagacctacatggatgtgatatacgagtcatcgagcaaagatggttgaccgacgattgatgtcgattctgttttctcctctgacctccaccacccatggagctattgtttgaggaaactgtaagcaaagagatgtcgtgggaaaggaacgtgtcgtcctccctagatctttcaccttggcgaattaggaggcaggtgtgataaataagagtcttgctagttcgtcgtcgtcgtccatgttgtcatagatcctgtcttgtgtgttcatgttactgtgatgcaggcaatggtgtgttgtgtccgggcgttatttcctgtgttgtgctttgccaatttgccagcttcagtttatgtgtatatgctttttaggctgtcttcggcagatcgtgtaaaataggggacgtgacagtgtagatgacaccgtttaacttgtttttaaaatgaagtttgaaatatacacacatcatagttc

SEQ ID NO: 7214 - DNA, 838 bp, Zea mays
  Clone ID: 700622288_FLI
ggtttaaggaagacattaattcgttgggcagctgagaaaaacaaagaaagtggacaaaaaatatttattgaggatgaagaatgctcatccacctactgcatttcatttaaagtgtccaatactgcagctgcacctcctgtgaaggagattaggaggacaatgagaatacaagcactgcgttgccatgttttgtacagccatgatggtagcaagttgaatgtaattcctgttttggcttctcgctcacaggctttaaggtatttgtatatccgatggggggtagagctgtcaaacatcaccgtgattgtcggtgagtgtggtgacacagattatgaaggactacttggaggcgtgcacaaaactatcatactcaaaggctcgttcaatactgctccaaaccaagttcatgctaacagaagctattcatcccaagatgttgtatcctttgacaaacaaggaattgcttcaattgagggatatggtccagacaatctaaagtcagctctacggcaatttggtatattgaaagactaaatctttgatctttgctggtcagcagaggaatcaaagcaggaatgtaggatcgaggagagtgacaggacttcccctctgtgcacttcgccgaaaagtaataatgggattgctatgcatggcccttgttgtacactagaaaattgggcacgcaaacttgtgtcagtttttccgctgttgcgaaattcagtgatggtgtttttgtaactataccaacctgtgtcagttttgccgttgttgcaaaactcagtgatggtgttttttgtaattattatacatccgaataataagactggtgtttccagac

SEQ ID NO: 7215 - DNA, 975 bp, Zea mays
  Clone ID: 700622307_FLI
ctccccgccgcctgtccctgcgctagtcgacactcgacaggctcggtttccgccctcctctcccaccgccgcgcaccgagaagatggggaagcggtggatcccgctggaggccaacccggacgtcctgaaccagttcatatgggggctgggagtccacgaggaggatgtgcagttctgcgacgtctacggccttgacgatgagctgctcgctatggtgccccagcccgttctcgccgtcctcttcctctacccgctcacctccctggacgaggagaaagaagaatcaagtgtttctgctgccacatcgacctcagcgggcaaggaattgagcaagaaagtatactttacgaagcagactgttggtaatgcttgtggaacagttggtgttattcatgcaataggaaatgcaacatctcaaatcaagctagttgaggggtcctattttgagaagttctataagcaaacggctgatatggatccagctcagcgtgctgcctttctcgaggaagatgatgagatggaagatgcacattctgttgctgcatctgctggtgacactgatgctaatgttgatgttaatgaacattttgtatgtttctcctgtgttgatggtgaactttatgagcttgatggacgaaaatcacaacccacatcccatggcccttcatcacctgaaaccttgttgcaggatgctgcaaaagtcatcaaagctagaattgcagagaaccctaactcgatgaacttcaacgtcatggctctttcaaagaagtgaagtgtactgtgatggatggattttctttggcagaatacgggcctctttccctttcgcttccgctgagctgagctgcaccgagtggaaggtttgcattaggcaaacatagggaaaaaaaactttatatgacctgagatctttgtttgatgactcgatgtattctcgtgccttcatggagagagaaatgactgttcaggatttc

SEQ ID NO: 7216 - DNA, 1313 bp, Zea mays
  Clone ID: 700622325_FLI
ggggaggagtgatagatcggaaggcggcggagggaaatacgggttctggggcgcagatagcgacgtcggcggcgggacttgagctcgagcgtggctgcgatttggtctggtggtgaggactaagtgtggagaacaagggcggcatgctcgacggcgaggccgtgaagaacaagggaggtaatcacgatcaggagaactccacgagcttcttcttcttcttggtgacggcggtcgcgcccccggctggccctgggacggtctgcttgcacctcggccttggcctcctcctccgccttcctccctctcttcttcttcttgtgccagcagagagcagatcccagcgcgcggtgctgggtgtgcgtgtccaacgccgaacaaaagagagacagagagcagatgtaacgaaagagaagggatcctaccggagagaagctcgccagcgagtagaggtcgccggcggcggggaggatggctcgtcttcttccgccgccaccgctcctgggtctcacggtctcacaggatttgttccagacccttgcagccttggctccaatccaggaccgtctctggccatgtccttgccgccgtcaactcctcgcccaaccccagacccacccagagaggctagagcgaggccgcaggcggcggcggtggatggccgtgcgtgtataacagtagcttacaataataatgccgatcgtaggcccaccgccagccgcgcgcgccggactcgctgacaaacaaaagtgacggcagagtttgcaacgttatatagtgcctgaaaccaattttaagatatactcccttctcatgttagtatttattttagcttttagtttatatatgttaagggtcttctccgcggaagatccttaaaatgtaaacacctttgacaaaatgccacaagaagtccaccctccttctgccgaatgttctcaagacgaagacgacctcgggaaggagtagcaatgcagaacgccgaagctaccgatagcttcggttcagagcaagaaggaaaagactagatagaacttgttagtttaagttgtttataaacaaatgttcaagtgcatgatgtaatttttcctgggctgtgtcccgtgcgtatacatagatgaacagtaacatcgtattgttcacgcggtattgtaatcattctctcgcgtccacgcggtattgtaatcattctctcgcgtcttcaccttcgagcaaactgaaggtatcattgtaatgttaatattgttagtattcatacatgttttatgaaatacaaacatgtatgaattaatgaaatgcagccactgtctttaatc

SEQ ID NO: 7217 - DNA, 1372 bp, Zea mays
  Clone ID: 700622456_FLI
gggttattccgcttcctcgtttacatcgccgcagccgccgtaccatcgccaccatggcctccgcctccggcacccccaacccagtcgtgctagggtgcggcggcatctccgtcgactacctggccacggtggcatccttccccaaccccgacgataagatccgcagcctcgccctcaaggtgcaggggggcgggaacactggcaacgcgctcactgcagctgcacgcctcggcctccgtcccaggatcatttccaaggtagccaacgatgctcaaggaagaagcatcctcagcgaactccaaactgatggcgtggacacatcctacatcctggtcgcagagaacgggaactcacccttcacctacataatagttgatgaacagacgaaaactcgtacatgtatacacactcctggttctcctcccatggtgccagaagagctcacaaaggcaaactcgtcgtccgctttagatggcgtggacatcgtctacttcgatgtacgattgcatgacattgctttgcttgttgctgaagaggcaagtcaaagaaaaatccctattttgattgatgccgaaagaaagagggaggggctggacgagcttctcaactttgcatcttacgttgtatgctctgcaaagtttcctcaggcttggacaggagcctcatcaatacctgttgctttagtatccatgctttcaaggttaccaaacatcaaatttgttattgtaactctgggggagaaaggttgcttgatgcttgagagaagcagtacagatgcttctgaggcaggggaaatagatgcagaggctttattcgaatcactagagaagagcattgatcagagttctactataccaaaatgtgttgcttccaagtcaaacttgagaataagcgcagatggagtaggctcgataagtggcaggttacttctaggtacggccgaagttataccacctggtgaactcatagatacaactggtgctggagatgcattcattggagcagttctatatggtttatgcaccagcatgccaccggagaggatgctaccttttgctgcacgagtggctggttgtggttgcagaggtctgggggctcgaaccagccttccccatcgcgcagacccacgcctggctggctattgatccgaattcagaagggctgcatcctccatgaccacctgcctgcaccccgtccaatggttgtgaatattccagtcccgatcagatcaaataagtcatcaactattagcagcacatcattactatcattgtgatagctattattttgcgatgattatgcaactatatggttccaacttgctagctccaggcataccaggcctgtgcaccttttacgggtgtagaaagtt

SEQ ID NO: 7218 - DNA, 616 bp, Zea mays
  Clone ID: 700622463_FLI
ccgccgcgcttcgccctctcgctccagccgcttcacagcgccgccgctcgcctctccgaccgccgcgagaatgccgttcaagaggttcgtggagatcgggcgcgtggccctggtgaactacggcaaagactatggccgcctcgtcgtcatcgtcgatgtggtcgaccagaacagggcacttgtggacgcccctgatatggtcaggtgccagattaacttcaaacggctctcacttactgacatcaagattgacatcaaacgcgttcccaagaagtcaaccctgatcaaggctatggaggaagctgatgtgaagacgaagtgggaaaacagctcatggggcaagaagctgattgtccagaagaggagggctgcgctcagtgactttgacaggttcaaggtcatgctggcaaggatcaagaggggtggtgctatcaggcaagagctcgccaagctgaagaaggcgtccacggcttaagtcccttttggtggatggcatgttagtttttggtttcatgttgcatcagcattttgttttgagtgttgtcaaagccagaattagtaatatgtttcatgtgtacccttttcaaacttcatcaagaatgggtgtgctctggat

SEQ ID NO: 7219 - DNA, 688 bp, Zea mays
  Clone ID: 700622477_FLI
gagcaaccgataatccgccggcgctgagatgttggtttatcaagacctcctatctggcgacgagctcctgtcggattcattcacctacaaggagctcgagaacggcgtcctgtgggaggtcgagggaaagtgggtcacccaaggtcctgttgatgtagacattggtgccaatccatccgccgagggtggtgaggatgaaagcgttgatgacacagccgtgaaggtggttgatattgttgacacattccgtctacaggagcaacctccttttgacaagaaatcatttgtctcttacataaaaaaatacatcaagaatctcactgctgtgttggagccagagaaagcggatgagttcaaaaagggtgtcgagggtgcaaccaagtttctccttagcaagctgaaggaccttcaattttttgttggtgagagcatgaaggacgaagcgtccgtggtattcgcctattacaaggatggtgccactaatccgacattcctctatttctctcatggtcttaaggagatcaagtgctagattagttacccatgttgggtactatatatgttctattgttatagccacaactatagctgccctgcctgaactgaactcaggttttttttaagaaaaaactgtccaagattggattgcttgttaaagctaaatattgttattgacgtgttattgctt

SEQ ID NO: 7220 - DNA, 1699 bp, Zea mays
  Clone ID: 700622539_FLI
tgaaatcagaagtactcttgacaggcatatgattttgaagactactcttgttgagctaggaaggaccttgggtctggaggaatgtgcattgtggatgccatctcgaagtggttcaagccttcagctttctcatactttgcaccaccagattactgttggatcatcggtgccaattaatcttcctgtcatcaatcaagtgttcagtagcaaccgggcaattataataccccacacatctcctttggcgcggattcgacctcttacagggcgatatgttccaccagaagtggctgcagtccgtgtacctcttctccacctttcaaacttccaaataaatgattggcctgagctttcggcaaaaagctttgcaatcatggttttgatgcttccatctgatagtgcaagaaaatggcatgtacatgaattggagctggttgaggttgttgctgatcaggtagcagttgcactatctcatgcggctattcttgaagagtccatgcgagcacgtgatttactaatggagcagaatgttgccctggatttagctcgaagagaggctgagatggctatccgtgctcgcaatgattttctagctgttatgaatcacgaaatgagaacacccatgaatgcaataatagccctttcctccttgcttttggaaactgagcttactcctgagcagcgtctaatggtggaaacagtactgaaaagcagcaatctgttagcaacactcatcaatgatgtgctagatctttccaaactcgaggatggaagccttgaactggagattaaagcattcaatcttcatgctgttttcaaagaagtgatgggtttcattaaaccaattgcatctatcaagaggctatctgtatcggttatgttggcaccagatttgccgttatgtgccattggtgatgaaaagagactcatgcaaactattctgaacatctctggcaacgctgtaaagtttaccaaggagggacacatcacacttgtagcttccattgtgaaggctgactctttgagagagttcagaaccccagaatttcatccaactgcaagtgatgaccatttctatttgaaagttcaggtaaaagatacaggctgtggaattggtccacaggatctacctcatgtatttacaaagtttgctcatcctcaaagcggaggaaaccgagggtttaatggtagtggtcttggccttgccatatgcaagaggtttgttagtctcatgggagggcacatctggattgacagcgaaggaaccggaagaggttgcaccgcaacattcgtcgtcaagctcggcgtgtgtgacaacacaaacacctaccagcagcagctgatccctctagtatggccaagcagcgcagactccgatttgcgtgctccgaaacctcttccggacgggagaggatctactcccttgaaatctcggtaccaaaggagcgtatgagcctagtgtaaatgattgacggcatagtgccaagtaggggaccgattagtgccaccgtctaattttgtttgtaaccctgtcatagcaggcatatgatgtacaaatactgtaaagcaaatggagactgcggccgtgtatctgggtggcaacgctgacttgctgcattgagtggtatatacatatgctaccagcggattgaattgcttattctggggtgtgccgagcgcgcccgtgtgcgaccaccgt

SEQ ID NO: 7221 - DNA, 1068 bp, Zea mays
  Clone ID: 700622579_FLI
atggcagcctgctaaagccttacacccaaccagttgtgactttgtggtacagggctccggaactactattaggagcaaaggagtattcgactgctatcgatatgtggtcattaggttgcataatggcagaactcttgtcaaaagagccactcttcactgggaagtctgagatagatcaacttgataagatatttagaatactcggcacacccaatgaggagcggtggcatggttgttccaaattgcctggcttcaaaggcaacttcgtaaagcgaccgtacaatagattaagggacaaatttccagctgtatccttcacgggaggcttgaccttgtcagaagctgggtttgacctgctaaataggttgctggcatatgaccctgagaagcgcatatctgctgctgatgccttgaaccatgagtggttccgtgaagttcctctgcccaagatgaaggaattcatgccaacttttcctgctctgaatgaacaggacaggaggatcaagagatacatgaagagccctgaccccctggtggagcaacagatgaaagaacaagggagcataggagatcatggcctttttgactgatctgaaagcagacaagtcttgctgcaaatgacagtttttgagtgagtaaacatgttgcaaggtgaggtgtacaactggacagagaagtatcccgtctacttggtgtgcggtgacagcttattgtgttctataacaggctaagagatcaaaggggaacataaattttacttaagttccatgcagctagtgttcaaatggcagggttagctctctacgagaactgtcatattctaacctatcatcattataagttgcagatgtaatgcagttcgtctaaaaggtttggccttgcgtacaccaagtttcacctctgatacttgtaaagtattataaactgttgacttgtaatcagtaatcaatgagatattagtgacatcgtattttattttctcttttcaagtagtgcatcttcttttgatcttttgattgtctttgcaagagttgaatgaagtgaaggaaccggggccttttttttttt

SEQ ID NO: 7222 - DNA, 406 bp, Zea mays
  Clone ID: 700622608_FLI
gctcctgcggcagctcatgcaactgcatgtcccctaacgtggagaccgccgccgccagcagcatcaagaccacggtcctcgccgcgccgaccaccaaggccagcgccggcggcttcgaggcggccaccgagggcggcggctgcgactgcaacacctgcaactgcggcaccagctgcggctgctcctgctgcagctgcaactgagccggtcaggcgatggcgcacgagagtcgagaggacgacgacgagtcgtataaatataatagcggcgtctaaataagatcctgtcaactgcacccgccattatcgatccatggtcgctcctggggttcatgttcatctgtaacgtgctcgcggtcatgtccgtctcgtgccggatttaatatttatatgcatgtatttgtgtt

SEQ ID NO: 7223 - DNA, 726 bp, Zea mays
  Clone ID: 700622640_FLI
ctcccctcccctcccctccctttctcccctgactcctgctctactggatcctccgcctccatcgcctctcgcgcctccatcgacctcggcgcctcgtccgtcctgctccacctcttcttacgccggttgaccctgacctcaaccttgtgaaagggcggggtggtgctcttcttcgtgagaagatggttgaggcagcatcggacaagtttattgttattgttgacgagacaaaactagttgatgggttaggaggtagtggtctagccatgccagtggaagttgtgcagttctgctggaagtacaaccttgtaagattgcaggaactgtttaaggaggaaggagtcgaggcaaagctaaggtttgaaggcgacaagccctatgttactgacaactcaaactacatcgtcgatttatacttcaagacgccaatcaaggatgcgttggcagcaggacaggaaattgcagctctggaaggagttgttgaccatgggttgttcttgaacatggcgagttcagtgatcattgctggaacggacggtgtcagtgtcaaaacgaagtgagtttttgagttgctttgttgtttgtgttgagttttacaatttaatgtacaagctattggtgtaaaagcagctgataagatgcttcaataaaggtgttcccccaatgtggggattgactatcacttattgtgggataaaaaagccattttaataggttgaaaaaaac

SEQ ID NO: 7224 - DNA, 986 bp, Zea mays
  Clone ID: 700622652_FLI
caacgctctctaccgtccgagaccccaagcaccagcgcggcggcgggggcggcggcgaccatggctgtcggaaagaacaagaggatctccaagggaaagaagggtggcaagaaaaagaccgtcgaccctttctctaagaaggattggtatgacatcaaggcaccgtcggtgttcagtgtgcgcaacatcgggaagactctcgtatccaggacacagggtaccaggattgcttctgagggtctgaagcacagagtctttgaggtttgcctagctgatcttcagggcgacgaggatcaagcttacaggaaaatcaggctccgtgctgaagatgtgcagggcaggaatgtgctcacaaacttttggggcatggattttaccactgataaactcagatccctagtgaagaagtggcagacattaatcgaagcccatgttgatgtcaagacaaccgacaactacatgttgcgtttgttctgcatcggcttcaccaagaggcgcccaaaccaagtcaagagaacctgctatgctcaggcatcccagatccgtcagatccgccgtaagatggttgagattatgatcaaccaggcttctacatgtgacctgaaagaacttgtttcgaagttcattccagaagttattggtaaggagattgagaagtctacctccagcatcttcccacttcaaaacgtcttcatccgcaaggtgaagatactcaaggcccccaagttcgatcttgggaaactcatggaggttcatggcgactacaaagaggatgttggtgtgaagcttgagaggcctgtcgagggagatgaggctgggcaggaggttgctgctgccgagtagtttgtttgctacttctgtatctaggcgagtctggacatgaggttgcttatgacgtgaacttatagagttgtcttggctacgtgttttcatctggccctaagattttgtcttgaaacaagtttaaaattaagattactcgtggc

SEQ ID NO: 7225 - DNA, 1081 bp, Zea mays
  Clone ID: 700622751_FLI
gctccgcctcgcgtggcactccgcggggacgttcgacgtgtcgtcgaggaccggcggtcccttcggtactatgaagtgcccggcggaactggctcacggcgccaacgcggggctggacatcgcggtgcggctgctcgagcccatcaaggaggagttccccaccctctcctatgccgatttctaccagcttgccggagttgtggccgtcgaggtcaccggtgggcctgagatccccttccaccccggcagggaggacaagcctcagccgccacctgagggccgtcttcctgatgccaccaagggttctgaccacctgaggcaagtctttggcaagcagatgggtttgagtgatcaggacattgttgccctctctggtggccacaccttgggaaggtgccacaaagagcggtctggttttgagggggcctggactacgaaccctttggtctttgacaactcttacttcaaggaacttctgagtggcgacaaggagggtcttcttcagctcccaagtgacaaagccctgctgagcgaccctgtcttccgccctcttgtggagaaatatgctgcagatgagaaggcattctttgatgactacaaagaggcccacctcaagctctccgaactggggtatgctgatgcttaaatgtccatatcctggagcgggacacaaactgctgcctgtatggactcgtgcgattcagggtgaaccatcagattgtctagtgtcttctttgtaataaatttatctgttcttggtactttgtctatggttgaatcggaacccattttccgtttgcctagattcttaatttctggtgctgtatccagctgaaactagtagatctatgatcttgtggctgcagcatgttcttgtcacttttatctggtctccgttggttcggttcacaggttgtgtgctttaaaaggctgtgcttaagtcctgcaattcgagtccaccaaactgtagggtgcaagtcgagattttattagtgatgcaagttgctggtattggtgcattatcgggctaatacgcttgcgttgccttctgattttataagtgatgtaaattgctggtttt

SEQ ID NO: 7226 - DNA, 745 bp, Zea mays
  Clone ID: 700622846_FLI
gaaagctgaacctgatcctgacgatcatgttggtgactcaaacatcaatgagctgcaaagggttgaagaaccagtgagagccctctgttcacgactccagaagtccattaagatgcttcggttgcaagcaacacctgtagaggcagagtctgctattcaaactctctttaagattatcaagaatgttatagagcatccaaatgacattaagtataagagattgcgtaagtccaatccacatttccaaaggagcgtagcaaactataaagctgcaatggaggttcttgaattgattggtttctgcgaggatgtaatctcagatgaggttgggcgtgctgagacttacctggtattgaaaaggaatgatcctggattgctatggctggcaaagtcctcccttgaggtctctctggcttgataaaatttgatacatcattcatggttgctatttttcgtcgtgaatatatttgattgtttgtacaagagagctagctattggcatgcaccattctcctgtatggggactgttgtatacttgcatatgaatacacaagaatgtaatgccacattcaactttctgctctttgtttgcgttatctgtgccttcgtcttggatggctttcactcccatagtcccatgtgatgcacaacaatgtaccgagtttgactgattcatgagttcattgtacttgaatttccagattatgctgcgtttgaagcagacagaaggagcattttttttttc

SEQ ID NO: 7227 - DNA, 1789 bp, Zea mays
  Clone ID: 700622869_FLI
ctcggccacggaccacccgtctcgccctcatctaattacgccccgctcgctgtccctctcagatctcttccttgttctcgcctcgtcgtccccaatcgtcgccgggagtctcccgatccttcttccaccacctctaccggtggtgccagggccggctcgcggacggtgcttggactgcccccgtcccgtcatggatcgcgccgagctcaccaccgaacaggttctgaagcgagatattccatgggagcattacatgtcaactaagcttatctccggaacgtgccttcagcttttacggcgatatgaccacaaaccggagagccagcgagctcctttgcttgaggaggatgggccagcatatatccgagttttcctgaatatcctgcggagcatctccaaggaagagactgtggaatacgtgcttgcactcattgatgaaatgcttgcaacaaatcctaagcgtgcagcactgttttatgatcaatctttgtcgggtgaagatatttatgaaccgttcttaaggttgttatggaaaggcaactggtttgtacaagaaaaaagttgtaagatattgactgttataattagtgcacgaccaaagcttcagaatggcacacttccaaatggagatgcttcgaattcgaagagcaagcttacttcaacacacgatgtattgagaggtttggttgattggctctgttcacagctgaggaatcctacacacccgagctgctctattcctacttctatccattgcctctccactttgctaagagaaccatatgttaggacattatttgttcaagctgatggcatcaagctgctcattcccttaatttccccagcttccacacaacagtcaattcagctcctttatgaaacttgcctctgcatctggcttttatccttttatgatgctgcagttgattatttgtccaccacaagggttatgccaagacttgtagaggttgtcaagggctctactaaagagaaggtggtcagagttgttgtgttgtccttccgcaatttgctggcaaagggtgcatttgctgcccagatgatcgatcttggattgccacaaatggtacaaaacttgaaagctcaagcatggactgatgaggatctgttagatgctctgaatcaactagaggtgggactcaaagaaaaccttaagaagttgagttcctttgataagtacaaacagcaagttcttcttggtcatctggactggtctccaatgcacaaagatccaagtttctggcgtgagaacattaacaattttgaagaaaatgatttccagattctgcgagttctcatgacaatcattgacacatcaagtgacaccaccgctcttgccgtggcctgctacgacctctcacaattccttcagtaccatccatctggccgaatcgtggtggcagacctcaaggctaaggaccgagtcatgaaactcatgaatcatgagaacactgaagtgaggaaaaatgcattgatctgtgtgcagaggctcttccttggcgcaaagtatgccagtttcctgcaggcttgagaaaagctgagtcttgtatttagatccagagaaacccctggtcatttttcagaatggctgttgagaaagaaaaaccttgaaaattcttgttcagtgtatcctattgttatttgatttctgaagccgatgtataataaataatcagagtcatagaatgctcgatgtaataaagtgtccatgggcttgttgattcatttatgtaaattttgacttgtaacattagcaaacctcgtttttgtt

SEQ ID NO: 7228 - DNA, 621 bp, Zea mays
  Clone ID: 700622920_FLI
ccggaggactgagaccagaggaggagacgtcacgcctgcgcggctgcgcccaccatggacgaggatgagtttcggcgcatgctcgacctcttcccggtcgtccgctcccgagactactgctgctccgatcttggaacatccagcagaggaaccagacagcgatcacgagttcaggaggcaactaagggcgataataaggactcgtccggtggacgagatatgtttatgcagaaattgaagatggctgcggagaataagattggagcgacaaaggcagagttcttctgcaagacattcgaagaagttcatgagaaacttgttcacagagagctgaatttggatgctgctaagaagttcctgagcgcatatgagagctgatgatgaacaataggtagatgctgcttaagggtcggtagttgccaatgatctggaaagttgttgatgctgttgagattttgatcacaggcaaacttttaacaacaggtagatgctgttgagcgcatactgataccgcctgattggttcaccgatcgcccgtagccagctcgtatgcagccaggctgtccagagactgttatttgggccgtagaagtggatgcactcaaaataaatgttgcgttt

SEQ ID NO: 7229 - DNA, 565 bp, Zea mays
  Clone ID: 700622923_FLI
gctgtacggccccattccagaccccagcaagcccccgctgtacaggagcgtcagggcccgagacttcatcgcaaagttcaacaccataggactcgatggccgcgcgctcgaccacttcaggctctagctacctggctacgtttcagattcgtcctttcatttgctttggtctctaattaataattccaaataataagcccgcggatggacctctgtctgtctgtctgtaatttagtttccaagtttaggtagtgtttggttactagggactaatttttagtccctctattttattccactttagtttataaattgcaaaatatggaaactataactctattttagtttccatatttgacaatttagttactaaagtggaataaattggagggactaaaaattagtctctaaaaccaaacacccccttagtttgttgtggtaataattcctgtatcaattatgtcataaataaaagctagggaaccttgataaataacagagagtagtatgtataccatgacactcgatcgggaactcggaaaaagtttataagggctagtttggg

SEQ ID NO: 7230 - DNA, 2042 bp, Zea mays
  Clone ID: 700622955_FLI
aagttttaccttcacaagtttccgctcctatccaagtgtgctcgcttccagaagttgattccaactactggcgatgaaaatattgagatccacatccatgatattcctggtggtgccaaggcttttgagatctgtgccaagttttgctatggcatgattgtcacactcaatgcctacaatgtgattgctgcccgctgtgccgcagagtacctggagatgaacgagactgttgacaagggcaatctgatctacaagatcgatatcttcctcagctcaagcatacaccggagctggaaagactccataattgttcttggtacaacaaaggctcacttaccttgggcagaggatcttaagctggttagccactgcattgactctgttgcttcaaaagcctctattgacgtttcaaaagttgaatggtcatacacatacaaccgtaagaagctcacagttgagaatggtcatgattcgccatggaatggagtcaagcagcagcagtttgttccaaaggattggtgggtcgaagatctgacagatctcgacattgacgcctacaagcaagtcataacagcagtcaaaaccaagggtacggtgcccaaggatgtgatcggtgaggcgattaaagcctacacttacaagaagctcccgtcactaagcaaggtctcgatgatccatggtgacgcaaaagttcgggctatgctagttaccatcacatgcctgttgccatccgagaaaggttcggtttcgtgcagcttcctcttgaagttactgaaggcaacaaacttgctcaagtgtggagagatgtgcaggaaagagcttatgaagcgcatcgcacggcaactggaagaagcgtcagtgttagatcttctgatccctacggtggatggggataccaccgtttacgacatcgacctgattcttagcattgttgaagaatttgtcagacaagatagcaagaatgcccagagacataacggtggtgaggtgaatgaccacgtatctgctcctagtgcgtcaatggttgcagtggccaaaactgtcgatggatatctcacagaggttgcaagggacccaaatataccggtctacaagtttttcagcctagctgagacggtttcgaccggttcaaggccggttcatgatggactgtatcgtgccattgatatgtatctgaaggagcacccaagcttgggcaagagcgacaagaagagattatgtgccctgatggactgcaagaagttgtcgcccgatgcgtgcgctcatgccgtgcagaacgagcgcctgcctctgaggatcgtggtgcaggtgctataccacgagcagacaagggcctgtgccgcagccaccgccatccgagccgacagcatcggcatcggctcctacgagagctcaaggtcaggcgccacaacgaacacagaggacgagtgggacggagtcatggccgtggaggacctcagcctgtccaagacgacgaagctggtggacaaatgcgacacggcggccagtacggtcgtcgtggggaaggacaaggaccacggtggcaacaagggcgccaccggcagggtggcgaaaggtggcgctggcgcggcgacaccaaagaaggcgctcgggaaaacggtgtccggcaaagggcagaccggggagcgcagcagctcggactcatccgacagcgccgtcgccgtcgcagtcttgaccagccaggagcatcccaagaggacgacccgcgcaaggaacgccgccaagtcggctgctgcgtagcccttccgctgagagaaatgctcaaggagcactagctaggttttagcagtcgtctgttctttgttattacgagtgttgcatagaagccaggaccatgttttttacacgtctgtagctgcctgtagggatggtgtaataccaggtacgtgcgttgttaggtgatgctgttagcacgtaggttccaaacctatgagaccttgggctctgctgggtttatgtcgaactcgcagttgtgttataagaatcctactttgatagacttaaactgttctgcagctgtg

SEQ ID NO: 7231 - DNA, 476 bp, Zea mays
  Clone ID: 700622957_FLI
gggcattccaccggaccagcagcgcctgatctttgctggcaagcagctggaggatggccgtaccctcgccgactacaacatccagaaggagagcaccctccacctggtgctccgcttgcgaggtggtatgcagatctttgtgaagaccttgactggcaagaccataaccctggaggttgagagctccgacaccatcgacaacgtgaaggcaaagatccaggacaaagagggcatccccccagaccagcagcgtctgatcttcgctggcaagcagctggaggatggccgcaccctagcagactacaacatccagaaggagagcactctccacctggtgctccgcctccgtggtggtcagtaagccatggttcatttaagctgctgctgtacctgggtatctgcgtcgtctggtgccctctggtgtacctctatatggatgtcgtcgtctaataaacatctgtggtttgtgtgtcatg

SEQ ID NO: 7232 - DNA, 1189 bp, Zea mays
  Clone ID: 700623103_FLI
gattgttgagccgttcacagctcattatgtgtttgcactgggtgttgcaaggtttcttagctgtgcacattgggtccttcaggttcttttttttttgtctcccttcctgttttatttaccattaaaagaactaccatgctagttcatactttctggaacaaagtgtcaattggtcatctgtttttgaggccctaatgttagtagagtattaaaaaatgtcttccccgttagttagactatggaccaaatcattgcaaaggtcttgactcccaagatatcctagtctgaaaagaacaggatggaaacacaattatacaaaacaaattcagtacatcataaggtatagatgagtaatgattaatgaaacagcaaaacattttttttaaatttaggtgtgatttttttgttattgatatcatcggctgtgtttgtgtccattgcaaaatgtgctgggatgtactttactttgttctacctcatcccgtgctgtatggtattttctcagtatctgcgctttcagcaaaaaaaaaaaaaacctaccaaatatttgactggtcattgagaccttattgactagtgaagcctgaggaatgcttgtattgacattccttatgaatatttgtgtacagtatctccagtttatggctgtctactaggagacttgtgtcttgtggtgttcatgcatggaagcatggagatggaggaaatatcctccttacccgtgggttttagatgaatggaagtttcaattcgtgcttttgcagaattcaaggtttttctaagttcagtcggtctgatatcagttttgattactctcgtttgcaggttttggacacccgaggccgtttgttgactgctctgggctatggtttgtggccttcaatggtgcttctctccgaaattgttcagacattcatccttgcagatttctgctactactatgtgaagagtgtttttggtggccaactggtgctgcggcttccgtccggggtggtgtgaacactgcagcgcgatagaagaagcataccgtccatttcttctgtgttaaatcatacaaagcaacagtcatgctcctagtgcccaaactttttcactctctcaaagtggattagcagagccccgttaatcttttttacttgtaaactgtttacgtgaatactgtaccaacaccgtggaacgtaggccgtcc

SEQ ID NO: 7233 - DNA, 2235 bp, Zea mays
  Clone ID: 700623223_FLI
aaaaaaaaatcctctcacaccgcacacccgcatctctcccatcacagtgcgccacccgcacccaccaacgaggcaacgaaacccagtcggaagctagaccggcgacaagtgcagcgctcgccgcgatggattctgactacggcgtgccgcgcgagctgtcggaggtgcagaagaagcgcgcgctctaccagcccgaggtgcccccctgcctccagggtggagtatggtgacgccgcaattgcagctgaccaggcaggcgctcatgtgatcagccatgcgttccctcacacctatgggcagccccttgcacattttctcaggaagacggctgttgtccttgatgctaaggtcatatctgaacacccggtggtcagggttggcattgtcttctgtggcaggcaatccccaggaggccacaatgttgtttggggactctatgaggctatcaaggcccacaaccaaaacagcaaactcattggtttcctcggtggatcagatggtttgctagcgcagagaacattggagatcactaatgaagttcttgcttcatataaaaatcaaggtggatatgacatgcttggtcggacaaaggatcagattaggacgacagagcaggtcaatggtgcaatggctagttgccaggctttgaagttggatgctctggttataattggaggtgtcacttccaacactgacgctgctcaacttgctgagacttttgctgaggcaaagtgtgcaacgaaggttgtaggtgttcctgtaactttgaatggggacctcaagaaccagtttgttgagactactgttggctttgacaccatatgcaaggtgaatgcacaacttatcagcaatgtctgcactgatgctctatctgctgagaagtattactacttcattcgtttgatgggacgcaaggcttctcatgtggcattggaatgtgctcttcaatcacacccgaacatggtcatcctaggagaggaggtggctgcttccaaacttacaatttttgatattacgaagcagatttgtgatgcggttcaggcaagggcagaaaaagacaagaaccatggggttgttcttattcctgagggtcttgtggagagtattcctgaactatatgctctgcttcaggaaatccatggcctccatggcaaaggtgtttctgttgagaatatctcttctcagctttcaccctgggcatctgcactctttgagtttttgcccccttttatcaggaagcagctacttctccatcctgaatctgatgattcagctcaactttctcagattgagacagagaagcttctagcccagttagttgagactgagatgaacagacgtttgaaggagggcacttacaaaggaaagaagtttaatgcaatctgtcacttctttggctaccaagctaggggagcactgccttccaagtttgactgtgattatgcctatgtcttggggcatgtgtgctaccacatcatagctgccggtttgaacggttacatggccacagtgacaaatgttaagagtccagtgaacaagtggcgatgcggtgcggctcctatttcgtctatgatgactgtgcagcgatggtcgcgcggcccttcagccacccaaatcggaaagcctgctgttcacatggctagcgttgacttgaaaggaaaagcatacgatgtattgaggcagaattcttccaggtttttgttggaagacgtctacagaaacccaggtccgctccagtttgaaggaccaggtgccgattcaaagcctatctcactgtgcgtcgaggatcaagactacatgggcaggataaagaaattgcaggaatacctggagaaggtgaagagcattgtgaagcctgggtgctctcaggatgtccttaaggcggcgctgagcgccatgtcttctgtgacggagacactgaacatcatgacctcatcgtccaccggccagactgcactgtgactcgtttggtgccgttttgtggtgcggatcagaatccccactttttccatggtgtcgattgacaaagttaggagcagtaatcctgtggtgcggatcagaatccccactttttccatggtgccacacgggtcattcttttgtagcttcttgggagagttctatcagttttgaattcgatagtttattatgaagaggcttgttggtgagtttgagctcgaataatttttgaaacagacggattgcggaatcttaataaaccaaaatttgtgactg

SEQ ID NO: 7234 - DNA, 1127 bp, Zea mays
  Clone ID: 700623231_FLI
cggtcgtctccattcggcccaactccaactcgtctcgctctcctcccccgaggccccgattatccaaaaactaaccaaaatacggaatcttccccgtggatcccaactctcacccgatctcctcgataggtttttccgtttttgcctccaaggccgcgtcttccaacaagattcctcccctcctctctccgataacgctagcatccgccgccgccggcgacgaatccgctgctgttttgtctagcaggtgttttgagtttctgttgccagtgcagccatgtccatgttcaacaggatcttcgggaagcccaaggagcaggccaactccagtgccttggccactctcgacaagttaaatgagactcttgatatgctggagaagaaagagaaggtgctggacaaaaaagcagccgctgagcttgagagagccaaggagttctccaaagctaagaataaaagagcggctatccaatccttgaagaggaaaaaaactttatgaacaacaaattgagcaactcggaaattttcagttgagaattcatgatcagatgatcatgttagaagcagctaaagctacaacagagactgttgatgcgttgagaactggagctgcagctatgaaagcaatgcaaaaagcaacaaacattgatgatgtcgacaagaccatggatgaaattaatgaacagactgaaaatatgaaacaaattcaagatgctttgtcaactcctcttggagcttctgattttgacgaggatgaactggaagcggaacttgaagaactggaaggagcagagttggaatctcagcttctggagcctgttgcagctcttcctgtgcatccagtgcatgtcccaggcaacaagcaaccagctcgccctgctccacagaaagctacagctgaagatgatgagcttgctgcactgcaagctgaaatggcattgtgatcaggtttccactgaagaggtgaaatgtgtatatgaattgcgttatgctgaaagctgagtcaagctttattgtatttgccatgtgtgtataatcttggtggatatttggcaactgtcaaccgaagcagcgaaaggccgctacagccggtatttgtttcagtgattgggctctgttttctttcc

SEQ ID NO: 7235 - DNA, 441 bp, Zea mays
  Clone ID: 700623308_FLI
ggcttacccgatggcacggctgcactggcttgaggccgtcctgccgctggggatcatcggcggcatgctctgcatcatgggcaacgcccagtatttcatccacaaggccgcgcacggcaggccgaagcacatcgggaacgatatgtgggacgtcgccatggagcgccgcgacaagaagctcgtggaacaatcctccggcaactagggtattgatcaacctcaaacttttctggatgttgacgaacctccttcaaaagcacagaagtactgctcttttgtttcctgtacaattggaaccaagacttgtttgttttgctttgaaatatcaacagttcggagaataatctgtatctgacatctgtttaattgaacaaagccaaatactttgtcaattgtgtatgcacaattatttccgccaccggagcagatccatgaacaccg

SEQ ID NO: 7236 - DNA, 1090 bp, Zea mays
  Clone ID: 700623346_FLI
gttttgggtccacaattccgcattgccatctagtccagttccagtccgagcagcagcaagcggcggcggcgatgggctctggatccaactccaaggagggagaggagcgggtgctgagccacggtgacgtggtgctcatccgctccgacctcgcaatccttcgcggtccctgcttcatcaacgaccgcatcattgccttctacttcgcacacctctccgccagcctccaggacgacgacctcctcctgcttccgccctccatcccctacctcctctccaacctccctgactcggccgccgtcgccgccgtcgccgagccgctccgcctcgcctcccgccgcctcgtgctgcttcctgtcaacgacaatcccgatgcctccatcgccgagggcggttcccactggaccctcctcatccttgataacatcactagcccctccgtgccccgctttgtccaccacgacagcatcgctggagcgcccaacctcccaatcgctgcccgcctcgccgacgcactccgccccttgctgtcaggcagcaattccaagagggatactgttccgcttatcgaggggcccaccccaaggcagaccaacggctatgactgtggtgtctatgtcatggccatcgccagggctctgtgcgcctggtggaagagtggccaggaccaacgaggaggcgattggttccaggcggtgaggagcggggtggacgcccacagcgtcgaggccatgaggaccgacttgctgcagctaatcagcactctcatccaagagaaggccaatgccaattccacacccatgggcgacactgacccagggtcattagaatgataggcagtagattagttgctggtggtgatttctcaaatctggtacctcttcttgatcttaataagttatttcttgctgtttctgcttgtttgggaagaggaggaacagatggagcatacacacttcgtgtaagtaccaaacttttaaggaaaacacgtctcttgtgtgagtcaagtcttggcaaaatccagttgcaactctactattattattgtctatgatcaaaatgctgcaatcaatactgtgcttccgtttgc

SEQ ID NO: 7237 - DNA, 1471 bp, Zea mays
  Clone ID: 700623358_FLI
cggctacttcccctccgggtacgacccactcactaccgctgccggggcggagtctgcccccggcacccagctcttccggcacgagaagcatcccacctgggtggacctcgtggtccggagccccggcggcggacacgacttcgttggccggagctatgccggtgaggccgccgtgccgcaggtctgcgactacgcgcttggcgtccttgacaaggcctccggcactctcaggatcgtgcccatcgctggcaaaaagattctgaggctagagccacatcttgaagtgcagcatccagcgcattcgcagcactctgaggtggcatcagaagcggcttcagctgcaggaaatgatgaattgaaggttcaggatctgacaatgatgtatggagccaagacggacagggacaaggacaataagtggagatcgttaaaggaacaaaggaatgatccttccgcttatgaggacattgatcttggaatatcagagaccaatgtcaacgccaatgataggcaggaacctgtacttgttcggaacattccaccttatgatcctaccgcagatacatcagaaaatgcatatcttttggacgagattattccaaagagtatgcgggagcatcttttggaaattgtccgtcattttgaatcaggagaaatctcctcaaaaggctatgggagttttgtctcaaaacgtgtgcacaagttaaaggagcttcagggtgaagataaaaagaggtttgcttggatactttcctacatccaacatctcctatctctattggcgcggaatggctccatgtccaatcgcaaatggaaaggcagaaatgaaaaccagataagccatggaccagcaaccccgcaggctgtatatcgcaggctgctgttcatgtttacagaaccggggtccagtgtcatgccaacagagaaaaaagagcttctgaccaactacatattggtcctaacactttttgccgatgacttcagatccaaccccagcgacatatgtgaggaccttaaaatgacccgccaaaatcttaaaccatactatgaccagttgggatgcaaatctgtgacagaaggtgcttttaagtctactttcatgacgctcccagcccctctcaagttcccaaaggaagttacgagaaagcggcgacggcagtagggcttttatccaaaggagacaaggagagaaaccaatggctatttatctcagaaatggcttgcattacttgaatggatggctggattggaaatactccctatcgaaggcaagaagtaaaggcatcgatgctaggggcccgattttaatagtgtactggaaatgaaaagttgtcctgtgtttcatctcgttttgtttttagttgctcatcgacattttcttgttaaggaaacatgtcatctatgtattgataaatgtttgtctatctgtatgagtgaatgtattgaaatgcttccgcttgggttaattctt

SEQ ID NO: 7238 - DNA, 1335 bp, Zea mays
  Clone ID: 700623359_FLI
gcgcactctagcaatggcttctgaggttgtccgccctagcgacgccgagctactaaaggcacaagccgacatatggcggctcagcctctcctacctcacgcccctgtcactgaggtgcgccgtggagcttggcatccccacggcgatctaccgccatggcggggctgcctcagccgctgagctggtcacggcgctgtctctcccctccactaagctgccgttcctccgccgcctgctgcggctcctcgccgcgtcgggcgtgttcaccgtcgacaagcagagcacggaggaggagcggtaccgcatcagccccgtgtcctacctcctggtggacggcatccctcacgaggaccacatgaaccacaccgctctggtgctcacctgcacctcgacgcgctacatcgaggcggggatagggctggcggagtggttcaagagggacgtggtcacgtcaccgttcgaggagctgcacggggcgactctgttccacgagagcatggggagcctcgacgcagatttccacgacatggcgagcgaggccttggacgcccacgacaacttcggcatcgagatagctatgcgggagttcagggacttgttcgaggggatccagtccatgacctactgctgcggtaacttcggtgatgacaagggtgccagggccattgtcaaagccttcccacacataaaatgcactgtgctggcccctcccaagatcattgccaccaaaccggccgatggagcgaagataaactatgtcgaaggtgacatgttcagtttcattccacctgctcaaactgtcgtgctaaagcttgtgctgcaccacctgaccgatgaggagtgcgtcaagctcctggctcaatgccggaaggcgattcctccacggaaggacggcgggaaagttataatcggtgatattatgattgaccactctgggcttatgctggaaactcacctcctgatggacatcggcatgatgaccatgacaaaaggacggcagagagatgaaaaagaatggagcgagctcttcaccaaagcagggttcagcgaatacaagatcctgaaggaatttggagctcgtgttgccttcgaagtctatccgtgagatatatatatatatttacatacatatatgtatgtgtgtgggtgccttgcgtggcttggcgtgatgatgtcataaataaagagggtgggtgtgcttgcggtattcatggatggccatggatctgagcacatgacgttggatgctttcttaaggctctcgtggatcttctatatttggaagaagctgtaaaataatatatcgccatctagtgttggcgctggcttgtatgt

SEQ ID NO: 7239 - DNA, 1692 bp, Zea mays
  Clone ID: 700623362_FLI
cccatatcccttcgacccttccgccgagctcggcctcgggcggcgtcccggtctcaccgcgaccgggcggtgagaggtagaacggccaccagacatcaaccgtgaaggggtggcgtcaaggcagcgctgaagcggcggcgacgtcgaggctcgagctcccgtgccgcgctccgagctaacctagatgaacatactcgaaaggatacgtggaggtggcgacagggcggctgccacggagcgccccccgcggccggagtgctgggtggagatttcggagtccgtctcacggctctgcagcttcgacgccgccggcagcggtagccgcagcatctctgtaaaagttattcaggattctagacctatacatgacaaacttgttgattctttcttgaacaaatttttcccatcaggttatccatacagtgtgaatgaaggttacttaacttataccaaattccgtgtgctacagcatttctcgagtgctatgctacatgtgctatcaacacagtccttgctgtttgctgcaggtttgcgacctaccccggcgcaagcaactgctgtaagttggattctaaaagatggaatgcagcacgcaggaaagctcatttgtagcagcatgggtgcaagaatggattctgaaccaaagagttggaggatacttgctgatgttctctacgatcttggtactgcattggaagttgtttcgccgctgtgtccacaacttttccttgaagtagcaggcttgggaaattttgcgaagggaatggccgttgttgcagcaagagcaacgaggcttccaatttactcttctttcgccaaagaaggcaatcttagtgatttatttgctaaaggggaagccatatcaacacttttcaatgtcatgggaattggagctggaattggattggcatctactgtttgttcaacaactcaaggcaagttaattgcaggcccgttactttccgcagtgcatatatatggggtcatccaagagatgagagcaactcctgtaaacacactcaacccacaaagaacagcaatgatcgtggctgattttatcaagagtggaaaggtttctagccccgccgagctaaggtacaaggaagacctcctgtttcccaaccgagttatagaagaagccggcagtgtgaaaatcggtcagccacttcgcaaagtgttcagtccccggcttgttgagcagctgagggcgactttcccaggcgagaaatttctgctcagccagaaaagcaacaggacgtacatggttctggagcgaagcgcgagcggagaggacgcgctgagggggtggctggtcgccgcgttcgcttcggagatggagaggtcaggcgccggctcacgcgatgacgcggttctgagcgaggcctacgagaagatggagcgggtcttccccaccttcgtgtcagaagttaggagtagggggtggtacaccgatcagtttttggacgggaactgtagtcgagtctcgtttgccaagtttcggtagtcgcagagactgtatatggtctatgttttttggaggggagatgcggaaccatgaactcatgcatgcagggcagtgtagtcgaactcttaggctatccgcactcatactactttaaatttgtactctaaaaggaatattctatcctcgtcagcaagattatctactctataccacaatcctctgcagtc

SEQ ID NO: 7240 - DNA, 1579 bp, Zea mays
  Clone ID: 700623502_FLI
agggtatgtgatgctgcaaaagctgttgtacattgatgactatattaaaactactcccctatttcaggcgattgatgatgttatccaacattttttgctgcatttgataaaaataatgataaatctactagtaaaatttatgtttgaaaatcttaatagcttttgtttatagtactgttcaaataataagaatttcaatatttataccttagtgatacatatatagggacacttgcactagttttagttcatgtgtgtccaatatttatttcagtaaccaaaatttctggcaattggactatctttggctcgttatgtttatactgtagaggatatgtagtcacctctttaacatatacactaccttcctagctttcatcatcttgaagctagcttgtgtatgtttcacaaatataacttcgatcctttcatacgtggcctaccattgttgcacattgtgcatttaacttgcagaaggagatggatactgctgtgaaccggaaagaccttggtgttccagttggagatacattatttggcaaaacaatccttatccttggatttggggccattggcatcgaggttgccaagaggctaagaccctttggggtaaaaattcttgctaccaaaagaaattggtcatcggacacattgccatcttatgttgatgagctagttgacaagaaaggtgggccggaagatatgtatgagtttgctggtgaagctaacattgttatagcatgcatgaccttaaccagcgagacagttaatgcttctcttggtgtacttagttataaatattccttcaagatggcctctacttgaccttgattaggacgtgaccatcttttacagattggaattgtggatcataagtttgtttcatcaatgaaaaaggtacatgcttgtttctgtcatactggtctccatgttatcagatctgtgggctcatttcgctgactccatccttttggttttagtgttgtgcataaataatagagaaggaatgatccatgagtcatggtatcagttgagaacatttttactagaaaacattttctggagaataatgttattgggttaacttgaattgcttcaatcttaagtaggggtcatatctggtcaacattgctcggggacgcctgctggactacaaggctgtgtttgatcacctggaatcgggccatctagctggtctggggattgatgttgcttggatggagccatttgatcctgaggaccctgttctgaaattcccaaacgtcattctaacgccccatgtggccggcgtcaccgagtattcctacagaactatggcaaagtctgttggtgacaccgcccttcagcttcatttaggcgaggcgttcacggaggtagagttcgtcaactaaaaaaccgtccaggcggcagccgtagacgcatgccattcgtgggctatcggaaccgctgatgcgatcatttgtagagaataatggatccgcgacttgtaagaataaacatgtagccagatgtttgatggtgatctccatgagaactctgccactggctgccttagctggtagtggtagcaagtcatttt

SEQ ID NO: 7241 - DNA, 421 bp, Zea mays
  Clone ID: 700623572_FLI
cgtgctgaggctcaactgctgatccgtcttccaagctctggtatcatccctgagcactgatttaagatgtatctccagtactacatcaacgagaagggggacaaggtctacaccaccaagaaggagtcacctcttggggtgccaacgcagtctgctcacccagctcggttctcaccagatgacaagtactctcgccagcgatacctgttgaagaagagatttggacttctgccaacgcagaatccaggaccgaagtactgaagcttcaagtcaactgtccaacctgcgatgttctttttgtgtcaatgcttgttggttggaatgtactatcttcgttctcgaatatttgtggtccacttgttcaattttgaactaaaccgcgacaaataaaaaagaccactcatttgtccatttggcgttt

SEQ ID NO: 7242 - DNA, 998 bp, Zea mays
  Clone ID: 700623579_FLI
cagatccacacacatccgcatccctctctcctcggtttcctctcccaccaccaacccccagatcgcagcgatctccgccgccgccctctctgggattccgcgcgacaaagtcaggcgtagaggctccaggaggaggagggaggcgcagcagggcgggtgggggagatgttcctctgggactggttctacggggtgctggcctccctcggcctgtggcagaaggaggccaagatcctcttccttggcctcgacaacgccggcaagaccacgctgctccacatgctcaaggacgagcggttggtgcagcaccagccgacgcagcacccgacgtcggaggagctcagcatcggcaagatcaagttcaaggcgttcgacctcggcggccaccagatcgcgcgccgcgtgtggaaggattactacgcaaaggttgatgctgtagtatacctggtagatgcatatgataaggagcgatttgctgaatcaaagaaggagctcgatgctctcctgtctgatgattctttggccaatgttccatttctcatccttggcaacaagattgatatcccatatgctgcctctgaagaggagctacggtatcacctaggccttagcaacttcacaaccgggaagggcaaggtcaaccttggcgactccaatgtccgtccacttgaggtcttcatgtgcagtgttgttcgcaagatgggctacggtgatggtttcaagtgggtctcccagtacatcaagtagggccctcgccgaggcgcatgctcagcccggcgaatttttttgccttgttcgttccggttggttcgtgacgagaacgaacgatggtcgctaggaaagtatcatggagggtatgaagaggaaaaacagtgcttaacattgttgaacatgttgagtctttagcgtcaaaacaatttatgtcgaactctattctttcgcttttccatacaacgtttactaagtacttgcgatgcattataaaattattactcttt

SEQ ID NO: 7243 - DNA, 736 bp, Zea mays
  Clone ID: 700623615_FLI
ctaaaataagaaagaaaactagaacctaaaaaccagcgacgccgagcggatctacagccaccttggtcaccggcggcgatggcgagttccaagtccggcatccctatcaaggcagaacaagattcggatggctcggcacaaagcacagctgatatgacggcttttgtgcaaaaccttcttatgcagatgcaaaccaggttccaagctatgtcggagaacatcatttcaaagatagatgaaatgggtgcgagaattgatgaattggaacagagcctcaatgacctcaaggctgagataggcggtgaaggcatgtcgacgccatctaagatgaaggaagagtcaagaccttcagacagctccgcttgagtgcagcagaagcagcgtgactcgtttcagaggccgttgctgtgtcttgggcgttcattactaacaaatactcccccgttcttttttatttgtcgcgttttagttcaaaaatgaactagcgagagacaaatattcgagaacggaggttagtacctgtttaaggtctcatttgagcagagattgtaacccctgctacttgtgttttgctgaatggtttgccataaactgtacgtcttcgttctgtgtagacctacccgtggttatgcgctgagcatgtagtgacagctgctagagtgctagcaccccaactactaagaattcaggattcgcaagcataatttactttgcttctgtgttagttttatcactt

SEQ ID NO: 7244 - DNA, 891 bp, Zea mays
  Clone ID: 700623636_FLI
cccaatcagaagagcggcggcgcgggcggacaaggagcaggcggaggaggagttgtgccaagccacaatgggtatctcgcgtgactcgatgcacaagcgccgagccaccggtggaaagcagaaggcctggaggaagaagcgaaagtatgagcttggtcgccagccagccaacaccaagttgtcaagcaataagacggtgaggagggtccgtgttcggggaggtaatgtgaaatggagggctcttcgccttgatactggtaactactcatggggaagtgaagctgttacccgcaagacccgtatcctcgacgtggtctacaatgcatcaaacaatgagcttgtgaggacacaaacccttgtgaagagtgccattgtgcaagttgatgctgccccattcaagcagtggtacctcactcactatggagttgacattggtaggaagaagaaaacccctgctgcaaagaaggataatgctgagggacaagaggttgaggcagcagctgaggaaacgaaaaagagcaaccatgtcacgaggaagcttgagaagcgcaaggagggacgtacccttgacccacacattgaggagcaatttggcagtggacggttgctggcatgcatttcttcccgtcctggacagtgtggccgagctgatgggtacatccttgagggtaaagagcttgaattctacatgaagaagctacagaggaagaagggcaagagcgctgtagcttagagcattctcatggattgtcttgcaccgaaatgtgtgtcctgatgagtacacttttttggttagtcgtctcaagttcagagcgttatgccatattttcagacctgatttgtacactgttttctaaaagcgattgagctctagtccaatttgagcagggt

SEQ ID NO: 7245 - DNA, 333 bp, Zea mays
  Clone ID: 700623741_FLI
gcattgcacacatccaacatatatttcccctttatttgatcaccagaagacgtaaatataaaacaacacccccttctgtccggttccctgacacggctaattaatacgcatatacgtaaagcatccatggatgccttgaaacatgcatcacttgaacagaagctcacgagaggcagcgcgcgtcgtcgtcggccggcgcatgcatattgtaagagttgtggcttcgcggaatggcctcaagcaacagttcgccggcttcaccgaacgttatggcattgtctacgtcgaccgcaacaataactgcacgcgctacatgaaggagtctgccaagtc

SEQ ID NO: 7246 - DNA, 2150 bp, Zea mays
  Clone ID: 700623761_FLI
caaacccaccctcccaagtcccaagcccaccgaaccctactcaccaacccacccgcaggagaacggaaaaaaaaaaatcgtgtcgaggcgactttcgccgccatggcaggcgatcccccgacggctgcggagaaggagaccctggtctcctccttcatcgagatcaccgccggccagaccctcgagactgccacccagttcctccagatgacgagctggcacctggaggaggcgctgcagctgttctacatcgacggcgaggccgcccacaccgccgcgcattcggtggacccgtcgcctgcggcggcggccccgtcggcactagcggcggcggccggggtggaagaggcgatgaggttcgctccacccccggcggctgcactgggcgatgcaatgtcgcatgggtttggggtcagggaggacgacgacgttcgcgcgcccctgccggtgaagagggagactctctacggcgagggaatcgtgtccgtcatgcgacctaatgcatcagctgcattccgtaactttgaacaagaagcaagacaatctgctgtttgggactctgagcagaatgttgcatctagttctggtgataatcttgcttctttataccgtccaccttttcctttgatgttcaatggatcctttgacaaggcaaagttagaggcttcttccctggacaaatggctattaatcaatttgcagtcgacagaggaatttagctctcacatgcttaaccgagacacttggggaaatgaagcggtggctcagttaattaggtcaaattttattttctggcaggtttactatgacaccagtgaggggaggaaggtatgcacctattaccatttggtgtccatgcctgctattctcctaattgaccccgtcaccgggcaaaaagtacatgcttggaatggaatggttcacccagaccgtttactcgaggatttactaccttacctggataaaggtccgaaggggcaccatgcagctcaacctcaaaagcgcccaaggaaagttgatcaggaagcttctacgggcaagcaaggcaaaatcgctgtagaggatgaggatgaagaactagcaagggcaatagcagcttcgctagaggtagtcattgaagcatcagacgccagtgatgatgatatggctgaagctgaacctgaggaggaaaatgagcccagcttaaacatcaagcctgattatcctcctctccctgaagaacctaaaggaagcagggagcttctctgcagggttgcgattcggctaccgaacaatcaaaggatccaaagaaacttccttcacacagatcctatcaagctcctgtggtcattctgcgctcctcaggttgaggacggggagaagagggctttccacttcgtacaggccattcctggagcatcccagaagctgcagtttggaagcgacctaactttcaggaaagctgggctggccaactcgatgatcaacctcttgtggggctgagacgcttccatcttgcgcttggaaggccttgatcaggacgtgtccagtgtcctccggatgggcttgaagatccagttatttttcattccttgaggattaactcttcatattctgctccgtcccctgggctgcatgttgaaatgctcctttttgccgttcgttcttgtgtctacacatacatcgctgtccccggtagggttttgcctcgatttagtgcacatatctatcagagattcaatctggtggtgtggggcgtgcgcatggtctggtgctttgctttgatgtttcccttttgtatggtcgtggcaaagtctgaaagggagatgcatgaaggcaggcagcgcaatcagattcacagctggacctggatccaaaaccatgaatgaatgagcaggcatggtccttggtgtgccccgtccaacctcacacagtggccgctcaaagctgccggcacaggacagcgtgcggatgcagatgcagtgatgggagatcgcaggcagggagagtagagcagagagagagggacatcacaaggttacgtccctttgatgaatcatcactgcccctccagagacattgtttcgttgcatgatttatatgttctatgacaccttttgtgaacttgcttgatgtatgactgtacctaataatctaatatgttccttttt

SEQ ID NO: 7247 - DNA, 557 bp, Zea mays
  Clone ID: 700623774_FLI
aaaacaggagatgaacctggaggcacctccagcattgggaggtggatgtgcagcccccatgctaggagattcgatggcaaaggctccaagctcaccttggatgcctttctctatgttgtttgcagcgatctcaaccaaagtgtctcctcaaattatggacatggttattggttgctatgaagagtttaagagtaagaaaataagccgatgcgaactaataaaggagctgaggcacgtagttggtgatagagtgctaatatcgacgataatgcgtctccaagataagttgcctcctgtggagaggcgtgagggaccgggtgcatcagctgccaagatggtggcgaaaccgtgaggcgggtgtcggtcggtcggtgggcgaggaatgcagaagggaggaagcagctgactttgacaaccctgtgggaagcagcaactatgaagcctcttgtgtcagtctttgtatggcggctgatgtttcttctttctgtgtcgtatgagtatgttttttcctagtagattgtatcaggagtttttcatttcaaattgagctgcgcatg

SEQ ID NO: 7248 - DNA, 1646 bp, Zea mays
  Clone ID: 700623780_FLI
gccgtccgcttccgtttccttggataaccacgacgcccgccggcaagcgaaagcgaagcgagccaacccagccatggagaaggcgatcgatcggcagcgggtcctcctggcgcacctcctcccctccccctccgccgcctcctcgcagcctcagcttgcggcgtcggcgtgcgcggccggggacagcgccgcctaccagaggtcctcctccttcggggacgatgtcgtcgtcgtcgctgcctacaggacgccgatatgcaaggccaagcgaggaggcttcaaggacacctacccagaggacctcctcactgttgttctcaaggctgttctggacaacactagaatcaatccagctgacatcggtgacatcgtcgttgggacggtgctcggccctggttcccagcgtgcaaacgagtgcaggatggctgcgttgtttgctggcttccctgaaaccgtccctgttagaactgtcaaccgccagtgttcatctgggctacaggcagtagccgatgtcgcagctgctataaaggctggttactatgacatagggattggtgctggtttggaatccatgtgcataaattccattgcttgggaaggacaagttaacccaaaaataagcgcattccagaaagcacaggattgtcttctgcccatgggaattacgtctgaaaatgttgcccatcgatatggtgtaaccaggcaagagcaagatcaggccgccgctgagtctcataggagagctgctgcagccacggcctctggaaaattcaaggatgagatcgtcccggtgccaacaaagatcgttgatcctaaaactggagaggagaaggaagttgtgatatcagttgatgatgggattaggccagggaccacagcatctggattggcgaaactgaaaccagtttttaaaaaggatggaactacaactgcaggcaattccagtcaagtgagtgatggtgctggagctgttcttctcatgaaaagatctgtggctctgaagaaagggctgcccattcttggtgttttcaggagctttgcggctgttggagtggatccagctgttatgggtgttggtcctgctgtggccattcctgctgctgtgaagtctgcaggccttgagattggcgacattgatctgtttgaactgaatgaggccttcgcctctcagtttgtctattgctgcaacaagttggggctggaccgttctaaagtaaatgtaaatggaggcgcgattgcccttggacaccctctgggtgcaacaggtgcccggtgtgtggctactcttctaaatgaaatgaagcgccggggcagagactgcagatttggtgttgtcaccatgtgtatcggatctggaatgggggcagcagctgtgttcgagcggggagacgcggtggatggactctccaacgtgagggacatgcaggcacataattttctgtctaaggatgcgaagtagaggcgcagaaaaaccatccatcctagagcagcataagcctgctgcatttgtaatatattcgaaatccgtatttttttttcttcacaagcactactctatatacgatgaataaaagggcgacaatacagtgtcatcttgtagccacctaagatgcgaaagagaaaagaaggccggctgttcaatgttc

SEQ ID NO: 7249 - DNA, 733 bp, Zea mays
  Clone ID: 700623845_FLI
gtcagcccctctcgtttttcatccgccttcgcctccaaccgcgtgcgctccacgcctcctccaggaaagcgagagcttctgcataagaacaacaaatcaaaagcgtgatcagctcggtgccaacaaaacctcaacaaccaagtttcatgtctgatctcgacgtccagcttccatctgcctttgatccgtttgctgaggcaaatgctgaggactctggtgctggtcctggaacgaaggattatgtgcatgtgcgcatccagcagcgcaacggcagaaagagtctgactacagtccagggtctgaagaaggagttcagctataacaagatcctcaaggatctgaagaaggaattctgctgcaatggtactgtagttcaggacccagagctaggccaggtcattcagctccaaggtgaccagcgcaagaatgttgctactttcctagttcaggctgggattgcgaagaaagagaacatcaagattcacgggttctaagggacctgtaaatgcttgtgccctatattgtgtgcctcaacatattggggagcttgaagcatcgacagttgctagtcattgcttacttatataagaacataagtagtatttgctattgtcaagtgtgccttgcttgatgcaagttgtgttttcgtctcattattattatgcacggccatcgtacgtgtatggcttgtatgggttattgccaacttaataaaagcacactctgtttgcct

SEQ ID NO: 7250 - DNA, 611 bp, Zea mays
  Clone ID: 700623869_FLI
caaatctccaagctctcccaatttagaaacgagagatggccatgacgatgaccctcggttccatgctcatcgccgccgccgcagttgtcggcctgtgctccgtcgctcccgctgcatcagcgcgcgaggagccactacagccgcagatcgtcggcgggtggaaaccgatcaagaacgtgaacgacccccacgtccaagagatcggccggtgggcggtttcggagcacatcaagacggccaacgacgggctgggcttcggcagggtggtgagcggcgaggagcagatcgtcgccgggaaaaactacaggctgcgtattcaagcgacgaaggtcggcgggcagaaggcgatgtaccgtgcggtggtgtacgagcagcttaccaacacaaggcagctcctatcgtttgatccggcgaactgatctaattatggcgtcgctggacaacaacggttcgagtcgccttctaggatttcagattaaaattctgcaagtaccgcgtgtaacaaaccaactgatgtgttgccctagtcatatcgtggaattagaataagatccagcctatctttatctgtttttaatgttaaaaggaaataatgaactcagagtcgagat

SEQ ID NO: 7251 - DNA, 2146 bp, Zea mays
  Clone ID: 700623889_FLI
gtcagcttgttgggcaatggcaagatcctggctagatgttcaagtggatctagaattatctcagtaccaaacaagtagaccagaaaagcaacttgatgacgacatgaatggagcccaaagttcagttggtccagaaagttggccataccatgttcttgatcagcaacctcatgatttaactgctcttctgcagaaactccactcaagtgaccttgttcatgaaactgtctctcgagcatgccgagagcagcatcgacaaattcagatgaatctcatgagtggaaatatatctcatcttcttgaccttctatggtcatggttatcacctgctgaagagaaccataataatactgcaaggccccttgatgaccctgagatgatacggttcggggcgcatattgttcttgtgctgaggcaccttttcagtgatgggatggatgatgagttagatgaaaaactggttactgtcggtgatctcatcatcaacatgtacgtgaggtatttgttctcagaggatcaagaggagttggttggaatatatgcctcacagcttcaacatgacctttgcattactttgtttgtagaaatgatggaactaaggttaaatagcagtttgcatactatgtacaagctcttcctttctgctgtggagtatctgccattctcatctgataatgtatccaaggcttgttttgaagagatcatcgagagggtgctttcaagatctcggcaaacaaaacccactaagtatgatggggatttctctgatgttgcgcatcaacatcacctgcaatcacttcaaaaggctatggttattcagtggctttgcttcacaccaccatcctcgattccagactttcaaatgatcagttggaagcttctgatacgggcattgacacatagcaatacactgttcagggagttttctctgatatcaatgaggagagtccctgagctaccagcagggccacacaagttgcttgccattttagctgaaccgttaaagcaaaaagaaaatttaatttcacgggaagatccggaggtatctgataacttgccggagtttgaagattggcatgaatattactcccttgacgcgacttaccgcagttggcttaaaattgagatgatgaatgccgctgtttctcctgagatgctttcggcagaggaaaagggtcaagctgttgctgcagctaaagaaacactgaacttggcatgttcgttactacgcagggatggaagaccatggctgtatgctgtcgagagcagtccatttgaatcccccgatgttattttccttgagctgcatgcttctgcaatgctctgcctaccttctggagaatgtatgttaccagatgcaacatcatgcacagctttgacaagtgcactatattcaactgtcagtgaagatgatgtgctgcatcgcctgttgaaggtggatgtccaggtctcttctagagacccctgctgtattgaagtcgctcttcgctgcttagcagcagaaggtgatggatatgggcttcatgaagccaacgatggaggtcttcttgctgcagtcatggctgctggctttaaaggtgaactcagtcggttccaacctggagtttcgatggcaatttcacggcttgatgcttggtattctgaccggagtggttccgtggagagcaccgctgcttacataattcgagggctgtgtcggaggtgctgccttcctgaaacaattctaagatctatgcaggcatgtatcgcactctccgcggctggtgatgatctagattactctctagataaatgtgacgaacttgttgagttagttggttcagccgagtctggaatgatgcatttgttcagccagcagcagttgcaggagttcctgattttcgagagggaatatctcatatgtacaatggagtttgaggaggaccggttgccttgtgatggctaagctttttccccacttgctgactaatccatgagacatgaccggcatgtgcattttgtggcgccgtgacccaagaacctgctgtgatgtatcgctacaccatttcaaagcgaaaagatggaatttagtgcgtaacgtggttctgcccgtttgtgcacgagaattggcccgttttggagagtcaatataagattattcaagtcg

SEQ ID NO: 7252 - DNA, 836 bp, Zea mays
  Clone ID: 700623908_FLI
gcagcaacagccaacacctaaactaaagaacagtagtagtccctgtgtacgtctagcaacgatccgcaccgagctcgccagttttgctcgttagtttggggacggcgatggcgtccggtcaggaaagcagggaggagctggcgcgcatggccgaggaggggcagaccgtcgtccccggcggcaccggcggcaagaccctcgaggcgcaggagcacctcgccgaagggcgcagtcacggcgggcagacccggagtgagcagctgggccatgaggggtacagcgagatgggcagcaagggcgggcagacccgcaaagagcagctgggccacgaagggtacagcgagatggggaggaagggcggcctgagcaccatgcaggagtccggcggcgagcgcgccgcccgggagggcatcgagatcgacgagtccaagttcaggaccaagtcctagatctgatgcgtgcccccgcttagcatgtagtacgtagctgcaggaatgtagtgtcgtcgtagtagtagggtagtcgtacgacgtgccgctcctcgtttggcacgtgtgccctgaataatgtagtgctgtcagtcgtcgtcctagcacgcgtgtaggagaccatacgtgcgcgtatgatcatgcgtgcttcgcttcagttaggttctgatgttggtcgtcgtcaccgtgtttgaagcaggcaggtctcttcaggctttgtcgtcgtagcagcctgtgttctagctctacgaccccatactcatagcgtgtggtggtgggtcgtgatgccttaaggtctccgagtttgtatccgtgcttgtttcgttaaggtagtttggttcataactc

SEQ ID NO: 7253 - DNA, 896 bp, Zea mays
  Clone ID: 700623959_FLI
cagcgagatcgtgcgcgcctccgagatctccacgaagttgtggtaacatggggctcaccttcacgaagctcttcagccggctcttctccaagaaagagatgaggatccttatggttggtctcgatgcagctggtaagaccaccatcctctacaagctcaagctcggagaaatcgtgaccaccatccctacaatcgggtttaatgtggagactgttgaatacaagaacattagcttcactgtctgggatgttggaggtcaggacaagatcaggccattgtggaggcactatttccagaacacccaaggccttatctttgttgttgatagcaatgacagagatcgtgttgttgaagcaaaggatgagctccacaggatgctgaacgaggatgaattgagggatgctgtcttgctcgttttcgcaaacaagcaagatctaccaaatgcaatgaacgctgctgagatcaccgataagcttggtctccattccctgcgccaacgccactggtatatccagagcacttgtgctaccacaggagaaggtttgtacgagggtcttgattggctctccaacaacattgcaaacaaggcctgaatggacaattctgctgtttcacggagcacatctgcacatggcgaggcatggtcattttgaccctcagacgatcattgtttcattggaaagtatcgtatttctatgctaggcttttcagagagattactctctaagaaactgatccgatattaagacactataattggcattggcactagtagatcgtttactgagtaatgcagtttattttaatgtatcccaattgtgttgtaagatacaactatgcgtcggaattacccattcaatttgaatctagatacgtagtttttgttatatacttat

SEQ ID NO: 7254 - DNA, 1235 bp, Zea mays
  Clone ID: 700623983_FLI
ccggactctcggggtttcccgacgtccaccacccatcctcgcttctctcgagtcctcaatccatcctccggctgttccctcccagcgacgaaaccctagcccgtcacctcgacgcctagcccgccaccttgccgcccgtcgctgcaggtttatggcgcctgtgtgatcggatcagcagtccgctccgtctccctcggcccacgcatctgatgttcctctcccgcatcgtactccgcgacctggattccatcgactctccggcctccatggcgtcctcgaagaaggttgtgacccgtgacgagtgggagctgaagctccgcgacgtcaagatccgcaaggaggacatgaaccgcctcgtcatgaacttcctcgtcaccgagggcttcgtcgacgccgccgacaagtttcgcatcgagtccggcacccagccggagattgacctagcgaccatcactgatcgaatggaggttaagagagcagtacagtcgggtaatgttcaggaggcgatcgagaaaatcaacgaccttaaccccacgattttggacacgaatccccaactatactttcatctccagcaacagaaactaatagagttgattcgcgtgggaaaaataaatgaagctttggagttcgctcaagaagaacttgcaccgagaggcgaagaaaatcaaacatttctcgaggaaatagaaaaaactgtagcactactggtttttgaagatgtaaaaaattgcccttatggggaactattggatgtttctcaacgtttgaagactgcaagtgaagttaatgctgctattcttacaagccaaagccatgagaaagatccgaagcttccaagcttgttaaagatgttgaaatggacccaaaatcaactggacgaaaaggcggcttatcctcgaatcaacgatttcaccactgccgcgctggaagatccatcgatatgaatctgctgtgaaggaactgagggtatgcaccaagcctgcctggtgcctacacgtggttgccccggatctgtcaatagatcatcgtctgcagcgattgagttcaccccttgcactagtgtttaagatcaatgcaagcaattgatccgaaaacatcacctgtgttctacctgtacatgatgtagaagacatgtttgaaacctttttaagttagtgaaatgttggatttttttcatggacatatattcgtttcaaacctgtggtacttgcaacacgcaaattgtttcagtc

SEQ ID NO: 7255 - DNA, 542 bp, Zea mays
  Clone ID: 700624070_FLI
caaggcaccacacctcttcctcctcttcctcctcctagcacagctagcgcctgctccccttcgtctgtgatcatgtcttgcagcagcggcaagtgcaactgcggctccagctgctcctgcggcagctcatgcaactgcatgtcccctgacgtggagaccgccgccgccagcagcatcaagaccatggtcctcgctgcgccgaccaccaaggccagcgccggcggcttcgaggcggccaccgagggcggcggctgcgactgcaacacctgcaactgcggcaccagctgcggctgctcctgctgcagctgcaactgagccggcccgcccggcccggcgatggcgcacgagagtcgagaggacgacgacgacgaggcgtataaatataatagcagcgtctaaataagatcctgtcaactgcacccgccattatcgatccatggtcgctcctggggttcatgttcatctgtgtaacgtgctcgcggtcatgtccgtctcgtgccggaattaatatttatatgcatgtatttgtgtttttctgcgtt

SEQ ID NO: 7256 - DNA, 542 bp, Zea mays; identical to SEQ ID NO: 7255
  Clone ID: 700624073_FLI

SEQ ID NO: 7257 - DNA, 443 bp, Zea mays
  Clone ID: 700624077_FLI
cagtgacagacacgatggtgagcgccagaattgttgtcctcctcgccaccctcctatgcgctgccgccgcagtcgcgtcgtcctgggaggacgacaaccaccaccaccacgggggccacaagtccgggcaatgcgtgcggcggtgcgaggaccggccctggcaccagcgcccccggtgcctggagcagtgcagggaggaggagcgggagaagcggcaagagcggagcaggcacgaggccgacgaccgcagcggcgagggctcgtcgtagcatgagcctgagtggagacgttggacgtgtatgtatatacctctctgcgtgttaactatgtacgtaagcggcaggcagtgcaataagtgtggctctgtagtatgtacgtgcggatacgatgctgtatgctactgaggcaagtcccataaataaataatgacacgtgcgtgttct

SEQ ID NO: 7258 - DNA, 428 bp, Zea mays
  Clone ID: 700624089_FLI
gtggctgtacatatacatactgtacatgattggttcagtgcagggtttctgttccttcattgattagttattatactaataagtactagtaattttgtaagggcttgtagttgcagtctccgtactggtggtaggtagtgcaggccatattcgtcatcgccaagcttcgagtgtacttactcctacaatatatattttacagtatatattgtagctgtgttggctcttcggaagaaaaaaaatggaaggggaaaataacataatccctattttccccaaaaacactgggcttgatttggacgttaatgtgtgcattgtaactggtgtgccctatctgctgacagtgttgcacatcacatgtttggtgttaataaggacagactatgtatcatctgccagattgttgtacatatacattgtggtgatat

SEQ ID NO: 7259 - DNA, 724 bp, Zea mays
  Clone ID: 700624095_FLI
atcgatccccacagagccagggcgtgcaggcgggcgggcgggcgagcgagcgagaggaaaagccaaggcggcagcagtaggcagccaccatcaataaagaaggtccaagcatgtcgggggtgtgggtgttccggaacggcgtggtgaggctggtggagaacccgacgtcggggaacgcggcggcggcgccgggcaagcgcaaggcgctgctgcacacgccgtccggggaggtggtcacgtcctacgcctcgctggagcgcaagctggcggcgctcggctgggagcgctactacgccggcggcggagacggcggcggcgccggcctgctgcagtaccacaagcgcacctccgtcgacctcatctcgctgcccaaggacttcgcccacttcggctccgtccacatgtacgacatcgtcatcaagaaccgcgacgccttccgcgtcatcgacgcctaattataagctagcggatgcagcagatgacagatactcacctctcctcgctcgctcctcgctccggccagtgcatcatctacctcgctgtagctacctacctaccctaatataatagcagctatagccttcgtcacccattgctcgatcgatttagttgccgtgtcgatctcagtgccgcgttggtctaaattaatatatatagatcatgtactgatgatttggtttgttcatgcatgttttctctattttacatcttgtgttgctgggtc

SEQ ID NO: 7260 - DNA, 497 bp, Zea mays
  Clone ID: 700624118_FLI
acatcttcccgtgggatcccagtcgccgccgcaagaagaagagctcggggacttccaggtctcgcgagaagatggtcctagtgttgccgacatcgctgacggacccagacaatgttattgtgctctggttttgtacaatctctgtccgaagcagatccacgagatcaaggatttccttctcaccgcgaggaggaaggatgcccggtcagtgaagatcaagaggagcaaggatgttgtcaagttcaaggtccgctgctccaagtacttgtacaccctctgcgtattcgatgctgagaaggcaaacaagttgaagcaatctctccccccaggcttgagcgtccaggaggtttgattggatacatgacaacgtcgggtcgaacctctagagcatctttatcattagcagagcatgctgtttatgtagttttggactttaagctattagacatgtctggatttgtggatcttgaatttttggagaaataccaatttgcctc

SEQ ID NO: 7261 - DNA, 397 bp, Zea mays
  Clone ID: 700624129_FLI
gctcatcccacatcagtagtcgaccaagcacaagcagcagagccggccggaatatgtggacgatcaggaaggtggcgacgccgcaggtggccgtcctcctgctgctcctcatcgtcgttgcgcaggaggcggcgccgttggcggaggcgcgcgtgtgccggcgccggagcgcgggcttcaagggggtctgcatgtccgaccacaactgcgcgcaggtgtgcttgcaggagggctacggcggcggcaactgcgacggcatcatgcgccagtgcaagtgcatcagggagtgctagctagctaggctctaggatctagcaagctagctatatcggcctttaattaaattaataaggatcgacgtcgtggccggtcgctaaatatgtactactatacgtct

SEQ ID NO: 7262 - DNA, 891 bp, Zea mays
  Clone ID: 700624223_FLI
ctctcttctctccccgcggcccgtgactcatccacccacagtccactcgccactccccccggaacggcggcggcggcgacggcggaggagtaacgcaagatggcgaggaaacctctcgactacgaggagctgaacgagaacgtcaagagggtgcagtacgcggtgcgcggggagctgtacctccgcgcctccgagctgcagaaggagggcaagaagatcatcttcaccaacgtcggcaacccgcacgccctcggccagaaaccgctcaccttcccgcgccaggtggtggcgctgtgccaggctccgttcctcctcgacgatccccacgtcggcctcatgttcccggcggacgccatcgctagggccaagcactatctcgccatggcgcccggcggtctaggtgcgtacagtgactcccgcggcatcccgggaatcaggaaggaagttgccgacttcatccaccttcggaccactatccttccagcggaggaagacttccctgccatcatgtcgagcttcaagaagttcaacgactcgttcatggaacagtacgagggctactccaggctgtgagcaggaagagaaacaagagattacagatctgaagaagagattattgattggaagcttattagttattgtaactcccttgaaaagcaggttgtgcggggattattgtttattgaataaaaagtccgccatttgattctactgccataccagtatatataattgtgaattggcttgtacttgctgctggtggggagaggtggaaatagctagccctccttgaccgcgcgcgacaagaatgtcgcctctcgttctggagattattggagagttgaatagttcataatcagtctacctacaatatattgcagaaaaagaaaa

SEQ ID NO: 7263 - DNA, 787 bp, Zea mays
  Clone ID: 700624226_FLI
tctgaagtccggcggcggcggcagcggcgagggcgaggcctctgcgacttccagatctccccgacgaggaggaagtctctacagcggaggggagggagatgtcgtacatgcggggtgacctgctgacgaggatgcggaagctggtgaagggcctcgccaggcccgagccccggtggctcaaggccttggaacgggctccgccagtgacatttcctcgcccagaggggaagatcaagaatctggtgcttcctgaggatgtgtatgtcaggaagttcaacagaatacatccagattcgctttaccatgatgcaatcaagataagtggatttgatccaccgccagctcgagtgtttgcttggcgtgtcctggagttgaaagagcaaggagtcgatgaagatgttgcgatggctgtagcagataacgagtaccggacagagaagaaggcaaagaagaaagcgtacaaggagctgaaagaaatcgcccgcagcgaagggaggaagccacctccgaatccatacccgagtgccataaaggaaatacaggcggaggaaaagaagtatgtcatggaccgtttgcataacccgaaggtaatcgagattgcgaacaagatgaaggaggagcgagacaggatgttgagggatagagcagcaggtcagcggtagtcgtagcagcaggtaatgtttggactggccgactgggtgttgttgttcacgacatgggccaactggcgtcataaataatggttgttggagattgatatggcaaatatgaaactcttgtttttgtt

SEQ ID NO: 7264 - DNA, 633 bp, Zea mays
  Clone ID: 700624275_FLI
gtcctcgacaagcacccaaatcgacgaattcttcccccctctccgatctcgacgcgcaccgatgcgggcgatgtcgtcggcggttaatggtatgctgcgggcacggctgcgcggggcagcgcgcgttcgcggcggcggcggcgagggggccgggcggtggacgaccccaggtcacgaggagcgccccaaggggtacctcttcaaccggccgccgccgcctccgggggaatctcgcaagtgggaggattgggagctgccctgctacgtgacctccttcctcaccgtcgtcatcctcggcgtcggcctcaacgcgaagcccgaccttacaatcgagacgtgggcgcaccagaaggcgctcgagcgcctccagcagcaggagctcgccgctgccgacacccaggccgagtgatccgcgcgtctcaggtcctctcgaactctcggctgcctctgatttggttccaataagatggccacaatgtgcggtcctgaatgttctggacttctggtattgatggaacacgagctgaacactatgctgctgttttttctgttctgttttgaaatttgcccggtgatgatggcgaatgtcctgaatattctgaatattttgaaatgtttgactgttgtattatc

SEQ ID NO: 7265 - DNA, 289 bp, Zea mays
  Clone ID: 700624316_FLI
gttgatgaggctgttttcagtgcaccgctatccatggccatgctgtggtttcaagaccagagttggcggatagttacgtacacaggcggcaaatgtgtctcttagccgctgtttaagtgcaccgctgtaagtttgggtgtccatgtccatgctgtggtttcaagatcagagtccatggcggatagttatgtacacaagcgacaaacgtggttcttagcttaggttcatgaccagttccacgtagtacatatagcttatatgtatatatacaatctattttttactatgc

SEQ ID NO: 7266 - DNA, 749 bp, Zea mays
  Clone ID: 700624382_FLI
gagctagcaacacacagctacgatacaatacatggcggcgacgacggcgagcatgatggcgcgggtggatcggctggacctgctgctgggctacctggaggagatgcaccgcaacggcaacggcaacgctagtccgcctagtgctacaaccgcctcatcaccctccacccttgccgccggcggagtccatctcatcagcagtgacgacgacgtcgacgtcgactcctccgccggccccagcacgccgacctggcgccggccgcggcccgccaaggaggtgctggaggaggcgcaggccaaaggaagcctcatcgaccgcatagcctctctggaacaccgtgtgctcaaggttatattactgttcatccagtcatcggtcgtcgtcgtcccacctacctactatatagctatgccttgcttttgctgctgcagatggaagaggacatggaggtcacaccagcgaacacggagaaggctagccaccaaccgacagcgacgatgatgatgagcaaggacgacgatccaagcagcagcaggaagaagaagaaggggctcaagagcttggtcaagtcctgcctgcgtcatcagaggcaacctcaaaccttttaggcgtttcgctgctgcagctgcggctgagctacgtgtacgtgtgtgtatataggctagcagtgtgaacttgtttgtatgcatgagtttataaggccaatcaagtacgtatgatgaacaaattggcaaacggagatcgatcg

SEQ ID NO: 7267 - DNA, 741 bp, Zea mays
  Clone ID: 700624410_FLI
gccgtcctccccccactcccactccctccgctgcctggcttgcttcgccgcctgcctccgcaccggcgcgccctctcgtcctcttccggctctatcccgcttccaccgccggtgatggaggcttcctacaagtttgggccctacaaaatcgacgccagggaggtcttccacgccacgcccctctcctacgccatggtgaatctccgcccgctgctcccgggtcatgttcttgtgtgccccaagcgtgaagtgaaaagattcgccgatctaagttctgatgagattagtgacttatgggttactgcaaaggaagttggtgcacgtcttgagcagtaccacaaagcatcttcacttacctttgctatccaggatggtcctcaagctggccaaacagttgcacatgtccacatccacctcatcccaaggaagaaaggggattttgagaaaaatgatgaaatatatgatgcgattgatgtgaaggagaaagaattgaaggagaagcttgacctggacatcgagaggaaagataggagcatggaagagatggctaatgaggccaatgagtaccgtgctctttttagttagtttctaagctgagctgactgtttgctagaaataaggtttgctacctgttcttcattgttgcagttcagttatggttgcgcactgacattgtgatgatgtcccgttctgtaccgtggagaattaataatttgttgcaaggaatgcattcttagtgac

SEQ ID NO: 7268 - DNA, 324 bp, Zea mays
  Clone ID: 700624459_FLI
ccatggatgtgatgatggagttgctcttagggttggtcttgtgcatgtgggcaggtcttgctgttcccactaaatttctctcggtgcttccacattctgatgagaataggatcgtctcgctcccggctaacctggatttcatgatcttcaaccaccgtggaagagcgctgccgtcagactcagacctgaaactccatacatagacatgtccagaatccagatcttttttctttattttctgtaaggccttgttcggttattcctattacacatggattagatgagattggaaaaaattaaaaataaatttgacttgcttgaaaa

SEQ ID NO: 7269 - DNA, 440 bp, Zea mays
  Clone ID: 700624545_FLI
cagtgagctgcgcatcatcgaggccgacgccgacctctacctcgctgagatcgacggcaaggtcatcgtgaagattggatcaagatacgactgcgggcacctcatcccagaaggcttccaggtcgtggcgcacggagatggctatgccgtctgggagaaaaactgagccaaatctgtgcctgatccgtccgtccggtccggcacgacgagttttagcggatttgacctgcattttccttagcttattattactccaaatacgggatatatatagcgacaacctgtattcgagatacatgcgtgcccccagggacgcggaaaaagaaagagaagcacgcgtgtcaggacagccgaaagaagaacttgtgaagattattttttccccttaagggctagtttggaaacccttttttatgggattttcattaattttccttggg

SEQ ID NO: 7270 - DNA, 853 bp, Zea mays
  Clone ID: 700624547_FLI
gtggagtcttcagataccattgacaatgtcaaggccaagatccaggacaaggagggcatcccgccggaccagcagcgtcttatctttgccggcaagcagctggaggatggacgcacccttgcggattacaacattcagaaggagagcaccctccacctggtgctgcgcctcaggggaggaatgcagatcttcgtgaagacattgaccggcaagaccatcaccttggaggttgagagctccgacaccattgataatgtgaaggccaagatccaggacaaggagggtatccccccggaccagcagcggctgatcttcgccggcaagcagctggaggatggtcgcaccttggctgactacaacatccagaaggagagcaccctccatctggtgctccgcctgaggggcggtatgcagatctttgtgaagaccttgactggcaagaccataaccctggaggttgagagctctgacaccatcgacaacgtgaaggctaagatccaggacaaggaggggattcccccagaccagcagcgtctgatcttcgccggcaagcagctggaggatggtcgcacccttgcagactacaatatccagaaggagagcaccctccacctggtgctccgtcttcgcggtggttattaagccatcagtcgttgaagctgctgctgtatctgggttatctagtgtctctgccattgcccatggatggtgctgtctttcaaagtatttgtatggtttgtgtcgtgagtcgtgactgagctggtttcatggaccagttgtgttctcgttacccaaaactatcgtgcgaccgcatatggcttaatcatgaataaatgttgtttgaatttaaact

SEQ ID NO: 7271 - DNA, 790 bp, Zea mays
  Clone ID: 700624582_FLI
ccctccctctacccgtcgccgctgctgccatggacgaagtcgtcagccagattttggagaagcaagtgctgtctgccgcgaaggcggtggaggacaagctcgatgaggagatcgccgcgctcgatcgcctcgatccggacgacatcgaggcgctccgcgagcgccggatccagcagatgcgccgcgccgccgagcgccgcgccaagtggcgtgcgctggggcacggggagtacaccgaggtccccgagaaggagttcttctccatcgccaaggctagcgagcggctcgtctgccacttctaccgcgacaactggccctgcaaggtcgtggacaagcacttgtcggctctggcaaaacagcacgtggagacacggttcgtgaaggtccacgccgagaaggccccctttctgacagagaagctcaggatagtcgtcctcccgaccctcgccatagttaagaacgccaaggtcgaggactacgtggtcggcttcgacgagctcggcggcaaggacgacttcagcaccgaggacctggaagagcgcctggcgaggtcccaggtcgtcttcctggacggcgaagggtccgcgcacgcttcgaagcaggccgccgccgccaccaaacggagcgtccggcagtcgggcaccggcgactcgtccgactccgagtagctctcgtgtgttgttgttgttgttattattatatatatctaaatgggtacacagcacagacatgttttggttgctatgccaacaggcaacattagcattgcaaggatatgcgtcttattggg

SEQ ID NO: 7272 - DNA, 688 bp, Zea mays
  Clone ID: 700624596_FLI
ctcctacctacgcagcagaggccagccacctccccgtcgctctcacgctcttcgtgcccgccgcctctcctccgtctctgcctctctccctctcccctcccgtctgacgcacatggcctccatcgccggatcttcggccctctccttcgccaggcccgtcaaggcaatcaacacaaattctctagctttctccccggcgaggaagggcaacacattcctccgcctgcaaccaatgcctatgagatctgtttcctgcgctgccaagaaggatacaacagacaaggtttgtgagattgtgaagaagcagcttgctcttcctgaccatactgaagtttgcggtgaatcgaaattctctgaactcggtgcagattcactggacacggttgagattgtgatgagtctcgaggagcacttcgatattagcgtggaggagtccagcgcacaaacaatcgccacagttgaagacgccgcggacctcatcgacaagcttgttgctggcaaagcgtagttctgtacctcctctatcgttgtcctaccactctaggtctatcccttgatctaggtttctatggtctgaagatttgtgattttctccgcactgttgttgctatccccgtgtcgtaataatacgagatgttttaagcggttgaacattacggtggtgtaatcagagtaatctgttgctgtt

SEQ ID NO: 7273 - DNA, 1651 bp, Zea mays
  Clone ID: 700624603_FLI
ctcgactccagcatccctcgtccccgcatcaccgcgccgccgacactccgctcgctttcgctcccgagacccgggcctgccgagccgccgccatggacgaggagtacgacgtgatcgttctgggcacggggctcaaggagtgcatcctcagcggtctcctctctgtcgacggcctcaaggttctacacatggatagaaatgattactacggaggagattccacctccctaaacctgaaccagctctggaagaggtttaggggggaagacaagccaccggcacatctaggtgcaagcagagattacaatgtagacatggttccaaagtttatgatggcaaacgggactttggttcgcactctcattcacactgatgtgacaaaatatttgtcattcaaagctgttgatggaagctatgtcttcagcaaacggaagattcacaaggttcctgccaccgatatggaggctctaaaatctcctttgatgggtctatttgagaaacgtagagcaaggaacttttttgtttacgtccaaaattacaatgaagctgatccagtgacacatcaggggttggacctcacaaggattacaactagagaattgattttgaaacatggattgagtgatgacactgtggattttattggccatgcactcgctctgcacagggatgatcgttacctaaatgaacctgcccttgatactgtaaaaaggatgaagctttacgctgagtctcttgcacgttttcaaggaggctcgccttatatttatccattatatgggttgggtgagctgccacaggcttttgcacgtctaagtgctgtttatggtggtacatatatgttaaataaaccagagtgcaaggttgaatttgatatcgaagggaaagtgtgtggtgttacttcagaaggtgaaacggcgaaatgcaaaaaggttgtctgtgatccttcttacttgcctagcaaggtaaggaagattggaaaagttgcacgtgcaatcgctattatgagccacccaattccaaacacaaatgagtcccactcgattcagattattttgccgcagaagcaacttgggcgcaagtcagacatgtatgttttctgttgctcatatacacataatgttgcgccaaaagggaagttcattgcatttgtgtctgcggaagctgagaccgataatccacagtccgaactaaagcctggaattgatctacttggtcaagtagatgaactgttttttgatatgtatgacagatacaaacctgtcaatgaaccatctcttgataattgctttgtttcaatgagttatgatgctactacacactttgagacaactgtgacagatgttctcagtatgtacacagcaattactggaaagaccgttgatctcagtgtggacctgagcgctgccagcgcagctgaagaatactagagattttcctattagagataccatactctaaagaagaacggtgttaacacaggccctgcctggtggcttgccaggtttagatctatgctgcagctgcagccaattaaacggacagaacatatcaccctatagcatttacatggcgtttaaacacaagaccgtttaggatgatggtggtggttcctttgttccttgcattattgatcggatggttaactttt

SEQ ID NO: 7274 - DNA, 472 bp, Zea mays
  Clone ID: 700624610_FLI
agatgataacagttctgctgtaattaacaacccaagtgttaaatttcatgccgagcttgtaaataatactgggagccttaagtcagaggcccagctcggatttgtaaatagcgaggaggatggtggaggtggagagcaactcccagacttgtgatgttgactatgtcaagatggtcgatggtgatggaggagcctctttaatcgctgaagtcttcattgtgcgtgtgtagctgaattctttcatttctccatcctgagttctttacctctcttctatctatagttctattcataggcattcatgaaaattttaccgagagaaaagataggaagggaggtttaattctggccctatgggtgtggaagctttggtgatgttagttcgatatcttacaagttgtaaataacatgcaataatagcacgtaatttgtgaatatttaaatcataatgtgtccaactgaggtacgagac

SEQ ID NO: 7275 - DNA, 898 bp, Zea mays
  Clone ID: 700624679_FLI
gtcctgtcgttccctttccaaccccgtctccgtctccgcccgccacaacaatatcgcattgacagatcgttcatcgtagcctcctccagtcgtctcccgggatcttctccggctataaatttccgccccaattccccaatccagatgcgcaaacatcgaatcgtctcgctcgtggctgccctgctcatactgcttgccctcgccgtatcgtccacccgcaacgcacaggaggattccatggccgacaacaccgggacgttggcgggcggcatcaaggacgtgccggggaacgagaacgaccttcacctccaggaactcgcccgcttcgccgtcgatgagcacaacaagaaggccaatgctcttctggggttcgagaagcttgtgaaggccaagacacaagtggttgctggcacgatgtactatctcactattgaagtgaaggatggcgaagtgaagaagctctacgaagctaaggtctgggagaagccatgggagaacttcaaggagctgcaggaattcaagcctgttgaagagggtgctagcgcctaaggatctctccttctccatgtgcgagcctgaagctcaaagcaaagttgcagaataaggagccacctcccaacatgctagaccatgctcccttgtgtaatttcataagactacaacccttttagggcttgttcgtttgtgtctgtgtctaagggaattgaaggtgattaaatttccttctatacaaatagaggggctttaatccactccaatacttttcaatccacgcctaaccgaacaagcccttaatatgatatcttagattgccgtacctgtgtaatatcatgaataaaatttgctattatggattctaaggtttatgaactaccatacatggcagaatcctcatgtt

SEQ ID NO: 7276 - DNA, 837 bp, Glycine max
  Clone ID: 700645507_FLI
tgaaaccaccaggtcatgtatatcctttagcgatattgtgccatgatataatgccccctccactgaaggttgagaaagaaattggggagaaaagaattatatcctttcatggggctggcatatcagtggctccagcattaagcttttctgaaaccactgctactagtgaaaatcctgaaaaggctaaggagttattctcaaaagccctgtacgattctgtgaccgagcaatataatgtgctgaaatctgcgatacatggcaaaaaaggatttgaagcatcaactcctgtagtttctttgtcacagccatggaagtagttgaaattggcatttcttcattacaatttgctctgatgcagaagcaagttacaagacttcagtcaaacaatttcaactgatttacttctgagggactgcctattactacaccggtcaccgaatgatttgagcttgatggaagtttgcagtcaaatacatatttttcatttcatttgtccttttgctcttggttgccgttatcagcattcaattcatctggaatctgtttcagttcagaaggttcaaattcagctgcgtactgtacaggtctctcttagttcggtgtcagattcagttcattgactgataaaatactaaattttttccctgcaattttgtgatcaggcttagctagctgaatagataaaatctaattacttccgtttgtattttaagttaactttgttccattatagatgaatagatgttaatattacatgttcagaatcaagttgttcagacggggtcagtgaataaactggtccaaatgctaatgcaagattatttatattggcaaaat

SEQ ID NO: 7277 - DNA, 1769 bp, Glycine max
  Clone ID: 700645702_FLI
cttattaacactttccttagttcaatatggggaagcccttcttcactctctctctttcttccctttgcttgctactcttgtcgagtgcatgctttgctattacctccagcaagttcaacgagtgccaactcaacaacctcaacgcgttggaacccgaccaccgcgttgagtccgaaggtggtcttattgaaacatggaactctcaacaccctgagctgcaatgcgccggtgtcactgtttccaaacgcaccctcaaccgcaacggcctccacttgccatcttactcaccttatccccaaatgatcattgtcgttcaagggaagggagcaattggatttgcatttccgggatgtcctgagacgtttgagaagccacaacagcaatcaagcagaagaggctcaaggtcgcagcagcaactacaagacagtcaccagaagattcgtcacttcaatgaaggagacgtactagtgattcctcctggtgttccttactggacctataacactggcgatgaaccagttgttgccatcagtcttcttgacacctccaacttcaacaatcagcttgatcaaaaccccagagtattttaccttgctgggaacccagatatagagcacccagagaccatgcaacaacagcagcagcagaagagtcatggtggacgcaagcaggggcaacaccagcagcaggaggaagaaggtggcagtgtgctcagtggcttcagcaaacatttcttagcacaatccttcaacaccaacgaggacacagctgagaaacttcggtctccagatgacgaaaggaagcagatcgtgacagtggagggaggcctcagcgttatcagccccaagtggcaagaacaagaagacgaagacgaagatgaagacgaagaatatgaacaaactccctcttatcctccacgacgaccaagccatggaaagcatgaagatgacgaggacgaggacgaagaagaagatcaacctcgtcctgatcaccctccacagcgaccaagcaggcccgaacaacaagaaccacgtggaagaggatgtcagactagaaatggggttgaggaaaatatttgcaccatgaagcttcacgagaacattgctcgcccttcacgtgctgacttctacaacccaaaagctggtcgcattagcaccctcaacagtctcaccctcccagccctccgccaattcggactcagtgcccaatatgttgtcctctacaggaatggaatttactctccacattggaacttgaacgcgaacagtgtgatctatgtgactcgagggaaaggaagagttagagtggtgaactgccaagggaatgcagtgttcgacggtgagctaaggaggggacaattgctagtggtgccgcagaactttgtggtggctgagcaagggggagaacaaggattggaatacgtagtgttcaagacacaccacaacgccgtgagcagctacattaaggatgtgtttagggcaatcccttcggaggttctttccaattcttacaaccttggccagagtcaagtgcgtcagctcaagtatcaaggaaactccggccctttggtcaacccataaataacaacaagcatatatgaaggtgtggtgaggccatcttatatgaaataatatcaaaatatattttgtgtaataataaaactatggcctatgtatttaccaccctccgacccagcctatgttaatatctgagtggcgttgtacctttgaatcgccttaataaaatgtcagtcttcaagttttgtcttt

SEQ ID NO: 7278 - DNA, 1900 bp, Glycine max
  Clone ID: 700645775_FLI
cttaattattaacacttccttagttcaatatggggaagcccttcactctctctctttcttccctttgcttgctactcttgtcgagtgcatgctttgctattagctccagcaagctcaacgagtgccaactcaacaacctcaacgcgttggaacccgaccaccgcgttgagtccgaaggtggtttgattcaaacatggaactctcaacaccctgagctgaaatgcgccggtgtcactgtttccaaactcaccctcaaccgcaatggcctccacttgccatcttactcaccttatccccggatgatcatcatcgcccaagggaaaggagcacttggagttgcaattccaggatgtcctgagacgtttgaggagccacaagaacaatcaaacagaagaggctcaaggtcgcagaagcagcagctacaggacagtcaccagaagattcgtcacttcaatgaaggagacgtactcgtgattcctcctggtgttccttactggacctataacactggcgatgaaccagttgttgccatcagtcttcttgacacctctaacttcaataaccagcttgatcaaacccctagggtattttaccttgctgggaacccagatatagagtacccagagaccatgcaacaacaacaacagcagaaaagtcatggtggacgcaagcaggggcaacaccagcaggaggaagaggaagaaggtggcagcgtgctcagtggcttcagcaaacacttcttggcacaatccttcaacaccaacgaggacatagctgagaaacttcagtctccagacgacgaaaggaagcagatcgtgacagtggaaggaggtctcagcgttatcagccccaagtggcaagaacaacaagatgaagatgaagatgaagacgaagatgatgaagatgaacaaattccctctcaccctcctcgccgaccaagccatggaaagcgtgaacaagacgaggacgaggacgaagatgaagataaacctcgtcctagtcgaccaagccaaggaaagcgtgaacaagaccaggaccaggacgaggacgaagatgaagatgaagatcaacctcgcaagagccgcgaatggagatcgaaaaagacacaacccagaagacctagacaagaagaaccacgtgaaagaggatgcgagacaagaaacggggttgaggaaaatatctgcaccttgaagcttcacgagaacattgctcgcccttcacgcgctgacttctacaaccctaaagctggtcgcattagtaccctcaacagcctcaccctcccagccctccgccaattccaactcagtgcccaatatgttgtcctctacaagaatggaatttactctccacattggaatctgaatgcaaacagtgtgatctatgtgactcgaggacaaggaaaggttagagttgtgaactgccaagggaatgcagtgttcgacggtgagcttaggaggggacaattgctggtggtaccacagaacttcgtggtggcggagcaagccggagaacaaggattcgaatacatagtattcaagacacaccacaacgcagtcactagctacttgaaggatgtgtttagggcaattccctcagaggttcttgcccattcttacaaccttcgacagagtcaagtgtctgagcttaagtatgaaggaaattggggtcctttggtcaaccctgagtctcaacaaggctcaccccgtgttaaagtcgcataaatgacaagcatgatggtgtgaggatgaggccatcttatgaaataataacaaataaataaattttgtatgataataaaaagtatggcccatgtaccatcccagcgagcctatgtttatatctgagtggcgttgtacctttcaatcgccttaataaaatgtcagtcttcacgttttgtctt

SEQ ID NO: 7279 - DNA, 1901 bp, Glycine max
  Clone ID: 700645785_FLI
ttaattattaacacttccttagttcaatatggggaagcccttcactctctctctttcttccctttgcttgctactcttgtcgagtgcatgctttgctattagctccagcaagctcaacgagtgccaactcaacaacctcaacgcgttggaacccgaccaccgcgttgagtccgaaggtggtttgattcaaacatggaactctcaacaccctgagctgaaatgcgccggtgtcactgtttccaaactcaccctcaaccgcaatggcctccacttgccatcttactcaccttatccccggatgatcatcatcgcccaagggaaaggagcacttggagttgcaattccaggatgtcctgagacgtttgaggagccacaagaacaatcaaacagaagaggctcaaggtcgcagaagcagcagctacaggacagtcaccagaagattcgtcacttcaatgaaggagacgtactcgtgattcctcctggtgttccttactggacctataacactggcgatgaaccagttgttgccatcagtcttcttgacacctctaacttcaataaccagcttgatcaaacccctagggtattttaccttgctgggaacccagatatagagtacccagagaccatgcaacaacaacaacagcagaaaagtcatggtggacgcaagcaggggcaacaccagcaggaggaagaggaagaaggtggcagcgtgctcagtggcttcagcaaacacttcttggcacaatccttcaacaccaacgaggacatagctgagaaacttcagtctccagacgacgaaaggaagcagatcgtgacagtggaaggaggtctcagcgttatcagccccaagtggcaagaacaacaagatgaagatgaagatgaagacgaagatgatgaagatgaacaaattccctctcaccctcctcgccgaccaagccatggaaagcgtgaacaagacgaggacgaggacgaagatgaagataaacctcgtcctagtcgaccaagccaaggaaagcgtgaacaagaccaggaccaggacgaggacgaagatgaagatgaagatcaacctcgcaagagccgcgaatggagatcgaaaaagacacaacccagaagacctagacaagaagaaccacgtgaaagaggatgcgagacaagaaacggggttgaggaaaatatctgcaccttgaagcttcacgagaacattgctcgcccttcacgcgctgacttctacaaccctaaagctggtcgcattagtaccctcaacagcctcaccctcccagccctccgccaattccaactcagtgcccaatatgttgtcctctacaagaatggaatttactctccacattggaatctgaatgcaaacagtgtgatctatgtgactcgaggacaaggaaaggttagagttgtgaactgccaagggaatgcagtgttcgacggtgagcttaggaggggacaattgctggtggtaccacagaacttcgtggtggcggagcaagccggagaacaaggattcgaatacatagtattcaagacacaccacaacgcagtcactagctacttgaaggatgtgtttagggcaattccctcagaggttcttgcccattcttacaaccttcgacagagtcaagtgtctgagcttaagtatgaaggaaattggggtcctttggtcaaccctgagtctcaacaaggctcaccccgtgttaaagtcgcataaatgacaagcatgatggtgtgaggatgaggccatcttatgaaataataacaaataaataaattttgtatgataataaaaagtatggcccatgtaccatcccagcgagcctatgtttatatctgagtggcgttgtacctttcaatcgccttaataaaatgtcagtcttcacgttttgtctttt

SEQ ID NO: 7280 - DNA, 1673 bp, Glycine max
  Clone ID: 700645818_FLI
gtccttgaatataatactcagcatggctaagcttgttctttccctttgttttctgcttttcagtggctgctgcttcgctttcagtttcagagagcagccacagcaaaacgagtgccagatccaacgcctcaatgccctcaaaccggataaccgtatagagtcagaaggtggcttcattgagacatggaaccctaacaacaagccattccagtgtgccggtgttgccctctctcgctgcaccctcaaccgcaacgcccttcgcagaccttcctacaccaacgctccccaggagatctacatccaacaaggtagtggtatttttggcatgatattcccgggttgtcctagcacatttgaagagcctcaacaaaaaggacaaagcagcaggccccaagaccgtcaccagaagatctatcacttcagagagggtgatttgattgcagtgccaaccggttttgcatactggatgtacaacaatgaagacactcctgttgttgccgtttctcttattgacaccaacagcttccagaaccagctcgaccagatgcctaggagattctatcttgctgggaaccaagagcaagagtttctacagtatcagccacagaagcagcaaggaggtactcaaagccagaaaggaaagcgtcagcaagaagaagaaaacgaaggaggcagcatattgagtggcttcgccccggaattcttggaacatgcgttcgtcgtggacaggcagatagtgagaaagctacaaggtgagaacgaagaggaagagaagggtgccattgtgacagtgaaaggaggtctcagcgtgataagcccacccacggaagagcagcaacaaagacccgaggaagaggagaagccagattgtgacgagaaagacaaacattgccaaagccaaagcagaaatggcattgacgagaccatttgcacaatgagacttcgccacaacattggccagacttcatcacctgacatcttcaaccctcaagctggtagcatcacaaccgctaccagcctcgacttcccagccctctcgtggctcaaactcagtgcccagtttggatcactccgcaagaatgctatgttcgtgccacactacaacctgaacgcaaacagcataatatacgcattgaatggacgggcattggtacaagtggtgaattgcaatggtgagagagtgtttgatggagagctgcaagagggacaggtgttaattgtgccacaaaactttgcggtggctgcaagatcacagagcgacaacttcgagtatgtttcattcaagaccaatgatagaccctcgatcggcaaccttgcaggtgcaaactcattgttgaacgcattgccggaggaagtgattcagcaaacttttaacctaaggaggcagcaggccaggcaggtcaagaacaacaaccctttcagcttcctggttccacctaaggagtctcagaggagagttgtggcttagagccctttttgcatgtgctaccacacttttgtccttttgggcactagttagtgtgcgtagcaataaataagaacgaataaaacaacaaaggctttgctgccctttgttaagtataaaataacgggtaatgtaattgtacccttgtgtaatgagtcactcaagtacctatgcgggaaaatcataaattaaaagagaaatttcaatg

SEQ ID NO: 7281 - DNA, 301 bp, Glycine max
  Clone ID: 700645867_FLI
gctgaatgcattgctaggtagaccaaagcaattgcaaatcttcttgatttcaccatatggttgacaaactagtaggactagttacaagtagcaattgaatttgcttggttctacagcttttactatttgccattctactagttttcttcaatatatgtaaagaaatgccatgccccgatggcttcttgaactctgcttttactgatttttgagactaagcgtttactttggtatctccaacattcaatctcggtgcttttctatctagaaaatacttgaaaagatgagtttgatctttttg

SEQ ID NO: 7282 - DNA, 1556 bp, Glycine max
  Clone ID: 700646046_FLI
atcgaaatcggaagaaggattagggtttgtggagatgcaagggcaaggcgttgatgaagtgagcatagaagagttggcgtcgaatctttccctctacaaagatcaactgaaccaggttagagaactcttaaacgatgaccctgcaaattctgaatatgttgacatggagagggaactttccgaggtaagctcaattcaaccccagttttgatgttttgtttccgccttgttctctatcattcattcatcatcgagtaagcagatagatccctcccattccatcggaggatgtcattctatatattactactaatcaaactagtttcttcgaaaaggtgagggtactactactagtattactgcggcaatttgtaatatcattcaaattgctcaacctcaggaggagcattaaaaagtgagtgttaggtccaaatgcacatcacgtctatcttggttcttgtgcaggtctgctctgtctcctgatgtccagcatgctttctcctcagagattctaagttagatttttgtcattattttgctttatcgtcgtctaacacaatactacttgctttactgaactccaaatatgtgccctaaaattgtgttacacaggtcattgccttgaccgaggaactccttgcaactgcaaagcagaatgaaatctctgctcctcctaataatgctgctgcatctccaaccttgtccatacataacgagaatcaattgctagatagtagttctgatcatcaagagaaacttcctgttggcaccaaagttcaggcagtttggagtgaagatggggagtggtatgatgcgacaattgaggcttatactccaaatggttattatgtaagctatgacaattggggtaataaagaagaggttgatcctgccaatgtaaggtcaattcaagaaggttctgttgatgctttattagaagctgagcgagttgctgaagcaacaaaacaggccatcaaacgaaaaattgcacaagctgcatctatcgatttacagtctcggagtctacctacaaagcttcgtatagaggctgatgatcctgaggatgtgaaagcttcaaaacgcaagaaaatacatgcttttaagtcaaagatgcggatggagcaacttgaagtcacacaaaataagcggcaaaatgcttggcagcagtttcagtcaaccaaaggaaaggcaaagaagattggtttcttctctggaagaaaacgggagagtatttttaaatctcctgatgatcctcagggaaaggttggtgtgacgggaagtgggaaaggtttgacagagttccagaagagagaaaaacattttcacctcaaagatggtactgttgaaaatgatgattaggttatgcaccgactcggctagatgccctttcaattgtatgtaacatgctcaaacaaccattctctgtagaggttcactgatggcaaaccaaacaatgttatctactgaaatgtgtcgagacttcagaactgttctagattgtagctttcgccccacatatatatatttttttttctttcactattttatcatgatgc

SEQ ID NO: 7283 - DNA, 746 bp, Glycine max
  Clone ID: 700646115_FLI
gaaaaacaagtagttgagaactaagaagaaggaaatggcttcctcaatgatctcctccccagctgttaccaccgtcaaccgtgccggtgccggcatggttgctccattcaccggcctcaaatccatggctggcttccccacgaggaagaccaacaatgacattacctccattgctagcaacggtggaagagtacaatgcatgcaggtgtggccaccaattggcaagaagaagttcgagactctttcctacttgccagacctcgatgatgcccaattggcaaaggaagtcgaataccttctaaggaaaggatggattccttgcttggaattcgagttggagcacggtttcgtgtaccgtgagcacaacaggtcacctggatactatgatggacgctactggaccatgtggaagctgcctatgtttggctgcactgatgcttctcaggtgttgaaggagcttcaagaggctaagactgcataccccaatggcttcatccgtatcattggatttgacaacgttcgccaagtgcagtgcatcagcttcatcgcctacaagcccccaggcttctaagtcattgaaaaatttgcaaagcatctgtagccaccccactttgtttgttgtacttaaactacattcccatttgtttttgctttatgagatttcatcatcctgtatttttggtttctgttttcggacttcaatggaaattaatggatgagaactaatgaataagctattgtgttgt

SEQ ID NO: 7284 - DNA, 1291 bp, Glycine max
  Clone ID: 700646213_FLI
gttttcagtagtcttgctttgcattacagcagcacaagggaaagaacagcttcactcaaacagtgaatggccaaaatctttttcagttattcgtgatactgatggtatctgcaaagtggcagagacacaaggttacacatgtgaagaacataaggctacaacagaggatggctacatcctgagtttgcagaggttgcccgcgggacagtctggtaagaaagcccacaagccaccggtgctattacaacatggtctcttttgtgatgccatagtatgggtggtcaatcctccagatgaatcattgggatttatcttggcagacaatggatatgatgtgtggcttgccaatgttcgtggcacaaaatatagccgcgggcacatatcacttcatcctaatgacatggcttattgggattggtcatgggatgaattagctaggtatgatcttcctgcttttgttcagtatgtgtacaatcaaaccggccagcgaatgcactatgcaggtcattccttgggaaccttaatggttttagcggatttgtctcgagggaaactgttggacatgttgagatcagctgcattactttgcccaattgctcacttgaatcatgtcacgtcgccggtggcaagaactgctgctcaatcatttatagctgaccctctatactggttaggcctccgtgaattcattccaaacggggatgctgcaagcaaattagtgggaggcatctgccatattctaaacctgatcaactgctcaaacaacctactgacactaatcacaggtccaaactgctgcctaaattcatctgcattcaatgcctatcttgatcatggattaccgccaacagcaaccaagaacttgatccatctatgtcaaatgattagaacagcaaaaatagcaaagtatgattacggtgaccaaagacaaaatatgcaacactatggacaacgggttcctcctctttatgacatgaccaaaatttcaaatgaatttcctcttttcctcacctatggaagacaagatgcgctatccaatgtaaaggatgtgcaacttttgctcaatgaccttagagatcatgatggaaacaagttagtagtattgtttacggaagattattctcactatgattttattatgggtgtcaatgttaaccaaattatctatgatcctatgatagttttcttcgaggttaattgattttacaactattagtgattgcactttaaataatgtaaaaattttctttttcatcaagtttgttcaataaaatgttacattttcctctct

SEQ ID NO: 7285 - DNA, 1146 bp, Glycine max
  Clone ID: 700646325_FLI
gttggttctctttcaatggagtctaagcttttaagagccaccaccatctcagtcccttcaacaccctcatgcgctttccatcgcacaactcgcaaggcttcgatttccttcaaccccacctcggatttcgccccaaaaagcaatctttctctccaggcacatgcggcttccatcgagtcagtgccaacaaagaaaagaattgatgagagtgacaacctgacccttgatcatataagacgttctttagttcgtcaagaggatagcataatcttcagtctcatcgagcgagcacaatactgttacaatgaagatacatatgaccctgatgccttctccatggatggatttcatggctcattggttgagtacatggtcggggaaactgagaggcttcatgccaaggtgggtaggtacaagagccctgatgagcatccattctttccagatggcctacccgaaccagtgttaccacctttgcagtaccctcaggtgttgcaccctattgctgattcaattaatataaatgaaaaagtatggagtttatacttcagagttcttatcccacaaatagtcaaacaaggggatgatggtaactctggatccagtgctgtttgtgatgtaatatgcttgcaggctctctcaaagagaattcattatggaaaatatgtagctgaggcaaaataccaagctagtccagattcatataaagatgccattatagcacaggacaaggacaagttgatggaattgctaacatatcctgaagttgaagaggcaattaagaggagagttgacatgaagaccaagacttatgggcaagaactggttgtaactacgaaggaacatcgaactgaacctgtctacaaaataaatccaagcttggttgctgatctatacagtgattggatcatgccattgacaaaggaagtccaagtttcttatttattgagaaggttggattgaacaaaacaaaaagtaccttttcaattacagtgttcatagggtatttatattttctaggaaatgatacttgcaatgggtaatttctcttgaatcatgactataaactttagcttttgtaattaacatatgaggaagctcatattgggttcttatataataattaatggcatcttttatgttgtt

SEQ ID NO: 7286 - DNA, 1099 bp, Glycine max
  Clone ID: 700646326_FLI
ggtttgaaaagaagccggtgctgtctccttgttctccatcgtaagatataactaattatttttatatcttcatcaagatgcgccgagggagaaccgccgccgccgctgccgccgttgtggatcccacgccggaccaggccaaggagacgacgcggttccgtggcgtgaggaagcggccgtgggggcgattcgcggcggagattcgagatccgtggaagaagcagcgcgtttggctggggaccttcgattccgccgaggatgccgcgcgggcctacgacaaggctgcccgatccttccgcgggcccaaggccaaaaccaatttcccccccttccccggcccggcagaggcggaccaccactcgcagattccgctctaccaggcccatgggctttccaccaagttcgagcccgtcgtccaggtgaaccggcccacgagcagcggcatgagcagcaccgtggagtccttcagcgggcctagggttccctcctcctcctctcgcgctaagccccttgttgtggttgttaaccctatcatccctctcaacgacgacgaagacgattgccacagcgattgcgactcttcttcctccgtcgtcgacgacggccaggactgcgtcctcatctcctccttccggcaaccgctgcccttcgatctaaacctcccaccatccgatgccgacgacgacaacgacgacgacctgccggccaccgcgctgtgcctctgatgatgaagaagaagaagaagaagaagaacctcttctcggtataatcatcattttcttcttgttgttgttattgttgttgttgttgttcaccatctctggtttaattaattaattaaaagttgttagattgtgttgtggtgttgtagagtaatattataataggcatgaatgtgttgttgtaagttatttggatccattactgtgtcatagcattggacctgatctcaaaaactggttggtgcttatgctttcttcatggatctgcttcttacccttacccccaattagaacttactcttttcttttttttttgttgttgttgttctgtacaaaaattatggctatcagatcatagaataaattacattctaatc

SEQ ID NO: 7287 - DNA, 2101 bp, Glycine max
  Clone ID: 700646368_FLI
gatgaaatgaagcttcaaagaagtaagttagagaaggagaaacaagaagctgatgagaataaaaaacatcttgaaaggcaaaggatggaaatgcaagaggacatagatgtacttgttgacctcaacaggaagctgaaaaatcagcgggaacaatttattgtggaaagacgacgctttattgagtttgttgagaaacttcggagttgccagaactgtggggaaatgatctctgaatttgtgctttctgatttacaatcctctgttgacattgagaacttggaagtgccatctctcccaaaattagcagctgatattgtacagggagtttctaatgaaaatttagcttcttcaaggcaaaatactggattgtctcctgcaactgatcccaagtcacctgtttctggtggcactgtctcttggctacgtaaatgcacctctaagatttttaaaatctccccgattagaaagattgaatctgaagattcgggtactttaagagatgttgtgactttgtctgttgagcaaactaatgtggaagattcaccaggaagaattcctgatgctgaaaatgaagcagagttgtcatttgctgttgtaaatgattcttttgatgctcggagggtacaatctggcaatgatatcatagaggttgaagctgaccatgatccttcagttgaaaacctgaacaatgttgacagtaaggcaccagaagatttgcaggctcctgattcaaaggttgggcagcagaaatcccgcaagggagggggaagacccagagtaaagcgtacacacactgtgaaagctgttatcaaagaggctagggatatacttggggaatctgctgaagcattacctggggaatctgtggatgatcatgagactgagtttccaaatggaaatgctgaggattctgccaatgtgaattctgaaagtcagaaaccatacaatagaagaataccagcgaatgtcaggaagcgtaaccgggttcaaacatcatctcaaatttctgtaagtgggcatgatggcgatgccaatgaaggacattctgatagtctaatacctgggcagcgcaagagaaggcgacagaaggctgctgctccccccgcacaaactgctggtgaatcaagatataatttgagacgactcaaaactggagcaacaacttcatctgctagagctatgtctggtggtggcaaagaaagtcagggagaggttgatcgtgtaaaagatacagaagagggaattattgactcaaaaacttctcattcacattcagtgggcattactaatgagaatggtgaaagcatacatcttgagcagtctctgaaaggtgtggagacaagggccggttatggtggtgataccacggagacctttgccaacaatatggccttgagtgaggaggtgaatggaacagcagatgatgtggaggagaatgatgctgagtataggagtgaatcccgtggggaagatgctggtggagttgacaatgaggatgatgaagaagattacctgcaacccggtgaagcttcaatagggaagaagctttggaatttttttacaacataacaacacaagcttattgataacaatgaagctgtgtcttgacctcatcaactttagggatgatgtcggaagttatcttgtattaacacaattggaagtagatctctaaattataaccacgaggggtagtacttaggtgaggtgattgagtttctctatttttttttcttgtacgttttcatggatgtttggatggaacctctggtatttgtttatagttttaggcattcgatagtgtagctaaagtttagatattggattttagctacctccccttggaaattgattgaatccaaatgtttgtatctcttatgctaaatgtgattgtttgaatttattgagggtgcttttgtatcccatcgtgtgaactacgggtgacaatttgggtttgccagttgggcgtgtcaaggagtgggtaatttcattgagagaacccaaggggttggcgtagtagtatgagacacctttgtgtttccatgagtgaaaatgttttattaagttgagagtaatccaaaggaacttgcttttgatgctt

SEQ ID NO: 7288 - DNA, 309 bp, Glycine max
  Clone ID: 700646428_FLI
cacatttcagcctatgaaaaccagaacaacaagggtgtagaaattgagaagataatacctatggatgctgctccccttggtgttgccatccagggctaatacaaagatgtgacaaagaataatttgggcgacaatgaagataactaagctaaaggtgaatgaaaaatttgcctgcagtgtaatttcatctgggcaaagcttttatagtttatagttataaggctttctaaaaagtgttgcgtattgtattatcttgaatgctgtgatttgaagtcttaataaaagtgtttcctttatcagttcataatg

SEQ ID NO: 7289 - DNA, 1080 bp, Glycine max
  Clone ID: 700646588_FLI
tgcaagaatggcacttcgttgcttggtgatgtccctttctgttctcttcactcttggtcttgcgagagaaagccatgccagagacgaagatttttggcatgctgtttggccaaacactcccattccaagttcattgcgagatcttctaaagcctggccctgcaagtgttgaaatcgatgatcaccctatgcaaattgaagaaacacagtacccgaaaaccttcttctataaagaagaccttcatccaggcaaaacaatgaaagtacaattcagcaagcctccctttcaacaaccatggggtgttggtacatggttaaaggaaattaaagacactactaaagaaggatatagttttgaagagctatgcatcaagaaagaagccattgagggagaagagaagttttgtgcaaaatccttgggaacagtaattggttttgccatttcaaagctgggaaagaacattcaagtactttcaagttcctttgtcaataagcaagaccaatacactgtggaaggagtgcagaatcttggagacaaagcagtgatgtgtcataggctaaatttcagaactgcagtattttactgccatgaagtccgtgaaacaacagctttcatggttccattggtggctggtgatggaaccaaaactcaggcacttgctatttgccactcaaatacttctggaatgaatcatcaaatgcttcatcaacttatgggagttgatcctggaactaaccctgtttgccatttccttggaagcaaggccattttatgggtacccaatttatctgtggacactgcctatcagaccaacattgttgcttaattagtccatgcatcttgagcaccatgagaatgagattgtgtataaaataaattatcatgtgctgtgtgttgtgcaagtactaccttctctagctagattgctagagctagaatttcaacctacctatgtgtactgataagatctgcttccctacttaaagagagcatcatcctgtgatcagtgtgcttcgtattctctctctctatatatatatggtaaaaagtggttatctcgtgcctcgccttgagctatcc

SEQ ID NO: 7290 - DNA, 2159 bp, Glycine max
  Clone ID: 700646607_FLI
gtgaaaacaaactttatggcgaatttctaattaatgctcagggagaggatgtagttgctggaatcaggacacctgaagatttggaggttatgaaaacttgcatgccagaagcttataaggaacttgaggagaactgtgaaattctagagaaacattacaaggatatgatggatattgaattcactgtccaagaaaataggttgtggatgttgcaatgtcgaagcggaaaacgtaccggtaaaggtgcattcaaaatagctgtagatatggttgatgaggggcttgttgatattcgttctgcaatcaagatggtagagccacagcatcttgatcaacttctccacccacagtttgaggatccatctacttacaaggataaagtgatcgccattggtttgcctgcatcccctggagccgcagtagggcaggttgtgttcactgctgatgatgctgaagaatggcatgcacaaggaaagagtgtcatcttggtgaggaatgagactagtccagaggatgttgggggtatgcatgcagctactggaatcttgactgctagaggtggcatgacatctcatgctgctgttgtagcccgtggatggggaaagtgttgtgtgtctggttgctctgatatccttgtaaatgatgctgagaaggtgtttgtagttggggataaggtgataacggaaggagaatgggtctcactgaatggatctacaggtgaggtgatactaggaaagcagccactttctcctccggctctaagtgatgatttagaaactttcatgtcttgggctgatgaaataaggcatctgaaggttatggcgaatgctgacacacctgaagatgcagtaacagctagacaaaatggtgcccaaggaattggactttgcaggacagaacatatgttttttgcttcagacgagaggataaaggccgttagaatgatgataatggcagttacaccagagcagaggaaggctgcactggacctgttgctaccttatcaaagatcagattttgaggggatcttccgtgcaatggatggtctcccagtaacaattcgattgttagaccctccacttcatgaatttcttccagagggtgacctggaacacattgtcagtgaactaacttctgagacaggaatgaaagaagaagaaatcttctcgaggatagaaaaattatcagaagtgaatcccatgcttggttttcgtggctgcaggctgggaatttcatacccagaactgactgagatgcaggcccgtgcaatctttcaggctgctgtttcagtgagtaaccatggtattacagttcttccggagataatggttccacttatcggtacacctcaggagttaaggcatcaagtgaatttaataaggaatgttgctgataaagtgttgtctgagatgggttcttctttaagctataaggttggaactatgattgaagttccaagggctgcactagttgcagatgagattgcaaaggaagcagaattcttttcgtttggaaccaatgaccttactcaaatgacatttggatatagtagagatgatgttggcaaatttcttcctatatacctatccagtgggattctgcagcatgatccattcgaggtacttgaccaaaaaggtgtgggtcaactaatcaagatttgcacagagaagggtcgtgctgctagaccaaacttgaaggttggaatatgtggggagcatggtggggagccttcttcagttgcattctttgctgaaatcggacttgactatgtttcatgttctccttttagggttccaattgctaggcttgcagcagcacaagttgcagtttaggaaacagttcctgatggcatatgagagggattattgactctctacaactgtacataactacggttcatcagaaaatggaggtttacacgaagacgtcccatatataaaggagggcttctaacatatacgtatagaagtgaaagcaaaggaaaataaatagtaataaaaaagagaaaacatggtgtacaaatattcatgcaaatgtttctcttataccgtgtctcgtcatcataaaataagagacagactctgtaaaattcttgtacatgctactgctgtattctatcacaataaaaaagacaaatactgctgtaaaattctacgttt

SEQ ID NO: 7291 - DNA, 1402 bp, Glycine max
  Clone ID: 700648112_FLI
ctttttcttctctctcaacaacttcaccttcttcctcctcgatcatgtctcacttcaagggcaagtaccatgatgagcttatcgccaatgctgcgtacattggcactcctggaaagggtattcttgctgctgatgagtcaacagggacaattggcaagcgtttggccagcatcagtgtagagaacattgaatccaacaggcgagctcttagggagctgcttttcactgctcctggtgttcttcaatatctcagtggtgtcatcctctttgaggaaaccctctaccagagcacagctgcaggcaagccctttgtgaatgtcttgaaggaagctggtgtgcttcctggcatcaaggttgacaagggcacagtcgagcttgctggaactaatggagaaaccaccactcagggtctagatggccttggtcagcgttgtgccaagtactacgaagctggtgcacgttttgccaaatggcgtgcagtgctgaagattggtcccaacgagccatctgagctgtctatccatgagaacgcctatggcttggctagatacgctgtcatatgccaggagaatggcctggttcccattgttgagcctgagatccttgttgatggacctcatgacattcacaagtgtgccgccgtcaccgagcgtgtccttgcagcatgctacaaggctttgaatgatcaccatgtccttcttgagggtaccctattgaagccaaacatggtcacccctggatcccaatctgctaaggtttcccctcaggtggttgccgagcacactgtcagagcccttcagagaaccgtgcctgctgcagttcctgctgtcgttttcttgtctggtggccagagtgaggaggaggcatccgtcaacctcaacgccattaaccaggtcaatgggaagaagccatggtcactctctttctcctttggaagggcacttcaacagagcacccttaaggcatggggcggaaaagaagagaatgtgaagaaggctcaggaagcccttttggtaagagccaaggctaactcagaggcaactctgggaacctacaagggtaactcacagcttgctgatggtgcctcagagagcctccatgtttcgaactacagctactgatcaatcgaagttggtgttgtttgaagagactagtgcgagtaggaatcggtattatgggtacaacaaccgaatttcttgttgataagtattattgtggtttgactcttcccagaataatcgtttggaattttgctttttgttttcctagtgttccttttatgtcaattttagtaattcagtgtatttggtcaaacctgtgcaacagggaagggaatgtaactttgttttcttgaaagacaccaccgtgctgtgaatgaggctttgtgtttatttttgcgatt

SEQ ID NO: 7292 - DNA, 670 bp, Glycine max
  Clone ID: 700648140_FLI
attggaccataaagcttggatattgaaagattgagagaattgagactcttgttagatttgttagtcacgactgttgattcatacacattcccatcatggctcagctcattatcagctggcaaaagccttgaatttgtctacatccattctgcttctccagcagatgtctccgtggcgaactacgtgttggcctgaaagtggcatgggaatggtttactgctttcttgtgtaagactgtgtagccatacaaatgtgcagcgaggggagtgtctttacgtttttccttctataatttggtgtcaaatcttcttcttcttcttcccttgtgtattttgcatttcagtaggttagatcaaaataggtagattatataagatggaaggaccggagcagaaaggagtgaagagacaaaaggcagagctcatcctctttcttctccgctttacaacttatatacagtgagtgatacaagacaggtagtgaaacagtgttgttgagaagttaaaaaaaaaaaggtgaacttctcaatatttcagagaagagtcatcacttgtatttttcaacagctttggatgtcttttctgtgtttgatgttgtaagctttgcagcattttgtaatctctacagagaaacagtttgtgctatatagtattatgtttttgtgctgtgc

SEQ ID NO: 7293 - DNA, 703 bp, Glycine max
  Clone ID: 700648338_FLI
ggatcagctggctttaagcctgaaaatcttgtgcaaccaaacatacctaacacctggaaggcgatggaagcactctatgactctggcaaggctcggaccatcggtgtaagcaatttttccaccaagaagctctcggatttgctgctaattgctcgtgttcctcccgctgtcaaccaggtggagtgtcatccttcctggcagcaggacaagctgcaggctttctgcaattccaaaggtgtccacctctctggatattcacctttgggttcccctggaacaacctggcttaaaagtgatgtcctcaagcatcaagttataaatatgattgcggagaaactaggcaagacgcctgcacaagtagctcttcgctggggacttcaaatgggccatagtgttcttcccaagagtacaaacgaaactagaataaaggaaaattttgatgtttttggctggtctatacctgaggacctgctcgccaaattttctgagattcaacaggcaagattactcaggggtaccacatttgcccatgaaacttatggtgcctacagatcccttgaggaactttgggatggtgaaatctgagaaatctatctgtaaatttgataagtgaatggatcgaggagtgagagttctgtgaaactgtgaatcagtatactcctttgttgacttgagcaaattttattttattcctggtttgatg

SEQ ID NO: 7294 - DNA, 1693 bp, Glycine max
  Clone ID: 700648409_FLI
ctgatcaagatgaaggaaactgcggaagcattcctcgggaagaaaattaatgatgctgtggtcgctgtcccagcttacttcaatgatgctcagaggcaggccaccaaggatgctggtgtcattgctggtctcaatgttgctagaattatcaacgaacccactgccgctgccattgcctatggattggacaagaaaggtggcgagaagaacattctagtctttgatcttggtggtgggacctttgatgtcagtatcttgacaattgataacggtgtttttgaagttcttgctacaaatggagatactcatcttggaggtgaggattttgatcaaagaataatggagtacttcattaaattgatcaagaaaaagcatggaaaggatattagcaaggacaacagagcacttggaaagctgaggagagaggctgagcgtgcaaagagggctctcagcagccagcaccaggtccgcgtggaaattgaatcactttttgatggtgttgatttttctgagccactcactcgagctaggtttgaggagttgaacaatgacttgttccggaagaccatgggtccagtgaagaaggctatggaagatgctggattacagaagagtcagattgatgagattgttcttgttggtggaagcacaaggattccaaaggtacaacagcttttgaaggactactttgatggaaaggagccaaacaagggggtcaaccctgatgaagcagttgcctatggtgctgcagtgcaaggaagcattttgagtggagagggtggtgaagaaaccaaagatatccttctcctggatgtggctcccctcactctcggaattgaaactgttggtggagtcatgacaaagttgattcccagaaacactgttatcccgaccaagaaatctcaagtgttcaccacctaccaggaccagcagactaccgtctccattcaggttttcgaaggtgagaggagtctcacaaaggattgtcgccttcttgggaaatttgatctgtctggaattccaccagctccaaggggcacccctcaaattgaagtgaccttcgaagttgatgccaacggcattctaaatgtgaaggcagaagacaagggaactggtaaatcagaaaagatcaccattacaaacgaaaagggacgtcttagccaggaagaaatagatagaatggttcgtgaagcagaagagtttgccgaggaagacaagaaggtgaaggagaggatcgatgctcgcaacagtcttgaaacctacgtatacaacatgaagaatcaggtcagtgacaaggacaagctcgcggacaagttggagtcagatgaaaaggagaaaattgagactgcagtgaaagaagcattggaatggctggatgacaaccagagtgtggagaaagaagattatgaagagaagctgaaggaggttgaagccgtttgcaacccaatcatcagtgctgtgtatcagagatcaggaggagccccaggtggtgcaggtggcgaaggcgaagacgaggatgattctcacgatgagctctagattagtctaaatttttatcatatatgggaaattaagaattcccctgcgctctgcgcttgcttttttggtgccgatgataagatacttgtgaaattacttttactttgtttttttgcttagttttacgaccaaacttcttcatgagtctggtttc

SEQ ID NO: 7295 - DNA, 1482 bp, Glycine max
  Clone ID: 700648555_FLI
cagacttaacaacagcacaaagcgggttactgtctgttcaagctaccatctctctctctctttcttagtgcctccttgccagaagttaaaatggcccaagaaactttcctattcacatctgaatcagtgaacgaggggcaccctgacaagctctgtgaccagatctccgatgctgtgctcgatgcatgcttggagcaggaccctgacagcaaggttgcctgtgaaacctgcaccaagaccaacatggtgatggttttcggagagatcacaaccaaggccaacgtggactatgagaagattgtgcgtgacacatgcaggaacattggttttgtctctgatgatgttggtcttgatgctgacaactgcaaggtcctcgtcaacattgagcaacagagtcctgatattgctcaaggtgtgcacggccacctcacaaagaggcctgaggagattggtgctggtgaccaaggtcatatgttcggctatgccactgacgagactcccgagctcatgcccttgagccatgtccttgccacgaagctcggtgccaagctcaccgaggttcggaagaacgggacatgcccttggctgagacctgatggcaagacccaagtcactgttgagtactacaatgacaagggtgccatggttccaatccgcgtccacactgtgctcatctccacacagcatgatgagactgtcacaaatgatgagattgcagctgatcttaaagaacacgtgattaagcctgtgattcctgagaagtaccttgatgagaagaccattttccatttgaacccttctggcaggtttgtcattggagggccgcatggcgatgctggtctcaccggccgcaagatcatcatcgacacctatggaggatggggtgcacatggtggtggtgccttctctgggaaggatcctaccaaggttgataggagtggtgcctacattgtgaggcaagctgcaaagagcattgttgcaaatggacttgctaggagggcaattgtgcaagtttcctatgccattggtgtgcctgagcccttgtctgtgtttgttgacacttatggcactgggaagatccctgacaaggaaatcctcagcattgtgaaggagagttttgacttcaggcctggcatgatctccatcaaccttgatctcaagaggggtggaaatggcaggttcttgaagactgctgcatatggacactttggcagagatgaccctgacttcacatgggaagtggtgaagccactcaagggggagaaggtacctgcttaactaaaaggggttccaacactcttggcaagggacttttgcactactactggcttcttattatctgattgctaaaattttctctatgtttccttccctcttactcaattctgtttttttttttctgtatttttttatgaatttcccccttttttttgtgtacttgtatgtgttctttcagaacatatatattttatatgatgaaac

SEQ ID NO: 7296 - DNA, 1470 bp, Glycine max
  Clone ID: 700648707_FLI
cctggaattaatgaaggaccctgtcattgtttcaacaggacagacttatgagcgtacttgtattgagaagtggttgcaagcagggcacgggacctgccccaaaacacagcagactctcactagtactgttctcacacctaactatgtattacggagcctcatagcacaatggtgtgaagccaatggcatagagccaccaaaacgacctagcgatttacaacctagtaaatcagcatcagcctactctcctgctgagcaaagtaagattgaaagtcttctccaaaagctcacatctgtgagtcctgaagaccagagatcagctgctggcgagatccgccttcttgcaaagcgcaacgcagataaccgcgttgccattgctgaagctggtgcaatacctctccttgttggtcttttgtctgtgcctgactcccgcactcaagaacatgccgtgacagcgctcctgaatctttccatatatgaaaacaacaaaggaagtattgtttcttcaggagcagttccaggtatagttcatgtgctgaagaagggaagcatggaggctcgggaaaatgcagcagcaacacttttcagcctttcagtaatagatgaaaacaaggttacaattggatctttaggagccataccaccactagtgacactgctaagtgagggtaaccaaaggggtaagaaagatgctgcaacagcactcttcaatttgtgcatttatcagggcaacaagggaaaggcagtgagggctggcgttattcccacgctgatgcgactactgactgaacctagcgggggaatggtggatgaagcattagctattttggcaatattggctagccatcctgaagggaaggctactattagagcttcagaggcagtgccggttttagtagagtttattgggaatggctcaccaaggaacaaagagaatgcagctgccgttttagttcacctctgttctggagatcaacaatatcttgcacaggcacaagagctgggggtgatgggtccactgttagaattggctcaaaatggtacagacagaggcaaaagaaaggctggacaattgctagaacgtatgagcaggttagttgagcaacagcaggaagttccaatacaaactgaaactcaagctcagaacgaggatacccaaccacctttgattactaaccccgatgattcctaagatgtcttattatactttgttcattttgtctttttgttctctttaaagtgttgaaagaagcatctgtttggaggaaagggtggaagatcaccttcctactccataagttatttgtttgtttgtgtgatattcagcagagatgtaatgcaaaaaacttgtgaaagtgggcaagaagaaatcgaagcaaatgggcaagcttgaagtggaaaatgtataatttgtaacatgcactgtattctaatcatcctcagattttaatgaagagatgttttgtttag

SEQ ID NO: 7297 - DNA, 675 bp, Glycine max
  Clone ID: 700648724_FLI
atttggaatctcatatagttagatataacaccctccggcatgaggcttttaaatttgttgatgaaggtgcgcggtctgctgaaacttatgatgttgcaatggatgctttacaagaagctgcaaaaagagtttctcagggaatgcaaaatgagggaaaaattcctatcaataatggaaaggtaaggagtcacgtgctgaatgatgaaagtcatgctaattacacaagtgggtgccaggaagaaagcttgagccagcatatgtctaaggatgatttggataagaatattagaaaacttatgaatgagcttgagtgtgcaaatcggaagtgtgaaatttatcggtccaacctgctttccgttttgaaagctgttgaggatcacaagctagagttatcagttaaggtggaaaacatcaagataagcatgaaagatggcatctaaagactatggagaattaacattgaaactgataggaaaacaaattctattttggcaatccagtcgcgcatcaataatgatcccatgacaacccgccgccccacaattgtcttgtagccctcttgtgatgtataaagttggtttgcactgtattatttttttgttcagtactaaatttattatattgatgtcaacttttatagtccaagttttctttaagaaaataataatttagcac

SEQ ID NO: 7298 - DNA, 732 bp, Glycine max
  Clone ID: 700648732_FLI
ggatgctcctgatgaagcagaatatgtggaaattgagatagagtctggccttcctgtttcagtcaatgggaagaggctttcgccagcaactttacttactgagctcaatgagattggtggaaggcatggaattggccggatcgacatggttgagaatcggcttgtaggtatgaagagccgtggagtttatgaaactccaggtggaaccatcctgtttgctgcagcacgcgagctggagtttttgacacttgatcgagaaacaatacaagtcaaagattcattagcccttaaatatgcagagttagtatatgctggcagatggtttgatccacttcgggagtcaatggatgcctttatgcagaagatcacagagacaacaacaggttctgtgactttgaaattgtacaaaggttctgttactgtaaccagtcgaaagagtccctttagcctgtataggcaagacatttcatcatttgagagtgggcagatatatgatcaagctgatgctgctgggttcatccggctttatggtcttccaatgagggtccgagcaatgcttgagcagggcatctaagtgttaatttcatttcaaaatgtccttgatttcattgtcatttgcttgtttagaaaaaagttggattgaagctggagtgtactgtggattgttagtagatccctggaatcctaataaaatgaataatatttaatattcatcttgaattcatatcagat

SEQ ID NO: 7299 - DNA, 1326 bp, Glycine max
  Clone ID: 700648757_FLI
gacaatttcaggatgtgtaaggctctaatgccaggggatgaagaaaatatgagtgatgaggctatatgggaaactctccctcatttttgggttgctatctctatggtgttcttcattgctgctacagtcttcacactcctaaaacttagtggtgatgtaggtgctctgggctggtgggacttgtttattaattttgctattgccgagtgctttgctttccttgtatgtacaaagtggtccaatccagtcattcatagaaattcaagagaagccagtagttcatcttcaactacgattacatatcttgactggaacagtggtttagtggtttctacagacgaaaatcaacaccaggggagaatgtgtagccttcaagacataggaggtcatttcatgaaagtaccaattattgtattccaggttcttctttgtatgcatctagagggaacacctgcttgtgctgtacatatacctcttccagttattttctctccccttttcctactgcaaggagctggggtaatgttatctgcatctaaattaggggagaaacttgtgcttctgctacgaagtggagctggtggaggaatatattttagattttcttcaagagctcatgattgcttggggttcttgcatcatggttctagattattaggttggtggtcaattgatgaagggagtcgggaagaacaagcacgactataccatgagggagcaattgggtataatacattttgtggttatcctcctgagattgttaagaaaatgccaaaaaaggaacttgctgaggaggtttggagactccaggcagctcttggcgaacaaactgaaattacaaagttcagccaacaggagtatgaaagacttcaaaatgagaaagtgttatgcagagtttgtttcgagggagagattaacgttgtactgctcccatgtaggcatcgtgttctttgcagcacttgctcagagaagtgtaagaagtgcccgatttgccgtgactccattgctgagcgtctgcctgtatatgatgtttagatgttaacttggtcaacttttttcgtgttaaaagatcatagaagaaagggactagacaacatgttttaacagggtgaatatacttagtacagtgttggcagtgacattaattcgacaccaacttgactgtctaatacagcatcaaaggataggaagaaaaatagagcatccacttgatatactttggattttgagtttgatttgttttgttttgcattcagtctcttctgtaatttgtatatatatactatctttttacaggctctacaattgagtgatgagtgttgaatt

SEQ ID NO: 7300 - DNA, 828 bp, Glycine max
  Clone ID: 700649006_FLI
caaccacaagccatcttacttgacttgtctctgtctgtccatatataacattctattcgtacttcattttcattctcactccctcaaacagtcaaactttcatctttctcattcacttaacccaagtgtaaaaatggcagcattgaatatgtccactgtgagacttccaagagcttccttgtctggaacgacaccagctaggagatcttgtgctctcatcaagaatccatcatctttgaggtctgtgaagaacgtgtctaaagtatttggattgaaatcatcttcctttagagtgtcagcgatggcggtatataaagtgaagctgattggaccagacggtgaagagaatgaatttgaagcccctgatgacacttacattctggatgcagctgaaaatgctggagtggagctaccttactcatgcagagctggagcatgctctacttgtgctggccatgttgtttcaggctctgtggatcaagcagatcaatcctttcttgatgaccatcaaatcaaaaagggttaccttctgacatgtgtttcatacccgaaatcagattgtgtgattcacacccacaaggaggaagatctcgtttaagtggtggtggtgtgtgtcttgtgttagtttttctaagcttggatatgtgtcatggtagctagacatattgtgaaactctgttggtgttggtacaactttttgaatcgttctaaatttatgtgaactttaatatgtagccattagatcgattcattcaagaataaggctatgtttcgcccaatattatgttcaaccttaaaacttattttgaagttcaaaatataagcttt

SEQ ID NO: 7301 - DNA, 514 bp, Glycine max
  Clone ID: 700649013_FLI
caactcagttcggtggtggtatccattctgagttgaacaagaaggtttacaagcttggcaaagctggagatgaatctcactctgctcttactgagtttgataggaccgagaaagacattaccccaataggtggtttccctcactatggtgttgttaaggatgattatatcatggtcaagggatgctgcgttggtcccaagaaaagggttattacattgcgccaatccctccttaagcagacttctcgtgttgctctggaggagatcaagctcaagtttatcgacacctcttcaaagtttgggcatggtcgcttccagaccacacaggagaagcagaagttctttggacgcctcaaagcataattttgttaattggatggaaatgctggatttctattcggttaccatatcttataaacatattgtagtgttttctgttttgacattatggatccccgagtagtgagttttttccccccttaagttggccaaacttttgttgagactgatctttt

SEQ ID NO: 7302 - DNA, 738 bp, Glycine max
  Clone ID: 700649226_FLI
taattttttatctatgttaaaaaaaacatttttgcaatattctactcaaattaatgaagcaaaatctttttgttgtgcagactcctctgagctggctctttatctatccggagggactttataagctcatgacatacataagggacaactacaataatccaccggtgtacattaccgaaaatggcgttgcggaatcaaagaatgactcacttgcaatcaatgaagcccgaaaggatggtattcgaattagataccatgatggccatctcaaatccctgcttcatgcgatcaagtaaaagggtttctctctggtttaatagaaaattaatttaagcataattaaatatataatatgttgatgatttttggttattccttctttatcttgcagagatagagttaatgtgaagggctactatatatggtcattttcagatagctttgaatgggatgctggttacacagctcgatttggcatcatatatgtggattacaagaacaatttgagtagataccctaagtcctctgcgttttggctgaaaaaattccttctcaagtgatctaaatctattgttcctttggcatgcatgcccagtttttcttcttgtttgtttcctggatatcacagacatgcagtgtgtatcacttgctcttcgattcggatcaatgtaatcaagtcatcgttgatatcaaataaataatggcatgccagagaatggaataaattatcttttcaac

SEQ ID NO: 7303 - DNA, 1170 bp, Glycine max
  Clone ID: 700649555_FLI
cacttcacatacatcttcactgatgtgcattgtgtgacacttttcccaaattcataaacttttcaacaccccgcatcagatcttgatcccaaaccaattcaagtaggcaacaagcaacatgtgtacgatgaaacccactttaagattcatcttggtccttctcacccttctcttggtgctgaggtttaacgttgcctcagaggttgaggatgagttggaggaattgttagcagtggatgaggaagtagagcaagaagcggaaaagggtggcgagaagttatccgaagcagaggttttgagcaaagcccaaaggatcgtaattgagctcaacaacgacaacacagagagggttgttaatgggaacgagttcgttcttgttctggggtatgcaccttggtgtccaaggagtgctgagctcatgccccattttgcagaggctgcaacttctctcaaggaattgggaagccctcttgttttggccaaacttgatgctgacaggtattccaagccagcttctttccttggagtcaaaggcttccccactctgcttctctttgtcaacggcacctctcagccctactcaggtggtttcgcagcagatgatatagtgatatgggcacaaaaaaagactagtactcctgttattcggataggttcagtgacagaagcagaaaagtttctgagaaagtatcaaacattccttattggtcggtttgataaatttgagggacctgattatgaagaatttgtgagtgctgcacagtctgataatgaaatccagtttgttgaaacaaatcaggtagagcttgctcaagttctttatccagatatcaagcctactgatcaatttcttggaattgtcaagagcgaacccgaaagatacactgcatatgatggagctttcacaatgaataaaatactggaatttgtagactacaacaagtttccattagttacaaagctgactgaaatgaattctatcagagtctactccagccccatcaagcttcaggttttagtctttgcaaacattgatgacttcaagaatcttcttgaaactcttcaagatgttgcaaaaacattcaagtcaaagataatgtttatatatgtggatattaatgatgagaaccttgcaaagcccttcttaacattgtttggtcttgaagaatc

SEQ ID NO: 7304 - DNA, 1187 bp, Glycine max
  Clone ID: 700649584_FLI
gcagcaacaccaaaaccaaaaaggcaatatgggcagggctccttgctgcgacaaagcaaacgtgaagaaaggtccatggtcaccagaagaagatgctaagctcaaatcctacatagaaaagcatggcactggtggtaactggattgctttgcctcaaaaaataggccttaagcgttgtggcaagagttgccgccttaggtggctaaactatcttcgccctaatctcaaacatggtggtttctccgtagaagaagacgacattatttgcagcctttacgtcagtattggaagcaggtggtcggtgattgcagctcaattgccaggaagaaccgataatgacataaagaactactggaacacgaggctgaaaaagaagcttctggggaagcaccgaagagagccacgtaatagagggaattacaacagtgttaagcaagaaaatgatgttaatagagggagtggtactactgatggtgattcttcttccttatctttgcttcaggaaaatggtagcactactcatcatcaagaacaacatcaacagcaaccatgttggccacagaatattaataacatgcctgtgctaccactacaagtacctttgccatacaaaaaccaaggtccatgttttaacgaccaagattccctcaaaaaactccttatcaaactcggaggaagattttcaggtgattcttaccatcctacccttgatggcttgaaccttgaattctcatcacatgggcaacaaatttatcaagaacaagtccatgttggctcttctgctgcttgcattagtgccactattaacaacaacaatgaggtacaatttgcacaaactggtcaataccctggagttgataacttggtgcaagggcaaggtggtaatttcactccgtcgtttgaggaaatggtgtcttcttctaattatccagatggtttagagttcttgtataatgagggcatgatcgaccataagataatagacactactactaccacaacctggggtgaaactagcactccaatttatcatcatcatgattcacttgcttccacttaccaaggtcaaggtgtgatacaagaatgtgttttgcaagattttagctaccccagggcacaataacatgatcttgtacatattttgttatttttatcattattaacagctgctactagccatttatcac

SEQ ID NO: 7305 - DNA, 1210 bp, Glycine max
  Clone ID: 700649594_FLI
agatcgtgcgtgacacctgcaggaacatcggcttcgtctcaaacgatgtgggacttgatgctgacaactgcaaggtccttgtaaacattgagcagcagagccctgatattgcccagggtgtgcacggccaccttaccaaaagacccgaggaaatcggtgctggagaccagggtcacatgtttggctatgccacggacgagaccccagaattgatgccattgagtcatgttcttgcaactaaactcggtgctcgtctcaccgaggttcgcaagaacggaacctgcccatggttgaggcctgatgggaagacccaagtgactgttgagtattacaatgacaacggtgccatggttccagttcgtgtccacactgtgcttatctccacccaacatgatgagactgtgaccaacgacgaaattgcagctgacctcaaggagcatgtgatcaagccggtgatcccggagaagtaccttgatgagaagaccattttccacttgaacccctctggccgttttgtcattggaggtcctcacggtgatgctggtctcaccggccgcaagatcatcatcgatacttacggaggatggggtgctcatggtggtggtgccttctccgggaaggatcccaccaaggttgataggagtggtgcttacattgtgagacaggctgctaagagcattgtggcaagtggactagccagaaggtgcattgtgcaagtgtcttatgccattggtgtgcccgagcctttgtctgtctttgttgacacctatggcaccgggaagatccatgataaggagattctcaacattgtgaaggagaactttgatttcaggcccggtatgatctccatcaaccttgatctcaagaggggtgggaataacaggttcttgaagactgctgcatatggacacttcggcagagaggaccctgacttcacatgggaagtggtcaagcccctcaagtgggagaaggcctaaggccattcattccactgcaatgtgctgggagttttttagcgttgcccttataatgtctattatccataactttccacgtcccttgctctgtgtttttctctcgtcgtcctcctcctattttgtttctcctgcctttcatttgtaattttttacatgatcaactaaaaaatgtactctctgttttccgaccattgtgtctcttaatatcagtatcaaaaagaatgttccaagtt

SEQ ID NO: 7306 - DNA, 489 bp, Glycine max
  Clone ID: 700649675_FLI
agctgaggcaaaatatcaagctagtccagattcatataaagatgccattatagcacaggacaaggacaagttgatggaattgctaacatatcctgaagttgaagaggcaattaagaggagagttgacatgaagaccaagacttatgggcaagaactggttgtaactacgaaggaacatcgaactgaacctgtctacaaaataaatccaagcttggttgctgatctatacagtgattggatcatgccattgacaaaggaagttcaagttgcctatctgttgagaaggttggattgaacataacaaaaagtaccttttcaattacagtgtttatagggttatttatcttttctaggaaatgatacttgcaatgggtaatttctcttgaatcatgattcatgactataaacttgagcttttgtaattaacatatgaggaagctgatattgggttcttatataataattaatggcatcttttatgttgttttt

SEQ ID NO: 7307 - DNA, 873 bp, Glycine max
  Clone ID: 700649811_FLI
aacaagcaaacaccatggtgattaagtctgtgttgttcagcttcattttccccccgccaccttctctggtggtttgggggttgactgtgacaagcttcctgatactggctaatgctttcttgtcagaaattagagggaagcatttgaactattcaaagttttggaatgctaatccctctgcagaaaagcaggtcaagttgtctagcaaagctggcatgcttttgctgtacactcctgcttttcttgctggccttgcatccttctgggtctttcctcatcaagggctcagattcaccatccttcaatctgctgttactctgcactacttcaagagggtctttgaggttctgtttattcacaaatatagtggaggcatgacacttgaatctgcaatccccatcactctgagttatttcctctcagctgtaactatggtctattctcaacacctaacaaaagggtttccagaaccaccaatcaatctgttctaccctggcattgtgttgtttctagttggcatcattggcaacttctaccaccattaccttctgtccaaattgaggggaaagggtgaaaaggagtacaagattccaaagggtggcttttttgagcttgtgatttgcccccactacttctttgagattactgtgttttatgggatcttcttcatttctcagacattatattcattcgctttcgctgtaggcactactatgtacttggtgggtaggagttactcaactaggaaatggtatctttctaagtttgaagatttccctaagcatgttaaggctgtcatcccatttgtcttctaaatgttgtaatgaacatctaattctacttgagttgtaagtgtgctgctagattgtgttt

SEQ ID NO: 7308 - DNA, 2092 bp, Glycine max
  Clone ID: 700649823_FLI
caacttcacccattcatacgtggtgttgttactgctgctcttttctcttttcttttctctttagttctctcttcccctttctttttctttttcttcttcttctgagcttgtttaagcttttcttccattaacatattatcacaatgtgtggtattcttgctgttcttggttgttctgatgactctcgagccaaaagggtccgcgtgcttgagctctctcgcagattgaagcaccgtggccctgactggagtgggctccatcaacatggtgactgctttttggcacatcaacggttagccatagttgatcctgcttctggggatcaacctctctttaacgaggacaaatccgtcattgttacggtaaatggagagatttacaaccatgaagagctcaggaaacagctgcctaatcacaacttccgaactggaagtgattgtgatgttattgcacacctgtacgaggaacatggagaagactttgtggacatgctggatggtatcttctcatttgttctactggacacccgtgacaacagttttatagtggctcgggatgctattggggtcacttccttgtacattggatgggggttagatggctctgtttggatttcatcagaaatgaaaggcctgaatgatgattgtgaacactttgagtgttttccacctggtcacttgtactctagcaaagaaagagggttccgcagatggtacaatcctccttggttctctgaggctattccatctgccccttatgatcctcttgttttaagacacgcctttgagcaggcagtcataaaaaggttgatgactgatgtgccttttggtgttctactctctggaggtttggactcttctttggttgcatccatcacttctcgttacttggccaacacaaaggctgctgagcagtggggatcaaagttacattcattctgtgtaggccttgagggctcaccagatttgaaggctgcaaaagaggttgctgactatctaggcactgtccaccatgagtttaccttcactgttcaggatggaatagatgccattgaagatgttatctaccatattgaaacatatgatgtgactacaattagagcaagcacacctatgtttctcatgtctcggaagattaaatcacttggtgtcaaatgggttatctcaggagaaggatctgatgagatctttggagggtatttgtacttccacaaggcacccaacaaggaggagttccacagagaaacatgccgcaagatcaaagcacttcaccaatatgattgcttgcgagccaataaatcaacatttgcttggggtctagaagcccgtgtaccatttttggacaaggcgtttatcaatgctgcaatgagtattgaccctgagtggaagatgataaaaagagatgaaggacgaattgagaagtggattctgaggagagcctttgatgatgaagagcatccttatctgccaaagcacattttatacaggcagaaagaacaattcagtgatggagttggctatagttggattgatggccttaaggcccatgctgcaaaacatgtgactgaaaaaatgatgcttaatgctggtaacatttacccccacaacaccccaaaaaccaaggaagcatattactacagaatgatctttgagaggttcttccctcagaactcagctaggctcactgttcctggaggagcaagtgttgcatgtagcacagccaaagctgttgagtgggatgctgcttggtctaacaaccttgatccctctggtagagcagcacttggagtgcacatttcagcctatgaaaaccagaacaacaagggtgtagaaattgagaagataatacctatggatgctgctccccttggtgttgccatccagggctaatacaaagatgtgacaaagaataatttgggcgacaatgaagataactaagctaaaggtgaatgaaaaatttgcctgcagtgtaatttcatctgggcaaagcttttatagtttatagttataaggctttctaaaaagtgttgcgtattgtattatcttgaatgctgtgatttgaagtcttaataaaagtgtttcctttatcagtt

SEQ ID NO: 7309 - DNA, 1783 bp, Glycine max
  Clone ID: 700650111_FLI
caacaatgtccacttttgaacataagttactgtcctgcatcagaagttgatctggttcaaggaaagaatttggttattgtagtttacaactctctaggttggaggaggaatgaagtgattcggattccggttattgaggccaatgttagagttcatgactctaatggtatagaaatagaatctctcttcttcctcaggctgagaaatatgtagacttaagaaattactacgtgaaggcatatctaggacaaactccacccaaggcacctaagtactggcttgcatttacagtttctgtaccgccacttggttttagcacatacactgtctcaactgccaaaaggacagggtccacaagatcatcagtagatatatataagagtagtgaaaagtctaaatttgatgttggtcaaggaaatttgaagcttacattttctatggatcaagagaagtgtaccaattatgttaatataagaaacctggtcgaggaacaggttgaactaagttacctatactattctggatacaatggaactaatcaaaaagatccacagaattctggggcctatatcttccgtccaaatggcacacatcccataaaccatgaaaaaaaggttccattgactgttttgcatggacctgtgctagatgaagtgcaccaacaaatcaatccatggatatatcagattaccagactatacaaaggaaaggagcatgttgaagtggagtttattgttggccctataccaattgaagatggaattggcaaagaagttgccactcggatttcaactactatggaaaccaacaacatgttttacacggattctaatggacgtgattttatcaaaaggatacgagactacagaacagactgggacctagaagtgaaccaacctgctgctggaaattattaccctattaatcttgggatatacacagaggataataaaacagaattctcagttttggtggatagagctattggaggatccagcttacaagatggacaaatagagctgatggttcacaggagattactacttgatgattcaagaggtgttgatgaggctctaaatgaaacagattgtgtcggtgatgattgcaggggtctaactgtaaattttactacagaatagaccccttgggtgagggcgctaagtggcgtcgtacttttggccaggaaatatattctccacttctgttagcctttgctgaaaaggatgataaagatgactggatgaattcccgtgtattaacattttcaggaattgattcttcttatgcattacctgataatattgctattataacattacaggaacttgatgatgggacagttctgcttcggttagcacatctatatgagattgaagaagacaaagatctctctgtaattgcaactgtggagctgaaaaagctcttgcctgggaggaagatcaaggaggtgaaggagatgagtttatctgccaatcaagaaaggacagagatggagaagaaaagacttgcttggaaagtagaaggctcttctggaagtaagcaagtttcaaggggagggccagttgatccaaaagagctaaacgtggagcttgctcctatggaaattcgcacttttatccttgactttgatgatgtgtctaaccaactttttgatgcattgtagaacaaaatcatttcttctagtccttgcttctgaacaagcatattggtatatgacaagttcagctatatgataacctctcataaattacgtttcaaatagtagaatgttttgcttaatatt

SEQ ID NO: 7310 - DNA, 1539 bp, Glycine max
  Clone ID: 700650127_FLI
ctctaaaaaaaaataattagtaataacatcatcatggcagcagccactctctccgtccggcccgaccgtctctcgcccggttcggtgtttcccagaccaccggttcagcctccgctgcgaaaaccaatcgcggcgcccgagccgtggcgcgccgcggcgccgcggatacgcatcaggacggtggcgccggtccaggcgagctcgcgcgccgatgactccgcgccgttcgagatgtcggtggagaacgcgctgaagctgctgggcgtgtcggagggcgcttccttcgacgacatactccgcgccaaaaacgcaatcgtcgccaattgcaaagatgaccaagatgccattgctcaggttgaggctgcatacgacatgttgcttatgcagagcctaactcagcgtcgggcagggaaagtagtgaacagtagtgttcgttatgctgatgtcaaacgtgtgaagtcccctgctgggggatcaatgcctcaatggttgaagaattcacctgtatctattgagtcaccttccactagtgatttgggtttacaagctggagtgtatggtgcattgatgggtttaacttatcttaatggggcttctgcacccgccgcaggttatgctggggctgatgttcctggactcctcttggctggtagctttggagcttccctgtacttcatgaccaaaaagaatgttaagttagacccagactcccaatattaaaagtttttggttatgggtttatagaaaagacttgtaattctaatgctgctgatttggatactactgctcgtgtctctgggatgagggcttaacttatctaacatgaagatgatgtctatgtaaatggctgtctggaaggaataagaagtatcaaataaagtatggcactgcactgcagttgaaaaagttgacctacttaacaaatggaacttctagctattggtggttgagatctttttcacttggaaggccactgtcataaccataggagggctcgtagctggtgccgttgtagggtcagctgtagagaactggttgcaggtagatatagtcccattcctgggcatacactcccctgctgctgttgttagtgaaatcattattatatctcaattcttggtttctctgtacctaaggtaaacaggaaaacatggggatcttacattaaattgtgaaacttgtaattattcatttgcatgcagcatgacctaaggtagtcagggaaggctgctgttataacttataaccataggactcgtagctggccccctgtggttgtgtcagctggagagaactgttataccatttctgggcatacactctcctgcttctgttgttagtttaaatcataattctctctcatttgttggttttctctgtacctaaggtaggcaggaaaatatggtgatcttatatgaaaatgtgaaacttgtaactattcatgtgcatgaagcatgatcatacccaagcttttttttaggatgtgaaatcattgcatattgtacaaaactttgaatagaatgtagttgttcaatgggc

SEQ ID NO: 7311 - DNA, 1026 bp, Glycine max
  Clone ID: 700650175_FLI
cctaatctccccccttcacccttcgtacaccgcgtcgcatctacttccatcttctctcagatccaatctccgattcttgcttcactatcacaagcaaacatgtctgcggctttggatatgaccctcgaagatataattaagaacaacaagaaatcttccctcgccaacaccaggggccgaggccgagcctcgggacccggacccgctcgccgcctccccaaccgtgccgccaatcgcgccgcaccgtatgccgctgccaaggcgccggagacagcttggaaacacgatatgtacgcgaaccagccagtggccgcggcgtatccaggtggtcgagcgtcttccatcgaaacagggactaagctctacatttccaatttggattatggcgtttccaatgatgatattaaggagttgtttcttgaagttggcgacgtgaaacggcatactgttcattatgacaggagtgggagatccaagggtacggcagaagtagtcttctcgcgccgagctgatgctgtagctgcagtgaagaggtacaacaatgttcagctggatgggaaaccaatgaaggtagagattgtggggacgaacatcgctacacatgctgcaccacccgctgtgaatggaacttttggaaacccaactggagttcctagaagtggacaagggagaagtgggtcattaggaaggccacgtggtgggagtagaggtcgtggcagcattcaacggggccggggacgtggaagaggaggtcgtgatgaaaaggtatctgctgaagatcttgatgctgatttggagaagtatcatgctgaggctatgcaattaaactgaaggaaacaacgatgttctgttttattgctattacatttgcggttgttagggccatgttgatggaacaccgccgaattatgtatctttatcacagtcgtgcttttcggaaaggaaaaggataacttagagtgaaaacttttacagttgatatatgtagtttgggattctgttatgaaatatttgttttcgttgggt

SEQ ID NO: 7312 - DNA, 1033 bp, Glycine max
  Clone ID: 700650345_FLI
tgccacaaaagaatttctacagtctctgcatagtgcttgtgatgaagctggggcacttctcgtttttgatgaggttcaatgtggtttaggtagatcagggtttctttgggcccatgaggcatttggtgtcttcccggatatgatgacccttgcaaagcctcttgctggaggcctacctattggagcagtcctagtgactgagagagttgcttcttctataaattatggtgaccatggaagcacttttgctggaaaccctcttgtttgtagtgctgcccttgctgtttttgataaaatatcaaaacctgatttcctgtcgtctgtatctaagaaaggcctctacttcaaagaattactcaagcagaagttaggaggaaaccaacatgtgaaagaaattcgtggtgttgggctaatcataggaatagatttagatgtacctgcctcaccctttgtcgatgcatgccgaaattctggccttttagtattaactgctggaaaaggaaatgttgtcaggcttgtcccaccattgatcataacagagaaagagctcgagctagcggccgacattttgtgcaaaactttaccagttcttgataactaggagtgtaagagaaagaggtttggctttacaagcaaaatagaaaacttaattggttgtgtattgttgagtagcttttagatgccaaaacttcatggtttccctttcatttaagatgtctcgatggtaagaatatttcagaaatattgtagcatttctttgattatgcgtcccggatcagatggtttacatggtctattctctttctgcaagagatttatttgggtattttttgtcatataaagtgtaataataactacaaggtcttctgagttcccctcataaccgtagataaactatcttcttttggtagatggctgttgttcagattcttctttctccgttggaaaaacttctaaaaaagtctacctagttttgtggtacattgacttgttttgaattttcttatttgaaatgaacttgtgttgtgttgct

SEQ ID NO: 7313 - DNA, 1373 bp, Glycine max
  Clone ID: 700650714_FLI
gtttgttttgtgctttagataaaagttctgccaaatcaagaggggttttaagatcatagtgtgtgttttgcaacaatggctaagttctttgctgctatgatcttggcactctttgccatttccatacttcaaacagtggttagtcttagtcttcaatgtcggaaaatcagacacatttacacacaccacaatgtttttgtttttggtgccactaatgcatggttgaaatttgaagggttcttagttcttacatttgaaaggcttgatttttcaggtaatggctgctaatgaacaaggaggccacttgtatgacaacaaggtatatatatccttacctattcttcactctcttgtctctctttctttgtggggtgtgaagaataaaaaatggggtcttggggttttgatttctaagggttgaactagtgctgatttatgctgctttactgtgtttttcttcttcagagcaaatatggaagtggaagtgtcaagagttaccgtaagtaaagttcttgtcttcatcttctcattttatggtacatctagcaatgtagaacattatgatatttctccaaaatggaagaaggaaattttttaagacccttcccaaaagctcgcagagcagatctagcattgttattttgttattatttttttagttaagacaaattatactcccattatttgtactactcttgtcaaagttctaaactaacgaacactatttgtactcatttttttataaccgtgacccccgtacactcgtcctcacagtcaattttagtttgactgtggtcaattttcccccccgtaaaagctgcttcttttggagtgttttgactgatgtgtgaaaagaggcgagtcaaatggctattgattattgtattgaccataatgcttgttttgtttattatcaatggtcatggtgcgtctcttattctctttttggaatctgatatgaccagaatgcccatcacaatgctcgaggagatgtagccagacccaataccacaagccctgcatgtttttctgtcagaagtgctgcaggacatgcctgtgtgtgcccccggggtattatggtaataaagctgtgtgcccttgctacaacaactggaagaccaaggaaggaggacccaagtgcccttgagcttcaacttgttcaacttcaattgtcgctttcctacatttttattgcttccttccttgtgccaatttaatgcactagctaccaaatgctactagtcccttttggtggcattctatgatattatgtttttatgtattttggtgtatcactccttgggccttgtttgcctttaatgagagtggcttattaatatcaatatatcacctaccaaacttattgctagcat

SEQ ID NO: 7314 - DNA, 1031 bp, Glycine max
  Clone ID: 700650723_FLI
cggaggagtttttcgttggatagttccatagggaactttaacattgaagatggattgcctaagcttcctccttcgaaaaatcaaatgggtcagcactcacctagcaattcgatggacggcaaaatgtcagaaacctccacggagtttggaaatggcgaatttagtgcagaggaggtaaagaaaataatggaaagtgataaactagctgaaattgcttcgactgatcccaaacgtgcaaaaaggattttggctaatcgtcaatcagctgctcgttcaaaggagaggaagatgcgatacattgctgaattggaacacaaagtgcaaactcttcagacagaaacaaccacattgtctactcagtttaccaaattacagagggataactctgaccttaaaagtgagaacaacgagtgcaaattaaggcttcaagccatggaacaacagtctctattgaaagatgctctgaacgagactttggatgctgaagtccggcgtttgaggcgtgctgttgcagacttggcggtgaatccctcacaagttgcatggctcgacagcttgctattaaccaaacaaatgttcgagttacagcatcagcagcccagccaacagagacattttctactgcaaaatcaccatactcaggaagagatagagtctcgatcacagcagattcaaggcaatgaattgcatccccaggcacagattcagtcacagcagattcaacgcaatgaattgcatccccagccttaaattgcagagaaatatgttgcctattaatggtgccaaatagtggaagcaaaatacttttggacgtggagctggtgaggtataagtataatctcaatcgtacataagcagtgatctagcattagtttgcttgaagtttcataagatcggttcatcatctttatttaatttattattttgactgttttacctgcatacaaactcggactatcctattcatgtagtaaaccttattgtcatgaatacaacccacctttctctattgagaggggtcatgttgttgc

SEQ ID NO: 7315 - DNA, 2207 bp, Glycine max
  Clone ID: 700650775_FLI
catcaacaaccactctctctcccctctctgcagcaaaaccaattctccggcgacatctccggtcaggttccggcagcctctccggcgactcggcatggcaactcaatgaatgcggaatcaccgccggggctcctcatgtcggtttcctgcctctccgactacgacctcctctgcggcgaggactcctccggaatcctctccggagagtcgccggagtgctccttctccgacatcgactcctcacctcctccgccgtcgccgacgacagaggattgttattcgatcgcgagcttcatcgagcacgagcgcaacttcgttccgggattcgagtacctgtcgcggttccaatctcgctccctggacgccaacgccagagaagaatcagttggatggattctcaaggtacacgcgtactatggctttcagcctttgacggcgtacctcgccgtcaactatatggatcggtttttggattctcgccggttgccggaaacaaatgggtggcctctgcaacttgtatctgttgcatgcttgtctttggcagcaaagatggaagaacctcttgttccatctctcttggaccttcagatagaaggtgccaagtacatatttgagccgagaacaattcgtaggatggagctacttgttctcggtgtcttagattggaggctaagatcagtaacaccactttgcttcctcgctttctttgcgtgcaaagtagattcaactggaacttttatccggttccttatttccagggcaacagaaatcatcgtatctaatatccaagaggctagctttcttgcttactggccttcatgcattgctgctgcagccatactcactgcagctaatgaaattcctaattggtctgtggttaagcccgaaaatgctgagtcatggtgcgagggactaagaaaagaaaaagtaatagggtgctaccagttgatgcaagagcttgtgattaacaataaccaacggaaactccctactaaagtgttgccgcagctgcgagtaacaactcggacccgaatgaggtcaagtactgtatcatcattctcatcatcctcttcaacctccttctccttgtcttgtaagaggaggaaattaaataaccgtttgtgggtagatgacaaaggaaactccgagtgaagagaaaacgaacaacaataataaaagaagggaagaaaaagagagggaataaggtgggccaagttgtctagaaacctcaacattttttagagggtttttgcaattaaaaaatgacttgagtgagggtgtagattataatagtatatatatgatatatctctatcgtatatactaagagagtttgatgggtttggagtaatttttatttttatgttggtgacttattaatattgagtttgcagaattcacctagggaagagggattttgcgacatgttaccgtgggagaggaaatgagagaagaaagaagtgaaacactgaaacaggggtagaagaatttaatgtgatttgttcttgtaacctgtgagtgtggaagaaagaagtgagttgcgggctggaattcaaagtttgcattaattattggtgaaggagatgaaagatggtgggggcaacgctgtagagattgagaagaagaaaaagtagagagaaggtatgaaaaactctggtgattattgaaagttgaaacttagaagtttgaagtgttcaatgttcatatcatggtattcataagtcaagcaaagcttcatttcttggccagcatcactgcttcttcatcatccacgttactactactttgatgggaccctcaacagtaaagaacaattgaagggcaataagttgaagtttggctacaaatcgtggactttttttgttgggtattggcacgtgtgcagtcggttctggtgcgtgccaatgaagtgtgtacgtgtgatttttctttttcttggtttttctttgcgggagctgtttatatattttttcctatttttggccatgagttttggcctaactatacaggactccaatggctggtgtccgcgcgtgtgatggaaacacgtgtatatataggttttaatttaaaaaccttgaatttttttatttgttttcaagagaggagaaccctctttcacataggggtaaaaggtctttggggcctttttcctgtgtgctgtgtattggattgattaatatataatgacaactattaatttctta

SEQ ID NO: 7316 - DNA, 3033 bp, Glycine max
  Clone ID: 700650840_FLI
aaaatgcagagattgaaaaaattgttcaaaccataataaaaaaattgggttccaaattttcaagtcttccgaaagataatctagttgggatggaatctcgtgttgaagaattagtaaagtgtttgcgtttggggtctgttaatgatgttcgagttgttggaattagtggcatgagtggaataggaaagactgagcttgctcgtgctttgtatgaaagaatctctgatcaatttgatgttcattgtcttgttgatgatgtaagcaaaatttatcaagattctggtagattaggtgtacaaaaacagttactttctcagtgtctaaatgaaaaaaatctagagatttatgatgtttcccaaggaacatgtttggcatggaagaggctacaaaatgcaaaggcacttgtagtttttgatgaagttgttaatgaaagacaactacagatgtttacagggaacagagactctctattacgcgaatgcctaggtggagggagcagaatcatcataatatctagggatgaacatatattgaggacacatggggtagatgatgtttaccaagtcccattgttggatagagaagaagctgttcagttgttttgcaaaaatgctttcaaagataattttattatgagtggttatgcagagtttgcagatgttatactgtcacaagctcaaggcaatcccttagcaattaaggcggtgggctcatctttgtttggcttaaatgccccgcagtggagaagtgcagtggctaagctaagagaacaaaaaagtagagatattatggatgtgctgcgaattagttttgatgagttggatgacacaaacaaggaaatatttctagatattgcttgcttcttcaataatttttatgtgaaatctgtaatggaaattctagattttcgtggattttaccccgaacatggcctacaagttctccaagacagatcactcataatcaatgaatatgggatcattggaatgcatggcttgttgatagatttgggcaggtgcattgttcgagaaaaatcacctaaagagccaagcaattggagcagattgtggaagtaccaagatctctataaaatcatgtcaaataatatggcagcagagaaacttgaagccatcgctgttgattatgaatcagatgatgaggggtttcatgaaataagggtcgatgctttatcgaaaatgagtcaccttaagttgctcaaactttggggtgtgacttcttctggaagcctcaatcatctttctgatgaattaggatatattacttgggataaatatcctttcgtatgtttgcctaaaagttttcagccaaacaaactagttgagttgtgcctggaatacagcaacatcaaacatctatggaaagatagaaagcctctacacaatttgagacgtttggttctctctcattccaaaaatctaatcgagttgccagatttaggggaggctctaaatcttgagtggctagatctgaaaggatgcataaaactcaagaagattaatccatccatcggtcttctaagaaagctggcttatttgaatttgaaagactgcacaagtcttgttgagttaccacatttcaaagaggacctaaatcttcaacatctaactcttgaaggatgtacacatctcaagcatatcaatccatccgtcggtcttctaagaaagcttgaatatttgattttggaagactgtaaaagtctagtaagcttacccaacagcatattgtgcctcaattcacttaaatatttgagtctatatggctgttcaggactgtataatagcgggttattaaaagaacctagggatgcagagcttttgaagcagctgtgtataggtgaagcttctactgattccaaatcaatatcctccatagtgaaaaggtggtttatgtggtctccacgtttgtggtattccagagcacataacgactcagttggttgtctgttgccttccgcgccaactatcccaccatctatgattcaacttgatctaagttactgcaatttagttcaaatccccgatgctattggaaatttacattgcttagaaatcctaaatttagaaggaaacagttttgcagcactgcctgacctcaaggggctttccaaactgcgttatttaaaattagaccattgcaagcacttgaaagattttcctaagctccctgcacgaactgatttttcatacactttcctcttaccaatactgggaagagcagtagaacttccagtttggggatttagtgtgcctaaagcaccaaatgtagaacttccaagagcattgggattaagtatgttcaattgcccagaattagttgagagggaaggctgcagtagcatggttttatcatggatgatacaaattgttcaggcgcactaccaaagcaattttgcgtggtggcctataggaatgcctggattttccaatccatacatttgtagtgttattccaggaagtgaaatagaagggtggttcaccactcagcatgtgagcaaggacaacttaataaccatagacccacctccccttatgcagcatgacaaatgcattggcgttgcttattgtgtagtattcgcagctcattcaacagatttggagatggttcctccagaaacagaacgaggttatcctgttatgggcatcgtttggattccggtggatgttcatgaagatgtagtcacagacaaatcagatcacctgtgcttattctattcgcctacgtatataggaattggagactggaaattaaaagtgaaaataatggacaggaaaggttttcctgtggaggtgaagaaatacgggtatcgtagggtacatgaagaggatctagatctagaaccatcactcaacacagcaggaatccggaagaggaaaaggggaactgatgaataaaatgattgttttggttgttagagaataatacaatttttttatcctttttatgtaactttaacgaagccagtgaattagtatgcttttactataacattgtcgaagacggattagacctctg

SEQ ID NO: 7317 - DNA, 1040 bp, Glycine max
  Clone ID: 700650943_FLI
caaacattaagtactgttccttaacaaaaaaaaaaaacagaatggctgagctacctagctcagaagcatcgtcatcatccgcttccagtcggaagcactcgtcttcggaggcccatttacccgccccggatcagaaaaggcccaagcaggcccgagatagcagcagcaagcaccccgtctacagaggggtccgaatgcgggcctggggaaagtgggtatccgaaatacgcgagcccagaaagaagaaccggatctggctcggaacctttgccaccgccgagatggccgcacgtgcgcacgacgtggcggcgctcgccatcaaaggcaactccgccattctcaacttcccagaactcgcggcctcccttccccgacccgactccaactcgccaagagacgttcaggccgccgccgccaaagccgccgccatggaggttaacgatgttccgacgacgccttcgtcttcgtcgtcgtcggcgtctctgtcgctatcgcaatcgtcatcttggtcttcattggcggtttcttcttcctccggcgatggcccgtcgacgccggaggagctgggggagatagtggagctgccgagtctggggacgagtttcgaaatacccgacccgagtggggagttggtgtatttggacccgtggccgtattctcaggcgtggagtcacggcatttatgatgagagtgaggggtattttattggggactctgagactgagagcatgatactttgtggcttcgagggttcattgtggcagcattaatgcttgtgctttccttttttttctttttttgtcttattgactttccaatgtgtgagagccctttcccaatttttcacttcaagggctgctaaatacattactactactactactactactactgttgtttccccaccttaggtttctcaatgtcatcctccttctccttccgcgtgttgcacaacacgacaggtatgcctgccatcctcctcaatattcaatgtcttgtttcatgtaatcaatgtaatgcaaatgatttatgctcaattc

SEQ ID NO: 7318 - DNA, 1058 bp, Glycine max
  Clone ID: 700651179_FLI
aagggttttacggacaatcaacaccacaaagaaaaacaatgaatcccggtttcaacatagggacagacttcatcgcaaataaccgaatcccggccattgattttgcaacagtccactgctaccccgaccaatgggtatcgagctcaaatattcagtaccagctttcattcttgaacaactggttgagtgcccacttcatagacgcgcaataccatataaagaaaccaatactggtggcagaatttgggaaatcatttaagggttcgagttcctacgagagggatgaggtgttcaattcagtgtattacaaaatatacgcttctgcaaagagaggaggtgcagcgagtggagcactgttctggcagcttctaacggagggcatggagtctttccaagacggttacggaatcattcttgggcagagttcctctacggccaatctcattgctcgccagtcccgcaagctgtacctgattcggaagatcttcgcaagggtcgcgaacatgcggcgatggcaaagggccagagccagaggattttctggctccggaggtggaaacggaggcagatacattgacaactgagaacatgtttggtttgcagtttcaggattttatctgttaaatttacattgaagcgcgcgtcacagtatttttaactgaaaagcttgtttgtgttgggaagacagacatctttcatatacgagtttctctaccgagtgtttggaaggcgatggaggagggcccaccggaaccaacggaataccttggagatgaatcataatgttttcttataactacgttgacatatgttttcattgtttcagcttctctctcttttttttgtttatacagagcaaagcagctggtaagtttttccatggcgtctacttgtaggttactcaacctcactttagtttttaactttggaaagaatgttatttgtgtttagtacttgatatctgtagaaaaagaatgcaaaacaaagcgcaaatgtaagtttgaatcaaaataagttataaactcaagtttatactaacatgatttatgtttagattt

SEQ ID NO: 7319 - DNA, 677 bp, Glycine max
  Clone ID: 700651314_FLI
taaggccagcagtgtttaacatctctgtgaatgatcggtggggagcatccatgatgcagaaatgttaaggccagcagtgtttatttggattataacttggagccaagattgtcagattttggactggctaagattttcgggagtggcttggatgaggagattgcactttgttcacctggttatgctccaccagagttttctcaaccagaattcgatgcctcagttccaaaatccgatgtgtactgttttggggttgttctctttgagctactaaccgggaagaagccggttggagatgattatcctgatgagaaagaagcctctttggttagttgggtcagaggactagtgagaaagaacaaagcttcaagggctatcgatccaaaaattcgcgatactggagcagaagtgcagatggaggaggcccttaaaattggttatctttgcactgctgaccttccttccaagcgaccgagcatgcagcaaatagttggacttcttaaagatattaaaccttctgctaattagcatgatgataacgaaatgttgttgtttcttttatatttatcacctttttttcttgccactggatgaggctcccatgcaaccatgaagcaaatgtaaagcagttgaattactaaaagtctgtttttcatgttttatcatgatgtcttatc

SEQ ID NO: 7320 - DNA, 1092 bp, Glycine max
  Clone ID: 700651386_FLI
cactcacctattcactatttctatcatattatagttatagttatagttataacatagcaatagcaaattatatatatacatcgaccacccagatttaatttcactccaacccatcatgcatcaccgtagattcagcaaattaatacatgtggctgacccagatgagcctgagtccgggcccgagcccgcctcagaagctgggcctgcttctccttcttccggtgaagacacaaaaactgaagcaccgtcacccaagaaaaggtttttatttattttttctattttattttgtttttatgtgaattgggaagttaaacgttgaaggggttcatgtatgttcatgaaaccatacgtaggagggagatgaagaagagggtggtgacgataccgatcggtgacgtggatggatctaagagcaaaggagaaaattatccaccgtcggattcatgggcctggaggaagtacggccaaaagcccatcaaaggctccccttacccaaggggatattaccgatgcagcagttcaaaggggtgtcccgcaaggaagcaagttgagcgaagccgtgtggaccccacaaagctaatagtcacctacgcatatgaacacaaccactccctccctctcccaaaatcaaattcctccgcggcttccgccgctgtaagcgacggcgccacctcctcctcaccggcagattccgccgccaggtacccgccggaggaggagatgaaggtgttcgcgacggactcagacctcgaactcgccggcgacgcggcggttctgctcagccaccaccaccaccaccacttcgggtggttcgatgacgtgacgtccaccggcgtcctcgaaagcccgatctgcggcgaggtggatgacgtggcggtgccgatgagggaggaggacgagtcgctcttcgccgatctcggcgagttgccggagtgctcggcggttttccggcggatgaatattccggcgaccagcgcgatccggtgcggcggcatcacaggataacgcgggtggacccgtttttcttttgtgtcgcgtcattgcgtagtgatttatattatattcgccgcctgaaagtcgtgcgctatt

SEQ ID NO: 7321 - DNA, 2153 bp, Glycine max
  Clone ID: 700651428_FLI
atcaaagatctgcaactctctctctctctctctctctctctctcatgatttttccctcggcgttgccatgacggaaccaacagagccatccacgtcatcttcattggcgagggacccaaccaccgtggttcacccaaggcgcgagcccttcgagcacggcctcttgccaatcccgcgcctcatcttctccgacccggcgcaaaccctaattccgttgaagcagaagcttctcgagttatcctccaaccagcgagtcgacttggcggcaatctccgagtcactgcagatctccattgagcacgccaggctcgtcctcgataccctcgcctcgattctgcactccgactccgaacctctcgtcgtcgccaatctcgtcgaaatcgattccgtcggcgtcgacgtccatgatttggttttgttcctctacattcaatcctacaagaggctcctcccgcgcacgcataaggactccgccgccgtcaccgacgtctggccttccacctccgccttcgatggctacttgtccgctctctcgccgcttcagctcgtacgcagcaacagtcggcggtttatgccgtcccaggctgatgaagaggcgcatcagttgtcgtatctgcaaaagcacttggctaacattgtgtctcttctagcagagcctgtggagggagaaggcgatgagtccctggttttaaccatggatagatttgagcatcttgggttcctaattcagtttggtgataagggatcagaaggaaattcgtttagtcaatgttctcctttttttgcaaactcagaccctgacatgcctgctgttcctgttcctgccgcacaagttcatgattggcttctgcaaaatgtagcggctgctttggaatatatttctgaacggacttcttcaaaggaaaatggcccagctagtgcctctgatcaggatgttgccatgactgatgcaagcactgtctcagttaaggtctcaacaggtactagaggggcaagtttcattgaagggatctctaaatcgtcatatgcgaagcatgcatctgacattaaaggttcctctgttaaggttctaaattgccacgaatctgccatctacatcttagcaccattgagatatgccactgtctatggatgctcagatgcaacaatagttctaggagcagttggcaaggctgtgagagtagaacactgtgaacgagttcatgtaattgtagcagcaaaacgtatttgtattgctaattgccgtgaatgtgttttctttttgggggtgaatcagcaaccacttattgttggtgataaccataagctgcaggtggctccctataatacattttatgcccaattggaggagcatatgagtgaagttggaattgtgcccacagtgaaccgatggaatgaacctctagcattaggcatggttgatccccatgattcattatctcatccagctggtgtctctgatgttcaagctgagtctgctacactggtggaccctgatcagttcactaattttgtgattccaagctggcttgtagaagagtccactgggtctacaaaagacaatccattcacgttaccagatgcgtatatggcatctcagcataaaaatcacaaaaatttagaggagataaggcaactcttacgagaagcatctttagaagaaagtcgcaaacgagaattgtcatctgcgctccatgtctacttcaaggactggttatatgcttcgggaaacattcgtcagctttactgtctacaaggtgattgatctttgtcaggcaatgcaatggctcagtgaatgatggtacaggaacgaggtttctggcttcctttttgaacttcctcttcaattcctctcgacaattctattggccgcataggtagctgagatcattatcagatgacgtgaattagagtgcccacatatttatgccgtgacatcaccggtgcacagaatccaatgaaaaatacagttgctaatctgattgtaatatttttttgtgaaaataattactgtaatgtagtagtattttgttagcctaaattaatggtctttgtgaaaaattccagctgccagcatctggtgtactgcttttcatgtcttccaacttcgagttgttccatttaattaaacttcccgagtgtctgttgggtcc

SEQ ID NO: 7322 - DNA, 925 bp, Glycine max
  Clone ID: 700651436_FLI
ccgaaaggttggagcaccaccagaactggcttcacttcttgaagaaatagcccgtgaaagctacccaacggatgctcttcgtgagataggagatgatcctgaacttgacgaattcatggagtcatactgcgaagttcttcatagatacaagcaggagttgtcgaagccattcaacgaagcgaccttgtttttgtgcagtatcgaatcacaactcagcaatctttgcaagggaacactgacaatgccattggataacaaccactcagatgaggccgctggaacatcagaggatgaattgagttgggagaaggtggaagcagttgaaggtcacgaatcttctggcccacgtccaggtgatcaagagcttaaagaaatgctccttcgtaagtatggtggttatcttagcagcttgaaaaaggaatttcttaagaaaaggaaaaagggtaagctaccaaaggatgcaaggatggtactcatggactggtggaacacccactatcggtggccttatcctacggaggaggagaaagtgcagctatcagaaatgactggacttgatcaaaagcagatcaataattggttcatcaatcaaagaaaacggcattggaaaccatcagaggacatgcgatttgccattatggatggtgtaagtggcagtggctttggaggacctatctaatatatttctggagatggaccgtgttgattcctgctacttgtaccttcctgctcgtgtgatgtgtgtatacgttcttttccacgagatatgtattaattttttgaacctgcatttgtatgctaagtaaataggtccttcagcttatatatatatgcaagagtgtaaaaaacctgtagctaatatacgcgacagtgataatcgatcaatgctactgaatcattatttcatgacaatttacattatagt

SEQ ID NO: 7323 - DNA, 990 bp, Glycine max
  Clone ID: 700651467_FLI
atttagccatggagtcacactgcgcggtttgtaaggaagctttcgaattaggaactgcagttagagaaatgccatgcaagcacatatatcatcctgaatgcatattaccgtggctcgcacttcacaactcttgccccgtttgtcgccacgagttacccgctgataccccgaatccaaatcaaaatcaaaatccgtctcaaaatgttgccttgaacgaggaggagaatgtggggttgacgatttggaggttgcctggtggagggtttgcggtgggtagattctccggtgggagaagaggtgctgagagagagcttcctgtggtttacactgaaatggatggtgggtttaacaatggggggggtgagccgaggaggatttcttggtccagagggaatagagggagggagagtggagggttgactaggtttttccgcaatctgtttggttgcttcagaggaagtagtactcagcgttctgcttctagtagagagtctatgagggcgagttcctctcgttctagtactatggatccttcgttgcggtctcggaggacttggtctatggatgtaaacagtgggatgagagcgtggtagtagtagtaataggatcgatgactgatgagggtaaaaggctaaaaatctcaactttgtttctgggttcctctgtgtaccgtgtcattgtcaaagtgtacataatgggattgatcgatcgagagtcgtcgaggatgcaatgtcttgtgattgattctcacattttcaggatgttggatggggaaaccgttgtgttagcaataggggattggggcagggagtggcatcaacaatgggagaaagtgaaaccaatggggaggaatgaggttgaaggagggactcgggccgtgattgtgaagtattatctttggaatttttggggggaggggggacatgatgtgatgatgatcatgaacttcattttactttgataatgaactgaagcaccttcgtattgttt

SEQ ID NO: 7324 - DNA, 1665 bp, Glycine max
  Clone ID: 700651482_FLI
gaaggacagtgagagtggaatgcttcatgaaagaaagcagccccaatatctgggtgaggcctatcagtggactcacaatggtggttgaccttgaactcatgaagatcgttcagtatcacgacggtggcattataccagtaccaactgccgacaacactgaataccgcttttcacatcagaacccaccattcggtccaagacaacatagtctagcaacccatcaaccacagggtccaggcttccaaatcaacggacacagtattagttgggccaactggaagttccatattggatttgatccacgtgccggaattgtaatatcactggcatccatttatgatttggagaagcacaaatctcgtagagtgttatacaaaggttacatttctgagctgtttgtgccataccaagacccaacagatgatttttactataagactttctttgatgctggagagtttgggtttggtctctccacggtctcattggtgcccaaccgtgattgcccatcgaatgctcagttcctagatacatatgttcacgctgctgatggtactccgttactcatcaagaacgcaatctgtgtctttgaacaatatggcagcatcatgtggcgtcacaccgaaacaggcattcccaatgaatcgttcgaagaaacgagaacggaagtcaacttagtggtaagaactgttgttaccgtgggcaactacgataacatcattgattgggagtttaaaacaagtggctcaatcaaaccctcgattgctctctcgggtatattggaaattaagggagtggatattaagcacaagagtgagatcaagagcgatcaacatggtatcttggtgtcggcaaacagcattggtgtttaccacgaccacttctacatttaccatcttgaccttgacattgatggtgttgccaactcttttgagaagacaagtttgaagactgtaagagtgacagatggaagttcgaagaggaaaagctattggacaactgaggttgaaactgccaagactgaaaatgatgcaaagataatacttgggttgagccctggtgagctttcagtggtgaatcctaacaagaaaacctctgttggaaatgatgtgggataccgtttgattccagcaatcccagctcatcctcttctcacagatgacgattatccacaaatacgtggcgcttttaccaatttcaatgtgtgggtcactccatacaataggactgagaagtgggctggtggactctacgttgatcacagccatggagatgatactttagccgtttggaccaaaaagaatagagacattaacaacaaggacattgtgctgtggcacgttgtgggaattcatcatgttccagcacaggaagacttccccataatgccattattgagcactgcattcgagctcaggccaaccaatttcttcgagaggaatccggttcttaaaacactttctcccccggatgtccaatggcctggttgccccaagtaaaactagctagccagccatttccattatattagtgtgcttcgagtgctacaactagatgtgttccttggataatgtgaaatgcgatctgcttattgcatgtgcaagaataatgatttgatatgtattgcttattattatatcaatgagaagtttacttgaacttgac

SEQ ID NO: 7325 - DNA, 1269 bp, Glycine max
  Clone ID: 700651545_FLI
caaatccccattagttttcaaaataaagactttgcgtggcacccacaagaaggccacacagtcaccaccaccaccacccatttctcccggtgcgcgactcactttatttttattcatccttccttcctaacagatccgatccccgccacagcggcggaatgatgcccaaaacgattacttctctgtcgtttcgcaggggattgggaagttgtcttttgttgctgcctctgcggctaatgttgttcaggttggcacgaaggagttcacttccaaggtcaaggaaggtggttacgatcataaggtgaatgaaactgtcaatgttgtcactcagaagacatcagagattggacagaggacttggggcataatgaaaggagtcatggctatggcttcccagaagattgaggagtacactaaggatgatccaaactggaagaatgataactggcaacgaaatgagaatgatacaaatggttattatcaggattttaatcgagagaaaaaaggatggaattcttctactggaagagaacaatcttcatcaggggaatataaaactgaaagctctagctcttgggatgattgggaccacaaagatagcaggaaggaagaaccagctaaaggatcaactcattcatcaggtgggcagtttagtacctacaactcaagctcttgggatgattgggaacacaaagattctaggaaggaagaacctgctaaaggatcagctccccataataatgatgattgggctggctgggataatgccaaagatgatggattcgataatatttatgaaggtgctaataagaaaggtgttggtcataaggggaaatctgatggcacttggacagaggaaggctttctctaagatttcaaggtcataatttgaaacaaattattacttgttatacttcttggaccccaggggtgattggacttcattaccagtttcgtgatttgttcctcaagtgacaaaaaaatactgtagtttacgcactgatggcatgcaggccaagcaggggcgccaccaaccaaacatgatactcgattttcagctataacttttaatcccattgttcctttttaaacccagacccattcttctcctttccatcgtttcttcaatattcccttctcttttgtaatttttgggaatgttcgttggagagatagtatccaaaaatgggctaatctcccaaatatcaattcttaagagcattattgcctgcgtagtgcgatgaaacattaatggcagggaaatttcag

SEQ ID NO: 7326 - DNA, 1734 bp, Glycine max
  Clone ID: 700651682_FLI
gtgaggccattttggtcatggtgtgatcattttctctgctcttattcttaatgaggcttatatccaagtttggccggttgcatattgcacaaggcgtctataaaagtaacatcactgaaatcattgtcaaattgacactgcttttctctaaaaggacttcaaagttctgttagatatacagtgttattctgctttcgatcgctctattattcatttgctaagaccttagagaagacagaggatgggtaccctgcttccagatgaaaaatcagagaatccaaatgctttggaacaacttcaacaccaaaaagatgtggatgcaggcgctctctttgtcctcaaatccaaaggttcttggatgcattgtgggtaccacttgacaacttcgatcgtggcaccacctcttctaagtcttccttatgcattcaccttccttggatggacggctgggatcttaagcttagtgattggagctttggtcactttctattcatacaatttaatatctagggttcttgaacaccacgctcagatgggtatgcgtcagctacgctttagagacatggctcgcgatattttaggtccagggtggggtcgttattttgtcggcccaattcaattcgcagtctgttatggtgctgtagtagcttgtactctcttgggaggacaatgcatgaaggcaatttacttgctgtcaaatccaaacgggaccatgaagctttacgagtttgtaattatatttggatgcttcatgctgattttggctcaaatcccatctttccactctttgaggcacattaatctagtgtccttggttctgtgcttagcctatagtgccggtgctactattggttccatttacattggagactcatcaaaaggaccagaaaaggattattctttgaaaggtgattcagtgaatcgcttatttggaatcttcaatgcaattgctatcattgccacgacttatggaaatggaatcattccagaaattcaggcaacattagcaccacccgtaaaagggaagatgctcaagggactatgtgtttgttatcttgttcttatagttaccttctttagtgtatctgtatccggttattgggcatttggtaatgaatcagaaggcctcatcttaagcaacttcgtggacaatgggaagcctctggtgcccaagtggttcatttacatgaccaacattttcactataacacaattatctgcggttggtgtggtttatttgcaaccaacaaatgaagtgctagagcaaacatttggagacccaaaaagccccgagttctccaaacgcaatgtaatccctagagtgatatctcggtcattagctattgctatttcaaccactatagcagccatgcttccattttttggagacataaactctcttataggagcttttggctttatcccacttgacttcatcttgccaatggttttctacaatttgacatttaagccatctaagcgaagccctgttttctggttgaatgtgataattgttgtggctttctccgcattgggagctatagcagcagttgcagcagttaggcagatagttcttgatgctaaaaattaccaattatttgctaatgtatgatcatgttggaccatccaatgaagttttgttgttctatgtatcatggttcatactctagtagtttaaaaccaatcattgagttatttcaattaatataattatataaagactattgcagaacg

SEQ ID NO: 7327 - DNA, 855 bp, Glycine max
  Clone ID: 700651711_FLI
gacgatcgtgaccgagacagagaccgagcacgcagcaagagatctcgctcgcgttcgcctgaccgtggccgctcccgccacgcgcgctctccctctcccagcgagcgctcccaccgccggcggcatcaccggacgccgtcccccgacccgccgcggaagcgccaccggagagactcggcggaggaggatcacaaggagacgaagaaagcggtgtcggacttcgtggacggcatcgtgaaggagcagcagcagaaggagaacggagacggaggagaaggagaagctgaggggagcgaggatgagttggagataatgaagatgtttgggattcccaccggatttgactccaccaaggggaaaccggttcccggtgctgacgtcagcggcgtcagagccgtcaccaagcgccagccgcgccagtacatgaaccgccgcggcggatttaatcgcccattgcctgctgagaggaatcgctagggttttctttttttcagacgagtaatttcctttggtggtagacggtggttaatcatgtggaatgttggatccagaaacccttggtgggacccaaaatgaaagctcgcgagcgttccaccagttacttgtgtcgttcatttaataccccgtgctaccttcagctcaatatatcctgcgtaattggtgttaggcgtgcttttatttttttatccatctactaattgtctagttacattcatagaatttgtcaaattttcatgcggtatgtacatttagctgcacgccttacgccttgggaattgggatgcacatgctttatgtaatcaagtgattctggatttcaatatcatgcatggccaatatccgtgcgagtttgtt

SEQ ID NO: 7328 - DNA, 788 bp, Glycine max
  Clone ID: 700651789_FLI
aattaaccaaagtggtcatcagcatgcaatagcatatgttgaaggagacaagtattatggagcaaaagccactataaatgtgtgggaacccaagattcagcagactaatgagttcagcttgtctcagctttggatattaggaggctcatttggtcaagatcttaacagcatcgaagctggctggcaggttagcccggatttatacggtgataacaacacacggctattcacctactggacgagtgatgcatatcaagctactggctgctacaatcttctttgctcgggatttattcaggtcaacagtgaaatagcaatgggtgcaaccatttccccagtttctggataccgaaactctcagttcgatatcagtatccttatctggaaggatccaaaagagggacactggtggatgcaatttgggaatgactatgtattggggtattggccttctttcctgttctcatatttggctgacagtgcttccatgattgagtggggaggtgaagttgttaactctgagcctgatggtcagcacacatcaactcaaatgggaagtggtcatttccctgaagagggttttggcaaagcaagctacttcaggaacattcaagtggttgatagctccaataatctcaaggctcccaaaggcattggcaccttcactgagcaatcaaattgttatgatgtccaaacaggcagtaatggggattggggccattacttttactatggaggccctggtaaaaatcccaattgtcaatgagtaatgatgagaggtgaaagat

SEQ ID NO: 7329 - DNA, 1641 bp, Glycine max
  Clone ID: 700651839_FLI
ccagtttaatgctttcaccaactaagtactacagagtactagaaacaaaacaaaacaaatcaagtgctcttataactttagagtccttttaccttggttctgatccagtcatatatcccccacgttcgttcgttcattcttcggtttctccgaatctgattgctgatttgggaaaatgctcctgggattctcaacgttagcgttgttggtgtgtttctcatgttgttggttattagtgttgggcgagggtgaaacggcgtcgtgttcgaacatagtggcgttggggcaccgcaccgacaacatatccataacggagtttgggggcgtgggtgatggacgcaccctcaacaccaaggccttcagagaggccatatatagggttcagcacttgccacgagaaggaggcacgctcctttatgtgcctcccggggtgtacttaacggagccctttaacctcaccagccacatgacgctgtatctcgctgccggtgccgttatcatggccacccaggattcattgaattggcctttgattgcacccttgccatcttatggaagaggaagggaacggcctggaggaaggtatatgagttttatccatggtgatggagttcaggatgtggtaatcacaggtgaaaatgggacaatagatgggcaaggagatgcgtggtggaataagtggaggcagggaactcttcagtttaccagaccaaacctagttgaatttgtgaattctagagatattattatttcaaatgtaatctttaagaattctcccttttggaacatacacccggtttactgcagcaacgttgttgttcgatatgtcacgattttggctcctcgtgactctccaaatactgatggcattgatccggattcaagttcaaatgtgtgcatagaggattcatacatatctactggagatgatcttgtggctgtgaagagtggatgggatgaatatgggattgcttatggccgtcctagctctgacatcacgatccggcgcataactggatcgtctccatttgctgggattgctattggcagtgaaacctctggtggggtggagaatgtacttgctgagcacatcaacctttacaacatgggaattggtatccacattaagaccaacactggcaggggtggatttataaagaatataaccatgtctcatgtgtatatggaggaagcaaggaagggaataaggatctcaggtgatgttggggaccaccctgatgacaaatttgatgccaatgctctcccacttgtgaagggtgtcacaattaagaatgtttggggtatgaaggttttgcaggctggtttgatacaagggttgagaaattcacctttcactgatatttgcctatatgatatcaaccttcatggagtgacgggacctagaactccaccttggaagtgttctgatgtgtctggatttgctcatcaagttagcccttggccatgttctgagcttagcagcaaccagcagggatcatgtgccaattactcctgagattatgggaatatatttccacttttcaagcattgacatgggcaaccaagggcttctttagttgatttatcataatgtaaggcaatgaattactatgaaatgcaaaatgaagacttgttggcttt

SEQ ID NO: 7330 - DNA, 655 bp, Glycine max
  Clone ID: 700651877_FLI
caagagggtcaaaagaatcttggcaaatagtaatgcaaatgcaacatgttctagtgagaaaatcacagaccccaagagggtcaaaagaatcttggcaaatagacaatctgcgcaaagatcaagagtgaggaaactgcaatacatatctgagcttgagcgaagtgtgacttcattacaggccgaagtttcagtgttgtctccacgggttgcatttttggatcatcaacgtttgcttctgaatgttgacaatagtgctttgaagcaaagaatcgcagcgctggcccaagacaagattttcaaagatgcacatcaagaagcactgaagagggagatagagagacttaggcaagtttatcaccaacaaaacataaagaagatggacaatgctgcagggtcaccaccatcccaatccccaccatctccatcaccaaaaccacgatgtgaaactcacactgaaaaggaacagcttatcaatgtttgaagtttgaatttgaaccctccatttgaagactcactcactcaccctttatagactatgatcaaattaacatatcaaccacctagcttgttcaaaaaaatatcaaccacctagtgtatgctagtttagatgatctgtgattcctttcaatattaaaaaagaaattgcagaattttg

SEQ ID NO: 7331 - DNA, 1647 bp, Glycine max
  Clone ID: 700651974_FLI
cttcatgaaagaaagcagccccaatatctgggtgaggcctatcagtggactcacaatggtggttgaccttgaactcatgaagatcgttcagtatcacgacggtggcattataccagtaccaactgccgacaacactgaataccgcttttcacatcagaacccaccattcggtccaagacaacatagtctagcaacccatcaaccacagggtccaggcttccaaatcaacggacacagtattagttgggccaactggaagttccatattggatttgatccacgtgccggaattgtaatatcactggcatccatttatgatttggagaagcacaaatctcgtagagtgttatacaaaggttacatttctgagctgtttgtgccataccaagacccaacagatgatttttactataagactttctttgatgctggagagtttgggtttggtctctccacggtctcattggtgcccaaccgtgattgcccatcgaatgctcagttcctagatacatatgttcacgctgctgatggtactccgttactcatcaagaacgcaatctgtgtctttgaacaatatggcagcatcatgtggcgtcacaccgaaacaggcattcccaatgaatcgttcgaagaaacgagaacggaagtcaacttagtggtaagaactgttgttaccgtgggcaactacgataacatcattgattgggagtttaaaacaagtggctcaatcaaaccctcgattgctctctcgggtatattggaaattaagggagtggatattaagcacaagagtgagatcaagagcgatcaacatggtatcttggtgtcggcaaacagcattggtgtttaccacgaccacttctacatttaccatcttgaccttgacattgatggtgttgccaactcttttgagaagacaagtttgaagactgtaagagtgacagatggaagttcgaagaggaaaagctattggacaactgaggttgaaactgccaagactgaaaatgatgcaaagataatacttgggttgagccctggtgagctttcagtggtgaatcctaacaagaaaacctctgttggaaatgatgtgggataccgtttgattccagcaatcccagctcatcctcttctcacagatgacgattatccacaaatacgtggcgcttttaccaatttcaatgtgtgggtcactccatacaataggactgagaagtgggctggtggactctacgttgatcacagccatggagatgatactttagccgtttggaccaaaaagaatagagacattaacaacaaggacattgtgctgtggcacgttgtgggaattcatcatgttccagcacaggaagacttccccataatgccattattgagcactgcattcgagctcaggccaaccaatttcttcgagaggaatccggttcttaaaacactttctcccccggatgtccaatggcctggttgccccaagtaaaactagctagccagccatttccattatattagtgtgcttcgagtgctacaactagatgtgttccttggataatgtgaaatgcgatctgcttattgcatgtgcaagaataatgatttgatatgtattgcttattattatatcaatgagaagtttacttgaacttgacaccg

SEQ ID NO: 7332 - DNA, 710 bp, Glycine max
  Clone ID: 700652071_FLI
ggaggatgctgctgcttctgctaatgctgcagaggatagagaaaacaagttcctaactatggcaattgaagaagcatataaggcggttgaaagtggccatggtcgcccatttggtgcagttattgttcgaaacgatgaaatactttcaagctgtcataacatggttgtaagaaatgctgatcccactgcccatgctgagattactgctataagagaggcttgtcgaaagctgaatcaagttgaacttgctgactctgaaatctatgcttcttgcgagccttgtccaatgtgccttagtgcaattcatttttccaaaattaagaaactggtttatggagctaaagcagaagctgcggtagcaattgggtttgagagtatcattgctgatgcactgaaggacactggtttttatgagaaactcaacttagaggtaaaaaaggctgaaggtagtgttgctgtaatggcagaacaagtattcgagaagaccaaagacaagtttattattccctgattagttagctttaatcatcttattaaatgtgagcgcaagttacaattgttcaggaaaacttttgattcttggacaaaaataattttttgtcagactttattttggattagtcaggtctcattttcctgataatccggaggattagacaaaaaagaaataattcaagaaatataaaatttgcacgttcatgtttttgttc

SEQ ID NO: 7333 - DNA, 805 bp, Glycine max
  Clone ID: 700652236_FLI
atgagttccaaaagggaagtagtcatatggctgctgttgttaaggctaggggaaaaggcaaagaaactccacaaatcattgatgaagagaaaaatgaagaaaacaaaagcattggtggggattcacagttgaccactccgttgctacagaagcaggatgcaaaatcaggaagtgttgttgttgacatagtcaagccttcaaagccttccagcattaataagctgtctgttttgcaacgtagtgatagcacaacaaatggtccctcttcagaaaatattgaagatggtgaagtgattggtattatcactttagaagatgtatttgaagaacttctgcaagaagaaattgttgatgagacagatgaatatgtggatgttcataagagaatacgtgttgctgcagctgcagctgcttcctcagtggcccgagctccatcatcgcgaaggttgactagccagaagggagcaggaatccaaagtaagccagggcaagctccaaagaaatctgcagaggaaaatggattgaactctacaaagcaataaggaaatgcatattagcctgtcgggataatgaacctttaatactgaggggctgtttatgtgtcagcaatatgatgaaaaagaagtcaaggagagttttttagtcatttgatctttatgatgtatcaaattaataactttccttttaggaagggcataaacggatgtattcctatttatataggttattaagccggtgccatgctgcaattttatgttagatccaaaatgtcttttgtttttaccgaaagaaaagtgtgtttgtt

SEQ ID NO: 7334 - DNA, 815 bp, Glycine max
  Clone ID: 700652444_FLI
cagaggtcctacaagggaaggcattgtaagaagttttacacggaggaagggtgcccctatggagatagttgcacctttcttcacgatgagcaatcgaagaatcgcgagagtgttgctataagtttgggccctggtggttacggtggcggcggcggcggcggcggcggtgttggtggtggtgccagtggtggtaatggtggtgctaatgctgctgggaatgggcctaattcgaagccctctaattggaaaaccaggatttgcaataagtgggagatgacagggtattgcccctttggcaataagtgtcattttgctcatggtgccacagaattgcacagatatggaggcgggcttatggagggagaaaatagagatgctgcttctgcagttgctggtgacacaaataagggagtgccttcaaaagcttctgccgataatgtggttgcagcagttactcttgtcgctcattctgatgtgtatcatattggagtcccttcacaaaggccttcttccatggtgattcagaggccaggacagagagcacatcagaagtggaaaggtccagataaaatcagtaggatatatggtgattggattgatgacatcgaatagagttttaatcccattcatggaaacgactgatgagggcttatgtactatcaaaacgcaatatttttcattcacatgttaatttttcttaagatccttaacttccaacgggaatagcattttagatcgtttcattgataactgttttgtaggtttatgcttggtggtgtattcaccttccttaatacgttgattctctggtgtct

SEQ ID NO: 7335 - DNA, 1562 bp, Glycine max
  Clone ID: 700652611_FLI
gaaggatctgggtttacacctgacctgactgttctggcagtggagtgcaacagctactatctaatctaatggggtccgagcaaaatcgatttcctctgcacgaaaggcgaaagagatggggaggatgttggggtgcattttcttgttttaattcacagaaaggtgggaagcgcattgtacctgcatctcgcattcctgacagtagtgggccagcctctcagccaaatggacctcaagtgattgggttgaccaatcaagccacaggactagctccttctctcttagccccaccttcttcaccagcatccttcacacattctgcccttccttccactgcacaatcacctagttgtttcttatccttatctgctaactcacctggtggtccttcatctacaatgtatgccacaggaccatatgctcatgaaatgcagctggtgtctcctccagtcttttcaaatttcactactgaaccatctactgcacctctcactcctccacctgagttggctcatttaacgactccctcttccccagatgtaccttttgctcattttctctcatcttcagtggatctcaaaaacagtgacaagggtaactacatcactgcaaatgatcttcaagctacatattcactctaccctggaagtcctgccagtagccttatatctccaatatcaaggaactcgggtgactgtttatcatcttcttttcctgaacgagagttccgtccacagtgggattcatcactatctcccgagaatggaaagtatcagagaactgggtctgggagggtgtcagggcatgacacaaatggtgtcactatggcatcacaagatacaaatttcttttgccctgctacctatgcacaattctatttggaccaaaatcctccatttcctcataatggtgggagattaagtgtttcaaaagattcagatgttcaatctaatggcggaaatggacatcagagtaggcatgctagaagtcctaagcaagatgtggaagaaatagaagcttaccgagcatcctttggtttcagcgcagatgagattatatctaccagtcaatatgtggaaatttctgatgtaatggaggactcatttaccatgatgccatttgcttctgacaagtcaacaatggaagaaagcatagagccttcattaatgaaaggattcaaagctcaggagacgcaggtggcattgcagagtctgagaagtcttagatcagatccaggtccagtaggcaaggaagcacacaatcaggcccctatatgtccaggatgtgaagatcatacatcacaagggcattgtagcaacaactctggattaagtacaccagagaaacgtactctcgtagatgatgaggatatattctcaaaaatggaatcttccagaatctgcaggaaatatcagatggggttatcatgctctgatgctgaggttgactataggagaggaagaagcttacgagaaggaaagggaatgtgatttatgacactaagaattaatcagttgagaacagattgtatgttatctgtgtattaatttgtagctttgttt

SEQ ID NO: 7336 - DNA, 2410 bp, Glycine max
  Clone ID: 700652626_FLI
gacgaattaaactttctcaatagatattttttcataaacaaagtcttggagattgaaccactaatacatgcttaatgctcaaggatatttgtcaatcatgtcacatcatattggttaatatataaacttattttgagacaaaatgacatctagagtctcccggcccctacttcactaaatcctcgtctttcctgtgtttcttttttctctcaacgtgtaagccagtattgaatgcctgcgtctacatccaaaacaccatccagacaactggccactttagacaaagctgacttccacttccgtactttctcagagtcctttccgaactgacatttatatgcatccaggccctccttaaaactaccagtttatctccttacatgggagggatccatgtggtaaaagattggaataactggttggttctttgttttcttacactgaaggatgtcgacaagttattcaaggcaccacaaggaagacgtgaaattttgggagagatcaatgattgaaatcctggatgcttctaatgcttgaaaaatagtgtctaagatttgatcgccacccttcaaccaacaatcgaagaaggtcttcaatctcgcatgtcgcaaagcaacataaagattacctatgaaggtgtagtgcgtgtatttcgctctaaaacacaaaaaacatcatagcaccgcttcgcaatgcccccttcatccgccatcacaatgaaacaattaagcagatatgaactttgtaccacgaccctcacaactaatggctttagcaattgtctcaacagacaactttactgatatgccaagtacttttccggtgaagtatcctccaatgactttgtttctgtacaccttggcaatcctccagaactcgcagatgagttcaggcaccaccaccttggggtcttccaaaaagtgatggatgccacacaacatgaggttggctttgatgacgtacccagcattctccaaagattcaatgttgaagaagtgtttggcattaactctaggttatttcactcaattcatgcagttttattctgtcgatgaagattgtgtccagttttgttctgatgaggaatattgtgatgcagacaccaatagttgtgatgaagttgaaaaggctgaggtataccgtggaaaaacattgagcaacccctcagtggcaactgaatcttcattcaaagatagcatttcactcaattcatgcaatcattctgcaacacttgctggaccacagttgtctgagtctccaaaattcagcaaaacttaaaggagaagtgtggctatttcatcaagttatctgggaagttggaacaatgtagcagagacttcaactttcagtaacaaagtgttaagcaaaccatttaaacagggagatcatgtgcaatcctcattacagtctaacaaggccgagtccttggcagcaagccttcagaagggattacagattattgactatcatcagcagaactcagcattgaacaaatcttcaacttccttctcctttgagcacttaacttgacaccatgtctagacattgacaaggatgactcttatgaccaaacaatacaacagaaaccttccagtgatgaagtaactgctgctttcctttgtgcatcttgctgggcgaaaatatcaaatgaagattccagcaaggcccaggctggaaatcctgatggaatgacagataaagaagtccaggaagagttagcccaaagtgacgtctcttttgattcaaccgagaaggagtcacttcttaaggaaattcagaatctaaggagtaagctgcaattatgtagtgatgcaccagttaaaaagtctacagacaaactaaggtcttctttggtgtcaagatccatacaattgcaaaaaagcggtgttttttcttatgataatggccatgaatacctagagaatgaaagacagagatggacagaaatgaaagtgagtggatctatcttactgatgaacttagagctgatcttgagtcctaccgccaacgtacagagaggttggagatggatgatgcactaaagagagctgttatgggacatgctagaatggtagaacactatgctgatctacaagaaaaatacgatgacttggttactaagcatgatgctacaatggaagggatagcagaggtgaagaaggcagcagcaaaagcctcagaaaaaggtcatgctcgcttcgccaaatctctttctgctgagctttctgcatcgagagaggaaagagaaagggaatcaaaattattgaaaaaagagaaccagagcttgaagattcaacttcgagatactgctgaagctgttcaggctgctggagaactacttgttagactaagagaagctgaacacgcaacagctgttgctgaggtacatttctatctcactaagagaagc

SEQ ID NO: 7337 - DNA, 975 bp, Glycine max
  Clone ID: 700652631_FLI
gtttgatccataaagccagtggtgtcccttcccattcaaaagcgccgaaagaaagaaacctaacaacgccatagcgtttcctaacccatcgtgcgaggtccctcgacctccgcacaaccccaactccaaggggctgtgcctgtcgccgtcgtcttccacgctcatgtcggaacccgacatccacgcgccgccgttcctgctccagcgcccgccgctcctgcagtcggcctcgccactcttcaagcagcgatcgtggtcgccggacgccttccgcgatgaggcgtggctccggcgcaaggggaactgcaagaaccgccgcagcaagagcgtcaccgatgaggacgtggacgagctcaaagcctgcatcgagttgggcttcggattcgattcctcccccgagaacgagctcgatcaacgcctctccgatactttgcccgctctcggcctctactacgccgtcaacaagcgctacaacaactccctcgtcaccaaaaccacgccgtcctcctcctccgccgcctccgattgcgacagcagtccttccccccacggcagtccccactccgccatcttcaccaccggtgataaccctcagacggtgaagacgaggctgaggcagtgggctcaggtagttgcttgtgcggtgcgtcaaagttcagatgtgtgattgggaagcaaatgaagaagcagggttgtcaaacgtaaaccataaaatagaagcaatgtgtgattggtattattataaatgacaacgattccccatcgaaccggaccaaaccgagagcggaccctagttaaccacccaattgtgacggaaccaaactagttagttaattagctatattacattacatgcggggctgtcggcagcgccttgttttgtactgtacttgtccaatgtgatgactaagccaaggtagatctgttctattatagtattatctgtcacatatatgatatatgctagacttacgt

SEQ ID NO: 7338 - DNA, 1201 bp, Glycine max
  Clone ID: 700652811_FLI
caatgggctttgctactggtggaaaaacattctttctgtggggagggtgcatgatgatgcatgctgatgactttaggcaagatcgttatggtgtagtctccggacttaaagatggtggatattcggatgatatgactcttgcagccatatctggtgctcacaaaaggctcattacttctcctcctgttgctgtctttcctcacccccttgccagtgatcttaattttggaagatattggaattacttgaggaaacaaacatttgttttggagtcatatttaacaaatgttaactgggtgatgaaccgtgcattgtttactacccactgctatttgtcatggggatttgtggcaccatattttatggcgatgatccatgttgctgcagcagtaagattttactataaaggattctcacctgaagaaatggcctatacttctggtggtgagaacaatacttttcctttctagggttatcattggtggccttcctagccatatgcactcttgttgagcttctttcaatgtggaacttgacacggatagaagtccaactgtgcaacatgttatctcccgaggcaccacaactctttctcgcttcttataattggtgtcttgtgttcatcgcaatgctggtggataactttctttatcctgtgtctgcattccgctctcatttttctcaatctatcaattggtctggtattcggtactatttgaaagatgggaaaattagtaagattgaaagaactccaagaagcaaggatatgggtccagttttcacagatttgggaggaaaacatttgtacggaaagaaagggttgcctacaagagggtcattcctcagttctttgtccagaagtttggcacaatggcatcaacccaagaaatttgataactaggaacaagctccatcaaattctgtctcttctctctatctctttgcctcactcgggaagcatgggtgttggtagatcaaattgatcttttaattgttgtttggtgccattcatgattgattgttttagagtgtggtaggaattctagttccattttttcattgcccattcatcaatccatatgattttttagcccaagccttttcccttagggttaattttgtaattgtaacagttcagtgatttaatttatgtaattcagtgatcaagaatcgcagaattatacaggtagcgattcacatt

SEQ ID NO: 7339 - DNA, 2655 bp, Glycine max
  Clone ID: 700652889_FLI
gatttgtgcagtgatggcttcagcaaacccttccccaaatgcttcccctgttgcagtgcctccagcacttggtgctattttatcaccacctccttcttcatcttctccaacaaacacttccaccccaccatcacctcccagttcttctcagcctaatcaaacacaaacacaaacacaaacacccaattcccctgctccttcatctccttctgacccttctgctccacctccttctcctcctcaggcagtgccattaacccctcctccttccatatcactgtctcctccaccatcatctacaccaccaccaactttgccccctccatcaccacctgattctccaccaccattgccacctgcatctccaaccccaccagttacaacatctcccccctcaccaccagttacaacatctcccccctcaccaccagctaccacatcccctcctccagctgaaactccaccttcccttccaaatttgtctccaccatctccaccagccggttcccctcctcctcaatcacctcccacaacaattccacctccctctcgaccgatttcgccatctcctcctcctccggccaattttccaaggccaccaaccactagaactcctccagagaaagaaaatccaccaaaaactactccttcacatgcatctcctccatcagtttctgaaactcctcctaaacctccttcctctgatgttccccctccatccacattgccttcaactcctccttcagacccttcaggatcttcacctccagcttctttgcctgatcccccaactaataaaacagtggtggggggtccgaaggtgtcgctaccctctcttccaactgagaaacccactgctagacctactaatgatggtactaacagtatgtcttcaaacaacacaccttcacattctggagggttgagcactggaggatctgtggctattggaattgtagttggttttattgtcctcagccttcttgttatggctgtgtggtttgcacagaagaaaaagaagaagggaacaggatcaagaggtagttatgctgctccttctccatttacctcatcccacaattcaggtaccttattcttgaggccgcagtctccggccaactttttaggtagtggctctggtagtgattttgtatattctccatcagagcctggtggtgtaagtagttcaagatcatggttcacatatgaagaacttattcaagctacaaatgggttttcagcacaaaatttgttgggagaaggtggatttggctgtgtttataaaggtttgctgatagatggaagagaagtagctgtgaaacagctcaaaattggtggtgggcaaggggaacgcgaattcagggcagaagttgagattattagccgtgtacatcatcgtcatctggtttctttagttggttactgtatatccgagcatcagagattgcttgtatatgactatgttcccaacgatactcttcattaccatctccacggtgaaaatagaccagttctagattggcctaccagagtcaaggttgctgctggtgcagctcgtggaatagcttacttgcatgaagactgtcatccacgcattattcatcgagatattaagtcatcaaacatcctacttgatctcaactatgaagctcaagtttcggactttgggcttgcaaaattggcattagattcaaatacacatgtaactacacgtgtaatgggaacctttgggtacatggcaccagaatatgcgacaagtggaaaacttactgaaaagtctgatgtatattcttttggggttgtgcttttggagctaattacaggtcggaagcctgtagatgcatctcaaccaattggtgatgagagcctggttgaatgggctcgacctctgttgacggaagcacttgacaatgaggactttgaaattttggtggatccaagactggggaagaactacgatagaaatgaaatgtttcggatgatcgaggctgccgcagcctgtgtacgccactcatcggtgaagagaccacgcatgagtcaggtggtgagagctttagattccttggatgagtttacggatctcaataacggaatgaaaccgggacagagttcggtgtttgattcggcgcagcaatctgcacaaatcagaatgtttaggaggatggcttttgggagccaagatagttccggtttcttcaatgagtctcagagtagctggaggagtagagatcacgacccaacaactgtcttctcccaaaataaaactgggcatgggaacgtttgagtgacatgactcactcactctttctttaagggattgcatgcacacagcacccacctgtcaatgcatttcctgtggtgtaaatctcatttttactatttttgttctcattttcctaacatgattttgcttgctatggccctttgtattctttgtaaattaggctatttgttacataacgcaatgtatttatttattcatgtataataccatgatcgatctgaattcaacactgcccttaaaatcacaatttatgcttatatattgtttttgtttgtagggaaagagagtaaaaaagagagaaatgaacaatgaaataacaagagtttcacacttttacatccaattttaattcaaaatttgtatttcaattc

SEQ ID NO: 7340 - DNA, 1470 bp, Glycine max
  Clone ID: 700652978_FLI
gggagaacgcaatcgttctccagctacagcgaagacggcaacgccggcggccagaccttccaatcctacggaaagaactccgccggcgcggcgaacgacttcgccgcctacggcacagactccaacgtcgcctcttcagatttcacgaactacggaaagggaggtgcgggccccaacgacacgttcacgaattacggcgttaacatgaacaaccctacggagacgtttcagagctacgcagacggaaccgttggtggaacgcagagtttttccaactacagagaccaagctaacgtaggtgctgactcgttccaatcctacgctaagaacacgttagggtccgaagcggattttaaaaactacgggaattcgttcaaccctggttcggacactttcaaaggctacgctaaaggcgcagaagataacaaggttggcttcacaacctacagcgctaacacaaacgctacctttaaagattacgccaaacacggcgtttcctttgctagttacaacgtctcttcggaatctaaaacagtcagtagcagtgtggtaaaaaggtgggttgaaccgggtaagttttttcgcgagaccatgcttaaggaaggcactgttatgcccatgcccgatataagggataagatgccgaaaaggtcgtttttgccccgcgctattttaaccaaattgcccttctcgtctgcgaaggttgacgagttgaagcgtgtgtttaaggtgtctgagaactcatcaatggacaaaatgatcatggactcgttgggagagtgcgagagggcacccagcgtgggtgagaccaaacgctgtgtggcttccgtggaggacatgattgacttttcaacctccgttttgggccggaatgtggcagtttggaccacagagaatgtaaaagggtccaataagaatgtgatggtgggtcgggttaaagggatgaatggtgggaaggtgacaaaatcggtgtcgtgccaccagagcttgttcccttatttgctttactactgccactccgttcctaaggttcgggtctacgaagcggatcttttggaccccgaatctaaggccaagattaaccacggtgttgctatctgccacttggacacaactgcgtggagccccacccacggtgcattcttggcactcgggtcgggtccgggtaggattgaagtgtgtcactggatcttcgagaatgacttgacatggactattgctgactgatttaggaaattggagttggtttgcgactccggtggctaatggaaattgaaagcaggctcaacccagtgtcaatgggtttttcatttaagtcacttttttttttttttagaaataaatgttttcgacttttggaagtctttatttaataattactgataatgagcctgtgtttgaaagtgtgaattatgtatttatatggctttcccatttagtggaagcgaatgaatgaatgcatcttgccat

SEQ ID NO: 7341 - DNA, 1055 bp, Glycine max
  Clone ID: 700652990_FLI
ttgcaagaatggcacttcgttgcttggtgatgtccctttctgttctcttcactcttggtcttgcgagagaaagccatgccagagacgaagatttttggcatgctgtttggccaaacactcccattccaagttcattgcgagatcttctaaagcctggccctgcaagtgttgaaatcgatgatcaccctatgcaaattgaagaaacacagtacccgaaaaccttcttctataaagaagaccttcatccaggcaaaacaatgaaagtacaattcagcaagcctccctttcaacaaccatggggtgttggtacatggttaaaggaaattaaagacactactaaagaaggatatagttttgaagagctatgcatcaagaaagaagccattgagggagaagagaagttttgtgcaaaatccttgggaacagtaattggttttgccatttcaaagctgggaaagaacattcaagtactttcaagttcctttgtcaataagcaagaccaatacactgtggaaggagtgcagaatcttggagacaaagcagtgatgtgtcataggctaaatttcagaactgcagtattttactgccatgaagtccgtgaaacaacagctttcatggttccattggtggctggtgatggaaccaaaactcaggcacttgctatttgccactcaaatacttctggaatgaatcatcaaatgcttcatcaacttatgggagttgatcctggaactaaccctgtttgccatttccttggaagcaaggccattttatgggtacccaatttatctgtggacactgcctatcagaccaacattgttgcttaattagtccatgcatcttgagcaccatgagaatgagattgtgtataaaataaattatcatgtgctgtgtgttgtgcaagtactaccttctctagctagattgctagagctagaatttcaacctacctatgtgtactgataagatctgcttccctacttaaagagagcatcatcctgtgatcagtgtgcttcgtattctctctctctatatatatatggtaaaaagtggtt

SEQ ID NO: 7342 - DNA, 529 bp, Glycine max
  Clone ID: 700652993_FLI
ctaaggtcgatttctcgttgtgctaacattgcattggatagaaactaaagtcttaaaacattcataatcatatctctttttattagttgttattgtgtgtctcagtattcaattggttgaattgaagctacttgttataatggatcacgctattgatggttactgtgttggggattgcagccaaagagtggtcgatttggcacatctagtagcaagcaagtggccaggggcacctaaagcggggagtggagacccattggaggatttctgcgagacaaaccctgctgatgaggaatgcaaagtttatgaatagaggagagctccttttctaacgtatcatgtgaaaaagaaggaaattgttcagacagtctatctgaggagagattttcaaagtttatatttatttgcagccaataataagttttggcgtgactgaatgaatatcacccatatattgattgatattgaatttctgaattcttgtaactgatttgcaattcttcgaatcttttaatcattgctcagtgtt

SEQ ID NO: 7343 - DNA, 1065 bp, Glycine max
  Clone ID: 700653059_FLI
cattaattgcaagaatggcacttcgttgcttggtgatgtccctttctgttctcttcactcttggtcttgcgagagaaagccatgccagagacgaagatttttggcatgctgtttggccaaacactcccattccaagttcattgcgagatcttctaaagcctggccctgcaagtgttgaaatcgatgatcaccctatgcaaattgaagaaacacagtacccgaaaaccttcttctataaagaagaccttcatccaggcaaaacaatgaaagtacaattcagcaagcctccctttcaacaaccatggggtgttggtacatggttaaaggaaattaaagacactactaaagaaggatatagttttgaagagctatgcatcaagaaagaagccattgagggagaagagaagttttgtgcaaaatccttgggaacagtaattggttttgccatttcaaagctgggaaagaacattcaagtactttcaagttcctttgtcaataagcaagaccaatacactgtggaaggagtgcagaatcttggagacaaagcagtgatgtgtcataggctaaatttcagaactgcagtattttactgccatgaagtccgtgaaacaacagctttcatggttccattggtggctggtgatggaaccaaaactcaggcacttgctatttgccactcaaatacttctggaatgaatcatcaaatgcttcatcaacttatgggagttgatcctggaactaaccctgtttgccatttccttggaagcaaggccattttatgggtacccaatttatctgtggacactgcctatcagaccaacattgttgcttaattagtccatgcatcttgagcaccatgagaatgagattgtgtataaaataaattatcatgtgctgtgtgttgtgcaagtactaccttctctagctagattgctagagctagaatttcaacctacctatgtgtactgataagatctgcttccctacttaaagagagcatcatcctgtgatcagtgtgcttcgtattctctctctctatatatatatggtaaaaagtggttatct

SEQ ID NO: 7344 - DNA, 1910 bp, Glycine max
  Clone ID: 700653063_FLI
gttggaatccttctcttcagttgggttgtgtcttggctcgctccctctcggatcagatctgcgctctccgttttcagatcgcgttttgtttcaattcgacactttcctcgcttcaaagattaagcgaacaatatggttgtccttgctgcatccattgtgagcaaatctggcaaagtgctagtttctagacagtttgtggatatgactcgcataagaattgagggtcttctagcagcatttcccaagttggtagggactggaaaacagcacacgtatgttgaaactgagaatgtgcgctatgtttaccagccaatagaagcactgtacctgcttcttgtaacaaacaaaaacagcaacatactggaagatttggaaactctgagacttctctctaaacttgtacctgaatattcttactcccttgatgaagagggtatttgcaaacatgcctttgagttgatttttgcatttgatgaagtcatctctcttgggcacaaggaaaatgtgactgttgcacaagttaagcaatactgcgagatggagagtcatgaagagaagctgcacaagttggttttgcagagcaagattaatgaaactaaggatgttatgaagcgaaaagctagtgagattgataaaagcaagattgaaaagaacagaggtgataaaggaggatttggtccattacagtcaatgggctctggaagaattgaaaatagctttagtgatttgagcatatctagcagtggaactggttttggaagtggctctggttttggattgacttctgatgttgattcctttgcaaccaagtctaaaggtcgtccaacttcatcagccactgctccacctaaaggtcttggaatgaagcttggtaaatctcaaaggacaaaccagtttttggaatcattgaaagcagaaggtgaggtcattcttgaagatgttcagccaaaactctcccagtctcgggtttctgccccaccacctactgatcctatcactttgactgttgaggagaaactaaatgtgacactgaaacgagatggtggtgtcagtaattttgatgttcaaggcacattgtctctccaaattcttaaccaagaggatggacatattcaagtacaggtccaaactggtgacaatcaagctgtctctttcaagacacaccctaacatgaataaagaattatttgccaatgattatatactaggcctaaaagatcccaacaggcctttccccactggtcaagccagtgatgctgcaggtgttggtcttttaaagtggagaatgcaaagtactgatgagtcaatggtgcctctgacaatcaactgctggccctcttcttctggaaacgaaacttatgtcagcattgaatatgaggcttcatcaatgtttgatctgcaaaatgttgtgatctcagtacctcttccagctcttcgagaagcgccatctgttaggcagattgatggggaatggaggtatgactctaggaattccattttggagtggtctgtccttctgattgataattccaatcgcagtgggtcaatggagtttgttgttccactagcagattcatcagtgttctttcccatttcagtccgctttatggcaactgatacttttagtgacctgaaggttaccaacatcataccattaaagggtggcaatcctcccaaatttgctcagagaacacagctgataacggatagctaccaagttgtgtgattgactttcttgaatttgagctcctataacagttttgcttttacagtcgtagttcttttatcaataggccatgcaaagttgtacttgcctctattcatgaatttgtacttagttttacttcgcaagacatggcgcaaagtatgatttacataattaatgctaaagcgtgtctgttttactctagc

SEQ ID NO: 7345 - DNA, 1437 bp, Glycine max
  Clone ID: 700653073_FLI
caaaaatagaaaatgggtactaacagatctttaatggccacgatcctcatcgtgttcttcacggtgttggcagtgtcatcggcgttggacatgtcgataatctcgtatgacagaagccacgcggacaagtcagggtggaagagtgacgaggaggtaatgagtatatacgaggagtggcttgtgaagcatgggaaggtgtataacgccgtcgaagagaaggagaagaggtttcagatcttcaaagacaacctcaactttatcgaagaacacaatgctgtgaaccggacatacaaggttggactgaaccggttcagtgatcttagcaacgaggagtaccggtcaaaatacctgggaaccaagattgatcccagcagaatgatggccagaccaagtagacgttactctccgcgcgtggctgacaatttgccggaatctgttgattggaggaaagaaggtgctgttgtcagagtcaaaaaccaatcagaatgcgagggctgctgggcattctcagcaattgccgcagttgaaggaattaacaagatagtaacaggcaatctaactgcactgtcagagcaagaactgttggactgtgatagaaccgtcaatgcaggatgtagtggcggacttgtggactatgcctttgagttcattatcaacaatggtggcattgacactgaagaggattacccctttcaaggtgctgatggtatctgtgatcaatacaagataaatgctagagctgttacaattgatggttacgaacgtgttcctgcttatgatgaattagccttgaaaaaggcagtagcaaatcaacccgtgagcgttgccattgaagcatatggcaaagagtttcaattatatgaatctggtatattcacaggaacatgtgggacatcaatagaccatggtgttacagctgttgggtacggaacagaaaatggaattgactattggatcgtcaaaaattcatggggtgagaattggggagaggcaggttatgtaagaatggaacgtaatatagcagaagacactgcaggaaagtgtggaattgcgattctgacattgtatcccataaagattggccaaaatccctcaaacccagataactccagctaaacccaccgggaatttacaggaaataacaggaagactaaaagagttctagacttctgtttagtggaagttatctagcccatgaatgaaaaggtgaaaaaagagaagattaggccgtactcattctctattctctaatttgaaccagccatcaaggccgtacgagaaagatattcaaggtgggaagatcacattccttttttcctcttccttctaataaatctttgtttttagtttttctatgcctagctaaatcctttttgatggagttaggagaatttctatgtaacccacagggatttttaataaaattatgtttttctc

SEQ ID NO: 7346 - DNA, 2708 bp, Glycine max
  Clone ID: 700653127_FLI
aaaccaagtgttctcttttccaatattttgcaatgcccccaattttctcccctttgctttccaagcagtttcccccaaattctgaaatcaaagggtttctgaatttctgataatcacactctcatacatatataatagcagacccatcttactcatctctcaccaatcacacaaccaaagacccttttctctcagttcccctgtgactcactctcttccttcactgctaaactcttccaatggcaacaaaaaaagtcaaagccataggcattgacttgggcacgacctacagctgcgttgcagtgtggcaacacaaccgcgtcgaggtcatttccaacgaccaaggcaatcgcaccaccccttcctacgttgccttctccgacacccaaaggttgttgggtgactccgccatgaaccagcgatccatgaatccgaaaaacaccgtctttgacgccaaacgtttgattggtcgccgattctccgaccaaaccgttcagcaagacatgaagatgtggccttttaaggttgtccctggaaacaaagacaagcccatgatcgcggtcacttacaaaggcgaagagaaactccttgccccagaagagatatcttccatggttttgtataagatgaaggaagttgccgaagggtacttgggtcatttcataaaagatgcggttatcactgtccccgcttacttcagcaacgcgcagagacaggccacgaaggatgcggggaaaatcgcgggtatgaacgtgttgaggatcatcaacgagccaaccgctgctgctattgcttatgggttggacaagaaaggattgagagttggtgagcagaacgtgcttgtgtttgatctcggtgggggtacttttgatgtttccttggttactatttatgaaggcatgtttaaggttaaggccagtgttggagacactcatttgggtggtgtggattttgataacagattggtgaaccatcttgtgaatgtgtttagagagaagcacaagaaggatattagtgggaatgcgaaagctttggcgaggttaaggtcggagtgcgagaaagcaaagaggattctgtcttcgacttctcagacaacgattgagcttgattgtttatacgaagggcttgatctgtatgcccctgttacaagggccttgttcaacgaactgaacaaggacttgttcatgaagtgtatggatacagtggaaaagtgtctccttgaggcaaggattgataagatccaagttcatgagattattcttgttggtgggtccactagaattccaaaggtacaacaacttctgaaggacatgttcagtgtcaatggtaacaccaaagagctttgcaaaggcatcaaccctgatgaagctgtggcgtacggtgctgcagttcaagcagcgattttgagcggtgaaggagataaaaaagtggaggaattgttgttgctggatgtgatgccacttagtcttggatttgagggtgctggtggtgttatgtcagtgttgatccccaagaacaccatgatccccaccaagaaggagaggatttgttctaccttctatgacaatcagaaatcttttaatgtcaaagtgttcgagggagaacgagttaagacaaaggataacttctttctcggcaagtttgtcctcaaagggttcgatccattaccaaagggagtgccacaaatcaacgttatctttgatgtggatgctgatggcattgtggaggtcaccgcagaagataaagccacaggaatagaaaagaagatcacaatcaacaacaagcacggaaggctgaacccggaagagataagaagaatggtgagagactcaaagaagtacaaggcagaggatgagttggcaaagaagaaggtgaaggcgaagaacgcactagagaattacgcttatgagatgagggagagagcaaagaagattgaagaggcagtggaggaaaccatagagtggctagagtgtaaccaattggcagagataggggagtttgattacaagaagcaggagctaggaaggtacctaagagatgatccaaattatagtaacacctcaaattctggtgttaaggttcctatatggtgtacatggaggtgtccacctaatgggtgggtttgtctcaacacagatggttcggtgtttgagaaccatagaaacgggtgtagtgggagtgcttgtgggggtctagttcgtgattcctcgggatgttacctaggtggtttcacagttaacttaggcaacacatcggttactttagcggagctatggggtgttgttcacggtctgaagttggcgtgggatcttggttgcaagaaggtgaaggtggacattgattctggtaatgctcttggtcttgttaggcatggccctgtggctaacgaccctgctttcgcgttggtttcggagatcaacgagcttgttcggaaagagtggttggtagagttctcgcacgtgtttagagaatctaaccgtgcggctgataagttggctcacttgggacactcgcactctctggaatcgggtgcgaagcgattctcggacccaccctctgcccttgttgctattcttcaagatgacttggcagggcttgccaagcaacgtggtgttaattaagtgtaagagactgttgaccaagcaatgtaaattagttagagcttgcattctcgatcatcaaagtattttgactttgactgagtgtgt

SEQ ID NO: 7347 - DNA, 2178 bp, Glycine max
  Clone ID: 700653251_FLI
ctggcggttttgttggattggaacagagcgagcgagatcaaaaaatggcatcctctgcttgtaccaaacccatcttcccctctgccttcaccgtctctaagtcaaagctctctcgtcatgttcatgtctccttcacctcccccaaacccatctactaccactacagaaagctctctcatgcctctcaacgttccttggtggtcaacagcgttttgaaaacagttgacccgacacaaacctctttgcggagatccaactccgaggatgttgggtctctgggagaaaagcccaccatcctggtctccgagaaacttggagaggcagggctgcaggtgttacgtggcgttgggcacgtggaatgcgcgtatgagctctcacaggaggagctatgcacgaagatctcgtgctgtgacgctctgatagtcaggagcgggacgaaggtgacgagggaagtgtttgaagctgggaaagggaggttgaaggtcgtgggaagagccggcgtggggattgacaacgtggatctgcaagctgccactgaatttggttgcctggtcgtcaatgctcccactgccaacactattgctgctgccgagcatgggatcgctctccttgctgccatggcccgcaacgttgcccaggctgacgcctccaccaaagctggaaaatggcagagaagcaagtatgtgggagtttccatggttggaaagacattggcggtgatgggttttggaaaagttggatctgaagtggccaggcgcgcaaaagggttgggcatgcacgtgattgctcatgacccctatgctcctgctgacagggcacgtgctattggtgtggatctggtgtcctttgatcatgccatcgccactgcagatttcatctccctccacatgccactcactccaactactaacaagatcttcaatgacaacacttttgctaagatgaagaagggtgttcgcattgtcaacgttgcaagaggaggtgtcattgacgaagacgcattagtaagggccctcgacactggaatcgttgctcaggctgctcttgatgtcttcaccgaggagcccccatccaaagacagtaagttagtgcaacacgagaatgtcactgttacccctcatcttggagctagcaccaaagaggcacaggagggggtagctattgaaatagctgaggctgtgctaggagcattgaaaggggaactttcagcaactgctgtcaatgctcctatggttgctcctgaggtgttgtcagaattggccccatatgtggtgctggctgagaagctggggaggctagctgtgcagttggtgtgtggaggaagtggaatcaaatctgtgaagatagtgtatcgatcagctaggggcccagatgacttggacaccagacttctgcgagccatggttacaaaaggcctgattgaaccaatatcaaacaccattgtaaaccttgtgaatgcggatttcatagccaagcagaaagggcttcgcataagcgaggaaagagtggttgttgattcatctcctgagatgcctgttgattcaatccaggtacagatatccagtgtggactccaaatttgcgagtgctgtatcagagagtggtcagatcagcattgacggaagagtgaagtttggagaaccccacctgacatgtgtggggtctttcgatgtggatgtgagcttagaagggaatctaatcctgtgccggcaggtggatcagcccggcatgattggccgtgttggaaacatactgggtgaacaaaacgtgaatgtgagctttatgagtgtgggaagaacatcgcgtaggaacaaggctattatggctattggtgtcgatgaagaaccaaacaaggaggctcttgacaatattggagccgtgcctgccattgaagagttcgtcttcctcaagctctagcactagttgagtaatggtatacaaacaaacaaataaataatgtatgcgtatctactatccatggatggtacgttttagaaagtaaaatagctactattggttaaaaagaaatgtttttttttgacaattctcaagtgcacatgcacttcagatgatctagatctgtttttacaccgtagaagaggtattttgatgtgatatatttggatggaatgattcagaataaaacactagctgtttgcggctagtagtctgttgtctc

SEQ ID NO: 7348 - DNA, 939 bp, Glycine max
  Clone ID: 700653418_FLI
caaaccccaaaaaaagaaaagatgaaagcaatgaaacgctgctcttcatcatcttcctcttcttattcttctgcttctgagtccaccccacaaagcaatcaaaataaaaatagtaataacttttgctacaaaataaaaggcccatggagtgccaaggaggatcggattctgaccggcctcgtggaggcccatggcccgagaaactgggcctcgataagccgtcacattaagggtcggtccgggaagtcctgccggcttcggtggtgtaaccaactgagtccaacggtggagcaccgacctttctccacgcgcgaggacgaggttatattacacgcgcacgcgcggttcgggaacaagtgggccaccatcgcgagaatgctaccgggccgaaccgacaatgccgtcaagaaccactggaacgccacgctcaagcggcgtcgttttggtgctgacgtggtggtggaggatgatccgttgaccgcgttgactctggcgccgcccgggagtggttgttgtggccgtggagaggagcggcggggagtttcgccggcggggttttgggatgcgatgcgggacgtggtggcgagggaagtgagagggtacgtgtcttcctcgttttctgacaacttggcctctaatgagggattatccaaatattaatgtttttttttcatgatttattaagggaatttatgtggtttagttattattggacttcaggacccataaggggaacagttcagtgtaaaatttgtattattgattaattaaaaatcaatttaaatatcatactactatttcatatgtaattattataaattttaattatgtaataattgattattaagtgatattataaatattagtatatgtaaatttttttagcgaatggtatatgtaaatatttaaatcaacttataataataatttcgtttgatt

SEQ ID NO: 7349 - DNA, 1118 bp, Glycine max
  Clone ID: 700653501_FLI
gcacaaggtgccatggaagctgttgaagagggaaactacagcggtggtgaagaagcgagtgtttgtatgcccggagcctagttgtttgcaccatgacccatgccatgctctgggtgatcttgtcggcataaagaagcatttcagaaggaaacacaacaatcacaagcaatgggtctgcgagagatgctccaaaggctatgcggtgcagtctgattacaaagcacatctcaaaacttgtggcacccgaggacactcttgcgattgtggccgcgttttctcaagggtggagagctttattgagcaccaagacgcgtgcaacgtagggaggctggggccagaaacacaatcacaggcacaggcagtgcaagcagctgcatgcttgtctcgaacagcttcaagcgaaaccaatttcagcactggttccccttggccacaaagcggtactataataattccaaatcccaccgttacggtagtagaaccctcctcatacaccattgtcactgccgaaaccaacaacaaagtccaccccaacctggagcttcagctctctaataccactcctactgcatcatcacaggaagaaagggttcatcaagagcagttgaggattgcgaaggcgaagaaagcgttggcggaagaggcaaggaagcaagccaagaggcaaatcgaactggccgaacttgagttcactaacgccaagaggataagacaagaagcgcttgcggaacttgacaaagcctatgccttcaaggaccatgcaatcaaacacatcaattcaatcatgcttcaaatcacttgccgagcttgcaagcaccattttcattcgccaaccgacgaccaaatcttctcctacataacacaagctcgccaagtacaaaaacatcgtctcaaacccattattaattaactcttaattagacgacatcgatcccttccttcttttactattactactatgtcaagtgagtgctatggttatgtacgtgtgggattaatagccagctagcgaggtggtggaaaaaatgtgggttattattaatgtaaatgtaaattagttgcagcttgtgccatgttatttaaatgcagactataatatgatgagcaggttttgctgg

SEQ ID NO: 7350 - DNA, 2576 bp, Glycine max
  Clone ID: 700653509_FLI
ctactctcacccgcaagaaaaaaatggcatctcacatcgttggatacccccgtatgggtcccaagagagagctcaagttcgctctcgagtctttctgggatggcaagagcagcgccgaggatttgcagaaggtgtcttctgatctcagggcatccatctggaagcagatggctgatgctgggatcaagtacatccccagcaacactttctctcactatgaccaggttctcgacgccaccgccaccctcggtgccgttccaccaaggtacggctggaccggcggcgagattgggtttgatacctacttctccatggccagaggtaatgctaccgtgccagctatggagatgaccaagtggttcgacaccaactaccactttattgtccctgaattgggccctgatgtgaacttcacctatgcttctcacaaggctgttgatgaatacaaggaggccaaggcgcttggagtggataccgttccggtcctcgttggccctgttacatacctgttgctctccaagcctgccaagggagttgagaaatccttttctctcctctctctccttcccaaggttcttgctgtctacaaggaagttattgctgaccttaaggcagctggtgcttcatggattcagtttgatgagcctacccttgtcttggaccttgagtctcacaagttgcaagcattcactgacgcatatgcagaacttgcgcctgctttgtctggtttgaatgttcttgttgagacctactttgctgacatccctgctgaggcatacaagaccctcacatctctgaatggcgtcactgcatatggatttgatttggtccgtggaaccaacactcttgatttgatcaagggtggatttcccagcggaaaatacctctttgctggagtggttgatggaaggaacatctgggccaatgaccttgctgcttctctcactaccttgcagggtcttgagggcattgtgggcaaagataagcttgttgtgtccacctcctcctcccttcttcacactgctgttgatctagttaacgagaccaagttggatgatgagatcaagtcatggctagcttttgctgcccaaaaaattgttgaagttaacgcattggctaaagcattgtctggccacaaggatgaggccttcttctctggtaatgctgctgctctggcttcaaggaagtcttctccaagagtgaccaacgaggctgttcagaaggctgctgctgcattgaagggttcagatcatcgccgtgcaacaaatgtcagtgccagactggattctcaacaaaagaagctcaaccttccaatcctgccaaccaccactattggatccttccctcagactgtagaactgaggagggtacgccgtgaattcaaggctaacaagatctccgaggaagagtatgtaaagtcaattaaggaggaaattcgcaaagttgttgagcttcaagaagagcttgatattgatgttcttgttcatggagaaccagagagaaatgatatggttgagtacttcggtgaacaattgtcaggctttgccttcaccgttaatgggtgggtgcaatcctatggttcccgttgcgtgaagccaccgatcatctatggtgatgtgagccgcccaaagccaatgaccgtcttctggtcatctctggctcagagctttaccaagcgcccaatgaagggaatgcttaccggtcctgttaccattctcaactggtcctttgttagaaatgaccaacctagatctgagaccacctaccagattgctttgtctatcaaggacgaagtggaagaccttgaaaaggctggcatcactgttatccaaattgatgaagctgctttgagagagggtcttccactgaggaaatcagagcaagctcactacttggactgggctgtccatgccttcagaatcaccaatgttggtgtccaggataccacccagatccacactcacatgtgctactcgaacttcaacgacatcatccactccatcatcgacatggacgccgatgttatcaccattgagaactctcgctccgacgagaagcttctgtcagtcttccgcgaaggtgtgaagtatggtgctggaattggccctggtgtctatgacatccactccccaagaataccaccaactgaagaaattgctgacagaatcaacaagatgctggcagtgctcgagaagaacatcttgtgggtgaaccctgactgtgggctcaagacccgtaagtacactgaggtgaagccagccctcacaaacatggttgccgcagcaaaactcatccgcaacgaacttgccaagtgaatggtataagaaagtagaatcttccaagtcatttggttctgctttatattataatacaccaaagaaaaattttctctatattgggttgtttcaataactgtgtgtggaatatttaggtgtcttagcatgctctgtgagcaattgattcttcctcaacccctccccccttatttttccccactcctgttttccctaatgaatgttgtatctttgcggcttcgccgcaatccttattgatctggaattttaccagttttgtgc

SEQ ID NO: 7351 - DNA, 1857 bp, Glycine max
  Clone ID: 700653543_FLI
caaccatggctatgtctactattttgcttttgactttcttttctttcatttatggcagtgcagctactcatcacgtttatagaaatcttcagagtttatcttctgattcctccaaccaaccttacagaactgcttatcacttccaacctcccaagaattggataaatgatcccaatggaccattgagatatgcaggactttaccacctattctatcaatacaatcctaaaggtgcagtttggggaaatattgtgtgggcacattcagtgtcaaaggatcttgtgaattggactccactagatcctgccatttttccatctcaaccgtccgatataaatggctgttggtcaggatcaaccacactacttcctgggaacaaaccagttattctatacactggaattgacctattgaatcagcaagttcaaaacttggcccaacccaaaaatttgtctgacccatttcttagggaatgggtcaagtcccccaaaaatcctctaatggcaccaactagtgctaacaagatcaattcaagttcatttagagaccccaccactgcttggctaggcaaagatgggcattggagggtacttgttggaagcaaaagaagaactaggggaatcgcaattttgtataggagcaaagactttgttaattgggttcaagccaaacaccctttgtattcaatcctaggaagtggcatgtgggagtgtcctgattttttccctgttttgaataatgaccaattgggtgttgacacgtcggtgaatggttatgatgttaggcacgtgctcaaggttagcttggatgacaaaaaacatgattactatatgattgggagttacaatgctgccaaggatgcatttatcccggatgaagagtctaatgaatttgttttaagatatgactatggaaaatactatgcctcaaaaactttctttgatgatgggaagaagagaaggattttgttagggtgggctaatgaatcctctagtgttgctgctgatatcaagaagggatggtctggaatccatacaattccaagggctttatggctgcataagtctggtaaacagttggtacagtggccagtggtggaagttgaaaagctacgtgcatacccagtcaacttgcccccccaagtgctaaaaggaggcaagttgcttccaattaatggtgtcacagcaacacaggccgatgttgaaatttcatttgaagtgagtaatttgagagaggctgaagtattggactattggacagacccccaaattctgtgtagtaaaaagggttcatccatcaaaagtggactgggcccatttggtctgttagtttttgcttcagagggtttgcaagagtatacatcagttttcttcagaatattcagacaccaacacaaatatttggtgctcttgtgcagtgatcaaagcaggtcttccttaaacaaagacaatgatttgaccagttatggaacttttgtggacgtcgaccctcttcatgagaagctatcattgagaaccttgattgatcattctgtcgtggagagttttggaggagaaggaagggcttgcatcacggctagagtttatcccacattagcaatcaatgatgaagcacaactatatgctttcaataatggaactgctgatgtcaacatcacaaaactgaatgcttggagcatgaagaaagcacagataaattgataccgagcagaatgggagaaatggaagaaccataaaagttcatgatgactaattttttgacttcttctactgatgcctctaaatatcattgatgcacaacaataatatgcttgtcattcatcttattcagatttaatatttgataagttgacaaaat

SEQ ID NO: 7352 - DNA, 2482 bp, Glycine max
  Clone ID: 700653637_FLI
gcaaacaacagaatagagtcagaaggagagagagagagatggtggtcggtgttctttctgattctccttgatcttctttttctcttcgttattgttcccaacacattccaaaccctaaatttattgcctggctcttccatccccaatatccgaactcaaacgcggagtggcagcagagaacaaaaacatgtcatcttggctgagatctgcggtcaacaaagccgtcgaggtcggcaacaaaaacaacctcactcgcaccgtcaagaactacgccgacaccgtcgttcaacacgccggccaagccgtggccgagggcgccaaaatcctacaggatcgcattagtgctcggaattacagaagtgttgcgcagaccattaaaaggttggaagaagctgctgtctcgtataggggacctgagagagtgcagttgcttagaagatgggtggttgtgcttcaagagattcagaagttgtccgaggcttcattggctgaaggcaaagagaggactctcgagcagcaccttgcggttgaagaagccaaggagaacccaaggaaaccatctctggttctttattacgattctgatgttgggggagaaccattaaatttccgtgatgtttttcttcaaagtcaggcattggagggtataacgttatccatgattattcatgctccgaatgaggaagaggtttcccttctcctggagatgtttggactttgtcttactggaggaaaagaagttcataatgccatagtgagcagcctgcaagatttagcaacagctttttcaagctatgaagatgaagtactggtgaagcaagaggaattacttcagtttgcgcaaggtgccatcactgggttgaaaatcaattctgatgcttcaagaatagatgctgaagcctctaatctgaagaaaaagctcactgagataacaacttcacaggggcctgtaagcaaagttgattataaagcggctgaggaaacaatagcaacgctagaggctctgaaaattgcccttgctcagattagaatctgttccagactggaagccttattgctgaagaaaaaaaatttaagcaatggagactctcccgaaattcatgctcaaaaggttgataagctgaaggtattaacggagtctcttgccaactctgctacaaaagctgaaaagcgtattttagataacagactacaaaaagaggaagcattaaaggttcgagtgactaaagatggtgaggctagtgaaaaggagaaggaactggttactgagatatctgaactgcaatgcaaaaaagaagatctcgaagctgaattgaaaaaggttagcactactttggctgctgctcaagcacgactatggaatgtgagggaagagagagaccagtttgaggaagcaaacaatcagatagttgaacacctgaaaataaaggaagatgaactttcaaaatcaatcagctcatgtagggttgaagcagatgttatcaaaacctggattaattttctggaagatacttgggttcttcagtggtcaaatgcagaaattaatgacaagcaggtcaatgatgaattggagagacatgaggactactttgtgaacttggccattcaacttcttactacttaccagaaagagttagagccttgcattaaccatatcaaaacatttgtcgtgaacctcaagaatttaagtcagaggttagagatgacacccagtgcagatactgatgagtcagaagtattaagtccaaggagaaatcttgaggaggaatatttgacctatgaagccaagattattactaccttcagtgtagtggataacatgaaacaacagttttatgctcaacacgggaaaatttccaggaaagatgaggagagagttatagagctgtttgatgccattgaaaagttgcgaactcaatttgagtctattgagagaccaattcttgaaatagagatccctgcaaaagctgaaacgccacctttggagaaaaagtctgatgctactccttcagtttctgttccagctcaaggtgctgcagctcaaggtatcgagctttcaaagccagaaacagatgagcaaccaaaatcaccttcagttaagacagaccagatattggatcatgaagcggaattagctaagctggaatctgagtttgggaaggttagtaaggattattcagcagaggaaattggtgattgggaatttgatgagcttgaaagagaattaagcaagtagttaggttatttatgagtaattaatgcttgctgttgcattttgatgatgaagtgcaagtaccataaatttgtaagccataggtcggctgttaatgaagcttcaatctggatcggattcctttgaatttgtaaacattacatagcataatttctttattcttctgtaaattaacgggtttgcaacttgcagcccagtcaacaaaagatttgaaatgatcagtatggttagaattttgaacttcggatg

SEQ ID NO: 7353 - DNA, 1659 bp, Glycine max
  Clone ID: 700653658_FLI
ctatgggcaaaacaaaaccttggttaaaccctgaactcaaagttgcattacaggagagagagagagagagagagagatgtttgggaggggaacggtgtggtcagtgttgaggcgcggcaaagaagcttgcggcggatttcacaagctgagaggaacgcctttctcttattcttcttcttcaacacctttcaagttcttatcccctcccgtctccacccattgctttcatgctttccgatcccaactaatccccaagggtcatcatgttcatgtgccacaaatgaggaacttttctaagatggtctctgctgaacaaaaggaggagggattaaagctgctagtgagtgggggttctcgtgctcagaaattggttggaatatggctctttgggtcagcggcatgggtgttcagcatggtggtgctcgggggtttaacaagactcacccgatctggtctttcaatgactgattggaaattcaccggtactctccctcctttctcggatgaagaatggttgcaagagtttgacaaatataagcagtcacctgagttcaagcgtgttaacagaggcatgaagattgaagaattcaaattcatatattggatggaatatgcacatcgtatgtggggaagggcactaggagttatgtttgctttgccatattcatattttcttcataaggggtatattaccttgagattgggactgagactctctgctctgtttgccctgggtgctgggcagggtctcattggttggtggatggtcaaaagtggtttagaggaaccaccatctgaatattctcagccaagggtaagcccttatcgtcttgcagctcatcttacatcagcatttgctatttactgtggcctcttttggactgcactttctgttgttatgcctgaaccaccagctgaatcactaacatgggttcgtggggcagctaaagtgaggagacttgcattgcctatcagcatacttgttggtcttactgcagtctctggtgcattcgttgctggaaatgatgctgggcatgcttttaatactttcccaaagatgggtgatacatggataccaggagacatttttgaaatgaagcctctgattcgaaatttctttgagaatacggcaactgtgcagcttgatcaccgtatacttgcaactgcaactctgatttctgtgagcattttatggtggtcaacaagaaagctggagatacatcctgcagtacgatctgtgattggaggtgctgttggcatggcaactcttcaggtcaccttaggaatttcaacgcttctttcatatgtacctgtttcactgggcactgcacatcaggctggagccttgacacttctgacatttatgttacttcttaatcacacggttcgaagaccgtctttgtcccttctcaaatctctgcctcaagttggaaaagcacactaattgtttcccgatattatattgcatcaaggcttaggccttttaagttgacaaaatctgtggctattattttttccatgctaaattttgcgttgagctccttctccaattttccactgttggaatcttctgtatttgttttgtacatttgaagcatgaaaattcatgatgatgcaactgttctgttgattatgtaatgagcagatacatattatcag

SEQ ID NO: 7354 - DNA, 1830 bp, Glycine max
  Clone ID: 700653702_FLI
gtgattctgaaaatctgaaatttcatttctctctgtataaatatcctagtccttatcagcttcactatttcgattgaaatcgccgaagaaggtattgacgtcgatgatgaaaatgaaattggtgaaaacattactgcttctcctttgtgtgaaactcttctgttatgcagtgattggtgctcctcaaacttgtcctgctaacaatgaggataaatgcggcgattcagatgaatggaaaggggagtttttccctgacattcccaaaattaaatatgagggtccgtcaagtaagaatgtgctttcatttaaatggtataatgcagaggaggaaattcttgggaagaagatgaaggattggttaagatttagtgttgcattttggcatacattccgtggaacaggtgctgacccatttggtgcacctaccaaatactggctatgggaagatggtaccaattcattaaacatggctaaaagacgaatgagagctaactttgagttcataagcaaactcggtgttgacttttggtgtttccacgacagggatatagcccctgatggaaaaactcttgaggaatctaatgcaaacttggatgaagtggttgcccttgctcaagagctccagactaaggctaaaaaaagagtgttatggggaacagctcagttgttcatgcatcctcgttacatgcatggtgctgctactagctctgaattaaaggtctatgcatatgctgctgctcaagtgaagaaagccatagaggtgacacattatttggggggagaaaattatgttttctggggtggtcgtgaaggttatcaatctcttttgaacacagatatggagcgagagcttaatcatttggctaggttttttgaagctgctgttgcatacaaaaagaagattggattcaatgggacatttctaatcgaaccaaagccacaagaacctacaaaacaccagtatgattgggatgctgcaacctcagctaatttcttgcgaaaatatggacttacaggggaattcaaactcaacatagagtgcaaccatgccaccctctctggccacagttgtcatcatgagctcgaaactgcaaggatcaatggattgctgggtaatattgatgcaaacactggtgatcctcaagttggttgggacactgatcagtttcttgtagatattcaagaggcgacactgattatgctcagtgtgatcagaaatggaggacttgcacccggtggattcaacttcgatgcgaaattgcggagagagagcacagatgttgaagacttgttcatagcccacattgttggaatggataccctggcccgtggcctgaggaatgctgccaagttgattgaggatggttctcttgctgagcttgttcgtaagcgttatcagagttttgacactgaaattggggctcaaatagaggctggtaaggctgactttgaactgcttgagaagaaggtcaaggaatggggagaaccaaaggttgcttctgcgaaacaggagctagccgagatgatcctccaatctgttctgtagaaagtagaatctagccgtgtgtggtggctatttttcgtctattatattaggaacaattcggtataattaggtttactaataaaaggaaattaagattgacttatgcctgcttcgttttccttgggaaaatataagtgtgaagctgttatctgctaggtggatacgaagcctggtgaagtgcatgttagcttatgtataaaactacgtgatgcatagcttccctggctttgagcatgcttgagttaattaattttagtttcactccgtatcgatttttattcatt

SEQ ID NO: 7355 - DNA, 1759 bp, Glycine max
  Clone ID: 700653705_FLI
ggcgttgagcacgccaacgtgcttcttcctcccttggagacgctctgcaccgttgaggaaaccagcgtcagagacaagtcggtggagtcgctgtgcagaattggagctcagatgagagagcaagacttggttgaatacttgattcctttagttaagaggctggctgctggtgagtggttcacggcacgggtttcatcgtgtggtttgttccatattgcttaccctagtgcacccgaggcggtgaagactgaactgagagccatatatgggcagctgtgtcaggatgatatgcccatggttaggagatctgcggccacaaacttgggaaagtttgccgctactgttgaagctcctcacttgaaatctgacatcatgtctgtgtttgaggatctcacacatgatgatcaagattctgttcggctacttgctgttgagggttgtgcagctctggggaaattgttggaacctcaagattgcgtggcacatattcttcctgtcatagtcaatttttctcaggataagtcatggcgtgttcgttacatggttgctaatcaactatatgagctatgtgaagctgttggtcctgaccccaccagatcagaattggtccctgcatatgttcgtctgctgcgtgataatgaggctgaagtacgtattgctgctgctgggaaagtaactaagttttcccgcatattaaatcccgatcttgcgattcagcatattctaccatgtgtgaaggagttatcaactgattcttctcaacatgttcgctctgcactggcttctgttataatgggtatggcaccggtgttagggaaggatgccacaatcgagcaacttctgcctattttcctttctcttttgaaagacgagtttcctgatgtcaggctaaatattatcagcaagcttgatcaagtgaaccaggttattggtattgatttgttatctcagtctctgttgccagccatagtagaactagctgaggatcggcactggagagttcgacttgcaatcatagaatatatacccttattggcaagccagttgggtgttagttttttttgatgataagcttggagctctttgcatgcaatggctaaaggacaaggtatactcaatccgtgatgcggctgctaataacatcaaacgcttggcagaagaatttggaccggattgggcaatgcagcacattattccccaggtttttggacatggttactgatccacattatctgtatcgaatgacaatcttacaatcaatttctctactagctcctgttctgggctcagagatttcttcttcaaaactgctccctctggtcattaatgcatcaaaagatagggtacccaatatcaaattcaatgtagctaaagtgttgcagtctctcatcccaattgttgatcagtctgttgttgagagtaccattcgtccctgtttggttgagctcagtgaggatccagatgttgatgttaggtttttcgcctcacaagcactacaatcttgtgatcaagtcaagatgtctagctagatcagtttgcatgtggtctttagttttttttttttcttataagatttacattttcttctgtaattgacatgacgccaacttgcccaatcctttgtatcacataattgttgtgatcctgctttgctttcattttatccgtatctatgctaccaggttctttgtagtgatgaaacattgttcagaattgagatgggttttgacgaccactaattatatggtttaccaatgtg

SEQ ID NO: 7356 - DNA, 952 bp, Glycine max
  Clone ID: 700653721_FLI
ggtttgaggaaactgagttaaggcttggactgcctggaaacggaggcactgaagaagtgctcatcaggaagaggggtttctctgagactgaaactggtcatgaagatgagtctgccaccactgtggatttgatgcttaatctttcttctaaggaggccgcaaccactgctgctgctgctgcagatccaactgataagcacaagactttgcctaaggagaagacccttctgccagcagatcctgctaagcctccagccaagacgcaggtggtgggttggccacctgtgcggtccttccggaagaacatgttggctgtgcaaaagagcgttggagaagagagcgagaagaacagcagccctaatgcaagctttgtcaaagttagcatggatggagcaccttaccttcgcaaagtggacttgaagatgtacaagagttaccgagagctctctgattctttaggcaaaatgttcagctccttcacctttggcaattgtgaatcccaaggaatgaaggatttcatgaatgagagcaagctgaatgatctcttgaacagctctgattatgtcccaacctatgaggacaaggatggtgactggatgcttgtcggtgatgtcccatgggagatgtttgttgaatcatgcaagcgtttacgcatcatgaaaggaaaggaggctattggtcttggtcttgcaccaagagccatggcaaaatgcaagaacaggagctagactagtcgcacaattcatgacctgccccatcctttgtaattgtggtgcccagttggcttagtaactaaagtaaggataagctgcagcagacacggatggacattgcagggtgttgaattatagttaatttgtgtatcattatggtttgttataatatttcaaacaaaacaatgagatgcatgtctaattaagtactaattatgaacaggaacataatgactctc

SEQ ID NO: 7357 - DNA, 1291 bp, Glycine max
  Clone ID: 700653781_FLI
cttcccttgttcgtttcactctcacaatggactccctctctctcttctgcaccggagcccttctcgccggcggcctctactggttcgtctgtgttctgggccccgccgagcagaagggcaaacgcgccaccgatctatccggcggctccatctccgccgagaaagtccaagacaactacaagcagtactggtccttcttccgccgccccaaggagatcgagaccgccgacaaagttcccgacttcgtcgacaccttctacaatctagtcaccgacatctacgagtggggctggggccagtccttccacttctccccctccatccccggtaagtcccaccgcgaggccacgcgcctccacgaggagatggccgtcgatctcatcgaggccaagcccggcaacaaaatcctggacgtgggctgcggcgtgggcgggcccatgcgggccatcgcggcccactcccgcgcgaacgtggtgggcatcaccatcaacgagtaccaggtcaatcgagcaaggatgcacaacaagaaggctgggttggactctctctgcgaggtcgtgtgtgggaatttccttaagatgccgtttgtcgacaacagcttcgacggagcgtactccatcgaggccacgtgtcacgctcccaagctggaagaagtgtacgccgaaatcttccgagttctgaaaccgggggcgctctacgtttcctacgagtgggtgacgacggataagtacagcggcgatgaccctgaacacgtggaggtcattcaggggattgagaggggtgacgcgttgcctggcctcagaagctacgccgaaatagccgaaacggcgcgtaaggtagggtttgctgttgtgaaggagcgggatctggccaagccgccggctcttccctggtggagccgattgaagatgggtaggatcgcgtactggcggaaccatattgtggtcactgttctcgccgctttgggaatcgcgcctaaggggaccgtcgatgttcatgagatgctcttcaagaccgctgactatttgaccagagggggtgactctgggattttctctccgatgcacatgatcctctgcagaaagccccatgacaaggacgaacaaaactctggttagggtttcgtttcatttggaaattggaaaacaaaaaccaccaccgccaccttgtttctttccggtactcttttttctcattattatcctgggtttaacttgttgttattagttattattactatgaacttggtgtaatttggattttgatcttttcaattttaattttagtttgc

SEQ ID NO: 7358 - DNA, 937 bp, Glycine max
  Clone ID: 700653806_FLI
cgtgagaaacatggcttccttaagctccttagtgctgctccttgcagctctaattctatcccctcaagttcttgcaaactatgagaatcccccagtgtacaagcctcccactgagaaaccaccagtttataagcccccagttgagaagcctcctgtttacaaacctccagttgaaaaccccccaatttataagcctccagtagagaagccaccagtgtacaagcccccagttgagaaacccccagtgtacaagcccccagttgaaaaaccaccagtgtacaagcccccagttgagaaaccaccagtgtacaagcccccagttgaaaaacccccagtttacaagcccccagttgaaaaacccccagtgtacaagcccccagttgaaaaaccaccagtgtacaagcccccagttgagaagcccccagtttacaagcccccagttgagaagccaccagtttacaagcccccagttgagaagccaccagtatacaagccaccagttgagaagcctccagtgtacaagccaccagtagagaagcctccagtttacaagccaccagtagagaaacctccagtttacaagcccccagtggagaaacctcctatttacaagccacctgttgagaagcctccggtctacaagccaccatatggaaagccaccatacccaaagtaccctccaactgatgacacccatttctgaaggatgtcaagaggtgtattgagtatatgctaaataagaggtgctcaaaatgtagttatagattacaaattattgcaagggttgctcttagcttcttcatttcaagcttttgtttacactttgcagtgctatggcaaagataagagtatcatggatggaaaaagggggggaaaaaatgttgctttgtactccaaattatgaataatagaactttatattatttatcagattatt

SEQ ID NO: 7359 - DNA, 502 bp, Glycine max
  Clone ID: 700653953_FLI
gcaagcctgaaatcatgtctagggccagaaagccagctctccctaaaaagcctgtagttcagaagagcaaaagggaacaggaagatgagattagacagaagatggaagaattgcggaacgaacgtcagaggagaattgctgaaagaactgcatcctctggtgttggtcgtgccgcgacaaagaaagaccaaattgaaggtaaaacagcaaggatttctgccaagagtgacaagaataagggaatcagttctgtcaaggtcaggggaatttagcaagccacacagtaaagtgtgtttaaataaccgttgattaaaatgaaatgaatagttttgttttctatataatctcaaaatattttgttttgtttcacggttgtatatcaatagattctttatcaattgtaggtgaaaacttgtcataggttttgttggattgtatatcccggcattctttgttctatgtaatgtatgaaaccttttataaatagtttttgtttttcttc

SEQ ID NO: 7360 - DNA, 1676 bp, Glycine max
  Clone ID: 700653979_FLI
tcccagtggaaaatacctctttgctggagtggttgatggaaggaacatctgggccaatgaccttgctgcttctctcactacattgcagggtcttgagggcattgtgggcaaagataagcttgttgtgtccacctcctcctcccttcttcacactgctgttgatcttgttaacgagaccaagttggatgacgagatcaagtcatggctagcatttgctgcacaaaaaattgttgaagttaacgcattggctaaggcattgtctggcaacaaggatgtggccttcttctctgctaatgctgcagctcaggcttcaaggaagtcctctccaagagtgaccaacgaggctgttcagaaggctgctgctgcattgaagggttcagatcatcgccgtgcaacaaatgtcagtgccagactggatgctcaacaaaagaagctcaaccttccaatccttccaaccaccactattggatccttccctcagactgtagaactgaggagggtacgccgtgagttcaaggctaacaagatctccgaggaagagtatgttaagtcaattaaggaggaaattcgcaaagttgttgaacttcaagaagagcttgatattgatgttcttgttcatggagaaccagagagaaatgatatggttgagtacttcggtgagcaattgtcaggctttgccttcactgttaatgggtgggtgcaatcctatggttcccgttgtgtgaagccaccaatcatctatggtgatgtgagccgcccaaagccaatgactgtcttctggtcatctctggctcagagctttaccaagcgcccaatgaagggaatgcttaccggtcctgttaccattctcaactggtcctttgttagaaatgaccaacctagatctgagaccacctaccagattgctttggctatcaaggacgaagtggaggaccttgaaaaggctggcatcactgttatccaaattgatgaagctgctttgagagagggtctgccactgaggaaatcagaacaagctcactacttggactgggctgtccatgccttcagaatcaccaatgttggtgtgcaggataccactcagatccacacccacatgtgctactccaacttcaacgacatcatccactccatcatcgacatggacgctgatgttatcaccattgagaactctcgctccgatgagaagctcctgtcagtcttccgtgaaggtgtgaagtatggtgctggaattggccctggtgtctatgacatccactccccaagaataccaccaactgaagaaatcgctgacagaatcaataagatgcttgcagtgctcgagaagaacatcttgtgggtcaaccctgactgtggtctcaagacccgcaagtacactgaagtgaagccagccctcacaaacatggttgccgcagcaaaactcatccgtaacgaacttgccaagtgaatggtataagaaagtagaatctacaagttcattggttctgcttttataatacaccaaagaaaaattttctatattgggttgtttcaataaccgtgtgtggaatatttagatgttttagcatgctctgtgagcaattgattcttcctcaacccctctccccttatttttcccaactcctgttttccctaatgaatgttgtatctttgcggctttgccgcaatccttattg

SEQ ID NO: 7361 - DNA, 1650 bp, Glycine max
  Clone ID: 700653980_FLI
agaaatcaaagtcgatcaagttccagcaaataatcatccacaaaatggtgtctttacgagtctgaatgacaaatttggtgacagggagtctgaaaaggttttgaaccaaacaaagaatggggataatagtagtcaatcaggttcatctaatcatttagagaaagatgccaatggctctcaatcaggtgaagacagcggtgttaagagtgtttctgcttacagatcttcttcgcatcctataaccgcaccatcccctttgtctggtctgcctgaattctctcaccttggttggggccactggtttacattaagggacctggaacttgctacaaacaggtttgcaaaagataacgttattggtgaaggtgggtatggaattgtttatcacggtcaattaatcaatgggaatcctgtggccattaagaagctcctcaataatttaggacaagctgaaaaggaattcagggtagaagttgaggctattggtcatgtgcggcataagaacttggttcgacttttgggatattgcattgaaggcactcacaggctgttggtttatgagtatgttaacaatggcaatttggagcagtggcttcatggagccatgcgacaacatggctttcttacttgggatgcacggataaaaattctccttggaacagctaaagcgctggcttacttgcatgaggcaattgaaccaaaagttgtgcatcgagatattaagtcgagcaatattctgattgatgaggactttaatgccaaaatatcagactttgggttggctaagttacttggtgctggaaaaagccacattacaaccagagttatgggtacttttggatatgttgctccagaatatgccaattctggcttgctaaacgagaagagtgatgtttatagctttggggtattgctccttgaagcaattacaggaagagaccctgtggattatagccgaccagcagctgaggtaaatttggttgactggctcaagatgatggtggggtgtcgacgctcagaagaggtgttggatcctaacattgagactaggccatcgacaagtgcccttaagcgtgccctcttgactgctttgaggtgtgttgatccagatgctgaaaaaagaccaaggatgagccaagttgttcgtatgcttgaatcagaggaatatcctatactgcgagaggatcgaagacgccgaaggagtcaggcaggaaacatggaagtggagactcagagggagaattctgatactgataagagcgacaatccagattataagcccagtggcagaaggaaccaacgcatgtagcaccagttatctcaaagaatttccagaatgaagaacacaagtgaactgggaaattttgcattcttttgagcttctgtaagttctgatgcgcctgccactttttacatgaaaaacatggagcaggaaccagttactttagggtggtttatatataactgtctgttatattgtagatgttagaatgtagattattgtgtatgaatatgggattgaacagctcccttgcactaattgtgctgtgtacagtcctttactattcttgccttttatcctttcattgtgatggaggaagaactacccttgctttctggaagatcagaaaaaagataagctgcttgttc

SEQ ID NO: 7362 - DNA, 503 bp, Glycine max
  Clone ID: 700654122_FLI
gcgagagagagagagagaatggcagcacttggtggcaatcgtgatgtggcaggaagccagaacagccttgagatcgatggtttagctcgctttgctgttgaagaacacaacaaaaaacagaatgcccttttggagtttgaaaaggtagtaagtgcaaaacagcaagtggtttctggtaccttgtacaccatcactttggaggcaaaagatggtgggcaaaagaaggtttatgaagccaaagtttgggagaaggcatggttgaacttcaaggaggtgcaagagttcaagcttgttggagatgcacctgcatagtctagtgcttaattaggttgcagaagagtgaagagtgagacagcctggctcgaaggggaaagcctaaggatatatcaaagcatgctatatgtataaaataaatgtagcttttctaccttcggtattgatatttgaaatcgtgatttggcatcttatatatgatctctgtgtttgtctatacctatttatct

SEQ ID NO: 7363 - DNA, 2744 bp, Glycine max
  Clone ID: 700654162_FLI
gagagtgtttggttgaaagtagcaaagatgtttcctttcgggcaaaagggtcaaaagataaaggggactatggtggttatgcagaagaatgtgttggatatcaacagcatcaccagtgttggagggatcgttgaccaaggcttaggcttcataggcagtgcagtcgatgcacttacttttgcagccaccaaaatctccatccagttgattagtgctaccaaggctgatggtgggaaaggaaaaattggaaagagtacaaatttaagaggaaagataacattaccaaccttgggagctggcgaacaagcatacgatgttaattttgaatgggacagtgacttcggaattcccggtgcattttatattaagaacttcatgcaaaatgagttctacctcaagtctctaattctcgaagacattccaaaccacggaaccattcacttcgtatgcaactcctgggtttacaattcaaaaaactacaagactgatcgcattttctttgccaacaatacatatcttccaagcgagacaccagctccacttttgaagtacagagaagaagaattgaagaatgtaagaggggatggaactggagagcgcaaggaatgggataggatctatgattatgatgtctacaatgacttgggcaacccggatagcggtgataaatatgcacgccccgttcttggtggttcagccttaccttaccctcgcagaggaagaaccggaagaggaaaaactagaaaagatcccaacagtgagaagccgagcgattttgtttaccttccaagagatgaagcatttggtcacttgaagtcatcagattttctcgcttatggaatcaaatctgtatcccaagatgtcttgcctgtcttgactgatgcattcgatggaaatattttgagccttgagtttgataattttgctgaagtgcacaaactctatgaaggtggagttacactacctacaaactttcttagcaagatcgcccctataccagtgatcaaggaaatttttcgaactgatggcgaacagttcctcaagtatccaccacctaaagtgatgcaggtggataagtctgcatggatgactgatgaagaatttgcaagagaaacgattgctggtttaaatccaaatgtcattaagattatagaggagttcccactaagtagcaagctagatactcaagcctatggtgatcatacctgtataatagcaaaagaacatttggagcctaacttaggtgggctcactgttgagcaggctatccaaaacaagaagttgttcatcttagatcaccatgactatctcattccttatttgaggaaaataaatgcaaataccacaaagacttatgctacaagaaccatatttttcttgaaagatgatggaactttgacaccattggccattgagttaagtaagccacatcctcagggtgaagaatatggtcctgttagcgaagtctacgtgcctgccagcgaaggagtggaagcttatatttggttactggcaaaggcttatgttgttgtgaatgatgcatgctaccatcaaatcattagccattggctaagcactcatgcaattgttgagccatttgtcatagcaacaaacaggcaactgagtgtggttcaccctatttacaaacttctgtttcctcactaccgtgacaccatgaatattaattcacttgcccggaaagccctggtcaatgcagatggtattatagagaaaacattcttgtggggtaggtactctatggaaatgtccgctgtcatttacaaggactgggttttcactgatcaagcattacctaatgatcttgtaaagagaggagttgctgttaaggacccatctgctccccatggagttcgtcttttgattgaggactatccttatgcttctgatgggctagagatatgggatgccatcaagtcctgggtgcaagaatatgtctcattctactacaagtcagatgaggaactccaaaaagaccctgaactccaagcttggtggaaagaacttgtagaggtgggtcatggtgatttgaaagataagccatggtggcaaaagatgcaaactcgtgaagagttggttgaagcttccgctatcctcatatggattgcttcagcccttcatgctgctgttaactttggacagtatccatatggaggtttaatcctaaacaggccaactattagcaggagattcatgcctgaaaaggggtctcctgaatatgatgcgttggctaagaaccctgagaaggagtttttgaagactattactggcaagaaggagaccctcattgaccttacagttatagaaatcttgtcaaggcacgcatctgatgagttctaccttgggcagagagatggtggtgactactggacttctgatgccggtccattagaggcatttaagaggtttggaaagaagcttgaagagattgaaaagaagcttatagagaagaacaaagatgagacattgagaaaccgctatgggccagctaaaatgccttacactctgctctatccttctagtgaggagggattgactttcagaggaattcccaacagtatctctatctaaggaccctatggttgcttaagtactgttcctggttttaaataaatgtgaaattgaaggaaccagattccttaatcagttgtgtatgcttaagtcatgtatttggagtggctgaatgtatttgtatttgtcattaataaagagagttgtgttagtat

SEQ ID NO: 7364 - DNA, 345 bp, Glycine max
  Clone ID: 700654213_FLI
ctgatatatgaattaatatcgaagaaggagagtacatgagtgtttacagttattggacggagagaaatctatagagcttgccagggcaaattaagctgctactaagacctggattaatttatcagtgaaacataatttgtgcatggctgcatggatcctgaccaaaataatcatgtggccggataaagttataatagtcatctttattagtgtttttctccaacgccttcgcatttcacgggcatgtataagcaatgtgatgtcataaaaagttaaatagtacaattactcattttatctttacagttgtacatattaaattatatttttttagactctgcactt

SEQ ID NO: 7365 - DNA, 1637 bp, Glycine max
  Clone ID: 700654252_FLI
ggacattgcttctggggatcttccccctactcaccccatcagattgggtctcgctctcaacttctccgtcttctactatgaaatcctcaaccagtctgacaaagcgtgtgccatggctaaacaggtcaacttcatttcgacgtttttgactttcttgtttcggcaatcaattatcctttccccttttattttactcggagattccacttccgtttaacatttttggaaaaataacaaacattttttttttaatctttactggtatgttccggaaggattttgactaccaggatttctgtttgacttggtatatgccttttgttgtgttgtggggatgtatcttatcagaaaatgggtggattttgtgaatttctcttgtttggcttgctgtaacaatctgttttcttgaatttattgaggatttgcatttacacgcattattctgtgctgactgggcaccagaaaaaggttgctaacacagaccatagttcttacctgtatcatgatagttgaggtgggtgagcaataaattgcacactgcatagcagtctaactgtcaaatttggttcccaatcaattgcaaaggttttgctcatgaagcttggtaggtttttcacttgaattgaactattaacagaaagggggaaataacaagcaagccaacaaaaagtactttaaccttggttcatcagatttttctttctttcagaaataaaatgttattgttcatctgcaatgattatggttaccccatagcataatctggttcttaagcaatctgataattttgctgctcaattgcaactaaatggagttgatattttgtaggaaagatttgattattcatctgcagctaatttttttaattataaaatttagttgattggttgtgtgtaccaaactggatgacttgaaagtgttgttaactttaacccgaaattgtattttctcccctggaaagaatacactacaatttgtctattagcaatccaggcttatccatattggcttacatggcttacacgattccatgttttatgatattctgtctttctctttttccattttaatgcttggcttctactgttctgagtaactgcaacaggagcacgtccttattgattctaaaatctacttaaccgtatattggttttcgtatttgataggcttttgaggaagcaattgctgagctggacaccttgggagaagaatcctacaaagacagcacgctcataatgcagcttttaagagacaacctcaccctttggacttctgatgtccaggtaaatgtcactatggaataatatggaacccacactttacagaatatttctctctttagctcctaacgaatcaaaatctgagttgaactatactttaacttcatgcaggaccagctagatgagccctgatatccattataggtttgatgggtggtattcttcctctcatggaggtgggctttgaatgtcatttctttgtgctaaattaagaatcgccctagtttataaaatgattggcaatctgtgatataatgttgtatgaacagagaccaggcttctttgttttttatttttatgtctcatgatattttggaaaggatactgtataatgggatatccaattaattaattatt

SEQ ID NO: 7366 - DNA, 1165 bp, Glycine max
  Clone ID: 700654386_FLI
cttatgatgaacttcgtctggcaactgaggagttcagccaggaaaacctattaggagttggaagctttggctcagtttataaaggccatctaagtcatggagctactgttgcagtgaaagttcttgacaccctaagaactggctctttgaagagtttctttgcagaatgtgaggctatgaagaactcaaggcatcgaaatttggttaagctgatcacatcatgctctagtgttgacttcaaaaacaatgattttctggctctggtgtatgagtacctgtgcaatggtagcttggaagattggatcaaggggaggagaaatcacgcaaacggaaatgggttgaaccttatggagagactgaacatagctatagatgttgcttgtgcattggattacctgcacaatgatagtgaaatcccagttgtgcattgtgatttgaagcctagcaacattctattggatgaagacatgacagcaaaggttggagactttggattggctaggtcgctgattcaaaactcaacaaatcaagtttccataagctccactcatgtccttaggggctcaattggttacatacctccagagtatggatggggagagaaaccatctgcagctggagatgtatacagttttggtattgtgttactagagctcttctctggtaaaagcccaacagatgagtgtttcacaggaggcctaagtataagaagatgggtgcaatcagcaatgaaaaacaagacagtgcaagtcattgaccctcagttgctgtccctcactttccatgatgacccttctgagggaccaaatctgcaactcaattatttggatgcaactgtaggagttggcatatcttgcactgcagacaacccagatgaacgcattggcattagagatgctgttcgccaactaaaagctgctagagactctcttttgaaactgtctgatgagagtcctagaagagataccgagcgttacttccatgtttcaataaagtgaactctagactctagtcatgtatgtatggtggaaatagaggcatttcgaccaccaacctttaaatagggtattaataaataacaattgtgtttatgtttatgtgtaactctgtctcttgtaaaacttacttatgactataaagaagaatggtggatcatttatggctt

SEQ ID NO: 7367 - DNA, 1389 bp, Glycine max
  Clone ID: 700654670_FLI
caggctcagaatccttttgtaactattctctgaatttccattcattctatgtagtttcctcttttgttttctcttctttttccttgaagcaaagtgaacttgtggtgtatctttccaattgaagtgaaagagtaaggatgtcaagtgggacaacatactggtgttacacatgcaggcagccaatctggcttgaagggagggaagccatttgcccctactgtgacggaggctttgtgcaagaacttaatgagctgcgaggagttgcgcgccaacacggcttctcatcgcggatggaagatgctcatcaaatgcctgacattatggatgctgtaagagctgttatggagcaaagaggttctgaaccgagaattcgggttagagatgctgttgataactttatgaggcagagaatggctggaagatacacaaactttgatgttagaaggaggtctggttctggttctggttctggttctatccttattcctgatgagacttggggtgtctttagttctggtccttatttgatatttcatggtcaagcaccaggattcaccaattctaatggtagctcaagaggtggtcctaggcgtgttgattttggtgactactttctgggtcctagactagaaggactaattgaacaacacatttcaaatgaccggcttggtccaccccctgcatcgcactcttcgattgatgcaatgccaactattaagatcacacatgaacacctacagtctgattcacactgtccagtttgtaaggaacgatttgaactgggatccgaggccaggaagatgccatgtaaccacgtttaccactcagattgtattgttccatggttagttctgcataactcgtgtcctgtgtgccgtgttgagctgccaccgaaagaacatactagttctcgtggtagacgaatttggggtaatggcagtggtagtggtagtagcaatgatatctctaggggaagagagaatagacagatgaacaatggaaggagaaatctgctatcttatttgtggccattccggacctctagttcaagtacttagagtgtgtttgttttatcagaatcacactttccaaagcatgttgaacgtgatttctatgagattgattttgaaggtgattcaaagccaaaccaaaggcaaccttaatcattgtgctgagaccggggaatctactgttttatatctctttggccagaacaatgacagaagttaaaaagtttcctttcttcttcgagacaagtgtaattagctgtcaaaaaatgcttgtaatttaaatgacatgaagaaagtttctgtagattgtgctttgagcttgatctcatagatcatagaagtatgcgaatatctttgtaaatacaatattcttaaaacc

SEQ ID NO: 7368 - DNA, 1489 bp, Glycine max
  Clone ID: 700654923_FLI
ggccaggcaagccccactcaaccaccacacctctcctcgttcacgctacccctttctgctcttcttctacctttcaagttttaaaagtataaagatggcagagacattcctatttacctcagagtcggtgaacgagggacaccctgacaagctctgcgaccaaatctccgatgctgtcctcgacgcttgcctcgagcaggacccagacagcaaagttgcctgcgaaacatgcaccaaaaccaacttggtcatggtcttcggagaaatcacgaccaaggccaacgttgactacgagaagatagtgcgtgacacctgcaggaacatcggcttcgtctcaaatgatgtgggactggatgccgacaactgcaaggtcctcgtcaacattgagcagcagagccctgatattgctcagggtgtacacggccaccttaccaaaaaacctgaagaaattggtgctggtgaccagggtcacatgtttggctatgccactgatgaaacccctgaattgatgccattgagccatgttcttgcaacaaaactcggtgctcgtctcaccgaggttcgcaagaacggtacctgcccttggctgaggcctgatgggaagacccaagtgaccgttgagtattacaatgacaatggtgccagggttcctattcgtgtacacaccgtgctaatctccacccaacacgacgagactgtcaccaatgacgaaattgctgctgacctcaaagagcatgtgatcaagcctgtgatcccagagaagtaccttgatgagaagaccattttccacttgaacccttcaggccgttttgtcattggtggccctcatggcgatgctggtctcaccggccgcaagatcattatcgatacttatggaggatggggtgctcatggtggtggtgctttctccgggaaggaccctaccaaggttgataggagtggtgcttacattgtgagacaggctgctaagagcattgtggcaagtggacttgccagaaggtgcattgtgcaagtgtcttatgccattggtgtgcctgagcctttgtctgtgtttgttgacacctatggcactgggaagatccatgataaggagattctcaacattgtgaaggaaaactttgatttcaggcctggtatgatctccatcaaccttgatctcaagaggggtggaaataacaggtttttgaagactgctgcctatggacactttggaagagaagaccctgacttcacatgggaagtggtcaaacccctcaagtgggagaaggcctaagtaattcattccactgctctatgctggaagttttttgagcgttgcccttataatatgtctaatatccataactttccacgtctcttactctgtgtgtttctctcctcttcctcctattttgttatttgtatgttcttttgtaattttttacgtgatcaactaaaaacatgtactctctgtttgtatgtatgccctaccaatgtgtctcttaatatc

SEQ ID NO: 7369 - DNA, 920 bp, Glycine max
  Clone ID: 700655035_FLI
gttgtgtagtatttggagcgacgggaatgtgaatatgacagaaagactcttgtaaacttcttcaaggaaggagattcactgcaccctactttaactgatgtaatagtattcacatctactccagacaaagtgaacaacaaatactacctgggacctgctccacttgaagacatggctaggcaaatagcaactgcatatggcccttgcggaaacaacagggattacattttccttctagaaaaggccatgtatgatattggtaagttatctccttaacttacacatacatatgcagtcaaaaattattctctgaatgtcactagcttcgcatttaaatttgcggggcattctgatgagtcaagaggtttgatgtgcaggccatgaggatgacttagtgatagagcttgccaatgaagtgaggaaagtacttggaatgggaaatgtagtaccaaaggagaagaaactggttggagcagcacaacttccacaccctcctcatgtaacaatccctacccttcaactgcacccactgccagaacctattgcaatggatatatagctgaggggggagatgaccaaaaactgacgctgagttcggctactaaactgatttcctgctaaccctcattcaaatttaaataacatcacatatctattcctcttcgcctacttttagcggctttccagccattcccttgagatattgcttaaattcagtgaggcgcaatattttgaattggaatgttcgcggatattttacttctgcagactgcagtgttattattgaaaaagtttcattttttttatttatttcgtttacggcgatcttacacagttttttttatatcagttctgcattcaatcttaccgagttaatagctagctagtacttcgaaatgaataatacttctgttttgagc

SEQ ID NO: 7370 - DNA, 1038 bp, Glycine max
  Clone ID: 700655090_FLI
atgaattgtcagtatgcaataactccatcaggggatgtatttttgctagaggccaaccctcgagcttctcgtacagttccatttgtatcaaaagcaattggccatcccttggctaaatatgcttcccttgtcatgtctggaaagaccctctatgatttacagtttacaaaagaagttatccctaaatatgtgtcagtcaaggaagctgttcttcctttttcaaagttcccaggctgtgacgtgtttttaagtcctgagatgcgaagtactggtgaggtcatgggtattgacccttcttataatattgcatttgctaaggcacaaattgctgctggccagaagttaccactttctggtaccgtgttccttagtttgaatgacttaacaaagccacatcttgagaagatagcaaaggcttttgttgagaatggtttcaagattgctgctaccagtggaacagctcatgttcttaacttagctaaaattccagcggagcgagtgctgaagttgcatgaagggaggcctcatgctggtgacatgattgccaatggggacattcagctgatggtggtaaccagttcagatgatgcacttgatcggatagatggtctggccctgagaaggatggctttggattacaaggttcctatcgtgacaacagttaatggagctctggcaactgctgaagctataaacagcttgaaggccaactctatcaaaatgatcgcacttcaggacttcattgatggtgaatttaatgagtgagaaagttttttgcagacaaccactttctttctgaattggttaaggcgatacacaccacttaccgtgagattgtacaagttgctagatttgggagtggcagatgaattgctatgggatgctttcatttgtaaagtttccagatgagatatgtaaaggtcatgtagtctgtgtcctgactcctgatatatagcatttgtgtttttgtgtaaacggttttgtagtatttggatatctactgcttaataattaaactcatttttaaaatcttacaac

SEQ ID NO: 7371 - DNA, 479 bp, Glycine max
  Clone ID: 700655373_FLI
gcatttataaagcgcctgctggctgtttcagatcctagccaaatgaagactagcgtgaccgagactagtgcagctgaacttgcgaagctgctttattggttgatggtggttgggtacagcattcgcaatattgaagttcgttatgacatggaaagagtatttggcgctcctccaaagctagctgaattaccgccaggtgaaaatgtttaagctgtctggaattaagcagttcaacaaagtactcgtgtccctagttgaagccaaatgccctaattagattttacaccttttttgttgattggctgaaaggccaatcatgagctcaaagagaagtctgcatttttctgcggtcatgaacgacgattggtatcctaatttatatatttgataaaacttttccttttttggccaccatgaaacttttattcacaattatactgacaaagatatcaaggtcgactacaaaattggcaagcttc

SEQ ID NO: 7372 - DNA, 1981 bp, Glycine max
  Clone ID: 700655523_FLI
ctacgaccatttcaggaagaaagaagtgcaatggacatcggaacctatggctatcctacaccagcagtgaaaaagattgagtcttactatgatgtgccagagggagtggatattcggggaagatatgatgcagagtttgcaaaaatcctcacaaaagatgctttgaaattcgttgctgacttgcaacgtgagttcaggaaccatatcaagtatgcattagagtgcagaagagaagcaaagaagaagtacaatgaaggggctcttccagagtttgatcctgccacaaggtacatcagagagcaagagtgggtgtgtgcacctgttccaccagcagttgctgatagaaaagttgaaatcactggccctgtggatagaaagatggtcatcaatgctctcaactctggagctaaagtctttatggctgattttgaagatgcactgtcaccaggctgggaaaatcttatgagaggccaagtgaacttaaaggatgctgtggctgggaccataagcttgcatgacaaagcaagaaacagggtttacaagctcaatgatcaaacagcaaagctttttgtgcgaccaagaggttggcacctaccggaggcacatattctgattgatggtgaacctgcaactggttgccttgttgattttggcctctatttctaccacagctactcagcattccggcgcactcaaggtgctggctttggccctttcttttatcttcccaagatggagcattcaagggaagctaagatttggaacaatgtgtttgagaaagctgagaaggtagcaggcatcgaaagaggaagcataagggcaactgttctgatagaaacacttcctgcagtgtttcaaatgaatgaaattttgtatgaactgaaggaccattcagtgggtttgaactgtgggcgttgggattacattttcagttatgttaagaccttccaagctcatccagatcgcctcttaccagatagggtcctagttggcatgactcaacacttcatgaaaagttattctgatcttctcatcaggacgtgccacaggcgcggcgtgcatgctatgggaggaatggcagcgcagattccaatcaaagaagatccagtggctaacgaggtagcactggaacttgtaaggaaggacaagcttagagaagtgaaggcagggcacgatggaacttgggctgcgcaccctggtctcattccagcctgcatggagattttcaacaacaacatgggcaatgcttccaaccagatagacacagtgaaacgcgaagatggggcaaacatcaccgagcaagacctcttgcagataccaagaggagcccgcaccatggaaggtctcagattgaacacaagggtgggaattcagtacgtggcggcgtggctcaccggaagcggttcggtgcctctatacaacctcatggaggatgctgccactgctgagatcagcagggtgcagaattggcagtggctcaagtatggagtggagctcaatggggatggtcttggagtgaaagtgaacaaagaactttttggtagggttgttgaagaagagatggctaggattgaaaaggaagtggggacagagaagttcaagaagggaatgtacaaggaggcttgcaagatcttcactcgccaatgcacgtcaccaatgcttgatgattttctcactctggatgcttataattacattgtcgtgcatcacccgagggaaacatcaaagctttgaagtttgaactaaggaagtggttctttattatgcataataattgggtcctttagattctgtcttgtttgttctcctaagttgtctttgtctttttaccatcacttcatcgtttcatgaagggcctgggacgtcatataattgtgcgtggaagagaagaataaagttcgtcattgtagctatattttgaatgatataacttgccttatgtttactagcaatgaaaacaattatactagaaatttgatat

SEQ ID NO: 7373 - DNA, 817 bp, Glycine max
  Clone ID: 700656015_FLI
catttttggagcaatatcaaaatcataatgatcctgtcactactattgatccgaagcgtacttacggagttagagctcccacaatgcatcccatatttgaaaatttccgagtcgtgaccttgaaagcacttttaacatctgcagcttcaacctatcagcttacagccttaggagaattgctatatcagtgccaccacagctacggtacttgtggacttggctctgatggaacagataggcttgtaaacttagtgcaagagttgcagcacagtgcagcatctaaagctgaaggtgggacattatatggagccaagataactggtggtggttctggtggaacagtttgtgtagttggcagaaactgtctcaagagcagtgaacacatttttgaggttcaacataggtacaagaaagctactggttatttgcccttcatttttgaaggttcatcacccggtgctggaaaatttgggtacctaaaaatacgtcgtcgagctaccccaaaaaaggctaacgccatcaaggatgatggtgcactcacctcagaaaaggctaacgctagcaaggatgatggtgcagtcacgatgaagaataatagttaatcatggcttatatttaaccactttaagagttctacctttgttgtctttccccagaacatgtatagtatggttaaattttgaaccatttcaacaattattaacatttttaaagcactttattttattactttttattacaatttatgttggatggaactttattatgtgagtgagttgagaataaatgaaaaatgaaggtagaacctaattattac

SEQ ID NO: 7374 - DNA, 409 bp, Glycine max
  Clone ID: 700656055_FLI
cacagaggacggagccgaagaagccgttttcgcatgcctgcaactccacccagtaacaaaggaagaatctctaccctcttcgctttcactcctcgccaagttttgttaagcaaccaaacaatgaagcacaccactgacaatggaacccccatctcggaacacaaagttcttcttcaccaatccattgcccgttacttggaacgcagtggcttctccaaaactctgaaaaaatttctctccgaagcgcatatcgagaaaaacgatttggagggatcaccagttgatctggaagaaatgtgtctcaagtatttagaaatatgtggcaaagatgggaagtcaaatattaatgatcaaaatgagcaagttgcaggtgggcacagcaaaaacaaagaagagggtaaatccaagg

SEQ ID NO: 7375 - DNA, 434 bp, Glycine max
  Clone ID: 700656209_FLI
gtgaaaatcaaaattttgtctctgtgcttgcgccacatcactaggtcccatcaagacagttggttccagcttctgggatttctatctgaggtcttctcaaggtgccacgaagagattttatggactggttgtttgtttcctggtgttgtggttttgtagtgccctgaattttgtcattttgcgcgtggtatgaacaatattccttagggtcagttacaatttactagagtttatatatagcacattcttttggggcttttacctcaatatactcgtgccattgtgaatgtagaaaagcggaactagggacgggtgcctgtttaaattttagatagttattttttttaatattttttcttgatcatttttttaatttttatattttcctggattgtaaacatggatggttaatagagaaaataatgattcttccc

SEQ ID NO: 7376 - DNA, 530 bp, Glycine max
  Clone ID: 700656559_FLI
gtgattgttgtgactcgttcttcttcgtcgttatcttcttcttttgttgtttgtgtgtttgttttttctctcacctgaaaatgtcttgctgcggtggtaactgtggttgcggaagcgcctgcaagtgcggcaacggctgcggaggctgcaagatgtacccagacttgagctacaccgagtcaaccaccaccgagaccttggtcatgggagtggcaccagttaaggctcaattcgagagtgctgaaatgggtgttcccgctgagaacgatggctgcaaatgtggagctaactgcacctgcaacccctgcacttgcaagtgaggtgttggagagctaaagcttcaagcagaaatggcccttagaaataatgataaaaactatatgtagtttcaaaacttcaaaattatgtagtatgtattatgttgcactctggtgttttgtgtctaaacaaacacccttagaataaagtggtcatttcttgcccttgagcaagttcaagtgttttggacttgtgatgggtgtgttaaggtc

SEQ ID NO: 7377 - DNA, 367 bp, Glycine max
  Clone ID: 700656682_FLI
ctcctgcaccgcccgggacatccaggccgccgcagccaaggccgcccacatgatgatggtccaggctgcctccgccgactcgccggagaaaagcagcagcattacctccgactgcgacggcagcggtggtgacgacttctggggcgaaattgagctgccagaactgctcaacggcaagtggtgggcctccgaccgccacgtaacgccgtggccggagactgagcttccgccccagctgcccttcaccacggcgtgcttgtagtagtttgtaataatcaataatgctcttcccatgctctcatgacttggttggtatattagttacatatattattgctcatataattaagtaactctctttgtgttc

SEQ ID NO: 7378 - DNA, 1060 bp, Glycine max
  Clone ID: 700656920_FLI
catttctgctgctgaggttttgggaaggcataatgatactattatcaaaagagtcaccaagtatcagtctaaacttcctccgacaaaagttgctagagatggttccattatggaatgggcagaagattttgtggacccagatgtacatcatcgacatgtttcacacctttttggactgtttccaggacatacaattagtgttgagaaaactccagacctctgtaaagctgtggaagttagtctaattaaaagaggagatgatggtccagggtggtcaacaacttggaaagcttcactgtgggcacatcttcacaatagtgagcacgcatatcgcatgataaaacacttgattgtcttggtggagcctgatcatgaaagggattttgaaggtggactttacagcaacctgttcacagcacatcccccttttcagattgatgcaaactttggtttttctggagcaattgcagaaatgcttgttcaaagcacaacgaaggacctctacttgcttcctgcattgccacgcgacaaatgggcgaatggttgtgtgaaaggattaaaagctcgtggtggggtgacagtcaatatttgctggaaagaaggagatctgcttgaatttggcctttggacagaaaaccagaattcccaacttagactacattatagaggaaatgtggtcttaacaagtttatcgcccggcagagtttactcatataataaccttctgaagtgtgtgaaggcatactcccttaacgaagtgaatccttgaatcttttctataaatcttctgaggaacatgaattgctttttgcaatttgtcatagggtattagggttcaatgttggatgtagtttggtggttcaagatacatttatcttgattcctaagttaattcttccagagtcacatttatagccacggaggatgtaatttactaatttaagggagaactttttcagttgatgcatttgttttaagttttgtggtgtaaaacccgtgtaatattattgtcatttattattcaacttcatacaaatggatcaaccagatgttgaatgtg

SEQ ID NO: 7379 - DNA, 861 bp, Glycine max
  Clone ID: 700657072_FLI
gcctggcagcacaagaatcccatattctcattctcttaagccagtgattagaagccagtttttctgtgcttcatactacaccttcacaaaccccaagaagaatggaacggggaagaagaagcagctcttttggccctatgtcctcaaccgtcccttgttttctcctccttttgttctgtctctcaggatctgctgaggcctacaagaattatacagttggagactctttaggatggtttgacaatactgagaagtccaatgtcaattaccagaagtgggctgacagtaaagaattcagcttgggagatttcctcattttcaactcggacactaaccactcagtggttcagacatacaatttcaccacatacaaagaatgtgactatgatgatgcacaagacaaggacacaacccaatggtcagcttctgatccatccaacacccaaacacatcctgtgacagtggctgttcctttggtgaaggaaggcatgacatacttcttctcaggtgattatgatggtgaccaatgcaagagtggacaacacttcaaaataaatgtgacctatggacaagggttgccaaagagtcttaaatccccagaagatgctccatctcctgctagtcctgttgctggagatgatgattcagcaccagacactattgttccttccaatttcagtcaccccaaagaagaaaatgatgatgacaaagctagtgacgaccagaaatctagtagttctgtttcaattttaatgcatgcacaacttcacattgtcttattagggatactacttttcttgttttaaagagtcaagatttattttttatatatatatatatatatatatatatattttaaat

SEQ ID NO: 7380 - DNA, 1248 bp, Glycine max
  Clone ID: 700657119_FLI
gttgtgaatgattcgtgctaccatcaactcgtcagccactggctaaacactcatgcggttgttgagccattcgtcatagcaacaaacaggcatctgagcgtggttcaccctatttacaaacttttgtttcctcactatcgtgacaccatgaacattaattcacttgcccgcaaatccttggtcaatgcagacggtattatagagaaaacattcttgtggggtaggtactctttggaaatgtctgctgttatttacaaggactgggttttcactgatcaagcattgcctaatgatcttgtcaagagaggagttgcggttaaggatccatctgctccccatggagttcggcttttgattgaggactatccttatgcttctgatgggctagagatatgggatgccatcaagtcctgggtgcatgaatatgtctcattctactacaagtcagatgcagcaattcaacaagatcccgagctccaagcttggtggaaagaacttgtccaagtgggtcatggtgatttgaaagataagccatggtggcaaaagatgcaaactcgtgaagagttgattgaagcctcggctaccctcgtatggatcgcttcagcccttcatgcagctgttaactttggacagtatccatatggaggtttaatcctaaacaggccaaccattagcaggagattcatgcctgagaaagggtctgctgagtatgcagctttggctaagaaccctgagaaggagtttttgaagactattactggcaagaaggagaccctcattgaccttacaattatagaaatcttgtcaaggcacacatctgatgagttctaccttggggagagagatggtggtgactattggacttctgatgctggtccactagaggccttcaagaggtttggaaagaagcttcaagagattgaacaaaagcttatacagaagaacaaggacgagacgttgagaaaccgcagtgggccggctaaaatgccttacactttgctctatccttctagtgaggagggattgactttcagaggaattcccaacagtatctccatctaggggctctatggttgttgcagtactttccctggttttcaataaaagtgaatagaaggaatatgattccttcatctacctatgtatggttaagttatgtatttggggtgattgaatgttctcgtgtttgctgttaagtgttaatgaagaaattctgtttgtataaattgctgttaagtgttctcgcgc

SEQ ID NO: 7381 - DNA, 905 bp, Glycine max
  Clone ID: 700657173_FLI
gtccaactcagtagtcaacactaggcactctctattcccattcattgcagaagaagatggaggctcacccctacgtcccacgcgatttgcacttacccggctacgctccctgcttcctttccatgtccaacattctttccgtcttcgcctcctcctcattgctcatcgtcactctcgtctggatcttctctggacgctttaagaaaaccaaagttgatagagtgctgatgtgctggtgggccttcacaggtctcacacacattattcttgagggttattttgttttctctcctgagtttttcaaggataaaactggcttctacctggctgaagtttggaaggaatatagcaaaggggattcaaggtatgcaggaagggatgcaggggtagttactgttgaaggaataacagcggttttggagggtccagctagccttctagcagtatacgctatagctactgggaagtcatatagctacatacttcagtttgccatttctttgggccagctatacggaactgctgtttattatataacagcaatcttggaaggtgataatttttctacaaactcgttttactattatgcatactacattggagcaaatgcctcctggattgtaatacccttgatcattgccatccgctgctggaggaagatctgtgcagcatttcgagttcaaggtggccagacaaaaaagcctaaagttcgttgaaggaaacattttcaggttattggtcttagagatcctgagctaataatgatgttttggggtagttgagataggagagattgttgtaagaattgtgacattgattctcttaaactgcatatctcagggagaaaaaaaaatcccagtgtcatttgagaaggtgatgtttttaattttaagttttgaataagt

SEQ ID NO: 7382 - DNA, 1168 bp, Glycine max
  Clone ID: 700657203_FLI
gcccttctttcatcattcatcgctttccaccaggcacgcagattctctccttccttctctctatccaaattttgattctttcgatcaaacccgcaacacccacctcaccaaaaccctacgcaacccatccatgacgcttggcttaggaggatccagtgtcgtggttcctaggaacttcagattgctggaggagcttgaacgtggagaaaaaggaattggagatggcacagttagctatggaatggatgatggtgatgacatttacatgcgctcttggactggcaccattattggcccccataatactgtacatgaaggaagaatttatcaattgaagctgttttgtgataaagactacccagaaaagcccccaagtgttcggtttcattcacgagtcaacatgacttgtgttaatcatgaaactggagtggtatcatttataatttttcacatgctttcattttataaatatctttgtgcagtgcatgctgggacatataaaatgtgctaataacagtgtttttcctctttaattttacaattggcgataacttgagatgcctgttatttctaatcaagttcaatgtggatttttgggaaggaaataattggatatattttattcatactttattcgaaagcaagagtcgactcagcttcatatcgtgacacttctcatatttatgataatgtgaaatccacagtccattttgcaaacttaaagactgtttatctgcgaagcaagatttatagacttgtaaatgaaacaggttgaaccaaagaaatttggtcttcttgcaaattggcaaagagagtacaccatggaggacatactgacccagctgaagaaggaaatggctgctcctcataaccggaagcttgtccagcctccggaaggtacctacttttagcatccaacaagatggtatagatgtcggatcgtattgcatatgctgcatgcaatatatagtgtgtaatgctttgtagatccttccttctgaattcaagaacataggggaatgccccgaaaagcttcatatttccatctccatggcttcagagttgttttgttgtctttgtcaacggtgctgaaggggactgtttgattgaaatattgtgtgtgtcaaaaatttcgaaagcaactctttcaagtaggtattttcatgtg

SEQ ID NO: 7383 - DNA, 1093 bp, Glycine max
  Clone ID: 700657218_FLI
ggcaagtgagttaggatagccccagaaatagaaactcagaaaaactcacccactccaagttactcactcaaccacaaccaccatgttctgatattcccccaaccacacttttcacacaccaatcaaactaatgcaaatgcaaagcatgtcaaccaccatggcttcgttttctcctccgacccatttctcagccactccttcttcctcgaaaccccgtcttgtctacaagaacaactttttcttctctctcaggtcgaggagtctttctctctctcccttgaaggctgctgcttctgagaacggcgtcgggaccgccgtggagcctccgccggagcaggccgtgccggtgccggagccttctctgcctccggtggacaatagttctgtggggaccaatgggtctgctgttgcggttgagagtgaggtggttaaggttcaaagtagtttcgtggatccgaggtgggttgcaggaacatgggatttgaagcagtttcagaaaaatggaaccaccgattgggatgctgttattgatgctgaggctagaaggagaaaatggctcgaggataacccggaatcatccagcaatgaaaatcctgtagtttttgacacctccatcgtaccttggtgggcatggatgaaaaggttccatctccctgaagctgaactactcaatggccgtgctgcgatgatagggttctttatggcgtattttgttgatagtttgacaggagtaggtctagttgatcaaatgagcaacttcttttgcaaaactctgctgttcgtagcagtgttgggagtacttctgatccgaaagaacgaggaccttgaaaaccttaagaagctatttgatgagactacattatatgacaagcaatggcaagcaacttggcaggatgagaattcaagcacttccaaaaatgagtagtggaattgctgttttgtagttctccctcccccatttgtctcttaacacagtgctctattaattttgttagtgcaaaacaagacatggatatggattagacattgtatttcatttccttcacttgtcctagttccaaatgacccagaaagtttgtgtttgcaatgctgg

SEQ ID NO: 7384 - DNA, 522 bp, Glycine max
  Clone ID: 700657234_FLI
aatccgaggaaacaaaggcgatgctggtcaccagatcttcatcggcgatttgttgatgcgcttcaacaattagggggcccacaagtggccactccaaagcagattagagaactgatgcaggtggtaggcctcacaaatgatgaagtgaaaagccatttgcaaaagtacaggcttcattttaaaagacctcaaggttcttcaattggccatgctaacagtggcttatgcaagatggcacaagataaatgtggagacgataaatctggctctccacaaggtccactcttcctaggagggtctggaaaaggtctttcaagctctggacgcaatagcatggacacagaaggagatgaggaatcagattgccgcaattggaaaggtgggattcatcaccaattgcaaccagaaagtgacgttttgtgagcttttacagttttcagatacatgagaattaaacatatataatgaatattcaaaatttggagaaattatttggtaatttaaaattattactttttcatt

SEQ ID NO: 7385 - DNA, 476 bp, Glycine max
  Clone ID: 700657392_FLI
aacactgaaaagctaatttttaagaccaatagcaatcaggatgaattcctgttagtattagtaactgtggagccagaggggtttcctgcaaaactgcatgtagcagagaggcaatttattatcttcaatatagtatgtgatgaactattattaggcataccccacaaagcttggtgggtagtggcactggctttactctgtctaggaattgctttcatcgtgccttcttttcttccattgcatttgctaccaaagaaccaagtcttgaggacagatgattatgtttctaaaatttcttgataagcctccaagaagacatatttttttaaggcaaatgttagttgttaattgttagttttatgaacctccaagaagataaagtgattgtataattgtttgtctcaaatgcggtgaggcatgcttgcatatgacgttggctttgtcaatagaattttggaagctaccatgtggctgct

SEQ ID NO: 7386 - DNA, 374 bp, Glycine max
  Clone ID: 700657475_FLI
gatgaagctgctttcttgttggatttggcttctatagagggagaatgggatgagtatttggagcggattgccaaatgttacgaggaagcaggacttcaagatgtcgctaaattcatactttatagagattaatattagcagatttctttccaccaacaggcttctgtacatttccatttcggcatttccagtacttcatagttcatatgaagttttgaaaataattagaggaaaattatacgatttattccgcaggcttggatatttttccttcagttctcatttgttgcaatcaatttaacctgaactcctcatatgcctattatgtgtcatgctctacatataagaataatgatatttttacagtctttttt

SEQ ID NO: 7387 - DNA, 695 bp, Glycine max
  Clone ID: 700657519_FLI
ctcgatggcggcgatgagggagatgatattccgaatagcggttatgcagcccgttcacatcgatcctgaatccataaagccacccaagagaaggaacgtgaagatctccaaggatccgcagagcgtggcggcgcggcacagaagagaaaggataagcgagagaataaggattcttcagagattggtccctggcggcaccaagatggacactgcttctatgttggacgaggccattcactacgtcaagttcttgaagaaacaggtgcagacgctggagcaagcaggggcaaatacgtcaccacacagtaatactaatagtcccaataatcacgttgttggtgctgctggttttccgctagggatgtcttctaactactccaataatagtagtgttaattattcttctttgttgatgaagggtggttgccaaccttgtcaaatgttcggttccacttctaaacaattgctcagctaatagttgttaggggaagtttgagagggaatttgcttgtttttgtgatgagaaagcaatgggttgtgtagtgttgatcaattggtgtatgcatgggtttggtggatcgggaagaacatgtttctccatgttaatgccattgttgcaatgatcttttgcttttacaatggtgggggtgggtgtaatcgaaatttcattaacataatggatgagtatgttctac

SEQ ID NO: 7388 - DNA, 321 bp, Glycine max
  Clone ID: 700657564_FLI
agaatatgtgcaacgaataaaagaaagcgatggaaagcgcttcgcgatgcacgaaagagaagaaatggaagcaaagtttccgcgttttgtctttcataaaaaaaatgttaaattattattttctatgataggattggtttcttgtcttttttctcttgtttaagaatttcggtgtattttaacagttgtaaagcactctgcgctctctctgcatgatcatgtacaactacaagcatgctctctgtagttttcaacctgctgcgcttgcaggggttgtaaaactaatcaatataattaaataaattacattctgtctctctc

SEQ ID NO: 7389 - DNA, 667 bp, Glycine max
  Clone ID: 700657753_FLI
gttttgaagagctatgcatcaagaaagaagccattgagggagaagagaagttttgtgcaaaatccttgggaacagtaattggttttgccatttcaaagctgggaaagaacattcaagtactttcaagttcctttgtcaataagcaagaccaatacactgtggaaggagtgcagaatcttggagacaaagcagtgatgtgtcataggctaaatttcagaactgcagtattttactgccatgaagtccgtgaaacaacagctttcatggttccattggtggctggtgatggaaccaaaactcaggcacttgctatttgccactcaaatacttctggaatgaatcatcaaatgcttcatcaacttatgggagttgatcctggaactaaccctgtttgccatttccttggaagcaaggccattttatgggtacccaatttatctgtggacactgcctatcagaccaacattgttgcttaattagtccatgcatcttgagcaccatgagaatgagattgtgtataaaataaattatcatgtgctgtgtgttgtgcaagtactaccttctctagctagattgctagagctagaatttcaacctacctatgtgtactgataagatctgcttccctacttaaagagagcatcatcctgtgatcagtgtgcttcgt

SEQ ID NO: 7390 - DNA, 706 bp, Glycine max
  Clone ID: 700657794_FLI
gtttctttccttctctctctctggagctagcgcgagtgaccggagcggcgaagatagagtcagatcggaagcggaagaaggcgtcgacctcggcggcggagaaggagaaccggaataagcataagaagtcgaagatgtcgtcgtcgtcgtcgaagggtggtggcggtattgaggttagggcttcgcacatattgataaagcacgaaggttctagaaggaaggcctcgtggaaggatcctgaaggtcgcatcatcaagagcacaaccagagaaaacgcggtttctcagctcaaggccctccgcgacgacatcgtttcgggcaaggcctccttcgaggacatcgcctctcgcttctccgattgcagctccgccaagcgcgggggtgatctcggtccttttggtcgtggccagatgcagaagccttttgaagaagcaacttttgctcttaaagttggtgaaattagtgacattgtggatactgacagtggagtccacattattaagagaacaaaatgagattattacacggagtaatctcctaataaggagagacattaacatctgtagaatatttccaggattcttgctcaactcaagatctgttgatatatgttttagacatggcggtgtcttgtttttggatgatatattgtttttgtgacaattaaaaacatatgcttgtaattttgaaagacaattataaggtt

SEQ ID NO: 7391 - DNA, 499 bp, Glycine max
  Clone ID: 700657802_FLI
gcgggaactaaaactgcagtgatcgaggagttatttatacctgggactgtttactatcttaagaggaacttgggatcccaaattgatgctggaaaggattttttcaccctttacaagagggagcctggtgagcatttccagaaggtaatcttttcggggaattttatcacagaccacagatgtgatagccattattatgctttgagagatgtccttaaaggtgtgccatggtgtgggaaggaaggtatatttaaatagaaaatgttgttaattattttaatttaattttcccgtatcatttgattgtaataaaactgaacattgtgtagctgattttctgtgcttagggggtgccttacagttcttcagtctgtgcggaggtgttagcaatagcacagtagattagaagtttggcaatttaggctataaaatacataaaaaaattgtggatagtttggttctatcataaataaaaaaatgctgaattgttgtgtctgtt

SEQ ID NO: 7392 - DNA, 1136 bp, Glycine max
  Clone ID: 700657806_FLI
cccaaatttgattgtatgaaccagtagcttttgcttgtaaattgaattgatgaagtgggaaagtataaccctttcttctcctacttcttgtactccaaactccaacaccaattggttggtggaaaataatagcaggagcacaaaatggacccctgaagagaacaagctctttgaaaatgctcttgcagtgcatgataaggacaccccagatcggtggcacaaagtggctgagatgattcctggaaagacagtggttgatgtgataaggcagtacaaggagttggaagtggatgttagcaatatagaagctggtttgattccagttcctggctatagtagcactgctatctcacccttcaccttagattgggtgaacactcctggctatgatgggtttaaaggatgtggaaagagaccttcctcagtgagacccattgagcatgaaaggaagaaaggagtgccttggactgaagaggaacataaattgtttctattgggtctgaagaagtatgggaaaggcgattggagaaatatttctcgcaatttcgtgattactagaactccaacacaggttgctagccatgctcagaagtacttcataaggcaactttcaggaggcaaagacaagaggagggccagcatacatgacataacaacagtgaatctcacagaaaccatcacaacttcttgttcagaagacaccaatagatccacttcaccacatgttctctcacagccgcagcagcaaaattctactcctactacccccagaactcattttcagtggactaatcagtctaacacaggagtagctatgactctcaaccctgctcatgaaagagtcttcatgtctccttatggtgctaactcctttggggttaaaattgagggacagaatcttcatgagtcttcttacttgggacctcagacacagaacatggttttccaaatgcaacagtcctcacaacactagttccatgcattagaacttgttgtagtgaattattaatgggtagaagtagaaccagaatcttctgtccatttcaataagtacggtgcttgagttgagctttttcctaagttcttatgtgaatatcctagattattggttagttattatgaacttgaaggaaggt

SEQ ID NO: 7393 - DNA, 1567 bp, Glycine max
  Clone ID: 700657811_FLI
ctcagcatctaagggttcattggagtggaaccctaattttaaccaaagaagttacattttctttcctaagctgcctttattttttcaaatgattattttgtgttcaatggggtgtgtttgttttgcaggtatgagcttgggaggcagccagcaaacacaaagctatcaagcaacaagacggttaggaggattagggttcgcggtgggaacgtgaagtggcgcgctttgaggcttgatactgggaactactcttgggggagtgaggctgcaacccgcaagacaaggattcttgatgtggtgtacaatgcatccaacaatgagcttgttcggactcagacattggtcaagagtgccattgttcaggtcgatgcagcacccttcaagcagtggtatctgcagcattatggcgttgaggttggccgcaagaagaagagtgcagcagcttctgccaagaaggaaggggaggtacaacaagttgaattgaactgtgtgctaaatgctaatacatgtttgtttgttatgtacagtttctgttttagatgctttccaagatgaatgctgtgctgtgatattagaatagcttttgttgttgctggttgttggaaacttggaagcttgaatcttttgctttgttctgtggattatacttcaatttcaataatgtgcattgcgcactttatttggttatgatgcacttttttgtcattccactaactctctatattttataaaaatttattttatatgcactactttttcacacaaacatccaatgagatttgatcattttaccatgtcatctttttaattaatatgatgtggtgacaccgtgacatgacaaattcctgttgcatgtcaatgtaaaaatgttttacaccgacagtgtgtttaattaaactcattttgtaagttttgaattattcaagggctgtaaagtctttatgcaggaaaaaaaatctctaaaatgagttcgggaactgggttgctaaggctatatatgaaatgtttttttttaattagaataaggttatctttttttatcaactgtgattttctttattcaagttctgtttttcttgcagtttttatgataaccttagactgtttcttacatcattcagtatctgtgttttaacaggatggtgaagctgcaactgaggaggtgaaaaagagtaaccatgttttgagaaaattagaaaagcgaaagcagaaccgagttcttgatcctcacattgaagagcaattcggaggtggtcgccttttggcttgtatctcatctcgacctggtcaatgtggtcgtgctgatggctatatattagagggcaaagagctggaattttacatgaagaagcttcagaagaagaagggcaagggtgctgcttaagatattgtctatcttcctactcgttgtatcagaatttcttgaagctcttaactatccaccaacagattatcagttttgctacgaactctattttctttgggaggggtttatgggtgtaaacatggccaagaacttttatttgtttacttatagcgagtcctgtttaaattgattatttctacc

SEQ ID NO: 7394 - DNA, 841 bp, Glycine max
  Clone ID: 700657856_FLI
aaacttttaaaatcccggctgaactactcgtttaaagacccttatcttttagtagaggctctcacccatagttctggcaaacggccagaaattcggacatgttatgagcgactagagtttcttggggacgcagtgttggactatgtcatcactatgcatttctacaaggaatattctaatgacaaattctcagcagaatttttcactaacatgaggtctatttctgtgaacaatgagtgttacgcactgtcagccattaaagccaagctggatgaacacatactctgtgactcggtagtaaaaaataacattgcccagacaatggaaggtgttaagaacttatctttggaatcaacttttggatgggagctagaaacatatttctgtcaggtgctggcagatgttatagaatctatagcaggagcgatttttgttgattcagggtacaagaaggaggttgttttccaaagcataaagccccttttggaaccccttgttacacctgaaacagcaaggagacatcctattagtgagttgcacgaactatgccaaaaaaaaggctacaaaatgaaagtatatccccccgtccgcgtcaacggtgaaacttcagttacaattgaggtgaaaaccaacgggatcacttacaagaataatcctcctgctaaagcatctaataacgatacagctcgtaaactggctgccaaggatgttttaaaacaaattaagatttgcaagtctcttggctaattgatgttttacgcccataggaatgctcaaataggatgccctgttcctaaagtcattatggtatattggtatatcaaggtcaactaatacgact

SEQ ID NO: 7395 - DNA, 484 bp, Glycine max
  Clone ID: 700657947_FLI
gagaatggcagcacttggtgggaatcgtgatgtgacaggaagccagaacagcgttgagatcgatgctctagctcgctttgctgttgaagaacacaacaaaaaacagaatgcccttttggagtttgaaaaggtggtaactgcgaaacagcaagtggtttctggtaccttgtacaccatcactttggaggcaaaagatggtgggcaaaagaaggtttatgaagccaaagtttgggagaagtcatggttgaacttcaaggaggtgcaagagttcaagcttgttggagatgcacctgcatagtctagtgcttaattaggttgctgaagagtgaagaatgagacagcctggttcgaaggggaaaagcctaaggatatatcaaaggatcctatatgtataaaataaatgttgcttttttaccttcggtattgatatctgaagtctaatttgacatcctatatatgaatatatgatctatgtgtttctttc

SEQ ID NO: 7396 - DNA, 709 bp, Glycine max
  Clone ID: 700658011_FLI
ctgtgatgaccactacagttgctgccctaacgactatcccattcttaaggggataagatggctcaattgcacctaatcctggaccatcacccccttcacctgtgaagccaccaaatgtctgtgacaactactacagctgtgctgatagtgctacttgttgctgtattttcgagttcggaaatgcttgctttgagtggggttgctgtcctcttgagggtgctacctgctgtgatgaccactacagttgctgccctaacgactatcccatctgcaacacttatgctggaacttgtctcaagagcaagaacaacccattcggagtgaaggcattgaggcgtactccggctaaaccccattggacctttgggcgtaagaacaaggtcagcagtgcttaagcagataaaggaaatgtgaacgtgcaggaaggagccaatgatgaagtaaatgaaagacgaagaattaaaacaccagctgatacacttcccctttaccttcacataaatttctctgtgccattttattatgatacaaattgatactattctgtatcaaatttcagtcagatattggctgtgtacatagggttatattattgatgcactgtatttgtattcaaattccaattccaaatggcgaacatatttgattgctgttagtttcccaggttatgtagactatgtgacaatgcagcattatttggatttgcccg

SEQ ID NO: 7397 - DNA, 2499 bp, Glycine max
  Clone ID: 700658146_FLI
gtgagagtgaatgatttcccatttcccaacgacaatggcaaaaaccgcgaaaccctaaccccaaaacccctttcagcaaattctccactgtcttcaaaagccacggcgccatggacttcgatcaccacctcacggagctttccgcctcctcgccgttcattccatccggcgaggacttccacttctactacaaattcaggaacttccgccgcccgatcgaggaaattgcgaggagaacgcagtcgatgctcgacagaatcggctccgcggagaacatttggggcagaggctcggcgttccccggtgacgtcgacgacgcgtacgagtggctcgtgaacgcgaatgacgacgttttggagctggtggaggagctggtggacgagttgcggatgctcaagaaggacgagggagaggaatgtgacggcgcgaatccgaaagtgccgtttcatataccgacgatcaagaagccccagtatgcgtacaacattgtggttgataattcaaacgagccttttgagcatattttgttggagaagagtgatgatggtcagcgttacattcatccactggagaaactctctgttttggattttgttgataaagaaaatctcgagaatcttgtgccagtagagcctccctcaatagaatgcacccctttcaagcttgtggaggatgtcaaaggattgaaggaggtggctgctatgctgtcttcagttaatgaatttgcggtggatttggaacataatcattatcggtctttccaaggtttgacttgcttgatgcaaatctcaaccaggactgaagattttgttatagatactctgaaggtccgcaatcatgttgggccatacctgagggaagtcttcaaggaccctaccaagaagaaggtcatgcatggagcagatcgagacattgtgtggctgcaacgggattttggcatttatgtttgcaatatgttcgatactggccagtcttcaagagtgttaaagttggacagatatagtctgcaatatcttttgcaacagttttgtggggttactgcaaacaaggaataccagagtgcagattggagattacgccctcttcctgatgtgatgctaagatatggcagagaagatacacactatctgctttatatatatgatttaatgaggatcaaattatttgcattgtctaaggagtctgaaggttctgataatcctctactggaggtttacaagcgcagttatgatgtctgcatgcagctatacgagaaagagctgctgaaagaagactcgtaccttcatatatgggggttgcgaggggctggttttaatgctcagcagcttgccgttgtttcaggactttgggaatggcgtgacggtcttgctcgtgcagacgatgaaggtcctggctatgtattgccaaatagaattattcttgaaatcgttttttttttttttacccatttcaaagctaaccagatgcctgtcattataagcaatctacggcgaatagtaggaaggacaaaacacccatatgttgagcgcagccttgatgtcattgtcaacattgtcagacattctatgcaaaatgctgctgcctttgaagaggctgcactacgtttgaaagaagaacatgctgcaagtttgtcaaatgtgatacccgttaaggatggaactgaagtacctcatacactacaaaaggatggatgtgcagcaagaggaagcatgggaattgaaaatggctcctgtgttgatatcacacaaaactgtatgctttcttatgaccaagaggagaaaagttttcagcatcaagttgaagatggactatccgattgtctcaattcagatctactaagggtcaagaaggagatcaagccggaacagagtagatcgtcgttaaatattccatctcccttattgttgggcaacaatgagaagtcaagactagttgcagaaactccaagtgtaacatatgaaacatcatactcacgggagaaacttgtttcaggttcaccttctacctccaaccctattgggatggtaatggtagattcagccaaggaaaagaagatgaacgatgagtaagaataatgtctaagctctgagaaatgatttcaaacaagaagatcagacagatggagacaactgaagaatccaatggcttatggaagctagaatagaagctagaagctttcttttgatgttgaagtggaaggggacaagctttgcttttggaaagagaagaaaatgcatcgtcccacagtggagttagttactcaagatgttgagttcagatatgttccagatgtttcatttcatttctggagttgcaaccatctcatggttaaatgaaaataggttagatcattataggttcaaaatcagatgttgtcattacccatatcttctaattctagttgcgcaaaatgaagatcatctatgttcctatgttgtcattacccatgtcttctaattttagttgtgcaaaatgaagatcatctatgttcctttggtc

SEQ ID NO: 7398 - DNA, 945 bp, Glycine max
  Clone ID: 700658184_FLI
gaagatgccgatcagaaacatcgccgtcggaaggcctgaagaggcgactcaccccgacacgttgaaggcggctttggctgagttcatctcaaccttcatcttcgtgttcgccggctcaggctccggcatcgcctacaacaagctcaccgacaacggcgctgccacccctgccggcctcatctccgcctccatcgcccatgcattcgccctcttcgtcgccgtctccgtcggcgccaacatctccggcggccacgtcaaccccgccgtcaccttcggcgccttcgtcggcggcaacatcaccttcctccgcggcatcgtctacgtcatcgcccagctcctcggctccatcgtcgcctccctcctcctggccttcgtcaccgcctccactgttccagcattcggactctccgctggagttggagttggcaacgccttggtgttggagatcgtgatgaccttcggtctggtgtacacggtctacgcaactgccattgaccccaagaagggtaatttgggaattattgctcccatcgccattggtttcattgtcggcgctaacattttgttgggtggggccttctctggagcggccatgaaccccgctgtgacatttgggcctgctgtcgtgagctggacctggaccaaccactggatctactgggccgggcctctcatcggtggtggaatcgctggccttgtttacgaggttgtctttatcagccacacccacgagcagcttcccaccactgactactagagggggggaaatgaaaataaaaaaaaaaaaattgtgtattattgaatttctctggaatcttcttctgtgtatggttttccttccttgtgttttcttcctaattcactttcgagggttgtacttgttcctttcgtcttaaatccttggatggttgatgatcatgaagttctctttaaagttaaattatt

SEQ ID NO: 7399 - DNA, 549 bp, Glycine max
  Clone ID: 700658206_FLI
gaacggtctctcactacaacaatcactatgatgactcgggctttttctggttccggtttttgtgtgggcttttggtgtttttattggggatggggattaatgtatgggctgatagggttttgttgcggctcaagagcgagggaaagggctacgtggtgccgcgcggtgggttgttcgagctcgtggcgtgtccgaattactttggggagattgtcgagtggctcggctgggccgtgatgacttggtcatgggccgggctgggcttttttgtttacacttttgcgaatttgggtccaagggcccgggccaaccgtaggtggtatttggagaagtttggggaggattatccaaaggagagaaaggctgttattccttacttgtattgagtttttttttaatgattttcttttattggatttggaattgggaatgtgggtaaaatgatgaataattgaatgtggtgatgaatgatgcaatgcagctcaacttgcttaatgtgaggtcaaggatttttttcttcttcttaattatcaatttggtttctaaatt

SEQ ID NO: 7400 - DNA, 1414 bp, Glycine max
  Clone ID: 700658278_FLI
ctttcttccaacctctcaagtccaacctacccctttttcttctcccaccaacttcaccgtcttcttcctcgatcatgtctcacttcaagggcaagtaccatgatgagcttattgccaatgctgcttacattggcactcctggaaagggtattcttgctgctgatgagtcaacagggacaattggcaagcgtttggccagcatcagtgtagagaatgttgaatccaacaggcgtgctcttagggagctgcttttcaccgctcccggtgctcttaaatatctcagtggtgtcatcctctttgaggaaactctctaccagagcacagctgcaggcaagccctttgtggaagtcttgaaggaggctggtgtgcttcctggcatcaaggttgacaagggcacagttgagcttgctggcactaatggagaaaccaccactcagggtctagatggccttggtcagcgttgcgccaagtactatgaagccggtgcacgttttgccaagtggcgtgctgtgctgaagattggtcccaacgagccatctgagctggctatccatgagaatgcctatggcttggccagatacgctgtcatatgccaggagaatggcctggttcccattgttgagcctgagatccttgttgatggatctcatgacattcacaagtgtgctgccgtcaccgagcgtgtccttgcagcatgctacaaggctttgaatgatcaccacgtccttcttgagggtaccctattgaagccaaacatggtcacccccggatccaattctgctaaggtttcccctcaggtggttgcggagcacactgttagagcccttcagagaaccgtgcctgctgcagttcctgctatcgttttcttgtctggtgggcagagtgaggaggaggcatccgttaacctcaatgccattaaccaggtcaatggaaagaagccatggtcactctctttctcctttggaagggcacttcaacagagcacccttaaggcatggagtggaaaagaggagaatgtgaagaaggctcaggaagcccttttggtaagagccaaggccaactcagaggcaactctgggaacctacaagggtaactcaaagcttgctgatggtgcctcagagagcctccatgttgaggactacaagtactgatcaatctaagtgcgggtaggaatcggtattttatgggtacaaccgaattttcttgttaatgagtattgtgcttcgactcttcccagaataataatcgtttggaattttgctttttgtttttcctagtgttccttcatatcaattttagtaattcggtgtattggtcaaacctgtgcaaacaggggaggggatgtaactttgttttcttgatagacaccaccaccttgctgttaacgaggctttgtgtttattttgcaattatc

SEQ ID NO: 7401 - DNA, 715 bp, Glycine max
  Clone ID: 700658366_FLI
atggacctcaatctagacctagacttggacttgggcagggagtcagacctagaccctgggtctgagctgggttccgagatccaagccaaacccgaactggagtcagagcttgagatagatgtccagacagagcctgagacagaggaagagtcagaaagggagaggaagtcacagccaaggaccaggacaagggctcagagcccctggcagagctacttgactgcttatcgctttggttctacaagctcccagtccgcagggccgcctcagacgcctcagacacgcccagcagaaaagagatagccacacacttgccagaactctccccagaacaacgaggacgcatggtaggtgactccaaaaagcaggcagagtagctcggcaaatccttcctgcccaacttggcatgagatccagactggggtccaagctaccagtcctggctctgtgaccccctccacctgctgacttccttctcagtggattccgggatcacatgcccatcgtgctcccggctctgtgacttaaggtggacacttgtctctgggttccgtctccagagtttgcaggtttcaccttcaaccaattttcagtgaaggcctccctacacgcactctctgggaactgtgccagcttgtctctaagttcctcctctcatctctgtttccctttctccaaagaaacgaggcttgaataaaatatggaactcttcctt

SEQ ID NO: 7402 - DNA, 363 bp, Glycine max
  Clone ID: 700658408_FLI
ggattttaaattgtattttatttagagtattacagctacatgtggctaatggttacttcacaggacagcatccttgctcagggccttgctcaagaggcagggagcatgatgatcctcaagtcctctggatagagagtgccaaggtacaaaagcacaaaagccctcatgtgggaggaaagtgagcttcatcttgttacatcttgatacgaagagcccccacgcgtatcctcaagggaagtctggtcctcgcctagcctgcggcagccttcggcgtcaggcagtctccgcgcccgcccagggatgccactccaagtccggtccgcctcgcccagtacccctgaagaagcgcggatacgatgtaac

SEQ ID NO: 7403 - DNA, 1908 bp, Glycine max
  Clone ID: 700659079_FLI
aaagaaagaacacatcacaatggagtacggaaggttaggaccctctgatcctggtggctcctcgcgcctcaaccctccgagatcttccgggaggaaaaacattgtgtttctgtcactctttgctgtcttattaatagccgcgtccgctgttactgcagttgccgtccgctctcgcaccaaaaataccggaggggacggaactagtctcggcaagttcacacaggccatttcacgcacgtgcagcaagacacgctttaagatgttgtgcatgaaatcattactggacttcccgggatctcaaggagcatccgagaaggacctcgtccacatttccttcaacgtcacgctgcagcacttctccaaggcgctctactcttccgccaccatctcctacaccgccatggatccccgcgtccgcgccgcctaccacgactgcctcgagctcctcgacgactccgtcgacgcgctcgcccgctccctcaacacagtctccgtcggcgccgtcggctccgccaacgacgacgtgctgacgtggctcagcgctgcgctcaccaaccaggacacctgcgcggagggcttcgccgacgccgccggcacagtcaaggaccagatggccaacaacctcaaggacttgtccgagctcgtgagcaattgtctcgcgatattctccggcgcaggcgccggcgacgacttcgccggcgtccctattcagaataggaggcggttgatggcaatgcgagaggataattttccgacatggctgaatgggcgagataggagattgctgagcttgcctctgtcgcagatacaagcagatattgtggtttccaaagacggtaacggaaccgttaagaccatcgccgaggccattaagaaggtgccggaatatagctcacgccgcatcattatctacatcagggcaggaaggtatgaagaggacaatttaaagttggggaggaagaaaacaaatgtgatgttcataggggacgggaagggcaaaaccgtcatcacgggcggaagaaattattaccagaacctgaccacatttcacaccgcttccttcgctgctagtggttctggtttcatcgcaaaagacatgacgttcgagaactacgcagggccggggaggcatcaggcggtggccctccgcgtcggagcagaccacgcggtggtgtaccggtgcaacatcatcggataccaagacacaatgtatgtccactcgaaccgtcaattttaccgagaatgcgacatttacggaaccgtggacttcatattcggcaacgccgcggtggtgttccaaaactgcaccctctgggcccgaaagcccatggcccaacagaagaacaccatcacggcccaaaaccgaaaggacccgaatcagaacacgggcatttcgatccacaattgtaggatcatggccacgccggatcttgaagcatccaagggtagctaccccacttatctgggacgtccttggaaactttacgctagaaccgtcttcatgctgtcctacataggggaccacgtgcatccacgtggctggctcgagtggaacacttcctcctttgctttagacacgtgttattatggtgaatacatgaattatgggccgggttcagctctgggccaacgggttaattgggccggctatcgggccatcaattcgacggtggaagcgtctagattcacggtgggccagtttatatcgggctcgtcctggttgccctctaccggagtggcgttcattgctgggttatcaacgtaagttgatccactgccactgtagacccttttcaaaatcttggttcatagtttaaagtttaaaccaaaccaatttgcccatataatttttatttgtgactgtaataaactacaatatagtttttttattttattttcttttaaccc

SEQ ID NO: 7404 - DNA, 1909 bp, Glycine max
  Clone ID: 700659163_FLI
aaagccaaagccagaaaacccaaaccaccgacttttgtttcccgtttcagcaccactttctccgcaatggctcgaaaaccccttctcaagcaaaccctagccacactcttccttctcttcgtcctctacgcaatcttcaacgccttcttccagcccaccgattcctccgccttcgacgccgccgccaccttctcctccgcctcctccgttctcctctccggcgcaaccaccaaatcccccgccatcaatgtcttcctctacgatcttccccgcaggttcacctccgacgtcatccatcaccacgcgctggcgcgtggtggcgcctcacgcgtcacccctgatgacgacgcggcggcgcccaagtaccccggccaccagcacatggcggagtggtacctcttcgcggatctctcccgagccgagtccgaacgcgcaggctcgggctcgcccgtggttctggtcgcggatcccgaggaggcggatttgttcttcgtgccgttcttctcgtcgctgagtttgattgtgaacccggttcgaccgcccgggtcaaattccggttcggagaaaccggtttacagcgacgaggagaaccaggaggcgctggtggagtggctggagaagcaggagtattggaagaggaacagtgggagggatcacgtgattgtggcttcggatccgaatgcgatgtaccgggtcatcgatcgggtaaggaacgctgtcttgctggtgtcggattttgggaggctgagacccgaccagggatcgctggtgaaggatgtggttgtgccctactcccaccgtatcagaacttaccagggtgatgccggtgttgaagatcgtaacaccttgttattttttatgggaaaccggtatcgcaaagagggagggaaaattcgtgatatactctttaaaattctagaaaatgaaaaggatgtcataataaagcatggagcacaatccagagagagtcggcgggcagcttcacaaggaatgcatacatctaaattctgtttacatcctgcaggagatactccatcagcctgccgactgtttgatgctatagttagcttgtgcattccagtgattgtcagtgataatattgagttgccttttgaagatactatagactacagaaagcttgctgtatttatagaaacttcttctgctataaagccaggatatttggtctcaaaattgagagcactgaccccagatagagtcttggcatatcagaaagagctaaaggaggttaagcgatattttgaatacgaagaacctgatggaacggttaatgagatttggcgccaagtttcgaaaaaactacccctgattaaattgatgattaaccgtgagaaaaggttgtttggaaaacaagtggagtgctcttgcgtatgtacaaaccagactgctgttagaaccctatagcacttatccctctatccagtttggcattccatgaaatctgtggctcagttttgtcaggatacatttcaaggtgatgagtacatttaaatcagggatcagggataatgatagttgcgaatatgttttgtctcatatttcgcatatgggtgacttgatgataaatctcaatctactaaacaactcattcccccaacaaaatgcgcattgagatatgcaagagaagttatttgtgtaaccatcagtatccattacattagaaatccttccatgtactgtggggcttgactcaaatctggtatatctcgaggctgtgcataggttgtcacctgccatgtactacgactataccgaacacgttctgttgtagattccaatatgccccaataagttttacgcattgagatctagactaggaggggaaaattacattataccgtgattgaattgtacaggatgagaataaagttattattgttattctttt

SEQ ID NO: 7405 - DNA, 815 bp, Glycine max
  Clone ID: 700659189_FLI
catcagacttcttcagattttgtcgccttatgactaagttccgccaggaatgtgaatcgctaggcttagctgacttcccaacctctgagaggctgcagtggcatggtcattttcctggaaagccagactggtctgaaaccagccgttttgtggcttgtaccatggtagattcagtgaagggagaaatatacattgctttcaatatgagtcatttacctttcacagttaccttgccggagcgtcctggatacaaatgggaacctcttgtagacaccagcaagcctacaccatatgatttcctcactcctgaccttcctggaagagatattgccatacaacagtatgctcagtttctggacgccaatatgtatcccatgcttagttattcttccattatcctcttgcgcattccagatgaaaatctgtagcttggaaaatcttgcttctttgtttttatcggctatatatataatcctgttcctagtatgctggaaaagaaatcgtagtaagatgggtctgcaggaagtaagcaccaaaggcccaagaggaaggaacgtatagcatggctggcatcatgcatcatgcatacatgcaccgtacgtaggaaaagcgcaaacccgtgtgatagcatcgtgtcttctagaagatgcgtaggtagtggaataaaggcatatttgctcttaggatatttcggattgcttttatcttttccgtttttgcttgtcgggacttgtcccctctataacagctatatatatatgtaaagaaatggtgttggaaggatatgagaaaatagcagaaaaacgttcctccgt

SEQ ID NO: 7406 - DNA, 962 bp, Glycine max
  Clone ID: 700659335_FLI
catcatcaccgttgattgaagaagatgccgatcagaaacatcgccatcggaaggcctgaagaggctactcaccccgacacgttgaaggcggggttggctgagttcatctccaccttgatcttcgtgttcgccggttcaggttccggcatcgcctacaacaagctcaccgacaacggcgccgccactcccgccggcctcatctccgcttccatcgcccatgctttcgccctcttcgtcgccgtctccgtcggcgccaacatctccggcggccacgtcaaccccgccgtcaccttcggcgccttcgtgggcggcaacatcaccttactccgcggcatcgtctacgtcatcgcccagctcctcggctccatcgtggcctccctcctcctcgccttcgtcactgcctcccctgttccagcattcgggctttccgctggagtcggagttggcaacgctttggtgttggagatcgtgatgaccttcggtttggtgtacacagtctacgccactgccgttgaccccaagaagggcaatttgggaattattgctcccatcgccattggtttcattgttggcgctaacattttgttgggtggggccttctccggagcagccatgaaccctgctgtgacatttgggcctgctgtcgtgagctggacctggaccaaccactggatctactgggccggccctctcatcggaggtggaattgctgggcttatctacgaggttgtcttcatcagccacacccacgagcagcttcccagcactgactactagaggggaaaaatgaaataataaaaaaaaaaaatgtgtattattgaatttctccggaatcttcttctgtgtatggttttccttcctttgtgttttctttcctgttgaatcggtggccgttgatctttggttggatggttgatgatcctgaagttttcttttaagttaatttaattatcattttgtgc

SEQ ID NO: 7407 - DNA, 757 bp, Glycine max
  Clone ID: 700659535_FLI
aagtagttgagaactaagaagaaggaaatggcttcctcaatgatctcctccccagctgttaccaccgtcaaccgtgccggtgccggcatggttgctccattcaccggcctcaaatccatggctggcttccccacgaggaagaccaacaatgacattacctccattgctagcaacggtggaagagtacaatgcatgcaggtgtggccaccaattggcaagaagaagttcgagactctttcctacttgccagacctcgatgatgcccaattggcaaaggaagtcgaataccttctaaggaaaggatggattccttgcttggaattcgagttggagcacggtttcgtgtaccgtgagcacaacaggtcacctggatactatgatggacgctactggaccatgtggaagctgcctatgtttggctgcactgatgcttctcaggtgttgaaggagcttcaagaggctaagactgcataccccaatggcttcatccgtatcattggatttgacaacgttcgccaagtgcagtgcatcagcttcatcgcctacaagcccccaggcttctaagtcattgaaaaatttgcaaagcatctgtagccaccccactttgtttgttgtacttaaactacattcccatttgtttttgctttatgagatttcatcatcctgtatttttggtttctgttttcggacttcaatggaaattaatggatgagaactaatgaataagctattgtgttgtgttgctttgtttccaaat

SEQ ID NO: 7408 - DNA, 772 bp, Glycine max
  Clone ID: 700659687_FLI
gaggttgactccttgatgaagctctttgagacaacaataaactcctcaattgcatggaaggaattcaaatatacgtgattggggattcatcaaaacttcctgagtctctaaggagtactatagctaatgcagaaaagagtacaaaacataactcgagactccaacttattgtggcaatgaattacggtgggaaatacgatgttgttcaagcatgtaaaagtgtagcaaaaaaagtcaaagatggtcttcttcatttggacaacatcaatgaaaaaattattgaaaaagaattggaaactaaatgtactgagtttccttatccagatctactaatacgagctggtggtgagcttagattgagcaacttcttgttgtggcaattggcatacacagaattttattttaataaaacaccgtggccagattttggaaaggaagaatttgtagatgccttaagatcatttcagcaaagacaaagacactatggtggtgaacgacattcataagcatatgtctgtaatatagtattatcacttaattaatcttttaggattaagtgtataatggttttgggattatgtttaaattattggaccaagctaacctactaagtcgtgtgttcattatagctgaggtatctcacttaaggttttgctttgttcaatatagtgacatcactatatgcagtgctaacaaacttttgattagtttgttgttgacctggctttgtaacaatgttttgaagtaggtttaatatattagcttctaaact

SEQ ID NO: 7409 - DNA, 944 bp, Glycine max
  Clone ID: 700659694_FLI
ctgatatggccttcaattcaattgattccacaatagatgatagtaacttcttgaacagtggtccgtgggctccaccaccagcaccgccacctctgccaccagcacagtttcagcggatgaggacatataccaaggtatataaacgcggagctgtgggaaggtccatagacataacacgatattcaggttatgaggagcttaaaaaggatctagctcgtaggtttggcatagagggacagctggaggatcggcaaaggataggttggaaacttgtctatgtagatcatgagagtgatgttcttctagtgggagatgatccttgggaggagtttgtgaactgtgtccgctgtattaaaatactttctcctcaagaagtgcagcagatgagcttggacggagattttggcaatggtggccttcaaaatcaagcctgtagcagctctgacggtggcaatacttaaatgaagttcagtaatacgctaactattcttccgtattgttaacttagattatttctgggagatgcattattgtcctaattccgaaaggcaattattatgccactgcggacttctgtgtccaccatcaggacttgaaaggagaagttttgtctatgttccggacatgcaaatttgaagagccaaatgagggcggagaagtgagctgctgctctggtttaacattgagcggtaattttgaatgtataaagtcttaggcagctagattttgcggaagctttcatgatcttccatccttggaggcaccttattattttttagccaatatgactgtgaagtagagaaacttcaaatgttgtaaggtcaagtgcatactgttgcattgtttgcttgaagcgtaagtactaaaaatgttggagttatttgactgtacaggagatcaattactagtatttgacacatgaatctaatgttcatcatcgactc

SEQ ID NO: 7410 - DNA, 651 bp, Glycine max
  Clone ID: 700659735_FLI
gcagtattcactggaatgttaggaggagaagaactgtcccaagcatatgccagtggagatgtatttgtcatgccttcagagtcagagacgcttggttttgtagttttggaggcgatgtcttcagggatacctgtggtggcggcacgtgctggaggtattcctgatataatccctgcagatcaagatggtaaaactagctatctgtatgatccacgagatcttgaagactgcttgagcaaactaaggccccttttgcacaacaaagagttgagagaaaccatgggtaaagctgcacgtgaagagatggaaaagtatgattggaaggcagccacgcgaaagattcgcaacgaacaatacaacgctgccatttggttctggcgcaagaaaagagcccaactattgagacccttccaacggctggcaaaacgttttttcccatccccacaagtcaactacaggtgatgcaacttcacctaccaagcttaggctggtcccttgctagctttctttggcttcatagaagacttgtattggataaatgtgtggttgatagtgtaatggattcattctttttgaatgtaaaggaacatacaatatggtggcttgcaccgtattttgtgcttttataaagggaatcagtgccacaggttt

SEQ ID NO: 7411 - DNA, 531 bp, Glycine max
  Clone ID: 700659875_FLI
gagacagagaggaagaagacgatggcggaggatccgatttctagcttctgcaacgcattggcagctttctgcggccacctccactcctcttccgatgccctcaaacaatccatcgatcgccgacctattcctctcgattccgcctcgtcgaccttcttgcaatgcctcaatcgccgcgtatcgaccgcgagcgccgacctcgacatgctcgattccatgtccttcggtacagtctctttcgaagagctcctaggtcactgcaacgaattgtacaagaagaaccactccgatctccttcaacttcaagatcgcctccagagctacggttatagtgctgttcctgatattgaggaggcggatgaagatgaggatatacaacgtcaagatccggaagacaaattggatagtccgtcttctttctatggatcactctccgtcgccgattctagcttcaaaagtttcgaagaagatgctttgtatccttaatacgattttcagcttctgaacaaattttatatggaatggaaaaac

SEQ ID NO: 7412 - DNA, 385 bp, Glycine max
  Clone ID: 700659966_FLI
attgggattaattacaatggcttttagaaactggtatacttcaaacatggtaggcctctcctttggcattgctgtataccagtttctaaaagccattgggattaattacaatttcacaattgaggatgagatcatgctccctatagacactggtgatgctgataacttagaagaacttattgtagctcgagagggacataattgaaaaggtatgcgagatataattagggcatgtaatcaattttaatatgtaagtatctcttgccttgtggtcctaaaataaatgttagtgctatatataggttttatggtccagatccatttgtgtgctatcaatattgaaacatcaatttaatatcatcaaccatgaatgcccattatatat

SEQ ID NO: 7413 - DNA, 714 bp, Glycine max
  Clone ID: 700660051_FLI
ctcgaggctttgcatttgtgcagtttgtggatccttatgatgcctcagaggcacagtaccatatgaacagacagatttttgctggaagggaaatatctgtagttgtggctgaagagacaagaaaaagaccagaggagatgcgccacaggactagtaggttcagaggaccagcaagctatggaggccgaaggtcttctcattacgggcgttctcgatctcgctcaattaccagatcacgctcgccaccttatcactctggttctagaaatcgatatcgctcaaggtcctattctcctgctccaagacgacaaagcgattactctgtttcccctgggaggcaagctgagcaccccagatcaccaagaggtcctcccagggagaaggatggtgatcaaaagcgtaggtcttattctcctgcttatggcaatggtatcgaacagaatcaaagcaatggatatgctgagaaatctatgtacaagtctgaggctgatcgtagccagtggaagtcatcgagatcaccccctggatctagatcaagatctgctgaattgtcaccaaggcgtggaagatgaggttgcaggtagctggcaatgtgctgctggggcttctgtacatttcctgcaacttatcgcaacatttgcaaaatcctgtattttgcttgaagtttgcgaatatgatggatgaatgtataataattgacttgatgtgcgggtt

SEQ ID NO: 7414 - DNA, 370 bp, Glycine max
  Clone ID: 700660053_FLI
cccaatgcttgttccatcatgtgataatcagtgattaattttcgttttcggtgtactcttacacacggacggaatacgggatacggaatatgcacgcacgttgtaatttgtaaataaaaaaactggaaaaaaaaatcgacctgcgtgtaaaaaatgaggggtggataatatatcaatattccgtgttattgaaaattaatatagagaaattttatgatatggtagaattttgatataatataatgttttagagaatagagatagaggatggccggctggctggagaatcctgtccagaactcacatcacatgagttgttatttgttttgtttatttttttaatatcagaataaatggttactattgtttc

SEQ ID NO: 7415 - DNA, 964 bp, Glycine max
  Clone ID: 700660235_FLI
gcaccggtcaccgctacgcgtacagtgccggtgaccagttgccggtgcacgtggattggagggtgaagggtgcagttgctcccatcaaagatcagggaagttgtggaagttgttgggcgttctcaacggtggccacagtggaagcaataaacaagatagtgacagggaagtttgtgtccttatctgaacaagaacttgtggactgtgacagagcctacaatcaaggatgcaatggtggccttatggactatgcattcgaattcatcattcaaaatggtggcattgacacagacaaagattacccataccgtggctttgatggcatctgtgatccaactaagaaaaatgcaaaggcggtgaacattgatgggtacgaggatgttccaccgtatgatgagaatgccttgaagaaagctgtcgctcgtcaacccgtaagcattgctattgaagcctctggcagagctttgcaactttatcaatcgggtgtatttactggtgaatgtgggacaagtttagaccatggtgtggttgttgttggatatggctctgaaaatggtgtggattactggctagtgaggaattcatggggcactggatggggtgaggatggctatttcaagatgcaacgcaatgtgagaacccccacgggcaagtgtggaattacaatggaggcctcctacccagtgaagaatggtttaaactctgctaattcagtttatgaaagcactgaggtgtatgttagcagtgcttgatataacaaccttcatcgttatttatgatctttggaattgggaagaggaacaagtgctcaagttgcaaatgtttctgttatctttgatgcttctattgaatatgtctgttgggctattcttgtacatatatttcttcaggttaaaaaactgaacctgattatcaatttgtactggttttcactcattgttattccatttgaatgttttatctg

SEQ ID NO: 7416 - DNA, 491 bp, Glycine max
  Clone ID: 700660393_FLI
ctttgggacgtttggtccaaaagtgatgccaagaattggcaatgcaagaatgattccagggcagcttcttgcattgccaattcttggcatcactttgggacgtttggtccaaaactttgagctcttgcctccccctggccagtcacagattgacactagtgagaaaggagggcaatttagcttgcacatactcaagcattccaccattgtggcaaagccaaggtcattttagactccaccacatgatcatgatcatatgatcaatccccttaatttttttcttttttcttttcccttttctttactctgtattgtatcaatgcttgaaaatggggttgttccaaaaatgtcatatatatttggcctgctaatgggtattgtaaatctctgaacttgaagtgatgcacggttttgagatggttttctaataaacctacacttttgtctctaaatactctgtttcatatagtagaactttattgttgtagcag

SEQ ID NO: 7417 - DNA, 541 bp, Glycine max
  Clone ID: 700660662_FLI
ctgagttccgccattacactgacatcaatgagcttcctccacatcggcttgctgaaatcagaagattctttgaggactacaagaagaatgagaacaaaatagttgatgttgaagactttctaccggctgaagctgccattgatgccatcaattactccatggacttgtatgctgcttacatagttgagagcttaaggcactaacttctttagaaactgaatagccaatttcagtgatctccaactaaatatgtaaaatgtgaatgaaactccataaacattgtgatttccgtgctgttctgtgatgcactagtgctgcctcggttattgacacaacagtgtctaaaacttctgctttggatgcggttgtactgccccccaataatgagttcatttctagtattgaagtccttatcctttgtttggtattggagaaatagtaacacatgaatgaattttcagttaagcaaattcctcgagttttattgtatgtttggttttacttttgataaagttacaaataatagtatgtctttttcttt

SEQ ID NO: 7418 - DNA, 1996 bp, Glycine max
  Clone ID: 700660706_FLI
ggctcgagattacattacacttctcttcatctggggaaacaaatggctaggtctgcgaaagggcatcaagatgaattcgacgacgatgatgaagaagaactcttaactgctaataacacctctttcaaagtgaaggtggatgaacccagcacggggaagagggtgaacccacagcgttcaaagcattcagaaaccgagcaacgtagaaggagcaagattaacgaaaggcaagctttaaagaaaagaagaagaaaaaattctttttgttgagttaattgtttgtgtgtaggttttgagtggaagtttgatgtaattctatattatttggcaatatatgctcgcttgaaaaaattgtgtttttgagccaggtttcaggttctgagagatctgatacctcaaaatgatcaaaaaagagataaggcatccttcttgttggaggtcattgagtatattcagttcctacaggaaaaattacaaatttatgaacagacttatgaaggatggaatcaggagcccacgaaattaactccatgggtaaagttatttggaatggtgcaatgcgaacattttttgtatctgtatactctggaccttgatttatgaaatgttaggcaatgcattatgcatggcaatgcaagtgtgcactatagcagctttcccgactgatagtggtgccacctcaacattgttagacttgtgattttctgattgtataaggattcattttgtatagactgcaaaagaaagagcatcaactaggaagccttattcccactaagtagggtcaccaacatggatttgggaacaccgatgtacttggtcatgtgccatgtactcatgatgccaactgcaaaaaattctcataaagagtttaagttcctttcatgtttaggatttcactactttatgctgtttctttgaattcatgtctgcttgttttctttttttatttatttacaatgtccttttcttccagagctagtagcccagtatgcatatttgaatgagttcaggatggcattgtggcaacttcagtgatctatttgtcacaatggttggttgtgacttagtgtcttgaaattgtaacaatggctttttatctgaagtttattgttctcatctgtttttttttcagagaaataatcacgggcctgcagaaaatactacagatccttctcaagctactcaaaatgggtctgttgatgagaaaaataacaatgtctctccattgttgcccaaaaatgtacagaacccgatagagtctgacttctcaatgacaactattcagaagggcaacatccctggttcaactacagaagcagttcccctgcccatgcaaatgcgattggacatgtttgatccagttgttagcagtagtatggcaacccaacatctgctggaacctgtatctaatgttaacatgctttcccatacccagcctcaattgtggcttgataaacgaaacaagggcaactatattcttccacataatgatacaatgaaggaacaggaggagctggtgaatgaaagtgggtcagatagcatctcaagtgcctattctcagggaattttagattctctcacacaagcactgcactcttcaggcgtagatatgtcccagactaatgtctcagtgcaaattgatgttggtagacaagaaaatgctgggctgatcccctctgcatctacttcaaagggtcatgaaaaccaatctgtgagcaatccagcaatagcacgttccggagttgattactgcaatattgattctgaacaaagttcaaagaggctcagacaagaagcaagctagagattcctctcatgttcattttgtcaggagtttctttttttgctgtttgtcttcagatgagagtaagaggaattgggtggatcggttcatttttgccatgctggttagggccagatcaaatgtaaattttcacgattctggttttgggactaagacattctgaaataaaatgttatatatgcttgcttc

SEQ ID NO: 7419 - DNA, 1983 bp, Glycine max
  Clone ID: 700660709_FLI
gtttgtggaatggcagcagttagagtaactgcaaaagacgtagtattttggtttcggtcacacactgctgcagaaatccgatggggtggtgcaaagcatgaagctggagaaaaagatgatggtaggaggatgcatccaagatcatcattcaaggttttccttgatgttgtgaaggcaaggagcttaccatggaaggaatatgaaatagatgctatgcattccttgcagttaatactgagaaatgcattcaaagataccgagagtatggatttaaacacaaaagcaattaatacaagactaagcgatttgaagattgaggggatgcaggaactggaagcagtgacaagtgagattgttaggttgattgaaacagcaacagtgcctattttggcagttgatgttgatgggctggtcaatgggtggaacataaaaattgctgagttgacaggtcttccagttggtgaagctatgggaaagcatttactcacacttgttgaggattcttcaactgatagagtcaagaagatgcttaacttagcactgctaggtgaagaagagaagaatgtccaatttgagatcaaaacacatgggtctaagatggattctggtcctattagtttagtagtaaatgcttgcgcaagcagggatcttcgagataatgttgttggggtttgttttgtggcccatgatataactgctcagaagaatgtcatggacaaatttacgcgtattgaaggtgattacaaggcaattgtacagaaccgcaatccattaatccctcctatatttggcacagatgaatttggctggtgttgtgagtggaatccagctatgacgaagttaactggatggaagcgagaggaggtgatggataaaatgcttttgggagagctttttggcacccatatggctgcttgtcgcctaaagaatcaagaagcttttgttaatttgggtgttgtacttaataaagccatgactggtttggaaacagagaaggttccttttggtttctttgctcggaatggcaagtatgtggaatgcctgctttctgtgagtaagaaattggacgtagagggcctagttactggggtcttctgcttcttacagctagctagcccagagctccaacaagcattacatattcagcgcctatccgagcaaactgccttgaagagattaaatgcattaagttacatgaaaaggcaaatcaggaatcctttgtgtggaattatattttcccggaaaatgttggagggtactgccttgggaacagagcagaaacaacttctacgcactagtgctcagtgccagcagcagcttagtaaaattcttgatgactcagatcttgatagtatcatagatggttacttggatcttgaaatggctgagttcactctgcatgaagttctggttacctcacttagtcaggtcatgacaaaaagtaatggaaagagtatccgaatagtcaatgatgttgcagagcagattgtgatggaaactttatatggtgatagtcttaggcttcagcaggtattggctgactttttacttatttccatcaatttcactccaaatggaggtcaggttgttgtagcaggcactctaaccaaagaacagttaggcaaatccgtccatctcgttaagttagagctcagcataacacatggtgggagtggggtaccagaagcattactgaaccagatgtttggaaacaacgggctagaatccgaggagggtattagcctactgatcagcagaaagctgctgaagctgatgaatggagatgttcgctatctaagggaagcaggcaaatcagcttttatcctctctgctgaacttgcagcagcccataatttgaaaggttaaaagttttggaaaaaagaataaaagatgatgcaaccagcaaaacacaatctgttttgtacatcataaagagaacggagctagaaattaattgcatccaatgtaactctaatttgttcc

SEQ ID NO: 7420 - DNA, 823 bp, Glycine max
  Clone ID: 700660810_FLI
caacgcccaagccaaacaattgccctgccaacacctctaccactccgattgcatcacgccgtggatagaactcaactcgtcgtgtccgctatgcaggtttcggttggaggaagaagaggaggaaggtggtgacgccgacgctgacgccgacgccgttatgacggagatcaggagggagatcattgcgaggctgacggagctgacggaggaggatttctacgggctcaggaccacgctcagccacattgcctcgcgccacgcgctcatcgaagagaaccagaatcatcgcgcgcagattggcgagcctcgcggcggcggcggtggaggtggcggcgattcggcttgctgataacgacgtttacaataaggtatatagtttattaaataatgttgaagttgtatcaccatagatcgtcttatcaagtgtaaatctgcaccgacgattatgctgcttttgttcttttccctccttttttgggaatctccaactagctagttgtagtgctatagccaaaaatacaataaatttgatggagtgcacgagtaatgtgcatttctcctccatcttccactctctctatgttggtcacttggtcttggaactggatttccttacccaaatttcccttccaatttaggcaataaaatcttgtgtaaaacttggctttcttttgtgctgtgtctgaattgtccaagtggatgatggatccttcccactgaatcattttgttcacaattttgttttttgttatggatttacagtagatgatattttttcctgccaatattgctgtagttatggtatgagattgttgagggattg

SEQ ID NO: 7421 - DNA, 1263 bp, Glycine max
  Clone ID: 700660963_FLI
aacgtccccaacactgtgttcctgttcttcttcttcgatggcggcaacctcaacatcactggcttctcaactctacattggcctgcgccgcccatgcctcaagcttgattctttcaattctcaatctttctctgtcttcgaccccaatcttcgcctatccctctctcctcccagaccctcacgcgccatcgtcgccatggcaggcaccggcaagttctttgttggcggcaactggaagtgtatgttgttgtcgcacctccctttctgtacattgatcaagtgaaaaactcactcactgagaggattgaaatatctgcccagaattcttgggtgggaaaaggtggtgctttcacgggagaaatcaggttagctcacactttcctttcaagtgttaattgatctaaggtttctctttatattttgattttatagtgtttggctagttggacgattgtagataccttctttttctatgttgacattctccttcgtgttgttcttgatgtgattctgatgtttgaaccaaatgttatactacaatttaatgagttaattcagtcacttagttattaaaacctgactctttagcgcggaacaactaaaagatcttggatgcaagtgggttgttcttggacattctgagcgaagacatattattggagaaaatgatgagtttataggaaagaaagctgcctatgctttgagccaaggtcttggagtgattgcatgcattggagaattgttagaagaaagggaagctggaaaaacttttgatgtttgttttcagcaattgaaggcttatgcagatgcagttcctagctgggacaacattgttattgcatatgaacctgtatgggctattggaacgggcaaagtggccactccccagcaagctcaggaagtacatgtagctgttcgagattggctaaaaaagaatgtccctgatgaagttgcatctaaaacgcgaattatttatggagggtctgtaaatggagggaacagtgctgagctagcaaagcaagaagatattgatggatttctcgttggaggtgcttcattaaagggtcctgagtttgctaccattgtcaattcagtcacatccaagaaagttgcggcttgaacttgattacatattgtgattttggcaataagagagcattaaggatataaagacgggctagtcttaaatgtggcaataatatgggtgtacaataacagattggtttttattatcaaaattactgcgtcaatttctttgcaatc

SEQ ID NO: 7422 - DNA, 591 bp, Glycine max
  Clone ID: 700661004_FLI
ggcaagaggtgttgttcatgagcttgcaaaaagtagactatctaactcattggttcaggccgtgtctctactaagacagagaaatcacaagggagtggtttcttcactcaatgacttgctggcatgtgacaaagcagtaccctcacagccagtttcatgggaagtgccagaggagcttgctgatctatacaccatatacttgaagagtgatccaactcctgagaatttgtctcgtttgcagtatctgttgggtataaatgattcaacagctgctgctcttagggagatgggagatagattactcaataccactgctgaggaagagaagtttgtattctagtgttgtgataaaatgtttggcattttaggcatactagagatgcttcaagtccccttaattttgccattttttatttgccattttgtttaacggtagcagaaaaagaatatcaccatgtataaactttggaatagagatgagtgcagtgctgaaatcttagataatattttgtttgagatagttaaattaatcaattgttattttgtatgaatgaaaataagttctcataatcgtgaacaagtttttcaccg

SEQ ID NO: 7423 - DNA, 1172 bp, Glycine max
  Clone ID: 700661032_FLI
cttagcctcagttatctccttcttcttctttaccatagagccctttcttctcttcccccattttttcctctttcttcctcgcctagctagctccagaaaattaggatctgcttcagatctagtgtttccctgtcccaaatcacgagtccattgagtttgattttgtggatgaaaagcatagatagggcttttgcaaaactctccaatgtttcttgaaattatatgaccatgcgtcgaattcgtatgctgcactccttctccgtcgtgttcctctactggttctacgttttctcatgaactccctcttaaatccgtgattaattagatctatctccttagttaatccttgtcttttccaataattaattagatctgcgtctcctttttggattagtttcttttttggttctgttatcaaatcaaataaaaaatctccttctcggaaatggcatcaccgatccaacaacaacaacgctcgactactacaagttctggatctgaaggaggagatccgcatatcatcgatgagaggaagcggaagaggatgctgtcgaaccgcgagtcggcgcggcgatcgcggatgaggaagcagaaacagctggaggatctgaccgatgaagttagcagattgcaaagcgcgaacaagaagcttgcggagaacatagaggccaaggaagaagcgtgcgtcgagaccgaagcggcgaacagcattctgagagcacagacaatggaactggccgatcgattgcgcttcttgaactccatccttgagatcgctgaagaggtcgaagggttatccgttgagattcccgagattccagatcctctcctcaagccctggcagattcctcatccgatacaaccgattatggccaccgcaaacatgtttctgcgttgatcattcctgaggattttactttaattagggttattcagtgcggtagtaactttctctgttatgtgtattatattactattagtgttatctgtctgcatcaaaagtatcgtgtggtcatcaatgcattgggttcctgagagagatgaatgtgaggtacagggtgttgatggctggtagtggcagtgtgtgtccctttgcgcgacttgtaatcattttttatggtggctgttttattttaattaaaagtaatctcatcttctatgtttgttgtttt

SEQ ID NO: 7424 - DNA, 261 bp, Glycine max
  Clone ID: 700661120_FLI
cctgttctggccaacggataccgacgatagatagcatagtgaagtttggtcagcaaaggaaaggaaagcaagtgctgcttgtaatattctttgtaacctgtggggaataaggtatggcgctacatttattcgtctaaatatataaatatgtaatgttaaattatgaataggtgtaaaggtaagcaggtgtaaggggtcactcctagtttcttccacatatagttttgcttatattgtctagtaattttgttggaatgcttc

SEQ ID NO: 7425 - DNA, 1075 bp, Glycine max
  Clone ID: 700661163_FLI
gttgaacaagggtttctctgtctgcttcttcactttctctcgtttcaatcgaaaccaaaacaaaaacatgggcagaaaattcttcgtcggtggcaactggaaatgcaatgggaccactgaggaggtaaagaagattgttactactttgaatgaggctaaagtccctggagaagatgtcgtagaagttgttgtgagccctccttttgtgttccttcctgttgtaaaaagtttgctgcgccctgatttccatgtttcggcacaaaactgttgggttcgcaaaggtggtgcttataccggtgaggttagtgctgaaatgcttgttaatttgggaattccttgggttattattggtcactctgaacggaggcagcttttaaatgaatcaaacgagtttgtgggagataaagttgcctatgcacttcaacaaggtctaaaagttattgcatgcattggggagactctcgaacagcgtgaagctggtacaacaacggctgttgtttctgagcaaacaaaagcaattgcagctaaaatatcaaattgggacaatgttgttttggcctacgagccagtttgggccattggaacaggaaaggttgctactcctgctcaggctcaagaggtccatgctgatttgaggaaatgggttcatgacaatgtgagtgccgaagttgctgcatctgtaagaattatctatggaggttctgtaaatggaggaaactgcaaagaattggccgcacagcccgatgttgatggatttttggttggtggtgcctccctgaagccggagttcgtggacatcataaatgctgccactgtgaagaagaattgaaattcgtagttaggaactgatataatgctgcctttcaagctgcttcggaaattgctgtttttgagttttggatctgtgctttgtggccaatgttttgaactctgtttagtactgaataaacacgctttcctttgagatctcatccataggcgatcaattggattttgattaaatttctgaatgcaaaaatagtgtaactaccataacatttggtgggtaaataatgttgaacgcctagttgactgt

SEQ ID NO: 7426 - DNA, 1481 bp, Glycine max
  Clone ID: 700661172_FLI
caatgatgataatggggatgctaataatttagagaggaaaccaagtgaaggaaacaatgatgccaatgaaaatcattctgtcaaaccacccatgttgcagaggggggtgctcaggaccaactgcatagactgcttggatcgcactaatgttgcacaatatgcatatgggttggctgctcttggccaccagctccatgctctgggagttattgaccacccaaaaattgatcttgatgaccctgtagcagatgatttgatggggttttatgagcggatgggtgatacactcgcacatcagtatggtggttctgctgctcacaacaagattttctctgagaggaggggccagtggagagctgcaacacagtctcaggagttttttaggactcttcaacgctattatagcaatgcatacatggatgctatgaaacaggatgcaatcaatgtattcctggggcattttcagccacaacagggtaagcctgctctatgggagttgggttcagatcagctctatgatgcaggaagacatggagatgacgatgctaggtcatttttcaaaagatccttctcagatggaaacattcttaatgaaagttctacaccgatgtcagccccaaaggccaagcatgaaaaattcccaagccaaggcggcttaccagatcgatcagaagaaggaagcaagggactctgtgagtcatcaccagaaatatctactactgagagtgacatctcattttcaaggtacactccctcaatgcctcggagacagctctttggagatatgcaaagagagcgctgccttgaaagtgaacatatttactattctgatcacggggattccttcagctgctccaactttgttgacctggattggctatcttcttcaggaaattcatgtgaagaagagccatttgagaggtcatcaattaccaactctccaattgctggagtttcttcagaaaatgttgtcaatggaataatggtaggtgaggcaactgcctccactagtgattggggggcctccagcctaaagggaagggaacaaactgaatccgagttatcctacggtgatgcacggtccaacacaccagaggaatttccagatacttttgtaaactgggtgacttatggacagacactttgccattgaactttgcatatgatctcttgcactaatgtatgattgacatttttttggcttggtctaaagatgcttattagaagaaactagagagaaggaaccgggtaaagaaaaagaatcaggcatttgggtaggcttctgtttatgtggtgctaatctaagaatcatcctggggccaatcttggtattgacatgcaacattaatatttctgttgtgaagatctcaatcaaatcctcaaggcatagtagaaaatagtgcatagcaagtgtttgtaaaattcttcactgtctttttctttcttttactattattattattattattattgttattttc

SEQ ID NO: 7427 - DNA, 1438 bp, Glycine max
  Clone ID: 700661208_FLI
ggaataaaagctcctattggcttcaaaacaatagccactagtgcgtaccactataatggcgttttggagtatgatgctcacagtctttatggcttctctcaaaccattgcaactcacaagggccttcaagggcttcaaggcaaaaggccctttattttgtcccgctccacttatgtcggatcaggcaaatatgctgcacattggactggtgacaatcagggaacatgggagaacttgaggtactcaatatccacaatgctcaattttggcatatttggggtgccaatggtgggttcagatatatgtggcttctatccacagcccactgaagaattatgcaatagatggattgaagtaggtgctttctacccgttttcaagggatcatgcaaactactactcccctagacaggagctttaccaatggcaatcagtagctgagtctgctagaaatgctttgggcataaggtataagctactcccattcctttacaccttgaactatgaagctcatgtcagtggagccccaattgctagacctcttttcttctcatttccaacttacaccgaatgctacggcctaagcacccagttcttgctaggaagcagtctcatggtttctccagtgcttgagcagggaaaaacacaagtgaaagcactctttccacctggtagctggtacagtttgcttgattggacacacaccattacatcaaaggacggagtctatattaccctcgacgctcctcttcatgttgtcaatgtgcatttgtatcagaacaccattcttcctatgcagcagggcggaatggtctctaaggaagctagagcgacacccttcaccctcatcgtaaccttcccatcggacgccacccaaggagggctaaggggaaccttttcctcgacaacgatgagttgcctgacatgaaccttggaaatggctattcaacctatgttgatctccatgcaactgtggaccaaggagctgtgaaagtttggtcagaagtccaagagggcaagtttgccttggacaagggttggattattgattctatatctgtgctgggattagaaggaagtggagcagtgtcttcacttgagatagatggaaagcctctaatgggtggctcgaatgtgaatgttactacatcagcacatgagcacttgaacagtgagggagaaggagaaaagaagactgtgatggttgctttgaggggcttgagcatccctgtgggtaaaaactttgccatgacatggaaaatggggtgataggttgagtggtctcatatctgatttatcattttgaaactttgttatgttcttttttctttgctacaattcttgtaggcgttgtgagggagaagagatgtgctagaattatgctcgtccttttccaatttaacaagccaaggcaacaatggcgtatgggttgaaatctt

SEQ ID NO: 7428 - DNA, 2150 bp, Glycine max
  Clone ID: 700661209_FLI
aagcagtattacgcaaatgacgtggatagaacgaagaacatgggtgtgttgattcatggagatggaagttttgctggacagggtgtggtctatgaaaccctgcatttaagtgctcttccaaattacactactggtgggacgattcacatcgtgtttaacaatcaggttgcatttacaactgatccgacttctggcaggtcttcacaatattgcactgatgttgccaaggctttggatgctcccatctttcacgtgaatggtgatgatgttgaagcagttgttcatgcctgtgaacttgctgcagagtggcgccagactttccactctgatgtggttgtcgacttggtgtgttaccgtcgatttggccacaatgagattgatgaaccatctttcactcagcctaaaatgtacaaggtaatccgaagccatccatcaactcttgagatctatgagaagaaccttttggaatcaggggagttgacacaagaagaaattgataggatccacaagaaggtcacatcaattctaaatgaagaatttttggctagcaaagaatacattccaaaaagaagagattggctttcagcatattggcttggtttcaagtcacctgaacagctttcacgtatccgaaacactggtgtgaaaccagagatcttgaaaactgttggaaaagcaatcacaaccatccctgaaaatttcacacctcatagagcagtgaagaggatttatgaacaacgggcccaaatgattgaaactggggaagatattgactggggatttgcagaggcgcttgcttatgctaccttgcttattgaaggtaaccatgttcgattaagtggtcaggatgttgaaagaggaacttttagtcaccgccatgctgtagttcacgatcagacaacaggggagaaatattgtcccctggaccatgttataatgaaccaagacgaagagatgtttactgttagcaatagttcactttctgagtttggtgttcttggatttgaattgggttactcaatggaaaatcccaattcattgataatttgggaggctcagtttggtgattttgctaatggtgctcatgtgatatttgacaattttttggcttctggtgaggctaagtggcttcgtcagactgggcttgttgtgttacttcctcatggttatgatggccagggcccagagcattcaagtgcaagattggaacgctttcttcagatggctgatgacaaccctcatgttatccctgagatggatccaaccctccggaagcagattcaggagtgtaatttgcagattgtgaatgtcacaactcctgctaattttttccatgttctaaggaggcaggtacatagagattttcgcaaacctctcattgtaatgtcccctaagaacctgcttcgtagcaaggcttgcagatcaaatttatctgagtttgatgatgtccaaggccacccaggctttgacaaacagggaaccagattcaagcgcctcataaaagaccaaaatgcccacaaagatgttgaggagggtattagacgtttagtactttgctctggaaaagtttactatgaacttgatgaacaacgaacaaaggttgatgcaaatgatgttgcaatatgtagggtggaacagctttgtcctttcccttatgaccttgtccaacgagagcttaaacgatatccaaatgctgaggttgtttggtgtcaagaagagccaatgaacatgggtggatacacttatgttttaccccgacttatatcttcaatgaaagctgtgaataggggaggttacgacgatgtcaaatatattggtcgtgctccatccgcggccacagccactggcttcctcaaggttcaccagaaggagcagactgagattgctgaaaaagccgttcaacaagaaccaatcgacttcccattttgaaaaatcctttgcacatgcatccatcttttttgagagtgataataatgcatttagtttaatttatccaccacgtaagtggctatagttggaaggaaggcgacctcatacatttgctttcaagttttgacctttttttatgttcttttggttccttacaaaaagtatgttaagctgaatttcaacatacgtatgctgaaatatttatatttccttgttgcgat

SEQ ID NO: 7429 - DNA, 783 bp, Glycine max
  Clone ID: 700661275_FLI
gccaggcatttgaggatggcaatgatgaactccgtcgatcacctggcactccagttttcactgcaccagaatgttgtttaggtcttacttatcatggtaaagcttctgacacgtgggcagtaggagttactttgtactgtatgatattgggtgaatacccatttcttggagacacacttcaagacacatatgacaaaatagtcaatgatcctttagttctgccagatgacattaacccccagttgaagaatttaatagaaggattactatgcaaagacccagaactgaggatgacattgggcgatgttgctgagcatatctgggttattggagaagatgggcctattcctgggtacttatgttggtgcaaacgcaagagcatggtgactgaagactctgatgggagcgatatacttgcttgatccacgctgattctaagttggatttcttatgtacagtgacaaggcccattaatttttcccccactttggccccacggagagatgttatgattattatagagggagtctccaaagaataattgggaattaagaaaatacagttcatgttaccgacgatatgtagtcaactaagtcatgtttatttttgtgttgtgaagcatttggtgtcctctacggacttagaggtcttgtaatacggctctttcgcatagaacgagtttttttctttctttctcaaacacgtgccgaattctgttcagttcatactctttatacattccttggagtgttttgtttttacatttgctttggtttaacattc

SEQ ID NO: 7430 - DNA, 1309 bp, Glycine max
  Clone ID: 700661307_FLI
caacctctcaagtccaacctacccctttttcttctcccaccaacttcaccgtcttcttcctcgatcatgtctcacttcaagggcaagtaccatgatgagcttattgccaatgctgcttacattggcactcctggaaagggtattcttgctgctgatgagtcaacagggacaattggcaagcgtttggccagcatcagtgtagagaatgttgaatccaacaggcgtgctcttagggagctgcttttcaccgctcccggtgctcttaaatatctcagtggtgtcatcctctttgaggaaactctctaccagagcacagctgcaggcaagccctttgtggaagtcttgaaggaggctggtgtgcttcctggcatcaaggttgacaagggcacagttgagcttgctggcactaatggagaaaccaccactcagggtctagatggccttggtcagcgttgcgccaagtactatgaagccggtgcacgttttgccaagtggcgtgctgtgctgaagattggtcccaacgagccatctgagctggctatccatgagaatgcctatggcttggccagatacgctgtcatatgccaggagaatggcctggttcccattgttgagcctgagatccttgttgatggatctcatgacattcacaagtgtgctgccgtcaccgagcgtgtccttgcagcatgctacaaggctttgaatgatcaccacgtccttcttgagggtaccctattgaagccaaacatggtcacccccggatccaattctgctaaggtttcccctcaggtggttgcggagcacactgttagagcccttcagagaaccgtgcctgctgcagttcctgctatcgttttcttgtctggtgggcagagtgaggaggaggcatccgttaacctcaatgccattaaccaggtcaatggaaagaagccatggtcactctctttctcctttggaagggcacttcaacagagcacccttaaggcatggagtggaaaagaggagaatgtgaagaaggctcaggaagcccttttggtaagagccaaggccaactcagaggcaactctgggaacctacaagggtaactcaaagcttgctgatggtgcctcagagagcctccatgttgaggactacaagtactgatcaatctaagtgcgggtaggaatcggtattttatgggtacaaccgaattttcttgttaatgagtattgtgcttcgactcttcccagaataataatcgtttggaattttgctttttgtttttcctagtgttccttcatatcaattttagtaattcggtgtattggtc

SEQ ID NO: 7431 - DNA, 2198 bp, Glycine max
  Clone ID: 700661328_FLI
aattgttgtaactttttgattcctaaattctctaaaattcgaaattctaatttcgttaggggaaagagattgtttgtgtgtgagtgagtatggctggaaaaggcgagggtcctgctatcggaatcgatttgggaacgacgtactcttgcgtcggcgtgtggcaacacgatcgtgttgaaatcatagccaacgatcagggtaacagaactaccccatcctacgtggctttcaccgacacagaacggttgatcggcgatgcggcgaagaaccaggtcgctatgaacccaaccaacaccgtttttgatgctaagcgtttgattggaaggcgtttttccgatgcatcagtacaaggtgacatgaaattgtggccgttcaaggtgattcctggccctgctgagaaacctatgattgtggtgaactacaagggggaggagaaacagttttccgcggaagagatatcctccatggttcttatgaagatgaaggagattgcggaggcgtatctaggttccaccataaagaatgcggttgtcactgtgcctgcttacttcaacgactcacaacgtcaagccaccaaggacgctggtgtcatttctgggctcaacgtgatgcgaattatcaacgagcctaccgcggctgccattgcttatgggctcgacaaaaaggccactagctctggggagaagaatgttctcatttttgatctcggtggtgggacttttgatgtctctcttctcaccatcgaggagggtattttcgaggtgaaggccactgctggtgatactcacttgggaggtgaagattttgataacagaatggtgaaccattttgttcaggaattcaagaggaagaacaagaaggatattagtggaaatgccagagctctgaggaggttgagaacagcatgtgagcgggcaaagaggactctctcttccactgctcaaaccaccatagagattgattccttgtacgagggtattgacttctacacaaccattacccgtgcccgttttgaagagctaaacatggatttattcaggaagtgcatggagcccgtggagaagtgtttgcgggatgccaagatggataagagtaccgtccatgatgttgttcttgttggtggttctactaggattcccaaggttcaacagttgttgcaggacttcttcaacggaaaggaactttgcaagagtattaacccagatgaagctgttgcttatggtgctgcagtgcaggctgcgattctcagtggcgagggtaatgagaaagtgcaggatcttcttttgttggatgttactcctctatccactggtttggagactgcaggaggagtcatgactgtgttgattcccagaaacacaaccattcccaccaagaaggagcaggtgttctcaacctactctgacaaccagcccggtgtgttgattcaggtctatgaaggtgaacgaacgaggactcgtgacaacaatttgcttggcaaatttgagttatctggaattcctcctgctcccagaggtgttcctcagatcactgtttgcttcgacattgatgccaacggtatattgaacgtgtctgcggaggacaaaaccactggacagaagaacaagattacaattaccaacgacaagggcaggctttctaaggaggagattgagaagatggtgcaggaagctgagaaatacaagtctgaggacgaggagcataagaagaaagtggaggccaaaaatgcattggaaaattatgcctataacatgaggaacacaatcaaggatgacaagattgcttccaaactgtcttctgatgataagaagaaaattgaagatgcgattgagcaggctatccaatggctagatggaaaccaacttgctgaggctgacgaatttgaggataagatgaaggagttggagagcatttgtaatcccatcatagcaaagatgtaccagggtgctggtggtgatgcgggtggagccatggatgaggatggtcctgcagctggcagtggaagcggtgctggacccaaaattgaggaagtcgattaagcagaagattctcatgggttgttcttgattttgtcaaagacccttttgaagtttagataacagcgtgtcattatgtttttattgcgattttatttttctcttttttttttaatgtacttttccccgtttctacttgaacaatgatataagtttttgctc

SEQ ID NO: 7432 - DNA, 1110 bp, Glycine max
  Clone ID: 700661503_FLI
ggcaggcaaccctgtggatcaagtaacatctttacaaaagcatttgtccttagcggctttatctgctaagcaaacagccaagtcatgtccgtcagtggatgtagaatggccacctcgtgcatcttctggtgttaccccacaatttggtgatactgaaaggcagacaatagcagcaggaacttcatccacatctaatcttgaatctgatgatccttttgctgattggcctccgcatcctaatggctcagtatcaggtggatctggaatatccaacaatggtactttaggaatgccactaaacaaagttgggtttaattcaatgacaagcacttcaagcaatatggctccccaaactagcaacagttggcctgttaattcccaaagttctgccgagtccattagtttgaactcaaggagtgctagttcaacaacgggtagcctgaatactggtggccttggacaacagaaatctcttgggttcctaaaacaaagccaagcttttccagcatcgaatgtttcatataataatgttcagtcaacagcaacagatcttggatcaatattttcttccaacaagaatgaacaaattgcacctaaacttgcaccacccccttcaaccactgtgggtagaggacgaggaagagggaggggagctgcttcaaccactcggtcctctcataccaagtcacatgctgagcagccaccccttttggatttgttgtgatagcttgcatctattgttgttcatgtattagggtgagttactgttgagattgtacattttatgcaacatcctgtgttgagtgcttgtgaagggagatttcaaaaaatcttgccaggcaacatgttttaagggacggctactctttgtaaaggttttgttgtatgttgcttagtctatagtgattttgcaaaatttggattaatatttttgatttttttgtcctcgcatcatacttcattcttagggcatcaggcaaagtgtattcagaaaagtcctgattactgtgactgggttgaaaataataaaggctgtcatgaagtaacttctgtaccaaggatttgaattccactatgtacgactagcataatagaaattgtttgtgggtg

SEQ ID NO: 7433 - DNA, 641 bp, Glycine max
  Clone ID: 700661527_FLI
gaaagaaggtgactgctgtgcacaaagcaaacattatgaaacttgcagatggtttattcttggaatcttgtcgagaggttgccacaaggtatcctggaatcaagtacaatgaaattattgtagacaactgctgcatgcagcttgtttcaaaaccggagcagtttgatgtcatggtaacccccaatctttatggaaatcttgttgcaaatacagcggcaggtattgctggaggcactggagtcatgccgggaggtaatgttggggctgatcacgctgtgtttgaacaaggtgcttcagcaggaaatgttggcaatgataaagtagtagaacaacagaaagcgaacccagtggcactccttctctcgtcggccatgatgcttagacatctccagtttcctgcatttgctgaccgattggaaactgccgttaaaaaagtgattctggaaggcaaatatcggacaaaggaccttggagggacaagcaccacccaagaggttgttgatgcagtgatagatgctttagactgattcatttattttctcatcttccaaacgaaatcagcctcgtgtatttttggctaactaattttatcaacattatttttgcaccctttatctgcgaaattgccatttttttggtcc

SEQ ID NO: 7434 - DNA, 1455 bp, Glycine max
  Clone ID: 700661714_FLI
ctcctctctccctgttttccctgccaaagtaacctcgttagtgacaaacaaaaagctctctcacactgagtgaaagaaagagaacaattttgaggacaaagtgaagagagaaagaaaagaagaaagagtgagaggtggcaatgggtgcaaggttggggatgataacggcagcttgatgttgatgtgggaagatgggttttgccgaggaagagtttcagattgtttggaagagattgatggagaggatcctatcaggaaatcttttagcaaaatgtccattcagttatataattatggagaagggttgatgggaaaggttacatctgataagtgccacaaatgggtctttaaagagcctacggaatgtgagcctaatatctccaactactggcagagctcctttgatgctcttcctcctgaatggatagatcagtttgagtcaggcattcagacaatcgctgtgattcaagctgggcatggccttctgcaacttggttcttgcaagattattccagaagacctccattttgtgctaagaatgagacacacttttgaatctctaggctatcaatcagggttctacctctcccaactcttctcttcaacaaggaacacatcctcttccacttccctttcttcaaaaccatcctccattccaactaggccaccccctccactcctcaactggggtcagagaccacttggatcttccgcttctatgctaccctctcccacctttcagcatgcagccagaatggggttcccacaggccaaagatgagacccatatgttcctcatgcctcatgcatcagaacatgcaagaatgggagacatcatgggggagcatgagaatgacataaaatggccaaatggcttatccatcttcaatgcactcactggaagatctgatgatgctaaactcttgttcaatcaagagagcttggggggcaaaccaagtgatgatcacaatcaccaccaccaccaccaccactctctcaacccaaataatcccacctcatcagtgcaaaatgctaatagtgtggcaaacccaaatgagttcttgagcttggatagccacactgaaggaggaggggcaaggaaactggacaagttcaagaggtgcttcactctacctgctagaatgacttcatcttcatcttctacttcaatggatcaccatcaacaagcaggtgtggagtataggaattcaggaggtagtatgtaccaggatgtcatggagacctttttggagtgaatgtggggagaataaggtaagttgtgtttgggaaatgaagacgaaaaagttgtatttaggcatagtagttattttgtgttccttaattttcgtgtgttaagctttctttcctttttgtatcctgtgttttttcttttcatttctgtcatccactcagagggacttcattaatgacaatttctttctttttgtttgattag

SEQ ID NO: 7435 - DNA, 1030 bp, Glycine max
  Clone ID: 700661747_FLI
aatcataacagcaacaacccctatcaacctggtgcagaacaatatcacatgttggagtcggcacattcatggcctcattctcagttcaatgttgcttgtcactatagccagtcttttggggacaataatgttattttcccacaggggggttttggtggtggctatggcaataaccagtacccttaccagttttttcatggccctggtgatacgttgatgaggttggggccctcggcgacgaaggaagcgaggaagaagagaatggcgaggcagagaaggtttctgtctcatcacaggcatcataatggtaatcaccagaattcagggtcagacccacatgcaagattggggggtggtgataattgcaccactggtttggctgcacctcatcatgcaaatcctacagccaattggatgtactggcaggctatgacgggcggtgcggcgggtcctttggctcccccggccgagccgccagctgtggaccggtctgccttgcagacacagaattgtcatcagagtcgagttgcatcagataggagacagggttggaagcctgagaaaaacttgaggttccttctgcagaaggtgttgaaacaaagcgatgtgggaagtttggggagaatagttttgccaaaaaaagaggcagaaacccatttgccagagctggaggcaagagatggaatttccataacaatggaagacattggaacttcacgtgtttggaacatgcgctatagatactggccgaacaacaaaagcagaatgtatttgctcgagaacactggtgactttgtgagagccaatggactccaagagggagatttcatagtgatatactcagatgtgaagtgtggcaaatatatgataagaggagtgaaagtgagacaacaaggtgtgaaaccagagaccaagaaagtaggaaaatcgcagaaaaaccagcatgggacagggacaaatgcatcaactacagcttgtactgctgctaataatggcacgccatcgtcaccgaaaaccaaagctgaaattt

SEQ ID NO: 7436 - DNA, 1364 bp, Glycine max
  Clone ID: 700661776_FLI
ggggagagagccaaatcgaaccgaaaagtttcgaaattacatacataaagagggagagagaggggatgcaaattccatgagagcagaagaggtgcctcttactccgttacgagttcgacccctcctctcgctcttctcttctcttctcttctcttcatagcaaagcaataatcctattagaatatggaagagagcttcgttttccagtggagcgttatcagatctctcttgtccatccttcagtggtgggccttcaatgtcactgtcatcatcgtcaacaagtggatctttcagaaattggatttcaagtttcccttatcagtttcctgtgtccactttatctgttcatccattggagcatatgtggtaattaagttgctgaagcttaaaccactgataactgttgaccctgaagatcgctggagaagaatctttccaatgtcatttgtgttctgtattaacattgttctggggaatgtgagcctacgatacattccagtttcttttatgcagacaataaagtcattcacacctgccaccacagttgttttgcaatggctagtgtggaggaagtattttgactggcgtatttgggcttctcttatacccattgttggagggattcttctcacatctgtaacagagcttagttttaatatgtttggattctgtgctgccttatttggctgtttggctacatctacaaagactattcttgcagaatctcttctgcatggatacaaatttgacagcataaacacagtttattacatggcaccttttgcaaccatgatcttggcgcttcctgccatgttacttgaaggcaatggaatccttgaatggctaaatactcatccatatccttggtcggctctcatcattatttttagctccggggtgttggctttctgtcttaacttctcaattttttatgtgattcactccaccactgctgtaacatttaatgttgccggaaatcttaaggttgcagttgccgtccttgtttcttggctgatatttaggaacccaatttcgtatttaaattctgttggatgtaccgtgactcttgtgggatgtacattctatggttatgtgaggcacaagctctcccaacagccacaagtcccaggaactcctcggacacccaggactcccaggacccctcgtagtaagatggagttgcttcctcttgtaaatgataaattagaagataaggtctagttcatttagctacatatgatgaggtttcagcctttttgaaggcagtaatagcaataggtacaaatacattaaaataacttcggttattatttgttagattacctccgaaatctttaatacaaggttctttttttccccccttc
